United States Patent Application Publication US 2007/0192889 A1 - sequence listing, part 10

SEQ ID NO: 20179 - protein, 1586 aa, Oryza sativa
  Clone ID: TF_OSC19433j.C1.p2.fg
MSDARSQRSVASSTRRQQDAKLAAAEERRRATAQTAAAAAKAARLAAAELAAARAEAEAEAAEDAARAAEVEVETLRSSINGSIAGDITADRELEELARGRARERAERWAAAHLHGGGGGPRDRAPADGNPDGRGRAGGSPEPARGPRRRHGSLSPDRRHGHHGVQTVVRDFGPGGGWPTLTKTNYIEWAAVMRVRLQVRHMWEAVRYGDVDYDEDRRALDALIAAVPPEMQFSLSQKRTAKEAWDAIAAARIGSDRARKSTLQALRKEWENLAFKPGEDVDDFALRLNTLLQKMVQYGDDTYDEERAVEKLFRCVPEKYRQIARSIESLLDLSTMSIEEALGRLKVVDGDEPRPLSGPITIGGKLHLTREQWEASQGDGRKGESSSPTGGRKPRKARGGVQLRWARRRAEGGARRGAQGVATGNHKPARDDTCRNCGKLGHWAKDCRQPRRGQAHVARVEEEEPALLLAHASIELPPAAPAAAAFLHLDEPKVLVSLCDGSSNDKADGWYLDTGATHHMTGRREFFTEFDSSVRGTVKFGDASGVEIKGVGSVTFTAKSGEHRLLTGVYYIPALRNSIISVGQLDENGSRVLVEDGLMRIWDRRRRLLAKVTRGTNRLYILSAQVAHPVCLAARRDDEAWQWHERFGHLHFEALKQLSAKEMVRGMPCLDHVEQLCDVCVVTKQRRLPFPQQTSFRAKERLGLVHGDLCGPVTPATPGGRRYFLLLVDDLSRYMWVMVLGSKGEAADAIRHAQAAAEAECGRKLRVLRTDNGGEFTAAEFASYCADEGIQRHYTAPYSPQQNGVVERRNQTVVGMARALLKQRGMPAIFWGEAVVTAAYILNRSPTKALDGRTPYEAWHGRKPAVSHLRVFGCLAFAKELGHIGKLDDRSTPGVFIGYAEGSKAYRILDPETQRVRITRDVVFDEGRGWVWDKAVDDGSTPTYDDFTIEYVHFEGAGGVGSSSSPSVSTPVPEPPPTPTPTHPRATTSTTTSSSSTPPQPVSPHAPAPTATPPGTSTPTPARVERSPVEFVTPLSHDGERIDAYHDGEQLRYRTMEDLLGDQPVPGLVPRNLEAQLHLACDDGEPRSFAEAEKHAAWRAAMQSEMDAVQENRTWELADLPRGHRAITLKWVFKLKRDEAGAIVKHKARLVARGFVQQEGIDYDDAFAPVARMESVRLLALAAQEGWGVHHMDVKSAFLNGDLKEEVYVHQPPGFVIPGKEGKVLRLHKALYGLRQAPRAWNAKLDSTLKGMGFEQSPHEAAIYRRGNGGNALLVGVYVDDLVITGTKDAEVAAFKEEMKATFQMSDLGPLSFYLGIEVHQDNSGITLRQTAYAKRVVELAGLTDCNPALTPMEERLKLSRDSTAEEVDATQYRRLVGSLRYLTHTRPDLAFSVGYAVKRIIRYVAGTLDHGLYYPRCPGKAHFVGYSDSDHAGDIDTSKSTSGILFFLGECLVSWQSIKQQVVALSSCEAEYMAASAASTQALWLARLLSDLLGRDTGAVELRVDSKSALALAKNPVFHERSKHIRVRYHFIRSYLEEGSIKASYINTKDQLADLLTKPLRRIKFLELCSRIGMAQLSHKTAHKT

SEQ ID NO: 20180 - protein, 264 aa, Oryza sativa
  Clone ID: TF_OSC20233j.C1.p1.fg
MSIEEALGRLKVVDGDEPRPLSGPITIGGKLHLTREQWEASQGDGRKGESSSPTGGHKPRKARGGVQLRGAQGVATGNHKPARDDTCRNCGKLGHWAKDCRQPRRGQAHVARVEEEEPALLLAHASIELPPAAPAAAAFLHLDEPKVLVSLCDGSSNDKADGWYLDTGATHHMTGRREFFTEFDSSVRGTVKFGDASGVEIKGVGSVTFTAKSGEHRLLTGVYYIPALRNSIISVGQLDENGSRVLVEDGLMRIWDRRRRLLAK

SEQ ID NO: 20181 - protein, 323 aa, Oryza sativa
  unsure (1)..(323): unsure at all Xaa locations
  Clone ID: TF_OSC20233j.C1.p1.gp
LQKMVQYGDDTYDEERAVEKLFRCVPEKYRXIARSIESLLDLSTMSIEEALGRLKVVDGDEPRPLSGPITIGGKLHLTREQWEASXGDGRKGESSSPTGGHKPRKARGGVQLRWAXRRAEGGARRGAQGVATGNHKPARDDTCRNCGKLGHWAKDCRQPRRGQAHVARVEEEEPALLLAHASIELPPAAPAAAAFLHLDEPKVLVSLCDGSSNDKADGWYLDTGATHHMTGRREFFTEFDSSVRGTVKFGDASGVEIKGVGSVTFTAKSGEHRLLTGVYYIPALRNSIISVGQLDENGSRVLVEDGLMRIWDRRRRLLAKVTR

SEQ ID NO: 20182 - protein, 1601 aa, Oryza sativa
  Clone ID: TF_OSC28279j.C1.p1.fg
MSDARSQRSVASSTRRQQDAELAAAEERRRATAQTAAAAARAARLAAAELAAARAEAEAEAAEDAARAAEVEVETLRSSINGSIAGDITADRELEELARGRARERAERWAAAHLHGGGGGPRDRAPADGNPDGRGRAGGSPEPARGPRRRHGSLSPDRRHGHHGVQTVVRDFGPGGGWPTLTKTNYIEWAAVMRVRLQVRHMWEAVRYGDVDYDEDRRALDALIAAVPPEMQFSLSQKRTAKEAWDAIAAARIGSDRARKSTLQALRKEWENLAFKPGEDVDDFALRLNTLLQKMVQYGDDTYDEERAVEKLFRCVPEKYRQIARSIESLLDLSTMSIEEALGRLKVVDGDEPRPLSGPITIGGKLHLTREQWEASQGDGRKGESSSPTGGRKPRKARGGVQLRWARRRAEGGARRGAQGVATGNHKPARDDTCRNCGKLGHWAKDCRQPRRGQAHVARVEEEEPALLLAHASIELPPAAPAAAAFLHLDEPKVLVSLCDGSSNDKADGWYLDTGATHHMTGRREFFTEFDSSVRGTVKFGDASGVEIKGVGSVTFTAKSGEHRLLTGVYYIPALRNSIISVGQLDENGSRVLVEDGLMRIWDRRCRLLAKVTRGTNRLYILSAQVAHPVCLAARRDDEAWQWHERFGHLHFEALKQLSAKEMVRGMPCLDHVEQLCDVCVVTKQRRLPFPQQTSFRAKERLGLVHGDLCGPVTPATPGGRRYFLLLVDDLSRYMWVMVLGSKGEAADAIRHAQAAAEAECGRKLRVLRTDNGGEFTAAEFASYCADEGIQRHYTAPYSPQQNGVVERRNQTVVEMARALLKQRGMPAIFWGEAVVTAAYILNRSPTKALDGRTPYEAWHGRKPAVSHLRVFGCLAFTKELGHIGKLDDRSTPGVFIGYAEGSKAYRILDPETQRVRITRDVVFDEGRGWVWDKAVDDGSTPTYDDFTIEYVHFEGAGGVGSSSSPSVSTPVPEPPPTPTPTHPRATTSTTTSSSSTPPQPVSPHAPAPTATPPGTSTPTPARVERSPVEFVTPLSHDGERIDAYHDGEQLRYRTMEDLLGDQPVPGLVPRNLEAQLHLACDDGEPRSFAEAEKHAAWRAAMQSEMDAVQENRTWELADLPRGHRAITLKWVFKLKRDEAGAIVKHKARLVARGFVQQEGIDYDDAFAPVARMESVRLLLALAAQEGWGVHHMDVKSAFLNGDLKEEVYVHQPPGFVIPGKEGKVLRLHKALYGLRQAPRTWNAKLDSTLKGMGFEQSPHEAAIYRRGNGGNALLVGVYVDDLVITGTKDAEVAAFKEEMKATFQMSDLGPLSFYLGIEVHQDNSGITLRQTAYAKRVVELAGLTDCNPALTPMEERLKLSRDSTAEEVDATQYRRLVGSLRYLTHTRPDLAFSVGYVSRFMQRPTTEHQQAVKRIIRYVAGTLDHGLYYPRCPGKAHFVGYSDSDHAGDIDTSKSTSGILFFLGECLVSWQSIKQQVVALSSCEAEYMAASAASTQALWLARLLSDLLGRDTGAVELRVDSKSALALAKNPVFHERSKHIRVRYHFIRSYLEEGSIKASYINTKDQLADLLTKPLGRIKFLELCSRIGMAQLSHKTAHKT

SEQ ID NO: 20183 - protein, 1601 aa, Oryza sativa
  Clone ID: TF_OSC400946j.C1.p15.fg
MSDARSRRSVASSTRRQQDAELAAAEERRRATAQTAAAAARAARLAAAELAAARAEAEAEAAEDAARAAEVEVETLRSSINGSIAGDITADRELEELARGRARERAERWAAAHLHGGGGGPRDRAPADGNPDGRGRAGGSPEPARGPRRRHGSLSPDRRHGHHGVQTVVRDFGPGGGWPTLTKTNYIEWAAVMRVRLQVRHMWEAVRYGDVDYDEDRRALDALIAAVPPEMQFSLSQKRTAKEAWDAIAAARIGSDRARKSTLQALRKEWENLAFKPGEDVDDFALRLNTLLQKMVQYGDDTYDEERAVEKLFRCVPEKYRQIARSIESLLDLSTMSIEEALGRLKVVDGDEPRPLSGPITIGGKLHLTREQWEASQGDGRKGESSSPTGGHKPRKARGGVQLRWARRRAEGGARRGAQGVATGNHKPARDDTCRNCGKLGHWAKDCRQPRRGQAHVARVEEEEPALLLAHASIELPPAAPAAAAFLHLDEPKVLVSLCDGSSNDKADGWYLDTGATHHMTGRREFFTEFDSSVRGTVKFGDASGVEIKGVGSVTFTAKSGEHRLLTGVYYIPALRNSIISVGQLDENGSRVLVEDGLMRIWDRRRRLLAKVTRGTNRLYILSAQVAHPVCLAARRDDEAWQWHERFGHLHFEALKQLSAKEMVRGMPCLDHVEQLCDVCVVTKQRRLPFPQQTSFRAKERLGLVHGDLCGPVTPATPGGRRYFLLLVDDLSRYMWVMVLGSKGEAADAIRHAQAAAEAECGRKLRVLRTDNGGEFTAAEFASYCADEGIQRHYTAPYSPQQNGVVERRNQTVVGMARALLKQRGMPAIFWGEAVVTAAYILNRSPTKALDGRTPYEAWHGRKPAVSHLRVFGCLAFAKELGHIGKLDDRSTPGVFIGYAEGSKAYRILDPETQRVRITRDVVFDEGRGWVWDKAVDDGSTPTYDDFTIEYVHFEGAGGVGSSSSPSVSTPVPEPPPTPTPTHPRATTSTTTSSSSTPPQPVSPHAPAPTATPPGTSTPTPARVERSPVEFVTPLSHDGERIDAYHDGEQLRYRTMEDLLGDQPVPGLVPRNLEAQLHLACDDGEPRSFAEAEKHAAWRAAMQSEMDAVQENRTWELADLPRGHRAITLKWVFKLKRDEAGAIVKHKARLVARGFVQQEGIDYDDAFAPVARMESVRLLLALAAQEGWGVHHMDVKSAFLNGDLKEEVYVHQPPRFVIPGKEGKVLRLHKALYGLRQAPRAWNAKLDSTLKGMGFEQSPHEAAIYRRGNGGNALLVGVYVDDLVITGTKDAEVAAFKEEMKATFQMSDLGPLSFYLGIEVHQDNSGITLRQTAYAKRVVELAGLTDCNPALTPMEERLKLSRDSTAEEVDATQYRRLVGSLRYLTHTRPDLAFSVGYVSRFMQRPTTEHQQAVKRIIRYVAGTLDHGLYYPRCPGKAHFVGYSDSDHAGDIDTSKSTSGILFFLGECLVSWQSIKQQVVALSSCEAEYMAASAASTQALWLARLLSDLLGRDTGAVELRVDSKSALALAKNPVFHERSKHIRVRYHFIRSYLEEGSIKASYINTKDQLADLLTKPLGRIKFLELCSRIGMAQLSHKTAHKT

SEQ ID NO: 20184 - protein, 1542 aa, Oryza sativa
  Clone ID: TF_OSC401408j.C1.p1.fg
MSDARSRRSVASSTRRQQDAELAAAEERRRATAQTAAAAARAARLAAAELAAARAEAEAEAAEDAARAAEVEVETLRSSINGSIAGDITADRELEELARGRARERAERWAAAHLHGGGGGPRDRAPADGNPDGRGRAGGSPEPARGPRRRHGSLSPDRRYGHHGVQTVVRDFGPGGGWPTLTKTNYIEWAAVMRVRLQVRHMWEAVRYGDVDYDEDRRALDALIVAVPPEMQFSLSQKRTAKEAWDAIAAARIGSDRARKSTLQALRKEWENLAFKPGEDVDDFALRLNTLLQKMVQYGDDTYDEERAVEKLFRCVPEKYRRIARSIESLLDLSTMSIEEALGRLKVVDGDEPQPLSGPITIGGKLHLTREQWEASQGDGRKGESSSPTGGRKPRKARGGVQLRWARRRAEGGARRGAQGVATGNHKPARDDTCRNCGKLGHWAKDCRQPRRGQAHVARVEEEEPALLLAHASIELPPAAPAAAAFLHLDEPKVLVSLCDGSSNDKADGWYLDTGATHHMTGRREFFTEFDSSVRGSVKFGDTSGVEIKGVGSVTFTAKSGEHRLLTRVYYIPALRNSIISVGQLDENGSRVLVEDGLMRIWDRRRRLLAKVTRGTNRLYILSAQVAQPVCLAARRDDEAWQWHERFGHLHFEALKQLSAKEMVRGMPCLDHVEQLCDVCVVTKQRRLPFPQQTSFRAKERLELVHGDLCGPVTPATPGGRRYFLLLVDDLSRYMWVMVLGSKGEAADAIRHAQAAAEAECGRKLRVLRTDNGGEFTAAEFVSYCADEGIQRHYTAPYSPQQNGVVERRNQTVVGMARALLKQRGMLAIFWGEAVDTVRGLAWRKPAVSHLRVFGCLAFAKELGHIGKLDDRSTPGVFIGYAEGSKTYRILDPETQRVRIARDVVFDEGRGWVWDKAVDDGSTPTYDDFTIEYVHFEGAGGPVSPHAPAPTATPPGTSTPTPARVERSPVGFVTPLSHDEERIDAYHDGEQLRYRTMEDLLGDQPVPGLVPRNLEAQLHLACDDGEPRSFAKAEKHAAWRATMQSEMDAVQENRTWELADLPRGHRAITLKWVFKLKRDEAGAIVKHKARLVARGFVQQEGIDYDDAFAPVARMESVRLLLALAAQEGWGVHHMDVKSAFLNGDLKEEVYVHQPPGFVILGKEGKVLRLHKALYGLRQAPRAWNAKLDSTLKGMGFEQSPHEAAIYRRGNGGNALLVGVYVDDLVITGTKDAEVAAFKEEMKATFQMSDLGPLSFYLGIEVHQDNSGITLRQTAYAKRVVELAGLTDCNPALTPMEERLKLSRDSTAEEVDATQYRRLVGSLRYLTHTRPDLAFSVGYVSRFMQRPTTEHQQAVKRIIRYVAGTLDHGLYYPRCPDKAHFVGYSDSDHAGDIDTSKSTSGILFFLGECLVSWQSIKQQVVALSSCEAEYMAASAASTQALWLARLLSDLLGRDTGAVELRVDNKSALALAKNPVFHERSKHIRVRYHFIRSYLEEGSIKASYINTKDQLADLLTKPLGRIKFLELCSRIGMAQLSHKTAHKT

SEQ ID NO: 20185 - protein, 1286 aa, Oryza sativa
  Clone ID: TF_OSC401589j.C1.p7.fg
MWEAVWYGDVDYDKDRRALDALITAVPPEMQFSLSQKRTAKEAWDAIAAARIGSDRARKSTLQALRKEWENLAFKPGKDVDDFALRLNNLLQKMVQCDDDTYDEERAVEKLFHCVPEKYRQIARSIESLLDLSTMSIEEALGRLKVVDDDEPQPLSGPITIGGKLHLTREQWEASQSDGRKGESSPSIGGRKPRKACGGVQLRWARRRAEGGARRGAQGGAASNHKPARDDTCRNCGKLGHWAKDCRQPRRGQAHVAQVEEEEPALLLAHASIELPPAAPAAAAFLHLDEPKVLVSLCNSSSNNKADGWYLDTGATHHMTGRREFFTEFDPGVRGSIKFGDASGVEIKGVGSVTFTAKSGEHRLLTGVYYIPALRNSIISVGQLDENGSRVLVEDRLMRIWDRRRRLLAKVTRGTNRLYILGAQVAQPVCLTARRDDEAWQWHERFGHLHFEALKHLSAKEMVRGMPCLDHVEQLCDVFMTSFRAKERLELVHGDLCGPVTPATPGGRCYFLLLVDDLSRYMWVMVLGSKGEAADAIRRAQAAAEVECGRKLRVLRTDNGSEFTAAEFALYCVDEGIQRHYTAPYSPQQNGVVERHNQTVVGMARALLKQRGMPAIFWGEAVVTAVYILNRSPTKALDGRTPYEAWHGRKPAVSHLRVFGCLAFAKELGHIGKLDDKSTPGVLISYAEGSKAYHILDPETQRVRTARDVVFDEGRGWVWDKAVDDGLTPTYDDFTIEYVHFEGAGGSVSPRAPAPTATPPGTSTPTPARVERSPVEFATPLSHDGERIDAYHDGEQLRYRTMEDLLSDQPVPGLVPRDLEAQLHLACDDGEPGSFAEAEKHAAWRATMQSEMDAVQENRTWEFADLPRGHRAITLKWVFKLKRDEAGAIVKHKARLVARGFVQQEGIDYDDAFAPVARMESSAFLNGDLKEEVYVHQPPGFVLPSKEGKVLRLHKALYGLRQAPRAWNAKLDSTLKGMGFEQSPHEAAIYRRGNGGNALLVGVYVDDLVITGTKDAEVAAFKEEMKATFQMSDLGPLFFYLGIEVHQDNFGITLRQTAYAKRVVELAGLTDCNPALTPMEERLKLSHDSTAEEVDATQYRRLVGSLRYLTHTRPDLAFSVGYVSRCPGKAHFLRYSDSDHAGDIDTSKSTSGILFFLGECLVSWQSVKQQVVALSSCEAEYQALWLARLLGDLLGRDTGAVELRVDSKSALALAKTPVFHERSKHIRVRYHFIRSYLEEGSIKASYINTKDQLADLLTKPLGRIKFLELCSRIGMAQLSHKTTHKT

SEQ ID NO: 20186 - protein, 1601 aa, Oryza sativa
  Clone ID: TF_OSC401648j.C1.p6.fg
MSDARSRRSVASSTRRQQDAELAAAEERRRATAQTAAAAARAARLAAAELAAARAEAEAEAAEDAARAAEVEVETLRSSINGSIAGDITADRELEELARGRARERAERWAAAHLHGGGGGPRDRAPADGNPDGRGRAGGSPEPARGPRRRHGSLSPDRRHGHHGVQTVVRDFGPGGGWPTLTKTNYIEWAAVMRVRLQVRHMWEAVRYGDVDYDEDRRALDALIAAVPPEMQFSLSQKRTAKEAWDAIAAARIGSDRARKSTLQALRKEWENLAFKPGEDVDDFALRLNTLLQKMVQYGDDTYDEERAVEKLFRCVPEKYRQIARSIESLLDLSTMSIEEALGRLKVVDGDEPRPLSGPITIGGKLHLTREQWEASQGDGRKGESSSPTGGHKPRKARGGVQLRWARRRAEGGARRGAQGVATGNHKPARDDTCRNCGKLGHWAKDCRQPRRGQAHVAQVEEEEPALLLAHASIELPPAAPAAAAFLHLDEPKVLVSLCDGSSNDKADGWYLDTGATHHMTGRREFFTEFDSSVRGTVKFGDASGVEIKGVGSVTFTAKSGEHRLLTGVYYIPALRNSIISVGQLDENGSRVLVEDGLMRIWDRRRRLLAKVTRGTNRLYILSAQVAHPVCLAARRDDEAWQWHERFGHLHFEALKQLSAKEMVRGMPCLDHVEQLCDVCVVTKQRRLPFPQQTSFRAKERLGLVHGDLCGPVTPATPGGRRYFLLLVDDLSRYMWVMVLGSKGEAADAIRHAQAAAEAECGRKLRVLRTDNGGEFTAAEFASYCADEGIQRHYTAPYSPQQNGVVERRNQTVVGMARALLKQRGMPAIFWGEAVVTAAYILNRSPTKALDGRTPYEAWHGRKPAVSHLRVFGCLAFAKELGHIGKLDDRSTPGVFIGYAEGSKAYRILDPETQRVRITRDVVFDEGRGWVWDKAVDDGSTPTYDDFTIEYVHFEGAGGVGSSSSPSVSTPVPEPPPTPTPTHPRATTSTTTSSSSTPPQPVSPHAPAPTATPPGTSTPTPARVERSPVEFVTPLSHDGERIDAYHDGEQLRYRTMEDLLGDQPVPGLVPRNLEAQLHLACDDGEPRSFAEAEKHAAWRAAMQSEMDAVQENRTWELADLPRGHRAITLKWVFKLKRDEAGAIVKHKARLVARGFVQQEGIDYDDAFAPVARMESVRLLLALAAQEGWGVHHMDVKSAFLNGDLKEEVYVHQPPGFVIPGKEGKVLRLHKALYGLRQAPRAWNAKLDSTLKGMGFEQSPHEAAIYRRGNGGNALLVGVYVDDLVITGTKDAEVAAFKEEMKATFQMSDLGPLSFYLGIEVHQDNSGITLRQTAYAKRVVELAGLTDCNPALTPMEERLKLSRDSTAEEVDATQYRRLVGSLRYLTHTRPDLAFSVGYVSRFMQRPTTEHQQAVKRIIRYVAGTLDHGLYYPRCPGKAHFVGYSDSDHAGDIDTSKSTSGILFFLGECLVSWQSIKQQVVALSSCEAEYMAASAASTQALWLARLLSDLLGRDTGAVELRVDSKSALALAKNPVFHERSKHIRVRYHFIRSYLEEGSIKASYINTKDQLADLLTKPLGRIKFLELCSRIGMAQLSHKTAHKT

SEQ ID NO: 20187 - protein, 1791 aa, Oryza sativa
  Clone ID: TF_OSC409503j.C1.p9.fg
MDNLSEPLLAEIIKRIAKTSDRNSLSLVSKQLYTIDAEQRDAIHVGCGLHPATEALASLCSRFPNLWKVVIDYSGWISIHGKQLDNQGLLVLSSHCSSLTDLTLNFCSYIDDSGIGYLAYCKKLRSFRLNFAPAISSRGLLSVAVGCKSLCTFHLVDCMKVGSVEWLEYLGRAGSLEELVVKDSAPRRCAMSDARSRRSVASSTRRQQDAELAAAEERRRATAQTAAAAARAARLAAAELAAARAEAEAEAAEDAARAAEVEVETLRSSINGSIAGDITADRELEELARGRARERAERWAAAHLHGGGGGPRDRAPADGNPDGRGRAGGSPEPARGPRRRHGSLSPDRRHGHHGVQTVVRDFGPGGGWPTLTKTNYIEWAAVMRVRLQVRHMWEAVRYGDVDYDEDRRALDALIAAVPPEMQFSLSQKRTAKEAWDAIAAARIGSDRARKSTLQALRKEWENLAFKPGEDVDDFALRLNTLLQKMVQYGDDTYDEERAVEKLFRCVPEKYRQIARSIESLLDLSTMSIEEALGRLKVVDGDEPRPLSGPITIGGKLHLTREQWEASQGDGRKGESSSPTGGHKPRKARGGVQLRWARRRAEGGARRGAQGVATGNHKPARDDTCRNCGKLGHWAKDCRQPRRGQAHVARVEEEEPALLLAHASIELPPAAPAAAAFLHLDEPKVLVSLCDGSSNDKADGWYLDTGATHHMTGRREFFTEFDSSVRGTVKFGDASGVEIKGVGSVTFTAKSGEHRLLTGVYYIPALRNSIISVGQLDENGSRVLVEDGLMRIWDRRRRLLAKVTRGTNRLYILSAQVAHPVCLAARRDDEAWQWHERFEHLHFEALKQLSAKEMVRGMPCLDHVEQLCDVCVVTKQRRLPFPQQTSFRAKERLGLVHGDLCGPVTPATPGGRRYFLLLVDDLSRYMWVMVLGSKGEAADAIRHAQAAAEAECGRKLRVLRTDNGGEFTAAEFASYCADEGIQRHYTAPYSPQQNGVVERRNQTVVGMARALLKQRGMPAIFWGEAVVTAAYILNRSPTKALDGRTPYEAWHGRKPAVSHLRVFGCLAFAKELGHIGKLDDRSTPGVFIGYAEGSKAYRILDPETQRVRITRDVVFDEGRGWVWDKAVDDGSTPTYDDFTIEYVHFEGAGGVGSSSSPSVSTPVPEPPPTPTPTHPRATTSTTTSSSSTPPQPVSPHAPAPTATPPGTSTPTPARVERSPVEFVTPLSHDGERIDAYHDGEQLRYRTMEDLLGDQPVPGLVPRNLEAQLHLACDDGEPRSFAEAEKHAAWRAAMQSEMDAVQENRTWELADLPRGHRAITLKWVFKLKRDEAGAIVKHKARLVARGFVQQEGIDYDDAFAPVARMESVRLLLALAAQEGWGVHHMDVKSAFLNGDLKEEVYVHQPPGFVIPGKEGKVLRLHKALYGLRQAPRAWNAKLDSTLKGMGFEQSPHEAAIYRRGNGGNALLVGVYVDDLVITGTKDAEVAAFKEEMKATFQMSDLGPLSFYLGIEVHQDNSGITLRQTAYAKRVVELAGLTDCNPALTPMEERLKLSRDSTAEEVDATQYRRLVGSLRYLTHTRPDLAFSVGYVSRFMQRPTTEHQQAVKRIIRYVAGTLDHGLYYPRCPGKAHFVGYSDSDHAGDIDTSKSTSGILFFLGECLVSWQSIKQQVVALSSCEAEYMAASAASTQALWLARLLSDLLGRDTGAVELRVDSKSALALAKNPVFHERSKHIRVRYHFIRSYLEEGSIKASYINTKDQLADLLTKPLGRIKFLELCSRIGMAQLSHKTAHKT

SEQ ID NO: 20188 - protein, 1427 aa, Oryza sativa
  Clone ID: TF_OSC416913j.C1.p26.fg
MVTTASRRWSGIVVPAVGGPTLTKTNYIEWAAVMRVRLQVRHMWEAVRYGDVDYDEDRRALDALIAAVPPEMQFSLSQKRTAKEAWDAIAAARIGSDRARKSTLQALRKEWENLAFKPGEDVDDFALRLNTLLQKMVQYGDDTYDEERAVEKLFRCVPEKYRQIARSIESLLDLSTMSIEEALGRLKVVDGDEPRPLSGPITIGGKLHLTREQWEASQGDGRKGESSSPTGGRKPRKARGGVQLRWARRRAEGGARRGAQGVATGNHKPARDDTCRNCGKLGHWAKDCRQPRRGQAHVARVEEEEPALLLAHASIELPPAAPAAAAFLHLDEPKVLVSLCDGSSNDKADGWYLDTGATHHMTGRREFFTEFDSSVRGTVKFGDASGVEIKGVGSVTFTAKSGEHRLLTGVYYIPALRNSIISVGQLDENGSRVLVEDGLMRIWDRRRRLLAKVTRGTNRLYILSAQVAHPVCLAARRDDEAWQWHERFGHLHFEALKQLSAKEMVRGMPCLDHVEQLCDVCVVTKQRRLPFPQQTSFRAKERLGLVHGDLCGPVTPATPGGRRYFLLLVDDLSRYMWVMVLGSKGEAADAIRHAQAAAEAECGRKLRVLRTDNGGEFTAAEFASYCADEGIQRHYTAPYSPQQNGVVERRNQTVVGMARALLKQRGMPAIFWGEAVVTAAYILNRSPTKALDGRTPYEAWHGRKPAVSHLRVFGCLAFAKELGHIGKLDDRSTPGVFIGYAEGSKAYRILDPETQRVRITRDVVFDEGRGWVWDKAVDDGSTPTYDDFTIEYVHFEGAGGVGSSSSPSVSTPVPEPPPTPTPTHPRATTSTTTSSSSTPPQPVSPHAPAPTATPPGTSTPTPARVERSPVEFVTPLSHDGERIDAYHDGEQLRYRTMEDLLGDQPVPGLVPRNLEAQLHLACDDGEPRSFAEAEKHAAWRAAMQSEMDAVQENRTWELADLPRGHRAITLKWVFKLKRDEAGAIVKHKARLVARGFVQQEGIDYDDAFAPVARMESVRLLALAAQEGWGVHHMDVKSAFLNGDLKEEVYVHQPPGFVIPGKEGKVLRLHKALYGLRQAPRAWNAKLDSTLKGMGFEQSPHEAAIYRRGNGGNALLVGVYVDDLVITGTKDAEVAAFKEEMKATFQMSDLGPLSFYLGIEVHQDNSGITLRQTAYAKRVVELAGLTDCNPALTPMEERLKLSRDSTAEEVDATQYRRLVGSLRYLTHTRPDLAFSVGYAVKRIIRYVAGTLDHGLYYPRCPGKAHFVGYSDSDHAGDIDTSKSTSGILFFLGECLVSWQSIKQQVVALSSCEAEYMAASAASTQALWLARLLSDLLGRDTGAVELRVDSKSALALAKNPVFHERSKHIRVRYHFIRSYLEEGSIKASYINTKDQLADLLTKPLRRIKFLELCSRIGMAQLSHKTAHKT

SEQ ID NO: 20189 - protein, 1827 aa, Oryza sativa
  Clone ID: TF_OSC419638j.C1.p10.fg
MSDARSRRSVASSTRRQQDAELAAAEERRRATAQTAAAAARAARLAAAELAAARAEAEAEAAEDAARAAEVEVETLRSSINGSIAGDITADRELEELARGRARERAERWAAAHLHGGGGGPRDRAPADGNPDGRGRAGGSPEPARGPRRRHGSLSPDRRHGHHGVQTVVRDFGPGGGWPTLTKTNYIEWAAVMRVRLQVRHMWEAVRYGDVDYDEDRRALDALIAAVPPEMQFSLSQKRTAKEAWDAIAAARIGSDRARKSTLQALRKEWENLAFKPGEDVDDFALRLNTLLQKMVQYGDDTYDEERAVEKLFRCVPEKYRQIARSIESLLDLSTMSIEEALGRLKVVDGDEPRPLSGPITIGGKLHLTREQWEASQGDGRKGESSSPTGGHKPRKARGGVQLRWARRRAEGGARRGAQGVATGNHKPARDDTCRNCGKLGHWAKDCRQPRRGQAHVARVEEEEPALLLAHASIELPPAAPAAAAFLHLDEPKVLVSLCDGSSNDKADGWYLDTGATHHMTGRREFFTEFDSSVRGTVKFGDASGVEIKGVGSVTFTAKSGEHRLLTGVYYIPALRNSIISVGQLDENGSRVLVEDGLMRIWDRRRRLLAKVTRGTNRLYILSAQVAHPVCLAARRDDEAWQWHERFGHLHFEALKQLSAKEMVRGMPCLDHVEQLCDVCVVTKQRRLPFPQQTSFRAKERLGLVHGDLCGPVTPATPGGRRYFLLLVDDLSRYMWVMVLGSKGEAADAIRHAQAAAEAECGRKLRMLRTDNGGEFTAAEFASYCADEGIQRHYTAPYSPQQNGVVERRNQTVVGMARALLKQRGMPAIFWGEAVVTAAYILNRSPTKALDGRTPYEAWHGRKPAVSHLRVFGCLAFAKELGHIGKLDDRSTPGVFIGYAEGSKAYRILDPETQRVRITRDVVFDEGRGWVWDKAVDDGSTPTYDDFTIEYVHFEGAGGVGSSSSPSVSTPVPEPPPTPTPTHPRATTSTTTSSSSTPPQPVSPHAPAPTATPPGTSTPTPARVERSPVEFVTPLSHDGERIDAYHDGEQLRYRTMEDLLGDQPVPGLVPRNLEAQLHLACDDGEPRSFAEAEKHAAWRAAMQSEMDAVQENRTWELADLPRGHRAITLKWVFKLKRDEAGAIVKHKARLVARGFVQQEGIDYDDAFAPVARMESVRLLLALAAQEGWGVHHMDVKSAFLNGDLKEEVYVHQPPGFVIPGKEGKVLRLHKALYGLRQAPRAWNAKLDSTLKGMGFEQSPHEAAIYRRGNGGNALLVGVYVDDLVITGTKDAEVAAFKEEMKATFQMSDLGPLSFYLGIEVHQDNSGITLRQTAYAKRVVELAGLTDCNPALTPMEERLKLSRDSTAEEVDATQYRRLVGSLRYLTHTRPDLAFSVGYVSRFMQRPTTEHQQAVKRIIRYVAGTLDHGLYYPRCPGKAHFVGYSDSDHAGDIDTSKSTSGILFFLGECLVSWQSIKQQVVALSSCEAEYMAASAASTQALWLARLLSDLLGRDTGAVELRVDSKSALALAKKPRFSRTEQAHPSEVDVITYSTLIDGYCLAGKMDEAMKLLSDMVSVGLKPDTVTYSTLINGYCKISRMENALSLFRQMVCNGVSPNIITYNIVLQGLFQTGQTRAAKEIYVRIIKRGIQLEISTCNIVLQGLCKNNLTGEALQMFQNLCLMDVKLETRTFNIMIGSLLRSGRKDESKDLFAALSANGLAPDVVTYTLMIENLIEDGLLEESDNLFLSMEKNGCVPNSRMLNCIVRKLLQKGEIGRAGVYLSKIDKNDFSLEASTAELLILLVSSGKYNQHMKGLPEKYHSFVKSRAV

SEQ ID NO: 20190 - protein, 1247 aa, Oryza sativa
  Clone ID: TF_OSC421987j.C1.p2.fg
MELAAARAEAEAEAAEDAARVAEVEVETLRSSINGSITGDSTADRELEELARGRTVVRDFGPGCGWPTLTKTNYIEWAAMMRVRLQVQHMWEAVRYGDVDYDEDRRALDALIAAVLPEMQFSLSQKRTAKEAWDAIVAARIGSDRARKSTLQALRKEWENLAFKPGEDVDDFALRLNTLLQKMVQYGDDTYDEERAVEMLFRCVPEKYRQIARSIESLLDLSTMSIEEALGRLKVVDGDEPQPLSGPITIGGKLHFTREQWEASQGDGMKGESSPSTGGRKPRKACGGVQLRWARRRAEGGARRGAQGGAAGNHKPARDDTCRNCGKLGHWAKDCRQPRHGQAHVAQVEEEEPALLLAYASIELPPATPATAAFLHLDEPKVLVSLCNSSSNDKADGWYLDTGATHHMTGRREFFTELDPSVRGSIKFGDASGVEIKGVGSVTFIAKSGKHRLLTGVYYIPALRNSIISVGQLDENGSHVLVKHGVMRIWDRRRRLLAKRAGRTTSLLAARRDDEAWQWHERFGHLHFEALKQLSAKEMVRGLPCLDHVEQLCDVCVVTKQRRLPLPQQTSFRAKERLELVHGDLCGLVTPATPGGRRYFLLLVDDLSRYMWVMVLGSKGEAADAIRRAGMPAIFWGEAVVTAVYILNRSPTKALDGRTPYEAWHGRKPAVSHLRVFGCLAFAKELGHIGKLDDRSTPGVFIGYAEGSKTYRILDPETQRVRTARDVVFDEGRGWVWDKAVDDGSTLTYDFTVEYVHFEGAGGVGSSSSPSVPTPVPEPPPTPAATHSRASTSAATTSSPAPPQPATPRTPAPTATPLGMSTPTPARVERSPVELATPLSTTGSASTRTTTASSSGTVRWRTFSATSRCRDWCPATWRRSCTLRATTSEMDAVQENCTWELANLPRGHRAITLKWVFKLKRDEAGAIVKHKARLVARGFVQQEGIDYDDAFAPVARMESVRLLALAAQEGWGVHHMDVKSAFLNGDLKEVYVHQPPGFVIPGKEGNVLRLHKALYGLRQAPRAWNAKLDSTLKGMGFEQSPHEAAIYQRGNGGNALLVGVYVDDLITGTKNAEVYQDDSGITLRQTAYAKRVVELAGLTDCNPALTPMERLKLSRDSTTEEVDATQYRRLVGSLRYLTHTRPDLAFSVGYVSRFMQRPTTEHQQAVKRIICYVAGTLDHGLYYPRCPGKAHFVGYSDHAGDIDTSKSTSGILFFLGECLVSWQSVKQQVVALSSCEAEYMAASAAST

SEQ ID NO: 20191 - protein, 1601 aa, Oryza sativa
  Clone ID: TF_OSC422301j.C1.p5.fg
MSDARSQRSVASSTRRQQDAELAAAKERRRATAQTAAAAARAARLAAAELAAARAEAEAEAAEDAARAAEVEVETLRSSINGSIAGDITADRELEELARGRARERAERWAAAHLHGGGGGPRDRAPADGNPDGRGRAGGSPEPARGPRRRHGSLSPDRRHGHHGVQTVVRDFGPGGGWPTLTKTNYIEWAAVMRVRLQVRHMWEAVRYGDVDYDEDRRALDALIAAVPPEMQFSLSQKRTAKEAWDAIAAARIGSDRARKSTLQALRKEWENLAFKPGEDVDDFALRLNTLLQKMVQYGDDTYDEERAVEKLFRCVPEKYRQIARSIESLLDLSTMSIEEALGRLKVVDGDEPRPLSGPITIGGKLHLTREQWEASQGDGRKGESSSPTGGRKPRKARGGVQLRWARRRAEGGARRGAQGVATGNHKPARDDTCRNCGKLGHWAKDCRQPRRGQAHVARVEEEESALLLAHASIELPPAAPAAAAFLHLDEPKVLVSLCDGSSNDKADGWYLDTGATHHMTGRREFFTEFDSSVRGTVKFGDASGVEIKGVGSVTFTAKSGEHRLLTGVYYIPALRNSIISVGQLDENGSRVLVEDGLMRIWDRRRRLLAKVTRGTNRLYILSAQVAHPVCLAARRDDEAWQWHERFGHLHFEALKQLSAKEMVRGMPCLDHVEQLCDVCVVTKQRRLPFPQQTSFRAKERLGLVHGDLCGPVTPATPGGRRYFLLLVDDLSRYMWVMVLGSKGEAADAIRHAQAAAEAECGRKLRVLRTDNGGEFTAAEFASYCADEGIQRHYTAPYSPQQNGVVERRNQTVVGMARALLKQRGMPAIFWGEAVVTAAYILNRSPTKALDGRTPYEAWHGRKPAVSHLRVFGCLAFAKELGHIGKLDDRSTPGVFIGYAEGSKAYRILDPETQRVRITRDVVFDEGRGWVWDKAVDDGSTPTYDDFTIEYVHFEGAGGVGSSSSPSVSTPVPEPPPTPTPTHPRATTSTTTSSSSTPPQPVSPHAPAPTATPPGTSTPTPARVERSPVEFVTPLSHDGERIDAYHDGEQLRYRTMEDLLGDQPVPGLVPRNLEAQLHLACDDGEPRSFAEAEKHAAWRAAMQSEMDAVQENRTWELADLPRGHRAITLKWVFKLKRDEAGAIVKHKARLVARGFVQQEGIDYDDAFAPVARMESVRLLLALAAQEGWGVHHMDVKSAFLNGDLKEEVYVHQPPGFVIPGKEGKVLRLHKALYGLRQAPRAWNAKLDSTLKGMGFEQSPHEAAIYRRGNGGNALLVGVYVDDLVITGTKDAEVAAFKEEMKATFQMSDLGPLSFYLGIEVHQDNSGITLRQTAYAKRVVELAGLTDCNPALTPMEERLKLSRDSTAEEVDATQYRRLVGSLRYLTHTRPDLAFSVGYVSRFMQRPTTEHQQAVKRIIRYVAGTLDHGLYYPRCPGKAHFVGYSDSDHAGDIDTSKSTSGILFFLGECLVSWQSIKQQVVALSSCEAEYMAASAASTQALWLARLLSDLLGRDTGAVELRVDSKSALALAKNPVFHERSKHIRVRYHFIRSYLEEGSIKASYINTKDQLADLLTKPLGRIKFLELCSRIGMAQLSHKTAHKT

SEQ ID NO: 20192 - protein, 1409 aa, Oryza sativa
  Clone ID: TF_OSC900345j.C1.p5.fg
MRVRLQVRHMWEAVRYGDVDYDEDRRALDALIAAVPPEMQFSLSQKRTAKEAWDAIAAARIGSDRARKSTLQALRKEWENLAFKPGEDVDDFALRLNTLLQKMVQYGDDTYDEERAVEKLFRCVPEKYRQIARSIESLLDLSTMSIEEALGRLKVVDGDEPRPLSGPITIGGKLHLTREQWEASQGDGRKGESSSPTGGRKPRKARGGVQLRWARRRAEGGARRGAQGVATGNHKPARDDTCRNCGKLGHWAKDCRQPRRGQAHVARVEEEEPALLLAHASIELPPAAPAAAAFLHLDEPKVLVSLCDGSSNDKADGWYLDTGATHHMTGRREFFTEFDSSVRGTVKFGDASGVEIKGVGSVTFTAKSGEHRLLTGVYYIPALRNSIISVGQLDENGSRVLVEDGLMRIWDRRCRLLAKVTRGTNRLYILSAQVAHPVCLAARRDDEAWQWHERFGHLHFEALKQLSAKEMVRGMPCLDHVEQLCDVCVVTKQRRLPFPQQTSFRAKERLGLVHGDLCGPVTPATPGGRRYFLLLVDDLSRYMWVMVLGSKGEAADAIRHAQAAAEAECGRKLRVLRTDNGGEFTAAEFASYCADEGIQRHYTAPYSPQQNGVVERRNQTVVEMARALLKQRGMPAIFWGEAVVTAAYILNRSPTKALDGRTPYEAWHGRKPAVSHLRVFGCLAFTKELGHIGKLDDRSTPGVFIGYAEGSKAYRILDPETQRVRITRDVVFDEGRGWVWDKAVDDGSTPTYDDFTIEYVHFEGAGGVGSSSSPSVSTPVPEPPPTPTPTHPRATTSTTTSSSSTPPQPVSPHAPAPTATPPGTSTPTPARVERSPVEFVTPLSHDGERIDAYHDGEQLRYRTMEDLLGDQPVPGLVPRNLEAQLHLACDDGEPRSFAEAEKHAAWRAAMQSEMDAVQENRTWELADLPRGHRAITLKWVFKLKRDEAGAIVKHKARLVARGFVQQEGIDYDDAFAPVARMESVRLLLALAAQEGWGVHHMDVKSAFLNGDLKEEVYVHQPPGFVIPGKEGKVLRLHKALYGLRQAPRTWNAKLDSTLKGMGFEQSPHEAAIYRRGNGGNALLVGVYVDDLVITGTKDAEVAAFKEEMKATFQMSDLGPLSFYLGIEVHQDNSGITLRQTAYAKRVVELAGLTDCNPALTPMEERLKLSRDSTAEEVDATQYRRLVGSLRYLTHTRPDLAFSVGYVSRFMQRPTTEHQQAVKRIIRYVAGTLDHGLYYPRCPGKAHFVGYSDSDHAGDIDTSKSTSGILFFLGECLVSWQSIKQQVVALSSCEAEYMAASAASTQALWLARLLSDLLGRDTGAVELRVDSKSALALAKNPVFHERSKHIRVRYHFIRSYLEEGSIKASYINTKDQLADLLTKPLGRIKFLELCSRIGMAQLSHKTAHKT

SEQ ID NO: 20193 - protein, 2333 aa, Oryza sativa
  Clone ID: TF_OSC900415j.C1.p7.gm
MGNGVFKKTEVLAAVKHKKSGISGSTNSYNAVVRENAQLRHEVTEQRGMIREQRGMIQEHRGMLKAVYEKLGMDIPEEVLSRWESQREDSELDVDCSEGSEEYEIEEEDEGQSPKFRSLVVDGPPPSGRHNLATLVGGAGAGAASAGKECNSNAASRGQYQNFHEIPPDDADFNNLTIYLKSASPPAAELPSLTDHVNEEVAKLDRTVRRITAVLVDADEREIADETMKLWISELKQVTWEAEGILEDYSYELLRSTTVQEEKEGLCRKESRISRCTSSLLDPLEVYGREDEKKLIISSLLDGCLTFKKRRLKEHEYETCKAGAVRLISIVAMGGMGKTTLARLVYNDARVQNHFDIQAWVWVSEVFDEVRLTKAAIESVTAKPCDLTELEPLQRQLHEEVKGSHMIITTRNENVSTIVQAKKLAGSREKFVIVHDLIHDLAKSIGGKEILVKKCCGSSVGGCNTSANNHLRYLAVLVGTTPFYSDNKLVLVQSQWWYNLEGCLLHSPHLKYLRILDVSSSDQIKLVANSGSGAATLDEIKDINTLQGQLCIMDLQNITHDRIWEPRSANLSKKKLTRLELVWNPLPSYKSVPHDEVVLESLQPHNYIRQLVISGFRGLNFCSWLGDRSLFSLQELELCKCYYTDHLPPLGQLPNLKQLKLTSLWKLRSIGPEFYGDCEAPFQCLETLVVQNLVAWEEWWLPENHPHCVFPLLRTIDIRGSHKLVRLPLSNLHALAGITVSSCSKLETIVGLKERCEVTAGNGGLQAGQTNVLPSLRRVKITACPSLEEPLISMLRRQTEIGFSYWEQSPSTSPTDIADFGKTPWKDSGKDAELAAAEERRRATAQTAAAAARAARLAAAELAAARAEAEAEAAEDAARAAEVEVETLRSSINGSIAGDITADRELEELARGRARERAERWAAAHLHGGGGGPRDRAPADGNPDGRGRAGGSPEPARGPRRRHGSLSPDRRHGHHGVQTVVRDFGPGGGWPTLTKTNYIEWAAVMRVRLQVRHMWEAVRYGDVDYDEDRRALDALIAAVPPEMQFSLSQKRTAKEAWDAIAAARIGSDRARKSTLQALRKEWENLAFKPGEDVDDFALRLNTLLQKMVQYGDDTYDEERAVEKLFRCVPEKYRQIARSIESLLDLSTMSIEEALGRLKVVDGDEPRPLSGPITIGGKLHLTREQWEASQGDGRKGESSSPTGGRKPRKARGGVQLRWARRRAEGGARRGAQGVATGNHKPARDDTCRNCGKLGHWAKDCRQPRRGQAHVARVEEEEPALLLAHASIELPPAAPAAAAFLHLDEPKVLVSLCDGSSNDKADGWYLDTGATHHMTGRREFFTEFDSSVRGTVKFGDASGVEIKGVGSVTFTAKSGEHRLLTGVYYIPALRNSIISVGQLDENGSRVLVEDGLMRIWDRRRRLLAKWHERFGHLHFEALKQLSAKEMVRGMPCLDHVEQLCDVCVVTKQRRLPFPQQTSFRAKERLGLVHGDLCGPVTPATPGGRRYFLLLVDDLSRYMWVMVLGSKGEAADAIRHAQAAAEAECGRKLRVLRTDNGGEFTAAEFASYCADEGIQRHYTAPYSPQQNGVVERRNQTVVGMARALLKQRGMPAIFWGEAVVTAAYILNRSPTKALDGRTPYEAWHGRKPAVSHLRVFGCLAFAKELGHIGKLDDRSTPGVFIGYAEGSKAYRILDPETQRVRITRDVVFDEGRGWVWDKAVDDGSTPTYDDFTIDPRASTDSNTNTPSGHDFDYDELVVDTTPAVEFVTPLSHDGERIDAYHDGEQLRYRTMEDLLGDQPVPGLVPRNLEAQLHLACDDGEPRSFAEAEKHAAWRAAMQSEMDAVQENRTWELADLPRGHRAITLKWVFKLKRDEAGAIVKHKARLVARGFVQQEGIDYDNAFAPVARMESVRLLLALAAQEGWGVHHMDVKSAFLNGDLKEEVYVHQPPGFVIPGKEGKVLRLHKALYGLRQAPRAWNAKLDSTLKGMGFEQSPHEAAIYRRGNGGNALLVGVYVDDLVITGTKDAEVAAFKEEMKATFQMSDLGPLSFYLGIEVHQDNSGITLRQTAYAKRVVELAGLTDCNPALTPMEERLKLSRDSTAEEVDATQYRRLVGSLRYLTHTRPDLAFSVGYVSRFMQRPTTEHQQAVKRIIRYVAGTLDHGLYYPRCPGKAHFVGYSDSDHAGDIDTSKSTSGILFFLGECLVSWQSIKQQVVALSSCEAEYMAASAASTQALWLARLLSDLLGRDTGAVELRVDSKSALALAKNPVFHERSKHIRVRYHFIRSYLEEGSIKASYINTKDQLADLLTKPLGRIKFLELCSRIGMAQLSHKTAHKT

SEQ ID NO: 20194 - protein, 1441 aa, Oryza sativa
  Clone ID: TF_OSC900422j.C1.p3.fg
MADRLAAVGGEGRPGGGWPTLTKTNYIEWAAVMRVRLQVRHMWEAVRYGDVDYDEDRRALDALIAAVPPEMQFSLSQKRTAKEAWDAIAAARIGSDRARKSTLQALRKEWENLAFKPGEDVDDFALRLNTLLQKMVQYGDDTYDEERAVEKLFRCVPEKYRQIARSIESLLDLSTMSIEEALGRLKVVDGDEPRPLSGPITIGGKLHLTREQWEASQGDGRKGESSSPTGGRKPRKARGGVQLRWARRRAEGGARRGAQGVATGNHKPARDDTCRNCGKLGHWAKDCRQPRRGQAHVARVEEEEPALLLAHASIELPPAAPAAAAFLHLDEPKVLVSLCDGSSNDKADGWYLDTGATHHMTGRREFFTEFDSSVRGTVKFGDASGVEIKGVGSVTFTAKSGEHRLLTGVYYIPALRNSIISVGQLDENGSRVLVEDGLMRIWDRRCRLLAKVTRGTNRLYILSAQVAHPVCLAARRDDEAWQWHERFGHLHFEALKQLSAKEMVRGMPCLDHVEQLCDVCVVTKQRRLPFPQQTSFRAKERLGLVHGDLCGPVTPATPGGRRYFLLLVDDLSRYMWVMVLGSKGEAADAIRHAQAAAEAECGRKLRVLRTDNGGEFTAAEFASYCADEGIQRHYTAPYSPQQNGVVERRNQTVVEMARALLKQRGMPAIFWGEAVVTAAYILNRSPTKALDGRTPYEAWHGRKPAVSHLRVFGCLAFTKELGHIGKLDDRSTPGVFIGYAEGSKAYRILDPETQRVRITRDVVFDEGRGWVWDKAVDDGSTPTYDDFTIEYVHFEGAGGVGSSSSPSVSTPVPEPPPTPTPTHPRATTSTTTSSSSTPPQPVSPHAPAPTATPPGTSTPTPARVERSPVEFVTPLSHDGERIDAYHDGEQLRYRTMEDLLGDQPVPGLVPRNLEAQLHLACDDGEPRSFAEAEKHAAWRAAMQSEMDAVQENRTWELADLPRGHRAITLKWVFKLKRDEAGAIVKHKARLVARGFVQQEGIDYDDAFAPVARMESVRLLLALAAQEGWGVHHMDVKSAFLNGDLKEEVYVHQPPGFVIPGKEGKVLRLHKALYGLRQAPRTWNAKLDSTLKGMGFEQSPHEAAIYRRGNGGNALLVGVYVDDLVITGTKDAEVAAFKEEMKATFQMSDLGPLSFYLGIEVHQDNSGITLRQTAYAKRVVELAGLTDCNPALTPMEERLKLSRDSTAEEVDATQYRRLVGSLRYLTHTRPDLAFSVGYVSRFMQRPTTEHQQAVKRIIRYVAGTLDHGLYYPRCPGKAHFVGYSDSDHAGDIDTSKSTSGILFFLGECLVSWQSIKQQVVALSSCEAEYMAASAASTQALWLARLLSDLLGRDTGAVELRVDSKSALALAKNPVFHERSKHIRVRYHFIRSYLEEGSIKASYINTKDQLADLLTKPLGRIKFLELCSRIGMAQLSHKTAHKT

SEQ ID NO: 20195 - protein, 665 aa, Oryza sativa
  Clone ID: TF_OSC400177j.C1.p42.np
MDEVVATMDISEANEGYASCGSVIEMSRQMKTTRVGARAQPWPACPGIPAVGRVGSVLLFTARMGEGLCHIFTTGSKAMECGVKMCLVGWPGLAWDELEPRSGCQFGPNHRRPWVKAVLDGQLCEEEDVVSRLPKLRKTAGSASEAKEAVKPAVKQDKRLRSVKVLSLVSNLSLPFVFPLSLSKPLQQMADNEKGNKVRSQDIGTSSSRVNEAPDTSCVTLVQHLINQNRLLIEILQQHQTPILNLSQIQPQVQLEAVQALTPQVSAPPTSQKAPHAMPHVDPKEASIICFMCDEQGHYARNCPQQKRKAPMRTEDEVRKMIITSTEWPPPGMTKHQRRNSFRGAQQLTEHLLANGGRVSDSEDSDQVSSDDEDAKSPQDFNQNKIELKACSRCGEIGHVASSCAFTCVRCEEDHPPDRCPMSRITCFLCEGTDHVPKDCQLSFLLTKKMADQHAHSNGEKHQGSTNPRQDYSFSLTPVPGQRKQNEKRKCRVREDIRCFNCQGMGHFADKCPKPRNIAAGTSVHATPCNQQLAPQRIVIHASRSSPLARVATTPIPMSALPQGVNAQFQPQPPADKTEASICVVPLEVPIQQLRNQVQDEEPECKKVIVCYNCSEEGHYSKNCPQPRQNRPPHYRQFTRSRHSNRIVVTGANAVPVRPRVNQNP

SEQ ID NO: 20196 - protein, 661 aa, Oryza sativa
  unsure (1)..(661): unsure at all Xaa locations
  Clone ID: TF_OSC407089j.C1.p1.np
MNKVVATMNSEANEGYASCGSVIEMSRQMKTTRVGARAQPWPACPAQPWPACPGIPAVGRVGSVLLFTARMGEGLCHIFTTGSKAMECGVKMCLVGWPGLAWDELEPRSGCQFGPNHRRPWVKAVLVGQLCEEDVVSCLPKLRKTAGSASEVKEAVKPAVKDSKRLRSVKVLSLVSNLSLPFVFPLSLSKPLQQMADNEKGNKVRSQDIGTSSSRVNEAPDTSCVTLVQHLINQNRLLIEILQQHQTPILNLSQIQPQVQLEAVQALTPQVSAPPTSQKAPHAMPHVDPKEASIICFMCDEQGHYARNCPQQKRKAPLRTEDEVRKMIITSTEWPPPGMTKHQRRNSFRGAQXLTEHLLANGGRVSDSEDSDQVSSDDENKIELKACSRCGEIGHVASSCAFTCVRCEEDHPPDRCPMSRITCFLCEGTDHVPKDCQLSFLLTKKMADQHAHSNGEKHQGSTNPRQDYSFSLTPVPGQRKQNEKRKCRVREDIRCFNCQGMGHFADKCPKPRNIAAGTSVHATPCNQQLAPQRIVIHASRSSPLARVATTPIPMSALPQGVNAQFHPQPPADKTEASICVVPLEVPIQQLRNQVQDEEPECKKVIVCYNCSEEGHYSKNCPQPRQNRPPHYRQFTRSRHSNRIVVTGANAVPVRPRVNQDP

SEQ ID NO: 20197 - protein, 634 aa, Oryza sativa
  unsure (1)..(634): unsure at all Xaa locations
  Clone ID: TF_OSC10729j.C1.p1.np
GGHWGVHASGCRGGDSDPGMVHCGELCFARGTVTVPFQGTVVALRRMETCFGAVSCGYSVVYLLCSLLSMSYAHSCNIHSSEEEYFSEEIPGVTSWYQSHVDLRTSQMMSPHPPERLIDVVGFVRGLRMMAFEVGYDVAPEYRQIPHDPNEEQCRVRVTLTSDREDLPSIKFEAGGKKYSHACQEAALVAIGELRHRFDEELESSAFXYHPHKPHGQDYGVHNYPEDEDSTTLKHAVYMLSAMDAIGVEREKAAHDKENXNHGKIYKLESKVYRLQKELAELKGEAQPPAPKLRLTARKRTRPPRHIQLASKTRVVGDAVPDHAEPVIHMVNTRTESSGHNEEDPTLAQVLAQQTQLINLLVQQAQNQQANNNNQPPPPQNKLADFLRVRAPTFSSTTNPVEAGDWLHAVEKKAAAAGKPITWREFTAAFKKTHIPSGVVALKKREFSALNQGSRSVIEYLHDFNRLARYAPEDVRTDRERQEKFLEGLNDELSYALLAMEXRDFQQLVDKAIRQENMYDRMEQKKLARPQCQFYNNNTGNRSNNNRNVVTRPVATPTQNQPVRKEQGSKLGVCFNCGDPGHYANKCPKPRRVKTAPVQNNSNAPAPKARVNHVTAAEAQIDLQACKNEVLSDS

SEQ ID NO: 20198 - protein, 1949 aa, Oryza sativa
  Clone ID: TF_OSC417563j.C1.p1.fg
MAKNPKAAKNRRPTTRRPRAAAAAATASASADIEDLAPPSGCRAAVGLTTAAAAVRAELLRWYDANRRDLPWRRAAEPAGSGSGSGRGEEKRAYAVWVSEVMLQQTRVPVVVDYYSRWMARWPTVDSLAAATQEEVNEMWAGLGYYRRARFLLEGAKQIVEKGEFPRTASALREVRGIGDYTAGAIASIAFNEVVPVVDGNVRVISRLYAIPDNPKESSTVKRFCTRRQQDAELAAAEERRRATARTGAAAARAARLAAAELAAARAEAEAEAAEDAARAAEVEVETLRSSINGSIAGDITADRELEELARGRARERAERWVAAHLHGGGGGPRDRAPADGNPNGRERAGGSPEPARGPRRQHGSLSPDRRHGHHGVQTVVRDFGPGGGWPTLTKTNYIEWAAVMRVRLQVRHVGGSPFSLSQKRTAKEAWDAIAAARIGSDRARKSTLQALRKEWENLAFKPGEDVDDFALRLNTLLQKMVQYGDDTYDEERAVEKLFRCVPEKYRQIARSIESLLDLSTMSIEEALGRLKVVDGDEPQPLSGPITIGGKLHLTREQWEASQGDRRKGESSSPTGGRKPRKARGGVQLRGAQGVATGNHKPARDDACRNCGKLGHWAKDCQQPRRGQAHVARVEEEPALLLAHASIELPPAAPAAAAFLHLDEPKVLVSLCNGSSNDKADGWYLDTGATHHMTGRREFFTEFDSSVRGSVKFGDASGVEIKGVGSVTFTAKSGEHRLLTGVYYIPALRNSIISVGQLDENGSRVMVEDGLMRIWDRRRRLLAKVTRGTNRLYILSAQVAQPVCLAARRDDEAWQWHERFGHLHFEALKQLSAKEMVRGMPCLDHVEQLCDVCVVTKQRRLPFPQQTSFRAKKRLELVHEDLCGPVTPATPGGRRYFLLLVDDLSRYMWVMVLGSKGEAADAIRHAQAAAEAECGRKLRVLRTDNGGEFTAAEFASYCADEGIQRHYTTPYSPQQNGVVERRNQTVVGMARALLKQRGMPAIFWGEVVVTAAYILNRSPTKALDGRTPYEAWHGRKPAVSHLRVFGCLAFAKELGHIGKLDDRSTPGVFIGYAEGSKAYRILDPETQRVRTARDVVFDEGRGWVWDKAVDDGSIPTYDDFTVEYVHFEGAGGVGSSSSPSVSTLAPESPPTPTPTHPRATTSTTTSSSSTPPQPVTPHAPVPTATPPSTSTLTPARVERSPVEFATPLSHDGERIDAYNDGEQLRYRTMEDLLGDQPVPGLVPRDLEAQLHLACDDGEPRSFAEAEKHAAWRAAMQSEMDAVQENRTWELADLPRGHRAITLKWVFKLKRDEAGAIIKHKARLVARGFVQQEGIDYDDAFAPVARMESVRLLLALAAQEGWGVHHMDVKSAFLNGDLKEEVYVHQPPGFVIPGKEGKVLRLHKALYGLQQAPRAWNAKLDSTLKGMGFEQSPHEAAIYRRGNGGNALLVGVYVDDLVITGTKDAEVAAFKEEMKATFQMSDQGPLSFYLGIEVHKDNSGITLRQTAYAKRVVELAGLTDCNPALTPMEERLKLSRDSTAEEVDATQYRRLVGSLRYLTHTRPDLAFSVGYVSRFMQRPTTEHQQAVKRIIRYVAGTLDHGLYYPRCPGKAHFVGYSDSDHAGDIDTSKSTSGILFFLGKCLVSWQSVKQQVVALSSCEAEYMAASAASTQALWLARLLSDLLGRDTGTVELRVDSKSALALAKNPVFTNGASTSGQLTGELVDPSRPGDFNQAIMELGATLCRKTKPGCSQCPVSNHCQALTLSNQSASVKVTDYPRVVPKAKPRSDFAAVCVVQINDNLFLLIKRPEEGLLAGLWEFPSVLVSEEKTDVLNRRKEMDKYLKQVLSIDVKRRSSVILREDVGQHVHIFSHIRLTMFVELMILNLKDDGDKLCMEGQDNSKLRFIDENAVDSIGLISGIRKVYNMVKAFKEKRPKEQSQVPSRKRSRRLK

SEQ ID NO: 20199 - protein, 470 aa, Oryza sativa
  unsure (1)..(470): unsure at all Xaa locations
  Clone ID: TF_OSC900136j.C1.p9.np
MSWHRAGVLLLGGSILPACPGGSGRRGVGSVLLFMARMGWELCHVFRPYTVVMFNREKGKNVRGYASSNSSFQLNPPLASRELTRAHPWSIPSMLLSSQLPLVGSQDQNQYVFDRAFATQINELPMPEEHVPFCHDCREXGHYALNCPWVYAKEAPSFGLTGQTSLNQPPRTKSSLQPSVQSREPNGENPLNPGNCFPPSLSYHVGSRTKQAKGKKSKNQKRKAPMRTEEEVRKMTITSTEWPPAGITIPRRQRGNTFRGARQLTQHLLSHGGRVSDSEGSDQVSSDVEDESPRHLGEEEMESKACTRCGEIGHIASRCLTLCPHCEEDHPPGECPTRKVTCFLCEGTNHVPKDCQLSVLLTKTAEIQRTTLRLSHQLVSSNSNLDDIIHSTNAPPAAPDSAVNHSNNTFNTNHSLHRRPQQRIVVDGRSCVSPRPTPGRAKGNQSQECDTKQKTVICFKXQSEGSFSCE

SEQ ID NO: 20200 - protein, 1991 aa, Oryza sativa
  Clone ID: TF_OSC1745j.C1.p15.fg
MKSGKSKFAVANITSTAWRGRRQGGQRAPPSLNMPSTTPPPPQSSLPPSTGEKQDGNSDVEGNLEAVSPLAQTTHATGFGAKINDNDGHPAASREGEGRRGRRPPVASAREAAILKTKWCCEEGGARRGLDAAWGSRGRNYGLFGFTMNDYLSVGTVISFTTIINFGRVMMALAVDVSRFEGVPMAPPDPILGVSEAFKADQNDLKLNLGVGAYRTEELQPYVLNVVKKAETLMLEKGENKEYLPIEGLAAFNKATAELLFGADNPVLKQGRVATLQSLSGTGSLRLAAAFIQRYFPEAKVLISSPTWGNHKNIFNDAKVPWSEYRYYDPKTVGLDFEGMIADIQAAPDGSFVLLHGCAHNPTGIDPTPEQWEKIADVIQEKKHMPFFDVAYQGFASGSLDEDASSVRLFVQRGLEVFVAQSYSKNLGLYAERIGAINVVCSTPEVANRVKSQLKRLARPMYSNPPIHGARIVANVVGDPTMFGEWKQEMEEMAGRIKNVRQKLYDSLSAKDDSGKDWSFILRQIGMFSYTGLNKTQSDNMTDKWHIYMTKDGRISLAGLSLAKCEYLADAIIDSFHNGPSSHVYVNKDSNTEKVKLPEKIGCQKTSWYQSRPAGGRRRLNPSWPEAWRLEQGRECASAAARKSGASAARRGGRSRAAAGAELLLLLGAELAGRSGSCSVVAGSQHSEDFASLVENQGIEQVMGKLVDMLAKKFSEASTTSNAIIPHTESILKIELMQNEIKLEGVKNYLSWSRRALLILKTKGLEGYVTGEVKEPENTSSVEWKTWSTTNSLVVAWLLTSLIPAIATTVETISSAREMWKTLTKLYSGEGNVMLMVEAQEKISALRQGERSVAEYVVELKSLWSDLDHYDPLGLEHSDCIAKMKKWVERRRVIEFLKGLNPEFEGRRDAMFHQTTLPTLDEAIAAMAQEELKKKVLPSAAPCSPSPTYAIVQGKETRECFNCGEMGHLMRDCHAPRKPTYGRGRGVDRGGTRGGRGYAGRSNRGRGYGYRGDYKANAVTLEEGSSGTTPDNVANFAHSTSGSFNQAFMSMNTSHSSWILDSGASRHVTGMSGEFTSYKPYSFAHKETIQTADGTSCQERRTGKKLGISIRRDGLWYLDRRGTNEDVCALMASTSKEVTEFIRTDNGGEYMNSEFGHFLSLEGILHQTSCPDTPPQNGVAERKNRHLLEIARSLMYTMNVPKFLWSEAVMTAAYLINRTPSRILGMKTPYEMIFGKNEFVVPPRVFGCTCFVRDHRPSIGKLDPRAVKCIFIGYSSNQKGYKCWSPSERRTFVSMDVTFRESVPFYGEKTDISSLFVDLDDLTRGDHDQQKEGEILGLKENEQSKGKIMVGEIPCAIGDPVQEQEWRKPHEEENLQVYTRRMRLPTTQQVEVDDQVSDDLTHVQVSSESGGEQIEIREEESNLPIAIRKGMRSNAGKPPQRYGFEIGDESGDENDIANYVSYTSLSSTYKAFVASLNSAIIPKDWKEAKQDPRWHQAMLDELEALEKNKTWDLVSYPNGKKVVNCKWVYAVKQNPDGKVERYKARLVAKEYSQTYGIDYDETFAPVAKMSTVRTIISCAVNFDWPLHQLDVKNAFLHGDLQEEVYMEIPPGFATLQTKGKVLRLKKSLYGLKQSPRAWFDRFRRAMCAMGYKQCNGDHTVFYHHSGDHITILAVYVDDMIITGNDCSEITRLKQNLSKEFEVKDLGQLKYFLGIEIARSPRGIVLSQRKYALDLLSDTGMLGCRPASTPVDQNHKLCAESGNPVNKERYQRLVGRLIYLCHTRPDITYAVSMVSRYMHDPRSGHMDAVYRILRYLKGSPGKGLWFKKNGHLEVEGYCDADWASCPDDRRSTSGYCVFVGGNLVSWRSKKQPVVSRSTAEAEYRAMSVSLSELLWLRNLLSELMLPVDTPMKLWCDNKSAISIANNPVQHDRTKHVELDRFFIKEKLDEGVLELEFVMSGGQVADCFTKGLGVKKCNSSCDKMGMIDIYHPS

SEQ ID NO: 20201 - protein, 1237 aa, Oryza sativa
  Clone ID: TF_OSC401213j.C1.p23.fg
MAENQGIEQVMGKLVDMLAKKFSEASTTSNAIIPHTESILKIELMQNEIKLGVKNYLSWSRRALLILKTKGLEGYVTGEVKEPENTSSVEWKTWSTTNSLVVAWLLTSLIPAIATTVETISSASEMWKTLTKLYSGEGNVMLMVEAQEKISALRQGERSVAEYVAELKSLWSDLDHYDPLGLEHSDCIAKMKKWVERRRVIEFLKGLNPEFEGRRDAMFHQTTLPTLDEAIAAMAQEELKKKVLPSAAPCSPSPTYAIVQGKETRECFNCGEMGHLMRDCHAPRKPTYGRGRGVDRGGTRGGRGYAGRSNRGRGYGYRGDYKANAVTLEEGSSGTTPDNVANFAHSTPGSFNQAFMSMNTSHSSWILDSGASRHVTGMSGEFTSYKPYSFAHKETIQTADGTSCQERRTGKKLGIGIMRDGLWYLDRRGTNEDVCALMASTSKEVTENGVAERKNRHLLEIARSLMYTMNVPKFLWSEAVMTAAYLINRTPSRILGMKTPYEMIFGKNEFVVPPRVFGCTCFVRDHRPSIGKLDPRAVKCIFIGYSSSQKGYKCWSPSERRTFVSMDVTFRESVHSMEGEILGLKENEQSKGKIVVGEIPCAIGDPVQEQEWRKPHEEENLQVYTRRMRLPTTQQVEVDDQVSDDLTHVQVSSESGGEQIEIREEESNLPIAIRKGMRSNAGKPPQRYGFEIGDESGDENDIANYVSYTSLSSTYKAFVASLNSAIIPKDWKEAKQDPRWHQAMLDELEALEKNKTWDLVSYPNGKKVVNCKWVYAVKQNPDGKVERYKARLVAKGYSQTYGIDYDETFAPVAKMSTVRTIISCAVNFDWPLHQLDVKNAFLHGDLQEEVYMEIPPGFATLQTKGKVLRLKKSLYGLKQSPRAWFDRFRRAMCAMGYKQCNGDHTVFYHHSGDHITILAVYVDDMIITGNDCSEITRLKQNLSKEFEVKDLGQLKYFLGIEIARSPRGIVLSQRKYALDLLSDTGMLGCRPASTPVDQNHKLCAESGNPVNKERYQRLVGRLIYLCHTRPDITYAVSMVSRYMHDPRSGHMDAVYRILRYLKGSPGKGLWFKKNGHLEVEGYCDADWASCPDDRRSTSGYCVFVGGNLVSWRSKKQPVVSRSTAEAEYRAMSVSLSELLWLRNLLSELMLPVDTPMKLWCDNKSAISIANNPVQHDRTKHVELDRFFIKEKLDEGVLELEFVMSGGQVADCFTKGLGVKECNSSCDKMGMIDIYHPS

SEQ ID NO: 20202 - protein, 1299 aa, Oryza sativa
  Clone ID: TF_OSC401669j.C1.p18.fg
MAENQGIEQVMGKLVDMLAKKFSEASTTSNAIIPHTESILKIELMQNEIKLEGVKNYLSWSRRALLILKTKGLEGYVTGEVKEPENTSSVEWKTWSTTNSLVVAWLLTSLIPAIATTVETISSASEMWKTLTKLYSGEGNVMLMVEAQEKISALRQGERSVAEYVAELKSLWSDLDHYDPLGLEHSDCIAKMKKWVERRRVIEFLKGLNPEFEGRRDAMFHQTTLPTLDEAIAAMAQEELKKKVLPSAAPCSPSPTYAIVQGKETRECFNCGEMGHLMRDCHAPRKPTYGRGRGVDRGGTRGGRGYAGRSNRGRGYGYRGDYKANAVTLEEGSSGTTPDNVANFAHSTSGSFNQAFMSMNTSHSSWILDSGASRHVTGMSGEFTSYKPYSFAHKETIQTADGTSCQERRTGKKLGIGIRRDGLWYLDRRGTNEDVCALMASTSKEVTEFIRTDNGGEYMNSEFGHFLSLEGILHQTSCPDTPPQNGVAERKNRHLLEIARSLMYTMNVPKFLWSEAVMTAAYLINRTPSRILGMKTPYEMIFGKNEFVVPPRVFGCTCFVRDHRPSIGKLDPRAVKCIFIGYSSSQKGYKCWSPSERRTFVSMDVTFRESVPFYGEKTDISSLFVDLDDLTRGDHDQQKEGEILGLKENEQSKGKIVVGEIPCAIGDPVQEQEWRKPHEEENLQVYTRRMRLPTTQQVEVDDQVSDDLTHVQVSSESGGEQIEIREEESNLPIAIRKGMRSNAGKPPQRYGFEIGDESGDENDIANYVSYTSLSSTYKAFVASLNSAIIPKDWKEAKQDPRWHQAMLDELEALEKNKTWDLVSYPNGKKVVNCKWVYAVKQNPDGKVERYKARLVAKGYSQTYGIDYDETFAPVAKMSTVRTIISCAVNFDWPLHQLDVKNAFLHGDLQEEVYMEIPPGFATLQTKGKVLRLKKSLYGLKQSPRAWFDRFRRAMCAMGYKQCNGDHTVFYHHSGDHITILAVYVDDMIITGNDCSEITRLKQNLSKEFEVKDLGQLKYFLGIEIARSPRGIVLSQRKYALDLLSDTGMLGCRPASTPVDQNHKLCAESGNPVNKERYQRLVGRLIYLCHTRPDITYAVSMVSRYMHDPRSGHMDAVYRILRYLKGSPGKGLWFKKNGHLEVEGYCDADWASCPDDRRSTSGYCVFVGGNLVSWRSKKQPVVSRSTAEAEYRAMSVSLSELLWLRNLLSELMLPVDTPMKLWCDNKSAISIANNPVQHDRTKHVELDRFFIKEKLDEGVLELEFVMSGGQVADCFTKGLGVKECNSSCDKMGMIDIYHPS

SEQ ID NO: 20203 - protein, 489 aa, Oryza sativa
  Clone ID: TF_OSC900020j.C1.p11.fg
MSNSAATSTYAESVASCRAPAPATPRAPPRRREAPLRLRRRRRRYMLDFLDACVYFLKHARVHEERNANILFGVEKLIFVQMPQPAYMSHPKPNPHVFSSPCSPVVFNSPSNHLAGSTTPTPNNLQVFNGPRNPHVSNSPSNHLAGSTTPTPNNLQVFNAPGNLHVSNSPNNHRSGATTPVNANPPGSRSSDKQPICHCRAGKCKVETIKGQKYYVCCIQKGQGACPYQVPVNAFVEESPQAGNSVPLEDNRGNYSPVKVEANNDNGSINPDQPEYDEWPFDIVNNDVVCSGFLPTAEPTLRDGIVAGESPSTQHLSNATTEAKTPTKSPIMPPPHGSGSPFTPRSNPCYRCGEDGHWSRNCPKPASSPLNSPCYNCGKLGHWRARGGLLRCLSIICFVNHFLHECKVQTCYCYNCYFAPFFFSMMNWKAIGCRSLNLSLKFFLESFFQRWSSPLPFIRSETETWDDDRCRDLTRTYEDKKKNTNRWMD

SEQ ID NO: 20204 - protein, 545 aa, Oryza sativa
  unsure (1)..(545): unsure at all Xaa locations
  Clone ID: TF_OSC13693j.C1.p1.np
LVLDGQLCEEEDVASGLPKFXKAAGSTSEAKEAVKPDVKQEEKIRSVKVLSLVSDLFLPPIFSFPLSKPCQMADNEKGSVRNQNKGAPSRVNEAPDTSCVTVVXHLINXNELLIELPQQHQMPILDPSQMQPQVQVEAVQSLTPQVSAPPASQQAHRAMPHVDSKEARIICFIYVEQGHYARNCPXQKKKAPMRTEDEVRKMTITGTEWPPPGMTKRQRRNFFRGAPXLTEHLLANGGRVSDSEDSDQVSSRVEDEKSLQGFNQNKKEHMACSRCGEIGHFASSCVTTCVHCEEDHPPDECPTSRITYFLCEXADHVRKDCQFSFLLMKKMANQPASYNRQKHQGNPNPRQDYSFSLTPMPGQRNQNGKRKCRVWKDICCFNCQEVGHFADKCSKPRNIFTNTSVHATPRNQKLAPXQIGIHASXSSPIAQVAIAPTPMSALPQGVNAQFQPQPPVDKTEASIVGPLDGPGQQPRNQQDEEPESKKVIVCYNWKEPGHNSRTCPXPRKKNRPPHFRQFTRNRHANRQVVTEKNGPPPKKGVFKNP

SEQ ID NO: 20205 - protein, 1214 aa, Oryza sativa
  Clone ID: TF_OSC900382j.C1.p4.fg
MAGFADALRTDKFTDVHFKRWQIRVTLWLTAMKCFWVSTGKPMGVLNADQQKEFDEATTLFVGCILSVLGDRLVEVYMHMTDAKELWDALNTKFGATDASNDLYIMEQFHDYKMADNRSVVKQAHEIQTMAKELELLKCVLPNKFVVGCIIAKLPPSWRGFGTALKHKRQEYSIEGLIASLDVEEKAREKDAASKGDGGQSTANVVHKAQNKSKGKYKAQQTTNFKKKKNNNNPNQDERTCFVCSQPGHLARKCPQRKGMKAPAGQTSKSANVTIGNTGDGSGYGNLPTVFSVNQSTNWWVDTGANVHVCADISLFSSYQVARGYTVLVGNGSHASVHGVGTVDLKFTSGKIVQLKNVQHAPSIDRNLVSGSRLTRDGFKLVFESNKVVVSKHGYFIGKDYECGGLFRFSLSDFCNKSVNHICGSVDDEANVWHSRLCYINFGLMSRLSSMCLIPKFSIVKGSKCHSCVQSKQPRKPHKAAEERNLAPLELLHSDHCEMNWVLTKGGKRYFMTLIDDATRFCYMYLLKMKDEALDYFKIYKAEVENQLDRKIKRLRSDRGGEFFSNEFDLFCEEHGIIHERTPPYSPESNGIAERKNRTLTDLVNAMLDTAGLPKACIAYRFLIFKSEVPDMHVGTIMESRDATFFESFFPMKDTHSSSSQTSEIIPNSITPPEQTEHTHEHVTEEDDSEAPRRSKRQRTAKSFGDDFTVYLVDDTPKSISEAYASPDVDYWKEAEMTERPYGCKPVGCKWVFKKKLRPDGTIEKYNARLVAKGYTQKEGEDFFDTYSPVARLTTIRVLLSLAASHGLLVHQMDVKTAFLNGELDEEIYMDQPDGFVVEGQEGKICKLLKSLYGLKQAPKQWHEKFDRTLTSAGFAVNEADKCVYYRHGGGEGVILCLYVDDILIFGTNLEVINEVKSFLSQKFDMKDLGVADVILNIKLIRGENGITLLQSHYVEKILNRFGYFDSKPSPTPYDPSLLLRKNKRIARNQLEYSKIIGSLMYLASATRPDISFAVSKLSRFTSNPGDDHWRALERVMHYLKGTMELGLHYSGYPVVLEGYSDSNWISDVDEIKATSGYIFTLGGGAVSWRSCKQTILTRSTMKAELTALDTATVEAEWLRDLLMDLPIVEKPVPAIFMNYDNQTVIVKVNSSKDNMKSSRHVKRRLKSIRKLRNSGVITLDYIQTARNLADPFTKGLSQNVIDNASKEMGLRPM

SEQ ID NO: 20206 - protein, 361 aa, Oryza sativa
  Clone ID: TF_OSC31099j.C1.p1.fg
MPCHMLTQKKQGHYARNCPQQKRKAPMRTEDEVRKMIITSTEWPPPGMTKCQRRNSSRGAQQLTEHLLANGGRVSGSEDSDQVSSDDEDAKSPQGFNQNKIELKACSRCGEIGHVASSCAFTCVRCEEDHPPDRCPMSRITCFLCEGTDHVPKDCQLSFLLTKKMADQHAHSNGEKHQGNTNPRQHYSFSLTPVPGQRNQNEKRKCRVREDICCFNCQGMGHFADKCPKPRNIAAGTSVHATPCNQKLAPQRIVIHASRSSPIARVATAPIPMSALPQGVNAQFQPQPPAGKTEASICVVPLEVPIHQLRNQVQDEEPELKKGITPKTVPNQGKIGLHITANLHEADIPIVLWSLEQTPCP

SEQ ID NO: 20207 - protein, 1073 aa, Oryza sativa
  Clone ID: TF_OSC400545j.C1.p30.fg
MADQGHYVADSYEMLLAFLAIVWNEVYMHMTDAKELWDALNTKFGATDASNDLYIMEEFHDYRMVDNRSVVEQAHEIQTMAKELELLKSFGTALKHKRQEYSIEGLIASLDVEEKAREKDAASKGDGGQSSANVVHKAQNKSKGKYKAQQTTNFKKQKKNNNNPNQDERTCFVCGQPSHLARKCPQRKGMKAPAGQTSKSANVTIGNTGDGSGYGNLPTVFSVNQSTNWWVDTGANVARGSTVLMGNGSHAPVHGVGTVDLKFTSGKIVQLKNVQHVPSIDRNLVSGSRLTRDGFKLVFESNKVVVSKHGYFIGKGYECGGLFRFSLSDFYNKSVNHICGSVDDEANVWHSRLCHINFGLMSRLSSMCLISKFSIVKGFKCHSCVQSKQPRKPHKAAEERNLAPLELLHSDLCEMNGVLTKGGKRYFMTLIDDATRFCYVYLLKMKDEALDYFKIYKAEVENQIDRKIKKLRSDRGGEFFSNEFDLFCEEHGIIHERTPPYSPESNGIAERKNRTLTDLVNAMLDTAGLPKAWWGEALLTSNHVLNRVPNRNKDKTPYEIWIGRKPSLCYLRTWGCLAKVNVPITKKRKLGPKTVDCVFLGYAHHSIAYRFLIVKSEVPDMHVGTIMETRDATFFESFFPMKDTHSSSSQPSEIIPSSITPPEQTEYTHEHVTEEDGSEAPRRSKRQRTAKSFGDDFTVYFVDDTPKSISEAYASPDADYWKEAVPSEMDSIIANGTWEVTERPYGCKPLGCKWVFKKKLRPDGTIEKYKARLVAKGYTQKEGEDFFDTYSPVARLTTIRVLLSLAASHGLLVHQMDVKTTFLNGELDEEIYMDQPDGFVVEGQEGKVINEVKSFLSQNFDMKDLGVADVILNIKLIRGENGITLLQSHYVEKILNRFGYIDSKPSPAPYDPSLLLRKNKRIARNQLEYSQIIGSLMYLASATRPDISFAVSKLSRFTSNLGDDHWRALERVMRYLKGTMALGLHYTGYPAILEGYSDSNWISDVDEIKATSGYVFTLGGGAVSWRSCKQTILTRSTMEAELTALHTATVEAEWLRDLLMDLPIVEKMVPAIF

SEQ ID NO: 20208 - protein, 369 aa, Oryza sativa
  Clone ID: TF_OSC415186j.C1.p1.fg
MVNSRTNGSGNNNNEGNPTLAQVLAQQTQLMNMMIQQMQNQLNQGNNNAPPPQNKLTDFLRVRPPTFSSTTNLVEAGDWLHAVEKKLELLQCTDQEKVVFASHQLQGPASEWWDHFRMNRADGQPITWAEFTEAFKKTHIPVGVVALKKREFRALKQKDHTVAEYLHEFNRLARYAPEDVRTDEERQEKFLEGLKDELSVTLISHDYVDFQQLVDKAIRLEDKKNMMDNRKRKMTVFHEAQGSSQRQRIKPLQIGESSSAGQGQSQQLNIGGEIKSETNGSNEVNIEQANQPVPVQQDQSQENNSSGREQQVCFNCYNPGHFARECPKPKHQQSQVNNIVVTGANAVSVASSRVASSSVTAQPPVSRQQ

SEQ ID NO: 20209 - protein, 1421 aa, Oryza sativa
  Clone ID: TF_OSC900086j.C1.p11.gm
MPERSCRFPRGDATPPPPPAAASTCGRLGAGTRTSPAGGACAGSGRFVCISPRKGMKAPAGQTSKFANVTIGNTRDGSGYGNLPTVARGSTVLMGNGSHASVHGVGTVDLKFTSGKIVQLKNVQHVPSIDRNHVSGSRLTRDGFKLVFESNKVVVCKHGYFIGKGYECGGLFRFSLSDFCNKSVNHICGSVDNEANKRKLGPKTVDCVFLGYAHHSIAYRFLIVKSEVPDMHVGTIMESLDATFFESFFPMKDTHSGSSQPSEIIPSSITPPEQIEHTHEHVSEEDVCEAPRRSKRQRTAKSFGDDFTVYLVDDTPKSISEAYASPDADYWKEAVRSEMDSIIANGTWEVTERPYGCEPVGCKWVFKKKLRPDGTIEKYKARLVAKGYTQKEGEDFFDTYSPVARLTTIRVLLSLAASHGLLVHQMDVKTAFLNGELDEEIYMDQPDGFVVEGFAVNEADKCVYYRHGGGEGVILCLYVDDILIFGTNLEVINESHYVEKILNRFGYIDSKPSPTPYDPSLLLRKNKRIARNQLEYSQIIGSLMYLASATRPNISFAVSKLSRFTSNPGDDHWRALERIMRYLKGTMELGLHYIGYPAVLEGYSDSNWISNVDEIKATSGYIFTLGGGAVSWSILGDRLVEVYMHMTDAKELWDALNTKFGATDASNDLYIMEQFHDYKMADNRSVVEQAHEIQTMAKELELLKCVLPDKFVAGCIIAKLPPSWRSFGTALKHKRQEYSVEGLIASLDVEEKARKKDAASKGDGGQSSANVVHKAQNKSKGKYKAQQTTNFKKQKKNNNNPNQDERTCFVCGQVGHLVRKCPQRKGMKAPAGQTSKSANVTIGNTRDGSGYGNLPTVARGSTVLIGNGSHASVHGVGTVDLKFTSGKIVQLKNMQHVPSIDRNLVSGSRLTRDGFKLVFESNKVVVSKHVYFIGKGYECGGLFRFSLSDFCNNMCLIPKFSIVKGSKCHSCVQSKQPRKPHKAAEEINLAPLELLHSDLCEMNGVLTKEVENQLDRKIKRLRSDRGGEFFSNEFDLFCEKHGIIHERTPPYSPESNGIGERKNRTLTDLVNAMLDTAGLPKACEAPRRSKRQRTAKSFGDDFIVYLVDDTPKSISEAYASPDADYWKEAVRSEMDSIIANGTWEVTERPYGCKPVGCKWVFKKKLRPDASHGLLVHQMDVKTAFLNGELDEEIYMDQPDGFVVEGQEGKASQSMRQINVCTIAMVESHYVEKILNRFGYIDSKPSPTPYDPSLLLRKNKRIARNQLEYSQIVGSLMYLASATRPDISFAVSKLSRFTSNPGDNHWCALERVMRYLKGTVELGLHYTGYPAVLEGYSDSNWISDVDEIKATSGYVFTLGGGAVSWRSCKQTILTRSTMEAELTALDTATIEVSGTSAFDILHRLVFLSARVLRDFVDARNRE

SEQ ID NO: 20210 - protein, 1372 aa, Oryza sativa
  Clone ID: TF_OSC900219j.C1.p7.fg
MACHIGRTVYMYRSNDAFMLVFICNVMIYLWNRLNHYTSIISTIQKPYYRHCDFTMAGFADALRPDKFTGVHFKRWQIRVTLWLTAMKCFWVSTGKPEGVLTAEQQKQFEEATTLFVGCILSILGDRLVEVYMHMTDAKELWDALNTKFGATDASNDLYIMEQFHDYKMADNRSVVEQAHEIQTMAKELELLKCVLPDKFVAGCIIAKLPPSWRSFGTALKHKRQEYSVEGLIASLDVEEKARKKDAASKGDGGQSSANVVHKAQNKSKGKYKAQQTTNFKKQKKNNNNPNQDERTCFVCGQVGHLVRKCPQRKGMKAPAGQTSKSANVTIGNTGDGSGYGNLPTVFSVNQSTNWWVDTGANVHVCADISLFSSYQVARGSTVLMGNGSHASVHGVGTVDLKFTSGKIVQLKNVQHVPSIDRNLVSGSRLTRDGFKLVFESNKVVVSKHGYFIGKGYECEGLFRFSLSDFCNKSVNHICGSVDDEANVWHSRLCHINFGLMSRLSSMCLIPKFSIVKGSKCHSCVQSKQPRKPHKAAEERNLAPLELLHSDLCEMNGVLTKGGKRYFMTLIDDATRFCYVYLLKTKDEALDYFKIYKAEVENQLDRKIKRLRSDRGGEFFSNEFDLFCEEHGIIHERTPPYSPESNGIAERKNRTLTDLVNAMLDTAGLPKAWWGEALLTSNHVLNRVPNRNKDKTPYEIWIGRKPSLSYLRTWGCLAKVNVPITKKRKLGPKTVDCVFLGYAHHSIAYRFLIVKSEVPDMHVGTIMESRDATFFESFFPMKDTHSGSNQPSEIIPSSITPPEQTEHTHELVSEEDVSEAPRRSKRQRTAKSFGDDFTVYLVDDTPKSISEAYASPDADYWKEAVRSEMDSIIANGTWEVTERPYGCKPVGCKWVFKKKLRPDGTIEKYKARLVAKGYTQKEGEDFFDTYSPVARLTTIRVLLSLAASHGLLVHQMDVKTAFLNGELDEEIYIDQPDGFVVEGQEGKVCKLLKSLYGLKQAPKQWHEKFDKTLISAGFAVNEADKCVYYRHGGGEGVILCLYVDDILIFGTNLEVINEVKSFLSQNFDMKDLGVADVILNIKLIRGENGITLLQSHYVEKILNRFGYIDSKPSPTPYDPSLLLRKNKRIARNQLEYSQIIGSLMYLASATRPDISFAGYSDSNWISDVDEIKATSGYVFTLGGGAVSWKSCKQTILTRSTMEAELTALDTATVEAEWLRDLLMDLPVVEKPVPAILMNCDNQTTCEKTIEVCQEIKKLRSYNVGLHPNSEKPGRSLHEGTITKCDRQCIEGDGFETHWRQRGRVAAATGGAKGEGGMVEGVDQGRIYRQRPRGAMARLGASGAWWQQPRGGGGLVQILRPQRRQQRMAQGSQ

SEQ ID NO: 20211 - protein, 796 aa, Oryza sativa
  Clone ID: TF_OSC900421j.C1.p3.gm
MELSRGRHIQLGVAGPRSPAGPLRARPLNRRSHPHAKARTRDRGRWHQRRRNTSAISSEAAAPAGRLRALPLPSRDAHARRRGAAAESRGDYSIPLAGVHRRSGEQVSGTSTFNVLHREKAAIRVTLWLTAMKCFWVSTGKPEGVLTAEQQKQFEEATTLFVGCILSVLGDRLVEVYMHMTDAKKLWDALNTKFGATDASNDLYIMEQFYDYKMADNRSVVEQAHEIQTMAKELELLKCVLPDKFVAGCIIVKLPPSWRSFGTALKHKRQEYSVEGLIASLDVEEKAREKDAASKGDGGQSSANVVHKAQNKSKGKYKAQQTTNFKKQKKNNNNPNQDERTCFVCGQVGHLVRKCPQRKGMKAPAGQTSKSANVTIGNTGDGSGYGNLPTVARGSTVLMGNGSHASVHGVGTVDLKFTSGKIVQLKNVQHVPSIDRNLVSGSRLTRDGFKLVFESNKVVVSKHGYFIGKGYECGGLFRFSLSDFCNKSVNHICGSVDDEANVWHSHYWKEAVCSEMDSIIANGTWEVTERPYGCKPVGCKWVFKKKLRPDASHGLLVHQMDVKTAFLNGELDEEIYVDQPDGFVVEGFAVNEADKCVYYRHGGGEGVILCLYVDDILIFGTNLEVINESHYVEKILNRFGYINSKPSPTPYDPSLLLRKNKRIARNQLEYSQIIGSLMYLASATRPDISFAVSKLSRFTSNPGDDHCEDVVLQSILERTHLCELDCWSQSMKILDYSIPLAGVHWRSGEQVSGTSTFDVLHREKAAIRFLGSASRDCSLFVRDGSPSSSLACFVPS

SEQ ID NO: 20212 - protein, 318 aa, Oryza sativa
  Clone ID: TF_OSC400972j.C1.p1.fg
MGINQPMLLFEDPPQASRNKGRVQASLKPEDYTINLNHLKQYSSNERCHLTPAKRRINVTCYRCGEEGHCALDCPKKKLGNGQVRNIPRHPKRKMRAGIPPKPMPHSLYPKPMYQQFRRQGTTPHWWKGKRKRKASSRITYAELNLSKMGIEIGDLPEDVEELQLWQRKRDGCCFSCGQFGHYAIGCTQDTNEEQETLPSQIGPEKDRVPDPSKEVSKIKACSRCGEIGHYGSNCITQCPYCDEDHPNGECPTTKITCFLCEKTDHVPQDCQLSPLLTKTAEVQRVSLRFAHRLMTSRSHEDPGFPTFDLHVCLSNNI

SEQ ID NO: 20213 - protein, 212 aa, Oryza sativa
  Clone ID: TF_OSC900146j.C1.p24.fg
MWNGWPGLAWDELGPRSGCQFGLNHRRPWVKAGLKRLCNNMANNEKGNKVRSQDKGTSSSRLNEAPDTSCVAVVQHLINQNRLLKELLQQHQTPILNPSQMQPQVQLEAVQALTPQPQQPVDKTEASICVVPLDVPAQQPRNQVQDEEPECKKVIVCYNCSEEGHYSRNCPQPKRNPRHHSGHYARRRHDHNIRVTGANAEPVKPSASQKQS

SEQ ID NO: 20214 - protein, 324 aa, Oryza sativa
  Clone ID: TF_OSC400299j.C1.p12.fg
MAAAVPTGCYKCGRPGHWSRDCPSEPAGAGAASTDNPNPNPNPKPSASRFAPYPRPRFGKSAAAAAAAEGEDGSGGQAQGKKKKKERATRPKLTPDLLLSDDGLGFVLRYFPKAFKPRARPGHEVEDLGNLIKLYTDWHSRLIPYYSFDQFVRKVEKVGASNRVRRCVSELRDRVARGGDPTLLHEPPVEVIPEGEPDGATAEDPIFGTEVPATENHGVDQVQEDIDIPVESNDVDPMQEDLLNEIYNKEADEPQIPAVGGTAEETTPAMAPKEAKPQDDPPREAQNQPGKIQLTEEQRARMEANRLRALERAAAARARASQPA

SEQ ID NO: 20215 - protein, 355 aa, Oryza sativa
  Clone ID: TF_OSC10205j.C1.p1.fg
MADNKKGSMVRNQDVGTSSSRVNEAPDTSCMAVVQHLINQNKLLIEILQQHQTPILNPSQMQPQVQLEAVQALTPQVSAPPASQQAHRAMPLVDSKEARIICFICVEQGHYARNRPQQKRKAPMRTEDEVRKMTITGTEWPPPGMTKRQRRNFFRGAPQLTEHLLANGGRVSDSEDSDQVSSRDEDEKSLQGFNQNKKEHKACSRCGEIGHFASSCVTTCVPCEEDHPPDECPTSRITCFLCEGTNHVPKDCQFSFLLTKKMANQPASYNGEKHQGNPNPRQDYSFSLTPVPRQRNQNGKRKCQVWKDICCFNCQEVGHFADMCPKPRNIFASTSVHATPLNQKLAPQRIVIHAS

SEQ ID NO: 20216 - protein, 504 aa, Oryza sativa
  unsure (1)..(504): unsure at all Xaa locations
  Clone ID: TF_OSC12275j.C1.p1.np
LKTEPPTFAIAIDPMEASDWLRTVEKKLGLIQCTDQERVGFATHQLVGPASEWWNSYEASRPEGHTITWNEFQSCYFHGSIHHGVPSGNITLRKREFRYLKQGDLTVTEYLHEFYRLAHYAPEDVETDEDKQEKFLQGLKDEAVQLLLEDYEDFEKLVDKAMQLESEHNRMTNCKRRIVNIPVFPCGNQRQRTEPLQITGSSVVHQEFPRQEDGHNADNNISNTNDDDVTTNNHASCPNSDHSNQACNVNIIHQDVDDSINDGTQNDNPSNWDSEKDSDGDSNYGTTDANVSKDFQPPIPTPSQNDRPQTDSSAKKTLICYNCKEPGHYSRDCLQPRQSRPPHYRQFTRSRHPNRIVVTGANAVPVSLKGSRLKYHIVTRSIHNSRSEEYLVDKVDAKDMNYAKSGTEAPSSGAATQSKSAKGSTRDKSGEEKIPSATGDRAKQSRVEKFCXASLLXKTRRKKSTKKRRPPNLSSCXPPESRGRDSCKGGGFVTSXXIHPKIKN

SEQ ID NO: 20217 - protein, 265 aa, Oryza sativa
  Clone ID: TF_OSC13326j.C1.p2.gm
YLHEFYRLAHYAPEDVETDEDKQEKFLQGLKDELAVQLLLEDYENFEKLVDKAMQLESEHNRMTNCKRRMVNNPVFPGGNQRQRTEPLQITGSSVVYQEFLPQEDERNADNNNSTTNADNTTNHHGSCPIHDHLDQACNVNSIHQDIDDSINEGTQNDNPSNFDSEKDSNGDSNYGTTDANVSKDFQPPTPTPSQNDRPQTDSSAKKTLICYNCKEPGHYSRDCLQPRQNRPPHYRQFTRSRHSNRIVVTGANAVPVRPRVNQNP

SEQ ID NO: 20218 - protein, 501 aa, Oryza sativa
  Clone ID: TF_OSC14131j.C1.p1.np
VIWQRVGALLLGAQFRLPVPGIPAVGGIGSVLLSKARMGWKLCHVFRPYTVVMDNTGNKGYGNDGSDDSRTQANGNERSINETSPELIQVVVNQTNMLATAFQLLQNWNNPAGATNVQVPTVQQQCKLSEFLKTEPPTFAIAVDPMEASDWLRTIEKKLGLIQCTDQERVGFATHQLVGPASEWWDSYEASRPEGHTITWNEFSSVFRRSHVPAGMITLRKREFRYLKQGDLTVTEYLHEFYRLAHYAPEDVETDEDKQEKFLQGLKDELAVQLLLEDYEDFEKLVDKAMQLESEHNRMTNCKRRIVNIPVIPCGNQRQRTEPLQITGSSVVHQEFLLQEDGRDADNNTSNTNDDDTTNNHGSCPISDHSNKACNVSSIHQDVNDSINVGTQNDNLSNFDTEKDSNGDSNYGTTDANVSKDWQPPIPTPSQNDRPQTDSSAKKTLICYNCKEPGHYSRDCLQPRQNRPPHYRQFTRIRHPNPIGGTGANTVPVRPCGNQKP

SEQ ID NO: 20219 - protein, 446 aa, Oryza sativa
  Clone ID: TF_OSC15236j.C1.p1.fg
MDNTGNKGYGNDGSDDSRTQANGNEKSINETSPELIQIVVNQTNMLATAFQLLQNRKNPAGATNVQVPTVQRQCKLSEFLKTDPPTFAIAVDPMEACDWLRTVEKKLGLIQCTDQERVVFATHQLVRPASEWWDSYEASRPEGHTITWDEFSAVFKRSHVPVGMITQRKREFRYLKQEDLTVTEYLHEFYCLAHYAPEDVETDEDKQEKFLHGLKDEIAVQLLLEEYEDFEKLVDKAIQLESEHNRMKNCKRRIVSIPVFPCGNQRQRTEPLQITGSSVAHQEFLPQEDGHNADNNISNTNDDDTTNNHASCPISDHSNQACNVNIIHQGVDDSINDGTQNDNPSNCDSEKDSNGDSNYGTTDANVSKDFQPPIPTPSQNDRPQTDSSAKKTLICYNCKEPGHYSRDCLQPRQSRPPHYRQFTRSRHPNRIVVTGANAVPVRPRVN

SEQ ID NO: 20220 - protein, 787 aa, Oryza sativa
  Clone ID: TF_OSC15753j.C1.p3.np
MDNTGNKGYGNDGSDDSRTQANGNERSINETSPELIQVVVNQTNMLATAFQLLQNWNNPAGATNVQVPTVQQQCKLSEFLKTEPPTFAIAVDPMEASDWLRTIEKKLGLIQCTDQERVGFATHQLVGPASEWWDSYEASRPEGHTITWNEFSSVFRRSHVPAGMITLRKREFRYLKQGDLTVTEYLHEFYRLAHYAPEDVETDEDKQEKFLQGLKDELAVQLLLEDYEDFEKLVDKAMQLESEHNRMTNCKRRIVNIPVIPCGNQRQRTEPLQITGSSVVHQEFLLQEDGRDADNNTSNTNDDDTTNNHGSCPISDHSNKACNVSSIHQDVNDSINVGTQNDNLSNFDTEKDSNGDSNYGTTDANVSKDFQPPIPTPSQNDRPQTDSSAKKTLICYNCKEPGHYSRDCLQPRQNRPPHYRQFTRIRHPNRIVVTGANTVPVSLKGSKPKDLIVPRSVRNPRHEVGNLYEVDSKDMNYESSGTESPSSSAATQSKSAKGSTRDKSGEEKIPSAPRARAPLTGGPARPLTGGTHLSSPSPAAPAAARALAPPPPPNPPLPAFPARHKEGRITPRVSLSRFPLFSLSLSLGFVRFESRNHRRRLQWRPRSPRAIPSSPAPSLPSDAIKSSLVLRSSVSAARRSSRRRFRARPCSSLSAVAAELRFAAVVAPVLLPTRPTSIGFPSGCRPRPPLRFARRAGAPSSSSSRTARRFPPLRPPFSSSSLSRGEPDRRSLSPFPPLSRAPLHRAESPAVTIGARARRSRRPCRRVGFSPLLLLGLLGPFPLLRVF

SEQ ID NO: 20221 - protein, 798 aa, Oryza sativa
  Clone ID: TF_OSC16364j.C1.p1.np
MDNTGNKGYGNDGSDDSRTQANGNERSINETSPELIQVVVNQTNMLATAFQLLQNWNNPAGATNVQVPTVQQQCKLSEFLKTGPPTFAMAVDPMEASDWLRTIEKKLGLIQCTDQERVGFATHQLVGPASEWWDSYEASRPEGHTITWNEFSSVFKRSHVPAGMITLRKREFRYLKQGDLTVTEYLHEFYRLAHYAPEDVETDEDKQEKFLQGLKDELAVQLLLEDYENFEKLVDKAMQLESEHNRMTNCKRRIVNIPVFPCGNQGQRTEPLQITGSSVAHQEFPPQEDGHNADNNISNTNDDDVTTNNHASCPNSDHSNQACNVNIIHQDVDDSINDGTQNDNPSNWDSGKDSDGDSNYGTTDANVSKEFQPPIPTPSQNDCPQTDSSAKKTLICYNCKEPGHYSRDCLQPRQSRPPHYRQFTRSRHPNRIVVTGANAVPVSLKGSKPKDLIVPRSVRNPHKEYHLLEVDAKDMNYEKSGTEVPSSSATIQSKSARGATREKSGEEKIPSATPARAPLTGGPARPLTGGAHPSSPPRAAPAARPCPRPPPPPNPPHPAVPARHKEGEITPRDSLSLPPFFPLSLSLGFVWNLSRNPRRRHLEPRSPRRFPSHPAALSPSRRYIIVPRASLLRPPLAALSLRRNRARRRPLSPPSPTSSGSPPPSLRTSSPLGVASFVAASSSTPSAPPFRPPTAGTSPSSSINRAAAPPLRSSFPPSSSSRGEPRTAFASLFPPLSRPRSAAPLAAATIGARVRRLPSAVPARPPSGAPRGCQVGPAVSRPRPRVRLTRGTHGAGRR

SEQ ID NO: 20222 - protein, 449 aa, Oryza sativa
  Clone ID: TF_OSC23023j.C1.p1.fg
MDNTGNKGYGNDGSDDSRTQANGNEKSINETSPELIQIVVNQTNMLATAFQLLQNWNNPAGATNVQVPTVQQQCKLSEFLKTEPPTFAIAVDPMEASDWLRTIEKKLGLIQCTDQERVGFATHQLVGPASEWWDRYEASRPEGHTITWNEFSSVFRRSHVPAGTITLRKREFRYLKQGDLTVTEYLHEFYRLAHYAPEDVETDEDKQEKFLQGLKDELAVQLLLEDYENFEKLVDKAMQLESEHNRMTNCKRRMVNNPVFPGGNQRQRTEPLQITGSSVVYQEFLPQEDERNADNNNSTTNADNTTNHHGSCPIHDHLDQACNVNSIHQDIDDSINEGTQNDNPSNFDSEKDSNGDSNYGTTDANVSKDFQPPTPTPSQNDRPQTDSSAKKTLICYNCKEPGHYSRDCLQPRQNRPPHYRQFTRSRHSNRIVVTGANAVPVRPRVNQNP

SEQ ID NO: 20223 - protein, 520 aa, Oryza sativa
  Clone ID: TF_OSC28035j.C1.p1.fg
MDISRTNEGYTSCGPVVEMSWHRAGVLLLGAHSCLPVPEVPAVGGVGSVLLFMARMGWELCHVFRPYTVVMDNTGNKGYGNDGSDDSRTQASGNEKSINETSPELIQIVVNQTNMLATAFQLLQNWNNPAGATNVQVPTVQQQCKLSEFLKTEPPTFAIAVDPMEASDWLRTVEKKLGLIQCTDQERVGFATHQLVGPASEWWDSYEASRPEGHTITWNEFSSVFKRSHVPAGMITLRKREFRYLKQGDLTVTEYLHEFYRLAHYAPEDVETDEDKQEQFLQGLKDELAVQLLLEDYEDFEKLVDKAMQLESEHNRMTNCKRRMVNIPVFPCGNQGQRTEPLQITGSSVAHQEFPPQEDGHNADNNISNTNDDDVTTNNHASCPNSDHSNQACNVNIIHQDVDDSINDGTQNDNPSNWDSEKDSDGDSNYGTTDANVSKDFQPPIPTPSQNDRPQTDSSAKKTLICYNCKEPGHYSRDCLQPRQSRPPHYRQFTRSRHPNRIVVTGANAVPVRPRVNQNP

SEQ ID NO: 20224 - protein, 316 aa, Oryza sativa
  Clone ID: TF_OSC28035j.C1.p3.gm
MDISRTNEGYTSCGPVVEMSWHRAGVLLLGAHSCLPVPEVPAQGDLTVTEYLHEFYRLAHYAPEDVETDEDKQEQFLQGLKDELAVQLLLEDYEDFEKLVDKAMQLESEHNRMTNCKRRMVNIPVFPCGNQGQRTEPLQITGSSVAHQEFPPQEDGHNADNNISNTNDDDVTTNNHASCPNSDHSNQACNVNIIHQDVDDSINDGTQNDNPSNWDSEKDSDGDSNYGTTDANVSKDFQPPIPTPSQNDRPQTDSSAKKTLICYNCKEPGHYSRDCLQPRQSRPPHYRQFTRSRHPNRIVVTGANAVPVRPRVNQNP

SEQ ID NO: 20225 - protein, 266 aa, Oryza sativa
  Clone ID: TF_OSC32072j.C1.p1.fg
YLHEFYRLAHYAPEDVETDEDKQEKFLQGLKDELAVQLLLEDYEDFEKLVDKAMQLKSEHNRMTNCKRRIVNIPVFPGGSQRQRTEPLQITGSSVVHQEFLPQEDERNADNNTSNTNDDDTTNNHGSCPISDHSNKACNVSSIHQDVNDSINVGTQNDNLSNFDTEKDSNGDSNYGTTDANVSKDFQPPIPTPSQNDRPQTDSSAKKTLICYNCKEPGHYSRDCLQPRQNRPPHYRQFTRSRHPNRIVVTGANAVPVKPSASQKQP

SEQ ID NO: 20226 - protein, 1073 aa, Oryza sativa
  Clone ID: TF_OSC400220j.C1.p47.fg
MARGSAPLDGSVLPPSRIVSERQAGLPRRFMPESATGREIVSLGEGCPAPHYPGRSVFFLPFAMAWLVPPFSFFFMDVLEFYDLQMAHLTPNAVMTLAIFAHLCEMFIGVQPVSPPSVVGGCYFQLRGPVLNRYIPCVLRKKWDDWKSDWFYTPLADEARLRLPSQPLAQAYSWRVPVDLGDGYDAVLDRLAGLRSQGLTGAMEYTGSEDCMRTHQGVRWDWAPEDFKIVVQRVLNLSSMETSLIPQGVLPLCSDPDRASILTIMQAVGASEERAPRGHDGAGGSRRGEQSTPGGGRASGPRDGGPGSGRPADTRGKRKQEGTPPPSPPRGGGAARASSRRPEVATPTSQPEGERKKKRLRKMGGTEPSRGNLISPPRWSFNRPPRSEIPSRPSRHSKSGQSKAEDPATTEARRRESDRREAADRLREAEEAAQQLVDKAIRLEDKKNRMDNRKRKIIVFQEAQDSSQRQRIKPLQIGESFSAGQEQSQQLGMNGEINSETNASNEDNDEQATQSVSFQQDQSREDNSNGREQRVCFNCYKPGHFVRECPKPKHQQPQVNNIVVTGANAVPVASSRVASSSVTAQLPVSKQHEFPGVTATTSEAARDEAAGASLGPTPSGDAQDKPGPGDIPESGTSIGGPSRAASSPRRLFPTPSVAPLSAEPLLQALAVANTTVLDGLSAQVEALQAERAELDAAWARVEEGRRSVEAMVEVGRKAHRRHVSELEARRKVLGEIAKEVEEERGAALIATTVMNEAQDTLRLQYRSWEAELGKKLDAARMVLDAAAARERRAAETEVASRRREEALEARAMALEERACAVERDLADREAAVAIREVTLAVHEAACAEEESALRLREDALTERERALEEAEAAAQRLADSLSLREAAQEEQARRNLESARAERAALNQRAAELEAQARELDARARSGGAATGDSDLAARLAAAEHTIADLQGALDSSTGEVEALRLAGEIGPSMLRDAVSRLDRAGRQAGLWGGRTVKYAANQGGLAQRLSEMAGTLQRLPEELEGTIKSSSRDLARGAVELVLASYQARDPDFSPWTALDEFPPGTEDGARA

SEQ ID NO: 20227 - protein, 502 aa, Oryza sativa
  Clone ID: TF_OSC401338j.C1.p7.fg
MSWQRVGALLLGAQSCLPVPGVPAVGGIGSVLLSMARMGWKLCHVFRLYTVVMNNTGNKGYGNDGSDDSRTQANGNERSINETSPELIQVVVNQTNMLATAFQLLQNWNNPARATNVQVPTVQQQCKLSEFLKTGPPTFAMAVDPMEASDWLRTVEKKLGLIQCTDQERVGFATHQLVGPASEWWDSYEASRPEGHTITWNEFSSVFKRSHVPAGMITLRKREFRYLKQGDLTVTEYLHEFYRLAHYAPEDVETDEDKQEKFLQGLKDELAVQLLLEDYEDFEKLVDKAMQLKSEHNRMTNCKRRIVNIPVFPGGSQRQRTEPLQITGSSVVHQEFLPQEDERNADNNTSNTNDDDTTNNHGSCPISDHSNKACNVSSIHQDVNDSINVGTQNDNLSNFDTEKDSNGDSNYGTTDANVSKDFQPPIPTPSQNDRPQTDSSAKKTLICYNCKEPGHYSRDCLQPRQNRPPHYRQFTRSRHPNRIVVTGANAVPVKPSASQKQP

SEQ ID NO: 20228 - protein, 1069 aa, Oryza sativa
  Clone ID: TF_OSC401835j.C1.p9.fg
MAGFADALRPDKFTGVYFKRWQIRVTLWLTAMKCFWVSTGKPMGVLNVDQQKEFDEATTLFVGCILSMLGDRLVEVYMHMTDAKELWNALNTKFGATDASNDLYIMEQFHDYKMADNRSVVEQAHEIQTMAKELELLKCVLPDKFVAGCIIAKLPPSWRGFGTALKHKTQEYSVEGLIASLDVKEKSREKDAASKGDGGQSTANVVHKAQNKSKGKYKAQQATNFKKKNNSNNPNQDEMTCFVCGQPGHLVRKCPQRKGMKAPAGQTSKSANVTIGNTGDGSGYGANVHVCADISLFSSYQVARGSTVLLGNGLHASVHGVGTVDLKFTSGKIVQLKNVQHVPSIDRNLVSGSRLTRDGFKLVFESNKVVVSKHGYFIGKDYECRGLFRFSLSDFYNKSMNHICGSVGDEANAAEERNLAPLELLHSDLCEMNRVLTKGGKRYFMMLIDDATRFCYVYLLKTKDEALDYFKIYKAEVENQLDRKIKRLRSDRGGEFFLNEFDLFCEEHGIIHERTPPYSPESNGIAERKNRTLTDLVNAMLDTAGLPKAWWGEALLTSNHVLNRVPNRNKDKTPYEIWIGRKPSLSYLRTWGCLVKVNVPITKKRKLGPKTVDCVFLGYAHHSIAYRFLIVKSESISEAYASPDADYWKEAVRSEMDSIIANGTCEVIERLYRCKPVGCKWVFKKKLRPDGTIEKYKARLVAKGYTQKEGEDFFDTYSPVARLTTIRVLLSLVASHGLLVHQMDVKTAFLNGELDEEIYMDQPDGFVVEDQEGKVCKLLKSLYGLKQAPKQWHEKFDKTLTSAGFAVNEADKCVYYRHGGGEGVIMCLYVDDILIFGTNLEVINEVKSFLSQNFDMKDLGVADVILNIKLISGENGITLLQSHYVEKILNHFGYIDSTMELGLHYSGYPAVLEGYSDSNWISDVDEIKATSGYVFTLGGGAVSWRSCKQTILTRSTMEAELTALDTATVEAEWLHDLLMDLPIVEKPVPAILMNCDNQTVIVKVNSSKDNMKSSRHVKRRLKSVRKLRNSGVITLDYIQTARNLADPFMKGLSRNVIDNASKEMGLRLV

SEQ ID NO: 20229 - protein, 527 aa, Oryza sativa
  Clone ID: TF_OSC401912j.C1.p1.fg
MDEVGGRWTFSRANEGYTSCGPVVEMSWHRVGALLLGAQSCLPVPEVPAVGGIGSVLLCMARMGWKLCHVFRLYTVVMDNTGNKGYGNDGSDDSRTQANGNERSINETSPELIQVVVNQTNMLATAFQLLQNWNNPAGATNVQVPTVQQQCKLSEFLKTGPPTFAMAVDPMEASDWLRTIEKKLGLIQCTDQERVGFATHQLVGPASEWWDSYEASRPEGHTITWNEFSSVFKRSHVPAGMITLRKREFRYLKQGDLTVTEYLHEFYRLAHYAPEDVETDEDKQEKFLQGLKDELAVQLLLEDYENFEKLVDKAMQLESEHNRMTNCKRRIVNIPVFPCGNQGQRTEPLQITGSSVAHQEFPPQEDGHNADNNISNTNDDDVTTNNHASCPNSDHSNQACNVNIIHQDVDDSINDGTQNDNPSNWDSGKDSDGDSNYGTTDANVSKEFQPPIPTPSQNDCPQTDSSAKKTLICYNCKEPGHYSRDCLQPRQSRPPHYRQFTRSRHPNRIVVTGANAVPVRPRVNQNP

SEQ ID NO: 20230 - protein, 644 aa, Oryza sativa
  Clone ID: TF_OSC401952j.C1.p2.fg
MYTSDQSKSIRIAEPSDMGKPSNVPKSVFQFLKFAQQLKCGMVGLGWLGTSWDPGSGCQFGLNHRRPWVKAGLKRLCNNMDNTGNKGYGNDGSDDSRTQANGNERSTNETSPELIQVVVNQTNMLATAFQLLQNWSSPAGATNVQVPTVQQQCKLSEFLKTEPPIFAIAVDPMEASDWLRTIEKKLGLIQCTDQERVGFATHQLVGPASEWWDSYEASRPEGHTITWNEFSSVFRRSHVPAGMITLRKREFRYLKQGDLTVTEYLHEFYRLARYAPEDVETDEDKQEKFLQGLKDELAVQLLLEDYEDFEKLVDKAMQLESEHNRMTNCKRRIVNIPVIPCGNQRQRTEPLQITGSSVVHQEFLPQEDGRNADNNTSNTNDDDTTNNHGSCPISDHSNKACNVSSIHQDVNDSINVGTQNDNLSNFDTEKDSNGDSNYGTTDANVSKDFQPPIPTPSQNDRPQTDSSAKKTLICYNCKEPGHYSRDCLQPRQNRPPHYRQFTRSRHSNCIVVTGANAVPAKSEIFNSVSDATRSEKCKHRLPGNAMTWEDDPMGKNTSSGNLSEVDSEDMNHEKFWNGSITELPQPSLSQPKGAPWSKLGEEKIPSATGGQAKQFRVVKFCWKFVKTQRKKSDKKRRPPNLSSC

SEQ ID NO: 20231 - protein, 538 aa, Oryza sativa
  Clone ID: TF_OSC401984j.C1.p8.fg
MSWQRVGALLLGGSVLPACPGCPGRRGIGSVLLFMARMGWELCHVFRPYTVVMDNTGNKGYGNDGSDDSRTQANGNEKSINETSPELIQIVVNQTNMLATAFQLLQNRNNPAGATNVQVPTVQQQCKLSEFLKTGPPTFAMAVDPMEASDWLRTIEKKLGLIQCTDQERVGFATHQLVGPASEWWDSYEASRPEGHTITWNEFSSVFKRSHVPAGMITLRKREFRYLKQGDLTVTEYLHEFYRLAHYAPEDVETDEDKQEKFLQGLKDELAVQLLLEDYEDFEKLVDKAMQLESEHNRMTNCKRRIVNIPVFPGGNQRQRTEPLQITGSSVAHQEFPPQEDGRNTDNNTSNTNDDDTTNNHGSCPISDHSNKACNVSSIHQDVNDSINVGTQNDNLSNFDTEKDSNGDSNYGTTDANVSKDSQPPIPTPSQNDRPQMDSSVKKTLICYNCKEPGHYSRDCLQPRQSRPPHYRQFTRSRHPNRIVVTGANAVPVDAKDMNYEKSGTEVPSSSATIQSKSARGATREKSGEEKIPSATGD

SEQ ID NO: 20232 - protein, 514 aa, Oryza sativa
  Clone ID: TF_OSC407179j.C1.p2.np
MDNTGNKGYGNDGSDDSRTQANGNERSTNETSPELIQVVVNQTNMLATAFQLLQNWNNPAGATNVQVPTVQQQCKLSEFLKTEPPTFAIAVDPMEASDWLRTIEKKLGLIQCTDQERVGFATHQLVGPASEWWDSYEASRPEGHTITWNEFSSVFRRSHVPAGMITLRKREFRYLKQGDLTVTEYLHEFYRLARYAPEDVETDEDKQEKFLQGLKDELAVQLLLEDYEDFEKLVDKAMQLESEHNRMTNCKRRIVNIPVIPCGNQRQRTEPLQITGSSVVHQEFLPQEDGRNADNNTSNTNDDDTTNNHGSCPISDHSDKACNVSSIHQDVNDSINVGTQNDNLSNFDTEKDSNGDSNCGTGDANVSKDFQPPIPTPSRNDRPQMDSSAKKTLICYNCKEPGHYSRDCLQPRQNRPPHYRQFTRIRHPNRIVVTGANAVPVSPKGSKPKDLIVPRSVRNPHKEYHLLEVDSEDMNHEKFGNGSITELPQPSLSQPKGAPWSKSGEEKIPSATGG

SEQ ID NO: 20233 - protein, 203 aa, Oryza sativa
  Clone ID: TF_OSC413099j.C1.p8.hg
MKNCKRRIVSIPVFPCGNQRQRTEPLQITGSSVAHQEFPPQEDGHNADNNISNTNDDDTTNNHASCPISDHSNQACNVNIIHQGVDDSINDGTQNDNPSNCDSKKDSNGDSNYGTTDANVSKDFQPPIPTPSQNDRPQTDSSAKKTLICYNCKEPGHYSRDCLQPRQSRPPHYRQFTRSRHPNRIVVTGANAVPVRPRVNQNP

SEQ ID NO: 20234 - protein, 264 aa, Oryza sativa
  Clone ID: TF_OSC900009j.C1.p8.fg
MPKPPLSPEEEAKFEAADCLFCGALISVLTDNIVDVYMHMPLGKNMWDALEAKFGLSDAGSELYIMEQFYDYKMMLAKELENNNCELPDKFVAEGIIAKLPPSCSDFATSLKHKRQGFSVTDLIGFLGVEEKGRAKDNRGKVIEGGSTANLVQKTNPHASYNNKKKVKPDVKPKATTNFKKKGKGKAKSDCFVCGKPGHWVKNCPERKDKKSANMVISEGGETLGYGACLATMTQVGPYPLSFSLGLGSKLVSRQGFPNPGVRT

SEQ ID NO: 20235 - protein, 371 aa, Oryza sativa
  Clone ID: TF_OSC101565j.C1.p1.fg
MVNTRASGSENNNNEGNPTLAQVLAQQTQLMNMMIQQMQNQLNQGNNNAPLPQNKLADFLLVRPPTFSSTTNPVEAGDWLHTIEKKLELLQCTDQEKVVFASHQLQGPASEWWDHFRMNRAEGQPITWEEFTEGFKKTHIPVGVVALKKREFRALKQKDHTVAEYLHEFNRLARYAPEDVRTDEERQEKFLEGLKDELSVTLISHDYVDFQQLVDKAIRLEDKKNRMDNRKRKMTVFQEAQGSSQRQRIKPLQIGESFPAGPGQSQQLNIGGEIKLETNESKEVNIEQANQPVLVQQGQSQENNSSGREQQVCFNCYKPGHFARECPKPKHQQPQGQVNNIVVTGANAVPVASSRVVSSSVTTQPPVSKRQ

SEQ ID NO: 20236 - protein, 394 aa, Oryza sativa
  Clone ID: TF_OSC14497j.C1.p1.fg
VACLINLNNIMNYTHQISGNLVKMVNTRASGSGNNNNEENPTFAQVLAQQTQLINLLVQQMQNQQGNNNVNPPPPQNKLVDFLRVKPPTFSSTTNPVEAGDWLHAVEKKLELLQCTDQEKVVFASHQLQGSASEWWDHFRMNRAEGQPITWAEFTEAFKKTHIPAGVVALKKREFRALKQKDRTVTEYLHEFNRLARYAPEDVRTDEERQEKFLEGLKDELSVMLISHDYEDFQELVDKAIRLEDKKNRMDNRKRKMTVFQEAQGSRQRQRIEPLQIGESFSAGQGQSQQLNIGGEIESETNESNEVNIEQANQPVPVQQDQSQENNSSGREQQVCFNCYKPGHFARECPKSKHQQPQGQVNNIVVTGANAVPVASSRVAFSRDTAQPPVSKQQ

SEQ ID NO: 20237 - protein, 371 aa, Oryza sativa
  Clone ID: TF_OSC14970j.C1.p1.fg
MVNTRASRSGNNNNEGNPTLAQVLAQQTQLMNMMIQQMQNQLNQGNNNAPPPQNKLADFLRVRPPTFSSTTNPVEAGDWLHAIEKKLELLQCTDQEKVVFASHQLQGPASEWWDHFRMNRAEGQPITWAEFTEAFKKTHIPAGVVALKKREFRALKQKDRTVTEYLHEFNRLARYAPEDVRTDEERQEKFLEGLKDELSVMLISHDYEDFQELVDKAIRLEDKKNRMDNRKRKMTVFQEAQGSSQRQRIKPLQIGEPFSAGQGQSQQLNIGGEIKSETNESNEVNIKQANQPVPVQQDQSQENNSSGRKQQVCFNCYKPGHFARECPKPKHQQPQGQVNNIVVTGANAVPVASSRVVSSSVAAQPPVSKQQ

SEQ ID NO: 20238 - protein, 371 aa, Oryza sativa
  Clone ID: TF_OSC15152j.C1.p2.fg
MVNTRASGSGNNNNEENPTFAQVLAQQTQLINLLVQQMQNQQGNNNVNPPPPQNKLVDFLRVKPPTFSSTTNPVEAGDWLHAVEKKLELLQCTDQEKVVFASHQLQGSASEWWDHFRMNRAEGQPITWAEFTEAFKKTHIPAGVVALKKREFRALKQKDRTVTEYLHEFNRLARYAPEDVRTDEERQEKFLEGLKDELSVMLISHDYEDFQELVDKAIRLEDKKNRMDNRKRKMTVFQEAQGSRQRQRIEPLQIGESFSAGQGQSQQLNIGGEIESETNESNEVNIEQANQPVPVQQDQSQENNSSGREQQVCFNCYKPGHFARECPKSKHQQPQGQVNNIVVTGANAVPVASSRVAFSRDTAQPPVSKQQ

SEQ ID NO: 20239 - protein, 371 aa, Oryza sativa
  Clone ID: TF_OSC23005j.C1.p1.fg
MVNTRASGSGNNNNEENPTLAQVLAQQTQLINMLVQQMQNQQGNNNVNPPPPQNKLADFLRVRPPTFSSTTNPVEAGDWLHAVEKKLELLQCTDQKKVVFASHQLQGSASEWWDHIRMNRAEGQPITWAEFTEAFKKTHIPAGVVALKKREFRALKQKDHTVAEYLHEFNRLARYAPEDVRTDEERQEKFLEGLKDELSVMLISHDYEDFQELVDKAIRLEDKKNRMDNRKRGRIVFQEAQDSSQRQRIKPLQIGESFSTGQGQSQQLNIGGEIKSETNESNEVNIEQANQPVPVQQDQSQENNSSGREQQVCFNCYKPGHFARECPKPKHQQPQGQINNIVVTGANAVPVASSRVASSSVTAQPPVSKQQ

SEQ ID NO: 20240 - protein, 371 aa, Oryza sativa
  Clone ID: TF_OSC28072j.C1.p3.fg
MVNTRANGSGNNNNEGNPTLAQVLAQQTQLMNMMIQQMQNQLNQGNNNAPPPQNKLTDFLRVRPPTFSSTTNPVEAGDWLHTIEKKLELLQCTDQEKVVFASHQLQGPASEWWDHFRMNKAEGQPITWAEFTEAFKKTHIPAGVVALKKREFRALKQKDRTVTEYLHEFNRLARYAPEDVRTDEERQEKFLEGLKDELSVMLISHDYEDFQELVDKAIRLEDKKNRMDNRKRRMTVFQEAQGSSQRQCIKPLQIGESSSAGQGQSQQLNIGGEIKSETNESNEVNIEQANQPVPVQQDQSQENNSSGRKQQVCFNCYKPGHFARECPKPKHQQPQGQVNNIVVTGANAVPVASSRVVSSSVTTQPPVSRQQ

SEQ ID NO: 20241 - protein, 371 aa, Oryza sativa
  Clone ID: TF_OSC29458j.C1.p6.np
MVNTRASGSGNNNNEGNPTLAQVLAQQTQLMNMMIQQMQNQLNQWNNNAPPPQNKLADFLRVRPPTFSSTTNPVEAGDWLHAIEKKLELLQCTDQEKVVFASHQLQGPASEWWDHFRMNRAEGQPITWADFTEAFKKTHIPTGVVSLKKREFRALKQKDQTVAEYLHEFNRLARYAPEDVRTDEERQEKFLEGLKDELSVTLISHDYADFQQLVDKAIRLEDKKNRMDNRKRKMTVFQEAQGSSQRQRIKQLQIGESSSAGQGQSQQLNIGGEIKTETNESNEVNIEQANQLVPVQQDQSQENNSSGREQQVCFNCYKPGHFARECPKPKHQRPQGQVNNIVVTGANAVPVASSRVVSSSVTTQPPVSKQQ

SEQ ID NO: 20242 - protein, 343 aa, Oryza sativa
  Clone ID: TF_OSC400483j.C1.p11.fg
MVNTRASGSGNNNNEGNPTLAQVLAQQTQLMNMMIQQMQNQLNQGNNNAPPPQNKLTDFLRVRPPTFSSTTNPVEAGDWLHAVEKKLELLQCTDQEKVVFASHQLQGPASEWWDHFRMNRAEGQPITWEEFTEGFKKTHIPVGVVALKKQDVRTDEERQEKFLEGLKDELSVTLISHDYVDFQQLVDKAIRLEDKKNRMDNRKRKMIVFQEAQGSSQRQRIKPLQIGESSSAGQGQSQQLNIAGEIKSETNESNEVNIEQINQPMPVQQDQSRENNSSRREQQVCFNCYKPGHFARECPKPKHQQPQGQVNNIVVTGANAVPVVSSRVASSSVTAQPLVSKRQ

SEQ ID NO: 20243 - protein, 371 aa, Oryza sativa
  Clone ID: TF_OSC400718j.C1.p68.fg
MVNTRASGSGNNNNEGNPTLAQVLAQQTQLMNMMIQQMQNQLNQGNNNAPPPQNKLADFLRVRPPTFSSTTNPVEAGDWLHAVEKKLELLQCTDQEKVVFASHQLQGPASEWWDHFRMNRAEGQPITWADFTEAFEKTHIPTGVVSLKKREFRALKQRDHTVAEYLHEFNRLARYAPEDVRTDEERQEKFLEGLKDELSVTLISHDYVDFQQLVDKAIRLEDKKNRMDNRKRKMTVFQEAQGSSQRQRIKPLQIGESFSTGQGQSQPLNIGGEIKSKTNESNEVNIEQANQPVPVQQDQSQVNNSSGREQQVCFNCYKPGHFARECPKPKHQQPQGQVNNIVVTGANAVPVASSRVVSSSVTTQPPVSRQQ

SEQ ID NO: 20244 - protein, 367 aa, Oryza sativa
  Clone ID: TF_OSC401076j.C1.p10.fg
MVNTRASGSGNNNNEGNPTLAQVLAQQTQLMNMMIQQMQNQLNQGNNNAPPPQNKLTDFLRVRPPTFSSTTNPVEAGDWLHTIEKKLELLQCTDQEKVVFASHQLQGPASEWWDHFRMNRAEGHPKFTEAFKKTHIPAGVVALKKREFRALKQKDRTVTEYLHEFNRLARYAPEDVRTDEERQEKFLEGLKDELSVTLISHDYEDFQELVDKAIRLEDKKNRMDNRKRRMTVFQEAQGSSQRQCIKPLQIGESFSAGQGQSQQLNIGGEIKSETNESTEVNIEQANQPVPVQQDQSQENNSSGREQQVCFNCYKPGHFARECPKPKHPQPQGQVNNIVVIGANAVSVASSRVVSSSVTAQPPVSRQQ

SEQ ID NO: 20245 - protein, 734 aa, Oryza sativa
  unsure (1)..(734): unsure at all Xaa locations
  Clone ID: TF_OSC401130j.C1.p19.np
ALVAAVVAVGSAAPRRRCSRRRRSPSPPSGAKSSPSPSTASPPPKTVGAPSPSSTRRASPLPPRPAVRWSSAAVLVTGEFAASSSTXAHGGRWGVHALFYKGDYDPGMVRCGGLCYARGTVTAPFRGTVVVLRHMVTXCGAVSCGYSVAYLLCGLLSMSYAHCNNQSTSVETSCEGEDVWLIPQLSCLWEWSRSFARFYFSAAIFFLVRTKCLISKYLSFVNLMNLYIKLSICVPRLIPGRGFYAQISSEITSEFPGVTSWYRAISTVGXAKWSNLKDXFSENMMCEFSFLPSLEFSINHFIILSPPAFNLSSLKLVVETRRCXXGLLMEVSQVDRGRTEVPSGQDGMKFGSYLRTYAAKVSLKNSXXGRTLVACLCVGMVAFPSLEXFIDECVTILGNPNPSPPISSYLQXMVNTRANGSGNNNNEGNPTLAQVLAQQTQLMNMMIQQMQNQLNQGNYNAPPPQNKLTDFLRVRPPTFSSTTNPVEAGDWLHAIEKKAEGQPITWAEFTEAFKKTHIPAGVVALKKREFRALKQKDRTVMEYLHEFNRLARYAPEDVRTDEERQEKFLEGLKDELSVMLISHDYEDFQELVDKAIRLEDKKNRMDNRKRRMTVFQEAQGSSQRQSNDELNIEQANQLVPVQQDQSQVNNSSGREQQVCFNCYKPGHFARECPKPKHQQLQGQVNNIEVKTPKAKAKSATHEIDSIALVDRKLDATPTWRANCRNMNSAIIKGV

SEQ ID NO: 20246 - protein, 377 aa, Oryza sativa
  Clone ID: TF_OSC401143j.C1.p24.fg
MVNTRASGSGNNNNEGNPTLAQVLAQQTQLMNMMIQQMQNQLNQGNNNAPPPQNKLADFLRVRPPTFSSTTNPVEAGDWLHTIEKKLELLQCTDQEKVVFASHQLQGPASEWWDHFRMNRAEGQPITWEEFTEGFKKTHIPVGVVALKKREFRALKQKDHTVAEYLHEFNRLARYAPEDVRTDEERQEKFLEGLKDELSVTLISHDYADFQQLVDKAIRLEDKKNRMDNRKRRMTVFQEAQGSSQRQCIKPLQIGEPSSAGQGQSQQLNIGGEIKSETNESNKVNIEQANQPVPVQQDQSQENNSSGREQQVCFNCYKPGHFARECPKPKHQQPQGQVNNIVVTGANAVPVASSRVASSSVAAQPPVSKRQQFSLKP

SEQ ID NO: 20247 - protein, 398 aa, Oryza sativa
  Clone ID: TF_OSC401827j.C1.p24.fg
MEFFANHFIILSPPAFNLSSSKTLELEDANEVYLWSGNNNNEGNPTLAQVLAQQTQLMNMMIQQMQNQLNQGNNNAPPPQNKLADFLRVRPPTFSSTTNPVEAGDWLHAIEKKLELLQCTDQEKVVFASHQLQGPASEWWDHFRMNRAEGQPITWAEFTEAFKKTHIPAGVVALKKREFRALKQKDRTVTEYLHEFNRLARYAPEDVCTDEERQEKFLEGLKDELSVTLISHDYVDFQQLVDKAIRLEDKKNRMDNRKRKMTVFQEAQGSSQRQCIKPLQIGESSSAGQGQSQQLNIGGEIKSETNESKEVNIEQANQPVPVQQGQFQENNSSGREQQVCFNCYKPGHFARECPKPKHQQPQGQVNNIVVTGANAVPVASSRVVSSSVTAQPPVSKRQ

SEQ ID NO: 20248 - protein, 371 aa, Oryza sativa
  Clone ID: TF_OSC408811j.C1.p16.fg
MVNTRASGSGNNNNEGNPILAQVLAQQTQLMNMMIQQMQNQLNQGNNNAPPPQNKLADFLRVRPPTFSSTTNPVEAGDWLHTIEKKLELLQCTDQEKVVFASHQLQGPASEWWDHFRMNRAEGQPITWVEFTEAFKKTHIPVGVVSLKKREFRTLKQKDHTVAEYLHEFNRLARYAPEDVRTDEERQEKFLEGLKDELSVTLISHDYVDFQQLVDKAIRLEDKKNRMDNRKRRMTVFQEAQGSSQRQHIRPLQIGESSSAGQGQSQQLNIAGEIKSETNESNDVNIEQANQPVPVQQDQSQENNTSGREQQVCFNCYKPGHFARECPKPKRQQPQGQVNNIVVTGANAVPVASSRVASSSVTAQPLVSKQQ

SEQ ID NO: 20249 - protein, 371 aa, Oryza sativa
  Clone ID: TF_OSC411778j.C1.p1.fg
MVNTHANKSGNNNNEGNPTLAQVLAQQTQLMNMMVQQMQNQLNQGNNNAPPPQNKLTDFLRVKPPTFSSTTNPVEAGDWLHTIEKKLELLQCTDQEKVVFASHQLQGPASEWWDHFRMNRAERQPITWAEFTEAFKKTHIPVGVVALKKGEFRALKQKDHTVAEYLREFNRLARYAPEDVRTDEERQEKFLEGLKDELSVTLISHDYVDFQQLVDKAIRLEDKKNRMDNRKRKMTVFQEAQGSSQRQRIKPLQIGEPSSAGQGQSQQLNIGGEIKSETNESNEVNIEQANQPVPVQQDQSQVNNSSRREQQVCFNCYKPGHFARECPKPKHQQPQGQVNNIVVTGANAVPVASSRVVSSSVTAQPPVSKRQ

SEQ ID NO: 20250 - protein, 872 aa, Oryza sativa
  unsure (1)..(872): unsure at all Xaa locations
  Clone ID: TF_OSC4124j.C1.p4.np
VQPLPAALVASSPAPVVVVVILSSFPVVVAFPSVKPFSFVVLVPSCRSPVIVFVLASASPSIAPAASRLRPRIDAEVVPSPFVSVIPGRLRRPFVVVVPTPRCMVVSPLPRCPVLVLSVSPVPVVRLSAPSSGQSRAARAVPCAVAASSVKSRLPVAPFSNLVEGKYSSYPPLSLPPKNRSXSLSILSKSNSFSSLSPKPSFXWIDFLREERSLQSKAINRTPXSSSFVCPLSRGLPCLVALPPRAPPRRRRRPSSIRVAPPSVVAAGRRTAVRCAEVWRSPASCPPSSPATGAPPPARSEPPPPFTSSPVTVGRRLARGXVPVIICLAPGLELDLYSRDGCSEWLGLCNMGVLFSVDXNFGAEAIARSLFRCCFLFFCKYVTLIKMDFYIKLSVCVPRLILGRGFYAQISSEITSEFPGVTSWYQSHLDCRISQIVKPRTNFPETXFVKISPSSLSRILHKSFCRSLLFSLFQLEXLLNLMEKLEDVDVVNFCKSSGSRNKKMIVESKCSAVKIEXSLEPSLEPMPPKCLXRIVSRVERLLFFVCRYGCIPIIGVVHQRNNNVNPPPPQNKLADFLRVRPPTFSITTNPVEAGDWLHAVEKKLELLQCTDQEKVVFASHQLQGPASEWWDHFRMNRAEGQPITWAEFTEAFKKTHIPAGVVALKKREFRALKQKDRTVTEYLHEFNRLARYAPEDVRTDEERQEKFLEGLKDEVSVMLISHDYEDFQGLVDKAIRLEDKKNRMDNRKRGRIVFQETQGSSQRQRIKPNNEVNIEQANQPVLVQQDQSQENNSNGRGQQVCFNCYKPGHFARECPKSKHQQPQGQINNIVVTGANASSSSSGQSRAARAVPCAAAAFSVNLASPLLLFHLVE

SEQ ID NO: 20251 - protein, 371 aa, Oryza sativa
  Clone ID: TF_OSC415853j.C1.p8.fg
MVNTRASGSGNNNNEGNPTLAQVLAQQTQLMNMMIQQMQNQLNQGNNNAPPPQNKLADFLRVRPPTFSSTTNPVEAGDWLHAIEKKLELLQCTDQEKVVFASHQLQGPASEWWDHFRMNRAEGQPITWAEFTEAFKKTHIPVGVVASKKREFRALKQKDHTVAEYLHEFNRLARYAPEDVRTDEERQEKFLEGLKDELSVTLISHDYADFQQLVDKAIRLEDKKNRMDNRKRKMTVFQEAQGSSQRQRIKPLQIGEPFSAGQGHSQQLNIGGEIKSETNESKEVNIEQANQPVPVQQDQSQVNNSSGREQQVCFNCYKPGHFARECPKPKHQQPQGQVNNIVVTGANAVPVASSRVVSSSVTTQPPVSKKQ

SEQ ID NO: 20252 - protein, 784 aa, Oryza sativa
  Clone ID: TF_OSC408811j.C1.p3.fg
MASLLTLPSLSLSNPSASAAAAGAGAAPSLRLRAAFRCWALRRAGGGRWAAAGAIASPNSVLSEHAFKRLQLSDEEEEEEEGAYGSDEEGVEAVGGGEGDEDELAIARLGLPEQLVSTLEKRGITHLFPIQVSVLGGDSEGIGVSVGFVGGMSSWTVRAVLIPALDGRDLIARAKTGTGKTLAFGIPMIKQLMEEDDGRSVRRGRIPRVLVLAPTRELAKQVEKEIKESAPKLSTVCVYGGVSYNVQQNALSRGVDVVVGTPGRIIDLINGGSLQLGEVKYLVLDEADQMLAVGFEEDVETILQQLPAERQSMLFSATMPGWVKKLSRRYLNNPLTIDLVGDQDEKLAEGIKLYAIPLTSTSKRTVLSDLITVYAKGGKTIVFTKTKRDADEVSLALTNSIASEALHGDISQHQRERTLNGFRQGKFTVLVATDVAARGLDIPNVDLIIHYELPNDPETFVHRSGRTGRAGKAGTAILMFTNSQRRTVRSLERDVGCRFDFISPPAIEDVLESSAEHVIATLRGVHTESIQYFIPAAERLQEELGPNALASALAHLSGFSQPPSSRSLISHEQGWVTLQLTRDPGYGRGFFSPRSVTGFLSDVSSAAADEVGKIFLTADEKVQGAVFDLPEEIARDLLSMELPPGNTITKVTKLPALQDDGPATDSYGRFSNSDRGFRNRRSRGGGSRGGRGGWDSDGEDRFRRGGRSFRSDNDSWSDDDFGGGRRSNRSSSFGGRGSSYGSRSSSSFGGRSSSFGSRDSSRSFSGACFNCGESGHRASDCPNK

SEQ ID NO: 20253 - protein, 588 aa, Oryza sativa
  Clone ID: TF_OSC401920j.C1.p6.fg
MPLGELRRLPFRLLRSFSPLPGRPLARWADAAITVVVVVLPASGFNTQNSLEIWVKFLGVTKWYQSQLDFVKPWRINRQLRVCSEVKSSIKLHAAKSGKQMVSVRGNFNGSGSRQFHGSTQLNSISFPRQPLKDQPQSQVMANQTQTVEELLQQMRRRYQIYLMQQMQRQCQEPRQVHQPQMQVQVPARNLNQSQEFPISAPKTPVKMMSRSPKITSANSPSDQRKISATCYDCGEQGHYVRNCPWKVFARSPEKDEKQCPGSNQAPSQSTDKKDGTLQRNSGANRTVIWKMDNGRTMIITGSEFTPEDAARIPKRRRGRNTFRGARQLTRHLIKYGPPRPEDDESGERFSADDNDDNDDDNDDNDDATLDSFRERELKCKACARCGIVGHTASLCLPTCRCGEYTHYSDACPLRKVTCFLCEGTDHVPKDCQLNAVLAMTKKEQGATVQPIRQPMVVDNNSLNPSTLSPTTAPVEANLGRSNVARDVHESLCVPVSAAKVHNQKPAPRDPASRFCRNCRKPGHRFSDCPLPRAAKAVRRDSQVTSTAHDTNRHLNVQPPPQRIIVKGTVKGHIVPPAIVSSLQHQHQ

SEQ ID NO: 20254 - protein, 914 aa, Oryza sativa
  Clone ID: TF_OSC404332j.C1.p20.fg
MAQRWRSRARRDPDVDDEEGSPPERRRRGARSGSDDEEAGNEDLSLEIVARAARRRRRREASAGFAADAFSSGDEIDEDAVVELGEADPSSRKRRKEKKKRRKEKRKQRKGAPPEGSPSTAAADKESQVAGTQEGQTGTAQSVLTEDGPDVPLSDNIVLRKLLRIPRYFDPGETLLETCFNCGEEGHVAVNCPMEKRKRPCFVCGLFGHNSKQCTQVGLPSSKALLLGDLDRFQTSSSLITHIYLPLPMLLACVAWPANFRNQTFVNHFCRVKTVSSAKKEVILRKTALKSTIGILNSLLFVYDVENQVMICLDVPMIIHAMMLRKVIYVAPTSLIFVQKKLVVIIVPNLVILVWDVPSNVGKLVPRQLQLCVTNVARKATSHVGAQRTPSRKKGKGKKDFGTRSAPHDARKTSKRKSPLFEERRNSSHFKSKARGGWIADDADDQPYKKCKPNVWASPSTPKKQYNNHQFSSGGDYSTPQSSRWQKHGFASPSATYSPNTRKHSFSSSRFASNTHVRLHGQPTLELFAASNLTSPNDGSQCSLIASETEEMCVSGCIIELELYGLLALEAEERHASGHRVGEVGLKGELTSSVASSYGPRNSASERAAAHTCGLRLFAAADDFEIDWLFESSNRLRFVSSLRYDAPPPRTLRLRSHTTAATVAQGLSRRAVQPADGVFREEAAGDRAVPRGRVREGRGRQRRHRGFIALWASTAAPSPAPSAVGPTPAAAAAELLRRVAAPGVDPCPALRPVGGGAAETVASVLRRRGKGDDDDGGVEAVEAAVRVLAVLATSDCIEEENRRRVVAALAAGGAAPSVAASLARVMRSGSGLEARVDAARLVESLLRDGGEDDEVRRDGRRGGGGVRAVGGVPPVQGPARGGGGGGVQGRADEAAPADAERVLAGGEADGLGVP

SEQ ID NO: 20255 - protein, 497 aa, Oryza sativa
  Clone ID: TF_OSC10946j.C1.p3.fg
MEMDEVGGRWTFSRTNEGYTSCGPVVEMSWHRVGALLLGAQSCLPVPGVPAVGGIGSVLLSMARMGWKLCHSFRLYTVVMFNREKGKNVSGYDSSNSSFQLNLPLASRELTRAHPWSIPSMLLSSQLPLVGSQDQNQYVFDRAFATQVNELPMPEEQVPFCHDCREQGHYALNCPWVYVKEAPSLGLAGRTSLNQPPHTKSSLQPSVQSRELNGENPLNPGKCFPPSLSYHVGSHTKQAKGKKSKNQKRKAPMRTEEEVRKMTITSTEWPPAGITIPRRQRGNTFRGARQLTQHLLSRGGRVSDSEGSDQVSSDEEDESPRHLGEEEMESKACPRCGEIGHVASMCLTLCPHCEEDHPPGECPTRKVTCFLCEGTNHVPKDCQLSVLLTKTAEIQRTTLRLSHQLVSSNSNIDDIIHSTNAPPAAPDSAINHSDNTFSTNHSLHRQPQQRIVIDGRSCVSPRPTPGRAKGNQPPEGDTKQKTVIRLNQQPEGNFSCE

SEQ ID NO: 20256 - protein, 366 aa, Oryza sativa
  Clone ID: TF_OSC13029j.C1.p1.fg
MVNTHASGSGNNNNEENPTLAQVLAQQTQLINMMMQQMQNHLNQGNNNAPPPQNKLADFLCVKPPTFSSTINLVEAGDWLHTIEKKLELLQCTDQEKVVFASHQLHGYASEWWDHFRMNRAEGQPITWEEFTEGLKKTHIPAGVVALKKREFRTLKQKDRTVTKFLYEFNRLARYAPEDVCTDEERQEKILEGLKDELSVTLISHDYADFHELVDKAIQLEDKKNRMDNRKRRMTVFQEAQGSSQRQHIKPSQVGESSLTSQEQSQQLNIGGEINSETNASNEVNIKQATLSEPVQQDQSQENNSSGREQQVCFNCYEPGHFARKCPKPKHQQPQGQVNNIVVTGANAVPVASSSVTAQPPVSKQQ

SEQ ID NO: 20257 - protein, 470 aa, Oryza sativa
  Clone ID: TF_OSC17330j.C1.p2.fg
MSWHRTGVLLLGAQSCLPVPGVPGVGGVGSVLFSMARMGWKLCHVFRPYTVVMFNREKGKNVSGYDSSNSSFQLNLPLASRELTRAHPWSIPSMLLSSQLPLVGSQDQNQYVFDRAFATQVNELPMPEEQVPFCHDCREQGHYALNCPWVYVKEAPSLGLAGRTSLNQPPHTKSSLQPSVQSRELNGENPLNPGKCFPPSLSYHVGSHTKQAKGKKSKNQKRKAPMRTEEEVRKMTITSTEWPPAGITIPRRQRGNTFRGARQLTQHLLSRGGRVSDSEGSDQVSSDEEDESPRHLGEEEMESKACPRCGEIGHVASMCLTLCPHCEEDHPPGECPTRKVTCFLCEGTNHVPKDCQLSVLLTKTAEIQRTTLRLSHQLVSSNSNIDDIIHSTNAPPAAPDSAINHSDNTFSTNHSLHRQPQQRIVIDGRSCVSPRPTPGRAKGNQPPEGDTKQKTVIRLNQQPEGNFSCE

SEQ ID NO: 20258 - protein, 2157 aa, Oryza sativa
  Clone ID: TF_OSC29926j.C1.p1.fg
MSDLGGKNGENGNEDGASSKETPSPKGATIPFGYRKHTIPPHNFVSVPSGRAPQFDGTHYAAWKHKMKLHLISLYLSIWKVVCKGVDVPHDDMELTSEQEQLIHRNAQASNAILSALSPEEFNKVDGLEEAKEIWDTLQLAHEGSPAVREAKIDLLEGRLGRFVMDDKETPQEKYDRTMILVNKIKGLGSEDMTNHFVLKRLLRALGPRNPTLVSMIRERKDFKRLTPSDILGRIVSHEMQEEEARERFKHFLRNSGYGKGRKDDDKGKRQSKRACFNCGEYGHFVANCPKSNEAKAKGGKKKPEHAHVAEAHMAEVFYSGDEEDPEVKPKPKPKDKVEGEGGVATVAFKSSSSSKKRLFNNLSDDDDDFYHYSCFMAQGRKVMTQKRSHTSLDVDSSDEESDNELDDVLKSFRKPAMQHLAKLMRALDSKEQSLERQEELLILEKKRNLALEESLAKECAKNEQLANELNLANGSLASLSDVNETLQEKFASLDKSHKDLEVQFDTLWNSTSQPNVVSNSSNPSTSNGCARCYNIDLNSHTTNVDAMQALKKENERLGTLVKYGCMKTYHSKDALYKTINHLNMDGHGLGFSGGSPVSKRVMAYSSGGSSWVVDSGCTNHMTGERSMFTSLDEGAGSRENIVFGDDGKGKVMDLGKIAISKNQSLSNVLLVNSLRVNPEACLIAKSSMGWLWHRRLAHVGMRNLASLLKGEHILGLYNVSFEKDCVCSACQAGKQVGSPHPIKNIMTTTRPLELLHMDLFGPVAYISIGGNKYGFVIVDDFSRFTWVYFLHDKSEDQDVFKRFAKQAQNLYDLTIKRVQSDNGGEFKNTQMEEFLDEEGIKHEFSAPYDPPQNGIVERKNRTLIEATRAMLDEYKTSNVFWAEAVSTACHAINRLYLHKILKKTSYELLSGKKPNVSYFRVFGSKCFILSKRPRSSKFSPKVDEGFLLSYESNAHAYCVFNKTSGIVEVTRDVTFDESNGSQGEQVVVHVVGGVDPNQAIGTKAIGDIRPVETQDDQEDRDQPPSPASNSPTSVVSAESEIPGPIDRNLRTSLGPEVPGSIVRNLWISGSEDMPTAQVDGIDAEGTLEHSDQAQVPPVHHPRIHHTVQREHPVDNILGDIRKGVTTRSRITSFCQHFSFVSSLEPTRVEDVLGDPDWVMAMQEELNNFTRNQVWTLVERPKQNVIATKWIFRNKQDEHGVVVRNKARLFQMDVKSAFLNGPISELVYVEQPPGFEDPKLPNHVYKLHKALYGLKQAPRAWYECLRDFLLKNGFEIGKADTTIFTKKFKSDSFICQIYVDDIIFGSTNASFCEEFSSIMTKRFEMSMMGELTFFLGLQVKQAQEGTFISQTKYVKDILKKFGMEDAKPIKTPMPTNGHLDLDHNGKCVDQKVYRSMIGSLLYLCASRLDIMLSVCMCARFQAEPKECHLIAVKRILRYLVHTPNLGLWYPKGCGFELLGYSDSDYAGCKVDRKSTTGTCQFLGWSLVSWSSKKQNSIALSTAEAEYVAADSCCAQLLWMRQTLKDFGYNFTKIPLLCDNESAIKIANNPVQHSRTKHIDIRHHFLRDHETKGDICLTHVTTESQLADIFTKPLDEKRFCELRSELNILDSRNIRLEVPVTPVRNFRGSGGINTQGEPEPVVIMPREKRQKLSQDIPADSSPPIPIHSRRAGSIVIRDAPRSPSPTASESDDGGNEDEPGSESNPLRLYKTRAVDPDPKRPRVNYLKNLLKCGKDRMVSPDTLPADSQDDRFRTLVQVDWYNSVIMGRSHPVVEMKWLDWKYMSSKNNIVFNEVRKVCEHKHAADLLALQYSWNEEVIGQFYSTAFFGTTKKGLDFVKWTIQGQQYRVSMAQFVAALGLDDDDLSRPHIFVEDALSPTSTTFMYEKDAPKDCLGTTRGLHPYYRVLYSIFRWSLLPKVGDATALPGRHALLLSRMRYNKPDFSIMKLIWSEIYETVCEPKRGCIYAPYIMKMIEAKTGICYFKDNQYKPFRPHAPTTSATPTTRVTSASTSAAPSFSAAPQRSESSSPIKKALKAIFCMCAKTAKKVKKIERRQKEDWIAVGKDVSDISDDEEFVDPFAAYETAQDIGSGEGPSGTSRFFNEESCHSEESSDDEESDAPTENVPTDPDEAVDAAGQDIDSPHSGDTEIIPSDGDIDEA

SEQ ID NO: 20259 - protein, 1425 aa, Oryza sativa
  Clone ID: TF_OSC400458j.C1.p45.fg
MSYTPPGRRGGGGGGGSGNGRGGASGSGGGNGADGALLPLVSQGRDASHTARLPVLSRTNYPDWALLMRVNLQAQGLWTAIDPGYAEFREDRAALSAILQAVPREMLRGLAKHDTAKAAWDAIKTMRVGVDRVREAKEQGFRRQFESMRFKERETPEEFAMRLTAVVADIRDMGGVMEDEHVNKKLLRVVPKKYKPVAISLEQLLDVKTMALEELVGRLSTVDSYSDDEEGSNGGKLYLTEEQWQARVKQREQEGSGNSGNKGRGAPGAQNHRGKPGGSPKGKEAATGANSSRDISRVKCFNCDEFGHYARQCRKPRRQRRGEANLVQAAEEEPTLLMAHVVGVSLAGEATLGRTPSGQEVHLTEKKVILDHEDGGEEEVTGDWFLDTGATNHMTGVRSAFAELDTGVVGTVKFGDGSVIEIQGRGTVVFRCKNGDHRSLDAVYYIPKLRKNIISVGRLDARGYDAHIWGGVCTLRDPNGLLLAKVKRDINYLYILKLHIANPVCMAASGGDTAWRWHARFGHLNFQSLRRLAQGNMVRGLPTIDHTDQLCDGCLAGKQRRLPFPEEAKFRAQEALELVHGDLCGPITPATPGGRKYFLLLVDDMSRHMWIRLLSGKHEAATAIKQFQAGVELESGRKLRALRTDRGGEFTSVEFMDYCTDRGMRRELTAPYSPQQNRVVERRNQTVVAAARSMLKAAGLPARFWGEAVVAAVYVLNRSPTKALDGVTPYEAWHGRRPSVEHLRVFGCVGYVKTVKPNLRKLDDRGTRMVFIGYEQGSKAYRMYDPVAQRVCVSRDVVFDETATWAWRDPEDAATEEEEFTVDFFVSPVAPSVADAGEQTGTPVQAGVSPVSTGVLSSPPRAPNGEFCTPPTSVTPETDGGPVRYRRVQDILSTTEPVLDFDYSDQCLIATEEPTSFVEAEKHECWRRAMVEELRSVEENQTWSLAELPAGHKAIGLKWVYKLKKDPSGAIVKHKARLVAKGYVQQQGVDFDEVFAPVARMETVRLLVALAAQKGWEIHHMDVKSAFLNGELEEEVYVVQPPGFDDKTNASKVLKLRKALYGLRQAPRAWNAKLDNTLLSLKFNKSATESAVYVRGVGDSKLIVGVYVDDLIITGSQKKEIDAFKLQMKQRFNMSDLGFLSYYLGMEVVQKGEGIFLSQSAYAGKILEKTGMEGCNPTQVPMEARLKLSKEGTGECVDPTEYRSIVGSLRYLVNTRPDLAYSVGYVSRFMEKPTSEHWAAVKHILRYISGTIKTGCWYGREEVGNAKLVGFSDSDMAGDLDDRKSTTGVLFRYGGSLISWQSQKQKVVALSSCEAEYIAATTAACQGIWLSRLIAELLDAEPGQTTLMIDNKSAINLCKNPVFHDRSKHIDTRYHFIRECVEKKQIAVEYVCSEDQLADLLTKPVGRVRFKELRRKMGLDRTLQD

SEQ ID NO: 20260 - protein, 1544 aa, Oryza sativa
  Clone ID: TF_OSC401327j.C1.p24.fg
MATCINGGELQVRVVSRRLVQASDESLRPHVLAVSNLDLLPQSIQVSMICIYPNPPTSAGGFHDVVAAFAAGLPSLLNHFFPLADRIAVNPCSGLPEIHCYNQGAELVVGEADVALASLDYGRVGESIQKILLPYAGDVALSVQYWNDPAMSYTPPGRRGGGGGGGSGNGRGGASGSGGGNGADGALLPLVSQGRDASHTARLPVLSRTNYPDWALLMRVNLQAQGLWTAIDPGYAEFREDWAALSAILQAVPREMLRGLAKHDTAKAAWDAIKTMRVGVDRVREAKEQGFRRQFESMRFKERETPEEFAMRLTAVVADIRDMGGVMEDEHVNKKLLRVVPKKYKPVAISLEQLLDVKTMALEELVGRLSTVDSYSDDEEGSDGGKLYLTEEQWQARVKQREQEGSGNSGNKGRGAPGTQNHRGKPGGSPKGKEAATGANSSRDISRVKCFNCDEFGHYARQCRKPRRQRRGEANLVQAAEEEPTLLMAHVVGVSLAGEATLGRTPGGQEVHLTEKKVILDHEDGGEEEVTRDWFLDTGATNHMTGVRSAFAELDTGVVGTVKFGDGSVIEIQGRGTVVFRCKNGDHRSLDTVYYIPKLRKNIISVGRLDARGYDAHIWGGVCTLRDPDGLLLAKVKRDINYLYILKLHIANPVCMAASGGDTAWRWHARFGHLNFQSLRRLAQGNMVRGLPIIDHTDQLCDGCLAGKQRRLPFPEEAKFRAQEALELVHGDLCGPITPATPGGRKYFLLLVDDMSRHMWIRLLSGKHEAATAIKQFQVGVELESGRKLRALRTDRGGEFTSVEFMDYCADHGMRRELTAPYSPQQNGVVERRNQTVVAAARSMLKAAGMPACFWGEAVVAAVYVLNRSPTKALNGVTPHEAWHGRRPSVEHLRVFGCVGYVKTVKPNLRKLDDRGTRMVFIGYEQGSKAYRMYDPVVRRVCVSRDVVFDEAATWAWRDPETEATEEEEFTVDFFVNPVDSVVADLGEQASTPVQGGTYPASTATPPSPPEVPAGVEFCSPPNSVTPGTNEGPIRYRRVQDILSATEPVLDFDYSDQCLLASEEPMSLAEAEQQLCWRQAMQEELKSIEDNQTWSFAELPVGHKAIGLKWVYKVKKDPSGVVVKHKARLVAKGYVQQQGIDFEEVFAPVARMETVRLLIAVAANKGWEIHHMDVKSAFLNGDLEEEVYVVQPPGFIEKGKEGQVLRLKKALYGLKQAPRAWNAKLHNTLISLNFIKSETESAVYEEMKKKFRMSDLGLLSYYLGMEVVQKDDGVFLSQTAYAAKILEKTGMEGCNSTQVPMEARLKLKRESGGEGVDSTMYRSTVGSLRYLVNTRPDLAYSVGYVSRFMEKPTSEHWAAVKHILRYIAGTLDVGCWFGRREKGELRLIGFSDSDMAGDLDDRKSTTGVLYMLGDSLISWQSQKQKVVALSSCEAEYIAATTGACQGIWLNRLLAELLGEDPGQTVMKVDNKSAINLCKNPVLHDRSKHIDTRFHFIRECVEKKQIAVEYVRTEDQLADILTKPVGRVRFLELRKKMGLEQAHQD

SEQ ID NO: 20261 - protein, 1426 aa, Oryza sativa
  Clone ID: TF_OSC401947j.C1.p42.fg
MSYTPPGRRGGGGGGGSGNGRGGASGSGGGNGADGALLPLVSQGRDASHTARLPVLSRTNYPDWALLMRVNLQAQGLWTAIDPGYAEFREDRAALSAILQAVPREMLRGLAKHDTAKAAWDAIKTMRVGVDRVREAKEKGFRRQFESMRFKERETPEEFAMRLTAVVADIRDMGGVMEDEHVNKKLLRVVPKKYKPVAISLEQLLDVKTMALEELVGRLSTVDSYSDDEEGSDGGKLYLTEEQWQARVKQREQEGSGNSGNKGRGAPGTQNHRGKPGGSPKGKEAATGANSSRDISRVKCFNCDEFGHYARQCRKPRRQRRGEANLVQAAEEEPTLLMAHVVGVSLAGEATLGRTPGGQEVHLTEKKVILDHEDGGEEEVTRDWFLDTGATNHMTGVRSAFAELDTGVVGTVKFGDGSVIEIQGRGTVVFRCKNSDHRSLDTVYYIPKLRKNIISVGRLDARGYDAHIWGGVCTLRDPDGLLLAKVKRDINYLYILKLHIANPVCMAASGGDMAWRWHARFGHLNFQSLRRLAQGNMVRGLPIIDHTDQLCDGCLAGKQRRLPFPEEAKFRAQEALELVHGDLCGPITPATPGGRKYFLLLVDDMSRHMWIRLLSGKHEAATAIKQFQVGVELESGRKLRALRTDRGGEFTSVEFMDYCADHGMRRELTAPYSPQQNGVVERRNQTVVAAARSMLKAAGMPACFWGEAVVAAVYVLNRSPTKALNGVTPHEAWHGRRPSVEHLRVFGCVGYVKTVKPNLRKLDDRGTRMVFIGYEQGSKAYRMYDPVARRVCVSRDVVFDEAATWAWRDPETEATEEEEFTVDFFVNPVDSVVADLGEQASTPVQGGTYPASTATPPSPPEVPAGVEFCSPPNSVTPGTNEGPIRYRRVQDILSATEPVLDFDYSDQCLLASEEPMSLAEAEQQLCWRQAMQEELKSIEDNQTWSFAELPVGHKAIGLKWVYKVKKDPSGVVVKHKARLVAKGYVQQQGIDFEEVFAPVARMETVRLLIAVAANKGWEIHHMDVKSAFLNGDLEEEVYVVQPPGFIEKGKEGQVLRLKKALYGLKQAPRAWNAKLHNTLISLNFIKSETESAVYVRGTGSSRLIVGVYVDDLIISGAQASEIDFFKEEMKKKFRMSDLGLLSYYLGMEVVQKDDGVFLSQTAYAAKILEKTGMEGCNSTQVPMEARLKLKRESGGEGVDSTMYRSTVGSLRYLVNTRPDLAYSVGYVSRFMEKPTSEHWAAVKHILRYIAGTLDVGCWFGRREKGELRLIGFSDSDMAGDLDDRKSTTGVLYMLGDSLISWQSQKQKVVALSSCEAEYIAATTGACQGIWLNRLLAELLGEDPGQTVMKVDNKSAINLCKNPVLHDRSKHIDTRFHFIRECVEKKQIAVEYVRTEDQLADILTKPVGRVRFLELRKKMGLEQAHQD

SEQ ID NO: 20262 - protein, 2102 aa, Oryza sativa
  Clone ID: TF_OSC408405j.C1.p8.fg
MSDLGGKNGENGNEDGASSKETPSPKGATIPFGYRKHTIPPHNFVSVPSGRAPQFDGTHYAAWKHKMKLHLISLYLSIWKVVCKGVDVPHDDMELTSEQEQLIHRNAQASNAILSALSPEEFNKVDGLEEAKEIWDTLQLAHEGSPAVREAKIDLLEGRLGRFVMDDKETPQEKYDRTMILVNKIKGLGSEDMTNHFVLKRLLRALGPRNPTLVSMIRERKDFKRLTPSDILGRIVSHEMQEEEARERFKHFLRNSGYGKGRKDDDKGKRQSKRACFNCGEYGHFVANCPKSNEAKAKGGKKKPEHAHVAEAHMAEVFYSGDEEDPEVKPKPKPKDKVEGEGGVATVAFKSSSSSKKRLFNNLSDDDDDFYHYSCFMAQGRKVMTQKRSHTSLDVDSSDEESDNELDDVLKSFRKPAMQHLAKLMRALDSKEQSLERQEELLILEKKRNLALEESLAKECAKNEQLANELNLANGSLASLSDVNETLQEKFASLDKSHKDLEVQFDTLWNSTSQPNVVSNSSNPSTSNGCARCYNIDLNSHTTNVDAMQALKKENERLGTLVKYGCMKTYHSKDALYKTINHLNMDGHGLGFSGGSPVSKRVMAYSSGGSSWVVDSGCTNHMTGERSMFTSLDEGAGSRENIVFGDDGKGKVMDLGKIAISKNQSLSNVLLVNSLRVNPEACLIAKSSMGWLWHRRLAHVGMRNLASLLKGEHILGLYNVSFEKDCVCSACQAGKQVGSPHPIKNIMTTTRPLELLHMDLFGPVAYISIGGNKYGFVIVDDFSRFTWVYFLHDKSEDQDVFKRFAKQAQNLYDLTIKRVQSDNGGEFKNTQMEEFLDEEGIKHEFSAPYDPPQNGIVERKNRTLIEATRAMLDEYKTSNVFWAEAVSTACHAINRLYLHKILKKTSYELLSGKKPNVSYFRVFGSKCFILSKRPRSSKFSPKVDEGFLLSYESNAHAYCVFNKTSGIVEVTRDVTFDESNGSQGEQVVVHVVGGVDPNQAIGTKAIGDIRPVETQDDQEDRDQPPSPASNSPTSVVSAESEIPGPIDRNLRTSLGPEVPGSIVRNLWISGSEDMPTAQVDGIDAEGTLEHSDQAQVPPVHHPRIHHTVQREHPVDNILGDIRKGVTTRSRITSFCQHFSFVSSLEPTRVEDVLGDPDWVMAMQEELNNFTRNQVWTLVERPKQNVIATKWIFRNKQDEHGVVVRNKARLFQMDVKSAFLNGPISELVYVEQPPGFEDPKLPNHVYKLHKALYGLKQAPRACSIMTKRFEMSMMGELTFFLGLQVKQALEGTFISQTKYVKDILKKFGMEDAKPIKTPMPTNGHLDLDHNGKCVDQKVYRSMIGSLLYLCASRLDIMLSVCMCARFQAEPKECHLIAVKRILRYLVHTPNLGLWYPKGCGFELLGYSDSDYAGCKVDRKSTTGTCQFLGWSLVSWSSKKQNSIALSTAEAEYVAADSCCAQLLWMRQTLKDFGYNFTKIPLLCDNESAIKIANNPVQHSRTKHIDIRHHFLRDHETKGDICLTHVTTESQLADIFTKPLDEKRFCELRSELNILDSRNIRLEVPVTPVRNFRGSGGINTQGEPEPVVIMPREKRQKLSQDIPADSSPPIPIHSRRAGSIVIRDAPRSPSPTASESDDGGNEDEPGSESNPLRLYKTRAVDPDPKRPRVNYLKNLLKCGKDRMVSPDTLPADSQDDRFRTLVQVDWYNSVIMGRSHPVVEMKWLDWKYMSSKNNIVFNEVRKVCEHKHAADLLALQYSWNEEVIGQFYSTAFFGTTKKGLDFVKWTIQGQQYRVSMAQFVAALGLDDDDLSRPHIFVEDALSPTSTTFMYEKDAPKDCLGTTRGLHPYYRVLYSIFRWSLLPKVGDATALPGRHALLLSRMRYNKPDFSIMKLIWSEIYETVCEPKRGCIYAPYIMKMIEAKTGICYFKDNQYKPFRPHAPTTSATPTTRVTSASTSAAPSFSAAPQRSESSSPIKKALKAIFCMCAKTAKKVKKIERRQKEDWIAVGKDVSDISDDEEFVDPFAAYETAQDIGSGEGPSGTSRFFNEESCHSEESSDDEESDAPTENVPTDPDEAVDAAGQDIDSPHSGDTEIIPSDGDIDEA

SEQ ID NO: 20263 - protein, 480 aa, Oryza sativa
  Clone ID: TF_OSC900201j.C1.p3.fg
MAQGWCPAARGLNPACLSRGFRPCAFCIMFVRCTPAFPGTGINTLAFGKRISETNNTSTRRVSSFKVLSLVLMFNREKGKNVSGYASSNSSFQLNPPLASRELTRAHPWSIPSMLLSSQRPLVGSRDQNQYVFDRAFATQVNELPMPEEHVPFCHDCREQGHYALNCPWVYAKEAPSFGLAGQTSLNQPPRTKSSLQPSVQRREPIRENPLNPGKCFPPSLSYHVGSRTKQAKGKKSKNQKRKAPMRTEEEVRKMTITSTEWPPAGITIPRRQRGNTFRGARQLTQHLLSHGGRVSDSEGSDQVSSDYEDESLRHLGEEEMESKACPRCGEIGHVASMCLTLCPHCEEDHPPGGCPTRKVTCFLCEGTNHVPKDCQLSVLLTKTAEIQRTTLRLSHQLVSSNINIDDIIPSTNAPPAAPDSAVNHSNNTFNTNHSLHRRPQQRIVVDGRSCVSPRPTPGRAKGNQSQECDTKQKTVICFK

SEQ ID NO: 20264 - protein, 610 aa, Oryza sativa
  unsure (1)..(610): unsure at all Xaa locations
  Clone ID: TF_OSC401021j.C1.p3.np
AYKLISMCVVHDMRTWEVFVFKIFTIPSAPCHRHEEYKKRKSNHQXNSSRGAPRPRYGQPMQYHQSVTQANCQPGYAPRPQMNRPAPRPQQRAPSGTTAPNSVTSFKSPQGPSAVQCFRCNQMGHYARECPQNPTNTNSGHANGSTARTPTPAAAQSRPSSQASGQGSRASNSFGRGRVNHIQAETAQDAPDIVMGMFSVNSIPAIVLFDSGASHSFISQAFVKRNGWKTQNLRVPMIVHSPGRNIRATQICPEVNLRTEEVDFLAKPIVLDSQNLDIILGMDWLAKHKGQIDCAEKSITLQGPGGKQVRFTSNTPTASRSILTCLQVTSLESVPVVCEYPDVFPEELTSMPPDREIEFAIELAPGTAPIAKRPYQMAANELAEVKRQIEELESKGYVRPSSSPWGAPVLLVKKKDGSERMVIDCRALNEVTINNKYPLPRIDDLFDQLKGARVFSKIDLRLGYHQLEIRSEDIPKTTFSTRYGLYEFTVMSFGLTNAPAFFMNLMNKIFMEYLDQFVVVFIDDILIYSKNEEEHAEHLRLIMEKLRDHQLLAKFSKCEFWLDRVAFLGHMISSNGVEVDPSKVKAVLAWNPPKNVSEIRSFLGLAGYYR

SEQ ID NO: 20265 - protein, 1214 aa, Oryza sativa
  Clone ID: TF_OSC900048j.C1.p16.fg
MQYHQSVTQANCQPGYAPRPQMNRPAPRPQQRAPSGTTAPNSVTSFKSPQGPSAVQCFRCNQMGHYARECPQNPTNTNSGHANGSTARTPTPAAAQSRPSSQASGQGSRASNSFGRGRVNHIQAETAQDAPDIVMGMFSVNSIPAIVLFDSGASHSFISQAFVKRNGWKTQNLRVPMIVHSPGRNIRATQICPEVNLRTEEVDFLAKPIVLDSQNLDIILRMDWLAKHKGQIDCAEKSITLQGPGGKQVRFTSNTPTASRSILTCLQVTSLESVPVVCEYPDVFPEELTSMPPDREIEFAIELAPGTAPIAKRPYQMAANELAEVKRQIEELESKGYVRPSSSPWGAPVLLVKKKDGSERMVIDCRALNEVTINNKYPLPRIDDLFDQLKGARVFSKIDLRLGYHQLEIRSEDIPKTTFSTRYGLYEFTVMSFGLTNAPAFFMNLMNKIFMEYLDQFVVVFIDDILIYSKNEEEHAEHLRLIMEKLRDHQLLAKFSKCEFWLDRVAFLGHMISSNGVEVDPSKVKAVLAWNPPKNVSEIRSFLGLAGYYRRFIEGFSKLARPMTELLKKEKKFQWSAACEGSFQEMKKRLTTAPVLTLPDIRKDFEIFCDASRQGLGCVLMQERKVVAYASRQLRPHEVNYPTHDLELAAVVHALKIWRHYLIGNRCEVYTDHKSLKYIFTQTELNMRQRRWLELIKDYDLGIHYHPGKANVVADALSRKAYCNVAQIRPDQDRLCRELEKLRLTVVQSGVPASLTVQPTLESQIREAQKDDEGIKELIKRIQEKKDTNFSIDDQGTVWCGPRICVPAKKELRDLILKEAHESAYSIHPGSTKMYQDIKAYFWWAGMKRDVTEYVALCDICQRVKAEHQRPAGLLQPLPIPEWKWEEIGMDLITGLPRTPSGYDSIWVIVDRLTKSAHFVAVKTTFDGKKLAELYMTHVVCRFGCPKKIVSDRGTQFTSRFWKQLHEALGTDLNFSTAYHPQTDGQTERVNQILEDMLRACALDFEGTWDRCLPYAEFSYNNSYQASIQMSPNEAMFGRKCHTPLCWNEVGEALVFGPDILKAAKEQVKLIRERLKTAQNRQKNYADNRRRDLEFGKGDHVYLRVSPLRGMRRFGMSGKLAPRYIGPYLITARRGEVAYQLELPEEEQVSLGNIELEKNLTYKERLIKVLEEAERQTRRKTIKFYKVQWSNHSEDEATWEREDLLRAEFPELLP

SEQ ID NO: 20266 - protein, 382 aa, Oryza sativa
  Clone ID: TF_OSC415688j.C1.p7.fg
MASTRNDKTSEKKYLPRCTTVDRAPLANGGRVSDSEDSDQVSSDDEDEMERKACSRCGEIGHVASSCATTCVHCEEDHPPDRCPTSRITCFFCEGTDHVSKDCQFSFLLTKKMANQLASSNGEKHQGNTNPRQDYSFSLNPVPGQRNQNEKRKCRVREDICCFNCQGMGHFADKCPKPRNVAASTSVHATPCNQKLAPQRIVIHASRSSPIARVATAPTPASALPQGVNAQFQPQPSVDKTEVSIGIVPLDVPAQQPRNQVQDEEPEPPTILCTDSLSKELSSMEEVVSLPDLLQAEQRAINLRRAIPSRRPSSASNSNQKEASPMNDSNMQSYHIITEPIKDDAVTRTMPAISLQNQNEQPRLWFSVRYLSLCNRKFAAIM

SEQ ID NO: 20267 - protein, 419 aa, Oryza sativa
  Clone ID: TF_OSC411239j.C1.p1.fg
MADNEKGNKVRSQDIGTSSSRVNEAPDTSCVTLVQHLINQNRLLIEILQQHQTPILNLSQIQPQVQLEAVPALTPQVSMPPASRRTHGEVPHVDSKEASIICFMCDEHGHYARECPQQKRKTPMRTEDEVRKMIITSTEWPPLGMTKRQRRNTFRGAPQLTEHLLANGGRVSDSEDSDQVSSDDEDEMERKACSRCGEIGHVASSCATTCVHCEEDHPPDRCPTSRITCFFCEGTDHVPKDCQFSFLLMKKMANQPASSNGEKHQGNTNPRQDYSFLLTPVPGQRNQNEKRKCRVREDICCFNCQGMGHFADKCPKPRNIAAGTSVHATPCNQKLAPQRIVIHASRSSPIARVATAPTPASALPQGVNAQFQPQPSVDKTEASIGIVPLDVPAQQPRNQVQDEEPEREKVIVCYNCSTC

SEQ ID NO: 20268 - protein, 338 aa, Oryza sativa
  Clone ID: TF_OSC421348j.C1.p2.fg
MSRYVDPNDRYEPRGRNSRLYVGHISLRTRAEDLENLFSRYGRVRFVDLKNEYGFVEFSDPRDANDARLDLDGRKYDGSDIIVQFARGVERGLGGSRGYKARPAHGSDHCFNCGMEGHWHRNCTAGDWTNRCYGCGERGHILRECKNSPKDLKQERGYSRSRSPRRRRSPSYGKSGPPSHWGSHGADREERLHSRRDGRGYSRSPRRHDSPSNQRNHSPRRYALPSNERYDGTRRYASPSYGRDRSPGGNALPANGRSHNLTSDGMNPSPRERDDQNGSHRRGDNDYLPSKRDDQNGSYRRGDSDYLSRERDDYLSRGRDDQNGSHRRGDSDYLSRDR

SEQ ID NO: 20269 - protein, 305 aa, Oryza sativa
  Clone ID: TF_OSC401685j.C1.p63.fg
MPRYDDRDRYDDRYGGNTRLYVGRLSSRTRTRDLEDLFGRYGRVRYVDMKHEFAFVEFSDARDADEARYNLDGRDFDGSRMIVEFAKGVPRGPGGSREYMGRGPPPGSGRCFNCGIDGHWARDCKAGDWKNRCYRRGRSYSRSPSPRRGRSRGRSYSRSRSRSYSRSQSPRRDSRNERRSRSPRDSRSPRGSPRDSRSPRGSPRDSRSPKGSPRDTQSPRGSPRDSRSPRRSASPPNGRNRSPTPNASRSPAPRDSRSPMRADSRSPADHERRDMSTAANGRSPSPRDYEDNGNHRASPRGSASP

SEQ ID NO: 20270 - protein, 68 aa, Oryza sativa
  Clone ID: TF_OSC900030j.C1.p15.fg
MAGMLMESRILVEFAKGVPRGAAGGSREYMGRGPPPGTGRCFNCGIDGHWARDCKAGDWHDAYAAHPA

SEQ ID NO: 20271 - protein, 350 aa, Oryza sativa
  Clone ID: TF_OSC401054j.C1.p14.fg
MPLSSQLPLVGSQDQNQYVFDRAFATQVNELPMPEEDVPFCHDCREPGHYALNCPWVYAKETPSFGLAGQTSLNQPPHTKTSLQPSVQSREPNGENPWNPGNCFPPSLSYHVGSRTKQAKGKKSKNQKRKAPMRTEEEVRKMAISSTEWPPAGITIPRRQRGNTFRGARQLTQHLLSHGGRVSDSEGSDQVSSNDEDESPRHLGEEEMESKACTRCGEIGHVASMCLTLCTHCEEDHPPGECPTRKVTCFLCEGMGHFADKCPRPRNIAASTSVHATPCNQKLAPQRIVIHASRSSPIDRVATAPTLASALPQGVNAQFQPQPSVDKTEASIGIVPLDVPAQQPKKSSTR

SEQ ID NO: 20272 - protein, 477 aa, Oryza sativa
  Clone ID: TF_OSC26158j.C1.p1.fg
MADNEKGNKVRSQDIGTSNSRVNEAPDTSCVAVVQHLINQNKLLIEILQQHRMPILNPSQMQPQVQLEAVQALTPQVSAPPTSQKAPHAMPHVDPKEASIICFMCDEQGHYARNCPQQKRKAPMRTEDEVRKMIITSTEWPPPGMTKHQRRNSFRGAQQLTEHLLANGGRVSDSEDSDQVSSDDEGAKPPQGFNQNKIELKACSRCGEIGHVASSCASICVHCEEDHPPDRCPTSRITCFFCEGTDHVPKDCRFSFLLTKKMANQPASSNGEKHQGNTNPRQDSSFSLTPVPGQRNQNEKRKCRVREDICCFNCQGMGHFADKCPKPRNVAASTSVHANPRNQKLAPQRIVIHASRSSPIARVATAPTPMSALPQGVNAQFQPQPPADKTEASICVVPLEVPIQQLRNQVQDEEPECKKVIVCYNCNEEGHYSKNCPQPRQNRPPHYRQFTRSRHSNRIVVTGANAVPVRPRVNQNP

SEQ ID NO: 20273 - protein, 665 aa, Oryza sativa
  Clone ID: TF_OSC405314j.C1.p1.np
MDEVVATMDISEANEGYASCGSVIEMSRQMKTTRVGARAQPWPACPGIPAVGRVGSVLLFTARMGEGLCHIFTTGSKAMECGVKMCLVGWPGLAWDELEPRSGCQFGLNHRRPWVKAVLDGQVSEEEDIVSCLPKLQKTAGSASEVEEAVKPAVKQDKRLRSVKVLSLVSNLSLPFVFPLSLSKPLQQMADNEKGNKVRSQDIGTSNSRVNEAPDTSCVAVVQHLINQNKLLIEILQQHRMPILNPSQMQPQVQLEAVQALTPQVSAPPTSQKAPHAMPHVDPKEASIICFMCDEQGHYARNCPQQKRKAPMRTEDEVRKMIITSTEWPPPGMTKHQRRNSFRGAQQLTEHLLANGGRVSDSEDSDQVSSDDEGAKPPQGFNQNKIELKACSRCGEIGHVASSCASICVHCEEDHPPDRCPTSRITCFFCEGTDHVPKDCRFSFLLTKKMANQPASSNGEKHQGNTNPRQDSSFSLTPVPGQRNQNEKRKCRVREDICCFNCQGMGHFADKCPKPRNVAASTSVHANPRNQKLAPQRIVIHASRSSPIARVATAPTPMSALPQGVNAQFQPQPPADKTEASICVVPLEVPIQQLRNQVQDEEPECKKVIVCYNCNEEGHYSKNCPQPRQNRPPHYRQFTRSRHSNRIVVTGANAVPVRPRVNQNP

SEQ ID NO: 20274 - protein, 1801 aa, Oryza sativa
  Clone ID: TF_OSC400710j.C1.p4.fg
MEGVPAAGANASRSPQHRGRRHSLSPTPRRGRGRGAAVREVVVQRTVREVGGAAAFPTLTRTNYTEWSLLMKVMLQARGLWDAVEHGECDEQEDRMAMEAILRAVPSEMISLLATKDSAKDAWDAIKVMRVGVDRVRKAKAQQLHREYESISFHDGESIDDFALRLTSLVSQLGTLGERIEEQNVIEKFLRVVPERFSQIAVSIETLLDLSTLTIEDVTGRLKEQWLARQKERQKGERSSKQSQGGARQRPRSHRKKRGFGGGVGGEKGNTNRDTAPNRCHNCGRLGHWAKDCRQPKKEAAHLAQGDDDDDVLLLSRACELEDDDATLLMAHACELNDGPIIAPSPVSLVEPRVQVSLGATDAEDKEAWYLDTGATNHMTGRGDVFAELDRSVTGTVKFGDSSIVDIKGAGNVIFTGKNGEHKVLSGVYYIPRLKSSIISIGQLDESGTRVLVEDGIMRIWDRRRRLLAKIKRGRSRLYVLRLEVARPICLATRHDDVAWRWHERFGHIHFGSLEKMGRQELVRGLPRLEHVEQLCDTCVITKHRRAAFPKAAKYRAQEPLDLVHGDICGPITPATPGGRRYFLLLVDDATRYMWVALLAAKSNAPDAIKRIQMAAKTHCGRKLCVFRTDNGGEFTSLEFATYCTDEGIQRHFFAPYAPQQNGVVERRNQTVVSMARALLKQKGMPAEFWGEAVSTAVFLLNHAPTKSLTGKTPYEAWHGKKPMVSFLRTFGCLAYVKELNDVRKLDDRSTPGVFIGYEEGVKAYRVLDPRTRRVRLARDVIFDESRGWDWTAASSTDARPSSDFAIEYHVEKTTGHPIPSVGGGVVTPSASPTPLQETSPATPATPAPSPSVAPTEFVSPPSHDEERIDAAHSNTPVRYRTVDNLIGENAPAPGIAQRELEEASLLLAGPGEPCSFAEAEGDDAWRAAMREEMDAVNRNGIWELVDLPHGHRPIGLKWVYKLKKNEAGKVVKHKARLVARGFVQQPGIDFDEVFAPVARMESIRLLLAVAAQKGWHVHHMDVKSAFLNGDLAEEVYVKQPPGFVVAGEEDKVLRLRKALYGLRQAPRAWNAKLDCTLKELGFDQSKHEHAMYRRNNGGSALLVGVYVDDLVITGPSTRAIEQFKEEMKAKFQMSDLGLLSFYLGIEVKQGDDGISLNQGRYAQRIVESAGLKDCNPCATPMEERLKLSRDSTAPPVDATKYRRLVGSLRYLVHTRPDLAFAVGFVSRFMERPTEEHMVAVKRILRYVAGTMEYGLHYKREKEEQRLIGYSDSDLAGDIDTRRSTSGMLFFLGSSLVSWQSIKQRVVALSSCEAEYVAATNAATQGIWLARLLGELLGKQPKAIELKVDSKSALALAKNPVFHERSKHIDLRYHFIRSCLEEGSISASFITTMDQLADILTKALGRVRFHELVARIGVILNRQVVKSDSATIKIPELDFEIPPEAQRGSLSTVEGIIMRAVDELQALQDERKKVDPQKAEAIDKFLAKLRSLGLGEAAFTFVLDDPAGNSFIENQNAPSSDPLLSVRFYERMREQQAALGFLVEPSTEEPGDQPVNHASTVEGNSEVLQEPHGSVGAVAGRRAIAQGNPDEVAAALCRYSAPEECLVFDLWLEIPYFREVIVMATTCDMCGYRNSELKPGGEIPAKGKKITLRVQNGKDLTRDVIKSDSAGVKVPELELELASGTLGGIVTTVEGLIVKICEALQRVHGFHLGDSTLEWKKKKWEDFNDRLSKLLSLQEPWTLIIDDGLAASFVAPATDSLEDDNQLTIEEYVRSWEQNEELGLNDMDTSSADAAYNTTNP

SEQ ID NO: 20275 - protein, 1450 aa, Oryza sativa
  Clone ID: TF_OSC401728j.C1.p22.fg
MEGVPAAGANASRSPQHRGRHHSLSPTPRRGRGRGAAVREVVVQRTVREVGGAAAFPTLTRTNYTEWSLLMKVMLQARGLWDAVEHGECDEQEDRMAMEAILRAVPSEMISLLATKDSAKDAWDAIKVMRVGVDRVRKAKAQQLHREYESISFHDGESIDDFALRLTSLVSQLGTLGERIEEQNVIEKFLRVVPERFSQIAVSIETLLDLSTLTIEDVTGRLKVAEERRPAPTSTTTPAGGQLLLTEEQWLARQKERQKGERSSKQSQGGARQRPRSHRKKRGFGGGVGGEKGNTNRDTAPNRCHNCGRLGHWAKDCRQPKKEAAHLAQGDDDDDVLLLSRACELEDDDATLLMAHACELNDGPIIAPSPVSLVEPRVQVSLGATDAEDKEAWYLDTGATNHMTGRGDVFAELDRSITGTVKFGDSSIVDIKGAGNVIFTGKNGEHKVLSGVYYIPRLKSSIISIGQLDESGTRVLVEDGIMRIWDRRRRRRLLAKIKRGRSRLYVLRLEVARPICLATRHDDVAWRWHERFGHIHFGSLEKMGRQELVRGLPRLEHVEQLCDTCVITKHRRAAFPKAAKYRAQEPLDLVHGDICGPITPATPSGRRYFLLLVDDATRYMWVALLAAKSNAPDAIKKIQMAAETHCGRKLCVFRTDNGGEFTSLEFATYCTDEGIQRHFSAPYAPQQNGVVERRNQTVVSMARALLKQRGMPAEFWGEAVSTAVFLLNRAPTKSLTGKTPYEAWHGKKPMVSFLRTFGCLAYVKELNDVRKLDDRSTPGVFIGYEEGVKAYRVLDPRTRRVRLARDVIFDESRGWDWTAASGIDARPSSDFAIEYHVEKTTGHPIPSVGGGVVTPSASPTPLQETSPATPATPAPSPSVAPTEFVSPPSHDEERIDAAHSNTPVRYRTVDNLIGENAPAPGIAKRELEEASLLLAGPGEPCSFAEAEGDDAWRAAMREEMDAVNRNGIWELVDLPHGHRPIGLKWVYKLKKNEAGKVVKHKARLVARGFVQQPGIDFDEVFAPVARMESIRLLLAVAAQKGWHVHHMDVKSAFLNGDLAEEVYVKQPPGFVVAGEEDKVLRLRKALYGLRQAPRAWNAKLDCTLKELGFDQSKHEHAMYRRNNGGSALLVGVYVDDLVITGPSTRAIEQFKEEMKAKFQMSDLGLLSFYLGIEVKQGDDGISLNQGRYAQRIVESAGLKDCNPCATPMEERLKLSRDSTAPPVDATKYRRLVGSLRYLVHTRPDLAFAVGFVSRFMERPTEEHMVAVKRILRYVAGTMEYGLHYKREKEEQRLIGYSDSDLAGDIDTRRSTSGMLFFLGSSLVSWQSIKQRVVALSSCEAEYVAATNAATQGIWLARLLGELLGKQPKAIELKVDSKSALALAKNPVFHERSKHIDLRYHFIRSCLEEGSISASFITTMDQLADILTKALGRVRFHELVARIGVVKISSE

SEQ ID NO: 20276 - protein, 749 aa, Oryza sativa
  Clone ID: TF_OSC401048j.C1.p45.np
HLPTLSYQLRLPVDRHSVPHSPGGADMDLADIAQSLAPIKTTIAPPPPRIPPHPAVPARIKEGEIIPRVSLPRFPRFPLSLSLGSVRIHPVILAGDIYGARDPRAFPSSPAAFSPSRCYIIAPRAPLFRFRRSPLALAVGSVLAPCSSLSAVAADLRFAADVAPVLRPTRRHLHPLRRIAVDLVRASVSLADRRSAAVIVIPSRAAAFLHSVRRLRRPCLGVSRGPPFRFPLLSALSGAAPPRRWSPAVTIGARARRSRRPCRRGRLRARPRGCQVGPAVSRPRPRVRLTRGTHGADRRQPRAPGPPWTERLTRGPHFPWTRANEGYTSCGPMADNEKGNKVRSQDIGTSSSRVDEAPDTSCVTLVQHLINQNRLLIEILQQHQTPILNLSQTQPQVQLEAVQALTPQVSMPPASRRTHGDVPHVDPKGASNICFMCDEQGHYARERPQQKRKTPMRTEDEVRKMIITSTEWPPPGMTRRQRRNTFRGAPQLTEHLLANGGRVSDSEDSDQVSSDDEDEMERKACSRCGEIGHVASSCATICVHCEEDHPPDRCPTSRITCFFCEGTDHVPKDCQFSFLLTKKMANQPASSNGEKHQGNTNPRQDYSFSLTPVPGQRNQNEKRKCRVREDICCFNCQGMGHFADKCPKPRNIAAGTSVHAAPCNQKLAPQRIVIHASQSSPMARVATAPTPASALPQGVNAHFQPQQRIVVDGRSCVSPRPTPGQAKGDTKQKTVIRFNQQSEGSFSCE

SEQ ID NO: 20277 - protein, 417 aa, Oryza sativa
  Clone ID: TF_OSC401054j.C1.p18.fg
MADNEKGNKVRSQDIGTSSSRVDEAPDTSCVTLVQHLINQNRLLIEILQQHQTPILNLSQTQPQVQLEAVQALTPQVSMPPASRRTHGDVPHVDPKGASNICFMCDEQGHYARERPQQKRKTPMRTEDEVRKMIITSTEWPPPGMTRRQRRNTFRGAPQLTEHLLANGGRVSDSEDSDQVSSDDEDEMERKACSRCGEIGHVASSCATMCVHCEEDHPPDRCPTSRITCFFCEGTDHVPKDCQFSFLLTKKMANQPASSNGEKHQGNTNPRQDYSFSLTPVPGQRNQNEKRKCRVREDICCFNCQGMGHFADKCPKPRNIAAGTSVHAAPCNQKLAPQRIVIHASQSSPMARVATAPTPASALPQGVNAHFQPQQRIVVDGRSCVSPRPTPGQAKGDTKQKTVIRFNQQSEGSFSCE

SEQ ID NO: 20278 - protein, 605 aa, Oryza sativa
  Clone ID: TF_OSC900056j.C1.p3.fg
MADNEKGNKVRSQDIGTSSSRVNEAPDTSCVTLVQHLINQNRLLIEILQQHQTPILNLSQIQPQVQLEAVQALTPQVSMPPASRRTHGDVPHVDPKEASNICFMCDEQGHYARERPQQKRKTPMRTEDEVRKMIITSTEWPPPGMTRRQRRNTFRGAPQLTEHLLANGGRVSDSEDSDQVSSDDEDEMERKACSRCGEIGHVASSCATICVHCEEDHPPDRCPTSRITCFFCEGTDHVPKDCQFSFLLTKKMANQPASSNGEKPQGNTNPRQDYSLSLKPVPGQRNQNEKRKCRVREDICCFNCQGMGHFADKCPKPRNIAASTSVHATPCNRKLAPQRIDIHASRSSPIARVATAPTPASALPQGVNAQFQPQPSVDKTEASIGIVPLDVPAQQPRNQVQDEEPKPLTILCTDSLSKELSSMKEVVSLPDLLQAKQRAINLRRAIPSRRPSSASNSNQKEASPVNDSIMQSYHIITEPIKDAVTRTMPAISLQNQNEQPRLWFSVRYLSLCSRKFAAITGNLSEVDSEDMNHEKFWNGSITELPQPSLSQPKGAPWSKSGEEKIPSATGGQAKQFRVVKFCWKFVKTQRKKSDKKRRPPNLSSC

SEQ ID NO: 20279 - protein, 1051 aa, Oryza sativa
  Clone ID: TF_OSC11569j.C1.p3.fg
MRKEKIPHQAPFAIQAAQLLGRAIGAGLFAITPAGERGMCCKAIKLGNARVFPVTTFEPPVSPEEKVKFEALDCLFRGALISVLADNIVDVYMHIPSRKDMWNALEAKFGVSDAGSELYVMEQFYDYKMVDDRSVVEQAHEIQMLAKELENNKCELPDKFGAGGIIAKLPPSWSDFATSLRHKRQEFRVSDLIGSLGVEEKARAKDNRGKKVEGGSSANMVQKKNTHASHNSKKVKSDVKPKARTNFKKKGKGKAKGDCFVCGKSGHWAEDCPERKDRKSANMVISEGGGTSGYGKILPTVLSVFHSPDWWIDTGANIHVGRGSSLLMGNGSLANIHVWVVHGVGTVDLKFTSGKTVQLKNVQHVPSIKKNLVSGSLLCREGFRLVFESNKCVVSKYGTFIGKGYDSGGLFHFSLDDMRNNNNVVNHISENDESNVWHSRPCHVNFGCMTRLANMSLIPKFTLVKGSKCHTCVQSKQPRKPHKASEARDLAPLELLHSNLCEMNGVLTKGGKKYFMTLIDDCTRFCYVYLLKTKDEALHYFKTYKAKVENQLERKIKRLRSDRGGEYFSNEFTSFCEEFGIIHERTPPYSPQSNGVTERKNRTLTEMVNAMLDTARLSQEWWGEAVLTACHVLNKIPMKHKEVTPFEEWERKRLNLSYLRTWGCLAKVNVPIAKKRKLGPNTVDCVFLGYAIHSVGYRFLVVNSEVPDMRVGTIIESRDATFFENEFPMKNTPSTSNHETVIPHKHFAPIEHNDQTPEGNPEEDNIVDTRKSKRQRVAKSFGDDYIVYLVDDTPRTIEKAYSSPDADYWKEAKKLRPDGTIEKYKTRLVARVIPKKKARIFFDTYLPVARLITIRVLLVRAASHGLLVHQMDVKTAFLNGELEEEIYMDQQDRYVLEGQVGMVCKLLKSLYGLKQAPKQWHEKFDTTLTSTGFVVNEADKCVYYRYGGGEGVILCLYVDDILIFGISLNVIEEVKDFLSKSFEMKDLGDADVILNIKLLRGDEGGIAQSHYVDKVLSRFGYSDYKPAPTPYDPSMLLRKNRRIARDQLRYS

SEQ ID NO: 20280 - protein, 470 aa, Oryza sativa
  Clone ID: TF_OSC28694j.C1.p1.fg
MSWHRAGVLLLGAQSCLPIPGVPAVGGVGSVLLFMARMGWELCHVFRPYTVVMFNREKGKNVSGYAPSNSSFQLDQPLASRELTRAHPWSIPSMLLSSQLPLVGSQDQNQYMFDRAFATHVNELPMPEEDVPFCHDCREQGHYALNCPWVYAKEAPSFGLTGQTSLNQPPRTKSSLQPIVQSREPNGENPLNPGKCFPPSLSYHVGSRTKQAKGKKSKNQKRKAPMRTEGEVCKMAISSTEWPPAGITIPRRQRGNTFRGARQLTQHLLSHGGRVSDSEGSDQVSSDYEDESLRHLGEEEMESKACPRCGEIGHVASMCFTLCPHCEEDHPPGECPTRKVTCFLCEGTNHVPKDCQLSVLLTKTAEIQRTTLRLSRQLVSSNSNIDDIIHSTNAPLAAPDSAINHSNNTFSTNHSLHRRPQQRIVVDGRSCVSPRPTPGRAKGNQPQEDDTKQKTVIRFNQQSEGSFSCE

SEQ ID NO: 20281 - protein, 741 aa, Oryza sativa
  Clone ID: TF_OSC400381j.C1.p11.fg
MRPGRRWGYRRVAVALAVCVHAAVLLSAVVYLSSVLSAAGPGASSSSLQETEMMRLTAKLEQIIGRPPHNRAHLPSHAFAPSKSGLATAIQALDWGTDAEEDEDDVIAPELHQRSAETFNPQTAKARKAASPSPASKAFHQEINARSQEEELDITAERGEGQSAITPPPEKAQEEDAEKKAREKATLKSIIVAPARATSKSQIEAEEQDLSSKWQAVKPKFWWRKRQNPSSSTSQVVFNRPATSFNPLNLREKFKEILHGKCFRCFASDHQAAACRDPIRCYTCRRSGHISFRCPNKSKQPIHSRLTFPKQAPSIQSRLIFPPLPSKNQQQPTTTRPGSVFHRLHKPAVTMDHIPGLPNQRPAVGYATVPMTELMQHELERLHYHGALISAEVEGQETSPREVARALTQQVGIPISDLRVTRHHPEDFFVFFDFPEGQAAAARRGFITLDGGRFTITPWSADRHVHHPNWWFRVRLCLEGLPQYAWNRAGLEGVMVLSTFFPPGAGRVTSGITPPLPDEIALPPRGRLPHVIVHLDEMEDWTPGPPRSPSFGVSGLPSSDLSDSGGPIPTVRTFQWYLGCADGTQPPRRRAAARRGCRAPPQRREDPEDDEDDDGRRRHAEDIPPRRRSLRDVIIGRGRSVESRAAEGVRHRSRTPHPSGRQRAHGDGRQGRSQTRHSSRCSCRYRSRRTRSPSSLTPRDQDGTGDAGCATTKVVAVSGQADGDQQCSARSVVAPSGKTIS

SEQ ID NO: 20282 - protein, 497 aa, Oryza sativa
  Clone ID: TF_OSC401054j.C1.p53.fg
MEVDEVGGRWTFSRANEGYTSCGPVVEMSWQRVGALLLGGSVLPACPGCPGRRGIGSVLLFMARMGWELCHVFRPYTVVMFNREKGKNVSGYASSNSSFQLNPPLSSRELTRAHPWSIPSMLLSSQLPLVGSQDQNQYVFDRAFATQVNELPMPEEDVPFCHDCREQGHYALNCPWVYAKEAPSFGLAGQTSLNQPPHTKSSLQPSVQSREPNGENPWNPGKCFPPSLSYHVESRTKQAKGKKSKNQKRKAPMRTEEEVRKMTITSTEWPPAGITIPRRQRGNTFRGARQLTQHLLSHGGRVSDSEGSDQVSSDYEDESPRHLGEEEMESKACPRCGEIGHVASMCFTLCPHCEEDHPPGECPTRKVTCFLCEGTNHVPKDCQLSVLLTKTTEIQRTTIRLSHQLVSSNSNIDDIIHSTNAPPAAPDSAINHSNNTFSPNHSLHRQPQQRIVVDGRSCVSPRPTPSRAKGNQPQEGDTKQKTVICFKQQSEGSFSRE

SEQ ID NO: 20283 - protein, 1019 aa, Oryza sativa
  Clone ID: TF_OSC900220j.C1.p13.fg
MARRALRLRLSLSLSFCNGPESNPTEPPVSPEEKVKFEALDCLFRGALISVLADNIVDVYMHIPSRKDMWNALEAKFGVSDAGSELYVMEQFYDYKMVDDRSVVEQAHEIQMLAKELENNKCELPDKFVAGGIIAKLPPSWSDFATSLRHKRQEFRVSDLIGSLGVEEKARAKDNRGKKVEGGSSANMVQKKNTHASHNSKKVKSDVKPKARTNFKKKGKGKAKGDCFVCGKSGHWAEDCPERKDRKSANMVISEGGGTSGYGKILPTVLSVFHSPDWWIDTGANIHVGRGSSLLMGNGSLANIHVWVVHGVGTVDLKFTSGKTVQLKNVQHVPSIKKNLVSGSLLCREGFRLVFESNKCVVSKYGTFIGKGYDSGGLFHFSLDDMRNNNNVVNHISENDESNVWHSRPCHVNFGCMTRLANMSLIPKFTLVKGSKCHTCVQSKQPRKPHKASEARDLAPLELLHSNLCEMNGVLTKGGKKYFMTLIDDCTRFCYVYLLKTKDEALHYFKTYKAKVENQLERKIKRLRSDRGGEYFSNEFTSFCEEFGIIHERTPPYSPQSNGVTERKNRTLTEMVNAMLDTARLSQEWWGEAVLTACHVLNKIPMKHKEVTPFEEWERKRLNLSYLRTWGCLAKVNVPIAKKRKLGPNTVDCVFLGYAIHSVGYRFLVVNSEVPDMRVGTIIESRDATFFENEFPMKNTPSTSNHETVIPHKHFAPIEHNDQTPEGNPEEDNIVDTRKSKRQRVAKSFGDDYIVYLVDDTPRTIEKAYSSPDADYWKEAKKLRPDGTIEKYKTRLVARVIPKKKARIFFDTYLPVARLITIRVLLVRAASHGLLVHQMDVKTAFLNGELEEEIYMDQQDRYVLEGQVGMVCKLLKSLYGLKQAPKQWHEKFDTTLTSTGFVVNEADKCVYYRYGGGEGVILCLYVDDILIFGISLNVIEEVKDFLSKSFEMKDLGDADVILNIKLLRGDEGGIAQSHYVDKVLSRFGYSDYKPAPTPYDPSMLLRKNRRIARDQLRYS

SEQ ID NO: 20284 - protein, 670 aa, Oryza sativa
  Clone ID: TF_OSC900403j.C1.p14.fg
MLDEYKTSDRFWAEAVNTACHAINRLYLHRLLKKTPYELLIGNKPNVSYFRVFGSKCYILTKKARSSKFAPKVDEGFLLGYGSNECAYRVFNKTSGIVGIARDVTFDETNGSQVEQVDSHVLGEEEDPSVAIKRCEKAPSSTGLSTSWYTWSNHWASRIRSIPTTCTSSTRRSTGSSRMMTKRFEMSMMGELKFFLGLQIKQLKEGTFICQTKYLKDMLKKFGMENAKPIHTPMPSNCHLDLNEQGKDVDQKMFNREKGKNVRGYASSNSSFQLNPPLASRELTRAHPWSIPSMLLSSQLPLVGSQDQNQCVFDRAFATQVNELPMPEEHVPFCHDCREQGHYALNCPWVYAKEAPSFGLAGQTSLNQPPRTKSSLQPSVQRREPIGENPLNPGKCFPPSLSYHVGSRTKQAKGKKSKNQKRKAPMRTEEEVRKMTITSTEWPPAGITIPRRQRGNTFRGARQLTQHLLSHGGRVSDSEGSDQVSSDYEDESPRHLGEEEMESKACPRCGEIGHVASMCFTLCPHCEEDHPPGECPTRKVTCFLCEGTNHVPKDCQLSVLLTKTAEIQRTTLRLSRQLVSSNSNIDDIIHSTNAPLAAPDSAINHSNNTFSTNHSLHRRPQQRIVVDGRSCVSPRPTPGRAKGNQPQEDDTKQKTVIRFNQQSEGSFSCE

SEQ ID NO: 20285 - protein, 910 aa, Oryza sativa
  Clone ID: TF_OSC101630j.C1.p12.fg
MEFGWALRRPMRLPDSPRHERGLPAALRGVGVKPEGRSAITPPPEKAQEEDAEKKARGKATLKSIIVAPARATSKFQIEAEEQYLSSKWQAVKPKFWWRKRQNPSSSTSQAVFNRPAASFNPLNLREKFKEILHGKCFRCLASDHQAAACRDPIRCYTCRRSGHISFRCPNKSKQPIHSRLTFPKQAPSIQSQLIFPPLPSKNQQQPTTTRPGSVFHRLHKPTVTMDHIPGLPNQRPAVGYATVPMTELMQHELERLRFHGALISAEVEGQETSPREVARALTQQVGIPISDLRVTRHHPEDFFVFFDFPEGQAAATRRGFITLDGGRFTITPWSADRHVHHPNWWFRVRLCLEGLPQYAWNRAGLEGVMGPICLFDRIEHESVQRQNMAIFSCWMWMRNPDLLPRIVISTFFPPEAGRVTSGITPPLPDEIAPPPRGRLPHVIVHLDEMEDWTPGPPHPPCSPSSGVSGLPSSDSSDSGGPIPTVRTFQWYLGCADGTQPPRQRAAVRRGCRALPQRREDPEDDEDDNGRRRHAEDIPPRRRSLRDVIIGRDWSVESRAAEGARHWSRTPHPSGRQRAHGDGCQGRSRTRHSSRCSCRCRSRRTRSPSSLTPRGQDGTGDAGGATTKVVAVSGQADGDQQPVDALVSLPDPLIKILCSSPLLPFSDDQGDHDPMLPLLAEIAPKSSREAENETKRTGGEEPILGEDKVASAAELGQEKMGHLVPDAQQAPKMDLLAQSTGDDEAQASTGDQPTLVQQADCEEQHQATVQTQPIHGGEGEREKVVLSPLFSQLQPPIILQAPLELAPPGAAKTKGCGRKVVQMPSRRSGRKARFSSVPVSKRAEVRLMEEMGLLTPGEPVVDAVVEAYAKSFDTPLPLHVIAGLRALTLLDGVHDMPVPGEKGTTATAVV

SEQ ID NO: 20286 - protein, 369 aa, Oryza sativa
  Clone ID: TF_OSC11448j.C1.p1.fg
MEAELTALDTATVEAEWLRELLVDLPVVEKPVPAILMNCDNQTVIIKVNSSKDNMKSSRHVKRRLKSVRKQKNSGVIALDYVQTAKKLADQFTKGLPRKRSEPPLSHEEEAKFEASDCLFRGALFSVLADNIVDVYMHMPSGKDMWDALEAKFGVSDAGSELYVMEQFYDYKMELENNNCELPDKFVAGGIIAKLPPFLSDFATSLKHKRQEFSVNDLIGSLGVEEKARAKDNRGKKIEGGSSANMVQKKNPHASHNNKKVKPDVKPKATTNFKKKGKGKAKGDCFVYGKPGHWAKDCPERNDKKSANIVISEGGGTSGYGRERFLLVDGKRVACGYSWCWYGRSEVYFGKDRAAEERATCPFNKEESS

SEQ ID NO: 20287 - protein, 639 aa, Oryza sativa
  Clone ID: TF_OSC900186j.C1.p18.fg
MPPQVSLQLVVMAADEGSQIWWLVVMSDESGISQADGGKRSEPPLSHEEEAKFEASDCLFRGALFSVLADNIVDVYMHMPSGKDMWDALEAKFGVSDAGSELYVMEQFYDYKMELENNNCELPDKFVAGGIIAKLPPFLSDFATSLKHKRQEFSVNDLIGSLGVEEKARAKDNRGKKIEGGSSANMVQKKNPHASHNNKKVKPDVKPKATTNFKKKGKGKAKGDCFVYGKPGHWAKDCPERNDKKSANIVISEGGGTSGYGKFLPTVLSVFHSPDWWVDTGANIHVGRGSSLLMGNGSLAAIHGVGSKCHTCVQLKQPRKPHKASEARNLAPLELVHSDLCEMNGVLTKGGKKFFMTLIDDCTRFCYLYLLKTKDEALHYFKIYKAEVENQLERKIKRLRSDRGGEYFSNEFTSFCKEFGIIHERTSPYSPQSNGVAERKNRTLTEMVNAMLDTAGLPKEWWGEAILTACHVLNKIPMKHKEITPFEQWERKKLNLSYLRTWGCLAKEAVRSEIDSIMFNGTCEVVERPYGCKPVGCKWVFKKKLRPANGFSTKSLGLMMDVKTAFLNGELEEEIYMDQPDGYALEGQEGMVCKQLKSLYGLKQAPKQWHEKFDTTLTSAGFVVNEADKCVYYRYGGGE

SEQ ID NO: 20288 - protein, 245 aa, Oryza sativa
  Clone ID: TF_OSC15136j.C1.p2.hg
MRTEEEVRKMTITSTEWPPAGITIPRRQRGNTFRGARQLTQHLLSHDGRVSDSEGSDQVSSDYEDESLRHLGEEEMESKACPRCGEIGHIASMCLTLCTHCEEDHPPGECLTRKVTCFLCEGTNHVPKDCQLSVLLTKTVEIQRTTLRLSHQLVSSNSNIDDIIHSTNAPPAAPDSAVNHSDNTFSTNHSLHRQPQQRIVVDGRSCVSPRPTPGQAKGNQPQEGDTKQKTVIHFKQQSEGSFSCE

SEQ ID NO: 20289 - protein, 727 aa, Oryza sativa
  Clone ID: TF_OSC25727j.C1.p1.fg
MKCFWVSTGKPMEVLNADQQKEFDEATTLFVGCILSVLGDRLVEVYIHMTDAKELWDALIAKFGATDASNNLYIMELFHDYKMADNRSVVEQAHVIQTMAKKLEQAHEYSVEGLIASLDVEEKTREKDSASKGDGGQSSANVVHKAQNKSKGKYKAQQTTNLKKKKNNNPNQDERTCFVCGLPGHLARKCPQRKGMKALAGQTSKSANVTIGNTRDGSGYDNLPSGFSVNQSTNWWIDIGANVARGSTVLIGNGSHASVHGVGTVDLKFTSGKIVQLKNVQHIPTIDRNLVSGSRLTRDGFKLVFESNKIVLSKHGYFIGKCYECGGLFRFSLSDFLQVPNRNKDKTPYEIWIGRKPSLSYLRTWGCLAKVNVPITKKRKLGPKTVDCVFLGYAHHSIAYRFLIVKSEVPDMHVGTIMESRDATFFVNFFLMKDTHSSSSQPSEIIPSSITSPEQTEHTHEHVTEENDSEGPRRSNRQRTAKSFGDDFIVYLVDDTSKSISKAYASPDADYWKEAVRSEMDSIITNGTWEVIERPYGCKPVGCKWVFKKKLRPDGTIEKYKARLVAKCYTQKEELDEEIYMDQPDEFVVDGQEGKKQAPKQWHEKFDKTLTSAGFAINEKILNRIGYIDKLTALDTATVEAEWVRDLLMHLPIVEKSVPAILMNCDNQTKAGKSLHEGTITKCDRQCIEGDGFETHSILERTYLCELDCWSQSMKMLGESSRKLTKD

SEQ ID NO: 20290 - protein, 245 aa, Oryza sativa
  Clone ID: TF_OSC26403j.C1.p1.fg
MELFHDYKMADNRSVVEQAHVIQTMAKKLEQAHEYSVEGLIASLDVEEKTREKDSASKGDGGQSSANVVHKAQNKSKGKYKAQQTTNLKKKKNNNPNQDERTCFVCGLPGHLARKCPQRKGMKALAGQTSKSANVTIGNTRDGSGYDNLPSGFSVNQSTNWWIDIGANVARGSTVLIGNGSHASVHGVGTVDLKFTSGKIVQLKNVQHIPTIDRNLGSGSRLTRDGFKLVFESNKIVLSKHGYLI

SEQ ID NO: 20291 - protein, 448 aa, Oryza sativa
  unsure (1)..(448): unsure at all Xaa locations
  Clone ID: TF_OSC401381j.C1.p2.np
PSXPLEACEVERRGGTHGRTRLALLGRAGGARARRTFEWSEKLVPYPCADVDEATTLFMGYILSVLGDCLVEVYMHMTLRSCGMWDALNTKFGATDASNDLYVMQFHDYRMADNRFVVEQAHEIQTMAKELVAVSXLQDGXQPFCSXAGYRPWLKNSYTALKHNRQEYTVEGLIASLDVEEKAHEKDFAPKGDGGQSSANVVHKAQNKSKGKYKAQQTTNFKKQKKNNNNPNQDERTCFVCGLPGHLARKCPQRKGMKAPAGXTSKSANVTIGNTREGTTYGNLPTIFSVNQSTNWWIDTGANVHVCADISLFSSYQVARDSTVLMGNGSHASIHGVGTVDLKTSGKIVQLKNVQHVPTINRNFVSGSRLTRDRFKLVFESNKVVVVKSFHYGRKFLAMGEFLKLILKVFVLSEIVYIVAKISKEMMFWHCKLGYIVFIIMDRSSWMY

SEQ ID NO: 20292 - protein, 470 aa, Oryza sativa
  Clone ID: TF_OSC406456j.C1.p1.fg
MSWQRVGALLLGAQSCLPVPGVPAVGRIGSVLLFMARMGWELCHVFRPYTVVMFNREKGKNVRGYASSNSSFQLNPPLASRELTRAHPWSIPSMPLSSQLPLVGSQDQNQYVFDRAFATQVNELPMPEEDVPFCHDCREQGHYALNCPWVYAKEAPSFGLTGQTSLNQPPRTKSSLQPSVQSREPNGENPLNPGNCFPPSPSYHVGSRTKQAKGKKSKNQKRKAPMRTEEEVRKMAISSTEWPPAGITIPRRQRGNTFRGARQLTQHLLSHGGRVSDSEGSDQVSSDDEDESPRHLGEEEMESKACIRCGEIGHIASMCLTLCAYCEEDHPPGECPTRKVTCFLCEGTNHVPKDCQLSVLLTKTAEIQRTTLRLSRQLVSSNSNIDDIIHNTNAPPAPPNSAINHSNNIFSTNHSLHRQPQQRVVVDGRSCVSPRPTPGQAKGNQPQEGDTKQKTVIRFNQQSEGSFSCE

SEQ ID NO: 20293 - protein, 468 aa, Oryza sativa
  Clone ID: TF_OSC18459j.C1.p2.np
MSWQRVGALLLGGSVLPACPGCPGRRGIGSVLLSMARRGWKLCHVFRLYTVVMFNREKGKNVSGYASSNSSFQLNPPLASRELTRAHPWSIPSMLLSSQLPLVGSQDQNQYVFDRAFATQVNELPMPEEDVPFCHDCREQGHYALNCPWVYVKEAPSFGLAGQTSLNQPPRTKSSLQPSVQSEEPNGDNPLNPRKCFPPSLSHHVGSRTKQAKGRKSKNQKRKAPMRTEEEVRKMTITSTEWPPPGMTKRQRRNTFRGAPQLTEQLLANGGRVSDSEDSDQVSSDDEDEKSPQGFNQNKMEHKACSRCGEIGHVASMCLTLCTHCEEDHPPGECLTRVTCFLCEGTNHVPKDCQLSVLLTKTAEIQRTTLRLSHQLVSSNNNIDDIIHRTNAPLAPPNFAINHGNNTFSTNHSLHRQPQQRIVVDGRSCVSPRPTPGQAKGNQPQEGDTKQKTVIRFKQQSEGSFSCE

SEQ ID NO: 20294 - protein, 429 aa, Oryza sativa
  Clone ID: TF_OSC400691j.C1.p14.fg
MSWQRVGALLLGAQSCLPVPGVPAVGGIGSVLLSMARMGWELCHVFRPYTVVMFNREKGKNVRGYASSNSSFQLNPPLVSRELTRAHPWSIPSMPLSSQLPLVGSQDQNQYVFDRAFATQVNELPMPEEDVPFCHDCREQGHYALNCPWVYAKEAPSFGLTVQTSLNQPPRTKSSLQPSVQSREPNGENPLNPGNCFPPSLSYHVGSRTKHAKGKKSKNQKRKAPMRTEEEVRKMTITSTEWPPAGITIPRRQRGNTFRGARQLTQHLLSHGGRVSDSEGSDQVSSDYEDESLRRLGEEEMESKACPRCGEIGHIASRCLTLCPHCEEDHPPGECPTRKVTCFLCEGTNHVPKDCQLSVLLTKTAEIQRTTLRLSRQLVSSNSNIDDIIHSTNAPLAAPDSAVNHSDNTFSTNHSLHRQPQQRISPESE

SEQ ID NO: 20295 - protein, 430 aa, Oryza sativa
  Clone ID: TF_OSC412750j.C1.p3.fg
MDEVGRRWTFSRANEGYTSCGPEWWPWVGLEQAGTPGRVPSSVQIMVGLGLRQMFNREKGKNVRGYASSNSSFQLNPPLVSRELTRAHPWSIPSMPLSSQLPLVGSQDQNQYVFDRAFATQVNELPMPEEDVPFCHDCREQGHYALNCPWVYAKEAPSFGLTVQTSLNQPPRTKSSLQPSVQSREPNGENPLNPGNCFPPSLSYHVGSRTKHAKGKKSKNQKRKAPMRTEEEVRKMTITSTEWPPAGITIPRRQRGNTFRGARQLTQHLLSHGGRVSDSEGSDQVSSDYEDESLRRLGEEEMESKACPRCGEIGHIASRCLTLCPHCEEDHPPGECPTRKVTCFLCEGTNHVPKDCQLSVLLTKTAEIQRTTLRLSRQLVSSNSNIDDIIHSTNAPLAAPDSAVNHSDNTFSTNHSLHRQPQQRISPESE

SEQ ID NO: 20296 - protein, 878 aa, Oryza sativa
  Clone ID: TF_OSC401056j.C1.p5.fg
MSTTGDNNNTGDKDKAILPQTPAEGHSRVGFAASLKPHAFDGSNYKRWKARALLWLTAVHCFFVSRGKPSELPLSPEEEAKFEAADCLFRGALISVLADNIVDVYMHMPSRKDMWDAFEAKFGVSDASSELYVMEQFYDYKMVDGRSVVEQAHEIQMLAKELENNNCELPDKFVAGGIIAKLPPSWTDFATSLKHKRQEFSVTDLIGSLGVEEKARAKDNRGKKIEGGSSANLVQKKNPHASHNNNKKVKPDVKPKATTNFKKKGKGKAKGGCFVYGKSGHWAKDCPECKDKKSTNMVISEGGGTSRYGKFLPTVLSVCHSPDWWVDTGANIHVGRGSSLLMGNGSLAAVHGVGYDSGGLFRFSLDDMCNKVVNHDEALHYFKIYKAEVENQLERKIKRLRIPTKHKEVTPFEEWEKKKLNLSHLRTWGCLAKRCHFFENEFPMKNAPSTSSQEPILSPEHFMPIEHIDQTLEENPKEDNIVATRKSKRQRTAKSFGDDYIVYLMDDTPRTIEEAYSSPDADYWKEAVRSEMDSIMSNGTWEVVERPYGCKPVGCKWVFKKKLRPDGTIEKYKARLVAKGYTQKEGEDFFDTYSPVARLTTIRVLLALAASHGLLVHQMDVKTAFLNEELEEEIYMDQLDGYVLEGQKGMVCKLLKSLYGLKQAPKQWHEKFDNKLTSAGFVVNEADKCVYYRYGGGEGVILCLYVDDILIFGTRLNVIEEVKDFLSKSIEMKDLGVGGVILNIKLLRGDEGGITLVQSHYVDKVLSRFGYSDCKAAPTPYDPSVLLRKNRRIARDQLRYSQIIGSLMYLASATRPDISFAVSKLSRVFSNPGDDHWHALERVIRYLKGTMSYEIHYAGTQKCWRAIVIQIGYLMLMR

SEQ ID NO: 20297 - protein, 1327 aa, Oryza sativa
  unsure (1)..(1327): unsure at all Xaa locations
  Clone ID: TF_OSC497j.C1.p1.np
MRVSLLAQGVWGAVDPGYAEFKEDRVALAAILQAVSKEMLRPLAKKDSAKAAWDAIKLMRVGVDRVREAKEQAFRQQYEAMRFKVGETAEEFSLRLTSVVTDIRDMGGVLDDEHMIKKFLRVVPKRYKQVAVALEQFLDLKTMPIEELVGRLSTAERDDNVDDDDDAPRGNRLYLTEEECLARMKLKDHDGSSSGSKSGGGGEKSRHDKPCSGGRGDRGHDNKSGGGSSSTRTWDRSKVKCFNCDKLGHYSKECRKPRREWREEANLVQVENEQPALLFTEVHQTVFLNEERVIKEMPDDVWYFDTGASNHMIGNRAMFASLDEKVTGTVRFGDNSVVEIQGMGAVTFQCKNGEHRALTEVYYIPRLRSNIISLGQLEEGGCRGVLENAALTLFDAERQLLAWVPRKNRMYTLSLKLATPVCLLTKADDEAWRWHERFGHLNFRSLRDMSLKHMVEGMPLVNHVEQFCQGCSLGKHHRAPFPRASAFRAERGFELVHGDLCGPITPTTTTGKRYFLLIVDDYSRYMWVEMLRSKDEAFKCFKKIKAAAENELDVKLKAFRTDRGGEFNSNEFTSYCVELGIRRDTTAPYTPQQNGVVERRNRTVVEMARSMLKSKGVPAHFWAEAVKTAVHVLNRAPTRALDGMTPYEALYRRKPKVHYLRTFGCAALVKKVGPGVSKLSDRSIPGVFIGYEDNAKAYRVYDPVAKKLYVSRDVVFEEEKKWNWETNTGRQDPDWSGTFTVVYTPRDMGDSLGSNGGTQEVSDAPGQQSPATPERPPPATPSMPTTSTGVEFVSPPMGGSCDSEGMPLRYRSLENLQQTTLPVDDTVMSDVNDFSGFCLVAAEEPDSVERALAEPNWRRAMEDEMSSIRGNETWEFARLPEGHRAIGLKWVFKVKRDPAGNIVKYKARLVAKGYAQRQGVDFDEVFAPVARLEMVRLLLALAAHDGWSVHHMDVKSAFLNGDLEEEVYVQXPPGFIDDKQGGAVLRLRKALYGLRQAPRAXHSKLDATLVSLGFDRCPMEHGVYKRKTGDDLLLVGVDLGLLSYYLGIEVQQSRGIITMCQSSYAKKILEMSGMIGCNACATPMENRLKLSKKDGSAAVNPTEYRSIVGSLRYLVNTRPDLAYSVGIVSRYMEAPTSQHMAAVKHILRYLSGTIGFGCCYRKQDQSDNGLMGYSDSDIASDLDDRRSMSGAAFFLGASLVTWTSQKQKVVALSSCEAEYIAAASAACQGLWLSRLLNDLIGGAAKKFKLLVDNKSAIALTKNPVHHDRSKHIDTKFHFIRQCVEEEKVQIDHIGTDGQLADLPTKPLGRVKFLELRRKLGVENVKVT

SEQ ID NO: 20298 - protein, 556 aa, Oryza sativa
  Clone ID: TF_OSC17441j.C1.p2.gm
MEEKPSTSCLFGSQVKSSLKLHARSEKISSKSSFREDQESRQCHPPQVPDQMPARNPNQSQSQEFPISAPKTPVKMLSRSPKITTAKSSSDQRKVSATCYDCGEQGHYVRNCPWKVFARSPEKDEKQCPGSNQAPSQSTDKKDGTLQPNSGANRKVTWKMDNGRTMIITSSEFTPEDAARIPKRQRGRNTFRGARQLTRHLIKYGSPRPEDDESGEQFSADDDDDDTDDDDDTTLNSFMERGLEFKAYHVPKDCQLNAVIAKTKKEQGTTVQPIRQPMTIDNSGHNPSALPPTLVPVEANHGRSNVTKDVHKSLLVPVSAAKVHNQKPAPRDQASRFCHNCRKPGHRFSDCPLPRAAKAVRRDSQVTSTAHDTNRHLNVQPPPQRIIVKGTVKGHIVPPAIVSSLQHQRQQRKQCQENNSSLQLQRGGTPLRQHPRQVLSAPGRPTVVSSSNAPRIAPIWRPIDKSPFGNPTGKKILPVTADKTVAPPPSKINKQSNVPGHTYPHSARDRGDVGARPPVQSDVTGNRPVTDWSPPIDRGQLGAPHACPYRVKCSEG

SEQ ID NO: 20299 - protein, 1784 aa, Oryza sativa
  unsure (1)..(1784): unsure at all Xaa locations
  Clone ID: TF_OSC400545j.C1.p64.np
ILETDERRTRNRVIRFCKVQWSNHSEGESTWEREDELKSAHPHLFASSSESISTFPESPFSQEKNLKSSKSSKATPGLEWLIPGLEIELCSRGGCSEXLGLCNRMPRYKPEYLFGTEGFVQELRTMSFAIGFGTAPLYAQIPHDHDEEKCRVKVTLNSNREDIPSVMFEAGGGNYIHACQEVARIAIGELRDRYSDQLANTEYRYHPLQPQGSDRGSYLEPEGIENDATTRHLVEMLWAMDETRAEIVLAAQDREDRNRGKICKLEDKVDRLEKELAALKGEAPPQKARVRLTAMKRALFVPRYQLAPKMVLTRSNGKGPNINNNNNNNGENPTLAQVLAQQAQLMNMMMQQLQNQQNQGNNHAPPQNKLAEFLRVRPPTFSSTTNPVEAGDWLHAIEKKLDLLQCTDQEKVSFASHQLHGPASEWWDHFRLNRTTAEPISWLEFTAAFRKTHIPSGVVSLKKKEFRSLTQGSRTVTEYLHEFNRLARYAPEDVHTDEERQEKFLEGLNDELSYPLMTGDYHDFQKLVDKAIRQEDKYNRMEQKKRRIAHFKAQQGNSQRPRLTLGPQSMPQGGSSSVVRPQRQFFNNNAGNNIRNQAPRPIAALTQQQPAKKEQGSKPGVCFNCGEPGHYSDKCPKPRCVKVVPVQSNSTAPASKARVNHVAAAEAQGAPDVILGTFPVNSFPAIVLFDSGATHSFLSMSFAGNHGMEVEDLRRPLMVSTPSNQALSLQRSPSVRIEIQGVPFLANLILLESKDLDVILGMDWLARYKGVIDCANRKVTLTSNDGRVVTVHALSSEPLRSSLNQIALEEIPIVQEYPDVFPDDLPGMPPKRDIEFRIDLVPGTTLIHKRPYRMAANELAEVKRQVDDLLQKGYIRPSSSPWGAPVIFVEKKDHTQRMCVDYRALNDVTIKNKYLLPRIDDLFDQLKGATIFSKIDLRSGYHQLRIKEEDIPKTAFTTRYGLFECTVMSFGLTNAAAFFMNLMNKVFMEYLDKFVVVFIDDILIYSRTKEEHEEHLRLALEKLREHQLXAKFSKCEFXLSAVKFLGHVISAGGVAVDPSNVESITNWKQPKTVSEIRSFLGLAGYYRRFIENFSKIAKPMTXLLQKDVKYKWSEECEQSFQELKSRLISAPILILPDPKKGFQVYCDASKLGLGCVLMQDGKVVAYASRQLRPHEKNYPTHDLELAAVVHALKIWRHYLFGTRTEVYTNHKSLKYIFTQPDLNMRQRRWLEFIKDYDMGIHYHPGKTNVVADALSRKGYCNATEGRQLPLELCKEFKRLNLGIVSRGLVAALEAKPTLIDQVREAQINDPDIQEIKKNMRRGKAIGYLEDEQGTVWLGERICVPNNKDLKDAILKEAHDTLYSIHPGSTKMYQDLKERFLWASMKREIAEYLAVCDVCQRVKVEHQKSAGLLQPLKIPEWKWEEIGMDFITGLPRTSSGHDSIWVIVDRLTKVAHFIPVKTTYSGSRLAELYMARIVCLHGVPKKIVSDRGSQFTSKFWKKLQEEMGSKLNFSTAYHPQTDGQTERVNXILEDMLRACALDFGGSWNKNLPYAEFSYNNSYQASLQMAPYEALYGRKCRTPLLWDQTGERRVFGTDILREAEEKVKIIQERLRVAQSRQKSYADNRRRDLSFEEGDHVYLRVTPLXGVHRFRTKGKLAPRFVGPYKVVSRRGEVAYQLELPQSLAGVHNVFHVSQLKKCLRVPTEEANLEQIEIQEDLAYVEKPIRILEWTDERRTRNRVIRFCKVQWSNHSEEESTWEREDELKSAHPHLFASSSESRGRDSV

SEQ ID NO: 20300 - protein, 1592 aa, Oryza sativa
  Clone ID: TF_OSC401340j.C1.p25.fg
MGKLKESEELLERCLEVRKRILSEEHFQITYQVFEFFTTSSALLAINTDWEVAVTLVHLARLTMLNFISDKEDSDLARSKLVRARLLVNDSISSPPEVRHVRRSVSAFGRLEHSASAGRRARRSRRAQASNGSDRCSSSEGGQTGGSGVGSSQGGGGGGGGGGGRCGTCGGGSLRSWQEKGHGSGQSGGQQPTSTAAAAAQGTARPPTGTQTGAGVPAAARSPHAAIAGSAALSPDRRHGHHVVQTVVRDFGPVGGWPTLTKTNYIEWAVVMRVRLQVRHMWEAVRYGDVDYDEDRRALDALIATVPPEMQFSLSQKRTAKEAWDAIAAARIGRDRARKSTLQALRKEWENLAFKPGEDVDDFALRLNTLLQKMVQYGDDTYDEERAVEKLFRYVPEKYRQIARSIESLLDLSTMSIEEALGRLKVVDGDEPQPLLGPITIGGKLHLTREQWEASQGNGRKGESSSPTGGRKPRKARGGVQLRWARRHAEGGARRGAQGVATGNHKPARDDACRSCGKLGHWAKDCRQPRRGQVHVARVEEEPALLLAHANIELPPAAPAAAAFLHLDEPKVLVSLCNGSSNDKADGWYLDTGSTHHMTDRREFFTEFDSSVRGSVKFGDASGVEIKGVGSVTFTAKSGEHRLLTGVYYIPALRNSIISVEQLDENGSRVLVEDGLMRIWDRCRRLLAKVTRGTNRLYILSAQVAQPVCLAARRDDEAWQWHERFGHLHFEALKQLSAKEMVRGMPCLDRVEQLCDVCVVTKQRRLPFPQQTSFRAKEQLELVHGDLCGPVTPATPGGRRYFLLLVDDLSRYMWVMVLGSKGEAADAIRHAQAAAEAECGRKLRVLCTDNGGEFTAAEFASYCADEGIQRHYTTPYSPQQNGVVERRNQMVVGMARALLKQRGMPAIFWGEAVVTAAYILNRSPTKALDGRTPYEAWHGRKPAVSHLRVFGCLAFAKELGHIGKLDDRSTPGVFIGYAEGSKAYRILDPETACAHCARRCVRRRPRVGMGQGGGRWLDFTVEYVHFEGAGGLGSSSSPSVSTQAPESPPTPTPTHPRATTSTTTSSSSTPPQPVTPHAPAPTATPSTSTPTPARVERSPVEFATPLSHDGERIDAYHDGEQLRYRTMEDLLGDQPVPGLVPRDLEAQLHLACDDGEPRSFAEAEKHAAWRAAMQSEMDAVQENRTWELADLPRGHRAITLKWVFKLKRDEAGAIVKHKARLVARGFVQQEGIDYDDACAPVAWMESVRLLLALVAHEGWGVHHMDVKSVFLNVDLKEEVYVHQPPGFVIPGKEGKVLRLHKALYGLRQAPRAWNAKLDSTLKGMGYEQSLHEAAIYRRGNGGNALLVGVYINDLVIIGTKDAEVAAFKEEMKATFQMSDLGPLSFYLGIEVHQDDSGITLRQTAYAKRVVELAGLTDCNPALTPMEERLKLSRDSTAEEVDATQYRRLVGSLRYLTHTRPDLAFSVGYVVALSSCEAEYMAASATSTQALWLARLLSDLLGRDTGTVELRVDSKSALALAKNPVFHERSKHIRVRYHFIRSYLEEGSIKASYINTKDQLADLLTKPLGRIKFLELCSRIGMAQLPHKTTHKT

SEQ ID NO: 20301 - protein, 1623 aa, Oryza sativa
  Clone ID: TF_OSC418119j.C1.p2.fg
MCSRDDCSEWLGLSNRMPRYKPEYLFGVERFVQELRTMSFAIGFGTAPLYAQIPHDRDEEKCRVKVTLNSNSEDIPSVMFEVGGGNYIHACQEVARIAIGELRDRYSDQLADTEYRYHPRQPQGGDRGSYLETEGIENDATTRHLVEILWAMDETRAEVVLAAQDREDRNRDKICKLEDNVDSIRCKWARPGGGGTLHGSFGPGLGEAGRYMDRLEKELAALKGEAPPQKARVRLTARKRALFVPRYQLAPKVRVVEKEATPTLADPPVVNVSDDEGEESKRTHSKVEWGATQDDGDEPNEPSINSDAGSGDWLHAIEKKLDLLQCTDQEKVSFASHQLHGPASEWWDHFCLNRTTAEPITWLEFTAAFRKTHIPSGVVSLKKKEFKSLTQGSRTVTEYLHEFNRLARYAPEDVRTDEERQERFLEGLNDELSYPLMTGDYHDFQKLVDKAICQEDKYNRMKQKKRRIAHFKAQQGNSQKPRLPLGPQSMPQGGSLSVVRPQRQFFNNNAGNNIRNQAPLPVAAPTQQQPAKKEQGSKPGVCFNCGEPGHYSDKCPKPRRVKVVPAQSNSTAPASKARVNHVAAAKAQGAPDVILGTFLVNSVPATVLFDFGATHSFLSMSFAGNHGMEVEDLRCPLMVSTPSNQALSLQRSPSVRIEIQGVPFLANLILLESKDLDVILGMDWLARYKGVIDCANRKVTLTSNDGRVVTVHALSSEFLRSSLNQIALEEIPIVQEYPDVFPDDLPANELAEVKRQVDDLLQKGYIRPSSSPWGAPVIFVEKKDHTQRMCVDYRALNDVTIKNKYPLPRIDDLFDQLKGATVFSKIDLRSGYHQLRIKEEDIHKTAFTTRYGLFECTVMSFGLTNAPAFFMNLMNKVFMEYLDKFVVVFIDDILIYSRTKEEHEEHLRLALEKLREHQLYAKFSKCEFWLSEVKFLGHVILAGGVAVDPSNVESVTNWKQPKTVSEIRSFLGLAGYYRRFIENFSKIAKPMTRLLQKDVKYKWSEECEQSFQELKSRLISAPILILPDPKKGFQVYCDASKLGLGCVLMQDGKVVAYTSRQLRPHEKNYPTHDLELAAVVHALKIWRHYLFGTRTEVYTDHKSLKYIFTQPDLNMRQRRWLELIKDYDMGIHYHPGKANVVADALSRKGYCNATEGRQLPLELCKEFEILNLGIVSRGFVAALEAKPTLIDQVREAQINDPDIQEIKKNMRRGKAIGYLEDEQGTVWLGERICVPDNKDLKDAILKEAHDTLYSIHPGSTKMYQDLKERFWWASMKREIAEYVAVCDVCQRVKAEHQKPAGLLQPLKIPEWKWEEIGMDFITGLPSTSSGHDSIWVIVDRLTKVAHFIPVKTTYSGSRLAELYMARIVYLHGVPKKIVSDRDEQTERVNQILEDMLRACALDFGGSWDKNLSYAEFSYNNSYQASLQMAPYEALYGRKCRTLLLWDQTGERQVFGTDILREAEEKVKIIQERLRVAQSRHKSYADNRRRDLSFEEGDHVYLRVTPLRGVHRFHTKGKLAPCFVGPYKIINRRGEVAYQLELPQSLAGVHNVFHVSQLKKCLRVPTEEANLEQIEVQEDLTYVEKPIRILETNERRTRNRVIRFAKSNGVITRKKNQLGNEKMN

SEQ ID NO: 20302 - protein, 1508 aa, Oryza sativa
  Clone ID: TF_OSC8370j.C1.p11.fg
MMPRCKPEYLFGVEGFVKELRTMSFAIGFGTAPLYAQIPRDRDEEKCRVKVTLNSNSEDILSVMFEAGGGNYIHACQEVARIAIGELRDRYSDQLADTEYRYHPRQPQGSDRGSYLETEGIENDATTRHLVEMLWAMDKTRAEIVLAAQDREDRNRGKICKLEDKVDRLEKELAALKGEAPPQKARVRLTARKRALFVPRYQLAPKVRVVEKEATPTLADPPIVNNKLAEFLRARPPTFSSTTNPVEAGDWLHAIEKKLDLLQCTDQEKKTHIPSGVVSLKKKEFRSLTQGSRTVTEYLHEFNRLARYAPEDVRTDEERQERFLEGLNDELSYPLMTGDYHDFQKLVDKAIRQEDKYNRMEQKKCRIAHFKAQQGNSQRPRLTLGPQSMPRGGSSSVVRPQRQFFNNNAGNNIRNQAPHPVAAPTQQQPAKREQGIKPGVCFNCGEPGHYSDKCPKPRRVKVVPAQSNSTAPASKARVNHVAAAEAQGAPDVILGTFLVNSVPATVLFDSGATHSFLSMSFAGNHGMEVEDLRRPLMVSTPSNQALSLQRSPSVRIEIQGVPFLANLILLESKDLDVILGMDWLARYKGVIDCANRKVTLTNNDGRVVTVHALSSESLRSSLNQIALEEIRIVQEYPDVFPDDLPGMPPKRDIEFRIDLVPGTTPIHKRPYRMAVNELAEVKRQVDDLLQKGYIRPSSSLWGAPVIFVEKKDHTQRMCVDYRALNDVTIKNKYPLPRIDDLFDQLKGATVFSKIDLRSGYHQLRIKEEDIPKTAFTTRYGLFECTVMSFGLTNAPTFFMNLMNKVFMEYLDKFVVVFIDDILIYSRTKEEHEEHLRLALEKLREHQLYVKFSKCEFWLSEVKFLGHVISAGGVTVDPSNVESVTNWKQPKTVSEIHSFLGLAGYYRRFIENFSKIAKPITRLLQKDVKYKWSEECEQSFQELKNRLISAPILILPDPKKGFQVYCDASKLGLGCVLMQDGKVIAYASRQLRPHEKNYPTHDLELAAVVHALKIWRHYLFGTRTEDYDMGIHYHLGKVNVVADALSRKGYCNATEGRQLPLELCKEFERLNLGIVSRDFVAALQAKPTLIDQIREAQINDPDIQEIKKNMRRGKAIGFLEDEQGTRVKAEHQKPTGLLQPLRIPEWKWEEIGMDFITGLPRTASGHDSIWVIVDRLTKVAHFILVKTTYSGSRLAELYMARIVCLHGVPKKIVSDRGSQFTSKFWKKLQEEMGSKLNFSTAYHPQTDGQTERVNQILEDMLRACALDFGGSWDKNLPYAEFSYNNSYQASLQMAPYEALYGRKCRTPLLWDQMGERQVFGTDILREAEEKVKIIQERLRVAQSRHKSYADNRRRDISFEEGDHVYLRVTPLRGVHRFHTKGKLAPRFVGPYKIVSRRGEVACQLELPQSLAGVHNVFYVSQLKKCLRVPTEEANLEQIEVQEDLTYVEKPIRILEIDERRTRNRVIRFCKVQWSNHSEEESTWEREDELKSAHPHLFASSSESRGRDSV

SEQ ID NO: 20303 - protein, 1574 aa, Oryza sativa
  unsure (1)..(1574): unsure at all Xaa locations
  Clone ID: TF_OSC8370j.C1.p11.np
MPRCKPEYLFGVEGFVKELRTMSFAIGFGTAPLYAQIPRDRDEEKCRVKVTLNSNSEDILSVMFEAGGGNYIHACQEVARIAIGELRDRYSDQLADTEYRYHPRQPQGSDRGSYLETEGIENDATTRHLVEMLWAMDKTRAEIVLAAQDREDRNRGKICKLEDKVDRLEKELAALKGEAPPQKARVRLTARKRALFVPRYQLAPKVRVVEKEATPTLADPPIVNVSDDEGEESKRTHSKVEWGATQDDGDEPNEPSILRCPEDLECLFSPVSLLVPCPCQMVLTRSNGNGPNINNNNNNNGENPTLAQVLAQXAQLMNMMMQQLQNQXNQGNNHAPPQNKLAEFLRARPPTFSSTTNPVEAGDWLHAIEKKLDLLQCTDQEKVSFASHQLHGLASEWWDHFRLNRTTAEPISWLEFTAAFXKTHIPSGVVSLKKKEFRSLTQGSRTVTEYLHEFNRLARYAPEDVRTDEERQERFLEGLNDELSYPLMTGDYHDFQKLVDKAIRQEDKYNRMEQKKCRIAHFKAQQGNSQRPRLTLGPQSMPRGGSSSVVRPQRQFFNNNAGNNIRNQAPHPVAAPTQQQPAKREQGIKPGVCFNCGEPGHYSDKCPKPRRVKVVPAQSNSTAPASKARVNHVAAAEAQGAPDVILGTFLVNSVPATVLFDSGATHSFLSMSFAGNHGMEVEDLRRPLMVSTPSNQALSLQRSPSVRIEIQGVPFLANLILLESKDLDVILGMDWLARYKGVIDCANRKVTLTNNDGRVVTVHALSSESLRSSLNQIALEEIRIVQEYPDVFPDDLPGMPPKRDIEFRIDLVPGTTPIHKRPYRMAVNELAEVKRQKDHTQRMCVDYRALNDVTIKNKYPLPRIDDLFDQLKGATVFSKIDLRSGYHQLRIKEEDIPKTAFTTRYGLFECTVMSFGLTNAPTFFMNLMNKVFMEYLDKFVVVFIDDILIYSRTKEEHEEHLRLALEKLREHQLYVKFSKCEFWLSEVKFLGHVISAGGVTVDPSNVESVTNWKQPKTVSEIHSFLGLAGYYRRFIENFSKIAKPITRLLQKDVKYKWSEECEQSFQELKNRLISAPILILPDPKKGFQVYCDASKLGLGCVLMQDGKVIAYASRQLRPHEKNYPTHDLELAAVVHALKIWRHYLFGTRTEVYTNHKSLKYIFTQPDLNMSQRRWLXLIKDYDMGIHYHLGKVNVVADALSRKGYCNATEGRQLPLELCKEFERLNLGIVSRDFVAALQAKPTLIDQIREAQINDPDIQEIKKNMRRGKAIGFLEDEQGTVWLDKRICVPDNKDLKVAILKEAHDTLYSIHPSSTKMYQDLKEXFWWASMKREIAXYVAVCDVCQRVKAEHQKPTGLLQPLRIPEWKWEEIGMDFITGLPRTASGHDSIWVIVDRLTKVAHFILVKTTYSGSRLAELYMARITDGQTERVNQILEDMLRACALDFGGSWDKNLPYAEFSYNNSYQASLQMAPYEALYGVHNVFYVSQLKKCLRVPTEEANLEQIEVQEDLTYVEKPIRILEIDERRTRNRVIRFCKVQWSNHSEEESTWEREDELKSAHPHLFASSSESRGRDSV

SEQ ID NO: 20304 - protein, 1396 aa, Oryza sativa
  Clone ID: TF_OSC900207j.C1.p2.fg
MVHCFELCYAEGIVTISIRWYTSGQSKTIRIAVPAYLLNAIYTNETILCHPLLSPALAYLLHGLLSMSYTLLAIIHQRRSSKVMLKMPRFKPEYLFGIEGFVQELRAMSFTIGFGTAPLYAQIPHDRDEEKCRVKVTLNSDREDIPSVMFKAGGGSYPHACQEVARIAIGELRGRYNDLLADTEYRYHPRQPQGSDRASYVDPEGIENDATTRHLVEMLWAMDESRVEIVSAAQAREDRNRGKICKLEGKVDRLEKELAELKGEAPPQKARVRLTARKRALFVPRYQLAPKVHVVSREAVPVDPPVVNLSDDEEEDSKRTHSKNQQNQGNNHAPPQNKFAEFLRVRPPTFSSTTNLVEAGDWLHTIEKKLDLLQCTDQEKVSFASHQLHGPAFEWWDHFRLNRATAEPITWLEFTAAFRKTHVPSRVVSLKKKEFRALTQGSRSVTEYMHEFNRLARYAPKDVRTNEEHQEKFLEGLNDELSYPLMTGDYSDFQELRQFYNNNNNRNQAPRPVATPVQHQPVKREQENKPGVCFNCGEPGHYSDKCPKPRRVKTIPVQNNSNAPTSKAHVNHVAVAEAQGATDVILEIQGVPFPANLILLESKDLDVILGTDWLDRYKRVIDYANRKVTLTSNDGQVVTVHALPSEPLRSSLNQITLEEIPIVRDYPDVFPDDLPAKVKRQVDDLLQKGYIRPSSSPWGAPVIFVEKKDHTQRMCVDYRALNDVTIKNKYPLPRIDDLFDQLKGATVFSKIDLRSGYHQLRIKDEDIPKTSFTTRYGLFECTVMSFGLTNAPAFFMNLMNKVFMEYLDKFMVVFIDDILIYSQTKEEHEEHLRLALEKLREHQLYVKFSKCEFWLSAVKFLGHVISAGGVAVDPSYYRRFIENFSKIAKPMTRLLQKDVKYKWSEECEQSFQELKSRLISAPILILPDPKKGFQVYCDASKLGLGCVLMQDGNVVAYASHQLRPHEKNYPTHDLELAAVIHALKIWRHYLFGTRTEVYTDHKSLKYIFIQPDLNMRQRRWLELIKDYDMGIHYHPGKANDVADVLSRKGYCNATEGRQLPWELCKEFERLNLGIVSRGFVVALEAKPTLIDQVREAQINDLNIQEIKKNMRRGKAIGYLEDEQGTVWLGERICVPDNKELKDTILKEAHDTLYSIHPGSTKMYQDLKEKFWWASMKHEIAEYVAVCDVCQRVKAEHQKPAGERQVFGTDILREAEEKVKIIQERLRIAQSRHKSYADNRRRDLSFEEGDHLYLRVMPLRGAHRFRTKGKLAPCFVGPYKIISRRGEVAYQLELPQSLAGVHNVFHVSQLKKCLRVPTEEANPEQIEIQEDLTYVEKPIRILETDEKRTRNRVIRFCKVQWSNHSEEEATWEREDELKSAHPHLFVISSESRGQDSV

SEQ ID NO: 20305 - protein, 1504 aa, Oryza sativa
  Clone ID: TF_OSC900380j.C1.p12.fg
MPRYKPEYLFGTEGFVQELRTMSFAIGFGTAPLYAQIPHDRDEEKCCIKVTLNSNREDIPSVMFEAGGGSYIHACQEVARITIGELRESYNDQLADTEYRYHPRQPQGNDRGSYLEPAGIENDATTRHLVEMLWAMDETRVEIVLAAQDREDRNRGKICKLEDKVDRLEKELAALKGEAPPQKARVRLTARKGALFVPRYQLAPKVRVVEKEAAPAPADPPVVNCTDQEKVSFASHHLHGPASEWWDHFRFNRTTAEPITWLEFTAAFRKTHIPSGVVSLKKEFRVLTQGSRFVTKYLDEFNRLPRYTPEDVCTDEERQEKFLEGLNDELSYPLMTGDYHDFQKLVDKAIRQEDKYNRMEKKKHRIAHFKAQQGNSQRPRLAMGPQAVSQGGSSSVVRPQRQLFNNNASNNNRSQAPRPVATPTQHQPAKREQGNKPGVCFNCGEPGHYSDKCPKPRRVKIVPAQNNSSAPASKAHVNHVAAAEAQSAPDVILGTFPVNSVPATVLFDSGATHSFLSMSFAGNHGMEVEDLRRPLMVSTPSNQALSSQRSPSVRIEIQGVPFLANLILLESKDLDVILGMDWLAKYNGVIDCTNRKVTLTSNDGQVVTVHSLPYGPLRSSLNQITLEEIPIVREYPDVFLDDLPGMPPKRDIEFRIDLVPGTTPIHKRPYRMAANELAEVKRQVDDLLQKGYIRPSSSPWGAPVIFVEKKDHTQRMCVDYRALNDVTIKNKYPLPRIDDLFDQLKDATVFSKIDLRSRYHQLRIKEEDIPKTAFTTRYGLFECTVMSVGLTNAPAFFMNLMNKVFMEYLDKFVVVFIDDILIYSRTKEEHEEHLRLALEKLREHQLYAKFSKCEFWLSEVKFLGHVISAGGVAIDPSNVESVTNWKQPKTVSEIRSFLGLAGYYRRFIENFSKIPKPMTRLLQKDVKYKWSEECEQSFQELKSRLISAPILILPDPKKGFQVYCDASKLGLGCVLMQDGKVVSYASCQLRPHENYPTHDLELAAVVHALKIWRHYLFGTRTEVYTDHKSLKYIFTQPNLNMRQRRWLELIKDYDMGIHNHHGKANVVADALSRKGYCNATEGQQLPWELCKEFERLNLGIVSRGFVATLEAKPTLIDQVREAQINDPDIQEIKKNMRRGKAIGYLEDEQGTVWLGERICVPENKELKDAILKEAHDTLYSIYPGSTKMYQDLKEKFWWASMKYERVKAEHQKPAGLLQPLKIPEWKWEEIGMDFITGLPRTSSGHDSIWVIVDRLTKVAHFIPVRTTYFGSRLAELYMARIVCLHGVPKKIVSDRGSQFTSKFWKKLQEEMGSKLNFSTAYHPQIDGQTERVNQILEDMLRACALDFGGSWDKNLPYAEFSYNNSYQASLQMAPYEALYGRKCRTPLLWDQTGERQVFGTDILREAEEKVKIIQERLRIAQSRHKSYADNRRSDLSFEEGDHVYLRVTPLRGVHRFHTKGKLAPRFVGPYKIVSQRGEVAYQLELPQSLAGVHNVIHVSKLKKC

SEQ ID NO: 20306 - protein, 1082 aa, Oryza sativa
  Clone ID: TF_OSC401728j.C1.p15.fg
MSGVAAAAGGDGGGGAPPTGAGASAPGGGAVNDNNNGGNSASPSSGGPFSGAIPVPLLALSLYYVRYVLVPVLHDASMRYCYVPVPDIHDAHSMLLVMLRSPYTAYAMIIALTFWIKICRLMTIFPTIQKLDRSFSVVGFAAALKPHAFDGSNYKRWKARALLWLTAMQCFYVSRGKRSEPPLSPEEEAKFEASDCLFRGTLISVLADNIVDVYMHMPSGKDMWDALEAKFGVSDADSELYVMEQFYDYKMVDDRSVVEQAHEIQMLVKELENNNCELPDKFVAGGIIAKLPPSWSDFATSLKHKRQEFSVSDLIGSLGVEEKARAKDVRGKKVEGGSSANMVQKKNPHASHDNKKVKPDVKSKATTNFKKKDKGKAKVDCFVCDKSGHWAKDCPERKDRKSANMVISEGGGTSGYGKILSTVLSVFHSPDWWVDTGANIHVGRGSSLLMGNGSLAAVHGVGSKCHTCVQSKQPRKPHKASEARNLAPLELVHSDLCEMNGVLTKGGKKYFMTLIDNCTRFCYVYLLKTKDEALYYFKIYKAEEVTPFEEWERKKLNLSYLQTWGCLAKVNVPIAKKWKFGPNTVDCVFLGYAIHSVVYRFLIVNSGVPDMHVGTILESRGATFFENEFPMKHTPSTSSKETVMPHEHLAPIEHNDQTPKENPEEDNIVDTRKSKRQRVAKSFGDDYIVYLVDDTPRTIEETYSSPDADYWKEAVRSEMDSIMSNGTWEVVERPYGCKPVGCKWVFKKKLRPDGTIEKYKARLVAKCYTQKEGEDFFDTYSPVARLTTIRVLLALAASLGLLVHQMDVKTAFLNGELEEEIYMDQPDGYVLEGQEGMVCKLLKSLYGLKQAPKQWHEKFDTTLTSAGFVVNEADKCVYYRYGGGEGVILCLYVDDILIFGTSLNVIEEVKDYLSKSFEMKDLGEADVILNIKLQRGDEGGITLVQSHYVDKVLSRFGYSDCKPAPTPYDPSVLLRKNRRIARDQLRYSQIIGSLMYLASATRPNISFAVSKLSRFVSNPGDDHWQALERVMRYLKGTMSYGIHYTGYPKVLEGYSDSNWISDADEIKATSGYVFTLGGGAVS

SEQ ID NO: 20307 - protein, 638 aa, Oryza sativa
  Clone ID: TF_OSC401847j.C1.p19.fg
MSTTGDNNNTRDKEEPPVNTNGGNTVSNSSGGPFSGYNVSLLPFVLRFLQLSVAILLRSLVYVDAYSILSTLKLYTSSTVTRSTHIANVMFIVLIFWIKICRIMTKFPTIQKLDSVHADSIVDVYMHMPSGKDMWDSLEAKFGVSDADSELYVMEQFYDYNMVDDRSVVEHAHEIQMLAKELENNNCELPDKFVAGGIIAKLPPSWSDFGTSLKHKRQEFSVTDLIGSLGVEEKTRAKDNRDKKIEGGSSANLVQKKNPHASHNKNKKVKPDVKPKATINFKNKDKGKAKGDCFVCGKPRHWAKDCPECMDKKSANMVISEGGGTSGYGRERFLLVDGKRIVCGCSWCRFCYVYLLKTKDEALHYFKIYKAEVENQLERKIKRLRSGRGGEYFSNEFTSLCEEYGIIHERTPPYSPQSNGVAEKKNRTLTEMVNAMLDTARLSKEWWGEAILTACHVLNRIPTMHKELTPFEEWERKKLNLPHLRTWGCLAKVNVSIAKKRKLGPKTVDCVFLGYAIHSVGYRFLTVNSGVPDMRVGIITESRDATFFENEFPMKNAPSTSSQEPILSPEHFVPIEHIDQMLEENSEEDNIVATQKSKRQRTAKSFGDDYVVYLVDDTPRTIEEAYSSPDTDYWKEAV

SEQ ID NO: 20308 - protein, 131 aa, Oryza sativa
  Clone ID: TF_OSC423289j.C1.p1.gm
HKRQEFSVSDLIGSLGVEEKARAKDVRGKKVEGGSSANMVQKKNPHASHDNKKVKPDVKSKATTNFKKKDKGKAKVDCFVCDKSGHWAKDCPERKDRKSANMVISEGGGTSGYGRERFLLVDGKRVACGCS

SEQ ID NO: 20309 - protein, 751 aa, Oryza sativa
  Clone ID: TF_OSC12493j.C1.p1.fg
MSGVAGGGGAPPPTGAGSGAGAPPPTGAGSGAGAPGGGAVNDYNNGGNSASPSSGGPFSGYNLLLLLLLLALYCVSYVLVPVLHDASSMLSHYWYVPVSDIHDAHSMLLVMLRSPYTAYAMIIVSISWIKICRIMTIFPTIQKPDRSFSVVGFAAALKPHAFDGSNYKRWKARALLWLTAMQCFYVSRGKRSEPPLSPEEEAKFEASDCLFRGALISVLADNIVDVYMHMPSGKDMWDALEAKFGVSDAGSELYVMEQFYDYKMVDDRSVVEQAHEIQMLAKELENNNCELPDKFVAGGIIAKLPPSWSDFATSLKHKRQEFSVPDLIGSLGVEEKARAKDVRGKKVEGGSSANMVQKKNPHASHNNKKVKPDVKPKAATNFKKKGKGKAKGDCFVCGKSGHWAKDCPERKDRKSANMIISEGGGTSGYGKILPTVLSVFHSPDWWVDTGANIHVGRGSSLLMGNGSLAAVHGVGTVDLKFTSGKTVQLKNVQHVPSIKKNLVSGSLLCREGFRLVFESNKCVVSKYGTFVGKGYDSGGLFRFSLNDMCNNHNAVNHISENDESNVWHSRLCHVNFGCMTRLANMSLIPKFTLVKGSKCHTCVQSKQPRKPHKASEARNLAPLELVHSDLCEMNGVLTKGGKKYFMTLIDDCTRFCYVYLLKTKDEALHYFKIYKAEVENQLERKIKRLRSDRGGEYFSNEFASFCEEFGIIHEMTPPYSPQSNGVPERKNRTVASQNDSKTHPRNCAKNN

SEQ ID NO: 20310 - protein, 805 aa, Oryza sativa
  Clone ID: TF_OSC1305j.C1.p1.fg
MSGVAAAATGGGGAPPPTGAGAPPPTGAGSGAGAPGGGAVNDYNNGGNSASPSSGGPFSGYNLLLLLLLLALFLFPLLALYCVRYVLVPVLHDASSMLSRYWYVPVSDIHDAHSMLLVMLRSPYTAYAMIIVSISWIKICRIMTIFPTIQKPDRSFSVVGFAAALKPHAFDGSNYKRWKARALLWLTAMQCFYVSRGKRSEPPLSPEEEAKFEASDCLFRGALISVLADNIVDVYMHMPSGKDMWDALEAKFGVSDAGSELYVMEQFYDYKMVDDRSVVEQAHEIQMLAKELENNNCELPDKFVAGGIIAKLPPSWSDFATSLKHKRQEFSVPDLIGSLGVEEKARAKDVRGKKVEGGSSANMVQKKNPHASHNNKKVKPDVKPKVATNFKKKGKGKAKGDCFVCGKSGHWAKDCPERKDRKSANMIISEGGGTSGYGKILPTVLSIFHSPDWWVDTGANIHVGRGSSLLMGNGSLAAVHGVGTVDLKFTSGKTVQLKNVQHVPSIKKNLVSGSLLCREGFRLVFESNKCVVSKYGTFVGKGYDSGGLFRFSLNDMCNNHNAVNHISKNDESNVWHSRLCHVNFGCMTRLANMSLIPKFTLVKGSKCHTCVQSKQPRKPHKASEARNLAPLELVHSDLCEMNGVLTKGGKKYFMTLIDDCTRFCYVYLLKTKDEALHYFKIYKAEVENQLERKIKRLRSDRGGEYFSNEFASFCEEFGIIHEMTPPYSPQSNGVAERKNRTLTEMVNAMLDTAGLSKEWWGEAVLTACHVLNKIPMKHKEVTPFEEWERKKLNLSYLRTWCCMAK

SEQ ID NO: 20311 - protein, 1186 aa, Oryza sativa
  Clone ID: TF_OSC1309j.C1.p6.fg
MSGVAAAATGGGGAPPPTGAGAPPPTGAGSGAGAPGGGAVNDYNNGGNSASPSSGGPFSGYNLLLLLLLLALFLFPLLALYCVRYVLVPVLHDASSMLSRYWYVPVSDIHDAHSMLLVMLRSPYTAYAMIIVSISWIKICRIMTIFPTIQKPDRSFSVVGFAAALKPHAFDGSNYKRWKARALLWLTAMQCFYVSRGKRSEPPLSPEEEAKFEASDCLFRGALISVLADNIVDVYMHMPSGKDMWDALEAKFGVSDAGSELYVMEQFYDYKMVDDRSVVEQAHEIQMLAKELENNNCELPDKFVAGGIIAKLPPSWSDFATSLKHKRQEFSVPDLIGSLGVEEKARAKDVRGKKVEGGSSANMVQKKNPHASHNNKKVKPDVKPKVATNFKKKGKGKAKGDCFVCGKSGHWAKDCPERKDRKSANMIISEGGGTSGYGKILPTVLSIFHSPDWWVDTGANIHVGRGSSLLMGNGSLAAVHGVGTVDLKFTSGKTVQLKNVQHVPSIKKNLVSGSLLCREGFRLVFESNKCVVSKYGTFVGKGYDSGGLFRFSLNDMCNNHNAVNHISKNDESNVWHSRLCHVNFGCMTRLANMSLIPKFTLVKGSKCHTCVQSKQPRKPHKASEARNLAPLELVHSDLCEMNGVLTKGGKKYFMTLIDDCTRFCYVYLLKTKDEALHYFKIYKAEVENQLERKIKRLRSDRGGEYFSNEFASFCEEFGIIHEMTPPYSPQSNGVAERKNRTLTEMVNAMLDTAGLSKEWWGEAVLTACHVLNKIPMKHKEVTPFEEWERKKLNLSYLRTWCCMAKSRDATFFENEFPMKYTPSTSSKETVMPHEHFAPIEHNDQTPEENPEEDNIVDTRKSKRQRVAKSFGDDYIVYLVDDTPRTIEEAYSSPDADYWKEAVRSEMDSIMSNGTWEVVERPYGCKPVGCKWVFKKKLRPDGTIEKYKARLVAKGYTQKESEDFFDTYSPVARLTTIRQAPKQWHEKFDTTLTSAGFVVNEADKCVYYRYGGGEGVILCLYVDDILIFGTSLNVIEEVKDYLSKSFEMKDLGEADVILNIKLQRGDEGGITLVQSHYVDKVLSRFGYSDCKPAPTPYDPSMLLRKNRRIARDQLRYSQIIGSLMYLASATRPDISFAVSKLSRFVSNPGDDHWQALERVMRYLKGTMSYGIHYTGYPKVLEGYSDSN

SEQ ID NO: 20312 - protein, 413 aa, Oryza sativa
  Clone ID: TF_OSC14746j.C1.p5.gm
MPSRKDMWDALEAKFGVSDAGSELYAMEQFYDYKMVDDRSIVEQAHEIQMLAKELENNNCELPDKFVADGIIAKLLPSWSDFATSLKHKRQEFSVSDLIGSLGVEEKARAKDNRGKKVEGGSSANMLQKKNPHASHNNKKVKADVKPKATTNFKKKGKGKAKGDCFVCGKSGHWAKDCPERKDRKSANMVISEGRGTSGYVNYGVPDMRVGTIIESRDATFFDNEFAMKNTPSTSSQETVIPHKHFAPIEHNDQTPEGNPEEDNIVDTRKSKRQRVAKSFGDDNIVYLVDGTPRTIEEAYSSPDADHWKEAVRSEMDSIMSNGTWEVVERPYGCKPVGCKWVFKKKLRPDGTIEKYKARLVAKASHGLLVHQMDVKTAFLNGELEEEIYMDQPDGDVDLQNISEGTHLYEFDC

SEQ ID NO: 20313 - protein, 1382 aa, Oryza sativa
  Clone ID: TF_OSC16536j.C1.p8.fg
MSNTGDKEKETPVNTNGGNTASNSSGRPFLGYNLITLFQLEVLLLMFIAMSTLCHYVIVDAYSMLSMLMLITFTTITGSNPIVNIMFIILLFWIKICRIMTKFLTIQKPDRSFSVVGFAATLKPHAFDGSNYKRWKARALLWLTAMQCFYVSRGKRSEPPLSPEEEAKFEASDCLFRGALISVLADNIVDVYMHMPSGKEMWDALEAKFGVSDAGSELYVMEQFYDYKMVDDRSVVEQAHEIQMLAKELENNNCELPDKFVAGGIIAKLPPSWSDFATSLKHKRQEFSVPDLIGSLGVEEKARAKDVRGKKVEGGSSANMVQKKNPHASHNNKKVKPDVKPKAATNFKKKSKGKAKGDCFVCGKSGHWAKDCPERKDRKSANMIISEGGGTSGYGKILPTVLSVFHSPDWWVDTGANIHVGRGSSLLMGNGSLAAVHGVGTVDLKFTSGKTVQLKNVQHVPSIKKNLVSGSLLCREGFRLVFESNKCVVSKYGTFVGKGYDSGGLFRFSLNDMCNNHNAVNHISENDESNVWHSRLCHVNFGCMTRLANMSLIPKFTLVKGSKCHTCVQSKQPRKPHKASEARNLAPLELVHSDLCEMNGVLTKGGKKYFMTLIDDCTRFCYVYLLKTKDEALHFFKIYKAEVENQLERKIKRLRSDRGGEYFSNEFASFCEEFGIIHEMTPPYSPQSNGVAERKNRTLTEMVNAMLDTAGLSKECIRKTPFEEWERKKLNLSYLRTWGCLAKVNVPIAKKRKLGPKTVDCVFLGYAIHSVGYRFLIVNSGVPDMHVGTILESRDAIFFENEFPMKYTPSTSSKETVMPHEHFAPIEHNDQTPEENPEEDNIVDTRKSKRQRVAKSFGDDYIVYLVDDTPRTIEEAYSSPDADYWKEAVRSEMDSIMSNGTWEVVERPYGCKPVGCKWVFKKKLRPDGTIEKYKARLVAKGYTQKEGEDFFDTYSPVARLTTIRVLLALAASHGLLVHQMDIKTAFLNGELEEEIYMDQPDGYVLEGQEGMVCKLLKSLYGLKQAPKQWHEKFDTTLTSAGFVVNEADKYVYYRYGGGEGVILCLYVDDILIFGTSLNVIEEVKDYLSKSFEMKDLGEADVILNIKLQRGDEGGITLVQSHYVDKVLSRFGYSDCKPAPTPYDPSVLLRKNRRIARDQLRYSQIIGSLMYLASATRPDISFAVSKLSRFVSNPGDDHWQALERVMRYLKGTMSYGIHYTGYPKVLEGYSDSNWISDADEIKATSGYVFTLGGGAVSWKSCKQTILTRSTMEAELTALDIATVEAEWLRELLMDLPVVEKPVPAILMNCDNQTVIIKVNSSKDNMKSSRHIKRRLKSVRKQKNSGVIALDYVQTARNLADQFTKGLPRNVIDSASREMGLIPT

SEQ ID NO: 20314 - protein, 1186 aa, Oryza sativa
  Clone ID: TF_OSC18107j.C1.p5.fg
MSAPGAGASDGAPGAGAGDGAPGAANVNTNGGNFASQSSGGPFSGEPPLSPEEEAKFEASDCLFRGALISVLADNIVDVYMHMPSGKDMWDALEAKFGVSDAGSELYVMEQFYDYKMVDDRSVVEQTHEIRMLAKELENNNYELPDKFVAGGIIAKLPPSWSDFATSLKHKRQEFSVSDFIGSLGVEEKARAKDVRGKKVEGGSSANMVQKKNPHASHNNKKVKHDVKPKAATNFKKKGKGKAKGDCFVCGKSGHWAKDCPERKDKKSANMVISEGGGISGYGKILPTVLFVFHSPDWWVDTSANIHVGRGSSLLMGNGSLAAVHGVGMVDLKFTSGKTVQLKNVQHVPSIKKNLVSGSLLCREGFRLVFKSNKCVVSKYGTFVGKGYDSGGLFRFSLNDMCNNHNVVNHISENDESNVWHSRLCHVNFGCMTRLANMSLIPKFTLVKGSKCHTCVQSKQPLKPHKASEARNLAPLELVHSNLCEMNGVLTKGGKKYFMTPIDDCTRFCCVYLLKTKDEALHFFKTYKAEVENQLERKIKRLRSDRGGEYFSNEFSSFCEEFGIIHERTPPYSPQSNGVAERKNRTLTEMVNAMLDIVELSKEWWGKAVLTACHVLNKIPMKHKEVNVPIAKKWKLGPNTVDCVFLGYAIHSVGYRFLIVNSGVPGMHLGTIIECRDATFFENEFPMKHTPSTSSQETVMPHEHFAPIEHNDQTPEENPEEDNIVDTRKKEAYSSPDADYWKEAVRSEMDSIMSNGTWEVIEHPYGCKPVGCKWVFKKKLRLDGTIEKYKARLVARVIPKRKARTFFDTYSPVARLTTIRVLLALAASHGLLVHQMDVKTAFVNRELEEEIYMDQPYGYVLEGQEGMVCKLLKSLYGLKQAPKQCHEKFDTTLTSAGFVVNETDKCVYYHYSGGEGVILCLYVDDILIFGTSLNVIEEVKDYLSKSFEMKDLGEADVILNIKLQRGDEGGITLVQSHYVDKVLSRFGYSDCKPAPTPYDPSVLLRKNRRIARDQLRYSQIIGSLMYLASATRPDISFAVSKLSRFVSNPGDDHWQALERVMRYLKGTVSYGIHYTGYPKVLEGYSDSNWISDADEIKATGGYVFTLGGGAVSWKSCKQTILTSSKDNMKSSRHIKRRLKSVRKQKNSGVIALDYVQTARNLADQFTKRLPRNVIDSASREMGLIPT

SEQ ID NO: 20315 - protein, 311 aa, Oryza sativa
  Clone ID: TF_OSC21802j.C1.p1.fg
PDVKPKAATNFKKKGKGKTKGDCFVCGKSGHWAKDCPECKDRKSANMIISEGGGTSGYGKILPTVLSVFHSPDWWVDTGANIHVGRGSSLLMGNGSLAAVHGVGTVDLKFTSGKTVQLKNVQHVPSIKKNLVSGSLLCREGFRLVFESNKCVVSKYGTFVGKGYDSGGLFRFSLNDMCYNHNAVNHISENDESNVWHSRLCHVNFGCMTRLANMSLIPKFTLVKGSKCHTCVQSKQPRKPHKASEARNLAPLELVHSDLCEMNGVLTKGGKKYFMTLIDDCTRFCYVYLLKTKDEALHYFKIYKAEVENQL

SEQ ID NO: 20316 - protein, 868 aa, Oryza sativa
  Clone ID: TF_OSC22139j.C1.p3.fg
MSAPGAGAATAAGGDGGGGAPPGAGAGAGGGAPGARAGAANNNTNGGNSASQSSGGPFSRSPYTVYAMIIVLTFWIKICRFMTIFSTIQKPDRSFSVVGFAATLKPHAFDGSNYKRWKARALLWLTAMQCFYVSRGKRSEPPLSPEEEAKFEASDCLFRGALISVLADNIVDVYMHMPSGKDMWDALEAKFGVSDAGSALYVMEQFYDYKMVDDRSVVEAHEIQMLAKELENNNCELPDKFVVGGIIAKLPPSWSDFATSLKHKRQEFSVSDFIGSLGVEEKARAKDVRGKKVEGGSSANMVQKKNPHVSHNNKKVKPDVKSKAATNFKKKGKRKAKGDCFVCGKSGHWAKDCPERKDRKSANMVISEGGGTSGYGRKRFLLVDGKRVACGCSWCCVGYRFLIVNSGVPDMHVGTIFESRDATFFENEFPMKHTPSTSSQETVMPHEHFAPIEHNDQTPEENPEEDNIVDTRKSKRQRVTKSFGDDYIVYLVDDTPRTIEEAYSSPDADYWKEAVRSEMDSIMSNGTWEVVERPYGCKPMDVKTTFLNGELEEEIYMDQPDGYVLEDQKGMVCKLLKSLYGLKQAPKQWHEKFDTTLTSAGFVVNEADKCVYYRYDGGEGVILCLYVDDILIFGTSLNVIEEVKDYLSKSFEMKDLGEADVILNIKLQRGDEGGIALVQSHYVDKALERVMRYLKGTMSYGIHYTGYPKVLEGYSDSNWISDADEIKATSGYVFTLGGGAVSWKSCKQTILTRSTMEAELTALDTATVEAEWLRELLMDLPVVEKPVSAILMNCDNQTVIIKVNSSKDNTKSSRHIKRRLKSVRKQKNSGVIALDYVQTARNLADQFTKGLPRNVIDSASRKMGLIPT

SEQ ID NO: 20317 - protein, 1329 aa, Oryza sativa
  Clone ID: TF_OSC23901j.C1.p2.fg
MSGVAAAATGPPTGAGDTPPPTGAGSGAGAPGGGVVNDYNNGGNSASPSSGGPFSGYNLLLLLLLLALFLFLFPLLALYYVRYVLVPVLHNASSMLSRYCASMVSRGKRSEPPLSPEEEAKFEASDCLFRGALISVLADNIVDVYMHMPSGKDMWDALEAKFGVSDAGSELYVMEQFYDYKMVDDRSVVEQAHEIQMLAKELENNNCELPDKFVAGGIIAKLPPSWSDFATSLKHKRQEFSVPDLIGSLGVEEKARAKDVRGKRVEGGSSANMVQKKNPHASHNNKKVKPDVKPKAATNFKKKGKGKAKGDCFVCGKSGHWAKDCPERKDRKSANMIISEGGGTSGTVGRGSFLLMGNGSLAAVHGIGTVDLKFTSGKTVQLKNVQHVPSIKKNLVSGSLLCREGFRLVFESNKCVVSKYGTFVGKGYDSGGLFRFSLNDMCNNHNAVNHISENDESNVWHSRLCHVNFGCMTRLANMSLIPKFTLVKGSKCHTCVQSKQPRKPHKASEARNLAPLELVHSDLCEMNGVLTKGGKKYFMTLIDDCTRFCYVYLLKTKDEALHYFKIYKAEVENQLEMKIKRLRSDRGGEYFSNEFASFCEEFGIIHEMTPPYSPQSNGVAERKNRTLTEMVNAMLDTAGLSKEWWGEAVLTACHVLNKIPMKHKEVTPFEEWERKKLNLSYLRTWGCLAKVNVPIAKKRKLGPKTVDCVFLGYAIHSVGYRFLIVNSGVPDMHAGTILESRDATFFENEFPMKYTPSTSSKETVMPHEHFAPIEHDDQTPEENPEEDNIVDTRKSKRQRVAKSFGDDYIVYLVDDTPRTIEEAYSSPDADYWKEAVRSEMDSIMSNGTWEVVERPYGCKPVGCKWVFKKKLRPDGTIEKYKARLVAKGYTQKEGEDFFNTYSPVARLTTIRVLLALAASHGLLVHQMDVKTAFLNGELEEEIYMDQPDGYVLEGQEGMVCKLLKSLYGLKQAPKQWHEKFDTTLTSAGFVVNEADKCVYYRYGGGEGVILCLYVDDILIFGTSLNVIEEVKDYLSKSFEMKDLGEADVILNIKLQRGDEGGITLVQSHYVDKVLSRFGYSDCKPAPTPYDPSVLLRKNRRIARDQLRYSQIIGSLMYLASATRPDISFAVSKLSRFVSNPGDDHWQALERVMRYLKGTMSYGIHYTGYPKVLEGYGDSNWISDADEIKATSGYVFTLGGGAVSWKSCKQTILTRSTMEAELTALDTATVEAEWLRELLMDLPVVEKPVPAILMNCDNQTVIIKVNSSKDNMKSSRHIKRRLKSVRKQKNSGVIALDYVQTARNLADQFTKGLPRNVIDSASREMGLIPT

SEQ ID NO: 20318 - protein, 107 aa, Oryza sativa
  unsure (1)..(107): unsure at all Xaa locations
  Clone ID: TF_OSC2785j.C1.p1.hg
TTFKKKGKGKAKGDCFVCGKSGHWAKDCPERKDRKCANMVISEGGGTSGYGQERFLLVDGKRVAYGCLWCWYGRSEVYFGKDRAAEERATXFGIGDLLESSDGHLGQ

SEQ ID NO: 20319 - protein, 175 aa, Oryza sativa
  Clone ID: TF_OSC30194j.C1.p1.gm
QAHEIQMLAKELENNNCELPDKFVAGGIIAKLPPSWSDFATSLKHKRQEFSVSDLIGSLGVEEKVRAKDVRGKKVEGGSSANMVQKKNSHASHNNKKVKPDVKPKAATNFKKKGKGKAKGDCFVCGKSGHWAKDCPERKDRKSANMVISEGGGTSGYGRERFLLVDGKRVACGCS

SEQ ID NO: 20320 - protein, 906 aa, Oryza sativa
  Clone ID: TF_OSC31402j.C1.p3.fg
MAEVVRRRQELEPVARTTTSTEAILPHNPAEGHSRVDVYMHMPSGKDMWDALEAKFGVSNAGSELYVMEQFYDYKMLPDKFVAGGIIAKLPPSWSDFATSLKHKRQEFSVSDLIGSLGVEEKARATDIREKKVEGGSSANMVQKKNPHASYNNKKVKPDVKPKAATNFKKKGKGKAKGDCFVCGKSGHWAKDCPERKDRKSANMVIGEGGGTSGYGKILPTVLSVFHSPDWWVDTGANIHVGRGSSMLMGNGSLAAVHGIGTVDQKFTSGKTVQLKNVQHVPSIKKNLVSGSLLCREGFRLVFESNKCVVSKYGTFVRKGYDSGGLFRFSLNDMCNNHNVVNHISENDESNVWHSRLCHVNFSCMTRLANMSLIPKFTLIKGSKCHTCVQSKQPRKPHKASEARNLAPLELVHSDLCEMNGVLTKGGKKYFMTLIDDYTRFCYVYILKRKDEALHYFKIYKAEVENQLERKIKRLRSDRGEEYFSNEFASFCEEFGIIYERMPPYSPQSNGVAERKNRTLTEMVNAMLETAGLSKEWWGEAVLTACHVLNKISMKHKEVTPFEEWERKKLNLSYLRTWGCLAKHFAPIEHNDQTPEKNPEEDNIVDTHKSKRQRVAKSFGDDYIVYLVDDTPRTIEETYSSPDADYWKEIMDVKTAFLNGELEEEIYMDQPDGLNVIEEVKDYLYKSFEMKDLGEANVILNIKLQRGDEGGITLVQSHYVDKVLSRFGYSDCKPAPTPCDPSVLLRKNRRIVRDQLRYSQIIGSLMYLASATRPDISFAVSKLSRFVSNPGDDHWQALERVMRYLKGTMSYGIHYTGYSKVLEGYIDSNWISDADEIKVTSGYVFTLGGGVVSWKSCKQTILTRSTMEAELTALDTATVEAEWLRELLMDLPVVEKPVRASYPNEL

SEQ ID NO: 20321 - protein, 298 aa, Oryza sativa
  Clone ID: TF_OSC33128j.C1.p1.fg
MQCFYVSRGKRSEPPLSPEEEAKFEASDCLFRGALISVLADNIVDVYMHMPSGKDMWDALEAKFGVSDAGSELYVMEQFYDYKMVDNRSVVEQAHEIQMLAKELENNNCELPDKFVAGGIIAKLPPSWSDFATSLKHKRQEFSVSDLIGSLGVEEKARAKDVRGKKVEGCSSANMVQKKNPHASHNNKKVKPDVKPKAATNFKKKGKGKAKGDCFVCGKSGHWAKDCPERKDRKSANMVISEGGGTSGYGWERFLLVDGKRVACGCSWCWYGRSEVYFGKDRAAEERAACPFNKEESS

SEQ ID NO: 20322 - protein, 472 aa, Oryza sativa
  Clone ID: TF_OSC400211j.C1.p1.fg
MSAPGAGAAAAAGGDGGDGAPPGAAAGGGAPGAGAGAANNNTNGGSSASQSSGGPFSGYILLLFLFLLLALYCYVPVPDIHDASSMLPRYCYVLLPDIHNVVHDAFSMLLVMLHAVTRSPYTVYAMIIVLTFWIKICRFMTIFPTIQKPDRSFSVVGFAAALKPHAFDGSNYKRWKARALLWLTAMQCFYVSRGKRSEPPLSPEEEAKFEASDYLFRGALISVLTDNIVDVYMHMPSGKDMWDALEAKFGVSDAGSELYVIEQFYDYKMVDDRSVVEQTHEIQMLAKELENNNCELPDKFVAGGIIAKLPPSWSDFATFLKHKRQEFSEKARAKDVRGKKVEGGSSANMVQKKNPHASRNNKKVKPDVKPKAATNFKKKGKGKAKGDCFVCGKSGHWAKDCPERKDRKSANMVISEGGGTSGYGWERFLLVDGKRVACGCSWCWYGRSEVYFGKYRAAEERAACPFNKEESC

SEQ ID NO: 20323 - protein, 1126 aa, Oryza sativa
  Clone ID: TF_OSC400297j.C1.p2.fg
MQCFYVSRGKRSEPPLSPEEEAKFEASDCLFRGALISVLADNIVDVYMHMPSGKDMWDALEAKFGVSDAGSELYVMEQFYDYKMVDDRSVVEQAHEIQMLAKELENNNCELPDKFVAGGIIAKLPPSWSDFATSLKHNRQEFSVPDLIGSLGVEEKARAKDVQGKKVEGGSSANMVQKKNPHASHNNKKVKPDVKPKAATNFKKKSKGKAKGDCFVCGKSGHWAKDCPERKDRKSANMIISEGGGTSGYGKILPTVLSVFHSPDWWVDTGANIHVRRGSSLLMGNGSLAAVHGVGTVDLKFTSGKTVQLKNVQHVPSIKKNLVSGSLLCREGFRLVFESNKCVVSKYGTFVGKGYDSGGLFRFSLNDMCNNHNAVNHISENDESNDEALHFFKIYKAEIENQLERKIKRLRSDRGGEYFSNEFASFCEEFGIIHEMTPPYSPQSNGVAERKNRTLTEMVNAMLDTAGLSKEWWGEAVLTACHVLNKIPMKHKEVTPFEEWERKKLNLSYLRTWGCLAKVNVPIAKKRKLGPKTVDCVFLGYAIHSVGYRFLIVNSGVPDMHVGTILESRDATFFENEFPMKYTPSTSSKETIMPHEHFAPIEHNDQTPEENPEEDNIVDTRKSKRQRVAKSFGDDYIVYLVDDTPRTIEEAYSSPDADYWKEAVRSEMDSIMSNGTWEVVERPYGCKPVGCKWVFKKKLRPDGTIEKYKARLVAKGYTQKEGEDFFDTYSPVARLTTIRVLLALAASHGLLVHQMDVKTAFLNGELEEEIYMDQPDGYVLEGQEGMVCKLLKSLYGLKQAPKQWHEKFDTTLTSAGFVVNEADKCVYYRYGGGEVVILCLYVDDILIFGTSLNVIEEVKDYLSKSFEMKDLGEADVILNIKLQRGDEGGITLVQSYYVDKVLSRFGYSDCKPAPTPYDPSVLLRKNRRIARDQLRYSQIIGSLMYLASATRPDISFAVSKLSRFVSNPGDDHWQTLERVMRYLKGTMSYGIHYTGYPKVLEGYSDSNWISDADEIKATSGYVFTLGGGAVSWKSCKQTILTRSTMEAELTALDTATVEAEWLRELLMDLPVVEKPVPAILMNCDNQTVIIKVNSSKDNMKSSRHIKRRLKSVRKQKNSGVIALDYV

SEQ ID NO: 20324 - protein, 1297 aa, Oryza sativa
  Clone ID: TF_OSC400466j.C1.p5.fg
MSGVATATAGGGGTPPTGARSGAGAPGGAVNDNNNGGNSASPSSGGSASRTTAHRHVWSCHRHCWRRWSFSVVGFAAALKPHAFDGSNYKRWKARALLWLTAMQCFYVSRGKRSEPPLSPEEEAKFEASDCLFRGALISVLADNIVDVYMHMPSGKDMWDALEAKFGVSDAGSELYVMEQFYDYKMVDDHSVVEQAHEIQMLAKELENNNCELPDKFVAGGIIAKLPPSWSDFATSLKHKRQEFSVPDLIGSLGVEEKARAKDVRGKKVEGGSSANMVQKKNPHASHNNKKVKPDVKPKAATNFKKKGKGKAKGDCFVCGKSGHWAKDCPERKDRKSANMVISEGGGTSGYGKMLPTVLSVYHSPDWWVDTGANIHICADISLFSSYQVGRGSSLLMGNGSLAAVHGVGTVDLKFTSGKTVQLKNVQHVPLIKKNLVSGSLLCREGFRLVFESNKCVVSKYGTFVGKCYDSGGLFRFSLNDMCNNHNAVNHISENDESNVWHSRLCHVNFGCMTRLANMSLIPKFTLVKGSKCHTCVQSKQPRKPHKASEARNLAPLELVHSDLCEMNGVLTKGGKKYFMTLIDDCTRFCYVYLLKTKDEALHYFKIYKAEVENQLERKIKRLRSDRGGEYFSNEFASFCEEFGIIHEMTPPYSPQSNGVAERKNRTLTEMVNAMLDTAGLSKECVGYRFLIVNSGVPDMHAGTILESRDATFFENEFPMKYTPSTSSKETVMPHEHFAPIEHNDQTPEENPEEDNIVDTRKSKRQRVAKSFGDDYIVYLVDDTPRTIEEAYSSPDADYWKEAVRSEMDSIMSNGTWEVVERPYGCKPVGCKWVFKKKLRPDGTIEKYKARLVAKGYTQKKGEDFFDTYSPVARLTTIRVLLALAASHGLLVHQMDVKTAFLNGELEEEIYIDQPDGYVLEGQEGMVCKLLKSLYGLKQAPKQWHEKFDTTLTSAGFVVNEADKCVYYRYGGGEGVILCLYVDDILIFGTSLNVIEEVKDYLSKSFEMKDLGEADVILNIKLQRGDEGGITLVQSHYVDKVLSRFGYSDCKPAPTPYDPSVLLRKNRRIARDQLRYSQIIGSLMYLASVTRPDISFAVSKLSRFVTNPGDDHWQALERVMRYLKGTMSYGIHYTGYPKVLEGYSDSNWISDADEIKATSGYVFTLGGGAVSWKSCKQTILTRSTMEAELTALDTATVEAEWLRELLMDLPVVEKPVPAILMNCDNQTVIIKVNSSKDNMKSSRHIKRRLKSVRKQKNSGVIALDYVQTARNLAYQFTKGLPRNVIDSASREMGLIPT

SEQ ID NO: 20325 - protein, 1453 aa, Oryza sativa
  Clone ID: TF_OSC400483j.C1.p5.fg
MSGVAAAAATGGGGTPPPTGAGAPPPTGAGAPGGGAVNDYNNGGNSASPSSGGPFSGYNLLLLLLLLALFLFPLLALYCVRYVLVPILRDASSMLSRYWYVPVSDIHDAHSMLLVMLRLPYTAYAMIIVSISWIKICRIMTIFPTIQKPDRSFSVVGFAAALKPHAFDGSNYKRWKARALLWLTAMQCFYVSRGKRSEPPLSPEEEAKFEASDCLFRGALISVLADNIVDVYMHMPSGKDMWDALEAKFGVSDAGSELYIMEQFYDYKMVDDRSVVEQAHEIQMLAKELENNNCELPDKFVAGGIIAKLPPSWSDFATSLKHKRQEFSVPDLIGSLGVEEKARAKDVRGKKVEGGSSANMVQKKNPHASHNNKKVKPDVKPKAATNFKKKGKGKAKGDCFVCGKSGHWAKDCPERKDRKSANMIISEGGGTSGYGKILPTVLSVFHSPDWWVDTGANIHVCADISLFSSYQVERGSSLLMGNGSLAAVHGVGTVDLKFTSGKTVQLKNVQHVPSIKKNLVSGSLLCREGFRLVFESNKCVVSKYGTFVGKGYDSGGLFRFSLNDMCNNHNAVNHISKNDESNVWHSRLCHVNFGCMTRLANMSLIPKFTLVKGSKCHTCVQSKQPRKPHKASEARNLAPLELVHSDLCEMNGMLTKGGKKYFMTLIDDCTRFCYVYLLKTKDEALHYFKIYKAEVENQLERKIKRLRSDRGGEYFSNEFASFCEEFGIIHEMTPPYSPQSNGVAERKNRILTEMVNAMLDTAGLSKEWWGEAVLTACHVLNKIPMKHKEVTPFEEWERKKLNLSYLRTWGCLAKVNVPIVKKRKLGPKTVDCVFLGYAIHSVGYRFLIVNFGVPDMHAATIFESRDATFFENEFLMKYTPSTSSKETVMLHEHFAPIEHNDETPEENPEEDNIVDTRKSKRQRVAKSFGDDYIVYLVDDTPRTIEEAYSSPDADYWKEAVRSEIDSIISNGTWEVVERPYGCKPVGCKWVFKKKLRPDGTIEKYKARLVAKGYTQKEGEDFFDTYSPVARLTTIRVLLALAASHGLLVHQMDVKTAFLNGELEEEIYMDQPDGYVLEGQEGMVCKLLKSLYGLKQAPKQWHEKFDTTLTAAGFVVNEADKCVYYRYGGGEGVILCLYVDDILIFGTSLNVIEEVKDYLSKSFEMKDLGEADVILNIKLQRGDEGGITLVQSHYVDKVLSRFGYSDCKPAPTPYDPSVLLRKNRRIARDQLRYSQIIGSLMYLASATRPDISFAVSKLSWFVSNPGDDHWQALERVMRYLKGTMSYGIHYTGYPKVLEGYSDSNWISDADEIKATSGYVFTLGGGAVSWKSCKQTILTRSTMEAELTALDTATVEAEWLRELLMDLPVVEKPVPAILMNCDNQTVIIKVNSSKDNMKSSRHIKRRLKSVRKQKNSGVIALDYVQTARNLADQFTKGLPRNVIDSASREMGLIPT

SEQ ID NO: 20326 - protein, 1288 aa, Oryza sativa
  Clone ID: TF_OSC400500j.C1.p54.fg
MAHLELEPEPVPGTSTPMEAILPHNPVEGHSRGISFLLLLLLALLILLVATCYVPVPDVHDAYSILVMLHVPVPDVHAFSILLVMLYVVTRSSYTVHAMIIVLTFWIKICQYMTIFPTIQKPDKSFSVVGFDAALKPHAFDGSNYKRCKARALLWLTAMQCFYVSRGKRSEPPLSPEEEAKFEASDCLFCGALISVLADNIVDVYMHMPSEKDMWDALEAKFGVSDAGSELYVMEQFYDYKIVDDRSVHKRQEFSVSDLIGSLGVEEKARAKDVRGKKVEGGSSANMVQRKNPHASHNNKKVKPDVKPKAATNCKKKGKGKAKGDCFVCGKSGHWAKDCPECKDRKSANMVISEGGGTSGYGKILPTVLSVFHPPDWWVDTGANIHVERGSSLLMGNGSLAAVHGVGTVNLKFTSGKTVQLKNVQHVPSIKKNLVSGSLLCREGFRLMFESNKCVVSKYETFVGKGYDSGGLFRFFLNDMCNNHNVVNHISENDESNVWHSRLCHVNFGCMTRLANISLIPKFTLVKGSKCHTCVQSKQPRKTHKASEARNLAPLEFVHSDLCEMNGVLTKGGKKYFMTLIDDCTRFCYVYVLKTKDETLHYFKIYKAEVENQLERKIKRLRFDRGGEYFSNKFASFCEEFGIIHERTPPYSPQSNGVAERKNRTLTKMVNAMLGTAGLSKEWWGEAVLTVCHVLNKIPMKHKEVTPFEEWERKKSNLSYLRTWGCLAKVNVPIAKKRKLGPNTVDCVFLGYAIHSVGYRFLIVNSGVPDMHVGTIIESRDATFFENEFPMKHTPSTSSQETVMSHEYFAPIEHDDQTPEENPNEDNIIDTRKSKRQRVAKSFGDDYIVYLVDDTLRTIEEAYSSPDADYWKEAVHSEMDSIMSNGTWEVVERPYGCKPVGCKWVFKKKLRPMMDVKTAFLNEELEEEIYMDQPDGYVLEGQEGMVCKLLKSLYGLKQAPKQWHEKFDTTLTSAGFVVNEADKCVYYRYGGGEGVILCLYVDDILIFGTSFNVIEEVKDYLFKSFEMKDLGEADVILNIKLQRGDEGGITLVQSHYVDKVLSRFGYSDCKPAPTPYDPNVLLRKSRRIARDQLRYSQIIGSLMYLASATRPDISFAVSKLSRFVSNPGDDHWQALERVMRYLKGTMSYGIHYTGYLKVLEGYSDSNWISDADEIKATSGYVFTLGGGVVSWKSCKQTILTRSTIEAELIALDTAIVEAEWLRELLIDLPVVEKPVPAILMNCDNQTVIIKVNNSKDNMKSSRHIKRRLKSVRKQKKLRSDSIGLCPNG

SEQ ID NO: 20327 - protein, 965 aa, Oryza sativa
  Clone ID: TF_OSC400506j.C1.p17.gm
MALLGKTSCKAAVFLAALVVMATAFSSSHAAQGQDGRAIRFLGSARRDYSLFVNIYFIFTNMSNTGDKEKETPCFYVSRGKRSEPPLSPEEEAKFEASDCLFRGALISVLADNIVDVYMHMPSGKDMWDALEAKFGISDAGSELYVMEQFYDYKMVDDRSVVEQAHEIQMLAKELENNNCELPDKFVAGDIIAKLPPSWSDFATSLKHKRQEFSVPDLIGSLGVEEKARAKDVRGKKVEGGSSANMVQKKNPHASHNNKKVKPDVKPKAATNFKKKSKGKAKGDCFVCGKSGHWAKDCPERKDRKSANMIISEGGGTSGYGRERFLLVDGKRVACGCSCVGYRFLIVNSGVPDMHVGTILESRDATFFENEFPMKYTPSTSSKETVMPHEHFTPIEHNDQTPEENPEEDNIVDTRKSKRQRVVKSFGDDYIVYLVDDTPRTIEEAYSSPDADYWKEAVRSEMDSIMSNGTWEIVERPYGCKPVGCKWVFKKKLRPDGTIEKYKARLVAKGYTQKEGEDFFDTYSPVARLTTIRVLLALAASHGLLVHQMDVKTAFLNGELEEEIYMDQPDGYVLEGQEGMVCKLLKSLYGLKQAPKQWHEKFDTTLTSAGFVVNEADKCVYYRYGGGEGVILCLYVDDILIFGTSLNVIEEVKDYLSKSFEMKDLGEADVILNIKLQRGDEGGITLVQSHYVDKVLSRFGYSDCKPAPTPYDPSVLLRKNRRIARDQLRYSQIIGSLMYLASATRPDISFAVSKLSRFVSNPGDDHWQALERVMRYLKGTMSYGIHYTGYPKVLEGYSDSNWISDADEIKATSGYVFTLGGGAVSWKSCKQTILTRSTMEAELTALDTAIVEAEWLRELLMDLPVVEKPVPAILMNCDNQTVIIKVNSSKDNMKFLGSARRDYSLFVNIYFIFTNMSNTGDKEKETPVNTNGGNTASNSSGGPFLGFASTAVKQCNACVECGESR

SEQ ID NO: 20328 - protein, 1268 aa, Oryza sativa
  Clone ID: TF_OSC400569j.C1.p8.fg
MQCFYVSRGKRSEPPLSPEEEAKFEASDCLFRGALISVLADNIVDVYMHMPSGKDMWDALEAKFGVSDAGSELYVMEQFYDYKMVDDRSVVEQAHEIQMLAKELENNNCELPDKFVAGGIIAKLPPSWSDFATSLKHKRQEFSVPDLIGSLGVEEKARAKDVRGKKVEGGSSANMVQKKNPHASHNNKKVKPDVKPKAATNFKKKSKGKAKGDCFVCGKSGHWAKDCPERKDRKSANMIISEGGGTSGYGKILPTVLSVFHSPDWWVDTGANIHVCADISLFSSYQVGRGSSLLMGNGSLAAVHGVGTVDLKFTSGKTVQLKNVQHVPSIKKNLVSGSLLCREGFRLVFESNKCVVSKYGTFVGKGYDSGGLFRFSLNDMCNNHNAVNHISENDESNVWHSRLCHVNFGCMTRLANMSLIPKFTLVKGSKCHTCVQSKQPRKPHKASEARNLAPLELVHSDLCEMNGVLTKGGKKYFMTLIDDCTRFCYVYLLKTKDEALHFFKIYKAEVENQLERKIKRLRSDRGGEYFSNEFASFCEEFGIIHEMTPPYSPQSNGVAERKNRTLTEMVNAMLDSAGLSKEWWGEAVLTACHVLNKIPMKHKEVTPFEEWERKKLNLSYLRTWGCLAKVNVPIAKKRKLGPKTVDCVFLGYAIHSVGYRFLIVNSRVPDMHVGTILESRDATFFENEFPMKYTPSTSSKETVMPHEHFAPIEHNDQTPEENPEEDNIVDTRKSKRQRVAKSFGDDYIVYLVDDTPRTIEEAYSSPDADYWKEAVRSEMDSIMSNGTWEVVERPYGCKPVGCKWVFKKKLRPDGTIEKYKARLVAKGYTQKEGEDFFDTYSPVARLTTIRVLLALAASHGLLVHQMDVKTAFLNGELEEEIYMDQPDGYVLEGQEGMVCKLLKSLYGLKQAPKQWHEKFDTTLSSVGFVVNEADKCVYYRYGGGEGVILCLYVDDILIFGTSLNVIEEVKDYLSKSFEMKDLGEADVILNIKLQRGDEGGITLVQSHYVDKVLSRFGYSDCKPAPTPYDPSVLLRKNRRIARDQLRYSQIIGSLMYLASATRPDISFAVSKLSRFVSNPGDDHWQALERVMRYLKGTMSYGIHYTGYPKVLEGYSDSNWISDADEIKATSGYVFTLGGGAVSWKSCKQTILTRSTMEAELIALDTATVEAEWLRELLMDLPVVEKPVPAILMNCDNQTVIIKVNSSKDNMKSSRHIKRRLKSVRKQKNSGVIALDYVQTARNLADQFTKGLPRNVIDSASREMGLIPT

SEQ ID NO: 20329 - protein, 1385 aa, Oryza sativa
  Clone ID: TF_OSC400615j.C1.p31.fg
MSGVAAATAGGGGTPPPTGAGSGSGAGAPGGGAVNDYNNGGNSASPSSGEPFSGYNLLLLLLLLALFMFPLLALYYVRYVLVPVLHDASSMLSRYWYVPVPDIHDAHSMLLVMLRSPYTAYAMIIVSFSWIKICRLMTIFPTIQKPDRSFSVVGFAAALKPHAFDGSNYKRWKARALLWLTAMQCFYVSRGKRSEPPLSPEEEAKFEASDCLFRGALISVLADKIVDVYMHMPSGKDMWDALEAKFGVSDAGSELYVMEQFYDYKMVDDRSVVEQSHEIQMLAKELENNNCELPDKFVAGGIIAKLPPSWSDFATSLKHKRQEFSVPDLIGSLGVEEKARAKDVRGKKVEGGSSANMKKGKGKAKGDCFVCGKSGHWAKDCPERKDRKSANMIISEGGGTSGYVGRGSSLLMGNGSLAAVHSVGMVDLKFTSGKTVQLKNVQHVPSIKKNLVNGSLLCREGFRLVFESNKCVVSKYGTFVGKGYDSGGLFRFSLNDMCNNHNAVNHISENDESNVWHSRLCHVNFGCMTRLANMSLIPKFTLVKGSKCHTCVQSKQPRKPHKASEARNLAPLELVHSDLCEMNGVLTKGGKKYFMTLIDDCTRFCYVYLLKTKDEALHYFKIYKAEVENQLERKIKRLRSDRGGEYFSNEFASFCEEFEIIHEMTPPYSPQSNGVAERKNRTLTEMVNAMLDTAGLSKEWWGEAVLTACHVLNKIPMKHKEVTPFEEWERKKLNLSYLRTWGCLAKVNVPIAKKQKLGPKTVDCVFLGYAIHSVGYRFLIVNSGVPDMHAGTILESRDATFFENEFPMKYTPSTSSKETVMPHEHFAPIEHDDQTPEENPEEDNIVDTRKSKRQRVAKSFGDDYIVYLVDDTPRTIEEAYSSPDADYWKEAVRSEMNSIMSNGTWEVVERPYGCKPVGCKWVFKKKLRPDGTIEKYKARLVAKGYTQKEGEDFFDTYSPVARLTTIRVLLALAASHGLLVHQMDVKTAFLNGELEEEIYMDQPDGYVLEGQEGMVCKLLKSLYGLKQAPKQWHKKFDTTLTSAGFVVNEADKCVYYRYGGGEGVILCLYVDDILIFGTSLNVIEEVKDYLSKSFEMKDLGEADVILNIKLQRGDEGGITLVQSHYVDKVLSRFGYSDCKPAPTPYDPSVLLRKNRRIARDQLRYSQIIGSLMYLASATRPDISFAVSKLSRFVSNPGDDHWQALERVMRYLKGTMSYGIHYTGYPKVLEGYSDSNWISDADEIKATSGYAFTLGGGAVSWKSCKQTILTRSTMEAELTALDTATVEAEWLRELLMDLPVVEKPVPAILMNCDNQTVIIKVNSSKDNMKSSRHIKRRLKYVRKQKNSGVIALDYVQTARNLADQFTKGLPRNVIDSASREMGLIPT

SEQ ID NO: 20330 - protein, 1170 aa, Oryza sativa
  Clone ID: TF_OSC400694j.C1.p10.fg
MSAAPGAAAAAAAAPGDAPGAGAAANDNVNGGSSASQSSGGTFTGSFSVVGFASALKPHAFDGSNYKRWKARALLWLTAMQCFYVSRGKRSEPPLSPEEEVKFKASDWLFRGALISVLADNIVDVYMHMPFGKDMWDALEAKFGVSDAGSELYVMEQFYDYKMVDDRSVVEQAHEIQMLAKELENNNCELPDKFVAGGIIAKLPPSWSDFATSLKHKRQEFSVSDLIGSLGVEEKARAKDNRGKKVEGSSSANMVQKKNPHASHNNKKVKLDVKPKATTNFKKKGKGKAKGDCFVCGKSGHWAKDCPERKDRKSANMVISEGGGTSGYGKLLPTVLSVFHSPDWWVDTGANIHVGRGSSLLMGNGSLAAVHGVGTVDLKFTSGKTVQLKNMQHVSSIKKNLVIGSLLCREGFRLVFESNKCVVSKYGTFVGKGYDSGGLFRFSLDDMCNNHNVVNHISENDESNVWHSRLCHVNFGCMTRLANMSLVPKFTLVKDSKCHTCVQSKQPRKPHKASEARNLAPLELVHSDLCEMNGVLTKGGKKYFMTLIDDCTRVCYVYLLKTKDEALHYFKTYKTEVENQLERKIKRLRSDRGGEYFSNEFTSFCEEFGIIHERTPPYSPQSNGVAERKNRTLTEMVNAMLDTAGLSKEWWGEAVLTACHVLNKIPMKHKEMTLFEEWERKKLNLSYLRTWGCLAKGNPEEDNIVDTRKSKRQRVAKSFGDDYIVYLVDNTPRTIEEAYLSPYADYWKEAVHSEMDSIMSNGTWEVVERPYGCKPVGCKWVFKKKLRLDGTIEKYKARLVAKGYTQKEGEDFFDTYSPVARLTTIRVLLALAASHGLLVHQMDVKTAFLNGELEEEIYMDQPDGLNVIEEVKDFLSKSFEMKDLGEADVILNIKLLRGDEGGIPLVQSHYVDKVLSRFGYSDCKPAPTPYDPSVLLRKNRRIARDQLRYSQIIGSLMYLASATRPDISFAVSKLSRFVSNPGDDHWQALERVMRYLKGTMSYGIHYTGYPKVVEGYSDSNWISDADEIKATSGYVFTLGGGTVSWKSSKQTILTRSTMEAELTALDTATVEAEWLCELLMDLPVVEKPVPAILMNCDNQTVIIKVNSSKDNMKSSRHIKRRLKSVRKQKNSGVIALDYVQTAKNLADQFTKGLPRNVIDSASREMGLIPT

SEQ ID NO: 20331 - protein, 1335 aa, Oryza sativa
  unsure (1)..(1335): unsure at all Xaa locations
  Clone ID: TF_OSC400718j.C1.p100.np
HENMLNYXAPESNTNVNTKGGNSASQSSGGPFSGSFSVVGFAAALKPHAFDGSNYKRWKARALLWLTAMQCFYVSWGKRSEPPLSPGEEAKFEASDCLFRGALISVLADNIVDVYMHMPSGKDMWDALEAKFGFSDAGSELYVMEQFYDYKMVDDCSVVEQAHGIQMLAKELENNNCELPDKFVAGGIIAKLPPAWSDFATSLKHKRQEFSVSDLIGSLGVEEKARAKDVRGKKVEGGSSANMVQKKNPHASHNNKKVKPDVKPKAATNFKKKGKGKAKGDCFVCGKSGHWAKDCPERKNRKSANMVVSEGRGTSRYGKILPTVLSVFHSPDWWVDTGANIHVCADISLFSSYQVGRGSLLMGNRSLAAVHGVGTVDLKFTSGKTMQLKNVQHVPSIKKNLVSGSLLCREGFRLVFESNKCVVSKYETFVGKGYDSGGLFRFSLNDMCNNHNVVNHISENDESNVWHSRLCHVNFGCMTRLANMSLIPKFTLVKGSKCHTCVQSKQPRKPHKASEARNLAPLELVYSDLCEINGVLTKGGKKHFMTLIDDCTRFCYVYLLKTKDEALHYFKTYKAEVENQLERKIKRLRSDRGGEYFFNEFASFCKEFGIIHERTPPYSPQSNGVAERKNCTLTEMVNAMLDIAGLSKEWWVEAVLIACHVLNKMPMKHKEVTPFEEWERKKLNLSYLRTWGCLAKVNVPIAKKRKLGPNTVDCVFLSYAIHSVGYRFLIINSGVPDMHVGTIIMSRDATFFENEFPMKHTPSTSSQETVTPHEHFTPIEHNDQTPEENPEEDNIVDTRKSKRQRVAKSFGDDYIVYLVDDTPRTIEEAYSSPDADYWKEAVRSEMDSIMSNGTWEVVERPYGCKPVGCKWVFKKKLRPDGTIEKYKARLVAKGYTQKEGEDFFNTYSPVARLTTIRVLLALAASHGLLVHQMDVKTAFLNGELEEEIYMDQPDGYVLEGQEGMVCKLLKSLYGLKQAPKQWHEKFDTTLTSAGFVVNEADKCVYYRYGGGEGVILCLYVDDILIFGTSLNVIEEVKDYLSKSFEIKDLGQADVILNIKLQRGDEGGITLVQSHYVDKVLSRFGYSDCKPAPTPYDPSVLLRKNRRIVRDQLRYSQIIGSLMYLASATRPDISFAVSKLSRFVSNPGDDHWXAREKVMRYLKGTMSYGIHYTGYPKVLEGYSDSNWISDADEIKATSGYVFTLAGGAVFWKSCKQTILTRSTMEAELTALDTATVEAEXLHELLMDLPVVEKPVPAILMNCDNQTVIIKVNSSKDNMKSSRHIKRRLKSVRKQKNSGVIALDYIQTVRNLADQFTKGLPRNVIDSASREMGLIPT

SEQ ID NO: 20332 - protein, 1371 aa, Oryza sativa
  Clone ID: TF_OSC400758j.C1.p22.fg
MSGVAAAAAGGDGRGGAPPGAGAGGGAPGAGAGAANDNINGGNSASQSSGGPSSEYILLLFPLLALSLYCYVLYVPVPDIHDASSMLLRYCNVPVPDIHDAHGMLLVMLRAPYTAYAMIIALTFWIKICRFMTIFPTIQKSDRSFLVVGFAAALKPHAFDDSNYKRWKARALLWLTAMQCFYVSRGKRSEPPLSPEEEAKFEASDCLFRGALISVLTDNIVDVYMHMPSGKDMWDALEAKFRVSDAGSELYVMEQLYDYKMVDDRSVVEQAHEIQMLAKELENNNCELPDKFVAGGIIAKLPPSWSDFATSLKHKRQEFSVSDLIGSLGVEEKARAKDVRGKKVEGGSSANMVQKKNPHASHNNKKVKPDVKPKAATNIKKKGKGKSKGDCFVCGKSGHWAKDCPERKDRKSANMVISEGGGTSGYGKILPTVLSVLHSPDWWVDTGANIHVGRGSSLLMGNGSLAAVHGVGTVDLKFTSGKTVQLKNVQHVPSIKKNLVSGSLLCREGFRLVFESNKCAVSKYGTFVGKGSKCHTCVQSKQTRKPHKASEARNLAPLELVHSDLCEMNGVLTKRGKKYFMTLMDDCTRFCYVYLLKTKDEALHYFKIYKAEIENQLERKIKRLRSDRGGEYFSNEFASFCEEFRIIHERTPPYSPQSNGMAERKNHTLIEMVNAMLDTAGLSKEWWGEAVLTACHVLNKIPMKHKEVTPFEEWQRKKLNLSYLQTWGCLAKVNVPIAKKRKLGPNTVDCVFLGYAIHSVGYRFLIVNFGVPDMHVGTILESRDATFFDNEFPMKHTPSTSSKETVMPHEHFAPIEHNDQTPEENPEEDNIVDTRKSKRKRVAKSFGDDYIVYLVDDTPRTIEEAYSSPDADYWKEAVRSEMDSIMSNGTWEVVEHPYGCKPLGCKWVFKKKLRPDGTIEKYKARFVAKGYTQKEGEDFFDTYSPVARLTTIRVLLALAASHGLLVHQMDVKTTFLNGELEEEIYMDQPDGYILKGQEGMVCKLLKSLYGLKQAPKQWHEKFDTTLTSAGFVVNEADKCVYYRYGGGEEVILCLYVDDILIFGTSLNVIEEVKDYLSKSFEMKDLGEADVILNIKLQRGDEGGITLVQSHYVDKVLSWFGYSDRKPAPTPYDPSVLLRKNRKIARDQLRYSQIIGSLMYLASAMRPDISFAVSKLSRFVLNPGDDHWQALERVMRYIKGTMSYGIHYTGYPKVLEGYSDSNWISDADEIKATSGYVFTLGGGAVSCKSCKQTILTRSAMKAELTALDTATVEAEWLRELLMDLPVVEKPVPAILMNCDNQTVIIKVNSSKDNMKSSRHIKRRLKSVRKQKNSEVIALDYVQTARNLTDQFTKGLPRNVIDSASREMGLIPT

SEQ ID NO: 20333 - protein, 1253 aa, Oryza sativa
  Clone ID: TF_OSC400993j.C1.p11.fg
MQCFYVSRGKRSEPPLFPEEEAMFEASDCLFRGALISVLADNIVDVYMHMPSGKDMWDALEAKFGVSDAGSELYVMEQFYDYKMVDDRSVVEQAHEIQMLAKELENNNCELPDKFVAGGIIAKLPPSWSDFATSLKHKRQEFSVPDLIGSLGVEEKARAKDVRGKKVEGGSSANMVQKKNPHASHNNKKVKPDVKPKAATNFKKKGKGKAKGDCFVCGKSGHWAKDCPERKDRKSANMIISEGGGTSGYGKILPTVLSVFHSPDWWVDTGANIHVCADISLFSSYQVGRGSSLLMGNGSLAAVHGVGTVDLKFTSGKTVQLKNVQHVPSIKKNLVSGSLLCREGFRLVFESNKCVVSKYGTFVEKGYDSGGLFRFSLNDMCNNHNAVNHISENDESNVWHSRLCHVNFGCMTRLANMSLIPKFTLVKGSKCHTCVQSKQPRKPHKASEARNLAPLELVHSDLCEMNGVLTRFCYVYLLKTKDEALHYFKIYKAEIENQLERKIKQLRSDRGGEYFSNEFASFCEEFGIIHEMTPPYSPQSNGVAERKNHTLTEMVNAMLDTAGLSKEWWGEAVLTACHVLNKIPMKQKEVTPFEEWERKKLNLSYLRIWGCLAKVNVPIAKKRKLGPKTVDCVFLGYAIHSVGYRFLIVNSGVPDMHAGTILESRDATFFENEFPMKYTPSTSSKETVMPHEHYAPIEHNDQTPEENPEEDNIVDTRKSKRQRVAKSFGDDYIVYLVDDTPRTIEEAYSSPDADYWKEAVRSEMDSIMSNGTWEVVERPYGCKPVGCKWVFKKKLRPDGTIEKYKARLVAKGYTQKEGEDFFDTYSPVARLTTIRVLLALAASHSLLVHQMDVKTAFLNGELEEEIYMDQPDGYVLEGQEGMVCKLLKSLYGLKQAPKQWHEKFDTTLTSAGFVVNEADKCVYYRYGGGEGVILCLYVDDILIFGTSLNVIEEVKDYLSNNFEMKDLGEADVILNIKLQRGDEGGITLVQSHYVDKVLSRFGYSDCKPAPTPYDPSVLLRKNRRIVRDQLRYSQIIGSLMYLASATRPDISFAVSKLSRFVSNPGDDHWQALERVMRYLKGTLSYGIHYTGYPKVLEGYSDSNWISDADEIKATSGYAFTLGGGAVSWKSCKQTILTRSTMEAELTALDTATVETEWLRELLMDLPVVEKPVPAILMNCDNQTVIIKVNSSKDNMKSSRHIKRKLKSVRKQKNSGVIALDYVQTARNLADQFTKGLPRNVIDSASREMGLIPT

SEQ ID NO: 20334 - protein, 1467 aa, Oryza sativa
  unsure (1)..(1467): unsure at all Xaa locations
  Clone ID: TF_OSC400993j.C1.p82.np
MSGVAAATAGGGGTPPGAGSGAGAPGGAVNDNNNGVNSASPSSGGPFSGYTLLLLLLLLALFLFPLLALSLYYVRYVLVPVLHDASSMLSRYWYVPVPDIHDAHSMLLVMLRSPYTAYAMIIALTFWIKICRLMTIFPTIQKPDRSFSVVGFAAALKPHAFDGSNYKRWKARALLWLTAMQCFYVSRGKRSEPPLSPEEEAKFEASDCLFRGALISVLADNIVDVYMHMPSGKDMWDALEAKFGVSDAGSELYVMEQFYDYKMVDDRSVVEQAHEIQMLAKELENNNCELPDKFVAGGIIAKLPPSWSDFATSLKHKRQEFSVPDLIGSLGVEEKARAKDVRGKKVEGGSSANMVQKKNPHASHNNKKVKPDVKPKAATNFKKKGKGKAKGDCFVCGKSGHWAKDCPERKDRKSTNMVISEGRGTSGYGKILPTVLSVFHSPDWWVDTGANIHVCADISLFSSYQVGRGSSLLMGNGSLAAVHGVGTVDLKFTSGKTVQLKNVQHVPSIKKNLVSCSLLCREGFRLVFESNKCVVSKYGTFVGKGYDSGGLFRFSLNDMYNNHNAVNHISENDESNVWHSRLCHVNFGCMTRLANMSLIPKFTLVKGSKCHTYVQSKQPRKPHKASEARNLAPLELVHSDLCEMNGVLTKGGKKYFMTLIDDCTRFCYVYLLKTKDETLHYFKIYKAEVENQLQRKIKLLRSDRGGEYFSNEFASFCQEFGIIHEMTPPYSPLSNGVAERKNRTLTEMVNAMLDTAGLSKELWGEAVLTACHILNKIPMKHKEVTPFEEWERKKLNLSYLRTWGCLAKVNVPIAKRRKLGPKTVDCVFLGYAIHSVGYRFLIVNSGVPDMHAGTIFESRDATFFENEFPMKYTPSTSSKETVMPHEHFAPIEHNDQTPEENPEEDNIVDARKSKRQRVAKSFGDDYIVYLVDDTPRTIEEAYSSPDADYWKEAVRSEMDSIMSNGTWEVVERPYGCKPVGCKWVFKKKLRPDGTIEKYKARLVAKGYTQKEGEDFFDTYSPVARLTTIRVLLALAASHGLLVHQMDVKTAFLNGELEEKIYMDQPDGYVLEGQEGMVCKLLKSLYGLKQAPKQWHEKFDTTLTSAGFVVIEADKCVYYRYGGGEGVILCLYVDDILIFGTSLNVIEEVKDYLSKSFEMKDLGEADVILNIKLQRGDEGGITLVQSHYVDKVLTPTPYDPSVLLRKNRRIVRDQLRYSQIKVLTPTPYDPSVLLRKNRRIVRDQLRYSQIIGSLMYLASATRPDISFAVSKLSRFVXNPGDDHWQALERVMRYLKGTMSYGIHYTGYPKVLEGYSDSNWISNADEIKATSGXVFTLGGGAVSWKSCKQTILTRSTMEAELTALDTATVEAEWLRELLMDLPVVEKPVPAILMNCDNXTVIIKVNNSKDNMKSSRHIMRRLKSVRKQKNSGVIALDYVQTARNLADQFTKGLPRNVIDSASREMGLIPT

SEQ ID NO: 20335 - protein, 1438 aa, Oryza sativa
  Clone ID: TF_OSC401126j.C1.p85.np
MSGVAAATAGGGGTPPPPTGAGSGSGVGAPGGAVNDNNNGGNSASPSSGGPFSGYNLLLLLLLLALFLFPLLALSLYYVRYVLVPVLHDASSMLSRYWYVPVPDIHDAHSMLLVMLRSPYTAYAMIIVSISWIKICRLMTIFPTIQKPDRSFSVVGFAAALKPHAFDGSNYKRWKARALLWLTAMQCFYVSRGKRSEPPLSPEEEAKFEASDCLFRGALISVLADNIVDVYMHMPSRKDMWDALEAKFGVSDAGSELYVMEQFYDYKMVDDRSIVEQAHEIQMLAKELENNNCELPDKFVAGGIIAKLPPSWSDFATSLKHKRQEFSVPDLIGSLGVEEKARAKDVRGKKVEGGSSANMVQKKNPHASHNNKKVKPDVKPKAATNFKKKGKGKAKGDCFVCGKSGHWAKDCPERKDRKSANMIISEGGGTSGYGKILPTVLSVFHSPDWWVDTGANIHVCADISLFSSYQVGRGSSLLMGNGSLAAVHGVGTVDLKFTSGKTVQLKNVQHVPSIKKNLVSGSLLCREGFRLVFESNKCVVSKYRTFVGKGYDCGGLFRFSLNDMCNNHNAVNHISENDESNVWHSRLCHVNFGCMTRLANMSLIPKFTLVKGSKCYTCVQSKQPRKPHKASEARNLAPLELVHSDLCEMNGVLTKGGKKYFMTLIDDCTRFCYVYLLKTKDEALHYFKIYRAEVENQLERKIKRLRSDRGGEYFSNEFASFCEEFGIIHEMTPPYSPQSNGVAERKNRTLTEMVNAMLDTAGLSKEWWGEAVLTACHVLNKIPMKHKEVTQFEEWERKKLNLSYLRTWGCLAKVNVPIAKKRKLGPKTVDCVFLGYAIHSVGYRFLIVNSGVPDMHAGTILESRDATFFENEFPMKYTPSTSSKETVMPREHFAPIEHNDQTPEENPEEDNIVDTRKSKRQRVAKSFGDDYIVYLVDDTPRTIEEAYSSPDADYWKEAVRSEMDSIMSNGTWEVVERPYGCKPVGCKWVFKKKLRPDGTIEKYKARLVAKGYTQKEGEDFFDTYSPVARLTTIRVLLALAASHGLLVHQMDVKTAFLNGELEEEIYMDQPDGYVLEGQEGMVCKLLKSLYGLKQAPKKWHEKFDTTLTSAGFVVNEADKCVYYRYGGGEGVILCLYVDDILIFGTSLNVIEEVKDYLSKNFEMKDLGEADVILNIKLQRGDEGGITLVQSHYVDKDVTPTPYDPSVLLRKNRRIARDQLRYSQIIGSLMYLYSATRPDISFAVSKLSRFVSNPGDDHWQALERVMRYLKGTMSYGIHYTGYPKVLEGYSDSNWISDADEIKATSGYAFTLGGGAVSWKSCKQTILTRSTMEAELTALDTATVEAEWLRELLMDLPVVEKPVPAILMNCDNQTVIIKVNSSKDNMKSSRHIKRRLKSVHSGVIALDYVQTARNLADQFTKGLPRNVIDSASREMDLIPT

SEQ ID NO: 20336 - protein, 1352 aa, Oryza sativa
  Clone ID: TF_OSC401217j.C1.p36.fg
MSNTGDKEKETPVNTNGGNTASNSSGGPFLGYNLITLFQLEVLLLMFIAMSTLCHYVIVDAYSTLSMLMLITFTTITGSNPIVNIMFIILLFWIKICRIMTKFPTIQKPDRSFSVVGFAAALKPHAFDGSNYKRWKARALLWLTAMQCFYVSRGKRSEPPLSPEEEAKFEASDCLFRGALISVLADNIVDVYMHMPSGKDMWDALEAKFGVSDAGSELYVMEQFYDYKMVDDRSVVEQAHEIQMLAKELENNNCELPDKFVAGGIIAKLPPSWSDFATSLKHKRQEFSVPDLIGSLGVEEKARAKDVRGKKVEGGSSANMVQKKNPHASHNNKKVKPDVKPKAATNFKKKSKGKAKGDCFVCGKSGHWAKDCPERKDRKSANMIISEGGGTSGYGKILPTVLSVFHSPDWWVDTGANIHVGRGSSLLMGNGSLAAVHGVGTVDLKFTSGKTVQLKNVQHVPSIKKNLVSGSLLCREGFRLVFESNKCVVSKYGTFVGKGYDSGGLFRFSLNDMCNNHNAVNHISENDESNVWHSRLCHVNFGCMTRLANMSLIPKFTLVKGSKCHTCVQSKQPRKPHKASEARNLAPLELVHSDLCEMNGVLTKGVKKYFMTLIDDCTRFCYVYLLKTKDEALHCFKIYKAEVENQLERKIKRLRSDRGGEYFSNEFASFCEEFGIIHEMTPPYSPQSNGVAERKNRTLTEMVNAMLDTAGLSKEWWGEAVLTACHVLNKIPMKHKEVTPFEEWERKKLNLSYLRTWGCLAKSRDATFFENEFPMKYTPSTSSKETVMPHEHFAPIEHNDQTPEENPEEDNIVDTRKSKRQRVEKSFGDDYIVYLVDDTPRTIEEAYSSPDADYWKEAVCSEMDSIMSNGTWEVVERPYGCKPVGCKWVFKKKLRPDSTIEKYKARLVAKGYTQKEGEDFFDTYSPVARLTTIRVLLALAVSHGLLVHQMDVKTAFLNGELEEEIYMDQPDGYVLEGQEGMVCKLLKSLYGLKQAPKQWHEKFDTTLTSAGFVVNEADKCVYYRYGGGEGVILCLYVDDILIFGTSLNVIEEVKDYLSKNFEMKDLGEADVILNIKLQRGDEGGITLVQSHYVDKVLSRFGYNDCKPAPTPYDPSVLLRKNRRIVRDQLRYSQIIGSLMYLASATRPDISFAVSKLSRFVSNPGDDHWQALERVMRYLKGTMSYGIHYTGYPKVLEGYSDSNWISDADEIKATSGYVFTLGGGAVSWKSCKQTILTRSTMEAELTALDTATVEAEWLRELLMDLPVVEKPVPAILMNCDNQTVIIKVNSSKDNMKSSRHIKRRLKSVRKQKNSGVIALDYVQTARNMADQFTKGLPRNVIDSASREMGLIPT

SEQ ID NO: 20337 - protein, 1040 aa, Oryza sativa
  Clone ID: TF_OSC401279j.C1.p23.gm
MQCFYVSRGKRSEPPLSPEEEAKFEASDCLFRGALISVLADNIVDVYMHMPSGKDMWDALEAKFGVSDAGSELYVMEQFYDYKMVDDRSVVEQAHEIQMLAKELENNNCELPDKFVAGGIIAKLPPSWSDFATSLKHKRQEFSVPDLIGSLGVEEKARAKDVRGKKVEGGSSANMVQKKNPHASHNNKKVKPDVKPKAATNFKKKGKGKAKGDCFVCGKSGHWAKDCPERKDRKSANMIISEGGGTSGDATFFENEFPMKYTPSTSSKETVMPHEHFAPIEHNDQTPEENPEEDNIVDTRKSKRQRVAKSFGDDYIVYLVDDTPRTIEEAYLSPDADYWKEAVRSEMDSIMSNGTWEVVERPYGCKPVGCKWVFKKKLRPDGTIEKYKARLVAKGYTQKEGEDFFDTYSPVARLTTIRVLLALAASHGLLVHQMDVKTAFLNGELEEEIYMDQPDGYVLEGQEGMVCKLLKSLYGLKQAPKQWHEKFDTTLTSAGFVVNEADKCVYYRYGGGEGVILCLYVDDILIFGTSLNVIEEVKDYLSKSDLGEADVILNIKLQRGDEGGITLVQSHYVDKVLSRFGYSDCKPAPTPYDPSVLLRKNRRIARDQLRYSQIIGSLMYLASATRPDISFAVSKLSRFVSNPGDDHWQALERVMRYLKGTMSYGIHYTGYPKVLEGYSDSNWISDADEIKATSGYAFTLGGGAVSWKSCKQTILTRSTMEAELTALDTATVEAEWLRELLMDLPVVEKPVPAILMNCDNQTVIIKVNSSKDNMKSSRHIKRRLKSVRKQKNSGVIALDYVQTARNLADQFTKGLPPTNPRSHDSLRNSASTFFLLIDKEAASLIRVPRFFPGFWGVPPARLLIAMSGVAAAAIGGGGAPPPTPTGAGSGAGAPGGGAVNDYNNGGNSASPSSGGPFSGTTFRFRRANYVTRNFAIAAVTVFFPRPEEGPSALVNSAHHQFDRVRRCEVVGEMSSGGEEGKTSWPEVVGLRAEEAKKVILKDMPDADIVVVPVGTPVTMDFRPNRVRIFVDTVAGTPTIG

SEQ ID NO: 20338 - protein, 1268 aa, Oryza sativa
  Clone ID: TF_OSC401325j.C1.p27.fg
MQCFYVSRGKRSEPPLSPEEEAKFEASDCLFRGALISVLADNIVDVYMHMPSGKDMWDALEAKFGVSDAGSELYVMEQFYDYKMVDDRSVVEQAHEIQMLAKELENNNCELPDKFVAGGIIAKLPPSWSDFATSLKHKRQEFSVLDLIGSLGVEEKARAKDVRGKKVEGGSSANMVQKKNPHASHNNKKVKPDVKPKAATNFKKKSKGKANGDCFVCGKSGHWAKDCPERKDRKSANMIISEGGGTSGYGKILPTVLSVFHSPDWWVDTGANIHVCADISLFSSYQVGRGSSLLMGNGSLAAVHGVGTVDLKFTSGKTVQLKNVQHVPSIKKNLVSGSLLCREDFRLVFESNKCVVSKYETFVGKGYDSGGLFRFSLNDMCNNHNAVNHISENDESNVWHSRLCHVNFGCMTRLANMSLIPKFTLVKGSKCHTCVQSKQPRKPHKASEARNLAPLELVHSDLCEMNGVLTKGGKKYFMTLIDDCTRFCYVYLLKTKDEALHFFKIYKAEVENQLERKIKRLRSDRGGEYFSNEFASFCEEFGIIHEMTPPYSPQSNGVAERKNRTLTEMVNAMLDTAGLSKEWWGEAVLTACHVLNKIPMKHKEVTPFEEWERKKLNLSYLRTWGCLAKVNVPIAKKRKLGPKTVDCVFLGYAIHSVGYRFLIVNSGVPDMHVGTILESRDATFFENEFPMKYTPSTSSKETVMPHEYFAPIEHNDQTPEENPEEDNIVDTRKSKRQRVAKSFGDDYIVYLVDDTPRTIEEAYSSPDADYWKEAVRSEMDSIMSNGTWEVVERPYGCKPVGCKWVFKKKLRPDGTIEKYKARLVAKGYTQKEGEDFFDTYSPVARLTTIRVLLALAASHGLLVHQMDVKTAFLNGELEEEIYMDQPDGYVLEGQEGMVCKLLKSLYGLKQAPKQWHKKFDTTLTSAGFVVNEADKCVYYRYGGGEGVILCLYVDDILIFGTSLNVIEEVKDYLSKSFEMKDLGEADVILNIKLQRGDEGGITLVQSHYVDKVLSRFGYSDCKPAPTPYDPSVLLRKNRRIARDQLRYSQIIGSLMYLASATRPDISFAVSKLSRFVSNPGDDHWQALERVMRYLKGTMSYGIHYTGYPKVLEGYSDSNWISDADEIKATSGYVFTLGGGAVSWKSCKQTILTRSTMEAELTALDTATVEAEWLRELLMDLPVVEKPVPAILMNCDNQTVIIKVNSSKDNMKSSRHIKRRLKSVRKQKNSGVIALDYVQTARNLADQFTKGLPRNVIDSASREMGLIPT

SEQ ID NO: 20339 - protein, 425 aa, Oryza sativa
  Clone ID: TF_OSC401432j.C1.p16.gm
MAEMVRHLELLLEVVHQELEPVPRTTTPTEAVLPHNPAEGHSQAMQCFYVSRGKRSEPPLSPEEEAKFEASDYLFRGALISVLTDNIVDVYMHMPSGKDMWDALEAKFGVSDAGSELYVIEQFYDYKMEKARAKDVRGKKVEGGSSANMVQKKNPHASRNNKKVKPDVKPKAATNFKKKGKGKAKGDCFVCGKSGHWAKDCPERKDRKSANMVISEGGGTSGYEHNDQTPEENPEEDNIVDTRKSKRQRVAKSFGDDYIVYLVDDTPRTIEETYSSPDADYWKEAVHSEMDSMMSNGTWEVVERPYGCKPVGCKWVFKKKLRPDGTIEKYKARLVAKASHDLLVHQMDVKTAFLNGELEEEIYMDQPDSLNVIEEVKDYLSKSFEMKDLGEADVILNIKLQRGYEDHLNEVNNGSRTYSTRYCDS

SEQ ID NO: 20340 - protein, 1015 aa, Oryza sativa
  Clone ID: TF_OSC401539j.C1.p47.gm
MDHVVYLSADKLLTEQFADNVAMARPSDIRAVLASYQGRDIPAEFIERSKEHQRASLPASTARTNTSGRSPDQPEAEPVQIVAAMRPRAFAPPCLPGSGPLPGLAVPGRGDLFPAAGSVVGRRAAPAPAGRGAVARAVDGPSAAAAVAAAAASAAADVPPPQITWQIVVGAVAGVTPFVVAGVEFGKRIIAQKKCEICGGSGLVMKKDYYVRCQGRSRHLLLAHQLRIQLLSASAAAQLLSAAAHHRRHFEVGVGMPHARARAGPWAWPRRGVAGGGRVSRRYPFAATNPRSHDSLRNNASTFFLLIDKEAASFWGVPPARLLIAMSGVAAAAIGGGGAPPPTGAAPPPTPTGAGSGAAMQCFYVSRGKRSEPPLSPEEEAKFEASDCLFRGALISVLTDNIVDVYMHMPSGKDMWDALEAKFGVSDAGSELYVMEQFYDYKMVDDRSVVEQAHEIQMLAKELENNNCELPDKFVAGGIIAKLPPSWSDFATSLKHKRQEFSVPDLIGSLGVEEKVRAKDVRGKKVEGGSSANMVQKKNPHASHNNKKVKPDVKPKAATNFKKKGKGKAKGDCFVCGKSGHWAKDCPERKDMKSANMIISEGGGTSGYGRERFLLVDGKRVACGCSCVGYRFLIVNSGVPDMHAGTIFESRDATFFENEFPMKYTPSTSSKETVMPHEHFAPIEHNDQTPEENPEEDNIVDTRKSKRQRVAKSFGDDYIVYLVDDTPRTIEEAYSSPDADYWKEAVRSEMDSIMSNGTWEVVERPYGCKPVGCKWVFKKKLRPDGTIEKYKARLVAKGYTQKEGEDFFDTYSPVARLTTIRVLLALAASHGLLVHQMDVKTTFLNGELEEEIYMDQPDGYVLEGQEGMVCKLLKSLYGLKQAPKQWHEKFDTTLTSAGFVVNEADKCVYYRYGGGEGVILCLYVDDILIFGTSLNVIEEVKDYLSKSFEMKDLGEADVILNIKLQRGDEGGITLVQSHYVDKDGLCLNVIRVAFPSRDVDLQNISEGTHLYEFDC

SEQ ID NO: 20341 - protein, 1388 aa, Oryza sativa
  Clone ID: TF_OSC401643j.C1.p14.fg
MSGVAAATAGGGGAPPPTGARSGSGAGAPGGAVNDNNNGGNSASPSSGGPFSGYNLLLLLLLLALSLYYVRYVLVPVLHDASSMLSRYWYVPVPDIYDAHSMLLVMLRSPYTAYVMIIVSISWIKICRLMTIFPTIQKPDRSFSVVGFAAALKPHAFDGSNYKRWKARALLWLTAMQCFYVSRGKRSEPPLSPEEEAKFEASDCLFRGALISVLADNIVDVYMHMPSGKDMWDALEAKFGVSDAGSELYVMEQFYDYKMVDDRSVVEQAHEIQMLAKELENNNYELPDKFVAGGIIAKLPHSWSDFATSLKHKRQEFSVPDLIGSLGVEEKARAKDVRGKKVEGGSSANMVQKKNPHASHNNKKVKPDVKPKAATNFKKKGKGKAKGDCFVCGKSGHWAKDCPERKDRKSANMIISEGGGTSGYGKILPTVLSVFHSPDWWVDTGANIHVGRGSSLLMGNRSLAAVHGVGTVDLKFTSGKTVQLKNVHHVPSIKKNLVSGSVLCREGFRLVFESNKCVVSKYGTFVGKGYDNGGLFRFSLNDMCNNHNAVNHISENDESNVWHSRLCHVNFDCMTRLANMSLIPKFTLVKGSKCHTCVQSKQPRKPHKASKARNLAPLELVHSDLCEMNGVLTKGGKKYFMTLIDDCTRFCYVYLLKTKDEALHYFKIYKAEVENQLERKIKRLRSDRGGEYFSNEFASFCEEFGIIHEMTPPYSPQSNGVAERKNRTLTEMVNAMLDTAGLSKEWWGEAVLTACHVLNKIPMKHKEVTPFEEWEWKKLNLSYLRTWGCLAKVNVPIAKKRKLGPKTVDCVFLGYAIHSVGYRFLIANSGVPDMHAGTIFESRDATFFENEFPMKYTPSTSSKETVMPHEHFAPIEHNDQMPEENPEEDNIVDTRKSKRQRVAKSFGDDYIVYLVDDTPRTVEEAYSSPDADYWKEAVRSEMDSIMSNGTWEVVERPYGCKPIGCKWVFKKKLRPDGTIEKYKARLVAKSYTQKEGEDFFDTYSPVARLTTIRVLLALAASHGLLVHQMDVKTAFLNGELEEEIYMDQPDGYVLEGQEGMVCKLLKSLYGLKQAPKQWHEKFDTTLTSAGFVVNEADKCVYYRYGGGEGVILCLYVDDILIFGTSLNVIEEVLSRFGYSDCKPAPTPYDPSVLLRKNRRIARDQLRYSQIIGSLMYLASATRPDISFAVSKLSRFVSNPGDDHWQALERVMRYLKGTMSYGIHYTGYPKVLEGYSDSNWISDADEIKATSGYAFTLGGGAVSWKSCKQTILTRSTMEAELTALDTATVEAEWLRELLMDLPVVEKPVPAILMNCDNQTVIIKVNSSKDNMKSSRHIKRRLKSVRKQKNSGVIALDYVQTARNLADQFIKGLPRNVIDSASREMGLIPT

SEQ ID NO: 20342 - protein, 1328 aa, Oryza sativa
  Clone ID: TF_OSC401685j.C1.p115.fg
MSGVATAAAGGDGRGGAPGAGAGAANDNINGDNSASQSSGGPFLGYILLLFPLLALSLYYYVRYVPVPDIHDASSMLLRYCNVPVSDIHDAHSMLLHDASSMLLRYCNIPVPDIHDTHSMLLVMLRSPYTAYAMIIVLTFWIKICRFMTIFPTIQKPDRSFSVVGFAAALKPHAFDGSNYKRWKACALLWLTAMQYFYVSRGKRSEPPLSPEEEAKFEALDCLFRGALISVLADNIVDVYMHMPSGKDMWDALEAKFGVSDAGSELYVMEQFYDYKMVDDRSVVDQPHEIQMLAKKLENNNCELPDKFVAGGIIAKLPTSWSDFATSLKHKRQEFSVSDLIGSLGVEKKARAKDVRGKKVEGGSSANMVQKKNPHASHNNKKVKPDVKPKAATNFKKKGKGKAKGDCFVCGKSGHWAKDCPERKDRKSANMVISEGGGTSGYGKILPTVLSVLHLPDWWVDTGANIHVGRGSSLLMGNGSLAAVHGVGSKCHTCIQSKQPRKPHKSSEARNLAPLELVHSDLCEMNDVLTKGGKKYFMTLIDDCTRFCYVYLLKTKDKALHYFKIYKAEAENQLERKIKRLRSDRSGEYFSNEFASFCEEFGIIHERTPPYSPQSNGVAERKNRTLTEMVNAMLDTSGLSKEWWGEAVLTTYHVLNKIPMKHKEVTPFEEWERKKLNLSYLRTWGCLAKVNVPIAKKRKLGPNTVDCVFLGYAIHSVGYRFLIVNFGVPDMHVGTILESRDATFFENEFPMKHTPSTSSKETVMPHEHFAPVEHNDQTPEENPEEDNIVDTRKSKRQRVAKSFGDDYIVYLVDDTSRTIEEAYSSPDADYWKEAVRSEMDSIMSNGTWEVVELSYGCKPVGCKWVFKKKLIPDGTIEKYKARLAAKGYTQKEGEDFFDTYSPVARLTTIRVLLALAASHGLLVYQMDVKTAFLNGELEEEIYMDQLDGYVLEGQEGMVCKLLKSLYGLKQAPKQWHEKFDTTLTSAGFVVNETDKCVYYRYGGGEGVILCLYVDDILIFGTSLNVIEEVKDYLSKSFEIKDLGEADVILNIKLQIGDEGGITLVQSHYVDKVLSRFGYSDCKPAPTPYDPSVLLRKNRRIARDQLRYSQIIGSLMYLASATRPDISFAVSKLSRFVSNPGHDHWQALERVMRYLKGTMSYGIHYTGYPKVLEGYSDSNWISDADEIKATSGYVFTLGGGAVSWKSCKQTILTRSTMEAELTALDTATVEAEWLHELLMDLPVVEKSVPAILMNCDNQTVIIKVNSSKDNTKSSRHIKRRLKSVRKQKNSGVIALDYVQTARNLADQFTKGLPRNVIDNASREMGLIPT

SEQ ID NO: 20343 - protein, 1361 aa, Oryza sativa
  Clone ID: TF_OSC401706j.C1.p4.fg
MSASVGGGGTPPPTGAGAGSGVGAPGGGAVNDYNNGDNSASPSSGGPFSGYNLLLLFPLLALYYVPVPVLHDASSILSCYWYAPVPDIHDAHSMLLVMLRSPYTAYAMIIVSFSWIKICRLMTIFPTIQKPDRSFSVVGFAAALKPHAFDGSNYKRWKARALLWLTAMQCFYVSRGKRSEPPLSPEEDAKFEASDCLFRGALISVLADNIVDVYMHMPSGKDMWDALEAKFGVSDAGSELYVMEQFYDYKMVDDRSVVEQAHEIQMLAKELENNNCELPDKFVAGGIIAKLPPSWSDFATSLKHKRQEFSVPDLIGSLGVEEKARAKDIRGKKVEGGSSANMVQKKNPHASHNNKKVKPDVKPKAATNFKKKGKGKAKGDCFVCGKSGHWAKDCPERKDRKSANMIISEGGGTSGYGKILPTVLSVFHSPDWWVDTGTNIHVCADISLFSSYQVGRGSSLLMGNGLLAAVHGVGTVDLKFTSGKTVQLKNVQHVPSIKKNLVSGSLLCREGFRLVFESNKCVVSKYGTFVGKGYDSGGLFRFSLNDMCNNHNAVNHISENDESNVWHSRLCHVNFGCMTRLANMSLIPKFTLVKGSKCHTCVQSKQPRKPHKASEARNLAPLELVHSDLCEMNGVLTKGGKKYFMTLIDDCTRFCYVYLLKTKDEALHYFKIYKAEVENQLERKIKRLRSDRGGEYFSNEFASFCEEFGIIHEMTPPYSPQSNGVAERKNRTLTEMVNAMLDTAGLSKEWWGEAVLTACHVLNKIPMKHKEVTPFEEWERKKLNLSYLRTWGCLAKVNVPIVKKRKLGPKTVDCVFLGYAIHSVGYRFLIVNSGVPDMHAGTIFESRDAIFFENEFPMKYTPSTSSKETVMPHEHFAPIEHNDETPEENPEEDNIVDTRKSKRQRVAKSFGDDYIVYLVDDTPRTIEEAYSSPDADYWKEAVRSEMDSIMSNGTWEVVERPYGCKPVGCKWVFKKKLRPDGTIEKYKARLVAKGYTQKEGEDFFDTYSPVARLTTIRVLLALAASHGLLVHQMDVKTAFLNGELEEEIYMDQPDGYVLEGQEGMVCKLLKSLYGLKQAPKQWHEKFDITLTSAGFVVNEADKCVYYRYGGGEGVILCLYVDDILIFGTSLNVIEEVKDYLSKNFEMKDLGEADVILNIKLQRGDEGGITLVQSHYVDKALERVMRYLKGTMSYGIHYTGYPKVLEGYSDSNWISDADEIKATSGYVFTLGGGAVSWKSCKQTILTRSTMEAELTALDTATVEAEWLRELLMDLPVVEKPVPAILMNCDNQTVIIKVNSSKDNMKSSRHIKRRLKSVRKQKNSGVIALDYVQTARNLADQFTKGLPRNVIDSASREMGLIPT

SEQ ID NO: 20344 - protein, 1110 aa, Oryza sativa
  Clone ID: TF_OSC401762j.C1.p8.fg
MSAPGAGAATAAGGDGGGGAPPGAGAGAGGGAPGARAGAANNNTNGGNSASQSSGGPFSRSPYTVYAMIIVLTFWIKICRFMTIFSTIQKPDRSFSVVGFAATLKPHAFDGSNYKRWKARALLWLTAMQCFYVSRGKRSEPPLSPEEEAKFEASDCLFRGALISVLADNIVDVYMHMPSGKDMWDALEAKFGVSDAGSALYVMEQFYDYKMVDDRSVVEAHEIQMLAKELENNNCELPDKFVVGGIIAKLPPSWSDFATSLKHKRQEFSVSDFIGSLGVEEKARAKDVRGKKVEGGSSANMVQKKNPHVSHNNKKVKPDVKSKAATNFKKKGKRKAKGDCFVCGKSGHWAKDCPERKDRKSANMVISEGGGTSGYGKILPTVLSVFHSPDWWVDTGANIHVGRGSSLLMGNGSLAAVHGVGTVDLKFTSGKTMQLKNVQHVSSIKKNLVSGSLLCREGFRLVFECNKCVVSKYGTFVGKCYDNGAEVENQLERKIKRLRSDRGGEYFSNEFASFCEEFGIIHERTPPYSPQSNGVAERKNRTLTEMVNAMLDTAGLSKEWWGEAVLTACHVLNKIRMKHKEVTPFKEWERKKLNLSYLRTWGCLAKVNVPITKKRKLGPNIVDCVFLCYAIHSVGYRFLIVNSGVPDMHVGTIFESRDATFFENEFPMKHTPSTSSQETVMPHEHFAPIEHNDQTPEENPEEDNIVDTRKSKRQRVTKSFGDDYIVYLVDDTPRTIEEAYSSPDADYWKEAVRSEMDSIMSNGTWEVVERPYGCKPMDVKTTFLNGELEEEIYMDQPDGYVLEDQKGMVCKLLKSLYGLKQAPKQWHEKFDTTLTSAGFVVNEADKCVYYRYDGGEGVILCLYVDDILIFGTSLNVIEEVKDYLSKSFEMKDLGEADVILNIKLQRGDEGGIALVQSPLCGQDDHWQALERVMRYLKGTMSYGIHYTGYPKVLEGYSDSNWISDADEIKATSGYVFTLGGGAVSWKSCKQTILTRSTMEAELTALDTATVEAEWLRELLMDLPVVEKPVSAILMNCDNQTVIIKVNSSKDNTKSSRHIKRRLKSVRKQKNSGVIALDYVQTARNLADQFTKGLPRNVIDSASRKMGLIPT

SEQ ID NO: 20345 - protein, 1242 aa, Oryza sativa
  Clone ID: TF_OSC401880j.C1.p5.fg
MSGVAAAAAGGDGGGGAPPPGAGAGGGAPGGAANDNINGGNSASQSSGGPFSGVLADNIVDVYMHMPSGKDMWDTLEAKFGVSDAGSELYVMEQFYDYKMVDDRSVVEQAHEIQMLAKELENNNCALPDKFVAGGIIAKLPPSWSNFATSLKHKRQEFSVSDLIGSLGVEEKARAKDVRGKKVEGGSSANMVQNKNPHASHNNKKVKPDVKPKAATNFKKKGKGKAKGDCFVCGKSGHWAKDCPERKDRKSANIVISEGGGTSGYGKILPTVLSVFHSPDWSLASFHGVGTVDLKFTSGKTVQLKNVQHVPSIKKNLVSGSLLYREGFRLVFESNKCVVSKYGTFVGKGYDSGGLFRFSLNDMCNNHNAVNHISENDESNVWHSRLCHVNFGCMTRLANMSLIPKFTLVKGSKCYTCVQSKQPRKPHKASEARNLAPLELVHSDLCEMNGVLTKGGKKYFMTLIDDCTRFCYVYLLKTKDEALHYFKIYKAEVENQLERKIKRLRSDRGGQYFSNEFASFCEEFGIIHERTPPYSPQSNGVAERKNRTLTEMMNAMLDTAGLSKEWWGEAVLTACHVLNKIPMKHKEVAPFEEWERKKLNLSYLRTWGCLAKVNVPITKKRKLGPNTVDCVFLGYAIHSVGYRFLIVNSGVPDMHVGTILESRDATFFENEFPMKHTPSTSSKETVMPHEHFAPTEHNDQTPEENPEEDNIIDTRKSKRQRVAKSFGDDYIVYLVDDTPRTIEEAYSSPDADYWKEAVCSEMDSIMSNGTWEVVERPYGCKPVGCKWVFKKKLRPDGTIEKYKARLVAKGYTQKEGEDFFDTYSPVARLTTIRVLLALAASHGLLIHQMDVKTAFLNGELEEEIYMDQPDGYVLEGQEGMACKLLKSLYGLKQAPKQWHEKFDTMLTFAGFVVNEADKCVYYRYGGGEGVILCLYVDDILIFGTSLNVIEEVKDYLSKSFEMKDLGEADVIFNIKLQRGDEGGITLVQSHYVDKVLSRFGYSDCKPAPTPYDPSVLLRKNRRIARDQLRYSQIIGSLMYLASATRLDISFAASKLSRFVSNPGDDHWQALERVMRYLKGTMSYGIHYTGYPKVLEGYSDSNWISNADEIKATSGYVFTLGGGAVSWNSCKQTILTRSTMEAELTALDTATVEAEWLRELLMDLPVVEKPVPAILMNCNNQTVIIKMNSSKDNMKSSRHIKRRLKSVRKQKNSGVIALDYVQTARNLADQFTKGLPRNVIESA

SEQ ID NO: 20346 - protein, 1268 aa, Oryza sativa
  Clone ID: TF_OSC401918j.C1.p5.fg
MQCFYVSRGKRSEPPLSPEEEAKFEASDCLFRGALISVLADNIVDVYMHMPSGKDMWDALEAKFGVSDAGSELYVMEQFYDYKMVDDRSVVEQAHEIQMLAKELENNNCELPDKFVAGGIIAKLPPSWSDFATSLKHKRQEFSVPDLIGSLGVEEKARAKDIRGKKVEGGSSANMVQKKNPHASHNNKKVKPDVKPKAATNFKKKGKGKAKGDCFVCGKSGHWAKDCPERKDRKSANMIISEGGGTSGYGKILPTVLSVFHSPDWWVDTGANIHVCADISLFSSYQVGRGSSLLMGNGSLAAVHGVGTVDLKFTSGKTVQLKNVQHVPSIKKNLVSGSLLCREGFRLVFESNKCVVSKYGTFVGKGYDSGGLFRFSLNDMCNNHNAVNHISENDESNVWHSRLCHVNFGCMTRLANMSLIPKFTLVKGSKCHTYVQSKQPRKPHKASEARNLAPLELVHSDLCEMNGVLTKGGKKYFMTLIDDCTRFCYVYLLKTKDEALHYFKIYKAEVENQLERKIKRLRSDRGGEYFSNEFASFCEEFGIIHEMTPPYSPQSNGVAERKNRTLTEMVNAMLDTAGLSKEWWGEAVLTACHVLNKIPMKHKEVTPFEEWERKKLNLSYLRTWGCLAKVNVPIVKKRKLGQKTVDCVFLGYAIHSVGYRFLIVNSGVPDMHAGTIFESRDATFFENEFPMKYTPSTSSKETVMPHEHFAPIEHNDETPEENPEEDNIVDTRKSKRQRVAKSFGDDYIVYLVDDTPRTIEEAYSSPDADYWKEAVRSEMDSIMSNGTWEVVERPYGCKPVGCKWVFKKKLRPNGTIEKYKARLVAKGYTQKEGEDFFDTYSPVARLTTIRVLLALAASHGLLVHQMDVKTAFLNRELEEEIYMDQPDGYVLEGQEGMVCKLLKSLYGLKQAPKQWHEKFDITLTSAGFVVNEADKCVYYRYGGGEGVILCLYVDDILIFGTSLNVIEEVKDYLSKNFEMKDLGEADVILNIKLQRGDECGITLVQSHYVDKVLSLFGYSDCKPAPTPDDPSVLFRKNRRIARDQLRYSQIIGSLMYLASATRPDISFAVSKLSRFVSNPGDDHWQALERVMRYLKGTMSYGIHYTGYPKVLEGYSDSNWISDADEIKATSGYVFTLGGGAVSWKSCKQTILTRSTMEAELTALDTATVEAEWLRELLMDLPVVEKPVPAILMNCDNQTVIIKVNSSKDNMKSSRHIKRRLKYVRKQKNSGVIALDYVQTARNLADQFTKGLPRNVIDSASREMGLIPT

SEQ ID NO: 20347 - protein, 1413 aa, Oryza sativa
  Clone ID: TF_OSC401921j.C1.p13.fg
MSNTGDKEKETPVNTNGGNTASNSSGGPFLGYNLITLFQLEVLLLMFIAMSTLCHYVIVDAYSTLSMLMLITFTTITGSNPIVNIMFIILLFWIKICRIMTKFPTIQKPDRSFSVVGFAATLKPHAFDGSNYKRWKARALLWLTAMQCFYVSRGKRSEPPLSPEEEAKFEASDCLFRGALISVLADNIVDVYMHMPSGKEMWDALEAKFGVSDAGSELYVMEQFYDYKMVDDRSVVEQAHEIQMPAKELENNNCELPDKFVAGGIIAKLPPSWSDFATSLKHKRQEFSVPDLIGSLGVEEKARAKDVRGKKVEGGSSANMVQKKNPHASHNYKKVKPDVKPKAATNFKKKSKGKAKGDCFVCGKSGHWAKDCPERKDRKSANMIISEGGGTSGYSKILPTVLSVFHSPDWWVDTGANIHVCADISLFSSYQVGRGSSLLMGNGSLAAVHGVGTVDLKFTSGKTVQLKNVQHVPSIKKNLVSGSLLCREGFRLVFESNKCVVSKYGTFVGKGYDSGGLFRFSLNDMCNNHNAVNHISENDESNVWHSRLCHVNFSCMTRLANMSLILKFTLVKGSKCHTCVQSKQPRKPHKASEARNLAPLELVHSDLCEMNGVLTKGGKKYFMTLIDDCTRFCYVYLLKTKDEALHFFKIYKAEVENQLERKIKRLRSDRGGEYFSNEFASFCEEFGIIHEMTPPYSPQSNGVAERKNRTLTEMVNAMLDTAGLSKEWWGEAVLTACHVLNKIPMKHKEITPFEEWERKKLNLSYLRTWGCLAKVNVPIAKKRKLGPKTVDCVFLGYAIHSVGYRFLIVNSGVPDMHVGTILESRDATFFENEFPMKYTPSTSSKETVMPHEHFAPIEHNDQTPEENPEEDNIVDTRKSKRQRVAKSFGDDYIVYLVDDTPRTIEEAYSSPDADYWKEAVRSEMDSIMSNGTWEVVERPYGCKPVGCKWVFKKKLRLDGTIEKYKARLVAKGYTRKEGEDFFDTYSPVACLTTIRVLLALAASHGLLVHQMDVKTAFLNGELEEEIYMDQPDGYVLEGQEGMVCKLLKSLYGLKQAPKQWHEKFDTTLTSAGFVVNEADKCVYYRYGGGEGVILCLYVDDILIFGTSLNVIEEVKDYLSKSFEMKDLGEADVILNIKLQRGDEGGITLVQSHYVDKVLSRFGYSDCKPAPTPYDPSVLLRKNRRIARDQLRYSQIIGSLMYLASATRPDISFAVSKLSRFVSNPGDDHWQALERVMRYLKGTMSYGIHYTGYPKVQEGYSDSNWISDADEIKATSGYVFTLGGGTVSWKSCKQTILTRSTMEAELTALDTATVEAEWLRELLMDLPVVEKPVPAILMNCDNQTVIIKVNSSKDNMKSSRHIKRRLKSVRKQKNSGVIALDYVQTARNLADQFTKGLPRNVIDSASREMGLIPT

SEQ ID NO: 20348 - protein, 1030 aa, Oryza sativa
  Clone ID: TF_OSC401925j.C1.p1.fg
MSNTGDKEKETPVNTNGGNTASNSSGGPFLGYNLITLFQLEVLLLMFIAMSTLCHYVIVDAYSTLSMLMLITFTTITGSNPIVNIMFIILLFWIKICRIMTKFPTIQKPDRSFSVVGFAATLKPHAFDGSNYKRWKARALLWLTAMQCFYVSRGKRSEPPLSPEEEAKFEASDCLFRGALISVLADNIVDVYMHMPSGKEMWDALEAKFGVSDAGSELYVMEQFYDYKMVDDRSVVEQAHEIQMPAKELENNNCELPDKFVAGGIIAKLPPSWSDFATSLKHKRQEFSVPDLIGSLGVEEKARAKDVRGKKVEGGSSANMVQKKNPHASHNYKKVKPDVKPKAATNFKKKSKGKAKGDCFVCGKSGHWAKDCPERKDRKSANMIISEGGGTSGYSKILPTVLSVFHSPDWWVDTGANIHVGRGSSLLMGNGSLAAVHGVGTVDLKFTSGKTVQLKNVQHVPSIKKNLVSGSLLCREGFRLVFESNKCVVSKYGTFVGKGYDSGGLFRFSLNDMCNNHNAVNHISENDESNVWHSRLCHVNFSCMTRLANMSLILKFTLVKGSKCHTCVQSKQPRKPHKASEARNLAPLELVHSDLCEMNGVLTKGGKKYFMTLIDDCTRFCYVYLLKTKDEALHFFKIYKAEVENQLERKIKRLRSDRGGEYFSNEFASFCEEFGIIHEMTPPYSPQSNGVAERKNRTLTEMVNAMLDTAGLSKEWWGEAVLTACHVLNKIPMKHKEITPFEEWERKKLNLSYLRTWGCLAKVNVPIAKKRKLGPKTVDCVFLGYAIHSVGYRFLIVNSGVPDMHVGTILESRDATFFENEFPMKYTPSTSSKETVMPHEHFAPIEHNDQTPEENPEEDNIVDTRKSKRQRVAKSFGDDYIVYLVDDTPRTIEEAYSSPDADYWKEAVRSEMDSIMSNGTWEVVERPYGCKPVGCKWVFKKKLRLDGTIEKYKARLVAKGYTRKEGEDFFDTYSPVACLTTIRVLLALAASHGLLVHQMDVKTAFLNGELEEEIYMDQPDGYVLEGQEGM

SEQ ID NO: 20349 - protein, 1194 aa, Oryza sativa
  unsure (1)..(1194): unsure at all Xaa locations
  Clone ID: TF_OSC402516j.C1.p2.np
VVAAQYDYRQFSSISSIGAKFGCKQLAKELENNNCELLDKFVAGGIIAKLPPSCSDFATCLKHKRXEFSVSDLIGSLGVEEKARAKDVQGKKIEGGSSANMVQKKNPQASHNNKKVKPDVKPKAATNFKKKGKGKAKGDCFVCGKSGHWAKDCPERKDRKSANMVISEGGGTSGYGKILPTVLSVFHSPDWWVDTANIHVCADISLFSSYQVGRGSSLLMGNGSLAAVHGVGTIDLKFTSGNTVQLKNVQHVPSYIKKNLVSGSLLCREGFRLVFESNKCVVSKYETFVGKGYDSGGLFRFALNDMCNNHNAVNHISENDESNVWHSRLCHVNFGCMTRLANMSLIPKFTLVKGSKCHTCVQSKQPRKPHKASEARNLAPLELVHSDLCEMNSVLTKGGKKYFMTLTDDCTRFCYVYLLKRKDEALHYFKIYKAEVENQLERKIKRLRSDRGREYFSNEFASFCEEFGIIHERTPPYLPQSNGVAERKNRTLAEIVNAMLDTTGLCKEWWGEAVLTACYVLNKIPMKHKKVTPFEEWERKKLNLSYLRTWGCLAKVNVPIAKKRKLGPNTVDCVFLGYAIHSVGYRFLIVNSGVPDMHVGTIFESRDAIFFENEFPMKHTPSTSSQETVMPHEHFAPIEHNDQTPKKNPEEDNIVDTRKSKRQRVAKSFGDDYIVYLVDDTPRTIEEAYSSPDADYWKEAVRSEMDPIMSNGSWEVVERPYGCKPIGCKWVFKKKFRPNGTIEKYKARLVPKGYTQKEGEDFFDIYSPVARLTTIRVLLALAASHGLLVHQMDVKTAFLNGELEEEIYMDQLDGYVLEGREGMVCKLLKSLYGIKQAPKQWHEKFDTTLTSVGFVVNVVDKCMYYRYGGGEGVILCLYVDDILIFGISLNVIEEVKDYLSKSFEMKDLGEADVILNIKLQRGDEGGITLVQSHYVDKVLSRFGYSDCKPAPTPYDPSVLLRKNRRIVRDQLRYSQIIGSLIYLASATRPDISFAVSKLSRFVSNPGDDHWQALERVMRYLKGTMSYGIHYTGYPKVLEGYSDSNWISDADEIKVTSGYVFTLGGGAVSWKSCKQTILTRSTMEVELTALDTATVEAEWLRELLMDLSVVEKPVPAILMNCDNQTVIIKLNSSKDNMKLSRHIKRRLKSVRKXKNSGVIALDYVQTARNLADQFTKGLPRNVIDSASREMGMIPT

SEQ ID NO: 20350 - protein, 1301 aa, Oryza sativa
  Clone ID: TF_OSC402776j.C1.p10.gm
MQCFYVSRGKRSEPPLSPEEEAKFEASDCLFRGALISVLADNIVDVYMHMPSGKDMWDALEAKFGVSDAGSELYVMEQFYDYKMVDDRSVVEQAHEIQMLAKELENNNCELPDKFVAGGIIAKLPPSWSDFATSLKHKRQEFSVPDLIGSLGVEEKARAKDVRGKRVEGGSSANMVQKKNPHASHNNKKVKPDVKPKAATNFKKKGKGKAKGDCFVCGKSGHWAKDCPERKDRKSANIVISEGGGTSGTVGRGSFLLMGNGSLAAVHGIAKKRKLGPKTVDCVFLGYAIHSVGYRFLIVNSGVPDMHAGTILESRDATFFENEFPMKYTPSTSSKETVMPHEHFAPIEHDDQTPEENPEEDNIVDTRKSKRQRVAKSFGDDYIVYLVDDTPRTIEEAYSSPDADYWKEAVRSEMDSIMSNGTWEVVERPYGCKPVGCKWVFKKKLRPDGTIEKYKARLVAKGYTQKEGEDFFNTYSPVARLTTIRVLLALAASHGLLVHQMDVKTAFLNGELEEEIYMDQPDGYVLEGQEGMVCKLLKSLYGLKQAPKQWHEKFDTTLTSAGFVVNEADKCVYYRYGGGEGVILCLYVDDILIFGTSLNVIEEVKDYLSKSFEMKDLGEADVILNIKLQRGDEGGITLVQSHYVDKVLSRFGYSDCKPAPTPYDPSVLLRKNRRIARDQLRYSQIIGSLMYLASATRPDISFAVSKLSRFVSNPGDDHWQALERVMRYLKGTMSYGIHYTGYPKVLEGYGDSNWISDADEIKATSGYVFTLGGGAVSWKSCKQTILTRSTMEAELTALDTATVEAEWLRELLMDLPVVEKPVPAILMNCDNQTVIIKVNSSKDNMKSSRHIKRRLKSVRKQKNSGVIALDYVQTARNLADQFTKGLPRFWGVPPARLLIAMSGVAAAATGPPTGAGGTPPPTGAGSGAGAPGGGAVNDYNNGGNSASPSSGGPFSGDGYAFASTENSMVIYNINVAPLIKSNKYTLLAERTRKWEEEKRQERREGKAPAAPAGNRRGEAKQKATAEDIDDGDEDLGFQEPEATVATVDGGACAHASRWSLKAMKRELLAAAPTHEATRRARWSEVALTFDQTDHPPCVARGGQIAMVVSPTVCNVKLGRVLIDGGAALNILSPVAFDAIKALGMVLRPSQPIIGVTLGHTWPLGHIDLPVTFGGSANFRTERVDFDVADLSLPYNAVLGRPALVKFMAAVHYAYLQMKMPGPGGPITVHGDLKVALACMEQHADHLAAASKPAGGDERLSASVPAAPRQRMVTCDEVPVKEVALGDGPSKTTRIGGLLDDK

SEQ ID NO: 20351 - protein, 1438 aa, Oryza sativa
  Clone ID: TF_OSC406028j.C1.p4.fg
MSGGAPPPTGAGSGAGAPGGGAVNDYNNGGNSASPSSGGPFSGYNLLLLLLLALLLFPLLALYCVRYVLVPVLHDASSMLSHYWYVPVSDIHDAHSMLLVMLRSPYTAYAMIIVLISRIKICRIMTIFPTIQKPDRSFSVVGFAAALKPHAFDGSNYKRWKARALLWLTAMQCFYVSRGKRSEPPLSPEEEAKFEASDCLFRGALISVLADNIVDVYMHMPSGKDMWDALEAKFGVSDAGSELYVMEQFYDYKMVDDRSVVEQAHEIQMLAKELENNNCELPDKFVAGGIIAKLPPSWSDFATSLKHKRQEFSVPDLIGSLGVEEKARAKDIRGKKVEGGSSANMVQKKNPHASHNNKKVKPDVKPKAATNFKKKGKGKAKGDCFVCGKSGHWAKDCPERKDRKSANMIISEGGGTSGYGKILPTVLSVFHSPDWWVDTGANIHVCADISLFSSYQVGRGSSLLMGNGSLAAVHGVGTVDLKFTSGKTVQLKNVQHVPSIKKNLVSGSLLCREGFRLVFESNKCVVSKYGTFVGKGYDSGGLFRFSLNDMCNNHNAVNHISENDESNVWHSRLCHVNFGCMMRLANMSLIPKFTLVKGSKCHTCVQSKQPRKPHKASEARNLAPLELVHSDLCEMNGVLTKGGKKYFMTLIDDCTRFCYAYLLKTKDEALHYFKIYKAEVENQLERKIKRLRSDRGGEYFSNEFASFCEEFGIIHEMMPPYSPQSNGVAEKKNRTLTEMVNAMLDTAGLSKEWWGEAVLTACHVLNKIPMKHKEVTPFEEWERKKLNLSYLRTWGCLAKVNVPIVKKRKLGPKTVDCVFLGYAIHSVGYRFLIVNSGVPDMHAGTIFESRDATFFENEFPMKYTSSTSSKETVMPHEHFAPIEHNDQTSEENPEEDNIVDTRKSKRQRVAKSFGDDYIVYLVDDTPRTIEEAYSSPDADYWKEAVRSEMDSIMSNGTWEVVERPYGCKPVGCKWVFKKKLRPDGTIEKYKARLVAKGYTQKEGEDFFDTYSPVARLTTIRVLLALAASHGLLVHQMDVKTAFLNGELEEEIYMDQPDGYVLEGQEGMVCKLLKYLYGLKQAPKQWHEKFDTTLTSAGFVVNEADKCVYYRYGGGEGVILCLYVDDILIFGTSLNVIEEVKDYLSKSFEMKDLGEADVILNIKLQRGDEGGITLVQSHYVDKVLSRFGYSDCKPAPTPYDPSVLLRKNRRIARDQLRYSQIIGSLMYLASATRPDISFAVSKLSRFVSNPGDDHWQALERVMRYLKGTMSYGIHYTGYPKVLEGYSDSNWISDADEIKATSGYAFTLGGGAVSWKSCKQTILTRSTMEAELTALDTATVEAEWLRELLMDLPVVEKPVPAILMNCDNQTVIIKVNSSKDNMKSSRHIKRRLKSVRKQKNSGVIALDYVQTARNLADQFTKGLPRNVIDSASREMGLIPT

SEQ ID NO: 20352 - protein, 1382 aa, Oryza sativa
  Clone ID: TF_OSC408407j.C1.p3.fg
MSNTGDKEKETPVNTNGGNTASNSSGGPFLGYNLITLFQLEFLLLMFITMSTLCHYVIVDAYSTLSMLMLITFTTITGSNPIVNIMFIILLFWIKICRIMTKFPTIQKPDRSFSVVGFAAALKPHAFDGSNYKRWKARALLWLTAMQCFYVSRGKRSEPPLSPEEEAKFEASDCLFRGALISVLADNIVDVYMHMPSGKDMWDALEAKFGVSDAGSELYVMEQFYDYKMVDDRSVVEQAHEIQMLAKELENNNCELPDKFVAGGIIAKLPPSWSDFATSLKHKRQEFSVPDLIGSLGVEEKARAKDVRGKKVEGGSSANMVQKKNPHASHNNKKVKPDVKPKAATNFKKKSKGKAKGDCFVCGKSGHWAKDCPERKDRKSANMIISEGGGTSGYGKILPTVLSVFHSPDWWVDTGANIHVCADISLFSSYQVGRGSSLMMGNGSLAAVHGVGTVDLKFTSGKTVQLKNVQHVPSIKKNLVSGSLLCREGFRLVFESNKCVVSKYGTFVGKGYDSGGLFRFSLNDMCNNHNVVNHISENDESNVWHSRLCHVNFGCMTRLANMSLIPKFTLVKGSKCHTCVQSKQPRKPHKASEARNLAPLELVHSDLCEMNGVLTKGGKKYFMTLIDDCTRFCYVYLLKTKDEALHFFKIYKAEVENQLERKIKRLRSDRGGEYFSNEFASFCEEFGIIHEMTPPYSPQSNGVAERKNRTLTEMVNAMLDTAGLSKEWWGEAVLTACHVLNKIPMKHKEVTPFEEWERKKLNLSYLRTWGCLAKVNVPIAKKRKLGPKTVDCVFLGYAIHSVGYRFLIVNSGVPDMYVGRILESRDATFFENEFPMKYTPSTSSKETVMPHEHFAPIEHNDQTPEDNPEEDNIVDTRKSKRQRVAKSFGDDYIVYLVDDTPRTIEEAYSSPNADYWKEAVRSEMDSIMSNGTWEVVERPYGCKPVGCKWVFKKKLRPDGTIEKYKARLVAKGYTQKEGEDFFDTYSPVARLTTIRVLLALAASHGLLVHQMDVKTAFLNGELEEEIYMDQPDGYVLEGQEGMVCKLLKSLYVLKQAPKQWHEKFDTTLTSAGFVVNEADKCVYYRYGGGEGVILCLYVDDILIFGTSLNVIEEVKDYLSKSFEMKDLGEADVILNIKLQRGDEGGITLVQSHYVDKVLSRFGYSDCKLAPTPYDPSVLLRKNRRIARDQLRYSQIIGSLIYLASATRPDISFAVSKLSRFVSNPADDHWQALERVMRYLKGTMSYGIHYTGYPKVLEGYSDSNWISDADEVKATSGYVFTLGGGAVSWKSCKQTILTRSTMEAELTALDTATVEAEWLRELLIDLPVVEKPVPAILMNYDNQTVIIKVNSSKDNMKSSRHIKRRLKSVRKQKNSGVIALDYV

SEQ ID NO: 20353 - protein, 1457 aa, Oryza sativa
  Clone ID: TF_OSC408508j.C1.p21.fg
MSGVAAATAGGGGTPPPTGAGSGSGAGAPGGGAVNDYNNGGNSASPSSGGPFSGYNLLLLLLLLALFLFPLLALYYVRYVRYVLVPVLHDASSMLSSMLSRYWYVPVPDIHDAHSMLLVMLRSPYTAYAMIIVSFSWIKICRLMTIFPTIQKPDRSFSVVGFAAALKPHAFDGSNYKRWKARALLWLTAMQCFYVSRGKRSEPPLSPDEEAKFEASDCLFRGALISVLADNIVDVYMHMPSGKDMWDALEAKFGVSDAGSELYVMEQFYDYKMVDDRSVVEQAYEIQMLAKELENNNCELPDKFVAGGIIAKLPPSWSDLATSLKHKRQEFSVPDLIGSLGVEEKARAKYVRGKKVEGGSSANMVQKKNPHASHNNKKVKPDVKPKAATNFKKKGKGKAKGDCFVCGKSGHWAKDCPERKDRKSANMIISEGGGTSGYGKILPTVLSVFHSPDWWVDTGANIHVCADISLFSSYQVGRGSSLLMGNGSLAAVHGVGTVDLKFTSGKTVQLKNVQHVPSIKKNLVSGSLLCREGFRLVFESNKCVVSKYGTFVGKGYDSGGLFRFSLNDMCNNHNAVNHISENDESNVWHSRLCHVNFGCMTRLANMSLISKFTLVKGSKCHTCVQSKQPRKPHKASEARNLAPLELVHSDLCEMNGVLTKGGKKYFMTLIDDCTRFCYVYLLKTKDEALHYFKIYKAEVENQLERKIKRLRSDRGGEYFSNEFASFCEEFGIIHEMSPPYSPQSNGVAERKNRTLTEMVNAMLDTAGLSKEWWGEAVLTACHVLNKIPMKHKEVTPFEEWERKKLNLSYLRTWGCLAKVNVPIAKKRKLGPKTVDCVFLGYAIHSVGYRFLIVNSGVPDMHAGTILESRDATFFENEFPMKYTPSTSSKETVMPHEHFAPIEHDDQTPEENPEEDNIVDTRKSKRQRVAKSFGDDYIVYLVDDTPRTIEEAYSSPDADYWKEAVRSEMDSIMSNGTWEVVEHPYGCKPVGCKWVFKKKLRPDGTIEKYKARLVAKGYTQKEGEDFFDTYSPVARLTTIRVLLALAASHGLLVHQMDVKTAFLNGELEEEIYMDQPDGYVLEGQEGMVCKLLKSLYGLKQAPKQWHEKFDTTLTSAGFVVNEADKCVYYRYGGGEGVILCLYVDDILIFGTSLNVIEEVKDYLSKSFEMKDLGEADVILNIKLQRGDEGGITLVQSHYVDKVLSRFGYSDCKPAPTPYDPNVLLRKNRRIARDQLRYSQIIGSLMYLASATRPDISFAVSKLSRFVSNPGDDHWQALERVMRYLKGTMSYGIHYTGYPKVLEGYSDSNWISDANEIKAISGYAFTLGGGAVSWKSCKQTILTRSTMEAELTALDTATVEAEWLRELLMDLPVVEKPVPAILMNCDNQTVIIKVNSSKDNMKSSRHIKRRLKSVRKQKNSGVIALDYVQTARNLADQFTKGLPRNVIDSASREMGLIPT

SEQ ID NO: 20354 - protein, 1033 aa, Oryza sativa
  Clone ID: TF_OSC410626j.C1.p4.gm
MGSHWSSPPVTAARAAAAVAGGEARREEETCTGSLFLVADALHEHHHGRPNIAGATCVPHERDALLAFKEGVVGDPVGRLASWRTGEDCFRHWRGVRCSNLTGHVLKLHLRNTDGGEAAMSGKAGDQVFGDCFPHDCSVRPPCLRLEPELPPAPLLPLEMARREPEPFEPELPLAPLLPLEMARREPEALRTSTPTEAILPHNPAEGHSRAMQCFYVSRGKRSEPPLSPEEEAKFKASDCLFRGALISVLADNIVDVYMHMPFGKDMWDALEAKFGVSDAGSELYVMEQFYDYKMVDDRSVVEQAHEIQMLTKELENNNCELPDKFVAGGIIAKLPPSWSDFATSLKHKRQEFSVSDLIGSLGVEEKARAKDNWGKKVEGGSSANMVQKKNRHASHNNNKKVKPDVKPKVATNFKKKGKGKAKGDCFVCGKSGHWAKDCPERKDRKCANMVISEGGGTSGDATFFENEFSMKHTPSTSSQETVMPHKHFAPIEHNDQTPEENPEEDNIVDTRKSKRQRVAKSFGDDYIVYLVDDTPRTIEEAYSSPDADYWKEAVRSEMDSIMSNDTWEVVERPYGCKPIGCKWVFKKKLSPDGTIEKYKARLVAKGYTQKEGKDFFDTYSPVAHLTMIRVLLALAASHGVLVHQMNVKTAFLNGELEEEIYMDQPDGYVLEGFVVNGADKCVYYRYGGGEGVILCLYVDDILIFGTNLNVIEGVKDYLSKSFEMKDLGEADVILNIKLQRGDEGEITLVQSHYVDKILSHFGYSGCKPASTPYDPSVLLRKNRRIARDQLRYSQIIGSLMYLASATRPDISFAVSKLSRFVLNPGDDHWQALERVMRYLKGIMSYGIHYTRYPKVLEGYSDSNWISDADKIKATSGYVFALGGGTVSWKPCKQTILTRSTMEVELTALDTATVEAEWLRELLMDLPVVGKPVPAILMNCDNQTMIIKVNSSKDNMKSSRHIKRRLKSVRKQKNSGVIALDYVQTARNLADQFTKGLPRNDGSNLNVIRVAFPSRDVDLQNISEGTHLYEFDC

SEQ ID NO: 20355 - protein, 1234 aa, Oryza sativa
  Clone ID: TF_OSC411338j.C1.p6.fg
MSNTGDKEKETPVNTNGGNTASNSSGGPFLGYNLITLFQLEVLLLMYIAMSTLCHYVIVDAYSTLSMLMLITFTTITGSNPIVNIMFIILLFWIKICRIMTKFPTIQKPDRSFSVVGFAAALKPHAFDGSNYKRWKARALLWLTAMQCFYVSRGKRSEPPLSPEEEAKFEASDCLFRGALISVLADNIVDVYMHMPSGKDMWDALEAKFGVSDAGSELYVMEQFYDYKMVDDRSVVEQAHEIQMLAKELENNNCELPDKFVAGGIIAKLPPSWSDFATSLKHKRQEFSVPDLIGSLGVEEKARAKDVRGKKVEGGSSANMVQKKNPHASHNNKKVKPDVKPKAATNFKKKSKGKAKGDCFVCGKSGHWAKDCPERKDRKSANMIISEDGGTSGYGKILPTVLSVFHSPDWWVDTGANIHVGRGSSLLMGNGSLAAVHGVGTVDLKFTSGKTVQLKNVQHVLSIKKNLVSGSLLCREDFRLVFESNKCVVSKYGTFVGKGYDSGGLFRFSLNDMSNNHNAVNHISENDESNENQTVGSDRGGEYFSNEFASFCEEFGIIHEMTPPYSPQSNGVAERKNRTLTEMVNAMLDTAGLSKEWWGEAVLTACHVLNKIPMKHKEVTPFEEWERKKLNLSYLRTWGCLAKVNVPIAKKRKLGPKTVDCVFLGYAIHSVGYRFLIVNSGVPDMHVGTILESRDATFFENEFPMKYTPSTSSKETVMPHEHFAPIEHNDQTPEENPEEGNIVDTRKSKRQRVAKSFGDDYIVYLVDDTPRTIEEAYSSPDADYWKEAVRSEMDSIMSNGTWEVVERPYGCKPVGCKWVFKKKLRPDGTIEKYKARLVAKGYTQKEGEDFFDTYSPVARLTTIRVLLALAASHGLLVHQMDVKTAFLNGELEEEIYMDQPDGYVLEGQEGMVCKLLKSLYGLKQAPKQWHEKFDTTLTSAGFVVNEADKCVYYRYGGGEGVILCLYVDDILIFGTSLNVIEEVKDYLSKSFEMKDLGEADVIINIKLQRGDEGGIHLCNPTMWTSATRPDISFAVSKLSRFVSNPGDDHWQALERVMRYLKGTMSYGIHYTGYPKVLEGYSDSNWISDADEIKATSGYVFTLGGGVVSWKSCKQTILTRSTMEAELTALDTATVEAEWLRELLIDLPVVEKPVPAILMNCDNQTVIIKVNSSKDNMKSSRHIKRRLKSVRKQKNSGVIALDYVQTARNLADQFTKGLPRNVIDSASREIGLIPT

SEQ ID NO: 20356 - protein, 1171 aa, Oryza sativa
  Clone ID: TF_OSC415168j.C1.p9.fg
MSGVATAAIGGGGAPPPTGAAPPPTPTGAGSGAGAPGGGAVNDYNNGGNSASPSSGGPFSGYNLLLLLLLALLLFPLLALYCVRYVLVPVLHDASSMLSHYWYVPVSDIHDVHSMLLVMLRSPYTAYAMIIVSISWIKICRIMTIFSTIQKPDRSFSVVGFAAALKPHAFDGSNYKKWKARALLWLTAMQCFYVSRGKRSEPPLSPEEEAKFEASDCLFRGALISVLADNIVDVYMHMPSGKDMWDALEAKFGVSDAGSELYVMEQFYDYKMVDDRSVVEQAHEIQMLAKELENNNCELPDKFVAGGIIAKLPPSWSDFATSLKHKRQEFSVPDLIGSLGVEEKARAKDVRGKKVEGGSSANMVQKKNPHASHNNKKVKPDVKPKAATNFKKKGKGKAKGDCFVCGKSGHWAKDCPERKDRKSANMIISEGGGTSGYGKILPTVLSVFHSPDWWVDTGANIHVGRGSSLLMGNGSLAAVHGVGTVDLKFTSGKTVQLKNVQHVPSIKKNLVSGSLLCREGFRLVFESNKCVISKYGTFVGKGYDSGGLFRFSLNDMCNNHNAVNHISENDESNVWHSRLCHVNFGCMMRLANMSLIPKFTLVKGSKCHTCVQSKQPRKPHKASEARNLAPLELVHSDLCEMNGVLTKGGKKYFMTLIDDCTRFCYVYLLKTKDEALHYFKIYKAEVENQLERKIKRLRSDRGGEYFSNEFASFCKEFGIIHEMTPPYSPQSNGVAERKNRTLTEMVNAMLDTARLSKEWWGEAVLTACHVLNKIPMKHKEVNVPIVKKRKLGPKTVDCVFLGYAIHSVGYRFLIVNSGVPDMHAGTIFESRDATFFENEFPMKYTSSTSSKETVMPHEHFAPIEHNDQTPEENPEEDNIVDTRKSKRQRVAKSFGDDYIVYLVDDTPRTIEEAYSSPDADYWKEAVRSEMDSIMSNGTWEVVERPYGCKPVGCKWVFKKKLRPDGTIEKYKARLVAKGYTQKEGEDFFDTYSPVARLTTIRVLLALAASHGLLVHQMDVKTAFLNGELEEEIYMDQPDGYVLEGQEGMVCKLLKSLYGLKQAPKQWHEKFDTTLTSAGFVVNEADKCVYYRYGGGEGVILCLYVDDILIFGTSLNVIEEVKDYLSKSFEMKDLGEADVILNIKLQRGDEGGITLVQSHYVDKVLSRFGYSD

SEQ ID NO: 20357 - protein, 807 aa, Oryza sativa
  Clone ID: TF_OSC417635j.C1.p8.gm
MQCFYVSRGKRSEPPLSPKEETKFEASDCLFRGALISVLADNIVDVYMHMPSGKDMWDALEAKFGVSDAGSELYVMEQFYDYKMHKRQEFSVPDLIGSLGVEEKARANDVRGKKVEGGSSANMVQKKNPHASHNNKKVKPDVKPKAATNFKKKGKGKAKGDCFVCGKSGHWAKDCPERKDRKSANMIISEGGGTSGDATFFENEFPMKYTPSTSSKETVMPHEHFAPIEHNDQTPEKNPEEDNIVDTRKSKRQRVAKSFGDDYIVYLVDDTPRTIEEAYSSPDADYWKEAVRSEMDSIMSNGTWEVVERPYGCKPVGCKWVFKKKLRPDGTIEKYKARLVAKGYTQKEGEDFFDTYSPVARLTTIRVLLALAASHGLLVHQMDVKTAFLNGELEEEIYMDQPDGYVLEGQEGMVCKLLKSLYGLKQAPKQWHEKFDTTLTSAGFVVNEADKCVYYRYGGGEGVILCLYVDDILIFGTSLNVIEEVKDYLSKSFEMKDLGEADVILNIKLQRGDEGFWGVPPARLLIAMSGVAAAAIGGGGASPPTGAAPLPTPTGAAPLPMPTGAGSGAGAPGGGAVNDYNNGGNSASPSSGGPFSGRIEEYELRREEADRRTRADIRSLIDVVEACTPEVGKKAKDLPASIKKEQSKVTPTTCSTKCSSPDIEPNLTVVAVDKCATTAMASMKLVADDGATSTTKIPTTDYSKETHAKCSMLGFDVKWDANKADITFLTKTVVLETVPASIASLSAFSPRMIADIKQYTLMPTRKDNCYLSWRHLLLARVMVVELSSTGQFGSENISIKGKHVDKL

SEQ ID NO: 20358 - protein, 1086 aa, Oryza sativa
  Clone ID: TF_OSC420545j.C1.p5.fg
MALFCYRRASDFLPDHAAHAYGIQTAPLLAFYALANSALVTLYAMCWKGRRRLLAGEEAGGAGERVRAAAGAAVPPRLRRPVRGRRVPRPPEGAGAQRAGREVVTTEAAGVPFNFLNGLDIDQRTSDIYFTDSSSTYWRRPLVNLFLSKSNYYPSPKFLFSWADSHEPTLLKPKSNIPTPQNTVSVLDLPMDPFQQNVSPALPPKPKRRAGKVILMDLERRRSASINKLSDGFMSPDPNLGVGKPRGKDRAKSTKKLKMLAQESGILLSLNPLPLELNDPNASDDEIDAPLADCSIRLLQQIGTERCNVSWGKRSEPPFSPEEEVKFEASDFLFRGALISVLADNIVDVYMHTPSGKDMWDALEAKFGVSDAGMEQAHEIQMLAKELENNNCELPDKFVAGGIIAKLPPSWSDFATSLKHKRQEFSVSDLIGSLGVEEKARAKDNGAKRSREKVKPDVKPKATTNFKKKGKGKAKGDCFVCGKSGHWAKDCPERKDRKSANMVICEAEEYWGTDLQLTPPYSPQSNGAAERKNCTLTEMVNAMLDTAGLSKERWGEAILTACHVLNKIPTKHKEVTPFEEWERKKLNLSYLRIRGCLAKVNVPIAKKRKLGPNTVDCVFLSYAIHSVGYRFLIVNSGVPDMRVGTIIESRDATFFDNEFPMKNIPSTSSQETVIPHEHFAPIQHNDQAPEGNPEEDNIADTRKSKRQRVAKSFGDDYIVYFVDDTPRTIEEAYSSPDADYWKEAVRSEMDSIMSNGTWEVVERPYGCKPVGCKWVFKKKLRPDGTIEKYKARLVAKGYTQKEGEDFFDTYSPVARLTTIRVLLALAASHGLLVHQMDVKTAFLNGELDEEIYMDQPDGYVLEGQEGMVCKLLKSLYGLKQAPKQWHKKFDTTLTSVGFVVNEADKCVYYRYGGGEGVILCLYVDDILIFGTSLNVNEEVKDFLSKSFEMKDLGKADVILNIKLLKGDEGGITLVQSHYVDKVLSGFGYSDCKPAPTPYDPNVLLRKNRRIARDQLRYSQIIGSLMYLASATRPDISFAVSKLSRFVSNPGDDHWQALERVMRYLKGTMSYGIHYTGYPKVLEGYSD

SEQ ID NO: 20359 - protein, 1456 aa, Oryza sativa
  Clone ID: TF_OSC420787j.C1.p19.gm
MQCFYVSRGKRSEPPLSPEEEAKFEASDCLFRGALISVLADNIVDVYMHMPSGKDMWDALEAKFGVSDAGSELYVMEQFYDYKMVDDRSVVEQAHEIQMLAKELENNNCELPDKFVAGGIIAKLPPSWSDFATSLKHKRQEFSVPDLIGSLGVEEKARAKDVRGKKVEGGSSANMVQKKNPHASHNNKKVKPDVKPKAATNFKKKSKGKAKGDCFVCGKSGHWAKDCPERKDRKSANMIISEGGGTSGDATFFENEFPMKYTPSTSSKETVMPHEHFAPIEHNDQTPEENPEEDNIVDTRKSKRQRVAKSFGDDYIVYLVDDTPRTIEEAYSSPDADYWKEAVRSEMDSIMSNGTWEVVERPYGCKPVGCKWVFKKKLRPDGTIEKYKARLVAKGYTQKEGEDFFDTYSPVARLTTIRVLLALAASHGLLIHQMDVKTAFLNGELEEEIYMDQPDGYVLEGQEGMVCKLLKSLYGLKQAPKQWHEKFDTTLTSAGFVVNEADKCVYYRYGGGEGVILCLYVDDILIFGTSLNVIEEVKDYLSKSFEMKDLGEADVILNIKLQRGDEDGRAIRFLGSARRDYSLFVNIYFIFTNMSNTGDKEKETPVNTNGGNTTSNSSGGPFLGTIHFHLFESGFMPSYNCWTSHGEQGVEMEEDEVEDDNIPDFAQYVGFEGNQTGEEEIAADGNDVADDLGQMLQDAREDSESEKEAHKLDKMLEDHRTSLYPGCEQGHKKLDTTLDLLQWKAKNGDGILRHPADGSQWRNIDRKFKEFGKDARNIRFGPKQPGNDIDVYLRPLVEDLKQLWKKEGVPVWDEDKQEEFNLRALLFVTINDWPALSNLSGQSNKGYKACTHCMDETESTYLKHCRKVVYMGHRRFLAANHPVRKKDKHFEHKADHRTKPKHRSGKTVFAMVKDLKVVFGKGPGSQHIESEDGHAAMWKKNSIFWELPYWEFLDVRHAIDVMHLTKNLCVNLLGFLGVYGKSKDTLEARNDLKHMEQRSDLHPEPKEKGSHYLSPASYTLSKAEKESMFECLESIKVPSGYSTNIKRIISTKEKKFTNLKSHDCHVLMTQLLPVVIRGILPDNVRATITKLCAFMNAISQKVIDPDRLEALQNEVVQCLVSFELIFPPSFFNIMTHLLCHLVKEIRILGPMYLHNMFPFERYMGVLKKYVRNRARPEASIAKGYGTEEVIEFCVEFIEDLRPIGVPKSRHEGRLQGKGTLGRKAITTVDNNLFRKAHFTVLQHSSLVAPYIEEHLALVRARNIGKSDAWITRHHIDTFPAWLRQHLMGNESINQQLAFLAWGPSGSIATFQGYEINGYTFYTRAQDMKSTNQNSAVRVDAMGHDGTTATYYGSIEDIWELDYGPLKVPLFRCQWVRLTGGGVMIDDSGMTTVDLNKVGYSDEPFVLANDVTQVFFVKDMSSKGKKGRGPDEPKRQVVLPGKRKIVGVEDKTDEDYD

SEQ ID NO: 20360 - protein, 358 aa, Oryza sativa
  Clone ID: TF_OSC423002j.C1.p1.fg
MAMIFLLAALSTTHLASSLRPGAVAGGACRPSGYLPGKSYGRAIMFLGSARRDYSLFVNIYFIFTNMSNTGDKEKETPVNTNGGNTASNSSGGPFLGVLADNIVKVYMHMPSGKDMRDALEAKFGVSDAGSELYVMEQFYDYKMVDDRSVVEQAHEIQMLAKELENNNCELPDKFVAGGIIAKLPPSWSDFATSLKHKRQEFSVPDLIGSLGVEEKARAKDVRGKKVEGGSSANMVQKKNPHASHNNKKVKPDVKPKAATNFKKKSKGKAKGDCFVCGKSGHWAKDCPERKDRKSANMIISEGGGTSGYGRERFLLVDGKRVACGCSWCWYGRSEVYFGKDRAAEECAACPFNKEESS

SEQ ID NO: 20361 - protein, 788 aa, Oryza sativa
  Clone ID: TF_OSC423019j.C1.p2.np
IMIIILLFWIKICRIMTKFPTFQKPDRSFSVVGFAAALKPHAFDGSNYKRWKARALLWLTAMQCFYVSRGKRSEPPLSPEEEAKFEASDCLFRGALISVLADNIVDVYMHMPSGKNMWDALEAKFGVSDAGSELYVMEQFYDYKMVDDRSVVEQAHEIQMLAKELENNNCELPDKFVAGGIIAKLPPSWSDFATSLKHKRQEFSVPDLIGSLGVEEKARAKDVRGKKVEGGSSANMVQKKNPHASHNNKKVKPDVKPKAATNFKKKSKGKAKGDCFVCGKSGHWAKDCPERKDRKSANMIISEGGGTSGYGKILPTVLSVFHSPDWWVDTGANIHVCADISLFSSYQVGRGSSLLMGNGSLAAVHGVGTVDLKFTSGKTVQLKNVQHVPSIKKNLVSGSLLCREGFRLVFESNKCVVSKYGTFVGKGYDSGGLFRFSLNDMCNNHNAVNHISENDESNVWHSRLCHVNFGCMTRLANMSLIPKFTLVKGSKCHTCVQSKQPRKPHKASEARNLAPLELVHSDLCEMNGVLTKGGKKYFMTLIDDCTRFCYVYLLKTKDEALHFFKIYKAEVENQLERKIKRLRSDRGGEYFSNEFASFCEEFGIIHEMTPPYSPQSNGVAERKNRTLTEMVNAMLDSAGLSKEWWGEAVLTACHVLNKIPMKHKEVTPFEEWERKKLNLSYLRTWGCLAKVNVPIAKKRKLGPKTVDCVFLGYAIHSVGYRFLIVNSRVPDMHVGTILESRDATFFENEFPMKYTPSTSSKETVMPHEHFAPIEHNDQTPEENSEKDN

SEQ ID NO: 20362 - protein, 693 aa, Oryza sativa
  Clone ID: TF_OSC7439j.C1.p3.fg
MSAPGAGAAAAAAAAGAGDGVPGAGAGAVANVNTNRGNSASQSSGGPFSGYILLLLLTHSFIALLVLLVASQLQLLGSASRTIARPPCMRLEPELPPVPLLLELEMARLELEPELLRTSTPTEAILPHNPTEGHSRVGFAAALKPHAFDGSNYKRWKARALLWLTAMQCFYVSRGKQSEPPLSPEEEAKFEASDCLFRGALISVLADNIVDVYMHMPSGKDMWDALEAKFGVSDAGSELYVMEQFYDYKIVDDRSVVEQAHEIQMLAKELENNNCELPDKFVAGGIIAKLPPSWSDLATSLKHKRQEFSVSDLIGSLGVEEKARTKDVRGKKVEGGSSANMVQKKNPHASHNNKKVKPDVKPKAATNFKNKGKGKAKGDCFVCGKSGHWAKDCPERKDRKSANMVISEGGGTSGYGRERFLLVDGKRVACGCSWCWFCYVYLLKTKDEALHFFKTYKAEVENQLERKIKRLRSDRGGEYFSNEFASFCEEFGIIHERTPPYSPQSNGVAERKNRTLTEMVNAMLDTAGLSKEWWGEAVLTACHVLNKIPMKHKEVTPFEEWERKKLNLSYLRTWGCLAKVNVPIAKKRKLGPNTVDCVFLGYAIHSVGYKFLIVNSRVPDMHVGTIIESRDATFFENEFPMKHTPSTSSQETIMPHEHFAPIEHNDQTPEENPEEDNIVDTRKSKRQRVAKWR

SEQ ID NO: 20363 - protein, 1126 aa, Oryza sativa
  Clone ID: TF_OSC900014j.C1.p10.fg
MQCFYVSRGKRSEPPLSPEEEAKFEASDCLFHGALISVLADNIVDVYMHMPSGKDMWDALEAKFGVSDAGSELYVMEQFYDYKMVDDRSVVEQAHEIQMLAKELENNNCELPDKFVAGGIIAKLPPSWSDFATSLKHKRQEFSVPDLIGSLGVEEKARAKDVRGKKVEGGSSANMVQKKNPHASHNNKKVKPDVKPKAATNFKKKGKGKTKGDCFVCGKSGHWAKDCPECKDRKSANMIISEGGGTSGYGKILPTVLSVFHSPDWWVDTGANIHVGRGSSLLMGNGSLAAVHGVGTVDLKFTSGKTVQLKNVQHVPSIKKNLVSGSLLCREGFRLVFESNKCVVSKYGTFVGKGYDSGGLFRFSLNDMCNNHNAVNHISENDESNVWHSRLCHVNFGCMTRLANMSLIPKFTLVKGSKCHTCVQSKQPRKPHKASEARNLAPLELVHSDLCEMNGVLTKGGKKYFMTLIDDCTRFCYVYLLKTKDEALHYFKIYKAEVENQLERKIKRLRSDRGGEYFSNEFASFCEEFGIIHEMTPPYSPQSNGVAERKNRTLTEMVNAMLDTAGLSKECTSSKETVMPHEHFAPIEHDDQTPEENPEEDNIVDTRKSKRQRVAKSFGDDYIVYLVDDTPRTIEETYSSPDADYWKEAVRSEMDSIMSNGTWEVVERPYGCKPVGCKWVFKKKLRPDGTIEKYKARLVAKGYTQKEGEDFFDTYSPVARLTTIRVLLALAASHGLLVHQMDVKTAFLNGELEEEIYMDQPDGYVLEGQKGMVCKLLKSLYGLKQAPKQWHEKFDTTLTFAGFVVNEADKCVYYRYGGGEGVILCLYVDDILIFGTSLNVIEEVKDYLSKSFEMKDLGEADVILNIKLQRGDEGGITLVQSHYVDKVLSRFGYSDCKPAPTPYDPSVLLRKNRRIARDQLRYSQIIGSLMYLASATRPDISFAALERVMRYLKGTMSYGIHYTGYPKVLEGYSDSNWISDADEIKATSGYAFTLGGGAVSWKSCKQTILTRSTMEAELTALDTATVEAEWLRELLMDLPVVEKPVPAILMNCDNQTVIIKVNSSKDNMKSSRHIKRRLKSFRKQKNSGVIALDYVQTARNLADQFTKGLPRNVIDSASREMGLIPT

SEQ ID NO: 20364 - protein, 1240 aa, Oryza sativa
  Clone ID: TF_OSC900017j.C1.p7.fg
MQCFYVSRGKRSEPPLSPEEEAKFDASDCVFRGALISVLADNIVDVYMHMPSGKDMWDALEAKFGVSDAGSELYVMEQFYDYKMVDDRSVVEQAYEIQMLAKELENNNCELPDKFVAGGIIAKLPPSWSDFATSLKHKRQEFSVPDLIGSLGVEEKARAKDVRGKKVEGGSSANMVQKKNPHASHNNKKVKPDVKPKAATNFKKKGKGKAKGDCFVCGKSGHWAKDCPERKDRKSANMIISEGGGTSGYGKILPTVLSVFHSPDWWVDTGANIHVCADISQFSSYQVGRGSSLLMGNGSLAAVHGVGTVDLKFTSGKTVQLKNVQHVPSIKKNLVSGSLLCREGFRLVFESNKCVVSKYGTFVGKGYDSGGLFRFSLNDMCNNHNAVNHISENDESNVWHSRLCHVNFGCMMRLANMSLIPKFTLVKGSKCHTCVQSKQPRKPHKASEARNLAPLELVHSDLCEMNGVLTKGGKKYFMTLIDDCTRFCYVYLLKTKDEALHYFKIYKAEVENQLERKIKRLRSDRGGEYFSNEFASFCEEFGIIHEMTPPYSPQSNGVAERKNRTLTEMVNAMLDTAGLSKEWWGEAVLTACHVLNKIPMKHKEVTPFEEWERKKLNLSYLRTWGCLAKVNVPIVKKRKLGPKTVDCVFLGYAIHSVVYRFLIVNSGVPDMHAGTIFESRDATFFENEFPMKYTSSTSSKETVMPHEHFAPIEHNDQTPEENPEEDNIVDTRKSKRQRVAKSFGDDYIVYLVDDTPRTIEEAYSSPDADYWKEAVRSEMDSIMSNGTWEVVERPYGCKPVGCKWVFKKKLRPDGTIEKYKARLVAKGYTQKEGEDFFDTYSPVARLTTIRVLLALAASHGLLVHQMDVKTAFLNGELEEEIYMDQPDGYVLEGQEGMVCKLLKSLYGLKQAPKQWHEKFDTTLTSAGFVVNEADKCVYYRYGGGKGVILCLYVDDILIFGTSLNVIEEVKDYLSKSFEMKDLGEADVILNIKLQRGDEGGITLVQSHYVDKVLSRFGYSDCKPAPTPYDPSVLLRKNRRIARDQLRYSQIIGSLMYLASATRPDISFAVSKLSRFVSNLGDDHWQALERVMRYLKGTMSYGIHYTGYPKVLEGYSDSNWISDADEIKATSGYAFTLGGGAVSWKSCKQTILTRSTMEAELTALDTATVEAEWLRELLMDLPVVEKPVPAILMNCDNQTVIIKVNSSKDNMKSSRHIKRRLKSVRKQKKLRSDSIGLCPNG

SEQ ID NO: 20365 - protein, 829 aa, Oryza sativa
  Clone ID: TF_OSC900088j.C1.p24.fg
MSAPGAGAAGVAVGGDGVPGAGAGGGALGARAGATNNNINGGNFASQSSGGPFSGYILLLFLLLALYRYVPVPDIHDAFSMLALYCYVPVPDIHDAFSVLLRYCYVIHDAFSMLLVMLSLDYPTLRWKAHALLWLTAMQCFFVSRGKRSEPPLSPEEEAKFEASDCLFRGALISVLADNIVDVYMHMPSGKDMWDALEAKFGVSDAGSELYVMEQFYDYKMVDDRSVVEQAHEIQMLAKELENNNCELPDKFVHKRQEFSVSDLIGSLGVEEKARAKDNRGKKKKNPHASHNNKKIKLDVKSKAATKFKKKCKGKAKGDCFVCGKSGHWAKDCPECKDRKSANMVISEGGGTSGYGKILPTVLSVFHSPDWWVDTGANIHACADISLFSSYQVGRGSSLLMGNRSLAAIHGVGTVDLKFTSGKTMQLKNVQHVPSIKKNLVSGSLLCREGFRLVFESNKCVISKYGTFVGKGYDSGGLFRFSLNDMCNNHNVVNHISENDESNVWHSRLCHVNFGCMTLLANMSLIPKFTLVKGSKCHTCVQSKQPCKPHKTSEARNLAPLELVHSDLCEMNGVLTKGGKKYFMTLIDDCTRFCYVYLLKTKDEALHFFKTYKAEVENQLERKIKLLRSDRGGEYFFNEFASFCEEFGIIHERTPPYSPQSNGVAERKNRTLTEMVNAMLDTAGLSKEWWGEAVLTACHVLNKILMKHKEVIPFEEWERKKLNLSYLRTWGCLAKVNVPIAKKRKLGPNTVDCMFLGYAIHSVGYRFLIVNSGVPDMYVGTIIESRDATFFENEFPMKHTPSTSSQETVMPHEHFAMFLFLIFIMPLAC

SEQ ID NO: 20366 - protein, 1310 aa, Oryza sativa
  Clone ID: TF_OSC900094j.C1.p6.fg
MSNTGDKEKETPVNTNGGNTASNSSGGPFLGYNLITLFQLEVLLLMFIAMSTLCHYVIVDAYSTLSMLMLITFTTITGSNPIVNIMFIILLFWIKICRIMTKFPTIQKPERSFSVVGFAATLKPHAFDGSNYKRWKARALLWLTAMQCFYVSRGKRSEPPLSPEEEAKFEASDCLFRGALISVLADNIVDVYMHMPSGKDMWDALEAKFGVSDAGSELYVMEQFYDYKMVDDRSVVEQAHEIQMLAKELENNNCELPDKFVASGIIAKLPPSWSDFATSLKHKRQEFSVPDLIGSLGVEEKARAKDVRGKKVEGGSSANMVQKKNPHASHNNKKVKPDVKPKAATNFKKKSKGKAKGDCFVCGKSGHWAKDCPERKDRKSANMIISEGGGTSGYGKILPTVLSVFHSPDWWVDTGANIHVGRGSSLLMGNGSLAAVHGVGTVDLKFTSGKTVQLKNVQHVPSIKKNLVSGSLLCREGFRLVFESNKCVVSKYGTFVGKGYDSGGLFRFSLNDMCNNHNAVNHISENDESNVWHSRLCHVNFGCMTRLANMSLIPKFTLVKGSKCHTCVQSKQPRKPHKASEARNLAPLELVHSDLCEMNGVLTKGGKKYFMTLIDDCTRFCYVYLLKTKDEALHFFKIYKAEVENQLERKIKRLRSDRGGEYFSNEFASFCEEFGIIHEMTPPYSPQSNGVAERKNRSLTEMVNAMLDTAGLSKEWWGEAVLTACHILNKIPMKHKEVTSFEEWERKKLNLSYLRTWGCLAKENPEEDNIVDTRKSKRQRVAKSFGDDYIVYLVDDTPRTIEEAYSSPDADYWKEAVRSEMDSIMSNGTWEVVERPYGCKPVGCKWVFKEKLRPDGTIEKYKARLVAKGYTQKEGEDFFDTYSPVARLTTIRVLLALAASHGLLVHQMDVKTAFLNGELEEEIYMDQPDGYVLEGQEGIVCKLLKSLYGLKQAPKQWHEKFDTTLTSAGFVVNEADKCVYYRYGGGEGVILCLYVDDILIFGTSLNVIEEVKDYLSKSFEMKDLGEADVILNIKLQRGDEGGITLVQSHYVDKVLSRFGYSDCKPAPTPYDPSVLLRKNRRIARDQLRYSQIIGSLMYLASATRPDISFAVSKLSRFVSNPGDDHWQALERVMRYLKGTMSYGIHYTGYPKVLEGYSDSNWISDADEIKATSGYVFTLGGGAVSWKSCKQTILTRSTMEAELTALDTATVEAEWLRELLMDLPVVEKPVPAILMNCDNQTVIIKVNSSKDNMKSSRHIKRRLKSVRKQKNSGVIALDYVQTARNLADQFTKGLPRNVIDSASREMGLIPT

SEQ ID NO: 20367 - protein, 1504 aa, Oryza sativa
  Clone ID: TF_OSC900136j.C1.p6.fg
MARREPEPLRTSTPTEAILPHNPAEGHSRVVLVASQLRPWYVHDAYDTLSILLVMLHVITRSPHIVHAMVIVLIFWIKICRYMTIFPTIQKPDRSFSVVGFAAALKPHAFDGSNYKRWKARALLWLTAMQCFCVSQGKRSEPSLSHEEEAKFEASDCLFHGALISVLAHNIVDVYMHMPSGKDMWDALEATFGVSDAGSELYVMEQFYDYKMVDDRSVVEQAHEIQMLAKELEDNNCELPDKFVAGGIIAKLPPSWSDFATSLKHKRQEFSVSDLIGSLGVEEKARAKDNRGKKVEGGSSANMNNKKVKPDVKPKAATNFKKKGKGKAKGDCFVCGKSGHWAKDCPERKDRKSANMVISEGGGKSGYGKILPTVLSVFHSPDWWVDTGANIHVGRGSSLLMGNGSLAAVHGVGTVDLKFTSGKTVQLKNVQHVPSIKKNLVSGSLLCREGFRLVFESNKCVVSKYGTFVGKGYDSGGLFRFSLNDMCNNHNVVNHISENDESNDEALHFFKTYKAEVENQLERKIKRLRSDRGGEYFSNEFASFCEEFGIIHERTPPYSPQSNGVAERKNRTLTEMVNAMLDTMGLSMEWWGEAVLTACHVLNKIPMKHKEVTPFEEWERKKLNLSYLRTWGCLAKVNVPIAKKRKLGPNTVDCVFLGYAIHSVGYRFLIVNSGVPDMHVGTIIESRDATFFENEFPMKHTPSTSSQETVMPHKHFAPIEHNDQTPEENPEEDNVVDTRKSKRQRVAKSFGDDYIVYLVDDTPRTIEEAYSSPDANYWKEAEVVERPYGCKPVGCKWVFKKKLRPDGTIEKFKARLVAKGYTQKEGEDFFDTYSPVARLTTIRQAPKQWHEKFDTTLTSVGFVVNEADKCVYYRYGGGEGVILCLYVDDILIFGTSFNVIEEVKDYLSKSFEMKDLGEADVILNIKLQRGDEGGITLVQSHYVDKVLSHFGYSDCKPAPTPYDPSVLLRKNRRIARDQLRYSQIIGSLMYLVSATRPDISFAISKLSRFVSNPGDDHWQALERVMRYLKGTMSYGIHYTGYPKLLEGCSDSNWISDADEIKATSGYVFTLGGGTVSWKSFKQTILTRSTMEAELTTLYTATVEAKWLRELLMDLSVVEKPVPAILMNCDNQIVIIKVNSSKDNMKSSRHIKRRLKSVRKQKNSGVIALDYVQTARNLDGSYLNVIRVAFSSRDVDLQNISEGTHLYEFDCYSYPRWKFNLTVSTKTQKEQGLRNYTFARDLHQKCTSYYCCFHVFFTSILAQQQSSVVEIVAAVMHGEEVTRQRCRRPAVLRGERITRRQRSRLARRCKPPVGNAVAILRGERITQRRRMRSARRCKAPVGNAVAVLRGERITRWWRMRSARRCKPSVGNAVAILRGERITRRRCMRSARCKRSVGDEVAILRGERITWWWRVVPRQRGVSSPRARGKVGEEHPDDAGGEAPESVARSTNNAQATREVKPPSPWRVGVEHPDDAGGEAPESMVRSAKNAQTTRKRSPRVRGKSV

SEQ ID NO: 20368 - protein, 997 aa, Oryza sativa
  Clone ID: TF_OSC900169j.C1.p29.gm
MARREPEPFEPELPLAPLLPLEMARREPEALRTSTPTEAILPHNPAEGHSRAMQCFYVSRGKRSEPPLSPEEEAKFKASDCLFRGALISVLADNIVDVYMHMPFGKDMWDALEAKFGVSDAGSELYVMEQFYDYKMVDDRSVVEQAHEIQMLTKELENNNCELPDKFVAGGIIAKLPPSWSDFATSLKHKRQEFSVSDLIGSLGVEEKARAKDNWGKKVEGGSSANMVQKKNRHASHNNNKKVKPDVKPKVATNFKKKGKGKAKGDCFVCGKSGHWAKDCPERKDRKCANMVISEGGGTSGDATFFENEFSMKHTPSTSSQETVMPHKHFAPIEHNDQTPEENPEEDNIVDTRKSKRQRVAKSFGDDYIVYLVDDTPRTIEEAYSSPDADYWKEAVRSEMDSIMSNDTWEVVERPYGCKPIGCKWVFKKKLSPDGTIEKYKARLVAKGYTQKEGKDFFDTYSPVAHLTMIRVLLALAASHGVLVHQMNVKTAFLNGELEEEIYMDQPDGYVLEGFVVNGADKCVYYRYGGGEGVILCLYVDDILIFGTNLNVIEGVKDYLSKSFEMKDLGEADVILNIKLQRGDEGEITLVQSHYVDKILSHFGYSGCKPASTPYDPSVLLRKNRRIARDQLRYSQIIGSLMYLASATRPDISFAVSKLSRFVLNPGDDHWQALERVMRYLKGIMSYGIHYTRYPKVLEGYSDSNWISDADKIKATSGYVFALGGGTVSWKPCKQTILTRSTMEVELTALDTATVEAEWLRELLMDLPAGDQVFGECFPHDCSVHPPCLRLEPELPPAPLLPLEMTRQEPEPLRTSTPTEAILPHNSAEGHSRGSVRSLRYLNLSGIPFSDKVPPQLGSITGLRDLRHLNLAENRLSGGQLETLYTYNPLMYSGNNGLCGFPLQRSCPGNSTSKDGDLSNEKHGDQQIPELHSDDQMFFLFGCGVGFVVGSWVVFFSLLFVKTWRIAYFRLFDSVYDKVYVFVVVNWGSLTGMKVAS

SEQ ID NO: 20369 - protein, 1314 aa, Oryza sativa
  Clone ID: TF_OSC900172j.C1.p12.fg
MSGVAAATAGGGGTPPTGAGSGAGAPGGAVNDNNNGGNSASPSSGGPFSGYNLLLLLLLLALSLYYVRYVLVPVLHGASSMLSRYCYVPVPDIQDAHSMLLVMLRSPYTAYAMIIALTFWIKICRLMTIFPTIQKPDRSFSVVGFAAALKPHAFDGSNYKRWKARALLWLTAMQCFYVSRGKRSEPPLSPEEEAKFEASDCLFRGALISVLADNIVDVYMHMPSGKDMWDALEAKFGVSDAGSELYVMEQFYDYKMVDDRSVVEQAHEIQMLAKELENNNCELPDKFVAGGIIAKLPPSWSDFATSLKHKRQEFSVPDLIGSLGVEKKARAKDVQGKKVEGGSSANMVQKKNPHASHNNKKVKPDVKPKTATNFKKKGKGKAKGDCFVCGKSGHWAKDCPERKDRKSANMIISEGGGTSGYGKILPTVLSVFHSPDWWVDTGANIHVCADISLFSSYQVGRGSSLLIGNGSLAAVHGVGTVDLKFTSGKTVQLKNVQHVPSIKKNLVSGSLLCREGFRLVFESNKCVVSKYGTFVGKGYDSGGLFRFSLNDMCNNHNAVNHISENDESNVWHSRLCHVNFGCMTRLANMSLISKFTLVKGSKYHTCVQSKQPRKPHKASEARNLAPLEHVHSDLCEMNGVLTKGGKKYFMTLIDDCTRFCYVYLLKTKDETLHYFKIYKAEVENQLERKIKRLRSDRGGEYFSNEFASFCEEFGIIHEMTPPYSPQSNGVAERKNRTLTEMVNTMLDTAGLSKEWWGEAVLTACHVLNKIPMKHKEVTPFEEWERKKLNLSYLRTWGCLAKVNVPIAKKRKLGPKTVDCVFLGYAIHSVDYRFLIVNSGVPDMHVGTILESRDATFFENEFPMKYTPSTSSKETVMPHEHFAPIEHNDQTPKENPEEDNIVDTRKSKRQRVAKSFGDDYIVYLVDDTPRTIEEAYSSPDADYWKEAVRSEMDSIMSNGTWEVVERPYGCKPVGCKWVFKKKLRPDGTIEKYKARLVAKGYTQKEGEDFFDTYSPVARLTTIRVLLALAASHGLLVHQMDVKTAFLNGELEEEIYMDQPDGYVLEGQEGMVCKLLKSLYGLKQAPKQWHEKFDTTLTSAGFVVNEADKCVYYRYGGGEGVILCLYVDDILIFGTSLNVIEEVKDYLSKSFEMKDLGEADVILNIKLQRGDEGGITLMQSHYVDKVLNHFGYSDCKPAPTPYDPSVLLRKNQRIVRDQLRYSQIIGSLMYLASATRPDISFAVSKLSRFVSNPGDDHWQALERVMRYLKGTMSYGIHYTGYPKVLEGYSDSNWISDADEIKATSRYVVILGGGAVS

SEQ ID NO: 20370 - protein, 1301 aa, Oryza sativa
  Clone ID: TF_OSC900209j.C1.p26.gm
MQCFYVSRGKRSEPPLSPEEEAKFEASDCLFRGALISVLADNIVDVYMHMPSGKDMWDALEAKFGVSDAGSELYVMEQFYDYKMVDDRSVVEQAHEIQMLAKELENNNCELPDKFVAGGIIAKLPPSWSDFATSLKHKRQEFSVPDLIGSLGVEEKARAKDVRGKRVEGGSSANMVQKKNPHASHNNKKVKPDVKPKAATNFKKKGKGKAKGDCFVCGKSGHWAKDCPERKDRKSANMIISEGGGTSGTVGRGSFLLMGNGSLAAVHGIAKKRKLGPKTVDCVFLGYAIHSVGYRFLIVNSGVPDMHAGTILESRDATFFENEFPMKYTPSTSSKETVMPHEHFAPIEHDDQTPEENPEEDNIVDTRKSKRQRVAKSFGDDYIVYLVDDTPRTIEEAYSSPDADYWKEAVRSEMDSIMSNGTWEVVERPYGCKPVGCKWVFKKKLRPDGTIEKYKARLVAKGYTQKEGEDFFNTYSPVARLTTIRVLLALAASHGLLVHQMDVKTAFLNGELEEEIYMDQPDGYVLEGQEGMVCKLLKSLYGLKQAPKQWHEKFDTTLTSAGFVVNEADKCVYYRYGGGEGVILCLYVDDILIFGTSLNVIEEVKDYLSKSFEMKDLGEADVILNIKLQRGDEGGITLVQSHYVDKVLSRFGYSDCKPAPTPYDPSVLLRKNRRIARDQLRYSQIIGSLMYLASATRPDISFAVSKLSRFVSNPGDDHWQALERVMRYLKGTMSYGIHYTGYPKVLEGYGDSNWISDADEIKATSGYVFTLGGGAVSWKSCKQTILTRSTMEAELTALDTATVEAEWLRELLMDLPVVEKPVPAILMNCDNQTVIIKVNSSKDNMKSSRHIKRRLKSVRKQKNSGVIALDYVQTARNLADQFTKGLPRFWGVPPARLLIAMSGVAAAATGPPTGAGGTPPPTGAGSGAGAPGGGAVNDYNNGGNSASPSSGGPFSGDGYAFASTENSMVIYNINVAPLIKSNKYTLLAERTRKWEEEKRQERREGKAPAAPAGNRRGEAKQKATAEDIDDGDEDLGFQEPEATVATVDGGACAHASRWSLKAMKRELLAAAPTHEATRRARWSEVALTFDQTDHPPCVARGGQIAMVVSPTVCNVKLGRVLIDGGAALNILSPVAFDAIKALGMVLRPSQPIIGVTLGHTWPLGHIDLPVTFGGSANFRTERVDFDVADLSLPYNAVLGRPALVKFMAAVHYAYLQMKMPGPGGPITVHGDLKVALACMEQHADHLAAASKPAGGDERLSASVPAAPRQRMVTCDEVPVKEVALGDGPSKTTRIGGLLDDK

SEQ ID NO: 20371 - protein, 1504 aa, Oryza sativa
  Clone ID: TF_OSC900299j.C1.p21.fg
MARREPEPLRTSTPTEAILPHNPAEGHSRVVLVASQLRPWYVHDAYDTLSILLVMLHVITRSPHIVHAMVIVLIFWIKICRYMTIFPTIQKPDRSFSVVGFAAALKPHAFDGSNYKRWKARALLWLTAMQCFCVSQGKRSEPSLSHEEEAKFEASDCLFHGALISVLAHNIVDVYMHMPSGKDMWDALEATFGVSDAGSELYVMEQFYDYKMVDDRSVVEQAHEIQMLAKELEDNNCELPDKFVAGGIIAKLPPSWSDFATSLKHKRQEFSVSDLIGSLGVEEKARAKDNRGKKVEGGSSANMNNKKVKPDVKPKAATNFKKKGKGKAKGDCFVCGKSGHWAKDCPERKDRKSANMVISEGGGKSGYGKILPTVLSVFHSPDWWVDTGANIHVGRGSSLLMGNGSLAAVHGVGTVDLKFTSGKTVQLKNVQHVPSIKKNLVSGSLLCREGFRLVFESNKCVVSKYGTFVGKGYDSGGLFRFSLNDMCNNHNVVNHISENDESNDEALHFFKTYKAEVENQLERKIKRLRSDRGGEYFSNEFASFCEEFGIIHERTPPYSPQSNGVAERKNRTLTEMVNAMLDTMGLSMEWWGEAVLTACHVLNKIPMKHKEVTPFEEWERKKLNLSYLRTWGCLAKVNVPIAKKRKLGPNTVDCVFLGYAIHSVGYRFLIVNSGVPDMHVGTIIESRDATFFENEFPMKHTPSTSSQETVMPHKHFAPIEHNDQTPEENPEEDNVVDTRKSKRQRVAKSFGDDYIVYLVDDTPRTIEEAYSSPDANYWKEAEVVERPYGCKPVGCKWVFKKKLRPDGTIEKFKARLVAKGYTQKEGEDFFDTYSPVARLTTIRQAPKQWHEKFDTTLTSVGFVVNEADKCVYYRYGGGEGVILCLYVDDILIFGTSFNVIEEVKDYLSKSFEMKDLGEADVILNIKLQRGDEGGITLVQSHYVDKVLSHFGYSDCKPAPTPYDPSVLLRKNRRIARDQLRYSQIIGSLMYLVSATRPDISFAISKLSRFVSNPGDDHWQALERVMRYLKGTMSYGIHYTGYPKLLEGCSDSNWISDADEIKATSGYVFTLGGGTVSWKSFKQTILTRSTMEAELTTLYTATVEAKWLRELLMDLSVVEKPVPAILMNCDNQIVIIKVNSSKDNMKSSRHIKRRLKSVRKQKNSGVIALDYVQTARNLDGSYLNVIRVAFSSRDVDLQNISEGTHLYEFDCYSYPRWKFNLTVSTKTQKEQGLRNYTFARDLHQKCTSYYCCFHVFFTSILAQQQSSVVEIVAAVMHGEEVTRQRCRRPAVLRGERITRRQRSRLARRCKPPVGNAVAILRGERITQRRRMRSARRCKAPVGNAVAVLRGERITRWWRMRSARRCKPSVGNAVAILRGERITRRRCMRSARCKRSVGDEVAILRGERITWWWRVVPRQRGVSSPRARGKVGEEHPDDAGGEAPESVARSTKNAQATREVKPPSPWRVGVEHPDDAGGEAPESMVRSAKNAQTTRKRSPRVRGKSV

SEQ ID NO: 20372 - protein, 793 aa, Oryza sativa
  Clone ID: TF_OSC900307j.C1.p13.gm
MQCFYVSRGKRSEPPLSPEEEAKFEASDCLFRGALISVLADNIVDVYMHMPSGKDMWDALEAKFGVSDAGSELYVMEQFYDYKMVDDRSVVEQAHEIQMLAKELENNNCELPDKFVAGGIIAKLPPSWSDFATSLKHKRQEFSVPDLIGSLGVEEKARAKDVRGKKVEGGSSANMVQKKNPHASHNNKKVKPDVKPKAATNFKKKSKGKAKGDCFVCGKSGHWAKDCPERKDRKSANMIISEGGGTSRYGRERFLLVDGKRVACGCSCVGYRFLIVNSGVPDMHVGTILESRDATFFENEFPMKYTPSTSSKETVMPHEHFAPIEHNDQTPEENPEEDNIVDTRKSKRQRVAKSFGDDYIVYLVDDTPRTIEEAYSSPDADYWKEAVRSEMDSIMSNGTWEVVERPYGCKPVGCKWVFKKKLRPDGTIEKYKARLVAKGYTQKEGEDFFDTYSPVARLTTIRVLLALAASHSLLVHQMDVKTAFLNGELEEEIYMDQPDGYVLEGQEGMVCKLLKSLYGLKQAPKQWHEKFDTTLTSVGFVVNEADKCVYYRYGGGEGVILCLYVDDILIFGTSLNMIEEVKDYLSKSFEMKDLGEADVILNIKLQRGDEGGITLVQSHYVDKVLSRFGYSDCKPAPTPYDPSVLLRKNRRIARDQLRYSQIIGSLMYLASATRPDISFAVSKLSRFVSNPGDDHWQALERVMRYLKDGRAIRFLGSARRDYSLFVNIYFIFTNMSNTGDKEKETPVNTNGGNTASNSSGGPFLGPDAAIVFLADLGLSAADIATTVAYDHCY

SEQ ID NO: 20373 - protein, 1084 aa, Oryza sativa
  Clone ID: TF_OSC900361j.C1.p9.fg
MMYRETFADEVGHIRKSFEMLEGANVQQVIPEAAGGYAQDREQDERWDLLRRRHGVQARSAAQIHLCRGHRREATLLHFVVQEMTLSSAAEAADIAAGLAAELTNVRKTATVDLDVLTTSVSGPSHGLSQIKELIGSDLSGYERNQCFARGLHVTTLFTLFAFPLLKLDFGSESIRKSGRSSEPPLSPEEEAKFEASDCLFRGALISVLADNIVDVYMHMPSGKDMWDALEAKFGVSNAGSELYVMEQFYDYKMLPDKFVAGGIIAKLPPSWSDFATSLKHKRQEFSVSDLIGSLGVEEKARATDIREKKVEGGSSANMVQKKNPHASYNNKKVKPDVKPKAATNFKKKGKGKAKGDCFVCGKSGHWAKDCPERKDRKSANMVIGEGGGTSGYGKILPTVLSVFHSPDWWVDTGANIHVGRGSSMLMGNGSLAAVHGIGTVDQKFTSGKTVQLKNVQHVPSIKKNLVSGSLLCREGFRLVFESNKCVVSKYGTFVRKGYDSGGLFRFSLNDMCNNHNVVNHISENDESNVWHSRLCHVNFSCMTRLANMSLIPKFTLIKGSKCHTCVQSKQPRKPHKASEARNLAPLELVHSDLCEMNGVLTKGGKKYFMTLIDDYTRFCYVYILKRKDEALHYFKIYKAEVENQLERKIKRLRSDRGEEYFSNEFASFCEEFGIIYERMPPYSPQSNGVAERKNRTLTEMVNAMLETAGLSKEWWGEAVLTACHVLNKISMKHKEVTPFEEWERKKLNLSYLRTWGCLAKHFAPIEHNDQTPEKNPEEDNIVDTHKSKRQRVAKSFGDDYIVYLVDDTPRTIEETYSSPDADYWKEIMDVKTAFLNGELEEEIYMDQPDGLNVIEEVKDYLYKSFEMKDLGEANVILNIKLQRGDEGGITLVQSHYVDKVLSRFGYSDCKPAPTPCDPSVLLRKNRRIVRDQLRYSQIIGSLMYLASATRPDISFAVSKLSRFVSNPGDDHWQALERVMRYLKGTMSYGIHYTGYSKVLEGYIDSNWISDADEIKVTSGYVFTLGGGVVSWKSCKQTILTRSTMEAELTALDTATVEAEWLRELLMDLPVVEKPVRASYPNEL

SEQ ID NO: 20374 - protein, 1419 aa, Oryza sativa
  Clone ID: TF_OSC900380j.C1.p15.fg
MSGVATAAIGGGGAPPPTGAAPPPTPTGAGSGAGAPGGGAVNDYNNGGNSASPSSGGPFSGYNLLLLLLLALLLFPLLALYCVRYVLVPVLHDASSMLSHYWYVPVSDIHDVHSMLLVMLRSPYTAYAMIIVSISWIKICRIMTIFSTIQKPDRSFSVVGFAAALKPHAFDGSNYKKWKARALLWLTAMQCFYVSRGKRSEPPLSPEEEAKFEASDCLFRGALISVLADNIVDVYMHMPSGKDMWDALEAKFGVSDAGSELYVMEQFYDYKMVDDRSVVEQAHEIQMLAKELENNNCELPDKFVAGGIIAKLPPSWSDFATSLKHKRQEFSVPDLIGSLGVEEKARAKDVRGKKVEGGSSANMVQKKNPHASHNNKKVKPDVKPKAATNFKKKGKGKAKGDCFVCGKSGHWAKDCPERKDRKSANMIISEGGGTSGYGKILPTVLSVFHSPDWWVDTGANIHVGRGSSLLMGNGSLAAVHGVGTVDLKFTSGKTVQLKNVQHVPSIKKNLVSGSLLCREGFRLVFESNKCVISKYGTFVGKGYDSGGLFRFSLNDMCNNHNAVNHISENDESNVWHSRLCHVNFGCMMRLANMSLIPKFTLVKGSKCHTCVQSKQPRKPHKASEARNLAPLELVHSDLCEMNGVLTKGGKKYFMTLIDDCTRFCYVYLLKTKDEALHYFKIYKAEVENQLERKIKRLRSDRGGEYFSNEFASFCKEFGIIHEMTPPYSPQSNGVAERKNRTLTEMVNAMLDTARLSKEWWGEAVLTACHVLNKIPMKHKEVNVPIVKKRKLGPKTVDCVFLGYAIHSVGYRFLIVNSGVPDMHAGTIFESRDATFFENEFPMKYTSSTSSKETVMPHEHFAPIEHNDQTPEENPEEDNIVDTRKSKRQRVAKSFGDDYIVYLVDDTPRTIEEAYSSPDADYWKEAVRSEMDSIMSNGTWEVVERPYGCKPVGCKWVFKKKLRPDGTIEKYKARLVAKGYTQKEGEDFFDTYSPVARLTTIRVLLALAASHGLLVHQMDVKTAFLNGELEEEIYMDQPDGYVLEGQEGMVCKLLKSLYGLKQAPKQWHEKFDTTLTSAGFVVNEADKCVYYRYGGGEGVILCLYVDDILIFGTSLNVIEEVKDYLSKSFEMKDLGEADVILNIKLQRGDEGGITLVQSHYVDKVLSRFGYSDCKPAPTPYDPSVLLRKNRRIARDQLRYSQIIGSLMYLASATRPDISFAVSKLSRFVSNPGDDHWQALERVMRYLKGTMSYGIHYTGYPKVLEGYSDSNWISDADEIKATSGYAFTLGGGAVSWKSCKQTILTRSTMEAELTALDTATVEAEWLRELLMDLPVVEKPVPAILMNCDNQTVIIKVNSSKDNMKSSRHIKRRLKSVRKQKNSGVIALYYVQTARNLADQFTKGLPRNVIDSASREMGLIPT

SEQ ID NO: 20375 - protein, 1268 aa, Oryza sativa
  Clone ID: TF_OSC900383j.C1.p22.fg
MQCFYVSRGKRSEPPLSPEEEAKFEASDCLFRGALISVLADNIVDVYMHMPSGKDMWDALEAKFGVSDAGSELYVMEQFYDYKMVDNRSVVEQAHEIQMLAKELENNNCELPDKFVAGGIIAKLPPSWSDFATSLKHKRQEFSVSDLIGSLGVEEKARAKDVRGKKVEGCSSANMVQKKNPHASHNNKKVKPDVKPKAATNFKKKGKGKAKGDCFVCGKSGHWAKDCPERKDRKSANMVISEGGGTSGYGKILPTVLSVFHSPDWWVDTGANIHVCADISLFSSYQVGRGSSLLMGNGSLAAVHGVGTVDLKFTSGKTVQLKNVQHVPSIKKNLVSGSLLCREGFRLVFESNKCVVSKYGTFVGKGYDSGGLFRFSLNDMCNNHNAVNHISENDESNVWHSRLCHVNFGCMTRLANMSLIPKFTLVKGSKCHTCVQSKQPRKPHKASEARNLAPLELVHSDLCEMNGVLTKGGKKYFMTLIDDCTRFCYVYLLKTKDEALHYFKIYKAEVENQLERKIKRLRSDRGGEYFSNEFASFCEEFGIIHEMTPPYSPQSNGVAERKNRTLTEMVNAMLDTAGLSKEWWGEAVLTACHVLNKIPMKHKEVTPFEEWERKKLNLSYLRTWGCLAKVNVPIAKKWKLGPKTVDCVFLGYAIHSVGYRFLIVNSGVPDMHAGTILESRDATFFENEFPMKYTPSTSSKETVMPHEHFAPIEHNDQTPEENPEEDNIVDTRKSKRQRVAKSFGDDYIVYLVDDTPRTIEEAYSSLDADYWKEAVRSEMDSIMSNGTWEVVERPYGCKPVGCKWVFKKKLRPDGTIEKYKARLVAKGYTQKEGEDFFDTYSPVARLTTIRVLLALAASHGLLVHQMDVKTAFLNGELEEEIYMDQPDGYVLEGQEGMVCKLLKSLYGLKQAPKQWHEKFDTTLTSAGFVVNEADKCVYYRYGGGEGVILCLYVNDILIFGTSLNVIEEVKDYLSKSFEMKDLGEADVILNIKLQREDEDGITLVQSHYVDKVLSRFGYSDCKPAPTPYDPSVLLRKNQRIARDQLRYSQIIGSLMYLASATRPDISFAVSKLSRFVSNPGDDHWQALERVMRYLKGTMSYGIHYTGYPKVLEGYSDSNWISDADEIKATSGYVFTLGGGAVSWKSCKQTILTRSTMEAELTALDTATVEAEWLRELLMDLPVVEKPVPAILMNCDNQTMIIKVNSSKDNMKSSRQIKRRLKSVRKQKNSGVIALDYVQKARNLADQFTKGLPRNVIDSASREMGLIPT

SEQ ID NO: 20376 - protein, 314 aa, Oryza sativa
  Clone ID: TF_OSC9356j.C1.p1.fg
MSNTGDKEKETPVNTNGGNTASNSSGGPFLGSFSVVGFAATLKPHAFDGSNYKRWKARALLWLTAMQCFYVSRGKRSEPPLSPEEEAKFEASDCLFRGALISVLADNIVDVYMYMPSGKEMWDALEAKFGVSDAGSELYVMEQFYDYKMVDDRSIVEQAHEIQMLAKELENNNCELPDKFVAGGIIAKLPPSWSDFATSLKHKRQEFSVPDLIGSLGVEEKARAKDVRGKKVEGGSSANMVQKKNPHASHNNKKVKPDVKPKAATNFKKKSKGKAKGDCFVCGKSGHWAKDCPERKDRKSANMIISEGGGTSGY

SEQ ID NO: 20377 - protein, 804 aa, Oryza sativa
  Clone ID: TF_OSC400690j.C1.p14.fg
MADNEKGNKVRSQDIGTSSSRVNEAPDTSCVTLVQHLINQNRLLIEILQQHQTPILNLSQIQPQVQLEAVQALTPRVSMPPASRRTHGDVPHVDSKEASIICFMCDEQGHYARECPQQKKKTPMRTEDEVRKMSITSTEWPPPGMTKRQRRNTFRGAPQLTEHLLANGGRVSDNEDSDQVSSDDEDEKSPQGFNQNKMERKACSRCGEIGHVASSCATTCVHCEEDHPPDRCPTSRITCFFCEGTDHVPKDCQFSFLLTKKMANQPASSNGEKHQGNTNPRQDYSFSLTPVPGQRNQNEKRKCRVREDICCFNCQGMGHFADKCPKPRNIAASTSVHATPCNQKLAPQRTVIHASRSSPIARVATAPTPASALPQGVNAQFQPQPSVDKTEASIGIVPLDVRAQQPRNQNWNNPAGTTNVQVPTVQQQCKLSEFLKTEPPTFAIAVDPMEASDWLRTIEKKLGLIQCTDQERVGFATPQLVGPASEWWDSYEASQPEGHTITWNEFSSVFRRSHVPAGMITLRKREFRYLKQADLTVTKYLHEFYRLAHYAPEDVETDEDKQEKFLQGLKDELAVQLLLEDYEDFEKLVDKAMQLESEHNRMTNCKRRIVNIPVFPCGNQRQRTEPLQITGSSVVHQEFLPQEDGRNADNNTSNTNDDDTTNNHGSCLISDHSNKACNVSSIHQDVNDSINVGIQNDNLSNFDTEKDSNGDSNYGTTDANVSKDFQPPIPTPSQNDRPQMDSSTKKTLICYNCKEPGHFSRDCPQPKRNLRHHSGHYARRRQVTRLVVTGANAIPVRPHVNPNL

SEQ ID NO: 20378 - protein, 662 aa, Oryza sativa
  unsure (1)..(662): unsure at all Xaa locations
  Clone ID: TF_OSC900144j.C1.p22.np
MDEVGSMDISRTNEGYTSCGPVVEMSWHRAGVAARGSILPTCPGVPAVGGVGSVLLSMARMGWKLCHVFRPYTVVVFCSITKMSNGXPGLAWDELGPRSGCQFGLDHRRPWVKAVLDGQVSEEEDIVSCLPKLRKTAGSASEVEEAVKPAVKQDKRLRSVKVLSLVSNLSLPFVFPLFLSKPLQQMADNEKGNKVRSQDIGTSSSRVNEAPDTSCVTLVQHLINQNRLLIEILQQHQTPILNLSQIQPQVQLEAVQALTPQVSMPPASRRTHGDVPHVDSKEASIICFMCDEQGHYARECPQQKRKTPMRTEDEVRKMIITSTEWPLPGMTKRXRRNTFRGAPQLTEHLLANGGRVSDSEDSDQVSSDDEDEKSPQGFNQNKMERKACSRCGEIGHVASSCATTCVHCEEDHPPDRCPTSRITCFFCEGTDHVPKDCQFSFLLTKKMANQPASSNGEKHQGNTNPRQDYSFSLTPVPGQRNQNEKRKCRVREDICCFNCQGMGHFADKCPKPRNIAASTSVHATPCNQKLAPQRTVIHASRSSPIARVATAPTPASALPQGVNAQFQPQPSVDKTEASIGIVPLDVPAQQPRNQVQDKEPSTKKTLICYNCKEPGHFSRDCPQPKRNLRHHSGHYARRRQVTRLVVTGANAIPVRPHVNPNL

SEQ ID NO: 20379 - protein, 1571 aa, Oryza sativa
  unsure (1)..(1571): unsure at all Xaa locations
  Clone ID: TF_OSC900371j.C1.p5.np
MASRPRRAARAPARFGFEDGRVEAEANHEPANEHSHHSNRSHRTVSRNAEVEQPRRSSRSHRTVSREAELEQSHRPHRTASHNSREERLPSPPHVENNMQHIMAVQTQILQGLTTAIANFQHNAHGNGHPHVGNNRSKLTDFLRSRPPEFSQTVEPVEADDWLKDVDRKLNLVQCTPVEKTLYASHQLRGPAADWWENYCNAHPEPTNIAWDEFATAFRAAHVPESTIDMKKEEFNRLKQGNSSVNEYLSQFNKLARYAPEEVDTDKKKIRKFLKGIAVGMRLQLLAHDFPTFQHMINKALLLEDARKEATEEYKKHKSNHQGNSSRGAPRPRYGQPMQYHQSVTQANHQPGYAPRPQMNRPAPQPQQRAPSGNTAPNSVTSFKSPQGPSAVQCFRCNXMGHYARQCPQNPTNTNSGYANGSTARTPAPAAAQSRPSSQASGQGSRASNHFGRGRVNHIQAETAQDAPDVVMGMFSVNSIPAIVLFDSGASHSFISQAFVKRNGWKTQNLHVPMIVHSPGRNIRATQICPEVNLRIEEVDFLAKPIVLDSQSLDIILGMDWLAKHKGQIDCAEKSITLQGPGGKQVRFTPNTPTASRSILTCLQVTSLESVPIVCEYPDVFPEELTRMPPDREIEFAIELAPGTAPIAKRPYRMAANELAEVKRQIEELESKGYVRPSSSPWGAPVLLVKKKDGSERMVIDYRALNEVTIKNKYPLPRIDDLFDQLKGARVFSKIDLRSGYHQLKIRSEDIPKTAFSTRYGLYEFTVMSFGLTNAPAFFMNLMNKIFMEYLDQFVVVFIDDILIYSKNEEEHAEHLRLIMEKLRDHQLFAKFSKCEFWLDRVAFLGHVISSNGVEVDPSKVEAVLAWNPPKNVSEIRSFLGLAGYYRRFIEGFSKLARPMTELLKKEKKFQWSAACEDSFQELKKRLTTAPILLPDIRKDFEIFCDASRQGLGCVLMQERKVVAYASRQLRPHEVNYPTHDLELAAVIHALKIWRHYLIGNRCEVYTDHKSLKYIFTQTELNMRQRRWLELIKDYDLGIHYHPGKANVVADALSRKAYCNVAQIRPDQDHLCRELEKLRLTVVQTGVPASLTVQPTLESQIREAQKDDEGIKELIKRIQEKKDTNFSIDDQGTVWCDSRICVPAKKELRDLILKEAHESAYSIHPGSTKMYQDIKAYFWWAGMKRDVAEYVALCDICQRVKAEHQRPAGLLQPLPIPEWKWEEIGMDFITGLPRTPSGYDSIWVIVDRLTKSAHFVPVKTTYDGRKLAELYMTHVVCRFGCPKKIVSDRGTQFTSRFWKQLHEALGTDLNFSTAYHPQTDGQTKRVNQILEDMLRACALDFEGTWDRCLPYAEFSYNNSYQASIQMSPNEAMFGRKCRTPLCWNEVGEALVFGPDILKSAEEQVKLIREXLKTAQDRQKNYADNRRHDLEFEKGDHVYLRVSPLRGMRRFGMSGKLAPRYIGPYLITARRGEVAYQLELPEGLADVHNVFHVSQLKKCLRVPEEQVPLGNIELEKNLTYKERPIKVLEEAERQTRRKTIKFYKVQWSNHSEDEATWEREDLLRAEFPELLP

SEQ ID NO: 20380 - protein, 1764 aa, Oryza sativa
  Clone ID: TF_OSC401219j.C1.p40.fg
MAVNASFSSHGFSEGHHVAQLRDLACFLGFSCPEYTGYSVDRVPPHCELSVYLYPREGIHGAGLRPHHFTVARPTLQIAYQDLSWTALRRLAHDYSHRLGGSAFRQLPRLPSGHSDARYPCPYSESQPVLTRMVELSEAQATQHDLLLEAYRSLARCYTALEARLAEEGVTSVDTISWDSGRLCHASHLSSHSSRGSACTPSGPRSPSSRAPYSPVYSPYPHPVSPSYTPGHTPVASSRRGPRFIRTARKRVVGSSTVFRFHHPAPPPPAARAAAGPRQMASRPRRAARAPARFGFEEGRAEPEANHESANEQSHRSNRSHRTVSRNAEVEQPRRSNRSHRTASRDAEMEQSHRSHRTASHNSGEERLPSPPHVENNMQHLMAVQTQILQGIAAAVAGYQHNAHGNGHPHMGNNRSKLTDFLRSRPPEFSQTVEPVEADDWLKDVDRKLNLVQCTPVEKTLYASHQLRGPAADWWENYCNAHPEPTSIAWDEFATAFRAAHVPESTIDMKKEEFNRLKQGNSSVNEYLSMFNKLARYAPEEVDSDKKKIRKFLKGIAVGMRLQLLAHDFPTFQHMINKALLLEDARKEATEEYKKRKSNHQGNSSRGAPRPRYGQPMQYHQSVTQANRQPGYAPRPQMNRPAPQPQQRAPSGNTAPNSVTSFKSPQGPSAIQCFRCNQMGHYARQCPQNPTNTNSGHANGSTARTPTPAAAQSRPSTQASGQGSRASNHFGRGRVNHIQAETAQDAPDVVMVHSPGRNIRATQICPEVNLRIEEVDFLAKPIVLDSQSLDIILGMDWLAKHKGQIDCAEKSITLQGPGEKQVRFTPNTPTASRSILTCLQVTSLESVPIVCEYPDVFPEELTRMPPDREIEFAIELAPGTAPIAKRPYRMAANELAEVKRQIEELESKGYVRPSSSPWGAPVLLVKKKDGSERMVIDYRALNEVTIKNKYPLPRIDDLFDQLKGARVFSKIDLRSGYHQLKIRSEDIPKTAFSTRYGLYEFTVMSFGLTNAPAFFMNLMNKIFMEYLDQFVVVFIDDILIYSKNEEEHAEHLRLIMEKLRDHQLFAKFSKCEFWLDRVAFLGHVISSNGVEVDPSKVEAVLAWNPPKNVSEIRSFLGLARYYRRFIEGFSKLTRPMTELLKKEKKFQWSAACEDSFQEMKKRLTTAPVLTLPDIRKDFKIFCDASRQGLGCVLMQERKVVAYASRQLRPHEVNYPTHDLELAAVVHALKIWRHYLIGNRCEVYTDHKSLKYIFTQTELNMRQRRWLELIKDYDLRIHYHPGKANVVADALSRKAYCNVAQIRPDQDHLCRELEKLRLTMVQPGVPASLTVQPTLESQIREAQKDDEGIKELIKRIQEKKDTNFSIDNQGTVWCGPRICVPAKKELRDLILKEAHESAYSIHPGSTKMYQDIKAYFWWTGMKRDVAEYVALCDVCQRVKAEHQRPAAHFVPVKTTYDGKKLAELYMTHVVCRFGCPKKIVSDRGTQFTSRFWKQLHEALGTDLNFSTAYHPQTDGQTERVNQILEDMLRSCALDFEGTWDRCLLYAEFSYNNGYQASIQMLPNEAMFGRKCRTPLCWNEVGKALVFGPDILKSAEEQVKLTRERLKTAQNRQKNYADNRRRDLEFEKGDHVYLRVSPLRGMRRFGMSGKLAPRYIGPYLITARRGEVAYQLELPEGLADVHNVFHVSQLKKCLRVPEEQVPLGNIVLEKNLTYKERPIKVLEEAERQTRRKTIKFYKVQWSNHSEDEATWEREDLLRAEFLELLL

SEQ ID NO: 20381 - protein, 468 aa, Oryza sativa
  unsure (1)..(468): unsure at all Xaa locations
  Clone ID: TF_OSC11188j.C1.p2.np
MSWHRAGVLLLGSILPACPGVGRRWVGSVLLSMARMGWKLCHVFRPYAVVMFNREKGKNVSGYASSNSSFQLNPPLASRELTRAHPWSIPSMLLSSQLPLVGSQDQNQYVFDRAFATQVNELPMPEEDVPFCHDCREQGHYALNCPWVYAKEAPSFGLAGQTSLNQPPRTKSSLQPSVQSREPNGENPLNPGKCFPPSLSYHVGSRTKQAKGKKSKNQKRKAPMRTEEEVCKMTITSTEWPPAGITIPRRQRGNTFRGARQLTQHLLSHGGRVSDSEGSDQVSSDDEDESPXHLGEEEMESKACTRCGEIGHVASMCLTLCPHCEEDHPPGECSTRKVTCFLCEGTNHVPKDCQLIVLLTKTTEIQRTTLRLSHQLVSSNHNIDDILHSTDAPPAAPDSAINHSNNTFSTNHSLHRQPQQRVVIDGRSCVSPRPTPGRGKGNQPQEGDTKQKTVIRFNQQSEGSFSYE

SEQ ID NO: 20382 - protein, 440 aa, Oryza sativa
  unsure (1)..(440): unsure at all Xaa locations
  Clone ID: TF_OSC11867j.C1.p3.np
SYLXFWSILSWLVSSLTSIPVTMFNREKGKNVSGYASSNSSFQLNPPLASRELTRAHPWSIPSMLLGSQLPLVGSQDQNQYVFDRAFATQVDELPMPEEDVPFCHDCREQGHYALNCPWVYAKEAPSFGLAGQASLNQPPRTKSSLQPSVQSREPNGENPLNPENCFPPSLSYHVGSRTKQAKGKKSKNQKRKAPMRTEEEVRKMTITSTEWPPAGITIPRRQRGNTFRGAXQLTQHLLSHGGRVSDSEGSDQVSSDDEDESPRHLGEEEMESKACTRCGEIGHVASMCLTLCPHCEEDHPPGECPTRKVTCFLCEGTNHVPKDCQLSVLLTKTAEIQRTTLRLSHQLVSSNSNIDNIIHNTNAPPAPPDSAINHSNNTFSTNHSLHRQPQQRIVVDGRSCVSPRPTPGRAKGNQSQEGDTKQNTVLCFKXQSEGSFSCE

SEQ ID NO: 20383 - protein, 455 aa, Oryza sativa
  Clone ID: TF_OSC401126j.C1.p41.fg
MVGLGWLGTSWDPGSGCQFGLNHRRPWVKAGLPFSSFFKFQLVLDGQMFNREKGKNVSGYASSNSSFQLNPPLASRELTRAHPWSIPSMLLGSQLPLVGSQDQNQYVFDRAFATQVDELPMPEEDVPFCHDCREQGHYALNCPWVYAKEAPSFGLAGQASLNQPPRTKSSLQPSVPSREPNGENPLNPENCFPPSLSYHVGSRTKQAKGKKSKNQKRKAPMRTEEEVRKMTITSTEWPPAGITIPRHQRGNTFRGARQLTQHLLSHGGRVSDSEGSDQVSSDDEDESPRHLGEEEMESKACTRCGEIGHVASMCLTLCPHCEEDHPPGECPTRKVTCFLCEGTNHVPKDCQLSVLLTKTAEIQRTTLRLSHQLVSSNSNIDNIIHNTNAPPAPPDSAINHSNNTFSTNHSLHRQPQQRIVVDGRSCVSPRPTPGRAKGNQSQEGDTKQKTVLCFK

SEQ ID NO: 20384 - protein, 341 aa, Oryza sativa
  Clone ID: TF_OSC6416j.C1.p1.np
DVPFCHDCREQGHYALNCPWVYAKEAPSFGLIGQTSLNQPPRTKSSLQPSVQSREPNGENPLNPGNCFPPSPSYHVGSRTKQAKGKKSKTQKRKAPMRTEEEVRKMTITSTEWPPAGITIPRRQRGNTFRGARQLTQHLLSHGGRVSDSEGSDQVSSDDEDESPRHLGEEEMESKACTRCGEIGHVASMCLTLCAYCEEDHPPGECPTCKVTCFLCEGTNHVPKDCQLSVLSTKTAEIQRTTLRLSHQLVSSNGNIDDIIHSTNAPPAAPDSAINHSNNTFSTNHSLHRQPQQRIVVDGRSCVSPRPTPGQAKGNQPQEGDTKQKTVIRFKQQSEGSFSCE

SEQ ID NO: 20385 - protein, 424 aa, Oryza sativa
  Clone ID: TF_OSC12281j.C1.p1.fg
MKASDWLRTVEKKLGLIQCTDQERVGFATHQLVGPTSEWWDSYEASRPEGHTITWDEFSSVFKRSHVPAGMITLRKREFRYLKQEDLTVTEYLHEFHRLAHYAPEDVETDEDKQEKFLQGLKDEVAVQLLLEDYEDFEKLVDTSHTTRKDHSDQACDVNSIHQDIDDSINEGTQNDNPSNFDSEKDSNGDSNYGTTDANVSKDFQPPIPTPSQNDRSQTNSSVKKTLICYNCKEPGHFSTDCPQPKRNLRHHSGHYARRRQVTRLVVTGANAIPVSLKGSRLKYHIVTRSIHNSRSEEYLVDKGQKMIDRRYRKRCLLPGKEVGRNVIDKRNRERTHQVDNLCEVDAEDMNHEKFWNGSIIKLPQPSLSNLKGAPWFESGEEKIPSAIGGQAKQFRVVKFCWKFVKTQQKKSDKKRRPPNLSSC

SEQ ID NO: 20386 - protein, 682 aa, Oryza sativa
  unsure (1)..(682): unsure at all Xaa locations
  Clone ID: TF_OSC13271j.C1.p1.np
MASRPRRAARAPARFGVEDGRVEPEENHESANEQSHHSNRSHRTVSRNAEVEQPRRSSRSHRTVSRDAEMEQSHRSHRTASHNSGEERLPSPPHVETNMQHLMAVQTQILQGLTTAIASFQHNAHGNGHPHMGNNRSKLTDFLRSRPPEFSQTVEPVEADDWLKDVDRKLNLVQCTPVEKTLYASHQLRGPAADWWENYCNAHPEPTNIAWDEFATAFRAAHVPESTIDMKKEEFNRLKQGNSSINEYLSQFNKLARYAPEEVDTDKKKIRKFLKGIAVGMRLQLAHDFPTFQHMINNALLLEDARKEATEEYKKRKSNHQGNSSRGAPSPRYGQPMQYHQSVTQANRKPGYAPRPQINRSAPQPQQRAPSGNTAPNSVTSFKSPXGPSAVQCFRCNQMGHYARQCPQNPTNTNSGHANGSTARTPTPAATQSRPSSQASGQGSRASNNFGRGRVNHIQAETAQDAPDVVMGMFSVNSVPAIVLFDSGASHSFISQAFVKRNGWKTQNLRVPMIVHSPGRNIRATQICPEVNLRIEEVDFLAKPIVLDSQSLDIILGMDWLAKHKGQIECAEKSITLQGPRGKQVRFTPNTPTASRSILTCLQVTSLGSGAPLKVFPFGFPENQNPPDREIEFAIELAPGTAPFGFPENQNPPDREIEFAIELAPGTAPIAKRPYRMAANEL

SEQ ID NO: 20387 - protein, 712 aa, Oryza sativa
  Clone ID: TF_OSC13981j.C1.p2.hg
MASRPCRAARAPAHFGFEEGRVEPEANHESANEQSHRSNNSHRTVSRNAEVEQPRRSNRSHRTASRDSEMEQSHRSHRTASHNSGEERLPSPPHVENNMQHLMAVQTQILQGIAAAVAGYQHNVHGNGHPHMGNNRSKLTDFLRSRPPEFSQTVEPVEADDWLKDVERKFNLVQCTPVEKTLYASHQLRGPAADWWENYCNGHPEPTNIAWDEFATAFRAAHVPESTIDMKKEEFNRLKQGNTSVNEYLSQFNKLARYAPEEVDTDKKKIRKFLKGIAVGMRLQLLAHDFPTFQHMINKALLLEDARKEATEEYKKHKSNHQGNSSRGAPRPRYGQPVQYHQSVTQANRQPGYAPRPQINRPAPQPQQRAPSGNTAPNSVTSFKSPQGPSAVQCFRCNQMGHYARQCPQNPTNTNSGHANGSTARTPTPAAAKSRPSTQASGQGSRASNHFGRGRVNHIQAETAQDAPDVVMGMFSVNSVPAIVLFDSGASHSFISQAFVKRNGWKTQNLRVPMIVHSPGRNIKATQICPEVNLRIEEVDFLAKPIVLDSQSLDIILGMDWLAKHKGQIDCAEKSITLQGPGGKQVRFTPNTPTASRSILTCLQVTSLESVPIVCEYPDVFPEELTRMPLDREIEFAIELAPGTAPIAKRPYRMAANELAEVKRQIEELESKGYVRPSSSPWGAPVLLVKKKEGSERMVIDYRALNEVTIKN

SEQ ID NO: 20388 - protein, 283 aa, Oryza sativa
  Clone ID: TF_OSC14645j.C1.p1.fg
MEASDWLRTVEKKLGLIQCTDQERVGFATHQLVGPASEWWNSYEASRPEGHTITWDEFSSVFKRSHVPAGMITLRKREFRYLKQEDLTVTEYLHEFYRLAHYAPEDVETDEDKQEKFLQGLKDEVAVQLLLEDYEDFEKLVDTSHTTRKDHSDQACDVNSIHQDIDDSINEGTQNDNPSNFDSEKDSNGDSNYGTTDANVSKDFQPPIPTPSQNDRSQTNSSVKKTLICYNCKEPGHFSTDCPQPKRNLRHHSGHYARRRQVTRLVVTGANAIPVRPRANHNP

SEQ ID NO: 20389 - protein, 1382 aa, Oryza sativa
  Clone ID: TF_OSC16108j.C1.p1.fg
MASRPRRAARAPARFGFEDGRVEPEENHESANEQSHHSNRSHRTASRNAEVEQPRRSSRSHRTVSRNAEMEQSHRSHRTASHNSGEERLPFPPHVENNMQHLMAVQTQILQGLAAAVAGFQHNAHGNGHPHMSNNRSKLTDFLRSRPPEFSQTIEPVEADDWLKDVDRKLNLVQCTPVEKTLYASHQLRGPAADWWENYCNAHPEPTNIAWDEFATAFRAAHVPESTIDMKKEEFNRLKQGNSSVNEYLSMFNKLARYAPEEVDTDKKKIRKFLKGIAVGMRLQLLAHDFPTFQHMINKALLLEDARKEATEEYKKRKSNHQGNSSRGVPRPRYGQPMQYHQSVTQANHQPGYAPRPQMNRPAPQPQQRAPSGNTAPNSVTSFKSPQGPSAVQCFRCNQMGHYARQCPQNPTNTSLGHANGSTARTPTPAAAQSRPSSQASGQVHSPGRNIRATQVCPGVNLRIEEVDFLAKPIVLDSQSLDIILGMDWLAKHKGQIDCAEKSITLQGPGGKQVRFTSNTPTASRSILTCLQVTSLESVPIVCEYPDVFPEELTSMPPDREIVFAIELAPGTAPIAKRPYRMAANELAEVKRQIEELEGKGYVRPSSSPWGAPVLLVKKKDGSERMLDQFVVVFIDDILIYSKNEEEHAEHLRLIMEKLRDHQLFAKFSKCEFWLDRVAFLGHVISSNGVEVDPSKVEAVLAWNPPKNVSEIRSFLGLAGYYRRFIEGFSKLARPMTELLKKERKFQWSAACEDSFQEMKKRLTTAPVLTLPDIQKDFEIFCDASRQGLGCVLMQERKVVAYASRQLRPHEVNYPTHDLELAAVIHALKIWRHYLIGKRCEVYTDHKSLKYIFTQTELNMRQRRWLELIKDYDLGIHYHPGKANVVADALSRKAYCNVAQIRPDQDRLCRELEKLRLTVVQSGVPASLTVQPTLESQIREAQKDDEGIKELIKRIQEKKDTNFSIDDQGTVWCGPHICVPAKKELRDLILKEAHESAYSIHPRSTKMYQDIKAYFWWARMKRDVAEYVALCDICQRVKAEHQRPAGLLQPLPIPEWKWEEIGMDFITGLPRTPSGYDSIWVIVDRLTKSAHFVPVKTTFDGKKLAELYMTHVVCRFGCPKKIVSDRGTQFTSRFWKQLHEALGTDLNLSTGYHPQTDGQTERVNQILEDMLRACALDFEGTWDRCLPYAEFSYNNSYQASIQMSPNEAMFGRKCRTPLCWNEVGEALVFGLDILKAAEEQVKLIRERLKTAQNRQKNYADNRRRDLEFEKGDHVYLRVSPLRGMRRFGMSGKLAPRYIGPYLITARRGEVAYQLELPEGLADVHNVFHVSQLKKCLRVPEEQVPLGNIELEKNLTYKERPTKVLEEAERQTRKKTIKFYKVQ

SEQ ID NO: 20390 - protein, 1851 aa, Oryza sativa
  Clone ID: TF_OSC17191j.C1.p1.fg
MAVNASFSSHGFGEGHHVAQLRDLARFLGFSCPEYTGYSVDRVPPHCELSVYLYPRGGIHGAGLRPHHFTVARPTLQIAYQDLSWTALRRLAHDYSHRLGGSAFRQLPRLPSGHSDARYPCPYSESQPVLTRMVELSEAQATQHDLLLEAYRSLARRYAALEARLAEEGVTSVDTISWDSGRLCHASHLSSHSSRGSARTPSGPRSPSSRAPYSPVYSPYPHPVSPSYTPGHTPVASSCRGPRFIRTARKRVVGSATVFRFHYPAPLPPAARAAAGPRQMASRPRRAARAPARFGFEDGRVEPEENHESANEQSHHSNRSHRTVSRNAEVEQPRRSSRSHRTVSRDAEMGQSHRSHRTASHNSGEERLPFPPHVETNMQHLMAVQTQILQGLTTAIASFQHNAHGNGHPHMGNNRSKLTDFLRSRPPEFSQTVEPVEADDWLKDVDRKLNLVQCTPVEKMLYASHQLRGPAADWWENYCNAHPEPTNIAWDEFATAFRAAHVPESTIDMKKEEFNRLKQGNSSINEYLSQFNKLARYAPEEVDTDKKKIRKFLKGIAVGMRLQLLAHDFPTFQHMINKALLLEDARKEATEEYKKRKSNHQGNSFRGAPRPRYGQPMQYHQSVTQANRQPGYAPRPQINRPAPQPQQRAPSGNTAPNSVISFKSPQGPSAVQCFRCNQMGHYARQCPQNPTNTNSGHANGSTARTPTPAAAQSRPSSQASGQGSRASNNFGRGRVNHIQAETAQDAPDVVMGMFSVNSVPAIVLFDSGASHSFISQAFVKRNGWKTQNLRVPMIVHSPGRNIRATQICPEVNLRIEEVDFLAKPIVLDSQSLDIILGMDWLAKHKGQIDCAEKSITLQGPGGKQVRFTPNTPTASRSILTCLQVTSLESVPIVCEYPDVFPEELKRMPPDREIEFAIELAPGTAPIAKRPYRMAANELAEVKRQIEELESKGYVRPSSSPWGAPVLLVKKKDGSERMVIDYRALNEVTIKNKYPLPRIDDLFDQLKGARVFSKIDLRSGYHQLKIRSEDIPKTAFSTRYGLYEFTVMSFGLTNAPAFFMNLMNKIFMEYLDQFVVVFIDNILIYSKNEEEHAEHLRRIMEKLRDHQLFAKFSKCEFWLDRVAFLGHVISSNGVEVDPSKVEAVLAWNPPKNVSEIRSFLGLAGYYRRFIEGFSKLARPMTELLKKEKKFQWSAACEDSFQELKKRLTTAPVLTLPDIRKDFEIFCDASRQGLGCVLMQEQKVVAYASRQLRPHEANYPTHDLELAAVVHALKIWRHYLIGNRCEVYTDHKSLKYIFTQTELNMRQRKWLELIKDYDLGIHYHPGKANVVADALSHKAYCNVAQIRPDQDHLCRELEKLRLTVVQSGVPASLTVQPTLESQIREAQKDDEGIKELIKRIQEKKDTNFSIDDKGTVWCGPRICVPAKKELRDLILKEAHESAYSIHPGSTKMYQDIKAYFWWAGMKRDVAEYVALCDICQRVKAEHQRPAGLLQPLPIPEWKWEEIGMDFITGLPRTPSGYDSIWVIVDRLTKSAHFVPVKTTYDGKKLAELYMTHVVCRFGCPKKIVSDRGTQFTSRFWKQLHEALGTDLNFSTAYHPQTDGQTERVNQILEDMLRACALDFEGTWDRCLPYAEFSYNNSYQASIQMSPNEAMFGRKCRTPLCWNEVGEALVFGPDILKSAEEQVKLIRERLKTAQNRQKNYADNRRRDLEFEKGDHVYLRVSPLRGMRRFGMSGKLAPRYIGPYLITARHGEVAYQLELPEGLADVHNVFHVSQLKKCLRVPEEQVPLGNIELEKNLTYKERPIKVLEEVERQTRRKTIKFYKVQWSNHSEDEATWEREDLLRAEFPDLLP

SEQ ID NO: 20391 - protein, 1177 aa, Oryza sativa
  Clone ID: TF_OSC19655j.C1.p3.gm
MAPPIAGNGRANRLSLLAGASSGRAVASSSIAAASPSPACPPFPAETPGAAFPPSPFPFIRVGRLQPPLSPCLSAGRRRHHLPRLRDAALIPGISSSSPEFRRNTVARAGFSFLLGGISSGCPFRHAHASAGAAVPSLGTPRHHHLRHRSGKVALGLASPPSKPLRGPSSSSPIVLVVDVPSVTRLVVSRRRLRRRHRSGVVHAVVGCPHRLLAGPAPVIVFVLASASSSLVPAASRRRPRIAAEVVPSPSVSAAPLSSFRRFPKRGSWSSPKHNAHGNGHPHVGNNRSKLTDFLRSRPPEFSQTVEPVEADDWLKDVDRKLNLVQCTPVEKTLYASHQLRGPAADWWENYCNAHPEPTNIAWDEFATAFRAAHVPESTIDMKKEEFNRLKQGNSSVNEYLSQFNKLARYAPEEVDTDKKKIRKFLKRIAVGMRLQLLAHDFPTFQHMINKALLLEDARKEATEEYKKRKSNHQGNSSRGTPRPRYGQPMQYHQSVTQANRQPGYAPRPQMNRPTPPPQQCAPSGNTAPNSVTSFNSPQGPSVVQCFRCNQMGHYARQCPQNPTNTNLGHANGSIAKTPTPAAAQSRPSSQASGQGSRASNHFGRGRVNHIQAETAQDAPDVVMGYHQLKIRSEDIPKTAFSTRYGLYEFTVMSFGLTNAPAFFMNLMNKIFMEYLDQFVVVFIDDILIYSKNEEEHAEHLRLIMEKLRDHQLFAKFSKWEFWLDRVAFLGHVISSNGVEVDPSKVEAVLAWNPPKNEKKDTNFSIDDQGTVWCGPRICVPAKKELRDLILKEAHESAYSIHPGSTKMYQDIKAYFWWVGMKRDVTEYVALCDICQRVKAEHQRPAGDVGPEGDVFALLLVPPRGSSRTRLGPEGRGAPTPRGFSLRVYGLDSHDSASRLLPAKVEIGSLESHLGSPAEPAKGGLRGLPVRSPTLRHLPIPEWKWEEIGMDFITGLPRTPNGYDSIWASIQMSPNEAMFGRKCRTPLCWNEVGEALVFGPDILKSAEEQVKLIRERLKTAQNRHKNYTDNRRRDLEFEKGDHVYLRVSPLRGMRRFGMSGKLAPRYIGPYLITARRGEVAYQLELPEGLADVHNVFHVSQLKKCLRVPEEQVPLGNIELEKNLTYKERPIKVLEEAERQTRRKTIKFYKVQWSNHSEDEATWEREDLLRAEFPDLLP

SEQ ID NO: 20392 - protein, 529 aa, Oryza sativa
  Clone ID: TF_OSC2188j.C1.p1.fg
MQYHQSVTQANRQPSYAPRPQMNRLAPQPQQRAPSGNTAPNSVTSFKSPPGLSAVQCFRCNQMGHYARQCPQNLTNSNSGHTNGSTARTPTPAAAQSRPSTQASGQGSRASNNFGRDRVNHIQAETAQDAPDVVMGMFSVNSAPAIVLFDSGASHSFISQAFVKRNGWKTQNLRVPMIVHSPGRDIRATKICSEVNLRIEEVDFLAKPIVLDSQSLDIILGMDWLAKHKGQIDCAERSITLQGPGGKQVRFTPNTLTASRSILTSLQATSLESVPIVCEYPDVFPKELTEMPPNREIEFAIELALGTAPIAKSPYRMAANELAEVKKQIEELESKGYVRPSSSPWGAPVLLVKKKDGSERMLKIRYEDIPKTAFSTRYGLYEFTVMSFGLTNAPAFFMNLMNKIFMEYLDQFVVVFIDDILIYSKNEEEHVEHLRLIMEKLRDHQLFAKFSKCEFWLDRVAFLGHVISSNGVEVDPSKVEAVLAWYPPKNESEIRSFLGLAGYYRRFIEGFSKLARPMTELLKKEKKFE

SEQ ID NO: 20393 - protein, 1081 aa, Oryza sativa
  Clone ID: TF_OSC23559j.C1.p4.gm
MQRWNSLTALTALPVTILEKNASLPHLIPSSPSRLKDVDRKLNLVQCTPVEKTLYASHQLRGPATDWWENYCNAHPEPTNIAWDEFATAFRAAHVPESTIDMKKEEFNRLKQGNNSVNEYLSQFNKLARYAPEEVDTDKKKIKKFLKGIAVGMRLQLLAHDFPTFQHMINKALLLEDARKEATEEYKKRKSNHQGNSSRGAPRPRYGQPMQYHQSVTQANRQPGYAPRPQMNRPAPQPQQCAPSGNTAPNSVTSFKSPQGPSAVQCFRCNQMGHYARQCPQNPTNTNSGHANGSTARTPTPAAAQSRPSSQASGQGSRASNNFGRGRVNHIQAETAQDAPDVVMEELTSMPPDREIEFAIELAPSTAPIAKRPYRMAANELAEVKRQIEELESKGYVRPSSSPWGAPVLLVKKKDGSERMVIDYRALNEVTIKNKYPLPRIDDLFDQLKGARVFSKIDLRSGYHQLKIRTEDIPKTAFSTRYGLYEFTVMSFGLTNAPAFFMNLMNKIFMEYLDQFVVVFIDDILIYSKNEEEHVEHLRLIMEKLRDHQLFAKFSKCEFWLDRVAFLGLVISFNGVEVDPSKVEAVLAWNPPKNVSEIRSFLGLTGYYRRFIEGFSKLARPMTELLKKEKKFHWSAACEDSFQEMKKRLTTAPVLTLPDIRKDFEIFCDASRQGLGCVLMQERKVVAYASRQLRPHEVNYPTHDLELAAVVHALKIWRHYLIGNRCEVYTDHKSFKYIFTQTELNMRQRRWLELIKDYDLGIHTTPSGVPASLTVQPTLESQIREAQKDDEGIKELTKRIQEKKDTDLSIDDQGTVWCGPRICVPAKKELRDLILKEAHESAYSIHPGSTKMYQDIKAYFWWAGMKRDVAEYVALCDICQRVKAEHQRPAGLLQPLPIPEWKWEEIGMDFITGLPRTPSGYDSIWNRQKNYADNRRRDLEFEKGDHVYLRVSPLRGMRRFGMSGKLAPRYIGPYLITARRGEVAYQLELPEGLADVHNVFHVSQLKKCLRVPEEQVLLGNIELEKNLTYKERPIKVLEEAERQTRRKTTKFYKVQWSNHSEDEATWEREDLLRAEFPELLP

SEQ ID NO: 20394 - protein, 1504 aa, Oryza sativa
  Clone ID: TF_OSC27040j.C1.p1.fg
MASRPRRAARAPARFGFEDGRVEAEANHESANEQSHRSNRSHRTVSRNAEVEQPRRSSRSHRTVSRDAEMEQSHLSHCTVSHNSGEERLPSPPHVENNMQHIMAVQTQILQGLTTAIASFQHNVHGHPHVGNNRSKLTDFLRSRPPEFSQTVEPVEADDWLKDVDRKLNLVQCTPVEKTLYASHQLRGPAADWWENYCNAHPEPNNIAWDEFATAFRAAHVPESTIDMKKEEFNRLKQGNNSVNEYLSQFNKLARYAPEEVDTDKKKIRKFLKGIAVGMRLQLLAHDFPTFQHMINKALLLEDARKEATEEYKKRKSNHQGNSSRGAPRPRYGQPMQYHQSITQTNRQPGYAPRPQINRPAPPPQQRAPSGNTAPNSVTSFKSPQGPSAVQCFRCNQMGHYARQCPQNPANTNSGHANGSTARTPTPAAAQSRPSSQASGQGSRASNHFGRGRVNHIQAETAQDAPDVVMGMFSVNSVPAIVLFDSGASHSFISQAFVKRNGWKTQNLRVPMIVHSPGRNIRAIQICPEVNLRIEEVDFLAKPIVLDSQSLDIILGMDWLAKHKGQIDCAEKSITLQGPGGKQVRFTPNTPTASRSILTCLQVTSLESVPIVSEYPDVFPEELTTNELAEVKRQIEELESKGYVRPSSSPWGAPVLLVKKKDGSERMVIDYRALNEVTIKNKYPLPRIDDLFDQLKGARVFSKIDLRSGYHQLKIRSEDIPKTAFSTRYGLYEFTVMSFGLTNAPAFFMNLMNKIFMEYLDQFVVKCEFWLDRVAFLGHVISSNGVEVDPSKVEAVLAWNPPKNVSEIRSFLGLAGYYRRFIEGFSKLARPMTELLKKEKKFQWSAACEDSFQEMKKRLTTAPVLTLPDIRKDFEIFCDASRQGLGCVLMQERKVVAYASRQLRPHEVNYPTHDLELAAMVHALKIWRHYLIGNRCEVYTDHKSLKYIFTQTELNMRQRRWLELIKDYDLGIHYHPGKANVVADALSRKAYCNVAQTRPNQDHLCRELEKLRLTVVQSGVPASLTVQPTLESQIREAQKDDEGIKELIKRIREKKDTNFSIDEQGTVWCGPRICVPAKKELRDLILKEAHESAYSIHPGSTKMYQDIKAYFWWAGMKRDVAEYVALCDICQRVKAEHQRPAGLLQPLPIPEWKWEEIGMDFITGLPRTPCGYDSIWVIVDRLTKSAHFVPVKTTYDGKKLAELYMTHVVCRFGCPKKIVSDRGTQFTSRFWKQLHETLGTDLNFSTAYHPQTDGQTERVNQILEDMLRACALDFEGTWDRCLPYAEFSYNNSYQASIQMSPNEAMFGRKCRTPLCWNEVGEALVFGPDILKSAEEQVKLIRERLKTAQNRQKNYADNRRRDLEFKKGDHVYLRVSPLRGMRRFGMSGKLAPRYIGPYLIAARRGEVAYQLELPEGLADVHNVFHVSQLKKCLRVPEEQVPLGSIELEKNLTYKERPIKVLEEAERQTRRKTIKFYKVQWSNHSEDEATREREDLLRAEFPELLP

SEQ ID NO: 20395 - protein, 1657 aa, Oryza sativa
  Clone ID: TF_OSC29124j.C1.p1.fg
MAVNASFSSHGFGEGHHVAQLRDLAHFLGFSCPEYTGYSVDRVPPHCELSVYLYPRGGIHGAGLRPHHFTVARPTLQIAYQDLSWTALRRLAHDYSHRLGGSAFRQLPRLPSGHSDARYPCPYSEPQPVLTRMVELSEAQATQHDLLLEAYRSLARRYAALEARLAEEGVTSVDTISWDSGRLCHASHLSSHSSRGSTRTPSGPRSPSSRAPYSPVYSPYPHPVSPSYTPGHTPVASSRRGPRFIRTARKRVVGSATVFRFHYPAPLPPAARAAAGPRQMASRPRRAARAPAHFGFEDGRVEPEENHESANEQSHRSNRSHRTASRNAEMEQSHRSHHTVSHNSGEERLPSPPHVENNMQHLMAVQTQILQGLAAAVAGFQHNAHGNGHPHMSNNRSKLTNFLRSRPPEFSQTVEPVEADDWLKDVDRKLNLVQCTPVEKTLYASHQLRGPAADWWENYCNAHPEPTNIAWDEFATAFRAAHVPESTIDMKKEEFNRLKQGNSSVNEYLSMFNKLARYAPEEVDTDKKKIRKFLKGIAVGMRLQLLAHDFPTFQHMINKALLLEDARKEATEEYKKRKSNHQGNSFRGAPRPRYGQPMQYHQSVTQANRQPGYAPRPQMNHPAPQPQQRAPSGNTAPNSVTSFKSPQGPSAVQCFRCNQMGHYARQCPQNPTNNNSGHANGSTARTPTPAAAQSRPSSQASGQGSRASNNFGRGRVNHIQAETAQDALDVVMGPGGKQVRFTPNTPTASRSILTCLQVTSLESVPIVCEYPDVFPEELTRMPPDREIEFAIELAPGTAPIAKRPYRMAANELAEVKSKLKNWKVKVMCDLAHPLGEPQCFWLRKRMALREWSGYHQLKIRSEDIPKTAFSTRYGLYEFTVMSFGLTNAPAFFMNLMNKIFMEYLDQFVVVFIDDILIYSKNKEEHAEHLRLIMEKLRDHQLFAKFSKCEFWLDRVAFLGHVISSNGVEVDPSKVEAVLAWNPPKNVSEIRSFLGLAGYYRRFIEGFSKLARPMTELLKKEKKFQWSAACEDSFQEMKKRLTTAPVLTLPDIRKDFEIFCNASRQGLGCVLMQERKVVAYASRQLRPHEVNYPTHDLELAAVVHALKIWRHYLIGNRCEVYTDHKSLKYIFTQTELNMRQRRWLELIKDYDLGIHYHPGKANVVADALSRKAYCNVAQIRPDQDHLYRELDKLRLTVVQSGVPASLTVQPTLESQIREAQKDDEGIKELIKRIQEKKDANFSIDDQGTVWCGPRICVPAKKELRDLILKEAHESAYSIHPGSTKMYQDIKAYFWWAGMKRDVAEYIALCDICQRVKAEHQRPAGLLQPLPIPGWKWEEIGMDFITGLPRTPSGYDSIWVIVDRLTKSAHFVPVKTTYDGRKLAELYITHVVCRFGCPKKIVSDRGTQFTSRFWKQLHEALGTDLNFSTAYHPQTDGQTERVNQILEDMLRACALDFEGTWDRCLPYAEFSYNNSYQASIQMSPNEAMFGRKCRTPLCWNEVGEALVFGPDILKRDLEFEKGDHVYLRVSPLRGMKRFGMSGKLAPRYIGPYLITARRGEVAYQLELPEGLADVHNVFHVSQLKKCLRVPEEQVPLGNIELEKNLTYKERPIKVLEEAERQTRRKTIKFYKVQWSNHSEDEATWEREDLLRAEFPELLP

SEQ ID NO: 20396 - protein, 1472 aa, Oryza sativa
  unsure (1)..(1472): unsure at all Xaa locations
  Clone ID: TF_OSC31735j.C1.p1.np
MASRPRRAARAPAHFGFEEGRVEPEANHESANEQSHHSNRSHHTASRNAEVEQPHRSNRSHRTVSRNAEVEQSHRSPRAAIHNSREERIPSPPHVENNMQHLMAVQTQILQGLATAIAGIQHNAHGNGHPHTGNNRSKLTDFLRSRPPEFSQTVEPVEADDWLKDVERKLNLVQCTPVEKTLYASHQLRGPAADWWENYCNAHPEPTNIPWDEFAAAFRAAHVPESTIDMKKEEFNRLKQGNTSVNEYMSQFNKLARYAPEEVDTDKKKIRKFLKGVTVGMRLXLLAHDFPTFXHMINKRLLLEDARKEATEEYKKRKSTHQGNSSRGEPRPRFGQPMQYHQSVTQANRQPSYAPRPQMNRLAPQPQQRAPSGNTAPNSVTSFKSPPGLSAVQCFRCNQMGHYARQCPQNLTNSNSGHTNGSTARTPTPAAAQSRPSTQASGQGSRASNNFGRDRVNHIQAETAQDAPDVVMGMFSVNSAPAIVLFDSGASHSFISQAFVKRNGWKTQNLRVPMIVHSPGRDIRATKICSEVNLRIEEVDFLAKPIVLDSQSLDIILGMDWLAKHKGQIDCAERSITLQGPGGKQVRFTPNTLTASRSILTSLQATSLESVPIVCEYPDVFPKELTEMPPNREIEFAIELALGTAPIAKSPYRMAANELAEVKKQIEELESKGYVRPSSSPWGAPVLLVKKKDGSERMVIDYRALNEVTKKNKYPLPRIDDLFDQLXGAKVFSKIDLRSVYHQLKIRYEDIPKTAFSTRYGLYEFTVMSFGLTNAPAFFMNLMNKIFMEYLDQFVVVFIDDILIYSKNEEEHVEHLRLIMEKLRDHQLFAKFSKCEFWLDRVAFLGHVISSNGVEVDPSKVEAVLAWYPPKNESEIRSFLGLAGYYRRFIEGFSKLARPMTELLKKEKKFEWSAACEDSFQEMKKRLTTAPVLTLPDIRKDFEIFCDASRQGLGCVLMQERKVVAYASRQLRPHEVNYPTHDLELAAVVHALKIWRHYLIGNRCEVYTDHKSLKYIFTQTELNMRQRRWLELIKDYDLGIHYHPGKANVVADTLSRKTYCNAAQIWPDQDRLCRELEKLRLTVVQSGVPASLTVQPTLESQIREAQKDDEGIKELIKRIQKMKDTDFSIDDQGTVWCGPRICVPAKKELRDLILKEAHESAYSIYPGSTKMYQDIKAYFWWVGMKRDVAEYVALCDICQRVKAEHQRPAGLLQPLPIPEWKWEEIGMDFITGLPRTPSGYDSIWVIVDRLTKSAHFVPAKTTFDGKKLAELYMTHVVCRFGCPKKIVSDRGTQFTSRFWKQLHEALGTDLNFSTAYHPXTDGQTERVNQILEDMLCACALDFEGTWDRCLLYAEFSYNNSYQASIQMSPNEAMFGRKCRTPLCWNKVGEALVFGPDILKAAEEQVKLIRQCLKTTQNRQKNYADNRRRDLEFEKGDLVYLRVSPLRGMRRFGMSGKLAPRYIGPYLITARRG

SEQ ID NO: 20397 - protein, 1573 aa, Oryza sativa
  unsure (1)..(1573): unsure at all Xaa locations
  Clone ID: TF_OSC33740j.C1.p1.np
MASRPRRAARAPARFGFEDGRVEAEANHESANEQSHHSNRSHRTVSRNAEVEQPRRSNRSHRIVFRNAEMEQSHRSHHTASHNSGEERLPSPPHVENNMQHIMAVQTQILQGITTAIAGFQHNAHGNGHPHVGNNRSKLTDFLRSRPPEFSQTVEPVEADDWLKDVDRKLNLVQCTPVEKTLYASHQLRGPAADWWENYCNAHPEPTNIAWDEFAMAFHAAHVPESTIDMKKEEFNRLKQGNSSVNEYLSQFNKLARYAPEEVDTDKKKIRKFLKGIAVGMRLQLLAHDFPTFQHMINKALLLEDARKEATEEYKKRKSQVNHQGNSSRGAPRPRYGQPMQYHQSVTQANRQPGYAPRPQMNRPAPPPQQRAPSGNTAPNSVTSFKSPQGPSAVQCFRCNQMGHYARQCPQNPTNTNSGHANGSTARTPTPAAAQSRPSSQASGXGSRASNHFGRGRVNHIQAETAQDAPDVVMGMFSVNSVPAIVLFDSGASHSFISQAFVKRNGWKTQNLRVPMIVHSPGRNIRATQICPEVNLRIEEVDFLAKPIILDSQSLDIILGMDWLAKHKGQIDCAEKSITLQGPGGKQVRFTPNTPTASRSILTCLQVTSLESVPIVCEYPDVFPEELTSMPPDREIEFAIELAPGTAPIAKRPYRMAANELAEVKRQIEELESKGYVRPSSSPWGALVLLVKKKDGSERMVIDYRALNEVTIKNKYPLPRIDDLFDQLKGARVFSKIDLRSGYHQLKIRSEDIPKTAFSTRYGLYEFTVMSFGLTNAPAFFMNLMNQIFLEYLDQFVVVFIDDILIYSKNEEEHTEHLRLIMEKLRDHQLFAKFSKCEFWLDRVAFLGHVISSNGVEVDPSKVEAVLAWNPPKNVSEIRSFLGLAGYYRRFIEGFSKLARPMTELLKKEKKFQWSAACEDSFQEMKKRLTTAPVLTLPDIRKDFEIFCDASRQGLGCVLMQERKVVAYASRQLRPHEVNYPTHDLELAAVVHALKIWRHYLIGNRCEVYTDHKSLKYIFTQTELNMRQRRWLELIKDYDLGIHYHPGKANVVADALSRKAYCNVAQIRPDQEHLCRELEKLRLTVVQSGVPASLTVQPTLESQIREAQKDDEGIKELIKRIQEKKDTNFSIDDQGTVWCGPRICVPAKKELRDLILKEAHESAYSIHPGSTKMYQDIKAYFWWAGMKRDVAEYVALCDICQRVKAEHQRPAGMLQPLPIPEWKWEEIGMDFITGLPRTPNGYDSIWVIVDRLTKSAHFVPVKTTYDGKKLAELYMTHVCRFGCPKKIVSDRGTQFTSRFWKQLHEALGTDLNFSTAYHPXTDGQTERVNQILEDMLRACALDFEGTWDRCLPYAEFSYNNSYQASIQMSPNEAMFGRKCRTPLCWNEVGEALVFGPDILKSAEEQVKLIRERLKTAQNRXKNYADNRRRDLEFEKGDHVYLRVSPLRGMRRFGMSGKLAPRYIGPYLITARRGEVAYQLELPEGLADVHNVFHVSQLKKCLRVPEEQVPLGNIELEKNLTYKERPIKVLEEAEHQTRRKTIKFYKVQWSNHSEDEATWEREDLLRAEFPELFP

SEQ ID NO: 20398 - protein, 1203 aa, Oryza sativa
  Clone ID: TF_OSC34202j.C1.p14.gm
MAVQTQILQGLTTAIASFQHNAHGNGHPHVGNNRSKLTDFLRSRPPEFSQTIEPVEADDWLKDVDRKLNLVQCTPVEKTLYASHQLRGPAADWWENYCNAHPEPTNIAWDEFATAFRVAHVPESTIDMKKEEFNRLKQGHSSVNEYLSQFNKLARYAPEEVDTDKKKIRKFLKGIAVGMRLQLLAHDFPTFQHMINKALLLEDARKEATEEYKKRKSNHQGNSSRGAPRPRYGQPMQYHQSVTQANRQSSYAPRPQMNRPAPPPQQRAPSGNTAPNSVTSFKSPQGPSAVQCFRCNQMGHYARQCPQNPTNTSPGHANGSTARTPTPAAAQSRPSSQASGQGSRASNHFGRGRVNHIQAETAQDAPDVVMGYHQLKIRSEDIPKTAFSTRYGLYEFTVMSFGLTNAPAFFMNLMNKIFMEYLDQFVVVFIDDILIYSKNEEEHAEHLRLIMEKLRDHQLFAKFSKCEFWLDRVAFLGHVISSNGVEVDPSKVEAVLAWNPPKNVSEIRSFLGLAGYYRRFIEGFSKLARPMTELLKKEKKFQWSTACEDSFQEMKKRLTTAPVLTLPDIRKDFEIFCDASRQGLGCVLMQERKVVAYASRQLRPHEVNYPTHDLELAAVIHALKIWRHYLIGNRCEVYTDHKSLKYIFTQTELNMRQRRWLELIKDYDLGIHYHPGKANVVADALSRKAYCNIAQIRPDQDHLCRELEKLRLTVVQSGVPASLTVQPTLESQIREAQKDDEGIKELIKRIQEKKDTNFSIDDQGTIWCGPRICVPAKKELRNLILKEAHESAYSIHPGSTKMYQDIKAYFWWAGMKRDVAEYVALCDICQRVKAEHQRPAGLLQPLPIPEWKWEEIGMDFITGLPRTPSGYDSIWVIVDRLTKSAHFVPVKTTYDGKKLAELYMTHVVCRFGCPKKIVSDRGTQFTSRFWKQLHEALGTDLNFSTAYHPQTDGQTERVNQILEDMLRACALDFEGTWDRCLPYAEFSYNNSYQASIQMSPNEAMFGRRCRTPLCWNEVGEALVFGPDILKSAEEQVKLIRERLRTAQNRQKNYADNRRRDLEFEKGDHVYLRVSPLRGMRRFGMSGKLAPRYIGPYLITARRGEVAYQLELPEGLADVHNVFHVSQLKKCLRVPEEQVPLGNIELEKNLTYKERPIKVLEEAERQTRRKTIKFYKVQWSNHSEDEATWEREDLLRAEFPELLP

SEQ ID NO: 20399 - protein, 1776 aa, Oryza sativa
  Clone ID: TF_OSC400014j.C1.p36.fg
MAVNASFSSHGFGEGHHVAQLRDLARFLGFSCPEYTGYSVDRVPPHCELSVYLYPRGGIHGAGLRPHHFTVARPTLQIAYQDLSWTALRRLAHDYSHRLGGSAFRQLPRLPSGHSDARYPCPYSESQPVLTRMVELSEAQATQHDLLLEAYRSLARRYAALEARLAEEGVTSVDTISWDSGRLCHASHLSSHSSRGSARTPSGPRSPSSRAPYSPVYSPYPHPVSPSYTPGHTPVASSRRGPRFIRTARKRVVEVEQPRRSSRSHRTVSREAELEQSHRPHRTASHNSGEERLPSPPHVENNMQHIMAVQTQILQGLTTAIASFQHNAHGNGHPHMGNNRSKLTDFLRSRPPEFSQTVEPVEADDWLKDVDRKLNLVQCTPVEKTLYASHQLRGPAADWWENYCNAHPEPTNIAWDEFATAFRAAHVPESTIDMKKEEFNRLKQGHSSVNEYLSQFNKLARYAPEEVDTDKKKIRKFLKEIAVGMRLQLLAHDFPTFQHMINKALLLEDARKEATEEYKKRKSNHQGNSSRGAPRPRYGQPMQYHQSVTQANRQPGYAPRPQINRPAPQPQKHAPSGNTAPNSVTSFKSPQGPSAVQCFRCNQMGHYARQCPQNPTNTNSGHANGSTARTPTPAAAQSRPSSQASGQGSRASNHFGRGRVNHIQAETAQDAPDVVMGMFSVNSVPAIVLFDLGASHSFISQAFVKRNGWKTQNLRVPMIVHSPGRNIRATQICPEVNLRIEEVDFLAKPIVLDSQSLDIILGMDWLAKHKGQIDCAEKSITLQGPGGKQVRFTPNTPTASRSILTCLQVTSLESVPIVCEYPDVFPEELTRMPPDREIEFAIELAPGTAPIAKRPYRMAANELAEVKRQIEELESKGYVRPSSSPWGAPVLLVKKKDGYERMVIDYRALNEVTIKNKYPLPRIDDLFDQLKGARVFSKIDLRSGYHQLKIRSEDIPKTAFSTRYGLYEFTVMSFGLTNAPAFFMNLMNKIFMEYLDQFVVVFIDDILIYSKNEEEHAEHLRLIMEKLRDHQLFAKFSRCEFWLDRVAFLGHVISSNGVEVDPSKVEAVLAWNPPKNVSEIRSFLGLAGYYRRFIEGFSKLARPMTELLKKEKKFQWSTACEDSFQEMKKRLTTAPVLTLPDIRKDFEIFCDASRQGLGCVLMQERKVVAYASRQLRPHEVNYPTHDLELAAVIHALKIWRHYLIGNRCEVYTDHKSLKYIFTQTELNMRQRRWLELIKDYDLGIHYHPGKANVVADALSRKAYCNVAQIRPDQDHLCRELEKLRLTVVQSGVPASLTVQPTLESQIREAQKDDEGVKELIKRIQEKKDTNFSIDDQGTVWCGSRICVPAKKELRDLILREAHESAYSIHPGSTKMYQDIKAYFWWAGMKRDVAEYVALCDICQRVKAEHQRPAGLLQPLPIPGWKWEEIGMDFITGLPRTPSGYDSIWVIVDRLTKSAHFVPVKTTYDGKKLAELYMTHVVCRFGCPKKIVSDRGTQFTSRFWKQLHEALGTDLNFSTAYHPQTDGQTERVNQILEDMLRACALDFEGTWDRCLPYAEFSYNNSYQASIQMSPNEAMFGRKCRTPLCWNEVGEALVFGPDILKSAEEQVKLIRERLKTAQNRQKNYADNRRRDLEFEKGDHVYLRVSPLRGMRRFGMSGKLAPRYIGPYLITARRGEVAYQLELPEGLADVHNVFHVSQLKKCLRVPEEQVPLGNIELEKNLTYKERPIKVLEKAERQTRRKTIKFYKVQWSNHSEDEATWEREDLLRAEFSELLP

SEQ ID NO: 20400 - protein, 1670 aa, Oryza sativa
  Clone ID: TF_OSC400028j.C1.p11.fg
MAVNSSFSSHGFGEGHHVAQLRDLARFLGFSCPEYTGYSVDRVPPHCELSVYLYPRGGIHGAGLRPHHFTVARPTLQIAYQDLSWTALRRLAHDYSHRLGGSAFRQLPRLPSGHSDARYPCPYSESQPVLTRMVELSEAQATQHDLLLEAYRSLARRYAALEARLAEEGVTSVDTISWDSGRLCHASHLSSHSSRGSARTPSGPRSPSSRAPYSPVYSPYPHPVSPSYTPGHTPVASSRRGPRFIRTARKRVVGSSTVFRFHYPAPPPPAARAAAGPRQTQILQGLAAAIAGFQHNTHGNGHPHMSNNRSKLTDFLRSRPPEFSQTVEPVEADDWLKDVDRKLNLVQCTPVEKTLYASHQLRGPAADWWENYCNAHPEPTNIAWDEFATAFRAAHMPESTIDMKKEEFNRLKQGNSSVNEYLSMFNKLARYAPEEVDTDKKKIRKFLKGIAVGMRLQLLAHDFPTFQHMINKALLLEDARKEAIEEYKKRKSNHQGNSSRGAPRPRYGQPMQYHQSVTQANRQPGYAPRPQMNHPAPQPQQRAPSGNTAPNSVTSFKSPQGPSAVQCFRCNQMGHYARQCPQNPTNTNSVHANGSTARTPTPATAQSRPSSQASGQGSRASNHFGRGRVNHIQAETAQDAPDVVMGMFSVNSVPAIVLFDSGASHSFISQAFVKRNGWKTQNLRVPMIVHSPGRNIRATQICPEVNLKIEEVDFLAKPIVLDSQSLDIILGMDWLAKHKGQIDCAEKSITLQGPGGKQVRFTPNTPTASRSILTCLQVTSLESVPIVCEYPDVFPEELTSMPPDREIEFAIELAPGTAPIAKRPYRMAANELAEVKRQIEELESKGYVRPSSSPWGAPVLLVKKKDGSERMVIDYRALNEVTIKNKYPLPRIDDLFDQLKGARVFSKIDLRSGYHQLKIRSEDIPKTAFSTRYGLYEFTVMSFGLTNAPAFFMNLMNKIFMEYLDQFVVVFIDDILIYSKNEEEHAEHLRLIMEKLRDHQLFAKFSKCKFWLDRVAFLGHVISSHGVEVDPSKVEAVLAWNPPKNVSEIRSFLGLAGYYRRFIEVFSKLARPMTELLKKENKFHWSASCEDSFQEMKKRLTTAPVLTLPDIRKDFEIFCDASRQGLGCVLMQERKVVAYASRQLRPHEVNYPTHDLELAAVVHALKIWRHYLIGNRCEVYTDHKSLKYIFTQTELNMRQRRWLELIKDYDLGIHYHPGKANVVADALSRKAYCNVAQIRPDHDHLCRELEKLRLTVVQSGVPASLTVQPTLESQIREAQKDNEGIKELIKRNTGEERHQFLHRRSRHSLKELRDLILKEAHESAYSIHPGSTKMYQDIKAYFWWAGMKRDVAEYVALCDICQRVKAEHQRPAGLLQPLPIPEWKWEEIGMDFITGLPRTPNGYDSIWVIVDRLTKSAHFVPVKTTFDGKKLAELYMTHVVCRFGCPKKIVSDRGTQFTSRFWKQLHEALGTDLKFSTAYHPQTDGQTERVNQILEDMLRACALDFEGTWDRCLPYAEFSYNNSYQASIQMSPNEAMFGRKCRTPLCWNEVGEALLAPRYIGPYLITARRGEVAYQLELPEGLADVHNVFHVSQLKKCLRVPEEQVPLGNIELEKNLTYKERPIKVLEEAERQTRRKTIKFYKVQWSNHFEDEATWEREDLLRAEFPELLP

SEQ ID NO: 20401 - protein, 1829 aa, Oryza sativa
  Clone ID: TF_OSC400049j.C1.p32.fg
MPTVMGGCEMAVNASFSSHGFGEGHHVAQLRDLARFLGFSCPEYTGYSVDRVPPHCELSVYLYPRGGIHGAGLRPHHFIVARPTLQIAYQDLSWTALRRLAHDYSHRLGGSAFRQLPRLPSGHSDARYPCPYSESQPVLTRMVELSEAQATQHDLLLKAYRSLARRYAALEARLAEEGVTSVDTISWDSGRLCHASHLSSHSSRGSARTPSGPRSPSSRAPYSPVYSPYPHPVSPSYTPGHTPVASSRRGPCFIRTARKRVVGSSTVFRFHHLAPPPPAMASRPRRAACAPARFGFEEGRVKPEANHESANEQSHRSNRSHRTVSRNAKVEQPCRSNRSHRTASRDVEMEQSHRSHRTASHNSGEECLPSPHHVENNMQHLMAVQTQILQGIAAAVAGYKHNSHGNGHPHMGNNRSKLTDFLRSRPPEFSQTVEPVEADDWLKDVDRKLNLVQCTPVEKTLYASHQLRGPAANWWENYCNAHPEPTNIAWDEFATAFRAAHVPESTIDMKKEKFNRLKQGNSSVNEYLSMFNKLARYALEEVDSDKKKIRKFLKGIAVGMRLQLLAHDFPTFQHMINKALLLEDARKEATEEYKKRKSNHQGNSSRGAPRPRYGQPMQYHQSVTQANRQPGYAPRPQMNRSAPQPQQHAPSGNTAPNSVTSFKSPQGPSAVQCFRCNQMGHYARQCPQNPTNTNSGHANGSTARTPTPAAAQSRLSTQASGQGSRASNHFGRGCVNHIRAETAQDAPDVVMGMFSVNSVPAIVLFDSGASHSFISQAFVKRNGWKTQNLRVPMIVHSPGRNIRATQICPEVNLRIEEVDFLAKPIVLDSQSLDIILGMDWLAKHKGQIDCAEKSITLQGPGGKQVRFTPNTPTASRSILTCLQVTSLESVPIVCEYPDVFPEELTRMPPDREIEFAIELAPGTAPIAKRPYQMAANELTEVKRQIGELESKGYVRPSSSPWGAPVLLVKKKDGSERMVIDYRALNEVTIKNKYPLPRIDDLFDQLKGARVFSKIDLRSGYHQLKIRSEDIPKTAFSTRYGLYEFTVMSFGLTNAPTFFMNLMNKIFMEYLDQFVVVFIDDILIYSKNEEEHAEHLRLIMEKLRDHQLFAKFSKCEFWLDRVAFLGHVISSNGVEVDPSKVEAVLAWNPPKNVSEIRSFLGLAGYYRRFIEGFSKLARPMTELLKKEKKFRWSAACEDSFQEMKKRLTTAPVLTLPDIRKDFEIFCDASRQGLGCVLIQERKVVAYASRQLRPHEVNYPTHDLELAAVVHALKIWRHYLIGNRCEVYTDHKSLKYIFTQTELNMRQRRWLELIKDYDLGIHYHPGKANVVADALSRKTYCNVAQIRPDQDHLCRELEKLRLTVVQSGVPASLTVQPTLESQIREAQKDDEGIKELIKRIQEKKDTNFSIDNQGTVWCGPRICVPAKKELRDLILKEAHESAYSIHPGSTKMYQDIKAYFWWAGMKRDVAEYVALCDICQRVKAEHQRPAGLLQPLPIPEWKWEEIGMDFITGLPRTPNGYDSIWVIVDRLTKSAHFVPVKTTFDGKKLAELYMTHVVCRFGCPKKIVSDRGTQFTSRFWKQLHEALGTDLNFSMAYHPQTDGTWDRCLPYAEFSYNNSYQASIHMSPNEAMFGRKCHTPLCWNEVGEALVFGPDILKSAEEQVKLIRERLKTAQNRQKSYADNRRRDLEFEKGDHVYLRVSPLRGMRRFGMSGKLAPRYIGPYLITARRGEVAYQLELPEDLADVHNVFHVSQLKKCLRVPEEQVPLGNIVLEKNLTYKERPIKVLEEAERQTRRKTIKFYKVQWSNHSEDEATWEREDLLRAEFPELLP

SEQ ID NO: 20402 - protein, 1694 aa, Oryza sativa
  Clone ID: TF_OSC400197j.C1.p6.fg
MAVNASFSSHGFGEGHHVVQLRDLARFLGFSCSEYTGYSVDRVPPHCELSVYLYPRGGIHGAGLRPHHFTVARPTLQIAYQDLSWTVLRRLAHDYSHRLGGSAFRQLPRLPSGHSDARYPCPYSESQPVLTRMVELSEAQATQHDLLLEAYRSLARRYAALEARLAEEGVTSVDTISWDSGRLCHASHLSSHSSRGSARTPSGPRSPSSRAPYSPVYSPYPHPVSPSYTPGHTPVASSRHGPRFIRTARKRVVGSSTVFRFRHPAPPPMASRPRRAARAPARFGFEDGRVEAEANHESANEQSHHSNRSHRTVFRNAEVEQPHRSNRSHRTVFRNAEMEQSHRSHRTASHNSGEERLPSPPHVENNMQHIMAVQTQILQGLTTAIASFQHNAHGNGHPHVGNNRSKLTDFLRSHPPEFSQTVEPVEADDWLKDVDRKLNLVQCTPVEKTLYASHQLRGPAADWWENYCNAHPEPTNIAWDEFATAFRAAHVPESTIDMKKEEFNRLKQGNSSVNEYLSMFNKLARYAPEEVDTDKKKIRKFLKGIAVGMRLQLLAHDFPTFQHMINKALLLEDARKEATEEYKKRKSNHQGNSSRGAPRPRYGQPMQYHQSVTQANRQPGYAPRPQMNRPAPPPQQRAPSGNTAPNSVTSFKSPQGPSAVQCFRCNQMGHYARQCPQNPTNTNSGHANGSTARTPTPVAAQSRPSSQASGQGPRASNHFGRGRVNHIQAETAQDAPDVVMVCEYPDVFLEELTRMPPDREIEFAIELAPGTAPIAKRPYRMAANELAEVKRQIEELESKGYVRPSSSPWGAPMLLVKKKDGSERMVIDYRALNEVTIKNKYPLLRIDDLFDQLKGARVFSKIDLRSGYHQLKIRSEDIPKTAFSTRYGLYEFTVMSFGLTNALAFFMNLMNKIFMEYLDQFVVVFIDDILIYSKNEEEHAEHLRLIMEKLRDHQLFAKFSKCEFWLDRVAFLGHVISSNGVEVDPSKVEAVLSWNPPKNVSEIRSFLGLAGYYRRSIEGFSKLARPMTELLKKEKKFQWSAACEDSFQEMKKRLTTAPVLTLPDIRKDFEIFCDASRQGLGCVLMQERKVVAYASRQLRPHEVNYPTHDLELAAVVHTLKIWRHYLIGNRCEVYTDHKSLKYIFTQTELNMRQRRWLELIKDYDLGIHYHPGKANVVADALSRKAYCNVAQIRPDQDHMCRELEKLRLTVVQSGVPASLTVQPTLESQIQEAQKDDEGIKELIKRIQEKKDTNFSIDDQGTVWCGPHICVPAKKELRDLILKEAHESAYSIHPGSTKMYQDIKAYFWWAGMKRDVAEYVALCDICQRVKAEHQRPAGLLQPLPIPEWKWEEIGMDFITGLPRTPSGYDSIWVIVDRLTKSAHFVPVKTTYDGKKLAELYMTHVVCRFGCPKKIVSDRGTQFTSRFWKQLHEALGTDLNFSTAYHPQTDGQTERVNQILEDMLRACALDFEGTWDRCLPYAEFSYNNSYQASIQMSPNEAMFGRKCRTPLCWNEVGEALVFGPDILKSEEEQVKLIRERLKTTQNRQKNYADNRRRDLEFEKGDHVYLRVSPLRGMRRFGMSGKLAPRLITARRGEVAYQLELPEGLADVHNVFHVSQLKKCLRVPEEQVPLGNIELEKNLTYKERPIKVLEEAERQTRRKTIKFYKVQWSNHSDDEATWEREDLLRAEFPELLS

SEQ ID NO: 20403 - protein, 1851 aa, Oryza sativa
  Clone ID: TF_OSC400239j.C1.p3.fg
MAVNASFSSHGFGEGHHVAQLRDLARFLGFSCPEYTGYSVDRVPPHCELSVYLYPRGGIHGVGLRPHHFTVARPTLQIAYQDLSWTALRRLAHDYGHRLGGSAFRQLPRLPSGHADARYPCPYSESQPVLTRMVELSEAQATQHDLLLEAYRSLARRYAALEARLAEEGVTSVDTISWDSGRLCHASHLSSHSSRGSARTPSGPRSPSSRAPYSPVYSPYPHPVSPSYTPGHTPVASSRRGPRFIRTARKRVVGSSTVFRFRHPAPPPPAARAAAGPRQMASRPRRTARAPVRFGFEDGRVEAEANHEPANEHSHHSNRSHRTVSRNAEVEQPRRSSRSHRTVSREAELEQSHRSHRTASHNSGEERLPSPPHVENNMQHIMAVQTQILQGLTTAIASFQHNAHGNGHPHVGNNRSKLTDFLRSRPPEFSQTIEPVEADDWLKDVDRKLNLVQCTPVEKTLYASHQLRGPAADWWENYCNAHPEPTNIAWDEFATAFRVAHVPESTIDMKKEEFNRLKQGHSSVNEYLSQFNKLARYAPEEVDTDKKKIRKFLKGIAVGMRLQLLAHDFPTFQHMINKALLLEDARKEATEEYKKRKSNHQGNSSRGAPRPRYGQPMQYHQSVTQANRQSSYAPRPQMNRPAPPPQQRAPSGNTAPNSVTSFKSPQGPSAVQCFRCNQMGHYARQCPQNPTNTSPGHANGSTARTPTPAAAQSRPSSQASGQGSRASNHFGRGRVNHIQAETAQDAPDVVMGMFSVNSVPAIVLFDSGASHSFISQAFVKRNGWKTQNLRVPMIVHSPGRNIRATQICPEVNLRIEEVNFLAKPIVLDSQSLDIILGMDWLAKHKGQIDCAEKSITLQGPGGKQVRFTPNTPTASRSILTCLQVTSLESVPIVCEYPDVFPEELTRMPPDREIEFAIELAPGTAPIAKRPYRMAANELAEVKRQIEELESKGYVRPSSSPWGAPVLLVKKKDGSERMVIDYRALNEVTIKNKYPLPRIDDLFDQLKGARVFSKIDLRSGYHQLKIRSEDIPKTAFSTRYGLYEFTVMSFGLTNAPAFFMNLMNKIFMEYLDQFVVVFIDDILIYSKNEEEHAEHLRLIMEKLRDHQLFAKFSKCEFWLDRVAFLGHVISSNGVEVDPSKVEAVLAWNPPKNVSEIRSFLGLAGYYRRFIEGFSKLARPMTELLKKEKKFQWSTACEDSFQEMKKRLTTAPVLTLPDIRKDFEIFCDASRQGLGCVLMQERKVVAYASRQLRPHEVNYPTHDLELAAVIHALKIWRHYLIGNRCEVYTDHKSLKYIFTQTELNMRQRRWLELIKDYDLGIHYHPGKANVVADALSRKAYCNIAQIRPDQDHLCRELEKLRLTVVQSGVPASLTVQPTLESQIREAQKDDEGIKELIKRIQEKKDTNFSIDDQGTIWCGPRICVPAKKELRNLILKEAHESAYSIHPGSTKMYQDIKAYFWWAGMKRDVAEYVALCDICQRVKAEHQRPAGLLQPLPIPEWKWEEIGMDFITGLPRTPSGYDSIWVIVDRLTKSAHFVPVKTTYDGKKLAELYMTHVVCRFGCPKKIVSDRGTQFTSRFWKQLHEALGTDLNFSTAYHPQTDGQTERVNQILEDMLRACALDFEGTWDRCWPYAEFSYNNSYQASIQMSRNEAMFGRRCRTPLCWNEVGEALVFGPNILKSAEEQVKLIRERLRTAQNRQKNYADNRRRDVEFEKGDHVYLRVSPLRGMRRFGMSGKLAPRYIGPYLITARRGEVAYQLELPEGLADVHNVFHVSQLKKCLRVPEEQVPLGNIELEKNLTYKERPIKVLEEAERQTRRKTIKFYKVQWSNHSEDEATWEREDLLRAEFPELLP

SEQ ID NO: 20404 - protein, 1199 aa, Oryza sativa
  Clone ID: TF_OSC400259j.C1.p3.fg
MGNNRSKLTDFLRSRPPEFSQTVEPVEADDWLKDVDRKLNLVQCTPVEKTLYASHQLSGPAADWWENYCNAHPEPTNIAWDEFATAFRAAHVPEITIDMKKEEFNRLKQGNSSVNEYLSQFNKLARYAPEEVDTDKKKIRKFLKGIAVGMRLQLLAHDFPTFQHMINKALLLEDARKEATEEYKKRKSNHQGNSSRGAPRPRYGQPMQYHQSVTQANRQPGYAPRPQINRPAPQPQQRAPSSDTAPNSVTSFKSPQGPSAVQCFRCNQMGHYARQCPQNPTNTNSGHANGSTARTPTPAAAQSRPSSQASGQGSRASNNFGRGRVNHIQAETAQDAPDVVMGPGGKQVRFTPNTPTASRSILTCLQVTSLESVPIVCEYPDVFPEELTRMPPDREIEFAIELAPGTAPIAKRPYQMAANELAEVKRQIEELESKGYVRPSSSPWGAPVLLVKKKDGSERMVIDYRALNEVTIKNKYPLPRIDDLFDQLKGARVFSKIDLRSGYHQLKIRSEDIPKTTFSTRYGLYEFTVMSFGLTNAPAFFMNLMNKIFMEYLDQFVVVFIDDILIYSKNEEEHAEHLRLIMEKLRDHQLFAKFSKCEFWLDRVAFLGHVISSNACEDSFQELKKKLTTAPVLTLPDIRKYFEIFCDASRQGLGCVLMQEQKVVAYASRQLRPHEANYPTHDLELAAVVHALKIWRHYLIGNRCEVYTDHKSLKYIFTQTELNMRQRRWLELIKDYDLGIHYHPGKANVVADALSRKAYCNVAQIRPDQDHLCRELEKLRLTVIQSGVPASLTVQPTLESQIREAQKDDEGIKELIKRIQEKKDTNFSIDDQGTVWCGPRICVPAKKELRDLILKEAHESAYSIHPGSTKMYQDIKAYFWWAGMKRDVAEYVALCDICQRVKAEHQRPAGLLQPLPIPEWKWEEIGMDFITGLPRTPNGYDSIWIWLSQENCVRPRHSVHLKVLNFSTAYHPQTDGQTERVNQILEDMLRACALDFEGTWDRCLPYAEFSYNNSYQASIQMSPNEAMFGRKCRTPLCWNEVGKALVFGPDILKSAEEQVKLIRERLKTAQNRQKNYADNRRRDLEFEKGDHVYLRVSPLRGMRRFGMSGKLAPRYIGPYLITARRCEVAYQLELPEGLANVHNVFHVSQLKKCLRVPEEQVPLGNIELEKNLTYKERPIKVLEEAERQTRRKTIKLYKV

SEQ ID NO: 20405 - protein, 1640 aa, Oryza sativa
  Clone ID: TF_OSC400530j.C1.p1.fg
MAVNASFSSHGFGEGHHVAQLRDLARFLGFSCPEYTGYSVDRVPPHCELSVYLYPRGGIHGAGLCPHHFTVARPTLQIAYQDLSWTALRRLAHDYSHRLGGSAFRQLPHLPSGHSDARYPCPYSESQPVLTRMVELSEAQATQHDLLLEAYRSLARRYAALEARLAEEGVTSVDTISWDSGRLCHASHLSSHSSRGSARTPSGPRSPSSRAPYSPVYSPYPHPVSPSYTPGHTPVASSRRGPRFIRTARKRVVGSSTVFRFHYPAPPPPAARAAAGPRQMASRPRRAARAPARFGFEDGRVEPEENHESANEQSHHSNRSHRTVSRNTEVEQPRRSSRSHRTVSRDAEMEQSHRSHRTASHNSGEERLPSPPHVETNMQHLMAVQTQILQGLTTAIASFQHNAHGNGHPHMGNNRSKLTDFLRSRPLEFSQTVEPVEADDWLKDVDRKLNLVQCTPVEKTLYASHQLRGPTADWWENYCNAHPEPTNIAWDEFATAFRAAHVPESTIDMKKEEFNRLKQGNSSVNEYLSQFNKLARYAPEEVDTDKKKIRKFLKEIAVGMRLQLLAHDFPTFQHMINKALLLEDARKEATEEYKKRKSNHQGNSSRGAPRPRYGQPMQYHQSVTQANRQPGYAPRPQINRPAPQPQQRAPSSDTAPNSVTSFKSPQGPSAVQCFRCNQMGHYARQCPQNPTNTNSGHANGSTARTPTPAAAQSRPSSQASRQGSRASNHFGRGRVNHIQAETAQDAPDAVMGMFSVDSVPAIVLFDSGASHSFISQAFVKRNGWKTQKLRVPMIVHSPGRNIRATQICPEVNLRIEEVDFLAKPIVLDSQSLDIILGMDWLAKHKGQIDCAEKSITLQGPAGKQVRFTPNTPTASRSILTCLQVTSLESVPIVYEYPDVFLEELTRMPPDREIEFAIELAPGTAPIAKRPYRMAANELAEVKRQIEELESKGYVRPSSSPWGAPVLLVKKKDGSERMVIDYRALNEVTIKNKYPLPRIDDLFDQLKGARVFSKIDLRSGYHQLKIRSEDIPKTAFSTRYGLYEFTVMSFGLTNAPAFFMNLMSKIFMEYLDQFVVVFIDDILIYSKNEEEHAEHLRLIMEKLRDHQLFAKFSKCEFWLDRVAFLGHVISPNGVEVDPSKVEAVLAWNPPKNVSEIRSFLGLAGYYRRFIEGFSKLARPMTELLKKEKKFQWSAACEDSFQEMKKRLTTAPVLTLPDIRKDFEIFCDASRQGLGCVVMQERKVVAYASRQLRPHEVNYPTHDLELAAVVHALKIWRHYLIGNRCEVYTDHKSLKYIFTQTELNMRQRRWLELIKDYDLGIHYHPGKANVVADALSRKAYCNVAQIRPDQDHLCRELEKLRLTVVQSGVPASLTVQPTLESQIREAQKDDEGIKELIKRIQEKKDTNFSIDDQGTVWCGPRICVPAKKELRDLILKEAHESTYSIHPGSTKMYQDIKAYFWWAGMKRDVAEYVALCDICQRVKAEHQRPAGLLQPLPIPEWKWEEIGMDFITGLPRTPNGYDSIWVIVDRLTKSAHFVPVKTTYDGKKLAELYMTHVVCRFGCPKKIVSDRGTQFTSRFWKQLHEALGTDLNFSTAYHPQTDGQTERVNQILEDMLRACALDFEGTWDRCLPYAEFSYNNSY

SEQ ID NO: 20406 - protein, 1732 aa, Oryza sativa
  Clone ID: TF_OSC400630j.C1.p10.fg
MASRPRRAARAPARFGFEDGRVEAEANHESANEQSHHSNRSHHTVSRNAEVEQPRRSNRSHRTVFRNAEMEQSHRSHRTASHNSGEERLPSPPHVENNMQHLMAVQTQILQGLTTAIASFQHNAHGNGHPHVGNNRSKLTDFLRSRPPEFSHTVEPVEADDWLKDVDRKLNLVQCTPVEKTLYASHQLRGPAADWWENYCNAHPEPTNIAWDEFAMAFRTAHVPESAIDMKKEEFNRLKQGNSSVNEYLSMFNKLARYAPEEVDTDEKKIRKFLKGIAVGMRLQLIAHDFPTFQHMINKALLLEDARKEATEEYKKRKSNHQGNSSRGAPRPRYGQPMQYHQSVTQANRQPGYAPRPQMNRPAPQPQQRAPSGNTAPNSVTSFKSPQGPTVVQCFRCNQMGHYARQCPQNPTNTSSGHANGSTARTPTQRQLSLVLALRQVDKDASDIVMGMFSVNSIPAIVLVDSGASHSFISQAFVKRNGWKTQNLRVPMIVHSPGRNIRATQICPEVNLRIEEVDFLAKPIVLDSQSLDIILGMDWLAKYKGQIDCAEKSITLQGPGGKQVRFTPNTPTASRSILTCLQVTSLESVPIVCEYPDVFPEELTRMPPDREIEFAIELAPGTAPIAKRPYRMAANELAEVKRQIEELESKGFVRPSSSPWGAPVLLVKKKDGSERMVIDYRALNEVTIKNKYPLPRIDDLFDQLKGARVFSKIDLRSGYHQLKIRSEDIPKTAFSTRYGLYEFTVMSFGLTNAPAFFMNLMNKIFMEYLDQFVVVFIDDILIYSKNEEEHAEHLRLIMEKLRDRQLFAKFSKCEFWLDRVAFLGHVISSNGVEVDPSKVEAVLAWNPPKNVLEIRSLLGLAGYYRRFIKGFSKLARPMTELLKKEKKFQWSAACEDSFQEMKKRLTTAPVLTLPDIRKDFEIFCDASRQGLGCVLMQERKVVAYASRQLRPHEVNYPTHDLELAAVVHALKIWRHYLIGNRCEVYTDHKSLKYIFTQTELNMRQRRWLELIKDYDLGIHYHPGKANVVADALSRKAYHNVAQIRPDQDHLCRELEKLRLTVVQSGVPASLTVQPTLESQIREAQKDDEGIKELIKRIQEKKDTNFSIDNQGTVWCGPRICVPAKKELRDLILKEAYESAYSIHPGSTKMYQDIKAYFWWAGMKRDVAEYVALCDICQRVKAEHQRPAGLLQPLPIPEWKWEEIGMDFITGLPRTPNGYDSIWVIVDRLTKSAHFVPVKTTFDGKKLAELYMTHVVCRFGCPKKIMSDRGTQFTSRFWKQLHEALGTDLNFSTAYHPQTDGQTERVNQILEDMLRACALDFEGTWDRCLPYAEFSYNNSYQASIQMSPNEAMFGRKCRTPLCWNEVGEALAFGPDILKSAEEQVKLIRERLKTAQDRQKSYANNRRRDLEFEKGDHVYLRVSPLRGMRRFGMSGKLAPRYIGPYLITARRGEVAYQLELPEGLADVHNVFHVSQLKKCLRVPEEQVPLGNIVLEKNLTYKERPTKVLEEAEHDIIVASSTQSAVSALLQDLKEDFALKDLGDLHYFLGIEVNKVNDGLLLSQGKYTADLLKKTNMSDCKPFNTPLSTSEKLSLHEGDLLGSSDATQYRSIVGALQYLTLTRPDISFSVNKVCQFLHAPTTVHWATVKRILRYLKYTASLGLKFEKSKSGLVSAFTDADWAGSLDDRRSTGGFAIYLGSNLVSWSARKQATVSRSSTEAEYKALANVTAELMWI

SEQ ID NO: 20407 - protein, 1689 aa, Oryza sativa
  unsure (1)..(1689): unsure at all Xaa locations
  Clone ID: TF_OSC400662j.C1.p1.np
MTVLLLYNKETSVAVIFYLPVIPALFPGTGIDXQMAVNASFSSHGFGEGHHVAQLRDLARFLGFSCPEYTGYSVDRVPPHCELSVYLYPRGGIHGAGLRPHHFTVARPTLQIAHRLGGSAFRQLPRLPHRLGGSAFRQLPRLPSGHSDARYPCPYSESQPVLTRMVELSEAQATQHDLLLEAYRSLARRYAALEARLAEEGVTSVDTISWDSGRLCHASHLSSHSSRGSARTPSGPRSPSSRAPYSPVYSPYPHPVSPSYTPGHTPVASSRRGPRFIRTARKRVVGSSTVFRFHYPAPPPPAARAAAGPRQVPPVPSRQPIDVSSTEEPTTGARFGFEDGRVEAEANHESANEQSHHSNRSHRTISRNAEVEQPRRSNRSHRTASRDAEMEQSHRSHRTASHNSGEERLPSPPHVENNMQHLMAVQTQILQGIAAAVAGYQHNAHGNGHPHMGNNRSKLTDFLRSRPPEFSQTVEPVEADDWLKDVNRKLNLVQCTPVEKTLYASHQLRGPAADWWENYCNAHPEPTNIAWDEFATAFCAAHVPESTIDMKKEEFNRLKQGNSSVNEYLSMFNKLARYAPEEVDSDKKKIRKFLKGIAALLLEDARKEATEEYKKRALLLEDARKEATEEYKKRKSNHQGNSSQGAPRPRYGQPMQYHQSVTQANRQPGYAPRPQMNRPAPQPQQRAPSGNIAPNSVTSFKSPQGPSAVQCFRCNQMGHYARQCPQNPTNTNSGHANGSTARTPTPAAAQSRPSTQASGQGSRASNHFGRGRVNHIQAETAQDAPDVVMGMFSVNSVPAIVLFDSGASHSFISQAFVKRNGWKTQNLRVPMIVHSPGRNIRATQICPEVNLRIEEIDFLAKPIVLDSQSLDNILGMDWLAKHKGQIDCAEKSITLQGPGGKQVRFTPNTPTASRSILTCLQVTSLESVPIVCEYPDVFPEELTRMPPDREIEFAIELAPGTAPIAKKPYRMAANELAEIKRQIEELESKGYVRPSSSPWGAPVLLVKKKDGSERMLKIRSEDIPKTAFSTRYGLYEFTVMSFRLTNAPAFFMNLMNKIFMEYLDQFVVVFIDDILIYSKNEEEHAEHLRLIMEKLRDHQLFAKFSKCEFWLVRVAFLGHVISSNGVEVDPSKVEAVLAWNPPKNVSEIRSFLGLAGYYRRFIEGFSKLARPMTELLKKEKKFQWSAACEDSFQEMKKRLTTAPVLTLPDIRKDFEIFCDASRQGLGCVLMQERKVVAYASRQLRPHEVNYPTHDLELAAVVHALKIWRHYLIGNRCEVYTDHQSLKYIFTQTELNMRQRRWLELIKDYDLGIHYHPGKAKVVADALSRKAYHNVAQIRPDQDHLCRELEKLRLTVVQSGVPASLTVXPTLESQIREAQKDDEGIKELIKGIQEKKDTNFSIDNQGTVWCGPRICVPAKKELRDLILKEAHESAYSIHPGSTKMYQDIKAYFWWAGMKRDVTEYVALCDICQRVKAEHQRPVGLLQPLPTPEWKWEEIGMDFITGLPRTPNGYDSIWVIVDRLTKSAHFVPVKITYDGKKLAELYMTYVVCRFGCPKKIVSDRGTQFTSSYQASIQMSPNEAMFGRKCRTPLCWNEVGEALVFGPDILKSAEEQVKLIRERLKTARQKNYADNRRCDLEFEKGDHVYLRVSPLRALASKGQTGSGRPRSVPPRARDPPRAVRLRVGPPHL

SEQ ID NO: 20408 - protein, 1663 aa, Oryza sativa
  Clone ID: TF_OSC400702j.C1.p32.fg
MTVLLLCNKETSVAMIFCLPVIPALFPGTGIDEQMAVNASFSSHGFGEGHHVAQLRDLARFLGFSCPEYTGYSVDRVPSRYELSVYLYPRGGIHGAGLRPHHFTVARPTLQIAHRLGGSAFRQLLRLPSGRTDTRYPCPYSESQPVLTRMVELSEAQATQHDLLLEAYRSLARRYAALEARLAEEGVTSVDTASWDLGRLCHASHLSSHSSRGSVRTPSGPRTPSSRVPYSPVHSPYPHPVSPSYTPGHTPVASSCRGPRFIRTVRKRVVGSSTVFRFDHPARPPPAARAAAGPRQVPPISSRQPIDVSSTEEPTTGAHFGFEEGRVEPEANHESANEQSHHSNRSHHTASRNAEVEQPHRSNRSHRTVSRNAEVEQSHRSPRAAIHNSREERIPSPPHVENNMQHLMAVQTQILQGLATAIAGIQHNAHGNGHPHTGNNRSKLTDFLRSRPPEFSQTVEPVEADDWLKDVERKLNLVQCTPVEKTLYASHQLRGPAADWWENYCNAHPEPTNIPWDEFAAAFRAAHVPESTIDMKKEEFNRLKQGNTSVNEYMSQFNKLARYAPEEVDTDKKKIRKFLKGVTHMINKRLLLEDARKEATEEYKKRKSTHQGNSSRGEPRPRFGQPMQYHQSVTQANRQPSYAPRPQMNRLAPQPQQRAPSGNTAPNSVTSFKSPPGLSAVQCFRCNQMGHYARQCPQNLTNSNSGHTNGSTARTPTPAAAQSRPSTQASGQGSRASNNFGRDRVNHIQAETAQDAPDVVMGMFSVNSAPAIVLFDSGASHSFISQAFVKRNGWKTQNLRVPMIVHSPGRDIRATKICSEVNLRIEEVDFLAKPIVLDSQSLDIILGMDWLAKHKGQIDCAERSITLQGPGGKQVRFTPNTLTASRSILTSLQATSLESVPIVCEYPDVFPKELTEMPPNREIEFAIELALGTAPIAKSPYRMAANELAEVKKQIEELESKGYVRPSSSPWGAPVLLVKKKDGSERMLKIRYEDIPKTAFSTRYGLYEFTVMSFGLTNAPAFFMNLMNKIFMEYLDQFVVVFIDDILIYSKNEEEHVEHLRLIMEKLRDHQLFAKFSKCEFWLDRVAFLGHVISSNGVEVDPSKVEAVLAWYPPKNESEIRSFLGLAGYYRRFIEGFSKLARPMTELLKKEKKFEWSAACEDSFQEMKKRLTTAPVLTLPDIRKDFEIFCDASRQGLGCVLMQERKVVAYASRQLRPHEVNYPTHDLELAAVVHALKIWRHYLIGNRCEVYTDHKSLKYIFTQTELNMRQRRWLELIKDYDLGIHYHPGKANVVADTLSRKTYCNAAQIWPDQDRLCRELEKLRLTVVQSGVPASLTVQPTLESQIREAQKDDEGIKELIKRIQKMKDTDFSIDDQGTVWCGPRICVPAKKELRDLILKEAHESAYSIYPGSTKMYQDIKAYFWWVGMKRDVAEYVALCDICQRVKAEHQRPAGLLQPLPIPEWKWEEIGMDFITGLPRTPSGYDSIWVIVDRLTKSAHFVPAKTTFDGKKLAELYMTHVVCRFGCPKKIVSDRGTQFTSSYQASIQMSPNEAMFGRKCRTPLCWNKVGEALVFGPDILKAAEEQVKLIRQCLKTTQNRQKNYADNRRRDLEFEKGDLVYLRVSPLRGMRRFGMSGKLAPRYIGPYLITARRGVTPRTSPERN

SEQ ID NO: 20409 - protein, 1322 aa, Oryza sativa
  Clone ID: TF_OSC400719j.C1.p29.fg
MASRPRRAAHAPARFGFEQGRVEPEANHESANEQSHHSNRSHHTVSRNAEIEQPHRSNRSHHTASRNAEVEQSHRSHRTASHNSGEERLPSPPHVENNMQHLMAVQTQIVQGLAAAIAGFQHNAHGNGHPHRGNNRSKLTDFLRSRPPEFSQTVKPAEADDWLKDVDRKLNLVQCTPVEKTLYASHQLRGPAADWWENYCNAHPEPTNIAWDEFVMAFHAAHVPKSTIDMKKEEFNRLKQGNNSVNEYLSQFNKLARVTSFKSPLGPSAVQCFRCNQMGHYARQCPQNPTNTNSGHANGSTARTPTPAAAQSRPSSQASGQGSRASNNFGRGRVNHIQAETAQDAPDVVMGMFSVNSVPAIVLFDSGASHSFISQAFVKRNGWKTQNLRVPMIVHSPGRNIRATQIYPEVNLRIEEVDFLAKPIVLDSQSLDIILGMDWLAKHKGQIDCAEKSITLQGPGGKQVRFTSNTPTASRSILTYLQVTSLESVPIVCEYPDVFPEELTSMPSDREIEFAIELAPGTAPIAKRPYRMAANELAEVKRQIEELESKGYHQLKIRSEDIPKTAFSTRYGLYEFTVMSFGLTNAPAFFMNLMNKIFMEYLDQFVVVFIDDILIYSKNEEEHAEHLMLIIEKLRDHQLFAKFSKCEFWLDRVAFLGHVISSNGVEVDPSKVEAVLAWNPPKNVSEIRSFLGLAGYYRRFIEGFSKLARPMTELLKKEKKFQWSTACEDSFQEMKKRQGLGCVLMQERKVVAYASRQLRPHEVNYPTHDLELAAVVHALKIWRHYLIGSRCEVYTDHKSLKYIFTQTELNMRQRRWLELIKDYDLGIHYHPGKANVVADALSRKTYCNVAQIWPDQDHLCRELEKLRLTVENKGTDFSIDDQGTVWCGPRICVPAKKELRDLILKEAHESAYSIHPGSTKMYQDIKAYFWWAGMKRDVAEYIALCDICQRVKAEHQRPAGLLQPLPIPEWKWEEIGMDFITGLPRTPSGYDSIWVIVDRLTKSAHFVPVKTTFDGKKLAELYMTHVVCRFGCPKKIVSDRGTQFTSRFWKQLHEALGTDLNFSTAYHPQTDGQTERVNQILEDMLRACALDFEGTWDRCLPYTEFSYNNSYQASIQMSPNEAMFGRKCRTPLCWNEVGEALVFGPDMLKAAEEQVKLIRERLKTSQNCQKNYADNRRRDLEFEKGDHVYLRVSPLRGMRRFGMSGKLAPRYIGPYLITARRGEVAYQLELPEGLADVHNVFHVSQLKKCLRVPEEQVPLGNIELEKNLAYKERPIKVLEEAERQTRRKTIKFDKVQWSNHSEDEATWEREDLLRAEFPELLP

SEQ ID NO: 20410 - protein, 1851 aa, Oryza sativa
  Clone ID: TF_OSC400741j.C1.p10.fg
MAVNASFSSHGFGEGHHVAQLRDLARFLGFSCPEYTGYSVDRVPPHCELSVYLYPRGGIHGAGLRPHHFTVARPTLQIAYQDLSWTALRRLAHDYSHRLGGSAFRQLPRLPSGHSDARYPCPYSESQPVLTRMVELSEAQATQHDLLLEAYRSLARRYAALEARLAEEGVTSVDTISWDSGRLCHASHLSSHSSRGSARTPSGPRSPSSRALYSPVYSPYPHPVSPSYTPRHTPAASSRRGPRFIRTARKRVVGSSTGFRFHYPAPLPPAARAAAGPRQMASRPRRAARAPARFGFEDGRTEPEANHESANEQSHHSNRSHRTASRNAEVEQPRRSNRSHRTASRDAEMEQSHRSHRTASHNSGEERLSSPPHVENNMQHLMAVQTQILQGLAAAIAGFQHNTHGNGHPHISNNRSKLTDFLRSRPPEFSQTVEPVEADDWLKDVDRKLNLVQCTPVEKTLYASHQLRGPAADWWENYCNAHPEPTNIAWDEFATAFRTAHVPESAIDMKKEEFNRLKQGNSSVNEYLSMFNKLARYAPEEVDTDKKKIRKFFKGIVVGMRLQLIAHDFPTFQHMINKALLLEDARKEATEEYKKRKSNHKGNSSRGAPRPCYGQPMQYHQSVTQANRQPGYAPRPQMNRPAPQPQQRAPSGNTAPNSVTSFKSPQGPSAVQCFRCNQMGHYARQCPQNPTNTNSGHANGSTARTPTPAAAQSRPSSQASGQGSHVSNNFGRGRVNHIQAETAQDATDVVMGMFSVNSVPAIVLFDSGASHSIISQAFVKRNGWKTQNLRVPMIIHSPGRNIRATQICPEVNLRIEEVNFLAKPIVLDSQSLDIILGMDWLAKHKGQIDCAKKSITLQGPRGKQVRFTSNTPTTSRSILTCLQVTTLESVPIVCEYPDVFPEELTSMPPDREIEFAIKLAPGTAPIAKRPYRMAANELAEVKRQIEELESKGYVRPSSSPWGAPVLLVKKKDGSERMVIDYRALNEVTIKNKYPLPRIDDLFDQLKGARVFSKIDLRSGYHQLKIRSEDIPKTAFSTRYGLYEFTVMSFGLTNAPAFFMNLMNKIFMEYLDQFVVVFIDDILIYSKNEEEHAEHLRLIMEKLRDHQLFAKFSKCEFWLDRVAFLGHVISSNGVEVDPSKVEAVLAWNPPTNVSEIRSFLGLAGYYRRFIEGFSKLARPMTELLKKEKKFQWSVACEDSFQEMKKRLTTAPVLTLPDIRKDFEIFCDASRQGLGCVLMQERKVVAYASRQLRPHEVNYPTHDLELAAVVHALKIWRHYLIGNRCEVYTDHKSLKYIFTQTELNMRQRRWLELIKDYDLGIHYHPGKANVVADALSRKVYCNVAQIWPDQDRLCRELEKLRLTVVQSGVPASLTVQPTLESQIREAQKDDEGIKELIKRIQEKKDTNFSIDDQGTVWCGPRICVPAKKELRDLILKEAHESAYSIHPGSTKMYQDIKAYFWWAGMKRDVAEYVALCDVCQRVKAEHQKPAGLLQPLPIPEWKWEEIGMDFITGLPRTPSGYDSIWVIVDRLTKSAHFVPVKTTFDGKKLAELYMTRVVCRFGCPKKIVSDRGTQFTSRFWNQLHEALGTDLNFSTAYHPQTDGQTERVNQVLEDMLRACALDFEGTWDRCLPYAEFSYNNSYQASIQMSPNEAMFGRKCRTPLCWNEAGEALVFGPDILKTAEEQVKLIRERLKTAQNGQKNYADNRRRDLEFEKGDHVYLRVSPLRGMKRFGMSGKLAPRYIGPYLITARRGEVAYQLELPEGLADVHNVFHVSQLKKCLRVPEEQVPLGNIELEKNLTYKKRPIKVLEEAERQTRRKTIKFYKVQWSNHSEDEATWEQEDLLRAEFPELLP

SEQ ID NO: 20411 - protein, 1545 aa, Oryza sativa
  Clone ID: TF_OSC400773j.C1.p127.fg
MAVNASFSSHGFGEGHHVAQLRDLARFLGFSCPEYTGYSVDRVPPHCELSVYLYPRGGIHGAGLRPHHFTVARPTLQIAYQDLSWTALRRLAHDYSHRLGGSAFRQLPRLPSGHADARYPCPYSESQPVLTRMVELSEAQATQHDLLLEAYRSLARRYAALEARLAEEGVTSVDTISWDSGRLCRASHLSSHSSSGSARTPSGPRSPSSRAPYSPVYSPYPHPVSPSYTPGHTPVASSRRGPRFIRTARKRVVGSSTVFRFHYPAPPPPAPRAAAGPRQLRGPAVDWWENYCNAHPEPTNIAWDEFATAFRAAHVPESTIDMKKEEFNRLKQGNSNVNEYLSMFNKLARYAPEEVDTDKKKIRKFLKGIAVGMRLQLLAPDFPTFQHMINKALLLEDARKEATKEYKKRKSNHQGNSSRGAPRPRYGQPMQYHQSVTQANRQPGYTPRPQMNRPAPQPQQRAPSGNPAPNSVTSFKSPQGPSAVQCFRCNQMGHYARQCPQNPINTNSGHANGSTARTSTPAAAQSRPSSQASGQGSRASNNFGRGRVNHIQAETAQDAPDVVMGMFFVNSIPTIVLFDSGASHSFISQAFVKRNGWKTQNLRVPMIVHSPGRNIRATQICPEVNLRIEEVDFLAKPIVLDSQSLDIILGMDWLAKHKGQIDCAEKSITLQGPGGKQVRFTSNTPTASRSILTCLQVTTLESVPIVCEYPDVFPEELTGMPPDREVEFAIELAPGTAPIAKRPYRMAANELAEVKRQTEELESKGYFVVVFIDNILIYSKNEEEHAEHLRMIIEKLRDHQLYAKFLKCEFWLDRVAFLGHVISSNGVEVDPSKVEAVLAWNPPKNVSEIRSFLGLAGYYRRFIEGFSKLARPMTELLKKEKKFQWTAACEDSFQEMKKRLTTAPVLTLPDIQKDFEIFCDASRQGLGCVLMQERKVVAYASRQLRPHEVNYPTHDLELAAVVHALKIWRHYLIGNRCEVYTDHKSLKYIFTQTELNMRQRRWLELIKDYDLGIHYHPGKANVVADALSRKAYCNIAQIRPDQDRLCREMEKLRLTVVQSGVPASLTVQPTLESQIREAQKDDEGIRELIKRIQEKKDTNFSIDDQGTVWCGPRICVPAKKELRDLILKEAHESAYSIHLGSTKMYQDIKAYFWWAGMKRDVAEYVALCDICQRVKAEHQRPAGLLQPLPIPEWKWEEIGMDFITGLPRTPSGYDSIWVIVDRLTKSAHFVPVKTTFDGKKLVELYMTHVVCRFGCPKKIVSDRGTQFTSRFWKQLHEALGTDLNFSTAYHPQTDGQTERVNQILEDMLRACALDFEGTWDRCLPYAEFSYNNSYQASIQMSPNEAMFGRKCRTPLCWNEVGEALVFGPDILKAAEEQVKLIRERLKTAQNRQKNYADNRRRDLEFKKGDHVYLRVSPLRGMRRFGMSGKLAPRYIGPYLITARCGEVAYQLELPEGLADVHNVFHVSQLKKCLRVPEEQVPLGNIKLEKNLTYKERPIKVLEEAERQTRRKTTKFYKVQWSNHSEDKATWEREDLLRAEFPELLN

SEQ ID NO: 20412 - protein, 1542 aa, Oryza sativa
  Clone ID: TF_OSC400964j.C1.p53.fg
MAVNASFSSHGFGEGHHVAQLRDLARFLGFSCPEYTGYSVGRVPPHCELSVYLYPRGGIHGAGLAHTTSLWPGPLSRSRTRTSPGLRFVAWPTTTATVSGAPPSGSFHAFLLATQTPARAPARFGFEDGRAEPEVNHEQSPHSNRSHRTASRNAEVEQPRRSNRSHRTASCDAEMEQSHRSHHTASHNSGEERLPSPPHVENNMQHLMAVQTQILQGLAAAVAGFQHNAHGNGHPHMSNNRSKLTDFLRSRPPEFSQTVEPVEADDWLKDVDRKFNLVQCTPVEKTLYASHQLRGPAADWWENYCNAHPEPTNIAWDEFATAFRAAHVPESTIDMKKEEFNRLKQGNSNVNEYLSQFNKLARYAPEEVDTDKKKIRKFLKGIAVGMRLQLLAHDFPTFQHMINKALLLEDARKEATEEYKKRKSNHQGNSSRGAPRPRYGQPMQYHQSVTQANRQPGYAPRPQMNRPAPQPQQRAPSGNTAPNSVTSFKSPQGPSAVQCFRCNQMGHYARQCPQNPTNTSSGHANGSTARTPTPAAAQSRPSSQASGQGSHASNNFGRGRVNHIQAETAQDAPDVVMGMFSVNSIPAIVLFDSGASHSFISQAFVKRNGWKTQNLRVPMIVHSPGRDIRATQICPEVNLRIEEVDFLAKPIVLDSQSLDIILGMDWLAKHKGQIDCAEKSITLQGPGGKQVRFTSNSPTASRSILTCLQVTSLESVPIVCEYPDVFPEELTSMPPDREIEFAIELAPGTAPIAKRPYRMAANELAEVKRQIEELESKGYVRPSSSPWGAPVLLVKKKDGSERMFVVVFIDDILIYSKNEEEHAEHLRLIMEKLRDHQLFAKFLKCEFWLDRVAFLGHVISSNGVEVDPSKVEAVLAWNPPKNVSEIRSFLGLAGYYRRFIEGFSKLARPMTELLKKEKKFQWSAACEDSFQEMKKRLTTAPVLTLPDIRKDFEIFCDASRQGLECVLMQERKVVAYASRQLRPHEVNYPTHDLELAAVVHALKIWRHYLIGNRCEVYTDHKSLKYIFTQTELNMRQRRWLELIKDYDLGIHYHPCKANVVADALSRKAYCNVARIRPDQDRLCRELEKLRLTVVQSGVPASLTVQPTLESQIREAQKNDEGIKELIKRIQEKKDTNFSIDDQGTVWCGPRICVPAKKELRDLILKEAHESAYSIHPGSTKMYQDIKAYFWWAGMKRDVAEYVALCDICQRVKAEHQRPAGLLQPLPIPEWKWEEIGMDFITGLPRTPSGYDSIWVIVDQLTKPAHFVPVKTTYDGKKLAELYMTHVVCRFGCPKKIVSDRGTQFTSRFWKQLHEALGTDLNFSTAYHPQTDGQTERMSPNEAMFGRKCRTPLCWNEVGEALVFGPDILKAAEEQVKLIREHLKTAQNRQKNYADNRRRDLKFEKGDHVYLRVSPLRGMRRFGMSGKLAPRYIGPYLITARRGEVAYQLELPEGLADVHNVFHVSQLKKCLRVPEEQVPLGNIELEKNLTYKGRPIKVLEEAERQTRRKTIKFYKVQWSNHSEDEATWEREDLLHAEFPELLP

SEQ ID NO: 20413 - protein, 1681 aa, Oryza sativa
  Clone ID: TF_OSC400966j.C1.p1.fg
MGGMGDMWIHRGGVWEDPWASWHSMVWDLTCCWSGTPLVGIWPTLQIAYQDLSWTALRRLAHDYSHRLGGSAFRQLPRLPSGHSDARYPCPYSESQPVLTRMVELSEAQATQHDLLLEAYRSLARRYAALEARLAEEGVTSVDTISWDSGRPCHASHLSSHSSRGSARTPSGPRSPSSRAPYSPVYSPYPHPVSPSYTPGHTPVASSRRGPRFIRTARKRVVGSSTVFHFHYPAPLPPAARAAAGPRQMASRPRRAARAPARFGFEDGRAEPEVNHEQSPHSNRSHRTASRNAEVEQPRRSNRSHRTASCDAEMEQSHRSHHTASHNSGEERLPSPPHVENNMQHLMAVQTQILQGLAAAVAGFQHNAHGNGHPHMSNNRSKLTDFLRSRPPEFSQTVEPVEADDWLKDVDRKFNLVQCTPVEKTLYASHQLRGPAADWWENYCNAHPEPTNIAWDEFATAFRAAHVPESTIDMKKEEFNRLKQGNSNVNEYLSQFNKLARYAPEEVDTDKKKIRKFLKGIAVGMRLQLLAHDFPTFQHMINKALLLEDARKEATEEYKKRKSNHQGNSSRGAPRPRYGQPMQYHQSVTQANRQPGYAPRPQMNRPAPQPQQRAPSGNTAPNSVTSFKSPQGPSAVQCFRCNQMGHYARQCPQNPTNTSSGHANGSTARTPTPAAAQSRPSSQASGQGSHASNNFGRGRVNHIQAETAQDAPDVVMGMFSVNSIPAIVLFDSGASHSFISQAFVKRNGWKTQNLRVPMIVHSPGRDIRATQICPEVNLRIEEVDFLAKPIVLDSQSLDIILGMDWLAKHKGQIDCAEKSITLQGPGGKQVRFTSNSPTASRSILTCLQVTSLESVPIVCEYPDVFPEELTSMPPDREIEFAIELAPGTAPIAKRPYRMAANELAEVKRQIEELESKGYVRPSSSPWGAPVLLVKKKDGSERMFVVVFIDDILIYSKNEEEHAEHLRLIMEKLRDHQLFAKFLKCEFWLDRVAFLGHVISSNGVEVDPSKVEAVLAWNPPKNVSEIRSFLGLAGYYRRFIEGFSKLARPMTELLKKEKKFQWSAACEDSFQEMKKRLTTAPVLTLPDIRKDFEIFCDASRQGLECVLMQERKVVAYASRQLRPHEVNYPTHDLELAAVVHALKIWRHYLIGNRCEVYTDHKSLKYIFTQTELNMRQRRWLELIKDYDLGIHYHPCKANVVADALSRKAYCNVARIRPDQDRLCRELEKLRLTVVQSGVPASLTVQPTLESQIREAQKNDEGIKELIKRIQEKKDTNFSIDDQGTVWCGPRICVPAKKELRDLILKEAHESAYSIHPGSTKMYQDIKAYFWWAGMKRDVAEYVALCDICQRVKAEHQRPAGLLQPLPIPEWKWEEIGMDFITGLPRTPSGYDSIWVIVDQLTKPAHFVPVKTTYDGKKLAELYMTHVVCRFGCPKKIVSDRGTQFTSRFWKQLHEALGTDLNFSTAYHPQTDGQTERMSPNEAMFGRKCRTPLCWNEVGEALVFGPDILKAAEEQVKLIREHLKTAQNRQKNYADNRRRDLKFEKGDHVYLRVSPLRGMRRFGMSGKLAPRYIGPYLITARRGEVAYQLELPEGLADVHNVFHVSQLKKCLRVPEEQVPLGNIELEKNLTYKERPIKVLEEAERQTRRKTIKFYKVQWSNHSEDEATWEREDLLHAEFPELLP

SEQ ID NO: 20414 - protein, 1763 aa, Oryza sativa
  Clone ID: TF_OSC400993j.C1.p80.fg
MAVNASFSSHGFGEGHHVAQLRDLARFLGFSCPEYTGYSVDRVPPRCELSVYLYPRGGIHGAGLRPHHFTVARPTLQIAYQDLSCRDREKYIFPKASVLIPVPGKAGTEPQTKPYPLDMWKYGSALQQRPELNPYIGRGATSHNWHAPKPHRKTGFRGFERGREGGTMNRVPTSWDFVYPRVNKVDGDDEKAAGAEEGGGAARVDGDGGAPTIDERNGGVDEVGEDAAKPKEAAPRWEVVQGDDVGGPELGGDGGERERRRELDSAEEEGRREAETDGGGRDISWTTLRRLAHDYSHRLGGSAFRQLPRLPSGQADARYPCPYSESQPVLTRMVELSEAQATQHDLLLEAYHSLARRYAALEARLAEEGVTSVDTVSWDSGRLCHASHLSSHSSRGSARTPSGPRSPSSRAPYSPVYSPYPHPVSPSYTPGHTPVASSRRGPRFIRTARKRVVGSSTVFRFDYPAPPPPAARAAAGPRQMASRPRRAAHAPARFGFEEGRVVTEANHESANEQSHHSNSSHRTASRNAEVEQPRRSNRSHHTASHNAEVEQSHRSHRTASHNSGEERLPSPPHVENNMQYLMAVQTQILQGLAAAIAGFQHSAHGNGHPHMGNNRSKLTDFLRSRPPEFSQTVEPVEADDWLKDIDRKLNLVQCTPVEKTLYASHQLRGPAADWWENYCNAHPEPTNIAWDEFATAFRAAHVPESTIDMKKEEFNKLKQGNNSVNEYLSLFNKLARYAPEEVDTDKKKIRKFLKGIAVGMRLQLLAHDFLTFQHMINKALLLEDARKEATEEYKKRKSPLGPSAVQCFRCNQMGHYARQCPQNPTNTNSGHANGSTARTPTPAAAQSRPSSQASGQGSRPSNNFGRGRVNHIQAETAQDAPDVVMEELTSMPPDREIEFAIELAPGTAPIAKRPYRMAANELAEVKRQIEELESKGYVRPSSSPWGAPVLLVKKKDGSERMVIDYRALNEVTIKNKYPLPRIDDLFDQLKGARVFSKIDLRSGYHQLKIRSEDIPKTAFSTRMFVVVFIDDILIYSKNEEEHAEHLRLIMEKLRDHQLFAKFSKCEFWLNRVAFLGHVISSNGVEVYPSKVEAVLAWNPPKNVSEIRSFLGLAGYYRRFIEGFSKLARPMTELLKKEKKFQWSAACEDSFQEMKKRLTTAPVLTLPDIRKDFKIFCDASRQSLGCVLMQKRRVVAYASRQLRPHEVNYPTHDLELAAVVHALKIWRHYLIGNRCEVYTDHKSLKYIFTQTELNMRQRRWLELIKDYDLGIHYHPGKANVVADALSRKTYCNVAQIRPNQDRLCKELEKLRLTVVQSGVPASLTVQPTLESQIREAQKDDEGIKELIKKIREKKDTDFSIDDQGTVWCGPRICVPAKKDLRDLILKEAHESAYSIHPGSTKMYQDIKAYFWWAGMKRDVAEYVALCDICQRVKAEHQRPAGLLQPLPIPEWKWEEIGMDFITGLPRTPSGYDSIWVIVDRLTKSAHFVPVKTTFDGKKLAELYMTHVVCRFGCPKKIVSDRGTQFTSRFWKQLHEALGTDLNFSTAYHPQTDGQTERVNQILEDMLRACALDFEGTWDRCLPYAEFSYNNSYQASIQMSPNEAMFGRKCRTPLCWNEVGEALVFGPDILKAAEEQVKLIRERLKTAQNSQKNYADNRRRDLEFEKGDHVYLRVSPLRDVHNVFHVSQLKKCLRVPEEQVPLGNIELEKNLTYKERPIKVLEEAERQTRRKTVKFYKVKWSNHSEDEATWEREDLLRAEFPELLP

SEQ ID NO: 20415 - protein, 1787 aa, Oryza sativa
  Clone ID: TF_OSC401121j.C1.p38.fg
MAVNASFSSHGFGEGHHVAQLRDLARFLGFSCPEYTGYSVDRVPPHCELSVYLYPRGGIHGAGLRPHHFTVARPTLQIAYQDLSWTALRRLAHDYSHRLGGSAFRQLPRLPSGHSDARYPCPYSESQPVLTRMVELSEAQATQHDLLLEAYRSLARRYAALEARLAEEGVTSVDTVSWDSGRLCHASHLSSHSSRGSARTPSGPRSPSSRAPYSPVYSPYPHPVSPSYTPGHTPVASSRRGPRFIRTARKRVVGSSTVFRFHYPAPPPPAARAAAGPRQMASRPRRAARAPARFGFENGRVEPEENHESANEQSHHSNRSHRTASRNAEVEQPRRSSRSHRTVSRNAEMEQSHRSHRTASHNSGEERLPSPPHVENNMQHLMAVQTQILQGLAAAVAGFQHNAHGNGHPHMSNNRSKLTDFLRSRPPEFSQTVEPVEADDWLKDVDRKLNLVQCTPVEKTLYASHQLRGPAADWWENYCNAHPEPTNIAWDEFATAFRAAHVPESTIDMKKEEFNRLKQGNSSVNEYLSMFNKLARYAPEEVGTDKKKIRKFLKGIAVGMRLQLLAHDFPTFQHMINKALLLEDARKEATEEYKKRKSNHQGNSSRGAPCPRYGQPMQYHQSVTQANRQPGYAPRPQMNRPAPQPQQRAPSGNTAPNSVTSFKSPQGPSAVQCFRCNQMGHYARQCPQNPTNTSLGHANGSTARTPTPAAAQSRPSSQASGQGSRASNNFGRGRVNHIQAETAQDAPDVVMGMFSVNSIPAIVLFDSGASHSFISQAFVKRNGWKTQNLRVPMIVHSPGRNIRATQVCPEVNLRIEEVDFLAKPIVLDSQSLDIILGMDWLAKHKGQIDCAEKTITLQGPGGKQVRFTSNTPTASRSILTCLQVTSLESVPIVCEYPDVFPEKLTSMPPDREIEFAIELAPSTAPIAKRPYRMAANELAEVKRQIEELESKGYVRPSSSPWGAPVLLVKKKDGSERMVIDYRALNEVTIKNKYPLPRIDDLFDQLKGARVFSKIDLRSGYHQFKIRSEDIPKTAFSTRYGLYEFTVMSFGLTNAPAFFMNLMNKIFMEYLDQFVVVFIDDILIYSKNEEEHAEHLRLIMEKLRDHQLFAKFSKCKFWLDRVAFLGHVISSNGVEVDPSKVEAVLAWNPPKNVSEIRSFLGLAGYYRRFIEGFSKLARPMSELLKKGKKFQWSAACEHSFQEMKKRLTTAPVLTLPDIRKDFEIFCDASRQGVGCVLMQERKVVAYASRQLRPHEVNYPTHDLELAAVVHALKIWRHYLIGNRCEVYTDHKSLKYIFTQTELNMRQRRWLELIEDYDLGIHYHPGKANVVADALSRKAYCNVAQIRPDQDRLCRELEKLRLTMELRDLILKEAHESAYSIHPGSTKMYQDIKAYFWWAGMKRDVAEYVALCDICQRVKAEHQRPAGMLQPLPIPEWKWEEIGMDFITGLPRTPSGYDSIWVIVDRLTKSAHFVPVKTTYDGKKLAELYMTHVVCRFGCPKKIVSDRGTQFTSRFWKQLHEALGTDLNFSTAYHPQTDGQTERVNQILEDMLRACALDFEGTWDRCLPYAEFSYNNSYQASIQMSPNEAMFGRKCRTPLCWNEAGEALVFGPDILKTAEEQVKLIRERLKTAQNRQKNLADNRRRDLEFEKGDHVYLRVSPLRGMKRFGMSGKLAPRYIGPYLITARRGEVAYQLELPEGLADVHNVFHVSQLKKCLRVPEEQVPLGNIVLEKNLTYKERPIKVLEEAERQTRRKTIKFYKVQWSNHSEDEATWEREDLLRAEFPELLP

SEQ ID NO: 20416 - protein, 852 aa, Oryza sativa
  unsure (1)..(852): unsure at all Xaa locations
  Clone ID: TF_OSC401123j.C1.p15.np
MTVLLLYNKETSVAVIFCLPVIPALFPGTGIDXQMAVNASFSSHGFGEGHHVAQLRDLARFLGFSCPEYTGYSVDRVPPHCELSVYLYPRGGIHGAGLRPHHFTVARPTLQIAHRLGGSAFRQLPRLPSHRLGGSAFRQLPRLPSGHSDARYPCPYSESQPVLTRMVELSEAQATQHDLLLEAYRSLARRYAALEARLAEEGVTSVDTVSWDSGRLCHASHLSSHSSRGSARTPSGPRSPSSRAPYSPVYSPYPHPVSPSYTPGHTPVASSRRGPRFIRTARKRVVGSSTVFRFHYPAPPPPAARAAAGPRQVPPVPSRQPIDVSSTEEPTTGARFGFENGRVEPEENHESANEQSHHSNRSHRTASRNAEVEQPRRSSRSHRTVSRNAEMEQSHRSHRTASHNSGEERLPSPPHVENNMQHLMAVQTQILQGLAAAVAGFQHNAHGNGHPHMSNNRSKLTDFLRSRPPEFSQTVEPVEADDWLKDVDRKLNLVQCTPVEKTLYASHQLRGPAADWWENYCNAHPEPTNIAWDEFATAFRAAHVPESTIDMKKEEFNRLKQGNSSVNEYLSMFNKLARYAPEEVGTDKKKIRKFLKGIAALLLEDARKEATEEYKKRKSNHQGNSSRGAPCPRYGQPMQYHQSVTQANRQPGYAPRPQMNRPAPQPQQRAPSGNTAPNSVTSFKSPQGPSAVQCFRCNQMGHYARQCPQNPTNTSLGHANGSTARTPTPAAAQSRPSSQASGQGSRASNNFGRGRVNHIQAETAQDAPDVVMGMFSVNSIPAIVLFDSGASHSFISQAFVKRNGWKTQNLRVPMIVHSPGRNIRATQVCPEVNLRIEEVDFLAKPIVLDSQS

SEQ ID NO: 20417 - protein, 1848 aa, Oryza sativa
  Clone ID: TF_OSC401138j.C1.p20.fg
MAVNASFSSHGFGEGHHVAQLRDLSRFLGFSCPEYTGYSVDRVPPHCELSVYLYPRGGIHGAGLRPHHFTVARPTLQIAYQDLSWTALRRLAHDYSHRLGGSAFRQLPRLPSGHSDARYPCPYSESQPVLTRMVELSEAQATQHDLLLEAYRSLARRYAALEARLAEEGVTSVDTISWDSGRLCHASHLSSHSSRGSARTPSGPRSPSSRAPYSPVYSPYPHPVSPSYTPGHTPVASSRRGPRFIRTARKRVVGSSTVFRFHYPAPPPSAARAAAGPRQMASRPRHAARAPARFGFEDGRVEAEANHESANEQSHHSNRSHRTVSRNAEVEQPRRSSRSHRTVSRDAKMEQSHRTASHNSGEERLPSPSHVETNMQHIMAVQTQILQGLTTAIASFQHNAHGNGHPHVGNNRSKLTDFLRSRPPEFSQTVEPVEADDWLKDVDRKLNLVQCTPVEKTLYASHQLRGPAADWWENYCNAHPEPTNIAWDEFATAFRAAHVPESTIDMKKEEFNRLKQGNSSVNEYLSQFNKLARYAPEEIDTDKKKIRKFLKGIAVGMRLQLLAHDFPTFQHMINKALLLEDARKEATEEYKKRKSNHQGNSSRGAPRPRYGQPMQYHQSVTQANRQPSYAPRPQINRPAPQPQQRAPSGNTAPNSVTSFKSPQGPSAVQCFRCNQMGHYARQCPQNPTNTNSGHANGSTARTPTPAAAQSRPSSQASGQGSRASNHFGRGRVNHIQAETAQDAPDVVMGMFSVNSVPAIVLFDSGASHSFISQAFVKRNGWKTQNLRVPMIVHSPGRNIRATQICPEVNLRIEEVDFLAKPIVLDSQSLDIILGMDWLAKHKGQIDCAEKSITLQGPGGKQVRFTPNTPTASRSILTCLQVTSLESVPIVCEYPDVFPEELTRMPPDREVEFAIELAPGTAPIAKRPYRMAANELAEVKRQIEELESKGYVRPSSSPWGAPVLLVKKKDGSERMVIDYRALNEVTIKNKYPLPRIDDLFDQLKGARVFSKIDLRSGYHQLKIRSEDIPKTAFSTRYGLYEFTVMSFGLTNAPAFFMNLMNKIFMEYMDQFVVVFIDDILIYSKNEEEHAEHLRLIMEKLRDHQLFAKFSKCEFWLDRVAFLGHVISSNGVEVDPSKVEAVLAWNPPKNVSEIRSFLGLAGYYRRFIEGFSKLARPMTELLKKEKKFQWSAACEDSFQEMKKRLTTAPVLTLPDIRKDFEIFCDASRQGLGCVLMQERKVVAYASRQLRPHEVNYPTHDLELAAVVHALKIWRHYLIGNRCEVYTDHKSLKYIFTQTELNMRQRRWLELIKDYDLGIHYHPGKANVVADALSRKAYCNVAQIRPDQDHLCRELEKLRLTVVQSGVPASLTVQPTLESQIREAQKDDEGIKELIKRIQEKKDTNFSIDDQGTVWCGPRICVPAKKELRDLILKEAHESAYSIHPGSTKMYQDIKAYFWWAGMKRDVAEYVALCDICQRVKAEHQRPAGLLQPLPIPEWKWEEIGMDFITGLPRTPSGYNSVWVIVDRLTKSAHFVPVKTTYDGKRLAELYMTHVVCRFGCPKKIVSDRGTQFTSRFWKQLHEALGTDLNFSTAYHPQTDGQTERVNQILEDMLRACALDFEGTWDRCLPYAEFSYNNSYQASIKMSPNEAMFGRKCRTPLCWNEVGEALVFGPDILKSAEEQVKLIRERLKTAQSRQKNYADNRRRDLEFEKGDHVYLRVSPLRGMRRFGMSGKLAARYIGPYLITARRGEVAYQLELPEGLADVHNVFHVSQLKKCLRVPEEQVPLGNIELEKNLTYKERPFKVLEEAERQTRRKIIKFYKVQWSNHSEDEATWEREDLLRAEFPELLP

SEQ ID NO: 20418 - protein, 1571 aa, Oryza sativa
  Clone ID: TF_OSC401196j.C1.p71.fg
MASRPRRAARAPARFGFEDGRVEPEENHESANEQSRRSNRSHRTASRNAEVEQPRRGSRSHRAVSRDAEMEQSHRSHRTASHNSGEERLPSPPHVENNMQHIMAVQTQILQGLTTAIASFQHNAHGNGHPHVGNNRSKLTDFLRSRPPEFSQTVEPVEADDWLKDVDRKLNLVQCTPVEKTLYASHQLRGPAADWWENYCNAHPEPTNIAWDEFATAFRAAHVPESTIDMKKEEFNRLKQGNSSVNEYLSQFNKLARYAPEEVDTDKKKIRKFLKRIAVGMRLQLLAHDFPTFQHMINKALLLEDARKEATEEYKKRKSNHQGNSSRGTPRPRYGQPMQYHQSVTQANRQPGYAPRPQMNRPTPPPQQCAPSGNTAPNSVTSFNSPQGPSVVQCFRCNQMGHYARQCPQNPTNTNLGHANGSIAKTPTPAAAQSRPSSQASGQGSRASNHFGRGRVNHIQAETAQDAPDVVMGMFSVNSVPAIVLFDSGASHSFISQAFVKRNGWKTQNLRVPMIVHSPGRNIRATQICPEVNLKIEEVDFLAKPIVLDSQSLDIILGMDWLAKHKGQIDCAEKSITLQGPGGKQVRFTPNTPTASRSILTSLQVTSLESVPIVCEYPDVFPEELTSMPPDREIEFAIELAPGTAPIAKRPYRMAANELAEVKRQIEELESKGYVRPSSSPWGAPVLLVKKKDGSERMVIDYRALNEVTIKNKYPLPRIDDLFDQLKGARVFSKIDLRSGYHQLKIRSEDIPKTAFSTRYGLYEFTVMSFGLTNAPAFFMNLMNKIFMEYLDQFVVVFIDDILIYSKNEEEHAEHLRLIMEKLRDHQLFAKFSKWEFWLDRVAFLGHVISSNGVEVDPSKVEAVLAWNPPKNVSEIRSFLGLAGYYRRFIEGFSKLARPMTELLKKEKKFHWSTACEDSFQEMKKRLTTAPVLTLPDIRKDFEIFCDASRQGLGCVLMQERKVVAYASRQLRPHEVNYPTHDLELATVVHALKIWRHYLIGNRSNVVADALSRKAYCNIAQIRPDQDHLCRELEKLRLTVVQSGVPASLTVQPTLESQIREAQKDDEGIKELIKRIQEKKDTNFSIDDQGTVWCGPRICVPAKKELRDLILKEAHESAYSIHPGSTKMYQDIKAYFWWVGMKRDVTEYVALCDICQRVKAEHQRPAADSHDSASRLLPAKVEIGSLESHLGSPAEPAKGGLRGLPVRSPTLRHLPIPEWKWEEIGMDFITGLPRTPNGYDSIWVIVDRLTKSAHFVPVKTTYDGKKLAELYMTHVVCRFGCPKKIVSDRGTQFTSRFWKQLHEALGTDLNFSTAYHPQTDGQTERVNQILEDMLRACALDFEGTWDRCLPYAEFSYNNSYQASIQMSPNEAMFGRKCRTPLCWNEVGEALVFGPDILKSAEEQVKLIRERLKTAQNRHKNYTDNRRRDLEFEKGDHVYLRVSPLRGMRRFGMSGKLAPRYIGPYLITARRGEVAYQLELPEGLADVHNVFHVSQLKKCLRVPEEQVPLGNIELEKNLTYKERPIKVLEEAERQTRRKTIKFYKVQWSNHSEDEATWEREDLLRAEFPDLLP

SEQ ID NO: 20419 - protein, 1851 aa, Oryza sativa
  Clone ID: TF_OSC401200j.C1.p41.fg
MAVNASFSSHGFGEGHHVAQLRDLSRFLGFSCPEYTGYSVDRVPPHYELSVYLYPRGGIHGAGLRPHHFTVARPTLQIAYQDLSWTALRRLAHDYSHRLGGSAFRQLPRLPSGHSDARYPCPYSESQPVLTRMVELSEAQATQHDLLLEAYRSLARRYAALEARLAEEGVTSVDTISWDSGRLCHASHLSSHSSRGSARTPSGPRSPSSRAPYSPMYSPYPHPVSPSYTPGHTPVASSRRGPRFIRTARKRVVGSSTVFRFRHPAPPPPAARAAAGPRQMASHPRHAARAPARFGFEDGRVEPEENHESANEQSHHSNRSHHTVSRNAEIGQPRRSNRSHRTVSRDAEMGQSHRSHRTASHNSGEERLPSLPHVENNMQHIMTVQTQILQGLTTAIASFQHNAHGNGHPHVGNNRSKLTDFLRSRPPEFSQTVEPVEADDWLKDVDRKLNLVQCTPVEKTLYASHQLRGPAADWWENYCNAHPEPTNIAWDEFATAFRAAHVPESTIDMKKEEFNRLKQGNSSVNEYLSQFNKLARYAPEEVDTDKKKIRKFLKGIAVGMRLQLLAHDFPTFHHMINKALLLEDARKEATEEYKKRKSNHQGNSSRGAPRPRYGQPMQYHQSVTQANHQPGYAPRPQMNRPAPQPQQRAPSGNTAPNSVTSFKSPQGPSAVQCFRCNQMGHYARQCPQNPTNTNSGHANGSTARTPAPAAAQSRPSSQASGQGSRASNHFGRGRVNHIQAEIAQDAPDVVMGMFSVNSVPAIVLFDSGASHSFISQAFVKRNGWKTQNLRVPMIVHSPGRNIRATQICPEVNLRIEEVDFLAKPIVLDSQSLDIILGMDWLAKHKGQIDCAEKSITLQGPGGKQVRFTPNTPTASRSILTCLQVTSLESVPIVCEYPDVFPEELTRMPPDREIEFAIELAPGTAPIAKRPYRMAANELAEVKRQIEELESKGYVRPSSSPWGAPVLLVKKKDGSERMVIDYRALNEVTIKNKYPLPRIDDLFDQLKGARVFSKIDLRSGYHQLKIRSEDIPKTAFSTRYGLYEFTVMSFGLTNAPAFFMNLMNKIFMEYLDQFVVVFIDDILIYSKNEEEHAEHLRLIMEKLRDHQLFAKFSKCEFWLDRVAFLGHVISPNGVEVDPSKVEAVLAWNPPKNVSEIRSFLGLAGYYRRFIEGFSKLARPMTELLKKEKKFQWSVACEDSFQEMKKRLTTAPVLTLPDIRKDFEIFCDASRQGLGCVLMQERKVVAYASRQLRPHEVNYPTHDLELAAVVHALKIWRHYLIGNRCEVYTDHKSLKYIFTQTELNMRQRRWLELIKDYDLGIHYHPGKANVVADALSRKAYCNVAQIRPDQDHLCRELEKLRLTVVQSGVPASLTVQPTLESQIREAQKDDEGIKELIKRIQEKKDTNFSIDDQGTVWCGPRICVPAKKELRDLILKEAHESAYSIHPGSTKMYQDIKAYFWWAGMKRDVAEYVALCDICQRVKAEHQRPAGLLQPLPIPEWKWEEIGMDFITGLPRTPSGYDSIWVIVDRLTKSAHFVPVKTTYDGKKLAELYMTHVVCRFGCPKKIVSDRGTQFTSRFWKQLHEALGTDLNFSTAYHPQTDGQTERVNQILEDMLRACALDFEGTWDRCLPYAEFSYNNSYQASIQMSPNEAMFGRKCRTPLCWDEVGEALVFGPDILKSAEEQVKLIRERLKTAQNRQKNYADNRRRDLEFEKGDHVYLRVSPLRGMRRFGMSGKLAPRYIGPYLITARRGEVAYQLELPEGLADVHNVFHVSQLKKCLRVPEEQVPLGNIELEKNLTYKERPIKVLEEAERQTRRKTIKFYKVQWSNHSEDEATWEREDLLRAEFPDLLP

SEQ ID NO: 20420 - protein, 1851 aa, Oryza sativa
  Clone ID: TF_OSC401215j.C1.p49.fg
MAVNASFSSHGFGEGHHVAQLRDLARFLGFSCPEYTGYSVDRVPPHCELSVYLYPRGGIHGVGLRPHHFTVARPTLQIAYQDLSWTALRRLAHDYGHRLGGSAFRQLPRLPSGHADARYPCPYSESQPVLTRMVELSEAQATQHDLLLEAYRSLARRYAALEARLAEEGVTSVDTISWDSGRLCHASHLSSHSSRGSARTPSGPRSPSSRAPYSPVYSPYPHPVSPSYTPGHTPVASSRRGPRFIRTARKRVVGSSTVFRFRHPAPPPPAARAAAGPRQMASRPRRTARAPVRFGFEDGRVEAEANHEPANEHSHHSNRSHRTVSRNAEVEQPRRSSRSHRTVSREAELEQSHRSHRTASHNSGEERLPSPPHVENNMQHIMAVQTQILQGLTTAIASFQHNAHGNGHPHVGNNRSKLTDFLRSRPPEFSQTIEPVEADDWLKDVDRKLNLVQCTPVEKTLYASHQLRGPAADWWENYCNAHPEPTNIAWDEFATAFRVAHVPESTIDMKKEEFNRLKQGHSSVNEYLSQFNKLARYAPEEVDTDKKKIRKFLKGIAVGMRLQLLAHDFPTFQHMINKALLLEDARKEATEEYKKRKSNHQGNSSRGAPRPRYGQPMQYHQSVTQANRQSSYAPRPQMNRPAPPPQQRAPSGNTAPNSVTSFKSPQGPSAVQCFRCNQMGHYARQCPQNPTNTSPGHANGSTARTPTPAAAQSRPSSQASGQGSRASNHFGRGRVNHIQAETAQDAPDVVMGMFSVNSVPAIVLFDSGASHSFISQAFVKRNGWKTQNLRVPMIVHSPGRNIRATQICPEVNLRIEEVNFLAKPIVLDSQSLDIILGMDWLAKHKGQIDCAEKSITLQGPGGKQVRFTPNTPTASRSILTCLQVTSLESVPIVCEYPDVFPEELTRMPPDREIEFAIELAPGTAPIAKRPYRMAANELAEVKRQIEELESKGYVRPSSSPWGAPVLLVKKKDGSERMVIDYRALNEVTIKNKYPLPRIDDLFDQLKGARVFSKIDLRSGYHQLKIRSEDIPKTAFSTRYGLYEFTVMSFGLTNAPAFFMNLMNKIFMEYLDQFVVVFIDDILIYSKNEEEHAEHLRLIMEKLRDHQLFAKFSKCEFWLDRVAFLGHVISSNGVEVDPSKVEAVLAWNPPKNVSEIRSFLGLAGYYRRFIEGFSKLARPMTELLKKEKKFQWSTACEDSFQEMKKRLTTAPVLTLPDIRKDFEIFCDASRQGLGCVLMQERKVVAYASRQLRPHEVNYPTHDLELAAVIHALKIWRHYLIGNRCEVYTDHKSLKYIFTQTELNMRQRRWLELIKDYDLGIHYHPGKANVVADALSRKAYCNIAQIRPDQDHLCRELEKLRLTVVQSGVPASLTVQPTLESQIREAQKDDEGIKELIKRIQEKKDTNFSIDDQGTIWCGPRICVPAKKELRNLILKEAHESAYSIHPGSTKMYQDIKAYFWWAGMKRDVAEYVALCDICQRVKAEHQRPAGLLQPLPIPEWKWEEIGMDFITGLPRTPSGYDSIWVIVDRLTKSAHFVPVKTTYDGKKLAELYMTHVVCRFGCPKKIVSDRGTQFTSRFWKQLHEALGTDLNFSTAYHPQTDGQTERVNQILEDMLRACALDFEGTWDRCLPYAEFSYNNSYQASIQMSPNEAMFGRRCRTPLCWNEVGEALVFGPDILKSAEEQVKLIRERLRTAQNRQKNYADNRRRDLEFEKGDHVYLRVSPLRGMRRFGMSGKLAPRYIGPYLITARRGEVAYQLELPEGLADVHNVFHVSQLKKCLRVPEEQVPLGNIELEKNLTYKERPIKVLEEAERQTRRKTIKFYKVQWSNHSEDEATWEREDLLRAEFPELLP

SEQ ID NO: 20421 - protein, 1817 aa, Oryza sativa
  Clone ID: TF_OSC401237j.C1.p36.fg
MAVNASFSSHGFGEGHHVAQLRDLARFLGFSCPEYTGYSVDRVPPRCELSVYLYPRGGIHGAGLRPHHFTVARPTLQIACQDLSWTALRRLAYDYSHRLGGSAFRQLPRLPSGHANARYPCPYSEFQPVLTRMVELSEAQATQHDLLLEAYRSLARRYAALEARLAEEGVTSVDTVSWDSGRLYHASHLSSHSSRGSARTPSGLRSPSSRAPYSPVYSPYPHPVSPSYTPGHTPVASSHRGPRFIRTARKRVVGSSTVFRFDYPAPTPPAARAAVGPRQMASRPRRAARAPARFGFEEGRVEPEANHESANEQSHHSNRSHRTTSRNAEVEQPRRSNRSHHTASRNAEMEQSHRSHRTASHNSGEERLPSPPHVENNMQHLMAVQTQILQGLAAAVAGYQHNAHGNGHPHMGNNRSNLTDFLRSRPPEFSQTVEPVEADDWLKDVDRKLNLVQCTPVEKTLYASHQLKGPAADWWENYCNAHPEPTNIAWDEFATAFRAAHVPESTIDMKKEEFNRLKQGNNSVNEYLSMFNKLARYAPEEVDTDKKKIRKFLKGIAVGMRLQLLAHDFPTFQHMINKALLLEDARKEATEEYKKRKSNHQGNSSRGAPRPRYGQPMQYHQSVTQANRQPGYAPRPQMNRPAPQPQQRAPSGNTAPNSVTSFKSPLGPSAVQCFRCNQMGHYARQCPQNPTNTNSGHANGSTARTPTPAAAQSRPSSQASGQGSRASNNFGRGRVNHIQAETAQDAPDVVMGMFSVNSVPAIVLFDSEASHSFISQAFVKRNGWKTQNLRVPMIVHSPGRNIRATQICPEVNLRIEEVDFLAKPIVLDSQSLDIILGMDWLAKHKGQIDCAEKSITLQGPGGKQVRFTSNTPTASRSILTCLQVTSLESVPIVCEYPDVFPEELTSMPPDREIEFAIELAPGTAPIAKRPYRMAANELAEVKRQIEELESKGYVRPSSSPWGAPVLLVKKKDGCERMVIDYRALNEVTIKNKYPLPRIDDLFDQLKGARVFSKIDLRSGYHQLKIRSEDIPKTAFSTRYGLYEFTVMSFGLTNAPAFFMNIMNKIFMEYLDQFVVVFIDDILIYSKNEEEHAEHLRLIMEKLRDHQLFAKFSKCEFWLDRVAFLGHVISPNGVEVDPSKVEAVLAWNPPTNVSEIRSFLGLAGYYRRFIEGFSKLARPMTELLKKEKKFQWSTACEDSFQEMKKRFTTAPVLTLPDIRRDFEIFYDATRQGLGCVLMQERKVVAYASRQLRPHEVNYPTHDLELAAVVHALKIWRHYLIGNRCEVYTNHKSLKYIFTQTELNMRQRKWLELIKDYDLGIHYHPSKANVVTDALSRKAYCNVAQIRSYQDRLCRELEKLRLTVVQSGVPASLTVQPTLESQIREAQKDDEGIKELIKRIQEKNDTNFSIDDQGTVWCGPRICVPAKKELRDLILKEAHESAYSIHPGSTKMYQDIKAYFWWAGMKRDVAECVALCDICQRVKAEHQRPAGLLQPLPIPEWKWEEIGMDFITGLPRTPSGYNSIWVIVDRLTKSAHFVLVKTTFDGKKLAELYMTHVVCRFGCPKKIVSDRGTQFTSKFWKQLHEALGTDLNLLQPTIRRPMVRQKGYQASIQMSPNEAMFGRKCRTPLCWNEVGEALVFGPDVLKAAEEQVKLIRERLKTAQNRQKNYADNRRRDLEFEKGDHVYLRVSPLRGIRRFGMSGKLAPRYIGPYLITARRGEVAYQLELPEGLAYVHNVFHVSQLKKCLRVPEEQVPLGNIELEKNLTYKERLIKIFEEAERQTRRKTIKFYKVQWSNHSEDEATWEQEDLLRAEFPELLP

SEQ ID NO: 20422 - protein, 1562 aa, Oryza sativa
  Clone ID: TF_OSC401329j.C1.p28.fg
MAVNASFSSHGFGEGHHVAQLRDLARFLGFSCPEYTGYSVDRVPPHCELSVYLYPRGDARYPCPYSESQPVLTRMVELSEAQATQHDLLLEAYRSLARRYAALEACLAEEGVTSVDTISWDSGRLCHASHLSSHSSRGSARTPSGPRSPSSRAPYSPVYSPYPHPVSPSYTPGHTPVASSRRGPRFIRTARKRVVGSSTVFRFHYPAPPPLAMASRPRRTARAPARFGFEDGRVEPEANHESANEQSHHSNRSHRTVSRNAEVEQPRRSSRSHRTVSRDAEMEQSHRSHHTASHNSGEERLPSPPHVENNMQHLMAVQTQILQGLTTAIASFQHNAHGNGHPHMGNNRSKLTDFLRSRPPEFSQTVEPVEADDWLKDVDRKLNLVQCTPVEKTLYASHQLRGPAADWWENYCNAHLEPTNIAWDEFATAFRAAHVPESTIDMKKEEFNRLKQGNSSVNEYLSQFNKLARYAPEEVDTDKKKIRKFLKGIAVGMRLQLLAHDFPTFQHMINKALLLEDARKEATEEYKKRKSNHQGNSSRGAPRPRYGQPMQYHQSVTQANRQPGYAPRPQMNRPAPPPQQRAPSGNTAPNSVTSFKSPQGPSAVQCFRCNQMGHYARQCPQNPTNTNSGHANGSTARTPTPAAAQSRPSSQASGQGSRASNNFGRGRVNHIQAETAQDAPDVVMGPGGKQIRFTPNTPTASRSILTCLQVTSLESVPIVCAYPDVFPEELTRMPPDREIEFAIELALGTAPIAKRPYRMAANELAEVKRQIEELESKGYVRPSSSPWGAPVLLVKKKDGSERMVIDYRALNEVTIKNKYPLPRIDDLFDQLKGARVFSKIDLRSGYHQLKIRSEDIPKTAFSTRYGLYEFTFVVVFIDDILIYPKNVSEIRSFLGLAGYYRRFIKGFSKLARPMTELLKKEKKFQWSAACEDSFQEMKKRLTTAPVLTLPDIRKDFEIFCDASRQGLGCVLMQERKVVAYASRQLRPHEVNYPTHDLELAAVVHALKIWRHYLIGNRCEVYTDHKSLKYIFTQTELNMRQRRWLELIKDYDLGIHYHPGKANVVADALSRKAYCNVAQIRPDQDHLCRELEKLRLTMVQSGVPASLTVQPTLESQIREAQKDDEGIKELIKRIQEKKDTNFSIDDQGTVWCGPRIYVPAKKELRDLILKEAHESAYSIHPGSTKMYQDIKAYFWWAGMKRDVAEYVALCDICQRVKAEHQRPAGLLQPLPIPEWKWEEIGMDFITGLPRTPSGYDSIWVIVDRLTKSAHFVLVKTTYDGKKLAELYMTHVVCRFGCPKKIVSDRGTQFTSRFWKQLHEALGTDLNFSTAYHPQTDGQTERVNQILEDMLRACALDFEGTWDRCLPYAEFSYNNSYQASIQMSPNEAMFGRKCRTPLCWNEVGEALVFGPDILKSAEEQVKLIRERLKTAQNRQKNYADNRRRDLEFEKGDHVYLRVSPLHGMRRFGMSGKLAPRYIGPYLITARRGEVAYQLELPEGLADVHNVFHVSQLKKCLRIPEEQVPLVSEPEDPQCEDFEDQAPDLEQGKPPLNILNLYLKFNYVA

SEQ ID NO: 20423 - protein, 1529 aa, Oryza sativa
  unsure (1)..(1529): unsure at all Xaa locations
  Clone ID: TF_OSC401436j.C1.p1.np
MTVLLLYNKETSVAVIFCLPVIPALFPGTGIDXQMAVNASFSSHGFGEGHHVAQLRDLARFLGFSCPEYTGYSVDRVPPHCELSVYLYPRGGIHGAGLRPHHFTVARPTLQIAHHLGGFAFRQLPRLPHHLGGFAFRQLPRLPSGHSDARYPCPYSESQPVLTRMVELSEAQATQHDLLLEAYRSLARRYARLCHGSHLSSHSSRGSARTPSGPRSPSSRAPYSPVYSPYPHPVSPSYTPGHTPVASSRRGPRFIRTARKRVVGSSTVFRFHYPAPPPPAARAAVGPRQVPPVPSRQPIDISSTEEPTTGARFGFEDGRAEPEANHEQSHHSNRSHRTASRNAEVEQPRRSNRSHRTASCDVEMEQSHRSHRTASHNSGEERLPSPPHVENNMQHLMAVXTQILQGLAAAVAGFQHTAHGNGHRHMSNNRSKLTDFLRSRPPEFSQTVEPVEADDWLKDVDRKLNLVQCTPVEKTLYASHQLRGPAADWWENYCNAHPEPTNIAWDEFATSFRAAHVPESTIDMKKVEFNRLKQGNSSVNEYLSMFNNLARYAPEEVDTDKKKIRKFVKGIAALLLEDARKEATEEYKKRALLLEDARKEATEEYKKRNSNHQGNSSRGAPRPHYGQPMQYHQSVTQANRQPGYAPRPQMNCPAPQPQQRAPSGNTAPNSVTSFKSPQGPSAVQCFRCNQMGHYARQCPQNPTNTSSGHANGSTARTPTPAAAQSRPSSQASGQGSRVSNNLGRGRVNHIQAETAQDAPDVVMGMFSVNSIPAIVLFDSGASHSFISQAFVKRNGWKTQNLRVPMIVHSPGRDIRATQICLEVNLRIEEVDFLAKPIVLDSQSLDIILGMDWLAKHKGQIDCAEKSITLQGPGGKQVRFTPNTPTASRSILTCLQVTSLESVPIVCEYPDVFPEELTSMPPDREIEFAIELAPGTAPIAKRPYRMAANELVEVKRQIEELESKGYVRPSSSPWGAPVLLVKKKDGSERMLKIRSEDIPKTAFSTRYGLYEFTEMSFGLTNAPAFFMNLMNKIFMEYLDQFVVVFIDDILIYSKNEEEHAEHLRLIMEKLRDHQLFAKFSKCEFWLDRVAFLGHVISSNGVEVDPSKVEAVLAWNPPKNVSEIRSFLGLVGYYRRFIEEFSKLARPMTELLKKEKKFQWSAACEDSFQEMKKRLTTAPVLTLPDIRKDFEIFCDASRQGLGCVLMQERKVVAYASRQLRPHEVNYPTHDLELAAVVHALKIWRHYLIGNRCEVYTDHKSLKYIFTQTELNMRQRRWLELIKDYDLGIHYHPGKANVVADALSRKAYCNVAQIRPDQDRLCRELEKLRLTVVQSGVPASLTVQPTLESQIREAQKDDEGIKELIKRIQEKKDTNFSIDDQGTVWCGPRICVPAKKELRDLILKEAHESAYSIHPGSTKMYQDIKAYFWWAGMKRDVAEYVALCDICQRVKAEHQRPAGLLQPLPIPEWKWEEIGMDFITGLPRTPSGYDSIWVIVDRLTKLAHFVPVKTTWEREDLLRAEFPHIIFVFKFS

SEQ ID NO: 20424 - protein, 1799 aa, Oryza sativa
  Clone ID: TF_OSC401685j.C1.p111.fg
MAVNASFSSHGFGEGHHVAQLRDLARFLGFSCPEYTGYSVDRVPPHCELSVYLYPRGGIHGAGLRPHHFTVARPTLQIAYQDLSWTALRRLAHDYSHRLGGSAFRQFPRLPSGHSDARYPCPYSESQPVLTHMVELSEAQATQHDLLLEAYRSLARRYAALEARLAEEGVTSVDTISWDSGRLCHASHLSSHSSRGSARTPSGPRSPSSRAPYSPVYSPYPHPVSPSYTPGHTPVASSRRGPRFIRTARKRVVGSSTVFRFHYPAPPPPAARAAAGPRQMASRPRRAARAPARFGFEDGRVEAEANHESANEQSHHSNRSHRTVSRNAEVEQPRRSNCSHRTVSRDAEMEQSHRSYRTASHNSGEERLPSPPHVENNMQHLMAVQTQILQGLTTAIASFQHNAHGNGHPHMGNNRSKLIDFLRSRPLEFSQTVEPVEADDWLKDVDRKLNLVQCTPVEKTLYASHQLRGPAADWWENYCNAHPEPTNIAWDEFATAFRAAHVPESTIDMKKEEFNRLKQGNSSVNEYLSQFNKLARYAPEEVDTDKKKIRKFLKGAPRPRYGQPMQYHQSVTQTNRQPGYAPRPQMNRPAPPPQQRAPSGNTAPNSVTSFKSPQGPSAVQCFRCNQMGHYARQCPQNPTNTNSGHANGSNARTPTPAAAQSRPSSQASGQGSRASNNFGRGRVNHIQAETAQDAPEVVMGMFSVNSVPAIVLFDSGASHSFISQAFVKRNGWKTQNLRVPMIVHSPGRNIRATQICPEVNLRIEEVDFLAKPIVLDSQSLDIILGMDWLAKHKGQIDCAEKSITLQGPGGKQVRFTPNTPTANRSILTCLQVTSLESVPIVCEYPDVFPEELTRMPPDREIEFAIELAPGTAPIAKRPYRMAANELAEVKRQIEELESKGYVRPSSSPWGAPVLLVKKKDGSERMVIDYRALNEVTIKNKYPLPRIDDLFDQLKGARVFSKIDLRSGYHQLKIRSEDIPKTAFSTRYGLYEFTVMSFGLTNAPAFFMNLMNKIFMEYLDQFVVVFIDDILIYSKNEKEHAEHLRLIMEKLRNHRLFTKFLKCEFWLDRVAFLGHVISSNGVEVDPSKVEAVLAWNPPKNVSEIRSFLGLAGYYRRFIEGFSKLARPMTELLKKEKKFQWSAACEDSFQEMKKRLTTAPVLTLPDIRKDFEIFCDASRQGLGCVLMQERKVVAYASRQLRPHEVNYPTHDLELAAVVHALKIWRHYLIGNRCEVYTDHKSLKYIFTQTELNMRQRRWLELIKDYDLGIHYHPGKANVVADALSRKAYCNIAQIRPDQDHLCKELEKLRVTVVQSGVPASLTVQPTLESQIREAQKDDEGIKELIKRIQEKKDTNFSIDDQGTVWCGPRICVPAKKELRDLILKEAHESAYSIHPGSTKMYQDIKAYFWWAGMKRDVAEYVALCDICQRVKAEHQRPAGLLQPLPIPEWKWEEVGMDFITGLPRTPSGYDSIWVIVDRLTKSAHFVPVKTTYDGKKLAELYMTHVVCRFGCPKKIVSDRGTQFTSRFWKQLHEALGTDLNFSTAYHPQTDGQTERVNQILEDMLRACALDFEGTWDRCLPYAEFSYNNSYQASIQMSPNEAMFGRKCRTPLCWNEVGEALVFGPDILKSAEEQVKLIRERLKTAQNRQKNYADNRRRDLEFEKGDHVYLRVSPLRGMRRFGMSGKLAPRYIGPYLITARRDEVAYQLELPEGLADVHNVFHVSQLKKCLRVPEEQVPLGNIDLEKNLTNKERPIKVLEEAERQTRRKTIKFYKVQWSNHSEDEATWEREDLLRAEFPELLP

SEQ ID NO: 20425 - protein, 1572 aa, Oryza sativa
  unsure (1)..(1572): unsure at all Xaa locations
  Clone ID: TF_OSC401686j.C1.p1.np
MASRPRRAARAPARFGVEDGRVEPEENHESANEQSHHSNRSHRTVSRNAEVEQPRRSSRSHRTVSRDAEMEQSHRSHRTASHNSGEERLPSPPHVETNMQHLMAVQTQILQGLTTAIASFQHNAHGNGHPHMGNNRSKLTDFLRSRPPEFSQTVEPVEADDWLKDVDRKLNLVQCTPVEKTLYASHQLRGPAADWWENYCNAHPEPTNIAWDEFATAFRAAHVPESTIDMKKEEFNRLKQGNSSINEYLSQFNKLARYAPEEVDTDKKKIRKFLKGIAVGMRLQLLAHDFPTFQHMINNALLLEDARKEATEEYKKRKSNHQGNSSRGAPRPRYGQPMQYHQSVTQANRQPGYAPRPQINRPAPQPQQRAPSGNTAPNSVTSFKSPXGPSAVQCFRCNQMGHYARQCPQNPTNTNSGHANGSTARTPTPAATQSRPSSQASGQGSRASNNFGRGRVNHIQAETAQDAPDVVMGMFSVNSVPAIVLFDSGASHSFISQAFVKRNGWKTQNLRVPMIVHSPGRNIRATQICPEVNLRIEEVDFLAKPIVLDSQSLDIILGMDWLAKHKGQIECAEKSITLQGPRGKQVRFTPNTPTASRSILTCLQVTSLESVPIVCEYPDVFPEELTRMPPDREIEFAIELAPGTAPIAKRPYRMAANELAEVKRQIEELESKGYVRPSSSPWGAPVLLVKKKDGSERMVIDYRALNEVTIKNKYPLPRIDDLFDQLKGARVFSKIDLRSGYHQLKIRSEDIPKTAFSTRYGLYEFTVMSFGLTNAPAFFMNLMNKIFMEYLDQFVVVFIDDILIYSKNEEEHAEHLRLIMEKLRDHQLFAKFSKCEFWLDRVAFLGHVISSNGVEVDPSKVEAVLAWNPPKNVSEIRSFLGLAGYYRRFIEGFSKLARPMTELLKKEKKFQWSAACEDSFQELKKRLTTAPVLTLLDIQKDFEIFCDASRQGLGCVLMQEQKVVAYASRQLRPHEANYPTHDLELAAVVHALKIWRHYLIGNRCEVYTDHKSLKYIFTQTELNMRQRRWLELIKDYDLGIHYHPGKANVVADALSRKAYCNVAQIRPDQDHLCGELEKLRLTVVQSGVPASLTVQPTLESRIREAQKDDEGIKELIKRIQEKKDTNFSIDDQGTVWCGPRICVPAKKELRDLILKEAHESAYSIHPGSTKMYQDIKAYFWWAGMKRDVAEYVALSDICQRVKAEHQRPAGLLQPLPIPEWKWEEIGMDFITGLPRTPNGYDSIWVIVDRLTKSAHFVPVKTTYDGKKLAELYMTHVVCRFGCPKKIVSDRGTQFTSRFWKQLHEALGTDLNFSTAYHPQTDGQTERVNQILEDMLRAYALDFEGTWDRCLPYAEFSYNNSYQASIQMSPNEAMFGRKCRTPLCWNEVGKALVFGPDILKSAEEQVKLIRERLKTAQNRQKNYADNRRRDLEFEKGDHVYLRVSPLRGMRRFGMSGKLAPRYIGPYLITARRGEVAYQLELPEGLADVHNVFHVSQLKKCLRVPEEQVPLGNIELEKNLTYKERPIKVLEEAERQTRRKTIKFYKVQWSNHSEDEATWEREDLLRAEFPDLLP

SEQ ID NO: 20426 - protein, 1852 aa, Oryza sativa
  Clone ID: TF_OSC401716j.C1.p78.fg
MAVNASFSSHGFGEGHHVAQLRDLARFLGFSCPEYTGYSVDRVPPHCELSVYLYPRGGIHGVGLRPHHFTVARPTLQIAYQDLSWTALRRLAHDYGHRLGGSAFRQLPRLPSGHSDARYPCPYSESQPVLTRMVELSEAQATQHDLLLEAYRSLARRYAALEARLAEEGVTSVDTISWDSGRLCHASHLSSHSSRGSARTPSGPRSPSSRAPYSPVYSPYPHPVSPSYTPGHTPVASSRRGPRFIRTARKRVVGSSTVFRFRHPAPPPPAARAAAGPRQSGSPRRCAHSQARRSSVTSPHPLYQMASRPRRTARAPVRFGFDDGRVEAEANHEPANEHSHHSNRSHRTVSRDAEVEQPRRSNRSHRTVSREAELEQSHRSHHTASHNSGGERLPSPPHVENNMQHIMAVQTQILQGLTTAIASFQHNAHGNGHPHVGNNRSKLTDFLRSRPPEFSQTVEPVEADDWLKDVDRKLNLVQCTPVEKTLYASHQLRGPAADWWENYCNAHPEPTNIAWDEFAAAFRAAHVPESTIDMKKEEFNRLKQGHSSVNEYLSQFNKLARYAPEEVDTDKKKIRKFLKGIAVGMRLQLLAHDFPTFQHMINKALLLEDARKEATEEYKKRKSNHQGNSSRGAPRPRYDKPSGTSATEACPSGNTAPNSVTSFKSPQGPSAVQCFRCNQMGHYARQCPQNPTNTNSGHANGSTARTPTPAAAQSRPSSQASGQGSRASNHFGRGRVNHIQAETAQDAPDVVMGMFSVNSVPAIVLFDSGASHSFISQAFVKRNGWKTQNLRVPMIVHSPGRNIRATQICPEVNLRIEEVDFLAKPIVLDSQSLDIILGMDWLAKHKGQIDCAEKSITLQGPGGKQVRFTPNTPTASRSILTCLQVTSLESVPIVCEYPDVFPEELTRMPPDREIEFAIELAPGTAPIAKRPYRMAANELAEVKRQIEELESKGYVRPSSSPWGAPVLLVKKKDGSERMVIDYRALNEVTIKNKYPLPRIDDLFDQLKGARVFSKIDLRSGYHQLKIRSEDIPKTAFSTRYGLYEFTVMSFGLTNAPAFFMNLMNKIFMEYLDQFVVVFIDDILIYSKNEEEHAEHLRLIMEKLRDHQLFAKFSKCEFWLDRVAFLGHVISSNGVEVDPSKVEAVLAWNPPKNVSEIRSFLGLAGYYRRFIEGFSKLARPMTELLKKEKKFQWSTACEDSFQEMKKRLTTAPVLTLPDIRKDFEIFCDASRQGLGCVLMQERKVVAYASRQLRPHEVNYPTHDLELAAVIHALKIWRHYLIGNRCEVYTDHKSLKYIFTQTELNMRQRRWLELIKDYDLGIHYHPGKANVVADALSRKAYCNIAQIRPDQGQLCRELEKLRLTVVQSGVPASLTVQPTLESQIREAQKEDEGIKELIERIQEKKDTNFSIDDQGTVWYGPRICVPAKKELRDLILKEAHESAYSIHPGSTKMYQDIKAYFWWAGMKRDVAEYVALCDICQRVKAEHQRPAGLLQPLPIPEWKWEEIGMDFITGLPRTPSGYDSIWVIVDRLTKSAHFVPVKTTYDGKKLAELYMTHVVCRFGCPKKIVSDRGTQFTSRFWKQLHEALGTDLNFSTAYHPQTDGQTERVNQILEDMLRACALDFEGTWDRCLPYAEFSYNNSYQASIQMSPNEAMFGRRCRTPLCWNEVGEALVFGPDILKSAEEQVKLIRERLKTAQNRQKNYADNRRRDLEFEKGDHVYLRVSPLRGMRRFGMSGKLAPRYIGPYLITARRGEVAYQLELPEGLADVHNVFHVSQLKKCLRVPEEQVPLGNIELEKNLTYKERPIKVLEEAERQTRRKTIKFYKVQWSNHSEDEATWEREDLLRAEFPELLP

SEQ ID NO: 20427 - protein, 1347 aa, Oryza sativa
  Clone ID: TF_OSC401828j.C1.p26.fg
MASRPCRAARAPAHFGFEEGRVEPEANHESANEQSHRSNNSHRTVSRNAEVEQPRRSNRSHRTASRDSEMEQSHRSHRTASHNSGEERLPSPPHVENNMQHLMAVQTQILQGIAAAVAGYQHNVHGNGHPHMGNNRSKLTDFLRSRPPEFSQTVEPVEADDWLKDVERKFNLVQCTPVEKTLYASHQLRGPAADWWENYCNGHPEPTNIAWDEFATAFRAAHVPESTIDMKKEEFNRLKQGNTSVNEYLSQFNKLARYAPEEVDTDKKKIRKFLKGIAVGMRLQLLAHDFPTFQHMINKALLLEDARKEATEEYKKHKSNHQGNSSRGAPRPRYGQPVQYHQSVTQANRQPGYAPRPQINRPAPQPQQRAPSGNTAPNSVTSFKSPQGPSAVQCFRCNQMGHYARQCPQNPTNTNSGHANGSTARTPTPAAAKSRPSTQASGQGSRASNHFGRGRVNHIQAETAQDAPDVVMGMFSVNSVPAIVLFDSGASHSFISQAFVKRNGWKTQNLRVPMIVHSPGRNIKATQICPEVNLRIEEVDFLAKPIVLDSQSLDIILGMDWLAKHKGQIDCAEKSITLQGPGGKQVRFTPNTPTASRSILTCLQVTSLESVPIVCEYPDVFPEELTRMPLDREIEFAIELAPGTAPIAKRPYRMAANELAEVKRQIEELESKGYVRPSSSPWGAPVLLVKKKEGSERMVIDYRALNEVTIKNKYPLPRIDDLFDQLKGARVFSKIDLRSGYHQLKIRSEDIPKTAFSTRYGLYEFTVMSFGLTNAPAFFMNLMNKIFMEYLDQFVVVFIDDILIYSKNEEEHAEHLRLIMENLRDHQLFAKFSKCEFWLDRVAFLGHVISSNGVEVDPSKVEAVLAWNPPKNVSEIRSFLGLAGYYRRFIEGFSKLARPMTELLKKEKKFQWSAACEDSFQEMKKRLTTAPVLTLPDIRKDFEIFCDASRQGLGCVLMQERKVVAYASRQLRPHEVNYPTHDLELAAVVHALKIWRHYLIGNRCEVYTDHKSLKYIFTQTELNMRQRRWLELIKDYDLGIHYHPGKANVVADALSRKAYCNVAQIRPDQDHLCRELQKLMLTVVQSGVPASLTVQPTLESQIREAQKDDEGIKELIKRIQEKKDTNFSIDNQGTVWCGPRICVPAKKELRDLILKEAHESAYSIHPGSTKMYQDIKAYFWWAGMKRDVAEYVALCDICQRVKAEHQRPAGLLQPLPIPEWKPVRRFGMSGKLAPRYIGPYLITARRGEVAYQLELPEGLADVHNVFHVSQLKKCLRVPEEQVPLGNIVLEKNLTYKERPIKVLEEAERQTRRKTIKFYKVQWSNHSEDEATWEREDLLRAEFPELLP

SEQ ID NO: 20428 - protein, 1759 aa, Oryza sativa
  Clone ID: TF_OSC401909j.C1.p14.fg
MAVNASFSSHGFGEGHHVAQLRDLARFLGFSCPEYTGYSVDRVPPRCELSVYLYPRGDRVPGPLLDCASSLGPRLQPPSRGLCLPAASTPSFWPCRRQATQHYLLLETYRSLARRYAALEARLAEEGVTSVDTVSWDSGRLCHASHLSSHSSRGSARTPSGPRSPSSRAPYSPVYSPYPHPVSPSYTPGHTPVASSRRGPRFIRTARKRVVGSSTVFRFDYPAPPPPAARAAIGPRQMASRPRRAARAPARFGFEEGRVEPEENHESANERSHHSNRSHRTASRNAEVEQPRRSNRSHHTASRNAEMEQSHRSHRTASHNSGEERLPSPPHVENNMQHLMAVQTQILQGLAAAIAGFQHSAHGNGHPHMGNNRSKLTDFLRSRPPEFSQTVEPVEADDWLKDVDRKLNLVQCTPVEKTLYASHQLRGPAADWWENYCNAHPEPTNIAWAEFATAFRAAHVPESAIDMKKEEFNKLKQGNNSVNEYLSLFNKLARKEATEEYKKRKSNHQGNSSRGAPRPRYGQPMQYHQSVTQANRQPGYAPRPQMNRQAPQPQQRAPSGNTAPNNVTSFKSSLGPSAVQCFRCNQMGHYARQCPQNPTNTNSGHANGSTARTPTPAAAQSRPSSQASGQGSRVSNNFGRGRVNHIQAETAQDAPDVVMGMFSVNSVPAIVLFDSGASHSFISQAFVKRNGWKTQNLRVPMIVHFPGRNIRATQICPEVNLRIEEVDFLAKPIVLDSQSLDIILGMDWLAKHKGQIDCAEKSITLQGPGGKQVRFTSNTPTASRSILTCLQVTSLESVPIVCEYPNVFPEELTSMPPDREIEFAIELAPGTAPIAKRPYRMAANELAEVKRQIEELESKGYVRPSSSPWGAPVLLVKKKDGSERMVIDYRALNEVTIKNKYPLPRIDDLFDQLKGARVFSKIDLRSGYHQLKIRSEDIPKTAFSTRYGLYEFTVMSFGLTNAPAFFMNLMNKIFMEYLDQFVVVFINDILIYSKNEEEHAEHLRLIMEKLRDHQLFAKFSKYEFWLDRVAFLGHVISPNGVEVDPSKVEAVLAWNPPKNVSEIRSFLGLAGYYRRFIEGFSKLARPMTELLKKEKKFQWSTACEDSFQEMKKRLTTAPVLTLPDIRKDFEIFCDASRQGLGCVLMQERKVVAYASRQLRPHEVNYPTHDLELAAVVHALKIWRHYLIGNRCEVYTDHKSLKYIFTQTELNMRQRRWLELIKDYDLGIHYHPGKANVVADALSRKTYCNVDQIRPDQDRLCRDLEKLRLTVVQSGVAASLTVQPTLESQIRKAQKDDEGIKELIKRIQEKKDTDFSIDDQGTVWYGPRICVPAKKELRDLILKEAHESAYSIHPGSTKMYQDIKAYFWWAGMKRDVAEYVALCDICQRVKAEHQRPAGLLQPLPIPEWKWEEIGMDFITGLPRTPSGYDSIWVIVDRLTKSAHFVPMKTTFDGKKLAELYMTHVVCRFGCPKKIVSDRGTQFTSRFWKQLHEALGTDLNFSTAYHPQTDGQTERVNQILEDMLRACALDFEGTWDRCLPYAEFSYNNSYQASIQMSSNEEMFGRKCRTPLCWNEVGEALVFGPDILKAAEEQVKLIRERLKAAQNRQKNYVDNRRRDLEFEKGDHVYLRVSPLRGIRRFGMSGKLAPRYIGPYLITARRGEVAYHLELPEGLADVHNVFHVSQLKKCLRVPEEQVPLGNIELEKNLTYKERPIKVLEEAERQTRRKTIKFYKVQWSNHSEDEATWEQEDLLRAEFPELLP

SEQ ID NO: 20429 - protein, 1685 aa, Oryza sativa
  Clone ID: TF_OSC404112j.C1.p3.fg
MAVSASFSSHGFGEGHHVAQLRDLACFLGFSCPEYTGYSVDRVPPHCELSVYLYPRGGIHGAGLRPHHFTVARPTLQIAYQDLSWTALHRLAHDYNHRLGGSAFRQLPRLPSGHSDARYPCPYSESQLVLTRMVELSEAQATQHDLLLEAYRSLARRYAALEARLAEEGVTSVDTISWDSGRLCHASHLSSHSSRGSARTPSGPRSPSSRAPYSPVYSPYPHPVSPSYTPGHTPVASSRRGPRFIRTARKRVVGSSTMFRFRHPAPPPPAARAAAGPRQLTDFLRSRPPEFSQTVEPVEADDWLKDVDRKLNLVQCTPVEKTLYASHKLRGPAADWWENYCNAHPEPTNIAWDEFATAFRAAHVPESTIDMKKEEFNRLKQGNSSVNEYLSQFNKLAQHAPEEVDTDKKKIRKFLKGIAVGMRLQLLAHVFPTFQHMINKALLLEDARKEATEEYKKRKSNHQGNSSRGTPRPRYGQSMQYHQSVTQANRQPGYAPRPQMNRPAPQPQQRAPSGNTAPNSVTSFKSPQGPSAVQCFRCNQMGHYARQCPQNPTNTNSGHANGSTARTPTPAAALSRPSSQASGQSSRASNHFGRGRVNHIQAETAQDAPDVVMGMFSVNSVPAIVLFDSGASHSFISQAFVKRNGWKTQNLRVPMIVHSPGRNIRATQICPEVNLRIEEVDFLAKPIVLDSQSMDIILGMDWLAKHKGQIDCAEKSITLQGPGGKQVRFTPNTPTANRSILTSLQVTSLESVPVVCEYPDVFPEELTRMPPDREIEFAIELAPGTAPIAKRPYRMAANELAEVKRQIEELESKGYVRPSSSTWGAPVLLVKKKDGSERMVIDYRALNEVTIKNKYPLPRIDDLFDQLKGARVFSKIDLRSGYHQLKIRSADIPKTAFSTCYGLYEFTVMSFGLTNAPAFFMNLMNKIFMEYLDQFVVVFIDDILIYSKNGEEHAEHLRLIMEKLRDHQLFAKFSKCEFWLDRVAFLGHVISSNGVKVDPSKVEAVLAWNPPKNVSEIRSFLGLAGYYRRFIEGFSKLARPMTELLKKEKKFQWSAACEDSFQEMKKRLTTAPVLTLPDIRKDFEIFCDASRQGLGCVLMQERKVVAYASRQLRPHEVNYPTHDLELAAVVHALKIWRHYLIGNRCEVYTDHKSLKYIFTQTELNMRQRRWLELIKDYDLGIHYHPGKANVVADALSRKAYCNVAQIRPDQDHLCRELEKLRLTVVQSGVPASLTVHPTLESQIREAQKDDEGIKELIKRIQEKKDTNFSIDDQGTVWCGPRICVPAKKELRDLILKEAHESAYSIHPGSTKMYQDIKAYFWWAGMKRDVAEYWKWEEIGMDFITGLPRTPSGYDSIWVIVDRLTKSAHFVPVKTTYDGKKLAELYMTHVVCRFGCPKKIVSDRGTQFTSRFWKQLHEALGTDLNFSTAYHPQTDGQTERVNQILEDMLRACALDFEGTWDRCLPYAEFSYNNSYQASIQMSPNEAMFGRKCRTPLCWNEVGEALVFGPDILKSAEEQVKLIRERLKTAQNRQKNYADNRTRDLEFEKGDHVYLRVSPLRGMRRFGMSGKLAPRYIGPYLITARRGEVAYQLELPEGLADVHNVFHVSQLKKCLRVPEEQVPLGNIELEKNLTYKERPIKVLEEAERHTRRKTIKFYKVQWSNHSEDEATWEREDLLRAEFPELLP

SEQ ID NO: 20430 - protein, 1851 aa, Oryza sativa
  Clone ID: TF_OSC408311j.C1.p20.fg
MAVNASFSSHGFGEGHHVAQLRDLARFLGFSCPKYTGYSVDRVPPHCELSVYLYPRGGIHGAGLRPHHFTVARPTLQIAYQDLSWTALRRLAHDYSHRLEGSAFRQLPRLPSGHSDARYPCPYSESQPVLTRMVELSEAQATQHDLLLEAYRSLARRYAALEARLAEEGVTSVDTISWDSGRLCHASHLSSHSSRGSARTPSGPRSPSSRAPYSPVYSPYPHPVSPSYTPGHTPVASSRRGPRFIRTARKRVVGSSTVFRFHYPAPPPPAACAAAGPRQMASRLRRAARALARFGFEDGRVEPEENHESANEQSHHSNRSHRTVSRNAEVEQPRRSSRSHRIVSRDAEMEQSHRSHRTASHNSGEERLPSRPHVETNMQHLMAVQTQILQGLTTAIASFQHNAHGNGHPHMGNNRSKLTDFLRSRPPEFSQTVEPVEADDWLKDVDRKLNLVQFTPVEKTLYASHQLRGPAADWWENYCNAHPEPTNIAWDEFATAFRAAHVPESTIDMKKEEFNRLKQGNSSVNEYLSMFNKLARYAPEEVDTDKKKIRKFLKGIVVGMRLQLLAHDFPTFQHMINKALLLEDARKEATEEYKKRKSNHQGNSSRGAPRPRYGQPMQYHQSVTQANRQPGYAPRPQMNCPAPQPQQRAPSGNTAPNSVTSFKSPQGPSAVQCFRCNQMGHYARQCPQNPTNTNSGHANGSTARTPTPAAAQSRPSTQASGQGSRASNHFGRGRVNHIQAETAQDAPDVVMGMFSVNSVPAIVLFDSGASHSFISQAFVKRNGWKTQNLRVPMIVHSPRRNIRATQICPEVNLRIEEVDFLAKPIVLDSQSLDIILGIDWLAKHKGQIDCAEKSITLQGPGGKQVRFTPNTPTASRSILTCLQVTSLESVPIVCEYPDVFREELTRMPPDREIEFAIELAPGTAPIAKRPYRMTANELAEVKRQIEELESKGYVRPSSSPWGAPVLLVKKKDGSERMVINYRALNEVTIKNKYPLPRIDDLFDQLKGARVFSKIDLRSGYHQLKIRSEDIPKTAFSTRYGLYEFTVMSFGLTNAPAFFMNLMNKIFMEYLDQFVVVFIDDILIYSKNEEEHAEHLRLIMEKLRDHQLFAKFSKCEFWLDRVAFLGHVISSNGVEVDPSKVEAVLAWNPPKNVSEIRSFLGLAGYYRRFIEGFPKLARPMTELLKKEKKFQWSAACEDSFQEMKKRLTTAPVLTLPDIRKDFEIFCDASRQGLGCVLMQERKVVAYASRQLRPHEVNYPTHDLELAAVVHALKIWRHYLIGNRCEVYTDHKSLKYIFTQTELNMRQRRWLELIKDYDLGIHYHPGKANVVADALSRKAYLNVAQIRPDQDHLCRELEKLRLTVVQSGVPASLTVQPTLESQIREAQKDDEGIKELIKRIQEKKDINFSIDDQSTVWCGPRICVPAKKELRDLILKEAHESAYSIHPGSTKMYQDIKAYFWWAGMKRDVAEYVALCDVCQRVKAEHQRPAGLLQPLPIPEWKWEEIGMDFITGLPRTPNACDSIWVIVDRLTKSAHFVPVKTTYDGKKLAELYMTHVVCRFGCPKKIVSDRGTQFTSRFWKQLHEALGTDLNFSTAYHPQTDGQTERVNQILEDMLRACALDFEGTWDRCLPYAEFSYNNSYQASIQMSSNEAMFGRKCRTPLCWNEVGEALVFGPDILKSAEEQVKLIRERLKTAQNRQKNYADNRRRDLEFEKGDHVYLRVSPLRGMRRFGMSGKLAPRYIGPYLITTRRGEVAYQLELPEGLADVHNVFHVSQLKKCLRVPEEQVPLGNIVLEKNLTYKERPTKVLEEAECQTRRKTIKFYKVQWSNHSEDEATWEREDLLRAEFPELLP

SEQ ID NO: 20431 - protein, 1363 aa, Oryza sativa
  Clone ID: TF_OSC408596j.C1.p1.fg
MSNNRSKLTDFLRSRPPEFSQTVEPVEADDWLKDVDRKLNLVQCTPVEKTLYASHQLRGPAADWWENYCNAHPEPTNIAWDEFATAFRVAHVPESTIDMKKEEFNRLKQGNSSVNEYLSMFNKLARYAPEEVDTDKKKIRKFLKGIAVGMRLQLLAHDFPTFQHMINMALLLEDARKEATEEYKKRKSNHQGNSSRGAPRPRYGQPMQYHQSVTQANRQPGYAPRPQMNRPAPQPQQRAPSGNTAPNSVTSFKSPQGPSAVQCFRCNQMGHYARQCPQNPTNTNSGHANGSTARTPTPAAAQPRPSSQASGQGSRASNNFGRGRVNHIQAETAQDAPDVVMGMFSVNSVPAIVLFDSGAFHSFISQAFVKRNGWKTQNLRVPMIVHSPGRNIRATQICPEVNLRIEEVDFLAKPIVLDSQSLDIILGMDWLAKHKGQIDCAEKSITLQGPGGKQVRFTSNTPTASRSILTCLQVTSLESVPIVYEYPDVFPEELTSMPPDREIEFTIELAPGTAPIAKRPYRMAANELAEVKRQIEELESKSYVRPSSSPWGALVLLVKKKDGSERMVIDYRALNEVTIKNKYPLPQIDDLFDQLKGARVFSKIDLRSGYHQLKIRSEDIPKTAFSTRYGLYEFTVMSFGLTNAPAFFMNLMNKIFMEYLDQFVVVFIDDILIYSKNKEEHAEHLRLIMEKLRDHQLFAKFSKCEFWLDRVAFLGHVISSNGVEVDPSKVEAVLAWNPPKNVSEIRSFLDLAGYYRRFIEGFSKLARPMTELLKKENKFQWSAACEDSFQKMKKRLTTAPVLTLLDIRKDFEIFCDASRQGLGCVLMQERKRHYLIGNRCEVYTDHKSLKYIFTQTELNMRQRRWLELIKDYDLGIHDHPGKANVVGDALSRKAYSNVAQIRPDQDRLCRELEKLRLTVVQSGVPASLTVQPTLESQIREAQKDDEGIKELIKRIQEKKDTDFSIDDQGTVWCGPRICVPAKKELRDLILKEAHESAYSIHPGSTKIVKAEHQRPAGLLQPLPIPEWKWEEIGMDFITGLPRTPSGYDSIWVIVDRLTKSAHFVPVKTTFDGKKLAELYMTHVVCRFGCPKKIVSDRGTQFTSRFWKQLHEALGTDLNFSTAYHPQTDGQTERVNQILEDMLRACALDFEGTWDCCLPYAEFSYNNSYQASIQMSPNEAMFGRKCRTPLCWNEVGEALVFGPDILKAAEEQVKLIRERLKTAQNRQKNYADNRRRDLEFEKGDHVYLRVSPLRGMRRFGMSGKLAPRYIGPYLITARRGEVAYQLELPEGLVDVHNVFHVSQLKKCLRVPEEQVPLGNIVLEKNLTYKERPIKVLEEAERQTRRKTIKFYKVQWSNHSEDEAT

SEQ ID NO: 20432 - protein, 1761 aa, Oryza sativa
  Clone ID: TF_OSC414072j.C1.p1.fg
MTVPLLYNKETSVAVIICLPMIPALFPGSGINLQMAVNASVSSHGFGEGHHVAQLRDLARFLGFSCPEYTGYSVDRVPPRCELSVYLYPRGGIHGAGLRPHHFTVARPTLQIAYQDLSWTALRRLAHDYSHRLGGSAFRQLPRLPSGHADARYPCPYSESQPVLTRMVELSEAQATQHDLLLEAYRSLARRYAALEAHMAEEGVTSVDTVSWDSGRLCHASHLSSHSSRGSARTPSGPRSPSSRAPYSPVYSPYPHPVSPSYTPGHTPVASSRRGPRFIRTARKRVVGSSTVFRFHYPAPPPPAACAAAGPRQHLMAVQIQILQGLAAAVAGYQHNAHGNGHPHMGNNRSKLTDFLRSRPPEFSQTVEPVEADDWLKDVDRKLNLVQCTPVEKTLYASHQLRGPTADWWENYCNAYPEPTNIAWDEFATAFRAAHVPESTIDMKKEEFNRLKQGNSSVNEYLSMFNKLARYAPEEVDTDKKKIRKFLKGIAVGMRLQLLAHDFPTFQHMINKALLLEDARKEATEEYKKRKSNHQGNSSRGAPRPRYGQPMQYHQSVTQANRQPGYAPCPQMNRPAPQPQQRAPSGNTAPNSVTSFKSPQGPSAVQCFRCNQMGHYARQCPQNPTNTSSRHANGSTARTPTPAAAQSRPSSQASGQGTCASNNFGRGRVNHIQAETAQDAPDVVMGMFSVNSVPAIVLFDSGASHSFISQAFVKRNGWKTQNLRVPMIVHSPGRNIRATQICPEVNLRIEEVDFLAKPIVLDSQSLDIILGMDWLAKHKGQIDCAEKSITLQGPGGKQVRFTSNTPTASRSILTCLQVTSLESVPVVCEYPDVFPEELTSMPPDREIEFAIELAPGTAPIAKRPYRMVANELAEVKRQIEELKSKGYVRPSSSPWGAPVLLVKKKDGSERMIIDYRALNEVTIKNKYPLPRIDDLFDQLKGARVFSKIDLRSGYHQLKIRSEDIPKTAFSTRYGLYEFTLDQFVVVFIDDILIYSKNEEEHAEHLRLIMEKLRDHQLFAKFSKCEFWLDREAFLGHVISSNGVDVDPSKVEAVLAWNPPKNVLEIRSLLGLAGYYRRFIEGFSKLVRPMTELLKKEKKFHWSAACEDSFQEMKKRLTTAPVLTLPDIRKDFEIFCDASRQGLGCVLMQERKVVAYAFRQLRPHEVNYPTHDLELAAVFHALKIWRHYLIGNRCEVYTDHKSLKYIFTQTKLNMRQRRWLELIKDYDLGIHYHPGKANVVADALSRKAYCNVAQIRPDQDRLCRELEKLRLTVVQSGVPASLTVQPTLESQIREAQKDDEGIKELIKRIQEKKDTNFSIDDQGTVWCGPRICVPAKKELRDLILKEAHESAYSIHPGSTKMYQDIKAYFWWTGMKRDVAEYVALCDICQRVKAEHQRPAGLLQPLPIPEWKWEEIGMYFITGLPRTPSGYDSIWVIVDRLTKSAHFVPVKTIFDGKKLAELYMTHVVCRFGCPKKIVSDRGTQFTSRFWKQLHEALGTDLNFSTAYHPQTDGQTERVNQILEDMLRACALDFEGTWDRCLPYAEFSYNNSYQASIQMSPNEAMFGRKCRTPLCWNEVGEALVFGPDILKAAEEQVKLIRERLKTAQNRQKNYADNRRRDLEFEKGDHVYLRVSPLRGMRRFGMSGKLAPRYIGPYLITARRGEVAYQLELPEGLADVHNVFHVSQLKKCLRVPEEQVPLGNIELEKNLTYKERPIKVLEEAVRQTRRKTIKFYKVQWSNHSEDEATWEREDLLRAEFPELLP

SEQ ID NO: 20433 - protein, 949 aa, Oryza sativa
  Clone ID: TF_OSC415317j.C1.p1.gm
MGNNRSKLTDFLRSRPPEFSQTVELVEADDWLKDVDRKLNLVQCTPVEKTLYASHQLRGPAADWWENYCNAHPEPTNIAWDEFATAFRVAHVPESTIDMKKEEFNRLKQGNSSVNEYLSMFNKLARYAPEEVDSDKKKIRKFLKGIAVGMRLQLLAHDFPTFQHMINKALLLEDAKKEATEEYKKRKSNHQGNSSRGAPRPRYGQPMQYHQSVTQANRQPGYAPRPQMNRPAPQPQQRAPSGNTAPNSVTSFKSPQGPSAVQCFRCNQMGHYARQCPQNPTNTNSGHANGSTARTPTPAAAQSRPSTQASGQGSRASNHFGRGRVNHIQAETAQDAPDVVMGARVFSKIDLRSGYHQLKIRSEDIPKTAFSTRYGLYEFTVMSFGLTNAPAFFMNLMNKIFMEYLDQFVVVFIDDILIYSKNEEEHAEHLRLIMEKLRDHQLFAKFSKCEFWLDRVAFLGHVISSNGVEVNPSKVEAVLAWNPPKNVSEIRSFLGLAGYYRRFIEGFSKLARPMTELLKKEKKFQWSAACEDSFQEMKKRLTTAPVLTLPDIRKDFEIFCDASRQGLGCVLMQERKVVAYASRQLRPHEANYPTHDLELAAVVHALKIWRHYLIGNRCEVYTDHKSLKYIFTQTELNMRQRRWLELIKDYDLGIHYHPGKANVVADALSRKAYRNVAQIRPDQDHLCRELEKLRLTVEKKDTNFSIDNQGTVWCGPRICVPAKKELRDLILKEAHESAYSIHPGSTKMYQDIKAYFWWAGMKRDVAEYVALCDVCQRVKAEHQRPAGLLQPLPIPEWKWEEIGMDFITGLPRTPNGYDSIWDRQKSYADNRRRDLEFEKGDHVYLRVSPLHGMRRFGMSGKLAPRYIGPYLITARRGEVAYQLELPEGLAYVHNVFHVSQLKKCLRVPEEQVPLGNIVLEKNLTYKERPIKVLEEAERQTRRKTIKFYK

SEQ ID NO: 20434 - protein, 1869 aa, Oryza sativa
  Clone ID: TF_OSC415507j.C1.p7.fg
MTVPLLYNKETSVAVYTGYSVDRVPPHCELSVYLYPRGGIHGAGLRPHHFTVARPTLQIAYQDLSWTALRHLAHDYSHRLGGSAFRQLPRLPSGHSDARYPCPYSESQPVLTRMVELSEAQATQHDLLLEAYRSLARRYAALEARLAEEGVTSVDTISWDSGRLCHASHLSSHSSRGSACTPSGPRSPSSRAPYSPVYSPYPHPVSPSYTPDTPQLLPPAVAHALSAPRGSVLLVLPPCSVSATQLPHRQRPVLLPALDRFRRSLRASRSTFLRLRSRLQEAARPTRSRGGSLQQPSMASRPRRAARAPARFGFEDGRVEAEANHESANEQSHHSNRSHRTVSRNAEVEQPRRSNRSHRTVFRNAEMEQSHRSHRTASHNSGEEHLPPPPHVENNMQHIMAVQTQILQGLTTAIASFQHNAHGNGHPHVSSNRSKLTDFLRSHPPEFSQTVEPVEADDWLKDVDRKLNLVQCTPVEKTLYASHQLRGHAADWWENYCNAHPEPTNIAWDEFATAFRAAHVPESTIDMKKEEFNRLKQGNISVNEYLSMFNKLARYAPEEVDTDKKKIRKFLKGIAVGMRLQLLAHDFPTFQHMINKALLLEDARKEATEEYKKRKSNHQGNSSRGAPRPRYGQPMQYHQSVTQANRQPGYAPRPQMNRPAPQPQQRAPSSNTAPNSVTSFKSPQGPSAVQCFRCNQMGHYARQCPQNPTNTNSGHANGSTARTPTPAAAQSRPSSQASGQGSRASNHFGRGSVNHIQAETAQDAPDVVMGMFSVNSVPAIVLFDSGASHSFISQAFVKRNGWKTQNLRVPMIVHSPGRNIRATQICPEVNLRIEEVDFLAKPIVLDSQSLDIILGMDWLAKHKGQIDCAEKSITLQGPGGKQVRFTPNTPTASRSILTCLQVTSLESVPIVCEYPDVFPEELTSMPPDREIEFAIELAPGTAPIAKRPYRMAANELAEVKRQIKELESKGYVRPSSSPWGAPVLLVKKKDGSERMVIDYRALNEVTIKNKYPLPRIDDLFDQLKGARVFSKIDLRSGYHQLKIRSEDIPKTAFSTRYGLYEFTVMSFGLTNAPAFFMNLMNKIFMEYLDQFVVVFIDDILIYSKNEEEHVEHLRLIMEKLRDHQLFAKFSKCEFWLDRVAFLGHVISSNGVEVDPSKVEAVLAWNPPKNVSEIRSFLGLAGYYRRFIEGFSKLARPMTELLKKEKKFQWSAACEDSFQEMKKRLTTAPVLTLPDIRKDFEIFCDASRQGLGCVLMQERKVVAYASRQLRPHEVNYPTHDLELAAVVHALKIWRHYLIGNRCEVYTDHKSLKYIFTQTELNMRQRRWLELIKDYDLGIHYHPGKANVVADALSRKAYCNVAQIRPDQDHLCRELEKLRLTVVQSGVPASLTVQPTLESQIREAQKDDEGIKELIKRIQEKKDTNFSIDNQGTVWCGPRICVPAKKELRDLILKEAHESAYSIHPGSTKMYQDIKAYFWWAGMKRDVAEYVALCDICQRVKAEHQRPAGLLQPLPIPGWKWEEIGMDFITGLPRTPSGYDSIWVIVDRLTKSAHFVPVKTTYDGKKLAELYMTHVVCRFGCPKKIVSDRGTQFTSRFWKQLHEALGTDLNFSTAYHPQTDGQTERVNQILEDMLRACALDFEGTWDRCLPYAEFSYNNSYQASIQMSPNEAMYGRKCRTPLCWNEVGEALVFGPHILKSAEEQVKLIRERLKTAQNRQKNYADNRRRDLEFEKGDHVYLRVSPLRGMRRFGMSGKLAPRYIGPYLITARRGEVAYQLELPEGLADVHNVFHVSQLKKCIRVPEEQVPLGNIELEKNLTYKERPIKVLEEAERQTRRKTIKFYKVQWSNHSEDEATWEREDLLRAEFPELLP

SEQ ID NO: 20435 - protein, 1137 aa, Oryza sativa
  Clone ID: TF_OSC415705j.C1.p1.fg
MAVNASFSSHGFGEGHHVAQLRDLARFLGFSCPEYTGYSVDRVPPRCELSVYLYPRGGIHGAGLRPHHFSVARPTLQIAYQDLSWTALRRLAHDYSHHLGGSAFRQLPRLPSGHADARWLAAPAVQLVHQPASVLKKLRGPAADWWENYCNAHPEPTNIAWDEFATAFRAAHVPESTIDMKKEEFNRLKQGNSSVNEYLSMFNKLARYAPEEVDTDKKKIRKFLKGIAVGMRLQLLAHDFPTFQHMINKALLLEDARKEATEEYKKRNVTSFKSPQGPSAVQCFRCNQMGHYARQCPQNPTNTNSGHANGSTARTPTPAAAQSCPSSQASGQGSRASNNLGRGRVNHIQAETAQDAPDVVMVLLVKKKDGSKRMVIDYRALNEVTIKNKYPLPQIDDLFDQLKGARVFSKIDLRSGYHQLKIRSEDIPKTAFSTRYGLYEFTVMSFGLTNAPAFFMNLMNKIFMEYLDQFVVVFIDDILIYSKNEEEHAEHLRLIMEKLRDHQLFAKFSKCEFWLDRVAFLGHVISSNGVEVDPSKVEAVLAWNPPKNVSEIRSFLGLAGYYRRFIEGFSKLARPMTELLKKEKKFQWSAACEDSFQEMKKRQLRPHEVNYPTHDLELAAVVHALKIWRHYLIGNRCEVYTDHKSLKYIFTQTELNMRQRRWLELIKDYNLGIHYHPGKANVVADALSRKAYCNVARIRPDQDRLCRELEKLRLTVVQSGVPASLTVQPTLESQVREAQKDDEGIKELIKRIQEKKDTDFSIDDQGTVWCGPRICVPAKKELRDLILKEAHESAYSIHPGSTKMYQDIKAYFWWAGMKRDVAEYVALCDICQRVKAEHQRPAGLLQPLPIPEWKWEEIGMDFITGLPRTPSGYDSIWVIVDRLTKSAHFVPVKTTFDGKKLAELYMTHVVCRFGCPKKIVSDRGTQFTSRFWKQLHEALGTDLNFSTAYHPQTDALVFGPDILKAAEEQVKLIRERLKTAQNRQKNYADNRRRDLEFEKGDHVYLRVSPLRGMRRFGMSGKLAPRYIGPYLITARRGEVAYQLELPEGLADVHNVFHVSQLKKCLRVPEEQVPLGSIELEKNLTYKERPIKVLEEAERQTQRKTIKFYKVQWSNHSEDEATWEREDLLRAEFPELLP

SEQ ID NO: 20436 - protein, 1820 aa, Oryza sativa
  Clone ID: TF_OSC416839j.C1.p10.fg
MAVNASFSSHGFGEGHHVAQLRDLTRFLGFSCPEYTGYSVDRVPPHCELSVYLYPRGGIHGAGLRPHHFTVARPTLQIAYQDLSWTALRRLAHDYSHRLGGSAFRQLPRLPSGHSDARYPCPYSESQPVLTRMVELSEAQATQHDLLLEAYRSLARRYAALEARLAEEGVTSVDTISWDSGRLCHASHLSSHSSRGSARTPSGPRSPSSRAPYSPVYSPYPHPVSPSYTPGHTPVASSRRGPRFIRTARKRVVGSSTVFRFHHPAPPPPAARAAAGPRQMASRPRRATRAPARLGFEDGRVEAEANHEPANEQSHHSNRSHRTAPRNAEVEQPRRSNRSHRTVSRDAEMEQSLRSHRTASHSSGEERIPSPPHVENNIQHIMAVQTQILQGLTTAIASFQHNAHGNGHPHVGNNRSKLTDFLRSRPPEFSQTVEPVEADDWLKDVDRKLNLVQCTPVEKTLYASHQLRGPAADWWENYCNAHPEPTNIAWDEFATAFRAAHVPESTIDMKKEEFNRLKQGNSNDNEYLSQFNKLARYAPEEVNTDKKKIRRFLKGIAVGMRLQLLVHDFPTFQHMINKALLLEDARKEATEEYKKRKSNHQGNSSRGAPRPRYGQPMQYHQSVTQANRQPGYAPRPQMNRPAPQPQQRAPSGNTAPNSVTSFKSPQGPSVVQCFRCNQMGHYARQCPQNPTNTNSGHANGSTARTPTPAAAQSRPSSQASGQGSRASNNFGRGRVNHIQAETAQDAPDVVMGMFSVNSVPAIVLFDSGASHSFISQAFVKRNGWKTQNLRVPMIVHSPGRNIRATQICPEVNLRIEEVDFLAKPIVLDSQSLDIILGMDWLAKHKGQIDCAEKSITLQGPGGKQVRFTPNTPTASRMPPDREIEFAIELAPGTAPIAKRPYRMAANELAEVKRQIEELESKGYVRPSSSPWGAPVLLVKKKDGSERMVIDYRALNEVTIKNKYPLPRIDDLFDQLKGARVFSKIDLRSGYHQLKIRSEDIPKTAFSTRYGLYEFTVMSFGLTNAPAFFMNLMNKIFMEYLDQFVVVFIDDILIYSKNEEEHAEHLRLIMEKLRDHQLFAKFSKCEFWLDRVAFLGHVISSNGVEVDPSKVEAVLAWNPPKNVSEIRSFLGLAGYYRRFIEGFSKLARPMTELLKKEKKFQWSAACEGSFQEMKKRLTTAPVLTLPDIRKDFEIFCDASRQGLGCVLMQERKVVAYASRQLRPHEVNYPTHDLELAAVVHALKIWRHYLIGNRCEVYTDHKSLKYIFTQTELNMRQRRWLELIKDYDLGIHYHPGKANVVADALSRKAYCNVAQIRPDQDHLCRELEKLRLTVVQSGVPASLTVQPTLESQIREAQKDDEGIKELIKRIQEKKDTNFSIDDQGTVWCGPRIFVPAKELRDLILKEAHESAYSIHPGSTKMYQDIKAYFWWAGMKRDVAEYVALCDICQRIKAEHQRPAGLLQPLPIPEWKWEEIGMDFITGLPRTPSGYDSIWVIVDRLTKSAHFVPVKTTYDGKKLAELYMTHVVCRFGCPKKIVSDRGTQFTSRFWKQLHEALGTDLNFSTAYHPQTDGQTERVNQILEDMLRACALDFEGTWDRCLPYAEFSYNNSYQANIQMSPNEAMFGRKCRTPLCWNEVGEALVFGPDILKSAEEQVKLIRGRLKTAQNRQKNYADNRRRDLEFETGDHVYLRVSPLRGMKRFGMSGKLAPRYIGPYLITARRGEVAYQLELPEGLADVHNVFHVSQLKKCLRVPEEQVLLGNIELERNLTYKERPIKVLEEAERQTRRKTIKFYKVQWSNHSEDEATWEREDLLRAEFPELLP

SEQ ID NO: 20437 - protein, 1562 aa, Oryza sativa
  Clone ID: TF_OSC417333j.C1.p7.fg
MAVNASFSSHGFGEGHHVAQLRDLARFLGFSCPEYTGYSVDRVPPHCELSVYLYPRGDARYPCPYSESQPVLTRMVELSEAQATQHDLLLEAYRSLARRYAALEACLAEEGVTSVDTISWDSGRLCHASHLSSHSSRGSARTPSGPRSPSSRAPYSPVYSPYPHPVSPSYTPGHTPVASSRRGPRFIRTARKRVVGSSTVFRFHYPAPPPLAMASRPRRTARAPARFGFEDGRVEPEANHESANEQSHHSNRSHRTVSRNAEVEQPRRSSRSHRTVSRDAEMEQSHRSHHTASHNSGEERLPSPPHVENNMQHLMAVQTQILQGLTTAIASFQHNAHGNGHPHMGNNRSKLTDFLRSRPPEFSQTVEPVEADDWLKDVDRKLNLVQCTPVEKTLYASHQLRGPAADWWENYCNAHLEPTNIAWDEFATAFRAAHVPESTIDMKKEEFNRLKQGNSSVNEYLSQFNKLARYAPEEVDTDKKKIRKFLKGIAVGMRLQLLAHDFPTFQHMINKALLLEDARKEATEEYKKRKSNHQGNSSRGAPRPRYGQPMQYHQSVTQANRQPGYAPRPQMNRPAPPPQQRAPSGNTAPNSVTSFKSPQGPSAVQCFRCNQMGHYARQCPQNPTNTNSGHANGSTARTPTPAAAQSRPSSQASGQGSRASNNFGRGRVNHIQAETAQDAPDVVMGPGGKQIRFTPNTPTASRSILTCLQVTSLESVPIVCAYPDVFPEELTRMPPDREIEFAIELALGTAPIAKRPYRMAANELAEVKRQIEELESKGYVRPSSSPWGAPVLLVKKKDGSERMVIDYRALNEVTIKNKYPLPRIDDLFDQLKGARVFSKIDLRSGYHQLKIRSEDIPKTAFSTRYGLYEFTFVVVFIDDILIYPKNVSEIRSFLGLAGYYRRFIKGFSKLARPMTELLKKEKKFQWSAACEDSFQEMKKRLTTAPVLTLPDIRKDFEIFCDASRQGLGCVLMQERKVVAYASRQLRPHEVNYPTHDLELAAVVHALKIWRHYLIGNRCEVYTDHKSLKYIFTQTELNMRQRRWLELIKDYDLGIHYHPGKANVVADALSRKAYCNVAQIRPDQDHLCRELEKLRLTMVQSGVPASLTVQPTLESQIREAQKDDEGIKELIKRIQEKKDTNFSIDDQGTVWCGPRIYVPAKKELRDLILKEAHESAYSIHPGSTKMYQDIKAYFWWAGMKRDVAEYVALCDICQRVKAEHQRPAGLLQPLPIPEWKWEEIGMDFITGLPRTPSGYDSIWVIADRLTKSAHFVLVKTTYDGKKLAELYMTHVVCRFGCPKKIVSDRGTQFTSRFWKQLHEALGTDLNFSTAYHPQTDGQTERVNQILEDMLRACALDFEGTWDRCLPYAEFSYNNSYQASIQMSPNEAMFGRKCRTPLCWNEVGEALVFGPDILKSAEEQVKLIRERLKTAQNRQKNYADNRRRDLEFEKGDHVYLRVSPLHGMRRFGMSGKLAPRYIGPYLITARRGEVAYQLELPEGLADVHNVFHVSQLKKCLRIPEEQVPLVSEPEDPQCEDFEDQAPDLEQGKPPLNILNLYLKFNYVA

SEQ ID NO: 20438 - protein, 1620 aa, Oryza sativa
  Clone ID: TF_OSC4900j.C1.p6.fg
MGYSVDVFPLAVSSLCTFTLAEVYTELAFAHTTSLWLGPPSRSRTRTSPGLRFVAWPTTTATVSGALPSGSSHVFLLATQMPARFSFEEGRVEPEANHESANEQSHHSIRSHHTASRNAEVEQPHRSNRSHHTASRNAEVEQSHRSHRTASHNSGEERIPSPPHVENNMQHLMTVQTQILQGLAAAIAGFQHNAHGNGHPHMGNNRSKLTDFLRSRPPEFSQTVEPVEADDWLKDVDRKLNLVQCTPVEKMLYASHQLRGHAADWWENYCNAHPEPTNIAWDEFATAFRGAHVPESTIDTKKEEFNRLKQGNNSVNEYLSQFNKLARYAPKEVDTDKKKIRKFLKGIAVGMRLQLLAHDFPTFQHMINKALLLEDARKEATEEYKKRKFNHQGNSSRGAPRPRYGQPMQYHQSVTQANRQPGYAPRPQMNRPAPQPQQHAPSGNTAPNSVTSFKSPLGLSAVQCFRCNQMGHYARQCPQNPTNTNSGHANGSTARTPTPAAAQSRPSSQASGQGSRASNNFGRGRVNHIQAETAQDAPDVVMVHSPGRNIRATQICPEVNLRIEEVDFLAKPIVLDSQSLDIILGMDWLAKHKGQIDYAERSITLQGPRGKQVCFTTNTPTASRSILTYLQVTSLESVPIVCEYPDVFPEELTSMPPDREIEFAIELAPGTAPIAKRPYQMAANELAEVKRQIEELESKGYVRPSSSPWGAPVLLVKKKDGSERMVIDYRALNEVTIKNKYALPRIDDLFDQLKGARVFSKIDLRSGYHQLKIRSEDIPKTAFSTRYGLYEFTVMSFGITNAPAFFMNLMNKIFMEYLDQFVVVFIDDILIYSKNEEEHAEHLRLIMGKLRDHQLFAKFSKCEFWLDRVAFLGHVISFNGVEVDPSKVGAVLAWNPPKNVSEIHSFLGLAGYYRRFIEGFSKLARPMTELLKNEKKFQWSTACEDSFQEMKKRLTTAPVLTLPDIRKDFEIFCDASRQGVGCVLMQERKVVAYASRQLRPHEVNYPTHDLELAAVVHALKIWRHYLIGNRCEVYTDHKSLKYIFTQTELNMRQRRWLELIKDYDLGIHYHPGKANVVADALSRKTYYNVAQIWPDQDRLCGELEKLRLTVVQSGVPASLTVQPTLESQIREAQKDDEGIKELIKRIQEKKDTDFSNRRSRHSLKELRDPILKEAHESAYSIHPGSTKMYQDIKAYFWWAGMKRDVAEYVALCNICQRVKAENQRPAGLLQPLPIPEWKWEEIGMDFITGLPRTPSGYDSIWVIVDRLTKSAHFVPVKTTFDGKKLAELYMTHVVCRFGCPKKIVSDRGTQFTSRFWKQLHEALGTDLNFSTAYHPQTDGQTERVNQILEDMLPLVTSLTSRQSDLVTGLGLVAASAHAPASVSNSVGPSKLQNGSLRSEVTTSFADPSLYPLPLQIHRCHLSVPPDLAYLRSEAAVGTTKSLAILMKALILLVPARVAQGLGDTGVASLPSRPIISSHLYLIAAQASHQKTVPFFSSLKVLRLEPVARSTMGQPPRHRVESRWRSFREGTGDQRHARRSLRVASMQAERRASSQRSRNYYVACGKLGNDNTCGGDGILTGIWGEARVTKKSPHLSGNEWKNTNIYISYRNVGNNLTIEKK

SEQ ID NO: 20439 - protein, 1718 aa, Oryza sativa
  Clone ID: TF_OSC832j.C1.p1.fg
MAVNASFSSHGFGEGHHVAQLRDLARFLGFSCPEYTGYSVDRVPPRCELSVYLYPRGGIHGAGLRPHHFTMARPTLQIAYQDLSWTALCRLAHDYSHRLGGSAFRQLPHLPSSHADARYPCPYNESQPVLTRMVELSEAQATQHNLLLEAYCSLARRYAALEAHLAEEGVTSVDTVSWDSGRLCHASHLSSHSSRGSARTPSGPRSPSSRAPYSQVYSPYPHPVSPSYTPGHTPVASSRRGPRFIRTARKRVVGSSTVFCFDYPAPPPLAARAVGGPRQMASHPHRAARTPACFGFEEGRVEPEANHESANEQSHQSNRSHRTASRNAEVEQPHRSNRSHHTASRNTEVEQSHRSHRTASHNSGEERIPSPPHVENNMQHLMAVQTQILQGLAAAIAGFQHNAHGNGHPHMGNNRSKLTDFLRSRPPEFSQTIEPIEADDWLKDVDRKLNLVQCTPVEKTLYASHQLRGPAADWWENYCNAHPEPTNIAWGEFAMAFRAAHVPESAIDMKKEEFNRLKQGNNGVNEYLSQFNKLARYAPEEVDTDKKKIRKFLKGIAVGMRLQLLAHDFPTFQHMINKTLLLEDARKEATEEYKKRKSNHQGNSSLGAPHPRYGQPMQYHQSVTQANRQPGYAPRPQMNRPAPQPQQHTPSGNTAPNSVTSFKSPLGLSAVQCFRCNQMGHYARQCPQNPTNTNSGHANGSTARTRTPAAAQSRPSSQASGQGSRASNNFGRGRVNHIQAETAQDAPDVVMVHSPGRNIRATQICPGVNLRIEEVDFLAKPIVLDSQSLDIILGMDWLAKHKGQIDCAERSITLQGPGGKQVRFTSNAPTASRSILTCLQVTSLESVPIVCEYPDVFPEELTSMPPDREIQFAIELAPGTAPIAKRPYRMAANELAEVKRQIEELESKGYVRPSSSPWGAPVLLVKKKDGSERMVIDYRALNEVTIKNKYPLPRIDDLFDQLKGARVFSKIDLRSGYRQLKIRSEDIPKTAFSTRYGLYEFTVMSFGLTNAPAFFMNLMNKIFVEYLDQFVVVFIDDILIYSKNEEEHAEHLRLIMGKLRDHQLFAKFSKCEFCKVEAVLAWNPPKNVSEIRNFLGLAGYYRIFIEGFSKLARPMTELLKKEKKFEWTAACEDGFQEMKKRLTTVPVLTLPDIRKDFEIFCDASRQGLGCVLMQERKVVAYASRQLRPHEVNYPTHDLELAAVVHALKIWRHYLIGNRCEVYTDHKSLKYIFTQTELNMRQRRWLELIKDYDLGIHYHPGKANVVADALSRKTYCNEAQIWPAQDRLCRELEKLKLTVVQSGVPASLTVQPTLESQIREAQKDDEGIKELIKRIQEKKDTDFSIDDQGTVWCGPRICVPAKKELRNLILKEAHESAYSIHPGSTKMYQDIKAYFWWAGMKRDVAEYVALCDICQRVKAEHQRPAGLLQPLPIPEWKWEEIGMDFITGLPTTPSGFGCPKKIVSDRGTQFTSRFWKQLHEALGTNLNFSTAYHPQTDGQTERVNQILEDMLRACALDFEGTWDRCLPYAEFSYNNSYQASIQMSPNETMFGRKCRTPLCWNEVGEALNYADNRRRDLEFEKGDHVYLRVSPLRGMRRFGMSGKLAPRYIGPYLITARRGEVAYQLELPESLADVLNVFHVSQLKKCLRVPEEQVPLDNIELEKNLTYKEIPIKVLEEAERQTRRKTIKFYKVQWSNHSEDEATWEREDLLRAEFPELLP

SEQ ID NO: 20440 - protein, 1416 aa, Oryza sativa
  Clone ID: TF_OSC900019j.C1.p10.fg
MEQSHRSHHTASHNSGEERLPSPPHVENNMQHLMAVQTQILQGLTTAIASFQHNAHGNGHPHMGNNRSKLTDFLRSRPPEFSQTVEPVEADDWLKDVDRKLNLVQCTPVEKTLYASHQLRGPAADWLENYCNAHPEPTNISWDEFATAFRAAHVPESTIDMKKEEFNRLKQGNSSVNEYLSQFNKLARYAPEEVDTDKKKIRKFLKGIAVGMRLQLLAHDFPTFQHMINKALLLEDARKEATEEYKKRKSNHQGNSSRGALRPRYGQPMQYHQSVTQANRQPGYAPRPQMNRPAPQPQQRAPSGNTAPNSVTSFKSPQGPSAVQCFRCNQMGHYARQCPQNPTNTNSGHANGSTARTPTPAAAQFRPSSQASGQGSRASNHFGRGRVNHIQAETAQDAPDVVMGMFSVNSVPAIVLFDSGASHSFISQAFVKRNGWKTQNLRVPMIVHSPGRNIRATQICPEVNLRIEEVDFLAKPIVLDSQSLDIILGMDWLAKHKGQIDCAEKSITLQGPGGKQVRFTPNTPTVSRSILTCLQVTSLESVPIVCEYPDVFPEELTSMPPDREIEFAIELAPGTAPIAKRPYRMAANELAEVKRQIEELESKGYVRPISSPWGAPVLLVKKNDGSERMVIDYRALNEVTIKNKYPLPRIDDLFDQLKGARVFSKIDLRSGYHQLKIRSEDIPKTAFSTRYGLYEFTVMSFGLTNAPAFFMNLMNKIFMEYLDQFVVVFIDDILIYSKNEEEHAEHLRLIMEKLRDHQLFAKFSKCEFWLDRVAFLGHVISSNGVEVDPSKVEAVLAWNPPKIVSEIRSFLGLAGYYRRFIEGFSKLARPMTELLKKEKKFQWSVACEDSFQEMKKRLTTAPVLTLPDIRKDFEIFCDASRQGIGCVLMQERKVVAYASRQLRPHEANYPTHDLELAAVVHALKIWRHYLIGNRCEVYTDHKSLKYIFTQTELNMRQRRWLELIKDYDLGIHYHPGKANVVADALSRKAYCNVAQIRPDQDHLCRELEKLRLTVVQSGVPASLTVQPTLESQIREAQKDDEGIKELIKRIQEKKDTNFSIDDQGTVWCGQRICVPTKKELRDLILKEAHESAYSIHPGSTKMYQDIKAYFWWAGMKRDVAEYVALCDICQRVKAEHQRPAGLLQPLPIPEWKWEEIGMDFITGLARTPSGYDSIWVIVDRLTKSAHFVPVKTTYDGKKLAELYMTHVVCRFGCPKKIVSDRGTQFTSRFWKQLHEALGTDLNFSTAYHPQTDGQTERTAQSRQKNYADNRRRDLEFEKGDHVYLRVSPLRGMRRFGMSGKLAPRYIGPYLITARRGEVTYQLELPEGLADVHNVFHVSQLKKCLRVPEEQVPLGNIELEKNLTYKERPIKVLEEAERQTRRKTIKFYKVQWSNHSEDEATWEREDLLRAEFPELLP

SEQ ID NO: 20441 - protein, 1326 aa, Oryza sativa
  Clone ID: TF_OSC900174j.C1.p21.fg
VDSRGSPGTELEFNRLKQGNSSVNEYLSMFNKLARYAPEEVDTDKKKIRKFLKGIAVGMRLQLLAHDFPTFQHMINKALLLEDARKEATEEYKKRKSNHQGNSSRGAPRPRYGQPMQYHQSVTQANRQPGYAPCPQMNRPAPQPQQRAPSGNTAPNSVTSFKSPQGPSAVQCFRCNQMGHYARQCPQNPTNTSSRHANGSTARTPTPAAAQSRPSSQASGQGTCASNNFGRGRVNHIQAETAQDAPDVVMGMFSVNSVPAIVLFDSGASHSFISQAFVKRNGWKTQNLRVPMIVHSPGRNIRATQICPEVNLRIEEVDFLAKPIVLDSQSLDIILGMDWLAKHKGQIDCAEKSITLQGPGGKQVRFTSNTPTASRSILTCLQVTSLESVPVVCEYPDVFPEELTSMPPDREIEFAIELAPGTAPIAKRPYRMVANELAEVKRQIEELKSKGYVRPSSSPWGAPVLLVKKKDGSERMIIDYRALNEVTIKNKYPLPRIDDLFDQLKGARVFSKIDLRSGYHQLKIRSEDIPKTAFSTRYGLYEFTLDQFVVVFIDDILIYSKNEEEHAEHLRLIMEKLRDHQLFAKFSKCEFWLDREAFLGHVISSNGVDVDPSKVEAVLAWNPPKNVLEIRSLLGLAGYYRRFIEGFSKLVRPMTELLKKEKKFHWSAACEDSFQEMKKRLTTAPVLTLPDIRKDFEIFCDASRQGLGCVLMQERKVVAYAFRQLRPHEVNYPTHDLELAAVFHALKIWRHYLIGNRCEVYTDHKSLKYIFTQTKLNMRQRRWLELIKDYDLGIHYHPGKANVVADALSRKAYCNVAQIRPDQDRLCRELEKLRLTVVQSGVPASLTVQPTLESQIREAQKDDEGIKELIKRIQEKKDTNFSIDDQGTVWCGPRICVPAKKELRDLILKEAHESAYSIHPGSTKMYQDIKAYFWWTGMKRDVAEYVALCDICQRVKAEHQRPAGLLQPLPIPEWKWEEIGMYFITGLPRTPSGYDSIWVIVDRLTKSAHFVPVKTIFDGKKLAELYMTHVVCRFGCPKKIVSDRGTQFTSRFWKQLHEALGTDLNFSTAYHPQTDGQTERVNQILEDMLRACALDFEGTWDRCLPYAEFSYNNSYQASIQMSPNEAMFGRKCRTPLCWNEVGEALVFGPDILKAAEEQVKLIRERLKTAQNRQKNYADNRRRDLEFEKGDHVYLRVSPLRGMRRFGMSGKLAPRYIGPYLITARRGEVAYQLELPEGLADVHNVFHVSQLKKCLRVPEEQVPLGNIELEKNLTYKERPIKVLEEAVRQTRRKTIKFYKVQWSNHSEDEATWEREDLLRAEFPELLP

SEQ ID NO: 20442 - protein, 1759 aa, Oryza sativa
  Clone ID: TF_OSC900225j.C1.p12.fg
MWSYLSYVWMKFQGNRSLSARAGNRTPVMAVNASFSSHGFGEGHHVAQLRDLARFLGFSCPEYTGYSVDRVPPHCELSVYLYPRGGIHGAGHFTVARPTLQIAYQDLSWTALRRLAHDYSHRLGGSAFRQLPRLPSGHSDARYPCPYSESQPVLTRMVELSEAQATQHDLLLEAYRSLARRYAALEARLAEEGVTSVDTISWDSGRLCHASHLSSHSSRGSARTPSGPRSPSSRAPYSPVYSPYPHPVSPSYTPGHTPVASSRRGPRFIRTARKRVVGSSTVFRFCHPAPPPPAARAAAGPRQTQILQGLTTAIASFQHNAHGNGHPHVGNNRSKLTDFLRSRPPKFSQTVEPVEADDWLKDVDRKLNLVQCTPVEKTLYASHQLRGPAADWWENYCNAHPEPTNIAWDEFATAFRAAHVPESTIDMKKEEFNRLKQGHSSVNEYLSQFNKLARYAPEEVDTDKKKIRKFLKGIAVGMRLQLLAHDFPTFQHMINKALLLEDARKEATEKYKKRKSNHQGNSSRGAPRPRYGQPMQYHQSLTQANRQPGYAPRPQINRPAPQPQKHAPSGNTAPNSVTSFKSPQGPSAVQCFRCNQMGHYARQCPQNPTNTNSGHANGSTARTPTPAAAQSRPSSQASGQGSRASNHFGRGRVNHIQAETAQDAPDVVMGMFSVNSVPAIVLFDSGASHSFISQAFVKRNGWKTQNLRVPMIVHSPGKNIGATQICPEVNLRIEEVDFLAKPIVLDSQSLNIILGMDWLAKHKGQIDCAEKSITLQGPGGKQVRFTPNTPTASRSILTCLQVTSLESVPIVCEYPDVFPEELTRMPPDREIEFAIELAPGTAPIAKRPYRMAANELAEVKRQIEELESKGAPVLLVKKKDGSERMVIDYRALNEVTIKNKYPLPRIDDLFDQLKGARVFSKIDLRSGYHQLKIRSEDIPKTAFSMRYGLYEFTVMSFGLTNAPAFFMNLMNKIFMEYLDQFVVVFIDDILIYSKNEEEHAEHLRLIMEKLRDHQLFAKFSKCEFWLDRVAFLGHVISSNGDEVDPSKVEAVLAWNPPKNVSVIRSFLGLARYYRRFIEGFSKLARPMTELLKKEKKFQWSTACEDSFQEMKKRLTTAPVLTLPDIRKDFEIFCDASRQGLGCVLMQERKVVAYASRQLRPHEVNYPTHDLELAAVIHALKIWRHYLIGNRCEVYTDHKSLKYIFTQTELNMRQRRWLELIKDYDLGIHYHPGKANVVADALSRKAYCNVAQIRPDQDHLCRELEKLRLTVVQSGVPASLTVQPTLESQIREAQKDDEGIKELIKRIQEKKDTNFSIDDQGTVWCGSRICVPAKKELRDLILKEAHESAYSIHPGSTKMYQDIKAYFWWAGMKRDVAEYVALCDICQRVKAEHQRPAGLLQPLPIPEWKWEEIGMDFITGLPRTPSGYDSIWVIVDRLTKSAHFVPVKTTYDGKKLAELYMTHVVCRFGCPKKIVSDRGTQFTSRFWKQLHEALGTDLNFSTAYHPQTDGQTERVNQILEDMLRACALDFEGTWDRCLPYAEFSYNNSYQASIQMSPNEAMFGRKCRTPLCWNEVGEALVFGPDILKSAEEQVKLIRERLKTAQDRQKNYADNRRRDLEFEKGDHVYLRVSPLRGMRRFGMSGKLAPRYIGPYLITARRGEVAYQLELPEGLADVHNVFHVSQLKKCLRVPEEQVPLGNIELEKNLTYKERPIKVLEEAERQTRRKTIKFYKVQWSNHSEDEATWEREDLLRAKFPELLP

SEQ ID NO: 20443 - protein, 1629 aa, Oryza sativa
  Clone ID: TF_OSC900240j.C1.p1.fg
MVELSEAQATQHDLLLEAYRSLARRYAALEACLAEEGVTSVDTISWDSGRLCHASHLSSHSSRGSALTPSGPRSPSSRAPYSPVYSPYPHPVSPSYTPGHTPVASSRRGPRFIRTARKRVVGSSNVFRFHYPAPPPPAARAAAGPRQMASRPRRAARAPARFGFEDGRVEPEENHESANEQSHHSNRSHRTVSRNAEVEQPRHSSRSHRTVSRDAEMEQSHRSHRTASHNSGEERLPSPPHVETNMQHLMAVQTQILQGLTTAIASFQHNAHGNGHPHMGNNRSKLTDFLRSRPPEFSQTVEPVEADDWLKDVDRKLNLVQCTPVEKTLYASHQLRGPAADWWENYCNAHPEPTNIAWDEFATAFRAAHVPESTIDMKKEEFNRLKQGNSSVNEYLSQFNKLARYAPEEVDTDKKKIRKFLKGIAVGMRLQLLAHDFPTFQHMINKALLLEDARKEATEEYKKRKSNHQGNSSRGAPRPRYGQPMQYHQSVTQANRQPGYAPRPQINRPAPQPQQRAPSSDTAPNSVTSFKSPQGPSAVQCFRCNQMGHYARQCPQNPTNTNSGHANGSTARTPTLAAAQSRPSSQASGQGSRASNNFGRGRVNHIQAETTQDAPDVVMGMFSVNSVPAIVLFDSGASHSFISQAFVKRNGWKTQNLRVPMIVHSPGRNIRATQICPEVNLRIEEVDFLAKPIVLDSQSLDIILGMDWLAKHKGQIDCAEKSITLQGPGGKQVRFTPNTPTASRSILTCLQVTSLESVPIVYEYPDKKDGSERMVIDYRALNEVTIKNKYPLPRIDDLFDQLKGARVFSKIDLRSGYHQLKIRSEDIPKTAFSTRYGLYEFTVMSFGLTNAPAFFMNLMNKIFMEYLDQFVMVFIDDILIYSKNKEEHAEHLRLIMEKLRDHQLFAKFSKCEFWLDRVAFLGHVISSNGVEVDPNKVEAVLAWNPPKNVSEIRSFLGLAGYYRRFIEGFSKLARPMTELLKKEKKFQWSAACEDSFQELKKRLTTAPVLTLPDIRKDFEIFCDASRQGLGCVLMQEQKVVAYASRQLRPHEANYPTHDLELAAVVHALKIWRHYLIGNRCEVYTDHKSLKYIFTQTELNMRQRRWLELIKDYDLGIHYHPGKANVVADALSRKAYCNVAQIRPDQDHLCRELEKLRLTVVQSGVPASLTIQPTLESQIREAQKDDEGIKELIKRIQEKKDTNFSIDDQGTVWCGPRICVPAKKELRDLILKEAHESAYSIHPGSTKMYQDIKAYFWWAGMKRDVAEYVALCDICQRVKAEHQRPAGLLQPLPIPEWKWEEIGMDFITGLPRTPNGYDSIWVIVDRLTKSAHFVPVKTSYDGKKLAELYMTHVVCRFGCPKKIVSDRGTQFTSRFWKQLHEALGTDLNFSTAYHPQTDGQTERVNQILEDMLRACALDFEGTWDRCLPYAEFSYNNSYQASIQMSPNEAMFGRKCRTPLCWNEVGKALHRTVRRITLTIGGVTLSSKKEIMCGDHVYLRVSPLRGMRRFGMSGKLAPRYIGPYLITARRGEVAYQLELPEGLADVHNVFHVSQLKKCLRVPEEQVPLGNIELEKNLTYKERPIKVLEEAERQTRRKTIKFYKVQWSNHSEDEATWEREDLLRAEFPDLLP

SEQ ID NO: 20444 - protein, 1824 aa, Oryza sativa
  Clone ID: TF_OSC900246j.C1.p23.fg
MNRILQMRSSSRSKPATMAVNASFSSHGFGEGHHIAQLRDLARFLGFSCPEYTGYSVDRVPPRCELSVYLYPRGGIHGAGLRPHHFTVARPPLQIEYQDLSWTALRRLAHDYSHRLGGSAFRQLPRLPSGHVVARYPCPYSESQPVLTRMVELSEAQATQHDLLLEAYRSLARRYAALEARLAEEGVTSVDTVSWDSGRLCHAIHLSSHSSRGSARTPSGPLSPSSRAPYSPVYSPYPNPVSPSYTPGHTPVASSRRGPRFIRTARKRVVGSSTVFRFDYPAPPPPVALAAVGPRQMASRPRRAARAPARFVFEEGRVEPEENHESANERSHHSNRSHRTASRNAEVEQPRRINRSHRTASRNAEMEQSHRSHRTASHNSGEERLPSPPHVENNMQHLMAVQTQILQGLAAAVAGFQHNAHGNGHPHMSNNRSKLTDFLRSRPPEFSQTIEPVEADDWLKDVDRKLNLVQCTPVEKTLYTSHQLRGPAADWWENYCNAHPEPTNIAWDEFATAFRAAHVPESTIDMKKEEFNRLKQGNSSVNEYLSMFNKLARYAPEEVDTDKKKIRKFLKGIAVGMRLQLLAHDFPTFQHMINKALLLEDARKEATEEYKKRKSNHQGNSSRGAPRPRYGQPMQYHQSVTQANRQPGYAPRPQMNRPAPQPQQRAPSGNTAPNSVTSFKSPQGPSAVQCFRCNQMGHYARQCPQNPTNTSSGHANGSTARTPTPAAAQSRPSSQASGQGSRASNNFGRGRMNHIQAETAQDAPDVVMGMFSVNSVPAIVLFDSGASHSFISQAFVKRNGWKTQNLRVPMIVHSPRSNIRATQICPEVNLRIEEVDFLAKPIVLDSQSLDIILGMDWLAKHKGQIDCAEKSITLQGPGGKQARFTSNTPTASRSILTCLQVTSLESVPIVCEYPDVEFAIELAPSTAPIAKRPYRMAANELAEVKRQIEELESKGYVRPSSSPWGAPVLLVKKKDGSERMVIDYRALNEVTIKNKYPLPRIDDLFDQLKGARVFSKIDLRSGYHQLKIRSEDIPKTAFSTRYGLYEFTVMSFGLTNAPAFFMNLMNKIFMEYLDQFVVVFIDDILIYSKNEEEHAEHMRLIMEKLRDHRLFAKFSKCEFWLDRVAFLGHVISSNGVEVDPSKVEAVLAWNPPKNVSEIRSFLGLAGYYRRFIEGFSKLARPMTELLKKEKKFQWSAACEDSFQEMKKRLTTAPVLTLPDIRKHFEIFCDASRQGLGCVLMQERKVVAYASRQLRPHEVNYPTHDLELAAVVHALKIWRHYLIGNRCEDYDLGIHYHPSKANVVADALSRKVYCNVAQIWPDQDRLCRELEKLRLTVVQSGVPASLTVQPTLESQIREAQKDDEGIKELIKRIQEKKDTDFSIDDQGTVWCGPCICVPAKKELRDLILKEAHESAYSIHPGSTKMYQDIKAYFWWAGMKRDVAEYVALCDICQRVKAEHQRPAGLLQPLPIPEWKWEEIGMDFITGLPRTPGGYDSIWVIVDRLTKSAHFVPVKTTFDGKKLAELYMTHVVCRFGCPKKIVSDRGTQFTSRFWKQLHEALGTDLNFSTAYHPQTDGQTERVNQILEDMLRACALDFEGTWDHCLPYAEFSYNNSYQASIQMSPNEAMFGRKCRTPLCWNEVGEALVFGPDILKSAEEQVKLIRERLKTAQNRQKNYADNRRRDLEFEKGDHVYLRVSPLRGMRFGMSGKLAPRYIGPYLVTARRGEVAYQLELPEGLADVHNVFHVSQLKKCLRVLEEQVPLGNIELEKNLTYKERPIKVLEEAERQTRRKTVKFYKVQWSNHSEDEATWEREDLLRAEFPELLP

SEQ ID NO: 20445 - protein, 1792 aa, Oryza sativa
  Clone ID: TF_OSC900308j.C1.p18.fg
MMAVNASFSSHGFGEGHHVAQLRDLARFLGFSCPEYTGYSVDRVPPHCELSVYLYPRGGIHGAGLCPHHFTVARPTLQIAYQDLSWTALRRLAHDYSHRLGGSAFRQLPHLPSGHSDARYPCPYSESQPVLTRMVELSEAQATQHDLLLEAYRSLARRYAALEARLAEEGVTSVDTISWDSGRLCHASHLSSHSSRGSARTPSGPRSPSSRAPYSPVYSPYPHPVSPSYTPGHTPVASSRRGPRFIRTARKRVVGSSTVFRFHYPAPPPPAARAAAGPRQMASRPRRAARAPARFGFEDGRVEPEENHESANEQSHHSNRSHRTVSRNTEVEQPRRSSRSHRTVSRDAEMEQSHRSHRTASHNSGEERLPSPPHVETNMQHLMAVQTQILQGLTTAIASFQHNAHGNGHPHMGNNRSKLTDFLRSRPPEFSQTVEPVEADDWLKDVDRKLNLVQCTPVEKMLYAFHQLRGPAADWWENYCNAHPEPTNIAWDEFATAFRAAHVPESTIDMKKEEFNRLKQGNSSVNEYLSQFNKLARYAPEEVDTDKKKIRKFLKGIAVGMRLQLLAHDFPTFQHMINKALLLEDARKEATEEYKKRKSNHQGNSSRGTPRPRYGQPMQYHQSVTQANRQPGYTPRPQMNRPAPPPQQCAPSGNTAPNSVTSFKSPQGPSAVQCFRCNQMGHYARQCPQNPTNTNSGHANGSTARTPTPAAAQSRPSSQASRQGSRASNHFGRGRVNHIQAETAQDAPDAVMGMFSVDSVPAIVLFDSGASHSFISQAFVKRNGWKTQKLRVPMIVHSPGRNIRATQICPEVNLRIEEVDFLAKPIVLDSQSLDIILGMDWLAKHKGQIDCAEKSITLQGPAGKQVRFTPNTPTASRSILTCLQVTSLESVPIVYEYPDVFLEELTRMPPDREIEFAIELAPGTAPIAKRPYRMAANELAEVKRQIEELESKGYVRPSSSPWGAPVLLVKKKDGSERMVIDYRALNEVTIKNKYPLPRIDDLFDQLKGARVFSKIDLRSGYHQLKIRSEDIPKTAFSTRYGLYEFTVMSFGLTNAPAFFMNLMSKIFMEYLDQFVVVFIDDILIYSKNEEEHAEHLRLIMEKLRDHQLFAKFSKCEFWLDRVAFLGHVISPNGVEVDPSKVEAVLAWNPPKNVSEIRSFLGLAGYYRRFIEGFSKLARPMTELLKKEKKFQWSAACEDSFQEMKKRLTTAPVLTLPDIRKDFEIFCDASRQGLGCVVMQERKVVAYASRQLRPHEVNYPTHDLELAAVVHALKIWRHYLIGNRCEVYTDHKSLKYIFTQTELNMRQRRWLELIKDYDLGIHYHPGKANVVADALSRKAYCNVAQIRPDQDHLCRELEKLRLTVVQSGVPASLTVQPTLESQIREAQKDDEGIKELIKRIQEKKDTNFSIDDQGTVWCGPRICVPAKKELRDLILKEAHESAYSIHPGSTKMYQDIKAYFWWAGMKRDVAEYVALCDICQRVKAEHQRPAGLLQPLPIPEWKWEEIGMDFITGLPRTPNGYDSIWVIVDRLTKSAHFVPVKTTYDGKKLAELYMTHVVCRFGCPKKIVSDRGTQFTSRFWKQLHEALGTDLNFSTAYHPQTDGQTERVGEALIFGPDILKSAEVQVKLIRERLKTAQNRQKNYADNRRHDLEFEKGDHVYLRVSPLRGMRRFGMSGKLAPRYIGPYLITARRGEVAYQLELPEGLADVHNVFHVSQLKKCLRVPEEQVPLGNIELEKNLTYKERPIKVLEEAKRQTRRKTIKFYKVQWSNHSEDEATWEREDLLRAEFPELLP

SEQ ID NO: 20446 - protein, 1598 aa, Oryza sativa
  Clone ID: TF_OSC900308j.C1.p26.fg
MAANSIRAQELAWVVELSMMANSVQYMASRPRRAARAPARFGFEDGRVEPEENHESANEQSHHSNRSHRTVSRNAEVEQPRRSSRSHRTVSRDAEMEQSHRSHRTASHNSGEERLPSPPHVETNMQHLMAVQTQILQGLTTAIASFQHNAHGNGHPHMGNNRSKLTDFLRSRPLEFSQTVEPVEADDWLKDVDRKLNLVQCTPVEKTLYASHQLRGPTADWWENYCNAHPEPTNIAWDEFATAFRAAHVPESTIDMKKEEFNRLKQGNSSVNEYLSQFNKLARYAPEEVDTDKKKIRKFLKEIAVGMRLQLLAHDFPTFQHMINKALLLEDARKEATEEYKKRKSNHQGNSSRGAPRPRYGQPMQYHQSVTQANRQPGYAPRPQINRPAPQPQQRAPSSDTAPNSVTSFKSPQGPSAVQCFRCNQMGHYARQCPQNPTNTNSGHANGSTSRTPTPAAAQSRPSSQASGQGSRASNNFGRGRVNHIQAETAQDAPDVVMGMFSVNSVPAIVLFDSGASHSFISQAFVKRNGWKTQNLRVPMIVHSPGSNIRATQICPEVNLRIEEVDFLAKPIVLDSQSLDIILGMDWLAKHKGQIDCAEKSITLQGPGGKQVRFTPNTPTASRSILTCLQVTSLESVPIVCEYPDVFPEELTRMPPDQEIEFAIELAPGTAPIAKRPYRMAANELAEVKRQIEELESKGYVRPSSSPWGAPVLLVKKKDGSERMVIDYRALNEVTIKNKYPLPRIDDLFDQLKGARVFSKIDLRSGYHQLKIRSEDIPKTAFSTRYGLYEFTVMSFGLTNAPAFFMNLMNKIFMEYLDQFVVVFIDDILIYSKNEEEHAEHLRLIMEKLRDHRLFAKFSKCEFWLDRVAFLGHMISSNGVEVDPSKVEAVLAWNPPKNVSEIRSFLGLAGYYRRFIEGFSKLARPMTELLKKEKKFQWSAACEDSFQELKKRLTTAPVLTLPDIRKDFEIFCDASRQGLGCVLMQEQKVVAYASRQLRPHEANYPTHDLELAAVVHALKIWRHYLIGNRCEVYTDHKSLKYIFTQTELNMRQRRWLELIKDYDLGIHYHPGKANVVADALSRKAYCNVAQIRPDQDHLCRELVKLRLTMVQSGVPASLTVQPTLESQIREAQKDDEGIKELIKRIQEKKDTNFSTDDQGTVWCGPRICVPAKKELRDLILKEAHESAYSIHPGSTKMYQDIKAYFWWAGMKRDVAEYVALCDICQRVKPEHQRPAGLLQPLPIPEWKWEEIGMDFITGLPRTPNGYDSIWVIVDRLTKSAHFVPVKTTYDGKKLADLYMTHVVCRFGCPKKIVSDRGTQFTSRFWNQLHEALGTDLNFSTAYHPQTDGQTERVNQILEDMLRACALDFEGTWDRCLPYAKFSYNNSYQASIQMSPNEAMFGRKCRTPLCWNEVGKALVFGPDILKLAEEQVKLIRERLKTAQNRQKNYADNRRRDLEFEKGDHVYLQVSPLRGMRRFGMSGKLAPRYIGPYLITARRGEVAYQLELPEGLADMHNVFHVSQLKKCLRVPEEQVPLGNIELEKNLTYKERPIKVLEETERQTRRKTIKFYKVQWSNHSEDETTWEREDLLRAEFPDLLP

SEQ ID NO: 20447 - protein, 688 aa, Oryza sativa
  Clone ID: TF_OSC400732j.C1.p19.fg
MSHLEGTGGLDDKGDASSTKDTGPKGATIHFDYGKLNVPPHNFVSVPSGRVPQFDGTHYAAWKHKMKLHLISLHPSIWKVVCTEEFNKVDGLEEAKEIWERRPRRYGILCNWLMRDHPPFRLLRAFGPRNPTLVLMIRERKDFKRLTPSDILGRIVCHEMQEEEAREVRQMVKNATMIKNQEVVLKAKQEEESSYEESEDEEMAFIVKRFKHFLRKSGYGKGRKEDDKGKRQSKRACFNCGKYGHFIADCPKSNEAKVKGGKKKPERAHVAEAHMAEESLAKECAKNEQLANELNLANGSLASLRDVNETLQDKFANLDKSHKDLEVQFDTLSNSTYQPNVVSNPSNPSTSNGCARCYNIDLNSYDTNVDAMQALKKENERLGTLMKYGCMKTYHSKDALYKTITAHPNKDGHGLRFSGGSPVSKRVMVNGKECLMFVREGKAPQASEVTCPFTGQTPGSSGQNDRKFLPCKTGSFKHFVRKFRASDRQKGLTGSSGYNTRKFRPEDLYYDSYVISKNSEGKMVAYFNGNYNDEYRTCVGVPKALAYSSGGSSWVVDSGCTNYMMGERSMFTSLDEEGGSRENIVFGDNGKGKVMGLGFNCLFTDVDMTVFKRDDSSIALKGVLKGDLYLVDFDVDRVNPEACLIAKSSMRWLWHRRLAHVGMRNLASLLKGEHIIGLSNVSFEKDRV

SEQ ID NO: 20448 - protein, 487 aa, Oryza sativa
  Clone ID: TF_OSC14509j.C1.p1.fg
MSWHKAGVLLLGGSILPACPGGSGRRWGWMFNREKEKNVRGYASSNSSFQLNPPLASRELTRAHPWSIPSMLLGSQLPLVGSQDQNQYVFDQAFATQVNELPMPEEHVPFCHDCREQGHYALNCPWVYAKEAPSFGLAGQTSLNPPPRTKSSLQPSVQGREPNGENPLNPENCFPPSLSYHVGSRTKQAKGKKSKSQKRKAPMRTKEEVRKMTITSAEWPPAGITIPRRQRGNTFRGARRLTQHLLSHGGRVSDQVSSDDEDESPRHLGEEEMESKACTRCGEIGHVASMCLTLCLHCEEDHPPDRCPTSRITCFFCEGTDHVPKDCQSSFLLTKKMANQPASSNGEKHQGNTNPRQDYSFSLTPVPGQRNQNEKRKCRVREDICCFNCQGMGHFADKCPKPRNIAASTSVHATPCNQKLAPQRIVIHASRSSPIARVATAPTPASALPQGVNAQFQPQPSVDKTEASIGIVPLDVPAQQPKKSSTR

SEQ ID NO: 20449 - protein, 410 aa, Oryza sativa
  Clone ID: TF_OSC400775j.C1.p63.fg
MDISRTNEGFTSCGPVVEMSWHRAGVLLLGAQSCLPVPEVPAVGGVGSVLLSMARMGWKLCHVFRPYTVVVDELPMPEEDVPFCHDCREQGHYALNCPWVYAKEAPSFGLAGQASLNQPPRTKSSLQPSVQSREPNGENPLNPENCFPPILSYHVGSRTKQAKGKKSKNQKRKAPMRTEEEVRKMTITSTEWPPARITIPRRQRGNTFRGARQLTQHLLSHGGRVSDSEGSDQVSSDDEDESPRHLGEEEMESKACTRCGEIGHVASMCLTLCPHCEEDHPPGECPTRKVTCFLCEGTNHVLKDCQLSVLLTKTAEIQRTTLRLSHQLVSSNSNIDNIIHNTNAPPAPPDSAINHSNNTFSTNHSLHRQPQQRIVVDGRSCVSPRPTPGRAKGNQSQEGDTKQKTVLCFK

SEQ ID NO: 20450 - protein, 448 aa, Oryza sativa
  Clone ID: TF_OSC411686j.C1.p1.fg
MDISRTNEGYTSCGPVVEMSWHRAGVLLLGAQSCLPVPEVPAVGGVGSVLLFMARMGWELCHVFRPYTMVNKPNIHHNSKRLRSVKMADNEKGNKVRSQDIGTSSSRVNEAPDTSCVTLVQHLINQNQLLIEILQQHQTPILNLSQMQPQVQLEAVQALTPQVSMPPASRRTHGDVPHVDSKEASIICFMCDEQGHYARECPQQKRKTPMRTEDEVRKMIITSTEWPPPGMTKRQRRHTFRGAPQLTEHLLANGGRVSDSEDSDQVSSDDEDEMERKACSRCGENRSCCQLFSADEEDGQPTRQFQRREASRQHKSRQDYSFSLTPVPGQRNQNEKRKCRVREDICCFNCQGMGHFADKCPKPRNIAASTSVHATPCNQKLAPQRIVIHASRSSPIARVATAPTPASALPQGVNAQFQPQPSVDKTEASIGIIPLDVPAQQPKKSSTR

SEQ ID NO: 20451 - protein, 351 aa, Oryza sativa
  Clone ID: TF_OSC900406j.C1.p3.fg
MADNEKGNKVRSQDIGTSSSRVNEAPDTSCVTLVQHLINQNQLLIEILQQHQTPILNLSQMQPQVQLEAVQALTPQVSMPPASRRTHGDVPHVDSKEASIICFMCDEQGHYARECPQQKRKTPMRTEDEVRKMIITSTEWPPPGMTKRQRRHTFRGAPQLTEHLLANGGRVSDSEDSDQVSSDDEDEMEHCQFSFLLTKKMANQPASSNGEKHQGNTNPRQDYSFSLTPVPGQRNQNEKRKCRVREDICCFNCQGMGHFADKCPKPRNIAASTSVHATPCNQKLAPQRIVIHASRSSPIARVATAPTPASALPQGVNAQFQPQPSVDKTEASIGIIPLDVPAQQPKKSSTR

SEQ ID NO: 20452 - protein, 1470 aa, Oryza sativa
  Clone ID: TF_OSC14180j.C1.p3.fg
MASRRRATTSNDETQTPDLNTLAGIMATQTQLLQAIASNQGNRGGSSFGEFMRTKPPTFATADEPMEAEDWLRIIEKKLTLVRVREADKVIFAVNQLEGPAGDWWDTYKEAREDGAGEPTWEEFTAAFRENFVPTAVMRMKKNEFRRLRQGNTTVQEYLNKFTQLARYAIGDLADEEEKIDKFIEGLNDELRGPMIGQDHESFQSLINKVVRLENDQRTVEHNRKRRLAMSRPPQTMPQRLKGATPSGWKPPVMVTNRPAALSNFNRPVALQNRTPTPTLAAPGAKKNVDCFNCGKYGHYANNCPHPRKTPVRTGANAMTVRGTTTPAVGRGLFKTPQPNRTTTGFGRGQVNHVRAEEAQEDQGVLMGMFSLNSTPIKVLFDSGALHSFISLKASQQHNLTRVKLRQPMLVHSPGGEIAVDTACIDVPIRLRDVVFPSNLMVLIPQTLDVILGMDWLAKHRGVIDCRRREVTLTTPWGSDMRATMDQDPRLTERAGGIFTMLPLKGMPVVQRFPDVFPEDLPGMPPDRDIEFIIDLIPGTAPISKRPYRMPVNELEELKKQIRELQEKGFVRPSSSPWGAPVLFVKKKDGSMRMCVDYRSLNEVTIKNKYPLPRIDDLFDQLKGAKVFSKIDLRSGYHQLKIRTEDIPKTAFSTRYGLYEFTVMSFGLTNAPAYFMNLMNKVFMDYLDKFVVVFIDDILIYSKDEEEHAEHLRLVLQKLRKHKLYAKFSKCEFWLKEVAFLGHVISAGGVAVDPAKVEAVTEWKAPKSVTEIRSFLGLAGYYRRFIEGFSKIARPMTQLLKKEKKFAWSEQCQGSFEQLKEKLTSAPILVLPDIRKDFVVYCDASRQGLGGVLMQEGKVVAYASRQLRPHEENYPTHDLELAAVVHALKIWRHYLIGNHCDIYTDHKSLKYIFTQSDLNLRQRRWLELIKDYDLEVHYHPGKANVVADALSRKSHCNHLRTEGMVPELREEMAQLNLHIVPHGQINTLDIQPLLRTQIEEAQKDNEEVREVKERLAAGRAKEFSTDEKDVLWYKKRIYVPEQGGLRGLILKEAHESAYSLHPGSTKMYQDLKEGYWWPNMKRDVAEYVALCDVCQKVKAEHQRPAGLLQPLRIPEWKWDEIGMDFIVGLPKTATGYDSIWVIVDRLTKTARFIPVKTNYSSAKLAELYMTRIVCLHGIPKKIISDRGTQFTSHFWEKVHEALGSYLAFSTAYHPQTDGQTERTNQVLEDMLRACALDFSKDWERCLPYAEFSYNNSFQASLKMSPNEALFGRRCRTPLMWSETGERAVFGPDIIQEAEEKVRLIRDRLKVAQSRQKSYADTRRRNLEFKEGDYVYLKVSPMRGTKRFKVKGKLAPRYVGPFQIIARRGEVAYQLQLPEYIADVHPVFHVSQLKKCLRVPEEQAPLEEIHISNDLTYPEHPIRILDEAEKRTRSKVWRMYKVQWSNHTEDEATWEGEEFLRTEYPHLFGNW

SEQ ID NO: 20453 - protein, 526 aa, Oryza sativa
  Clone ID: TF_OSC900039j.C1.p14.fg
MADNEKGNKVRSQDIGTSSSRMNEAPDTSCVTLVQHLINQNRLLIEILEQHQTPILNLSQIQPQVQLEAVQALTPQVSMPPASRRTHGDVPHVGSKEASIICFMCDEQGHYARECPQQKRKTPMRTEDEVRKMIITSTEWPPPGMTKRQRRNTFRGVSQLTEHLLANGGRVSDSEDSDQVSSDDEDEMERKACSRCGEIGHVASSCATTCVHCEEDHPPDRCPTSRITCFFCEGTDHIPKDCQFNFLLTKKMANQPASSNGEKHQGNTNPRQDYSFSLTPVPGQRNQNEKRKCRVREDICCFNCQGMGHFADKCPKPRNIAAGTSVHATPCNQKLASQRIVIHASRSSPISRVATAPTPASALPQGVNAQFQPQPSVDKTEASIGIVPLDVPAQQPRNQVQDEEPEPIIPLAPTILCTDSLSKELSSMEEVVSLPDLLQAEPRAINLWRAIPSRRPSSASNSTQKEASPVNDGNMQSYHIITEPIKDDAVTRTTPAISLQNQNEQPRLWFSVRYLSLCNRKFAAIM

SEQ ID NO: 20454 - protein, 815 aa, Oryza sativa
  Clone ID: TF_OSC29958j.C1.p1.fg
MSGTSSDEPTLENLAHKLKGMENWYEELMRNSKSYKESTDKHLKTLSENLVKVVDQIEQMNQSHKQLTENIQNMNIGHENIVRCIGLLETAGEEGAGATAHRHQRYDDEDEEQSVADDEEEDESVGNRRRHRVRDKDDPLSKVKFTMLSFDGKFEPSVYLDWELAVEQKFSCYDFTDNKKVKAAISELTSFASLWWNDICGRGLRPRTWDYMKRIMRSRFVSSYYACDMLNKLQLLRQGSSSVETYYQEMMIALSRCDMQETEDARISRFYGGLNREIWDILEYKEYNTMNRLFHFACKAEREVQGLNKHRSSFAGATSTRQLTPRQSTTAFRPPTSTPSHAQETSKNASVQTPAKSATSVASTRRTREITCHRCHDIGHIARDCPNRRALFMNDDGEYTSASDCDDEYALAATDHAGGQDNDVIKEVHLHPESLDQYPSLIVKLALSAKEKCEEQNQHHNLFQSKVLVKGHTIKMIIDNGSCNNLASEEMVKKLGLTTIHIHIRIIFSGSYHDQIECDVVHMQACSVILGRPWQYDREVVFDGRTKTYKFMFNGKRVVLHSMTPAAALKDDLARLECEKKAKSENQIITKNLVSPSTTEPSATKNEIKLTGALLASKYNICALYEPDSCCYALFCKDPILTLATASSSLYSLPPAITNLLHGYEGVFHDEIHPRMTPERESEHDHEDEIESRTTPIQEGEDDEDINSSDTLITSHVQMIISSPSPVRPPETTLTSNGSSAFMPTPIWVILDFMENLSANFQTHPVSCPNSSRVNGNRQNKTALLLKLNLGLGPCNRLGPSRKCLPSPPRISTYP

SEQ ID NO: 20455 - protein, 707 aa, Oryza sativa
  Clone ID: TF_OSC29958j.C1.p3.np
MSGTSSDEPTLENLAHKLKGMENWYVRNSKSYKESTDKHLKTLSENLVKVVDQIEQMNQSHKQLTENIQNMNIGHENIVRCIGLLETAGEEGAGATAHRHQRYDDEDEEQSVADDEEEDESVGNRRRHRVRDKDDPLSKVKFTMLSFDGKFEPSVYLDWELAVEQKFSCYDFTDNKKVKAAISELTSFASLWWNDICGRGLRPRTWDYMKRIMRSRFVSSYYACDMLNKLQLLRQGSSSVETYYQEMMIALSRCDMQETEDARISRFYGGLNREIWDILEYKEYNTMNRLFHFACKAEREVQGNKHRSSFAGATSTRQLTPRQSTTAFRPPTSTPSHAQETSKNASVQTPAKSATSVASTRRTREITCHRCHDIGHIARDCPNRRALFMNDDGEYTSASDCDDYALAATDHADDVIKEVHLHPESLDQYPSLIVKLALSAKEKCEEQNQHHNLFQSKVLVKGHTIKMIIDNGSCNNLASEEMVKKLGLTTPHPHPYHIQWFNICGKMKVTRLVKIPFSIGSYHDQIECDVVHMQACSVILGRPWQYDREVVFDGRTKTYKFMFNGKRVVLHSMTPAAALKDDLARLCEKKAKSENQNQVPQRMKLRTGALLASKYNICALENQNQVPQRMKLRTGALLASKYNICALYEPDSCCYALFCKDPILTLATASSSLYSLPPAITNLLHGYEGVFHDEIHPRMTPERESEH

SEQ ID NO: 20456 - protein, 1004 aa, Oryza sativa
  Clone ID: TF_OSC17176j.C1.p5.fg
MAKFVGDITAVGQRDVALNIVGAVGFSGDADDLRTNLDEVHANKVSDRGFGELFTNVEDAMSMQCARHSRSGHCGHLARSARGVKRLLGPLMMVEPLILMHRCYHLPQTRVAKVCCLALNPKQRWDSGSGNIKEIKIRGELGLRDEQSSSDAALTWQSTRTLRKHLLIRRGECWSEYSSIVNTDDEAKATCNSFCETCWKILRFRSNQTFHQLNPFLNLRNRCNRVKHGNPMVVLQFHLEIISLSFGKLENRGRNVLRGRLRYLQGKDFRLPVKEGRRPSTSIPEHDIGKISVLIKSLYAYNLNNPKTYYRHCDFTMAGFADALRPDKFTGVHFKRWQIRVTLWLTAMKCFWVSTGKPEGVLTAEQQKQFEEATTLCVGCILSVLGDRLVEVYMHMTDAKELWDALNTKFGATDASNDLYIMEQFHDYKMADNRSVVEQAHEIQTMAKELELLKCVLPDKFVARCIIAKLPPSWRSFGTALKHKRQEYSVEGLIASLDVEEKAREKDAASKGDGGQSSANVVHKAQNKSKGKYKAQQTTNFKKQKKNNNNPNQDERTCFVCGQLGHLARKCPQRKGMKAPTGQTSKSANVTISNTGDGSGYGNLPAIFSVNQSTNWWVDTRSNVARGSTVLMGNGSHVSVHGVGTVDLKFTSGKIVQLKNVQHVPSIDRNLVSGSRLTRAGFKLVFESNKVVVSKHGYFIGKGYECGGLFRFSLSDFCNKSVNHICGSVDDEANVWHSRLCHINFGLMSRLSSMCLIPKFSIVKGSKCHSCVQSKQPRKPHKVAEERNLAPLELLHSDLCEMNGVLTKGGKRYFMTLIDDATRFCYVYLLKTKDEALDYFKIYKAEVENQLDRKIKRLMSDRSGEFFSNEFDLFCEEQDIIHERTPPYSPESNGIAKRKNRTLTDLVNAMLDTAGLPKAWWGEALLTSNYVLNRVPNRNKDKTPYEIWIGRKPSLSYLRTWGCLAQVNVPITNKHKLGPKTVDCVFLGYAYHNIAYRFLIVKSE

SEQ ID NO: 20457 - protein, 1224 aa, Oryza sativa
  Clone ID: TF_OSC30381j.C1.p1.fg
MAGFADALRPDKFTGVHFKRWQIRVTLWLTAMKCFWVSTGKPEGVLTAEQQKQFEEATTLFVGCILSVLSDRLVEVYMHMTDAKELWDALNTKFDATDASNDLYIMEQFHEYKMADNRSVVEQAHEIQTMAKELELLKCVLPDKFVAGCIIAKLPPSWRSFGTALKHTRQEYSVEGLIASLDVEEKAREKDVASKGDGGQSSANVVRKAQNKSKGKYKAQQTTNFKKQKKKNNNPNQDERTCFVCGQLGHLARKCPQRKGMKAPAGHTSKSANVTIGNTGDGSGYGNLPTVFSVNQSTNWWVDTGANVHVCADISLFSSYQDARGSTVLMGNGSHASVHGVGTVDLKFTSGKIVQLKNVQHVPSIDRNLVSGSRLTRDGFKLVFESNKVVVSKHGYFIGKDYKCGGLFRFYLSDFCNKSVNHICGSVDDEANVWHSRLCHISFGLMSRLSSMCLIPKFSIVKGSKCHSCMQSKQPRKPHKAAEERNLAPLELLHSDLCEMNGVLTKDGKRYFMTLIDDATRFCYVYLLKTKDEALDYFKIYKAEVENQLDRKIKRLRSDRGGEFFSNEFDLFCEEHDIIHERMPPYSPESNGIAERKNRTLTDLVNAMLDTAGLPKAWWGEALLTSNHVLNRVPNRNKDKTPYEILIGRKPSLSYLRTWGCLAKVNVPITKKRKLGPKTVDCVFLGYAHHSIAYRFLIVKSEVPNIHVGTIMESRDATFFESFFPMKDTHSSSSQPSEIILSSITPPEQTEHTHEHVTEEDDSEAPRRSKRQRTAKSFGDDFTVYLVDDTPKSISEAYASPDADYWKEAVRSEMDSIIANGTWEVTERPYGYKPVRCKWVLKKKLRPDGTIEKYKARLVAKGYTQKEGEDFFRTYSPVARLTTIRVLLSLAASHGLLVHQMDVKTAFLNGELDEEIYMDQPDGFVVEGFAVNEADKCVYYRHGGGEGVILCLYVDDILIFGTNLEVINEVKSFLSQNFDMKDLGVADVILNIKLIRGENGITLLQSHYVEKILNRFGYIDSKPSPTPYDPSLLLRKNKRIARNQLEYFQIIGSLMYLASATRPDISFVVSKLSRFTSNPGDDHWRALERVMRYLKGTVELGLHYTGYPAVLEGYSDSNWISDVDEIKATSGYVFTLGGGAVSWRSCKQTILTRSTMQAELMALDTATVEAEWLRDLLMDLTIVEKPVAAILMNCDNQTTCEKMIEVCQEIKKLRSYNVGLHPNS

SEQ ID NO: 20458 - protein, 433 aa, Oryza sativa
  unsure (1)..(433): unsure at all Xaa locations
  Clone ID: TF_OSC401605j.C1.p25.np
MAGFADALRPDKFTGVHFKRWQIRVTLWLTAMKCFWVSTGKPEGVLIAEQQKQFEEATTLFVGCILSILGDRLVEVYMHMTDAKELWDALNTKFGAIDASNDLYIMEQFHDYKMADNRSVIKQAHEIQTMAKELKLLKCVLPDKFVAGCIIAKLPPSWRSFGTALKHKRQEYSVEGLIASLDVEEKAQEKDAVSKGDGGQSSANVVHKAQNKSKGKYKAQQTTNFKKQKKNDNNPNQDERTCFVCGQLGHLARKCPQRKGMKAPAGQTSKSANVTIGNTGDGSGYGNLPIVFSVNQSTNWWVDTGANVHVCADISLFSSYQDARGSTVLMGNGSHASVHSVGTVDLKFTSGKIVQLKNVQHVPSIDRNLVSGSRMTRDGFKLVFKSNKVVVSKHGYWGARGVGADGLRKITLGVHIHISLTAINAEMKIXATG

SEQ ID NO: 20459 - protein, 868 aa, Oryza sativa
  Clone ID: TF_OSC414535j.C1.p29.gm
MRWRMRSSSVRASFSPAVRGLRRFFPPTTQRGDEEQCLEQRRRDTTAWSALPISSDAFHRATVVSTAISLFAFSTRRRSTSPSPLSAHHRSTSSSAHSARRRPAPSCRLHAPPLHGLTGLQNLCLRRFCLRLCAAPSLVDYSIPLAGVHLRSGEQVSRTSAFDVPHREKAAIKFLGSALRDCSLVTLWLTAMKCFWVSTGKPEGVLTAEQQKQFEEATTLFVGCILSVLGDRLVEVYMHMTDAKELWDALNTKFGATDASNGLYIMEQFHNYKMADNRSVVEQAHEIQTMAKELELLKCVLPDKFVAGCIIAKLPPSWRSFGTTLKHKRQEYSVEGLIASFDVEEKAREKDAASKGDGGQSSTNVVHKAQNKSKGKYKAQQTTNFKKQKKNNNNPNQDERTCFVCGQLGHLARKCPQRKGMKAPAGQTSKSANVTIDNTGDGSRYGNLPTDARGSTVLMGNVSHASVHGVGTVDLKFTSGKIVQLKNVQHVPSIDRNLVSGSRLTRDGFKLVFESNKVVVSKHGYFIGKGYECGGLFRFSLSDFCNNEAPRRSKRQRTAKSFGDDFTVYLVDDTPKSISEAYASPDADYWKEVVRSEMDSIIANGTWEVTERPYGCKPVGCKWVFKKKLRPDELDDEIYMDQPDGFVVEGQEGKASQSMRWGPPVGSFPHLPPIPARRRAETAAAPTPPSLPGHVGHARACAASPAPFPLSLPFAPAPEMAGIRKPNPASLSSPLPPRSSPSRAVAAVSFAGSRSTSAASSPSRFVAGALIPTRTGHAEARPPSPSPPVARRRRSPSSSSAPATLGEASPLLSFPVSPCVAATRARRRFGSLPPSAAAAFASPPPPGAVAGNPFARAPSPSPRPVGRS

SEQ ID NO: 20460 - protein, 1284 aa, Oryza sativa
  Clone ID: TF_OSC900320j.C1.p19.fg
MASFADALRPDKFTGVHFKRWQIRVTLWLTAMKCFWKQFEEATTLFVGCILSVLGDRLVEVYMHMTDAKELWDALNTKFGATDASNDLYIMEQFHDYKMADNRSVVEQAHEIQTMAKELELLKCVLPDKFVVGCIIAKLPPSWRSFGTVLKHKRQEYSVEGLIAPLDVEEKAREKDAASKGDGGQSSANVMHKAQNKSKGKYKAQQTTNLKKQKKNNNNPNQDERTCFVCGQLGHLARKCPQRKGMKAPVGQTSKSANDARGSTVLMGNGSHASVHGVGTVYLKFTSGKIVQLKNVQHVPSIDRNLVSGSRLIRDRFKLVFESNKVVVSKHGYFIGKGYECGGLFRFSLSDFCNKSVNHICGSVDDEANVWHSCLCHINFGLMSRLSSMCLIPKFSIVKGSKCHSCVQSKQPRKPHKAAEERNLAPLELLHSDLCEMNGVLTKGGKRYFMTLIDDATRFCYVYLLKTKDEALDYFKIYKAEVENQLDRKIKRLRSDRGGEFFSNEFDLFCEEHGIIHERTPPYSPESNGIAERKNRTLTDLIGRKPSLSYLRTWGCLAKVNVPITKKRKLGPKTVDCVFLGYAHYNIAYRILIVKSEVPDMHVGTIMESRDATFFESFFPMKDTHSSLSQPSEIITSSITPPEQTEHTHEHVTEEDDSEAPRRSKRQRTAKSFGDDFTVYLVDDTPKSISEAYASPDADYWKEVVRSEMDSIIANGTLEVTERPYECKPVGCKWVFKKKLGHDGTIEKYKARLVAKGYTQKEGEDFFDTYSPVARLTTIRVLLSLAASHGLLVHQMDVKTSFLTGELDEEIYMDQPDGFVVEGQKGKVCKLLKSLYGLKQAPKQWHEKFDKTLTSTGFAVNEADKCVYYRYGGGEGVILCLYVDDILIFGTNLEVINEVKSFLSQNFDTKDLGVVDVILNIKLIKGENGITLLQSHYVEKILNRFGYIDSKPSPTPYDPSLLLRKNKRIARNQLEYSQIIGSLMYLASTTRPDISFVVSKLSRFTSNPGDNHWRALERVMRYLKGTVELGLHYTGYPAVLEGYSDSNWISDVDEIKATSGYVFTLGGGAVSWRSCKQTILTRSTMEAELTALDTATVEAEWLRDLLMDLPIVEKPVPAIVMNCDNQTVIVKVNSSKDNMKSSRHVKRRLKSVRKLRNSGVITLDYIQTARNLADPFTKGLSRNVIDNASKEMGLRPIEDAVLQSILERTHLFELDCWSQSMEILGESSRKLTKDLGFCFAANSDSFLFWKRSEKSDYSIPLAGVHLRSGEQVSGTSAFDVLHRE

SEQ ID NO: 20461 - protein, 449 aa, Oryza sativa
  Clone ID: TF_OSC10753j.C1.p1.fg
MDNTGNKGYGNDGSDDSRTQANGNEKSINETSPELIQIVVNQTNMLATAFQLLQNRNNPAGATNVQVPTVQQQCKLSEFLKTGPPTFAIAVDPMEASDWLRTIEKKLGLIQCTDQERVGFATHQLVGPASEWWDSYETSRPEGHAITWNEFSSVFKRSHVPAGMITLRKREFRYLKQGDLTVTEYLHEFYRLAHYAPEDVETDEGKQEKFLQGLKDELAVQLLLEDYEDFEKLVDKAMQLESEHNRMTNCKRRIVNIPVIPGGNQRQRTEPLQITGSSVVHQEFLPQEDERNADNNTSNTNDDDTTNNHGSCPISDHSNKACNVSSIHQDVNDSINVGTQNDNLSNFDSGKDSNGDSNNGTTDANVSKDSQPPIPTPSQNDRPQMDSSVKKTLICYNCKEPGHFSRDCPQPKRNLRHHSGHYARRRQVTRLVVTGANAIPVRPHVNSNP

SEQ ID NO: 20462 - protein, 564 aa, Oryza sativa
  unsure (1)..(564): unsure at all Xaa locations
  Clone ID: TF_OSC12554j.C1.p1.np
MDSTGNKGYGNDGSDDSRTQANGNEKSINETSPELIQVVVNQTNMLATAFQLLQNRNNPAGATDVQVPTVQQQCKLSEFLKTGPPTFAMAVDPMEASDWLRTVEKKLGLIQCTDQERVGFATHQLVGPASEWWDSYEASRPEGHTITWNEFSSVFRRSHVPAGMITLRKRERYLKQGDLTVTEYLHEFYRSAHYAPEDVETDEDKQEKFLQGLKDELAVQLLLEDYEDFEKLVDKAMQLESEHSRMTNCKRRMVNNPVFPGGNQRQRTEPLQITGSSVVYQEFLPQGDERNADNHNSNTNADDTTNNHGSGPISDHSNKACNVSSIHQDVNDSINVGTQNDNLSNFDSEKDSNGDSNYGTTDANVSKDFQPPIPTPRHNDHPQMDSSAKKTLICYNCKEPGHFSRDCPQPKRNLRHHSGHYARRRQVTRLVVTGANAVPVSLKGSRPKDLIATRSIHNSRSEEYLVTKVDSKDMNYESSGTEAPSSSAATQSKSAKGSTRDKSGEEKIPSATGDRAKQSRVKKFCXASLLXKTEPPPSLSLSPSLPPLGPPPLSAPPFPPLSLP

SEQ ID NO: 20463 - protein, 377 aa, Oryza sativa
  Clone ID: TF_OSC12554j.C1.p2.np
DSRTQANGNEKSINETSPELIQVVVNQTNMLATAFQLLQNRNNPAGATAVQQQCKLSEFLKTGPPTFAMAVDPMEASDWLRTVEKKLGLIQCTDQERVGFATHQLVGPASEWWDSYEASRPEGHTITWNEFSSVFRRSHVPAGMITLRKRERYLKQGDLTVTEYLHEFYRSAHYAPEDVETDEDKQEKFLQGLKDELAVQLLLEDYEDFEKLVDKAMQLESEHSRMTNCKRRMVNNPVFPGGNQRQRTEPLQITGSSVVYQDFDSEKDSNGDSNYGTTDANVSKDFQPPIPTPRHNDHPQMDSSAKKTLICYNCKEPGHFSRDCPQPKRNLRHHSGHYARRRQVTRLVVTGANAVPVRPQLILTHSRNNVPMLSTFP

SEQ ID NO: 20464 - protein, 449 aa, Oryza sativa
  Clone ID: TF_OSC16506j.C1.p1.fg
MDNIGNKGYGNDGSDDSRTQANGNEKSLNETSPELIQIVVNQTNMLATAFHLLQNRNIPAGATNVQVPTVPQQCKLSEFLKTGPPTFAMAVDPMEASDWLRTVEKKLGLIQCTDQERVGFATHQLVGPASEWWDSYEASRPEGHTITWNEFSSVFKRSHVPTGMITLRKREFRYLKQGDLTVTEYLHEFYRLAHYAPEDVETDEDKQEKFLQGLKDELAVQLLLEDYEDFEKLVDKAMPLESEHNRMTNCKRRIVNIPVFPGSNQRQRTEPLQITGSSVVHQEFLPQEDECNADINTSNTNNDDTSNNQGSGPISDHSNKACNVSSIHQDVNDSINVGTQNDNLSNFDTEKDSNGDSNYGTTDANVSKDFQPPIPTPSHNDHPQMDSSAKKTLICYNCKEPGHFSRDCPQPKRNLRHHSGHYARRRQVTRLVVTGANAVPVRPHVNSNP

SEQ ID NO: 20465 - protein, 449 aa, Oryza sativa
  Clone ID: TF_OSC16879j.C1.p1.fg
MDSTGNKGYGNDGSDDSRTQANGNEKSINETSPELIQVVVNQTNMLATAFQLLQNRNNPAGATDVQVPTVQQQCKLSEFLKTGPPTFAMAVDPMEASDWLRTVEKKLGLIQCTDQERVGFATHQLVGPASEWWDSYEASRPEGHTITWNEFSSVFRRSHVPAGMITLRKREFRYLKQGDLTVTEYLHEFYRSAHYAPEDVETDEDKQEKFLQGLKDELAVQLLLEDYEDFEKLVDKAMQLESEHSRMTNCKRRMVNNPVFPGGNQRQRTEPLQITGSSVVYQEFLPQGDERNADNHNSNTNADDTTNNHGSGPISDHSNKACNVSSIHQDVNDSINVGTQNDNLSNFDSEKDSNGDSNYGTTDANVSKDFQPPIPTPRHNDHPQMDSSAKKTLICYNCKEPGHFSRDCPQPKRNLRHHSGHYARRRQVTRLVVTGANAVPVRPHVNSNP

SEQ ID NO: 20466 - protein, 382 aa, Oryza sativa
  Clone ID: TF_OSC17335j.C1.p1.fg
MLATAFQKSQNGNSPAGETNVQALTVKHQCKLSEFLKTGLPTFAIAVDPMEASDWLRTIEKKLGLIQCTDQERVGFATHQLVGPASEWWDSYEASRPEGHTITWNEFSSVFKRSHVPAGMITLRKREFRYLKQGDLTVTEYLHEFYRLAHYAPEDVETDEDKQEKFLQGLKDELAVQLLLEDYEDFEKLVDKAMQLESEHNRMTNCKRRIVNIPVIPCGNQRQRTEPLQITGSSVVHQEFLPQEDGRNTDNNPSNTNGDDTTNNHGSCPISDHSNQACNFDTEKDSNCDSNYGTTDANVSKDFQPPIPTPSQNDRSQTDNSAKKTLICYNCKEPGHFSRDCPQPKRNLRHHSGHYARRRQVTRLVVTGANAVPVRPHVNSNP

SEQ ID NO: 20467 - protein, 549 aa, Oryza sativa
  Clone ID: TF_OSC1738j.C1.p3.fg
MDNTGNKGYGNDGSDDSRTQANGNEKSINETSPELIQIVVNQTNMLATAFQLLQNRNNPAGATNVQVPTVQQQCKLSEFLKTGPPTFAMAVDPMEASDWLRTVEKKLGLIQCTDQERVGFATHQLVGPASEWWDSYEASRPEGHTITWNEFSSVFKRSHVPAGMITLRKREFRYLKQGDLTVTEYLHEFYRLAQYAPEDVETDEDKQEKFLQGLKDELAVQLLLEDYEDFEKLVDKAMQLESEHNRMTNCKRRMVNNPVFPGGNQRQRTEPLQITGSSVVYQEFLPQEDERNAGNNNSNTNADDTTNNHGSCPIHDHLDQACNVNIIHQDIDDSINEGTQNDNPSNFDSGKDSNGDSNNGTTDANVSKDSQPPIPTPSQNDRPQMDSSVKKTLICYNCKEPGHFSRDCPQPKRNLRHHSGHYARRRQVTRLVVTGANAVPARSEIFNSVSDATRSEKCKHRLPVDNLSEVDSEDMNHEKFWNGSITELPQLSLSQPKGAPWSKSGEEKIPSATGGQAKQFRVVKFCWKFVKTQRKKSDKKRRPPNLSSC

SEQ ID NO: 20468 - protein, 286 aa, Oryza sativa
  Clone ID: TF_OSC18196j.C1.p1.gm
RSHVPSGMITLRKRAFRYLKQGDLTVTEYLHEFYRLARYAPEDVETDEEKQEKFLQGLKDELAVQLLLEDYENFEKLVDKAMQLESEHNRMTNCKRRIVNILVFPGGNQRQRTEPLPIIGSSVGYHEFLPQEDERNVDNNNIIHQDIDDSINEGTQNGNPSNFDSEKDSKGDSNNGTTDADVSKDFQPPIPTPSQDDRSQADNSAKKTLICYNCKEPGHFSRDCPQPKRNLRHHSGHYARRRQVTRLVVTGANAVPVSLKGSKPKDLIVTRSIHNSRSEEYLVDKV

SEQ ID NO: 20469 - protein, 449 aa, Oryza sativa
  Clone ID: TF_OSC18372j.C1.p3.fg
MDNTGNKGYGNDGSDDSRTQANGNEKSINETSPELIQIVVNQTNMLATAFQLLQNWNNPAGATNVQVPTVQQQCKLSEFLKTEPPTFAIAVDPMEASDWLRTVEKKLGLIQCTDQERVGFATHQLVGQASEWWDSYEASRPEGHTITWNEFSSVFKRSHVPAGMITLGKREFRYLKQGDLTVTEYLHEFYRLAHYAPEDVETDEDKQEKFLQGLKDELAVQLLLEDYEDFEKLVDKAMQLENEHNRMTNCKRRIVNIPVFLGGNQRQRTEPLQITGSSVVHQEFLPQEDGRNADTNTSNTNDDDTTNNHGSCPISDHSNKACNVSSIHQDVNDSINVGTQNDNLSNVDTEKDSNGDSNYGTTDANVSKDFQSPIPTPSQNDRPQMDSSVKKTLICYNCKEPGHFSRDCPQPKRNLRHHSGHYARRRQVTRLVVTGANAVPVRPHVNPNP

SEQ ID NO: 20470 - protein, 764 aa, Oryza sativa
  Clone ID: TF_OSC18547j.C1.p2.gm
MVPPIAGNGRAKSGRLPLPPAAIPVAVPAPPVAGSLPHPIKWDPHPSFYRFSPFPSLPVVVSPLPAFSFSLSDAGRPPATSPSSPEHRPAVPSPPSALQHRPLHRPYRLLAGNSPERCPRRQPVALVPLYSLQPAAVHRRCADRRRRLLLRHRGIAFFPGITSSSPEFRRNAVARAGLTFLLVDISSGCPGRRARASADVAVSSLGDAASPSTPACPRFRRNVAANLSVRLAGVVRPPVPPRRVPVGHLHHHLRHRSRDVVLGLASPSTEPRRGVVLVVLVPVQPLPAVLVASSPVPVVVVVVVLSSFPVVVAPVLVFVLGSASSSLVPAAARLRPRIAAEAVPSPFVSVVPLSSFRRFPKRGSWSSPKNWNNPAGATNVQVPTVQQQCKLSEFLKTEPPTFAIAVDPMEASEWLRTIEKKLGLIQCTDQERVGFATHQLVGPASEWWDNYEASQPEGHTTTWNEFSSVFRRSHVPSGMITLRKREFRYLKQGDLTVAEYLHGFYRLAHYAPEDVETGEDKQEKFLQGLKDELAVQLLLEDYEDFEKLVDKAMQLESEHNRMTNCKRRMVNNPVFPGGNQRQRTEPLQITGSSVVYPEFLPQEDERNADNNNSNTNADDTTNNHGSCPIHDHLDQAYNVNIIHQDIDDSINEGTQNDNLSNFDTEKDSNGDSNNGTTDADVSKDFQPPIPTPNQNDRSQTDNSAKKTLICYNCKEPGHFSRDCPQPKRNLRHHSGHYARRRQVTRLVVTGANAVPVRPHINSNP

SEQ ID NO: 20471 - protein, 800 aa, Oryza sativa
  Clone ID: TF_OSC23013j.C1.p2.np
MDNTGNKGYGNDGSDDSKTQANGNEKSINETSPELIQIVVNQTNMLATAFQLLQNRNNPAGATNVQVPTVQQQCKLSEFLKTGPPTFAMAVDPMEASDWLRTVEKKLGLIQCTDQERVGFATHQLVGPASEWWDSYEASRPEGHTITWNEFSSVFKRSHVPAGMITLRKREFRYLKQGDLTVAEYLHEFYRLAHYAPEDVETDEDKQEKFLQGLKDELAVQLLLEDYEDFEKLVDKAMQLESEHNRMTNCKRRMVNNPVFPGGNQRQRTEPLQITGSSVVYPEFLPQEDGRNADNNTSNTNNDDTTNNHGSCPISDHSNKACNVGSIRQDVNDSINVGTQNDNLSNFDTEKDSNGDSNDGTADANVSKGFQPPIPTPSHNDHPQMDSSAKKTLICYNCKEPGHFSRDCPQPKRNLRHHSGHYARRRQVTRLVVTGANAVPVSLKGSKPKDLIVTRSIHNSRSEEYLVDKVDSKDMNYESSGTEAPSSSAATQSKSAKGSTRDKSAAPSPSVSPPFRGESTGDASSPASSGVATTSPPPAASATSPERRPTPPPPSSAPRRRSHPRHHLLLARTSPEHRRRAGFSFLLGGSTGRPHLHHLRHRSGKVVLGIISPPSKPLRGPSSSSPIVLVVDVPSVARLVVSRRRLRHRHRSGVFHVILAAVQPLPAALVASSPAPVVVVLVLSSFSVVVAFVPPSSRSRSSSSFVKVAAPSSSSSSPPRRQASRRPRLAFVQGSPPKPSPRRSSPLRPSVSAAPVRRCRSHASSRGGKVPSPRCPVLVLSVSPVPVVRLSAPVPVYRRR

SEQ ID NO: 20472 - protein, 449 aa, Oryza sativa
  Clone ID: TF_OSC26820j.C1.p1.fg
MDNTGNKGYGNDGSDDSRTQANGNEKSINETSPELIQIVVNQTNMLATAFQLLQNRNNPAGATNVQVPTVQQQCKLSEFLKTGPPTFAIAVDPMEASDWLRTIEKKLGLIQCTDQERVGFAAHQLVGPASEWWYSYEASRPEGHTITWNEFSSVFKRSHVPAGMVTLRKQEFRYLKQGDLTVTEYLHEFYRLAHYAPEDVETDEDKQEKFLQGLKDELAVQLLLEDYEDFENLVDKTMKLESEHNRRPNCKERIVNIQYFPGGNQRQRTEPLQITGSSVAHQEFPPQEDGRNADNNTSNTNDDDTTNNHGSCPISDHSNKACNVSSIHQDVNDSINVGNQNDNLSNFDSEKDSNGDSNYGTTDANVSKDFQPPIPTPSHNDRPQMDSSVKKTLICYNCKEPGHFSRDCPQPKRNLRHHSGHYARRRRVTRLVVTGANAVPVRPHVNSNP

SEQ ID NO: 20473 - protein, 842 aa, Oryza sativa
  Clone ID: TF_OSC400150j.C1.p6.gm
MVPPIAGNGRAKSGRLPLPPAAIPVAVPAPPVAGSLPHPIKWDPHPSFYRFSPFPSLPVVVSPLPAFSFSLSDAGRPPATSPSSPEHRPAVPSPPSALQHRPLHRPYRLLAGNSPERCPRRQPVALVPLYSLQPAAVHRRCADRRRRLLLRHRGIAFFPGITSSSPEFRRNAVARAGLTFLLVDISSGCPGRRARASADVAVSSLGDAASPSTPACPRFRRNVAANLSVRLAGVVRPPVPPRRVPVGHLHHHLRHRSRDVVLGLASPSTEPRRGVVLVVLVPVQPLPAVLVASSPVPVVVVVVVLSSFPVVVAPVLVFVLGSASSSLVPAAARLRPRIAAEAVPSPFVSVVPVCLRRARSSLSFPRLVAWWANEGYTSCGPVVEMSYGGGLVPNARGSVLPACPGYPGRSEARCEAGVKIFENPSQNLSHPLNWNNPAGATNVQVPTVQQQCKLSEFLKTEPPTFAIAVDPMEASEWLRTIEKKLGLIQCTDQERVGFATHQLVGPASEWWDNYEASQPEGHTTTWNEFSSVFRRSHVPSGMITLRKREFRYLKQGDLTVAEYLHGFYRLAHYAPEDVETGEDKQEKFLQGLKDELAVQLLLEDYEDFEKLVDKAMQLESEHNRMTNCKRRMVNNPVFPGGNQRQRTEPLQITGSSVVYPEFLPQEDERNADNNNSNTNADDTTNNHGSCPIHDHLDQAYNVNIIHQDIDDSINEGTQNDNLSNFDTEKDSNGDSNNGTTDADVSKDFQPPIPTPNQNDRSQTDNSAKKTLICYNCKEPGHFSRDCPQPKRNLRHHSGHYARRRQLSAKHFKVSLKGSKPKDLIVTRSIHNSRSEEYLVDKV

SEQ ID NO: 20474 - protein, 802 aa, Oryza sativa
  Clone ID: TF_OSC400404j.C1.p16.np
MDNTGNKGYGNDGSDDSRTQANGNEKSINETSPELIQIVVNQTNMLATAFQLLQNWNNPAEATNVQVPTVQQQCKLSEFLKTEPPTFAIAVDPMEASDWLRTIEKKLGLIQCTDQERVGFATHQLVGPASEWWDSYEASRPEGHTITWNEFSSVFRRSHVPAGMITLRKREFRYLKQGDLTVTEYLHEFYRLAHYAPEDVETDEDKQEKFLQGLKDELAVQLLLEDYGNFEKLVDKAMQLESEHNRMTNCKRRIVNIPVFPCGNQRQRTEPLQITGPSVVHQEFPPQEDGRNADNNTSNTNDDDTTNNHGSCPISDHSNKACNVSSIHQDVNDSINVGTQNDNLSNVDTEKDSNGDSNYGTTDANVSKDFQPPIPTPSQNDRPQMDSSVQKTLICYNCKEPGHFSRDCPQPKRNLCHHSGHYARRRQVTRLVVTGANAVPVSLKGSRLKYHIVTKSIHNSRSEEYLVDKVDAKDMNYEKSGTEVPSSSATTQSKSAKRCTRFKSATSSPSVSPPFRGESTGDAFSPANSGVAATVPPPAATVAFPVRRPTSPPPPSAPRRRPPPRLLLGFAGIHPLRRRRPFGHPFLLVGVAPLHHHLLQHRSSAFHAVPSSAQPLLPAIIVSSSPFVLAVDVPSVAWLIVSRRRLRRRHRSGVVRAILASVQPLPAALIASSPAPVVAVVVLSSFPVVVAFVPPSSRSRPSSAFVKRTAAAPSSSSSSAPRRQASCRPRLAFVQGSPPKPSPRRSSPLCPSVSAAPVRRCRSHASSRGGKVPSPRCPVLVLSVSPVPVVRLSTPVPMYRCR

SEQ ID NO: 20475 - protein, 790 aa, Oryza sativa
  unsure (1)..(790): unsure at all Xaa locations
  Clone ID: TF_OSC400628j.C1.p5.np
MDNTGNKGYGNDGSDDSRTQASGNEKSINKTSPELIQIVVNQTNMLATAFQLLQNWNNPAGTTNVQVPTVQQQCKLSEFLKTEPPTFAIAVDPMEASDWLRTIEKKLGLIQCTDQERVGFATPQLVGPASEWWDSYEASRPEGHTITWNEFSSVFRRSHVPAGMITLRKXEFRYLKQGDLTVTKYLHEFYRLAHYAPEDVETDEDKQEKFLQGLKDELAVQLLLEDYXDFEKLVDKAMQLESEHNRMTNCKRRIVNIPVFPCGNQRQRTEPLQITGSSVVHQEFLPQEDGRNADNNTSNTNDDDTTNNHGSCLISDHSNKACNVSSIHQDVNDSINVGIQNDNLSNFDTEKDSNGDSNYGTTDANVSKDFQPPIPTPSQNDRPQMDSSTKKTLICYNCKEPGHFSRDCPQPKRNLRHHSGHYARRRQVTRLVVTGANAIPVSLKGSKPKDLIVPRSVRNPHKEYHLLEISRKDSSRKKSIREIKNSVLEINSKTSSIRIRYSTISSDFWGSANFAGVIDGAEIAPPASPSSSSTSPPAAPSTAPVHQPALPSPPSASPHRPPPGCSSVSPERRRAGLSILFIASVLSAAPSTSPARRLAAPLPSSASQPRRRPRPRLPSDRTPPVSVVVFTVHPRRLAVSRRRLRRRHRSGVFHAILASVQPLPAALVVSSLAPVVVVVVLSSFPVVVAFVPPSSRSRLPPAFVKCAAAPSSSSSSPPRRQASCRPCLAFVPGSLPKSFPRSAAPVRRCRSHASSRGGKDPSSRCPVLVLLVSPVPVVRSSTPVPVYRCR

SEQ ID NO: 20476 - protein, 620 aa, Oryza sativa
  Clone ID: TF_OSC400689j.C1.p2.gm
MLATAFQLLQNWNNPAGATNVQGLKDELAVQLLIEDYEDFEKLVDKAIQLESEHNRMKNCKRRIVNIPVFPCGNQTQRTEPLQITGSSVAHQEFLPQEDGHNADNNISNTNADDTTNNHGSCPISDHSDQACNVNSIHQDIDDSINEGTQNDNPSNFDSEKDTNGDSNYGTTDANVSKDFQPPIPTPSQNDRSQTNSSVKKTLICYNCKEPGHFSRDCPQPKRNLRHHSGHYARRRQVTRLVVTGANAIPVSLKGNRLKYHIVTRSIHNSRSEEYLVDKGVDTRHEVDNLCEVDAEDMNHEKFWNGSIIKLPQPSLSQLKGAPWFESGEEKIPSAIGDQAKQFQVGKFAGQAASGPKPSGALPPVPRTRPYRRVSTPAGRAVAFPFVAVALPPLYHLQPPVPLCRSIGFRRRCLSRHRNVVLFPGHATASLIFSRNTAVPHRPLHPPRRNFPGRSFLHPCAVGRTTTTSSIAAASGVFHAVLVSMQLPPAALVASSPVPVIVLIVVAFVPPSSRSRSSSAFRQVSRCSPVVVFVLGSASSSVAPAASRLRPRIAAEVVPSPFVSVVPGRLRRAHVEALSPTVTLPACRRSDRRSLAGQTARTTAVRPPLSHRSDRAYNCR

SEQ ID NO: 20477 - protein, 575 aa, Oryza sativa
  Clone ID: TF_OSC400773j.C1.p64.gm
MVTLRKREFRYLKQGDLTVTEYLHEFYRLARYAPEDVETDEDKQEKFLQGLKDELAVQLLLEDYEDFEKLVDKAVQLESEHNRMTNCKRRIVNIPVIPCGNQRQRTEPLQITGSSVVHQEFLPQEDGRNADNNTSNTNDDDTTNNHGSCPIHDHLDQACNVNIIHQDIDDSINEGTQNDNPSNFDSEKDSNGDSNNGTTDANVSKDFQPPIPTPSQNDRSQTDNSAKKTLICYNCKEPGHFSRDCPQPKRRAKGNQHPEGDTKQKTVIRFNQQSEGSFSCEEKIPSATGGQAKQFRKVKICWKFVKTQRKKRARPPLSLTGGAHLSSPSSRRARRRARALAPPPPRIAPHPAVPARIKERGITPRVSLSRFPLFSLSLSLGFVRIHPAKFAGVFNGARDLRARFPLSPAALSPSRCYIFDPRASLFRFRRSPLALAVGFVLAPCSSLSAVAVDLRFAADVAPVLRPTRRHPHRLRRVVADPVRRSASPADCRSTVALGIPNRAVAFLRSGSPPPSLRSSSRLGATSLGIAASPSTSSAPPFRSPTVGAPPSSSSRAAPPSFSAPSAVSAAFAASG

SEQ ID NO: 20478 - protein, 501 aa, Oryza sativa
  Clone ID: TF_OSC400946j.C1.p3.fg
MSWHRVGVLLLVAQSCLPVPGVPAVGGVGSVLLFMARMGWELCHVFRPYTVVMDNTGNKGYGNDGSDDSRTQANGNEKSINKTSPELIQIVVNQTNMLATAFQLLQNWNNPAGATNVQVPTVQQQCKLSEFLKTEPPTFAIAVDPMEASDWLRTVEKKLGLIQCTDQERVGFATHQLVGPASEWWDSYEASRPEGHTITWNEFSSVFKRSHVPAGMITLRKREFRYRKQGDLTVTEYLHEFYRLAHYAPEDVETDEDKQEKFLQGLKDELAVQLLLEDYEDFEKLVDKAMQLESEHNRMTNYKRRIVNIPVFPCGNQRQRTEPLQITGSSVAHQELLPQEDGHNADNNISNTNADDTTNNHGSCPIHDHLDQACNVNSIHQDIDDSINEGTQNDNPSNFDSEKDSNGDSKYGTTDANVSKDFQPPIPTPSQNDRSQTDNSVKKTLICYNCKEPGHFSRDCPQPKRNLRHHSGHYARRRQVTRLVVTGANAIPVRPRVNHNP

SEQ ID NO: 20479 - protein, 648 aa, Oryza sativa
  unsure (1)..(648): unsure at all Xaa locations
  Clone ID: TF_OSC401006j.C1.p29.np
MDNTGNKGYGNDGSDDSRTQANGNEKSINETLPXLIQIVVNQTNMLATAFQLLQNRNNPAWATNVQVPIVQQQCKLSEFLKTGPPTFAIAVDPMEANDWLRTVEKNLGLIQCTDQERVVFATHQLVGLASEWWDSYEVSRPEGHTITWDEFLAVFKRSHVPAGMITLRKXEFRYLKQEYLTVIEYLHEFHRLAHYAPEDVETDEDKQEKFLQGLKDELAVQLLLEDYEDFEKLLDKAIQLESEHNQMKNCKRRIVNIPVIPCGNQRQRTEPLQITGSSVAHQEFLPQEDGYNADNNISNTNDDDTTTNHGSCPISDHSNQACNVNNIHQDVDDSINEGTQNDNPSNCDSEKESNGDSNYGTTDANVSKDFQPPIPTPSQNDRSQTDSSVKKKLICYNCKEPGHFSRDCPQPKRNLRHHSGHYARRRQVTRLVVTGANAIPVSLKGSKPKDHIATRSIHNSQSEEYLVEKVDTQDMNYEKSRTEAPSSSAATQSKSARGATRDKSSSSSPTSPLFRGETIGDASSPVNSGVAATAPPPAAPSAVPEHRPTSLSPPSTSQRRPLLRLCHGVDNIYVITKALKAXQSKINSSGLAGLWLHLHRRSTGVXARTPPKTSSQKLLLLEGGEKTPHLILESPVXMRRIWRRERAR

SEQ ID NO: 20480 - protein, 449 aa, Oryza sativa
  Clone ID: TF_OSC401130j.C1.p3.fg
MDNTGNKGYGNDGSDDSRTQANGNERSINETSPELIQIVVNQTNMLATAFQLLQNWNNPAGATNVQVPTVQQQCKLSEFLKTGPPTFAMAVDPMEASDWLRTVEKKLGLIQCTDQERVGFATHQLVGPASEWWDSYEASRPEGHTITWNEFSSVFRRSHVPAGMITLRKREFRYLKQGDLTVTEYLHEFYRLAHYAPEDVETDEDKQEKFLQGLKDELAVQLLLEDYEDFEKLVDKAMQLESEHNRMTNCKRRIVNIPVIPGGNQRQRTEPLQITGSSVVYQEFLPQEDERNADNNTSNTNADDTTNNHGSCPISDHSNKACNVSSIHQDVNDSINVGTQNDNLSNFDSEKDSNGDSNNGTTDANVSKDFQPPIPTPSQNDRSQTDNSAKKTLICYNCKEPGHFSRDCPQPKRNLRHHSGHYARRRQVTRLVVTGANAVPVRPHVNSNP

SEQ ID NO: 20481 - protein, 342 aa, Oryza sativa
  unsure (1)..(342): unsure at all Xaa locations
  Clone ID: TF_OSC401498j.C1.p2.np
MDEVGRRWTFSRANEGYTSCGSVVEMSYGGGLVNARGSVLPACPGIPAVGRIGSVLLSKARMGWKLCHIFTTGSKAMECGVKMCLVGWPGLAWDELGPRSGCQFGPIHRRPWVKAVLDGQLCEEEDVVSCLPKLRKTAGSASEAKEAVKPAVKQEKRVSSFKVLSLSGLFFPCMLPLSTPTLXQMDNTGNKGYGNDGSDDSRTQANGNEKSINETSPELIQVVVNQTNMLVQLLQNRNNPAGATNVQVPTVQQHTADANVSKGFQPPIPTPSHNDHPQMDSSEKTLICYNCKEPGHFSRDCPQPKRNLRHTPAIMQEEDRSLALWSLEQTPPRPTSPGNRSS

SEQ ID NO: 20482 - protein, 380 aa, Oryza sativa
  Clone ID: TF_OSC401523j.C1.p3.gm
MDEVGRRWTFSRANEGYTSCGPVVEMSYGGGLVPNARGSVLPACPGYPGRSEASCEAGVKILENPSQNLSHPLNRNNPAGATNVQVPTVQQQCKRSHVPSGMITLRKRAFRYLKQGDLTVTEYLHEFYRLARYAPEDVETDEEKQEKFLQGLKDELAVQLLLEDYENFEKLVDKAMQLESEHNRMTNCKRRIVNIPVFPGGNQRQRTEPLPIIGSSVGYHEFLPQEDERNVDNNNIIHQDIDDSINEGTQNGNPSNFDSEKDSKGDSNNGTTDADVSKDFQPPIPTPSQDDRSQADNSAKKTLICYNCKEPGHFSRDCPQPKRNLRHHSGHYARRRQVTRLVVTGANAVPVSLKGSKPKDLIVTRSIHNSRSEEYLVDKV

SEQ ID NO: 20483 - protein, 449 aa, Oryza sativa
  Clone ID: TF_OSC411286j.C1.p2.fg
MDNTGNKGYGNDGSDDSRTQANGNEKSINETSPELIQIVVNQTNMLATAFQLLQNRNNPAGATNVQVPTVQQQCKLSEFLKTGPPTFAMAVDPMEASDWLRTVEKKLGLIQCTDQERVGFATHQLVGPASEWWDSYEASRPEGHTITWNEFSSEFRRSHVPAGMITLRKREFRYLKQGDLTVTEYLHEFYRLAHYAPEDVETDEDKQEKFLQGLKDELAVQLLLEDYEDFEKLVDKAMQLESEHNRMTNCKRRIVNIPVFPGGNQRQRTEPLQITGSSVVHQEFLPQEDEHNADNNTSNTNDDDTTNNHGSCPISDHSNKACNVSSIHQDVNDSINVGTQNDNLSNFDTEKDSNGDSNYGTTDANVSKDSQPPIPTPSQNDRPQMDSSVKKTLICYNCKEPGHFSRDCPQPKRNLRHHSGHYARRRQVTRLVVTGANAVPVRPHVNSNP

SEQ ID NO: 20484 - protein, 401 aa, Oryza sativa
  Clone ID: TF_OSC414125j.C1.p2.fg
MQLESEHNRMTNCKRRIVNIPVIPGGNQRQRTEPLQITGPSVVHQESPPQEDGRNADNNTSNTNDDDTTNNHGSCPISDHSNKACNVSSIHQDVNDSINVGTQNDNLSNFDTEKDSNGDSNYGTTDANVSKDFQPPIPTPSHNDHPQMDSSAKKTLICYNCKEPGHFSRDCPQPKRNLRHPSGHYARRRQVTRLVVTGANAVPAASQRTSSSPEASAIHIKEYHLLEISRKMIDKKRLAKMFSSIKEVGRKVIDKQKHALHRSRKTPDCNCPATVTLSLSKQDDLGKSVSMKARSEIFNSVSDATRSEKCKHRLPVDNLSEVDSEDMNHEKFWNGSITELPQPSLSQPKGAPWSKSGEEKIPSATGGQAKQFRVVKFCWKFVKTQRKKSDKKRRPPNLPSC

SEQ ID NO: 20485 - protein, 638 aa, Oryza sativa
  Clone ID: TF_OSC414146j.C1.p1.fg
MDNTGNKGYGNDGSDDSRTQANGNEKSINKTSPELIQKVVNQTNMLTTAFQLLQNWNNPAGATNVQVPTVQQQFKLSEFLKTEPPTFAIAVDPMEASDWLRTVEKKLGLIQCTDQERVGFATHQLVGPASEWWDSYEASRPEGHTITWNEFSSVFKRSHVPAGMITLRKREFRYLKQGDLTVTEYLHEFYRLARYAPEDVETDEDKQEKFLQGLKDELVVQLLLEDYEDFEKLVDKAMQLESEHNRMTNCKRRIVNIPVIPGGNQRQRTEPLQITGPSVVHQESPPQEDGRNADNNTSNTNDDDTTNNHGSCPISDHSNKACNVSSIHQDVNDSINVGTQNDNLSNFDTEKDSNGDSNYGTTDANVSKDFQPPIPTPSHNDHPQMDSSAKKTLICYNCKEPGHFSRDCPQPKRNLRHPSGHYARRRQVTRLVVTGANAVPAASQRTSSSPEASAIHIKEYHLLEISRKMIDKKRLAKMFSSIKEVGRKVIDKQKHALHRSRKTPDCNCPATVTLSLSKQDDLGKSVSMKARSEIFNSVSDATRSEKCKHRLPVDNLSEVDSEDMNHEKFWNGSITELPQPSLSQPKGAPWSKSGEEKIPSATGGQAKQFRVVKFCWKFVKTQRKKSDKKRRPPNLPSC

SEQ ID NO: 20486 - protein, 704 aa, Oryza sativa
  Clone ID: TF_OSC415189j.C1.p2.gm
MDNTGNKGYGNDGSDDSRTQANGNERSTNETSPELIQVVVNQTNMLATAFQLLQNWSSPAGATNVQVPTVQQQCKLSEFLKTEPPTFAIAVDPMEASDWLRTIEKKLGLIQCTDQERVGFATHQLVGPASEWWGSYEASRPEGHTITWNEFSSVFKRSHVPAGMITLRKREFRYLKQGDLTVTEYLHEFYRLAHYAPEDVETDEDKQEKFLQGLKDELAVQLLLEDYEDFEKLVDKAMQLESEHNRMTNCKRRIVNIPVIPCGNQRQRTEPLQITGSSVVHQEFLPQEDGRNADNNSSNTNDDDTTNNHGSCPISDHSNKACNVSSIHQDVNDSINVGTQNDNLSNFDTEKDSNGDSNYGTTDANVSKDFQPPIPTPSQNDRPQMGSSVKKTLICYNCKEPGHFSRDCPQPKRNLRHHSGHYARRRQVTRLVVTGANAVPAGPPATLADGWDPPVIAFLPPRPPPARALAPPPPLNPPHPAFPARLNEGGITPRDSLSRFPLFSLSLSLGFVRIHPAKFAGVFNGARDLRARFPLSPAALSPSRCYIFDPRASLFRFRRSPLALAVGFVPAPCSSLSAVAADLRFAADVAPVLRPTRRHLLRLRRVVADPVRRSASPADCRSTVALGIPNRAVAFLRSGSPPPSLRSSSRLGATSLGIAASPSTSSAPSFRSPTVGAPPSSSSRAVPPPSSAPAAVLVVVVVPG

SEQ ID NO: 20487 - protein, 501 aa, Oryza sativa
  Clone ID: TF_OSC417492j.C1.p2.np
HTGGGVGAQMLGLSSALPVPGIPAVGRIGSVLLSKARMGWKLCHIFTTGSKAMDNTGNKGYGNDGSDDSRTQANGNEKSINETSPELIQVVVNQTNMLATAFQLLQNRNNPAGATNVQVPTVQQQCKLSEFLKTGPPTFAMAVDPMEASDWLRTVEKKLGLIQCTDQERVGFATHQLVGPASEWWDSYEASRPEGHTITWNEFSSVFKRSHVPAGMITLRKREFRYLKQGDLTVTEYLHEFYRLAHYAPEDVETDEDKQEKFLQGLKDELAVQLLLEDYEDFEKLVDKAMQLESEHNRMTNCKRRIVNIPVFPGGNQRQRTEPLQITGSPVVHQEFLPQEDECNADNNTSNTNNDDTTNNHGSCPISDHSNKACNVGSIRQDVNDSINVGTQNDNLSNFDTEKDSNGDSNDGTADANVSKGFQPPIPTPSHNDHPQMDSSAKKTLICYNCKEPGHFSRDCPQPKRNLRHHSGHYARRRQVTRLVVTGANAVPVRPHVNSNP

SEQ ID NO: 20488 - protein, 556 aa, Oryza sativa
  Clone ID: TF_OSC422569j.C1.p2.np
MDNTGNKGYGNDGSDDSRTQANGNEKSINETSPELIQIVVNQTNMLATAFQLLQNRNNPAGATNVQVPTVQQQCKLSEFLKTGPPTFAMAVDPMEASDWLRTVEKKLGLIQCTDQERVGFATHQLVEPASEWWDSYEASRPEGHTITWNEFSSVFKRSHVPAGMITLRKREFRYLKQGDLTVTEYLHEFYRLAHYAPEDVETDEDKQEKFLQGLKDELAVQLLLEDYEDFEKLVDKAMQLESEHNRMTNCKRRIVNIPVFPGGNQRQRTEPLQITGSSVAHQEFPPQEDGRNADNNTSNTNDDDTTNNHGSCPISDHSNKACHVSSIHQDVNDSINDGTQNDNPSNWDSGKDSNGDSNNGTTDANVSKDSQPPIPTPSQNDRPQMDSSVKKTLICYNCKEPGHFSRDCPQPKRNLRHHSGHYARRRQVTRLVVTGANAVPVSLKGSKPKDLIVTRSIHNSRSEEYLVDKVDAKDMNYEKSGTEVPSSSATIQSKSARGATREKSGEEKIPSATPARSLPSSLSFSPSPSLPPLGPPPLGPAPFPPPLFLPPFLPPL

SEQ ID NO: 20489 - protein, 501 aa, Oryza sativa
  Clone ID: TF_OSC6122j.C1.p1.fg
MSWQRVGALLLGGSVLPACPGCPGRRRIGSVLLFMARMGWELCHVFRPYTVVMDNTGNKGYGNDGSDDSRTQANGNERSINETSPELIQVVVNQTNMLATAFQLLQNWNNPAGATNVQVPTVQQQCKLSEFLKTEPPTFAIAVDPMEASDWLRTIEKKLGLIQCTDQERVGFATHQLVGPASEWWDSYEASRPEGHTITWNEFSSVFKRSHVPAGMITLRKREFRYLKQGDLTVTEYLHEFYRLAHYAPEDVENDEDQQEKFLQGLKDELAVQLLLEDYEDFEKLVDKAMQLESEHNRMTNCKRRIVNIPVIPGGNQRQRTEPLQITGSSVVHQEFLPQEDERNADNNTSNTNDDDTTNNHGSCPISDHSNKACNVSSIHQDVNDSINVGTQNDNLSNFDAEKDSNGDSNYGTTDANVSKDFQPPIPTPSHNDHPQMDSSAKKTLICYNCKEPGHFSRDCPQPKRNLRHHSGHYARRRQVTRLVVTGANAVPVRPCVNQNP

SEQ ID NO: 20490 - protein, 501 aa, Oryza sativa
  Clone ID: TF_OSC6489j.C1.p1.np
VIWQRVGALLLGAQFCLPVPGIPAVGGIGSVLLSMARMGRKLCHVFRPYTVVMDNTSNKGYGNDGSDDSRTQANGNERSTNETSPELIQVVVNQTNMLATAFQLLQNWNHPAGATNVQVPTVQQQCKLSEFLKTEPPTFAIAVDPMEASDWLRTVEKKLGLIQCTDQERVGFATHQLVGPASEWWDSYEASRPEGHTITWNEFSSVFKRSHVPAGMVTLRKREFRYLKQGDLTVTEYLHEFYRLAHYAPEDVETDEDKQEKFLQGLKDELAVQLLLEDYEDFEKLVDKAMQLESEHNRMTNCKRRIVNIPVFPGGNQRQRTEPLQITGSSVAHQEFPPQEDGRNADNNTSNTNDDDTTNNHGSCPISDHSNKACNVSSIHQDVNDSINVGTQNDNLSNFDTEKDSNGDSNYGTTDANVSKDFQPPIPTPSHNDHPQMDSSAKKTLICYNCKEPGHFSRDCPQPKRNLRHHSGHYARRRQVTRLVVTGANAVPVRPHVNSNP

SEQ ID NO: 20491 - protein, 791 aa, Oryza sativa
  Clone ID: TF_OSC900179j.C1.p6.gm
MESSPACDGNGASATFGGKRAAAEVALAAAAVARRGGEPSSDGVRPKVGSGRRRQEKGETSGRDKKPSMSPPPSCLTFLGSGLLRLSSLFLTARHLLAANSYASHLVCVDDPCTDQERVGFATHQLVGPASEWWDSYEASRPEGHTITWNEFSSVFRRSHVPAGMITLRKREFRYLKQGDLTVTEYLHEFYRSAHYAPEDVETDEDKQEKFLQGLKDELAVQLLLEDYEDFEKLVDKAMQLESEHSRMTNCKRRMVNNPVFPGGNQRQRTEPLQITGSSVVYQEFLPQGDERNADNHNSNTNADDTTNNHGSGPISDHSNKACNVSSIHQDVNDSINVGTQNDNLSNFDSEKDSNGDSNYGTTDANVSKDFQPPIPTPRHNDHPQMDSSAKKTLICYNCKEPGHFSRDCPQPKRNLRHHSGHYARRRQHRRHLLHAGLPSVSRGDPRNYVPAVALPFPSRRPPPAAFLSSPERRPAAPSSPSASQLPPLPRSALRFAGKSPETRPRRRPVASPPLLRLRPPLPRPRSAGRRRHHLPRLHDAALIPGITSASPELRRNTVARAGFSFLLGGISSGCPGRRARASADVAVSSLGVAASPSTPACPRFRRNVAANLSVRLTGVVRPPVPPRRASVGHLHHHLRHRSGKVVLGIVSPPSKPLRGPSSSSPIVLVVDVPFILARLVVSRRRLRHRHRCGVFRVVPVSVQPLPAALVAPSPVPVVVVVVVLSSFPVAAAPVIVFVLASASSSLVPAASRLRPRIAAEAVPSPFVSVVPVCLRRARSSLSFPRLVAWW

SEQ ID NO: 20492 - protein, 505 aa, Oryza sativa
  Clone ID: TF_OSC900319j.C1.p14.fg
MDNTGNKGYGNDGSDDSRTQANGNEKSINETSPELIQIVVNQTNMLATAFQLLQNRNNPAGATNVQVPTVQQQCKLSEFLKTGPPTFAIAVDPMEASDWLRTIEKKLGLIQCTDQERVGFAAHQLVGPASEWWYSYEASRPEGHTITWNEFSSVFKRSHVPAGMVTLRKQEFRYLKQGDLTVTEYLHEFYRLAHYAPEDVETDEDKQEKFLQGLKDELAVQLLLEDYEDFEKLVDKTMKLESEHNRRTNCKRRIVNIPVFPGGNQRQRTEPLQITGSSVAHQEFPPQEDGRNADNNTSNTNDDDTTNNHGSCPISDHSNKACNVSSIHQDVNDSINVGNQNDNLSNFDSEKDSNGDSNYGTTDANVSKDFQPPIPTPSHNDRPQMDSSVKKTLICYNCKEPGHFSRDCPQPKRNLRHHSGHYARRRRVTRLVVTGANAVPVSLKGSKPKDLIVTRSIHNSRSEEYLVDKVYEVIDRRYQQRCLLSNQEVGRKVIDKRNLKRIRQG

SEQ ID NO: 20493 - protein, 421 aa, Oryza sativa
  Clone ID: TF_OSC900373j.C1.p9.fg
MDNPGNQGYGNDGSDDSRTQANGNERSINATSPELIQVVVNQTNMLATAFQLLQNWNNPAGATNVQVPTVQQQCKLSEFLKTEPPTFAIAVDPMEASEWLRTIEKKLGLIQCTDQERVGFATHQLVGPASEWWDSYEASRPEGHTITWNEFSSVFRRSHVPAGMITLRKREFRYLKQGDLTVTEYLHEFYRLARHAPEDVETDEEKQEKFLQGLKDELAVQLLLEDYENFEKLVDKAMQLESEHNRMTNCKRRIVNIPVFPGGNQRQRTEPLQIIGSSVGYHEFLPQEDERNVDNNNIIHQDIDDSINEGTQNGNPSNFDSEKDSKGDSNNGTTDANVSKDFQPPIPTPSQDDRSQADNSAKKTLICYNCKEPGHFSRDCPQPKRNLRHHSGHYARRRQVTRLVVTGANVIPVRPRVNHNP

SEQ ID NO: 20494 - protein, 1276 aa, Oryza sativa
  unsure (1)..(1276): unsure at all Xaa locations
  Clone ID: TF_OSC14917j.C1.p1.np
MAGFTDALRLDKFTGVHFKRWQIRVTLWLTAMKCFWVSTGKPIGVLNADQQKEIDEATTLFVGCILSVLSDRLVEVYMHMTDAKELWDALNTKFGATDASNDLYIMEQFHDYKMADNRSVVEXAHEIQTMAKELELLKCVLSNKFVAGCIIAILPPSWRGFGTALKHKRQEYSVEGLIASLDVEEKAREKDTASKGDGGQSTTNVVHKAQNKSKGKHKTQQTTNFKKKKNNNNPNQDEKTCFVCGQPSHLARKCPQRKGMKAPAGQTSKSANVTIGNTRDGSGNLPTVFSVNQSTNWWVDTGANVHVCADISLFSSYQAARGSTVLMGNGSHASVHGVGTVDLKFTLGKIVQLKNVQHVPSIDRNLVSGSRLTRDGFKLVFESNKVVVSKHGYFIGKGYECGGLFRFSLSDFCNKSVNYICGSVDDEANVWHSRLCHINFGLMSRLSSMCLIPKFSIVKGSKCHSCMQTKQSRKPHKAAEERNLAPLELLHSDLCEMNGVLTKGGKRYFMTLIDDATRFCYVYLLKTKDEALDYFKIYKAEVENQLDRKIKRLRSDRGGEFFSNEFDLFCEEHGIIHERMPPYSPESNGIAERKNRTLTDLVNALLNSNHVLNRVPNRNKDKTPYEIWIGRKPSLSYLRTWGCLAKVNVPITKKRKLGPKTVDCIFLGYAHHSIAYRFLIFKSEVPDMHVGTIMESRDATFFESFFPMKDTHSSSSQPSEIIPSSITPPEQTEHTHEHVIEEDVSEAPRRSKRQRTAKSFGDDFTVYLVDDTLKSISEAYASPDADYWKEAFRSEMDSIIANGTWEVIEXPYGCKPVGCKWVFKKKLRPDGTIEKYKAWLVAKGYTQKEGEYFFDTYSPVARLTTICVLLSLAASHGLFVHQMNVKTAFLNGELDEEIYMDQPDRFVVEGQEGKVCKLLKSLYGLKQAPKQWHEKFDKTLTSPGFAVNEADKCVYYRHGGGEGVILCLFVDDILIFGTNLEVINEVKSFLSQNFDIKDLGVADVILNIKLIRGENGITLLQSHYVEKILNRSGYIDSKPSPTPGNKRIARNQLEYSEIIGSLMYLASATRPDISFAVSKLSRFTSNPGDDHWRVLERVMRYLKGTMELGLHYSGYPAVLEGYSDYNWISDVDEIKATSGYVFTLGGGAVSWRSCKQTILMRSTMEAELTALDTATVEAEWLRDLLMDLPIVEKPVPAILMNCDNQTVIVKVNSSKNNMKSSRHVKRRLKSVRKLRNSGVITLDYIQTARNLADPFTKGLSRNVIDNASKEMGLRPM

SEQ ID NO: 20495 - protein, 485 aa, Oryza sativa
  Clone ID: TF_OSC900099j.C1.p19.fg
MKQQMIDNSAKIVSPDTVTTSTRYCHKFAEFMKTRPPTFAGSATSWYTDQWLGTIENKLDMVQCDEKNKVFYAAHQLQGAALECWKGYCATDKDPQAISWAEFSSILHYMDVSPGFIKTKDHTKDGVCTLCSQGYRYELMWCPRNKPRNCACARCGEIGHSASEHEISCSSCEQSHLLGECPMSKLTCYLCEGDDHVPIKCPLSSILTTVTQHQREAYQEVIQQVIGETNKIIVTPVKKFREVDDSSLQYQCKRGSESASKVACSACGEQGEAASYKAKCMSKTRKASSKTKNVVCFSCNEMGHFANRCPLRHQTPAQDKTIPKAILTKRTTPTTGGEVLWWRGRGGFLPASAVNGGRSRNASKRENVAESFAHLMVVVSWTEVAGIDGDGGTSGGEPRLGDDDDAWSDPAAVENGGATATASSSLRSAKKGCFMNEDLRRNSPGSEESTKKWFGLRSTGWTGTEKEAGDGALEQKTATRTAQGG

SEQ ID NO: 20496 - protein, 366 aa, Oryza sativa
  Clone ID: TF_OSC900327j.C1.p7.fg
MKQQMIDNSAKIVSPDTVTTSTRYCHKFAEFMKTRPPTFAGSATSWYTDQWLGTIENKLDMVQCDEKNKVFYAAHQLQGAALECWKGYCATDKDPQAISWAEFSSILHYMDVSPGFIKTKDHTKDGVCTLCSQGYRYELMWCPRNKPRNCACARCGEIGHSASEHEISCSSCEQSHLLGECPMSKLTCYLCEGDDHVPIKCPLSSILTTVTQHQREAYQEVIQQVIGETNKIIVTPVKKFREVDDSSLQYQCKRGSESASKVACSACGEQGEAASYKAKCMSKTRKASSKTKNVVCFSCNEMGHFANRCPLRHQTPAQDKTIPKAILTKRTTPTTGGEVELIRNGRGRCLLVFVIGFYHLGILIVA

SEQ ID NO: 20497 - protein, 1136 aa, Oryza sativa
  Clone ID: TF_OSC14678j.C1.p1.fg
MPRRRSSSPIVRTPHDSGGRATGSGGGDRGLVIHRVVKEGGGSVNYPLLTKTNYNDWALLMKIKLQAHCLWAAIEPDGVDVPLHEDRMALDAICSAVPPEMIGTLATKASAREAWECIKTMRVGNDRIRKASAQKVRAEYESLAFRGDETVEDFALWLTTIVNQLATLGDPEPADKVIEKYLRVARPRFNQLILSIETLLDISTLSMEEVTGRLKAAEDSGQSSSHTAGGKLYLTEEEWAERQKKKDQEAKRGDSGGSGGRGKRRGGRGRTGGGGTASPESTNSGSARKGDKCRNCGKLGHWAKDCRSKSKREEQAHVAQEDEEEHTLMLLTGGRVDTVDAAAPEGDTPTPPHQAVVELVEMKVFPALDDVADHDPGRWIMDSGASNHMTGSRMAFADLDTNITGNVRLSDGSVVRIAGRGTILFACKNGEHRTLSNTYYLPRLAANIISIGQLDETGFKVLAEDGIMRVWDEQRRLLARIPRTPGRLYMLDINLARLVCLAAHADEDAWRWHARLGHINFRALCKMGKEELVRGLPCLSQVDQVCEACLAGKHRRSPFPRQALCRSDEPLALLHGDLCGPITPATPSGNRYFLLLVDDYSWYMWVALLSTKDAAPAAIKRIQAAAERKSGRKLRALRTDRGGEFTSTQFAEYCAELGMRRELTAPYSPQQNGVVERRNQSVVGTARSMLKAKGLPGMFWGEAINTAGYLLNRSSSKGIGGKTPYALWNGVPPAVHHLRTFGCVAHVKTTTPNLKKLDDRSCPMIFVGYEPGSKAYRAYDPATRRVHISRDIVFDEAAQWDWDAEAAADLDTDFVVEYTTVYHPGSLSGTRQDAGEPPARSSSSPRTPSDSPTAGRTPSVHGDAPAVDFVSPPTGAAANLDADHDDAPLRFRTMDNVLGPAMLPGLANREVQEELMMVSGEEPATFAQAERDEDWRRAMLDEISSIEENKTWRLVDLPSGHRPIGLKWVYKLKKDAQGVVVKHKARLVAKGYVQRAGIDFDEEGWMVHHMDVKSAFLNGELIEEVYVVQPPGFEIDGQENKVYRLDKALYGLRQAPRAWNTKLDCTLKKLGFKQSPLEHGLYARGDGSGRLLVGVYVDDLVIVGGDSGMIKGFKEQMKAEFKMSDLGPLSFYLGIE

SEQ ID NO: 20498 - protein, 1446 aa, Oryza sativa
  Clone ID: TF_OSC14686j.C1.p3.fg
MPRRRSSSPIVRTPHDSGGRATGSGGGDRGLVIHRVVKEGGGSVNYPLLTKTNYNDWALLMKIKLQAHCLWAAIEPDGVDVPLHEDRMALDAICSAVPPEMIGTLATKASAREAWECIKTMRVGNDRIRKASAQKVRAEYESLAFRGDETVEDFALWLTTIVNQLATLGDPEPADKVIEKYLRVARPRFNQLILSIETLLDISTLSMEEVTGRLKAAEDSGQSSSHTAGGKLYLTEEEWAERQKKKDQEAKRGDSGGSGGRGKRRGGRGRTGGGGTASPESTNSGSARKGDKCRNCGKLGHWAKDCRSKSKREEQAHVAQEDEEEHTLMLLTGGRVDTVDAAAPEGDTPTPPHQAVVELVEMKVFAALDDVADHDPGRWIMDSGASNHMTGSRMAFADLDTNITGNVRLSDGSVVRIAGRGTILFACKNGEHRTLSNTYYLPRLAANIISIGQLDETGFKVLAEDGIMRVWDEQRRLLARIPRTPGRLYMLDINLARLVCLAAHADEDAWRWHARLGHINFRALCKMGKEELVRGLPCLSQVDQVCEACLAGKHRRSPFPRQALCRSDEPLALLHGDLCGPITPATPSGNRYFLLLVDDYSWYMWVALLSTKDAAPAAIKRIQAAAERKSGRKLRALRTDRGGEFTSTQFAEYCAELGMRRELTAPYSPQQNGVVERRNQSVVGTARSMLKAKGLPGMFWGEAINTAVYLLNRSSSKGIGGKTPYALWNGVPPAVHHLRTFGCVAHVKTTTPNLKKLDDRSCPMIFVGYEPGSKAYRAYDPATRRVHISRDIVFDEAAQWDWDAEAAADLDTDFVVEYTTVYHPGSLSGTRQDAGEPPARSSSSPRTPSDSPTAGRTPSVHGDAPAVDFVSPPTGAAANLDADHDDAPLRFRTMDNVLGPAMLPGLANREVQEELMMVSGEEPATFAQAERDEDWRRAMLDEISSIEENKTWRLVDLPSGHRPIGLKWVYKLKKDAQGVVVKHKARLVAKGYVQRAGIDFDEVFAPVARLDSIRLLLALAAQEGWMVHHMDVKSAFLNGELIEEVYVVQPPGFEIDGQENKVYRLDKALYGLRQAPRAWNTKLDCTLKKLGFKQSPLEHGLYARGDGSGRLLVGVYVDDLVIVGGDSGMIKGFKEQMKAEFKMSDLGPLSFYLGIEVHQEAGIITLKQAAYASRIVEKAGLTGCNPCATPMEPCLKLSKESAGSLVDATEYRSLVGSLRYLVNTRPDLAYSVGYVSRFMEKPTDEHLAAVKRIIRYVAGTIHLGCRYVKEGEGGLQGYSDSDMAGDIDTRKSTTGVIFFLGKNPVSWQSQKQRVVALSSCESEYIAAATAACQGIWLARLLGDLRNAATEVVDLRVDNQSALALMKNPVFHDRSKHIQTKFHFIREAVENGEITPSYIGIEGQLADILTKPLSRIKFQELREQIGLATVRMRCVVWFPASDRWGNS

SEQ ID NO: 20499 - protein, 1511 aa, Oryza sativa
  Clone ID: TF_OSC400016j.C1.p3.fg
MPRRRSSSPIVRTPHDSGGRATGSGGGDRGLVIHRVVKEGGGSVNYPLLTKTNYNDWALLMKIKLQARCLWAAIKPDGVDVPLHEDRMALDAICSAVPPEMIGTLATKASAREAWECIKTMRVGNDRIRKASAQKVRAEYESLAFRGDETVEDFALRLTTIVNQLATLGDPEPADKVVEKYLRVARPRFNQLILSIETLLDISTLSMEEVTGRLKAAEDSGQSSSHTAGGKLYLTEEEWAERQKKKDQEAKRGDSGGSGGRGKRRGGRGRTGGGGTASPESTNSGSARKGDKCRNCGKLGHWAKDCRSKSKREEQAHVAQEDEEEHTLMLLTGGRVDTVDAAAPEGDTPTPPHQAVVELVEMKVFAALDDAADHDPGRWIMDSGASNHMTGSRMAFADLDTNITGNVRLGDGSVVRIAGRGTILFACKNGEHRTLSNTYYLPRLAANIISIGQLDETGFKVLAEDGIMRVWDEQRRLLARIPRTPGRLYMLDINLARPVCLAAHADEDAWRWHARLGHINFRALCKMGKEELVRGLPCLSQVDQVCEACLAGKHRRSPFPRQALCRSDEPLALLHGDLCGPITPATPSGNRYFLLLVDDYSRYMWVALLSTKDAAPAAIKRIQAAAERKSGRKLRALRTDRGGEFTSTQFAEYCAELGMRRELMAPYSPQQNGVVERRNQSVVGTARSMLKAKGLPGTRQDAGEPPARSSSSPRTPSDSPTAGRTPSVHGDAPAVEFVSPPTGAAANLDADHDDAPLRFRTMDNVLGPAMLPGLANREVQEELMMVSGEEPATFAQAERDEDWRRAMLDEISSIEENKTWRLVDLPSGHRPIGLKWVYKLKKDAQGVVVKHKARLVAKGYVQRAGIDFDEVFAPVARLDSVRLLLALAAQEGWMVHHMDVKLAFLNGELIEEVYVVQPPGFEIDGQENKVYRLDKALYGLRQAPRAWNTKLDCTLKKLGFKQSPLEHGLYARGDGSGRLLVGVYVDDLVIVGGDSGMIKGFKEQMKAEFKMSDLGPLSFYLGIEVHQEAGIITLKQAAYASRIVEKAGLTGCNPCATPMEPRLKLSKESAGSLVDATEYRSLVGSLRYLVNTRPDLAYSVGYVSRFMEKPTDEHLAAVKRIIRYVAGTIHLGCRYVKEGEGGLQGYSDSDMVGDIDTRKSTTGVIFFLGKNPVSCQSQKQRVVALSSCESEYIAAATAACQGIWLARLLGDLRNAATEVVDLRVDNQSALALMKNPIFHDRSKHIQTKFHFIREAVENGEITPSYIGTEGQLADILTKPLSRIKFQELREQIGLATIAQSQAPDGEKGKSTSKVPQLDIKDTKSSSNRKTRYGTSLNCQNRGMDLLDTLVVRFHMKGVFILDGTKKKYCGGSEALSYIDRDKVSLPELFGHLRDHCSVMSRTLLHWLFPGRDLQTGLRALSNDKACKLMCDCTGELDVAYIYVEEPEIVDLCDGSADNSNYEADMELKVDSEEEYVNMDVEVDVGEATGSGCKGKAVEEHGEASGSGSRAE

SEQ ID NO: 20500 - protein, 1431 aa, Oryza sativa
  unsure (1)..(1431): unsure at all Xaa locations
  Clone ID: TF_OSC400252j.C1.p3.np
MPQQALGARSSTGCSPAPPGAGSGTWAPSPGAAANVNVNGGSSASQSSGGPFSGYIFLLLLTHSFIPLLVMLVAILLRSWYVHDAYYTLSMLLVMLHFITRSPHIVHAMIIILTFWIKICRYMTIFPTIQKPDGSFSVVGFAATLKPHAFDGSNYKRWKARALLWLTAMQCFYVSWGKRSEPPLSPKEDVKFEASNCLFRGALISVLADNIVDVYIHMPSGKDMWDALEAKFGVSDAGSELYVMEQFYDYKMVDDRSVVEQAHEIQMLAKELENNNCELPDKFVAGGIIAKLPPSWSDFATSLKHKQEFSVSDLIGSLGVEEKARAKDNRGKKVEGGSSANMVQKKNPHASHNNKKVKLDGKPKATTNFKKKGKGKAKEDCFVCGKSGHWAKDCPERKERKSANMVISEGGETSGXGKILPTVLSVFHSPDWWVDTGANIHVCDDGRGSSLLMGNGSLAAVHGVGTVDLKFTSGKTVQLKNVQHVASTKKNLVSGSLLCREGFRVVFESYKCVVSKYGTFIGKGYDSRGLFHFSLDDMCNNHNVVNHISENDESNVWHSRLCHVNFGCTTRLANMSLIPKFTLVKVSKCHTCVQSKQPRKPHKAFEARNLALLELVHSDLCEMNGVLTKGGKKYFMTLIDDCTRFCYVYLLKTKDEALHYFKTYKAEVENQLERKKRLRSDRGGEYFSNEFASFCEEFGIIHERTPPYPPQSNGVAERKNCTLTEMVNAMLDTAELSKEWWGEAVLTACYILNKIPMKYKEVTPFEEWERKKLNLSYLRTWGCLAKVSVPIAKKRKLRPNTVDCMFLGYAIYSVGYRFLIVNSGVPDMRVGTIIESRDAIFFDNEFPMKHTPSTSSQETVIPHEHFAPIEHNDQTPEGNPEDNIVDTLKSKRQRVAKSFGDDYIVYLVDNTPRTIEEAYLSPDADYWKEAVRSEMDSIMSNDTWEVVEYPYGCKPVGCKWVFKKKLRPDGTIEKYKVRLVAKDYTQKEGEDFFDTYSLVARLTTIRLLLALAASHGLLVHQMDVKTAFLNGELEEEIYMDQPDGYVLEGQEGMVCKLFKSLYGLKQAPKQWHEKFDTTLTSAGFVDNEADKCVYYRHGGGEGVILCLYVDDILIFWTSLNVIEEVKDYLSKSFEMKDLGEADVILNIKLPRGYEGGITLVQSHYVDKVLTPTPYDPSVLLRKNRRIAPTPYDPSVLLRKNRRIARDQLRYSQIIGSLMYLASATRPNISFAVSKLSRFVSNPGDDHWQALERVMRYLKGTMSYGIHYTGYPKVLEGYSDSNWISDADEIKATSGYVFTLGGGAVSXKSYKQTILTRSTMEAELTALDTATVEAEWLRELLMDLPVVEKPVSAILMNCDNQIVIITVNSSKDNMKSSRHIKRRLKSVRKXKNSGVIALDYVQTANNLADQFTKGLPRNVIDSASRKMGLIPT

SEQ ID NO: 20501 - protein, 1499 aa, Oryza sativa
  Clone ID: TF_OSC401205j.C1.p5.fg
MRVSEFSSLPASCAGSSDHVVWLWGWTQLEHGVRSGLGGLATRSLGKFLTIGIRARFRKWTRDRALEGVFLPRRRSSSPIVHTPHDSGGRATGSGGGDRGLVIHRVVKEGGGSVNYPLLTKTNYNDWALLMKIKLQARCLWAAIEPDGVDVPLHEDRMALDAICSAVPPEMIGTLATKASAREAWECIKTMRVGNDRIRKASAQKVRAEYESLAFRGDETVEDFALRLTTIVNQLATLGDPEPADKVVEKYLRVARPRFNQLILSIETLLDISTLSMEEVTGRLKAAEDSGQSSSHTAGGKLYLTEEEWAERQKKKDQEAKRGDSGGSGGRGKRRGGRGRTGGGGTASPESTNSGSARKGDKCRNCGKLGHWAKDCRSKSKREEQAHVAQEDEEEHTLMLLTGGCVDTVDAAAPEGDTPTPPHQAVVELVEMKVFAALDDAADHDPGRWIMDSGASNHMTGSRMAFADLDTNITWNVRLGDGSVVRIAGRGTILFACKNGEHRTLSNTYFLPRLAANIISIGQLDETGFKVLAEDGIMRVWDEQRRLLARIPRTPGRLYMLDINLARPVCLAAHADEDAWRWHARLGHINFRALCKMGKEELVRGLPCLSQVDQVCEACLAGKHRRSPFPRQALCRSDEPLALLHGDLCGPITPATPSGNRYFLLLVDDYSRYMWVALLSTKDAAPAAIKRIQAAAERKSGRKLRALRTDRGGEFTSTQFAEYCAELGMRRELTAPYSPQQNGVVERRNQSVVGTARSMLKAKGLPGMFWGEAINTAVYLLNRSSSKGIGGKTPYALWNGVPPAVHHLRTFGCVAHVKTTTPNLKKLDDRSRPMIFVGYEPGSKAYRGYDPATRRVHISRDIVFDEAAQWDWDAEAAADLDTDFVVEYTTVYHPGSLSGTRQDAGEPPARSSSSPRTPSDSPTAGRTPSVHGDAPAVEFVSPPTGAAANLDADHDDAPLRFRTMDNVLGLAMLPGLANREVQEELMMVSGEEPATFAQAERDEDWRRAMLDEISSIEENKTWRLVDLPSGHRPIGLKWVYKLKKDAQGVVVKHKARLVAKGYVQRAGIDFDEVFAPVARLDSVRLLLALAAQEGWMVHHMDVKSAFLNGELIEEVYVVQPPGFEIDGQENKVYRLDKALYGLRQAPRAWNTKLDCTLKKLGFKQSPLEHGLYARGDGSGRLLVGVYVDDLVIVGGDSGMIKGFKEQMKAEFKMSDLGPLSFYLGIEVHQEAGIITLKQAAYASRIVEKAGLTGCNPCATPMEPRLKLSKESAGSLVDATEYRSLVGSLRYLVNTRPDLAYSVGYVSRFMEKPTDEHLAAVKRIIRYVAGTIHLGCRYVKEGEGGLQGYSDSDMAGDIDTRKSTTGVIFFLGKNPVSWQSQKQRVVALSSCESEYIAAATAACQGIWLARLLGDLRNAATEVVDLRVDNQSALALMKNPVFHDRSKHIQTKLHFIREAVENGEITPSYIGTEGQLADILTKPLSRIKFQELWEQIGMFPV

SEQ ID NO: 20502 - protein, 1446 aa, Oryza sativa
  Clone ID: TF_OSC401652j.C1.p3.fg
MPRRRSSSPIVRTPHDSGGRATGSGGGDRGLVIHRVVKEGGGSVNYPLLTKTNYNDWALLMKIKLQAHCLWAAIEPDGVDVPLHEDRMALDAICSAVPPEMIGTLATKASAREAWECIKTMRVGNDRIRKASAQKVRAEYESLAFRGDETVEDFALWLTTIVNQLATLGDPEPADKVIEKYLRVARPRFNQLILSIETLLDISTLSMEEVTGRLKAAEDSGQSSSHTAGGKLYLTEEEWAERQKKKDQEAKRGDSGGSGGRGKRRGGRGRTGGGGTASPESTNSGSARKGDKCRNCGKLGHWAKDCRSKSKREEQAHVAQEDEEEHTLMLLTGGRVDTVYAAAPEGDTPTPPHQAVVELVEMKVFAALDDVADHDPGRWIMDSGASNHMTGSRMAFADLDTNITGNVRLSDGSVVRIAGRGTILFACKNGEHRTLSNTYYLPRLAANIISIGQLDETGFKVLAEDGIMRVWDEQRRLLARIPRTPGRLYMLDINLARLVCLAAHADEDAWRWHARLGHINFRALCKMGKEELVRGLPCLSQVDQVCEACLAGKHRRSPFPRQALCRSDEPLALLHGDLCGPITPATPSGNRYFLLLVDDYSWYMWVALLSTKDAAPAAIKRIQAAAERKSGRKLRALRTDRGGEFTSTQFAEYCAELGMRRELTAPYSPQQNGVVERRNQSVVGTARSMLKAKGLPGMFWGEAINTAVYLLNRSSSKGIGGKTPYALWNGVPPAVHHLRTFGCVAHVKTTTPNLKKLDDRSCPMIFVGYEPGSKAYRAYDPATRRVHISRDIVFDEAAQWDWDAEAAADLDTDFVVEYTTVYHPGSLSGTRQDAGEPPARSSSSPRTPSDSPTAGRTPSVHGDAPAVDFVSPPTGAAANLDADHDDAPLRFRTMDNVLGPAMLPGLANREVQEELMMVSGEEPATFAQAERDEDWRRAMLDEISSIEENKTWRLVDLPSGHRPIGLKWVYKLKKDAQGVVVKHKARLVAKGYVQRAGIDFDEVFAPVARLDSIRLLLALAAQEGWMVHHMDVKSAFLNGELIEKVYVVQPPGFEIDGQENKVYRLDKALYGLRQAPRAWNTKLDCTLKKLGFKQSPLEHGLYARADGSGRLLVGVYVDDLVIVGGDSGMIKGFKEQMKAEFKMSDLGPLSFYLGIEVHQEAGIITLKQAAYASRIVEKAGLTGCNPCATPMEPCLKLSKESAGSLVDATEYRSLVGSLRYLVNTRPDLAYSVGYVSRFMEKPTDEHLAAVKRIIRYVAGTIHLGCRYVKEGEGGLQGYSDSDMAGDIDTRKSTTGVIFFLGKNPVSWQSQKQRVVALSSCESEYIAAATAACQGIWLARLLGDLRNAATEVVDLRVDNQSALALMKNPVFHDRSKHIQTKFHFIREAVENGEITPSYIGIEGQLADILTKPLSRIKFQELREQIGLATVRMRCVVWFPASDRWGNS

SEQ ID NO: 20503 - protein, 1522 aa, Oryza sativa
  Clone ID: TF_OSC401885j.C1.p1.fg
EKNFWARHHGTPEHAPSAAAADIVVVPTTVDQTKPSRRANVFSVSSNLVCHGLATRSLGKFLTIGIRARFRKWTRDRALEGVFMPRRRSSSPIVRTPHDSGGRATGSGGGDRGLVIHRVVKEGGGSVNYPLLTKTNYNDWALLMKIKLQARCLWAAIEPDGVDVPLHEDRMALDAICSAVPPEMIGTLATKASAREAWECIKTMRVGNDRIRKASAQKVRAEYESLAFRGDETVEDFALRLTTIVNQLATLGDPEPADKVVEKYLRVARPRFNQLILSIETLLDISTLSMEEVTGRLKAAEDSGQSSSHTAGGKLYLTEEEWAERQKKKDQEAKRGDSGGSGGRGKRRGGRGRTGGGGIASPESTNSGSARKGDKCRNCGKLGHWAKDCRSKSKREEQAHVAQEDEEEHTLMLLTGGCVDTVDAAAPEGDTPTPPHQAVVELVEMKVFAALDDAADHDPGRWIMDSGASNHMTGSRMAFADLDTNITGNVRLGDGSVVRIAGRGTILFACKNGEHRTLSNTYYLPRLAANIISIGQLDETGFKVLAEDGIMRVWDEQRRLLARIPRTPGRLYMLDINLARPVCLAAHADEDAWRWHARLGHINFRALCKMGKEELVRGLPCLSQVDQVCEACLAGKHRRSPFPRQALCRSDVPLALLHGDLCGPITPATPSGNRYFLLLVDDYSRYMWVALLSTKDAAPAAIKRTQAAAERKSGRKLRALRTDRGGEFTSTQFAEYCAELGMRRELTAPYSPQQNGVVERRNQSVVGTARSMLKAKGLPGMFWGEAINTAVYLLNRSSSKGIGGKTPYALWNGVPPAVHHLRTFGCVAHVKTTTPNLKKLDDRSRPMIFVGYEPGSKAYRAYDPATRRVHISRDIVFDEAAQWDWDAEAAADLDTDFVVEYTTVYHPGSLSGTRQDAWEPPARSSSSPRTPSDSPTAGRTPSVHGDAPAVEFVSPPTGAAANLDADHDDAPLRFRTMDNVLGPAMLPGLANREVQEELMMVSGEEPATFAQAERDEDWRRAMLDEISSIEENKTWRLVDLPSGHRPIGLKWVYKLKKDAQGVVVKHKARLVAKGYVQRAGIDFDEVFAPVARLDSVRLLLALAAQEGWMVHHMDVKSAFLNGELIEEVYVVQPPGFEIDGQENKVYRLDKALYGLRQAPRAWNTKLDCTLKKLGFKQSPLEHGLYARGDGSGRLLVGVYVDDLVIVGGDSGMIKGFKEQMKAEFKMSDLGPLSFYLGIEVHQEAGIITLKQAAYASRIVEKAGLTGCNPCATPMEPRLKLSKESAGSLVDATEYRSLVGSLHYLVNTRPDLAYSVGYVSRFMEKPTDEHLAAVKRIIRYVAGTIHLGCRYVKEGEGGLQGYSDSDMAGDIDTRKSTTGVIFFLGKNPVSWQSQKQRVVALSSCESEYIAAATAACQGIWLARLLGDLRNAATEVVDLRVDNQSALALMKNPVFHDRSKHIQTKFHFIREAVENGEITPSYIGTEGQLADILTKPLSRIKFQELREQIGLATVRVRCVRLVSC

SEQ ID NO: 20504 - protein, 415 aa, Oryza sativa
  Clone ID: TF_OSC401980j.C1.p15.fg
MSGTSSDEPTLENLAHKLKGMENWYEELMRNSKSYKESTDKHLKTLSESLVKVVDQIEKMNQSHKQLTENIQNMIIEHENIVRRIGLLEAAGEEGAGATAHRHQRYDDEDEEQSVADDVEEDESVGNRRQRRVRDKDDPLSKVKFTMPSFDETYYQEMMIALSRCDLQETEDARISRFYGSLNREIRDILEYKEYNTMNRLFHFACKAEREVQGRNKHRSSFAGATSTRQSTPRQATTAVRSPTSTPSNAQEKSKNASVQTPAKSATSVASTGRTRDITCHKCHGIGHIARDCPNRRALFVNDDGEYTSTSDCDDEYALAATDHAGGQDNDDIEEVHLHPESLDQYPSLIVKLALSAKEKCEEQNQCHNLFQSKVLVKDHTVKMIIDSGSCNNLASEEMVKKLGLTTHPPPRIST

SEQ ID NO: 20505 - protein, 415 aa, Oryza sativa
  Clone ID: TF_OSC900308j.C1.p9.fg
MSGTSSDEPTLENLAHKLKGMENWYEELMRNSKSYKESTDKHLKTLSESLVKVVDQIEKMNQSHKQLTENIQNMIIEHENIVRRIGLLEAAGEEGAGATAHRHQIYDDEDEEQSVADDVEEDESVGNRRQRRVRDKDDPLSKVKFTMPSFDETYYQEMMIALSRCDLQETEDARISRFYGSLNREIRDILEYKEYNTMNRLFHFACKAEREVQGRNKHRSSFAGATSTRQSTPRQATTAVRSPTSTPSNAQEKSKNASVQTPAKSATSVASTGRTRDITCHKCHGIGHIARDCPNRRALFVNDDGEYTSTSDCDDEYALAATDHAGGQDNDDIEEVHLHPESLDQYPSLIVKLALSAKEKCEEQNQCHNLFQSKVLVKDHTVKMIIDSGSCNNLASEEMVKKLGLTTHPPPRIST

SEQ ID NO: 20506 - protein, 319 aa, Oryza sativa
  Clone ID: TF_OSC10377j.C1.p4.fg
MATECLGFQERATPVGESSSVLPRRRSPEKGLPRGYTHADILTVAARGPVSSGAKISGEFAHEFRPERPSNGGGSPMATVQPRVARGPASSTMMNCGKKVGEINLEDIFPKFRPTEPQKWIWIKRGEVRPLLGFPARDDEIRRFGDGARRIWKVPEKRCDHRTFAQVVMERRPPNRLDWQANKRRATEQGGGDWGARGGGDWGACGAREEEELHRQLLAQNPRANQGAQWKPQGLPGTDGERGARAPKIKCFKCGREGHHQAARPNPSLCYSCHSSGHISSQCPLMMRKGVKLCGFGIPGQGFYSLNVELSDMRLLKPL

SEQ ID NO: 20507 - protein, 635 aa, Oryza sativa
  Clone ID: TF_OSC420025j.C1.p1.fg
MVTPAPPGGWDFSPGDAIREEVRLRFRSPVHFSSKFCPTHFRLVDLPRANFRLTNSSVALALRAAIGGSPADLNDQHLLDRSFSFDVCSKQVGLWIYRLRSFSCDDFALRFYLWRNGGPNWQWEFESWSRDCAEEWTLVSSKKRLVHNSSKVQKGKSYAQAVQQRDVLVKSVFQHLKAPLQERRSVFTRLQGLKVPIAGETPATKTVEPIMEEDPISARNLNSNFMLSCTRCLDKGHIASDCSEPVWCHSCLEAGHMARFCATRPAKAHQPVGKFPKLSSRNNLVWRAKSSPAKKMAVYPRIPSSPRNTVQSNPQNFPSLAMANLNPNPQRFLRQGQVVHQGGNLRVPRVDLTIPQRLPRRHEDACIAIVEPAIPEHEWDHHRALISDHLFEVHMYEVRTAYRHPSAVGMFQLRSVMHRDALVNSPPAAYDGMHTVEFVKHDQGPNWRACHFNQEGWFLLLDFPLDFVDHHHINLAVASFGQLSFWLDRDQMLGRVFVRAKYRDLDSVPRKIVLQDPLGNGGGGESWTISIFVLDGDFADIPPEEDLPPAGLQPGPNEDNADDPDDGNIWQLGHPGNQGGGGAWDDLVQQQQAAEAEIEDAWGQDHPMGQVEENPGQLIILPNQKEQELNLFEQE

SEQ ID NO: 20508 - protein, 947 aa, Oryza sativa
  unsure (1)..(947): unsure at all Xaa locations
  Clone ID: TF_OSC17665j.C1.p1.np
MSNEVNHVGKAPMFNGTNYSTWKIKMSTHLKAMSFHIWSIVDVGFTITDTPLTEIDHHNLQLNAQAMNALFNSLSQEEFDRVSNLKTAYEIWNKLAEIHEGTSEYKDAKLHFLKIQYETFSMLPHESVNDMYGRLNVIVNDLKGLGANYIDLEVAQKMLRPLPEKYETLVTMLINSDMSRMTLASLLGKINTNDMYKLKKEEMKEASPSKKCIALQAEVEDKGKGKVNEANEDLEEEIALLARRFNDLLGRRKERGRGSNSNRRRNRRPKKTLSNLRCFECGEKGHFASKCTSKDDDEDKSSKKKSGGYKLRKKLKKEGKKIEAFIGEXDSNEESSTSSGSEEEGGDDASSKKKKMAVVAIKEAPSLFAPLCLMAKGSSKVISLSDGGSDDDCDDVSYDELVSMFEELYAYSEKEIVKFKDLKKDHASLEVLYEELKTSHERLTISHEKLKEAHDNLLSTTXHRALIDVGISCDLLDDSATCHIAHVASSSISTSFNDLVDMPSSGSSPCVSICDASLVVENNKLKEQVAKLNKSLERCFKGKNTLNKILSEQRCILNKERLGFIPKKGKKPSHRATRFVKSNGKYCSKCREVGHLVNDCPGSKPPKTCMFDSHYMLRKAYDGSIVARYVDSPILGGKKNAIWVPKALVSNLQRPKQVWIILAILVFFLHDKSIVAELFKKFAKKAQNEFSCTLVKIRSDNGSEFKNTNIEDYCDDLGIKHELSATYSPQQNGVVERKNRTLIEMARTMLDEYGVSDFFWAEAINTACHAINRLYLHRLLKKTSYELIVGRKPNVAYFRVFGCKCYIYRKGVRLTKFESRCDEGFLLGYASNSKAYRVYNKNKGDEGDEGLMRAMKNMSIGDVKPIEVEDKPSTSTQDEPSTSATPSQAQVEVEEEKAQNPPMPPRIHTVLSKDHPIDXVLGDISKGVQTRSRVASICEHYSFVSCL

SEQ ID NO: 20509 - protein, 215 aa, Oryza sativa
  Clone ID: TF_OSC30726j.C1.p1.fg
MRAEIPPKPMPHSPYPKPMYQQFRRQGTTPHWWKGKRKRKASSLITYAELDLSKMGIEIGDLPEEVEELQLWQRKRDGCCFSCGQFGHYAIGCTQDTNEEQETLPSQISPEEHRVSDPSKEVSKIKAYSRCGEIGHYGSNCVTQCPYCDEDHQNGECPTTKIACFLCEKTDHVPQDCQLSPLLTKTAEVQRVSLRFAHQLMTSGSHEDPGFPTFD

SEQ ID NO: 20510 - protein, 1571 aa, Oryza sativa
  Clone ID: TF_OSC400850j.C1.p68.np
MASRPRRAARAPARFGFEDGRVEPEENHESANEQSHHSNSSHRTVSRNAEVEQPRRSNRSHRTVSRDAEMEQSHRSHRTASHNSGEERLPSPPHVETNMQHLMAVQTQILQGLTTAIASFQHNAHGNGHPHMGNNRSKLTDFLRSRPPEFSQTIEPVEADDWLKDVDRKLNLVQCTPVEKTLYASHQLRGPAADWSENYCNAHPEPTNIAWDEFATAFRAAHVPESTIDMKKEEFNRLKQGNSSVNEYLSQFNKLARYAPEEVDTDKKKIRKFLKGIAVGMRLQLIAHDFPTFQHMINKALLLEDARKEATEEYKKRKSNHQGNSSRGAPRPRYGQPMQYHQSVTQANHQPGYAPRPQINRPAPQPQKHAPSGNTAPNSVTSFKSPQGPSAVQCFRCNQMGHYVRQCPQNPTNTNSGHANGSTAKTPTPAAAQSRPSSQASGQGSRASNNIGRGRVNHIQAETAQDAPDVVMGMFSVNSVPAIVLFDSGASHSFISQAFVKRNGWKTQNLRVPMIVHSPGRNIRATQICPEVNLRIEEVDFLAKPIVLDSQSLDIILGMDWLAKHKGQIDCAEKSITLQGPGGKQVRFTPNTPTASQSILTCLQVTSLESVPIVCEYPDVFPEELTRMPPDREIEFAIELAPGTAPIAKRPYRMAANELAEVKRQIEELESKGYVRPSSSPWGAPVLLVKKKDGSERMVIDYRALNEVTINNKYPLPRIDDLFDQLKGARVFSKIDLRSGYHQLKIRSEDIPKTAFSTRYGLYEFTVMSFGLTNAPAFFMNLMNKIFMEYLDQFVVVFIDDILIYSKSEEEHAEHLRLIMEKLRDHQLFAKFSKCEFWLDRVAFLGHVISSNGVEVDPSKVEAVLAWNPPKNVSEIRSFLGLAGYYRRFIEGFSKLARPMTELLRKEKKFQWSAACEDSFQEMKKRLTTAPVLTLPDIKDFEIFCDASRQGLGCVLMQERKVVAYASRQLRPHEVNYPTHDLELAAVVHALKIWRHYLIGNRCEVYTDHKSLKYIFTQTELNMRQRRWLELIKDYDLGIHYHPGKANVVADALSRKAYCNVAQIRPDQDHLCRELEKLRLTVVQSGVPASLTVQPTLESQIREAQKDDEGIKELIKRIQDKKDTNFSIDDQGTVWCGPRICVPAKKELRDLILKEAHESAYSIHPGSTKMYQDIKAYFWWAGMKRDVAEYVALCDICQRVKAEHQRPAGLLQPLPIPEWKWEEIGMDFITGLPRTPSGYDSIWVIVDRLMKSAHFVPVKTTFDGKKLAELYMTHVVCRFGCPKKIVSDRGTQFTSRFWKQLHEALGTDLNFSTAYHPQTDGQTERVNQILEDMLRACALDFEGTWDRCLPYAEFSYNNSYQASIQMSPNEAMFGRKCRTPLCWNEVGEALVFGPDILKSAEEQVKLIRERLKTAQNRQKNYADNRRRDLEFEKGDHVYLRVSPLRGIKRFGMSGKLAPRYIGPYLITARRGEVAYQLELPEGLADVHNVFHVSQLKKCLRVPEEQVPLGNIELERNLTYKERPIKVLEEAERQTRRKTIKFYKVQWSNHSEDEATWEREDLLRAEFPELLP

SEQ ID NO: 20511 - protein, 1209 aa, Oryza sativa
  Clone ID: TF_OSC415532j.C1.p8.fg
MSGVAAAAAGGDGGGGAPPTGAGAGAPGGAVNDNNNGGNSASPSSGEPFSGTFSVVGFAAALKPHAFDGSNYKRWKARALLWLTAMQCFYVSRGKRSEPPLSPEEEAKFEASDCLFRGALISVLADNIVDVYMHMPSGKDMWDALEAKFGVSDAGSELYVMEQFYDYKMVDDRSVVEQAHEIQMLAKELENNNCELPDKFVAGGIIAKLPPSWSDFATSLKHKRQEFSVSDLIGSLGVEEKARAKDVRGKKVEGGSSANMVQKKNPHASHNNKKVKLDVKPKAATNFKKKGKGKAKGDCFVCGKSEHWAKDCPERKDRKSANMVISEGGGTSGYGKILPTVLSVFHSPDWWVDTGANIHVGRGSSLLMGNGSLAAVHGVGTVDLKFTSGKTVQLKNVQHVPSIKKNLVSGSLLCREGFRLVFESNKCVVSKYGTFVGKGYDSGGLFRFSLNDMCNNHNAVNHISENDESNVWHSRLCHMNFGCMTRLANMSLIPKFTLVKGSKCHTCVQSKQPRKPHKASEARNLAPLELVHSDLCEMNGVLTKGGKKYFMTLIDDCTRFCYVYLLKTKDEALHYFKIYKAEVENQLERKIKRLRSDRGGEYFSNEFASFCKEFGIIHERTPPYSPQSNGVAERKNRTLTEMVNAMLDTAGLSKEWWGEAVLTACHVLNKIPMKYKEVTPFEEWERKKLNLSYLRTWGCLAKVNIPIAKKRKLGPNTVDCVSLGYAIHSVGYRFLIVNSGVPDMHVGTILESRDATFFENEFPMKHTPSTSSKETVMPHEHFAPIEHNDQTPEENPEEDNIVDTRKSKRQRVAKSFGDDYIVYLVDDTPRTIEEAYSSPDADYWKEAVRSEMDSIMSNGTWEVVERPYGCKPVGCKWVFKKKLRPDGTIEKYKARLVAKGYTQKEGEDFFDTYSPIARLTTIRVLLALAASHGLLVHQMDVKTAFLNGELEEEIYMDQPDGYVLECQEGMVCKLLKSLYGLKQAPKQWHEKFDTTLTSAGFVVNEADKCVYYRYGGGEGVILCLYVDDILIFGTSLNVIEEVKDYLSKSFEMKDLGEADVILNIKLQRGDEGGITLVQSHYVDKVLSRFGYSDCKPAPTPYDPSVLLRKTRRIARDQLRYSQIIGSLMYLASTTRPDISFVVSKLSRFVSNLGDDHWQALERVMRYLKGTMSYGIHYTGYPKVLEGYSDSNWISDADEIKATSGYVFTL

SEQ ID NO: 20512 - protein, 979 aa, Oryza sativa
  Clone ID: TF_OSC419079j.C1.p8.fg
MSQVGDSLVSEYSGALISVLADNIMDVYMHMPSGKDMWDTLEAKFGVSDAGSELYVMEQLYDYKMVDDRSIVEQAHEIQMLAKELENNNCELPDKFVAGGIIAKLPPSWSDFATSLKHKRQEFSVSDLIGSLGVEEKTRAKDNRGKKVEGGSSANMVQKKNPHASHNNKKVKPDVKPKATTNFKKKGKGKAKGDCFVCGKSEHWAKDCPERKDRKSANMVGRGSSLLMGNGSLAAVNGVVTVDLKFTSGKTMQLKNVQHVPSIEKNLVSGSLLCREGFRLVFESNKCVIFKSGTFIGKGYDSGGLFRFSLDDMCNNNNVVNHISENDESNDEALHYFKTYKAEVENQLERKIKRLRSDRGGEFFSNEFTSFCEEFGIIHERTPPYSPQSNGVAERKNRTLTEMVNAMLDTAGLSKEWWGEAVLTTCHVLNKIPMKHKEVTPFEVWERKKLNLSYLRTWGCLAKVNIPIAKKRKLGPNTVDCVFLGYAIHSVGYRFLIVNSRVPDMRVGTIIESRDATFFENEFPMKNTPSTSSQETVIPNEHFAPIEHNDQTPEGNPEEDNIVDTRKTSHGLLIHQMDVKTAFLNGELEKEIYMDQPDGYVLEGQEGMVCKLLKSLYGLKQAPKQWHEKFETTLTSAGFVVNETDKCVYYRYGGGEGLILCLYVDDILIFGTSLNVIEEVKNFLSKSFEMKDLGEADVILNIKLLRGDEGGITLVQSHYVDKVLSRFGYSDCKPAPTPYDPSVLLRKNRRIARDQLRYSQIIGSLMYLASASRPDISFAVSKLSRFVSNPGDDHWQALERVMRYLKGTMSYGVHYIGNPKVLEGYSDSNWISDADEIKATSGYVFTLGGGVVSWKSCKQTILTRSTIEAELTALDTMTVEAEWLRELLMDLPMVEKPVPAILMNYDNQTIIIKVNSSKDNMKSSSNIKRRPKSVRKQKNSGVIALDYAQTAKNLTDQFTKGLPCNVIDSTSRGMGLIST

SEQ ID NO: 20513 - protein, 858 aa, Oryza sativa
  Clone ID: TF_OSC900115j.C1.p1.fg
MSGVAAAAAGGDGGGGAPPTGAGAGAPGGAVNDNNNGGNSASPSSGEPFSGTFSVVGFAAALKPHAFDGSNYKRWKARALLWLTAMQCFYVSRGKRSEPPLSPEEEAKFEASDCLFRGALISVLADNIVDVYMHMPSGKDMWDALEAKFGVSDAGSELYVMEQFYDYKMVDDRSVVEQAHEIQMLAKELENNNCELPDKFVAGGIIAKLPPSWSDFATSLKHKRQEFSVSDLIGSLGVEEKARAKDVRGKKVEGGSSANMVQKKNPHASHNNKKVKLDVKPKAATNFKKKGKGKAKGDCFVCGKSEHWAKDCPERKDRKSANMVISEGGGTSGYGKILPTVLSVFHSPDWWVDTGANIHVGRGSSLLMGNGSLAAVHGVGTVDLKFTSGKTVQLKNVQHVPSIKKNLVSGSLLCREGFRLVFESNKCVVSKYGTFVGKGYDSGGLFRFSLNDMCNNHNAVNHISENDESNVWHSRLCHMNFGCMTRLANMSLIPKFTLVKGSKCHTCVQSKQPRKPHKASEARNLAPLELVHSDLCEMNGVLTKGGKKYFMTLIDDCTRFCYVYLLKTKDEALHYFKIYKAEVENQLERKIKRLRSDRGGEYFSNEFASFCKEFGIIHERTPPYSPQSNGVAERKNRTLTEMVNAMLDTAGLSKEWWGEAVLTACHVLNKIPMKYKEVTPFEEWERKKLNLSYLRTWGCLAKVNIPIAKKRKLGPNTVDCVSLGYAIHSVGYRFLIVNSGVPDMHVGTILESRDATFFENEFPMKHTPSTSSKETVMPHEHFAPIEHNDQTPEENPEEDNIVDTRKSKRQRVAKSFGDDYIVYLVDDTPRTIEEAYSSPDADYWKEAVRSEMDSIMSN

SEQ ID NO: 20514 - protein, 1228 aa, Oryza sativa
  Clone ID: TF_OSC400060j.C1.p7.fg
MSGVAAATAGGGGTPPTGAGSGAGAPGGAVNDNNNGGNSASPSSGGPFSGYTLLLLLLLLALFLFPLLALSLYYVRYVLVPVLHNASSMLSCYWYVPVPDIHDAHSMLLVMLRSPYTAYAMIIALTFWIKICRLMTIFPTIQKPDRSFSVVGFAAALKPHAFDGSNYKRWKARALLWLTAMQCFYVSRGKRSEPPLSPEEEAKFEASDCLFRGALISVLADNIVDVYMHMPSGKDMWDALEAKFGVSDAGSELYVMEQFYDYKMVDDRSVVEQAHEIQMLAKELENNNCELPDKFVAGGIIAKLPPSWSDFATSLKHKRQEFSVPDLIGSLGVEEKARAKDVRGKKVEGGSSANMVQKKNPHASHNNKKVKPDVKPKAATNFKKKGKGKAKGDCFVCGKYGHWAKDCPERKDRKSANMVISEGGGTSGYGKILPTVLSVFHSPDWWVDTGANIHVGRGSSLLMGNGSLAAVHGVGTVDLKFTSGKTVQLKNVQHVPSIKKNLVSGSLLCREGFRLVFESNKCVVSKYGTFVGKGSKCHTCVQSKQPRKAHKASEARNLAPLELVHSDLCEMNGVLTKGGKKYFMTLIDDCTRFCYVYLLKTKDEALHYFKIYKAEVENQLERKIKRLRSDRGGEYFSNEFASFCEEFGIIHEMMPPYSPQSNGVAERKNRTLTEMVNAMLDTAGLSKEWWGEAVLTACHVLNKIPMKHKEVNVPIAKKRKLGPKTVDCVFFGYAIHSVGYRFLIVNSGVPDMHAGTILESRDATFFENEFPMKYTPSTSSKETVMPHEHFAPIEHNDQTPEENPEEDNIVDTRKRKRQRVAKSFGDDYIVYLVDDTPRTIEEAYSSPDADYWKEAVRSEMDSIMSNGTWEVVERPYGCKPVGCKWVFKKKLRPDGTIEKYKARLVAKGYTQKEGEDFFDTYSPVARLTTIRVLLALAASHGLLVHQMDVKTAFLNGELEEEIYMDQPDRYVLEGQEGMVCKLLKSLYGLKQAPKQWHEKFDTTLTSAGFVVNEADKCLYYRYGGGEGVILCLYVDDILIFGTSLNVIEEVKDYLSKSFEKKDLGEADVILNIKLQKGDEGGITLVQSHYVDKVLSRFGYSDCKPAPTPYDPSVLLRKNRRIVRDQLRYSQIIGSLMYLASATRPDISFAVSKLSRFVSNPGDDHWQALERVMRYLKGTTSYGIHYTGYPKVLEGYSDSNWISDADEIKATSGYVFTLGGGAVSWKSCK

SEQ ID NO: 20515 - protein, 259 aa, Oryza sativa
  Clone ID: TF_OSC400775j.C1.p8.fg
MSTDGGVNGGHVGGGTGGGENDNINGGNNNNSNISFSGAFSSKPSEPPLSPKEEAMFESADCLFHGALISVLADNILDVYMHMPSAKDMWDAVEAKFGVSDAGKFGVTDLIGSLGVEEKVRAKDNPDKKIKRGSSANLVQKKNPNAPHNNNKKVKRDVKLKATTNFKKKCKGKAKGNCFVCGKSGHWAKDCPDHNDKKSANMVISEGEGTSGYGKFLPTVLSIFHSPDWWVDTFRHFRSRLRYLHGLEIVGARVYARLK

SEQ ID NO: 20516 - protein, 742 aa, Oryza sativa
  Clone ID: TF_OSC402610j.C1.p17.fg
MSTTGDNNNTGDKEKEPPVNTNRGNTASNSSGGPLSGVLADNIVDVYMHMPSGKDMWDALEAKFGVFDAGSELYVMEQFYDYKMVDDRSVVEQAHEIQMLAKELENNNCELPDKFVAAGIIAKLPPSWSDFATSLKHKRQEFGVTDLIGSLGVEEKARAKDNRSKKIKGGSSANLVQKKNPHASHNNNKKVKPDVKPKATTNFKKKGKGKAKGDCFVCGKYGHWAKDCPECKDKKSASMVIGEGGGTLRYGKFLPTVLFVCHSPDWWVDTGANIHVGRCSSLLMGNGSLAAVHGVGYDSGGLFRFSLDDMCNKVVNHDEALHYFKIYKAEVENQTGKENQTVEYGIIHERTPPYSPQSNGVAERKNRTLTEMVNAMLDTAGLSKEWWGEAILTACHVLNRIPTKHKEVTQFEEWERKKLNLSHLRTWGYLAKVNVPIAKKRKLGPKTVDCVFLGYAIHSVGYRFLIVNSRVPDMRIGTITESRDATFFENEFPMKNAPSTSSQEPILSPEHFAPIEYIDQTLEENPVEDNIMDVKTAFLNGELEEEIYMDQPDGLNVIGEVKDFLSKSFEMKDLGVADVILDIKLPRGDDGGITLVQSHYVDKVLSRFGYSDCKAAPTPYDPSVLLRKNRRIARDQLRYSQIIGSLMYLANVTRPNISFAVSKLSRFVSNPGDDHWHALERVMRYLKGTMSFGIHYTGYPKVLEGYSDSNWISDADEIKATSGYVFTLGGALFPGSLASRPS

SEQ ID NO: 20517 - protein, 533 aa, Oryza sativa
  Clone ID: TF_OSC6126j.C1.p2.fg
MADNEKGNKVRSQDISTLSSRVNEAPDTSCVTLVQHLINQNRLLIEILQQHQTPILNPSQIRPQVQLEAVQALTPQVSMPPASRRTHGDVPHVDPKEASNICFMCEEQGHYARERPQQKRKTPMRTEDEVRKMIITSTEWPPPGMTRRQRRNTFRGAPQLTEHLLANGGRVSDSEDSDQVSSDDEDEMERKACSRCGEIGHVASSCATICVHCEEDHPPDRCPTSRITCFFCEGTDHVPKDCQFSFLLTKKMANQPASSNGEKHQGNTNPRQDYSFSLTPVPGQRNRNEKRKCRVREDICCFNCQGMGHFADKCPKPRNIAAGTSVHATPCNQKLAPQRIVIHASRSSPIARVATAPIPMNALPQGVNAQFQPQPPADKTEASICVVPLEVPIQQLRNQVQDEEPELKKGITPKTVPNQGKIDLHITANLHEADIPIVLWSLEQTPYPGNLSEVDSEDRNHEKFWNGSITALPQPSLSQPKGAPWSKSGEEKIPSSTGGQAKQFRVVKFCWKFVKTQRKKSDKKRRPPNLSSC

SEQ ID NO: 20518 - protein, 566 aa, Oryza sativa
  Clone ID: TF_OSC14149j.C1.p1.np
SPSPNAICKRFLRSSSSDFQLVLDGQLCEEEDVVNCLPKLRKTAGSASEVEEAVKPAVKQDKRLRSVKVLSLVSNLSLPFVFPLSLSKPLQQMADNEKGNKVRSQDIGTSSRVNEAPDTSCVAVQHLINQNQLLIEILQQHWIAILNPSQMQHQVQLEAVQALSPQVSAPPTSQKAPHAMPHVDPKEASIICFMCDEQGHYARNCPQQKRKPMRTEDEVRKMIITSTEWPPPGMTKHQRRNSSQGAQQLTEHLLANGGRVSGSEDSDQVSSDDEDAKSPQGFNQNKIELKACSRCGEIGHVASSCASTCVHCEEDHPPDRCPTSRITCFFCEGTDHVPKDCQFSFLLTKKMANQPASSNGEKHQGNTNPRQGHRFSLTPVPGQRNRNEKRKCRVREDICCFNCQGMGHFADKCPKPRNIAAGTSVHATPCNQKLAPQRIVIHASRSSPIARVATAPIPMNALPQGVNAQFQPQPPADKTGASICVVPLEVPIQQLRNQVQDEEPECKKVIVCYNCSEEGHYSKNCPQPRQNRPPHYRQFTRSRHSNRIVVTGANAVPVRPRVNQNP

SEQ ID NO: 20519 - protein, 645 aa, Oryza sativa
  Clone ID: TF_OSC18542j.C1.p1.fg
MADNEKGNKVRSQDIGTSSSRVNEAPDTSCVAVVQHLINQNQLLIEILQQHRMPILNPSQMQPQVQLEAVQALTPQVSAPPTSQKAPHAMPHVDPKEASIICFMCDEQGHYARNCPQQKRKAPMRTEDEVRKMIITSTEWPPPGMTKHQRRNSFRGAQQLTEHLLANGGRVSGSEDSDQVSSDDEDEKSPQGFNQNKIELKACSRCGEIGHVASSCASTCVHCKEDHPPDRCPTSRITCFFCEGTDHVPKDCQFSFLLTKKMANQPASSNGEKHQGNTNPRQDHRFSLTPVPGQRNRNEKRKCRVREDICCFNCQGMGHFADKCPKPRNIAAGTSVHATPCNQKLAPQRIVIHASRSSPIARVATTPIPMSALTQGVNAQFQPQPPADKTEASICVVPLEVPIQQLRNQVQDEEPECKKVIVCYNCSEEGHYSKNCPQPRQNRPPHYRQFTRSRHSNRIVVTGANAVPAEPRAINLRRAIPSRRPSSASTSNQKEASPVNDSSMQSYHIITEPIEDAVTGTMPAISLQNQNEQPCLWFSVRYLSWCNRKFAAIIFMSINIDNLSEVDSEDMNHEKFWNGSITELPQPSLSQPKGAPWSKSGEEKIPSATGGQAKQFRVVKFCWKFVKTQRKKSDKKRSPPNLSSC

SEQ ID NO: 20520 - protein, 477 aa, Oryza sativa
  Clone ID: TF_OSC23131j.C1.p4.fg
MADNEKGNKVRSQDIGTSSSRVNEAPDTSCVAVVQHLINQNQLLIEILQQHRMPILNPSQMQHQVQLEAVQALTPQVSAPPTSQKAPHAMPHVDPKEASIICFMCDEQGHYARNCPQQKRKAPMRTEDEVRKMIITSTEWPPPGMTKHQRRNSSRGAQQLTEHLLANGGRVSGSEDSDQVSSDDEDAKSPQGFNQNKIELKACSRCGEIGHVASSCASTCVHCEEDHPPDRCPTSRITCFFCEGTDHVPKDCQFSFLLTKKMANQPASSNGEKHQGNTNPRQGHRFSLTPVPGQRNRNEKRKCRVREDICCFNCQGMGHFADKCPKPRNIAAGTSVHATPCNQKLAPQRIVIHASRSSPIARVATAPIPMNALPQGVNAQFQPQPPADKTGASICVVPLEVPIQQLRNQVQDEEPECKKVIVCYNCSEEGHYSKNCPQPRQNRPPHYRQFTRSRHSNRIVVTGANAVPVRPRVNQNP

SEQ ID NO: 20521 - protein, 162 aa, Oryza sativa
  Clone ID: TF_OSC18181j.C1.p1.np
RNNAHKNLTLIPDKHPPLTNETKVIVCYNCSEEGHYSKNCPQPRQNRPPHYRQFTRSRHSNRIVVTGANAVPVKQCTNAPPAAPDLKQCTNAPPAAPDLAINHSNHSLHRQPQQRIVVNGRSCVSSRPTPGRAKGNQPPEGDTKQKTVIRFNQQSEGSFSCE

SEQ ID NO: 20522 - protein, 815 aa, Oryza sativa
  Clone ID: TF_OSC414329j.C1.p9.fg
MSNEVKHVGKTPMLHSTNYSTWKIKMSTHLKAMSFHIWSFVDVGFAITGTPLTEIDHRNLQLNAQAMNALFNSLSQEEFDRVSNLETAYEIWNKLAEIHEGTSEYKDAKLHFLKIQYETFSMLPYESVNDMGLGQPTPMEMEEASPSKKEMEEASPSKKCIALQAEVEDKGKSKVNEVNDDLEEEIALLARRFNNLLGRRKERGRGSNSNKRRNKRPNKTLSNLRCFECGEKGYFASKCPSKDNDGDKSSKKKSGGYKLMKKLKKEGKKIEAFIGEWNSNEESSASSGSEEEGGDDASSKKKKMAVVAIKEAPSLFAPLCLMAKGSSKVASLSDSESDDDCDDVSYDELVSMFEKLHAYSEKEIVKFKALEKDHASLEVLYEELKTSHERLTISYEKIKEAHDNLLSTTQHGAHIDVGISCDLLDDSASSHIPHVASSSISTSCDDLMDMPSSSYSSCVSICDASLVVENNELKEQVAKLNKSLERCFKGKNTLDKIFSEQRCILNNKGLGYIPKKGKKPSHRVTRFVKSNGKYCSKCHEVGHLVNDCPGSKPSKTCMFDSHYMLKKAHDGSIVARYVGSPILGGKKNAIWVPKALVSNLQGPKQVWVNYRIGGSHWVLNSGCIQHMTGDRAMFTIFEVGGKEQEKVTFRDNSKGKEEIALLARRFNDLLGRRKERGRGSNSNKRRNKRPNKTISNLRCFECGEKGHFASKCPSKDDDGDKSSKKKSGGYKLMKKLKKEGKKIDTKPHPLRNIVSSHPYSVPLLLCVVSSTVFRSYRHVLPCFHPHRHFISTANPSPLEPHHDETGCKLENGYLI

SEQ ID NO: 20523 - protein, 822 aa, Oryza sativa
  Clone ID: TF_OSC900209j.C1.p21.gm
MDLPQFVVDIDALAKLQLEGMLPSQQNPEDPTKEDDENEHKNAQAANAILSAFSGSEFNRVDGIESAKVIWDTLRNLHEGTDSASESKVEILKGQFERFVMLDGESPSDMYDRLSKIVNEIKRLGSKDMTDEVVVKKMVQAITPRNSTLVTIIRERPDYKTLTPHDLHGCILAHDMLEQESKEVIQYINQTSTTSIKKEDLALKAKEEEEESCKSKSKAEIDDEEMALFVKKFGKFMKQSGFAKGSSSKYSSNKSSGRHSARVCYVCKKPGHFIADCPHIKDCPHLKEDKKKLEKKEKHKHSKHDRYGQAHLGMIFGFDSESSSSDEEGVATFTVKPSSPPRLFNYSSDEDAPICLMAKETKVPSPLKSFNVDLVSDEEDDVEDEVMDEELFKSITKESLPHLSELLGRIEDQYATLERQEALLIREKERSHELKGSKALKEYLGYQRDNFNHEGLGACQAGKQIGAHHPVKNVMATTRPLELLHMELFGPIAYLSVGGNKYGLVIVDDFSRFTWVFFLHDKSETQALFKKFARRAQNEFDLKIKNIRSDYGKEFKNTCIESFLDEEGIKHEFSSPYSPQQNLKELMGLQYPRNKMRGEYNPFNCTSSRKYWRDNWFYLHDADTSPCLVVPEEQPPHSWCWTAKPVLTPTLKGFIDKIHNLREHGLTGYEVVCDFTCSWIRPLQACAHPTFEYTRAEDTTRIMRFGLSRTAVAKCVVQVVVDPPSAVDNIPTTVCDLLQTEKDAVVNINYVQHEVGRDQEGTAVEEAKSWPHSSGPGQSTRAREDAVSSANDLVVAFEAQLKKEHADNARLSEVVAGNDAQR

SEQ ID NO: 20524 - protein, 491 aa, Oryza sativa
  Clone ID: TF_OSC900013j.C1.p20.fg
MVMSSADSHVPTSRLLPAEVETKSLEPHPGPPAEPAKGGLRGLPVRSPKLRQKVFARSPEKDEKQCPGSNQAPCQSTDKKDGTLQPNSGANRTVIWKMDNGRTMIITGSEFTPEDAARIPKRQRGRNTFRGARQLTRHLIKYGPPRPEDDESGERFSADDDDDNDDDNDDNDDATLDSFRERELKFKACARCGIVGHTASLCLPTCRCGEYTHYSNACPLRKVTCFLCEGTDHVPKDCQLNAVIAKTKKEQGTTVQPIRQPMTIDNSGHNPSALPPTPAPVEANHGRSNVTKDVHKSLLVPVSAAKVHNQKPAPRDQASRFCRNCHKPGHRFSDCPLPRAAKAVRRDSQVTSTAHDTNRHLNVQPPPQRIIVKGTVKGRIVPPAIVSSLQHQRQQGKQCQENNSSLQLQRGGTLPRQHPRQVLSATGRPTVVSSSNAPRIAPIWRPIDKSPLGNPTGKKILPVTADKTVAPPPSKINKQSNVPGETSGSRN

SEQ ID NO: 20525 - protein, 534 aa, Oryza sativa
  unsure (1)..(534): unsure at all Xaa locations
  Clone ID: TF_OSC416144j.C1.p2.np
GILTNSEFQMNIKFCFINSISKSISELQIKRNQLFVLMHASKYSFRVSNKKRIISCCQIGIYEEEIREVEAEEGVVSSSRSKRVRPKRPKKVMTPMEAVERRKLKREEQEERRKVKKEKRRIRRLMETEAAGEKLKREEQEERRKVKKEKRRIRRLMETEAAGEVGEAAAEEEEEEHEAETEGEEEAAAEEQKVYVGGIPYYSSEDDIRSFFEACGSITSVDCMTFPESGKFRGIAILTFKTDAAAQRALALDGADMGGFFLKIQPYKSVREKEDFAPKMIEGYNRVYVGNLAWDITEDDLKKFFSDCKISSIRFGTDKETGDFKGYVHVDFSEGTSVAVAMKLDQKVIKGRPVRIRCAVPKKDNQKLNGNANPDSSNNKIRICYECGTPANKKASEAISDEKKANVDSVTASSKKRRTCYECGIPGHLSSACPNKKAGDAVSSDKGQSAPSITPEDNKIGEESNSAPSKKRRKCYESTSTSDGNKASDDTNPVPAKKKKRRTCYECGIAGHLASECPNKTTXSNGCVTVLDFY

SEQ ID NO: 20526 - protein, 1728 aa, Oryza sativa
  unsure (1)..(1728): unsure at all Xaa locations
  Clone ID: TF_OSC400057j.C1.p11.np
IPTFRESPILQEKNLRNSKASKATPGLEWLIPGLEIELYSRGGCSVWLGLCKRMPRYKPEYLFGTEGFVQELRTMSFLIGFGIAPLYAQIPHDRDEEKCRVKVALNSNREDIPSVMFEAGGGSYIHACQEVARIAIGELRKSYNDRLADTEYRYHPRQPXGSDRGSYLEPAGIENDATTRHLVEMLWADETRAEIVIAAQDREDRNCDKICKLEDKVDRLEKELAALKGEAPPQKARVRLTARKRALFVPRYQLAPKMVLTRSNGNGPNPNNNNNAENPMLAQVLAHQAQLMNLMMQQLQNQQNQGNNHAPPQNKLAEFLRVRPPVLSSTTNPVEAGDWLHAIEKKLDLLQCTDQEKVSFASHQLHGPASEWWDHFRLNRTTAEPISWLEFTAAFRKTHIPSGVVSLKKKKFRSLTQGSRTVTEYLHEFNRLARYAPEDVRTDEERQEKFLEGLNDELSYPLMAGDYHDFQKLVDKAIRQEDKYNRMEQKKRRIAHFKAQQGNSXRLRLALGPQSMPQGGSSSVARPQRQFFNNNTGNNNRNQAPRPVAAPSQQQPAKREQGSKPSVCFNCGDPGHYADKCPKPRRAKVVPAQNNSSAPAAKARVNHVAAAEAQGAPDVILGMFPVNSVPATVLFDSGATHSFLSMSFAGNHGMEVEELRRPLMVTTPSNQALSSQRSPSVRIEIQGVPFLANLILLESKDLDVILGMDXLARYKGVIDCASRKVTLTSNDGQVVTVHALPFGPLRSSLNQITLEEIPIVREYLDVFPDDLPGMPPKRDIEFRIDLVPGTTPIHKRPYRMAANELAEVKRQVDDLLXKGYNRPSSSPWGVPVIFVEKKDHTQRMCVDYHALNDVTIKNKYPLPRIDDLFDQLKGATVFSKIDLRSGYHQLRIKEEDIPKTAFTTRYGLFECIMSFGLTNAPAFFMNLMNKVFMXYLDKFVVVFIDDILIYSRTKEEHEEHLRLALEKLREHQLYAKFSKCEFWLSEVKFLGHAISAGGVAVDPSNVESVTNWKQPKIVSEIRSFLGLAXYYRRFIENFSKIAKPMTRLLQKDVKYKWSEECEQSFQELKSRLISAPILILPDPKKGFQVYCDASKLGLGCVLMQDGKVVAYASRQLRPHEKNYPTHDLELAAVVHALKIWHHYLFGTRTEVYTDHKSLKYIFTQPDLNMRQRRWLELIKDYDLGIHYHPGKANVVADALSKKGYCNAMEGQQLPLELCKEFERLNLEIISRGFVAALEAKPTLIDQVREAQINDHDIHEIKKNMRRGKAIGFLEDEQGTVWLGERICVPDNKDLKDAILKEAHDTLYSIHPGSTKMYQDLKERFWWASMKREIAEYVAVCDVCHRVKAEHQKPAGLLXPLKIPEWKWEEIGMDFITGLPRTSSGHDSIWVIVDRLTKVAHFIPVRITYSGSHLAELYMARIVCLHGVPKKIVSDRGSQFTSKFWKKLQEEMGSKLNFSTAYHPQIDGQTERVNXILEDMLRACALDFGGSWDKNLPYAEFSYNNSYQASLQMAPYEALYGRKCCTPLLWDQTVERQVFGTDILREAEEKVKIIQERLRVAQSRHKSYADNRRRDLSFEEGDYVYLRVTPLRGVHRFHTKGKLAPRFVGPYKIVSRRGEVAYQLELPQSLAGVHNVFHVSQLKKCLRVPTEEANLEQIEVQEDLTYVEKPIRILETDERRTRNRVIRFCKVQWSNHSDEESTWEREDELKSAHSHLFASSSESRGRDSV

SEQ ID NO: 20527 - protein, 2515 aa, Oryza sativa
  Clone ID: TF_OSC401341j.C1.p12.fg
MAGPEDKDEEGASHSPRTKGIIQYFTRQVKQHTEGLDTDLQVTNEKIGQLESTQISTNTKLTGLETAVARIDTSLAALVRHFDALNAGGNGGGNDDDIDGEYVEDNLEDEYIADTEQDDRDAQDRRRLHNNRRGMGGRRRREVRNNDDAFSKIKFKIPPFDGKYDHDAYLSWEIAVDQKFACHEFPENTRVRAATSEFTDFASVWWIEHGKKNPNNMPQTWDALKRVMRARFVPSYYARDLLNRLQQLRQGAKSVEEYYQELQICLLRCKLEETEDAAMARFLGGLNREIYDIVDYKDYTNMTRLFHLACKAEREVQGRRASAKANFSAGKTSSWQTRTTPPAGRTASPSSTPTTSRAAPPTSSDKSATKAAQPAPSASSMASTGRMRDVQCHRCKGFWHVQRDCPSNDFDDDTLALLAADLADNEPPEEHIRAAFADHYESLIVQRVLSAQMEKAEQNQRHTLFQTKCVVKERCCRMIIDGGSCNNLASSEMVEKLALSTKPHPHPYYIQWLNNSGKAKVTKLVHINFAIGNYHDVVECDVVPMQVCNILLGRPWQFDRDSMHHGRSNQYSFLYHDKKIVLHPMSPEDILRDDVAKAAKSKCESDKKAQSDGKKPETINLKPKCLLATKSDINELIASPSVAYALEYSDVFPKEVPPGLPPVRGIEHQIDLIPGASLPNRAPYRTNPEETKEIQRQVHELLDKGAINNITIRYRHPIPRLDDMLDELSGSIVFSKADLRSGYHQIRMKLGDEWKTAFKTKFGLYEWLVMPFGLTNAPSTFMRLMNEVLRPFIGKFVVVYFDDILIYSKSMGEHFNHLRAVFNALRDARLFGNLEKCTFCTDRVSFLGYVVTPQGIEVDQAKVEAIQSWPTPKTVSQVRSFLGLAGFYRRFVQDFSTIAAPLNALTKKGVPFTWGTSQENAFHMLKDKLTHAPLLQLPDFNKTFELECDASGIGLGGVLLQEGKPVAYFSEKLSGLVLNYSTYDKELYALVRTLETWQHYLWPKEFVIHSDHESLKHIRSQGKLNRRHAKWVEFIESFPYVIKHKKGKENIIADALSRRYTLLTQLDYKIFGLETIKDHMRMMLILMMCCCIEAHGGGLMGHFGAKKTHDILASHFFWPQMRRDVGRAVLKKNIKMWEECLPHIEFAYNRSLHSTTKMCPFQIVYGLLPRAPIDLMPLPSSEKLNFDAKQRAELMLKLHETTKENIERMNAKYKFAGDKGRRELNFEPGDLVWLHLRKERFADLRKSKLMPRADGPFKVLAKINENAYKIDLPADFGVSPTFNVADLKPYLGEEDELESRTTQMQEGEDDEDINTIDTSTSPHIQHDGPITRARARQLNYQDECPRGRVDAHHKFAATIGDGGSSSQQQQQQQPRSAPRPQFVVRVPQPQQQQSQQGTRAPRPPMPAMQPGQGRRDVQGPQCLCFNCFEPGHFADKCPKPRRQQGQAPPRSNNGGKDVIRGRVNHVTAEDVLTTPDVIIGTFLIHSIPATILFDSGASHSFISVPFVGRNQLGVERLRNPLLITTPGGVMTAKNYSPAVPIEIQGIPFPSDLILLDTKNLDVILGMNWLAQFQGVVDCARRTVTLYRGPEQPVVFFAPPTSVSSSELHQIGQSEIPIVREFGDVFPEELPGMPPKREIEFRIDLAPGTTPLYKRPYHMAANELAEVKKQLEELKEKGYIRPSTSPWGAPVIFVEKKDKTKRMCVDYRALNEVTIKNKYPLPRIDDLFDQLKGATVFSKIDLRSGYHQLRIREKDIPKTAFTTRYGLYEFTMMSFEEDHQHHLRLVLGKLREHQLYAKLSKCEFWLSEVKFLGHVISAKGVAVDPETVTAVTDWKQPKTVTQIRSFLGLAGYYRRFIENFSKIARPMTQLLKKEEKFVWSPQCEKAFQTLKEKLVSSPVLILPDTRKDFMVYCDASRQGLGCVLMQDGHVVAYASRQLWPHEGNYPTHDLELAAVVHALKIWRHYLIGNRCEIYTDHKSLKYIFTQSDLNLRQRRWLELIKDYDVGIHYHPGKANVVADALSQKSHCNTLNVRGIPPELNQQMEALNLSIVGRGFLAALEAKPTLLDQIREAQKNDPDMHGLLKNMKQGKAAGFTEDEHGTLWNGNRVCVPDNRELKQLILQETHESPYSIHPGSTKMYLDLKEKYWWVSMKREIAEFVALCDVCQRVKAEHQRLAGLLQPLQVPEWKWDEIGMDFITGLPKTQGGYDSIWVVVDRLTKVARFIPVKTTYGGNKLAELYFARIVSLHGVPKKIVSDRGSQFTSHFWKKLQEELDFGKTWDKSLPYAEFSYNNSYQASIQMAPYEALYGRKCRTPLLWDQVGESQVFGTDILREAEAKVRTIRDNLKVAQSRQKSYADNRRRNLEFAVDDFVYLRVTPLRGVHRFQTKGKLAPRFVGPFSIITRRGEVAYQLELSASLGNVHDVFHVSQLKKCLRVPSEQTDSEQIEVREDLTYVERPVKILDTMERRTRNRVIRFCKVQWSNHAEEEATWEREDELKAAHPDLFASFSESRGRDSV

SEQ ID NO: 20528 - protein, 247 aa, Oryza sativa
  Clone ID: TF_OSC402051j.C1.p15.fg
MMSSPTPAPLLPVAPLDGGGGYLRWKESVLLRLRTLDLAYVLSEHQPEDGRSDSAKKKRARDDELCRGHILATLSDRLLPDYAHHATAAAAWRALARTYDMDGKLPNLPLDRFFAYRFVDGEPVLEQLAHLEAMGVAGKLDDRTMYGLVHQKLPPALVKAIALASPPYPDPPSMDHIWDTARLEERMRLCGEIRRGEHTQDKEDDDDQGGGDYPDEDHRSPKRKRRYDRGPCYNCGEPGHIARDCRG

SEQ ID NO: 20529 - protein, 649 aa, Oryza sativa
  unsure (1)..(649): unsure at all Xaa locations
  Clone ID: TF_OSC900147j.C1.p14.np
MDEVGGRWTFSRANEGYTSCGPVVEMSWQRVGALLLGGSVLPACPGCPGRRRIGSVLLFMARMGWELCHVFRPYTVVVFCSTTKMWNGWPGLAWDELGPRSGCQFGLNHRRPWVKAVLDGQLCEEEDVVSCLPKLRKTAGSASEAKEAVKPAVKQDKRLRSVKVLSLVSNLSLPFVFPLSLSKPLQQMAVNEKGNKVRSQDIGTLSSRVNEAPDTSCVTLVQHLINQNRLLIEILQQHQTPILNLSQIQPQVQLEAVQALTPQVSMPPASRRTQGDVPHVDPKEASNICFMCDEQGHYARERPQQKRKTPMRTEDEVRKMIITSTEWPPPGMTRRQRRNTFRGAPQLTEHLLANGGRVSDSEDSDQVSSDDEDEECKACSRCGEIGHVASSCATICVHCEEDHPPDRCPTSRITCFFCEGIDHVPKDCQFSFLLTKKMANQPASSNGEKHQGNTNPRQDYSFSLTPVPGQRNQNERRKCRVREDICCFNCQGMGHFADKCPKPRNIAASTSVHAAPCNQKLAPQRIVIHASQSSPMARVATAPTPASALPQGVNAHFQPQQRIVVDGRSCVSPRPTPGQAKGNRPPEGDTKQKTVIRLNQQSEGNFSCEXQYAVLSHHHRTNQGCSHXNRDLGSHFRGIMFQPRVNNQP

SEQ ID NO: 20530 - protein, 423 aa, Oryza sativa
  Clone ID: TF_OSC900329j.C1.p15.fg
MAVNEKGNKVRSQDIGTLSSRVNEAPDTSCVTLVQHLINQNRLLIEILQQHQTPILNLSQIQPQVQLEAVQALTPQVSMPPASRRTQGDVPHVDPKEASNICFMCDEQGHYARERPQQKRKTPMRTEDEVRKMIITSTEWPPPGMTRRQRRNTFRGAPQLTEHLLANGGRVSDSEDSDQVSSDDEDEMECKACSRCGEIGHVASSCATICVHCEEDHPPDRCPTSRITCFFCEGIDHVPKDCQFSFLLTKKMANQPASSNGEKHQGNTNPRQDYSFSLTPVPGQRNQNERRKCRVREDICCFNCQGMGHFADKCPKPRNIAASTSVHAAPCNQKLAPQRIVIHASQSSPMARVATAPTPASALPQGVNAHFQPQQRIVVDGRSCVSPRPTPGQAKGNRPPEGDTKQKTVIRLNQQSEGNFSCE

SEQ ID NO: 20531 - protein, 601 aa, Oryza sativa
  Clone ID: TF_OSC1509j.C1.p2.fg
MSWQRVGALLLGAQSCLPVPEVPAVGGIGSVLLSMARMGWKLCHVVRLYTVVNKPNIHHNSKRLRSVKVLSLVPNLSLPFVFPLSLSKPLQQMADNEKGNKVRSQDIGTSSSRVNEAPDTSCVTLVQHLINQNRLLIEILQQHQTPILNLSQIQPQVQLEAVQALTPQVSMPPASRRTHGDVPHVDSKEASIICFMCDEQGHYARECPQQKRKTPMRTEDEVRKMIITSTEWPPPGMTKRQRRNTFRGAPQLTEHLLANGGRVSDSEDSDQVSSDDEDEKSPQGFNQNKMERKACSRCGEIGHVASSCATTCVHCEEDHPPDRCPTSRITCFFCEGTDHVPKDCQSSFLLTKKMANQPASSNGEKHQGNTNPRQDYSFSLTPVPGQRNQNEKRKCRVREDICCFNCQGMGHFTDKCPKPRDIAASTSVHATPCNQKLAPQRIVIHASRSSPIARVATAPTPASALPQGVNAQFQPQPPVDKTEASIGIVPLDVPAQPPRNQVQDEEPEPLTILCTDGLSKELSSMEEVVSLPDLLQAERRAINLRRVIPSRRPLFASTSNQKEASPVNDSNMQSHHIITEPIKDDAVTRTMPAIPLQNQNE

SEQ ID NO: 20532 - protein, 160 aa, Oryza sativa
  unsure (1)..(160): unsure at all Xaa locations
  Clone ID: TF_OSC102138j.C1.p17.gp
GGGGGGGGGFGSRGGGGSGGGGRSYGGSWGGGRRSGGGGPGGGCFKCGESGHMARDCFNGGGVGVGGGGGGGGGAGGGCFKCGEMGHMARDCFNSGGGGGGGGGGGGGGACYNCGETGHLARDCYNGGGGGGGGRFGGGGDRSCYNCGEAGHIARDCHKX

SEQ ID NO: 20533 - protein, 373 aa, Oryza sativa
  unsure (1)..(373): unsure at all Xaa locations
  Clone ID: TF_OSC19735j.C1.p3.np
KACSRCEEIGHVASSCASTCVHCEEDHPPDRCPTSRITCFFCEGTDHVPKDCRFSFLLTKKMANQPVSSNGEKHQGNTNPRQDYSFSLTPVPGQRKQNEKRKCRVREDICCFNCQGMGHFADKCPKPRNVAASTSVHANPRNQKLAPQRIVIHASRSSPIARVATAPIPMSALPQGVNAQFQPQPPADKTEASICVVPLEVPIQQLRNQVQDEEPEKKGITPKTVPNQGKKGITPKTVPNQGKIDLHITANLHEADIPIVLWSLEQTPYQRVKSSTRYQMLHGVKNASTGYQVDSKDMNYAKFWNXSPIFMPQPSRSQLKVQPWFESGEKKIPPATGDRAKQSRVEKLCYKFVIKAERKKSDKKRRPPNLSSC

SEQ ID NO: 20534 - protein, 883 aa, Oryza sativa
  Clone ID: TF_OSC401219j.C1.p8.fg
MDISRTNEGYTSCGPVVEMSWHRAGVLLLGAQSCLPVPEVPAVGGVGSVLLSMARMGWKLCHVFRPYAVVNKPNIHHNSKRLRSVKVLSLVSNLSLPFVFPLSLSKPLQQMADNEKGNKVRSQDIGTSSSRVNEAPDTSCVTLVQHLINQNRLLIEILQQHQTPILNLSQIQPQVQLEAVQALTPQVSMPPASRRTHGDVPHVDSKEASIICFMCDEQGHYARECPQQKRKTPMRTEDEVRKMIITSIEWPPPGMTKRQRRNTFRGAPQLTEHLLANGGRVSDSEDSDQVSSDDEDEKSPQGFNQNKMERKACSRCGEIGHVASSCATTCVHCEEDHPPDRCPTSRITCFFCEGTDHVPKDCQFSFLLTKKMANQPASSNGEKHQGNTNPRQDYSFSLTPVPGQRNQNEKRKCRVRKDICCFNCQGMGHFADKCPKPRNIAASTSVHATPCNQKLAPQRIVIHASRSSPIAPVATAPTPASALPQGVNAQLQPQPPVDNTEASIGIVPLDVPAQQPRNQNWNNPAGATNVQVPTVQQQCKLSEFLKTETPTFAIAVDPMEASDWLRTVEKKLGLVQCTDQERVVFATHQLISHVPAGMITLRKREFRYLNQEDLTVTEYLHEFHRLAHYAPEDVENDEDKQEKFLQALKDEIAVQLLLEEYEDFEKLVDKAIQLESEHNRMKNCKRRIVSIPVSSCGNQRQRTEPLQIIGSSVAHQEFPPQEDGHNADNNISNTNDDDTTNNHAPCPISDHSNQACNVNIIHQGVDDSIDDGTQNDNPSNCDSEKDSNGDSNYGTTDANVSKDFQPPIPTPSQNDRPQTDSSAKKTLICYNCKEPRHYSRDCLQPRQSRPPHYRQVTQSRHPNRIVVTGANTVPVRPRVNQNP

SEQ ID NO: 20535 - protein, 645 aa, Oryza sativa
  unsure (1)..(645): unsure at all Xaa locations
  Clone ID: TF_OSC22429j.C1.p2.np
MLDLGGKDGEIGNEDGASSKGTPSPKGATIPFDYRKLTIPSHNFVSVPSGRAPQFDGTHYAAWKHKMKLHLISLHPSIWKVVCTGIDVPHEDMELTSEKEQLIHRNAQASNAILSALSPEEFDKVDGLEEAKEIXDTLQLAHEGSPAVREAKIELLEGRLGRFVMDDNETPQEMYDRMMILVNKIKGLGSEDMTNHFVVKRLLRAFGPRNPTLVSMIHERKDFKRLTPSDILGRIVSHKMQEEEAREVRQMVKNAAMIKNQEVALKAKQEEMAFIVKRFKHFLRKSGYGKGRKLKAKQEEMAFIVKRFKHFLRKSGYGKGRKVDDKGKRQSKRACFNCGEFGHFIADCPKSNEAKAKGGKKKLERAHVAEAHMAEVWYSGDEEDPEVKPKPKSKDKVEGEGGVATVTFKSSSSSKERLFNNLSDDDDDSYHYSCFMAQGRKVMTQKPSHTSLDVESSDEESDNELDDVLKSFSKPAMQHLAKLMRALDSTEQLLVRQEELLILEKKRNLALEESLAKESAKNKQLANELNFANGSLASLRDVNETLQEKFACLDKSHKVQIDTLWNSTSQPNVVSNSSNPSTSNGCARCYNIDLNSYATNIVEMQALKKENERLGTLVKYGCMKTYHSKDALYKTITAHPNKDGH

SEQ ID NO: 20536 - protein, 1713 aa, Oryza sativa
  Clone ID: TF_OSC401835j.C1.p29.fg
MSDLGGKDGEIGNEDGASNKGTPSPKGATIPFDYNKLTIPSHNFVSVPSGRAPQFDGTYYAAWKHKMKLHLISLHPSIWKIVCTGIDVPHEDMELTSEQEQLIHRNAQASNAILSALSPEEFNKVDGLEEAKEIWDTLQLAHEGSPAICDAKIELLEGRLGRFVMDDKETPQEMYDRMMILVNKIKGLGSEDMTNHFVVKRLLRTFGPRNPTLVSMIRERKDFKRLTPSDILGRIVSHEMQEEEAREVRQMVKNAAMIKNQEVALKAKQEEESSGEESQDEEMAFIVKRFKHFLRKSGYGKGRKDDDKGKRQSKRACFNCGEFGHFIADCPKSNEAKAKGGKKKTERAHVAEAHMAEVWYSRDEEDPEVKLKPKSKDKVEGEGGVATIAFKSSSSSKERLFNNLSDDDDDSYHYSCFMAQGRKVMTQKPSHTSLDVDSSDEESDNELDDVLKSFSKPAMQHLAKLMRALDSKEQLLERQEELLIHEKKRNLALEESLAKECAKNEQLANELNLANGSLASLRDVNETLQEKFACLDKSHKDLEVQFDTLWNSTSQPNVVSNSSNPSTSNGCAKCYNIDLNSYATNIDAMQALKKENERLGTLVKYGCMKTYHSKDALYKTITAHPNKDGHGHGFSGGSPVSKRVMVNGKECLMFVREGKAPQASEITNLVSSQGPGTSGQTGQNLWVGVSISQKFPPGSSGRFARKFRANGRAQDMTGSSRHNARRFRPDGLYYDSYAYSSGGSSWVVDSGCTNHMTGERSMFTSLNDENGTRENIVFGDDGKGKLGYNCLFTDEDVTVFRRDDSSVAFKGKIKGDLYLVDFDVDRVNPEACLIAKSSMSWLWHRRLAHVGMRNLATLLKGEQSSGSLMSHLRKIRVRSDNGGEFKNTQVKEFLDEVGIKHEFSAPYDPPQNGIVERKNQTLIEAARSMLDEYKTSDIFWVEAVSTTCHAINRLYLHKILKKTSYELLSGKKPNVSYFRVFGSKCFILSKRPRSSKFSPKVDEGFLLGYESNAHAYRVFNKTSGIVEVTRDVTFDESNGSQGEQVVVHVVGDVDSSQAIGTKAIGDIRPVKTQDDQEDRDQPSSSTSNSPTLSQVSVDPEVPGPDGRNLRTSPSQEVPGPSARKFRAEDSQGVPTAQVDGIDAEGTVEHPDQAQVPSVHHPRIHHTVQRDHPVDNILGDIRKEVTTRSRVANFCQHYLFVSSLEPTRVEDALGDLDWVMAMQVELNNFTRNQVWTLVERPDQNVIGTKWIFRNKPDEHGVVVRNKARLVAQGFTQIEGLDFGETFTPVAHLESIRILLAYAAHHDFRLFQMDVKSAFLNGPISELVYVEQPPGFEDPRLPNHVYKLHKALYGLKQAPRAWYECLRDFLLKNGFEIGKADTTLFTKKSKSDLFICQIYVDDIIFGSTNASFCEEFSSIMTKRFEMSMMGELTFFLGLQVKQVQEGTFISQTKYVKDILKKFGMEDAIPIKTPMPTNGHLDLDDNGKCVDQKVYRSMIGSLLYLCTSRPDIMLSVCMCARFQAEPKECYLIAVKRILRYLVHTPNLGLWYPKGCDFELLGYSDSDYAGCKVDRKSTTGTCQFLGRSLVSWSSKKQNSIALSTAEVEYVATGSCCVQLLWMKQTLKDFGYNFTKIPLLCDNESAIKIANNPVQHSRTKHIDIRHHFLRDHETKGDICLTHVRTESILADIFTKPLDEKRFCELRSELNILDSRNIR

SEQ ID NO: 20537 - protein, 2049 aa, Oryza sativa
  Clone ID: TF_OSC900009j.C1.p24.fg
MLDLGGKDGEIGNEDGASSKGTPSPKGATIPFDYRKLTIPSHNFVSVPSGRAPQFDGTHYAAWKHKMKLHLISLHPSIWKVVCTGIDVPHEDMELTSEKEQLIHRNAQASNAILSALSPEEFDKGSPAVREAKIELLEGRLGRFVMDDNETPQEMYDRMMILVNKIKGLGSEDMTNHFVVKRLLRAFGPRNPTLVSMIQERKDFKRLTPSDILGRIVSHKMQEEEAREVRQMVKNAAMIKNQEVALKAKQEEESSGEESEDEEMAFIVKRFKHFLRKSGYGKGRKVDDKGKRQSKRACFNCGEFGHFIADCPKSNEAKAKGGKKKLERAHVAEAHMAEVWYSGDEEDPEVKPKPKSKDKVEGEGGVATVTFKSSSSSKERLFNNLSDDDDDSYHYSCFMAQGRKVMTQKPSHTSLDVESSDEESDNELDDVLKSFSKPAMQHLAKLMRALDSTEQLLVRQEELLILEKKRNLALEESLAKESAKNKQLANELNFANGSLASLRDVNETLQEKFACLDKSHKVQIDTLWNSTSQPNVVSNSSNPSTSNGCARCYNIDLNSYATNIVAMQALKKENERLGTLVKYGCMKTYHSKDALYKTITAHPNKDGHGLGFSGGSPVSKRVMVNGKECLMFVREGKAPQASEVTNLVSSQGPGTSGQTGQNLRVGVSVSQKFPPGSSGQFARKFRANGRAQDITGSSEHNARRFWPDGLYYDSYVIFKNSEGKVVAYFNGNYNDEYRTCVWVPKALAYSSGGSSWVVDSGCTNHMTGERSMFTSLDEENGTRENIVFGDDGKGKLGYNCLFTDEDVTVFRRDDSSVAFKGKLKGDLYLVDFDVDRVNPEACLIAKSSMGWLWHRRLAHVGMRNLATLLKGEHILRLTNVTFEKDRVCSACQAGKQVGNPHPIKNIMTTTRPLELLHMDLFGPMVYISIGGNKYDFFIVDDFSRFTWVYFLHDKSEAQDVFKRFAKQAQNLYDLTIKRVRSDNGGEFKNTQVEEFLDEVGIKHEFSAPYDPPQNGIVERKNRTLIEAARSMLDEYKTSDIFWAEAVSTACHAINRLYLHKILKKTSYELLSGKKPNVSYFRVFGSKCFILSKRPRSSKFSPKVDEGFLLGYESNAHAYRVFNKTSGIVEVTRDVTFDESNGFQGEQVVVHVVSDVDPSQAIGTKAIGDIRPVETQDDQEDRDQPSSSTSNSPKLSQVSVDPEVPGPDGRNLRTSPGQEVPGPSARKFRAEDSQGVPMAQVDGIDAEGTVEHPDQAQVPSVHHPRIHHTVQRDHPVDNILGDIRKGVTTRSRVASFCQHYSFVSSLESTRVEDALGDPDWVMAMLFQMDVKSAFLNGPISELVFVEQPPGFEDPKLPNHVYKLHKALYGLKQAPRAWYECLRDFLLKNGFEIGKADTTLFTKKFKSDLFICQIYVDDIIFGSTNASFCEEFSSIMTKRFEMSMMGELTFFLGLQVKQAQEGTFISQTKYVKDILKKFGMEDAKPIKTPMPTNGHLDLDDNGKCVDQKDVSGDESPPIRFPRGRLGKEKVVEGGSGSGTRTSPRFRRQTSNRPVQIRDVDSGQGSDAPSSRGRGRGGGRSSGAGRASHDFPVGSRENLVRLYKTIGFDTTPMHHIGRPKSNYLHQLAKCRRGRLIDPETQPEESQDPRFRTLTQLDWYNSVIMARDNLVVEMKWIDWTYMRKKNNEVFNQAMQVCHNKNLGDILALEYDWNEEVIAQFYATAFFGSTRKGTPYVKWMTEGVRHKISIAQFAEILGLEDEDLNRPNIHSEAPLPLIKTKFMYTKNAPRTCMGPTHGLHPNYKVLYSIFRWSLLPKVGDATALPSKHAHLLSRMRYNQPPFSVKLIWYEIANTILEPKRGCIYAPFIMKMIESVTGVFYIKDGRHNPFRPRVPPSSSSVAPRSIPSTSAGPSSSAPPPSSSSSPIKKALQAIFCMCAKTAKKVKKIERRQKEDRREAGKEVSDDSEDEVYVDPFEAYEAARNVAGEGPSTYFNEESSQSDDDDDDDDDEDDIDAAAEYVPTDVEEAVDTAAQSDESHLSGDTEIVPSDGDGDE

SEQ ID NO: 20538 - protein, 2336 aa, Oryza sativa
  Clone ID: TF_OSC900298j.C1.p14.fg
MSDLGGKDGEIRNEDGASSKGTPSPKGATIPFDYSKLTIPSHNFVSMPSGRAPQFDGTHYAAWKHKMKLHLISLHPSIWKVVCTGIDVPHEDMELTSEQEQLIHCNAQASNAILSALSPEEFNKVDGLEEAKEIWDTLQLAHEGSPAVREAKIELLEGRLGRFVMDDKETPQEMYDRMMILVNKIKGLGRRFVMDDKETPQEMYDRMMILVNKIKGLGSEDMTNHFVVKRLLRAFGPRNPTLVSMIRERKDFKRLTPSDILGRIVSHEMQEEEAREVRQMVKNAAMIKNQEVALKAKQEEESSGEESEDEEMAFIVKRFKHFLRKSGYGKGRKDDDKGKRQSKRACFNCGEFGHFIADCPKSNEAKAKGGKKKPERAHVAEAHMAEVWYSGDEEDPEVKPKPKSKDKVEGEGGVATVAFKSSSSSKEHLFNNLSDDDDDDSYHYSCFMAQGRKVMTQKPSHTSLDVESSDEESDNELDDVLKSFSKPAMQHLAKLMRALDSKEQLLERQEELLILEKKRNLALEESLAKECAKNEQLANELNFANGSLASLRDANETLQEKFACLDKSHKDLEVQFDTLWNSTSQPNVVSNSSNPSTSNGCARCYNIDLNSYATNIDAMQALKKENERLDTLVKYGCMKTYHSKDALYKTITAHPNKDGHGLRFSGGSPVSKRVMVNGKECLMFVREGKAPQASEVTNLVSSQGLGTSGQTGQNLWVGVSVSQKFPPGSSGQFAGKFRANGRAQDMTGSSRHNARRFRPDGLYYDSYVISKNSEGKVVVYFNGNYNDEYRTCVWVPKALTYSSGGLSWVVDSGCTNHMTGERSMFTSLDEENGTRENIVFGDDGKGKVMGLGKIAISNNQSLSNVLLVNSLSYNLLSVSQLCKLGYNCLFTDEDVTVFRRDDSSVAFKGKLKGDLYLVDFNVDRVNPEACLIAKSSMGWLWHRRLAHVGMRNLATLLKGEHILGLTNVTFEKDRVCSACQAGKQVGNPHPIKNIMTTTRPLELLHMDLFGPVAYISIGGNKYGFVIVDDFSRFTWVYFLHNKSEAQDVFKRFAKQAQNLYDLTIKRVRSDNGGEFRNTQVEEFLDEVGIKHEFSTPYDPPQNGIVERKNRTLIEAARSMLDEYKTSDIFWAEAVSTACHAINRLYLHKILKKTSYELLSGKKPNVSYFRVFGSKCFILSKRPRSSKFSPKVDEGFLLGYESNAHAYRVFNKTSGSVEVTRDVTFDESNGSQGEQVVVHVVGDMDPSQAIGTKAIGDIRPVETQDDQEDRDQPSSSTSNSPTLSQVSVDPKVPGPDGRNLQTSPGQEVPGPSAKKFRAEDSQGVPTAQVDGIDAEGTVEHPDQAQVPSVHHPRIHHCPKRSSRRQHTWVEDALGDPDWVMAMQEELNNFTRNQVWMLVERPNQNVIGTKWIFRNKQDEHGVVLRNKARLRKGSPKLFQMDVKSAFLNGPISELVFVEQPPGIEDPKLPNHVYKLHKALYGLKQAPRAWYECLRDFLLKNGFEIGKADTTLFTKKFKSDLFICQIYVDDIIFGSTNASFCEEFSSIMTKRFEMSMMGELTFFLGLQVKQAQEGTFISQTKYVKDILKKFGMEDAKPIKTPMPTNGHLDLDDNGKCVDQKVYRFMIGSLLYLCASRPDIMLSVCMCARFQAEPKECHLIAVKRILRYLVHTPNLGLWYPKGCDFELLGYSDSDYAGCKVDRKSTTGTCQFLGRSLVSWSSKKQNSIALSTAEAEYVAAGSCCAQLLWMKQTLKDFGYNFTKIPLLCDNESAIKIANNPVQHSRTKHIDIRHHFLRDHETKGDICLTHVRTKTQLADIFTKPLDEKRFCELRISTMTREKRQKASQDVSGDESPPIRFPRGRLGKEKVVEGGSGSGTRTSPRFTRQSSNRPVQIRDVDSGQGSDAPSSRGRGRGGGRTSGAGRASHDFPVGFRENPVRLYKTIGFDTTPIHHIGRPKSNYLHQLAKCRRDRLIDPETQPEESQDPRFRTLTQLDWYNSMIMARDNPVVEMKWIDWTYMRKKNNEVFNQAMQVCHNKNLGDILALEYDWTEEVIAQFYATAFFGTTRKGTPYVKWMTAGVRHKISIAQFAEILGLEDEDLNRPNIHSEAPLPMIKTKFMYTKDAPRTCMGTTHGLHPNYKVGDATALPSKHAHLLSRMRYNQPLFSVMKLIWYEIANTILEPKRGCIYAPFIMKMIETVTGVFYIKDGRHNPFRPCVPPSSSPVAPRSIPSTSAGPSSSAPPQSSSSSPIKKALQAIFCMCAKTAKNAYEAARNVAGEGSSTYFNEESSQLDDDDDDDEDDTDAAAEDAPTDVDTAAQSDESHLSGDTEIVPSDGDGDGDE

SEQ ID NO: 20539 - protein, 1092 aa, Oryza sativa
  Clone ID: TF_OSC34887j.C1.p12.fg
MMQQMQQQHQQMYQRMRQQAEQQQQQFGPSPPQSKLPEFLRVRPPTFSSTTNPMEANDWLHAIEKKLNLLQCNDQEKAAFTTHQLQGPASAWWDNHMATRPPGTEVTWVEFCRSFRKAQVPDGVVAQKKREFRALHQGNRTVTEYLHEFNRLARYAPEDVRTDAEKQEKFLAGLDDELTNQLISGDYADFERLVDKAIRQEDQRNKMDRKRKAAQFRNFHQGASGSQNHHGGQPNRSAAPRPPMAPAQSASSTQAKKETGTKPGSCFNCGELGHFANKCPKPRRAGPRFVQARVNHASAEEAQVAPEVVLGTFPVNSIPATVLFDSGATHSFISKKFVGMHGLIREELSTPMRVHTPGNSSTLVQFSPSVTIEIQRSLFLANLILLESKDLDVILGMDWLTRFKGVIDCANRTVTLTNEKGETVVYKSLVSPKQGVSLNQIKVENPVTTEEKGTAPIYKRPYRMAANELAEVKKQVDEQLQKGYIRPSTSPWGAPVIFVEKKDKTKRMCVDYRALNEVTIKNKYPLPRIDDFFDKLKGAKLRIREEDIPKTAFTTRYGLYECTVMSFRLTNAPAFFMNLMNKVFMEFLNKFVVVFIDDILIYSKSEEEHKQHLRLVLEKLKEHQLYAKFSKCDFLLSEVKFLGHVITAQGVAVDPSNVESVTKWTPPKTVSQIRSFLGLAGYYRRFIENFSRIARPMTQLLKKDEKFKWTAECDKSFEEFKKKLVSAPVLILPDQMKDFQGRVVAYASRQLRPHEGNYPTHDLELAAVVHALKIWRHYLIGNRCEVYTDHKSLKYIFTQPDLNLRQRRWLELIKDYDMSIHYHPGKVNVVANARSRKSYCNALCIEGMCGELQQELERLNLRLVEHGYVAALEARPTLVDQVRVAQVNDPEIAELKKNMRVGKAWDFHEDEHGTIWMGERLCVPDDKLAELYLSRIMCLHGVPKKIVSDRGSQFTSKFWQKLQEELGTRLNFCTAYHPQTDGQTERVNQILEDMLRACALDFGGAWDKSLPYAEFLYNNSYQASLQMAPFEALYGRKCRTPLFWDQTGERQLFGTEVLTEAEEKVRIVRERLRIAQSRQKSYVDNRRRELTF

SEQ ID NO: 20540 - protein, 1472 aa, Oryza sativa
  Clone ID: TF_OSC416291j.C1.p22.fg
MVYTRNGSRATGEGSNGEERTDGAHPHSDSGHGPPPLPKNPTLAQVMAHQTQMMAAMMQQMQQQHQQMHQRMLQHAEQQHQQFGPPPPQSKLPEFLRVRPPTFSSTTNPMEANDWLHVIEKKLNLLQCNDQEKVAFATHQLQGPASAWWDNHMATRPPGTEVTWAEFCRSFRKAQGNRTVTEYLHEFNRLARYAPEDVRTDAEKQEKFMAGLDDELTNQLISGDYADFERLVDKAIRQEDQRNKMDRKRKAAQFRAPQGSHQRPRFAPGQQGGPTTMIVHQHRPFNPSNFPQGASGSQNHHGGQSNHGAAPRPPMAPAQTGPPAQSKKETGAKPGSCFNCGELGHFANKCPKPRRAGPRFIQARVNHASAEEAQAAPEAVLGTFPVNSIPATILFDSGATHSFISKKFVGMHGLIREELSTPMRVHTPGNSSTSVQFSPSITIEIQRSPFLANLILLESKDLDVIHGMDWLTKFKGVIDCANRTVTLTNEKGETVVYKSLVSPKRGVSLNQIETEIPVDTVEKNLGKLEDIPIVCEYPEVFPKDLTTMPPKREIEFRIDLAPGTAPIYKRPYRMAANELAEVKKQVDEQLQKGYIRPSTSPWGAPVIFVEKKDKTKRMCVDYRALNEIDLRSGYHQLRIWEEDIPKTEIRLYECTVMSFGLTNAPAFFMNLMNKVFMEFLDKFVVVFIDDILIYSKSEEEHEQHLRLVLEKLKEHQLYAKFSKCDFWLTEVKFLGHVITAQGVAVDPSNVESVTKWTPPKTVSQIRSFLGLAGYYRRFIENFSRIARPMTQLLKKDEKFKWTAECDKSFEELKKKLVSAPVLILPDQMKDFQVYCDASRHGLGCVLMQEGRVVAYASRQLRPHEGNYPTHDLELAAVVHALKIWRHYLIGNRCEVYTDHKSLKYIFTQPDLNLRQRRWLELIKDYDMSIHYHPGKANVVADALSRKSYCTALCIEGMCEELRQEFEHLNVGIVEHGFVAALEARPTLVDQVRAAQVNDSEIAELKKNMRVGKARDFHEDEHGTIWLGERLCVPDDKELKDLILTEAHQTQYSIHPGSTKMYQDLKEKFWWVSMRREIAEFVALCDVCQRVKAEHQRPAGLLQPLQIPEWKWEEIGMDFITGLPRTSSGHDSIWVVVDRLTKVAHFIPVHTTYTGKRLAELYLSRIMCLHGVPKKIVSDRGSQFTSKFWQKLQEELGTRLNFSTGYHPQTDGQTERVNQILEDMLRACALDFGGAWDKSLPYAEFSYNNSYQASLQMAPFEALYGRKCRTPLFWDQTGERQLFGTEVLAEAEEKVRIIRERLRIAQSRQKSYADNRRRELTFEAGDYVYLCVTPLRGVHRFQTKGKLAPRFVGPYKILERRGEVAYQLELPSNMIGIHDVFHVSQLKKCLRVPEEQADSEHIDIQEDLTYVEKPVRILDTSERKTRNKVTRFCRVQWSHHSKEEATWEREDELKAAHPHLFTSSSESRGRDSV

SEQ ID NO: 20541 - protein, 506 aa, Oryza sativa
  Clone ID: TF_OSC10633j.C1.p1.fg
MSGVTSMSPTAGARSDASPEPESESESGVPNIGTEDPCQNAVQIPEDNDSQVNVRPKESHYVRNCPWKVFARSPEKDEKQCPGSNQAPSQSTDKKDGTLQPNSGANRTVIWKMDNGRTMIITGSEFTPEDAARIPKRQRGRNTFRGARQLTRHLIKYGPPRPEDDESGERFSADDDDDNDDDNDENDDATLDSFRERELKFKACARCGIVGHTASLCLPTCRCGEYTHYSDACPLRKVTCFLCEGTDHVPKDCQLNAVIAKTKKEQGTTVQPIRQPMTIDNSGHNPSALPPTPAPVEANHGRSNVTKDVHKSLLVPVSAAKVHNQKPAPWDQASRSCRNCRKPGHCFSDCPLPRAAKAVRRDSQVTSTAHDTNRHLNVQPPPQRIIVKGTVKGRIVPPAIVSSLQHQRQQGKQCQENNSSLQLQRGSTLLRQHPRQASSAPGHPAVVSSSNAPRIAPIQRPIGKSPLGNPASKKFLPAAAVKRVVTPPSKINKQSNIPGETSASRN

SEQ ID NO: 20542 - protein, 548 aa, Oryza sativa
  Clone ID: TF_OSC404116j.C1.p1.fg
MSALGGKDGKIGNEDGASSKGTPSPKVATIPFDYSKLTIPSHNFVSVPSGRAPQFDGTHYAAWKHKMKLHIISLHPSIWKVVCTGIDVPYEDMELTSEQEQLIHHNAQASNAILSALSPEEFNKVDGLEEAKEIWDTLQLAHEGSPAVREAKIELLEGRLGRFVMDDKETPQEMYDRMMILVNKIKELGSEDMTNHFVVKRFLRAFGLRNPTLVSMIWERKDFKRLTPSDILGRIVSHEMQEEEAREAKQEEESSGEESEDEEMAFIVKRFKHFLRKSGYGKGRKDDDKGKRQSKIACFNCGEFGHFIADCPKSNEAKAKGGKKKPERAHVAEAHMAEVWSSGDEEDPEVKPKPKSKDKVEGEGGVATVAFKSSSSSKERLFNNLSDDDNDSYHYSCFMAQGRKVMTQKPSHTSLDVYSSNEESDNELDDVLKSFSKPAMQHLAKLMRALDSKEQLLERQEELLILEKKRNLALEESLAKECAKNEQLANELNLANGSLASLRDVNETLQEKFACLDKSHKDLEVQFDTLWNSTSQPNVVMLGVTILI

SEQ ID NO: 20543 - protein, 1258 aa, Oryza sativa
  Clone ID: TF_OSC10942j.C1.p1.fg
MMPPHSPRNLIKVLGFVRELRLMAFEVGYEVAPEYRQISHDPDEEKCRVRVTLASDSDDLPSFKFEAGGRSYSHACQEAALVAIGELRQRFEEELDSSAFQYHPHKPHGQDYGTYTCPDGEESATLMHAVHMLSAMDAVSVERDKAAHDRENWNRGKICKLESKVYRLQKELAELKGETPPPTPKHRLTQRKRTCPPPRLQLASKIRVMGEAVPDRAEPVIDIISDEEEEEDPEEREPATPEEEDPSLRSDTRRMVNTRTGSGSGSGSGATNNGGDPTLAQILAQQTQLINLLVQQAQNQQANNQNQNPPPPPQNKLADFLRVRPPTFSSTTNPVEAGDWLHAVEKKLDLIQCTEQEKVSFASHQLHGPAAEWWDHFRQGRAEGEPITWQEFTAAFRKTHIPSGVVALKKREFRALNQGSRSVTEYLHDFNRLARYAPEDVRTDEERQEKFLEGLNDELSYALMSTDFRDFQQLVDKAIRQEDKYNRMEQKKRRAAQFKAQQGSNQRPRLVTGPQVPSYPQGGSSSVVRPQRQFYNNNTSNRGNDNRNVVARPAATSAQNQPVRKEQGSKPVICFNCGDPGHYADKCPKPRRVKNAPAPNNSNVPAPKARVNHVAAAEAQNAPDVVLGTFPVNSIPATVLFDSGATHSFLSKSFTSNHGMEVISLERPLLVNTPGNQVFSTQYCPSATIEIEEVPFPSSLILLESKDLDVILGMDWLSCHRGVIDCANRKVTLTSSNGETVSFFMSSPKSHGVILNQVALQEIPIVQDYPDVFPEDLPGMPPKREIEFRIDLVPGTNPIHKRPYRMAANELVEVKRQVEDLLQKGYIRPSTSPWGAPVIFVEKKDHTQRMCVDYRALNEVTIKNKYPLPRIDDLFDQLEGATVFSKIDLRSGYHQLRIREEDIPKTAFTTRYGLFECTVMSFGLTNAPAFFMNLMNKVFMEYLDKLVVVFIDDILIYSKTKEEHEEHLRLALEKLREHQLYAKFSKCEFWLSEVKFLGHVISSGGVAVDPSNVESVLSWKQPKTVSEIRSFLGLAGYYRRFIENFSKIARPMTRLLQKEVKYKWTEDCEQSFQELKKRLATALVLILPDSRKGFQVYCDASRLGLGCVLMQEGKVVAYASRQLRPHENNYPTHDLELAAVVHALKIWRHYLFGNRTEVYTDHKSLKYIFTQPDLNMRQRRWLELIKDYDMEIYYHPGKANVVADALSRKSYCNMSEGRRLPWELCQEFEKLNLGIVSNGFVAALEAKPTLFDQVKRLK

SEQ ID NO: 20544 - protein, 1784 aa, Oryza sativa
  unsure (1)..(1784): unsure at all Xaa locations
  Clone ID: TF_OSC11373j.C1.p1.np
FFVISLTLPINGNNVVNAXFGMDNSWFGGLICSTMPPHSPRNLIEVLGFVRELRLMAFEVGYEVAPEYRQISHDPDEEKCRVRVTLASDREDLPSIKFEAGGRSYCHACQEAALVAIGELRQRFEEELDSSAFQYHPHKPHGQDYGTYICPDGEESATLMHVVHMLSAMDAVSVERDKAAHDRENWNRGKICKLESKVYRLQKELAELKGETPPPTPKLRLVARKRTCPPPRLQLASKIRVMGEAVPDRAEPVIDIISDEEEEEDPEEREATPEEEDPSLRSMVNTRTGTGSGSGSGSGSGATNNGGPTLAQILAQQTQLINLLVQQAQNQQANNQNHPPPQNKLADFLRVRPPTFSSTTNPVEAGDWLHAVEKKLDLIQCTEQEKVSFASHQLHGPAAEWWDHFRQGRAEGELITWQEFTTAFKKTHIPSGVVALKKREFRALNQGSRSVTEYLHDVNRLARYAPEDVRTDEERQEKFLEGLNDELSYALMSTDFRDFQQLVDKAIRQEDKYNRMEQKKRRAAQFKAQQGSNQRPRLVTGPQAPSYPQGGSSSVVRPQRQFYNNNSGNDNRNMVARPAATPAQNQPVRKEQGSKPVICFNCGDPGHYADKCPKPRHVKNAPAPNNSNVLAPKARVNHVAAAEAQNAPDVVLGTFPVNSIATVLFDSGATHSFLSKSFASKHGMEVVSLGRPLLVNTPGNQVFSTXYCPSVTIEIEEVLFPSSLILLESKDLDVILGMDWLSRHRGVIDCANRKVTLTSSNWETVSFFVSSPKYHGVNLNQVALQEIPIVQDYPDVFPEDLPGMPPKRDIEFRIDLVPGTNPIHKRPYRMAANELAEVKKQVDDLLQKGYIRPSTSPWGAPVIFVEKKDHTQRMCVDYRALNEVTIKNKYPLPRIDDLFDQLEGATVFSKIDLRSGYHQLRIREYGLFECTVMSFGLTNAPYGLFECTVMSFGLTNAPAFFMNLMNKVFMEYLDKFVVVFIDDILIYSKTKEEHEEHLRLALEKLREHQLYAKFSKCEFWLSEVKFLGHVISSGGVAVDPSNVESVLSWKQPKTVTEIRSFLGLAWYYRRFIENFSKIARPMTRLLQKEVKYKWTEDCERSFQELKKRLVTAPVLILPDSRKGFQVYCDASRHGLGCVLMQEGKVVAYASRQLRPHENNYPTHDLELAAVVHALKIWRHYLFGNRTEEFEKLNLGIISKGFVAALEAKPTLFDQVREAQVNDPDIQEIKKNMRRGKAIGFVEDEQGTVWLGETICVPENKELKNTIMKEAHETLYSVHPGSTKMYQDLKQQFWWASMRREIAEYVALCDVCQRVKAEHQKPAGLLQPLKIPEWKWEEIGMDFITGLPRTSAGHDSIWVVVDRLTKVAHFIPVKTTYTGHKLAELYMARVVCLHGVPKKIVSDRGSQFTSKFWQKLQLELGTRLNFSTAYHPQTDGQTERVNQILEDMLRACVLDFGGSWDKNLPYAEFSYNNSYQASLQMAPYDALNGRKCRTPLLWDQTGERQVFGTDILRQAEEKVKIIQERLRVAQSRQKSYADNRRRDLAFEEGDYVYLRVTPLRGVHRFQTKGKLAPRFVGPFKIVSRRGEVAYQLELPPSMAGIHDVFHVSQLKKCLRVPTEEADPDRIELQEDLTYVEKPVRILEVSERNTRNRVIRFCKVQWSNHSEEEATWEREDELNLEFDLFNPSLYKFPSSSSSVCPLSRALPCPVAPPPRAPARRRRRPSSACRRAVSAVAAACRRRRXVRRGERNLGRPFPFAADHRSPLVAVKPPPPPSSSSPAAIVRL

SEQ ID NO: 20545 - protein, 597 aa, Oryza sativa
  Clone ID: TF_OSC14733j.C1.p1.fg
RYAPEDVRTDEERQEKFLEGLNDELSYTLMSTEFRDFQQLMDKAIRQEDKYNRMEQKKRRAAQFKAQQGSNQRPRLVTGPQVPSYPQGGSSSVVRPQRQFYNNNTGNRSNDNRNVVARPAATSVQNQPVRKEQGSKPVICFNCGDPGHYADKCPKPRRVKNVPAPNNSNVPAPKARVNHVAAAEAQNAPDVVLGTFPVNSIPATVLFDSGATHSFLSKSFASKHGMEVVSLGRPLLVNTPGNQVFSTRYCPSVTIEIEEVSFPSSLILLESKDLDVILGMDWLSRHRGIIDCANRKVILTNSNGKTVSFFASSPKFHGVILNQVALQEILIVQDSSRVFPEDLSGMPLKRDIEFRIDLVLATNPIHKRPCTGNFRASVIHVSVRVKKQVDDWAQKGYIRPSTSPWGAPVIFVEKKDHTQRMCVDYRALNEVTIKNKYPLPRIDDLFDQLKGATVFSKIDVRSGYHQLRIREEDIPKTAFTTRYGLFECTVMSFGLTNAPAFFMNLMNKVFMEYLDKFVVVFIDDILIYSKTKEEHEEHLRLALDKLREHQLYAKFSKCEFWLSEVKFLGHVISSGGVAVDPSNVESVLSWKQPKTVS

SEQ ID NO: 20546 - protein, 1083 aa, Oryza sativa
  unsure (1)..(1083): unsure at all Xaa locations
  Clone ID: TF_OSC1737j.C1.p1.np
NXFNSWSGMANSWFGGLICSIMPRHSPRNLIEVLGFVRELRLMAFEVGYEVAPEYRQISHDPDEEKCRVRVTLASDSEDLPSFKFEAGGRSYCHACQEAALVAIGELRQHFEEELDSSAFQYHPHKPHGQDYGTYTCPDGEESATLMHAVHMLSAMDAVSVERDKAAHDRENWNRGKICKLKSKVYRLQKELAELKGETPPPTSXLRLTARKRTCPPPRLQLASKIRVMGEAVPDRVEPVIDIISDEEEEEDPEEREATPEEEDSSLRSDARRMVNTRTGTGSGSGSGANNNEENPTLAQILAQQTQLINLLVQQAQNQQANNQNHPPPQNKLADFLRVSPPTFSSTTNPVEAGDWLHAVEKKLDLIQCTEQEKVSFASHQLHGPAAEWWDHFRQGRAGGEPITWQEFTTAFKKTHIPTGVVALKKREFRALNQGSRSVTEYLHDFNRLARYAPEDVRTDEERQEKFLEGLNDELSYALMSTDFRDFQQLVDKAIRQEDKYNRMEQKKRRAAQFKSQQGSNQRPRLVTGPQVPSYPQGGSSSVVRPQRQFYNNNSGNDNRSVVARPAATPVQNQPVRKEQGSKPVICFNCGDPGHYADKCPKPRRVKNAPAPNNSSAPAPKARVNHVAAAEAQNAPDVVLGTFPVNSIPATVLFDSGATHSFLSKSFASNHGIEVISLGRPLLVNTPGNQVFSTQYCPSVTIEIEEVLFPSSLILLESKDLDVILGMDWLSRHRGVIDCANRKVTLTNSNGETVSFFASSPKSHGVVLNQVALQEIPIVQDYPDVFPEDLPGMPPKRDIEFRIDLVPGTNPIHKRPYRMAANELAEVKKQVDDLLQKGYIRPSTSPWGAPVIFVEKKDHTQRMCVDYRALNEVTIKNKYPLPRIDDLFDQLEGATVFSKIDLRSGYHQLRIREYGLFECTVMSFGLTNAPAFFMNLMNKVFMYGLFECTVMSFGLTNAPAFFMNLMNKVFMEYLDKFVVVFIDDILIYSKTKEEHEEHLRLALEKLREHQLYAKFSKCEFWLSEVKFLGHVISSGGVAVDPSNVESVLSWKQPKTVSEIRSFLGLAGYLRERREGGSERSGPR

SEQ ID NO: 20547 - protein, 1150 aa, Oryza sativa
  Clone ID: TF_OSC25598j.C1.p1.fg
MMPPRSPRNLIEVLGLVRELRLMAFEVGYEVAPEYRQIPHDPDEEKCRVRVTLASDSEDLPSFKFEAGGRSYCHACQEVALVAIGELRQHFEEELDSSAFQYHPHKPHGQDYGSYTCPDGEESATLMHVVHMLSAMDTVSVERDKAAHDRENWNRGKICKLKSKVHRLQKELAELKGEMPPPTSKLRLTARKRTCPPPRLQLASKIRVMGEAVPDRAEPVIDIISDEEEEEDPEEREPATPEEEDSSLRSDARVMVNTRTGSGSGSGANNNEGEPTLAQILAQQTQLINLLVQQAQNQQGNNQNQNPPPPPQNKLADFLRVRPPTFSSTTNPVEAGDWLHAVEKKLDLIQCTEQEKVSFASHQLHGPAAEWWDHFRQGRAGGEPITWQEFTAAFKKTHIPSGVVALKKREFRALNQGSRSVTEYLHDFNRLARYAPEDVRTDEERQEKFLEGLNDELSYTLMSTEFRDFQQLVDKAIRQEDKYNRMEQKKRRAAQFKAQQGSNQRPRLVTGPQVPSYPQGGSSSVVRPQRQFYNNNTGNRGNDNRNVVARPAATSVQNQPVRKEQGSKPVICFNCGDPGHYADKCPKPRQSKDLDVILGMDWLSRHRGVIDCANRKVTVTNSNGEIVSFFASSPKSHGVVLNQVTLQEIPIVQDYPDVFPEDLPGMPPKRDIEFRIDLVPGTNPIHKRPYRMAANELAEVKKQVDDLLQKGYIRPSTSPWGAPVIFVEKKDHTQRMCVDYRALNEVTIKNKYPLPRIDDLFDQLKGATVFSKIDLRSGYHQLRIREEDIPKTAFTTRYGLFECTVMSFGLTNAPAFFMNLMNKVFMEYLDKFVVVFIDDILIYSKTKEEHEEHLRLALEKLREHHFYAKFSKCEFWLSEVKFLGHVISSGGVAVDPSNVESVLSWKQPKTVSEVRSFLGLAGYYRRFIENFSKIARPMTRLLQKEVKYKWTEDCERSFQELKKRLVSAPVLILPDSRKGFQVYCDASRLGLGCVLMQEGKVVAYASRQLRPHENNYPTHDLELAAVVHALKIWRHYLYGNRTEIYTDHKSLKYIFTQPDLNMRQRRWLELIKDYDMEIHYHPGKANVVADALSRKSYCNMSEGRCLPWELCQEFEKLNLGIVSKGFVAALEAKPTLFDQIREAQVNDPDI

SEQ ID NO: 20548 - protein, 778 aa, Oryza sativa
  Clone ID: TF_OSC27003j.C1.p1.np
LSLPQSEGYVIVLHQMLRRLRYPGFPSYRVRQCGPVWEARVEIHPRVPSELDYSFQTRHHRDLPETAMQDAAREAFLRLSSIHRAELVSTEFAHHPFREEGNSVCTVQNTPCCYNPIVTRLSRWAEAVDDYYEEALLEIDDHQRRMGELETEVTDLTAQQLQLEEEHQAWGSEIDSLKAQLQLGSGLETPIQIDSETEETDTEPEIEPDITDPSEDEAPVPRITFLGGPRTLSTARKSTRPPGKRPKPDPEATTSEPWGLRVIEKKLTLVRVREADKVIFAANQLEGPAGDWWDTYKEAREDGAGEPTWEEFTAAFRENFVPAAVMRMKKNEFRRLRQGNTTVQEYLNKFTQLARYAIGDLADEEEKIDKFIEGLNDELRGPMIGQDHESFQSLINKVVRLENDQRTVEHNRKRRLAMSRPPQTVPQRLKGATPSGWKPPVVVTNRPAAPSNFNRPVALQNRTPTPTLAAPGAKKNVDCFNCGEYGHYANNCPHPRKTPVRTGANAMTVRGTTTPTVGRGLFKTPQSNRTTTGFGRGQVNHVRAEEAQEDQGVLMGMFSINSTPVKVLFDSGASHSFISLKASQKHNLTLVGLRKPMIVHSPGGEITVSHACIDVPILLRDVVFPSNLMVLIPQTLDVILGMDWLAKHTGVIDCRRREVTLTTPWGSDMRATMDQDPRLTERAGGIFTMLPLKGMPVVQRFPDVFPEDLPGMPPDRDIEFIIDLIPGTTPISKRPYRMPVNELEELKKQIRELQEKGFVRPSSSPWGAPVLFVKKKDG

SEQ ID NO: 20549 - protein, 1262 aa, Oryza sativa
  unsure (1)..(1262): unsure at all Xaa locations
  Clone ID: TF_OSC29560j.C1.p2.np
MPPHSPRNLIEVLGFVRELRLMAFEVGYEVAPEYRQISHDPDEEKCRVRVTLASDREDLLSIKFEAGGRSYSHACQEVALVAIGELRQRFEEELDSSAFQYHPHKPHGQDYGTYICPDGEESATLMHAVHMLSAMDAVSVERDKAAHDRENWNRGKICKLESKVYRLQNELAELKGETPPPTPKLRVTLRKRTCPPPRLQLASKIRVMEAVPDRAEPVIDIISDEEEEEDPEEREATPEEEDPSLRSDARRSSRLVRSLPYLSVVLSCCCQMVNTRTGSGSGSGSGATNDGGDPTLAQILAQQTQLINLLVQQAQNQQANNQNHPPPQNKLADFLRVRPPTFSSTTNPVEAGDWLHAVEKKLDLIQCTEQEKVSFASHQLHGPAAEWWDHFRQGRAEGEPITWQEFTAAFKKTHIPAGVVALKKREFRALNQRSRSVTEYLHDFNRLARYAPEDVRTDEERQEKFLEGLNDELSYALMSTDFRDFQQLVDKAIRQEDKYNRMEQKKRRAAQFKAQQGSNQRPRLVTGPQAPSYPQVGSSSVVRPQRQFYNNNSGNDNRNMVARPAATSAQNQPVRKEQGSKPVICFNCGDPGHYADKCPKPRRVKNAPAPNNSNVPVPKARVNHVAAVEAQNAPDVVLGTFPVNSIPATVLFDSGATHSFLSKSFASNHGMEVISLGRPLLVNTPGNQVFSTQYCPSVTIEIEEVPFPSSLILLESKDLDVILGMDWLSRHRGVIDCANRKVTLTSSNGETVSFFASSPKSHGVTLNQVVLQEIPIVQDYPDVFPEDLPGMPPKRDIEFRIDLVPGTNPIHKRPYRMAANELADVKRQKDHTXRMCVDYRALNEVTIKNKDPLPRIDDLFDQLKGATVFSKIDLRSGYHQLRIREEDIPKTAFTTRYGLFECTVMSFGLTNAPAFFMNLMNKVFMEYLDKFVVVFIDDILIYSKTKEEHEEHLRLALEKLREHQLYAKFSKCEFWLSEVKFLCHVISSGGVAVDPSNVESVLSWKQPKTVSEFRSFLGLAGYYRSFIENFSKIARPMTRLLQKEVKYKWTDDCEQSFXELKKRLVTAPVLILPDSRKGFQVYCDASRLGLGCVLMQEGKVVAYASRQLRPHENNYPTHDLELAAVVHALKIWRHYLFGNRTEMYTDHKSLKYIFTQPDLNMRQRRWLELIKDYDMEIHYHPGKANVVADALSRKSYCNMSEGRRLPWELCQEFENLNLGIVNKGFVAALQAKPTLFDQVRCHARKSKDARRRPATREGGAAV

SEQ ID NO: 20550 - protein, 566 aa, Oryza sativa
  Clone ID: TF_OSC2960j.C1.p1.fg
MAFEVGYEVAPEYRQISHDPDEEKCRVRVTLASDSEDLPSYKFEAGGRSYCHACQEVALVAIGELRQHFEEELDSSAFQYHPHKPHGQDYGTYTCPDGEESATLMHVVHMLSAMDAVSVERDKAAHDRENWNRGKICKLKSKVHRLQKELAELKGETPPPTSKLRLTARKRTCPPPRLQLASKIRVMGEAVPDCAQPVIDIISDEEEEEDPKEREPATPEEEDSSLRSDARRNAAGTESAGKQSEPESTPPPQNKLADFLRVRPPTFSSTTNPVEAGDWLHAVEKKLDLIQCTEQEKVSFASHQLHGPAAEWWDHFRQGRAGGEPITWQEFTAAFKKTHIPSGVVALKKREFRALNQGSRSVTEYLHDFNRLARYAPEDVRTDEERQEKFLEGLNDELSYALMSTDFRDFQQLVDKAIRQEDKYNRMEQKKRRAAQFKAQQGSNQRPRLVTGPQAPSYPQGGSSSVVRPQRQFYNNNTGNRGNDNRNVIARPAATPVQNQSVRKEQGSKPVICFNCGDPGHYADKCPKPRRVKNVPAPNNSNVPAPKARVNHVVAAEAQNAPDVVL

SEQ ID NO: 20551 - protein, 1777 aa, Oryza sativa
  Clone ID: TF_OSC31236j.C1.p2.fg
MVPGLEWLVPGLEVIFVQLGLVVQMWLGLCNMEIPGVTSWYQSHLDLRISQMMPRHSPRNLIEVLGFVRELRLMAFEVGYEVAPEYRQIPHDPDEEKCRVRVTLASDSEDLPSFKFEAGGRSYCHACQEVALVAIGELRQHFEEELDSSAFQYHPHKPHGQDYGTYICPDGEESATLMHAVHMLSAMDAVSVERDKAAHDRENWNRGKICKLESKVYRLQKELAELKGEMPPPTPKLRLVARKRTCPPPRLQLASKIRVMGEAVPDRAEPVIDIISDEEEEEDPEEREPATPEEEDSSLRSDASCCLHHGWDMVNTRTGTGSGSGSGANNNEGEPTLAQILAQQTQLINLLVQQAQNQQGNNQNQNPPPPPQNKLADFLRVRPPTFSSTTNPVEAGDWLHAVEKKLDLIQCTEQEKVSFASHQLHGPAAEWWDHFRQGRAGGEPITWQEFTAAFKKTHIPSGVVALKKREFRALNQGSRSVTEYLHDFNRLARYAPEDVRTDEERQEKFLEGLNDKLSYALMSTDFQDFQQLVDKAIRQEDKYNRMEQKKRRAAQFKAQQGSNQRPRLVTGPQVPSYPQGGSSSVVRPQRQFYNNNTGNRGNDNRNVVARPAATPVQNQPVRREQGSKPVICFNCGDPGHYADKCPKPRRVKNAPAPNNFNVPAPKARVNHVAAAEAQNAPDVVLGTFPVNSIPATVLFDSGATHSFLCKSFAIKHGMEVVSLGRPLLVNTPGNQAFSTRYCPSVTIEIEEVPFPSSLILLESKDLDVILGMDWLSRHRGVIDCANRKVTLTSSNGETVSFFASSPKSHGEVLNQVALQEIPIVQDYPDVFPEDLPGMPPKRDIEFRIDLVPGTNPIHKRPYRMAANELAEVKKQVDDLLQKGYIRPSTSPWGAPVIFVEKKDHTQRMCVDYRALNEVTIKNKYPLPRIDDLFDQLKGATVFSKIDLRSGYHQLRIREEDIPKTAFTTRYGLFECTVMSFGLTNAPAFFMNLMNKVFMEYLDKFVVVFIDDILIYSKTKEEHKEHLRLALEKLREHQLYAKFSKCEFWLSEVKFLGHVISSGGVAVDPSNVESVLSWKQPKTVSEVRSFLGLAGYYRRFIENFSKIARPMTRLLQKEVKYKWTEDCEQSFQELKKRLVTAPVLILPDSRKGFQVYCDASRLGLGCVLMQEGKVVAYASRQLRPHENNYPTHDLELAAVVHALKIWRHYLYGNRTEVYTDHKSLKYIFTQPDLNMRQRRWLELIKDYDMEIHYHPGKANVVADALSRKSYCNMSEGRCLPWELCQEFEKLNLGIVSKGFVAALEAKPTLFDQIREAQVNDPYIQEIKKNMRRGKAIGFVEDEQGTVWLGERICVPENKELKDTIMKEAHETLYSIHPGSTKMYQDLKQQFWWASMRREIAEYVALCDVCQRVKAEHQKPAGLLQPLKIPEWKWEEIGMDFITGLPRTSAGHDSIWVVVDRLTKVAHFIPVKTTYTGHKLAELYMARVVCLHGVPKKIVSDRGSQFTSKFWQKLQSELGTRLNFSTAYHPQTDGQTERVNQILEDMLRACVLDFGGSWDKNLPYAEFSYNNSYQASLQMSPNEALYGRKCRTPLLWDQTGERQVFGTDILREAEEKVKIIQERLRVAQSCQKSYADNRRRDLVFEEGDYVYLRVTPLRGVHRFQTKGKLAPRFVGPFKIVSRRGEVAYQLELPPSMAGIHDVFHVSQLKKCLRVPTEEADPDCIELQEDLTYVEKPVRILEFPTFRRRAFPLRKVPKRLWKLKASHTDPKQPFEHVDPV

SEQ ID NO: 20552 - protein, 1532 aa, Oryza sativa
  Clone ID: TF_OSC31236j.C1.p4.fg
MPHRSPRNLIKVLGFVRELRLMAFEVGYEVAPEYRQIPHDPDEEKCRVRATLASDSEDLPSFKFEAGGRSYSHACQEVALVAIGELRQHFEEELDSSAFQYHPHKPHGQDYGSYTCPDGEESATLMHVVHMLNAMDTVGVEREKAAHDRENWNRDKICKLKSKVNRLQKELAELKGETPPPTSKLRLTARKRTCLPPRLQLASKIRVMGEAVPDRAEPVIDIISDEEEEEDPEEREPATPEEEDSSLHFLRVRPPTFSSTTNPVEAGDWLHAVEKKLDLIQCTEQEKVSFASHQLHGPAAEWWDHFRQGRAGGEPITWQEFTAAFKKTHIPTGVVALKKREFRALNQGSRSVTEYLHDFNRLARYAPEDVHTDEERQEKFLEGLNDELSYTLMSTEFRDFQQLVDKAIRQEDKYNRMEQKKRRAAQFKAQQGSNQRPRLIPGPQVPSYPQGGSSSVVRPQRQFYNNNTGNRGNENRNVVARPAATPVQNQPVRKEQGSKPVICFNCGDPGHYADKCPKPRHVKNVPVPNNSNVPAPKARVNHVAAAEAQNAPDVVLGTFPVNSIPATVLFDSGATHSFLSKSFATKHGMEVVSLGRPLLVNTPGNQVFSTRYCPSVTIEIEGVPFPSSLILLESKDLDVILGMDWLSRHRGVIDCANRKVTLTNSNGETVSFFASSPKSHGVVLNQVALQEIPIVQDYPDVFPEDLPGMPPKRDIEFRIDLVPGTNPIHKRPYRMAANELAEVKKQVDDLIQKGYIRPSTSPWGAPVIFVEKKDHTQRMCVDYRALNEVTIKNKYPLPRIDDLFDQLEGATVFSKIDLRSGYHQLRIREEDIPKTAFTTRYGLFECTVMSFGLTNAPAFFMNLMNKVFMEYLDKFVVVFIDDILIYSKTKEEHEEHLRLALEKLREHQLYAKFSKCEFWLSEVKFLGHVISSGGVAVDPSNVESVLSWKQPKTVSEIRSFLGLAGYYRRFVENFSKIARPMTRLLQKDVKYKWTEDCEQSFQELKKMLVTAPVLILPDSRKGFQVYCDASRHGLGCVLMQEGKVVAYASRQLRPHENNYPTHDLELAAVVHALKIWRHYLFGNRTEIYTDHKSLKYIFTQPDLNMRQRRWLELIKDYDMEIHYHPGKANVVADALSRKSYCNMSEARCLPWELCQEFERLNLGIVSKGFVATLEAKPTLFDQIREAQMNDPDIQEIKKNMRRGKAIGFVEDEQGTVWLGERICVPENKELKNTIMKEAHETLYSIHPGSTKMYQDLKLQFWWASMRREIAEYVALCDVCQRVKAEHQKPAGLLQPLKIPEWKWEEIGMDFITGLPRTSAGHDSIWVVVDRLTKVAHFIPIKTTYTGHKLAELYMARVVCLQGVPKKIVSDRGSQFTSMFWQKLQSELGTRLNFSTAYHPQTDGQTERVNQILEDMLRACVLDFGGSWDKNLPYAEFSYNNSYQASLQMSPNEALYGRKCCTPLLWDQTGERQVFGTDILREAEEKVKIIQERLRVAQSRQKSYADNRRRDLAFEEGDYVYLRVTPLRGVHRF

SEQ ID NO: 20553 - protein, 1170 aa, Oryza sativa
  unsure (1)..(1170): unsure at all Xaa locations
  Clone ID: TF_OSC32906j.C1.p1.np
MTSWYQSHLDLRISQMMPPHSLRNLIKVLGFVRELRLMAFEVGYEVAPEYRQISHDPDEEKCRVRVTLASDSEDLPSFKFEAGGRSYCHACQEAALVAIGELREHFEEELDSSAFQYHPHKPHGQDYGIYTCPDGEESATLMHAVHMLSAMDAVSVERDKAAHDRENWNRGKICKLESKVYRLQKELAELKGETPPPTPKLRLTPRKRICPPPRLQLASKIHVMGEAVPDRAEPVIDIISDEEEEEDPEEREPATPEEEDSSLRSDARRTTNPVEAGDWLHAVEKNLDLIQCTEQEKVSFASHQLHRPAAEWWDHFRQGRAEGEPITWQEFMAAFKKTHIPTGVVALKKREFRALNQGSRSVTEYLHDFNRLARYAPEDVRTDEERQEKFLEGLNDELSYALMSTDFRDFQQLVDKAIRQEDKYNRMEQKKHRAAQFKAQQGSNQRPRLVTGPQAPPYPQGGSSSVVCPQRQFYNNNTGNRGNDNRNTVARPAATPAQNQPVRKEQGSKPVICFNCGDPGHYADKCPKPRRVKNAPTPNNSNVPAPKARVNHVAAAEAQNAPDVVLGTFPVNSIPATVLFDSGATHSFLSKSFASNHGMEVISLGRPLLVNTPGNQVFSTQYCPSATIEIEEVPFPSSLILLESKDLDVILGMDWLSRHRGVIDCANRKVTLTSSNGETVSFFVSSPKYHGVILNQVALQEIPIVQDYPDVFPEDLPGMPPKRDIEFRIDLVPGTNPIHKRPYRMAANELAEVKRQVDDLLQKGYIRPSTSPWGAPVIFVEKKDHTQRMCVDYRALNEVTIKNKYPLPRIDDLFDQLEGATVFSKIDLRSGYHQLRIREEDIPKTAFTTRYGLFECTVMSFGLTNAPAFFMNLMNKVFMEYLDKFVVVFIDDILIYSKTKEEHEEHLRLALEKLREHXLYAKFSKCEFWLSEVKFLGHVISCGGVAVDPSNVESVLSWKQPKTVSEIRSFLGLAGYYCRFIENFSKIARPMTRLLQKEVKYKWTEDCERSFQELKKRLVTAPVLILPDSRKGFQVYCDASRLGLGCVLMQEGKVVAYASRQLRPHENNYPTHDLELAAVVHALKIWRHYLFGNRTEMYTDHKSLKYIFTQPDLNMRQRRWLELIKDYDMEIHYHPGKANVVADALSRKSYCNMSEGRHLPWELCQEFEGL

SEQ ID NO: 20554 - protein, 859 aa, Oryza sativa
  Clone ID: TF_OSC33037j.C1.p1.fg
MMPPHSPRNLIKVLGFVRELRLMAFEVGYEVAPEYRQISHDPDEEKCRVRVTLASDSDDLPSFKFEAGGRSYSHACQEAALVAIGELRQRFEEELDSSAFQYHPHKPHGQDYGTYTCPDGEESATLMHAVHMLSAMDAVSVERDKAAHDRENWNRGKICKLESKVYRLQKELAELKGETPPPTPKHRLTQRKRTCPPPRLQLASKIRVMGEAVPDRAEPVIDIISDEEEEEDPEEREPATPEEEDPSLRSDTRRMVNTRTGSGSGSGSGATNNGGDPTLAQILAQQTQLINLLVQQAQNQQANNQNQNPPPPPQNKLADFLRVRPPTFSSTTNPVEAGDWLHAVEKKLDLIQCTEQEKVSFASHQLHGPAAEWWDHFRQGRAEGEPITWQEFTAAFRKTHIPSGVVALKKREFRALNQGSRSVTEYLHDFNRLARYAPEDVRTDEERQEKFLEGLNDELSYALMSTDFRDFQQLVDKAIRQEDKYNRMEQKKRRAAQFKAQQGSNQRPRLVTGPQVPSYPQGGSSSVVRPQRQFYNNNTSNRGNDNRNVVARPAATSAQNQPVRKEQGSKPVICFNCGDPGHYADKCPKPRRVKNAPAPNNSNVPAPKARVNHVAAAEAQNAPDVVLGTFPVNSIPATVLFDSGATHSFLSKSFTSNHGMEVISLERPLLVNTPGNQVFSTQYCPSATIEIEEVPFPSSLILLESKDLDVILGMDWLSCHRGVIDCANRKVTLTSSNGETVSFFMSSPKSHGVILNQVALQEIPIVQDYPDVFPEDLPGMPPKREIEFRIDLVPGTNPIHKRPYRMAANELVEVKRQVEDLLQKGYIRPSTSPWGAPVIFVEKKDHTQRMCVDYRALNE

SEQ ID NO: 20555 - protein, 1602 aa, Oryza sativa
  Clone ID: TF_OSC34537j.C1.p1.fg
MADSDSPATWELSLPQSEGYVIVLHQMLRRLRYPGFPSYRVRQCGPVWEARVEIHPRVPSELDYSFQTRHHRDLPETAMQDAAREAFLRLSSIHRAELVSTEFAHHPFREEGNSVCTVQNTPCCYNPIVTRLSRWAEAVDDYYEEALLEIDDHQRRMGELETEVTDLTAQQLQLEEEHQAWGSEIDSLKAQLQVHGDQYQQLSDQYNDRRGMMDTLEEQLRESQEHVSQLEEQLRAAKISTTGASTSTAAGRDRYFFLTPPYPPAFHALLGEASMLATESAPYLVDPTAAQPPVPELVHTPLVPTPSPQLGSGLETPIQIDSETEETDTEPEIEPDITDPSEDEAPVPRITFLGGPRTLSTARKSTRPPGKRPKPDPEATTSEPWGLRVIEKKLTLVRVREADKVIFAANQLEGPAGDWWDTYKEAREDGSREFPEPDQQGRQARERSKDGEHNRKRRLAMSRPPQTVPQRLKGATPSGWKPPVVVTNRPAAPSNFNRPVALQNRTPTPTLAAPGAKKNVDCFNCGEYGHYANNCPHPRKTPVRTGANAMTVRGTTTPTVGRGLFKTPQSNRTTTGFGRGQVNHVRAEEAQEDQGVLMGMFSINSTPVKVLFDSGASHSFISLKASQKHNLTLVGLRKPMIVHSPGGEITVSHACIDVPILLRDVVFPSNLMVLIPQTLDVILGMDWLAKHTGVIDCRRREVTLTTPWGSDMRATMDQDPRLTERAGGIFTMLPLKGMPVVQRFPDVFPEDLPGMPPDRDIEFIIDLIPGTTPISKRPYRMPVNELEELKKQIRELQEKGFVRPSSSPWGAPVLFVKKKDGSMRICVDYRSLNEVTIKNKYPLPRIDDLFDQLKGAKVFSTIDLRSGYHQLKIRTEDIPKTAFSTRYGLYEFTVMSFGLTNAPAYFMNLMNKVFMDYLDKFVVVFIDDILIYSKDEEEHAEHLRLVLQKLRKHKLYKKFSKCEFWLKEVAFLGHVISAGGVAVDPAKVEAVTEWKAPKSVTEIRSFLGLAGYYRRFIEGFSKIARPMTQLLKKEKKFVWSEQCQESFEQLKEKLTSAPILVLPDIRKDFVIYCDASRQGLGGVLMQDGKVVAYASRQLRPHEENYPTHDLELAAVVHALKIWRHYLIGNHCDIYTDHKSLKYIFTQSDLNLRQRRWLELIKDYDLEVHYHPGKANVVADALSRKSHYNHLRMEGMVPELREEIAQLNLHIVPHGRINTLDIQPLLRTQIEEAQKDNEEVREVKERLAAGRAKEFSTDGKDVLWYKKRIYVPEQGGLRGLILKEAHESAYSLHPGSTKMYQDLKEGYWWPNMKRDVAEYVALCDVCQKVKAEHQRPAGLLQPLRIPEWKWDEIGMDFIVGLPKTATGYDSIWVIVDRLNKTARFIPVKTNYSSAKLAELYMTRIVCLHGIPKKIISDRGTQFTSHFWEKVHEALGSYLAFSTAYHPQTDGQTERTNQTGERAVFGPDIIQEAEEKVRLIRDRLKVAQSRQKSYADTRRRNLEFKEGDYVYLKVSPMRGTKRFKVKGKLAPRYVGPFQIIARRGEVAYQLQLPEYIADVHPVFHVSQLKKCLRVPEEQAPLEEIHISNDLTYPEHPIRILDEAD

SEQ ID NO: 20556 - protein, 1575 aa, Oryza sativa
  unsure (1)..(1575): unsure at all Xaa locations
  Clone ID: TF_OSC400236j.C1.p2.np
MQDAAREAFLRLSSIHRAELASTEFAHHPFREESNSVCTVQDTPCCYNPIVTRLSRWAEAVDDFYEEALLEINDQQRRVGELETEVTDLTVQQLQLEEEHQAWGTGLQYGDSDPGRLRDRGDQHRAEIEPDITDPSEDETPVPRITFIGGPCTLSTAHKNTRPPGKKPKPDPEATTSEPWGLSSHQNNSLNGIKPXELVRKLXYLLNRPTQMASRRRASTSNEETXTPDLTTLAGVMATQTQLLQAIANNQGNRGGSSFGEFVRTKPPTFATADEPMEAEDWLRIIEKKLTLVRVREADKVIFAVNQLEGPAGDXWDTYKEAREEDAGEPTWEEFTAAFCENFVPAAVMRMKNEFRRLRQGNTTVQEYLNRFTQLARYAIGDLADEEEKIDKFIEGLNDELHGPMIGQDHESFQSLINKVVRLENDQRTVEHNRKRRLAMNRPPQGVPQRLKGAPSSGWKPPIVATNRPAAPSNFNRPIAIQNHTPTPTLAALGAKKNVDCFNCGEYGHYANNCPHPRKTPVRTGANAMTVRGTTTPAARRGLFKTPQTNRTATGFGRGQASQKHNLTLVGLRKPMIVHSPGGEITGCGVSLQPGCGVSLQPYGFDTPDPGCHIGYGLVNKEQREDLPGMPPDRDIEFIIDLIPGTAPISKRPYRMPVNELEELKKQIRELQEKGFVRPSSSPWGAPVLFVKKKDGSMRMCVDYRSLNEVTIKNKYPLPWIDDLFYQLKGAKVFSKFDLRSGYHQLKIKTGDISKTAFSTCYRLYEFTVMSFGLTNAPACFMNLMNKVFMDYLDKFVVVFIDDILIYSKDEEEHAEHLRLVLEKLRKHKLYAKFSKCEFWLKEVAFLGHVISAGGVAVDPAKVEAVTEXKAPKSVTEIRTFLGLAGYYRRFIEGFSKIARPMTQLLKKEKKFVWSGQCQESFEQLKEKLTLAPILVLPDIRKNFVIYYDASRQGLGGVLMQDGKVVAYASRQLRPHEENYPTHDLELAVVVHALKIWRHYLIGNHCDIYTDHKSLKYIFTQSDLNLRQRRWLELIKDYDLEVHYHPGKANVVADALSRKSHCNHLRTEGMAPELKEEMAQLNLHIVPHGQINTLDVQPLLRTQIEEAQKDNEEIREVKERLAAGRAKEFSTDEKGVLWYKKRIYVPEQGGLRGLILKEAHESAYSLHPGSTKMYQDLKEGYWWPNMKDVAEYVALCDVCQKVKAEHQRPAGLLQPLRIPEWKWDEIGMDFIVGLPKTATGYDSIWVIVDRLTKTARFIPVKTNYSSAKLAELYMTRIVCLHGVPKRIISDRGTQFTSHFWEKVHEALGSYLAFSTAYHPQIDGQTERTNQLLEDMLRACALDFSKDWEICLPYAEFSYNNSFQASLKMPPNEALFGRRCRTPLMWSETGERAVFGPDIINEAEEKVRLIRDRLKVAQSRQKSYADTRRRNLEFKEGDYVXLKVSPMRGTKRFKVKGKLAPRYVGPFQITARRGEVAYQLQLPENIADVHPVFHVSQLKKCLLVPEEQAPLEEIHISNDLTYPEHPIRILDEAEKRTRSKVWRVYKVQWSNHTEDEATWESEEFLRTEYPHLFENW

SEQ ID NO: 20557 - protein, 1415 aa, Oryza sativa
  Clone ID: TF_OSC400304j.C1.p3.fg
MASRRRASISNEETQTPDLTTLAGVMATQTQLLQAIANNQGNRGRSSFGEFMRTKPPTFTTADEPMEAEDWLRIIEKKLTLVRVREADKVIFAVNQLEGPAGDRWDTYKEAREEDAGEPTWEEFTAAFQENFVPAAVMRMKKNEFRRMRQGNTTVQEYLNRFTQLARYAIGDLADEEEKIDKFIEGLNDELRGPMIGQDHESFQSLINKVVRLENDQRTVEHNHKRRLAMNRPPQGVPQRLKGATSSGWKPPIVAPNRPAAPSNFNRPVVIQNRTPTPTLAAPGAKKNVDCFNCGEYGHYANNCPHPRKTPVRTGANAMTVRGTTTPAAGRGLFKTPQTNRTATGFGRGQVNHVRAEEAQEDQGVLMGMFSINSTPVKVLFDSGASHSFISRKASQKHNLTLVGLRKPMIVHSPGGEITVSHACIDVPIRLRDVVFPSNLLVLIPQTLDVILGMDWLTKNRGVIDCRRRKVTLTTPWRSDMRATMDQDPRLIERAGGIFTMLPLKGMPIVQRFPDVFPEDLPGMPPDRDIEFIIDLIPGTAPISKRPYRMPVNELEELKKQIRELQEKGFNKYPLPRIDDLFDQLKGAKVFSKIDLRSGYHQLKIRTGDVPKTAFSTRYGLYEFTVMSFGLTNTPAYFMNLMNKVFMDYLDKFVVVFIDDILIYSKDEEEHVEHLRLVLEKLRKHKLYAKFSKCEFWLKEVAFLGHVISAGGVVVDPAKVEAVTEWKAPKSVTEIRSFLGLAGYYRRFIEGFSKITRPMTQLLKKEKKFVWSEQCQESFEQLKEKLTSAPILDWGGVLMQEGKDVAYASRQLRPHEENYPTHDLELAVVVHELKIWRHYLIGNHCDIYTDYKSLKYIFTQSDLNLRQRRWLELIKDYDLEVHYHPGKANIVADALSRKSHCNHLRMEGITPELKEEIAQLNLHLVPYGQINTLDIQPLLRTQIEEAQKDNGEIQEVKERIAAGCAKEFSIDEKETLWYKKRIYVPEQGGLRGLILREAHESAYSLHPGSTKMYQDLKEGYWWPNMKRDVAEYVALCDVCQRVKAEHQRPAGLLQPLRIPECKWDEIGMDFIVGLHKTATGYDSIWVIVDRLTKTARFIPVKTNYSGAKLAELYMTRIVCLHGVPKRIISDRGTQFTSHFWEKVHEALGSYLAFSTAYHPQTDGQTERTNQVLEDMLRACALDFSKDWEKCLPYAEFSYNNSFQASLKMSPNEALFGRRCRTPLMWSETGERTVFGPDIIQEAEEKVRLIRDRLKVAQSRQKSYADTRRRDLEFKEGDYVYLKVSPMRGTKMFKVKGKLAPRYVGPFQIIARRGEVAYQLQLPENIADVHPVFHVSQLKKCLRVPEEQAPLEEIHISNDLTYPEHPVRILDEAEKRTRTKVWRMYKVQWSNHTEDEATWESEEFLETEYPHLFEIR

SEQ ID NO: 20558 - protein, 673 aa, Oryza sativa
  unsure (1)..(673): unsure at all Xaa locations
  Clone ID: TF_OSC400340j.C1.p1.np
MGVPRSEGYVIELHRVMRRLRYPRFPIYRVRQCGPFWEGRIEVHPRVPSESDYSFSTRHRRDLPETAMQDAAREAFLXLSSIHWAELASTEFAHHPFREESNSVCTVQDIPCCYNPMVTRLSRWAEAVDDFYEEALLEIDDQQRRMGELETKVTDLTAQQLQLEEEHQAWGSEIDSLKAQLQPGSSLETPIQVDSETEGTDTEPEIEPDITDPSEDATPVPRITFIGGPRTLSNARKSTRPPGKKPKPDLEATTSEPWGLRIIEKKLTLVRVREADKVIFAVNQLEGPVGDRWDTYKEAREKDAGEPTWEEFTAAFQENFVPAAVMRMKKNEFRRMRQGNTTVQEYLNRFTQLARYAIGDLADEEEKIDKFIEGLNDELRGPMIGQDHESFQSLINKVVRLENDQRTVEHNHKRRLAMNRPPQGVPQRLKGATSSGWKPPIVAPNRPAAPSNFNRPVVIQNRTPTPTLAAPGAKKNVDCFNCGEYGHYANNCPHPRKTPVRTGANAMTVRGTTTPAAGRGLFKTPQTNRTATGFGRGQVNHVRAEEAQEDQGVLMGMFSINSTPVKVLFDSGASHSFISRKASQKHNLTLVGLKPMIVHSPGGEITVSHACIDVPIRLRDVVFPSNLLVLIPQTLDVILGMDWLTKNRGVIDCRRRKVTLTTPWRSDMRATMD

SEQ ID NO: 20559 - protein, 1569 aa, Oryza sativa
  Clone ID: TF_OSC400724j.C1.p13.fg
MQDAAREAFLRLSSIHRAELASTEFAHHPFREESNSVCTAQDTPCCYNPIVTRLSRWAEAVDDFYEEALLEINDQQRRVGELETEVTDLTVQQLQLEEEHQAWGTRFEFGDSDPGRLRDRGDRHRAEIEPDITDPSEDETPVPRITFLGRPHTLSTARKSTRPPGKKPKPDPEATTSEPWGLSSHQNNSLNGIKPQELVRKLGYLLNRPTQMASRRRASTNNEETQTPDLTTLAGVMATQTQLLQAIANDQGNRGGSSFGEFMRTKPPTFAMADKPMEAEDWLRIIEKKLTLVRVREADKVIFVVNQLEGPAGDWWDTYKEAREEDAGEPTWEEFTAAFHENFVPAAVMRMKKNEFRRLQQGNTTVQEYLNRFTQLARYAIGDLANEEEKIDKFIEGLNDELRGPMIGQDHESFRSLINKVVRLENDQRTVGHNRKRRLAMNCPPQGVPQRHKGATSSGWKPPIVATNRPAAPRNFNRPVAIQNRTPTPTLAAPGAKKNVDCFNCGEYGHYANNCPHPRKTPVHTGANAMTVSGTTAPAAGRGLFKTPQTNRTATRFGRGQASQKHNLTLVGLRKPMIVHSPGGEITGCGVSLQPYGFDTPDRGCHIGYGLVNKEQREDLPGMPPDRDIEFIIDLIPGTAPISKRPYRMPVNELEELKKQIRELQEKGFVRPSSSPWGAPVLFVKKKDGSMRMCVDYRSLNEVTIKNKYPLPWIDDLFDQLKGAKVFSKIDLRSGYHQLKIRTGDIPKTAFSTRYGLYEFTVMSFGLTNAPAYFMNLMNKVFMDYLDKFVVVFIDDILIYSKDEDEHAEHLRLVLEKLRKHKLYAKFSKCEFWLKEVAFLGHVISAGGVAMDPAKVEAVTEWKAPKFVTEIRSFIGLAGYYRRFIEGFSKIARPMTQLLKKEKKFVWLEQCQESFEQLKEKLTSSPILVLPDIWKDFVIYCDASRQGLGGVLMQDGKVVAYASRQLRPHEENYPTHDLELAAVVHALNIWRHYLIGNHCDIYTDHKSLKYIFTQSDLNLRQRRWLELIKDYDLEVHYHPGKANVVADALSRKSHCNHLRTEGMAPELKEEIAQLNLHMVPHGQINNLDIQPLLRTQIEEAQKDNEEIREVKERLVAGFAKEFSTDEKDVLWYKKRIYVPEQGGLRGLILKEAHKSAYSLHPGSTKMYQDLKEGYWWPNMKRDVAEYVALCDVCQKVKAEHQRPAGLLQPLRIPEWKWDEIGMDFIVGLPKTATGYDSIWVIVDRLTKTARFIPVKTNYNSAKLTELYMTRIVCLHGVPKRIISDRGTQFTSYFWEKVHEALGSYLAFSTAYHPQTDGQTERTNQVLEDMLRVCAMDFSKDWERCLPYAEFSYNNSFQASLKMSPNEALFGRRCRTPLMWTETGERAIFGLDIIKEAEEKVRLIRDHLKVAQSRQKSYADTRRRNLELKEGDYVYLKVSPMRGTKRFKVKGKLAPRYVRPFQITARRGEVAYQLQLPENIADVHPVFHVSQLKKCLRVPEEQATLEEIHISNDLTYPEHLVRILDEAKKKTRTKVWRMYKVQWSNHTEDEATWESEEFLKTEYPHLFENL

SEQ ID NO: 20560 - protein, 1540 aa, Oryza sativa
  unsure (1)..(1540): unsure at all Xaa locations
  Clone ID: TF_OSC401044j.C1.p17.np
PSRLTGEAFLRISSIHRAELASTEFAHHPFREESNSVCTVQDTPCCYNPTVTRLSRWAEAVDDFYEEALLEIDDQXRRVGELETEVTDLTVQQLQLEEEHLAWGTGFQFGDSNPGRLRDRGDRHKPEIEPDITDLSEDETPAHRITFVGGPRTLSTARKSTRPPGKKPKPDPEATTSEPWGLSSHQNNSLNGIKPKGLVRKIGYIPHRPTQMASRRRASTSNEETQVPDLTTLARVMATQTQLLQAIANNQDNCGGSSFGEFMRTKPPTFATADEPMEAEDWLRIIEKKLTLVRVREADKVIFAVNQLEGPTGDWWDTYKEAREEDAGEPTWGEFTTAFRENFVPAAVMRMKKNKFRRLRQGNTMVQEYLNRFTQLACYAIGDLADEEEKIDKFIEGLNDELRGPMIGQDHESFQSLINKVIRLENDQRTVEHNRKRRLAMNRPPQGPQRLKGATSSGWKPPIVATNRPAAPSNFNRLVAIQNHTPTPTLATPGAKKNVDCFNCGEYGHYANNCPHPRKTPVRTGANAMTIRGTTTPAAGRGLFKTPQTNRTATGFGRGQVNHRGNSTTTTSSSAGAAASPSSVTDVAAVSAACDLASPLLGVLAATGATSGNSRMKLPGLPPARVFDHSIPLLPGAKPVNLRPYXYNPAQKDEIERQVADMLQQGIIQPSSSPFSSPVLLVLKKDLTWRFCIDYRHLNAITVKNRYPLPIIDELLDELAGSCLFTSFDLRAGYHQIRMRPEDEHKTAFKTHNGHYEFRVMSYGLTSAPATFQVLMNQILAPLLRKGVLVFTDDILIYSQNLDDHVALLRRVFQLLTDHQLKVKRSKCSFARASLPYLGHVISAEGVATDSKNIQAVHNWAVPCNVKEVRGFLGLAGYYRKFVHSFGIISRPLTDLLKKNVVFVWTSEHQASFDALKEALVSAPVLALPDFSKVFEIETDASDKGVGAVLMQAGHPLAFLSKSLGPRNQGLSTYEKECLAILLAVEQXRSYLQFGEFIIRTDQRSLIHLDDQRLVTPWQQRALTKLLGLQYRIVYKKGLENKAADALSRNQSTDVFQLSAVSSCIPVWLADVQLGYAGSSILSTVDXTLVXVLRRSLSTDQNGIIYHKGRIWLGNNVELQTKVLTALHNAAIGGHSGTQATFSRVNKLFAWPGLRKAVRQFVSACSICKQAKAERVRYPGFLQPLPVPEHAWQTVSLDFIEGLPSSSGFDCILVVVDKFSKYAHFVALAHPFTAFDVALAYLNNVYKMHGLPQHLISDRDRIFTSALWKELFQLADTQLQMSSAYHPQTDGQTERVNQCLETFLRCFVHACPKRWYRWLALAEFWYNTAFHSALDKSPFEVLYGHSPRHFGVFDRFECAVPDLQDWLKEREVITSLPRQHLLRAQQSMKLQADKKRSDREFAVGDWVFLKAQPHAQFSMTGRSNHKLAFRYFGPFQILARIGSVAYRLQLPTTCAIHPVVHVSQLRQASSPAPDSSIQDLPALTEDEALPVQILARRAVKKGAGAVEQLKIRWSGQTSAEATWEDGAALRARFPEAPAWG

SEQ ID NO: 20561 - protein, 1474 aa, Oryza sativa
  Clone ID: TF_OSC401051j.C1.p12.np
MVNTRTGSGSGSGSGATNNGGEPTLAQILAQQTQLINLLVQQAQNQQANNQNQNPPPPPQNKLADFLRVRPPTFSSTTNPVEAGDWLHAVEKKLDLIQCTEQEKVSFASHQLHGPAAEWWDHFRQGRAGGEPITWQEFTAAFKKTHIPSGVVALKKREFRALNQGSRSVTEYLHDFNRLARYAPEDVRTDEERQEKFLEGLNDELSYALMATDFRDFQQLVDKAIRQEDNNQRPRLITGPQAPSNQRPRLITGPQAPSYPQGGSSSVARPQRQFYNNNTSNRGNDNRNMVACPAATPVQNQPVRKEQGSKPVICFNCGDPGHYADKCPKPRRVKNAPVPNNPNVPAPKARVNHVAAAEAQNAPDVVLGTFPVNSIPATVLFDSGATHSFLSKSFASKHGMEVVSLGRPLLVNTPGNQVFSTQYCPSVTIEIEEVPFPSSLILLESKDLDVILGMDWLSRHRGVIDCANRKVTLTNSNGETVSFFASSPKSHGVVLNQVALQEIPIVQDYPDVFPEDLPGMPPKRDIEFRIDLVPGTNPIHKRPYRMAANELAEVKKQVDDLLQKGYIRPSTSPWGAPVIFVEKKDHTQRMCVDYRALNEVTIKNKYPLPRIDDLFDQLEGATVFSKIDLHSGYHQLRIREEDIPKTAFTTRYGLFECTVMSFGLTNAPAFFMNLMNKVFMEYLDKFVVVFIDDILIYSKTKEEHEEHLRLALEKLREHQLYAKFSKCEFWLSEVKFLGHVISSGGVAVDPSNVESVLSWKQPKTVSEIRSFLGLAGYYRRFIENFSKIARPMTRLLQKEVKYKWTEDCERSFQELKKRLVTAPVLILPDTRKGFQVYCDASRLGLGCVLMQEGKVVAYASRQLRPHENNYPTHDLELAAVVHALKIWRHYLFGNRTEIYTDHKSLKYIFTQPDLNMRQRRWLELIKDYDMEIHYHPGKANVVADALSRKSYCNMSEGRRLPWELCQEFELNLGIVSQGLVATLEAKPTLFDQIREAQVNDPDIQEIKKNMRRGKAIGFVEDEQGTVWLGERICVPDNKELKDTIMKEAHETLYSIHPGNTKMYQDLKQQFWWASMRREIAEYVALCDVCQRVKAEHRKPAGLLQPLKIPEWKWEEIGMDFITGLHRTSAGHDSIWVVVDRLTKVAHFIPVKTTYTGHKLAELYMARVVCLHGVPKKIVSDRGSQFTSKFWQKLQLELGTRLNFSTAYHPQTDGQTERVNQILEDMLRACVLDFGGSWDKNLPYAEFSYNNSYQASLQMAPYEALYGRKCRTPLLWDQTGERQVFGTDILRQAEEKVKIIQERLRVAQSRQKSYADNRRRDLAFEEGDYVYLRVTPLRGVHRFQTKGKLAPRFVGPFKIVSRRGEVAYQLELPPSMAGIHDVFHVSQLKKCLRVPTEEADPDRIELQEDLTYVEKPVRILEESERKTRNRVIRFCKVQWSNHSEEEATWEREDELKSAHPHLFASSSESRGRDSV

SEQ ID NO: 20562 - protein, 1646 aa, Oryza sativa
  unsure (1)..(1646): unsure at all Xaa locations
  Clone ID: TF_OSC401235j.C1.p43.np
MTSWYQSHLDLRISQMMPPHSLRNLIKVLGFVRELRLMAFEVGYEVAPEYRQISHDPDEEKCRVRVTLASDSEDLPSFKFEAGGRSYCHACQEAALVAIGELREHFEEELDSSAFQYHPHKPHGQDYGIYTCPDGEESATLMHAVHMLSAMDAVSVERDKAAHDRENWNRGKICKLESKVYRLQKELAELKGETPPPTPKLRLTPRKRICPPPRLQLASKIHVMGEAVPDRAEPVIDIISDEEEEEDPEEREPATPEEEDSSLRSDARRTTNPVEAGDWLHAVEKNLDLIQCTEQEKVSFASHQLHRPAAEWWDHFRQGRAEGEPITWQEFMAAFKKTHIPTGVVALKKREFRALNQGSRSVTEYLHDFNRLARYAPEDVRTDEERQEKFLEGLNDELSYALMSTDFRDFQQLVDKAIRQEDKYNRMEQKKHRAAQFKAQQGSNQRPRLVTGPQAPPYPQGGSSSVVCPQRQFYNNNTGNRGNDNRNTVARPAATPAQNQPVRKEQGSKPVICFNCGDPGHYADKCPKPRRVKNAPTPNNSNVPAPKARVNHVAAAEAQNAPDVVLGTFPVNSIPATVLFDSGATHSFLSKSFASNHGMEVISLGRPLLVNTPGNQVFSTQYCPSATIEIEEVPFPSSLILLESKDLDVILGMDWLSRHRGVIDCANRKVTLTSSNGETVSFFVSSPKYHGVILNQVALQEIPIVQDYPDVFPEDLPGMPPKRDIEFRIDLVPGTNPIHKRPYRMAANELAEVKRQVDDLLQKGYIRPSTSPWGAPVIFVEKKDHTQRMCVDYRALNEVTIKNKYPLPRIDDLFDQLEGATVFSKIDLRSGYHQLRIREEDIPKTAFTTRYGLFECTVMSFGLTNAPAFFMNLMNKVFMEYLDKFVVVFIDDILIYSKTKEEHEEHLRLALEKLREHXLYAKFSKCEFWLSEVKFLGHVISCGGVAVDPSNVESVLSWKQPKTVSEIRSFLGLAGYYCRFIENFSKIARPMTRLLQKEVKYKWTEDCERSFQELKKRLVTAPVLILPDSRKGFQVYCDASRLGLGCVLMQEGKVVAYASRQLRPHENNYPTHDLELAAVVHALKIWRHYLFGNRTEMYTDHKSLKYIFTQPDLNMRQRRWLELIKDYDMEIHYHPGKANVVADALSRKSYCNMSEGRHLPWELCQEFERLNLGIVSKGFVAALEAQPTLFDQVREAQVNDPDIQEIKKNMRRGKAIGFVEDEQGTVWLGERICVPENKELKDTIMKEAHETLYSIHPRSTKMYQDLKQQFWWASMRREIAEYVALCDVCQRVKAEHQKPAGLLQPLKIPEWKWEEIGMDFITGLPRTSAGHDSIWVVVDRLTKVAHFIPVKTTYTGNKLAELYMARVVCLHGVPKKIVSDRGSQFTSKFWQKLQLELGTRLNFSTAYHPQTDGQTERVNQILEDMLRACVLDFGGSWDKNLPYAEFSYNNSYQASLQMAPYEALYGRKCRTPLLWDQTGERQVFGTDILRQAEEKVKIIQXRLHVAQSRQKSYADNRRRDLAFEEGDYVYLRVTPLRGVHRFQTKGKLAPRFVGPFKIVSRRGEVAYQLELSPRRGEVAYQLELSPSMAGIHDVFHVSQLKKCLCVPTEEADPDRIELQEDLTYVEKPVRILEFPTFRRRAFPLRK

SEQ ID NO: 20563 - protein, 1630 aa, Oryza sativa
  unsure (1)..(1630): unsure at all Xaa locations
  Clone ID: TF_OSC401235j.C1.p75.np
KVGCEHMVLMVVLMTIKDRFASYCCETFIVPTTSQRGQRLYLLYSMIHYSAPDXEVARSPWGSLGSPCLVLKGVIMIQVRCTVVNCVMRGVLSLLLSEMPRHSPRNLIEVLGFVRELRLMAFEVGYEVAPEYRQIPHDPDEEKCRVRVTLASDSEDLPSFKFEAGGRSYCHACQEVALVAIGELRQHFEEELDSSAFQYHPHKPHGQDYGTYICPDGEESATLMHAVHMLSAMDAVSVERDKAAHDRENWNRGKICKLESKVYRLQKELAELKGEMPPPTPKLRLVARKRTCPPPRLQLASKIRVMGEAVPDRAEPVIDIISDEEEEEDPEEREPATPEEEDSSLRSDARWKAGGEPITWQEFTAAFKKTHIPSGVVALKKREFRALNQGSRSVTEYLHDFNRLARYAPEDVRTDEERQEKFLEGLNDKLSYALMSTDFQDFQQLVDKAIRQEDKYNRMEQKKRRAAQFKAQQGSNQRPRLVTGPQVPSYPQGGSSSVVRPQRQFYNNNTGNRGNDNRNVVARPAATPVQNQPVRREQGSKPVICFNCGDPGHYADKCPKPRRVKNAPAPNNFNVPAPKARVNHVAAAEAQNAPDVVLGTFPVNSIPATVLFDSGATHSFLCKSFAIKHGMEVVSLGRPLLVNTPGNQAFSTRYCPSVTIEIEEVPFPSSLILLESKDLDVILGMDWLSRHRGVIDCANRKVTLTSSNGETVSFFASSPKSHGEVLNQVALQEIPIVQDYPDVFPEDLPGMPPKRDIEFRIDLVPGTNPIHKRPYRMAANELAEVKKQVDDLIQKGYIRPSTSPWGAPVIFVEKKDHTQRMCVDYRALNEVTIKNKYPLPRIDDLFDQLEGATVFSKIDLRSGYHQLRIREEDIPKTAFTTRYGLFECTVMSFGLTNAPAFFMNLMNKVFMEYLDKFVVVFIDDILIYSKTKEEHEEHLRLALEKLREHQLYAKFSKCEFWLSEVKFLGHVISSGGVAVDPSNVESVLSWKQPKTVSEIRSFLGLAGYYRRFVENFSKIARPMTRLLQKDVKQLRPHENNYPTHDLELAAVVHALKIWRHYLFGNRTEIYTDHKSLKYIFTQPDLNMRQRRWLELIKDYDMEIHYHPGKANVVADALSRKSYCNMSEARCLPWELCQEFERLNLGIVSKGFVATLEAKPTLFDQIREAQMNDPDIQEIKKNMRRGKAIGFVEDEQGTVWLGERICVPENKELKNTIMKEAHETLYSIHPGSTKMYQDLKLQFWWASMRREIAEYVALCDVCQRVKAEHQKPAGLLQPLKIPEWKWEEIGMDFITGLPRTSAGHDSIWVVVDRLTKVAHFIPIKTTYTGHKLAELYMARVVCLQGVPKKIVSDRGSQFTSMFWQKLQSELGTRLNFSTAYHPQTDGQTERVNQILEDMLRACVLDFGGSWDKNLPYAEFSYNNSYQASLQMSPNEALYGRKCCTPLLWDQTGERQVFGTDILREAEEKVKIIQERLRVAQSRQKSYADNRRRDLAFEEGDYVYLRVTPLRGVHRFXTKGKLAPRFVGPFKIVSRRGEVAYQLELPPSMAGIHDVFHVSQLKKCLRVPTEEADPGRIELQEDLTYVEKPVRILEFPTFRRRAFPLRKVPKHLWKPKASHTDPKQPFEHVDPV

SEQ ID NO: 20564 - protein, 1778 aa, Oryza sativa
  Clone ID: TF_OSC401235j.C1.p76.fg
MGVAGESMPCFKGGDYDPGTVHCSELCYARGIVTTPFRGIVVVLRHMMPRHSPRNLIEVLGFVRELRLMAFEVGYEVAPEYRQIPHDPDEEKCRVRVTLASDSEDLPSFKFEAGGRSYCHACQEVALVAIGELRQHFEEELDSSAFQYHPHKPHGQDYGTYTCPDGEESATLVHVVHMLSAMDAVSVERDKAAHDRENWNRGKICKLKSKVHRLQKELAELKGEMPPPTSKLRLTARKRTCPPPRLQLASKIRAMGDAVPVRAEPVIDIISDEEEEEDPEEREPATPEEEDSSLRSDASCCLHHGWDMVNTRTGTGSGSGSGANNNEGEPTLAQILAQQTQLINLLVQQAQNQQGNNQNQNPPPPPQNKLADFLRVRPPTFSSTTNPVEAGDWLHAVEKKLDLIQCTEQEKVSFASHQLHGPAAEWWDHFRQGRAGGEPITWQEFTAAFKKTHIPSGVVALKKREFRALNQGSRSVTKYLHDFNRLACYAPEDVCTDEERQEKFLEGLNDELSYALMSTDFRDFQQLVDKAIRQEDKAAQFKAQQGSNQRPRLVTGPQVPSYPQGGSSSVVRPQRQFYNNNTGNRGNDNRNVVARPAATPVQNQPVRREQGSKPVICFNCGDPGHYADKCPKPRRVKNAPAPNNFNVPAPKARVNHVAAAEAQNAPDVVLGTFPVNSIPATVLFDSGATHSFLSKSFAIKHGMEVVSLGRPLLVNTPGNQAFSTRYCPSVTIEIEEVPFPSSLILLESKDLDVILGMDWLSRHRGVIDCANRKVTLTSSNGETVSFFASSPKSHGEVLNQVALQEIPIVQDYPDVFPEDLPGMPPKRDIEFRIDLVPGTNPIHKRPYRMAANELAEVKKQVDDLLQKGYIRPSTSPWGAPVIFVEKKDHTQRMCVDYRALNEVTIKNKYPLPRIDDLFDQLEGATVFSKIDLRSGYHQLRIREEDIPKTAFTTRYGLFECTVMSFGLTNAPAFFMNLMNKVFMEYLDKFVVVFIDDILIYSKTKEEHEEHLRLALEKLREHQLYAKFSKCEFWLSEVKFLGHVISSGGVAVDPSNVESVLSWKQPKTVSEIRSFLGLAGYYRRFIENFSKIARPMTRLLQKDVKYKWTEDCEQSFQELKKRLVTAPVLILPDSRKGFQVYCDASRHGLGCVLMQEGKVVAYASRQLCPHENNYPTHDLELAAVVHALKIWRHYLFGNRTEIYTDHKSLKYIFTQPDLNMRQRRWLELIKDYDMEIHYHPGKANVVADALSRKSYCNMSEGRCLPWELCQEFERLNLGIVSKGFVATLEAKPTLFDQIREAQMNDPDIQEIKKNMRRGKAIGFVEDEQGTVWLGERICVPENKELKNTIMKEAHETLYSIHPGSTKMYQDLKLQFWWASMRREIAEYVALCDVCQRVKAEHQKPAGLLQPLKIPEWKWEEIGMDFITGLPRTSAGHDSIWVVVDRLTKVAQFIPIKTTYTGHKLAELYMARVVCLHGVPKKIVSDRGSQFTSKFWQKLQSELGTRLNFSTAYHPQTDGQTERVNQILEDMLRACVLDFGGSWDKNLPYAEFSYNNSYQASLQMSPNEALYGRKCRTPLLWDQTGERQVFGTDILREAEEKMKIIQERLRVAQSRQKSYADNRRRDLAFEEGDYVYLRVTPLRGVHRFQTKGKLAPRFVGPFKIVSRRGEVAYQLELPPSMAGIHDVFHVSQLKKCLRVPTEEADPGRIELQEDLTYVEKPVRILEVSERNTRNRVIRFCKVQWSNHSEEESTWEREDELKSAHPHLFSSSSESRGRDSV

SEQ ID NO: 20565 - protein, 1691 aa, Oryza sativa
  Clone ID: TF_OSC401235j.C1.p80.fg
MGVAGESMPCFKGGDYDPGKVHCGELCYARDIVTIPFRDTVVVLRHMMPHRSPRNLIKVLGFVRELRLMAFEVGYEVAPEYRQIPHDPDEEKCRVRATLASDSEDLPSFKFEAGGRSYSHACQEVALVAIGELRQHFEEELDSSAFQYHPHKPHGQDYGSYTCPDGEESATLMHVVHMLNAMDTVGVEREKAAHDRENWNRDKICKLKSKVNRLQKELAELKGETPPPTSKLRLTARKRTCLPPRLQLASKIRVMGEAVPDRAEPVIDIISDEEEEEDPEEREPATPEEEDSSLRSDARRNYTTNPVEAGDWLHAVEKKLDLIQCTEQEKVSFASHQLHGPAAEWWDHFRQGRAGGEPITWQEFTAAFKKTHIPTGVVALKKREFRALNQGSRSVTEYLHDFNRLARYAPEDVHTDEERQEKFLEGLNDELSYTLMSTEFRDFQQLVDKAIRQEDKYNRMEQKKRRAAQFKAQQGSNQRPRLIPGPQVPSYPQGGSSSVVRPQRQFYNNNTGNRGNENRNVVARPAATPVQNQPVRKEQGSKPVICFNCGDPGHYADKCPKPRHVKNVPVPNNSNVPAPKARVNHVAAAEAQNAPDVVLGTFPVNSIPATVLFDSGATHSFLSKSFATKHGMEVVSLGRPLLVNTPGNQVFSTRYCPSVTIEIEGVPFPSSLILLESKDLDVILGMDWLSRHRGVIDCANRKVTLTNSNGETVSFFASSPKSHGVVLNQVALQEIPIVQDYPDVFPEDLPGMPPKRDIEFRIDLVPGTNPIHKRPYRMAANELAEVKKQVDDLLQKGYIRPSTSPWGAPVIFVEKKDHTQRMCVDYRALNEVTIKNKYPLPRIDDLFDQLKGATVFSKIDLRSGYHQLRIREEDIPKTAFTTRYGLFECTVMSFGLTNAPAFFMNLMNKVFMEYLDKFVVVFIDDILIYSKTKEEHKEHLRLALEKLREHQLYAKFSKCEFWLSEVKFLGHVISSGGVAVDPSNVESVLSWKQPKTVSEVRSFLGLAGYYRRFIENFSKIARPMTRLLQKEVKYKWTEDCEQSFQELKKRLVTAPVLILPDSRKGFQVYCDASRLGLGCVLMQEGKVVAYASRQLRPHENNYPTHDLELAAVVHALKIWRHYLYGNRTEVYTDHKSLKYIFTQPDLNMRQRRWLELIKDYDMEIHYHPGKANVVADALSRKSYCNMSEGRCLPWELCQEFEKLNLGIVSKGFVAALEAKPTLFDQIREAQVNDPYIQEIKKNMRRGKAIGFVEDEQGTVWLGERICVPENKELKDTIMKEAHETLYSIHPGSTKMYQDLKQQFWWASMRREIAEYVALCDVCQRVKAEHQKPAGLLQPLKIPEWKWEEIGMDFITGLPRTSAGHDSIWVVVDRLTKVAHFIPVKTTYTGHKLAELYMARVVCLHGVPKKIVSDRGSQFTSKFWQKLQSELGTRLNFSTAYHPQTDGQTERVNQILEDMLRACVLDFGGSWDKNLPYAEFSYNNSYQASLQMSPNEALYGRKCRTPLLWDQTGERQVFGTDILREAEEKVKIIQERLRVAQSCQKSYADNRRRDLVFEEGDYVYLRVTPLRGVHRFQTKGKLAPRFVGPFKIVSRRGEVAYQLELPPSMAGIHDVFHVSQLKKCLRVPTEEADPDCIELQEDLTYVEKPVRILEFPTFRRRAFPLRKVPKRLWKLKASHTDPKQPFEHVDPV

SEQ ID NO: 20566 - protein, 1244 aa, Oryza sativa
  Clone ID: TF_OSC401468j.C1.p1.fg
MEIPGVTSWYQSHLDLRISQMMPPHSPRNLIEVLGFVRELRLMAFEVGYEVAPEYRQISHDPDEEKCRVRVTLASDSEDLPSFKFEVGGRSYCHACQEVALVAIGELRQHFEEELDSSAFQYHPHKAHGQDYGTYTCPDGEESATLMHVVHMLSAMDAVSVERDKAAHDRENWNQGKICKLKSKVHRLQKELAELKGETPPPISKLRLTARKRTCPPPRLQLASKIRVMGEAMPNRAEPVIDIISDEEEEEDHKEREPATPEEEDSSFRSDARRNCCLHHWWDMVNTRTGSGSGSGSGATNNGGEPTLAQILAQQTQLINLLVQQAQNQQANNQNQNPPPPPQNKLADFLRVRPPTFSSTTNPVEAGDWLHAVEKKLDLIQCTEQEKVSFASHQLHGPAAEWWDHFRQGRAGGEPITWQEFTAAFKKTHIPSGVVALKKREFRALNQGSRSVTEYLHDFNRLARYAPEDVRTDEERQEKFLEGLNDELSYALMATDFRDFQQLVDKAIRQEDKYNRIEQKKRRAAQFKAQQGSNQRPRLITGPQAPSYPQGGSSSVARPQRQFYNNNTSNRGNDNRNMVACPAATPVQNQPVRKEQGSKPVICFNCGDPGHYADKCPKPRRVKNAPVPNNPNVPAPKARVNHVAAAEAQNAPDVVLGTFPVNSIPATVLFDSGATHSFLSKSFASKHGMEVVSLGRPLLVNTPGNQVFSTQYCPSVTIEIEEVPFPSSLILLESKDLDVILGMDWLSRHRGVIDCANRKVTLTNSNGETVSFFASSPKSHGVVLNQVALQEIPIVQDYPDVFPEDLPGMPPKRDIEFRIDLVPGTNPIHKRPYRMAANELAEVKKQVDDLLQKGYIRPSTSPWGAPVIFVEKKDHTQRMCVDYRALNEVTIKNKYPLPRIDDLFDQLEGATVFSKIDLHSGYHQLRIREEDIPKTAFTTRYGLFECTVMSFGLTNAPAFFMNLMNKVFMEYLDKFVVVFIDDILIYSKTKEEHEEHLRLALEKLREHQLYAKFSKCEFWLSEVKFLGHVISSGGVAVDPSNVESVLSWKQPKTVSEIRSFLGLAGYYRRFIENFSKIARPMTRLLQKEVKYKWTEDCERSFQELKKRLVTAPVLILPDTRKGFQVYCDASRLGLGCVLMQEGKVVAYASRQLRPHENNYPTHDLELAAVVHALKIWRHYLFGNRTEIYTDHKSLKYIFTQPDLNMRQRRWLELIKDYDMEIHYHPGKANVVADALSRMSRPAIH

SEQ ID NO: 20567 - protein, 1710 aa, Oryza sativa
  Clone ID: TF_OSC401768j.C1.p3.fg
MADSDSPATWELSLPQSEGYVIELHRMLRRLRYPGFPSYRVRQCGSVWEARVEIHPRVPSELDYSFQTRHHRDLPETAMQDAAREAFLRLSSIHRAELVSTEFAHHLFREEGNSVCTVQDTPCCYNPMVTRLSRWAEAVDDYYEEALLEIDDHQRRVGELETEVTDLTAQQLQLEEEHQAWGSEIDSLKAQLQVHGDQFQQLSDQYNDHRGMMDTLEEQLRESQEHVSQLEEQLRAAKISTTGASTSTAVGRDRYFFLTPPYPPAFHALLGEASMLATESAPYLVDPTATQPPVPELVHTPLIPTPSPQLGSSLETPIQVDSETEGTDTEPEIEPDITDPSEDEAPVPRITFLGGPRTLSTARKSTRPPGKRPKPDPEATTSGPWGLSNDETQTPDLNTLAGVMATQTQLLQAIANNQGNRGGSSFGEFMRTKPPTFATADEPMEAKDWLRIIEKKLTLVRVREADKVIFAVNQLERPAGDWWDTYKEAREDGAGEPTWEEFTAAFRENFVPAAVMRMKKNEFRRLRQGNTTVQEYLNKFTQLARYAIGDLADEEEKIDKFIEGLNDELRGPMIGQDHESFQSLINKVVRLENDQRTVEHNRKRRLAMSHPPQTVPQRLKGAPPSGWKPPVMVTNRPAALSNFNRPVALQNRTPTPTLAAPGAKKNVDCFNCGEYGHYANNCPHPRKTPVRTGANAMTVRGTTTPAIGRGLFKTPQSNRTATGFGRGQVNHVRAEEAQEDQGVLMGMFSINSTPVKVLFDSGASHSFISLKASQKHNLTLVGLRKPMIVHSPGGEITMSHACIDVPIRLRDVVFPSNLMVLIPQTLDVILGMDWLAKHRGVIDCRRREVTLTTPWGSDMRATMDQEPRLTERAGGIFTMLPLKGMPVVQRFPDVFPEDLPGMPPDRDVEFIIDLIPGTAPISKRPYRMPVNELEELKRQIRELQEKGFVRPSSSPWGAPVLFVKKKDGSMRMCVDYRSLNEVTIKNKYPLPRIDDLFDQLKGAKIRTEDIPKTAFSTRYGLYEFTVMSFGLTNAPAYFMNLMNKVFMDYLDKFVVVFIDDILIYSKDEEEHAEHLRLVLQKLRKHKLYAKFSKCEFWLKEVAFLGHVISAGGVAVDPAKVEAVTEWKAPKSVTEIRSFLGLAGYYRRFIEGFSKIARPMTQLLKKKKKFVWSEQCQESFEQLKEKLTSAPILVLPDIRKDFVIYCDASRQGLGGVLMQDRKVVAYASRQLRPHEENYPTHDLELAAVVHALKIWRHYLIGNHCDIYTDHKSLKYIFTQSDLNLRQRRWLELIKDYDLEVHYHPGKANVVADALSRKSHCNHLRMEGMVPELREEIAQLNLHIVPRGQINTLDIQPLLRTQIEEAQKDNEEVRELKERLAAGRAKEFSTDEKDVLWYKKRIYVPEQGGLRGLILKEAHESAYSLHPGSTKMYQDLKEGYWWPNMKRDVAEYVALCDVCQKVKAEHQRPAGLLQPLRIPEWKWDEIGMDFIVGLPKTATGYDSIWVIVDRLTKTARFIPVKTNYSSAKLAELYMTRIVCLHGVPKKIISDRGTQFTSHFWEKVHEALGSYLAFSTAYHPQTDGQTERTNQVLEDMLRACALDFSKDWERCLPYAEFSYNNSFQASLKMSPNEALFGRRCRTPLMWSETGERAVFGPDIIQEAEEKVRLIRDRLKVAQSRQKSYADTRRRNLEFKEGDYVYLKVSPMRGNKKV

SEQ ID NO: 20568 - protein, 329 aa, Oryza sativa
  Clone ID: TF_OSC401836j.C1.p3.gm
MDLLLNGGIIFAKAGLKESLLRGRSSRPLSRRRTYQREKFLEGLNDELSYALMSTDFRDFQQLVDKAIRQEDKYNRMEQKKRRAAQFKAQQGSNQRPRLVTGPQAPSYPQVGSSSVVRPQRQFYNNNTGNRGNDNRNMVARPAATSAQNQPVRKEQGSKPVICFNCGDPGHYADKCPKPRRVKNAPAPNNSNVPVPKARVNHVAAVEAQNAPDVVLAFFMNLMNKVFMEYLDKFVVVFIDDILIYSKTKEEHEEHLRLALEKLREHQLYAKFSKSAARLDGDGGAPVVGGEGERAAEIPLTTAHLTAATANGGDGGGDGAAQLEIAGDG

SEQ ID NO: 20569 - protein, 763 aa, Oryza sativa
  unsure (1)..(763): unsure at all Xaa locations
  Clone ID: TF_OSC420873j.C1.p1.np
KVGCEHMVLMVVLMTIKDRFASYCCETFIVPTTSQRGQRLYLLYSVIHYSAPDXEVARSPWGSLGSPCLVLKGVIMIQERSTVMGYVVRGVLSRLLSEMPPHSPRNLIEVLGFVRELRLMAFEVGYEVAPEYRQISHDPDEEKCRVRVTLASDREDLPSIKFEAGGRSYCHACQEAALVAIGELRQRFEEELDSSAFQYHPHKPHGQDYGTYICPDGEESATLMHVVHMLSAMDAVSVERDKAAHDRENWNRGKICKLESKVYRLQKELAELKGETPPPTPKLRLVARKRTCPPPRLQLASKIRVMGEAVPDRAEPVIDIISDEEEEEDPEEREPATPEEEDPSLRSDARRRAEGELITWQEFTTAFKKTHIPSGVVALKKREFRALNQGSRSVTEYLHDVNRLARYAPEDVRTDEERQEKFLEGLNDELSYALMSTDFRDFQQLVDKAIRQEDKYNRMEQKKRRAAQFKAQQGSNQRPRLVTGPQAPSYPQGGSSSVVRPQRQFYNNNTGNRGNDNRNMVARPAATPAQNQPVRKEQGSKPVICFNCGDPGHYADKCPKPRHVKNAPAPNNSNVLAPKARVNHVAAAEAQNAPDVVLGTFPVNSIATVLFDSGATHSFLSKSFASKHGMEVVSLGRPLLVNTPGNQVFSTXYCPSVTIEIEEVLFPSSLILLESKDLDVILGMDWLSRHRGVIDCANRKVTLTSSNWETVSFFVSSPKYHGVNLNQVALQEIPIVQDYPDVFPEDLPGMPPKRDIEFRIDLV

SEQ ID NO: 20570 - protein, 1776 aa, Oryza sativa
  Clone ID: TF_OSC900401j.C1.p12.fg
MADSDSPATWELSLPQSEGYVIELHRMLRRLRYPGFPSYRVRQCGSVWEARVEIHPRVPSELDYSFQTRHHRDLPETAMQDAAREAFLRLSSIHRAELASTEFAHHPFREEGNSVCTVQDTPCCYNPMVTRLSRWAEAVDDYYEEALLEIDDHQRRVGELETEVTDLTAQQLQLEEEHQAWGSEIDSLKAQLQVHGDQFQQLSDQYNDRRGMMDTLEEQLRESQEHVSQLEEQLRAAKISTTGASTSTAVGRDRYFFLTPPYPPAFHALLGEASMLATESAPYLVDPTATQPPVPELVHTPLIPTPSPQLGSNLETPIQVDSETEGTDTEPEIEPDITDPSEDEAPVPCITFLGGPRTLSTARKSTRPPGKRPKPDPEATTSEPWGLRLFMMASRRRATTSNDETQTPDLNALAGIMATQTQLLQAIASNQGNRGGSSFGEFMRTKPPTFATADEPMEAEDWLRIIEKKLTLVRVREADKVIFAVNQLEGPAGDWWDTYKGAREDGAGEPTWEEFTAAFRENFVPAAVMRMKKNEFRRLRQGNTTVQEYLNKFTQLARYAIGDLADEEEKIDKFIEGLNDELRGPMIGQDHESFQSLINKVVRLENDQRTVEHNRKRRLAMSRPPQTVPQRLKEATPSGWKPPVMVTNRPAALSNFNRPVALQNRTPTPTLAAPGAKKNVDCFNCGEYGHYANNCPHPRKTPVRTGANAMTVRSTTTPAVGRGLFKTPQSNRTTTGFGRGQVNHVRAEEAQEDQGVLMGMFSINSTPVKVLFDSGASHSFISLKASQKHNLTLVGLRKPMIVHSPGGEITVSHACIDVPIRLRDVVFPSNLMVLIPQTLDVILGMDWLAKHRGVIDCRRREVTLTTPWGSDMRATMDQDPRLTERAGGIFTMLPLKGMPVVQRFPDVFPEDLPGMPPDRDIEFIIDLIPGTAPISKRPYRMPVNELEELKKQIKELQEKGFVRPSSSPWGAPVLFVKKKDGSMRMCVDYRSLNEVTIKNKYPLPRIDDLFDQLKGAKVFSKIDLRSGYHQLKIRTEDIPKTAFSTRYGLYEFTVMSFGLTNAPAYFMNLMNKVFMDYLDKFVVVFIDDILIYSKDEEEHAEHLRLVFQKLRKHKLYAKFSKCEFWLKEVAFLGHVISAGGVAVDPAKVEAVTEWKAPKSVTEIRSFLGLAGYYRRFIEGFSKIARPMTQLLKKEKKFVWSEQCQESFEQLKEKLTSAPILVLPDIRKDFVIYCDASRQGLGGVLMQDGKVVAYASRQLRPHEENYPTHDLELAAVVHALKIWRHYLIGNHCDIYTDHKSLKYIFTQSDLNLRQRRWLELIKDYDLEVHYHPGKANVVADALSRKSHCNHLRMEGMVPKLREEIAQLNLHIVPRGQINTLDIQPLLRTQIEEVQKDNKEVREKVKAEHQRPAGLLQPLRIPEWKWDEIGMDFIVGLPKTATGYDSIWVIVDRLTKTARFIPVKTNYSSAKLAELYMTRIVCLHGIPKRIISDRGTQFTSHFWEKVHEALGSYLAFSTAYHPQTDGQTERTNQILEDMLRACALDFSKDWERCLPYAEFSYNNSFQASLKMSPNEALFGRRCRTPLMWSETGERAVFGPDIIQEAEEKVRLIRDRLKVAQSRQKNYADTRRRDLEFKEGDYVYLKVSPMRGTKRFKVKGKLAPRYVGPFQIIARRGEVAYQLQLPENIADVHPVFHVSQLKKCLRVPEEQAPLEEIHISNDLTYPEHPIRILDEAEKRTRSKVWRMYKVQWSNHTEDEATWESEEFLRTEYPHLFENR

SEQ ID NO: 20571 - protein, 523 aa, Oryza sativa
  Clone ID: TF_OSC19735j.C1.p1.fg
MADNEKGNKVRSQDIGTSSSRVNEAPDTSCVAVVQHLINQNKLLIEILQQHRMPILNPSQIQPQVQLEAVQALTPQVSAPPTSQKAPHAMPHVDPKEASIICFMCDEQGHYARNCPQQKRKAPMRTEDEVRKMIITSTEWPPPGMTKCQRRNSSRGAQQLTEHLLANGGRVSGSEDSDQVSSDDEDEKSPQGFNQNKIELKACSRCGEIGHVASSCATTCVHCEEDHPPDRSHVPAGMITLRKREFRYLKQEDLTVTEYLHEFHRLAHYAPEDVENDEDKQEKYLQGLKDEITVQLLLEEYEDFEKLVDKAIQLESEHNRMKNCKRRIVSIPVFPCGNQRQRTEPLQITGSSVAHQEFPPQEDGHNADNNISNTNDDDTTNNHASCPISDHSNQACNVNIIHQGVDDSINDGTQNDNPSNCDSEKDSNGDSNYGTTDANVSKDFQPPIPTPSQNDRPQTDSSAKKTLICYNCKGPGHYSRDCLQPRQSRSPHYRQFTRSRHPNRIVVTGANAVPVRPRVNQNP

SEQ ID NO: 20572 - protein, 364 aa, Oryza sativa
  unsure (1)..(364): unsure at all Xaa locations
  Clone ID: TF_OSC25205j.C1.p1.np
VKWQRVGALLLGSVLPACPGGSGRRGIGSVLLSMARMGWKLCHVFRLYTVVVFSRSRQAGIRAISTVGXAKWIKPKVINKTICESSFFLLPLMLFAKGLPLLPSSDFNXYXMVRSVKKKTSSVVCPPEDCRICERSQESGHWYLKLPVNEAQDTSCAAVVQHLINQNKLLIEILQPSDANFEPESEGPSCHATCXPGPSCHATCXPKRSKYHLFMCDEQGHYARNCPQQKRKAPMRTEGEVRKMIITSTEWPPPGMTRRQRRNTFRGAPQLTEHLLANGGRVSDSEDSDQVSSEDEDEKSPQGFNQDKMERKACSRCGEIGHVASSCASTCVHCEEDHPPDRCPTSRITCLFCEGTDHVPKCQF

SEQ ID NO: 20573 - protein, 212 aa, Oryza sativa
  Clone ID: TF_OSC11782j.C1.p1.fg
FPNDLCNNCKRPGHFARDCPNVALCHACGLPGHIAAECSSKDLCWNCKEPGHMANSCPNEGICRNCGKSGHIARECSAPPMLPGEMRLCSNCYKPGHLAAECTNEKACNNCRKSGHLARNCPNEPVCNLCNVSGHLARECPKSDAINERGGPPPFRGGYSDVVCRACNQVGHMSRDCMAGAFMICHNCGGRGHMAYECPSGRLMDRFPPRRF

SEQ ID NO: 20574 - protein, 247 aa, Oryza sativa
  Clone ID: TF_OSC400622j.C1.p112.fg
MSSRSPPPKDRRIRTERTSYRDAPYRRDSRRGPSRFPNDLCNNCKRPGHFARDCPNVALCHACGLPGHIAAECSSKDLCWNCKEPGHMANSCPNEGICRNCGKSGHIARECSAPPMLPGEMRLCSNCYKPGHLAAECTNEKACNNCRKSGHLARNCPNEPVCNLCNVSGHLARECPKSDAINERGGPPPFRGGYSDVVCRACNQVGHMSRDCMAGAFMICHNCGGRGHMAYECPSGRLMDRFPPRRF

SEQ ID NO: 20575 - protein, 320 aa, Oryza sativa
  Clone ID: TF_OSC5579j.C1.p1.gm
EENESETQKLPEYSTSDSEDFWEEELFPELIKPLPDDGGMRLKNTFEEEFAEDTWCKLSKKVALNTSQSVVSLASFKDYSIPLAGVHQRSGEQVSGTSAFDVLHREKAAIRHCDFTMAGFADALRPDKFTGVHFKRWQIRVTLWLTAMKCFWEYSVEGLIASLDVEEKARKKDDASKGDGGQSSANVVHKAQNKSKGKYKAQQTTNFKKQKKNNNNPNQDEMTCFVCGQVGHLARKCPQRKGMKAPAGQTSKSANVTIGNTGDGSGYGNLPTVARGSTVLMGNGSHASVHGVGTVDLKFTSGKIVQLKNVQHVPSIDRNL

SEQ ID NO: 20576 - protein, 840 aa, Oryza sativa
  Clone ID: TF_OSC407628j.C1.p7.fg
MDISRTNEGYTSCGPVVEMSWHRAGVLLLGAQSCLPVPEVPAVGGIGSVLLSMARMGWELCHVFRPYTVVNKPNIHHNSKRLRSVKVLSLVSNLSLPFVFPLSLSKPLQQMADNEKGNKVRSQDIGTSSSRVNEAPDTSCVTLVQHLINQNRLLIEILQQHQTPILNLSQIQPQVQLEAVQALTPQVSMPPASQKTDGGVPHVDSKEASIICFMCDEQGHYARNCPQQKGKTPMRTEDEVRKMIITSTEWPPPGMTKRQRRNTFRGAPQLTEHLLANGGRVSDSEDSDQVSSDDEDEKSPQDCQFSFLLTKKMANQPASSNGEKHQGNTNPRQDYSFSLTPVPGQRNQNEKRKCRVREDICCFNCQGMGHFADKCPKPRNIAASTSVHATPCNQKLAPQRIVIHASRSSPIARVTTAPTPASALPQGVNAQFQPQPPVDKTEASIGIVPLDVPAQQPRNQNWNNPAGATNVQVPTVQQQCKLSEFLKIETPTFAIAVEPMEASDWLRTVEKKLGLIQCTDQERVVFATHQLVGLASEWWDSYEASRPEGHTITWDEFSSVFKRSHVPAGMITLRKREFRYLKQEDLTVTEYLHEFHRLAHYAPEDVENDEDKQEKYLQGLKDEIAVQLLLEEYEDFEKLNCKRRIVSIPVFPCGNQRQRTEPLQITGSSVAHQEFPPQEDGHNADNNISNTNDDDTTNNHASCPISDHSNQACNVNIIHQGVDDSINDGTQNDNPSNCDSEKDSNGDSNYGTTDANVSKDFQPPIPTPSQNDRPQTDSSAKKTLICYNCKGPGHYSRDCLQPRQSRPPHYRQFTRSRHPNRIVVTGANAVPVRPRVNQNP

SEQ ID NO: 20577 - protein, 863 aa, Oryza sativa
  Clone ID: TF_OSC900017j.C1.p25.fg
MADNEKGNKVRSQDIGTSSSRVNEAPDTSCVTLVQHLINQNRLLIEILQQHQTPILNLSQIQAQVQLEAVQSLTPQVSMPPASQKTHGGVPHVDSKEASIICFMCDEQGHYARECPQQKRKTPMRTEDKVRKMIITSTEWPPPGMTKRQGRNTFRGAPQLTEHLLANGGRVSDSEDSDQVSSDDEDEMERKACSRCGEIGHVASSCATTCVHCEEDHPPDRCPTSRITCFFCEGTDHVPKDCQFSFLLTKKMANQPASSNGEKHQGNTNPSQDYSFSLTPVPGQRNQNEKRKCRVREDICCFNCQGRGHFADKCPKPRNIAASTSVHATPCNQKLAPQRIVIHASRSSPIVPVATASTPASALPQGVNAQFQPQPPVDKIEASIGIVPLDVPAQQPRNQNWNNPAGATNVQVPTVQQQCKLSEFLKTEPPTFAIAVDPMEASDWLRTVEKKLGLIQCTDQERVVFATHQLVGLASEWWDSYEASRPEGHTITWDEFSSVFKRSHVPAGMITLRKREFRYLKQEDLTVTEYLHEFHRLAHYAPEDVENDEDKQEKFLQGLKDEIAVQLLLEEYEDFEKLVDKAIQLESEHNRMKNCKRRIVSIPVFPCGNQRQRTEPLQITGSSVAHQEFPPQEDGHNADNNISNTNDDDTTNNHAFCPISDHSNQACNVNIIHQGVDDSINDGTQNDNPSNCDSEKDSNGDSNYGTTDANVSKDFQPPIPTPSQNDHPQTDSSAKKTLICYNCKEPGHYSRDCLQPRQSRPPHYRQFTRSRHPNRIVVTGANAVPATTVSLAFDEPLEGSLKGSRLKYHFVTRSIHNSRSEEYLVDKVQKVIDRRYQQRCLSPGKEVGRKVIDKRNLKRTHQG

SEQ ID NO: 20578 - protein, 1018 aa, Oryza sativa
  Clone ID: TF_OSC400718j.C1.p77.fg
MAEAVKHHVSYEKKLLSLISNLLSEPRWLAGAMSEHTPPRPSCSPPPTPPRSRSPLVRPSQTPPCHNPAESPPCRGRGRGERQPFAAQPRVVRESSAAVHYPVLTRTNYEECALFMTVNQQAQGLWHAVEPYEDEEIEYRDDRLVLAAILRVVPPEMLRSLSTKRTVKSAWEAIKTVCVGTRRVREANEQLLRREFADARFKDGENIDDFSMRIFGIANSIRTLGGDLPEIDVIAISIETLLDIRDLSIKEVTVRLRSVEKCKAKPKEVVDSGGRLMLTEEQWLARLKNREQGGESSGTTPGAAANNSGKKRGNRRRRGRGQEHPGDKCHNCSKMGHWAKDCRSKAKKAEAHIATKDDDEPTLLMARACLVQRRCPPAEPTSKITPVLAHLDGDPDPADLWYLDTGVTNHMTGARSVFSELNTAVTGSVVTIEGYGTILFACKNGEHRGLTGVYYIPRLTVNLISLGQLDENGCESLGDMVRGLPLIDHVDQVCDSYLAGKQRCAPFPAHAKHFAEHLLDLVHGYLCGPILPAMLGGNHYFLLLVDDVSRYIWLTLLASKDQAPAAIKRFQAAAELESGCKLKVLRTDRGEETASFKEAEQHKSWRHAMMEEMESITHNKTWVLVDPPPSHRPIRLKWVYKVKQDERGVIVKYKARLIAKGYIQQAGIDFEEVFAPVARMESVRLLLAVAAHAGWGVHHMDVKSAFLNGELAEEVQGDAKLIVGVYVDDLIITGANQANIGEFKKEMCNIFKMSDLRLLSYYLGLESAYADKLLYKSGMGDCNSCATPMEIHLKLSKASSSPPVSATSYRSIIGGLRYLVNTRPDIAHAVGYLSRFMEEPHEDHQAAVKHVLRYIGRTRHHGVHYARGKGGWLELHGFSDSDMAGDLDTRRSTSGVLLPRLQSCLLAISETEGGHTIILARLLSDLLDSEPGAPEIMVDNKSAIAITKNPVFHDRSKHIDTRYHFIRECVENGKIVINYIRIEEQLAAVLMKPLGRVPFQELCNGIGIVELKGDGDKN

SEQ ID NO: 20579 - protein, 666 aa, Oryza sativa
  unsure (1)..(666): unsure at all Xaa locations
  Clone ID: TF_OSC401348j.C1.p24.np
MGPQIERVVDVSISPPNDKELSFKEEEKCIHLNAQVTNVLFSVLSEDVFKTIMPLEDAHLIWTTLKERYDKSKCDDVLFMEEPLEERSTSSPNCEEPQVTTFDDQDNHPTSTLSSTHDYIEGNELVSKVDDRPILPLDSNNTDNEIVILHCVVDSCISPSTKYVCEDDMDKCSTSYSTCGTNLLKEEVNERHWTSEESTSSRCSSSISEDYACFMGEDGDSEFDHLSKKDITMVIKLMEAIEKQQACTIKKNGEIVSLTEELKKLKNFHSSXTMRYEKLENEFACATNSIACVASLEKQNQELKSQLDEITNKYVDLQERHDELLCSHENLVDSHAMLEVSHEVIIAMVKSYEPHVQVDLTCTNPCCSQANISPSTICDLDCVGKREKQIDHGLVCIAQPSQDNREGMVKNLEEGSTVACTKIHQRDSKSINAYTKGRNQKMIKNSITCFKCKKVRHHVRNCPWKKGNKLIKKKDIPHIKCFKCTEVGHFASRSPCTLDERCKTSSERQKQTEKYISKSRLCYNCWAKGHIGKNSPMGNIPKPSLSFDYNLLRNAKNDICATRMICSPHTSTKAIWVSKSLVTNLYGPNVVGDQNVLKFYCGTKGFGKTARFAIKLIYHHAIDPGDPKKSTSTIRMXTVIKELNMFVMEKLSFSGLESRKRFHQAH

SEQ ID NO: 20580 - protein, 580 aa, Oryza sativa
  Clone ID: TF_OSC400390j.C1.p65.fg
MADNEKGNKVRSQDIGTSSSRVNEAPDTSCVAVVQHLINQNKLLIEILQQHRMPILNPSQMQPQVQLEAVQALTPQVSAPPTSQKAPHAMPHVDPKEASIICFMCDEQGHYARNCPQQKRKAPMRTEDEVRKMIITSTEWPPPGMTKHQRRNSFRGAQQLTEHLLANGGRVSDSEDSDQVSSDDEDEVELKACPRCGEIGHVASSCASTCVHCEEDHLPDRCPTSRITCFFCEGTDHVPKDCQFSFLLTKKMANQPASSNGEKHQGNTNPRQDHRFSLTPVPGQRNRNEKRKCRVREDICCFNCQGMGHFADKCPKPRNIAAGTSVHATPCNQKLAPQRIVIHASRSSPIARVATAPIPMNALPQGVNAQFQPQPPADKTGASICVVPLEVPIQQLRNQVQDEEPELKKGIIPKTVPNQGKIDLHITANLHEADIPIVLWSLEQTPYPFHRKAASQRTSSSPEASAIHIKEYHLLDISRKKIDKKRLAKMFSSMKEVGRKVDSEDMNHEKFWNGSITALPQPSLSQPKGAPWSKSGEEKIPSATGGQAKQFRVVKFCWKFVKTQRKKSDKKRRPPNLSSC

SEQ ID NO: 20581 - protein, 750 aa, Oryza sativa
  Clone ID: TF_OSC13329j.C1.p2.np
CGCTHYSLAPPPPRIPPHPAVPARIKERGITPRVSLSRFPLFSLSLSLGFVRIHPAKFAGVFNGARDLRARFPLSPAALSPSRCYKIVPRASLFRFRRSPLALAVGFVPAPCSSLSAVAAELRFAAVVAPVLLPTRRHLHRLRRVVADPVRRSASPADRRSTVDIGIPNRAAAFLHSGRRFRRPRCPGVSRGPPSRFPLLSALSGAAPPRRWSPAVTIGARARRSRRPCRRGRLRAPRGCQVGPAVSRPRPRVRLTRGTHGADRRQPRAPGPPWTERLTRGPHFPWTRNEGYTSCGPMADNEKGNKVRSQDIGTSSSRVNEAPDTSCVAVVQHLINQNKLLIEILQQHRMPILNPSQMQPQVQLEAVQALTPQVSAPPTSQKAPHAMPHVDPKEASIICFMCDEQGHYARNCPQQKRKAPMRTEDEVRKMIITSTEWPPPGMTKHQRRNSFRGAQQLTEHLLANGGRVSDSEDSDQVSSDDEDKIELKACSRCGEIGHVASSCASTCVHCDEDKIELKACSRCGEIGHVASSCASTCVHCEEDHPPDRCPTSRITCFLCEGTDHVPKDCQFSFLLTKKMANQPASSNGEKHQGNTNPRQDSSFSLTPVPGQRNRNEKRKCRVREDICCFNCQGMGHFADKCPKPRNVAAGTSVHATPCNQKLAPQRIVIHASRSSPIARVATTPIPMSALPQGVNAQFQPQQRIVVDGRSCVSPRPTPGLAKGNQPPEGDTKQKTVIRFNQQSEGSFACR

SEQ ID NO: 20582 - protein, 1235 aa, Oryza sativa
  Clone ID: TF_OSC414006j.C1.p3.fg
MAGFADALRPDKFTGVHFKRWQIRVTLWLTAMKCFWVSTGKPEGVLTAEQQKQFEEATTLFVGCILSVLGDRLVEVYMHMTDAKELWDALNTKFGATDASNDLYIMEQFHDYKMADNHSVVEQAHEIQTMAKELELLKCVLPDKFVAGCIIAKLPPSWRSFGTALKHKRQEYSVEGLIASLDVEEKAREKDAASKGDGGQSSANVVHKAQNKSKEKYKAQQTTNFKKQKKNNNNPNQDERTCFVCGQVGHLARKCPHRKGMKAPAGQTSKSANVTIGNTGDGSGYGRTGFHRPNGEWVTCFCSWCWHGRSEVYFGKDRAAEEHAACPFYRQESCYECGGLFRFSLSDFCNKYVNHICGSVDDEANVWHSRLCHINFGLMSRLSSMCLIPKFFIVKGSKCHSCVQSKQPRKPHKAAEERNLAPLELLHSDLCEMNGVLTKGGKRYFMTLIDDATRFCYVYLLKTKDEALDYFKIYKAEVENQLDRKIKRLRSDRGGEFFSNEFDLFCEEHGIIHERTPPYSPESNGIAERKNRTLTDLVNAMLDTAGLPKAWWGEALLTSNHVLNRVPNRNKDKTPYEIWIGRKPSLSYLRTWGCLAKVNVPITKKRKLGPKTVDCVFLGYAHHSIAYRFLIVKSEVPDMHVGTIMESRDATFLESFFPMKDTHSGSNQPSEIIPSSITPPEQTEHTHELVSEEDVSEAPRRSKRQRTAKSFGDDFTVYLVDDTPKSISKAYASPDADYWKEAVRSEMDSIIANGTWEVTERPYGCKPVGCKWVFKKKLRPDGTIEKYKARLVAKGYTQKEGEDFFDTYSPVARLTTIRVLLSLAASHGLLVHQMDVKTAFLNGELDEEIYMDQPDGFVVEGQEGKVCKLLKSLYGLKQAPKQWHEKFDKTLTSAGFAVNEADKCVYYRHGGGEGVILCLYVDDILIFGTNLQVINEVKSFLSQNFDMKDLGVADVILNIKLIRGENGINLLQSHYVEKILNRFGYIDSKPSPTPYDPSLLLRKNKRIARNQLEYSQIIGSLMYLASATRPDISFAVSKLSRFTSNPGDDHWRALERVIRYLKGTVELGLHYTGYPAVLEGHSDSNWISDVDEIKATSGYVFTLGGGAVSWRSCKQTILTRSTMEAELTALDTATVEAEWLRDLLMDQPVVEKPVPAILMNCDNQTVIVKVNSSKDNMKSSRHVKRRLKSVRKLRNSGVITLDYIQTARNLADPFTKGLSRNVIDNASKEMGLRPM

SEQ ID NO: 20583 - protein, 622 aa, Oryza sativa
  Clone ID: TF_OSC13321j.C1.p1.fg
PGLEWCIPGLEIELCSRDGCSERLGLCNRMPRYKPEYLFGTEGFVQELRTMSFLIGFGIAPLYAQIPHDRDEEKCGVKVTLNSNREDIPSVMFEAGGGSYIHACQEVARIAIGELRESYNDRLADTEYRYHPRQPQGSDCGSYFEPAGIENDATTRHLVEMLWAMDETRAEIVIAAQDREDRNRGKICKLEDKVDHLEKELAALKGEAPPQKARVRLPQGRELYSSLAISWHQRFVWWKKKLPQRILRLSITTNPVEAGDWLHAIEKKLDLLQCTDQEKVSFASHQLHGPASEWWDHFRLNRTTPEPISWLEFNAAFRKTHIPSGVVSLKKKEFRSLTQGSRTVTEYLHEFNRLARYAPEEVRTDEERQERFLKGLNDELSYPLMTGDYHDFQKLVDKAIRQEDKYNRMEQKKRRIAHFKAQQGNSQRPRLTLGPQSMPQGAPRPVASPTQQQPAKREQGSKPGVCFNCGDPGHYADKCPKPRRVKVVPAQNNPSAPAAKARVNHVAAAEAQGAPDVILGTFPVNSVPATVLFDSGAMHSFLSMSFAGNQGMEVKELRRPLMVSTPSNQALSSQRSPSVRIEIQGVPFLANLILLESKDLDVILGMDWLARYKGVIDCANRK

SEQ ID NO: 20584 - protein, 305 aa, Oryza sativa
  unsure (1)..(305): unsure at all Xaa locations
  Clone ID: TF_OSC15264j.C1.p1.np
RHSPFRLHASLQPSVQSREPNEENPLNPGNCFPPSLSYHVGSRTKHAKGKKSKNQKRKAPMRTEEEVRKMTITSTEWPPAGITIPRRQRGNTFRGARQLTQHLLSHGGRVSDSEGSDQVSSDYEYESPRRLGEEEMELKACTRCGEIGHIASMCLTLCPHCEEDHPPGECPTRKVTCFLCEGTNHVPKDCQLSVLLTKTAEIQRTTLRLSHQLVSSNSNLDDIIHSTNAPPAAPDSAINHSNNTFSTNHSLHXQPQQXIVVDGRSCFSPRPTPGRAKGNQPQEGDTKQKTIIHFNQQSEGIFSCE

SEQ ID NO: 20585 - protein, 224 aa, Oryza sativa
  Clone ID: TF_OSC15276j.C1.p1.hg
MAMDYWDFQQLMDKAIRQEDKYNRMEQKKRRAAHFKAQQGSSQRPHIALGPQAAPYPQGGSSSVARPQRQFYNNNTGNRSNDNRNMVTRPVAAPTQNHPVRKEQGSKPGVCFNCGDPGHYADKCPKPRRVKNAPVQNNSNAPAPKARVNHVAAAEAQNTPDVVLEEECFNEVAKQPGPHVSDSAAREAEAAGEQRRPTAFVAAYWLHHMWASFCWDLGDVSGAM

SEQ ID NO: 20586 - protein, 679 aa, Oryza sativa
  Clone ID: TF_OSC15283j.C1.p3.fg
MGVAGESIASGFEGEIMIQERCTVMPPHSPRNLIKVLGFVRELRLMAFEYHPHKPHGQDYGTYTYPDGEESATLMQAVHMLSSMYAVSVERDKAAHDRENWNRGKICKLESKVYRLQKELAELKGETPPPTPKLHLTARKRTCPPPRLQLASKLRVMGDAVPDRAEPVIHVLSDEEEEEYPEERMVNTRTGSGSGAANNGGDSTLAQILAQQTQLINLLVQQAQNQQANNQNQNQPPPPQNKLADFLRLHGPAAEWWDHFRQARAEGEPITWQEFTAAFKNTHIMTGVVALKKREFRALNQGSRSVTEYLHDFNRLARYAPKYVRTDEERQEKFLEGLNDELSYALMSTDFRDFQQLVDKAIRQEDKYNRIEQKKRRAAQFKAQQGSNQRSRLVTGPQATSYPQGGSSSVARPQRQFYNNNTGNRGNDNRNVVARPAATPAKNQPVRKEQGSKPGVCFNCGDPGHYADKCPKPRRVKNAPAPNNSNTPAPKARVNHVVAAEAQNAPDVVLDLDVILGMDWLSRHRGVIDCANRKVTLTSSNGETVSFFVSSPKYHGVILNQVALQEIPIVQDYPDVFPEDLPGMPPKRDIEFRIYLVPGTNPIHKRPYRMAANELAEVKRQVGDFLQKGYIRPSTSPWGAPVIFVEKKDHTQRMCVDYSEEFSGAIIQKKKPLGSEKMN

SEQ ID NO: 20587 - protein, 1177 aa, Oryza sativa
  Clone ID: TF_OSC15295j.C1.p2.fg
MAPGLEWYIPGLEIELCTRDGCSEWLGLYNRMPPHSPRNLIKVLGFVRELRLMAFEVGYEVAPEYRRISHDPNEEKCRVRVTLASDREDLPSIKFETRGRSYNHACQEAALVAIGELRQRFEEELDSSAFQYHPHKPRGQDYGTYTCPDGEESATLMHAVHMLSAMDAVSVERDKAAHDRENWNRGKICKLESKVYHLQKELAELKGETPLPTPKLLLTARKRTCPPPRLQLASKIRVMGEVVPDRAELVIDIMVNTRTGSGSGSGSGAANNGGDPTLAQILAQQTQLINLLVQQAQNQQANNQNQNPPPPPQNKLADFLRQLVDKAIRQEDKYNRMEQKKRRAAQFKAQQGSNQRPRLVTEPQAPSYPQGGSSSVVRPQRQFYNNNTGNRGNDNRNMVARPAATPAQNQPVRKEQGSKPGVCFNCGDPGHYADKCPKPRRVKNAPAPNNSNAPAPKARVNHVAAAEAQNAPDVVLGTFPVNSIPASVLFDSGATHSFLSKSFASNHEMEVISLGRPLLVNTPGNQVSSTQYCPSATIEIEEVPFPSSLILLESKDLDVILGMDWLSRHRGVIDCANRKVTLTCSDGETVSFFVSSPKSHGVTLNQVALQEIPVVQDYSDVFPEDLPGMPPKRDIEFRIDLVPGTNPIHKRPYRMAANELAEIKRQVDDLLQKGYIRPSTSPWGAPVIFVEKKDHTQRVFMEYLDKFVVVFIDDILIYSKTKEEHEEHLRLALEKLREHQLYAKFSKCEFWLSEVKFLGHVISSGGVAVDPSNVESVLNWKQPKTVSEIRSFLGLAGYYRRFIENFSKIARPMTRLLQKDVKYKWTEDCEQSFQELKKRLVTAPVLILPDSRKGFHVYCDASRLGLGCVLMQEGMVVAYASKQLRPHENNYPTHDLELAAVVHALKIWRHYLFGNRTEMYTDHKSLKWLELIKDYDMEIHYHPGKANVVADALSRKSYCNMSEGRHLPWELCQEFEKLNLGIVSKGFVAALEAQPTLFDQVREAQGNDPDIQEIKKNMRRGKAIGYVEDEQGTVWLGERICVPDNKELKDTIVKEAHETLYSIHPRSTKMYQDLKQQFWWASMRREIAEYVALCDVCQRVKAEHQKPAGLLQPLKIPEWKWEEIGMDFITGLPRTSAGHDSIWVVVDRLTKVAHFIPVKLSKQPTRGINLQSYTWPE

SEQ ID NO: 20588 - protein, 1708 aa, Oryza sativa
  unsure (1)..(1708): unsure at all Xaa locations
  Clone ID: TF_OSC15641j.C1.p2.np
IPTFPESLFSQEKILKSSKASKATPGLEWYIPGLEIDLYSRDGCSERLGLYNRMPRYKPEYLFGVEGFVQELRTMSFAIGFGTALFYAQIPHDRHEEKCRVKVTLNSNSEDIPSVMFEAGGRNYIHACQEVARIAIGELRNRYSDRLADTEYHYHPRQPQGSDRGSYLETEGIENDATTRHLVEMLWADETRAETVLAAQDREDRNRGKICKLEDKVDRLEKELAMLKGEAPPQKARVRFTARKRALFVPRYQLAPKMVLTRSNGNGPNNNNNNNNGENPTLAQVLAQQAQLMNMMMQQLQNQQNQGNNHAPPQNKLAEFLRVRPPTFSSTTNPVEAGDWLHAIEKKLDLLQCTDQEKVSFASHQLHGPASEWWDHFRLNRTTAEPITWLEFTAAFRKTHIPSGVVSLKKKEFRSLTQGSRSVTEYLHEFNRLARYAPEDVRTDEERQEKFLEGLNDELSYPLMTGEQKKCRIAHFKAQQGNSQRPRLTLGPXTMPQGGSSSVVRPQRQFFNNNAGNNIRNQAPRPIAASTPQQPAKREQGSKPGVCFNCGDPGHYADKCPKPRRVKVVPDQSNSTVPASKARVNHVVAAEAQDAPDVILGTFLVNLVPATVLFDSGATHSFLSMSFARNHGMEVEDLRRPLMVSTPSNQALSLQRSPSVRIEIQGVPFLANLILLESKDLDVILGMDWLARHKGVIDCANRKVTLTSNDGRVVTVHALSSESLRSKLNQITLEEIPIVREYPVVFPDDLPGMPPKRDIEFRIDLVPGTTPIHKRPYRMAANELAKVKRQVDDLLQKGYIRPSSSPWGAPVIFVEKKDHTQRMCVDYRALNDVTIKNKYPLPRIDDLFDQLKGATVFSKIDLRSGYHQLRIKEEDIPKTAFTTRYGLFECTVMSFGLTNAPAFFMNLMNKVFMEYLDNFVVVFIDDILIYSRTKEEHEEHLRLALEKLREHQLYAKFSKCEFWLSEVKFLGHVISAGGVAVDPSNVESVTNWKQPKTVSEIRRFLGLAGYYRRFIENFSKIAKPMTRLLQKDVKYKWSEECEQSFQELKNRLISAPILILPDPKKGFQVYCDASKLGLGCVLMQDGKVVAYASRQLRPHEKNYPTHDLELAAVVHALKIXRHYLFGTRTEVYTDHKSLKYIFTQPDLNMRQRRWLELIKDYDMGIHYHPGKANAVADALSRKGYCNATKGRQLPLELCKDFERLNLGIVSRGFVAALEAKPTLIDQVREAQINDPDIQETKKNMRRGKAIGFLEDEQGTVWLGERICIPNNKDLKDVILKEAHDTLYSIHPGSTKMYQDLKERFWWASMKREITEYVAVCDVCQRVKAEHQKPAGLLQPLKIPEWKWEEIGTDFITGLPRRSSGHDSIWVIVDRLTKVAHFIPVKTTYSGSRLAELYMARIVCLHGVPKKIVSDRGSQFTSNFWKKLQEEMGSKLNFSTAYHPQTDGQTERVNQILEDMLRACALDFGGSWDKNLPYAEFSYNNSYQASLQMAPYEALYGRKCRTPLLRDQTGERQVFGTDILREAKEKVKIIQERLRVAQSRHKSYADNRRRDLSFDEGDYVYLRVTPLREVHRFHTKGKLAPRFVGPYKIVSRRGEVAYQLELPQFLAGVHNVFHVSQLKKCLSVPTEEANLEQIEVQEDLTYVEKPIRILEIDERRTRNRVIRFCKVQWSNHSEEESTWEREDELKSAHPHLFASSSESRGRDSV

SEQ ID NO: 20589 - protein, 1591 aa, Oryza sativa
  Clone ID: TF_OSC15717j.C1.p3.fg
MAFEVGYEVAPEYRRISHDPNEEKCHVRVTLASDREDLPSIKFEAGGRSYSHACQEAALVAIGELRQRFEEELDSSAFQYHPHKPHGQDYGTYTCPDGEESAALMHAVHMLSAMDAVSVERDKAAHDRENWNRGKICKLESKVYRLQKELAELKGETPPPTPKLRLIARKRTCPPPRLQLASKIRVMGEAVPNRAEPVIDIISDEEEEEDPEEREPATPEEEDPSLRSDARRDYTTNPVEAGDWLHPVEKKLDLIQCTEQEKVSFASHQLHGPAAEWWDHFRQGRAEGEPITWQEFTAAFKKTHIPTGVVALKKREFRALNQGSRSVTEYLHDFNRLARYAPEDVLTDEERQEKFLEGLNDELSYALMSTDFRDFQQLVDKAIRQEDKYNRMEQKKRRAAQFKAQQGSNQRPRLVTGPQAPSYPQGGSSSVVRPQRQFYNNNTGNRGNDNRNMVARPAATPAQNQSVRKEQGSKPGVCFNCGDPGHYADKCPKPRCVKNVPAPNNSNAPAPKARVNHVAAAEAQNAPDVVLGTFPVNSIPASVLFDSGATHSFLSKSFASNNGMEVISLGRPLLVNTPGNQVFSTQYCPSVTIEIEEVPFPSSLILLESKDLDVILGMDWLSRHRGVIDCANRKVTLSSSNGETVSFFVSSPKYHGVILNQVALQEIPIVQDYPDVFPEDLPGMPPKRDIEFRIDLVPGTNPIHKRPYRMAANELAEVKRQVDDLLQKGYIRPSTSPWGAPVIFVEKKDHTQRMCVDYRALNEVTIKNKYPLPRIDDLFDQLEGATVFSKIDLRSGYHQLRIREEDIPKTAFTTRYGLFECTVMSFGLTNAPAFFMNLMNKVFMEYLDKFVVVFIDDILIYSKTKEEHEEHLRLALEKLREHQLYAKFSKCEFWLSEVKFLGHVISSRGVAVDPSNVESVLSWKQPKTVSEIRSFLGLAGYYRRFIENFSKIARPMTRLLQKEVKYKWTEDCEQSFQELKKRLVTAPVLILPDSRKGFQVYCDASRLGLGCVLMQEGKVVAYASRQLRPHENNYPTHDLELAAVVHALKIWRHYLFGNRREMYTDHKSLKYIFTQPDLNMRQRRWLELIKDYDMEIHYHPGKANVVADALSRKSYCNMSEGRHLPWELCQEFEKLNLDIVSKGFVATLQAQPTLFDQVREAQVNDLDIQEIKKNMRRGKAIGYVEDEQGTVWLGERICVPENKELKDTIMKEAHETLYSIHPGSTKMYQDLKQQFWWASMRREIAEYVALCDVCQRVKAEHQKPASLLQPLKIPEWKWEEIGMDFITGLPRTSAGHDSIWVVVDRLTKVAHFIPVKTTYTGNKLAELYMARVVCLHGVPKKIVSDRGSQFTSKFWQKLQVEMGTRLNFSTAYHPQTDGQTERVNQILEDMLRACVLDFGGSWDKNLPYAEFSYNNSYQASLQMAPYEALYGRKCRTPLLWDQTGERQVFGTDILREAEEKVKIIQERLRVAQSRQKSYADNRRRDLAFEEGDYVYLRVTPLRGVHRFQTKGKLAPRFVGPFKIVSRRGEVAYQLELPPSMAGIHDVFHVSQLKKCLRVPTEEADPDRIELQEDLTYVEKPVRILENFLGII

SEQ ID NO: 20590 - protein, 368 aa, Oryza sativa
  Clone ID: TF_OSC19350j.C1.p5.gm
MSTDFRDFQQLVDKAIRQEDKYNRMEQKKRRAAQFKAQQGSNQRPRLVTGPQAPSYPQGGSSSVVRPQRQFYNNNTGNRGNDNRNMVARPAATPAQNQPVRKEQGSKPGVCFNCGDPGHYADKCPKPRRVKNAPAPNNSNAPAPKARVNHVAAAEAQNAPDVVLGYYRRFIENFSKIARPMTRLLQKEVKYKQLRPHENNYPTHDLELAAVVHALKIWLSKKEIMYTFGLRRYEAGDQVFEECFRMTAPRLLFVVVVCYTMSGASAAAAPRDGGALGAGAAANENINGGSSASQSSGGTFTGLIKGAPCCDEPRVASALKSGGGSGGGGHDLPSTKSGHRGGGEMGGSDGACVLPSARSGGVFPIGAH

SEQ ID NO: 20591 - protein, 1371 aa, Oryza sativa
  Clone ID: TF_OSC20906j.C1.p1.fg
LLVWNIPGLEIELCSRDGCSEWLGLGNRMPRFKPEYLFGVEGFVQELRTMSFAIGFGTAPLYAQIPHDHDEEKCRVKVTLNSNSEDIPSVMFEAGGGNYIHACQEVARIAIGELRDRYSDQLADTEYRYHPRQPQGSDRGSYLETEGIENDATTRHLVEMLWAMDETRAEVVLAAQDREDQNRGKICRLEDKVDRLEKELAALKGEAPPQKARIRLTARKRALFVPRYQLAPKVRVVEKEVTPALADPPVVNMVLTRSNGNGPNNNNNNNGENPTLAQVLAQQAQLMNIMMQQLQNQQNQGNNHAPPQNKLAEFLRCTDQEKVSFASHQLHGPASEWWDHFRLNRTTAEPITWLEFTAAFRKTHIPSGVVSLKKKEFRSLTQGSRTVTEYLHEFNRLARYAPEDVRTDEERHERFLEGLNDELSYPLMTRDYHDFQKLVDKAIRQEDKYNRMEQKKRRIAHFKAQQGNSQRPRLTLGPQSMPQGGSWSVVRPQRQFFNNNAGNNIRNQAPRPVAAPTQQQPAKREQGSKPGVCFNCGDPGHYADKCPKPRRVKVVPAQSNSTAPAPKARVNHVAAAEAQVPATVLFDSGATHSFLSMSFVGNHGMEVEDLRRPLMVSTPSNQALSLQRSPSIRIEIQEVPFLANLILLESKDLDIILGMDWLARYKGMIDCANRKVILTSNDGRVVTVHALSSESLRSSLNQMTLEEIPIVREYPDVFPNDLLGMPPKRDIEFRIDLVPGTTPIHKRPYRMAANELAEVKRQVDDLLQKGYIRPSSSPWGAPVIFVEKKDHTQRMCVDYRALNDVTIKNKYPLPRIDDLFDQFKGATVFSKIDLRSGYHQLRIKEEDIPKTTFTTRYGLFECTVMSFGLTNAPAFFMNLMNKVFMEYLDKFVVVFIDDILIYSRTKEEHEEHLRLALEKLREHQLYAKFSKCEFWLSEVKFLGHVISAGGDAVDPSNVESVTNWKQPKTVSEIHSFLGLVGYYRRFIENFSKIAKPMTRLLQKDVKYKWSEECEQSFQELKNRLISAPILILPDPKKGFQVYCDASKLGLGCVLMQDGKVVAYASCQLRPHEKNYPTHDLELVAVVHALKIWRHYLFGTRTKDYDMGIHYHPGKANVVADALSRKGYCNATEGRQLPLELCKEFERLNLGIVSRGFVAALEAKPTLIDQVREAQIIDPDIQEIKKNMRRGKAIGFLEDEQGTVWLGERICVPDNKDLKDAILKEAHDTLYSIHPGSTKMYQDLKERFWWASMKREIAEYVAVCDVCQRVKAEHQKPTGLLQPLKIPEWKWEEIGMDFITGLPRTSSGHDSIWVIVDRLTKVAHFIPVKTTYSGSQLAELYMARIEKNLKSSKASKASHTDPKQPFEHVDSV

SEQ ID NO: 20592 - protein, 342 aa, Oryza sativa
  Clone ID: TF_OSC23055j.C1.p1.fg
IPSGVVSLKKKEFRSLTQGSRTVTEYLHEFNRLARYAPEEVRTDEERQERFLKGLNDELSYPLMTGDYHDFQKLVDKAIRQEDKYNRMEQKKRRIAHFKAQQGNSQRPRLTLGPQSMPQGAPRPVASPTQQQPAKREQGSKPGVCFNCGDPGHYADKCPKPRRVKVVPAQNNPSAPAAKARVNHVAAAEAQGAPDVILGTFPVNSVPATVLFDSGAMHSFLSMSFAGNQGMEVKELRRPLMVSTPSNQALSSQRSPSVRIEIQGVPFLANLILLESKDLDVILGMDWLARYKGVIDCANRKVTLTSNDGRVVTVHALSSESIRSRLNQLTLEEIPIVREYPD

SEQ ID NO: 20593 - protein, 1473 aa, Oryza sativa
  Clone ID: TF_OSC25185j.C1.p21.fg
MVRCGGLCCARGTVTAPFRAPGLEWYIPGLEIELCSRDGCSEWLGLCNRMPRYKPEYLFGVEGFVQELRTMSFVIGFRTTPFYAQIPHDRHEEKCRVKVTLNSNSEDIPSVMFEAGGGNYIHACQEVARIAIGELRDRYSDQLADTKYRYHPRQPQGSDRGSYLETEGIENDATTRHLVEMLWAMDETRAETVLAAQDREDQNRGKICKLEDKVDRLEKELAALKGEAPPQKARIRLTARKRALFVPRYQLAPKMVLTRSNGNGPNNNNNNNNGENPTLAQVLAQQAQLMNMMMQQLQNQQNQGNNHAPPQNKLVEFLRVRPPTFSSTTNPVEAGDWLHAIEKKLDLLQCTDQEKVSFASHQLHGPASEWWDHFRLNRTTAEPITWLEFTAAFRKTHIPSGVVSLKKKEFRSLTQGSRSVTEYLHEFNRLARYAPEDVRTDEQRQERFLEGLNDELSYPLMTGDYHDFQKLVDKAIRQEDKYNRMEQKKRRIAHFKAQQGNSQRPRLTLGPQSMPQGGSSSVVRPQRQFFNNNAGNNIRNQAPRPVAASTQQQPAKKEQGIKPGVCFNCGDPGHYADKCPKPRRVKVVPAQSNSTAPASKARVNHVAAAEAQGAPDVILDCANRKVTLTSNDGRVVTVHALSSESLRSSLNQITLEEIPVVREYPDVFPDDLPGMPPKRDIEFRIDLVPGTTPIHKRPYRMAANELAEVKRQVDDLLQKGYIRPSSSPWGAPVIFVEKKDHTQRMCVDYRALNDVTIKNKYPLPRIDDLFDQLKGATVFSKIDLRSGYHQLRIKEEDIPKTAFTTRYGLFECTVMSFGLTNAPAFFMNLMNKVFMEYLDKFVVVFIDDILIYSHTKEEHEEHLRLALEKLREHQLNVESVTNWKQSKTVSEIRSFLGLAGYYRRFIENFSKIAKSMTRLLQKDVKYKWSEECEQSFQELKNRLISAPILILPDPKKGFQVYCDASKLGLGCVLMQDGKVVAYASRQLRPHEKNYPTHDLELAAVVHALKIWRHYLFGTRTEVYTDHKSLKYIFTQPDLNMRQRRWLELIKDYDMGIHYHPGKANVVADALSRKGYCNATEGRQLPLELCKEFERLNLGIVSRGFVAALEAKPTLIDQVREAQINDPDIQEIKKNMRRGKAIGFLEDEQGTVWLDERICVPDNKDLKDVILKEAHDTLYSIHPGSTKMHQDLKERFWWASMKHEIAEYVATDGQTERVNQILEDMLRACALDFGGSWDKNLPYAEFSYNNSYQASLQMAPYEALYGRKCRTPLLWDQTGERQVFGMDILREAEEKVKIIQERLRVAQSRHKSYADNRRRDLSFDEGDYVYLCVTPLRGVHRFHTKGKLAPCFVGPYKIVSRRGEVAYQLELPQSLAGVHNVFHVSQLKKCLRVPTEETNLEQIEVQEDLTYVEKPIRILEIDERRARNRVIRFCKVQWSNHSEEESTWEQEDELKSAHPHLFASSSESRGRDSV

SEQ ID NO: 20594 - protein, 1607 aa, Oryza sativa
  Clone ID: TF_OSC29665j.C1.p2.fg
MMPPHSPRNLIEVLGFIRELRLMAFEVGYEVAPEYRQISHDPDEEKCRVRVMLASDREDLPSFKFEAGGRSYCHACQEVALVAIGELRQRFEEELDSSAFQYHPHKPHGQDYGTYTCPDGEESATLMHVVHMLSAMDAVSVERDKAAHDRENWNRGKICKLESKVYRLQKELSELKGETPPPTPKLRLVARKRTCPPPRLQLASKIRVMGEAVPDRAEPVIDIISDEEEEEDPEEREPATPEEEDPSLRSDARRDYAAGTESAGKQSESESTPPPQNKLADFLRVRPPTFSSTTNPVEAGDWLHAVEKKLDLIQCTEQEKVSFASHQLHGPAAEWWDHFRQGRAGGEPITWQEFTAAFKKTHIPTGVVALKKREFRALNQGSRSVTEYLHDFNRLARYAPEDVRTDEERQEKFLEGLNDELSYALMSTDFRDFQQLVDKAIRQEDKYNRMEQKKRRAAQFKAQQGSNQRPRLVTGPQAPSYPQGGSSSVVRPQRQFYNNNTGNRGNDNRNMVARPAATSVQNQPVRKEQGSKPGVCFNCGDPGHYADKCPKPRRVKNAPTPNNSNVPAPKARVNHVAAAEAQNAPDVVLGTFPVNSIPATVLFDSGATHSFLSKSFASNHGMEVVSLGRPLLVNTPGNQVFSTQYCPSVTIEIEEVPFPSSLILLECKDLDVILGMDWLSRHRGVIDCANRKVTLTSSNGETVSFFVSSPKYHGVILNQVALQEIPIVQDYPDVFPEDLPGMPPKREIEFRIDLVPGTNPFHKRSYRMAANELAEVKKQVDDLLQKGYIRPSTSPWGAPVIFVEKKDHTQRMCVDYRALNEVTIKNKYPLPRIDDLFDQLEGATVFSEIDLRSGYHQLRIREEDIPKTAFTTRYGLFECTVMSFGLTNALAFFMNLMNKVFMEYLDKFVVVFIDDILIYSKTKEEHEEHLRLALEKLREHQLYAKFSKCEFWLSEVKFLGQVISSGGVAVDPSNVESVLSWKQPKTVSEIRSFLGLAGYYRRFIENFSKIARPMTRLLQKEVKYKWTEDCEQSFQELKKRLVTAPVLILPDSRKGFQVYCDASRLGLGCVLMQEGKVVAYASRQLRPHENNYPTHDLELAAVVHALKIWRHYLFGNRTEIYTDHKSLKYIFTQPDLNMRQRRWLELIKDYDMEIHYHPGKANVVADALSRKSYCNMSEGRRLPWELCQEFERLNLGIVSKGFVAVLEAKPTLFDQVREAQVNDPDIQEIKKNMRRGKAIGFVEDEQGTVWLGERICVPENKELKDTIMKEAHETLYSIHPGSTKMYQDLKQQFWWASMRREIAEYVALCDVCQRVKAEHQKPAGLLQPLKIPEWKWEEIGMDFITGLPRTSAGHDSIWVVVDRLTKVAHFIPVKTTYTGNKLAELYMARVVCLHGVPKKIVSDRGSQFTSKFWQKLQSELDTRLNFSTAYHPQTDDILREAEEKVKIIQERLRVAQSRQKSYADNRRRDLAFEEGDYVYLRVTPLRGVHRFQTKGKLAPRFVGPFKIVSRRGEVAYQLELPPSMAGIHDVFHVSQLKKCLRVPTEEADPDRIELQEDLTYIEKPVRILEFPTFRRRAFPLRKVPKRLRKPKASHTDPKQPFEHVEPI

SEQ ID NO: 20595 - protein, 1120 aa, Oryza sativa
  Clone ID: TF_OSC34887j.C1.p15.fg
MSFLIGFGTAPLYAQIPHDCDEEKCRVKVTLNSNREDIPSVMFEAGGGSYIHACQEVARIAIGELHESYNDRLADTEYRYHPRQPQGSDRGSYLEPAEIENDATTRHLVEMLWAMDETRAEIVIAAQDCEDRNRGKICKLEDKVDRLEKELAALKGEAPPQKARVRLTARKRALFVPRYQLAPKVRVVEKEATPAPVDPPVVNVSDDDEEESKRTHSKVEWGATQDDGDMVLTRSNGNGPNPNKNNNNAENPTLAQVLAQQAQLKNLMMQQLQNQQNQGNNHAPPPNKLVEFLRVRPPTLSSTTNPIEAGDWLHAIEKKLDLLQCTDQEKVSFASHRLHGPASEWWDHFRLNRTTAEPITWLEFTAAFRKTHIPSGVVSLKKKEFRALTQGSRSVTKYLHEFNRLARYAPEDVRIDEERQEKFLEGLNDELSNPLMTGDYHDFQKLVDKAIRQEDKYNRMEQKKRRIAHFKAQQGNTPTQHQPAKREQGSKPGVCFNCGDPGHYADKCPKPHRAKVVPAQNNPSAPATKARVNHVAAAEAQGAPDVILGTFPVNSVPATVLFDSGATHSFLSLSFAGNHEMEVEDLRRPLMVSTPSNQALSSQRSPSVRIEIQGVPFLANLILLESKDLDVILGMDWLAKYKGVIDCANRKVTLTSNDGQVVTVHALPSEPLRSSLNQITLEEIPIVQEYPDVFPDDLPGMPPKRDIEFRIDLVPGTTPIHKRPYRMAANELAEVKRKVDDLLQKGYIRPSSSPWGAPVIFVEKKDHTQRMCVDYRELNDVTIKNKYPLPRIDDLFDQLKGATVFSKIDLRSGYHQLRIKEEDIPKIAFTTTYGLFECTVMSFGLTNAPAFFMNLMNKVFMEYLDKFVVVFIDDILIYSRTKEEHEEHLRLALEKLREHQLYAKFSKCEFWLSEVKFLDHVISAGGVAVDPSYYWRFIENFSKIAKPMTRLLQKDVKYKWSEECEQCFQELKSRLISAPILILPDPKKGFQVYCDASKLGLGCVLMQDGKVVAYASRQLRPHEKNYPTHDLELAAVVHALKIWRHYLFGTRTEVYTDHKSLKYIFTQPDLNMRQRRWLELIKDYDMGIHYCNILKMCHFLILHHADSYVLNNLLNLGKYT

SEQ ID NO: 20596 - protein, 992 aa, Oryza sativa
  Clone ID: TF_OSC400055j.C1.p4.gm
MERSRCVPSYLRLACGEEPRGAPEGGLAGTADGRRRTRAPMVAAGDHRRGGAAPERGEGRGKRIGGPRLTPDRRRRRERRPERREAAARLGSTGTAAFRRSATETERWTRSARTRRSRRWQRRGGRWSGATTAADRSSAAMAERESDGASWVIAPAQASSHDTPGPMSPTRSLTQGSRTVTEYLHEFNRLARYAPKDLRTDEERQEKFLEGLNDELSYPLMTGDYHDFQKLVDKAIRQEDKYNRMEQKKRRIAHFKAQQGNSQRPRLTLGPQSMPQGGSSSVVRPQRQFFNNNAGNNNRNQAPRPVATPSQQQPAKREQGSKPGVCFNCGDPGHYADKCPKPRRAKVVPAQNNSSAPAAKARVNHVAATEAQGAPDVILGTFPVNSVPATVLFDSGATHSFLSMSFAGNHGMEVEELRRPLMVSTPSNQALSSQRSPSVRIEIQGVSFLANLILLESKDLDVILGMDWLARYKGVIDCANRKVTLTSNDGQVVTVHALPSEPLRSSLNQITLEKIPIVREYPDVFPDDLPVMSFGLTNAPAFFMNLMNKVFMEYLDKFVVVFIDDILIYSRTKEEHEEHLRLALEKLREHQLYAKFSKCEFWLSEVKFLGHVISAGGVAVDPSNVESVTNWKQPKTVSEIRSFLGLAGYYRRFIENFSKIAKPMTRLLQKDDGKVVAYASRQLRPHEKNYPTHDLELAAVDYDLGIHYHPGKANVVADALSRKGYCNVMGGRQLPLELCKEFERLNLGIVSRGFVAALEAKPTLIDQVREAQINDPDILEIKKNMRRGKAIGFLEDEQGTVWLGERICVPDNKDLKDAILKEAHDTLYSIHPAFEDTRMEVGGNRYGFHHWTTQNVVGLAPPSPPPLQPCVAVAPVITVARGGRRLVAVLVRPFAVAVDRRSTVAVVKPKVAAASFSSPTSSGHRPPSLWSPVSSSCRLQPVGAFRSRCRAVVRRRARVVRSPPVVTSSLTSSSSSIREPRWIQSISAVRCR

SEQ ID NO: 20597 - protein, 1633 aa, Oryza sativa
  Clone ID: TF_OSC400677j.C1.p41.np
VTSWYQSHLDLRISQMMPPHSPRNLFKVLGFVRELRLMAFEVGYEVAPEYRQISHDPDEEKCRVRVTLASDREDLPSIKFEAGGRSYSHACQEAALVAIGELRQRFEEELDSSAFQYHPHKPHGQDYGTYTCPDGEESATLMHAVHMLSAMDAVSVERDKAAHDRENWNRGKICKLESKVYRLQKELAELKGETPPPTPKLRLTARKRTCPPPRLQLASKIRVRGEVVPDRAEPVIDIISDEEEEEDPEEREPATPEEEDPSLRSDARRTTNPVEAGDWLHAVEKKLDLIQCTEQEKVSFASHQLHGPAAEWWDHFRQGRAEGEPITWQEFTAVFKKTHIPAGVVALKKREFRALNQGSRSVTEYLHDFNRLARYAPEDVRTDEERQEKFLEGLNDELSYALMSTDFRDFQQLVDKAIRQEDKYNRMEQKKRRATQFKAQQGSNQRPRLVTGPQAPSYPQGGSSSVVRPQRQFYNNNTGNRGNDNRNVVARPAATPVQNQPVRKEQGSKPGVCFNCGDPGHYADKCPKPRRVKNAPAPNNSNAPAPKARVNHVAAAEAQNAPDVVLGTFPVNSIPATVLFDSGATHSFLSKSFASNHGMEVISLGRPLLVNTPGNQVFSTQYCPSVTIEIEEVHFPSSLILLESKDLDVILGMDWLSRHRGVIDCANRKVTLTNSNGETVSFFVSSPKSHGAVLNQVALQEIPIVQDYPDVFPEDLPGMPPKRDIEFRIDLVPGTNPIHKRPYRMAANELAEVKRQVDDLLQKGYIRPSTSPWGAPVIFVEKKDHTQRMCVDYRALNEVTIKNKYPLPRIDDLFDQLEGATVFSKIDLRSGYHQLRIREEDIPNTAFTTRYGLFECTVMSFGLTNAPAFFMNLMNKVFMEYLDKFVVVFIDDILIYSKTKEEHEEHLRLALEKLREHQLYAKFSKCEFWLSEVKFLGHVISSGGVAVDPSNVESVLSWKQPKTVSEIRSFLGLAGYYRRFIENFSKIARPMTRLLQKEVKYKWTEDCERSFQELKKRLVTAPVLILPDSRKGFQVYCDASRLGLGCVLMQEGKVVAYASRQLRPHENNYPTHDLELAAVVHALKIWRHYLFGNRTEIYTDHKSLKYIFTQPDLNMRQRRWLELIKDYDMEIHYHPGKANVVADALSRKSYCNMSEGRRLPWELCQEFEKLNLGIVSKGFVAALEAKPTLFDQVREAQVNDPDIQEIKKNMRRGKAIGYVEDEHGTVWLGERICVPENKKLKDTIMREAHETLYSIHPGSTKMYQDLKQQFWWASMRREIAEYVALCDVCQRVKAEHQKPAGLLQPLKIPQWKWEEIGMDFITGLPRPSAGHDSIWVVVDRLTKVAHFIPVKTTYTGNKLAELYMARVVCLHGVPKKIVSDRGSQFTSKFWQKLQLEMGTRLNFSTAYHPQTDGQTERVNQILEDMLRACVLDFGGSWDKNLPYAEFSYNNSYQASLQMAPYEALYGRKCRTPLLWDQTGERQVFGTDILREAEEKVKIIQERLRVAQSRQKSYADNRRRDLAFEEGDYVYLRVTSLRGVHRFQTKGKLAPRFVGPFKILSRRGEVAYQLELPPSMAGIHDVFHVSQLKKCLRVPTEEADPDRIELQEDLTYVEKPVSILEFPTFRRRAFPLRK

SEQ ID NO: 20598 - protein, 460 aa, Oryza sativa
  Clone ID: TF_OSC401071j.C1.p1.fg
MAFEVGYEVAPEYCQIPYDPNEEKCRVRVTLTSDREDLPSIKFEAGGRKYSHACQEAALVAIGELRHRFDEELESSAFQYHPHKPHGQDYGTYNCPEGEGSATVMHAVYMLSAMDAVGVEREKAAHDRENWNRGRICKLESKVYRLQKELAELKGEAPPPAPKLRLTARKRTRPPPRLQLASKTGVVGDAVPDHAKPVIHVLSDEEEEEDLEEREPATPEEEDPSLHSDARRDMLLTSMVGCNYMSLVLLLVRDSLCPRRCRTDEEHQEKFLEGLNDELSYALMAMDYWDFQQLMDKAIRQEDKYNRMEQKKRRAAHFKAQQGSSQRPHIALGPQAAPYPQGGSSSVARPQRQFYNNNTGNRSNDNRNMVTRPVAAPTQNHPVRKEQGSKPGVCFNCGDPGHYADKCPKPRRVKNAPVQNNSNAPAPKARVNHVAAAEAQNTPDVVLEEECFNEGDDQED

SEQ ID NO: 20599 - protein, 1639 aa, Oryza sativa
  unsure (1)..(1639): unsure at all Xaa locations
  Clone ID: TF_OSC401235j.C1.p70.np
VTSWYQSHLDLRTSQMTPPHPPESLINAVGFVRELRMMAFEVGYDVAPEYRQIPYDPNEEKCRVRVTLTSDREDLLSIKFEAGGRKYSHACQEVALVAIGELRHRFDEELESSAFQYHPHKPHGQDYGVYHCPEDEDSTTLKHAVYMLSAMDAVGVEREKTADDRENWNRGRICKLESKVYRLQKELAELKGEAPPPAPKLRLTARKRTRPPPRIQLASKTRVVGDVVPDHAEPIIHVLSNDEEEEDPEEREPATPEEEDPSLRSDARRTTNPVEAGDWLHAVEKKLDLILRTEXEKVSFALHQLHGPAAEWWDHFCQNRAAGEPITWREFTATFKKTHIPSGVVALKKRDFRALNQGSCSVTEYLHDFNRLAHYVPDDVRTDEERQEKFLEGLNDELSYALMAIEYRNFQQLVDKAIRQEDKYNRMEQKKRRAAYFKAQXGNSQRPRIALGPQAAPYPXGGSSSVARPQRQFYNNNTGNHSNDNRNVVTRPVAAPTQNQPVRKEQGIKPGVCFNCGDPGHYADKCPKPRRVKNAPVQNNSNAPAPKARVNHVAAAEAXNAPDVVLGTFPVNSIPATVLFDFGATHSFLSKSFASNHGMEVISLGRPLLVNTPGNQVSSTQYCPSITTEIQEIPFPSTLILLESKDLDVILGVDWLTHHRGVIDCANRKVTLTSSNGXTVSFFVSSPRSHGLTLNQVALQEIPIVQDYPDVFPEDLPGMPPKRDIEFRINLVPGTNPIHKRPYRMAAIELAEVKRQVDDLLQKGYIRPSTSPWGAPVIFVEKKDHTQRMCVDYRALNEVTIKNKYPLPRIDDLFDQLEGATVFSKKDLCSGYHQLXIREEDIPKIAFTTRYGLFESTVMSFGLTNAPAYFMNLMNNVFMEYLDKFVVVFIDDILIYSKTKEEHEEHLRLALEKLREHQLYAKFSKCEWLPEVKFLSHVISAGGVVVDPSNVEXVLNWKQPKMVSEIRSFLGAGYYRRFIENFSKIARPMSRLLQKDVKYKWTEECEQSFQELKKRLVTAPMLVLPDPRKGFQVYCDASRHGLGCVLMQDGKVVAYTSRQLRPHENNYPTHDVELAAVVHELKIWRHYLFDNRTEMYTDHKCLKYIFTQPNLNMRQRRWLELIKDYDMEIHYHPGKANVVADALSRKSYCNMSEGRHLPWELCQELEKLNLGIVNKGFVAALEAQPTLFDQVREAQVNDLDIXEIEKNMRRGKTIGYIEDEQGTVWLGERICVPDNKELKDTIMKEAHETLYSIHPGSTKMYQDLKQQFWWASMRXEIAEYVALCDVCQRVKAEHQKPACQLQPLKILEWKWEEIGMDYITGLPRTSAGQDSIWVVVDRLTKVAHFIPVKTTYSGNKLAELYMARVVCLHGVPKKIVSDRGSQFTSMFWRKLQEEMRTRLNFSTTYHPQTDGQTKRVNQILEDMLRACVLDFGGSWDKNMPYAEFGYINSYQASLQMAPYEALYGRKCRTPLLWDQTGERQVFGTDILREAEEKVKIIQERLRIAQSRXKSYADNRRRDLTFEEGDYVYLRVTLLRGVHRFQTKGKLAPRFVGPFKIVSRRGEVAYQLELPPSMAGIHDVFHVSQLKKCLRVPTEEADPEHIELQKDLTYVEKPVRILVFPTFRRRAFTLRKAIDQYXNA

SEQ ID NO: 20600 - protein, 1570 aa, Oryza sativa
  Clone ID: TF_OSC401314j.C1.p26.np
VTSWYQSHLDLRISQMMPPHSPRNLIKVLGFVRELRLMAFEVGYEVAPEYRRISHDPDEEKCRVRVTLASDREDLPSIKFEAGGRSYSQACQEAALVAIGELRQRFEEELDSSAFQYHPHKPHGQDYGTYTCPDGEESATLMHAVHMLSAMDAVSVERDKAAHDRENWNRGKICKLESKVYRLQKELAELKGETPPPTPKLHLIARKRTCPPPRLQLASKIRVMGEAVPDRAEPVIDIISDEEEEEDPEEREPATPEEEDPSLRSDARRTTNPVEAGDWLHAVEKKLDLIQCTEQEKVSFASHQLHGPAAEWWDHFRQGRAEGEPITWQEFTAAFKKTHIPAGVVALKKREFRALNQGSRSVTEYLHDFNRLARYAPEDVRSDEERQEKFLEGLNDELSYALMSTDFRDFQQLVDKAIRQEDKYNRMEQKKRRAAQFKAQQGSNQRPRLVTGPQAPSYPQGGSSSVVRSQRQFYNNNTGNRGNDNRNMVVRPAATPVQNQPVRKEQGSKPGVCFNCGDPGHYADKCPKPRRVKNVPAPNNSNAPAPKARVNHVAAVEAQNAPDVVLGTFPVNSIPATVLFDSGATHSFLSKSFASNHGMEVISLGRPLLVNTPGNQVFSTQYCPSVIIGIEEVLFPSSLILLESKDLDVILGMDWLSRHRGVIDCANRKVTLTSSNGETVSFFVSSPKSHGVILNQVALQEIPIVQDYPDVFPEDLPGMPPKRDIEFRIDLVPGTNPIHKRPYRMAANELAEVKRQVDDLLQKGYIRPSTSPWGAPVIFVEKKDHTQRMCVDYRALNEVTIKNKYPLPRIDDLFDQLEGATVFSKIDLRSGYHQLRIHEEDIPKTAFTTRYDLFECTVMSFGLTNAPAFFMNLMNKVFMEYLDKFVVVFIDDILIYSKTKEEHEEHLRLALEKLREHQVYAKFSKCEFWLSEVKFLGHVISSGGVAVDPSNVESVLSWKQPKTVSEIRSFLGLAGYYRRFIENFSKIARPMTRLLQKEVKYKWTEGCEQSFQELKKRLVTAPVLVLPDSRKGFQVYCDASRHGLGCVLMQEGKVVAYASRQLRPHENNYPTHDLELAAVVHALKIWRHYLFGNRTEIYTDHKSLKYIFTQPDLNMRQRRWLELIKDYDMEIHYHPGKANVVADALSRKSYCNMSEGRRLPWELCQEFEKMNLGIVSKGFVATLEAQPTLFDQVREAQVNDPDIQEIKHQKPAGLLQPLKIPEWKWEEIGMDFITGLPRTSAGHDSIWVVVDRLTKVAHFIPVKTTYTGNKLAELYMARVVCLHGVPKKIVSDRGSQFTSKFWQKLQVEMGNRLNFSTAYHPQTDGQTERVNQILEDMLRACVLDFGGSWDKNLPYAEFSYNNSYQASLQMAPYEALYGRKCRTPLLWDQTGERQVFGTDILREAEEKVKIIQERLRVAQSRQKSYADNRRRDLAFEEGDYVYLRVTPLRGVHRFQTKGKLAPRFVGPFKIVSRRGEVAYQLELPPSMAGIHDVFHVSQLKKCLRVPTEEADPDRIELQEDLTYVEKPVRILEPTFRRRAFPLRKIVRVPCQASLLGEGCKAKSIYRRKMT

SEQ ID NO: 20601 - protein, 1731 aa, Oryza sativa
  unsure (1)..(1731): unsure at all Xaa locations
  Clone ID: TF_OSC401388j.C1.p10.np
ILNNKFQYKIPTFPESPILQEKNLKSSKASKVTAGLEWYIPGLEIELCSRDGCSEWLGLCNRMPRYKPKYLFGTEGFVQELRTMSFLIGFGTAPLYAQIPHDRDEEKCRVKVTLNSNHEDIPSVMFEAGGGSYIHACQEVARIAIGKLRESYNDRLADTEYRYHPRQPQGSDRGSYLEPAGIENNATTRHLVEMLWAMDETRADIVIAAQDREDRNRGKICKLEDKVDRLEKEPAALKGEATARKRALFVPRYQLAPKMVLTRSNGNGPNPNNNNNNGENPTLAPVLAQQAQLMMNLMMQQLQNQQNQGNNHAPPQNKLAEFLRVRPPTFSSTTNPVEAGDWHAIEKKLDLLQCTDQEKVSFASHQLHGPASEWWDHFRLNRTTAEPITWLEFTAAFRKTHIPSGVVSLKKKEFRSLTQGSRTVTEYLHEFNRLARYAPEDVRTDEERQEKFLEGLNDELSYPLMTGDYHDFQKLVDKAIRQEDKYNRMEQKKRRIAHFKAXQGSSQRLRLALGPQSVPQGGSSSIVRPQRQFFNNNAGNNNRNQAPRPVAAPTQNQPAKREQGSKPGVCFNCGDPGHYADKCPKPRRTKVVPAKNNSSAPATKARVNHVAAAEAQGDPDVILGTFLVNSVPATVLFDSGATHSFLSMSFAGNHGMEVEDLRRPLMVSTPSNQALSSQRSPSVRIEIQGVPFLANLILLESKDLDVILGMDWLARYKGVIDCANRKVTLTSNDGQVVTVHALPSETLRSSLNQITLEEIPIVREYPDVFLDDLPGMPPKRDIEFRIDLVPGTTPIHKRPYRMAANELAEVKRQVDDLLQKGYIRPSSSPWGAPVIFVDKKDHTQRMCVDYRALNDVTIKNKYPLPRIDDLSDQLKGATVFSKIDLRSGYHQLRIKEEDIPKTAFTTRYGLFECTVMSFGLTNAPAFFMNLMNKVFMEYLDKFVVVFIDDILIYSRTKEEHEEHLRLALEKLREHQLYAKFSKCEFXLSEVKFLGHVISAGGVAVDPSNVESVTNXKQPKTVSEIRSFLGLAGYYMRFIENFSKIAKPMTRLLQKDVKYKWSEECEQSFQELKSRLISAPILILLDPKKGFQVYCDASKLGLGCVLMQDGKVVAYASRQLRPHKKNYPTHDLELAAVVHALKIWRHYLFGTRTEVYTDHKSLKYIFTQPDLNMRQRRWLELIKDYDLGIHYHPGKANVVADALSRKGYCNATEGXQLPLELCKEFERLNLGIVSRGFVAALEAKPTLIDQVREAQINDPDIHEIKKNMRRGKAIGFLEDEQGTVWLGERICVPDNKDLKDAILKEAHDTLYSIHPGSTKMYQDLKERFWWASMKREIAEYVTVCDVCQRVKAEHQKLAGLLQPLKIPEXKWEEIGMDFITGLPRTSSGHDSIXVIVDRLTKVAHFIPVRTTYSGSSLAELYMARIVCLHGVPKKIVSDRGSQFTSKFWKKLQEEMGSKLNFSTAYHPRTDEQTERINQILEDMLRACALDFGGSWDKNLLYAEFSYNNSYQASLQMPPYEALYGRKCRTPLLWDQTGERQVFGTDILREAEEKVKIIQERLRVAQSRHKSYADNRRRDLSFEEGDHVYLRVSPLRGVHRFHTKGKFAPRFVGPYKIVSRRGEVAYQLELPQSLAGVHNVFHVSQLKKCLRVPTEEANPEQIEFQEDLTYVEKPICILETDERRTRNRVIHFCMVQWSNHSEEEATWEREDELKSAHPHLFTSSSESRGRDSV

SEQ ID NO: 20602 - protein, 1319 aa, Oryza sativa
  Clone ID: TF_OSC401693j.C1.p22.fg
MAFEVGNEVAPEYRRISHDPNEEKCRVRVTLASDREDLPSIKFEAGGRTYSHACQEAALVAIGDLRQRFEEELDSSAFQYHPHKPHVHMLSAMDAVSVERDKAAHDRENWNRGKICKLESKVYRLQKELAELKGETPPPTPKLRLTARKRTCPPPCLQLASKIRVMGDAVPDCAEPIIHILSDEEEEEDPEERKAQNQEANNQNQNQPPTFSSTTNPVEAGDWLHAVEKKLDLIQCTKQEKVSFASHQLHGPAAEWWDHFRQGRAEGEPITWQEFTAAFNKTHIPTGVVALRKREFRALNQGSRSVIEYLHDFNRLARYAPEDVRTDEERQEKFLEGLNDELSYALMSMDFRDFQQLVDKAIRQEDKYNRMEQKKRRAAQFKAQQGSNQRPRLVTGPQAPSYPQGGSSLVVRPQRQFYHNNTGNRTNDNRNMVARPAATPAQNQPVRKEQGSKPGVCFNCGDPGHYADKCPKPRRVKNAPALKNCNTPAPKARVNHVAAAEAQNAPDAVLDVILGMDWLSRHRGVIDCANRKVTLTSSDGETVSFFASSPKSHGVTLNQVVLQEIPVVQDYPDVFPEDLPGATVFSKIDLRSGYHQLRIREEDIPKTAFTTRYGLFECTVMSFGLTNAPALFMNLMNKVFMEYLDKFVVVFIDDILIYSKTKEEHEEHIRLALEKLREHQLYAKFSKCEFWLSEVKFLGHVISSGGVAVDPSNVESVLNWKQPKTVSEIRSFLGLAGYYRRFIENFSKIARPMTRLLQKEVKYKWTEDCEQSFQELKKRLVTAPVLILPDSRKEGKVVAYASRQLRPHENNYPTHDLELAAVVHALKIWRHYLFGNRTGMYTDHKSLKYIFTQPDLNMRQRRLLELIKDYDMEIHYHPGKANVVADALSRKSYCNMSEGRHLPWELCQEFEKLNLGIVSKGFVAALEAQPTLFDQVREVQVNDPDIQEIKKNMRRGKAIGYVEDEQGTIPEWKWEEIGMDFITGLPRTSAGHDSIWVVVDRLTKVAHFIPVKTTYTANKLAELYMARVVCLHGVPKKIVSDRGSQFTSKFWQKLQVEMGTRLNFSTAYHPQTDGQTERVNQILEDMLRACVLDFGGSWDKNLPYAEFPYNNSYQASLQMAPYEALYGRKCRTPLLWDQTGEHQVFGTDILREPEEKVKIIQERLRVAQSRQKSYANNRRRDLAFEEGDYVYLRVTPLRGVHRFQTKGKLASHFVGPFKIVSRRGEVAYQLELPPSMAGIHDVFHVSQLKKCLRVPTEEADPEHIELQEDLTYVEKPVRILEFPTFRRRAFLLRKVPKRLWKPKASHTDPKQPFEHVEPV

SEQ ID NO: 20603 - protein, 1732 aa, Oryza sativa
  unsure (1)..(1732): unsure at all Xaa locations
  Clone ID: TF_OSC401740j.C1.p1.np
IPTFPESPFSQEKNLKSSKASKATPGLEWYIPGLEIDLYSRDGCSGWLGLSSMMPRYKPEYLFGVEGFVQELRTMSFAIGFGTAPFYAQIPHDRHEEKCRVKVTLNSNSEDISSVMFEAGGGNYIHACQEVARIAIGELRDRYSDQLADTEYRYHPRQPQGSDRGSYLETEGIENDATTRHLVEMLWAMDKTRAETVLAAQDREDRNRGKICKLEDKVDRLEKELAALKGEAPPQKARIRLTARKRALFVPRYQLALKMVLTRSNGNGPNNNNNNNNNGENPTLAQVLAQQAQLMNMMMQQLQNQQNQGNNHAPPQNKLAEFLRVRPPTFSSTTNHVEAGDWLHAIEKKLDLLQCTDXEKVSFASHQLHGPASEWWDHFRLNRTTAEPITWLEFTAAFRKTHIPSGVVSLKKKEFRSLTQGSRSVTEYLHEFNRLARYAPEDVRTDEERXERFLEGLNDELSYPLMTGDYHDFQKLVDKAIRQEDKYNRMEQKKRRIAHFKAQQGNSQRPRLTLGPQSMPQGVSSSVVRLQRQFFNNNAGNNIRNQAPRPVAASTQQQPAKKEQGSKPGVCFNCGDPGHYADKCPKPRRVKVVPAQSNSTAPASKARVNHVAAAEAQGAPDVILGTFLVNLVPATLLFDSGAIHSFLSMSFAGNHGMEVEDLRRPLMVSTPSNQALSLQHSPSVRIEIQGVPFLANLILLESKDLDVILGMDWLARYKGVIDCANRKVILTNNDGRVVTVHALSSESLRSSLNQITLKEIPIVREYPDVFPDDLPGMPSKRDIEFRIDLVPGTTPIHKRPYRMAANELVEVKRQVDDLLQKGYIRPSSSPWRAPVIFVEKKDHTQRMCVDYRALNDVTIKNKYPLPRIDDLFDQLKGATVFSKIDLRSGYHQLRIKEEDIPKTAFTTRYGLFECTVMSFGLTNAPAFFMNLMNKVFMEYLDKFMVVFIDDILIYSRTKEEHEEHLRLALEKLREHQLYAKFSKCEFWLSEVNFLGHVISAGGVAVDPSNVESVTNWKQPKTVSEIHSFLGLAGYYRRFIENFSKIAKPMTRLLQKDVKYKWSEECEQSFQELKNRLISAPILILPDPKKGFQVYCDASKLGLGCVLMQDGKVVAYASRQLRPHEKNYPTHDLELAAVVHALKIWRHYLFGTRTEVYTDHKSLKYIFTQPDLNMRQRRWLELIKDYDMGIYYHPGKANVVADALSRKGYCNATEGRQLPLELCKEFERLNLGMVSRGFVAALEAKPTLIDEVREAQINDPDIQEIKKNMRRGKAIGFLEDEQGTVWLGERICVPDNKDLKDAILKEAHDTLYSIHPGSTKMYQDLKERFWWASMKREIAEYVAVCDVCQRVKAEHQKPAGLLQPLKIPEWKWEEIGMDFITGLPRTSSGHDSIWVIVDRLTKVAHFIPVKTTYSGSRLAELYMARIVCLHGVPKKIVSDRGSQFTSKFWKKLQEEMGSKLNFSTAYHPQTDGQTERVNQILEDMLRACALDFGGSWDKNLPYAEFSYNNSYQASLQMAPYEALYGRKCRTPLLWDQTGERQVFGTDILREAEEKVKIIQERLRVAQSRHKSYADNRRRELSFDEGDYVYLRVTPLRGVHRFHTKGKLAPHFVGPYKIVSRRGEVAYQLELPXSLAGVHNVFHVSQLKKCLRVPTEETNLEQIEVQEDLTYLEKPIRILEIDERRTRNRVIRFCKVQWSNHSEEESTWEREDELKSAHPHLFASFSESRGRDSV

SEQ ID NO: 20604 - protein, 988 aa, Oryza sativa
  unsure (1)..(988): unsure at all Xaa locations
  Clone ID: TF_OSC401750j.C1.p20.np
EELDSSAFQYHPHKPHGQDYGTYTCPDGEESATLMHAVHMLSAMDAVSVERAKAAHDRENWNRGKICKLESKVYRLQKELAELKGETPPPTPKLRLTARKRTCPPPRLQLASKIRVMGEAVPDRAEPVIDIISDEEEEEDPEEREPATPEEEDPSLRSDARRTTNPVEAGDWLHAVEKKLDLIQCTEQEKVSFASHQLHGPAAEWWDHFRQGRAEGEPITWQEFTAAFKKTHIPTGVVALKKREFRALNQGSRSVTEYLHDFNRLARYAPEDVRTDEERQEKFLEGLNDELSYALMSTDFRDFQQLVDKAIRQEDKYNRMEQKKRRAAQFKAQQGSNQRPRLVTGPQAPSYPQGGSSSVVRPQRQFYNNNTGNRGNDNRNMVARPAATPAQNQPVRKEQGSKPGVCFNCGDPGHYADKCPKPRRVKNAPAPNNSNAPAPKARVNHVAAAEAQNAPDVVLGTFPVNSIPASVLFDSGATHSFLSKSFASNHGMEVISLGRPLLVNTPGNQVFSTQYCPSATIEIEEVPFPSSLILLESKDLDVILGMDWLSRHRGVIDCANRKVTLTNSNGETVSFFVSSPKSHGVILNQVALQEIPIVQDYPDVFPEDLPGMPPKRDIEFRIDLVPGTNPIHKRPYRMAANELAEVKRQVDDLLQKGYIRPSTSPWGAPVIFVEKKDHTXRMCVDYRALNEVTIKNKYPLPRIDDLFDQLEGATVFSKIDLRSGYYXLRIREEDIPKTAFTTRYGLFECTVMSFGLTNAPAFFMNLMNKVFMEYLDKFVVVFIDDILIYSKTKEEHEEHLRLALEKLREHQLYAKFSKCEFWLSEVKFLGHVISSGGVAVDPSNVESVLSWKQPKTVSEIRSFLGLAGYYRRFIENFSKIARPMTRLLQKEVKYKWTEDCEQSFQELKKRLVTAPVLILPDSRKGFQVYCDASRLGLGCVLMQEGKVVAYASRQLRPHENNYPTHDLELAAVVHALKIWRNHTFAXDL

SEQ ID NO: 20605 - protein, 1576 aa, Oryza sativa
  Clone ID: TF_OSC405551j.C1.p5.fg
MAFEVGYEVAPEYRRISHDPNEEKCHVRVTLASDREDLPSIKFEAGGRSYSHACQEAALVAIGELRQRFEEELDSSAFQYHPHKPHGQDYGTYTCPDGEESAALMHAVHMLSAMDAVSVERDKAAHDRENWNRGKICKLESKVYRLQKELAELKGETPPPTPKLRLIARKRTCPPPRLQLASKIRVMGEAVPNRAEPVIDIISDEEEEEDPEEREPATPEEEDPSLRSDARRDYTTNPVEAGDWLHPVEKKLDLIQCTEQEKVSFASHQLHGPAAEWWDHFRQGRAEGEPITWQEFTAAFKKTHIPTGVVALKKREFRALNQGSRSVTEYLHDFNRLARYAPEDVLTDEERQEKFLEGLNDELSYALMSTDFRDFQQLVDKAIRQEDKYNRMEQKKRRAAQFKAQQGSNQRPRLVTGPQAPSYPQGGSSSVVRPQRQFYNNNTATPAQNQSVRKEQGSKPGVCFNCGDPGHYADKCPKPRCVKNVPAPNNSNAPAPKARVNHVAAAEAQNAPDVVLGTFPVNSIPASVLFDSGATHSFLSKSFASNNGMEVISLGRPLLVNTPGNQVFSTQYCPSVTIEIEEVPFPSSLILLESKDLDVILGMDWLSRHRGVIDCANRKVTLSSSNGETVSFFVSSPKYHGVILNQVALQEIPIVQDYPDVFPEDLPGMPPKRDIEFRIDLVPGTNPIHKRPYRMAANELAEVKRQVDDLLQKGYIRPSTSPWGAPVIFVEKKDHTQRMCVDYRALNEVTIKNKYPLPRIDDLFDQLEGATVFSKIDLRSGYHQLRIREEDIPKTAFTTRYGLFECTVMSFGLTNAPAFFMNLMNKVFMEYLDKFVVVFIDDILIYSKTKEEHEEHLRLALEKLREHQLYAKFSKCEFWLSEVKFLGHVISSRGVAVDPSNVESVLSWKQPKTVSEIRSFLGLAGYYRRFIENFSKIARPMTRLLQKEVKYKWTEDCEQSFQELKKRLVTAPVLILPDSRKGFQVYCDASRLGLGCVLMQEGKVVAYASRQLRPHENNYPTHDLELAAVVHALKIWRHYLFGNRREMYTDHKSLKYIFTQPDLNMRQRRWLELIKDYDMEIHYHPGKANVVADALSRKSYCNMSEGRHLPWELCQEFEKLNLDIVSKGFVATLQAQPTLFDQVREAQVNDLDIQEIKKNMRRGKAIGYVEDEQGTVWLGERICVPENKELKDTIMKEAHETLYSIHPGSTKMYQDLKQQFWWASMRREIAEYVALCDVCQRVKAEHQKPASLLQPLKIPEWKWEEIGMDFITGLPRTSAGHDSIWVVVDRLTKVAHFIPVKTTYTGNKLAELYMARVVCLHGVPKKIVSDRGSQFTSKFWQKLQVEMGTRLNFSTAYHPQTDGQTERVNQILEDMLRACVLDFGGSWDKNLPYAEFSYNNSYQASLQMAPYEALYGRKCRTPLLWDQTGERQVFGTDILREAEEKVKIIQERLRVAQSRQKSYADNRRRDLAFEEGDYVYLRVTPLRGVHRFQTKGKLAPRFVGPFKIVSRRGEVAYQLELPPSMAGIHDVFHVSQLKKCLRVPTEEADPDRIELQEDLTYVEKPVRILENFLGII

SEQ ID NO: 20606 - protein, 1264 aa, Oryza sativa
  Clone ID: TF_OSC407994j.C1.p15.fg
MAAVRMTLRWDGSYQPPLRRKQMPRYKPEYLFGVEGFVQELRTMSFAIGFGTAPFYAQIPHDRHEEKCRVKVTLNSNSEDIPSVMFEAGGRNYIHACQEVARIAIGELRDRYCDQLADTEYRYHPRQPQGSDRGSYLETEGIENDATTKHLVEMLWAMDETRAETVLAAQDREDRNRGKICKLEDKVDRLEKELAALKGEAPPQKARIRLTARKRALFVPRYQLAPKVRVVEKEVTPALADPPVVNNKLAEFLRVRPPTFSSTTNPVEAGDWLHAIEKKLDLLQCTDQEKVSFASHQLHGPASEWWDHFRLNRTTAEPITWLEFTAAFRKTHIPSGVVSLKKKEFRSLTQGSRSVTEYLHEFNRLARYAPEDVRTDEERQEKFLEGLNDELSYPLMTGDYPDFQKLVDKAIRQEDKYNRMEQKKRRIAYFKAQQGNSQRPRLTLGPQSMPQGGSSSVVRPQRQFFNNNAGNNIRNQAPRPVAAPTQQQPAKKEQGSKPGVCFNCGDPGHYADKCPKPRRVKVVPAQSNSTIPASKARVNHVAAAEAQDAPDMILGTFLVNLVPATVLFDSGATHSFLSMSFAGNHRMEVEDLRRPLMVSTPSNQALSLQRSPSIRIEIQGVPFLANLILLESKDLDVILGMDWLARYKGVIDCANRKVTLTSNDGRVVTVHALSSESLRSSLNQITLEEIPVVREYPDVFPDDLPGMPPKRDIEFRIDLVPGTTPIHKRPYRMAANELAEVKRQVDDLLQKGYIRPSSSPWGAPVIFVEKKDHTQRMCVDYRALNDVTIKNKYPLPRIDDLFDQLKGATVFSKIDLRSGYHQLRIKEEDIPKTAFTTRYGLFECTVMSFGLTNAPAFFMNLMNKVFMEYLDKFVVVFIDDILIYSRTKEEHEEHLRLALEKLREHQLYAKFSKCEFWLSEVKFLGHVISAGGVAVDPSNVESVTNWKQPKTVSEICSFLGLAGYYRRFIENFSKIAKPMTRLLQEEMGSKLNFSTAYHPQTDGQTERVNQILEDMLRACALDFGGSWDKNLPYAEFSYNNSYQASLQMAPYEALYGRKCRTPLLWDQTGERQVFGTDILREAEEKVKIIQEILRVAQSRHKSYADNRRRDLSFDEGDYVYLRVTPLRGVHRFHTKGKLAPRFVGPYKIVSRRGEVAYQLELPQSLAGVHNVFHVSQLKKCLRVPTEETNLEQIEVQEDLTYVEKPIRILEIDERRTRNRVIRFCKVQWSNHSEEESTWEREDELKSAHPHLFASSSESRGRDSV

SEQ ID NO: 20607 - protein, 1989 aa, Oryza sativa
  unsure (1)..(1989): unsure at all Xaa locations
  Clone ID: TF_OSC408075j.C1.p2.np
VTSWYQSHLDLRISQMMPPHSPRNLIKVLGFVRELRLMAFEVGYEVAPEYRRISHDPNEEKCRVRVTLASDREDLPSIKFEAGGRSYSHACQEAALVAIGELRQRFEEELDSSAFQYHPHKPHGQDYGTYTCPDGEESATLMHAVHMLSAMDAVSVERDKAAHDRENWNRGKICKLESKVYRLQKELVELKGETPPPTPKLRLIARKRTCPPPRLQLALKIRVMGEAVPDRAEPVIDIISDEEEEEDPEEREPATPEEEDPSLRSDARRTTNPVEAGDWLHAVEKKLDLIQCTEQEKVYFASHQLHGPAAEWWDHFRQGRAEGEPITWQEFMAAFKKTHIPTGVVALKKREFRALNQGSRSVTEYLHDFNRLARYAPEDVRTDEERQEKFLEGLNDELSYALMSTDFRDFQQLVDKAIRQEDKYNRMEQKKRRAAQFKAQQGSNQRPRLVTGPQAPSYPQGGSSSVIRPQRQFYNNNIGNRGNDNRNMVARPTATLAQNQPVRKEQGSKPGVCFNCGDPGHYADKCPKPRRVKNAPASNNSSVPAPKARVNHVAAAEAQNAPDVVLGTFPVNSIPASMLFDSGATHSFLSKSFASNHGMEVISLGRPLLVNPPGNQVSSTQYCPSATIEIEKVPFPSSLILLESKDLDIILGMDWLSRHRGVIDCANRKVTLTSSNGETVSFFVSSPKYHGVILNQVALQEIPIVQDYPDVFPEDLPGMPPKRDIEFRIDLVPGTNPIHKRPYRMAANELAEVKRQVDDLLQKGYIRPSTSPWGAPVIFVEKKDHTQRMCVDYRALNEVTIKNKYPLPRIDDLFDQLEGATVFSKIDLRSGYHQLRIREEDIPKTAFTTRYGLFECTVMSFGLTNAPAFFMNLMNKVFMEYLDKFVVVFIDDILIYSKTKEEHEEHLRLALEKLREHQLYAKFSKCEFWLSEVKFLGHVISSGGVAVDPSNVESVLSWKQPKTVSEIRSFLGLAGYYRRFIENFSKIARPMTRLLQKEVKYKWTEDCEQSFQELKKRLATAPVLILPDSRKGFQVYCDESRLGLGCVLMQEGKVVAYASRQLRPHENNYPTHDLELAAVVHALKIWRHYLFGNRTEMYTDHKSLKYIFTQPDLNMRQRRWLELIKDYDMEIHYHPGKANVVADALSRKSYCNMSEGRHLPWELCQEFEKLNLDIVSKGFVATLEAQPTLFDQVREAQVNDPDIQEIKKNMRRGKAIGYVEDEQGTVWLGERICVPDNKELKDTIMKEAHETLYSIHPGSIKMYQDLKQQFWWASMRREIEEYVALCDVCQRVKAEHQKPAGLLQPLKIPEWKWEEIGMDFITGLPRTSAGHDSIWVVVDRLTKLAHFIPVKTTYTGNKLAELYMARVVCLHGVPKKIVSDRGSQFTSKFWQKLQVEMGTRLNFSTAYHPQTDGQTERVNQILEDMLRACVLDFGGSWDKNLRSKREEYQESRYTVLQVAIYFAPCPPKCLSDSSSALFWEFRWLAAPAVQLVHQPTLVLKSRVEPEENHESANEQSQHSNRSHRTASRNAEVEQPRRSDRSHRTASRDAERTVSPLSPLCQSQFWRRTPPFPTSCGKQHEALNGSSDTNLARISRHRQEEDQEILERDRSWNETPVACYDFPTFQHMINNIRKDFEIFCDASRQGLGCVLMQERKVVAYASRQLRPHEVNYPTHDLELAAVVHALKIWRHYLIGNRCEVYTDHKSLKYIFTQTELNMRQRRWLELIKDYDLGIHYHPGKANVVADALSRKAYCNVAQIRPDQDRLCRXMEKLRLTVVQSGVPASLTVQPTLESQIREAQKDDEGIKELIKRIQEKKDTNFSIDDQGTVWCGPRICVPAKKELRDLILKEAHESAYSIHPGSTKMYQDIKAYFWWAGMKRDVTEYVALCDICQRVKAEHQRPAGLLQPLPIPERKWEEIGMDFITGLPRTPSGYDSIWVIVDRLTKSAHFMPVKTTFDGKELAEKTIKFYKVQWSNHSEDEATWEREDLL

SEQ ID NO: 20608 - protein, 1082 aa, Oryza sativa
  Clone ID: TF_OSC409804j.C1.p8.gm
MVNTRTGSGSGSGSGAANNGGDPTLAQILAQQTQLINLLVQQAQNQQANNQNQNPSPPPQNKLADFLRVRPPTFSSTTNPVEAGDWLHAVEKKLDLIQCTEQEKVSFASHQLHGPAAEWWDHFRQGRAEGEPITWQEFTAAFKKTHIPTGVVALKKREFRALNQGSRSVTEYLHDFNRLARYAPEDVRTDEERQEKFLEGLNDELSYALMSTDFRDFQQLVDKAIRQENKYNRMEQKKRRAAQFKAQQGSNQRPRLVTGPQAPSYPQGGSSSVVRPQRQFYNNNTGNRGNDNRDMVARPAATPAQNQPVRKEQGSKPGVCFNCGDPGHYADKCPKPRRVKNAPAPNNSNAPVPKARVNHVAAAEAQNAPDVVLGMPPKRDIEFRIDLVPGTNPIHKRPYRMAANELAEVKRQVDDLLQKGYIRPSTSPWGAPVIFVEKKNHTQRMCVDYRALNEVTTKNKYPLPRIDDLFDQLEGATVFSKIDLRSGYHQLRIREEDIPKTAFTTRKGFVATLEAQPTLFDQVREAQVNDPDIQEIKKNMRRGKAIGYVEDEQGTVWLGERICVPDNKELKDTIMKEAHETLYSIHPGSTKMYQDLKQQFWWASMRREIAEYVALCDVYQRVKAKHQKPAGVGKPGRTSALAAGRRSPVAAADHPISGEVANPGRPLMILRSGEKSVWVAGESMPLVVEGVIMIQIEILGVTASEPYTRKKGLSLLDVVGVHYAVCPFDLSIALRVRNRGEANLDSQSNTVILEVSADELRAVVCYDAVRQSISAEYPFDKLDGIIGLDFSCGRCLNPLGEFVDGHKQELVAALSSWEWSEYVEPQHENGQEEMFAVVGRDAFEKYSVWSLFVQIFADHTVDFGLSGYLLSFSVVFGQLITTQQLNERGPPVFRGLDIGNDPRERARGPGPREWGPHVSLSVHGGPGARGWRRPAPWVPRVSRTRGRGRLTAGPYLAAAGRARRRPFPAQPTGDGAPAPRWSPPGDHRRGGTAPERAERTGTKGRSTAHPGSTATTGTAAEAEEGGGAVRDDEDDGAPTVGGRNGGADEVDEDAAKPMEVTPRREEARGDGGMRRIRRRRRR

SEQ ID NO: 20609 - protein, 961 aa, Oryza sativa
  Clone ID: TF_OSC5118j.C1.p2.fg
MGVAGESIASGFEGEIMIQERCTVMPPHSPRNLIKVLGFVRELRLMAFEYHPHKPHGQDYGTYTYPDGEESATLMQAVHMLSSMYAVSVERDKAAHDRENWNRGKICKLESKVYRLQKELAELKGETPPPTPKLHLTARKRTCPPPRLQLASKLRVMGDAVPDRAEPVIHVLSDEEEEEYPEERMVNTRTGSGSGAANNGGDSTLAQILAQQTQLINLLVQQAQNQQANNQNQNQPPPPQNKLADFLRLHGPAAEWWDHFRQARAEGEPITWQEFTAAFKNTHIMTGVVALKKREFRALNQGSRSVTEYLHDFNRLARYAPKYVRTDEERQEKFLEGLNDELSYALMSTDFRDFQQLVDKAIRQEDKYNRIEQKKRRAAQFKAQQGSNQRSRLVTGPQATSYPQGGSSSVARPQRQFYNNNTGNRGNDNRNVVARPAATPAKNQPVRKEQGSKPGVCFNCGDPGHYADKCPKPRRVKNAPAPNNSNTPAPKARVNHVVAAEAQNAPDVVLGMPPKRDIEFRIDLVPGTNPIHKRPYRMAANELAEIKRQVDDLLQKGYIRPSTSPWGAPVIFVEKKDHTQRVFMEYLDKFVVVFIDDILIYSKTKEEHEEHLRLALEKLREHQLYAKFSKCEFWLSEVKFLGHVISSGGVAVDPSNVESVLNWKQPKTVSEIRSFLGLAGYYRRFIENFSKIARPMTRLLQKDVKYKWTEDCEQSFQELKKRLVTAPVLILPDSRKGFHVYCDASRLGLGCVLMQEGMVVAYASKQLRPHENNYPTHDLELAAVVHALKIWRHYLFGNRTEMYTDHKSLKWLELIKDYDMEIHYHPGKANVVADALSRKSYCNMSEGRHLPWELCQEFEKLNLGIVSKGFVAALEAQPTLFDQVREAQGNDPDIQEIKKNMRRGKAIGYVEDEQGTVWLGERIWVPDNKELKDTIVKEAHETLYSIHPRSTKMYQDLKQQF

SEQ ID NO: 20610 - protein, 1336 aa, Oryza sativa
  unsure (1)..(1336): unsure at all Xaa locations
  Clone ID: TF_OSC5135j.C1.p1.np
MVAAGDHRRGGAAPEKGEGRGKXNRSTAHPGSTVTGTATGAEEGGGAARVNEGDGVPAVGGRNGGVDEVGEVAANPKKATPKRERVRGDDGGGPELGGDGGEREXRRELDSDGERERRVAETVEGGTGSVYIVLGGGENGRRGRKPARRSRAPSMRRRGLRECFQTNPREREREKLNDDVNVLFNSWFGMVNSXFGDSTVQPMPRYKPEYLFGTEGFVQELRTMSFLIGFGIAPLYAQIPHDRDEEKCRVKVTLNSNREDIPSVMFEAGGGSYIHACQEVARIAIGELRESYNDRLADTEYRYHPRQPQGSDHGSYLEPAGIENDATTRHLVEMLWAMDETRAEIVIAAQDREDQNRGKICKLEDKLDRLEKELAALKGEAPPQKARVRLTARKRALFVPRYQLAPKVRVVEKEVAPADPPVVNVSDDDEEESKRTHSKIEWGPTQDDGDVPNEPSILRCPEDLDNGNGPNNNNNNNNAENPTLAQVLAQQTQLMNLMMQQLQNQQNQGNNHAPPQNKLAEFLRVRPPVFSSTTNPVEASDWLHAIEKKLDLLQCRDQEKVSFASHQLHGPASEWWDHSCLNRTTAEPISWLEFTAALRKTHIPSGVVSLKKKEFRSLTQGSRTVTEYLHEFNHLARYAPEDVRTDEERQEKFLEGLNDELSYPLMTGDYHDFQKLVDKAIRQEDNYNRMEQKKHRIAHFKAQQGNSQRPRIASGPLSMPQGGSSSVVRPQRQFFNNNAGNNNRKPAPCPVATPSQQXPAKREQGSKPGVCFNCGDPGHYADKCPKPCRAKVVPAQNNSSAPAAKARVNHVAAAEAQGAPDVILGTFPVNSVPATVLFDSGATHSFLSMSFAENHGMEVEELRRPLMVSTPSNQALSSQRSPSVRIEIRGVPFLANLILLESKDLDVILGMDWLARYKGVIDCANRKVTLTSNDGQVVTVHALPSEPRRSSLNQITLEEIPIDREYPDVFPDDLPGMPPKRDIEFRIDLVPGTTPIHKRPYRMAANELAEVKRQVDDLLQKGYIRPSSSPWGAPVIFVEKKDHTQRMCVDYRALNDVTIKNKYPLPSIDDLFDQLKGATVFSKIDLRSGYHQLRIKEYGLFECTVMSFGLTNAPAFFMNLMNKVFMYGLFECTVMSFGLTNAPAFFMNLMNKVFMEYLDKFVVVFIDDILIYSXTKEEHEEHLRLALEKLREHQLYAKFSKCEFWLSEVKFLGHVISAGGVAVDPSNMESVTNSKQPKTVTEIRSFLGLAGYYRRFIENFSKIAKPMTRLLQKDVKYKRLEECEQSFQELKSHLISAPILILPDPKKGFQVYYDASKGCLMSELTHILLYQCSQLH

SEQ ID NO: 20611 - protein, 1320 aa, Oryza sativa
  Clone ID: TF_OSC5376j.C1.p5.fg
MGVAGESIASGFEGEIMIQERCTVMPPHSPRNLIKVLGFVRELRLMAFEYHPHKPHGQDYGTYTYPDGEESATLMQAVHMLSSMYAVSVERDKAAHDRENWNRGKICKLESKVYRLQKELAELKGETPPPTPKLHLTARKRTCPPPRLQLASKLRVMGDAVPDRAEPVIHVLSDEEEEEYPEERMVNTRTGSGSGAANNGGDSTLAQILAQQTQLINLLVQQAQNQQANNQNQNQPPPPQNKLADFLRLHGPAAEWWDHFRQARAEGEPITWQEFTAAFKNTHIMTGVVALKKREFRALNQGSRSVTEYLHDFNRLARYAPKYVRTDEERQEKFLEGLNDELSYALMSTDFRDFQQLVDKAIRQEDKYNRIEQKKRRAAQFKAQQGSNQRSRLVTGPQATSYPQGGSSSVARPQRQFYNNNTGNRGNDNRNVVARPAATPAKNQPVRKEQGSKPGVCFNCGDPGHYADKCPKPRRVKNAPAPNNSNTPAPKARVNHVVAAEAQNAPDVVLGMPPKRDIEFRIDLVPGTNPIHKRPYRMAANELAEIKRQVDDLLQKGYIRPSTSPWGAPVIFVEKKDHTQRVFMEYLDKFVVVFIDDILIYSKTKEEHEEHLRLALEKLREHQLYAKFSKCEFWLSEVKFLGHVISSGGVAVDPSNVESVLNWKQPKTVSEIRSFLGLAGYYRRFIENFSKIARPMTRLLQKDVKYKWTEDCEQSFQELKKRLVTAPVLILPDSRKGFHVYCDASRLGLGCVLMQEGMVVAYASKQLRPHENNYPTHDLELAAVVHALKIWRHYLFGNRTEMYTDHKSLKWLELIKDYDMEIHYHPGKANVVADALSRKSYCNMSEGRHLPWELCQEFEKLNLGIVSKGFVAALEAQPTLFDQVREAQGNDPDIQEIKKNMRRGKAIGYVEDEQGTVWLGERICVPDNKELKDTIVKEAHETLYSIHPRSTKMYQDLKQQFWWASMRREIAEYVALCDVCQRVKAEHQKPAGLLQPLKIPEWKWEEIELYMARVVCLHGVPKKIVSDRGSQFTSKFWQKLQVEMGTRLNFSTAYHPQTDGQTERVNQILEDMLRPCVLDFGRSWDKNLPYAEFSYNNSYQASLQMAPYEALYGRKCRTPLLWDQTGERQVFGTDILREAEEKVKIIQERLRVAQSRQKSYADNRRRDLTFEGDYVYLRVTPLRGVHRFQTKGKLAPRFVGPFKIVSRRGEVAYQLELPPSMAGIHDVFHVSQLKKCLRVPTEEADPEHIELQEDLTYVEKPVRILEVSERNTRNRVIRFCKVQWSNHSEEEATWEREDELKSAHPHLFAGSSESRGRDSV

SEQ ID NO: 20612 - protein, 1638 aa, Oryza sativa
  unsure (1)..(1638): unsure at all Xaa locations
  Clone ID: TF_OSC5848j.C1.p1.np
VTSWYQSHLDLRTSQMTPPHPPESLINAVGFVRELRMMAFEVGYDVAPEYRQIPYDPNEEKCRVRVTLTSDREDLLSIKFEAGGRKYSHACQEVALVAIGELRHRFDEELESSAFQYHPHKPHGQDYGVYHCPEDEDSTTLKHAVYMLSAMDAVGVEREKTADDRENWNRGRICKLESKVYRLQKELAELKGEAPPPAPKLRLTARKRTRPPPRIQLASKTRVVGDVVPDHAEPIIHVLSNDEEEEDPEEREPATPEEEDPSLRSDARRTTNPVEAGDWLHAVEKKLDLILRTEXEKVSFALHQLHGPAAEWWDHFCQNRAAGEPITWREFTATFKKTHIPSGVVALKKRDFRALNQGSCSVTEYLHDFNRLAHYVPDDVRTDEERQEKFLEGLNDELSYALMAIEYRNFQQLVDKAIRQEDKYNRMEQKKRRAAYFKAQXGNSQRPRIALGPQAAPYPXGGSSSVARPQRQFYNNNTGNHSNDNRNVVTRPVAAPTQNQPVRKEQGIKPGVCFNCGDPGHYADKCPKPRRVKNAPVQNNSNAPAPKARVNHVAAAEAXNAPDVVLGTFPVNSIPATVLFDFGATHSFLSKSFASNHGMEVISLGRPLLVNTPGNQVSSTQYCPSITTEIQEIPFPSLILLESKDLDVILGVDWLTHHRGVIDCANRKVTLTSSNGXTVSFFVSSPRSHGLTLNQVALQEIPIVQDYPDVFPEDLPGMPPKRDIEFRINLVPGTNPIHKRPYRMAAIELAEVKRQVDDLLQKGYIRPSTSPWGAPVIFVEKKDHTQRMCVDYRALNEVTIKNKYPLPRIDDLFDQLEGATVFSKKDLCSGYHQLXIREEDIPKIAFTTRYGLFESTVMSFGLTNAPAYFMNLMNNVFMEYLDKFVVVFIDDILIYSKTKEEHEEHLRLALEKLREHQLYAKFSKCEWLPEVKFLSHVISAGGVVVDPSNVEXVLNWKQPKMVSEIRSFLGAGYYRRFIENFSKIARPMSRLLQKDVKYKWTEECEQSFQELKKRLVTAPMLVLPDPRKGFQVYCDASRHGLGCVLMQDGKVVAYTSRQLRPHENNYPTHDVELAAVVHELKIWRHYLFDNRTEMYTDHKCLKYIFTQPNLNMRQRRWLELIKDYDMEIHYHPGKANVVADALSRKSYCNMSEGRHLPWELCQELEKLNLGIVNKGFVAALEAQPTLFDQVREAQVNDLDIXEIEKNMRRGKTIGYIEDEQGTVWLGERICVPDNKELKDTIMKEAHETLYSIHPGSTKMYQDLKQQFWWASMRXEIAEYVALCDVCQRVKAEHQKPACQLQPLKILEWKWEEIGMDYITGLPRTSAGQDSIWVVVDRLTKVAHFIPVKTTYSGNKLAELYMARVVCLHGVPKKIVSDRGSQFTSMFWRKLQEEMRTRLNFSTTYHPQTDGQTKRVNQILEDMLRACVLDFGGSWDKNMPYAEFGYINSYQASLQMAPYEALYGRKCRTPLLWDQTGERQVFGTDILREAEEKVKIIQERLRIAQSRXKSYADNRRRDLTFEEGDYVYLRVTLLRGVHRFQTKGKLAPRFVGPFKIVSRRGEVAYQLELPPSMAGIHDVFHVSQLKKCLRVPTEEADPEHIELQKDLTYVEKPVRILVFPTFRRRAFTLRKAIDQYXNA

SEQ ID NO: 20613 - protein, 1141 aa, Oryza sativa
  Clone ID: TF_OSC900055j.C1.p25.gm
MVNTRTGSGSGSGSGAANNGGDPTLAQILAQQTQLINLLVQQAQNQQANNQNQNPSPPPQNKLADFLRVRPPTFSSTTNPVEAGDWLHAVEKKLDLIQCTEQEKVSFASHQLHGPAAEWWDHFRQGRAEGEPITWQEFTAAFKKTHIPTGVVALKKREFRALNQGSRSVTEYLHDFNRLARYAPEDVRTDEERQEKFLEGLNDELSYALMSTDFRDFQQLVDKAIRQENKYNRMEQKKRRAAQFKAQQGSNQRPRLVTGPQAPSYPQGGSSSVVRPQRQFYNNNTGNRGNDNRDMVARPAATPAQNQPVRKEQGSKPGVCFNCGDPGHYADKCPKPRRVKNAPAPNNSNAPVPKARVNHVAAAEAQNAPDVVLDVFPEDLPANELAEVKRQVDDLLQKGYIRPSTSPWGAPVIFVEKKNHTQRMCVDYRALNEVTTKNKYPLPRIDDLFDQLEGATVFSKIDLRSGYHQLRIREEDIPKTAFTTRYGLFECTVMSFGLTNAPAFFMNLMNKVFMEYLDKFVVVFIDDILIYSKTKEEHEEHLRLALEKLREHQLYAKFSKCEFWLSEVKFLGHVISSGGVAVDPSNVESVLSWKQPKTVSEIRSFLGLAGYYRRFIKNFSKIARPMTRLLQKEVKYNKGFVATLEAQPTLFDQVREAQVNDPDIQEIKKNMRRGKAIGYVEDEQGTVWLGERICVPDNKELKDTIMKEAHETLYSIHPGSTKMYQDLKQQFWWASMRREIAEYVALCDVYQRVKAKHQKPAVKKCLRAPTEEADPDRIELQEDLTYVEKPVRILELILISSPVLLNLEDEIPFKGASPPSPPSPRRRRPSSIRRRAAASTITVACRRRHCFRQGVGKPGRTSALAAGRRSPVAAADHPISGEVANPGRPLMILRSGEKSVWVAGESMPLVVEGVIMIQIEILGVTASEPYTRKKGLSLLDVVGVHYAVCPFDLSIALRVRNRGEANLDSQSNTVILEVSADELRAVVCYDAVRQSISAEYPFDKLDGIIGLDFSCGRCLNPLGEFVDGHKQELVAALSSWEWSEYVEPQHENGQEEMFAVVGRDAFEKYSVWSLFVQIFADHTVDFGLSGYLLSFSVVFGQLITTQQLNERGPPVFRGLDIGNDVFRLCSPRNTSSKLCRE

SEQ ID NO: 20614 - protein, 1564 aa, Oryza sativa
  Clone ID: TF_OSC900186j.C1.p15.fg
MVDLVKMIPTFPESPFSQGKILKSSKASKATPGLEWYIPGLEIDLYSRMPRYKPEYLFGVEGFVQELRTMSFAIGFGTAPFYAQIPHDRHEEKCRVKVTLNSNSEDIPSVMFEAGGRNYIHTCQEVARIAIGELRDRYSDQLADTEYRYHPRQPLGSDRGSYLETKGIKNDATTRHLVKMLWAMDETRAETVLAAQDREDRNRGKICKLEDKVDRLEKELAALKGEAPPQKARIRLTARKRALFVPRYQLAPKVRVVEKEVTPALADPPVVNMVLTRNNGNDPNNNNNNSNGENPTLAQVLAQQAQLMNMMMQQLQNQQNQGNNHAPPQNKLAEFLRVRPPTFSSTTNPVEAGDWLHAIEKKLDLLQCADQEKVSFASHQLHGPASEWWDHFRLNRTTAEPITWLEFTAAFRKTHIPSGVVSLKKKEFRSLTQGSRSVTEYLHEFNRLARYAPEDVRTDEERQEKFLEGLNDELSYPLMTGDYPDFQKLVDKAIRQEDKYNHMEQKKRRIAHFKAQQGNSQRPSLTLGPQSMPQGGSSFVVRPQHQFFNNNAGNNIRNQAPRPVAASTQQQPAKKEQGSKSGVCFNCGDPGHYADKCPKPRRVKVVPAQSNSTVPASKARVNHVAAAEAQDAPDVILGTFLVNLVPTTVLFDSGATHSFLSMSFAGNHGMEVEDLRHPLMVSTPSNQALSLQRSPSVRIEIQGVPFLANLILLESKDIDVILGIDWLARYKGVIDCANRKVTLTSNDGRVVTVHALSSESLRSRLNQITLEEIPVVREYPDVFPDDLPGMPPKRDIEFRIDLVPGTTPIHKRPYRMAANELAEVKRQVDDLLQKGYIRPSSSPWGAPVIFVEKKDHTQRMCVDYRALNDVTIKNKYPLPRIDDLFDQLKGATVFSKIDLRSGYHQLRIKEEDIPKTAFTTRYGLFECTVMSFGLTNAPAFFMNLMNKVFMEYLDKFVVVFIDDILIYSRTKEEHEEHLRLALEKLREHQLYAKFSKCEFWLSEVKFLGHVISAGGVAVDPSNVESVTNWKQPKTVSEIRSFLGLAGYYRRFIENFSKIAKPMTRLLQKDVKYKWSEECEQSFQELKNRLISAPILILPDPKKGFQVYCDASKLGLGCVLMQDGKVVAYASRQLRPHEKNYPTHDLELAAVVHALKIWRHYLFGTRTEVYTDHKSLKYIFTQPDLNMRQRRWLELIKDYDMGIHYHPGKANVVADALSRKGYCNATEGRQLPLELCKEFERLNLGMVRRGFVAALEAKPTLIDQVREAQINDPDIQEIKKNMRRGKAIGFLEDEQGTVWLGERICVPDNKDLKDAILKEAHDTLYSIHPGSTKMYQDLKERFWWASMKREIAEHVAVCDVCQRVKAEHQKPAGLLQPLKIPEWKWEEIGMDFITGLPRTSSGHDSIWVIVDRLTKVAHFIPVKTTYSGSRLAELYMARITDGQTKRVNQILEDMLRACALDFGGSWDKNLPYAEFSYNNSYQASLQMAPYEVLYGRKCRTPLLWDQTGERQVFGMDILREAEEKVKIIQERLRVAQSRHKSYADNRRRDLSFDEGDYVYLRVTPL

SEQ ID NO: 20615 - protein, 773 aa, Oryza sativa
  Clone ID: TF_OSC900399j.C1.p17.gm
MVLTRSNGNGPNNNNNNNNGENPTLAQVLAQQAQLMNMMMQQLQNQQNQGNNHAPPQNKLAEFLRVRPPTFSSTTNPVEAGDWLHAIEKKLDLLQCTDQEKVSFASHQLHGPASEWWDHFRLNRTTAEPITWLEFTAAFRKTHIPSGVVSLKKKEFRSLTQGSRSVTEYLHEFNRLARYAPEDVRTDEERQEKFLEGLNDELSYPLMTGEQKKCRIAHFKAQQGNTSTPQQPAKREQGSKPGVCFNCGDPGHYADKCPKPRRVKVVPDQSNSTVPASKARVNHVVAAEAQDAPDVILEKKDHTQRMCVDYRALNDVTIKNKYPLPRIDDLFDQLKAEGRGRADRVHGSGAHAAASRSTVDRPLGAPEGGQAGAAGGRRRACAPMVAAGYHQRDGAAPERGEGKGETKRRSTAHHGSTATMETATGAEEGGGAARVDGVDGVPAVGERNGGVDEVGEDAAKPKEAASRWEVVRGDNGGGPELGSDGGERERRRELDSGGERGRRVAETVVGSSGRVYIGLGVREGGRRRGKWARETRPPLMAPASKCEFWLSEVKFLGHVISAGGVAVDPSNVESVTNWKQPKTVSEIRRFLGLAGYYRRFIENFSKIAKPMTRLLQKDVKYKCLATPSSPLLQPCSAIAPVIAVARGGRHRGRRCVAVLVRPFAVAVDRRNTAAVVKPKVAAASSLTPSPSVDLPPPFWSPVSSPRHPLRAGALRSRRRAVVRRRVCKPEPPPVVTSPLTSSSSSLVVRPWTGEDFEEFQGQQGKSHRSQTTL

SEQ ID NO: 20616 - protein, 1820 aa, Oryza sativa
  unsure (1)..(1820): unsure at all Xaa locations
  Clone ID: TF_OSC9428j.C1.p1.np
SMLGGNXLDSWFGMVNSWFGGLVCSTMPPHSPRNLFKVLGFVRELRLMVFEVGYEVAPEYRQISHDPDEEKCRVRVTLASDREDLPSIKFEAGGRSYSHACQEAALVAIGELRQRFEEELDSSAFQYHPHKPHGQDYGTYTCPDGEESATLMHAVHMLSAMDAVSVERDKAAHDRENWNRGKIYKLKSKVYRLQKELAELKGETPPPTPKLRLTARKRTCPPPRLQLALKIRVMGEAVPDRAEPVIDIISDEEEEEDPEEREATPEEEDPPVVPAYRQMVNTRTGTGSGSGSGSGATNNGGDPTLAQILAQQTQLINLLVQQAQNQQANNQNHPPPQNKLADFLRVRPPTFSSTTNPVEAGDWLHAVEKKLDLIQCTEQEKVSFASHQLHGPAAEWWDHFRQGRAEGEPITWQEFTAAFKKTHIPAGVVALKKREFRELNQGSRSVTKYLHDFNRLARYAPEDVRTDEERQEKFLEGLNDELSYALMSTDFRDFQQLVDKAIRQEDKYNRMEQKKRRAAQFKTQQGSNQRPRLVTGPQVPSYPQGGSSSVVRPQRQFYNNNSGNDNRNVVARPAATPAQNQPVRKEQGSKPGVCFNCGDPGHYADKCPKPRRVKNAPAPNNSNAPAPKARVNHVAAAEAQSAPDVILGTFPVNSIPATVLFDSGATHSFLSKSFASNHGMEVISLGRPLLVNTLGNQVFSTQYCPSATIEIEEVPFPSSLILLESKDLDVILGMDWLSRHRGVIDCASRKVTLTNSIGETVSFLASSPKSHGVILNQVALQEIPIVQDYPDVFPEDLLGMPPKRDIEFRIDLVPGTNPIHKRPYRMAANELAEVKRQVDDLLQKGYIRPSTSPWGAPVIFVEKKDHTQRMCVDYRALNEVTIKNKYPLPRIDDLFDQLEGATVFSKIDLRSGYHQLRIREYGLFECTVMSFGLTNAPAFFMYHQLRIREYGLFECTVMSFGLTNAPAFFMNLMNKVFMEYLDKFVVVFIDDILIYSKTKEEHEEHLRLALEKLREHQLYAKFSKCEFWLSEVKFLGHVISSGGVAVDPSNVESVLSWKQPKTVSEIRSFLGLAGYYRRFIENFSKIARPMTRLLQKEVKYKWTEDCERSFQELKKRLVTAPVLILPDSRKGFQVYCDASRLGLGCVLMQEGKVVAYASRQLRPHENNYPTHDLELAAVVHALKIWRHYLFGNRTEKFEKLNLGIVSNGFVAALEAKPTLFDQVREAQVNDPDIQEIKKNMRRGKAIGYVEDEQGTVWLGERICVPENKGLKDTIMKEAHETLYSIHPGSTKMYQDLKQQFWWASMRREIAEYVALCDVCQRVKAEHQKPAGLLQPLKIPEWKWEEIGMDFITGLPRTSAGHDSIWVVVDRLTKVAHFIPVKTTYTGNKLAELYMARVVCLHGVPKKIVSDRGSQFTSKFWQKLQLEMGTRLNFSTAYHPQTDGQTERINQILEDMLRACVLDFGGSWDKNLPYAEFSYNNSYQASLQMAPYEALYGRKCRTPLLWDQTGERQVFGTDILREAEEKVKIIQERLRVAQSRQKSYADNRRRDLAFEEGDYVYLRVTPLRGVHRFQTKGKLAPRFVGPFKIVSRRGEVAYQLELPPSMAGIHDVFHVSQLKKCLRVPTEEADPDRIELQEDLTYVEKPVRILEVTERNTRNCVIRFCKVQWSNHSEEEATWEREDELNALFRLPPLPWSPVPPSRRAAALVRRRRRPSSAAPRHPPPSPPLAVAAVRCARRXGSLATSSFAADRRSSPSPTDRAAAVVPLVAGHHRSSFVVVVSTVGFVSSSSTCTCPPKPRPTALAPARSPIRASHCSSMLV

SEQ ID NO: 20617 - protein, 1181 aa, Oryza sativa
  Clone ID: TF_OSC29927j.C1.p3.fg
MSDLVEKNGENGNQDGASSKGTSPPKGATIPFDYNKLTIPSHNFVSVPSGRAPRFDGTHYAAWKHKMKLHLISLHPSIWKVVCTGIDVPHDDMELTSEQEQLIHRNAQASNAILSALSPEEFNKVDGLEEAKEIWDTLQLAHEGSPAVREAKIELLEGRVGRFVMDDKETPQEMYDRMMILVNKIKGLGSEDMTNHFVVKRLLRAFGPRNPSLVSMIRERKDFKRLTPSDILGRIVSHEMQEEEARQVSQIVKNVAMIKNQEVALKAKQEEESSCEESEDEEMAFIVKRFKHFLRKRGYGKGRKDDDKGKRQSKRACFNCGEYGHFINDCPNDEESDNELDDVLKSFSKPAMQHLAKLMRALDSKEQSLERQEELFILEKKRNIALEESLAKECAKNEQLANELNLANGSLASLRDVNETLQEKFANLDKTLKKENERLGTLVKYGCMKTYHSKDAIYKTITAHPNKDGHGLGFSSGSPVSKRVMTYSSGGSSWVVDSGCTNHMTGERSMFTSLDEEGGSRENIVFGDDGKGKVMGLGKIAISKNQSLSNVLLVNSLSYNLLSVFQLYKLGFNCLFTDVDVTVFRRDDSSVAFKGVLKGDLYLVDFDIDRVNPEACLIAKSSMGWLWHRRLAHVGMRNLASLLKGEHILGLSNVSFEKDRVCSACQAGKQVGSPHPIKNIMTTTRPLELLHMDLFGPVAYISIGGNKYGFIIVDDFSRFTWVYFLHDKSEAQDVFKRFAKQAQNLYDLTIKRVRSDNGGEFKNTQVEEFLDEEGIKHEFSAPYDPPQNGIVERKNRTLIEAARAMIDEYKISDFSPKVDEGFLLGYESNAHAYRVFNKTSGIVEVTRDVTFDESNGFQGEQVVVHVVGDVDPSQAIGPEVPGSTVRNLRTSGSEDVPTVQVDGIDAASTLEHTDQAQRPKQNVIGTKWIFRNKQDEHGVIVRNKARLFQMDVKSAFLNGPISELVYVEQPPGFEDPKLPNHVYKLHKALYGLKQAPRACSIMTKRFEMSMMGELTFFLGLQVKQALEGTFISQTKYVKDILKKFGMEDAKPIKTPMPTNGHLDLDHNGKCVDQKVYRSMRGSLLYLCASRPDIMLSVCMCACFQAEPKECHLIAVKRILRYLVHTPNLCLWYPKGCGFELLGYSDSDYAKCKVDRKSTTGTCQFLGRSLVFWSSKKQNSFG

SEQ ID NO: 20618 - protein, 692 aa, Oryza sativa
  Clone ID: TF_OSC400219j.C1.p70.gm
MSNEVNHVGKAHMLNGTTTPLGKLKCFAITGTPLTEIDHHNLQLNAQAMNALFNSLSQEEFDRVSNLETAYEIWNKLAKIHEGASEYKDAKLHFLKIQYETFSILPHESVNDMYGRLNVIVNDLKGLGATYTDLEDAQKMLRALPEKYETLVTMLINSDMLRMTPASLLVKINTNDIYKLKKKEMEEASPSKKCIALQAEVEDKGKTKVNVANEDLEEEIALLARRFNDLLGKRNERGRGSNSNRRRNRRPNKTLTNLRCFECGEKGHFASKCPSKDDDGDKSSKKKSGGYKLMKKLKKEGKKIEAVIREWDSNEESSASSGSEEEGGDDASSKKKKMAVVAIKEAPSLFAPLCLMAKGSSKVTSLSDSESDDVSYHELVSMFEELHAYSEKEIVKFKALKKDHASLEDHRCLLYPPPPSPSSLAVGSALAPCDLEPPSPPSLQPCAAVAPVVVVARGGRHRGRRRVAVLVRPFAAAVDRRSTAVVVKPKTAAASSSSPPPSVAFPPWSCVSICDASLVVENNELKEQVAKLNKSLERCFKGKNTLDKILSEQRCILNKKGLGFIPKKGKKPSHRAIHFVKSNGKYCSKCRDVGHLVNDCPGGYASNSKAYHVYNKNKGIVEETADVQFDETNGSQEGHENLDNVGDEGLMRAMKNMSIGDVKPIEVEDKPSTSTQDEPYRLPLRQVKLKLK

SEQ ID NO: 20619 - protein, 644 aa, Oryza sativa
  Clone ID: TF_OSC900079j.C1.p11.gm
MNALFNSLSQEEFDRVSNLETAYEIWNKLAKIHEGASEYKDAKLHFLKIQYETFSILPHESVNDMYGRLNVIVNDLKGLGATYTDLEDAQKMLRALPEKYETLVTMLINSDMLRMTPASLLVKINTNDIYKLKKKEMEEASPSKKCIALQAEVEDKGKTKVNVANEDLEEEIALLARRFNDLLGKRNERGRGSNSNRRRNRRPNKTLTNLRCFECGEKGHFASKCPSKDDDGDKSSKKKSGGYKLMKKLKKEGKKIEAVIREWDSNEESSASSGSEEEGGDDASSKKKKMAVVAIKEAPSLFAPLCLMAKGSSKVTSLSDSESDDVSYHELVSMFEELHAYSEKEIVKFKALKKDHASLEDHRCLLYPPPPSPSSLAVGSALAPCDLEPPSPPSLQPCAAVAPVVVVARGGRHRGRRRVAVLVRPFAAAVDRRSTAVVVKPKTAAASSSSPPPSVAFPPWSCVSICDASLVVENNELKEQVAKLNKSLERCFKGKNTLDKILSEQRCILNKKGLGFIPKKGKKPSHRAIHFVKSNGKYCSKCRDVGHLVNDCPGGYASNSKAYHVYNKNKGIVEETADVQFDETNGSQEGHENLDNVGDEGLMRAMKNMSIGDVKPIEVEDKPSTSTQDEPYRLPLRQVKLKLK

SEQ ID NO: 20620 - protein, 1468 aa, Oryza sativa
  Clone ID: TF_OSC402542j.C1.p9.fg
MDGLVPLIFKVLKKKKAMRVCLLLCTAPSLVDYSIPLAGVHRRSGEQVSGTSAFDVLHREKAAIRLNHYMSIISTIQKPYYRHCDFTMAGFADALRPDKFTGVHFKRWQIRVTLWLTAMKCFWVSTGKPEGVLTAEQQKQFEEATTLFVGCILSVLGDRLVEVYMHMTDAKELWDALNTKFGATDASNDLYIMEQFHDYKMADNRSVVEQAHEIQTMAKELELLKCVLPDKFVAGCIIAKLPPSWRSFGTALKHKRQEYSVEGLIASLDVEEKAREKDAASKGDGGQSSANVVHKAQNKSKGKYKAQQTTNFKKQKKNNINPNQDERTCFVCGQVGHLARKCLQCKGMKAPAGQTSKSANVTIGNTGDGSGYGNLPTVFSVNQSTNWWVDTGANVHVCADISLFSSYQVARGSTVLMGNGSHASVHGVGTVDLKFTSGKIVQLKNVQHVPSIDRNLVSGSRLTRDGFKLVFESNKVVVSKHGYFIGKGYECGGLFRFSLSDFCNKSVNHICGSVDDEANVWHSRLCHINFGLMSRLSSMCLIPKFSIVKGSKCHSCVQSKQPRKPHKAAEERNLAPLELLHSDLCEMNGVLTKGGKRYFMTLIDDATRFCYVYLLKTKDEALDYFKIYKAEVENQLDRKIKRLRSDRGGEFFSNEFDLFCEEHGIIHERTPPYSPESNGIAERKNRTLTDLVNAMLDTAGLPKTWWGEALLTSNHVLNRVPNRNKDKTPYEIWIGRKPSLSYLRTWGCLAKVNVPITKKRKLGPKTVDCVFLGYAHHSIAYRFLIVKSEVPDMHVGTIMESRDATFFESFFPMKDTHSGSNQPSEIIPNSITPPEQTEHTHELVSEEDVSEAPRRSKRQRTAKSFGGDFTVYLVDDTPKSISEAYASPDADYWKEAVRSEMDSIIANGTWEVTERPYGCKPVGCKWVFKKKLRPDGTIEKYKARLVAKGYTQKEGEDFFDTYSPVARLTTIRVLLSLAASHGLLVHQMDVKTAFLNGELDEEIYMYQPDGFVVEGQEGKVCKLLKSLYGLKQAIKQWHEKFDKTLTSAGFAVNEADKCVYYRYGGGEGVILCLYVDDILIFGTNLEVINEVKSFLSQNFDMKDLGVADVILNIKLIRGENGITLLQSHYVEKILNRFGYIDSKPSPTPYDPSLLLRKNKRIARNQLEYSQIIGSLMYLASATRPDISFAVSKLSRFTSNPGDDHWRALERVMRYLKGTVELGLHYTGYPAVLEGYSDSNWISDVDEIKATSGYVFTLGGGAVSWRSCKQTILTRSTMEAELTVLDTATVEAEWLRDLLMDLPVVEKPVPAILMNCDNQTTCEKTIEVCQEIKKLRSYNVGLHPNSEKPGRSLHEGTITKCDRQCIEGDGFETHIKSLYVYNLNTLSSSSSFSGTGGPPRIDDIVAAATMTTPRDHKLKVVTKPGGGAQRVAAMETLPRETFSPRFRCGGGAAAAVASAIVGRSYLGGK

SEQ ID NO: 20621 - protein, 1491 aa, Oryza sativa
  Clone ID: TF_OSC101703j.C1.p1.gm
VVSFNGEKKAIAMYRNFIKKSYKATIEEGIITGFGMGSVMCVVFGSYGLAFWYGGKLIIEKGYTGGKIMTILFAVLTGASSLGNATPAVAAVVEGQSAAYNLFKTIERKPEIDSDDNNGMGYDTLVGQRGTQLSGGQKQRIAIARAILKDPKILLLDEATSALDVESERIVQEALNRMMVERTTLVVAHRLSTVRNVDCITVVRKGKIVEQGPHDALVKDPDGAYSQLIRLQETHRDERHKLPDSRSKSTSLSFRRSRTKDFLSKSNSGALGTRLSVDALNVRRLVGDNLALIVQAVATLITGFAIAFAADWRLALIITCVIPLVGAQGYAQVKFLKGFSEESKTIALVGESGSGKSTIIALLERFYDPDSGNISLDGVEIRSLKVSWLRDQMGLVGQEPVLFNDTIRANITYGKHSEVTEEEITAVAKAANAHEFVSSLPQGYDTVVGEKGVQLSGGQKQRVAIARAILKDPKILLLDEATSALDAESERVVQDALDRVMVNRTTIVVAHRLSTIKGADMIAVLKEGKIAEKGKHEALLRIKDGAYASLDAELAAAEERRRATAQTAAAAARAARLAAAELAAARAEAEAEAAEDAARAAEVEVETLRSSINGSIAGDITADRELEELARGRARERAERWAAAHLHGGGGGPRDRAPADGNPDGRRRAGGSPELARGPRRQHGSLSPDRRHGHHGVQTVVRDFGPGGGWPTLTKTNYIEWAAVMRVRLQVRHMWEAVRYGDVNYDEDRRALDALIAAVPPEMQFSLSQKRTAKEAWDAIAAARIGSDRARKSTLQALRKEWENLAFKPGEDVDDFALRLNTLLQKMVQYGDDTYDEERAVEKLFRCVPEKYRQIARSIESLLDLSTMLIEEALGRLKVVDGDEPQPFSGPITIGGKLHLTREQWEASQGDGRKGESSSPTGGRKPRKARGGVQLRWARRRAEGGARRGAQGVATGNHKPARDDACRNCGKLGHWAKDCRQPRRGQAHVARVEEEEPALLLAHASIELPPAAPAAAAFLHLDEPKVLVSLCNGSSNDKADGWYLDTGATHHMTGRREFFTEFDSSVRGSVKFGDASGVEIKGVGSVTFTAKSGEHRLLTGVYYIPALRNSIISVGQLDENGSRVLVEDGLMRIWDRRRRLLAKVTRGTNRLYILSAQVAQPVCLAARRDDEAWQWHERFGHLHFEALKQLSAKEMVRGMPCLDHVEQLCDVCVVTKQRRLPFPQQMSFRAKERLELVHGDLCGPVTPATPGGRRYFLLLVDDLSRYMWVTVLGSKGEAADAIRHAQAAAEAECGRKLRVLRTDNGGEFTAAEFASYCADEGIQRHYTTPYSPQQNGVVERRNQTVVGMARALLKQRGMPAIFWGEAVVTATATSTMASDGQGQGRMWLGADAAAWEGREECKRRRRMQPGVEVMVSDVAAQPGEPDEAGRSDAGILAMELVLAAAVVAGDDADCSGGRGGRRCGRGRRRGSRTTAEVAVSDDTDGSDGRGG

SEQ ID NO: 20622 - protein, 1475 aa, Oryza sativa
  Clone ID: TF_OSC14030j.C1.p1.fg
MSDARSRSSVASSTRRQQDAELAAAEERRRATAQTAVAVARAARLAAAELAAARAEAEAAEDAARAAEVEVETLRSSINGSIAGDITADRELEELARGRARERAERWAAAHLHGGGGGPRDRAPADGNPDGRGRASGSPEPARAPRRQRGSLSLDLRHGHHGVQTVVRDFGPGGGWPTLTKTNYIEWAAVMRVRLQVRHMWEAVRNDRARKSTLQALRKEWENLAFKPGEDIDDFALRLKTLLQKMVQYGDDTYYEERAVEKLFRCVPEKYRQIARSIESLLDLSTMSLEEALGRLKVVDGNEPQPLSGPITIGGKLHLTREQWEASQGDGRKGESSSSTGGRKPRKVREGVQLRWARKRAEGGARRGAQGVATGNHKPAQDDACRNCGKLGHWAKDCRQPRRGQAHVARVEEKKPALLLAHASIELPPAAPAAAAFLHLDEPKVLVSLCNGSSNDKADGWYLDTGATHHMTGRREFFTEFDSSVRGSVKFGNASGVEIKGVGSVTFTAKSGEHRLLTGVYYIPTLRNSIISVGQLNENGSRVLVEDGLMRIWDRRRRLLAKVTGGTNRLYILSAQVAQPVCLAARRDDEAWQWHERFGHLHFEALKQLSAKEMVRGMPCLDHVEQLCDVCVVTKQRRLPFPQQTSFRAKERLELMHGDLCGPVTPATPGGRCYFLLLVDDLSRYMWVMVLGSKGEAADAIRHAQAAAEVECGRKLRVLRTDNGGEFTAAEFTSYCADEGIQRHYTMPYSPQQNGVVERRNQTVVGMARALLKQRGMPAIFWGETVVTAAYILNRSPTKALDGRTPYEVWHGRKPAVSHLRVFSCLAFAKELGHIGKLDDRSTPRVFIGYAKGSKAFRILDPETQRVRTARDVVFDEGRGWVWDKAVDDGSTPTYDDFTVEYVYFEGAGGVGSSSSPSVSTPAPESPPTPTPTHPRATTSTTTSSSLTPPQPVTPHAPAPTATPPSTSTPTPARVERSPVEFATPLSHDGERIDAYHDGEQLRYRTMEDLLGDQPVPVPRDLEAQLHLACNDGEPRSFAEAEKHAAWRAAMQSEMDAVQENRTWELADLPRGHRAITLKWVFKLKRDEAGAIVKHKARLVARGFVQQEGIDYDDAFAPVARMESEGWGVHHMDVKSAFLNDNLKEEVYVHQPPGFVIPGKEGKDAEVAAFKEEMKATFQMSDLGPLSFYLGIEVHQDDSEITLRQTAYAKRVVELAGLTDCNPALTPMEERLKLSRDSTAEEVDATQYRCLVGSLRYLTHTRPDLAFSVGYVSRFMQRPTMEHQQAVKRIIRYIAGTLDHGLYYPRCPGKAHFVGYSDNDHAGDIDTNKSTSRILFFLGKCLVSWQSDKQQVVALSSYKAEYIAASAASTQALWLARLLSDLPGRDTGTVELRVDSKSALALAKNPVFHERSKHIRVRYHFIRSYLEEGSIKASYINTKDQLADLLTKPLGRIKFLELCSRIGMAQLAHKTTHKT

SEQ ID NO: 20623 - protein, 1600 aa, Oryza sativa
  Clone ID: TF_OSC23522j.C1.p7.fg
MSDARSRRSVASSTWRQQDAELAAAEERRRATAQTAAAAARAARLATAELAAARAEAEAEAAEDAARAAEVEVETLRSSINGSIAGDITADRELEELARGRARERAERWAAAHLHGGGGGPRDRGPANGNPDGRGRAGGSPEPARGPRRQRGSFSPDRRHGHYGVQTVVRDFGPGGGWPTLTKTNYIEWAAVTRVRLQVRHMWEAVRYGDVDYDEDRRALDALIAAVPPEMQFSLSQKRTAKEAWDAIAAARIGSDRARKSTLQALRKEWENLAFKPGEDVDDFALRLNTLLQKMVQYGDDTYDEERAVEKLFRCVPEKYRQIARSIESLLDLSTMSIEEALGRLKVVDGDEPQPLSGPITIGGKLHLTREQWEASQGDGRKGESSSPTGSRKPRKARGGVQLRWARRRAEGGARRGTQGVATGNHKPGRDDACRNCGKLGHWAKDCRQPRRGQAHVARVEEEEPALLLAHASIELPPAAPAAAAFLHLDEPKVLVSLCDGSSNDKADGWYLDTGATHHMTGRREFFTEFDSSVRGSVKFGDASGVKIKGVGSVTFTAKSGEHRLLTEVYYIPALRNSIISVGQLDENGSRVLVEDGLMRIWDRRRRLLAKVTRGTNRLYILSAQVAQPVCLAARRDDEAWQWHERFGHLHFEALKRLSAKEMVRGMPCLDHVEQLCDVCVVTKQRRLPFPQQTSFRAKERLELVHGDLCGPVTPATPGGRRYFLLLVDDLSRYMWVMVLGSKGEAADAIRRAQAAAEAECGRKLRVLRTDNGGEFTAAEFASYCADEGIQRHYTAPYSPQQNGVVERRNQTVVGMARALLKQRGMPAIFWGEAVVTAVYILNRSPTKALDGRTPYEAWHGHKPAVSHLRVFGCLAFAKELGHIGKLDDRSTPGVFIGYAEGSKAYRILDPETQRVRTARDVVFDEGRGWVWDKAVDDGSTPTYDDFTIEYVHFEGAGGVGSSSSSVSTPAPESPPTPTPTHPRATTSTTTSSSSTPPQPVTPHAPAPTATPPSTSTPTPARVERSPVEFATPLSHDGERIDAYHDGEQLRYRTMEDLLGDQPVPGLVPRDLEAQLHLACDDGEPRSFAEAEKHAAWRAAMQSEMDAVQENRTWELADLPRGHRAITLKWVFKLKRDEAGAIVKHKARLVARGFVQQEGIDYDDAFAPVAQMESVRLLLALAAQEGWGVHHMDVKSAFLNGDLKEEVYVHQPPGFVIPGKEGKVLRLHKALYGLRQAPRAWNAKLDSTLKGMGFEQSPHEAAIYRRGNGGNALLVGVYVDDLVITDTKDAEVAAFKEEMKATFQMSDLGPLSFYLGIEVHQDNSGITLRQTAYAKRVVELAGLTDCNPALTPMEERLKLSRDSTAEEVDATQYRRLVGSLRYLTHTRPDLAFSVGYVSRFMQRPTTEHQQAVKRIIRYVAGTLDHGLYYPRCPGKAHFVGYSDSDHAGDIDTSKSTSGILFFLGECLVSWQSIKQQVVALSSCEAEYMAASAASTQALWLARLLSDLLGRDTGAVELRVDSKSALALAKNPVFHERSKHIRVRYHFIRSYLEEGSIKASYINTKDQLADLLTKPLGRIKFLELCSRIGMAQLSHKTAHKT

SEQ ID NO: 20624 - protein, 1523 aa, Oryza sativa
  Clone ID: TF_OSC28294j.C1.p8.fg
MSDVRSRRSVVSSTRRQQDAELAAAEERRRATAQTAAAAARAARLAAAELAAARAEAEAEAAEDAARAAEVEVETLRSSINGSIAGDITADRELEELARGRARERAERWAAAHLHGGGGGPRDRAPADGNPDGRGRAGGSPEPARGPRRQRGSPSPDRHHGHHGVQTVVRDFGPGGGWPTLTKTNYIEWAAVMRVRLQVRHMWEAVRYGDVDYDEDRRALDALIAAVPPEMQFSLSQKRTAKEAWDAIAAARIGSDRAHKSTLQALRKEWENLAFKPGEDVDDFALRLHTLLQKMVQYGDDTYDEERAVEKLFRCVPEKYKQIARSIESLLDLSTMSIEEALGRLKVVDGDEPQPLSGPITIGGKLHLTREQWEASQSNGRKGESPPSTGGRKPRKARGGVQLRWARRRAEGGARRGAQGDAAGNHKPARDDACRNCGKLGHWAKDCRQPRRGQAHVAQVEEKPALLLAHASIELSSAAPAATAFLHLEEPKVHAFLGNSSSNDKADGWYLDTGATHHMTGRREFFTELDSSVRGSVKFGDASGVEIKGVGSVTFTTKSGEHRLLTGVYYIPALRNSIISVGQLDENGSSVLVEHGVMRIWDRRRRLLAKVTRGTNRLYILSAQVAQPVCLAARRDGEAWQWHERFGHLHFEALKRLSAKEMVRGLPCLDHVEQLCDVCVLTKQRRLPFPQQTSFRAKERLELMHGDLCGPVTPATPGGRRYFLLLVDDLSRYMWVMVLGSKGEAADTIRRAQAAAEAECGRKLRVLRTDNGGEFTAAEFASYCADEGIQRHYTAPYSPQQNGVVERRNQTVVGMARALLKQRGMPAIFWGEAVVTAVYILNRSPTKALDGRTPYEAWHGRKPGVSHLRVFGCLAFVKELGPISKLDDRSTPGVFIGYAEGSKAYRILDPETQRTVDDGSTLTYDDFTVEYVHFERAGGVGSSSSPSVSTPVPEPPSTPTPTHPRATASTATSSSPTPPQPATPRAPAPTATPPSTSTPTPARVERSPVEFATPLSHDGERIDAYHDGEQLRYRTMEDLLGDQPVPGMVPRDLEAQLHLACDDGEPRSFAEAEKHAAWRAAMQSEMDAVQENRTWELVDLPRGHRAITLKWVFKLKRDKAGAIVKHKARLVARGFVQQEGIDYDDAFAPVARMESVRLLALAAQEGWGVHHMDVKSAFLNGDLKEEAPRAWNAKLDSTLKGMGFEQSPHEAAIYRRGNGGNALLVGVYVDDLVITGTKDAEVYQDDSGITLRQTAYAKRVVELAGLTDCNPALTPMEERLKLSRDSTAEEVDATQYRRLVGSLRYLTHTRPDLAFSVGYVSRFMQRPTTEHQQAVKRIIRYVAGTLDHGLYYPRCPGKAHFVGYSDSDHAGDIDTSKSTSGILFFLGECLVSWQSIKQQVVALSSCEAEYMVASAASTQALWLARLLSDLLGRDTGAVELRVDSQSALALAKNPVFHERSKHIRVRYHFIRSYLEEGSIKASYINTKDQLADLLTKPLGRIKFLELCSRIGMAQLSHKTTHKT

SEQ ID NO: 20625 - protein, 281 aa, Oryza sativa
  Clone ID: TF_OSC30052j.C1.p1.fg
MRVRLQVRHMWEAVRYGDVDYDEDRRALDALIAAVPLEMQFSLSHKWTAKEAWDAIAVARIGSDRARKSTLQALRKEWENLAFKPGEDVDDFALRLNTLLQKMVQYGDDTYDEERAVEKLFRYVPEKYRQIARSIESLLDLSTMSIEEALGRLKVVDGDEPQPLSGPITIGGKLHLTREQWEASQGDGRKGESSPSTGGRKPCKARGGVQLRWARRRAEGGARRGAQGGAAGNHKPARDDACRNCGKLGHWAKDCRQPRRGIELSPAAPAATAFLHLDEPK

SEQ ID NO: 20626 - protein, 2168 aa, Oryza sativa
  Clone ID: TF_OSC400397j.C1.p58.fg
MALQDEVAQNLRWSMDSARDTASCPSYPSAMDGWMKTGVPKGGREKISCRGFHSSFRPTDSGLSLNVDVSTTMIVRPGPVIEFLLFNQNIKNPHEIDWGKFYLFQDSIYPSAYFSVARTTATAAAAARAARLAAAELAAARAEAEAAKDAARAAEVEVETLRSSINGSIAGDITADRELEELARARARERAERWAAAHLHGGGGGPRDRAPADGNPDGLGRAGGSPEPARGPRRQHGSLSPDRHHGHHGVQTVVRDFGPGGGWPTLTKTNYIEWAAVMRAVRYGDVDYDEDRRALDALIAAVPPEMQFSLSQKRTAKEAWDAIAAARIGSDRARKSTLQALRKEWENLAFKPGEDVDDFALRLNTLLQKMVQYGDDTYDEERAVEKLFRCVPEKYRQIARSIESLLDLSTMSIEEALSRLKVVDGDEPQPLSGPITIGGKLHLTREQWEASQGDGRKGESSSPIGGRKPRKAQGGVQLRWARRRAEGGARRGAQGVATGNHKPARDDACRNCGKLGHWAKDCRQPRRGQAHVARVEEEPALLLAHASIELPPAAPAAAAFLHLDEPKVLVSLCNGSSNDKADGWYLDTGATHHMTSRREFFTEFDSSVRGSVKFGDASGVEIKGVGSVTFTAKSGEHRLLTGVYYIPALRNSIISLGQLDENGSRVLVEDGLMRIWDRRRRLLAKVTRGTNRLYILSAQVAQPVCLAARRDDEAWQWHERFRHLHFEALKQLSAKEMVRGMPCLDHVEQLCDVCVVTKQRRLPFPQQTSFRAKERLELVHGDLCGPVTPATPGGRRYFLLLVDDLSCYMWVMVLGSKGEAADAIRHAQAAAEAECGRKLHVLRTDNGGEFTAAEFASYCADEGIQRHYTTPYSPQQNDVVERRNQTVVGMARALLKQRGMPAIFWGEAVVTAAYILNRSPTKALDGRTPYEAWHGRKPAVSHLRVFGCLAFAKELGHIGKLDDRSTPGVFIGYAEGSKAYRILDPETQRVRTARDVVFDEGRGWVWDKAVDDGSTPTYDDFTVEYVHFEGAGGVGSSSSPSVSTPAPKSPPTPTPTHPRATTSTTTSSSSTPHAPAPTATPPSTSTPTPARVERSPVEFATPLSHDGERIDVYHDGEQLWYRTMEDLLGDQPVPGLVPRDLEAQLHLACDDGEPRSFAEAEKHAAWRAAMQSEMDAVQENRTWELADLPRGHRAITLKWVFKLKRDEAGAIVKHKARLVARGFVQQEGIDYDDAFAPVARMESVRLLLALAAQEGWGVHHMDVKSAFLNGDLKEEVYVHQPPGFVIPGKEGKVLRLHKALYGLRQASRAWNAKLDSTLKGMGFEQSPHEAAIYRRGNGGNALLVGVYVDDLVITGTKDAEVAAFKEEMKATFQMSDLGPLSFYLGIEVHQDNSGITLRQTAYAKRVVELAGLTDCNPALTPMEERLKLSRDSTAEEVDATQYRRLVGSLRYLTHTRPDLAFSVGYVSRFMQRPTTEHQQAVKRIIRYVAGTLDHGLYYPKCPGKAHFVGYSDSDHAGDIDTSKSTSGILFFLGKCLVSWQSVKQQVVALSSCEAEYMAASAASTQALWLARLLSDLLGRDTGKVELRVDSKSALALAKNPVFHERTKHIRVRYHFIRSYLEEWSINASYINTKDQLADLLTKPLGRIKLGGCSNRLAASYGYIYMYPTSLGQAKCALKNLRIKTTHTGSEFRIIGLSEDTCYSQTFQIKRKNGNGGSDTVEEVTVFEYYRKNWKIDLKGSAHFPCLNVGKPKRPTYIPLELCHLVPLQRYKKALSTLQRSTLVERSRQNPQERMFVLSGVLRDSDYNSVPMLRECGISIAQEFTQVAARVLPAPKLKSGDGEDIFARNGRWNFNKNCNAHHLAQRLIHCGNLKGLINDQYLTNVLLKINAKLGGLNSLLQIERNQAIPLLSKTPTIILGMDVSHGSPGRDDVPSVAAVVSSLEWPLISKYKASVCTQSPRLEMIDSLFKLVGNEDHVIIRDGVSEGQFNQVLNIELAQIIKACEFLANEKNDSEWSPKFTVIVAQKNHHTKFFQTDRSNKVVNVPPGTVVDKGICHPRNCDFYMCAHAGMIGTTRPTHYHVLHDENNFTPDDLQELVHNLSYVYQRSTTAISGVAPICYAHLAAAQVSQFVRLDDAASEGSGDGGAPPRPVPELPRLHPDVRQSMFFC

SEQ ID NO: 20627 - protein, 466 aa, Oryza sativa
  Clone ID: TF_OSC400397j.C1.p76.gp
LQKMVQYGDDTYDEERAVEKLFRCVPEKYRQIARSIESLLDLSTMSIEEALSRLKVVDGDEPQPLSGPITIGGKLHLTREQWEASQGDGRKGESSSPIGGRKPRKAQGGVQLRWARRRAEGGARRGAQGVATGNHKPARDDACRNCGKLGHWAKDCRQPRRGQAHVARVEEEPALLLAHASIELPPAAPAAAAFLHLDEPKVLVSLCNGSSNDKADGWYLDTGATHHMTSRREFFTEFDSSVRGSVKFGDASGVEIKGVGSVTFTAKSGEHRLLTGVYYIPALRNSIISLGQLDENGSRVLVEDGLMRIWDRRRRLLAKVTRGTNRLYILSAQVAQPVCLAARRDDEAWQWHERFRHLHFEALKQLSAKEMVRGMPCLDHVEQLCDVCVVTKQRRLPFPQQTSFRAKERLELVHGDLCGPVTPATPGGRRYFLLLVDDLSCYMWVMVLGSKGEAADAIRHAQAAAE

SEQ ID NO: 20628 - protein, 1708 aa, Oryza sativa
  Clone ID: TF_OSC401340j.C1.p28.fg
MAIAVRSAAAVARHSLRPPLAAPGSIRGASLLPPQRARGVGPCRARARAASSSATGGGGHLPPLFSVAPMMDWTDNHYRTLARLISKHAWLYTEMVVAETIVHQKDNLDRFLAFPAEQHPIVLQIGGSNLDNLAKATELANAYSYDEINLNCGCPSGKVAGHGCFGARLMFDPEFVGDAMSAIAANCNVPVSVKCRIGVDDRDSYEELCEFVDKVVSKSPTRHFIIHARKALLSGLSPAENRNVPPLKKPENCPISSAILFSMRVTIEVLTSGSLRSWQEEGHGNGQSGGGGPRDRAPADGNPDGRGRAGGSPEPARGPRRQRGSPSPDRCHGHHGVQTVVRDFGLGGGWPTLTKTNYIERAAVMRVRLQVRHMWEAVRYGDVDYDEDRRALDALIAAVPLEMQFSLSHKWTAKEAWDAIAVARIGSDRARKSTLQALRKEWENLAFKPGEDVDDFALRLNTLLQKMVQYGDDTYDEERAVEKLFRCVPEKYRQIARSIESLLDLSTMSIEEALGRLKVVDGDEPQPLSGPITIGGKLHLTREQWEASQGDGRKGESSPSTGGRKPCKARGGVQLRWARRRAEGGARRGAQGGAAGNHKPARDDACRNCGKLGHWAKDCRQPRRGIELSPAAPAATAFLHLDEPKVHAFLGNSSSNDKADGWYLDTGATHHMTGRREFFTELDSSVRGSIKFGDASGMEIKGVGSVTFTAKSGEHRLLTGVYYIPVLRNSIISVGQLDENGSRVLVEHGVMTIWDRRRRLLAKVTRGTNRLYILSAQVAQPVCLAARRDDEAWQWHERFGHLHFEALKWLSAKEMVRGLPCLDHVEQLCDVCVLTKQRRLPFPQQTSFRAKEQLELVHGDLCGPVTPATPGGRRYFLLLVDDLSRYMWVMVLGSKAEAADAIRRAQAAAEVECGRKLRVLRTDNGGEFTAAEFASYCADEGIQRQYTAPYSPQQNGVKRRNQTVVGMARALLKQRGMPAIFWGEVVVTAVYILNRSPTKALDGRTPYEAWHERKPGVSHLRVFGCLAFVKELGHIGKLDDRSTPGVFIGYAEGSKAYRILNSETQRVRTARDVVFDEGRGWVWDKAVDDGSTPKYDDFTVEYVHFEGAGGVGNSSSPSVSTPVPEPPPTPTPTHSRATTSTTTSSSPTPPQPVTPRAPAPTATPPSTSTPTPASVERNPVEFATPLSHDGERIDAYHDGEQLRYRTMEDLLGDQPVPGLVPPDLEAQLHLACDDGEPRSFAEAEKHVAWRAAMQSEMDAVQENRTWELADLPRGHRAITLKWVFKLKRDEAGAIVKHKARLVARGRLGVHHMDVKSAFLNGDLKEEVYVHQPPGFVIPGKEGKVLRLHKALYGLRQAPRAWNAKLDSTLKGMGFEQSPHEAAIYRRGNGGNALLVGVYVDDLVITGTKDAEVAAFREEMKATFHMSDQGPLSFYLGIEVHQDDSGITLRQTAYAKRVVELARLTDCNPALTPMEERLKLSRDSTTEEVDATQYRRLVGSLRYLTHTAGLGLLRRLRQSAVKRIIRYVAGTLDHGLYYPRCPGKAHFVEYSNSNHAGDIDTSKSTSGILFFLGECLVSWQSVKQQVVALSSCEAEYMAASAASTQALWLARLLSDLLGRDTGAVELRVDSKSALALAKNPVFHEWSKHIWVRYHFIRSYLEEGSIKASYINTKDQLADLLTKPLGRIKFLELCFRIGMAQLPHKTTHKT

SEQ ID NO: 20629 - protein, 2534 aa, Oryza sativa
  Clone ID: TF_OSC401545j.C1.p1.fg
MALERRLAYAALIPFLLLALPILPSDSPSGGGGGGAGGGGGGGETLDPPAAKYVVRFVEYRPADEHREYLEDGLRGAARPPPAASWRWVERRNPAAAFPTDFAVLEIRDACRAAVVDAVSALGRVRDVHADASYSRGVLSADRPRQQGKLFTAMSFEGEEGGGDREVGCSTDSNNSSSAGWRRKLLVQRSQVTSLFGAERLWGRGFTGRKVKMAIFDTGIRADHPHFRNIKERTNWTNEDTLNDNLGHGTFVAGVIAGQDAECPGFAPDTEIYAFRVFTDAQISYTSWFLDAFNYAIATGMDVLNLSIGGPDYLDLPFVEKDAELAAAEERRRATAQTAAAAARAARLAAAELAAARAEAEAEAAKDAARAAEVEVETLRSSINGSIAGDITADRELEELARGRARERAERWAAAHLHGGGGGPRDRGPANGNPDGRGRAGGSPEPARGPRRQRGSFSPDRRHGHHGVQTVVRDFGPGGGWPTLTKTNYIEWAAVMRVRLQVRQMWEAVRYGDVDYDEDRRALDALIAAVPPEMQFSLSQKRTAKEAWDAIAAARIGSDRARKSTLQALRKEWENLAFKPGEDVDDFALRLNTLLQKMVQYGDDTYDEERAVEKLFRCVPEKYRQIARSIESLLDLSTMSIEEALGRLKVVDGDEPQPLSGPITIGGKLHLTREQWEASQGDGRKGESSSPTGGRKPRKARGGVQLRWARRRAEGGARRGAQGIATGNHKPARDDACRNCGKLGHWAKDCRQPRRGQAHVARVEEEEPALLLAHASIELPPAAPAAAAFLHLDEPKVLVSLCDGSSNDKADGWYLDTGATHHMTCRREFFTEFDSSVRGSVKFGDASGVEIKGVGSVTFTAKSGEHRLLTGVYYIPALRNSIISVGQLDENGSRVLVEDGLMRIWDRRRRLLAKVTRGTNRLYILSAQVAQPVCLAARRDDEAWQWHERFGHLHFEALKRLSAKEMVRGMPCLDHVEQLCDVCVVTKQRRLPFPQQTSFRAKERLKLVHGDLCGPVTPATPGGRRYFLLLVDDLSRYMWVMVLGSKGEAADAIRRAQAAAEAECGRKLRVLRTDNGGEFTAAEFASYCADEGIQRHYTAPYSPQQNGVVERRNQTVVGMARALLKQRGMPAIFWGEAVVTAVYILNRSPTKALDGRTPYEAWHGHKPAVSHLRVFGCLAFAKELGHIGKLDDRSTPGVFIGYAEGSKAYRILDPETQRVRTARDVVFDEGRGWVWDKAVDDGSTPTYDDFTIEYVHFEGAGGVGSSSSSVSTPAPESPPTPTPTHPRATTSTTTSSSSTPPQPVTPHAPAPTATPPSTSTPTPARVERSPVEFATPLSHDGERIDAYHDGEQLRYRTMEDLLGDQLVPGLVPRDLEAQLHLACDDGEPRSFAEAEKHAAWRAAMQSEMDAVQENRTWELADLPRGHRAITLKWVFKLKRDEAGAIVKHKARLVARGFVQQEGIDYDDAFAPVARMESVRLLFALAAQEGWGVHHMDVKSAFLNGDLKEEVYVHQPPGFVIPGKEGKVLRLHKALYGLRQAPRAWNAKLDSTLKGMGFEQSPHEAAIYRRGIGGNALLVGVYVDDLVITGTKDAEVAAFKEEMKATFQMSDLGPLSFYLGIEVHQDNSGITLRQTAYAKRVVELAGLTDCNPALTPMEERLKLSRDSTAEEVDATQYRRLVGSLRYLTHTRPDLAFSVGYVSRFMQRPTTEHQQAVKRIIRYVAGTLDHGLYYPRCPGKAHFVGYSDSDHAGDIDTSKSTSGILFFLGECLVSWQSIKQQVVALSSCEAEYMAASAASTQALWLARLLSDLLGRDTGAVELRVDSKSALALAKNPVFHERSKHIRVWELTANNIIMVSAIGNDGPLYGTLNNPADQSDVIGVGGIDYNNHIASFSSRGMTTWELPHGYGRVKPDVVAYSRDIMGSKISTGCKTLSGTSVASPVVAGVVCLLVSVIPEEHRKSILNPATMKQALVEGASRLSGPNMYEQGAGKIDLWQSYEILKSYQPRASIFPNTLDFTDCPYFWPFCRQPLYAGAMPVVFNATILNGMGVIGYVKDPPVWQPSEDVGNILSVHFTYSDVIWPWTGYLALHLQVKDEGSQFSGIISGKVTLSIYSPAAHGESSPRSSSCVLYLKVKVVPTPVRSRRILWDQFHNIKYPSGFVPRDSLNVHNDILDWHGDHLHTNFHILFNMLRDAGYYIETLGSPLTCFDASNYGTLLMVDLEDEYFSEEIQKLKDDVVHKGLGVVVFAEWYHVDTMVKMTFFDENTRSWWTPITGGANVPALNELLAPFGIAFGDKVLSGDFSINGEQTHYASGTDIVQFPAGGFLHSFQLQDNSKISQDNSRSADTQNTPDKSKCLLVCGSVHMLSSILGMMEAGKGRVAVYGDSNCLDSSHMVTNCYWLLRKLVEFTGNRIKDPVLFSESAQLKFPVFESIHQLSRRPDVNFSTYSTVVGNELICHQDSRFEVWGTKGYGTQQTGTTRKLPEYQKSEAYNISTPIASDSTPDEAGLQRNISTPIASKFDKRMDYFGFLGHEE

SEQ ID NO: 20630 - protein, 469 aa, Oryza sativa
  unsure (1)..(469): unsure at all Xaa locations
  Clone ID: TF_OSC401606j.C1.p6.gp
LQKMVQYGDDTYDEERAVEKLFRCVPEKYRQIARSIESLLDLSTMSIEEALGRLKVVDGDELQPLSGPITIGGKLHLTRKQWEASQGDGRKGESSSPTGGRKPRKARGGVQLRWVRRRAEGGACKGAQGVATGNHKPARDDACRNCGKLGHWAKDCRQPRRGQAHVARVEEEEPALLLAHASIELPPAAPAAAAFLHLDEPKVLVSLCNGSSNDKADGWYLDTGATHHMTGRREFFTEFNSSVRGSVKFGDASGVEIKGVGSVTFTAKSGEHRLLTGVYYIPALRNSIISVGQLDENGSRVLVEDGLMRIWDRRRRLLAKVTRGTNRLXILSAQVAQPVCLAARRDDEAWQWHERFGHLHFEALKQLSAKEMVRGMPCLDHVEQLCDVCVVTKQRRLPFPQQTSFRAKERLELVHGDLCGPMTPATPGGRRYFLLLVDDLSRYMWVMVLGSKGEAADAIRHAQAAVEAE

SEQ ID NO: 20631 - protein, 1459 aa, Oryza sativa
  Clone ID: TF_OSC401606j.C1.p8.fg
MSDARSRRSVASSTRRQQDAELAAAEERRRATGQTAAAAARAARLAAAELAAARAEAEAEAAEDAARAAEVEVETLRSSINGSIAGDITADRELEELARGRARERAERWAVAHLHGGGGGPRDRAPADGNPDGRGRAGGSPEPARGPRRQRGSLSPDRRHGHHGVQTVVRDFGPGGGWPTLNKTNYIEWAAVMRVRLQVRHMWEAVRSGLPRRPGTPSLRHASAATAPASPHCRHSARSRRTWPSSQKMVQYGDDTYDEERAVEKLFRCVPEKYRQIARSIESLLDLSTMSIEEALGRLKVVDGDELQPLSGPITIGGKLHLTRKQWEASQGDGRKGESSSPTGGRKPRKARGGVQLRWVRRRAEGGACKGAQGVATGNHKPARDDACRNCGKLGHWAKDCRQPRRGQAHVARVEEEEPALLLAHASIELPPAAPAAAAFLHLDEPKVLVSLCNGSSNDKADGWYLDTGATHHMTGRREFFTEFNSSVRGSVKFGDASGVEIKGVGSVTFTAKSGEHRLLTGVYYIPALRNSIISVGQLDENGSRVLVEDGLMRIWDRRRRLLAKVAQPVCLAARRDDEAWQWHERFGHLHFEALKQLSAKEMVRGMPCLDHVEQLCDVCVVTKQRRLPFPQQTSFRAKERLELVHGDLCGPMTPATPGGRRYFLLLVDDLSRYMWVMVLGSKGEAADAIRHAQAAVEAECGRKLRVLRTNNGGEFTAAEFASYCADEGIQRHYTPYSPQQNDVVEWRNQTVVGMAQALLKQRGMPAIFWGEAVVTAAYILNRSPTKALDGRTPYEAWHGRKPAVSHLRVFGCLAFAKELGHIGKLDDRSTPGVFIGYAEGSKAYRILDPETQRVRTARDVVFDEGRGWVWDKAVDDGSTPTYDDFTVEYVHFEGAGGVGSSSSPSVSTAAPESPPTLTPTHPWATTSTTTSSSSTTPQPVTPHAPAPTATPPSTSTPTPARVERSPVEFATPLSHDGERIDAYHDGEQLQYQAEKHAAWRAAMQSEMDAVQENRTWELADLPRGHRAITLKWVFKLKRDEAGAIVKHKTHLVARGFVQQEGIDYDDAFAPVARMESVRLLALAAQEGWGVHHMDVKLAFLNGDLKEEVYVHQPPGFVIPGKEGKVLRLHKALYGLRQALRAWNAKLDSTLKGMGFEQSPHEAAIYRRGNGGNALLVGVYVDDLVITGTKDAEVAAFKEEMKATFQMSDLGPLSFYLGIKVHQDDSGITLRQTAYAKRVVELAGLTDCNPTLTPMEERLKLSRDSMAEEAVKRIIRYVAGTLDHGLYYPRCPGKAHFIGYSDSDHAGDIDTSKSTSGILFFLGKCLVSWQSVKQQVVALSSCEAEYMAASAASTQALWLARLLSDLLGRDTGTVELRVDSKSALALAKNPVFHERSKHIWVRYHFIRSYLEEGSIKASYINTKDQLADLLTKPLGRIKFLELCSRIGMAQLPHKTTHKT

SEQ ID NO: 20632 - protein, 1168 aa, Oryza sativa
  Clone ID: TF_OSC401785j.C1.p5.fg
MSIEEALGRLKVVDGDEPQPLSGPITIGGKLHLTREQWEASQGDGRKGESSSPTGGRKPRKARGGVQLRWARRRAEGGARRGAQGVATGNHKPARDDACRNCGKLGHWAKDCRQPRRGQAHVARVEEEPALLLAHASIELPPAAPAAAAFLHLDEPKVLVSLCNGSSNDKADGWYLDTGATHHMTGRREFFTEFDSSVRGSVKFGDASGVEIKGVGSVTFTAKSGEHRLLTGVYYIPALRNSIISVGQLDENGSRVLVEDGLMRIWDRRRRLLAKVTRGTNRLDILNVQVAQPVCLAAHRDDEAWQWHERFGHLHFEALKQLSAKEMVRGMPCLDHVEQLCDVCVVTKQRRLPFPQQTSFRAKERLELVHGDLCGPVTPATPGGRRYFLLLVDDLSRYMWVMVLGSKGEAADAIRHAQAAAKAECGRKLRVLRTDNGGEFTAAEFASYCADEGIQRHYTTPYSPQQNGVVERRNQTVVGMARALLKQRGMPAIFWGQAVVTAAYILNRSPTKALDGRTPYEAWHGRKPAVSHLRVFGCLAFAKELGHIGKLDDRSTPGVFIGYAEGSKAYRILDPETQRVRTARDVVFDEGRGWVWDKAVDDGSTPTYDDFTVEYVHFEGAGGVGSSSSPSVSTPAPESPPTPTPTHPRATTSTTTSSSSTQPQPVTPHAPAPTATPPSTSTPTPARVERSPVEFATPLSHDGERIDAYHDGEQLRYRTMEDLLGDQPVPGLVPRDLEAQLHLACDDGEPRSFVEAEKHAAWRAAMQSEMDAVQENRTWELADLPRGHRAITLKWVFKLKRDEAGAIIKHKARLVARGFVQQEGIDYDDAFAPVARMESVRLLALAAREGWGVHHMDVKSAFLNGDLKEEVYVHQPPGFVIPGKEGKVLRLHKALYGLRQAPRAWNAKLDSTLKGMGFEQSPHEAAIYRRGNGGNALLVGVYVDDLVITGTKDAEDNSGITLRQTAYAKRVVELAGLTDCNPALTPMEERLKLSRDSTAEEVDATQYRRLVGSLRYLTHTRPDLAFSVGYVSRFMQRPTTEHQQAVKRIIRYVAGTLDHGLYYPRCPGKAHFVGYSDSDHAGDIDTSKSTSGILFFLGKCLVSWQSVKQQVVALSSCEAEYMAASAASTQALWLARLLSDLLGRDTRTVELRVDSKSALALAKNPVFH

SEQ ID NO: 20633 - protein, 469 aa, Oryza sativa
  unsure (1)..(469): unsure at all Xaa locations
  Clone ID: TF_OSC401841j.C1.p11.gp
LQKMVQYGDDTYDEERAVEKLFRCVPEKYRQIARSIESLLDLSTMSIEEALDRFKVVDGDEPQPLSGPITIGGKLHLTREQWEASQGDGRKGESSSPTGGRKPRKARGGVQLRWARRRAEGGARRGAQGVATGNHKPARDDACRNCGKLGHWAKDCRQPRRDQAHVARVEEEEPALLLAHASIELPPAAPAAAAFLHLDEPKVLVSLCNGSSNDKADGWYLDTGATHHMTGRREFFTEFDSSVRGSVKFGDASGVEIKGVGSVTFTAKSGEHRLLTGVYYIPALRNSIISVGQLDENGSRVLVEDGFMRIWDRRRRLLAKVTRGTNRLYILSAQVAQPVCLAARRDDEAWQWHERFGHLHFEALKQLSAKEMVRGMPCLDHVEQLCDVCVVTKQRRLPFPXQTSFRAKERLELVHGDLCGPVTPATPGGRRYFLLLVDDLSCYMWVMVLGSKGEAADAIRHAQAAAEAE

SEQ ID NO: 20634 - protein, 1292 aa, Oryza sativa
  Clone ID: TF_OSC401841j.C1.p8.fg
MSDARSRRSVASSTRRQQDAELAAAEERRRATAQTAAAAARAARLAAAELAAARAEAEASEDAARVTEVEVETLRSSINGSIAGDITADRELEELARGRARERAERWAAAHLHGGGGGPRDHAPADGNPDGRGRAGGSPEPARGPRRQRGSLSPDRRHGHHGVQTVVRDFGPGGGWPTLTKTNYIEWAAVMRVRLQVRHMWEAVRDRARKSTLQALRKEWENLAFKPGEDVDDFALRLNTLLQKMVQYGDDTYDEERAVEKLFRCVPEKYRQIARSIESLLDLSTMSIEEALDRFKVVDGDEPQPLSGPITIGGKLHLTREQWEASQGDGRKGESSSPTGGRKPRKARGGVQLRWARRRAEGGARRGAQGVATGNHKPARDDACRNCGKLGHWAKDCRQPRRDQAHVARVEEEEPALLLAHASIELPPAAPAAAAFLHLDEPKVLVSLCNGSSNDKADGWYLDTGATHHMTGRREFFTEFDSSVRGSVKFGDASGVEIKGVGSVTFTAKSGEHRLLTGVYYIPALRNSIISVGQLDENGSRVLVEDGFMRIWDRRRRLLAKVTRGTNRLYILSAQVAQPVCLAARRDDEAWQWHERFGHLHFEALKQLSAKEMVRGMPCLDHVEQLCDVCVGSKAYRILHLETQRVRIVRDVVFDEGRGWVWDKAVDDGSTPTYDDFTVEYVHFEGAGGVGSSSSPSVSTLAPESPPTPTPTHPRATTSTTTSSSSTPPQPVTPHAPAPTATPPSTSTPTPARVERSPVEFATPLSHDGERIDAYHDGEQLRYQAEKHAAWRAAMQSEMDAVQENRTWELADLPRGHRAITLKWVFKLKRDEAGAIVKHKARLVARGFVQQEGIDYDDAFAPVARMESVRLLALAAQEGWGVDHMDVKSAFLNSDLKEEVYVHQPPRFVIPGKEGKVLRLHKALYGLRQAPRAWNAKLDSTLKGMGFEQSPHEAAIYRRGNGGNALLVGVYVDDLVITGTKDAEVAAFKEMKATFQMSDLGPLSFYLGIEVHQDDSGITLRQTAYAKRVVELAGLTDCNPALTPMEERLKLSRDSTAEEVDATQYRRLVGSLRYLTHTRPDLAFSVGYVSRFMQRPTTEHQQAVKRIIRYVAGTLDHGLYYPRCPGKAHFVGYSDSDHAGDIDTSKSTSGILFFLGKCLVSWQSVKQQVVALSSCEAEYMAASAASTQALWLARLLSDLLGRDTGTVELRVDSKSTLALAKNPVFLERSKHIRVRYHFIRSYLEEGSIKASYINTKDQLAYLLTKPLGRIKFLELCSRIGMAQLPHKTTHKT

SEQ ID NO: 20635 - protein, 1815 aa, Oryza sativa
  Clone ID: TF_OSC401948j.C1.p6.gm
MDESGRGTGDDHGRETKDAAAAASSSSGKKVPLFSLFRYADRLDVLLMVVGTVGALGNGISQPLMTVLFGNVINSFGANTSGSVLRSVTKVVLNFIYLGIGTSVASFLQVSCWTMAGERQSARIRSLYLKAVLRQDITFFDTEMTTGEAVSRMSSDTLLIQGALGEKVVSFNGEKKAIAMYRNFIKKSYKATIEEGIITGFGMGSVMCVVFGSYGLAFWYGGKLIIEKGYTGGKIMTILFAVLTGASSLGNATPAVAAVVEGQSAAYNLFKTIERKPEIDSDDNNGMVLEDMNGDIELKDVYFRYPARPEQLILDGLSLQVASGTTMAIVGESGSGKSTVISLVERFYDPQSGEVLIDGISIKKLRLDWIRGKIGLVSQEPLLFMASIKDNIIYGKKDATLEEIKRAAELANAANFIDKLPNGYDTLVGQRGTQLSGGQKQRIAIARAILKDPKILLLDEATSALDVESERIVQEALNRMMVERTTLVVAHRLSTVRNVDCITVVRKGKIVEQGPHDALVKDPDGAYSQLIRLQETHRDERHKLPDSRSKSTSLSFRRSRTKDFLSKSNSGALGTRLSVDALNVRRLVGDNLALIVQAVATLITGFAIAFAADWRLALIITCVIPLVGAQGYAQVKFLKGFSEESKTIALVGESGSGKSTIIALLERFYDPDSGNISLDGVEIRSLKVSWLRDQMGLVGQEPVLFNDTIRANITYGKHSEVTEEEITAVAKAANAHEFVSSLPQGYDTVVGEKGVQLSGGQKQRVAIARAILKDPKILLLDEATSALDAESERVVQDALDRVMVNRTTIVVAHRLSTIKGADMIAVLKEGKIAEKGKHEALLRIKDGAYASLDAELAAAEERRRATAQTAAAAARAARLAAAELAAARAEAEAEAAEDAARAAEVEVETLRSSINGSIAGDITADRELEELARGRARERAERWAAAHLHGGGGGPRDRAPADGNPDGRRRAGGSPELARGPRRQHGSLSPDRRHGHHGVQTVVRDFGPGGGWPTLTKTNYIEWAAVMRVRLQVRHMWEAVRYGDVNYDEDRRALDALIAAVPPEMQFSLSQKRTAKEAWDAIAAARIGSDRARKSTLQALRKEWENLAFKPGEDVDDFALRLNTLLQKMVQYGDDTYDEERAVEKLFRCVPEKYRQIARSIESLLDLSTMLIEEALGRLKVVDGDEPQPFSGPITIGGKLHLTREQWEASQGDGRKGESSSPTGGRKPRKARGGVQLRWARRRAEGGARRGAQGVATGNHKPARDDACRNCGKLGHWAKDCRQPRRGQAHVARVEEEEPALLLAHASIELPPAAPAAAAFLHLDEPKVLVSLCNGSSNDKADGWYLDTGATHHMTGRREFFTEFDSSVRGSVKFGDASGVEIKGVGSVTFTAKSGEHRLLTGVYYIPALRNSIISVGQLDENGSRVLVEDGLMRIWDRRRRLLAKWHERFGHLHFEALKQLSAKEMVRGMPCLDHVEQLCDVCVVTKQRRLPFPQQMSFRAKERLELVHGDLCGPVTPATPGGRRYFLLLVDDLSRYMWVTVLGSKGEAADAIRHAQAAAEAECGRKLRVLRTDNGGEFTAAEFASYCADEGIQRHYTTPYSPQQNGVVERRNQTVVGMARALLKQRGMPAIFWGEAVVTATATSTMASDGQGQGRMWLGADAAAWEGREECKRRRRMQPGVEVMVSDVAAQPGEPDEAGRSDAGILAMGFGQRDSLVSPLERLLEDIFFHVVAIIWFGDALTIGLYHGRYYKFLALNIELKELVLAAAVVAGDDADCSGGRGGRRCGRGRRRGSRTTAEVAVSDDTDGSDGRGG

SEQ ID NO: 20636 - protein, 1555 aa, Oryza sativa
  Clone ID: TF_OSC410155j.C1.p3.fg
MSDARSRRSVASSTRRQQDAELAAAEERKRATAQTAAAAARAARLAAAELAAAREEAEAEAAEDAAHAAEVEVETLRSSINGSIAGDITADRELEELARGRARERAERWAAAHLHGGGGGPRDRAPANGNPDGRGRAGGSPEPARGPCRQRGSLSPDRRHGHHGVQTVVRDFGPGGGWPTLTKTNYIEWAAVMRVRLQVRHMWEAVRYGDVDYDEDRRALDALIAAVPPEMQFSLSQKRTAKEAWDAIAAARIGSDRARKSTLQALRKEWENLAFKPGEDVDDFALRLNTLLQKMVQYGNDTYDEERAVEKLFRCVPEKYRQIARSIESLLDLSTMSIEEALGRLKVVDGDEPQPLSGPITIGGKLHLTREQWEASQGDGRKGESSSPTGGRKPRKARGGVQLRWARRRAKGGARRGAQGVATGNHKPARDDACRNCGKLGHWAKDCRQPRRGQAHVARVEEEEPALLLAHASIELPPAAPAAAAFLHLDEPKVLVSLCNGSSNDKADGWYLDTGATHHMTGRREFFTEFDSSVRGSVKFGDASGVEIKGVGSVTFTAKSGEHRLLTGVYYIPALRNSIISVRQLDENGSRVLVEDGLMRIWDRRRRLLAKVTRGTNRLYILSAQVAQPVCLAARRDDEAWQWHERFGHLHFEALKRLSAKEMVRGMPCLDHMEQLCDVCVVTKQRRLPFPPQMSFRAKERLELMHGDLCGPVTPATPGGRRYFLLLVDDLSRYMWVMVLGSKGEAADAIRRAQAAAEAECGRKLRVLRTDNGGDEGIQRHYTASYSPQQNGVVERRNQTGEAVVTAVYILNRSPTKALDGRTPYEAWHGHKPAVSHLRVFGCLAFAKELGHIGKLDDRSTPGVFIGYAEGSKAYRILDPETQRVRTVRDVVFDEGRGWVWDKAVDDGSTPTYDDFTIEYVHFEGAGGVGSSSSPSVSTPVPEPPPTPTPTHPRATTSTTTSSSSTPPQPVSPRAPAPTATPPGTSTPTPARVERSPVEFVTPLSHDGERIDAYHDGEQLRYRTMDDLLGDQPVPGLVPRNLEAQLHLACDDGEPRSFAEAEKHAAWRAAMQLEMDAVQENRTWELADLPRGHRAITLKWVFKLKRDEAGAIVKHKARLVARDFVQQEGIDYDDAFAPVARMESVRLLALAAQEGWGVHHMDVKSAFLNGDLKEEVYVHQPPGFVLPGKEGKVLRLHKALYGLRQAPRAWNAKLDSTLKGMGFEQSPHEAAIYRRGNGGKCLADAEVATFKKEMKATFQMSDLGPLSFYLGIEVHQDDSGITLRQTAYAKRVVELAGLTDCNPALTPMEERLKLSRDSTAEEVDATQYRRLVGSLRYLTHTRSDLAFSVGYVSRFMQQPTTEHQQAVKRIIRYVAGTLDHGLYYPRCPGKAHFVGYSDSDHAGDIDTSKSTSGILFFLGECLVSWQSVKQQVVALSSCEAEYMAASAASTQALWLARLLGDLLGRDTGAVELRVDSKSALALAKNPVFHERSKHIRVRYHFIRNYLEEGSIKASYINTKDQLADLLTKPLGRIKFLELCSRIGMAQLSHKTTHKT

SEQ ID NO: 20637 - protein, 1351 aa, Oryza sativa
  Clone ID: TF_OSC420547j.C1.p5.fg
MRVRLQVRHMWEAVRYGDVDYDEDRRALDALIAAIPPEMQFSLSQKRTAKEAWDAIAAARIGSDRARKSTLQALRKEWENLAFKPGEDVDDFALRLNTLLQKMVQYGDDTYDEERAVEKLFRCVPEKYRQIARSIESLLDLSTMTIEEALGRLKVVDSDEPQPLSGPITIGGKLHLTREQWEASQGDGRKGESSSPTGGCKPRKARGGVQLRWVRRRAEGGARRGAQGVATGNHKPARDDACRNCGKLGHWAKDCRQPRRGQAHVARVEEEPALLLAHASIELPPAAPAATAFLHLDEPKVLVSLCNGSSNDKADGWYLDTGATHHMTGRREFFIEFDSSVRGSVKFGDASGVEIKGVGSVTFTAKSAWDSWMRTAHACWSRTDTNRLYILSAQVAQPVCLTARRDDEAWQWHERFGHLHFEALKQLGAKEMVRGMPCLDHMEQLCDVCVVTKQWRLPFPQQTSFRAKERLELVHGDLCGPVTPATPGGRRYFLLLVDDLSRYMWVMVLGSKGEAADAIRHAQAAAEAECGRKLHVLRTDNSGEFTAAEFASYCADEGIQRHYTTPYSPQQNGVVERRNQTVVGMARALLKQRGMPAIFWGEAVVTAAYILNRSPTKALDGRTPYEAWHGRKPAVSHLRVFGCLAFAKELGHIGKLDDRSTPGVFIGYAEGSKAYRILDPETQRAVDDGSTPTYDDFTVEYVHFEGAGGVGSSSSPSVSTPAPESPPTPTPTHPRATTSTTTSSSSTPPQPVTPHAPAPTATPPSTSTPMPARVERSPVEFATPLSHDGERIDAYHDGEQLRYRTMEDLLGDQPVPGLVPRDLEAQLHLACDDGEPRSFVEAEKHAAWRAAMQSEMDAVQENRTWELADLPHGHRAITLKWVFKLKRDEAEAIVKHKARLVARGFVQQEGIDYDDAFAPVARMESVRLLLALAAQEGWGVHHIDVKSAFLNGDLKEEVYVHQPPGFVIPGKEGKVLRLHKALYGLRQAPRAWNAKLDSTLKGMGFEQSPHEAAIYRRGNGGNALLVGVYVDDLVITGTKDAEVAAFKEEMKATFQMSDLGPLSFYLGIEVHQDNSGIMLQQTAYAKRVVELAGLTDCNPALTPMEERLKLSRDSTAEEVDATQYRRLVGSLRYLTHTRPDLAFSVGYVSRFMQRPTTEHQQAVKRIIRYVAGTLDHGLYYPRCPGKAHFVGYSDSDHAGDIDTSKSTSGILFFLGKCLVSWQSVKQQVVALSSCEAEYMAASAASTQALWLARLLSDLLGRDTGTVELRVDSKSALALAMNPVFHERSKHIRVRYHFIRSYLEEGSIKASYINTKDQLADLLTKPLGRIKFLELCSRIGMAQLPHKTTHKT

SEQ ID NO: 20638 - protein, 1168 aa, Oryza sativa
  Clone ID: TF_OSC422293j.C1.p3.fg
MSIEEALGRLKVVDGDEPQPLSGPITIGGKLHLTREQWEASQGDGRKGESSSPTAGRKPRKARGGVQLRWARRRAEGGARRGAQGVATGNHKPARDDACRNCGKLGHWAKDCRQPRRGQAHVARVEEEPALLLAHASIELPPAAPAAAAFLHLDEPKVLVSLCNGSSNDKADGWYLDTGATHHMTGRREFFTEFDSSVRGSVKFGDASGVEIKGVGSVTFTAKSGEHRLLTGVYYIPALRNSIISVGQLDENGSRVLVEDGLMRIWDRRRRLLAKVTRGTNRLDILNVQVAQPVCLAAHRDDEAWQWHERFGHLHFEALKQLSAKEMVRGMPCLDHVEQLCDVCVVTKQRRLPFPQQTSFRAKERLELVHGDLCGPVTPATPGGRRYFLLLVDDLSRYMWVMVLGSKGEAADAIRHAQAAAKAECGRKLRVLRTDNGGEFTAAEFASYCADEGIQRHYTTPYSPQQNGVVERRNPTVVGMARALLKQRGMPAIFWGQAVVTAAYILNRSPTKALDGRTPYEAWHGRKPAVSHLRVFGCLAFAKELGHIGKLDDRSTPGVFIGYAEGSKAYRILDPETQRVRTARDVVFDEGRGWVWDKAVDDGSTPTYDDFTVEYVHFEGAGGVGSSSSPSVSTPAPESPPTPTPTHPRATTSTTTSSSSTQPQPVTPHAPAPTATPPSTSTPTPARVERSPVEFATPLSHDGERIDAYHDGEQLRYRTMEDLLGDQPVPGLVPRDLEAQLHLACDDGEPRSFVEAEKHAAWRAAMQSEMDAVQENRTWELADLPRGHRAITLKWVFKLKRDEAGAIIKHKARLVARGFVQQEGIDYDDAFAPVARMESVRLLALAAREGWGVHHMDVKSAFLNCDLKEEVYVHQPPGFVIPGKEAKVLRLHKALYGLRQAPRAWNAKLDSTLKGMGFEQSPHEAAIYRRGNGGNALLVGVYVDDLVITGTKDAEDNSGITLRQTAYAKRVVELAGLTDCNPALTPMEERLKLSRDSTAEEVDATQYRRLVGSLRYLTHTRPDLAFSVGYVSRFMQRPTTEHQQAVKRIIRYVAGTLDHGLYYPRCPGKAHFVGYSDSDHAGDIDTSKSTSGILFFLGKCLVSWQSVKQQVVALSSCEAEYMAASAASTQALWLARLLSDLLGRDTRTVELRVDSKSALALAKNPVFH

SEQ ID NO: 20639 - protein, 1253 aa, Oryza sativa
  Clone ID: TF_OSC900377j.C1.p6.fg
MVQYGDDTYDEERAVEKLFRCVPEKYRQIARSIESLLDLSTMSIEEALGRLKVVDGDEPQPLSGPITIGGKLHLTREQWEASQGDGRKGESSSSTGGRKPRKVRGGVQLRWARRRAEGGARRGAQGVATGNHKPARDDACRNCGKLGHWAKDCRQPRRGQAHVARVEEEEPALLLAHASIELPPAAPAAAAFLHLDEPKVLVSLCNGSSNDKADGWYLDTGATHHMTGRREFFTEFDSSVRGSVKFGDASGVEIKGVGSVTFTAKSGEHRLLTGVYYIPTLRNSIISVGQLDENGSRVLVEDGLMRIWDRRRQKNAKVTGGTNRLYILSAQVAQPVCLAARRDDEAWQWHERFGHLHFEALKQLSAKEMVRGMPCLDHVEQLCDVCVVTKQRRLPFPQQTSFRAKERLELMHGDLCGPVTPATPGGRCYFLLLVDDLSRYMWVMVLGSKGEAADAIRHAQAAAEVECGRKLRVLRTDNGGEFTAAEFTSYCADEGIQRHYTMPYSPQQNGVVERRNQTVVGMARALLKQRGMPAIFWGETVVTAAYILNRSPTKALDGRTPYEVWHGRKPAVSHLRVFSCLAFAKELGHIGKLDDRSTPRVFIGYAKGSKAFRILDPETQRVRTARDVVFDEGRGWVWDKAVDDGSTPTYDDFTVEYVYFEGAGGVGSSSSPSVSTPAPESPPTPTPTHPRATTSTTTSSSLTPPQPVTPHAPAPTATPPSTSTPTPARVERSPVEFATPLSHDGERIDAYHDGEQLRYRTMEDLLGDQPVPVPRDLEAQLHLACNDGEPRSFAEAEKHAAWRAAMQSEMDAVQENRTWELADLPRGHRAITLKWVFKLKRDEAGAIVKHKARLVARGFVQQEGIDYDDAFAPVARMESEGWGVHHMDVKSAFLNDNLKEEVYVHQPPGFVIPGKEGKRGNGGNALLVGVYVDDLVIAGTKDAEVAAFKEEMKATFQMSDLGPLSFYLGIEVHQDDSEITLRQTAYAKRVVELAGLTDCNPALTPMEERLKLSRDSTAEEVDATQYRCLVGSLRYLTHTRPDLAFSVGYVSRFMQRPTMEHQQAVKRIIRYIAGTLDHGLYYPRCPGKAHFVGYSDNDHAGDIDTNKSTSRILFFLGKCLVSWQSDKQQVVALSSYEAEYIAASAASTQALWLARLLSDLLGRDTGTVELRVDSKSALALAKNPVFHERSKHIRVRYHFIRSYLEEGSIKASYINTKDQLADLLTKPLGRIKFLELCSRIGMAQLAHKTTHKT

SEQ ID NO: 20640 - protein, 2020 aa, Oryza sativa
  unsure (1)..(2020): unsure at all Xaa locations
  Clone ID: TF_OSC34299j.C1.p1.np
AXIGNNLISSWFGMVYSWFGDRTVQPMPRYKPEYLFGVEGFVQELRTMSFVIGFGTAPFYAXIRHDRHEEKCRVKVTLNSNSEDIPSVMFEAGGRNYIHACQEVARIAIGELRDRYSDQLADTEYRYHPRQPQGSDRGSYLETEGIENDATTRHLVEMLWAMDESRAETVLAAQDREDRNRGKICELEDKVDRLEKELAALKGEAPPQKARIRLTARKRALFVPRYQLAPKVRVVEKEVAPADPPIIIISSDEEEESKRNHSKIEWVATQDDEDEPNEPSIDLRCSEEQDNRNGPNLNNPNNNNNGENPTLAQVLAQQTQLMNMMMQQLQNQQNQGNNHAPPQNKLAEFLRVRPPVFSSTTNPVEAGDWLHAIEKKLDLLQCTDQEKVSFASHQLHGPASEWWDHFRLNRTTAEPITWLEFTAAFRKTHIPSGVVSLKKKEFRSLTQGSRSVTEYLHEFNRLARYAPEDVRNDEERQEKFLEGLNDELSYPLMTGDYHDFQKLVDKAIRQEDKYNRMEQKKRRIAHFKAQQGSLGPQSMPQGGSSSVVRPQRXFFNNNAGNNIRNQAPRPVAASTQQQPAKREQGSKPMVCFNCGDPGHYADKCPKPRRVKVVPAQSNSAVPASKARVNHVAAAEAQDAPDVILGTFLVNSVPATVLFDSGATHSFLSMSFAGNHGMEVEDLRRPLMVSTPSNQALSLQRSPYVRIEIQGVPFLANLILLESKDLDVILGMDWLARHKGVIDCANRKVTLTSNDGRVVTVHALSSEFLRSRLNQITLEEIPIVREYPDVFPDDLPGMPPKRDIEFRIDLVPGTTPIHKRPYRMVANELAEVKRQVDDLLQKGYIRPSSSPWGAPVIFVEKKDHTQRMCVDYRALNDVTIKNKYPLPRIDDLFDQLKGATVFSKIDLRSGYHQLRIKEYRLFECTVMSFGLTNAPAFFMNHQLRIKEYRLFECTVMSFGLTNAPAFFMNLMNKVFMEYLDKFVVVFIDDILIYSKTKEEHEEHLRLALEKLXEHQLYAKFSKCEFWLSEVKFLGHVISAGGVAVDPSNVESVTNWKQPKTVSEIRSFLGLAGYYRRFIENFSKIAKPMTRLLQKDVKYKWSEECEQSFQELKSRLISAPILILPDPNEGGQLYCDASKLGLRCVLMQDGKVVAYASRQLRPHEKNYPTHDLELAAVVHALKIWRHYLFGTRTEEFERLNLGIVSIGFVAALEAKPTLIDQVREAQTNDPDIQEIKKNMRRGKAIGFLEDEHGTVWLGERICVPDNKDLKDAILKEAHDTLYSIHPGSTKMYXDLKERFWWASMKREIAEYVAVCDVCQRVKAEHQKPAGLLQPSKIPEWKWEEIGMDFITGLPRTSLGQDSIWVIVDRLTKVAHFIPVKTTYSGSRLAELYMARIVCLHGVPKKIVSDRGSQFTSNFWKKLQEEMGSKLNFSTAYHPQTDGQTERVNQILEDMLRACALDFGGSWDKNLPYAEFSYNNSYQASLQMAPYEALYGRKCRTPLLWDQTGERQVFGTDIVREAEEKVKIIQERLRVAQSRHKSYADNRRRDLSFEEGDYVYLRVTPLRGVHRFHTKGKLALRFVGPYKIVSRRGEVAYQLELPQSLAGVHNVFHVSQLKKCLRVPTEEANLEQIEVQEDLTYVEKPIRILETNERKTRNRVIRFCKVQWSNHSEEESTWEREDELNRGIEFDSDRPLSFKPSFPSSSPAAMGLRLRLRAPLKASPVSPPPAATLAFASRRQSRSSAPCAAVDSAVAVPCAAVDSAVAVAREGRHRGRQVVAVLVRRFAIVGDRRSIVAVVKPKNSAVSSSSPAPSVASPPSFWSSRRRSPRRRSPASVRRPSRPLRRAAAAVGDVIADVIKVVRHSVVSGESVFAGEEFEEFQGQQGKSHRSQTTRDVCQRVKAEHQRPAGLLQPLQVPEWKWDEIGMDFITGLPKTQGGYDSIWVVVDRLTKVARFIPVKTTYGGNKLAELYFARITDGQTECLNQILEDMLRACVLDFGKTWDKSLPYAEFSYNNCRVPKRL

SEQ ID NO: 20641 - protein, 799 aa, Oryza sativa
  Clone ID: TF_OSC400724j.C1.p1.gm
MVNTRSNRNGPNLNNPNNNNNGENPTLAQVLAQQTQLMNMMMQQLQNQQNQGNNHAPPQNKLAEFLRVRPPVFSSTTNPVEAGDWLHAIEKKLDLLQCTDQEKVSFASHQLHGPASEWWDHFRLNRTTAEPITWLEFTAAFRKTHIPSGVVSLKKKEFRSLTQGSRSVTEYLHEFNRLARYAPEDVRNDEERQEKFLEGLNDELSYPLMTGDYHDFQKLVDKAIRQEDKYNRMEQKKRRIAHFKAQQGSSQKPRLTLGPQSMPQGASTQQQPAKREQGSKPMVCFNCGDPGHYADKCPKPRRVKVVPAQSNSAVPASKARVNHVAAAEAQDAPDVILVREYPDVFPDDLPERIHQTEFISMGSSVKFLGHVISAGGVAVDPSNVESVTNWKQPKTVSEIRSFLGLAGYYRRFIENFSKIAKPMTRLLQKDVKYKWSEESVAVAREGRHRGRQVVAVLVRRFAIVGDRRSIVAVVKPKNSAVSSSSPAPSVASPPSFWSSRRRSPASVRRPSRPLRQAAAAVGDVIADVIKMAGSVSRRGLDMTGFVLELRGMCVVLGYPPGVDYQARPLPEQEGDDAEPHAAWEVTAVILTGSPERTSLAVTAGGDSFPAACQNAALLAIGTLHQRYPDELQHSPYRYHPRCGGARDFATFRDASSEDDATIVHLARMVEAYDAARIDFQQMVRRGMVENNMKILELRQENLQLKKDLHALEAQLCQLKVAQGEVCRPKRRRVCRSQKITARKSTSRPELVRQSLAWTCFVETPRAEPAPVVPQEGEASGVGSTEDALLLTFRPGPSQR

SEQ ID NO: 20642 - protein, 1594 aa, Oryza sativa
  Clone ID: TF_OSC401061j.C1.p17.fg
MVRCGGLCCARGTVTAPFRAPGLEWYIPGLEIDLYSRMPRYKPEYLFGVEGFVQELRTMSFVKGFGTAPFYAQIPHDRHEEKCRVKVTLNSNSEDIPSVMFEAGGRSYIHTCQEVARIAIGELHDRYSDQLADTEYRYHPRQPQGSDRGSYLETEGIEIDATTRHLVEMLWAMDETRAETVLAAQDREDRNRGKICKLEDKVDRLEKELAALKGEAPPQKARIRLTARKRALFVPRYQLAPKVRVVEKEVTPAPADPPVVNMVLTHSNGNGPNNNNNNNNNGENPTLAQVLAQQAQLMNMMMQQLQNQQNQGNNHAPPQNKLAEFLRVRPPTFSSTTNPVEAGDWLHAIEKKLDLLQCTDQEKVSFASHQLHGPASEWWDHFRLNRTTAEPITWLEFTAAFRKTHIPSGVVSLKKKEFRSLTQRSRSVTEYLHEFNRLARYAPEDVRTDEERQEKFLEGLNDELSYSLMTGDYHDFQKLVDKAIRQEDKYNRMEQKKRRIAQFKAQQGNSQRPRLTLGPQSMPQGGSSSVVRPQRQFFNNNAGNNIRNQAPRHVAASTQQQPAKKEQGSKPMVCFNCGDPGHYADKCPKPRRVKVVPTQSNSTVPASKAHVNHVAAAEAQGAPDVILGTFLVNSVPATVLFDSGATHSFLSMSFAGNHGMEVEDLRRPLMVSTPSNQVLSLRRSPSVRIEIQGVPFLANLILLESKDLDVILGMDWLARYKGVINCANRKVTLTSNDGRVVTVHASSSESLRSRLNQITLEEIPVVREYRDVFPDDLPGMPPKRDIEFRIDLVPGITPIHKRPYRMAANELAEVKRQVDDLLQKGYIRPSSSPWGAPVIFVEKKDHIQRMCVDYRALNDVTIKNKYPLPRIDDLFDQLKSATVFSKIDLRSGYHQLRIKEEDIPKTAFTTRYGLFECTVMSFGLTNAPAFFMNLMNKVFMEYLDKFVVVFIDDILIYSRTKEEHEEHLRLALEKLREHQLYTKFSKCEFWLSEVKFLGHVISAGGVAVDPSNVESVTNWKQPKTVSEIRSFLGLTGYYRRFIENFSKIAKPMTRLLQKDVKYKWSEECEQSFQELKSRLISAPILILPDPKKGFQVYCDASKLGLGCVLMQDGKVVAYASHQLRPHEKNYPTHDLELAAVVHALKIWRHYLFGTRTEVYTDHKSLKYIFTQPDLNMRQRRWLELIKDYDMGIHYHPGKANVVADALSRKGYCNATEGRQLPLELCKEFERLNLGIVSRGFVAALEAKPTLIDQVREAQINDPDIQEIKKNIRRGKAIGFLEDEQGTVWLGERICVPDNKDLKDAILKEAHDTLYSIHPGSTKMYQDLKERFWWASMKREIAEYVAVCDVCQRVKAEHQKPVGLLQPLKIPEWKWEEIGMDFITGLPRTSSGHDSIWVIVDRLTKVAHFIPVKTTYSGSRLAELYMARIVCLHGVPKKIVSDRGSQFTSNFWKKLQEEMGSKLNFSTAYHLQTDGQTERVNQILEDMLRACALDFGGSWDKNLPYAEFSYNNSYQASLQMASYEALYGRKCRTPLLWDQTGERQVFGTDILREAEEKIPTFSESPFSQEKNLKSSKASKASHTDPKQPFKHVDPI

SEQ ID NO: 20643 - protein, 1598 aa, Oryza sativa
  Clone ID: TF_OSC4272j.C1.p3.fg
KFHDKLSNMRLVDGAGRPQGVRVGRFINAAGTTGFPTGKRAMPRYKPEYLFGVEGFVQELRTMSFVKGFGTAPFYAQIPHDRHEEKCRVKVTLNSNSEDIPSVMFEAGGRSYIHTCQEVARIAIGELHDRYSDQLADTEYRYHPRQPQGSDRGSYLETEGIEIDATTRHLVEMLWAMDETRAETVLAAQDREDRNRGKICKLEDKVDRLEKELAALKGEAPPQKARIRLTARKRALFVPRYQLAPKVRVVEKEVTPAPADPPVVNMVLTHSNGNGPNNNNNNNNNGENPTLAQVLAQQAQLMNMMMQQLQNQQNQGNNHAPPQNKLAEFLRVRPPTFSSTTNPVEAGDWLHAIEKKLDLLQCTDQEKVSFASHQLHGPASEWWDHFRLNRTTAEPITWLEFTAAFRKTHIPSGVVSLKKKEFRSLTQRSRSVTEYLHEFNRLARYAPEDVRTDEERQEKFLEGLNDELSYSLMTGDYHDFQKLVDKAIRQEDKYNRMEQKKRRIAQFKAQQGNSQRPRLTLGPQSMPQGGSSSVVRPQRQFFNNNAGNNIRNQAPRHVAASTQQQPAKKEQGSKPMVCFNCGDPGHYADKCPKPRRVKVVPTQSNSTVPASKAHVNHVAAAEAQGAPDVILGTFLVNSVPATVLFDSGATHSFLSMSFAGNHGMEVEDLRRPLMVSTPSNQVLSLRRSPSVRIEIQGVPFLANLILLESKDLDVILGMDWLARYKGVINCANRKVTLTSNDGRVVTVHASSSESLRSRLNQITLEEIPVVREYRDVFPDDLPGMPPKRDIEFRIDLVPGITPIHKRPYRMAANELAEVKRQVDDLLQKGYIRPSSSPWGAPVIFVEKKDHIQRMCVDYRALNDVTIKNKYPLPRIDDLFDQLKSATVFSKIDLRSGYHQLRIKEEDIPKTAFTTRYGLFECTVMSFGLTNAPAFFMNLMNKVFMEYLDKFVVVFIDDILIYSRTKEEHEEHLRLALEKLREHQLYTKFSKCEFWLSEVKFLGHVISAGGVAVDPSNVESVTNWKQPKTVSEIRSFLGLTGYYRRFIENFSKIAKPMTRLLQKDVKYKWSEECEQSFQELKSRLISAPILILPDPKKGFQVYCDASKLGLGCVLMQDGKVVAYASHQLRPHEKNYPTHDLELAAVVHALKIWRHYLFGTRTEVYTDHKSLKYIFTQPDLNMRQRRWLELIKDYDMGIHYHPGKANVVADALSRKGYCNATEGRQLPLELCKEFERLNLGIVSRGFVAALEAKPTLIDQVREAQINDPDIQEIKKNIRRGKAIGFLEDEQGTVWLGERICVPDNKDLKDAILKEAHDTLYSIHPGSTKMYQDLKERFWWASMKREIAEYVAVCDVCQRVKAEHQKPVGLLQPLKIPEWKWEEIGMDFITGLPRTSSGHDSIWVIVDRLTKVAHFIPVKTTYSGSRLAELYMARIVCLHGVPKKIVSDRGSQFTSNFWKKLQEEMGSKLNFSTAYHLQTDGQTERVNQILEDMLRACALDFGGSWDKNLPYAEFSYNNSYQASLQMASYEALYGRKCRTPLLWDQTGERQVFGTDILREAEEKIPTFSESPFSQEKNLKSSKASKASHTDPKQPFKHVDPI

SEQ ID NO: 20644 - protein, 1729 aa, Oryza sativa
  Clone ID: TF_OSC900176j.C1.p15.fg
MGLRLRLRAPLKASPVSPPPAATLAFASRRQSRSSAVQPCAAAAAAAPAVCRRRFSRRRRSGRTSSWSPSRRRPRPPLRHRRRPPEHRRRRQAEELRRFLFVAGAVRCFSAVVLVVAPGLEWYIPGLEIELCSRDGCSEWLGLCNRIRHDRHEEKCRVKVTLNSNSEDIPSVMFEAGGRNYIHACQEVARIAIGELRDRYSDQLADTEYRYHPRQPQGSDRGSYLETEGIENDATTRHLVEMLWAMDESRAETVLAAQDREDRNRGKICELEDKVDRLEKELAALKGEAPPQKARIRLTARKRALFVPRYQLAPKVRVVEKEVAPADPPIIIISSDEEEESKRNHSKIEWVATQDDEDEPNEPSIDLRCSEEQDFPPVSLLVPYPCQMVNTRSNRNGPNLNNPNNNNNGENPTLAQVLAQQTQLMNMMMQQLQNQQNQGNNHAPPQNKLAEFLRVRPPVFSSTTNPVEAGDWLHAIEKKLDLLQCTDQEKVSFASHQLHGPASEWWDHFRLNRTTAEPITWLEFTAAFRKTHIPSGVVSLKKKEFRSLTQGSRSVTEYLHEFNRLARYAPEDVRNDEERQEKFLEGLNDELSYPLMTGDYHDFQKLVDKAIRQEDKYNRMEQKKRRIAHFKAQQGSSQKPRLTLGPQSMPQGASTQQQPAKREQGSKPMVCFNCGDPGHYADKCPKPRRVKVVPAQSNSAVPASKARVNHVAAAEAQDAPDVILGTFLVNSVPATVLFDSGATHSFLSMSFAGNHGMEVEDLRRPLMVSTPSNQALSLQRSPYVRIEIQGVPFLANLILLESKDLDVILGMDWLARHKGVIDCANRKVTLTSNDGRVVTVHALSSEFLRSRLNQITLEEIPIVREYPDVFPDDLPGMPPKRDIEFRIDLVPGTTPIHKRPYRMVANELAEVKRQVDDLLQKGYIRPSSSPWGAPVIFCGKERSYPEDLKGATVFSKIDLRSGYHQLRIKEEDIPKTAFTTRYRLFECTVMSFGLTNAPAFFMNLMNKVFMEYLDKFVVVFIDDILIYSKTKEEHEEHLRLALENKCEFWLSEVKFLGHVISAGGVAVDPSNVESVTNWKQPKTVSEIRSFLGLAGYYRRFIENFSKIAKPMTRLLQKDVKYKWSEECEQSFQELKSRLISAPILILPDPKKGFQVYCDASKLGLGCVLMQDGKVVAYASRQLRPHEKNYPTHDLELAAVVHALKIWRHYLFGTRTEVYIDHKSLKYIFTQSDLNMRQRRWLELIKDYDMGIHYHPGKANVVADALSRKGYCNATEGRQLPLELCKEFERLNLGIVSIGFVAALEAKPTLIDQVREAQTNDPDIQEIKKNMRRGKAIGFLEDEHGTRVKAEHQKPAGLLQPSKIPEWKWEEIGMDFITGLPRTSLGQDSIWVIVDRLTKVAHFIPVKTTYSGSRLAELYMARIVCLHGVPKKIVSDRGSQFTSNFWKKLQEEMGSKLNFSTAYHPQTDGQTERVNQILEDMLRACALDFGGSWDKNLPYAEFSYNNSYQASLQMAPYEALYGRKCRTPLLWDQTGERQVFGTDIVREAEEKVKIIQERLRVAQSRHKSYADNRRRDLSFEEGDYVYLRVTPLRGVHRFHTKGKLALRFVGPYKIVSRRGEVAYQLELPQSLAGVHNVFHVSQLKKCLRVPTEEANLEQIEVQEDLTYVEKPIRILETNERKTRNRVIRFCKVQWSNHSEEESTWEREDELKSAHPYLFASSSESRGRDSV

SEQ ID NO: 20645 - protein, 840 aa, Oryza sativa
  unsure (1)..(840): unsure at all Xaa locations
  Clone ID: TF_OSC400155j.C1.p1.np
GSVYAGALIGDRLVEVYMHMTDAKELWDVLNTKFGATDASNDLYIMEQFHDYKMTDNRSVVEQAHEIXTMAKELELLKCVLPDKFVAGYIIAKLPPSWRSFGTALKHKRQEYSVKGLIASLDVEEKAREKDVVSKGDGGQSNANVVHKAQNKSKGKYKAQQTTNFKKQKKKNNNPNQDERTCFVYGQPGHLARKCPQRKGMKAPSGQTSKSANVTIGNTGDGSGYGNLPTVFFVNQSTNWWVDTGANVHVCAGISLFSSYQVARGSTILMGNGVGTVDLKFTSGKIVQLKNVQHVPSIDRNLVSGSRLTRDGFKLVFESNKIVVSKHGYFIGKGYECGDLFRFSVSDFCNKSVNHICASVDDEANVXHSRLCHINFGLMSWLSSMCLIPKFSIVKGSKCHSCVQSKQPRKPHKVAEEINLAPVELLHSDLCEMNGVLTKGGKRYFMTLIDDATRFCYVYLLKMKDETLDYFKIYKAEVENQLDRKIKRLRSNRGGEFFSNEFDLFCEEHGIIHERTPPYSPESNGIVERKNRTLTDLVNAMLDTAGLPKAWWGEGLLISNHMLNRVPNRNRDQTPYEIWIGRKPSLSYLRTWGCLAKVNVPITKKRKLGPKTVDCVFLKYAHHNIAYRFLIVKSEVPDMHVGTIMESRDATFFESFFPMKDTHSGSSQPSEIIPSSITPPEQIEHTHEHVSEEDVSEAPRRSKRQRTAKSFGDDFTVYLVDNTPKSISEAYASPDADYWNEAVRSNGTWEVTERPYGCKPVGCKWVFKKKFRPDGTTKKYKARLVAKGYTQKEGEYFFDTYSPVARLTTIRVLLSLAASYCLLVHQMDVKTAFLNGELDE

SEQ ID NO: 20646 - protein, 287 aa, Oryza sativa
  Clone ID: TF_OSC12955j.C1.p6.fg
MAGFADALRPDKFTGVHFKRWQIWVILWLTAMKCFWVSTGKSMGVLNADQQKKFDEATTLFMGCILSVLGDRLVEVYMHMTDAKELWDALNTKFGATDASNDLYIMEQFHDYKMANNRSVVEQAHEIQTIAKELELLKRKHWEKDAASKGDGGQSTANVVHKAQNKSKGKYKAQQTTNFKKNKNNNNPNQDKRTCFVCGQPGHLARKCPQRKGMKAPAGQTSNSANVTIGNTRDGSGYGRTGFHRPTGEWVTCFCSWCWYGRYEVYFGKDRAAEERAACPFYRQESC

SEQ ID NO: 20647 - protein, 1355 aa, Oryza sativa
  Clone ID: TF_OSC24526j.C1.p2.fg
MAGFADTLRPDKFTGVHFKRWQIRVSTGKPEGVLTAEQQKQFEEATTLFVGCILSVLGDRLVEVYMHMTDAKELWDALNTKFGATDASNDLYIMEQFHDYKMADNRSVVEQAHEIQTIAKELELLKCVLPDKFVAGCIIAKFPPSWRSFNTALKHKRQEYSVEELIASLDVEEKAREKDAASKGDDGQSSANVVHKAQNKSKGKYKAQQTTNFKKQKNNNNNPNQDERTCFVCGQPGHLARKCPQRKGMKAPAGQTSKSANVTIGNTGDGNGYSNLPTVFSVNQSNNWWVDTGANVARGSTVLMGNGSHASVHGVGTFSIVKGSKCHSCVQSKQPRKPHKAAEERNLAHLELLHSDLCEMNGVLTKGGKRYFMTLIDDATRFCYVYLLKTKDEALDYFKIYKAEVENQLDRNIKRLRSDRGGEFFLYEFDLFCEEYGIIHERTPPYSPESNGIAERKNRTLTDLVNAMLDTAGLPKAWWGESISEAYASPDADYWKEAVRSEMDSIIANGTWEVTERPYGCKPVGCKWVFKKKLRPDSTIEKYKARLVAKGYTQKEGEDFFDTYSPVARLTTICVLLSLAASHGILVHQMDVKTAFLNGELDEEIYMDQPDGFVVEGQEAKVCKLLKSLYSLKQAPKQWHEKFDRTLTSACFAVNETDKCVYYRHGGGEGVILCLYVDDILIFRTNLEVINEVKSFLSQKFDMKDLGVADVILNIKLIRGKNGITLLQSHYVEKILNHFGYIDSKPSPTPYDPNLLLRKNKRIARNQLEYSQIIGSLMYLASATRPDISFAVSKLSRFTSNPGDDHWRALERVMRYLKGTMELGLHYSGYPAVLEGYSDSNWISDVDEIKATSGYVFTLGGSAVSWRSCKQTILTRSTMEAELTALDTATVEAEWLRDLLMDLPIVEKPVPAILMNCDNQTVIVKVNSSKDNMKSSRHVKRRLKSVRKLRNSGVITLDYIQTTRNLADPFTKGLSRNVIDNASKEMGLRPMTAVTAGGRWRHTRQIIPKEFVQRLKGDIPGEIQLETRNRNSHTVRVDKTQEKVIFTEGWAQFVKTFDLQMGDSMMFRFNGNSQFDVIIVDQIGREKACSAVVDDSQNPNVQERRVDATETLNSSRAHSQPMPMQSTTETVNHSHARPCPMHTAVDCMPLSHAHPQPMPMQFPTETVNHCHAPTGPMEMPLENVALSHAHARPLQMQSQPTDRLTQVQRGYSLSSKDQDCRVGVIPDPIIGQKTILSRVQVNVVKRKIQNIGSQIPIFVSVIGKNNASGRISSLSIANRYVDNYLQDEKTIRLSRLGDKWNIRLSDSSGNRRMVGGCRKFAEDNDVGVGDICLFELLKNHKCTMKVHIIRAKDIC

SEQ ID NO: 20648 - protein, 99 aa, Oryza sativa
  Clone ID: TF_OSC32480j.C1.p1.hg
KNNNNPNQDERTCFVCGQPGHLARKCPQRKGMKAPVGQTSKSANVTIGNTGDGSGYGRTGFHRPNGLGHMLLFMLKNVQHVPSIDRNLVSGSRLTRDGF

SEQ ID NO: 20649 - protein, 2737 aa, Oryza sativa
  Clone ID: TF_OSC400022j.C1.p2.fg
MAGFADALRPDKFTGVHFKRWQIKITLWLIAMKCFWVSTGKPMGVLNADQQKEFDEATTLFVGCILSVLGDRLVEVYMHITDAKELWDALNTKFGATDASNDLYIMEQFHDYKMADNRSVVEHAHEIQTMAKELELLKFRYCTQTQETGIRSVEGLIASLDVEEKAREKDVASKGDGGQSTANVVHKAQNKSKGKYKAQQTTNFKKKNNNNNSNQDERTCFVCGQPGHLARKCPQRKGMKAPAGQTSKSANVTIGNTGDGSGYGNLPTVFSVNQSTNWWVNTGANVARGSTVLMGNGSHASVHGVGTVDLKFTSGKIVQLKNVQHVPSIDRNLVSGSRLTRDGFKLVFESNKVVVSKHGYFICQGHEYRGLFRFSLSDFCNKSVNHIFGSVDDEANAEVENQLHRKIKRLRSNRGGEFFSNEFDLFCEEHGIIHERTPPYSPESNGIAERKNRTLIDLVNAMLDTAGLPKAWWGEALLTSNHVLNRVPNRNKDKTPYEIWIGRKPSLSYLRTWGCLAKVNVPITKKCKLGPKTVDCVFLGYAHHSIAYRFLIVNLSSITPPEQTEHTHEHVTEEDDSEAPRRSKRQRTAKSFGDDFTVYLVDDTPKSISEAYASPDADYWKEAVRSEMDSIIANGTWEVKTCGVQVASHGLLVYQMDVKIAFLNGELDEEIYMDQPDWFVVEGQEGKVCKLLKSLYGLKQAPKQWHEKFDKTLTFAGFAVNETNKCVYYRHGGGEGVILCLYVDDILIFGTNLEVINEVKSLLSQNFDMKDLGVANVILNIKLIRGENGITLLQSHYVEKILNRFGYIDSKPSPTPYDPNLLLRKNKRITRNQLEYSQIIGSLIYLASATRPDISFAGYSDSNWISDVDEIKATSGYVFTLGGGAVSWRSCKQTILTRSTMEAELTALDTATVEAEWLRDLLMDLPIVEKPVPAILMNCDNQTENSDLFSFGNIPKNPMDRQWMYADRRSKEFIDGVHYFLRVAEANRQRGFICCPCNKCKNQKEYSASRTIYFHLFESGFMPSYNCWTSHGEQGVEMEEDEVEDDNIPDFAQYDGFEENQTGEEEIAADGNDIADDLGQMLQDAREDCESEKEAHKLDKMLEDHRTSLYPGCEQGHKKLDTTLEFLQWKAKNGVSAKAFGDLLKLVKNILPGGNKLPETTYEAKIVCPLGLEVHKIHACPNDCILYRGEEYENLEACPVCKALRYKIRRDDPGEVDGQLTKKRIPAKWRNIDRKFKEFGKDARNIRFGLSTDGMNPFGEMSSGHSTWPVTMCIYNLSPWLCMKRKYIMMPIIIQGPKQPGNDIDVYLRPLVEDLKQLWKKEGVPVWDEDKQEEFNLRALLFVTINDWPALSNLSGQSNKGYKACTHCMDETESTYLKHCRKVVYMGHRRFLAANHPVRKKGKHFKHKADHRMKPKHHSGKTVFAMIKDLKVVFGKGPGSQPIESEDSHAAMWKKNSIFWELPYREFLDVRHAIDVMHLTKNLCVNLLGFLGVYGKSKDTLEARNDLKHMEQRGDLHPEPKEKGSHYLSPASYTLSKAEKESIFEYLESIKVPSGYSTNIKRIISMKEKKFTNLKSHDCHVLMTQLLPVVIRGILPENVRATITKLCAFMNAISQKVIDPDRLEALQNEVVQCLVSFELIFLPSFFNIMTHLLCHLVKEIRILRPVYLHNMFPFERYMGVLKKYVRNRARPEASIAKGYGTEEVIEFCAEFIEDLRPIGVPESRHEGRLRGKGTLGRKSNNDAPYIEEHLALVRARNIGKSDAWITWHHIDTFPTWLRQHLMGNESINQQLAFLARGPSGSIATFQGYEINGYTFYTRAQDMKSTNQNSAVRVDAMGHDATTATYYGAIEDIWELDYGPLKVPLFWCQRVRLTGGGIMIDDSGMTTVDLNKVGYSDEPFVLANDVTQVFFVKDMSSKGKKGRGPNEPKRQVVLPGKRKIVGAEDKTDEDYDQLDRQPPFTVTIDPSILLSNEDTPYSRSDHKEGTIMADRDEEQILYDTIAEGSSQYWNEEEGNEDPNQYLNEKGNVERDAEGNQQGHVERDVEGNQEEEASGSQPSVGQKRARGQRGAAKKLEGRHIIMEVEEDGRPSAPAVAAKNYVRHSGWVVRDNVPVSTVYWRRTRTRGDHESFVLDSEKEMLWTIMLETFTLPAGTEDKVKRWTLKKMAEQFQSFKGELYKKYILKGQTPNFDTFPKLRDHWDEFVAYKTGEQGQAMMERNKENAAKKKYHHYLGSGGYSVTMPKWEEMEAILIERGIEPATANWPERSKFWYYAHGGTLNPADGSLVFGDQIREAARRLTDAVEASSQGTFRSDRYRDELTLALSRMRSKRDTEAKIADLEFRVSSYELSMQEEVTRKVDERIAAHRSHDPQPTIPPAMMSPSGNRSSCALTGQVGLQSMDAIQTQDESTCPVDDITQQTPSELHIPYKNLSIKVASGMAIPTDPSGTYHCRPIPAGYSKVEVELVEGAYEDLELDYPGGDGSSTDSSSGSCTDSSSGSYTYSSASSSSGTFKVKGPPPAPPPAHTRATKKAKVDAAKNKDPGYDCTQEELDAYVASEVKRQFKPRSPEKKIPIDPSVRNFFRGMSASVKEAIKLSDYERTLKKASSGKSKPVPQLGERPNQEIEPLVTGKEMMIEQFITDTGLTTDQLLGVAPIEKTEVKYMYELGKPLVKPELLQSLPTQMYKFHQLYMEMSATGREMIGARIRDTDFLQGDDILWINFRGINELYQLDALDISIMSC

SEQ ID NO: 20650 - protein, 1132 aa, Oryza sativa
  Clone ID: TF_OSC400667j.C1.p2.fg
MARLPLRSRATLLRRRPQLRVVPAEQPVFPAPRCCDFTMAGFADALRPDKFTGVHFKRWHIRVTLWLTAMKCFWQKQFEEATTLFVECILSVLGDRLVEVYMHMTDAKELWDALNTKFGATDASNDLYIMEQFHDYKMADNRSVVEQAHEIQTMAKELELLKCVLPDKFVVGCIIAKLPPSWRSFGPEQEKGKYKAQQTTNFKKQKKNNNNPNQDERTCFVCGQPGHLARKCPQRKGMKTPTSQTSKSANVTIGNTGDRSGYGRTGFHRPSGEWVTCFYSWCWHGRYEVYFGKDRAAEERATCPFYRQESCYECGGLFRFSLSDFCNKSVNHICGSVDDEANVWHSRLCHINFGLMSRLSSMFLIPKFSIVKGSKCHSCVQSKQPRKPHKAAEERNLAPLELLHSDLCEMNGVLTKGGKRYFMMLIDDATRFCYLYLLKTKDEALDYFKIYKAEVENQLDRKIKRLRFDRGGEFFSNEFDLFCEEHGIIHERTPPYSPESNGIAKRKNRTLTDLVNAMLDTAGLPKARWAEALLTSNHVLNRVPNRNKDKTPYEIWIRRKPSLSYLRTWGCLAKVNIPITKKRKLGPKSVDCVFLGYAHHNIAYRFLIVKSEVPDMHVGTIMESRDATFFENFFPMKDAHSSLSQPSEVIPSPITPPEQTEHTHEHVTEEDVSEAPRRSKRQRTAKSSGDDFTVYLMDDTPKSILEAYASPDADYWKEAIRSEMDSIIANRTLEVTERPYGCKPVGCKWVFKKKLRPDGTIEKYKARLVAKGYTQKEGEDFFDTYSPVARLTTIRVLLSLAASHGLLVHQMDVKTAFLNGELDEEIYMDQPDGFVVEGQEGKVCKLLKSLYGLKQAPKQWHEKFDKTLTSTGFAVNEADKCVYYRHGGGEGVILCLYVDDILIFGTNLEVINEFYYVEKILNRFGYIDSKPSPTPYDPSLLLRKNKRIARNQLEYSQIIGSLMYLASATRPDISFVGYSDSNWISNVDEIKATSGYVFTLGGGAISWRSCKQIILTRSTMEAELTALDTATVEAEWLRDLLMDLPIVEKPVPGILMNCDNQTVIVKVNSSKDNMKSSRHVKRRLRSVRKLRNSGVITLDYIQTARNLADPFTKGLSRNVIDNASKEMGLRPM

SEQ ID NO: 20651 - protein, 1306 aa, Oryza sativa
  unsure (1)..(1306): unsure at all Xaa locations
  Clone ID: TF_OSC400820j.C1.p1.np
MAGFADALRPDKFTHFKRWQIRVTLWLTAMKCFWVSTGKPEGVLTAEQQKQFEEATTLFVGCILSVLGDHLVEVYMHMTDAKELWDALNTKFGATDASNDLYIMEQFHDYKMADNRSIVEQAHDIQTMAKELELLKCVLPDKFVVGCIIAKLPPSWRSFGTALKHKRQEYSVEGLIASLDVEEKAREKDAASKGDGGQSSANVVHKAQNKSKGKYKAQQTTNFKKQKKNNNNPNQDERTCFVCGQPGHLARKCPQRKGMKAPAGQISKSANVTIGNTGDGSGYGNLPTVFSVNQSTNWWVDTGANVHVCADISLFSSYXVARGSTVLMRNGSHASVHGVGMVDLKFTSGKIVQLKNVQHVPSIDRNLVSGSRLTRDGFKLVFESNKVVVSKHGYFIGKGYECGGLFRFSLSDFCNKSVNHICGSVDDEANVWHSRLCHINFGLMFRLSSMCLIPKFSIVKGSKCHSCVQSKQPRKPHKAAEERNLAPLELLHSDLCEMKWVLTKGGKRYFMTLIDDATRFCYVYLLKTKDEALDYFKIYKAEVENQLDRKIKRLRSDRGGEFFSNEFDLFCEEHGIIHERTPPYSPESNGIAERKNRTLTDLVNAMLDTAGLPKAWXGEALLISNHVLNRVPNRNKDETPYEIWIGRKPSLSYLRTWGCLAKVNVPVTKKRKLGPKTVDCVFLGYAHHSIAYRFLIVKSEVPDMHVGTIMESRDATFFESFFPMKDTHSSSSQPSEIIPGSITPPEQTEHTHEHVTKEDDSEAPRRSKRQRTAKSFGDDFTVYLVDDTPKSISEAYASPDANYWKEAVRSEMDSIIANGTWEVTERPYGCKPVGCKWVFKKKLRPDGTIEKYKARLVAKGYTQKEGEDFFDTYSPVARLTTIRVLLSLAASHGLLVHQMDVKTAFLNGELDEEIYMDQPDGFVVEGQEGKVCKLLKSLYGLKQAPKQWHEKFDKTLTSAGFAVNEADKCVYYRHGGGEGVILCLYVDDILIFGTNLEVINEVKSFLSQNFDMKDLGVADVILNIKLIRGENVITLLQSHYVEKILNRFGYIDSKPSPTPYDPSLLLRKNKRIARNQLEYSQIIGSLMYLASATRPDISFAVSKLSRFTSNPGDDHWRALERVMRYLKGTVELGLHYTGYPAVLEGYSDSNWISDVDEIKATSGYVFTLGGGAVSXRSCKQTILTRSTMEAELTALDTATVEAEWLHDLLMDLPIVEKPTCEKTIEVCQEIKKLWSYNVGLHPNSXKPGRSLHEGTITKCDRQCIEGDGFETHSILERTHLCELDCWSQSMEILGESSRKLTKDLGV

SEQ ID NO: 20652 - protein, 364 aa, Oryza sativa
  Clone ID: TF_OSC400991j.C1.p14.fg
MADNRSVVEHAHEIQTMAKELELLKCVLPDKFVAECIIAKLPPSWRGFGTALKHKRQEYSVEGLIASLDVEEKAREKDAASKGDGGQSTANVVHKAQNKSKGKYKAQQTTNFKKKKNNNNPNQDERTCFVCGQPGHLARKCPQRKGMKAPAGQTSKSANVTIGNTGDGSGYGGNVARGSTVLMGNGSYASIHGVGTVGRAEPTNCYSQKCKGNFTLRKCSLRLAAEDEIHALLAIMELGAFLHSLLLRPAARDEINAFMSAWSSARSSAYSAPVWQSPLLIPSSSTWVPSSLIDVLASILTELIVGPCCPIITLDQAEVTEAFRAFDCKGNGFISAIELTRSIADTATPTASSSFYLTVGPITH

SEQ ID NO: 20653 - protein, 1035 aa, Oryza sativa
  Clone ID: TF_OSC401117j.C1.p5.fg
MAGFADALRPDKFTSVHFKRWQIRVNLWLTAMKCFWVSTGKPMGVLNADQQKEFDEATTLFVGCILSVLGDRLVEVYMHMTDATELWDALNTKFGATDASNDLYIMEQFHVYKMADNRSVVEQAHKIQTMAKELKLLKCVLPDKFVAGCIIAKLSPSWRGFGTALKHKRQEYFVEGLIASLDVEEKAREKDVASKGDGGQSSTNVVHKAQNKSKGKYKAQQTTNFNKKKKNNNPNQDERTCFVCGQPGHLARKCPQRKGMKAPAGQTSKSANVTIGNTGDGSGYGRTGFHRPNGEWVTCFCSWCWHGRSEVYFGKDRAAEERVAYYWKEDVRSEMDSIIANGTWEVTERPYGCKPVGCKWVFKKKLRPDGTIEKYKARLVAKGYTQKEGEDFFDTYSPVARLTTIRVLLSLAASHGLLIHQMDVKTTFLNEELDEEIYMDQPDGFVVEGQEDKVCKLLKSLYGLKQAPKQWHEKFDKTLTSAGFAVNEADKYVYYRHGGGEGVILCLYVDDILIFRTNLEVINEVKSFLSQNFDMKDLGVADVILNIKLIRGENGITLLQSHYVEKILNRFDYIDSTMELGLHYSGYPAVLEEYSGSNWISDVDEIKATSGYVFTLGGGAVSWRSCKQTILMRSIMEAELTALDTATVEAEWLRDLLMDLPIVEKPVPAILMNCDNQTIIVKMNSSKDNMKSSRHVKRRLKFVRKLRNSGVITLDYIQTARNLANPFTKGLSRNVIDNASKEMGLRPISNDTLMLLYICNVMIYLWNILNHYMPIFSTFKRHEIEAYEKFKRSAVGTALYIHPCLSEISEGDAADRASNLTDATVDSLIESIIIKDGVKAKFFFNIMSLANSAGEKLLAFSQYILPMKFLERLLVKRLGWHVGKEIFMISGDTSADDREVAMDQFNNSADAKVLFGSIKACGEGISLVGASRVIILDVHLNPSVTRQAIGRAFRPGQQKKVFVYRLVAADSPEVKFHETAFKKEVIPKLWFEWSELCTTEDFKLNQVDIDDSEDELLEANAIRQDIKALYRRMLQ

SEQ ID NO: 20654 - protein, 1308 aa, Oryza sativa
  unsure (1)..(1308): unsure at all Xaa locations
  Clone ID: TF_OSC401276j.C1.p11.np
MAGFADALRPNKFTGVHFKRWQIRVTLWLMVMKCFWVSTGKPEGILTADHQKQFEEATTLFVGCILSVLGDRLVKVYMHMTDAKELWDALNTKFGATDASNDLYIMEQFHDYKMADNRSVVEQAHEIQTMAKELELLKCVLPDKFVAGCIIAKLPPSWRSFGTALKHKRQEYSVEGLIASLDVEEKAREKDAASKGDGGQSSANVVHKVQNKSKGKYKAQQTTNFKKQKKNNNNPNQDERTCFVCGQPGHLARKCPQRKGMKAPAGQTSKSANVTIGNTGDGSGYGNLPTIFSVNQSTNWWVDTGANVHVCADISLFSSYQVARGSTVLMGNGSHASVHVVGTVDLKFTSGKIVQLKNVQHVPSIDRNLVSGSRLTRDGFKLVFESNKVVVSKHGYFIGKGYECGGLFRFSLSDFCNKSVNYICASVDDEANVWHSRLCHINFGLMSRLSSMCLIPMFSIVKGSKCHSCVQSKQSLKPHKAAEERNLAPLELLHSDLCEMNGVLTKGGKRYFMTLIDDATRFCYVYLLKTKDEALDYFKIYKAEVENQLDRKIKRLRSDHGGEFFSNEFDLFCEEHGIIHERTPPYSPESNGIAERKNRTLTDLVNAMLDTAGLPNAWWGEALLTSNHVLNRVPNRNKDKIPYEIWIGRKPSLSYLRTWGCLAKVNVPITKKRKLGPKTVDCVFLGYDHHSIAYRFLIVKSEVPDMHVGTIMESRDATFFESFFPMKDTHSGSSQPSEIIPSSITPPEQTEHTHEHVSEEDVSEAPRRSKRQMTAKSFGGDFTVYLMDDTPKSISEAYASPDADYWKEAVRSEMDSIIANGTWEVTERPYGCKPLGXKWVFKKKLRPEGTIEKYKARLVAKGYTQKEGEDFFDTYSPVARLIIFCVLLSLAASHGLLVHQMDVKTAFLNGELDEEIYMDQPDGFVVEGQEGKVCKLLKSLYGLKQAPKQWHEKFDKTLTSAGFAVNEADKCVYYRHGGGEGVILCLYVDDILIFGTNLEVINEVKSFLSQNFDMKDLGVADVILNIKLIRGENEITLLQSHYVEKILNRFGYSDSKPSLTPYDPSLLLRKNKRIARNQLEYSQIIGSLMYLASATRSDISFAVSKLSRFTSNPGDDHWRALERVMRYLKGNMELGLHYTGYPAVLEGYSDSNWISDVDEIKATSGYVFILGGGAVSWRSCKQTILTRSTMEAELTALDTATVEAEWLRDLLMDLPIVEKPTCEKTIEVCQEIEKLWSYNVGLHPNSXKPGRSLHEGTITKCDRXCIEGDGFETHSILERTHLCKLDCWLQSMEILGESSRKLTKDLGV

SEQ ID NO: 20655 - protein, 1039 aa, Oryza sativa
  Clone ID: TF_OSC401339j.C1.p49.fg
MGRAGLRNLCLRRPAPGEGAVIFTMAGFTDALRLDKFTGVHFKRWQIRVTLWLIAMKCFWVSTGKPMGVLNADQQKEFYEATTLFVGCILSILGDRLVEVYMHMTDAKELWDALNTKFGATDASNDLYIMEQFHDYKMANNHSVVEQAHEIQTMAKELELLKCVLPDKFVPGCIIAKLPPSWRGFGTALKHKRREYSIEGLIVSLDVEEKAWEKYAASKGDAQQTTNFKKQKKNNNNPNQDERTCFVCGQPGHLARKCPQRKGMKAPAGQTSKSANVTIGNTGDGSGYGNLPTVFSVNQSTNWWVDTGANVARGSTILMGNGSHASVHGVGTVDLKFTSGKIVQLKNVQHVLSIDRNLVSGSRLTRDRFKLVFESNKVVVSKHGYFIGKGYECGGLFRFFLSDFCNKSVNHICGSVDDEANVWHSRLCHINFGLMSRLSSIVPNRNKDKTPYEIWIGRKPSLSYLRTWGCLAKVNVPITKKRKLGPKTVDCVFLGYAHHSIAYRFLIVKSEVPDMHVGTIMESRDATFFESFFPMKDTHSGSSQPSEIIPSSITPPEQTEHTHEHVSEEDVSEAPRRSKRQRTAKSFGDDFTVYLVDDTPKSISEAYASPDADYWKEDVRSEMDSIITNGTWEVTERPYGCKPVGCKWVFKKKLRPDGTIEKCKARLVAKGYTQKEGEDFFDTYSPVARLTTIRVLLSLAASHGLLVHQMDVKTAFLNGELDEEIYMDQPNGTNLEVINEVKSFLSQNFDMKDLGIADVILNIKLIRGENEITLLQSHYVEKILNRFGYIDSKPSPTPYDPSLLLRKNKRIARNQLEYSQIIGSLMYLASATRPDISFAVSKLSRFTSNPGDDHWRALERVMHYLKGTMELGLHYTGYPAVLKGYSDSNWISDVDEIKATSRYVFTLGGGAVSWRSCKQTILTRSTMEAELTALDTATVEAGWLCDLLMDLPIVEKPVPAILMNYDNQTVIVKVNSSKDNMKSSRHVKRRLKSIRKLRNSGVITLDYIQTARNLADPFTKGLSRNVIDNASKEMGLRPM

SEQ ID NO: 20656 - protein, 681 aa, Oryza sativa
  Clone ID: TF_OSC401388j.C1.p3.gm
MGLPVDGGGETCLSSTMLSQASLRLGFRKGKRGQRSSDSVRARRGGTREGAVGRVRGGRREEEEAAAVEKQHEVQRSAGGVGGRLGITGANGPFECAREAGTILQHDRVSHPGAVTMPPRQKGKRGWANVAMGDVVPHTTAPAMLLLSLLIFAQSQHAEKPSVTTPGWLALPFQCQCCAQGPEQEQGKYKAQQTTNFKRQKKNNNNPNQDERTCFVCGQPGHLARKCPQCKGMKAPAGQTSQSANVTIGNTGDGSGYDNLPTVARGSTVLMGNGSHASVHGVGTVDLKFTSGKIVQLKNVQHVSSIDRNLVSGSRLTRDGFKLVFESNKVVVSKHGYFIGKGYECGGLFRFPLSDFCNKSVNHICDSVDDEANVWHSHYWKEAVRSEMDSIIANGTWEVTERPYGCKPVGCKWVLKKKLRPDGTIEKYKARLVAKGYTQKEGEDFFDTYSPVARLTTIRVLLSLEDSHGLLVHQMDVKTAFLNGELDEEIYMDQPDGFIVEVNEADKCVYYRHGGGEGVILCLYVDDILIFGTNIEVINESHYVEKILNHFGYIDTGQRQRAWRGWAQPRRRETGTAAAGKGARGSGDPPISAAAQGGAGASVAAWQRHGQAQAASGGLESDMMAHGGAGLKAAMAIRGDAMVRQLRRRMRDAMAAAAHGARGTDVTATVTRVARGSARRG

SEQ ID NO: 20657 - protein, 1256 aa, Oryza sativa
  Clone ID: TF_OSC401417j.C1.p24.fg
MAGFADTLRPDKFTGVHFKRWQIRVSTGKPEGVLTAEQQKQFEEATTLFVGCILSVLGDRLVEVYMHMTDAKELWDALNTKFGATDASNDLYIMEQFHDYKMADNRSVVEQAHEIQTIAKELELLKCVLPDKFVAGCIIAKLPPSWRSFNTALKHKRQEYSVEELIASLDVEEKAREKDAASKGDDGQSSANVVHKAQNKSKGKYKAQQTTNFKKQKNNNNNPNQDERTCFVCGQPGHLARKCPQRKGMKAPAGQTSKSANVTIGNTGDGNGNLVSGSRLTRDGFKLVFESNKVVVSKHGYFIGKGYECGGLFRFSLSDFCNKSVNHICGSVDDEANVWHSRLCHINFGLMSRLSSMCLIPKFSIVKGSKCHSCVQSKQPRKPHKAAEERNLAHLELLHSDLCEMNGVLTKGGKRYFMTLIDDATRFCYVYLLKTKDEALDYFKIYKAEVENQLDRNIKRLRSDRGGEFFLYEFDLFCEEYGIIHERTPPYSPESNGIAERKNRTLTDLVNAMLDTAGLPKAWWGESRDVTFFESFFPMKDTHSNSSQPSEIIPSSFTPPEQIEYTHEHVTEEDDSEAPRRSKRQRTTKSFGDDFTVYLVDDTPKSISEAYASPDADYWKEAVRSEMDSIIANGTWEVTERPYGCKPVGCKWVFKKKLRPDSTIEKYKARLVAKGYTQKEGEDFFDTYSPVARLTTICVLLSLAASHGILVHQMDVKTAFLNGELDEEIYMDQPDGFVVEGQEAKVCKLLKSLYSLKQAPKQWHEKFDRTLTSACFAVNETDKCVYYRHGGGEGVILCLYVDDILIFRTNLEVINEVKSFLSQKFDMKDLGVADVILNIKLIRGKNGITLLQSHYVEKILNHFGYIDSKPSPTPYDPNLLLRKNKRIARNQLEYSQIIGSLMYLASATRPDISFAVSKLSRFTSNPGDDHWRALERVMRYLKGTMELGLHYSGYPAVLEGYSDSNWISDVDEIKATSGYVFTLGGSAVSWRSCKQTILTRSTMEAELTALDTATVEAEWLRDLLMDLPIVEKPVPAILMNCDNQTVIVKVNSSKDNMKSSRHVKRRLKSVRKLRNSGVITLDYIQTTRNLADPFTKGLSRNVIDNASKEMGLRPIEDAVLQSILERTHLCELDCWSQSMKILGESSRKLTKDLGDCGHCGRALAAHAAGLQQCASAALRLRRQPAKAADCCRLRRQCGSGLLRRPSRPRRARVARRRSLSRSDQIAARVGVATREGEEGRDRESCDGATLRFLNSN

SEQ ID NO: 20658 - protein, 760 aa, Oryza sativa
  Clone ID: TF_OSC401478j.C1.p139.gm
MTENRFLDKTSPKDESEGAQIATPISGDETPSSSTMTRLVQYNSCRSATSTVAANLPRSMRRRWGTSTTAASVPVQCPRCRPPPAARLTLPTVRAARGTHRALLEEDSSPITIDVELERGLQNLCLRRPALGEGGNKIFGKRFARLLPIRPRRLAFLSARVLCAFVDARNREVTLWLGAMKCFWVSTGKPMGVLNADQQKEFDEATTLSVGCILSVLGDRLVEVYMHMTDAKELWDALNTKFGATDASNDLYIMEQFHDYKMADNRSVVEQAHEIQTMAKELELLKCVLPDKFVAGCIIVKLPPSWRGFSTALKHKRQEYSVEGLIASLDVEEKAREKDVASKGDGGQSTANVVHKAQNKSKGKYKAQQTTNFKKKKKNNNPNQDERTCFVCGQPGHLARKCPQRKGMKAPAGQTSMSANVTIGNTGDGSGYGKIVQLKNVQHVPSIDRNLVSGSRFAVNDAMMQINVYTIAMMGSHYVEKILNRFGYIDSKPSPTPYDPSLLLRKNKRIARNQLEYSQIIGSLMYLASATRPDISFAVSKLSRKLRNSGVITLDYIQTTRNLADPFTKGLSRNVIDNASKEMGLRPIEDAILQSILERTHLCELDCWSQSMDILGESSRKLTKDHPSVHLRSGEQVSGTSAFDAPHWEKAAIRGDSRSTRAMEWVGGETVVSVPPEPQVEEHHDEQQKHIGRRLGEEKLMRAEHWKWERKVWDGENTRAKKCGKEMVEIDNSCKVREKPCKVKNVPKYSEQNVLALKNV

SEQ ID NO: 20659 - protein, 1460 aa, Oryza sativa
  Clone ID: TF_OSC401518j.C1.p12.fg
MPLRRGALPPRAPLRPAPGGLCGRALLRRTCSLSWPATTGGAALRHTKYKNLADLYYAEDLVVDLISALYSYQMKNSRWKPVFALETGGPSNADSQDFEDDGGFLGRTRLGRLIQAAGRELLEKLNSARSNSPTKIFLVLFGFYTANALATILGQTGDWDVLVAGVVVAAIEGIGMLMYRKPMSRPPGRFQSLIAMVNYWKAGEAKVRECLGDRRRRGELDAGWEWWIVEGDELLLDIICHSPLGIGALLWVWRIHTVHAAAYSQRVTIQLPTMGLESRDATSGGDLRSRAKDDSYHNPQAPCKEELGAVTGQRRRKIRICFIVGNIPKNPVSTGKPMGVLNADQQKEFDEATTLFVGCIPSVLGDRLVEVYMHMTDAKELWDALNTKFGATDASNDLYIMEQFHDYKMADNRSVVEQAHEIQTMAKELELLKCVLPDKFVAGCIIAKLPPSWRGFGTALKHKRQEYSVEGLIASLDVEEKAREKDVASKGDGGQSTANVVHKAQNKSKGKYKAQQTTNFKKKNNNNNPNQDKRTCFVCGQPGHLARKCPQCKGMKAPAGQTSKSANVTIGNTGDGSGYGANVHVCADISLFSSYQVAWGSTVLIGNGSHASVHGVGTVDLKFTSGKIVQLKNVQHVPSIDRNLVSGSRLTRDGFKLVFESNKVVVSKHRYFIGKGYECGGLFCFSFSDFCNKSVNHICGSVDDEANVWHSRLCHINFGLMSRLSSMCLIPKFSIVKGSKCHSCVQSKQPRKPHKAAKERNLAPLELLHSDLCKMNGVLTKGGKRYFMTLIDDATRFCYVYLLKTKDEALDYFKIYKAKVENQLDRKIKRLRSDRGGEFFSNEFDLFCEEHGIIHERTPPYSPESNKIAERKNRTLTDLVNAMLDTAGLPKAWWGETLLTSNHVLNRVPNRNKDKTPYEIWIGRKPSLSYLRTWGCLAKVNVSITNKRKLGPKTVDCVFLGYAHYSIAYRFLIVKSEVPDMHVGTIMESRDATFFESFFPMKDTHSSSSQPSEIILSSITPPEQTEHTHEHVTEEDDSEAPRRSKRQRTVKSFGDDFTVYLVDDTPKSISEAYASPDADYWKEVVRSEMDSIIANGTWEVTERPMGVNMWGASGCSRRSSGLMVLLKTSYGLLVHQMDVKTAFLNGELDEEIYMDQPDGFVVEGFAVNEADKCVYYRHGGGEGVILCLYVDDILIFGTNLEDLGVVDVILNIKLIRGENEITLLQSHYVEKILNCFGYIDSKPSPTPYNPSLLLRKNKRIARNQLEYSQIIGSPMYLASATRPDISFAVSKLSWFTSNPGDDHWRALERVMRYLKGTMELGLHYSGYPAVLEGYSDSKWISDVDEIKATSGYVFTLGGGAVSWRSCKQTILTRSTMEAELTALDTATVEAEWLHDLLMDLPIVEKPVLAILMNCDNQTVIVKVNSSKDNMKSSRHVKRRLKSVRKLRNSGVITLDYIQTA

SEQ ID NO: 20660 - protein, 1257 aa, Oryza sativa
  Clone ID: TF_OSC403909j.C1.p3.fg
MCGGEKRGNTRELARLASPRLASPGRAGQVARVHDVCVEWSATARRLQPRVVRAEQPVFPPPRHCDFTMASFTDALRPDKFTGVHFKRWQIRVTLWLTAMKCFWVSTGKPMGVLKADQQKEFDEATTLFVGCILSVLGDRLIEVYMHMTDAKELWDALNTKFGATDASNDLYIMEQFHDYKMVGNRSVVEQAHEIQAMDKELRLLKCVLPDKFVVGCIIAKLPPSWRGFYTALKHKRQEYSVEGLIASLDVEEKAREKDAASKGDGGQSTANVVHMAQNKSKGKYKAQQTTNFKKKKNNNNPNEDERTCFVCGQPGHLARKCPQRKGMKAPAGQTSKSANVTIGNTGDGSGYGNLPTVFSVNQSTNWWVDTGANVARGSTVLMGNGLHASVRGVGTVDLKFTSGKIVQLKNVQHVPSIDRNLVSGSRLTRDGFKLVFESNKVVVSKHGYFIGSKCHSCVQSKQPRKPHKAAEERNLAPLELLHSDLYEMNGVLTKGGKRYFMTLIDDATRLCYVYLLKTKDKALDYFKIYKAEDENQLDRKIKRLWSDRGGEFFSNEFDLFCEEYGIIHERTPPYSPESNGIAKRKNHTLTDLVNAMLDTAGLPKAWWGETLLTSNHVLNRVSNRNKDKTPYEIWIRRKPSLSYLRTWGCLAKVNIPITKKRKLGPKTVDCVFLGYVHHSIAYRFLIVKFEVPDIHIGTIMESRDATFFESFFPMKDTHSSSSQTSEIIPNSITPLEQTEHTHEHVTEEDDSEALRRSKRQRTAKSFGDDFTVYLVDDTPKSISEAYASPDADYWKEAVRSEMDSIIANGTWEMTERPYGCKPVGCKWVFKKKLRPDGTIEKYKARLVAKGYTQKEGEDFFYTYSPVSRLTTIRVLLSLAASHGLLVHQMDIKTAFLNGELDEEIYMDQPDGFVVEGFAVNETDKCVYYRHGGGEGVILCLYVDDILIFGTNLEVINEVKSFLSQKFDMKDLGLADVILNIKLIRGENGIALLQSHYVEKILNRFGYIDSNPSPTPYDSSLLLRKNKRIARNQLEYFQIIGSLMYLASATRPDISFAVSKLSRFTSNPGDDHWRALERVMRYLKGTIELGLHYSRYPAVLEGYSDFNWISDVDEIKATSGYAFTLGGGAVSWRSCKQTILTRSTMEAELTALDTATVEAEWLRDLLMDLPIVEKPVPAILMSYDNQTVIVKVNSSKDNMKSSRHVKRRLKSVRKLRNSGVITFDYIQTARKLADPFTKGLSRNVIDNVSKEMGLRPM

SEQ ID NO: 20661 - protein, 1233 aa, Oryza sativa
  Clone ID: TF_OSC405599j.C1.p3.fg
MVSTGKPEGVLTADQQKQFEEATTLFVGCILSVLGDRLVEVYMHMTDAKELWDALNTKFGATDASNDLYIMEQFHDYKMADNRSVVEQAHEIQTIAKELELLKCVLPDKFVAGCIIAKLPPSWRSFNTALKHKRQEYSVEELIASLDVEEKAREKDAASKGDDGQSSANVVHKAQNKSKGKYKAQQTTNFKKQKNNNNNPNQDERTCFVCGQPGHLARKCPQRKGMKAPAGQTSKSANVTIGNTGDGNGNLVSGSRLTRDGFKLVFESNKVVVSKHGYFIGKGYECGGLFRFSLSDFCNKSVNHICGSVDDEANVWHSRLCHINFGLMSRLSSMCLIPKFSIVKGSKCHSCVQSKQPRKPHKAAEERNLAHLELLHSDLCEMNGVLTKGGKRYFMTLIDDATRFCYVYLLKTKDEALDYFKIYKAEVENQLDRNIKRLRSDRGGEFFLYEFDLFCEEYGIIHERTPPYSPESNGIAERKNRTLTDLVNAMLDTAGLPKAWWGESRDVTFFESFFPMKDTHSNSSQPSEIIPSSFTPPEQIEYTHEHVTEEDDSEAPRRSKRQRTTKSFGDDFTVYLVDDTPKSISEAYASPDADYWKEAVRSEMDSIIANGTWEVTERPYGCKPVGCKWVFKKKLRPDSTIEKYKARLVAKGYTQKEGEDFFDTYSPVARLTTICVLLSLAASHGILVHQMDVKTAFLNGELDEEIYMDQPDGFVVEGQEAKVCKLLKSLYSLKQAPKQWHEKFDRTLTSACFAVNETDKCVYYRHGGGEGVILCLYVDDILIFRTNLEVINEVKSFLSQKFDMKDLGVADVILNIKLIRGKNGITLLQSHYVEKILNHFGYIDSKPSPTPYDPNLLLRKNKRIARNQLEYSQIIGSLMYLASATRPDISFAVSKLSRFTSNPGDDHWRALERVMRYLKGTMELGLHYSGYPAVLEGYSDSNWISDVDEIKATSGYVFTLGGSAVSWRSCKQTILTRSTMEAELTALDTATVEAEWLRDLLMDLPIVEKPVPAILMNCDNQTVIVKVNSSKDNMKSSRHVKRRLKSVRKLRNSGVITLDYIQTTRNLADPFTKGLSRNVIDNASKEMGLRPIEDAVLQSILERTHLCELDCWSQSMKILGESSRKLTKDLGDCGHCGRALAAHAAGLQQCASAALRLRRQPAKAADCCRLRRQCGSGLLRRPSRPRRARVARRRSLSRSDQIAARVGVATREGEEGRDRESCDGATLRFLNSN

SEQ ID NO: 20662 - protein, 1005 aa, Oryza sativa
  Clone ID: TF_OSC411284j.C1.p10.fg
MARLPLRSRAARLHRRSQPRVVPAEQSVFPPPRRYDFTMAVFADALRPDKFNGVHFKRWQIRVTLWLTAMKCFWKEFDEATTLFVGCILSVLGDHLVEVYMHMTDAKELWDALNTKFGATNASNDLYIMEQFHDYKMADNRSVVEQAHEIQTMAKELELLKCVLPDKFVVGCIIAKLPPSWRGFGTALKHKRQEYSVEGLIASLDVEEKAREKDAASKGDGGQSIANVVHQAQNKSKGKYKAQQTTNFKKKKNNSNPNQDERTCFVCGQPGHLARKCPQRKGMKAPGGQTSKFANVTIGNTGDGSGYGNLPTVFSVNQSTNWWVDTGANVHVCADISLLSSYQVARGSTVLMGNGSHASVHDVGTVDLKFTSGKIVQLKNMQHVPSIDKNLVSGSRLTRDGFKLVFESNKVVVSKHGYFIGKGYECGGLFRFSLSAFCNKSVNHICGSVDDEANVWHSRLCHINFGLMSRFSSMCLIPKFSIVKGSKCHSCVQSKQPRKPHKATEERNLAPLELLHSDLCEMNGVLTKGGKRYFMTLIDDATRFCYVYLLKTKDEALDYFKIYKAEVENQLDRKIKILRSDRGGEFFSNEFDLFCEEHGIIHERTPPYSPESNRIAERKNRTLTDLSRDATFFESFFPMKDTHSSSSQPSEIIPSSITPPEQTEHTHEHVTKEDDSEAPRSSKRQRTAKSFGYDFTVYLVDDTPKSISEAYASLDADYWKEAIRSEMDSIITNGTWEVTERPYGCKPVGCKWVFKKKLRLDGTIEKYKARLIAKGYTQKEGEDFFDTYSLVARLTTIRVLLSLAASHGLLVHQMDIKTAFLNGELDEEIYMDQRDGFVVEGQEGKVCKLLKSLYGLKQAHKKWHKKFDKTLTSASFAVNEADKCVYYRHGGGEGVILCLYVDDILIFGTNLEVINEVKSFLSQNFDMKDLGVADVILNIKLIRGENEITLLQSHYVEKILNRFGYIDILEGYSDSNWISDVDKIKATSGYVFTLGGGAVSWRSCK

SEQ ID NO: 20663 - protein, 988 aa, Oryza sativa
  Clone ID: TF_OSC411372j.C1.p4.fg
MKCFWVSTGKPMGILNADQQKKFDEATTLFVGCILSVLDDRLVEVYMHMTNAKELWDALNTKFGAIDASNDLYIMEQFHDYKMADNCSIVEQAHEIQTMAKELELLKCVLPDKFVAGCIIAKQPPSWRGFSTALKYKRQEYSVEGLIASLDVEEKAREKDVASKGDGGQSTANVVHKAQNKSKGKYKAQQTTNFKKKNNNNPNQDERTCFVCGQPGHLARKCPQRKGMKAPVGQTSKFANVTIGNTGDGSSRTGSTVLMGNGSHASVHGYECGGLFRFSLSDFYNKSVNHICGSVDDKAYVWHSRLCHINFGLMSRLSSMCLIPKLSIVKGSKCYSCVQSKQPRKPHKVAEERNLAPLELLHSDLCEMNGVLTKGGKRYFVMLIDDATRFCYVYLLKTKDEALDYFKIYKAEVENQLDRKIKRLRSDRGGEFFSNEFDLFCEEHGIIHERTPPYSPESNGIAERKNRTLTDLVNAMLDTAGLPKACIAYRFLIVKSEVPDMHVGTIMESRDANFFEISFFPMKDTHSSSSQTSEIIPNSITPPEQTKHTHEHVTEEDDSEAPRRSKRQRTAKSFGDDFTVYLMDDTPKSISEAYASPDADYWKEAVRSEMDSIIANGTWEVTERPYGCKPVGCKWVFKKKLRPDGTIEKYKARLVAKGYTQKEGEDFFDTYSPVARLTTIRVLLSLAASHGLLVHQMDVKTTFLNGELDEVIYIDQPDGFVVEGQEDKACKLLKSLYGLKQAPKQWHEKLDRTLTSVSFAVNEAVKCVYYRHGGGEGVILCFYVDDILIFGTNLEVINEDLGVADVILNIKLIRGENGITLLQSHYVEKILNHFGYIDSKPSPTPYDPSLLLRKNKRIARNQLEYSQIIGSLIYLASATRPDISFAVSKLSRFTSNPEDDHWRALERVMRYPKGTMEFGLHYSGYPAVLEGYNDSNWISDVDEIKATSGYVFTLRGGAVSSRSCKQTILTRSTMEAELTALDTATVEA

SEQ ID NO: 20664 - protein, 1300 aa, Oryza sativa
  Clone ID: TF_OSC419914j.C1.p1.fg
MAGFADALRPDKFTGMLFKRWQIRVTLWLTAMKCFWVSTSKPMGVLNADQQKEFDEATTLFVGCILSVLGDRLVEVYMHMTDTKELWDALNTEFGATDASNDMYIMEQFHDYKMADNRSVVEQAHEIQTMAKELELLKCVLLDKFVAGCIIAKLPPSWRGFGTALKHKRQEYSVEGLIASLDVEEKAREKDAASKGDGGQSNANVVHKAQNKSKGKYKAQQTTNFKKQKKNNNNPNQDERTCFVCGQPGHLARKCPQRKGMKAPARQTYKSANVTIDNIGDGSGYDNLPTVFSVNQSTNWWVDTRANVARGSTVLMGNGSHASVHGVGTVDLKFTSGKIVQLKNVQHVPSIDRNLVSGSRLTRDGFKLVFESNKVVISKHGYFIGKGYECGGLFRFSLSDFCNKSVNHICGSVDDEANVWHSRLCHINFGLMSRLSSMCLIPKFSIVKGSKCHSCVQSKQPRKPHKAAEERNLAPLELLHSDLCEMNGVLTKKTKDEALDYFKIYKAEVENQLDRKIKRLRSDHGGEFLSNEFDLFCEEHSIIHERTPPYSPETNGIAERKNRILTDLVNAMLDTAGLPKAWWGEALLTSNHVLNRVPNRNKDKTPYEIWIGRKPSLSYLRTWGCLVKVNVPITKKRKLGPKTVDCVFLGYAHHSITYRFLIVKSEVPDMHVGTIMKSRDATLFESFFPMKDTHSGSSQPSEIIPSSITPPEQTEHTHEHVSEEDVSEAPRRSKRQMTAKSFGDDFTVYLVDDTPKSISEAYASPDADYWKEAVRSEMDSIIANGTWEVTERPYGCKPVGCKWVFKKKLRPDGTIEKYKARLVAKGYTRKECEDFFNTYSPVARLTTIRVLLSLAASHGLLVHQMDVKTAFLNGELDEEIYMYQPDGFVVEGQEGKVCKLLKSLYGLKQAPKQWHEKFDKTLTSAGFVVNEADKCVYYRHGGGEGVILCLYVDDILIFGTNLEVINEVKSFLSQNFDMKDLGVADVILNIKLIRGENGITLLQSHYVEKILNRFGYIDSKPSPTPYDPSLLLRKNKRIARNQLEYSQIIGSLMYLASATRPDISFAVSKLSRFTSNPGDDHWRALERVMRYLKGTVELGLHYTGYPAVLEGYSDSNWISDVDEIKATSGYVFTLGGGAVSWRSCKQTILTRSTMEAELTALDTATVEAEWLRDLLMDLLVVEKPVPAILMNCDNQTTCEKTIEVCQEIKKLRSYNVGLHPNSEKPGRSLHEGTITKCDRQCIEGDGFETHFTDVRSAAYFNGHQHNIEAPHQNRKKEYRMRTYITYGIHIMLLDLKLVYC

SEQ ID NO: 20665 - protein, 666 aa, Oryza sativa
  Clone ID: TF_OSC900064j.C1.p13.gm
MEDAKALRRLLNDTDLDLVSDRERQAYYMLSDREYAHMREYAPELLKKIGIRLIYTGKINNPRRGVHLRSGEQVSGTSAFDVLHREKAAIRFLGSASRDCSLFVRDGSPSSPLACCAPSSTPATTSSSCRATDLSATSWLGDRLVEVYMHMTDAKELWDALNTKFGATDASNDLYIMQQFHDYKMADNRSVVEQAHEIQTMAKELELLKCVLPDKFVAGCIIAKLPPSWRGFGTALKHKRQEYSVEGLIASLDVEEKAREKDTASKGDGGQCSANVVHKAKNKSKGKYKAQQTTNFKKQKKNNNNPNQHERTCFVCGQPGHLARKCPQRKGMKAPAGQTSKSTNVTIGNTGDGSGYGNFPTVARGSTVLMGNGSHASVHGVGTVDLMFTSGKIVQLKNVQHVPSIDRNLVSGSYYWKEAVRSEMDSIIANGTWEVTERPYGCKPVGCKWVFKKKLRLDASHGLLVHQMDVKTAFLNGELDEEIYMDQPDGFVVEGFAVNEANKCVYYRHGGGEGVIMCLYVDDILIFGTNLEMINESHYVEKILNRFGYIDSKPSPTHYDPSLLLRKNKRIARNLLEYSQIIGSLMYLASATRPDISFAVSKLSRRAPAIRRAGLWNLCLRRPTLGEGGNKVFGKRFARLLPVCPRRLAFLSARVLRAFVDARNRE

SEQ ID NO: 20666 - protein, 880 aa, Oryza sativa
  Clone ID: TF_OSC900186j.C1.p17.fg
MADQGHSVAGSDEMLLGVYMTDAKELWDALNTKFGATDASNDLYIMEQFHDYRMADNRSVVEQAHEIQTMAKELELLKCVVPDKFVAGCIIAKLPPSWRSFGTALKHKRQEYSVEGLIASLDVEKKAREKDAASKGDGGQSSANVVHKAHNKSKGKYKAQQTTNFKKQKKKKNNPNQDERTCFVCGQPGHLARKCPQRKGMKAPAGQTSKSANVTIGNTRDGSGYVARGSTVLMGNGSHASVHGVGTVDLKFTSGKIVQLKNVQHVPTIDMNLVSGSRLTRDGFKLVFESNKVVVSKHGYFIGKGYECGGLFCFSLSDFCNKSVNHICGSVDRGGKNKTEPKNRTEKTETETEKTEIETEKTETEKFGSDHGGELFSNKFDLFCEEHGIIHERTPPYSPESNGIAERKNRTLTDLVNAMLDTAGLPKAWWGKALLTSNHVLNRVPNRNKDKTPYEIWIGRKPSLSYLRTWGCLAKVNVPITKKRKLGPKTVDCVFLGYAHHSIAYRFLIVKSEVPDMHVGTIMESRDATFFESFFPMKDTHSSSSQPSEIIPNSITEHTHEHVTEEDVSEAPRRSKRQRTAKSFGDDFTVYLVDDTPKSISEAYASPDADYWKEAVRSEMDSIIANGTWEWVFKKKLRPNGTIEKYKARLVAKGYTQKEGEDFFDTYSPVARLTTICVLLSLAASHGLLVHQMDIKTTFLNGELDEIYMDQPDGFVVEGFAVNEVDKCVYYRHGGGEGVILCLYVDDILIFGTNLEVINKVKSFLSQNFDMKDLGVADVILNIKLIRGENGITLLQSHYVEKILNRFGYIDSKPSPTPYDPSLLLRKNKRIARNQLEYSQIIGSLMYLASATRLDISFAVSKLTRFTSNPGDDHCVRLSE

SEQ ID NO: 20667 - protein, 1442 aa, Oryza sativa
  Clone ID: TF_OSC900199j.C1.p19.fg
MCGGEKRGNTRELARLASPRLASPGRAGQVARVHDVCVEWSATARRLQPRVVRAEQPVFPPPRHCDFTMASFTDALRPDKFTGVHFKRWQIRVTLWLTAMKCFWVSTGKPMGVLKADQQKEFDEATTLFVGCILSVLGDRLIEVYMHMTDAKELWDALNTKFGATDASNDLYIMEQFHDYKMVGNRSVVEQAHEIQAMDKELRLLKCVLPDKFVVGCIIAKLPPSWRGFYTALKHKRQEYSVEGLIASLDVEEKAREKDAASKGDGGQSTANVVHMAQNKSKGKYKAQQTTNFKKKKNNNNPNEDERTCFVCGQPGHLARKCPQRKGMKAPAGQTSKSANVTIGNTGDGSGYGNLPTVFSVNQSTNWWVDTGANVARGSTVLMGNGLHASVRGVGTVDLKFTSGKIVQLKNVQHVPSIDRNLVSGSRLTRDGFKLVFESNKVVVSKHGYFIGSKCHSCVQSKQPRKPHKAAEERNLAPLELLHSDLYEMNGVLTKGGKRYFMTLIDDATRLCYVYLLKTKDKALDYFKIYKAEDENQLDRKIKRLWSDRGGEFFSNEFDLFCEEYGIIHERTPPYSPESNGIAKRKNHTLTDLVNAMLDTAGLPKAWWGETLLTSNHVLNRVSNRNKDKTPYEIWIRRKPSLSYLRTWGCLAKVNIPITKKRKLGPKTVDCVFLGYVHHSIAYRFLIVKFEVPDIHIGTIMESRDATFFESFFPMKDTHSSSSQTSEIIPNSITPLEQTEHTHEHVTEEDDSEALRRSKRQRTAKSFGDDFTVYLVDDTPKSISEAYASPDADYWKEAVRSEMDSIIANGTWEMTERPYGCKPVGCKWVFKKKLRPDGTIEKYKARLVAKGYTQKEGEDFFYTYSPVSRLTTIRVLLSLAASHGLLVHQMDIKTAFLNGELDEEIYMDQPDGFVVEGFAVNETDKCVYYRHGGGEGVILCLYVDDILIFGTNLEVINEVKSFLSQKFDMKDLGLADVILNIKLIRGENGIALLQSHYVEKILNRFGYIDSNPSPTPYDSSLLLRKNKRIARNQLEYFQIIGSLMYLASATRPDISFAVSKLSRFTSNPGDDHWRALERVMRYLKGTIELGLHYSRYPAVLEGYSDFNWISDVDEIKATSGYAFTLGGGAVSWRSCKQTILTRSTMEAELTALDTATVEAEWLRDLLMDLPIVEKPVPAILMSYDNQTVIVKVNSSKDNMKSSRHVKRRLKSVRKLRNSGVITFDYIQTARKLADPFTKGLSRNVIDNVSKEMGLRPMKIRICFVLETLRKIRVCLLLYTAPSLIDYSIPLAGVHRRSGEQVSGTSAFDVLHREKAAISTSMHQFAGQAQPEEEQKCVHCGGGVAGAQVEAALNRKNVEALPEDETVEGGPDDVWVPDHETCVFVPADKAAVFGTENHDHCGAAAVAGGSPSVLDQAVFVHEEDMEDVERPAVDMAAANHKPK

SEQ ID NO: 20668 - protein, 1223 aa, Oryza sativa
  Clone ID: TF_OSC900250j.C1.p4.fg
MAKELKLLKCVLPDKFVAGCIIAKLPPSWRSFGTALKYKRQEYSVEGLIASLDVEEKAREKDAAYKGDGGQSSANVVHKAQNKSKGKYKAQQTTNFKKQKKNNNNPNQDKRTCFVCGQPGHLARKCPQRKGMKAPAGQTSKSANVTIGNTGNGSGYGNLPTVFSVNQSTNWWVDTGANVHVCADISLFSSYQVARGSTVLMGNGSHASVHGVGTVDLKFTSGKIVQLKNVQHVPSIDRNLVSGSRLTRDGFKLVFESNKVFVSKHGYFIGKGYECGGLFRFSLSDFCNKSVNHICGSVDDEANVWHSRLCHIIFGLMSRLSSMCLIPKFSIVKGSKCHSCVQSKQPRKPHKAAEERNLAPLELLHSDLCEMNGVLMKGGKRYFMTLIDDATRFCYVYLLKTKDEALDYFKIYKAEVENQLDRKIKRLRSDRGGEFFSNEFDLFCEEHGIIHERTPPYSPESNGIAERKNRTLTDLVNAMLDTAGLLKAWWGEALLTSNHVLNRVLNRNKDKTPYEIWIGRKPSLSYLRTWGCLAKVNVPITKKRKLGPKTVDCVFLGYAHHSIAYRFLLVKSEVPDMHVGTIMKSRDATFFESFFPMKDTHSGSSQPSEIIPSSITPPEQIEHTHEHVSEEDVSEAPRRSKRQRTAKSFGDDFTVYLVDDTPKSISEAYASPDADYWKEAVRSEMDSIIANGTWEVTERPYGCKPVGCKWVFKKKLRPDGTIEKYKARLVAKGYTQKEGEDFFDTYSPVARLTTIRVLLSLAASHGLLVHQMNVKTAFLNGELDEEIYMDQPNGFVVVGQGKVCKLLKSLYGLKQAPKQWYKKFNKTLTSAGFAVNEADKCVYYRHGGGEGVILCLYVDDILILGQTLRGENGITLLQSHYVEKILNRFGYIDSKPSPTPYDPSLLLRKNKIIARNQLEYSQIIGSLMYLASATRPDISFVVSKLSRFTSNPGDDHWHALERVMHYLKGTMELGLHYTGYRAVLEGYSDSNWISDVDEIKATSGYVFTLGGGAVSWRSCKQTILTRSTMEAKLTALDTATVEAEWLRDLLMDLPIVKKPVPAILMNCDNQTVIVKVNSSKDNMKSSRHVKRRLKSVRKLRNSGVITLDYIQTARNLADPFTKGLSRNVIDNASKEMGLRPIEDAVLQSSLERTHLCKLDYWSQSMEILGESSRKLTKDLGMPAKSFDRAAGLSATSGETGGRGNRYPEEIEHEKKGVGKIVHT

SEQ ID NO: 20669 - protein, 893 aa, Oryza sativa
  Clone ID: TF_OSC900297j.C1.p4.gm
MGRTAQTSTLSIVLPAPSSPTMLPHYSIPLTGVHRRSGEQVSGTIAFDVLHREKAAISVLGDRMVEVYMHMTDAKELWDALNTKFGATDASNDLYIMEQFHDYKMADNRSVVEQAHEIQTMAKELELLKCVLPDKFMAGANVVHKAQNKSKGKYKAQQTTNFKKQKKNNINPNQDERTCFVCGQPGHLARKCPQRKGMKAPTRQTSKSANVTIGNTRDGSRYGNNTGDGSKYGNLPTVARGSTVLMGNGSHASIHGVDMVDLKFTSGKIVQLKNMQHVPSIDMNLDTHSSSSQPSKVIPSSITPPEQTEHTHEHVTEEDVSEAPRRSKRQRTAKSFGDDFTMYLVDDTPKSISEAYASPDVDYWKEAVHSEMDSIIANGTWEVTERPCGCKPVGCKWVFKKKLRPDVNEADKCVYYRHGGGEGVILCLYVDDILIFGTNLEVINESHYVEKILNRFGYIDSKPSPTPYDPSLLLRKNKRIAKNQLEYSQIIGSLMYLASATRPDISFAMSKLSRFTSNPGDDHWRALERVMRYLKGTMKLGLHYNGYPAVLEGYSDSNWISDVDEIKATSGYVFTLGGGAVSWRFCKQTILTRSTMEAELTALDIATVEAEWLRDLLMDLPIVEKPVPAILMNYDNQTGRRCACTMYASNDYSIPLAGVHRRLGEQVSGISAFDILHQEKAAIRFLGSASRDCSLFVRDGSPSSPLACFAPSSTLATASSSCRATGLSATSGHKQKEGSSFPVPPMPIIWKRTPVQEIMCAYRVAAPVSGEDEAAPASSERTGRRQGGHGISFPVVNELFRHILAPPRPSSPAAAAAAPAPRTPLLLTMREEDGKSEGSGMILILEIFSGTQPITQIVVLMSMAARNSNEPYDLVAKKSPLVVLLLTVVGVRE

SEQ ID NO: 20670 - protein, 383 aa, Oryza sativa
  Clone ID: TF_OSC900312j.C1.p12.fg
MADNRSVVEHAHEIQTMAKELELLKCVLPDKFVAECIIAKLPPSWRGFGTALKHKRQEYSVEGLIASLDVEEKAREKDAASKGDGGQSTANVVHKAQNKSKGKYKAQQTTNFKKKKNNNNPNQDERTCFVCGQPGHLARKCPQRKGMKAPAGQTSKSANVTIGNTGDGSGYGNLSTVFSVNQSTNWWVDTGGNVARGSTVLMGNGSYASIHGVGTVGRAEPTNCYSQKCKGNFTLRKCSLRLAAEDEIHALLAIMELGAFLHSLLLRPAARDEINAFMSAWSSARSSAYSAPVWQSPLLIPSSSTWVPSSLIDVLASILTELIVGPCCPIITLDQAEVTEAFRAFDCKGNGFISAIELTRSIADTATPTASSSFYLTVGPITH

SEQ ID NO: 20671 - protein, 1082 aa, Oryza sativa
  Clone ID: TF_OSC900381j.C1.p18.fg
MAGFADALRPDKFTGVHFKRCRSNSRKPLFVGCILSVLDDRLVEVYMHMTDAKELWDALNTKFGATDASNDLYIMEQFHDYKMADNRSVVEQAHEIQTMAKELELLKCVLPDKFVAGCIIAKLPPSWRSFASLDVEEKAREKDAASKGDGGQSSANVVHKAQNKSKGKYKAQQTTNFKKQKKNNNPNQDERTCFVCGQPGHLARKCPQCKGMKAPAGQTSKSANVTIGNTGDGSGYGNLPTVFSVNQSTNWWVDTGANVARGSTVLMGNGSHASVHGVGTVDLKFTSGKIVQLKNVQHVPSIDRNLVSGSRLTRDKFKLVFESNKVVVSKHGYFNGKGYECGGLFRFSLSDFCNKSVNHICGSVDDEANVWHSRLCHINFGLMSRLSSMCLIPKFSIVKGSKCHRCVQSKQPRKPHKAAEERNLAPIELLHSDLCEMNGVLTKGEKRYFMTLIDDATRFCYVYLLKTKDEALDYFKIYKAEVENQLDRKIKRLRSDRGGEFFSNEFDLFCEEHGIIHERTPPYSPESNGIAEKKNRTLTDLVNAMLDTAGLPKAWWREALLTSNHVLNRVPNRNKDKTPYEIWIGRKPSLSYLRTWGCLAKVNVLITKKCKLGPKIVDCVFLGYAHHSIAYRFLIVKSEVPDMHVGTIMESRDATFFESFFPMKDTHSGSRQPSEIIPSSITPPEQTEHTHEHVSEEDVSEAPRRSKRQRTAKSFGDDFTVYLVDDTPKSISEAYASPDADYSKEAVHSEMDSIIANGTWEVTERPYRCKPVGCKWVFKKKLRLDGTIEKYKARLVAKGYTQKEGEDFFDTYSPVARLTTIRVLLSLAASHGLLVHQMDFSFIKWTLRQLFLMESWMRRSIWINLMGFAVNEADKCVYYRHGGGEGVILCLYVDDILIFGTNLEVINEVKSFLSQNFDMKDLGVADVILNIKLIRELGRNVLVHVRPRRSAGSSPQNTLFASARPCNDVMLKKLGGISPVRLFCDKANMRSAGRCDKPSGMELPRRFWSNSSCTIFVRFASDGGKWPESELWLSWSTVRFGNASSHRGMPPTIEVVVFEVRDVEGGAIVERVRYLAGERVVA

SEQ ID NO: 20672 - protein, 1300 aa, Oryza sativa
  unsure (1)..(1300): unsure at all Xaa locations
  Clone ID: TF_OSC900389j.C1.p9.np
MAGFADALRPDKFTGVHFKRWQIRVTLWLTAMKCFWVSTGKPEGILTVDQQKQFEEATTLFVGCILSVLGDRLVEVYMHMTDAKELWDALNTKFGATNASNDLYIMEQFHDYKMADNRSVVEEAHEIQTIAKELELLKCVLPDKFVAGCIIAKLPPSWRSFSTALKHKRQEYSVEGLIASLDVEEKAREKDAASKGDGGQSSANVVHKAQNKSKGKYKAQQTTNFKKXKKNNINPNQDERTCFVCGQPGHLARKCPQRNGMKAPVGQTSKSANVTIGNTGDGSGYGNLPTVFSVNQSTNWWVDTGANVHVCVDISLFSSYQVARGSTVIMGNGSHASVRGVGMVDMKFTSGKIVQLKNVQHVPSIDRNLVSGSRLTRDGFKLGFESNKVVVSKHGYFIDKGYECGGLFRFSLSDFCNMSVNHICGSVDDEANVWHSRLCHINFGLMFRLSSMCLIPKFSIVKGSKCHSCVQSKQPRKPHKAVEERNLAPLELLHSDLCEMNGVLTKGGKRYFMALIDDATRFCYVYLLKTKDEALDYFKIYKAEVENQLDRKIKRLRSNRGGEFFSNEFDLFCEEHGIIHERTPSYSPESNGIAERKNRTLTDLVNAMLDTAGQPKAWWEALLTSNHVLNRVPNRNKDKTPYEIWIGRKPSLSYLRTWGCLAKVNVPITKKHKLGPKTVDCVFLGYAHHSIAYRFLIVKSEVPDMHVGTIMESRDATFFESFFPMKDTHSSSSXPSEVIPSSITPPEQTEHTHEHVTEEDVSEAPRRSKRQRTAKSFGDDFTVYLVNDTPKSISEAYASPDADXWKEAVRSEMDSIIANGTWEVTERPYGCKPVGCKWVFKKKLRPDGTIEKYKARLVAKGYTQKEGEDFFDTYSPVARLTTIRVLLSLAASHGLLVHQMDVKTAFNGELDEEIYMDQPDGFVVEGQEGKVCKLLKSLYGLKQAPKQWHEKFDKTLTSAGFAVNEADKCVYYRHGGGEGVILCLYVDDILIFGTNLEVINEVKSFLSQNFDMKDLGVADVILNIKLIRGENGITLLQSYYVEKILNRFGYIDSKPSPTPYDPSLLLCKNKRIAKNQLEYSQIIGSLMYLASATRPDISFAVSKLSRFTSNPGDDHWRALERVMRYLKGIMELGLHYTGYPAVLEGYSDSNXISDVDEIKATSGYVFTLGGGAVSCRSCKQTILMRSTMEAELTALDTTTVEAEWLRDLLMDLPIVEKPVPAILMNCDNQTVIVKVNSSKDNMKSSRHVKRRLKSVRKLRNSGVITLNYIQTARNLADPFTKGLSRNVIDNALKEMGLRPM

SEQ ID NO: 20673 - protein, 654 aa, Oryza sativa
  Clone ID: TF_OSC900404j.C1.p25.gm
MGRTAQTSTLSIVLPAPSSPTMLPHYSIPLTGVHRRSGEQVSGTIAFDVLHREKAAISVLGDRMVEVYMHMTDAKELWDALNTKFGATDASNDLYIMEQFHDYKMADNRSVVEQAHEIQTMAKELELLKCVLPDKFMAGANVVHKAQNKSKGKYKAQQTTNFKKQKKNNINPNQDERTCFVCGQPGHLARKCPQRKGMKAPTRQTSKSANVTIGNTRDGSRYGNNTGDGSKYGNLPTVARGSTVLMGNGSHASIHGVDMVDLKFTSGKIVQLKNMQHVPSIDMNLDTHSSSSQPSKVIPSSITPPEQTEHTHEHVTEEDVSEAPRRSKRQRTAKSFGDDFTMYLVDDTPKSISEAYASPDVDYWKEAVHSEMDSIIANGTWEVTERPCGCKPVGCKWVFKKKLRPDVNEADKCVYYRHGGGEGVILCLYVDDILIFGTNLEVINESHYVEKILNRFGYIDSKPSPTPYDPSLLLRKNKRIAKNQLEYSQIIGSLMYLASATRPDISFAMSKLSRFTSNPGDDHWRALERVMRYLKGTMKLGLHYNGYPAVLEGYSDSNWISDVDEIKATSGYVFTLGGGAVSWRFCKQTILTRSTMEAELTALDIATVEAEWLRDLLMDLPIVEKPVPAILMNYDNQTEIEKLRSYNVGLHPNS

SEQ ID NO: 20674 - protein, 214 aa, Oryza sativa
  Clone ID: TF_OSC16941j.C1.p1.fg
MANQHARSNGEKHQGNTNPRQDYSFSLTPVPGQRNQNEKRKCRVRKDICCFSCQEMGHFADKCPKPRNMAASTSVHATPRNQKLAPQRIVIHASRSSPIARVATAPTPTSALPQGVNAPFQSHPPADETEASICVVPLDVPIQQLINQVQDEEPECKKVIVCYNCSEEGHYSRDCPQPRQNRPPHFRQFTGSKHANRQVVTGANAVPVKPSASQ

SEQ ID NO: 20675 - protein, 77 aa, Oryza sativa
  unsure (1)..(77): unsure at all Xaa locations
  Clone ID: TF_OSC423269j.C1.p2.gp
MASEYGGGGGGGSRACYKCGEEGHMARDCSQGGGGGGGYGGGGGGYRGGGGGGGGGGCYNCGETGHIARECPSKTYX

SEQ ID NO: 20676 - protein, 1567 aa, Oryza sativa
  Clone ID: TF_OSC900284j.C1.p10.np
MASRPRRAARAPARFGFEEGRVEPEENHESANEQSHHSNRSHRTASRNAEVEQPRRSNRSHHTAPRNAEMEQSHRTASHNSGEERLPSPPHVENNMQHLMAVQTQILQGLAAAVAGFQHNAHGNGHPHMSNNRSKLTDFLRSRPPEFSQTVEPVEADDWLKDVDRKLNLVQCTPVEKTLYASHQLRGPAADWWENYCNAHPEPTNIAWDEFATAFRAAHVPESTIDMKKEEFNRLKQGNSSVNENLSMFNKLARYAPEEVDTDKKKIRKFLKGIAVGMRLQLLAHDFPTFQHMINKALLLEDARKEATEEYKKRKSNHGNSSRGAPRPRYGQPMQYHQSVTQANRQPGYAPRPQMNRPAPQPQQRAPSGNTAPNSVTSFKSPQGPSAVQCFRCNQIGHYARQCPQNPTNTNSGHANGSTARAPTPAAAQSRPSSQASGQGSRASNNFGRGRVNHIQAETAQDAPDVVMGMFSVNSVPAIVLFDSGASHSFISQAFVKRNGWKTQNLRVPMIVHSPGRNIRATQICPEVNLRIEEVDFLAKPIVLDSQSLDIILGMDWLAKHKGQIDCAEKSITLQGPGGKQVRFTSNTPTASRSILTCLQVTTLESVPIVCEYPDVFPEELTSMPLDREIEFAIELAPGTAPIAKRPYRMAANELAEVKRQIEELEGKGYVRPSSSPWGAPVLLVKKKDGSERMVIDYRALNEVTIKNKYPLPRIDDLFDQLNGARVFSKIDLRSGYHQLKIRSEDIPKTAFSTRYGLYEFTVMSFGLTNAPAFFMNLMNKIFMEYLDQFVVVFIDDILIYSKNEEHAEHLRLIMEKLRDHQLFAKFSKCEFWLDRVAFLGHVISSNGVEVDPSKVEAVLAWNPPKNVLEIRSFLGLAGYYRRFIEGFSKLARPMTELLKKEKKFQWSAACEDSFQEMKKRLTTAPVLTLPDIRKDFEIFCDASRQGLGCVLMQERKVVAYASRQLRPHEVNYPTHDLELAAVVHALKIWRHYLIGNRCEVYTDHKSLKYIFTQTELNMRQRRWLELIKDYDLGIHYHPGKANVVADALSRKAYCNIAQIRPDQDRLCRELEKLRLTVVQSGVPASLTVQPTLESQIREAQKDDEGIKELIKRIQEKKDTNFSIDNQGTVWCGPRICVPAKKELRDLILKEAHQSAYSIHPGSTKMYQDIKAYFWWAGMKRDVAEYVALCDICQRVKAEHQRPAGLLQPLPIPEWKWEEIGMDFITGLPRTPSRYDSIWVIVDRLTKSAHFVPVKTTFDGKKLAELYMTHVVCRFGCPKKIVSDRGTQFTSRFWKQLHEALGTDLNFSTAYHPQTDGQTERVNQILEDMLRACALDFEGTWDRCLPYAEFSYNNSYQASIQMSPNEAMFGRKCRTPLCWNEVGEALVFGPDILKSAEEQVKLIRERLKTAQNRQKNYADNRRRDLEFEKGDHVYLRVSPLHGMRRFGMSGKLAPRYIGPYLITARHGEVAYQLELPEGLADVHNVFHVSQLKKCLRVPKEQVPLGNIELEKNLTYKERPIKVLEEAERQTRRKTIKFYKVQWSNHSEDEATWEREDLLRAEFPELLP

SEQ ID NO: 20677 - protein, 1423 aa, Oryza sativa
  Clone ID: TF_OSC14746j.C1.p4.fg
MKNGIDEIFRDTKKDAIVMSSTKSELQNERIFVPIVLDTNILQASENNQGNEKEKKYEVEKDLSIAPCMLEECSIDQAPIISKEEKRDTDNGVITTQGMGGAQNQRYQQGNNNRVPDDPYAKVKFKIPSFSGYYDAEKYSDWEMIVEQKFSAHLVPDQHRVRQASSEFKDFAIMWWARLADDGILPTTWKELKVAMRDIFVPPSYLRDLSKKLMRLEQRDKSVQDYYGELQKGLMRCSIVKGTEDSICRFYMGLRRKIQDIVDNKEFNTVNQLFQFAMLAVKELQGRDQQVKNKASTYIPRAKPSLGLPKPISFWTTPLASKRPVASGVSAAPKPPSPRPAVSGKGSSQVSTKSASSIASTGRTSRIRCHHCHGFGHVQKICPSQRAYVATVDCYICTSDVEDVEVEEKKDGEQKDLSIAPCMLEECLIDQAPIISEDEKKGNDNGATTNQGISLLDEVNLVSARLITRGDVVLRLRGSVACSFRSQIELCRDSAQIDCLSIPIGRSGPNILIIRGKRSEPPLSPEEEVKFEASDCLFRGALISVLADNIVDVYMQMPSRKDMWDALEAKFGVSDAGSELYAMEQFYDYKMVDDRSIVEQAHEIQMLAKELENNNCELPDKFVADGIIAKLLPSWSDFATSLKHKRQEFSVSDLIGSLGVEEKARAKDNRGKKVEGGSSANMLQKKNPHASHNNKKVKADVKPKATTNFKKKGKGKAKGDCFVCGKSGHWAKDCPERKDRKSANMVISEGRGTSGYGRERFLLVDGKWVTCGCSRCWMKHCVTFKTYKAEVENQLERKIKRLRSDRGGEYFSNEFTSFCEEFGIIHEMTPPYSPQSNGVAERKNRTLTEMVNAMLDTAGLSKEWWGEAVLTACHVLNKIPMKHKEVTPFEEWERKKLNLSYLRTWGCLAKVNVPIAKKHKLGPNTVDCVFLGYAIHSVGYRFLIVNYGVPDMRVGTIIESRDATFFDNEFAMKNTPSTSSQETVIPHKHFAPIEHNDQTPEGNPEEDNIVDTRKSKRQRVAKSFGDDNIVYLVDGTPRTIEEAYSSPDADHWKEAVRSEMDSIMSNGTWEVVERPYGCKPVGCKWVFKKKLRPDGTIEKYKARLVAKGYTQKEGEDFFDTYSPVARLTTIRVLLALAASHGLLVHQMDVKTAFLNGELEEEIYMDQPDGYVLEGQERMVCKLLKSLYGLKQAPKQWHEKFDTTLTSVGFVVNEVDKCVYYRYGGGEGVILCLYVDDILIFGTSLNVIEEVKYFLSKSFEMNDLGEVDVIFNIKLLRGDEGGITLVQSHQVDKILSRFGYSVYKPAPTPYDPSVLLRKNRRIARDQLRYSQIIGSLMYLASATRPDISFVVSKLSRFVSNPGDDHWHALERVMCYQKGTMGYGIHYTGYSKVLEGYSDSNLISDADEIKATSGYVFTLGGGAVS

SEQ ID NO: 20678 - protein, 776 aa, Oryza sativa
  unsure (1)..(776): unsure at all Xaa locations
  Clone ID: TF_OSC31101j.C1.p1.np
GAALYCSRDWGKWREFRRGRRSDVGDLKLSQLRLHCALAPPPPRISPHPAVPARIKDGENHPRDSLSRFPLFSLSLSLGFVRIAPAILAGAINGGRDLRAFPPSPAALSPSRRYIIVPRAPLFRFRRSPLALAFGFVLATFSSLSAVAADLRLAAVVAPVFLPTRRHLHRLRRVVADPVRPFASPADRRSSVSFVVPNRAAAFLRSGRRFRRPRCPGVSRGPPSRFPLLSALSGAAPPRRWSPAVTIGARARVSRRSSRRGRLRPPRGCQVGPAVSRPRPRVRLTRGTHGAGRRQPRAPGPPWTERLTRGPLPWTRTNEGYTSCGPADNEKGNKVRSQDIGTSSSRVNEAPDNSCVTLVQHLINQNRLLIEILQQHQTPILNLSQIQPQVQLEAVQSLTPQVSMPPASQKTHGGVPHVDSKEASIICFMCDEQGHYARNCPXQKRKTPMRTEDEVRKMIITSTEWPPPGMTKRQRRNTFRGAPQLTEHLLANGGRVSDSEDSDQVSSDDEDEMERKACSRCGEIGHVASSCATTCVSDDEDEMERKACSRCGEIGHVASSCATTCVHCEEDHPPDRCPTSRITCFFCEGTDHVPKDCQFSFLLTKKMANQPASSNGEKHQGNTNPRQDYSFSLTPVPGQRNQNEKRKCRVREDICCFNCQGMGHFADKCQKPRNIAASTSVHATPCNQKLAPQRIVIHASRSSPIARVATAPTPASASPQGVNAQFQPQPSVDKTGKDFQPPIPTPSQNDRPQTDSSAKKTLICYNCKEPGHYSRD

SEQ ID NO: 20679 - protein, 469 aa, Oryza sativa
  unsure (1)..(469): unsure at all Xaa locations
  Clone ID: TF_OSC400445j.C1.p12.gp
LQKMVQYGDDTYDEERAVEKLFRCVPEKYRQIARSIESLLDLSTMSIEEALGRLKVVDGDEPQPLSGPITIGGKLNLTREQWEASQGDGRKGESSSPTGGRKPRKARGGVQLRWARRRAEGGARRGAQGVATGNHKPARDNACRNCGKLGHWAKDCRQPRRGQAHVARVEEEEPALLLAHASIELPPAAPAAAAFLHLDEPKVLVSLCNGSSNDKADGWYLDTGATHHMTGXREFFTEFDSSVQGSVKFGDASGVEIKGVGSVTFTAKSGEHRLLTGVYYIPALRNSIISVGQLDENGSRVLVEDGLMRIWDRRRRLLAKVTRGTNQLYILSAQVAQPVCLAARRDDEAWQWHERFGHLHFEALKQLSAKEMVRGMPCLDHVEQLCDVCVVTKQRRLPFPQQTSFRAKERLELVHGDLCGPVTAATPGGRRYFLLLVDDLSRYMWVMVLGSKGEAADAIRHAQATAEAE

SEQ ID NO: 20680 - protein, 2588 aa, Oryza sativa
  Clone ID: TF_OSC400445j.C1.p19.fg
MAAPPNSPIGWWREVRARLWLHTVEVEVNFLAHPFVVYSHFPLFESGSPPSFSLKAALHLISKKKDQGPLLLGVSCSSDLTTSQIATKKLYFAKMKDSAYDADDVMDEFDYLILKANAQQKSKLSSLASSSLAIGKRLVGQDKFRSKLRRVLNSLIRVKECADMLIKVIGAENSNSYMPPQPLQWRVTSSISPGQIIIGRQNEQDDLVHRLLREADGPEPSRGLTISPTPSIITIVGSGGIGKTALAQLIYNDRRIVSGFDLRTWIYVSNIFNKVKITKEILKSIDRNSDITNFSFNMLQEDLKNKLTAKKFLLVLDDVWYDEKIGELTNADRWRELFAPLCYGAKGSKILVTARTNIVSRILGCPAPFHLEGLKGEDSWNLFRICAFGAEDPGNYPELESIGECIVQKLNGSALVIKVVGAHLNANLNVEEWTRVMKSSSSNKEDIMQILRLSYECLPGHLQQCFTFCSLFPKGYSLEPDLLVNMWIAHKFVHGHIGTYESMRETGRSYFNELLSRSFFQELQYGHTIRYVMHDLMNDLASHISRAAPRRCAMSDARSRRLVASSTWRQQDAELAAAEERRRATAQTAAAAAARVAKLAAVELAAARAEAEAEAAEDAARAAEVEVETLRSSINGSIAGDITADRELEELARGRAWERAERWAAAHLHGGGGGPRDRAPADGNPDGRWRAGGSPEPARGPRRQRGSLSPDWRHGHHGVQTVVRDFGPGGGWPTLTKTNYIEWAAVMRSGTGDVDYDEDRRALDALIAAVPPEMQFSLSQKRTAKEAWDAIAAARIGSDRARKSTLQALRKEWENLPFKPGEDVDDFALRLNTLLQKMVQYGDDTYDEERAVEKLFRCVPEKYRQIARSIESLLDLSTMSIEEALGRLKVVDGDEPQPLSGPITIGGKLNLTREQWEASQGDGRKGESSSPTGGRKPRKARGGVQLRWARRRAEGGARRGAQGVATGNHKPARDNACRNCGKLGHWAKDCRQPRRGQAHVARVEEEEPALLLAHASIELPPAAPAAAAFLHLDEPKVLVSLCNGSSNDKADGCVQGSVKFGDASGVEIKGVGSVTFTAKSGEHRLLTGVYYIPALRNSIISVGQLDENGSRVLVEDGLMRIWDRRRRLLAKVTRGTNQLYILSAQVAQPVCLAARRDDEAWQWHERFGHLHFEALKQLSAKEMVRGMPCLDHVEQLCDVCVVTKQRRLPFPQQTSFRAKERLELVHGDLCGPVTAATPGGRRYFLLLVDDLSRYMWVMVLGSKGEAADAIRHAQATAEAECDRKLRRGMPAIFWGEAVVTAAYILNRSPTKALDGRTPYEAWHGRKPAVSHLWVFGCLAFAKELGHIGKLDDRSTPGVFIGYAEGSKAYRILDLETQRVRTARDVVFDEGRGWVWDKAVDDGSTPMYDDFTVEYVHFEGAGGVGSSSSSSVSTPAPESPPTPTPTHPRATTSTTTSSSSTPPQPVTPHAPAPTVTPPSTSTSTPARVERSPVEFATPLSHDGERIAYHDGEQLRYRTMEDLLGDQPVPGLVPRDLEAQLHLACDDGEPRSFAEAEKHAAWRAAMQSEMDAVQENRTWELADLPRGHRAITLKWVFKLKRDEAGAIVKHKARLVARGFVQQEGIDYDDAFAPVARMESVRLLHALAAQEGWGVHHMDVKSAFLNGDLKEEVYVHQPPGFVIPGKEGKVLRLHKALYGLRQAPRAWNAKLDSTLKGMGFEQSPHEAAIYRRGNGGNALLVGVYVDDLVITGTKDAEDDSGITLRQTAYAKRVVELAGLTDCNPALTPMEERLKLSRDSTAEEVDATQYRRLVGSLRYLTHTRPDLAFSVGYVSRFMQRPTTEHQQAVKRIIRYVAGTLDHGLYYPRCPGKAHFVGCEAEYMAASAASTQALWLARLLSDLLGRDTGTVELRVDSKSALALTKNPVFHERSKHIRVRYHFIRSYLEEGSIKASYINTKDQLADLLTKPLGRIKRLVTFPKCLGTLSSILCIDVHRMCTVDLAASSHMPCLRAAGEFCVDKSKVQGLEVLKQMNELQGSLAITSLENVKSRDEATDAQLFRKSQIFKLKLQWGSSNASSKSDKANDVFDALRPHSGLEELIVQGYPGCVSPSWLESEWLSRLRHISISDCKCWKLLPSLGQIQSLRTLRIARLNAVVCIGPEFYGTAGFPSLEILEMIELPELAEWSSVDCFFPALLEVCIRGCPKLKQLPPVVLPPVRMSIYVSTEVCRLRNHNRLETCFTQEVSLSTLLDMLHLRRLEPVKCVNIIFEGANTLEDGLKDVTTNLPSLEELVIRGCSDLQHAFAASKQREEDGNVFSSASIQCLKMIGCNLTVDIFLSVFQNISFLSLWINDCNITYSTPERVLAMPKSVTGVLEKLCILSCDGLTAFMGLETFLRLSTIEIASCPKLTSVPDFRCLPALQNLIIKNCPELKELPENGNLTTLTALVVEHCNALISLRNLRDLSFLSKLVVRNCMKLMALPQMISFSSLRVLIIKNCPEVVSLPEDGLPVSLNCLYLAGCHPVLEEQFDQKNGSEWEKYEVLPFCFFADKSIEDIEEIAKEVLMADDLTRISIQGNRVHATDSAASSSSFP

SEQ ID NO: 20681 - protein, 1335 aa, Oryza sativa
  unsure (1)..(1335): unsure at all Xaa locations
  Clone ID: TF_OSC419088j.C1.p1.np
MRVNLQAQGLWEAVDTGDVPFHEDRQALSAILRAVPAEMLRPLAEKDNAKDAWDALKSMRVGTDRVRESCAQKLRQAFESMQFKPDESVEDFSLHLQWVVSDLRLLGDDITEEKIMCKFLRVVPRRYRQMALSIETLIDLTTLSIEDLTGRLLTVDDHPDSDSEDAGQALFGKKEEQARANKGLGQSSSRGSGTGTGSSERRQRGRGGCGRDGAGGKHKPGANQGGGRDVSKDKCRYCGELGHWAKDCRKAKRDRDKLAHAHLLGDDEPTLLMAQVCELVPTTEPELINEGDDEPTLLMAQVCELVPTTEPELINEVNLNKERALVSLREEGEVDPDWILDMAASNHMTGLDTTMRGTVKFGDTRIEGRGTMLFACKNGDYCGLIGVYFIPKLRSNMVSLGQLNKVGCKTVIEDGALTLRDPRWRLLCRVRRGRERLYVLQVELAQLVSLAARSSEDAWLXHARFGHLNFDSLRTLYAHGLAHGLPKLERVRQVCDGCLISKQRRVPFPTAATFRATSRLDLVHGNICVPISPPTHGGKKYFLLLIDDMSRYMWLFLLTSKSEAPATIKRFKAGVEVETACKLRVLRTNRGGEFTSIEFGLYCANEGVARQLTAPYSPQQNGVIKRRNQTVVSMARCMMKAKHMPRKFWGEAVRTAVFILNRSPTKAVPNKTPYKAWHGRTPAVHYFKTFGCVVHIKEVKPHLKKLEDRSKMMVFLGYEPGTKGYRVYDPDANRVVITRDAVFDEVTSWPWGEPVEHGEASTDDSFTVYYEVASSIVAEVGLLASRPCPTPSAQLATPPDTPSVEFMSLPNSMLDVDDDXGAPRRYRSMANILDTTAPVELDXNEIYLAAAEELANLSEAEQDEHWRQAMLDEIKSIEENNTWILTELLTGKRPIGVKRVFKLKKKETSAVIRHKARLVAKGYVQRHGIDFDEVFAPVARMESVRLLLAVAAYLGWTVHHMDIKSAFLNRELEEEVYVSQPPGFIDDKHPSQVLHLNRALYGLRQARRTWNAXLDTRLHELGFKRSATEHAVYTRGEGSKRLIIGVDLGLLSYYLRIEVRQGSDDITINXSAYAQKLLKIGGLVDCNSTCVPMEPRLKLMKNSDRPAIDATLYRSLVGSLRYLVHTWPDFAFAVGSVSRFMESPRDDHLLVVKHILRYVAGTQNFGCCLARSGETGICLLGFSDSDLGGDIDDRKSTSGALFFLGSSPIAWQSQKQKVVALSSCEAEYIAATGAACLGIWLARLLAEVLGTEPEMAILKVDNKSVISLCKNPVFHDRSKHIDTRYHIRQCIEEKKDDVEFIPTDEQVADILTKPLVCIKFQEFRNKAGVVQIVTW

SEQ ID NO: 20682 - protein, 2084 aa, Oryza sativa
  Clone ID: TF_OSC12503j.C1.p1.fg
MLDLGGKNGENGNEDEASSKGTPPPKGATIPFDYSKLTIPSHYFVSMPSGHTPQFDGTYYDAWKHKVKLHLISLHPSIWKVVCTGIDIPHDDMELTSGQEQFIHRNAQASNAILSALSPEEFNKVDGLEEAKEIWDTLQLAHEGSPAVREAKIELLEGRLGRFVMDVKETPQEMYDRMMILVNKIKGLGKTSACIWSKKSHSFLSMIRERKHFKRLTPSDILGRIVSHEMQEEEAREVRQMVNNAAMIKNQEVALKAKQEEESSCEESEDEEMAFIVKRFKHFLRKSGYDKGRKDDDKGKRQSKRACFNCGEYGHFIADCPKSNEAKAKGGKKKPERAHVAEAHMAEVWHSGDEEDPEVKPKPKSKDKVEGEGGVATVAFKSSSSSKECLFNNLSDDDDDSYHYSCFMAQGRKSFSKPAMQHLAKLMRALDSKEQSLERQEELLILEKKRNLALEESLAKECAKNKQLANELNLANGSLASLRDVNETLQEKFANLDKSHKDLEVQFDTLWNSTSQPNVVSNSSNPFTSNGCARCYDIDLNSYATNIDAMQALKKENERLSTLVKYGCMKTYHSKDVLYKTITAHPNKDGHELGFSGGSPVPKRVMVNGKECLMFVREGKAPQASEVTGLVSCQGPGTSGQTGRNLWVGVSVSQKFPPGSSGRFARKFRANGRAQDMTGSSGHNARRFQPDGLYYDSYVISKNSEGKVVAYFNVNYNDEYRTCVWVPKALVTNIKGPKLRQAYSSGGSSWVVDSGCTNHMTGERSMFTSLDKENGTRENIVFGDDGKGKLGYNCLFTDEDVTVFRRDDSSVAFKGKLKGDLYLVDFDVDRVNPETCLIAKSSMGWLWHRRLAHVGMRNLATLLKGEHILGLTNVTFEKDRSEAQDVFKRFAKQAQNLYDLTIKRVRSDNGGEFKNTQVEEFLDEVGIKHEFSAPYDPPKNGIVERKNRTLIEAARAMLDKYKTSDIFWAEAVSTACHAINCLYLHKILKKTSYELLSGKKPNVSYFRVFGSRCFILSKRPRSSKFSPKVDEGFLLGYESNAHAYRVFNKTFGIVEVIRDVTFDESNGSQGEQVVVHVVGDVDPSQAIGTKAIGDIRPVETQDDQEDRDQPSSSTSNSPTSSQESVDPEVPGPDDRILRTSPSQEVPGPSARKFRAEDSQGVPVDGIDAEGTVEHPDQAQVPSVHHPRIHHTVQRDHPVDNILGDIRKGITTRSRVANFCQHYSFVSSLEPTRVEDALGDTDWVMAMQEELNNFTRNQVWTLLERPDQNIIGTKWIFRNKQDEHRVVVRNKVRLVAQGFTQVEGLDFGETFAPVARLESIRILLAYAAHHDFRLFQMDVKSAFLNRPISELVYVEQPPGFEDPKLPNHVYKLHKALYGLKQAPRACSIMTKRFEMSMMGELTFFLGLQVKQAQEGTFISQTKYVKDILKKFGMEDAKPIKTPMPTNGHLDLDDNGKCVDQKVYRSKSVCMCAHFQAEPKECHLIAVKRILRYLVHTPNIGLWYPKGCDFELLGYSDSDYAECKVDRKSTTGTCQFLGRSLVSWSSKKQNSIALSTAEAEYVAAGSCCAQLLWMKQTLKDFGYNFTKIPLLCDNESTIKIANNPVQHSRTKHIDIRHHFLRDHETKGDICLTHVRTESQLADIFTKPLDEKRFCELRISTMPREKRQKASQDVSGDKSPPIRFPRGRLGKEKVVDAAVVAVLVLVLGLPVIMARENPVVEMKWIDWAYMRKKNNEVFNQVMQVCHNKNLGDILALEYDWNEEVIAQFYATAFFGTTRKGTPYVKWLTEDDEDLNRPNIHSEASLPMIKTKFMYAKDAPRTCMGSTHGLHPNYKVLYSIFHWSLLPKVGDATALPSKHAHLLSRMRYNQPPFNVMKLIWYEIANTILEPKRGCIYAPFIMKMIETVTGVFYIKDGHHNPFRPRAPPFSSPVVPRSVPSTSAGPSTSGPPSSSSFSPIKKALQAIFCMCAKTAKKVKKIERRQKEDRREARKEVSDDSEDEVYVDPFEAYEAARNVAGEGPSTFFNEESSHSDDDDDDDDDDDDGDEGDTEAAAEDAPIDVDEGDTAAQSDESHLSGDTEIVPSDGDE

SEQ ID NO: 20683 - protein, 570 aa, Oryza sativa
  Clone ID: TF_OSC13789j.C1.p4.fg
MSHLEGDEYLEEKGDASSTKETGSKGATIHFDYIKLNVPPHNFVSVPSGRAPHFDGTHYAAWKHKMKLHLISLHPSIWKVVCTGIDVPNDDMELTSEQEQLIHRNAQASNTILSALSPKEFNKFDGLEEAKEIWDTLQLAHEGSPAVREDKIELLEGRLGRFVMDDKETPQEMYDRMMILVNKIKGFGSEDMTNHFVVKRLLRAFGPRNPTLVSMIRERKDFKRLTPSDILGRIVSHEMQEEEAREVRQMVKNAAMIKNQEVALNAKQEEESSCEESEDEEMALIVKRFKHFLLKSGYGKGRKDDDKGKRQSERACFNCGEYGHFIADCPKTNEAKAKGDKKKPERAHVVKAHMVEVWYSEDEEASEDKPKPKPKDKIEGEGGIATVAFKSSSSSKECLFNNLSDDDDDSYHYSCFMAQGRKVMTQKPSHTSLDDDSSDEETSLRDVNETLQEKFAILDKSHKDLEVQLDTLWSSTSQPNVVSNSSNPSTSNGCARCYNIDLTSYATNVDAMQALKKENERLGTLVKYGCMKTYHSKDALYKTITAHPNKDGHGLGFSGGMSRPDKFIPK

SEQ ID NO: 20684 - protein, 658 aa, Oryza sativa
  Clone ID: TF_OSC30721j.C1.p1.fg
MELTSEQEQLIYRNAQASNAILSALNPEEFNKVDGLEEAKEIWDTLQLAHEGCPAVREAKIELLEGRLGRFVMDDKETAQEMKDFKRLTPSDILGRIVSHEMQEEEAREVRQMMKNAAMIKNQEVALKAKQEEESSCEESEDEEMAFIVKRFKHFLYKSGYGKGRKDDDKGKRQSKRACFNCGEYGHFIADCPKSNEANAKGGKKKPERAHVAEAHMAEVWYFGDEEDPEVKPKPKSKDKVEGEGGVATVAFKSSSSSKERLFNNLSDDDDDSYHYSCFMAQGRKVMTQKPSQTSLDVDSSDEESDNELDDVLKSFSKPAMQHLVKLMRALDSKEQSLERQEELLILEKKRNLVLEESLAKECAKNKQLANELNLANGSLASLRDVNETLQEKFANLDKSHKDLEVQFDTLWNSTSQPNVVSNSSNPSTSNALKKENEKLCTLVKYGCIKTYHSKDALYKTITAHPNKDGHGFGFSGRSPVSKRVMVNGKECLMFVREGKAPQASEVTGLVSCQGPGTSGQTGRNLRVGVSVSQKFPPESSGRFAKKFRANGRAQDMTGSSGHNARRFRPDGLYYDSYVISKNLEGKVGAYFNGNYNDEYRTCVWVPKALAYSSGGSSWVVDSGCTNHMTGERSMFTSLDEENGTRENIVFGDDGKGK

SEQ ID NO: 20685 - protein, 449 aa, Oryza sativa
  Clone ID: TF_OSC400044j.C1.p46.fg
MSHQEGNGEIDEGDKGDASSTEEIASKGATIHFDYSKLNVPSHNFVSVPSGRAPHFDGTHYAAWKHKMKWHLISLHPSIWKVVCTGIDVPHDGMELTSEQEQLIHRNAQASNAILSALSPEEFNKVDGLEEAKEIWDTLQLAHEGSPAVREAKIELLEERLGRFVMDDKETPQEMYDRMMILVNKIKGLRSEDMTNHFVVKRLLRAFGPRNPTLVSMIHERKDFKRLTSSDILGRIVSHEMQEEEAREVRQMVKNAAMIKNQEVALKAKQEEESSCEESEDEEMALIVKRFKHFLRKSGYGKGRKDDDKGKRQSKRACFNCGEYGHFIADCPKSNEAKAKGGKKKPERAHVAEAHMAEVWYSEDEEASEAKPKPKPKPKDKVEGEGSVATIAFKSSSSSKERLFNNLSDDDDDSYHYSCFMAQGRKVMTQSPLTLLLMMILVMKKVIIN

SEQ ID NO: 20686 - protein, 1794 aa, Oryza sativa
  Clone ID: TF_OSC400116j.C1.p1.fg
MSHLEGTEGLDDKGDASSTKDTGPKGATIHFDYNKLNVPPHNFVSVPSGRAPQFDGTHYAAWKHKMKLHLISLHPSIWKVVCTGIDVPHDDMELTSEQEQLIHCNAQASNAILSALSLEEFNKVDGLEEAKEIWDILQLAHEGSPAVREAKIELLEGRLGRFVMDDKKTPQEMYDRMMILVNKIKGLGSKDMTNHFVVKRLLRAFDPRNPTLVSMIREKKNFKRLTPSDILGRIVSHEMQEEEAREVRQMVKNAAMIKNQEVALKAKQEEESSCEESEDEEMAFIVKRFKHFLRKSGYGKGRKDDDKGKRQSKRACFNCGEYGHFIADCPKSNEAKAKGGKKKPERAHVTEVNMAEVWYSRDEEDPEVKPKPKLKDKVEGEGRKEMTQKPSHTSLDVDSSDEESDNELDDVLKSFSKPAMQHLAKLMRALDSKEQSLERQEELLILEKKRNLALEESLAKECAKNEQLANELNLANGSLASLRDVNETLQEKFANLDKSHKDLDVQFDTLWNSTSQPNVVSNSSNPSTSNGCARCYNIDLNSCTTNVDAMQALKKENERLGTLVKYGCIKTYHSKDALYKTITAHPNKDGHGLGFSGGSPVSKRVMVNGKECLMFVREGKTPQASEETRPFSGQHPEVPDKMIGSSCPAYSSDGSNWVVDSGCTNHMTGERSMFTSLDEEGGSRENIVFGDDGKGKLQFIIRISIVRDDSSIAFKGVLKGDLYLVDFNVDRVNPEACLIAKSSMGWLCHRRLAHVGMRNLASLLKGEHILGLSNVSFEKDRVCSACQVGKQVGSPHPIKNIMTTTRPLELLHMDLFGPVAYIIIGGNKYGFVIVNDFSRFTWVYFLHDKSKAQDVFKRFAKQAQNLYDLTIKRVQSDSGGEFKNTQVEEFLDEEGIKYEFSTPYDPLQKGIVERKNRTLIEAARAMLDEYKTSDVFWAKAVSTACHAINRLYLHKILKKTSYELLSCKKPNVSYFRVFGSKCFILSKRPRSSKFSSKVDEGFLLGYESNAHAYRVFNKTSGIVEVTRDVTFDESNGSQGEQVVVHVVSDVDPSQAISIKAIGDIRPVETQDDQEDRDQPPSSTSNSPTSVVSAEPEVPGPIDWNIRTSPGPEVPGSLVQNLRTSGSEDVPTAQVHDYVQRDHPVDNILGDIRKGVEDALGDPDWVMAMQEEFNNFTRNQVWTLMERPKKNVIGTKWIFRNKQDEHGVIVRNKARLFQMDVNSAFLNGPISELVYVEQPPGFEDLKLPNHVYKLHKALYGLKQAPRACVSMCARFQAEPKECHLIAVKRILRYLVHTPNLGLWYPKGCDFKLLGYSDSDYAGCKVDRKSTTGTCQFLGWSLVSWSSKKQNSIALSTAEAEYVAAGSCCAQFHWMKQTLKDFGYNFSKIPLLCDNESAIKIANNPVQHSRTKHIDIHHHFLRDHETKRDICLTHVRTESQLADIFTKPLDEKRFCELRMVSMPREKRQKLSQDVPSDSSPLVRGPRGRLGKEKVGDFYSGSQILIHSRRAGSIVIRDAPRSPSPVASESDNGGNEDEPGSESNPLRLYKTRAVDPDPRHPRVNYLKNLLRCAKDRMVSPDTMTADSQDDRFRTLVQIDWYNSMIMRRSYPVVEMKWLDWQYMSSKNNLVFNEVRKDAPKDCLGTTRGLHPYYRVLYSIFRWSLLPKVNDATALPSRHALLLSRMRYNKPDFSIMKLIWTGKEVSDISDDEEFVDPFAAYEAARDIANGEGPSGTTHFFNEESSYSEENSDDEESDAPTENVPTDLDEAVDAAGQDIDSPDSGDTEIISSDGDDDEA

SEQ ID NO: 20687 - protein, 1778 aa, Oryza sativa
  Clone ID: TF_OSC400685j.C1.p36.fg
MSDLGGKNGENGNEDEASSKGTPPPKGATIPFDYSKLTIPSHNFVSVPSGRAPQFDGTYYAAWKHKMKLHLISLHPNIWKVVCTGIDIPHDDMELTSEQEQLIHRNAQASNAILFALSPEEFNKIDGLVEAKEIWDTLQLAHEGSPAVREAKIELLEERLGRFVMDDKETPQEIYDRMMILVNKIKGLGSEDMTNHFVVKKLLRAFGPRNPTLVSMIRERKDFKRLTPSDILGRIVSHEMQEEEAREVRQMVKNAAMIKNQEVALKAKQEEMAFIVKIFKHFLRKSGYGKGRKDDDKGKRQSRRACFNCGEYGHFIADCPKSNEAKAKGGKKKPEHAHVAEAHMAEVWYSGDEEDPEVKPKPRSKDKVEGEGGVATVAFKSSSSSKERLFNNLSDDDDDSYHYSCFMAQGCKVMTQKPSQTSLDVDSSDEESDNELDDVLKSFSKPAMQHLAKLMRALDSKEQSLERQEELLILEKKRNLTLEESLAKKCAKNEQLANELNLANGSSASLRDVNETLQEKFANLDKSHKDLEVRFDTRWNSTSQPNVVSNSSNPSTSNGCARCFNIDLNSYATNIDAMQALKKENERLGTLVKYGCMKTYHSKDALYKTITAHPNKDGHGLGFSGGSPVSKRVMVNGKECLMFVREGKAPQASEVTSLVSCQGPGTSGQTGRNFRVGVSVSQKFPPGSSGQFAKKFRANGRAQDMTGSSGHNARRFRPEGLYYDSYAYSSGGSSWVVDSGCTNHMTGEMSIFTSLDEENGTRENIVFGDDGKGKIIGLAFISIGGNKYGFVIVDNFSRFTWVYFLHDKSEAQDVFKRFAKQAQNLYDLTIKRVRSDNGGEFKNTQVEEFLDEEGIKHEFSAPYDPPQNGIVEKKNRTLIEAAREMLDEYKTSDSFWTEAVSTTCHAINRLYLHKILKKTSYELLSGKKPNVSYFHVFASKCFILSKRPRSSKFSPKVDEGFLLGYESNAHAYRVFNKTSGIVEVTRDVTFDESNGSQGEQVVVHVIDDADPREAIGSKAIGDIRPVETQDDQEDRDQPSSSTSNSPTTSQESVDPEVPGPDDRNLQTSPGQEVPGPSARKFRAEDSQGLPTTQVDGIDAVGTVEHPDQAQVSSVHHPRIHHTVQRDHPVDNILGDIRKGVTTRSRVANFCQHYSFVSSLEPTRVEDALGDPDWVMAMQEELNNFTRNQVWTLVERPDQNVIGTKWIFRNKQDEHGVVVRNKARLIVQGFTQVEGLDFGETFAAVACLESIRMLLAYAAHHDFRLYQMDVKSAFLNGPISELVYVEQPPGFEDPKLPNHVYKLHKALYGLKQAPRVWYECLRDFLLKNGFEIGNTYTTLFTKKFENDLFICQIYVDDIIFGSTNASFCEEFSSIMAKRFEMSIMGELTFFLGLQVKQAQEGTFISQTKYVKDILKKFEMEDAKPIKTPMPTNGHLDLDENGKCVDQKGCDFELLGYSDSDYAGCKVDRKSTTGTCQFLGRSLVSWSSKKQNSIALSTTEAEYVAAGSCCAQLLWMKQTLKDFGYNFTKIPLLCDNESAIKIANNPVQHSRTKHIDIRHHFLRDHETKGDIFLTHKRQKASQDVSGDESPPIRFPRGRLGKEKVIEGGSGSGTRTSPRFTRQSSNRPVQIRDVDSGQGSDAPNTRGRGRGGGRSSGAGRASHDFPIGSRENPVQLYKTLGFDTTPMHHIGRPKSNYLHQLAKCRRDLITARENPMVKMKWIDWTYMRKKNNEVFNQVMQVCHNKNLGDILALEYDWNEEVIAQFYATAFFGTTRKGIVTP

SEQ ID NO: 20688 - protein, 1762 aa, Oryza sativa
  unsure (1)..(1762): unsure at all Xaa locations
  Clone ID: TF_OSC400735j.C1.p3.np
MSYLGGKNGENGNEDEASSKGTPPPKGATIPFDYSKLTIPSHNFVSVPSGRAPQFDGTYYAAWKHMMKVHLISLHPSIWNVVCTGIDIPHDDMELTSEQEQLIHRNAQASNAILSALSPEEFNKVDGLEEAKEIWDTLQLTHEGSPAVREAKIELLEGRLGRFVMDDKETPQEMYDRMMILVNKIKGLGSEDMTNHFVVKRLFGPRNPTLVSMIRERKDFKRLTPSDILGRIVSHEMQEEEGREVRQMVKNSLKAKQEEESSCEESEDEEMTFIVKRFKHFLRKSGYGKGRKDDDKGKRQSKRACFNCGEYGHFIADCPKSNKAKAKGGKKKPERAHVAEAHMAEVWYSRDEEDPEVKPKPKSKDKVEGEGGVATVAFKSSSSSKERLFNNLSDDDDDSYHYSCFMAQGRKVMTQKPSETSLDVDSSDEESDNELDDVLKSFSKPAMQHLAKLMRALDSKEQSLERQEELLILEKKRNLALEESLAKECAKNEQLANELNLANGSLASLRDVNETLQEKFANLDKSHKDLEVQFDTLWNSTSQPNVVSNSSNPSTSNGCARWYNIDLNSYATNIDDMQALKKENERLGTLVKYGCMKAYHSLDALYKTITAHPNKDGYRLGFSGGSPVSKCVMVNGKECLMFVREGKAPQASEVTSLVSCQGPGTSGQTGRNIRVGVSVSQKFPPGSSGQFARKFRANDHAQDMTGSSGHNAWRFRKEGLYYDSYAYSSDGSSWVVDSGCTNHMTGERSMFTSLDEXNGTRENIVFGDDGKGKVIGLAYISIGGNKYGFVIVDDFSRFTWVYFLHDKSEAQDVFKRFAKQAQNLYDLTIKRVRSDNGGEFKNTQVEEFLDEEGIKHEFSTPYDPPQNSIVERKNRTLIEAARAMLDEYKTSDIFWVEAVSTACHAINRLYLHKILVSYFRVFGSKCFILSKRPCSSKFSPKVDEGFLLGYKSNAHAYRVFNKTSGIVEVTRDVTFDESNGSQEEQVVVHVVDDADPRQAIGSKAIGDIRPVETQDDQEDRDQPSSSTSNSPTTSQESVDPEVPGPDDRNLRTSLGXEVPGPSPRKFGAEDSQGVPTAQVDGIDAEGTVEHPDQAQVPSVHHPRIHHTVQRDHPVDNILGDIRKGVTTRSRVANFCQHYSFVSSLEPTRVEDALGDPDWVMAMQEELNNFTCNLVWTSVERPDQNVIGTKXIFCNKQDEHGVVVRNKARLVAQGFTQVEGLDFGETFAPVARLESIQMLLDYAAYHDFRLYQMDVKSAFLNGPILELVYVEQPPGFEDPKLPNHVYKLHKAQNGLKQPRAWYECLRDFLLKNSFEIGKADTTLFTKKFENDLFICQTYVDDIIFGSTNASFCEEFSSIMTKRFEMSMMGELTFFLALQVKQAQEGTFISQTKYMKDILKKFGMEDAKTIKTPMPTNGHRDLDENGKCVDQKGCDFELLGYSDSDYAGCKVDRKSTTGTCQFLRQSLVSWSSKKQNSIALSTAEAEYVAADSCCAQLLWMKQTLKDFGYNFTKIPLLCDNESATKIANNPVQHSRTKHIDIRHHFLRDHETKGDICLTHKRQKASQDVSGDESPPIRFPRGRLGKEKVVEGGSGSGTRTSPRFTRQSSNRPVQIRDVDSGQGSDAPNTRGRGRGGCRSSRAGRASHDFPVGSRENPVRLYKTLGFDTTPLHHIGRPKSNYLHQLAKCRRDLIMARENPVVEMKWIDWAYMRKKNNEVFNQVMQVCHNKNLGDILALEYDWNEEVIAQFYATAFFGTTRKGTPYV

SEQ ID NO: 20689 - protein, 1991 aa, Oryza sativa
  Clone ID: TF_OSC401074j.C1.p9.fg
MVKNAAMIKNQKVALKAKQEEESSCEESEDEEMAFIVKRFKHFFHKSGYGKGRKDDDKGNKQSKRACFNCGEYGHFIADCPKSNEANAKGGKKKPERAHVVEAHMAEVWYSGDEEDPEVKPKPKSKDKVEGEGGVATVAFKSSSSSKEHLFNNLSDDDDDSYHYSCFMAQGRKVMTQKPSQTSLDVDSSDEESDNELDDVLKSFSKPDMQHLAKLMRALDSKEQSLERQKELLILEKKRNLALEESLAKECAKNEQLANELNLANGSLASLRNVNETLQEKFANLDKSHKDLEVQFDTLWNSTSQPNVVSNSSNPSTSNGCARCYNIDLNSYATNIDAMQALKKENERLGTLVKYGCMKTYHSKDALYKTITAHPYKDGHGLGFSGGSPVSKRVMVNGKECLMFVREGKAPQVSEVTGLVSCQEPGTSGQTGRNLRVGVSVSQKFPPGSSGRFARKFWANGRAKDMTGSSGHNARRFRPDGLYYDSYVISKNLEGKVVAYFNGNYNDEYHTYVWVPNALAYSSGGTSWVVDSGCTNHMTGERIMFTSLDEENETRENIVFGDDGKGKLGYNCLFTDEDVTVFRRDDSSVAFKGKLKGDLYLVDFDVDRVNPEACLIAKSSMGWLWHRRLAQVGMRNLATLLKGEHILGLTNVTFEKDRVCSACQAGKQVGNPHPIKNIMTTTRPLELLHMDLFGPVAYISIGGNKYGFVIVDDFSRFTWVYFLYDKSEAQDVFKRFAKQAQNLYDLTIKRVRSDNGGEFKNTQVEVFLDEVGIKHEFFAPYDPPQNGIVERKNRTLIEATRAMLDEYKTSDIFWAEAVSTACHAINRLYLHKILKKTSYELLSGKKPNVSYFRVFGSRCFILSKRPCSSKFSPKVDEDSYLAMSQMHMPTVSSTKPLVLLKLQGSPTSSQESVDPEVPGPDDRNLRTSPGQEVSGPFARKFRAEDSQGVPTAQVDGIDAEGTIEHPDQAQVPSVHHPRIHHTVQRDHPVDNILGDIRKGVTTRSRVANFCQHYSFVSSLEPTRVEDALGDPDWVMAMQEELNNFTRNQVWTLVERPDQNVIGTKWIFRNKQDEHGVVVRNKARLVAQGFIKVEGLNFGETFAPIARLESIRILLAYAAHHDFRLFQMDVTSAFLNGPISELVYVEQPPGFEDPKLPNHVYKLHKALYGLKQAPRACSIMTKRFEMYMMGELTFFLGLQVKQAQEGTFISQTKYVKDILKKFGIEDAKPIKTPMPTNGHLNINDNGKCVDQKVYRSMLGSLLYLCASRHDIMLSVCMCARFQAEPKECHLIAVKRILRYLVHTPNLGLWYPKGCDFELLGYSDSDYAGCKVDRKSTTGTCQFLGRSLVSWSSKKQNSIVLSTAEAEYVAAGSCCAQLLWMKQTLKDFGYNFTKIPLLCDNESAIKIANNPVQHSRTKHIDIRHHFLRDHETKGDICLTHVRTESQLADIFTKPLDEQRFCELRISTMPREKRQKASQDVSGDESPPIRFPHGCLGKEKVVEGGSGSGTRTSSRFTRQSSNRLVQIRDVDSGQGCDAPNTRGRGRGGGRSSGAGRASHDFPVGSRENPVRLYKTLGFDTTPMHHIGRPKSNYLHQLAKCRRDRLIDPETRPEESHDPRFRTFTQLDWYNSMIMARENPVVEMKWIDWAYMRKKNNEVFNQVMQVCHNKNLGDILALEYDWNEEVIAQFYATAFFGTTRKGTPYVKWLTEGVRHKISMAQFAEMLGLDDEDLNRPNIHSEAPLPMIKTKFMYAKDAPRTCMGSTHGLHPNYKVLYSIFCWSLLPKVGDATALPSKHAHLLSRMRYNQPPFSVMKLIWYEIANTILEPKRGCIYAPFIMKMIETITGVFYIKDGHHNPFRPRAPPSSSPVVPRSIPSTSAGPSTSAPPSSSSSSPIKKALQAIFYMCAKTAKKAYEAARNVVGEGPSTFFNEESSHSDDDDDDDDDDDDDDGDQGDTEAAAEDAPTDVNEGDTAAQSDESHLSGDIEIVPSDGDE

SEQ ID NO: 20690 - protein, 1431 aa, Oryza sativa
  Clone ID: TF_OSC401693j.C1.p19.fg
MSSASMAGACSFLVAAAGKPPRRSSLQRCFMTREGSKRSGGVNGRAQWRNDSVGGQSSRAYNGLNGSVVLPAEEVDVEAGGGKEELELGAPELRGGGGTSGQHGERGGGVPIYDECGGELRLEVAGPKEGQATGEKARCGGGDEEPQPVAEHVLLQGDSTEDAIGGGEEGVGKELEPRESWGQRGGRGDRRRVAEREKIGLVRGSGRLASSPSPHLQRHNTCLRAFTTLCVTSARLSTVSRALCSSGVRSRPLADSLGFPDKIGRRSSRGGQGRNGSGGGDSAGPARKTDKCHNCGKLGHWAKDCRSKPKQEQAHVVQEEDEPTLMLMTGGCIDVVEETGAPCVTPAPPAPRPRLDVVELVEQKVFAALDDATDHDNKRWILDTGASNHMTGSRAAFSDIDTNVTGNVRLGDGSLVRIGGRRTILFACKNGEHHMLHKAYYLPCLAANIISVGQLDETGFKVLVEDGVMRVWDEQHRLLARITRTPGRLYVLDINLARPVYLMARAGEDAWRWHARFGHVNFTALRKMGREALVRGLPVLSQVEQVCEACLAGKQRRAPFPQQALHRATEPLALLHGDLCGPVMPATPSGNRYFPLLVDDYSRYMWLVLLATKDAAPDAMKRVQAAAERKSGRKLRALRTDRGGEFTVGHFTEYCAELGLRRELTAPYSPQQNGVVERRNQSVVSTARSMLKAKGLPGMFWGEAVNTAVYLLNRCSSKSIDGKTPYELWNGVTPAVHHLRTFGCVAHVKVTAPTKKLDDRSRPMIFVGYELGSKAYRVYDPATRRVHVSRDVVFDEEAQWNWDGEAATNVDSDFTIEYTTVYHPATATPTQTGTEHGGAPASPRSPASGSTPTTPPVAEVSPVEFVSPPPDVEDDLDADHDDAPLRFRRIDDVLGPATPPGQAVRELSEELFAVTAEEPASFAEAEQLSCWRQAMIEEMRSIEANKTWRLVDPLARQRPIGLKWVYKAKKDAAGNITKYKARLVAKGYVQRQGIDFDEVFAPVARLESVRLLLAHAACEGWAVHHMDVKSAFLNGELLEEVYVAQPPGFVVDGQEHKVLRLDKALYGLRQAPRAWYSKLDASLLSLGFHRSDSEHAVYMRGTGEQRLVVGVYVDDLIITGGNPGELKQFKEEMKGTFQMSDLGLLQYYLGLEVNQTEDGITVNQRAYAEKILQTAGMVASNPSLTPMETRLKLSKMSNAPSVDATDYRWIVGSLRYLVNSRPDLAYSVGYVSRFMEKPTTEHLAAVKRVLRYVAGSIGYGCHYKRKKDASLVGYSDSDLAGDVDTRKSTSGVFFFLGDNLITWQSQKQKVVALSSCEAEYIAATTAACQGVWLARLLAELQGEEADAVTLRIDNQSAIMLSKNPVFHDRSKHIDTRYHYIRECIEEGRVKVEFIGTNEQLADILTKSLGRDRFMELRSQIGLVEVQTPRKV

SEQ ID NO: 20691 - protein, 2098 aa, Oryza sativa
  Clone ID: TF_OSC403369j.C1.p1.fg
MTRETLLAPRIKGATIHFDYSKLNVPPHNFVSVPSERAPQFDGTHYAAWKHKMKLHLISLHPSIWKVVCTGIDVPNDDMELTSEQEQLIHRNAQASNAILSTLSPEEFNKMYDRIMILVNKIKGLGNEDMTNHFVVKRLLRAFGPRNPTLVSMIRERKDFKRLTPSDILGIIVSHAMQEEEAREVRQMVKNAAMIKNQEVALKAKQEEVSSCEEIEDEEMAFIVKRFKHFLRKSGYGKGRKDDDKGKRQSKRACFNCGEYGHFIADCPKSNEAKAKGGKKKLERAHVAEVWYSGDEEDPEVKPKPKPKDKVEGEGGVATVAFMSSSSSKERLFNNLSDDDDDSYHYSCFMAQGRKLMRALDSKEQSLERQEELLILEKKRNLALEESLATKCAKNEQLANELNLANGSLAILRDVNETLQDKFANLDKSHKDLEVQFDTLWNSTSQPNVVSNPSNPSTSNDCARCYNIDLNSCATNVDAMQALKKENERLGTLVKYGYMKTYHSKDALYKTITAHPNKDGHGLGFSSGSPVSKRVMVNGKECLMFLREGKAPQASEVTCPFTGQTLGSSGQNDGKFLPCKTGSSEHFVRKFRTSDESKGLTGSSWYNARKFRPEGLYYDLYVISKNSEGKVVAYFNGNYNDEYRTCVWVPKALVTNIKGPKLMTGERCMFTSLDEQGGSRENIFFGDDGKGKDCVCSACQAGKQVGSPHPIKNIMTTTRPLELLHMDLFGPVAYISIGGNKYGFVIVDDFSRFTWVYFLHDKSKAQDVFKRFAKQAQNLYDLTIKRVRSDNGGEFKNTQVEKFLDEEGIKHEFSAPYDPPQNGIVERKNRTLIEAARAMLDEYKTSDVFWAEAMSDVDPSQAIGTKAIGDIRLVETQDDQEDRDQPPSSTSNSPTSAVSAEPEVPDPIDQNLRTSPGPIPPVHHPRIHNTVQRDHPVDNILGDIRKGVTTRSRVACFCQHYSFVSSLEPTRVEDALGDPDWVMAMQEELNNFTRNQVWTLAERPKQNVVGTKWIFRNKQDEHGVVVRNKAQIVAQGFTQVEGLDFGETFAPVAHLESIRILLAYAAHHDFRLFQMDVKRAFLNGPISELVYVEQPPGFEDPKLPNHVYKLHKALYGLQQAPRAWYECLQDFLLKNGFEIGKADTTLFTKKFKSDLFICQIYVDDIIFGSTNASFCEEFSSITTKSFEMSMMGELTFFLGIQVKQAQEGTFISQTKYVKDILKKFGMEDTKPIKTPMPTNGHLDLDNNGKCVDQKVYRSMIGSLLYLCASRPDIMLSVCMCARFQAEPKECHLIAVKRILRYLVHTPNLGLWYPKDCDFELLGYSDSDYAGCKVDRKSTTGTCQFLGRSLVSWSYKKQNSIALSTTEAEYVAAGSCCAQLLWMKQTLQDFGYNFTKITLLCDNESAIKIANNPVQHSRTKYIDICHHFLRDHETKRDICLTHVRTETQLADIFTKPLDEKRLCELRSELNILDSRNIRFLFLIVEFSSIPLNLGLTALCSVRPEVPVTLVRNIRGSGFCRPEVPVFLVRNFRSLSSQPANLDSSNFYFNHCTSTLLILVAVVSMPHEKRQKLSQDVPADSSPPVHGPRRRLGKEKVGNFYSGSQIPIHSRRAGSIVIGDAPRSPSPVASKSDDGGNEDEPSSESNPLRLYKTRVVDPDPRRPSVNYLKNLLKCGMDRMVSPDTMPADSQDDRFRTVVQVDWYNSVIMGRSHPVVEMKWLDWQYMSLKNNLVFSEVRKVCERKHVADLLALQYSWNEEVIGQLYSTAFFGTTKKGIEFVKWTIQGQQYRVSMAQFAAALELDDDDLSRPHIFVENALSPTSTTFLYEKDAPKDCLGTTRGLRPYYRVLYSIFRWSLLPKVGDTTALPDRHALLLSRIRYNKPDFSIMKLIWSEIYEIVCELKRGCIYAPYIMKMIEAKIGISYFKDNQHKPFRPHVPSSSAPPSTRATRASTSAARSSSAAPQRSESSSPIKKALRAIFCMCAKTAKKVKKIERRQKEDWIAAGKDVSNISDEEEFVDPFAAYETAQDIASGEGPSGTSHFFNEESSHSKESSDDEESDAPTENVPTDPDEAVDIAGQDIDSPHSGDTEIIPSDGDDDEA

SEQ ID NO: 20692 - protein, 167 aa, Oryza sativa
  Clone ID: TF_OSC4135j.C1.p1.fg
MIRERKHFKRLTPSDILGRIVSHEMQEEEAREVRQMVNNAAMIKNQEVALKAKQEEESSCEESEDEEMAFIVKRFKHFLRKSGYDKGRKDDDKGKRQSKRACFNCGEYGHFIADCPKSNEAKAKGGKKKPERAHVAEAHMAEVWHSGDEEIPRSSPSPSQKTRLKEK

SEQ ID NO: 20693 - protein, 1355 aa, Oryza sativa
  Clone ID: TF_OSC414619j.C1.p7.fg
MELTSEQEQLIHRNAQASNAILSALSPEEFNKVDGLEEAKEIWDTLQLAHEGSPVVREAKIKLLEGRLERFVMDDKETPQEMYDRMMILVNKIKGLGSEDMTNHFVVKRLLRAFGPRNPTLVSIIRERKDFKRLTPSDILRRIVSHEMQEEEAREVRQMEKNAAMIKNQEVALKAKQEEELSCKESEDEEMAFIVKRFKHFLRKSGYGKGRKDGDKGKWKSKRACFNCGEYGHFIADCPKSNEAKAKGGKKKPERAHYSGDEEDPEVKPKPKPKEKVEGEGGVATVAFKSSSSSKKRLFNNLSDDDDDSYHYSCFMAQALKVMTQKPSHISLDVGSNDEESDNELDDVLKSFSKPTMQHLAKLMRALDSKEQSLERQEELLILEKKKNLALEESLAKECAKNEQLANELILANGSLASLRDVNGTLQEKFVNLDISHKDLEVQFVTLWNSTSQPNVVSNPSNPSTSNGCARCYNIDLNSYATNVDAMQALKKENERLGTLVKYGCMKTYHSKDALYKTIIAHPNKDGHRLGFSGGSPVSKRVMDPNLFGSVAYISIGGNKYGFVIVDDFSRFTWVYFLHDKSEAQDVFKHFAKQAQNLYDLTIKRVRSDNGGEFKNTQVEEFLDEEGIKHEFSAPYDPPQNSIVERKNRTLIEAVRAMLDEYKTSDVFWAEAVSTACHAINRLYLHKILKKTSYELLSVTRDVTFDESNGSQGEQVVVHVIGDVDPSQAIGTKAIGDIRPVETQDDQEDRDQPPSSTSNSPTSAVSAEPEVPGPIDQNLQTSPGPEVLGSPVRNLRTNGSEDVPTLQVPLVHHPRIHHTIQRDHPVDNILGDIRKGVTTRSRVASFCQHYSFVSSLEPTRVEDVLGDPDWVMAMQEELNNFTHNQVWTLVERPKQNVIGTKWIFRNKQDEHVVVVRNKARLVAQGFIQVEGLDFGETFTPVARLESIKILLAYAAHHDFRLFQIDVRSAFLNGPISELVYVEQPSGFEVPKLPNHVYKLHKALYGLKQAPRAWYECLRDFLLKNGFEIGKADTTLFTKKFKSDLFICQIYVDDIIFGFTNASFCEEFSTVMTKRFEMSMMGELTFFLGLQVKQAQEGTFISQTKYVKDILKKFGMEDAKPIKTPMPTNGHLDLNDNGKCVDQKVYRSMIGSLLYLCASRPDIMLSVCMCARFQAEPKECHLIAVKRILRYLVHTPNLGLWYPKGCDFELLGYSDSDYAGCKVDTKSTTGTCQFLGRSLVSWSSKKQNSIVLSTAEAEYVVAGSCCAQLLWMKPTLKDFGYNFTKIPLLCDNESAIKIANNPIEHSRTKHIDIRHHFLRDHETKGDICLTHVRTETQLADIFTKPLDEKRFCELRS

SEQ ID NO: 20694 - protein, 199 aa, Oryza sativa
  Clone ID: TF_OSC415728j.C1.p4.fg
MAFIVKRFKHFLRKSGYGKGRKDDNKGKRQSKRACFNCGEYGHFIADCPKSNEAKAMGGKKKPEHDHVAEAHMTEVWYSGDEEDPEVKPKPKPKDKVEGEGGVATVAFKSSSSSKERLFNNLSDDDDDSYHYSCFMAQGHKVMTQKPSHTSLDVDSSDEESDNELDDVLKSFSKPAMQQLAKLMRALDNLNVHCLIRID

SEQ ID NO: 20695 - protein, 1195 aa, Oryza sativa
  unsure (1)..(1195): unsure at all Xaa locations
  Clone ID: TF_OSC420031j.C1.p1.np
TIHFDYNKLNVPPHNFVSVPSGRAGKRQSKRACFNCGEYGHFIADCPKTNKAKAKGGKKKPERGRKVMTQKPSHTSLDDVLVMKKVIMNXMMCLRALAEFLDEEGIKHEFSAPYDPPQNGIVERKKNXTLITTPGGVMTAKYYSPAVPIEIQGIPFPSDLILLDTKNLDVILGMNWLAQFQGVVDCARRTVTLYRGPEQPVVFFAPPTSVGSSELHQIGLSEIPIVREFGDVFPEELPGMPPKREIEFWIDLAPGTTPLYKXPYRMASNELAEVKKQLEELKEKGYIRPSTSPWGAPVIFVEKKDKTKRMCVDYRALNEVTIKNKYPLPRIDDLFDQLKGATVFSKIDLRSGYHQLRIREEDIPKTAFTTRYGLYEFTVMSFGLTNAPAFFMNLMNKVFMEYLDKFVVVFIDDILVYSQSEEDHQHHLRLVLGKLREHQLYAKLSKCEFWLSKVKFLGHVISAKGVAVDSETVTAVTDWKQPKTVTQIRSFLGLAGYYRRFIENFSKIARPMTQLLKKEEKFVWSPQCEKAFQTLKERLVSSPVLILPDTRKDFMVYCDASRQGLGCVLMQEGHVVAYASRQLWPHEGNYPTRDLELAAVVHALKIWRHYLIGNRCEIYTDHKSLKYIFTQSDLNLRQRRWLELIKDYDVGIHYHPGKANVVADALSRKSHCNTLDVRGIPPELNQQMEALNLSIVGRGFLATLEAKPTLLDQIREAQKNDPDMRGLLKNMKQGKAASFTEDEHGTLWNGNRVCVPDDRELKQLILQEAHESLYSIHPGSTKMYLDLKEKYWWVSMKREIAEFVALCDVCQRVKAEHQRPAGLLQPLQVPEWKWDEIGMDFITGLPKTQGGYDSIWVVVDRLTKVARFIPVKTTYGGNKLAELYFARIVSLHGVPKKIVSDRGSQFTSHFWKKLQEELGTRLNFSTVYHPQTDGQTERLNQILEDMLRACVLDFGKTWDKSLPYAEFSYNNSYQASIQMAPYEALYGRKCRTPLLWDQVGESQVFGTDILREAEAKVRTIRDNLKVAQSRQKSYADNRRRNLEFAVDDFVYLRVTPLRGVHRFQTKGKLAPRFVGPFHIIARRGEVAYQLELPASLGNVHDVFHVSQLKKCLRVPSEQADSEQIEVREDLTYVERPVKILDTMECRTRNRVIRFCKVQWSNHAEEEATWEREDEMKAAHPDLFASSSESRGRDSV

SEQ ID NO: 20696 - protein, 2296 aa, Oryza sativa
  Clone ID: TF_OSC420074j.C1.p1.fg
MKAPAGQTSKSANVTICNTGDGSGYGNLPTVFSVNQSTNWWVDTGTNVARGSTVLMGNGSHASVHGVDTVYLKFTSGKIVQLKNVQHVPSIDRNLVSGSRLSRDRFKLVFESNKGGKRYFMTLIDDATIFCYVYLLKTKDETLDYFKIYKAEVENQLDRKIKRLMSDRGGEFFSNEFDLFFEEHGIIHERTPPYSPESNGIAESKNRTMTDLVNAMLDTAGLPKAWWGEALLTSNHVLNRVPNRNKDKTPYEIWIGRKPSLSYLRTWGCLAKVNVPIRKKRKLGPKTVDCVFLGYAHHSIAYRFLIVKSEVLDMHVGTIMESRDATFFESFFPMKDTHSSSSQPSEVIPSSITPPEQTKHTHEHVTEEDVSEAPRRSKRQRTAKSFGDDFTVYLVDDTPKSISEAYASPNADYWKVAVRSEMDSIIANGTWEVTERPYGCKSVGCKWVFKKKFRPDGTIEKYKAWLVTMGYTQKEGEDFFETYSPIVRLTTIRVLLSLAASHGLLVHQMDVKITFLNGELDEEIYMDQPDGFVVEGQEGKVCKLLKSLYGLKQAPKQWHEKFDKTLTSAGFAVNEADKCVYYRHGGGEGVILCLYVDDILIFGTNLEVINEVKLFLSQNFDMKDLGVADVILNIKLIRGENVITLLQSHYVEKILNRFGYIDSSMELWLHYSGYPVVLEGYSDSNWISDVDEIKATSGYVFTLGGGAVSWRSCKQTILTRSTMEAELTALDTATVEAEWLRDLLMDLPIVEKPVPAILMNCDNQTVIVKVNSSKDNMKSSRHVKRRLKSVRKLRNSGVITLDYIQTARNLADPFTKGLSRNVIDNASKEMGLRPIEGYPEVLAGTSGRRFIAKNFLSAAWKFLAFLPGTSWQLHRFEDEDLGGKNGENRNEDEASSKGTPPHKGATIPFDYSKLTIPSHNFVSVPSGRAPQFDGTYYAAWKHKMKLHLISLHPSIWKVVCTGIDIPHDDMELTSEQEQLIHRNAQASNAILSALSSDEFNKVDGLEKAKEMWDNLQLAHEGSPAVREAKIELLEGRLGRFVMDDKETSQQMYDRMMILVNKIKGLGSVDMTNHFVVKRLLCAFGPRNPTLVSMIQEMKDFKRLTPSDILGRIVSHEMQEEEAREVRQMVKNATMIKNQEVALKVKKEEDSSCKESEDEEMAFIVKRFKHFLCKSGYGKGRKDDDKGNMQSKRACFNCGEYGHFIADCPKSNEAKAKGGKKKPERTHVAEAHMAEVWYSGDEEDPEVKPKPKSKDKVEGEASLRDVNETLQEKFVNLDKSHKDLEVQFDTLWNSTSQPNVVSNSSNPSTSNGYARCYNIDLNSCGTNIDAMQALKKENERLGTLVKYGCMKTYHSKDALYKTITAHPNKDGHGLGFSGGSPVSKRVMVNGKECLMFVREGKAPQESEVTSLVNCQGPGTSGQTGRNLRVGISVSQKFPLGSSGRFARKFRANGHAQDMTGSSGHKARRFRPEGLYYDSYVISKNSEGKVVAYFNGNYNDEYRTCVWVPKALAYSSGGSSWVVDSGCTNHMTGERSMFTSLDEESGTRENIVFGDDGKGKLGYNCLFTDEDVTVFRRDDSSVAFKGKLKGDLYLVDFDVDRVNPEACLIAKSSMGWLWHHRLAHVGMRNLATLLKGEHILGLTNVTFEKDYVCSACQAWKQVGNPHPIKNIMTTTRPLELLHMDLFGPVAYISIGGNKYGFVIVDNFSRFTWVYFLHDKSEAQDVFKRFAKQGQNLYNLTIKRRESSTSSPPPYDPPQNGIVERKNQTLIEAARAMLDEYKTSDIFWAETVSTACHAINRLYLHKILKKTSYELLSGKKPNVSYFRVFGSKCFILSKRPRSSKFSRKVDEGFLLGYESNAHAYHVFNKTSSIVEVTRDVTFDESNGSQGEQVVVHVVDDADPRQAIDSKAIGDIRPVKTQDDEEDRDQPSSSTSNSPTTSQESVDPEVPGPDDWNLRTSPGPEVLGPSARKFQAKDSQGVPTAQVDGIDAEGTVEHPDRAHVPSVHHPRIHHIVQRDHPVDNILGDIRKGVMAMQEEFNNFTRNQVWTLVERPDQNVIGTKLYQMDVKSAFLNGPLLELVYVEQPPGFEDPKLPNHMYKLHKALNGLKQAPRALGGPQRVPLLPPHLQRGNAIISMSRFDINSLMEAVQRHRVTHLFCVPPVIIALTKHGRAAAIDTVGEWDTGVEAGEEQLRDVTTLHHRPLCTMTREKRQKASQDVSGDESPPIRYTRGRLGKEKVVEGGSGSGTRTSPRFTRQSSNRPVQIRDVDSGQVMPLIQEVAGEVVVAVLGLEGHLMISL

SEQ ID NO: 20697 - protein, 559 aa, Oryza sativa
  Clone ID: TF_OSC422195j.C1.p16.fg
MSHLEGDEYLEEKGDASSTKETGSKGATIHFDYIKLNVPPHNFVSVPSGRAPHFDGTHYAAWKHKMKLHLISLHPSIWKVVCTGIDVPNDDMELTSEQEQLIHRNAQASNTILSALSPKEFNKFDGLEEAKEIWDTLQLAHEGSPAVREDKIELLEGRLGRFVMDDKETPQEMYDRMMILVNKIKGFGSEDMTNHFVVKRLLRAFGPRNPTLVSMIRERKDFKRLTPSDILGRIVSHEMQEEEAREVRQMVKNAAMIKNQEVALNAKQEEESSCEEKIQALSSQEWLWQGRKDDDKGKRQSERACFNCGEYGHFIADCPKTNEAKAKGDKKKPERAHVVKAHMVEVWYSEDEEASEDKPKPKPKDKIEGEGGIATVAFKSSSSSKECLFNNLSDDDDDSYHYSCFMAQGRKVMTQKPSHTSLDDDSSDEETSLRDVNETLQEKFAILDKSHKDLEVQLDTLWSSTSQPNVVSNSSNPSTSNGCARCYNIDLTSYATNVDAMQALKKENERLGTLVKYGCMKTYHSKDALYKTITAHPNKDGHGLGFSGGMSRPDKFIPK

SEQ ID NO: 20698 - protein, 2111 aa, Oryza sativa
  Clone ID: TF_OSC900024j.C1.p13.fg
MSDLGGKNGENRNEDGARSKGTPSPKGVTIHFDYSKLTIPPHNFVSVPSGRAPQFDGTHYAAWKHKMKLHLISLHPSIWKVVCTGVDVPHDDMELTSEQEQLIHRNAQASNAILSALSPEEFNKVDGLEEAKEIWDTLQLAHEGSPAVREAKIELLEGRLGRFMMDDKETPQEMYDRMMILVNKIKGLGSEDMTNHFVVKRLLRAFGPRYPTLVSMIRERKDFKRLTPSDILGRIVSHEMQEEEAREVRQMVKNAAMIKNQEVALKAKQEEESSCEESEDEEMAFIVKRFKHFLRKSGYGKRRKDDDKGKRQSKRACFNCGEYGHFIADCPKSNEAKAKGGKKKPERAHVAEAHMAEVWYSRDEEDPEVKPKPKPKDKVEGEGGVATVAFKSSSSSNKRLFNNLSDDDDDFYHYSCFMAQGRKVMTQKPSHTSLDIDSSDEESDNELDDVLKSFSKPAMQHLAKLMRALDSKEQSLERQEELLILEKKRNLALEEILAKESSLRNVNETLQEKFASLDKSHKDLEVQFDTLWNSTSQPNVVSNSSNPSTSNGCARCYNIDLNSHATNVDAMQALKKENERLGTLVKYGCMKTYHSKDALYKTITAHPNKDGHGLGFSGGSPVSKRVMAYFSGGSSWVVDNGCTNHMTGERSMFTSLEEEGGSRENIVFGDDGKGKLQFIIRVSIVRDDSSIEFKGVLKGDLYLVDFDVDRVNPEACLIAKSSMGWLWHRRLAHVVMRNLASLLKGEHILGLSNVSFEKDRVCSACQAGKQVGSPHPIKNIMTTTRPLELLHMDLFGLVAYISIGGNKYGFIIVDDFSRFTWVYFLHDKSEAQDVFKRFAKQAQNLYDLTIKRVRSDNGGEFKNTQVEKFLDEEGIKHEFSAPYNPPQNGIVERKNRTLIEAARAMLDEYKTSDVFWAEAMSTACHAINRLYLHKILKKTSYELLSGKKPNVSYFHVFGSKCFILSKRPRSSKFSPKVDEGFLLGYESNAYAYRVFNKTSGIVEVTRDVTFDESNGSQGEQVVVHIVGDVDPNQAIGTKAIGDIRPVETQDDQEDRDQPPRHRHPIALQVLCLLSRKFRVLLTGTSGHLQARKFRVLQSGTSGSVAVKTCQWHKVEDALGDPDWVMAMQEELNNFTRNQVWTLVERPKQNVIGTKWIFRNKQDEHGVVVRNKARLFQMDVKSAFLNGPISELVYVEQPPGFEDPKLPNHVYKLHKALYGLKQAPRACFEIGKVDTTLFTKKFKSDLFICQIYVDDIIFGSTNASFCEEFSSIMTKRFEMSMMGELTFFLGLQVKQALVGIFISQTKYVKDILKKFGMEDAKPIKTPMPTNGYLDLDDNGKCVDQKVYRSMIGSLLYLCASRPDIMLSVCMCARFQAEPKECHLIAVKRILRYLVHTPNLGLWYPKGCGFELLGYSDSDYAGCKVDRKSTTGTCQFLGRSLVSWSSKKQNSIALSTAEAEYVAAGSCCAQLLWMRQTLKDFGYNFTKIPLLCDNESAIKIANNPIQHSRTKHIDIRHHFLRDHETKGDICLTHVRTESQLADIFTKPLDEKRFCELRSFHFQIFEFSSIPLNLGLTALCSVRPEVPVTPVRNFRGSGAGNSGVLGPELPVSVQPASNLDFATVSFNHCTPTLLILVAVVIMPREKRQKLSQDVPADSSPPVRGPRGRLGKEKVGDFYSGSQIPIHSRRASSIVIRDAPRSPSPAASDSDDGGNEDEPGSESNPLRLYKTRAVDPDPKRPRVNYLKNLLKCGRDRMVDWYNSVIMGRSHPVVEMKWLDWQYMSSKNNIVFNEVRKVCERKHVADLLALQYSWNEEVIGQFYSTAFFGTTKKGLDFVKWTIQGQQYRVSMAQFAAALGLDDDDLSRPHIFVEDALSPTSTTFMYEKDAPKDCLGTTRGLRPYYRVLYSIFRWSLLPKVGDATALPGRHALLLSRMRYNKPDFSIMKLIWSEIYETVCEPKRGFIYAPYIMKMIEAKTGICYFKDNQHKPFRPHAPTTSATPTTRVTRASTSAAPSFSAAPQRSESSSPIKKALRAIFCMCAKTAKSDEGPSGTSRFFNEESSHSEESSDDEESDAPTENAPTDPNEAVDAAGQDIDSPHSGDTEIIPSDGDNDEA

SEQ ID NO: 20699 - protein, 1450 aa, Oryza sativa
  Clone ID: TF_OSC900028j.C1.p16.fg
MELTSEQEQLIYRNAQASNAILSALNPEEFNKVDGLEEAKEIWDTLQLAHEGCPAVREAKIELLEGRLGRFVMDDKETAQEMKDFKRLTPSDILGRIVSHEMQEEEAREVRQMMKNAAMIKNQEVALKAKQEEESSCEESEDEEMAFIVKRFKHFLYKSGYGKGRKDDDKGKRQSKRACFNCGEYGHFIADCPKSNEANAKGGKKKPERAHVAEAHMAEVWYFGDEEDPEVKPKPKSKDKVEGEGGVATVAFKSSSSSKERLFNNLSDDDDDSYHYSCFMAQGRKVMTQKPSQTSLDVDSSDEESDNELDDVLKSFSKPAMQHLAKLMRALDSKEQSLERQEELLILEKKRNLVLEESLAKECAKNKQLANELNLANGSLASLRDVNETLQEKFANLDKSHKDLEVQFDTLWNSTSQPNVVSNSSNPSTSNALKKENEKLCTLVKYGCIKTYHSKDALYKTITAHPNKDGHGFGFSGRSPVSKRVMVNGKECLMFVREGKAPQASEVTGLVSCQGPGTSGQTGRNLRVGVSVSQKFPPESSGRFAKKFRANGRAQDMTGSSGHNARRFRPDGLYYDSYVISKNLEGKVVAYFNGNYNDEYRTCVWVPKALAYSSGGSSWVVDSGCTNHMTGERSMFTSLDEENGTRENIVFGDDGKGKLQFIIRFSIMDDSSVAFKGKLKGDLYLVDFDVDRVNPEACLIAKSSMGWLWHHRLAHVGMQNLATLLKGEHILGLTNVTFEKDRVCSACQAGKQVGNPHPIKNIMTTTRPLELLHMDLFGPVAYISIGGNKYVFVIVDDFSRFTWVYFLHDKSKAQDVFKRFAKQAQNLYDLTIKRVRSDNGGEFKNTQVEEFLDEEGIKHEFSAPYDPPQNGIVERKNRTLIEAARAMLDEYKTSDVFWAEAVSTACHAINRLYLHKILKKTSYELLSGKKPNVSYFRVFGSKCFILSKRPCSSKFSPKVDEGFLLGYESNAHAYRVFNKTSGIVEVTRDVIFDESNGSQGEQVVVHVVGDVDPSQAIGTKAIGDIRPVETQDDQEDRDQPPSSTSNSPTSVVSAEPEVPGPIDRNLRTSPGPEVPGSTVRNLRTSGSEDVPTAQVDGIDAAGTLEVEDELGDPDWVMAMQEELNNFIRNQVWTLVERPDQNVIGTKWIFRNKQDEHGVVVRNKARLYQMDVKSAFLNGPISELVFVEQPPGFEDPKLPNHVYKLHKALYGLKQAPRAWYECLRDFLLKNGFEIGKADTTLFTKKFENNLFICQIYVDDIIFGSTNASFCEEFSSIMTKRFEMSMMGELTFFLGLQVKQAQEGTFISQTKYVKDIVKKFGMEDAKPIKTPMPTNGHLDLDENGKCVDQKVYRSIIGSLLYLCASRPDIMLSVCMCARFQAEPKECHLIAVKRILRYLVHTPNLGLWYPKGCDFELLGYSDSDYAGCKVDRKSTTGTCQFLGRSLVSWSSKK

SEQ ID NO: 20700 - protein, 1849 aa, Oryza sativa
  Clone ID: TF_OSC900207j.C1.p1.fg
MTRETLLAPRIKGATIHFDYSKLNVPPHNFVSVPSERAPQFDGTHYAAWKHKMKLHLISLHPSIWKVVCTGIDVPNDDMELTSEQEQLIHRNAQASNAILSTLSPEEFNKMYDRIMILVNKIKGLGNEDMTNHFVVKRLLRAFGPRNPTLVSMIRERKDFKRLTPSDILGIIVSHAMQEEEAREVRQMVKNAAMIKNQEVALKAKQEEVSSCEEIEDEEMAFIVKRFKHFLRKSGYGKGRKDDDKGKRQSKRACFNCGEYGHFIADCPKSNEAKAKGGKKKLERAHVAEVWYSGDEEDPEVKPKPKPKDKVEGEGGVATVAFMSSSSSKERLFNNLSDDDDDSYHYSCFMAQGRKVMTQKPSHISLDVDSSDEESDNELDDVLESFSKPAMQHLAKLMRALDSKEQSLERQEELLILEKKRNLALEESLATKCAKNEQLANELNLANGSLAILRDVNETLQDKFANLDKSHKDLEVQFDTLWNSTSQPNVVFNPSNPSTSNDCARCYNIDLNSCATNVDAMQALKKENERLGTLVKYGYMKTYHSKDALYKTITAHPNKDGHGLGFSSGSPVSKRVMVNGKECLMFLREGKAPQASEVTCPFTGQTLGSSGQNDGKFLPCKTGSSEHFVRKFRTSDESKGLTGSSWYNARKFRPEGLYYDLYVISKNSEGKVVAYFNGNYNDEYRTCVWVPKALVTNIKGPKLMTGERCMFTSLDEQGGSRENIFFGDDGKGKDCVCSACQAGKQVGSPHPIKNIMTTTRPLELLHMDLFGPVAYISIGGNKYGFVIVDDFSRFTWVYFLHDKSKAQDVFKRFAKQAQNLYDLTIKRVRSDNGGEFKNTQVEKFLDEEGIKHEFSAPYDPPQNGIVERKNRTLIEAARAMLDEYKTSDVFWAEAMSDVDPSQAIGTKAIGDIRLVETQDDQEDRDQPPSSTSNSPTSAVSAEPEVPDPIDQNLRTSPGPIPPVHHPRIHNTVQRDHPVDNILGDIRKGVTTRSRVACFCQHYSFVSSLEPTRVEDALGDPDWVMAMQEELNNFTRNQVWTLAERPKQNVVGTKWIFRNKQDEHGVVVRNKAQIVAQGFTQVEGLDFGETFAPVAHLESIRILLAYAAHHDFRLFQMDVKRAFLNGPISELVYVEQPPGFEDPKLPNHVYKLHKALYGLQQAPRAWYECLQDFLLKNGFEIGKADTTLFTKKFKSDLFICQIYVDDIIFGSTNASFCEEFSSITTKSFEMSMMGELTFFLGIQVKQAQEGTFISQTKYVKDILKKFGMEDTKPIKTPMPTNGHLDLDNNGKCVDQKVYRSMIGSLLYLCASRPDIMLSVCMCARFQAEPKECHLIAVKRILRYLVHTPNLGLWYPKDCDFELLGYSDSDYAGCKVDRKSTTGTCQFLGRSLVSWSYKKQNSIALSTTEAEYVAAGSCCAQLLWMKQTLQDFGYNFTKITLLCDNESAIKIANNPVQHSRTKYIDICHHFLRDHETKRDICLTHVRTETQLADIFTKPLDEKRLCELRSELNILDSRNIRPEVPVFLVRNFRSLSSQPANLDSSNFYFNHCTSTLLILVAVVSMPHEKRQKLSQDVPADSSPPVHGPRRRLGKEKVGNFYSGSQIPIHSRRAGSIVIGDAPRSPSPVASKSDDGGNEDEPSSESNPLRLYKTRVVDPDPRRPSVNYLKNLLKCGMDRMVSPDTMPADSQDDRFRTVVQVDWYNSVIMGRSHPVVEMKWLDWQYMSLKNNLVFSEVRKVCERKHVADLLALQYSWNEEVIGQLYSTAFFGTTKKGIEFVKWTIQGQQYRVSMAQFAAALELDDDDLSRPHIFVENALSPTSTTFLYEKDAPKDCLGTTRGLRPYYRVLYSIF

SEQ ID NO: 20701 - protein, 550 aa, Oryza sativa
  Clone ID: TF_OSC900226j.C1.p2.gm
MSDLGEKNGENGNEDGASSKGTPSTKGATIPFDYSKLTIPSHNFVSVPSGHAPQFDGTHYAAWKHKMKLNLISLHPSIWKVVCTGVDVPHDDMELTSEQEQLIHRNAQASNAILSALSPEEFNKVDGSEEAKEIWDTLQLAHEGSPAVCEAKIELLEGRLGRFVMDDKETPQEMYDRMMILVNKIKGLGSEDMTNHFVVKRLLRAFGPRNPTLVSMIWERKDFKRLTPSDILGRIVSHEMQEEEAHEVRQMVKNAAMIKNQEVAWKAKQEEESSCEESEDEEMAFVVKRFKHFLRKSGYGKGRKDDDKGKRQSKRACFNCGEYGHFIADCPKSNEAKAKGGKKKPERAHVAEAHMAEVWYSRDEEDPEVKPMPKPKDKVEGEGGVATVAFKSSSSSKARLFNNLSDDDDDSYHYSCFMAQGRKGSRWTGCTAAAHGNERPRSILSKTDGQDPSVHDRATGNDDDDVGGDVTTGGGSGVHARRRMTARRRKRRAPTGSGRHGELTGDQSSGGGATDGDGVEEEAAATFGLMTTAVLRRPTATAEGRTRTAT

SEQ ID NO: 20702 - protein, 2236 aa, Oryza sativa
  Clone ID: TF_OSC900330j.C1.p8.fg
MSDLGGKNGENGNEDGASSKGTPSPKGATIPFDYSKLTIPSHNFVSMPSGRAPQFDGTHYAAWKHKMKLHLISLHPCIWKVVCTGVDVPHDDMELTSEQEQLIHRNAQASNAILSALSPEEFNKVDGLEEAKEIWDTLQLAHEGSPAVREAKIELLEGRLGRFVMDDKEIPQEMYDRMMILVNKIKGLGSEDMTNHFVVKRLLRAFGPRNPTLVSMIRERKDFKRLTPSDILGRIVSHEMQEEEAREVRQMVKNAAMIKNQEVVLKAKQEEESSCEESEDEEMAFIVKRFKHFLRKSGYGKGRKNDDKGKRQSKRACFNCGEYGHFIADCPKSNEAKAKGGKKKPERAHVAEAHMAEVWYSGDEEDPEVKPKPKPKDKVEGEGGVATVALKSSSSSKERLFNNLSDDDDDSYHYSCFMAQGRKVMTQKPSHTSLDVDSSDEESDNELDDVLKSFSKPAMQHLAKLMRALDSKEQSLERQEELLILEKKRNLALEESLAKKCAKNEQLANELNLANGSLASLRDVSETLQEKFASLDKSHKDLEVQFDTLWNSTSQPNVVSNSSNPSTSNGCARCYNIDLNSHATNIDAMQALKKENERLGTLVKYGCIKTYHSKDALYKTITAHPNKDGHGLGFSGGSPVFKRVMVNGKECLMFVREGKAPQASEMTCPLTGQTPGSSGQNDRMFLPCKTGSSGHFVRKFRASDRPKGLTGSSGYNARKFQPEGLYYDSYVISKNSEGKVVAYFNGNYNDEYRTCVWVPKALAYSSGGSSWVVDSGCTNHMTGERSMFTSLDEEGGSRENIVFGDDGKGKVMGLGKIAISKNQSLSNVLLVNSLSYNLLSVSQLCKLGFNCLFTDVDVTVFRRDDSSIAFKGVLKGDLYLVDFDVDRVNPEACLIAKSSMGWLWHRRLAHVGMRNLASLLKGEHILGLSNVSFEKDRVCSACQAGKQVGSPHPIKNIMTTTRPLELLHMDLFGPVAYISIGGNKYGFVIVDDFSRFTWVYFLHDKSEAQDVFKRFAKQAQNLYDLTIKREEGIKHEFSAPYDPPQNGIVERKNQTLIEAARAMLDEYKTSDVFWAEAVSTACHAINHLYLHKILKKTSYELLSGKKPNVSYFLVFGSKCFILSKRPRSSKFSPKMDEGFLFGYESNAHAYRVFNKTSGIVEVTRDVTFDESNGSQGEQVVVHVVGDVDPSQAIGTKAIRDIRPVETQDDQEDRDQPPSSTSNSPTSAVSVEPEVLGPIDRNLWTSPGPEVPGSIVRNLRTSGSEDAQMDRRWMYYAHRSSTEYKEGVTEFVTFADNDRKSRMSMHMLCPCRDCKNDQMIEDKDEVHVHLIMNGFMKKYTCWTKHGEQEVPDVAAEEVLDQDVENTAAARDGMFVPSPLGGETIDLDTQCLLQCCMTLKTQRTTTEILRSLEYADLDVCPIYGASRYKRAKSEGEGSKSKRGGPAKVVWYLPIAERMKRMFANKEQAKLVRWHAEERKVDSMLTHPADLVQWRTIDRIYQEFSNDPRNMRFAMCTDGINPFGDLSSRHSTWPVLLVNYNLPPWLCFKRKYIMLAMLIQGPRQPGNDIDVFLEPIIDDFERLWNEGTRTWDAYAQEYFNLHAMLFCTINDYPALGNLSGQTVKGKWACSECMEETRSKWLKHSHKTVYMGHRRFLPRYHPYRNMIKNFNGHRDTAGPPAELTGTEVHNLVMGITNEFGKKRKVGKRKEKSTSKEKTEEHVEKQKIKERSMWKKKSIFWRLPYWKDLEVRHCIDLMHVEKNVCESLMGLLLNPGTTKDGLNARRDLEDMGVRSELHPITTESGRVYLPPACYTLSKEEKIDLLTCLSGIKVPSGYSSRISRLVSLQDLKLVGMKSHDCHVLITQLLPVAIRNILPPKVRHTIQRLCSFFHAIGQKIIDPEGLDELQTELVRTLCHLEMYFPPTFFDIMEHLPVHLVRQTKCCGPAFMTQMYPCERYLGIFKGYVRNRSHPEGSIIESYTTEEVIDFCVDYMSETSSIGLPRSHHEGRLDGVGTVGRKTIRLDRKVYDKAHFTVLQHMTEVVPYVDEHLAVIRQENPGRSKSWVRNKHMSSFNEWLKNRIARLQNLSSETLQWLSQGPEWSATTWQGYDINGYTFHTVKQDSKCTVQNSGLRIEAASDGGRRDQYYGFTTVNLANNAYKDEPFILAKQVVQVFNIVDPCNKKLHVVREGKRRIVGLENIVDEDDYNQHVHGIGQEIPLEEEEEEDEVQYACVDHEEGLFL

SEQ ID NO: 20703 - protein, 1103 aa, Oryza sativa
  Clone ID: TF_OSC900406j.C1.p18.gm
MELTSEQEQLIHRNAQASNAILSALSPEEFNKVDGLEEAKEIWDTLQLAHEGSPAVREAKIELLEGRLGRFVMDDKETPQEMYDRMMILVNKIKGLGSEDMTNHFVVKRLLRAFGPRNPTLVSMIWERKDFKRLTPRDILGRIVSHEMQEEEAREVRQIVKNAAMIKNQEVALKGKQEEESSCEESKDEEMAFIVKRFKYFLRKSGYGKGRKDDDKGKRQSKRACFNCGEYGHFIADCPKSNEAKAKGGKKKPKRAHVAEAHMAEVWYSGDEEDPDHEVKLKPKSKDKVEGEGGVATVAFKSSSSSKEHLFNNLSDDDDDSYHYSCFMAQGRKVMTQKPSQTSLDVDSSDEESDNELDDTYHSKDALYKTITAHPNKNGHGSGFRVEVMDPEHPDKPGETSGWESLSLKNSHQEVPGQWPCTRYDRKFRSQCQEVPARGKQVGNPHPIKNIMTTTRPLELLHMDLFGSMAYISIGGNKYGFVIVDDFSRFTWVYFLHDKSEAQNVFKRFTKQAQNLYDLTIKKVRSDNGEFKNTQVEEFLDEEGIKHEFSTPYDPPQNGIVERKNRTLIEAARAMLDEYKTSDIFWAEAVSTACHAINLLYLHKILKKTSYELLSGDVDPSQAIGTKAIGDIRLVETQDDQEDRDQPPSSTSNSPTSAVSAEPEVPGPIDRNLRTSPGPEVPGSTVRNLRTSGSEDVPTAQVDGIDVPGTLEHTDQAQVPPVHHPRIHHIVQRDHPVDNILELVYVEQPPGFEDPKLPNHVYKLHKTLYGLKQAPRACIMTKSFKMSMMGELTFFLGLQVKQAQEGTFISQTKYVKDILKKFGMEDAKPIKTPMPTNGHLDLDDNGKCVDQKREHHSTGILDGTDEAYSSENPPSDTYSSSEDQPGYTNDNVDIQIHREHHSTGILDGTDEAYSSENLPSDTYSSSEVGGKRLTSARGRGADRRGPPVSDREREKGGGGARAHGSAARGKGGAAAPRGGRTDGPDLPKGRSDGGGTSRPGRAGAARDGGNHGAGGAALTRRRRACGSGARRRPKATDRRRGAAARGGAAATRLSGAHAATRYGEKEKEEGEASPTTVDDGGRRRTTTTAGRAPEPPNEQKERD

SEQ ID NO: 20704 - protein, 1179 aa, Oryza sativa
  Clone ID: TF_OSC900415j.C1.p4.fg
MSDLGGKDGEIGNEDGASSKGTPSPKGATTPFDYSKLTIPSHNFVSVPSGRAPQFDGTHYAAWKHKIKLYLISLHPSIWKVVCTGIDVTHEDMELTLEQEQLIHRNAQASNAILSALSPEEFNKVDRLEEAKEIWDTLQLAHEGFPAVREAKIELLEGRLGRFVMDDKETPQEMYDKMMILVNKIKGLGSEDMTNHFVVKRLLRAFGPRNPTLVSMIRERKDFKRLTPSDILGRIVSHEMQVEEARESGYGKGRKDDGKGKRQSKRACFNCGEYGHFIADCPKSNEAKAKRGKKKPERAHVAEAHMAEVWYSEDEEASEAKPKPKPKDKVEGEGGVATVAFKSSSSSKERLFNNLSDDNDDSYQYSCFMAQGRKAYSSGGSSWVVDSGCTNHMTGERSMFTSLDEENKTHENIVFGDDGKGKLGYNCLFTDEDVTVFRRDDSSVAFKGKLEGDLYLVNFDVDRVNPEACLIAKSSMGWLWHRRLAHVGMRNLAILLKGEHILGLTNVTFEKDRVCSAFQAGKQVGNLHPIKNIMTTTRPLELLHMDLFGPVAYISIGGEAQDVFKRFAKQAQNLYDLTIKRVRSDNGREFKNTQVEEFLDEEGIKHEFSAPYDPPQNGIVERKNQTLIEAARAMLDEYKTSDIFWAEAVSTACHAINRLYLHKILKKTSYELLSGKKPNVSYFRIFGSKCFILSKRPRSSKFSPKVDEGFLLGYESNAHAYCVFNKTSGIVEVTRDVTFDESNGSQGEQVVVHVVGDVDPSQAICTKAIGDIRPVETVEDALGDPDWVMAMQEELNNFTRNQVWTLVERPDQNVIGIKWIFRNKQDEHGVVVRNKARLVAQGFTQVEGLDFGETFAPVARLESIQILLAYAAHHDFRLFQIDVKSAFLNGPISELVYVEQPPGFEDPKLPNHVYKLHKALYGLKQAPRACSIMTKRFEMSMMGELTFFLGLQVKQAQEGTFISQTKYVKDILKKFMMEDAKPIKTPMPTNSHLDLDDNGKCVDQKVYRSMIGSLLYLCASRPDIMLSICMCACFQAEPKECHLIAIKRILRYVVHTPNLGLWYPKGCDFELLGYSDSDYAGCKVDRKSTTGTCQFLGRSLVSWFSKKQNSIALSTAEAEYVATGSCCAQLLWMKQTLKDFGYNFTKIPLLCDNESAIKIANNPVQYSRTKHIDIRHHFS

SEQ ID NO: 20705 - protein, 80 aa, Oryza sativa
  Clone ID: TF_OSC422776j.C1.p6.gm
MEMELGLGRYWGVGRRRCGACAVAPAAVHCRTCDGDGGGGGYLCAGCDAEHGRAGHERVWVCEVCELAPAAVTCKADAAA

SEQ ID NO: 20706 - protein, 56 aa, Oryza sativa
  Clone ID: TF_OSC415445j.C1.p6.gm
MELRKYWGVGGRRCGACEASPAAVHCRGCGGVYLCTACDARPDHARTDHERIVVVL

SEQ ID NO: 20707 - protein, 256 aa, Oryza sativa
  Clone ID: TF_OSC403009j.C1.p11.fg
MKIQCDACESAAAAVVCCADEAALCAACDVEVHAANKLAGKHQRLPLEALSARLPRCDVCQEKAAFIFCVEDRALFCRDCDEPIHVPGTLSGNHQRYLATGIRVGFASASPCDGGSDAHDSDHHAPPMGSSEHHHHHQQPAPTVAVDTPSPQFLPQGWALQKESSPPLGFQELEWFADIDLFHNQAPKGGAAAGRTTAEVPELFASQAANDVAYYRPPTRTAAAAFTAATGFRQSKKARVELPDDEEDYLIVPDLG

SEQ ID NO: 20708 - protein, 403 aa, Oryza sativa
  Clone ID: TF_OSC23982j.C1.p10.fg
MGQDEVEVGAEKKDQELPEVEVVEEEEEEGSKKAAAGCDYCGDAAAVVYCRADAARLCLPCDRHVHGANGVCSRHARAPLCAACAAAGAVFRRGAGGFLCSNCDFSRHRHGGERDPAAPLHDRSTVHPYTGCPSALDLAALLGISYSDKAAAATAAAGGDDGGWWAIWEEPQVLSLEDLIVPTTSCHGFEPLLTPSSPKIQNSPDGKVNEEVIRQLTELANSDGGGAQIWAHREAAQAGDHQLPSWGTTTQHNTGHGNFGTANSNEVATMPTPGYENGGWDNSDYPALNDPCKVEFTYEQPPASSAEACISSFVQMSELCPSMSNGSSMEETHQTNPGNGTPMQVLPKMPEFVPCPDRNLVISRYKEKRKTRRFDRQVRYESRKARADSRLRIKGRFAKVNQI

SEQ ID NO: 20709 - protein, 427 aa, Oryza sativa
  Clone ID: TF_OSC400961j.C1.p15.fg
MAGRFGTFLMYLHWLPHTGAKATTTTSKATSFMNYNFGGNVFDQEVGVGGEGGGGGEGSGCPWARPCDGCRAAPSVVYCRADAAYLCASCDARVHAANRVASRHERVRVCEACERAPAALACRADAAALCVACDVQVHSANPLPAITIPATSVLAEAVVATATVLGDKDEEVDSWLLLSKDSDNNNNNNNNNDNDNNDNNNSNSSNNGMYFGEVDEYFDLVGYNSYYDNRIENNQDRQYGMHEQQEQQQQQQEMQKEFAEKEGSECVVPSQITMLSEQQHSGYGVVGADQAASMTAGVSAYTDSISNSISFSSMEAGIVPDSTVIDMPNSRILTPAGAINLFSGPSLQMSLHFSSMDREARVLRYREKKKARKFEKTIRYETRKAYAEARPRIKGRFAKRSDVQIEVDQMFSTAALSDGSYGTVPWF

SEQ ID NO: 20710 - protein, 223 aa, Oryza sativa
  Clone ID: TF_OSC900291j.C1.p4.fg
MENEVGCECQLCGGRRGVVFCGAHGGRLCLQCDRALHQAHGGAGDHPRAPLCDSCNAAAAELRLNDGATLCGPCAYPYAYAYPYTYTYVYTGCPTPLEMMRLLHAAPPPPPATCSLQQRGEGEELLPTLLSATATPNTATAAPMAMPPPPLQHHTTTSLIMMIRNIHKREERNRAKLRFSKQIKYACRKAGADARKRVKGRFAKASSSSSSSSSSSSSIDHRL

SEQ ID NO: 20711 - protein, 300 aa, Oryza sativa
  Clone ID: TF_OSC401495j.C1.p5.fg
MSVAAEGKEKGVGGGGGGAGAGACELCGAAARVYCGADEATLCWGCDAQVHGANFLVARHARALLCRGCARPTPWRAAGPRLGPTASLCERCVRRGGGGRGGGGGGGAAGGGGRGGGGDEEMGGEGDEEEEDEDEEVVVEEEEDEDDEDEEGEGEGENQVVPWAEEAEATPPPVASSTSSSSREAAANGANAADRVKEDQPCSTSQPSLCRYASSAHHGGGGRSDEATSSRNGGGVGGRFLASRHRKRSPSDFRRSGLAQSLIDSKLAFRFQEHCKSTFPSSSLSILPCTWQLFLRQLKQ

SEQ ID NO: 20712 - protein, 59 aa, Oryza sativa
  unsure (1)..(59): unsure at all Xaa locations
  Clone ID: TF_OSC400901j.C1.p11.gp
MEVGNGKCGGGGAGCELCGGVAAVHCAADSAFLCLVCDDKVHGANFLASRHRPPPVGGX

SEQ ID NO: 20713 - protein, 132 aa, Oryza sativa
  unsure (1)..(132): unsure at all Xaa locations
  Clone ID: TF_OSC400070j.C1.p2.np
MNCNFSSNLFEQEAGGRGFPWGSPCDGCHADSTTVHSADHVTSRHRRLQANECTPQASVLACCADAVALCTTCDAEVHSANPLAQRHQVPVLPLPVASFNXAEAAHGSEEDEVNSWLLRRGSDDRGCTLVLS

SEQ ID NO: 20714 - protein, 352 aa, Oryza sativa
  Clone ID: TF_OSC406117j.C1.p11.fg
MVRCLVENASLCQNCDWNGHSAGSSAAGHKRQTINCYSGCPSSSELSKIWTFVSDIPNVAPEPNCEQGISMMSISDSGVSNQDNAAGDSSLLDIASATLMSDLGTAGKPKSLIGSSSEAGVNLLPLATDQMAGSVDSTSAKVPYTADQDMFSKDSIYEDFCVDDVDLSFENYEELFGTSHIQTEQLFDDAGIDSYFESKEIPSGNSDEQPKLMQPVTSNAVSADSGMSIPGAKGDSSLCIPVRQARSSISLSFSGLTGESSAGDYQDCGVSPVLLMGEPPWHPPGPEGSFAGATRDDAITRYKEKKKRRKFDKKIRYASRKARADVRKRVKGRFVKAGEAYDYDPLCETRSY

SEQ ID NO: 20715 - protein, 229 aa, Oryza sativa
  Clone ID: TF_OSC401841j.C1.p12.fg
MRIQCDACEAAAATVVCCADEAALCARCDVEIHAANKLASKHQRLPLDAALPAALPRCDVCQEKAAFIFCVEDRALFCRDCDEPIHVPGTLSGNHQRYLTTGIRVGFSSVCSANADHLPPPAPKGNSKPPASGIAAAAAPKPAVSAAAQEKGSPIGFKDLEWLDDIDLFHVQSPAKGGSTAAEVPELFASPQPASNMGLYKASGARQSKKPRVEIPDDDEDFFIVPDLG

SEQ ID NO: 20716 - protein, 421 aa, Oryza sativa
  Clone ID: TF_OSC401487j.C1.p38.fg
MASAAAATGAALGARTARACDGCMRRRARWHCPADDAFLCQACDASVHSANPLARRHHRVRLPSASSSPASSPRSAAAPRAGSDDPDAPAWLHGLKRRPRTPRTKPGGGGKHDASAATVAAAAASAVPDLEAEESGIVGDTDHDVGEEDDEDLLYRVPVFDPMLAELYNPVAADDEEQQIEQKPAARVVPFSEPSPEFASGSVEADGLSGFDVPDMELASFAADMESLLMGVDEGFDDLGFLDDEKPHVKLDLDMDMDFASISPAPAPEREERKRKRPEMILKLDYEGVIDSWARDGASPWFHGERPRFDPSESWPDFPAGSRGGLGAAVTAVTGGEREARVSRYREKRRTRLFAKKIRYEVRKLNAEKRPRMKGRFVKRAAALPPLPLPRHQHPPPPPPRALPPVPMMLAPRGAHGRYRF

SEQ ID NO: 20717 - protein, 479 aa, Oryza sativa
  Clone ID: TF_OSC414184j.C1.p8.fg
MKDGGGGGGRGQQQQWPCDYCGEAAAALHCRADAARLCVACDRHVHAANALSRKHVRAPLCAACAARPAAARVASASAPAFLCADCDTGCGGDDGAALRVPVEGFSGCPAAAELAASWGLDLPGGCGGEEEEADDAFFSALDYSMLAVDPVLRDLYVPCDPPEVVVAGGGRRLKGEALGHQLAEMARREAETAHPHTQPHSDLSPRTPRRTSAAASGRLQEKQAPPPLPHAAATAAPLPYTSLLMMAPANCTELMENNRVGDEDENVLWESTAPSVPPTQIWDFNLGKSRDHNENSALEVGFGSNNGGFMIKSYNDMLKEISSGTTKDLEDIYDSRYFAAAEDIMSTNVCQLSSKNPSTRSNKRKASSCASTIDGPTTSTSHVPAASGALGGSSNDRGSALPKEISFCDQTVVPTGADQRPCTIKIDSETLAQNRDSAMQRYEKHIRYESRKLRADTRKRVKGRFVKSNGAPDDVSNGG

SEQ ID NO: 20718 - protein, 269 aa, Oryza sativa
  Clone ID: TF_OSC401779j.C1.p12.fg
MKVQCDVCAAEAASVFCCADEAALCDACDHRVHRANKLAGKHRRFSLLNPSASGRSPTSTTAPLCDICQEKRGFLFCKEDRAILCRECDVPVHTASELTMRHSRYLLTGVRLSSEPAASPAPPSEEENSSSFCCSADDAVPAPAAPATSHGGSSGSSSISEYLTTLPGWHVEDFLVDDATAEAAAAAAATSSGISANGPCQGVTRIGGLQESAGYPAWMAQQQLCCDGLVAGDASPASRERWVPQMYADQLAAGSKRSRTSTASSYSYW

SEQ ID NO: 20719 - protein, 176 aa, Oryza sativa
  Clone ID: TF_OSC412318j.C1.p1.fg
MGAGGWSARSMRWVGQGRRRSRVPGSKGRRRWWMAEAAGSSSSSSASAVVVAVVIAVVVVVWVVVRRKVRRAAARREEVLRLTRLAQEESEMAEVECARAYYSELFPSVVHATEMVDEAAWGAPPAVVPAQAEAEAEMEARAQPQPQPPVGAKGVCAVCFRPTTFRCKQCKAVKYW

SEQ ID NO: 20720 - protein, 177 aa, Oryza sativa
  Clone ID: TF_OSC18513j.C1.p1.fg
CMQIIMKSCRDTHCHYCFSEAPADVVVCPSCTIPIYCSNRCQEKAIGQMSCNQNTHLESNNNVVDIAKLSVTSTKSKTPDSKQIAEHRHECGGACWAAVLPADIVLAGRIMAQYIEKQLLVGKRSTISGPNLDLVHHYDQDSSASKFESHIYATVLFLCLQSYYKSGVSWAEDSLSQ

SEQ ID NO: 20721 - protein, 379 aa, Oryza sativa
  Clone ID: TF_OSC410441j.C1.p2.fg
MVAKRGAGACALSWDEEGEVSRGEKRRRADGDGSSDVGGGGGIGAFDALHDELVVSILADVAASAGSPADLAAAMLTCRRFRELGKHGLVLARASPSAVAVRAAAWCDDAHRFLVRCAEAGNVEASYLLGMIMFYCFENRKLGAELLGAAARRGHGEALYSMAIIQFNGSGLPKDGRNLQAGAQLCARAASRGHTDALRELGHCVSDGYGVRRSLSGGRRLLIQANFRELCAAVANGGARFAAALGRSGECKPPGPHMCLLSDYGCHVAGAAGRRAHAANAFLAGWYASRPLASGAGAAALRMCSQPTCGRPETRKHEFRRCSVCSGVIYCSRACQAMHWKVAHKSACVPMAHWLVAANAGAGNAVGAAAAAAAQMAMP

SEQ ID NO: 20722 - protein, 419 aa, Oryza sativa
  Clone ID: TF_OSC400421j.C1.p12.fg
MESNAEKLRGLTITSLDEEDDEPELPHRSPPASGGGGGGGAGYEDDDEEEEEEAEVTLGFLEKPKHPGLLLRHLFPSKAGGIPAWLDPVNLPSGNSRCCGFCGEPLQFVLQIYAPIEDNAASFHRTLFMFMCPSMACLLRDQHDQWKHRQGNPCRSVKVFRCQLPRSNAFYSSEPPKHNDSDKPLCPGAPVCHWCGTWKGDKLCSSCKKARYCSEKHQTLHWRSGHKSDCLQLISSSEASSSIFPAVGKVPASKSWPEYEIAIDYEGAFNSDSCDESNSKSLVMQRPGKPDDMMQSWMDQFEADADNKCWASFQERVSRAPKQVLRYCREENAKPLWALSAGCPSNADIPSCSYCRGPLCYEFQIMPQLLYYFGVKNEPDSLDWATIVVYTCKGSCDQNVSYKEEFAWVQLYPTTTTRS

SEQ ID NO: 20723 - protein, 400 aa, Oryza sativa
  Clone ID: TF_OSC7547j.C1.p3.fg
RRRARTAPPIPTRSGGGGGGGAGYEDDDEEEEEEPEVTLGFLEKPKHPGLLLRHLFPSKAGGIPAWLDPVNLPSGNSRCCGFCGEPLQFVLQIYAPIEDNAASFHRTLFMFMCPSMACLLRDQHDQWKHRQGNPCRSVKVFRCQLPRSNAFYSSEPPKHNDSDKPLCPGAPVCHWCGTWKGDKLCSSCKKARYCSEKHQTLHWRSGHKSDCLQLISSSEASSSIFPAVGKVPASKSWPEYEIAIDYEGAFNSDSCDESNSKSLVMQRPGKPDDMMQSWMDQFEADADNKCWASFQERVSRAPKQVLRYCREENAKPLWALSAGCPSNADIPSCSYCRGPLCYEFQIMPQLLYYFGVKNEPDSLDWATIVVYTCKGSCDQNVSYKEEFAWVQLYPTTTTRS

SEQ ID NO: 20724 - protein, 89 aa, Oryza sativa
  unsure (1)..(89): unsure at all Xaa locations
  Clone ID: TF_OSC400080j.C1.p23.gp
PTPGSAAEDEAAGLRLCSHALCGRPETRRHEFRRCSVCGVVNYCSRACQALHWKTAHKAECTPMDRWLDNAAAGAANPNAAAMAAPAPX

SEQ ID NO: 20725 - protein, 320 aa, Oryza sativa
  Clone ID: TF_OSC419993j.C1.p16.fg
MASWEEQLRDELAGRDLAVASVPGKGRGLFAARSFFPGEVVISQEPYASTPNKISVGSNCDNCFASRNLRKCSVCRVAWYCGSACQREEWKLHQLECRAIAALTEDRKKMLTPTIRLMVRLVLRRKLQDDKMANLVQLILPSFELDLKEITHTFSKFACNAHTICDPELRPLGTGLYPVLSIINHSCVPNAVLIFEGRTAYVRALQPISKNEEDSEEDALLEGYRCNDQKCDGFLLPNAVDNSEVGSMYKTIEELERKLYHPLSITLLHTRETLLKIYMELQDWQTALMYCRLTIPVYERIYPPFHPMIGLQFYTCGKLE

SEQ ID NO: 20726 - protein, 266 aa, Oryza sativa
  Clone ID: TF_OSC400648j.C1.p12.fg
MKKFPTLGNAETENAPFPFPLLSLEAAGEAGGHMECAAKGLVAEPCAGEARRRCGGCGAVAYCSRAHQTVHWGFHKEECARLAEQMSRIDMLKQFPFTFSVESPAPNHTFPSLRCFLLESFKLHQKGLWKSECICDPEVTSVKDLSKTTDWSMGSALCPCTEPEHNVSTPLTSWKDYYRWRSLPLQSPVAVLLHWDSKPHLIVAPNAGIAAYPSWIPTIEIIRKVGIPAIFTDFCEEAAHLASSCITSITGQPLRVPIQNCKFVSP

SEQ ID NO: 20727 - protein, 978 aa, Oryza sativa
  Clone ID: TF_OSC401717j.C1.p3.fg
MAEAAGSSSSSSASAVVVAVVIAVVVVVWVVVRRKVRRAAARREEVLRLTRLAQEESEMAEVECARAYYSELFPSVVHATEMVDEAAWGAPPAVVPAQAEAEAEMEARAQPQPQPPVGAKGVCAVCFRPTTFRCKQCKAVKYCSFKCQIAHWRQGHKNECRPPSTDANHDDVAELSVAKERKIEQTSASEENIAETNTAATVKNLNDKTKDMPSEVLASVEVPDDDHSVSAVKLPQSSSQVASLGSRKTESNMKPTTPVENGSYTKDLDEALVCRFQPSPPKISGSGSLINKESLIDSKKHQDCSQTSNSKKYADNNNAQAALPVAVEPKTSRTALHVEVGHSKTKAAGSDNIGVSKMVPSVLTVDKVSPVPGGRSVTPNSSKRADNIAERNSKPSEKSISTANSLATSLKKIVRQQTAPKVVRHYPSEPTHFPYELFIKLYEKVELQPFGLHNLGNSCYANAVLQCLMFTRPLTSYLLGGLHSKNCSKKEWCFMCEFEKLVGEGRQGKIALSPTGILSHLPDIGSSFGPGKQEDAHEFLRYAIDAMQSVCMKEARKSGTHRLHEETTLMQLIFGGYLRSKIRCTRCDATSEQHERILDLTVEIDGDISSLEGALERFTSTEVLDGDNKYKCSRCKSHERAKKKLTISEAPNVLTIALKRYQSGKFGKINKAIRFPETLNLQRYMSPKADDTSPVYSLYAVVVHHDIMNAAFSGHYVCYVKDTHGKWYKTDDSQVKPVSLENVMSKCAYMLLYARCSPRAPSSVRPALMAQDPARVKKDKARVNSGRWHGGGPIHQGGQMYADHMTDDLPHTYDEFGHGPYSPAESPSPSESSSIFTSSDTGSHSTDSSESTRNSTSEDMERLIFGDQVSYFDGSMFGHGENGRMTYSRSKSSLGTSSSGQEVDQYRPDEHRLQGAREGWNQGDESSSLYTNQSKHQFSSKLTEQYRRRLDGTEHDPGEANSVLLRRSARERTAQTFY

SEQ ID NO: 20728 - protein, 376 aa, Oryza sativa
  Clone ID: TF_OSC400036j.C1.p67.fg
MEPDTDKLQSLQINPNKETNLVAVFKNDYVDDEDDEDMDPQVTLGFIEEPEGPEDWHLLLPQHFPNKAGGVPAWLDPVNLPSGKSRCCDFCGEPLRFVLQVVFHLYDKLQVYAPIQCKETAYHRTLFVFMCPSMACLLLDQHEQGKDRAGEKVCSRCRKSSYCSKKHQELHWRAKHKNECHQISGSHNASAIMPDAGKVFAGNIWPEYMVVDETEKVSCFASCENRSELLMEQGQSEEDDMTASLMDQFEVDDDNRCWASFLERISREQDQVLRYCRESTAKPLWVVYSGSLTNAAKPSCIYCNGPLCYEFQIMPQLLHYFHVENEPDSLDWATIIVYTCKGSCDQNVSYMEEFVWVQLSPATTRTNQSTCPPAGL

SEQ ID NO: 20729 - protein, 883 aa, Oryza sativa
  Clone ID: TF_OSC402150j.C1.p11.fg
MATPDVILPGPSLRPMPYMRSAPSARPEYHECATCHGPAKTRCSRCKSVRYCSGKCQIIHWRQGHKQTCQQWNGFGTSSSGGLPPTENTEQMPFLSNLNSPLRGSDVHLHDMDFDTMSEPSFVTTDSYNLDTSPFLSDRSNMNKPNQFLHTSENGAAIGSYEKNDYSIDGEVPSSEILSGNKGLNNSSGSGENCGNRDVIYPLNSVVHQPNNYAPEIRKRPKASITVYESDKGVYLTSDMISSGEGPYASAAESLQRSNSSGNVTGKGNMIHKKPPYPSGSTKTAVSTNSSLQGCNGISKAGASKVEALKKPSKFLKTSLVGLINDNKRSKVLFPYEDLVKFFQYEVRGISPRGLFNCGNSCYANAVLQCLMCTKPLMIYLLLRLHSKDCNTKTQAPTLLGVVVKSLTISDFFDIDCFILLGCSKNWCLMCELEQYASTLRESGGPVSPSRILSNLRNIGCRLGGGSQEDAHEFLRHLVMSMQGACLDGLGGEKQVEASLQETTLIQQMFGGRLKSKVKCLRCYHESERYENIMDLTLEIHGWVESLQDALTQFTAPEDLDGENMYKCGRCSAYVKARKQLSVHEVPNILTVVLKRFQTGKYGKINKCVTFPDMLDMVPFVTGAGDNPPLYFLYAVVVHVDTENASFSGHYISYVKDMQGTWLRIDDSEVQAVSLNQVMSEGAYMLFYMRSFPRPPKIYIEKGLSSVPTCSKRHSSKSSKGSKQDLNHTESLFASSDQTYGIYDFRPDNGYIQDQHAALRTRNFYHTDDAFADSISTDFSDATSSEWSLFTSSDESSFTTESTRDSFSVVDYGDNAGLDPISSIFGPYYAQDHPPGSFASCTRLSPSNPQTRFLTHGTLKGGIPALELQGNICNSPKISAKAE

SEQ ID NO: 20730 - protein, 423 aa, Oryza sativa
  Clone ID: TF_OSC400964j.C1.p156.gm
GNHSPNANTNATANANAAPHHLSTAGRGGAGAWTEMRTRSGSLYRSGGGGGETAMVGQKRKRSSLPPQYATAGDCCGGGGRRKRLAGGGPDYLDELPDDLVLAVLSKLAASASSPSDLLSVHLTCKRLNGLGRHDMVFAKASPASLAVKAASWSEPVQRFLKLCADAGNLEACYILGMIRFYCLGNRSGGAALLARAAVGGHAAALYSLAVIQFNGSGGAKSDRDLRAGAALCARAAALGHVDALRELGHCLQDGYGVRRDPAEGRRFLVAANARELTLALAAAASHRPFAALPLAGGAAAGAIGCPLLSDFGWSLPEAEPHPANLFMADWWASRGVQATAKKPGLEAPAAATGDSDGGGELRLCSHVRCGRRETRRHEFRRCSVCGAANYCSRACQALDWKRAHKAQCVPMDRWLLAAGEAQ

SEQ ID NO: 20731 - protein, 81 aa, Oryza sativa
  unsure (1)..(81): unsure at all Xaa locations
  Clone ID: TF_OSC400964j.C1.p176.gp
PGLEAPAAATGDSDGGGELRLCSHVRCGRRETRRHEFRRCSVCGAANYCSRACQALDWKRAHKAQCVPMDRWLLAAGEAQX

SEQ ID NO: 20732 - protein, 858 aa, Oryza sativa
  Clone ID: TF_OSC415384j.C1.p5.gm
QQQRRPRRRNHGGGGQRRGPPQERPSAAPPPPPPQQQQRQQHAAPAPTRAAAPAPARVAATKAAAGGDGAVPQLVQEIQDKLARGAVECMICYDMVRRSAPVWSCGSCFSIFHLPCIRKWARSPASAADASDPDSSWRCPGCQSVHAVPARELAYTCFCGRRREPPNDLFLTPHSCGEPCSKPLEKADPAVKADDAAATRCPHVCVLQCHPGPCPPCKAFAPDRLCPCGKQTIVRRCADRTTPVTCGQRCDRLLPCRRHRCEKVCHTGPCGDCNVLISARCFCGKKTETLLCGEMELKGNLSEKDGVFSCSEACSHMLSCGNHACQDICHPGPCGECELMPGKVTACHCGKTRLLEKRASCLDPIPTCDKVCDKKLPCGVHRCKVTCHEGDCPPCVVRVEQRCRCGSSGQMVECYKVLEEEFRCNKPYATNLVERTGNVECTLATGLAILPLVIHHLQMEMLAQVLVVELHVDSAGGTANGDNMFEVSIIQKLPMPLQPVESDGRRVPLGQRKLSCDEDCAKMERKRVLAEAFDITPPNLDALHFGENSNASDLLSDLFRREPKWVMAIEERCKFLVLGKTRGNSSGNLKVHVFCHMTKDKRDAIRVIADRWKLSVQAAGWEPKRFITIHPTPKSKAPARILGSKPGVFVAASHPFFDPLVDMDPRLVVAMLDLPRDADVSALVLRFGGECELVWLNDKNAVAVFNDPARAATALRRLDYGSAYQGAAVFLPSSSAQPGNVWVAGQKDGVAATKSSANPWKKATASEPDPSSGDWTGVLGQAPGSVWRRGGDTVAQVMGTSNRWNALESDAATSSRPVEESKPAPRTDAVSSAGPSTAPPVSKMQPEVEVDDWEEACE

SEQ ID NO: 20733 - protein, 827 aa, Oryza sativa
  Clone ID: TF_OSC401685j.C1.p89.fg
MPFSYAAAASGSASSSRKPVPVAAAAARRPAPSPAAAAAPAPSPSNPSAVSDSDPSSYSSSGEETDLTASDPAAASVISSYLSVAGDGADLSKVGIFLSSAARRRSPPCLICFDPIRPSDPVWSCSASCFALLHLHCIQSWAHQSSSAAPSPTWGCPKCRFPYPKSQTPTSYLCFCSKTVDPAPDPWILPHSCGDVCGRRLNADRDSGCEHNCLLLCHPGPCPPCPAIVPNAMCFCGSHRETRRCSHQRYSCSGKCNKRLGCGIHRCPVDCHDGPCPPCAVRGKHKCECGETMEERLCSERVFQCKRECGGMLQCGKHSCERGCHAGKCGGCPLQGRRTCPCGKKDYPSLDCDAEAATCGSTCEKVLGCGRHKCPERCHRGSCVETCRLVITKSCRCGGLKKEVPCYQELTCERKCQRLRNCGRHACRRRCCEGDCAPCPEVCDKRLRCGNHKCLSPCHRCHGPIAPPNPEFTLKPIKRKKGKHIDSTPGTPCPPCQEVVLVPCFGHHLGQERAILCSKRRQFPCQNLCGNPLNCGNHYCTKACHVLQIPLSQPEGDQSAILSLASASAFAEPCEECNLPCQRVREPPCSHPCPLPCHLNDCPPCKALVKRPCHCGAMVHAFECMYYNNLNATKQQKVRSCGGPCHRKLPNCPHLCSEICHPGQCPSVDQCMKKVNVRCACNNLKKEWICQDVLKEYRQSGRDPKQIPKNQYAVGLLACGEDCVKKVKAADSELHLRKIQEIKTPAVEVENVPKRRKRRNRGQESVESSKFQEIKAVALKFLLVIFLCIIVVAGLYLLWKGVYRLSDWMNDMEEQRARQRHLKPGRL

SEQ ID NO: 20734 - protein, 848 aa, Oryza sativa
  Clone ID: TF_OSC101038j.C1.p1.fg
MALSASAAASAGRGARAEKVGRIFERFDANGDGGLDRDEMAALVVAVNPRVKFSEDQISAILDEVFRTYAEFILPGGRGLSLPGLLRTYDDGAGDVDRDFLALSLPPLESGESSPEIAAGDPAAASSPPSGAAAAASLLDDHIKPLGAAGGAPSSSSRAAAAAPAWATSPSHGIAFDSSWALLDDLEILVKRLRSKQLRRTSSIDTINGSGGAGNNNFDSFSEAGWSREISGQADSASTAAPWDETSRDYLTFVKELAVLRTRADASRSREEAFDNHMVIGRALSEHRLFRDALSSFRRACELQPTDVRPHFRAGNCLYALGRHSEAKEEYLLALEAAEAGGSQSADILPQIHVNLGIAMEAEGMVLGACEHYREAAILCPSHARALKLLGSALFGVGEYRAAEKALEEAIFLKPDYADAHCDLGSALHAIGDDDRAVQEFQKAIDLKPGHVDALYNLGGLNMDAGRFVRAAEMYTRVLSIRPNHWRAQLNKAVALLGQGESEEAKKALKEAFKMTQRVEVYDAISHLKTLQKKKPKPPKGKDDSQGEEAFVVVEPSKFKRVGRKTTLRQDLANALDIRAFEKTTKLGRCDAELLRKEMNETDVPISYSGAGNPEKSIRKAALEVILHRLLSFLKPDTFQGSVKAINERILSVLDASGSGRVDLGMFFAIIAPICSGPVDKRKRVVFDALLWRPASEGSRGQIRRSDALSYIKLLRAVYIPTHGASDMLEMHGESDPTMVSYTEFLEMFNDPDWGFGILSTLVKLEDSDHIRHGRHTCSICRYPIIGSRFKETKHSFSLCNRCYSEGKVPSAFKLDEYRFKEYGNESEALIDKCMCFNLHSKKLEADT

SEQ ID NO: 20735 - protein, 956 aa, Oryza sativa
  Clone ID: TF_OSC100588j.C1.p12.fg
MLPSGLAVAPPPISLHAAASRTGRQRCLIVLDNVWTVSTWNVVRHALQEDCCSRIVVTTEINDVAQAWSFYKSQHNASHVIKKHILKMEPLNDDFSRDLLVSRVFGDKDKCPEELNEVSYEIARKCGGLPLATIAAASLLLSRPDKPDEWIYVQKSLIPDLRIQPTSEGMAQLLNNSFNNLPHHLKACMLYLSIYKEDHIINPDDLVKQWVAEDFVSATEGKSLDEAARNHFYELVHRGILETEHISCSDEVVSCTVHDMVLNFIKRKAMEENFVTAIDHSQSGIRLADKVRRLSLHFGYSKDAKAPACIRLSQLRSLVFSGFWKCGPSISEFHLLRVLFLHGKHGEFLDLTRIRELFLLTYLQIEGNVCIDLPSELQGLKYLRTLHIGAMVTFLRSEVVHLPPLLHFRLPPNLGYFVDAGSVQSIEELTNLQDLQLACPQIATSDHIKHNMKLLGSIIGILKSLKSLTVVPVCFSEDSNDNENSSIAIFLDFLDKVPPPCSLLQRLELFPRVCVFHRLPSWIITIEKLCILKVAVMELLRKDIETLSMLNALTVFSLYVRTTPAEPIIFDKSGFHVLKYFKFKCSTVSSLRFDEGAMPNLQRLKMEFNGSTVEQYNLENVGFKHLSGVKVSAKICIAGTSEANRMAIASVLNNAIRQNTRISSVIIRFINRVIKDLPIVPTPHTDHMHENLRLDKSVRSWPTQCDGCKELGAGHRFKCEQCNSKVYYDMCCATAPHTLKHPLFPGSVFRFLRKPLASECGRACDACGDLMHGFVYHCFERGLDLHPRCARLPVRTANVKGYVMELRRVSACSRCCICMCGKEGYRNKFWSYRSSQEGQDINVHMACLKDLASKSHETLTKLYEILMGESQWTPTEVLGEDTSDQLVVSSAEDGDRTPLRQDEITEEFQHKDEVCNVLEHGREELRKKETDTRVKIAKTNSMWFSYHTVDNLTCAF

SEQ ID NO: 20736 - protein, 807 aa, Oryza sativa
  Clone ID: TF_OSC102172j.C1.p5.fg
MLPSGLAVAPPPISLHAAASRTGRQRCLIVLDNVWTVSTWNVVRHALQEDCCSRIVVTTEINDVAQAWSFYKSQHNASHVIKKHILKMEPLNDDFSRDLLVSRVFGDKDKCPEELNEVSYEIARKCGGLPLATIAAASLLLSRPDKPDEWIYVQKSLIPDLRIQPTSEGMAQLLNNSFNNLPHHLKACMLYLSIYKEDHIINPDDLVKQWVAEDFIEGNVCIDLPSELQGLKYLRTLHIGAMVTFLRSEVVHLPPLLHFRLPPNLGYFVDAGSVQSIEELTNLQDLQLACPQIATSDHIKHNMKLLGSIIGILKSLKSLTVVPVCFSEDSNDNENSSIAIFLDFLDKVPPPCSLLQRLELFPRVCVFHRLPSWIITIEKLCILKVAVMELLRKDIETLSMLNALTVFSLYVRTTPAEPIIFDKSGFHVLKYFKFKCSTVSSLRFDEGAMPNLQRLKMEFNGSTVEQYNLENVGFKHLSGVKVSAKICIAGTSEANRMAIASVLNNAIRQNTRISSVIIRFINRVIKDLPIVPTPHTDHMHENLRLDKSVRSWPTQCDGCKELGAGHRFKCEQCNSKVYYDMCCATAPHTLKHPLFPGSVFRFLRKPLASECGRACDACGDLMHGFVYHCFERGLDLHPRCARLPVRTANVKGYVMELRRVSACSRCCICMCGKEGYRNKFWSYRSSQEGQDINVHMACLKDLASKSHETLTKLYEILMGESQWTPTEVLGEDTSDQLVVSSAEDGDRTPLRQDEITEEFQHKDEVCNVLEHGREELRKKETDTRVKIAKTNSMWFSYHTVDNLTCAF

SEQ ID NO: 20737 - protein, 576 aa, Oryza sativa
  Clone ID: TF_OSC100588j.C1.p17.fg
MLRTPDLGDPPVAEITHPFHPHKLRLADNVTDGHWPFRCGGCKELAAGRRRYRCEPCDLTLYTCCATAPLTLEHPLLPGRHFRLLERPPPPPPWLAADDRGGGGWRPACDACGDLLRGDGFAYHCADGHGLVGLNLHPRCARLRLPVAAARGAAAVKLCRRAAPRRRCGVCMSGEDGYRHGFWTCRFRRSGGDELVDVHLSCLKELMSHSHETLTNLYEILMEDGTPTNDCGEGASAQDNSSYSGESNGDAEEFENQNGTNNGMVPEMKTITHPSHPEHKLRMVTTTGEAPFKCDACKEPGDGPRYHCLTCEDLNMHKFCAHAPSTLYHHLFGRTFELLAKPPQGRPEKPHPAATGGGRGESGGRWCDTCGDHVFGLVYHCSGANLDLHPCCASLQELPVQNRETLDQPKESLATPQKLVKEGLAKITIDGVAFDIAAFSKCSLCSRQEEEGPDHCCRRLRRQEQWCYYNSDVVDGGGEAVSLHVSCIKQIARRRWQAARDMKCGGQIMLAISEEMIGEGGPLHGIPSERDRNIVGAVVRVIIAVIFGDRTAMEGDISSWVALGLPWLTNLFTVQR

SEQ ID NO: 20738 - protein, 1258 aa, Oryza sativa
  Clone ID: TF_OSC100588j.C1.p21.gm
MADRNEEQILYDTIAEGSSQNWNEEEGNKDPNQYLNEEGSVERDAEGNQEGHVERDVEGNQEEEASGSQPSVGQKRGRGQRGATKKLEGRHIITEVDEDGRPSAPAEAAKNYVRHSGWVARDNVPVSTVYWRRTRARGDHESFVPDSEKEMLWTTMLETFTLPAGTEDKVKRWTLKKMAEQFRSFKGDLYQKYILKGQTPNFDTFPKLRDHWDEFVAYKTGEQGQAMMERNKENAAKKKYHHHLGSGGYSVAMPKWEEMEASLLERGIEPATANWPERSKFWYYAHGGMLNPADGSLTPEHPGRTRGKGVIPWKIGFKEDIHTYRSRMRSKRDTEAKIADLEFRVSSYELSMQEEVARKVDECMAAHRSHDPQPTIPPAMDESTCPVDDITQRTPCELHIPFKNLSIKVASGMAIPTDPSGTYHCRPIAAGYSKVEVELVEDAYEDLELDYPGGDGSSTVSSSCSSTVSTSGSCTDSSLGSCTDSSSGSCTDSSLGSSSGTFQVKGNPSSTACPHKGNKEGEKVNRQFKPRSPEKKIPIDPSVRNFFRGMSAPAKEAIKLSDYERTLKKASSGKSKPVPQLGEQPNQEIEPLVTGEDFGIQEFINDTGLTTDQLLGDAPIEKAEVKYMYELGKPLVKPELLQSLPTQMYKFHQLYMEMSATGREMIGARIRDTDFLQGDDILWINFKGIYELYQLDALDVRKENDNHMLRTPDLGDPPVAEITHPFHPHKLRLADNVTDGHWPFRCGGCKELAAGRRRYRCEPCDLTLYTCCATAPLTLEHPLLPGRHFRLLERPPPPPPWLAADDRGGGGWRPACDACGDLLRGDGFAYHCADGHGLVGLNLHPRCARLRLPVAAARGAAAVKLCRRAAPRRRCGVCMSGEDGYRHGFWTCRFRRSGGDELVDVHLSCLKELMSHSHETLTNLYEILMEDGTPTNDCGEGASAQDNSSGESNGDAEEFENQNGTNNGMVPEMKTITHPSHPEHKLRMVTTTGEAPFKCDACKEPGDGPRYHCLTCEDLNMHKFCAHAPSTLYHHLFGRTFELLAKPPQGRPEKPHPAATGGGRGESGGRWCDTCGDHVFGLVYHCSGANLDLHPCCASLQELPGLAKITIDGVAFDIAAFSKCSLCSRQEEEGPDHCCRRLRRQEQWCYYNSDVVDGGGEAVSLHVSCIKQIARRRWQAARDMKCGGQIMLAISEEMIGEGGPLHGIPSERDRNIVGAVVRVIIAVIFGDRTAMEGDISSWVALGLPWLTNLFTVQR

SEQ ID NO: 20739 - protein, 845 aa, Oryza sativa
  Clone ID: TF_OSC101306j.C1.p1.fg
MSGRSSPMYEGLASRPDEWDVVLKVKYGETLKRFGGYVQGPQFSLNLSALRSKIASAFKFGSDVDFILTYTDEDGDIVMLDDDDDLHDAAIHQKLNPLRINVQLNNSHTAAPQAKQQDSDNIPLRSTTTEDPLAHIKSVIDEVLKPISMKSIQEPVPETLAKLSHEVLEAASPQLAELIKPFVKLVTPSNNNPSNGHADGSCSSSTGLPQTQVDPKTNDEPKIDTSLGSQPLDTQNSKSSGARGLKTLSVEAPATSGVKSSQGQQASLYPSIEELLFSPFLPNSGDDKSASKGISDAQSKGKSVMTSATPPTPPAAPAFRPAPPIPSLNDWSQPPARGSTFYPSIWQSEADPKANSDSRWRVPLCRAGHPFQPHAPLSRPPPPMPAPMSYGPSPHFPYPGRLLSSGHLHGDLGNNIENSPARTFHRWIQCDGCGVQPIVGPRYKSKTKEDYDLCDACFHRMGNEVEYTRIDKPLLPQRLLRDPTLCRKIHSRAAMKSKREKLESRFILDVTVLDGTLMAPSTPFTKIWRMHNNGSIMWPLGTQLIWVGGDQFALQTYVPLEIPVDGFPVDQEIDVAVDFVAPARPGRYISYWRLASPSGQKFGQRVWVHIQVEDPSFVSNNRTAAINLNLPPESNITNTSNLIDVNIEPVDQVFNQHVNSTNKELLEHLIHHQIDEPKNPEPAPLPVPIVSSTTSLHPIIDVDVPSSSTAAAFVPVFDEPAPEPAVTPVPPTVNVPAGNAPASVGASSSDHHGIDNLTEEKLLKELEEMGFRQVDLNKEILRQNKYNLEQSVDDLCGVSEWDPLLEELQEMGFEDTEINKEMLEKNGGSIKRAVMDLIAREKKDQ

SEQ ID NO: 20740 - protein, 5033 aa, Oryza sativa
  Clone ID: TF_OSC900328j.C1.p15.fg
MRKNNQLPVSTSDPSIPFGFENNMKCEVSTVVELSVPPSFIEGRYTFVLVEQVESTVVEIVERSLEFCLLYLEKSSYACEDYGLLNEVAYFMECVLLRGTPSKVYSLEPSVVNDVIEQWSSVQVDSERISPQEKYFCYLKGLWNVGALFADCFLMAQPGFNCSNSGDDLQRFRLTLSPECLQQDYVIAENTESSHTASPNGMVSIAQHFAVVHLHCIPVLLTLVQKLCQSPALDVIEDTNFNMRLSFGQRILKLVHGLAMEFPCDASDAMMLCSVARCTDSLPVLFKLKFKFANHDRVFSGDGVGTVLLQILDEFLQLIHIIFCNSDICCTVQVCILASLLEIFSPEKWKYDRSAACLMPPLVYSPHIVQYVLKLLNDTKRWTSRVDRDRPGKDVLGYSCNSETDGLSCHARSKKVPLLKKYTSEEYLQLIFPSEEQWLDDLVHLIFFLHEEGVKSMPLLEKPQMSCTKQVTLSELESVASHEEEALFGNLFAEARSTGVADSVEQPISLGSGPSSSQHGPIQLAADLICFMKMSIFSPEWCTAIYVDACRKFHSNHLEQFLSILQCPAFCSDESIATTSLSEVNSLHINTACFELLQMFLISHECPASLREDLVDKVFNAENGMYTYNNYTLALVARAIISGASSIYNLGRKVFVQYVGYLLEKANDKSSSSLDLNNFCRILPCAFHLEILLVAFHSTTGPEKADLINIVLSSLEKMRQPPLGVNASGLTRWALLLSRLLLVLRHMLLYPVTHPSWLLMRLRSRMRDILLKEGQSRSMNDYLPSFTAEVVEGIFADTVKEYASTSSLFPQLIDVTPAHAEIYFDKSALEALGLNFANLGSNISEILGVWKGRKAEVAEDLIAERYLFLICWSTLSGIGYSGGYEGLLNPDFADVNFFISFALSVSDDASSLLDANLPSVIFGFLKLLQSEILCGPSVLESWDFLRKGAWLSLILSLINTGFWGHQTSGKPDVDLQGKQVVQDAEIFGKSLLTFISENSGHCLHVLSSLLETYLHAFKEAFISFVVEKGRVCEDHCYPSWLLKHSAFDKSKHPLLFEKVGSNIGMLEPICDLSSRIDRVATKLGDGRKEYFLLKCLLHGFPVNSASNNSAILSCVLVINEIIYMLNGCIKIMQPNDRDLVDVGVISKLLSMIMTIKSDGMFTSIHKLCDSIFMSLIDQKDDLAGYSDLFVLKQLEGYLADINSKEIMDNEVKEIIVFTIVDLVEDLRSKTNVFKFFLGEAEGAPERANSLFALEQADMSVFIDVLDKCQSEQVNLKILNLFTDILGDGLCPDLKQKLQHKFIGMDVSCFSSWLEFRTLGHSMKIESTNSTTSGPTALRELTMDFLMRLTCPSSETLAKELQHHLFDSMLLLLDKAFMSCDLQIVKAHFHFIAQLSTDESHFKELFEKTLKLMENMVGNEGLLHTLKFLFTCVESVFGDAGSNRSALKRLSSKSSGNSFGSGSLIPKQLKNSDSLVLRTNQESNSTVDCDASSGEEDEDDGTSDGELVSIDRDEEEDGNSERALATKVCTFTSSGSNFMEQHWYFCYTCDLTVSKGCCSVCAKVCHQGHRVVYSRSSRFFCDCGAGGVRGSSCQCLKPRKFTGTSSVSPPVTSSFQPILPYHEDVEPVADSGSDFEDDISTEAENCIKLSVPKGFSDELPVFLKNLDVEVRMLELCKKLLPMILSQRELNLLKDRKVFLGGEMPMSQASDIFQLKKAFKSGSLDLKIKADYPNSRELKSHLANGSLTKSLLSISIRGKLAVGEGDKVAIFDVGQIIGQPTAAPITADKTNVKPLSRNIVRFEIVHLIFNPLVEHYLSVAGYEDCQVLTLNSRGEVTDRLAIELALQGAYIRCVEWVPGSQVQLMVVTNKFVKIYDLSQDNISPLHYFTVADDIIVDATLVPSSMGKLVLLVLSEGGLLYRLNVALAGDVGAKTLTDTVLVKDAVSMHKGLSLYFSSTYRLLFVSHQDGTTYMGRLDGDSSSITELSYICENDQDGKSKPAGLYRWRELIAGSGALACLSKFKSNSPLAVSLGPHELFAHNMRHASGSNAPVVGIAAYKPLSKDKAHCLLLYDDGSLNIYSHTPNGSDSSTTLTAEQTKKLGSSILSSRAYAGTKPEFPLDFFEKTTCITCDVKFNSDTTKSSDSESIKQRLSSDDGYLESLTSAGFKVTISNPNPDIVMVGCRIHVGNTSASNIPSEITIFHRVIKLDEGMRSWYDIPFTTAESLLADEEFTIVVGRTFDGSSIPRIDSIEVYGRAKDEFGWKEKMDAALDMEAHVLGGSSASGKSGKKAQTMQAAPIQEQVLADALRILSRIYLLCQPGFCTDTIDADMELNNLKCRSLLETIFQSDREPLLHSAACRVLQAVFPKKEIYYHVKDTMRLLGVIKSLPSITSRIGVGGAASSWVTKEFIAQIHTVSKVAVHRKSNLASFLETHAVAILNVTRKLGYAECLALHSNEKSGVSVAPAVALLKKLLFAPYEAVQTSSSLAISSRFLQVPFPKQTMIANDDAPDNHAKASAASNSTTGNAQVMIEEDPATSSVQYCCDGCSTVPILRRRWHCNICPDFDLCETCYEILDADRLPAPHSRDHPMSAIPIELDTFGGEGNEIHFSVDELTDSSVLQAPADRTIQTSPSSIHVLDASESVDFHGSMTEQRTVSISASKRAINSLLLSRLIEELSGWMETTAGTRAIPIMQLFYRLSSAVGGPFMDSTKPENLDLEKFVKWLIDEINISKPFPAKTRCSFGEVSILVFMFFTLMFRNWHQPGTDGSHSKSGGSSDLTEKGPVHVQVSTTTLQSSNDDHDKNEFASQLIRACSALRQQSFLNYLMDILQQLVHVFKSSSINGEGGSSSSGCGSLLTVRRELPAGNFSPFFSDSYAKSHPTDLFMDYYKLLLENTFRLVYSMVRPEKEKSADKDKSCKVPNTKDLKLDGYQDVLCSYISNAHTTFVRRYARRLFLHLCGSKTHYYSVRDSWQYSHEVKKLHKIINKSGGFRNPVPYERSVKLIKCLSTLCDVAASRPRNWQKFCLKHTDLLPFLMDNFYYFSEECIVQTLKLLNLAFYSGKDANHNAQKTESGDIGSSTRTGSQSSDSKKKRKGDDSSEGSSEKSCMDMEQAVVVFTGKDGDVLKRFVDTFLLEWNSTSVRHEAKSVLFGLWYHAKSSFKENMLTTLLQKVKYLPMYGQNIIEYTDLMTCLLGKANDSTAKQSDTELLNKCLTSDVVSCIFDTLHSQNELLANHPNSRIYNTLSCLVEFDGYYLESEPCVTCSCPDVPYSRMKLESLKSETKFTDNRIIVKCTGSFTIQSVTMNVYDARKSKSVKVLNLYYNNRPVTDLSELKNNWSLWKRAKSCHLTFNQTELKVEFPIPITACNFMIELDSFYENLQASSLESLQCPRCSRSVTDKHGICSNCHENAYQCRQCRNINYENLDSFLCNECGYSKYGRFEFHFMAKPSFSFDNMENDDDMRKGLTAIESESENAHRRYQQLMGFKKPLIKLVSSIGEQEIDSQQKDAVQQMMVSLPGPTGKVNRKIALLGVLYGEKCKAAFDSVSKSVQTLQGLRRVLMTYLHQKNSNDTDALPACSIPRSPSSCYGCSTTFVTQCLELLQVLSKHATSRKQLVSAGILSELFENNIHQGPRTARTLARAVLSSFSEGDADAVQELNNLIQKKVMYCLEHHRSMDISQSTREELLLLSETCALVDEFWEARLRVAFQLLFSSIKVGAKHPAISEHIILPCLRIISQACTPPKSDSGEKEPGMGKSSLMQAKNDDTVGHSVTNLSTSKTQSELSGKIPDGSRRRQDISLLSYSEWESGASYLDFVRRQYKVSQAVKGLQKTRHDSQKSDYLVLKYGLRWKRRACRKSSKGDFSKFALGSWVSDLILSSCSQSIRSEICTLISLLCPSNSSRQFQLLNLLMSLLPRTLSAGESAAEYFELLGTMIDTEASRLFLTVRGCLTTLCSLITKEVSNVESQERSLSIDISQGFILHKLVELLNKFLEIPNIRARFMSDNLLSDVLEAFLVIRGLVVQKTKLINDCNRLLKDLLDSLLVESTANKRQFIRACISGLQKHVKEKKRRTSLFILEQLCNLICPVKPEPVYLLILNKAHTQEEFIRGSMTRNPYSSAEIGPLMRDVKNKICHQLDLIGLLEDDYGMELLVAGNIISLDLSISQVYEQVWRKHHGQTQHSLSNASQLSAAASSVRDCPPMTVTYRLQGLDGEATEPMIKELEDEREESQDPEVEFAIAGAVRECGGLEIILSMIQSLREDELRSNQEELGSVLNLLKYCCKIRENRCALLRLGALGLLLETARRAFSVDAMEPAEGILLIVESLTMEANESDISIAQSVFTTTTEETGAGEEAKKIVLMFLERLCPPDGAKKSNKQQRNEEMVARILPNLTYGEPAAMEALVLHFEPYLMNWSEFDQLQKQHEENPKDETLSKNASMQRSAVENFVRVSESLKTSSCGERLKEIILEKGITKAAVGHLRESFASAGQASFRTSAEWTVGLKLPSIPLILSMLKGLAKGDLPTQKCVDEEDILPLLHALEGVPGENEIGARAENLLDTLANKENNGDGFLAEKIQELRHATRDEMRRRALKKREMLLQGLGMRQEFASDGGRRIVVSQPIIEGLDDVEEEEDGLACMVCREGYTLRPTDMLGVYAFSKRVNLGATSSGSGRGDCVYTTVSHFNIIHYQCHQEAKRADAALKNPKKEWDGATLRNNETLCNCIFPLRGPSVPPGQYTRCLDQYWDQLNSLGRADGSRLRLLTYDIVLMLARFATGASFSTDCKGGGRESNSRFLPFMIQMASHLVDGSANQQRHVMAKAVTSYLSSSPSTPESPVRLSALSGARGGSGSSEETVQFMMVNSLLSESYESWLQHRPAFLQRGIYHAYMQHKHGRSTLKLSADTSSSAVRSDEGSSADSNDSKRLFAIVQPMLVYTGLIEQLQQFFKKGKSSGTQKVGEKDGSSGGNLEAWEIMMKEKLGNMKEMLGFSKDVLSWLEDMTSSEDLQEAFDVMGALPDVFSGGHTTCEDFVRAIIHGAKS

SEQ ID NO: 20741 - protein, 881 aa, Oryza sativa
  Clone ID: TF_OSC401213j.C1.p57.fg
MSRRRDAAPTAREGERDLVVKVKFGGTLKRFTAFVNGPHFDLNLAALRSKIASAFKFNPDTEFVLTYTDEDGDVVILDDDSDLCDAAISQRLNPLRINVELKSSSDGVHQTKQQVLDSISVMSTALEDQLAQVKLAIDEALKFVPEQVPTVLAKISHDLRSKAASSAPSLADLLDRLAKLMAPKSKMQSSSGSADGSSGSSSGRGQTLGSLNIKNDTELMAVSASNPLDMHNSGSTKSLGLKGVLLDDIKAQAEHVSGYPYYVDTLSGWVKVDNKGSTNAQSKGKSVTSSAVPQVTSIGHGAPTVHSAPASDCGEGLRSDLFWTQLGLSSESFGPNGQIGGDLNSTCPPPPLFPRYPLQSLRADKSSIKGGCSYPPCICKSSTSKPENLSHYPVQSLQADRSLKGGHYFPPCTCKSNTSKPDNLSPVGLYGPYSEGSSCNRCPYRDLSDKHESMAQHTLHRWIQCDGCGVTPIAGSRYKSNIKDDYDLCNTCFSRMGNVNEYTRIDRPSFGSRRCRDLNQNQMLFPHLRQLHDCRFIKDVTVPDGTVMAPSTPFTKIWRIHNNGSSMWPYGTCLTWVGGHLFARNSSVKLGISVDGFPIDQEIDVGVDFVTPAKPGGYVSYWRLASPTGQMFGQRVWVFIQVEHPVKTSSNKQSAAINLNMPPEGSNTEWKHSVDANIQSADIVGKYSGSTITDPLAHALYHEATKPMEPELVSSAVPSVPRAFESVLVPATDLLTSSAGAEKASKPAATPGPAPQAVPLPKPVSIPASGPAPAPVSATTAAPVGAAAAPISEPTAPAAAIGMPSATARAASCLPTEPSSDHISAVEDNMLRELGQMGFGQVDLNKEIIRRNEYNLEQSIDELCGILEWDALHDELHELGI

SEQ ID NO: 20742 - protein, 152 aa, Oryza sativa
  Clone ID: TF_OSC100588j.C1.p14.gm
MPNLQRLKMEFNGSTVEQYNLENVGFKHLSGVKGYKRSWPTQCDGCKELGAGHRFKCEQCNSKPLASECGRACDACGDLMHGFVYHCFERGLDLHPRCARLPVRTANVKGYVMELRRVSACSRCCICMCGKEGYRNKFWSYRSSQEGQDINE

SEQ ID NO: 20743 - DNA, 4613 bp, Oryza sativa
  Clone ID: TF_OsC259_1
atggtggtttcccccaccgtttgcaatgtgaagttggggcgtgtcctcatagacgggggtgcaacccccccctcccctccacagccgcgttcgcatccgccgccgcagccgcagccgccgccgccgacgccgacgaggagaggaggagagggaaggcgagagggaggtaggtaggtaggcagttagccatgtcgccggcggagccgacgagggaggagagcgtgtacaaggcgaagctggcggagcaggcggagcggtacgaggagatggtggagtacatggagcgcgtggcgcgcgcggcggggggcgcctccggcggggaggagctcacggtggaggagcggaacctgctgtccgtggcgtacaagaacgtcatcggcgcccgccgcgcgtcgtggcggatcatctcgtcgatcgagcagaaggaggagggccgcgggaacgacgcccacgccgccaccatccgctcctacaggggcaagatcgaggccgagctcgcccgcatctgcgacggcatcctggccctgctcgactcccacctcgtcccctccgccggcgccgccgagtccaaggtcttctacctcaagatgaagggcgactaccacaggtaccttgcggagtttaagtctggcgacgagaggaagcaggctgcggagagcaccatgaatgcatacaaggctgctcaggacattgctctcgcagatttggctccgacccaccccataaggcttgggcttgcactcaacttttcagtgttctactatgagatcttgaactcccctgaccgtgcctgcaacctcgcgaagcaggcgtttgatgaggccatatcagaactggacagccttggtgaagaatcctacaaggacagcactttgatcatgcagctcctgcgtgacaacttgactctgtggacttcagatgccaatgatgatggtggtgacgaaatcaaggaagccgcagctccaaaagagcctggggatcagtgagatgaattcggacgccagtctgatgcaccatctgttgttgttggggcaatggacattgatgtcttcggctttcagtagctatcttctagtacacgaactgtcgtcgcaccatcgcggaggagacgatgatgttcttaaattacttaagtagttctgggtcacgcttttgttcagttgataaatgatggctggatcctggttttcttgttccacgatgccagccacaggaaaaaccctactattctgcactgttagaatgctgttatattaaccatgtttgacaagacattttcagtatgtttgtatgaccgtcttggaagtgtttggttgaacctgtctcagggtctttggtccaagacattattcacctggcttgcttaactcgttttagagaacaaaaagcgcgacgaggacaaccctcactccgcgcatccccaccctgtgtcgactcgacccgggagagagcagggaggagaggcccccgagccgaacggcggcccgaggcccccgacggtcagagctggccctctgcccgcttgtccgacggtgccaggcgcccccgacccccaggatggccccggggccactgcgggaaggccgcgcctgtcgccctctgaccccgaggtcgtcggcacagaagtcgagtgcgcccctggtggcctctcggacgaagagcgccctggagatgcggcccctggcgaagaggatcggccccgccgaaaggtgcagcggcccgtctacttcgttagtgaggccctccgggacgccaagacccgataccctcaggcccagaagatgctttacgctattctgatggcttcgaggaagttgcgccattatttcctggcgcatcgggtctcggtggttacgtcttaccccctcggccaaatcttgcataaccgagagggtactggacaggtggtgaaatgggcaatcaaactctctgagttcgatttgcactttgaaccacgccacgcgatcaagagccaggccctcgccgactttgtggcagagtggaccccagctcccgagcccgtctccgtcctcgaggccagctcgggcccctcgcagctgcctcacaccgcctactgggtgatgcagttcgacggctccctatctcttcagggcgccggtgcgggggtcacgttgacctcgctgaacggagacgtcctcagatacctggttcgcctcgactttcgggcgaccaataatatggcggagtacgagggactccttgcgggactcagggtggcagctggactggggatccgccgcctgctggtgttaggcgactcccagctggtcgttaaccaggtctgtaaggagtaccgacccccaccgggcgcctttgaagaaaggcttgcccagccgtcggcgcgacccgaccccctaggggagacggacgcgcctgaacggcccccgaggcccgtcggagtccaggcctcgggacccgatgggagcgttcccagctcccttagattgattgcttggatcgctgagatccaggcgtacctcgcagataagactctacccgaggaccgcgaagggagtgaacgcgtccagcgcatctccaagcgctacgtgctggccttgcagaccatacctctttcgtggctgtttgctgtctgggggctcgatatcctgggtccgtttaggcgggccccgggcgggttcgagtatctgtatgtcgctgtcgacaagttcactaagtggcccgaggcttatccggtcatcaagatcgataagcactccgcgcttaaattcatcaggggcatcactgctcggtttggggtgcctaaccgtatcattacggataacggcacccagttcactagtgagctcttcggtgactactgcgaagacatgggcatcaagctctgcttcacctcccccgcccaccccagaagcaatggccaagtggagcgcgccaacgcggaaatcctcaagggcctcaaaaccaagaccttcaacatcctcaagaagcacggcgactcatggatcgaggagctgccagcggtgctctgggcgaaccgaaccacgccaagccgagcaaccggggaaacgcctttcttcctcgtctacggcgcggaggcggttctcccatctgagctcaccctgaggtcccctcgggccaccatgtattgcgaggctgatcaagatcagcttcgcagagacgacctcgactacttggaagagcgaaggcggcgcgcggccctccgagccgcgcgctaccagcagagcctgcggcgctaccatcagcgccacgtccgggcccgatcactctgcgtcgacgacctcgtcctacgccgcgtccaaacgcgtgctggactgagcaagctctcaccaatgtgggagggtccgtatcgagtgatcggtgtcccccggccgggctccgttcggctggccatgggcgacggcacagagctgcctaacccgtggaacatcgaacaccttcgtcgcttctacccctatggaaccatgaatagagtacccaccagttggggttttgtttattctagggtgaacaaggttaccactttggctccggcgtttatgttgtgggtcttgtgcgggtaccgtgtgcccacgggatccgtgtgggcccagggttccccaagaggggaaggctctcggtcgctttttggagcgcaaagggccggcacgcggttgcattggcggaacggcccggttgccgtggaccgccaacgggtccgggcgagtggacatgcggggcaccaaccggtccagcaacggcgcttcgtcgtcgtcgtcaaaagattccccacgttccccgtccccaccaaagccgcgttcgcatccgccaccacaaccgcaacccgccgccgccgacgccgacgaggagaggaggagagggaaggcgagagggaggcggagcggtacgaggagatggtggagtacatggagcgcgtggcgcgcgcggcggggggcgcctccggcggggaggagctcacggtggaggagcggaacctgctgtccgtggcgtacaagaacgtcatcggcgcccgccgcgcgtcgtggcggatcatctcgtcgatcgagcagaaggaggagggccgcgggaacgacgcccacgccgccaccatccgctcctacaggggcaagatcgaggccgagctcgcccgcatctgcgacggcatcctggccctgctcgactcccacctcgtcccctccgccggcgccgccgagtccaaggtcttctacctcaagatgaagggcgactaccacaggtaccttgcggagtttaagtctggcgacgagaggaagcaggctgcggagagcaccatgaatgcatacaaggctgctcaggacattgctctcgcagatttggctccgacccaccccataaggcttgggcttgcactcaacttttcagtgttctactatgagatcttgaactcccctgaccgtgcctgcaacctcgcgaagcaggcgtttgatgaggccatatcagaactggacagccttggtgaagaatcctacaaggacagcactttgatcatgcagctcctgcgtgacaacttgactctgtggacttcagatgccaatgatgatggtggtgacgaaatcaaggaagccgcagctccaaaagagcctggggatcagtga

SEQ ID NO: 20744 - DNA, 589 bp, Oryza sativa
  Clone ID: TF_LIB3434-064-P1-K1-F6
aacttctttgtgacaatctgactctctggacctctgacaatgcgcaggattgtggggacggggtcaatgaagcggtgagttctgaatgtgacggccattaatctgttctgaatcctatttctgactccacttatcttatttctctgctggattactggatcataagtattattacgattaatcgttatgtgtttttataacatttcggttttgtacttctaaatgctgtctgttctatcacctcatgctcatccctttatctcattatattctttttgtgattcttctatcttctatcctttactcttccacctcttcctcgctcttctcccatttttttccttttcttcttccttactttctttttctcctcccttcattccttctttccctcttgccttcttccttcttctccactccccttccttttcttccctctttttcctaccttattccttttctctttccttcatcctttccttcctcccccttcactcctcttcccttcttctccctcttccctttttccttccacctctttttatctttcccttttttctcttcattcttttacttctcttcttcttcc

SEQ ID NO: 20745 - DNA, 461 bp, Oryza sativa
  unsure (1)..(461): unsure at all n locations
  Clone ID: TF_4879985
ctccctccgctcctccgctcctcgcctcttttacccgctcttccccccgatctccccggactcccacagccgcagcgaacaaatcccgcgcgggttgggaagagcgagctcgtgaggagagcagagggaaagcgcgagggggaaggaggaggaaaggtgcacaaggtcagactaagtttgcgttgaagaacaaaggagaggaaaaatgtcgcctgctgaggcatcgcgtgaggagaatgtgtacatggcaaagcttgccgagcaggcttgagcgttacgaggaaatggtcgaattcatggagaaggtggcaaagaccacttgatgtttggtgagctcaaccgtttgaggaggccgggaanccttgcttttttcttgtgggcttttaccaaagggaaccggtgatttnggtgcttccgggaggggcaattcgttgggaggggttccancctctttctatttt

SEQ ID NO: 20746 - DNA, 551 bp, Oryza sativa
  Clone ID: TF_uC-osroM202032b04b1
ttatttggcttctaacacaccaattcgtcgaacacttccgatcgtcttctctgtctccgtgtgagtattgacctcaggcgccgcgacgtctgcaagagtagtcagattcaggagatgctcgttgggtagagcggatcggagagtcactgtcacagtagcgcttctgctcttgcttctcggatcccaccacccaagaagagctttgctttgctcccgttccactgccagtgccagccatggcgccactcccaagctccagctcaacgcgggccacctctctcgtggcgatcccgggcgcctcctgcccccatggccaggcgcaacgcctgctcgccttccgttccccacgacgcgggtcacagtggcgcgggctttgcgtgtcccgggggcgccaaggtgcgaccgttgccatggcaatgacaggtcgagacgtcgtacctgcaacatgaaacgcgactactatcagtacctcgacactttaagactggagctgagaggaaggatgctgctgagaacaccatggtggcatacaaagccgctcatgatattgc

SEQ ID NO: 20747 - DNA, 704 bp, Oryza sativa
  Clone ID: TF_OsC20576_1
gaagggtgactactaccgttacttggctgaatttagcactggaactgaaaagaaggctgctactgatcagtcccttatggcctatcaggcttggccttgcgctcaacttttcagtcttcttgagataatgaactctcctgagagagctagccaagtggcaaaacaagcacttgatgaggctactgctgagattaactctgctggtgtggagggttacaaggacagcatgcttatgatgcagctcctgaaggagaacctggcattgtggacatcagaactaactggaggtgaaacatctaaggacgatgatgttgttatggagggctaactgtctgaaatgttctaaaggccccagcatgtgagcaaaacaatcagtaacattgtaacaatactgctactgaacttgcgacatttatcatgggagccgtggaaatcacctttatttttccctttcttctgtagtttctttttttttggccctcgcttgggtcttggtgtgacccccaaagtattttcagagtttggatttgataaccatgcaccagctttggttatattttgagatcttggagtggtcaccaacccagctttaatattagtttgagagtacttttttttccaatgcttgttaagcatctttgtataccaacgggatgatgaactatatatctcttaatgatgacgaaataaacgtctcttttgtt

SEQ ID NO: 20748 - DNA, 360 bp, Oryza sativa
  unsure (1)..(360): unsure at all n locations
  Clone ID: TF_11118254
gcatccgccgccgcagccgcagccgccgccgccgacgccgacgaggagaggaggagagggaaggcgagagggaggtaggtaggtaggcagttagccatgtcgccggcggagcancgagggaggagagcgtgtacaaggcgaantggcgganaggcggagcggtacgaggagatggtggagtacatggagcgcgtggcggcncggncgggggncgcctccggcggggaggagctcacggtggaggagcggaacctnctgtccgtngcgtacaagaacgtcatcggcgcccgccgcgcgttcgttagcggatcatctcgtcgatcgagcagaaggaaggaagggccncgggaacgacggcca

SEQ ID NO: 20749 - DNA, 265 bp, Oryza sativa
  unsure (1)..(265): unsure at all n locations
  Clone ID: TF_2442689
ctggtcgcccccanccactcacaggctcaactcaactccacccgaatccgcaagagagatagaganatacgatggcggcggcggcgggaggagggacgagggaggagatggtgtacatggcgaactggcggacaggcggagaggtacgaggagatggtggagttcatggagaangtggtgacggcggcggcggcgggccggggttgggagctcacggttgaggagangaacctnctgtcgtggcgtanaaaaacgttatcggcgc

SEQ ID NO: 20750 - DNA, 328 bp, Oryza sativa
  Clone ID: TF_uC-osroM202039c12b1
tctatttgcttttgcatccacaagaccactcgaacgggctctctatatccgccgacgggtctcgactaatcacttaggtggtcacaacgccccccgaggagattgtgtacatggtcaagttcgccaaccacgctcaaaggattgaggtgatccgtgagtacgtgctgcacggtggcaacactgtaggtgcccacaagctcactgtcatggaccgcacccttttggctgttgcctacatgaatgagattagggcccggcaggcctcctggctcatgagactaattctacagacacacagggtggccggcaacctggcctgaagaacatg

SEQ ID NO: 20751 - DNA, 337 bp, Oryza sativa
  Clone ID: TF_LIB4370-040-R1-K1-G5
ggtcgcccccacccactcacaggctcaactcaactccacccgaatccgcaagagagagagagagagacgatggcggcggcggcgggaggagggacgagggaggagatggtgtacatggcgaagctggcggagcaggcggagaggtacgaggagatggtggagttcatggagaaggtggtgacggcgggggccctgtgcggacctcgccagctcactgcgccggacatggagctgctgtcttctgcctacggccacgcgactgtgacgaccctttcctcggtttgcgtgctccgcgtccttgctcgccatgggtgccgccgcttaccagttctctagg

SEQ ID NO: 20752 - DNA, 314 bp, Oryza sativa
  Clone ID: TF_uC-osflcyp073d07b1
cacaaatcccgcgcgggttgggaagagcgagctcgtgaggagagcagagggaaagcgcgagggggaaggaggtggaaaggtgcacaaggtcagactaagtttgcgttgaagaacaaaggagaggaaaaatgtcgcctgctgaggcatcgcgtgaggagaatgtgtacatggcaaagcttgccgagcaggctgagcgttccgaggaaacggtcgaattcatggagaaggtggcaatagaaccacctgatcggttgtgtgagcctcaacccgttagagcgaagccgggaaacctttgccttttcttgatgggcttt

SEQ ID NO: 20753 - DNA, 149 bp, Oryza sativa
  Clone ID: TF_LIB3434-001-P1-K1-E7
tactcataacggactaccggaccgcgagctagacttacctcactacgaggtgggacggtattctaaagctgctggaatcccagcttgttccctcaaacagaggggctgcgtccacaggttcctacctcaaaatgaaaggtgactactac

SEQ ID NO: 20754 - DNA, 653 bp, Oryza sativa
  Clone ID: TF_OsC20576_2
atgaaggagagggagaaggtggtgcgactggccaagctcgccgagcaggcggagagatacgacgatatggtggaatttatgaagacacttgctaggatggatgtggatatgagtgctgaagagaggcttttattttcagttggttttaagaaaactattggtgccaggagagcatcatggagaatccttgaatcacttgagcagaaggtgacagctggtgaccaaccaggtgtaacaataaatggctacaaaaagaaagtagaggatgaactaagggcagtttgcaatgaagtattatcaattattgctattcattgccttccattggccaattcgggtgaaaatgtcgtgttcttttataagatgtaggtgcaggttttaccaaatgatgctgaggtttcatatggaactgaaaagaaggctgctactgatcagtcccttatggcctatcagcacgccatggttggtgcctgcagtgagctttctcctgcccatcaattgaggcttggccttgcgctcaactttggagacttcttgagataatgaactctgctgagagagctagccaagtggcgaaacaagcactagatgaggctactgctgagattaactctgctggtgtggtaggttacaagggcagtgtgcttatgatg

SEQ ID NO: 20755 - DNA, 741 bp, Oryza sativa
  Clone ID: TF_LIB4309-008-Q1-K1-A8
gccaatctggagaaggtggtgacggcggcggcggcgggcgggggtggggagctcacggtggaggagaggaacctgctgtccgtggcgtacaagaacgtcatcggcgcgcgcagggcgtcgtggcgcatcgtgtcctcaagatgaagggcgactaccaccgctacctcgccgagttcaagaccggagccgagcgcaaggacgccgccgacgccaccctcgccgcctaccaggccgcgcaggacatagccatgaaggagctgtcgccgacgcaccccatcagactgggccttgcgctcaacttctccgtgttctactacgagatcctcaactcgcccgaccgcgcgtgcacgctcgccaagcaggccttcgatgaagctatttcggaactggatacccttggggaagaatcctacaaggacagcaccctgatcatgcagcttcttcgcgacaatctcactttgtggacttctgatatgcaggacgatggaggtgatgaaatgagggatgcaaccaagcctgaggatgagcactagctaaagatcctagtgacagtcgtctgtctcttaaccgctgggggtagttatgatgcttgtacaaggaccattttcttgtgtcctttcgtcgggtctttgcttaccctttgtttacttatattgctatcgccatcctcatgtattatttggtactttcctgctggaatctgctcgtgtgtgggagagtgccctcagccctttactagga

SEQ ID NO: 20756 - DNA, 625 bp, Oryza sativa
  Clone ID: TF_OsC327859_1
gattttgtttatttgtattcaatcatgttcgaagattgaaatattatatacatccttttttaggggttacaggttaaattaggtttagattcgaatttcgcaagaccaagaatttactcgtccttgtcgtccttgtcgtcaccaccgtccttgtcgttgtcaccttgaccgtcgctggtccacaaagtcaagttgtctcggagcaattgcataatgactgtggagtccttgtaagagtcttcggtgaggttgtcgagctcagcaatggcgtcgtcaaaagcttgtttagcaagttggcaagccttgtccgggctgttcataatttcgtagtagaaaacagagaagttaagagcaaggcccaatcggatggggtgagtagaggccaactccttggtggcaatatcagaagcagattggtaagcacccaaagacttgtcagcggcgtccttgcggaggtctccagccttgaactcagccaatatctgtagtagtcacccttcattttgtagtagaaaaccttagcctcgttggattgagcggcggggatgaggtgcttgtcgaggacgttcaaaacgtcttggcaaatgccggaaagctccggtcttcaaccttggttctgtttgag

SEQ ID NO: 20757 - DNA, 227 bp, Oryza sativa
  Clone ID: TF_LIB3431-002-P1-K1-B6
gctgtgacgagcacacgcgtgcgcacacacatccgggtatgaagtgatggtggagtacatgtaaatggttgcgaacactgcctatgtggaagagctcactggagtggaacgcaacctcttggctgctgctgacaagaatgttaatgcagcccacagagcgtgctggcgtattgccttatccatcgtacaaactgaggaagggcgtgccaatgaagaacatgttactc

SEQ ID NO: 20758 - DNA, 290 bp, Oryza sativa
  Clone ID: TF_uC-osflcyp002e09b1
tcgttaaaatgtagactgctgaggcatgacgagaggagaatgtgtccatggcacagcttgacgagcatggtgagcgctgcaaggaaatggacgagttcattgctaacgtggcacttaccactgatgttcgtgagctcacgctggtggaccggaacctgctttttgtgtcttacaagaacgacattggggctcaggacgcattgcacaagagcatctcttctattgaccagaaggaggacagcacgtggaacgaggcctatgtggcatcaattaacgacctccagctcagg

SEQ ID NO: 20759 - DNA, 723 bp, Oryza sativa
  Clone ID: TF_14571301
tcgatttcgagcgccgcccgggcaggtacatggcaaagcttgccgagcaggctgagcgttacgaggaaatggtcgaattcatggagaaggtggcaaagaccactgatgttggtgagctcaccgttgaggagcggaacctgctttctgtggcttacaagaacgtgattggtgctcggagggcatcgtggaggatcatctcttctattgagcagaaggaggagagccgtgggaatgaggcatatgttgcatcaattaaggagtttaagtcaggagctgaggggaaggaagcagctgagaacactcttgtggcatacaagtctgcccaggatattgcactcgctgacctgcctacaactcacccgataaggcttggacttgcactgaacttctcagtgttctactatgagatactgaactcaccagaccgtgcttgcaaccttgcaaagcaggcgttcgacgatgctattgctgaactggacactcttggcgaggagtcttacaaggacagcaccttgatcatgcaacttcttcgtgacaatctgactctctggacctctgacaatgcggaggatggtggtgacgagatcaaggaagcagcgaagcctgaaggagagggccactaatctgtcctgaagtctatttctgagtccatttactcagctacctgctgtattactggatcataagatgtacctcggccgcgaccacgctaatcactagtga

SEQ ID NO: 20760 - DNA, 463 bp, Oryza sativa
  Clone ID: TF_uC-osflcyp077e11b1
gttctacctgaaggagaatgacgtcttccacaggggcattgatgtggccaagatgggacttgaactgaaggatctggttgacatcactgtagagacatacaattctgccgatgcatttgggcttactaacctgactgcaacttacatgctaaggcatgtactaacactatactactcagtgtacgactatgatatgctgaactctccagacctggattgtatacttgaacagcaagcgtccgactattgtattggtgttcttgacactgttcaaaatatggcctacttggacagctcctcgaacatacaggctatgtccatcaagctttctctatggaccgctcgcatttctgaagatgtgcgtgtcaagaccaggtgagcagagaccacattctgagatgatcaatagtctagactgacacttatgtacgcgatcgttgactcaggttcattgcagatcact

SEQ ID NO: 20761 - DNA, 279 bp, Oryza sativa
  Clone ID: TF_LIB3431-007-P1-K1-B4
cccacgcgtccgcccacgcgtccgcccacgcgttcgcccacgcgtccgcccacgcgtccgcccacgcgtccgcccacgcgtccgacctgctgtccgtggcgtacaagaacgtcatcggcgcgcgcagggcgtcgtggcgcatcgtgtcctccatcgagcagaaggaggaaggccgcggcgccgctggccacgccgtcgtcgcgcgctcctaccgcgcccgcgtcgaggccgatctctccaacttctgcgcggggatactccgcctccttgacgagcgcc

SEQ ID NO: 20762 - DNA, 334 bp, Oryza sativa
  Clone ID: TF_LIB3431-058-P1-K1-E2
ggaaggcggaggaacggtgcacaccgtcatcactaagtttgcattgaccaacatacgtatcaggaaaagcgtcgcctgctaacgcatcctgtgaggagaacgcgtacatggcatagcttgcctacccggctgagcgttacataggaaatgcgtcaattcatggatatggcggcaaacaccactgatgtgctcgagctcaccgttcaggagcggaacctgctttctcgggcttacaagaacatgacttgtgctcggatggcattgtggaggatcatatcttctattgagcaaaaggaggacagccctaggcatgcagcatctgttgcatcaatta

SEQ ID NO: 20763 - DNA, 278 bp, Oryza sativa
  Clone ID: TF_uC-osrocyp028c02b1
gcgttttcgagcccgacccgcctgggcttcgccggcaacaaagtgactcataactaggcaaaaatgcatcggcaggagaatgtttacatgggcaagctggtccagcaggttgaagggcatgaggtgatggccgtgaacatggagatggttgcatagactgtacattaagaagagctcactgcagtggaatgcaacctctcctctgttgcttagaagaatgtgattggggcccaccacgcctccagagatgtcgatttattcagtgcacactatgagga

SEQ ID NO: 20764 - DNA, 490 bp, Oryza sativa
  Clone ID: TF_LIB4309-032-R1-K1-D2
cgcccttttcgcgaggagacccacgccgaaacgcgaggtgacgcacacagagacatggatttagaggagatatgtacagctctagagaggctttatcggtgaggcagagtggggccatggccagaggagattgggaacccgggcgggccgactggacgggccgagaggtgcgaagagagggccaaactgatgactaagagaccttttttttttttctgcagacctcagcgtggtggataccagactgcgtaggggaggcctacgagcctgcgagtgcagcccgtcctgcgttgtgcagcatgatgacctccgtggtgccgaaggacgaaagccacggatacgaggacagcgtggcacgtatgagagacagccgagcaagaatcgagactgagctctccagctgttgggatggcaccttgaacctgcttgcactgcaccttggtcccatgtcctctgcccctgagtgcaaggtgtcttccctcggaacgat

SEQ ID NO: 20765 - DNA, 2207 bp, Oryza sativa
  unsure (1)..(2207): unsure at all n locations
  Clone ID: TF_OsC2845_1
ttttttttttttaaaatnttgctgatatggccgggcttaaccaatacgaagttcagaatagcagaccagataagacactaaagacaaattcaaccatgaatattgatccctgcatgtttcttgacattcgacatcagtcacctgcagctcgtcgaaatcttcaaatctcccactcatccttcctgttagatcagaaggtatcatcacaccaagtattgccctttcaatgatttcagctatgccgccgcatttcggcctttcttcgacttactcttgttttcttgtgtcttctttttcttctcttctggtgtcgtccacacataatcagcagggatgacaaatgggtcctggatgtcctctacacggctgctggggcctggagctgttgagaagttctgatggtaaggagccttgatccattgaatccaagaacttgaggaagactgcgccactgggctcttgctattgtcagggctggatggcggtgtggtgaactcctctaatggctgtagctcttcaaactttgtgaatgtcacaagtaccctgattgtgggtacaactgggatggcaaccttgactggaaaagttcctggtggcagttttgttgtaaggagatctctcaagcgacggatcgccttcaccttgttcgcaagaatatcaagcagtggcaagagctcctcagtccgaagagggaagttaggagaaagccagagaacaggccttagacctttcttgtactcgctttctttgctaccttctttgcgcctatgtccacactccgacgaagcagcaggtctccgataatccctttccttgccccttctgctctcatcccctcttactacatctaccgaatgccttcctggcctagtttgtacattcgatggagattcaataaggatatcgctcaccttctcatctacacagagcgaactccttggaggtgccatcttcttcgtcccctctagcttgctactctgaaccctctttccccaatgaccaaaccaacctttcttatcatgtttactatccccatttccggagatgctcaaatcctcaattggtatctctctctccctcggctcaacacagctatgtcgaggaccaacaaacgtgtcggactggccttcaccaccagcaccatcaggagagtccatcttaagcgcggcttccaactgcttcttctcctcttcagtcaaaacatcgtcgaagccctcgctctcggtatcgttctcgttgcaagccgagaagaattcctcgtccgtcatcgcgccggggaccctccttgatttgacactgaccatcacatggtgcatgtcatacaccttggccttccatggcccaaccgactcggtcctctcctggcgccgccatgtgagctgcgggagcagcacggcctgcgtgacgtctattccggggcggaagatgttggtctgcgacatggcggtgacctcctgctgcacctcggcctcggaggcgggcgcgccagagccttccagggcgttcatcacctccttgtccttgtggttgatcatgcagagggagcccgggggcaccttgccgtcgtcggagccctcgccgaggaagagtatggtctggtcggagcgctggatcttgaagccgtcgaagccggcgagggtcatgtcggcgcggaggttggcgccgcgcttccagacccggtaggtgtcggagggggcgatgcgggagatgaaggggatgacggagctctcgaagtggaaggtgatctccatgtagaagtcgcgcatgcggcgcatggcggcgacgacgcgggggaggcggcggcaccacttggcccaggcgagcggctggtagtggcggacgatgacgcgggcgagcgcctcctcgcgggcgcagatggcctcctggagcgcgctccacccttgctcgttttgcaggctccagtccgcgcccgccgccatcagcatctccgccgccgccgcgtcgcccaggcggacggcgaggtggagcggcgtctcccgcccggggacgtcgcgccggtcgatgaccgccgacgccgcctccgcgcgcgcctcctccgccacggagtcggcctccgtccggatctcctccggcctccgcgccctcggcagcgcgtccagcacccgccgcagcgccgcgtggtccctcgtcgccaccgcgtggtgcgcctcgctgtgcgcgtacctcgccgcgtccacaccggccat

SEQ ID NO: 20766 - DNA, 728 bp, Oryza sativa
  Clone ID: TF_jC-osroLIB3475P018b07b1
gttgtcaccttgcaatggcgatggcgtcgagcagtggagactggagagccatgttctagctcggccacgcccacgcccacacccacggcagcaaccatggatgccaaactgacggtggcaactagctagcttagctgtggtgattgccagcaactattgagcaatcaagactctaattcttcgatggtggcgtcgggcaacaacacggcagcaccgctggcgaatacgctcccggcggtcattaatcccctactgctagcaacggcctgcactggctctcccaagggactggatcttcttctcaacagcaaggttgcagcaggtgatcaacgagtgctaccattcgcacttggaagccagagatttcgtgacctgatatcagcatatacctccagcgacagatcctccttagcgacgccgacgcagcgaatccctcctcatgacgacccagaagcacttttggcagagatgctgatgctggaaggggtcgcagttgatggggacaccgtgcttcacgcggtggccacctatggcgagaatgatgactttcagaagtgtgctcaaactatgtgcagcaaggcgaggcagctcctcttcaagcaaaacaagaacggtgacacgcccctgcactgcgctgcacgggcaggtaaaatccaaatggtctcttgcctcattgatctggccagaggcggtggcggcgacggcaacagcagcagcagcagcagcaa

SEQ ID NO: 20767 - DNA, 1494 bp, Oryza sativa
  Clone ID: TF_OsC311016_1
ggcacgaggattggaggagggtagggaagcttcggtctcttcgttcgtcgtcagtggcgattcccgcaccccccctccctccggccgcaaaagtcaatgccaatgcaaacaaccgacaaaactgatgctgtgaaatctatgctttccggagagaatagtgaaggctcagatggatcaaagtcatcggacacagttgagtgggacccatgggaccctccgcatcctccttgtcctactttgccacccacagcaagccttatgagccaagtggaaatggtcaaacagcatcattttcaagtactggccgtacttgctgcttccagggccacaaatataattgccccagaccgtactcctcaggaggtgcgccgtaaatttgctgaaatatgcaatgaactggcggacatccttgaaaaggacagtgttcggagattcctcaacttgtacagaagaaatatgcgtatcatgggttggggtctggtcatcacatctcaaacaatgaacttcattgtttcattcaatgccctgcgttgtgctaaggttgtcttggagggcaaggcacctaagctttgtcagatccgtgccaaccccaactacatgactagctatgggtacttccccctccacaaagctgctgaaaaattctcagttgacatgattaagttgctgctttgttatggtgcatcggcgaatttacgcacatcaggccaaaaggtcatcgagggcctcctcccactccatgttgccattgagaacacttgcatgcacaagtatctggaggacaatctattaactgaccggaagctcaagcaagtggatcttgacttcatctacaagctcatccatctgctttgtctgcctgagatgaagattttcttggacacgacaagactgcttgcagataacacagataatattgttgatgagctatggaactacatcaaggaggggaggcttgtccatgctgctattttgctccttgcagctcaacgaaaaattcgtacctgtgcttcctctaatagaaacatcagctgtaacctgaatggatttgatattatcagggatcgtgttatgggatccatagtttccatagaaagggaagggcgtggattaacaagtggtaaaaatagcaaggcacataagcagctggaggagaagcggaaattttttcataattcattgatgctcatttttgtaatttcgaaaaccggtgaagctcttgatgagtatatccagtctcattcagaggtctctcatcaggaggtgcttgagggtgtttcatcaattctcgatgatcatggttttgctcctactggaaaagggatcagcataggagacctggaatgccgtccctatgactgcaatgcgtcgaatagtgtgccgaagtgcaactatgaagattctggtacgaccaaggcagttggagaatctcctaatctgaatgttaaagctaaaaaatctgcaccagtagttatgctttatggatttggctga

SEQ ID NO: 20768 - DNA, 1395 bp, Oryza sativa
  Clone ID: TF_OsC180673_2
atggcccgcaatgctcgctcccataattgcactgtcctggagcccagggatggcgccgccgctcggcggctacccccggtgactccacgcgtcggttcctccagggacgcggagaccggcgtctacgccttcttcgaggaggatgcgggcgagcttgatgtcgcttaggcaggtcgccgtcattctatatcgagggtgtgtgatctaacgttcctggacgactgttcatagccctgcgatgacggcttgttagcaatgagatcataaccgacggaggcgctcagcttgcacttgaaggtcgccgactattccaacgtttgaattcatgattatgcagttagtcgtcttttcatggacagtgtgaaggacctttttgcagatgtttatgttcccgaatagcctgagggtagtggatatattgcaatatagctaacagatttttgagaaaacttggctggaaaaaaaccatcgttggcttgagtgtcgccattccaagcattaaaatatgattatcaacactgtcccatggtataggaccagtggttcattcacaaccgggccagagctacccatatttattttgtgttagtacttagttgttcagtcgagtgttagtttcgggaaaagttaaaaatggacccctacttatactatggatgctatgtattgtaaaaaaaaaaaaaaaacgggaggaccgcgatgtgcgcgtacatggtcgaggagctccaggtggacatcgacgccgccgatgagttaggcataacgcaactcgatgaggctggtgctgatgttaagggtgttggtacttttacccccttaatagttgctgcaactgaaggcttaactgatttctataagtgcttactggagggtggtgctgatcctgatgtgcctgataaagttgaccctttcttcaaaataagaccagctgatctgaagttggaaggaaatagggcatacatgagaaaagactatcttactgccgcaaaactctacaatatggccgatgggcggcggcagcaggcagcggcagcgacagcagcagcactaagcggcgtcggcggcagcagcagcaacaacagcagcaccagcaccattaccaggaggcggcaccggctacaccatcggcagcatgtgacggcggtagcatgtagcagcaacactacatcaacagcagcagcaacaaccagcaaggaagactgtggaactaggatattgcgccctgattggcccaagggctgctacagggaagggaccgctcacatgttcatgaaggactatgaaaaggcctgcaatgcatttcttgatggtttcaaactggacccagcgaatattgagattgaaaatgcgctacgggaggctttgaaatcattgaaggcgtctcgtgctgcttga

SEQ ID NO: 20769 - DNA, 1389 bp, Oryza sativa; identical to SEQ ID NO: 10871
  Clone ID: TF_OsC335757_1

SEQ ID NO: 20770 - DNA, 2274 bp, Oryza sativa
  Clone ID: TF_OsC77260_1
aagcaagcatgtgcattgagcttcctctttgcgagaaaatcactgccagattcgagggttttcgtacaacaggaggggaagtgctacagctaaaaagccccccacaaaacacatctttaacaacaacagggccgtatcatcatgatcatcaaacatacatccagctggaagaagaaaataagggggcaaaaaatagaattgaattacagattagcggggtatatagccatcctgtacttcctcgaggagatccaatcaactacgcgttctccagagcacattatcaatctatgctgtcaggtgcgcagcacagctgacatcaacatctaacatctctgaatgaaaggtgacctgctatgtggcgaaacttttttactcctcaaagccatccatcatcgggtgacctccttccgacgaggtgcttttcgatgattgtttccgagttgagccccgcctgttcttggctttctttgccttcatcctccgtttcttctcgttggcatcaacccaggtgtagtcagaaggtatttggaatggatcaacctcatctttccagttacggctatcaccactatcactggactgtgcaccacgcccccctctaacccacgaataccatgagcctgatccttctgattctttgcccttggcatcctggaattgcgttgggcttgagggtggggtagcaaactcatccaaaggttgtaattcctcaaactttgtgaatgtcacgatgactcgtattgttggaacaataggtatcgcaatcttcaccggaaatgtgcctggaggcagtttagtagtcaagagttccctaagccttctgacagctttcactttgtttgctaagacatcaagcagagggatcagttcatccgtcttcaaagggaaatctggtgtcagccacaacactggtcttaaccccttcttgtattcactttcatgtttagtagaatcccctgatgatgcacccttcttcttcttgctgctgttcttctcctttccctttcctaggtcacctgattcatccttactcccttgattcgccttggatggtttctcgtcattcttggtgcctttcttgccaccccaaccaaaccatcccttcttatcttttgccacgccatttgcatccaaatgatcagccccgccatcaccttcctcgcacctctcctcaaattcttcttcctggttccccattctcaacgcagaatcaagctgtttcctctcttcggctgtcaacacttcatccagctccgcgtcaagttcagtgcccctcccattcttctcctccccctccatcgcaaacagctcctcatctgtcatcgcccccggcacacgccttgacttcacagtcaccagaacgtttaacatatcataaaccttagctttccaatgtccaacggcttccgtcctctcctgccggcgccaattcaaatgaggcacaagctctgcctgcgtcacgtcgatcccgggacgatacatgttcgtctttgacatcaacgccacctcatgtgcgacctcggcctccgttggttgcacccctgctccctccaatgcatctgtgatctccttgtccttatgagccagcactatgagagaacctgggtgcaactctttgcccccagcatcctcaggacgagcaccatccccgagaaacaagaaggtctggtccgaacgctggatgcggaagccgtcgaagccggcaagcgtcatgtcggcacgcagcgcagctccacgcttccaaatgcggtaagtgtcggagggggcgatgcggccgatgaagggtatgacggaggactcgaagtggaaggagatctccatgtagaagtctcggatgcggttgatggaggcgaggacgcgcgggaggcggcggcaccacttggcccaggcgaggggctggtagtggcgcgcgatgatggtggcgatggcgtcctcccgcgtgcagacggcctcctggagcgcggaccacccgtcggcgttctggagcgaccagtcggcgccggcggacatgaggatgtcggcggcgacggggtcgcggagccgcacggcgaggtggagcggggtctccctccgcggcacgtcgcggcggtcgatggcggcggagaccgcgtcggccacggcctcgccggcgatggactcctcctcggtggccacctccccggcgcgcgggaggcgcgggagccccgcgaccaggcggcggagcgaggcgtggtcccgccgcaccacggcgaggtgggccgggctgtgcgcgtacttggacgcgtcctccat

SEQ ID NO: 20771 - DNA, 2439 bp, Oryza sativa
  Clone ID: TF_OsC3800_1
gcttccgggttgccctctgggcccccatcgctggccctcggggtgctttggctggtgggcgttcgttcctgatgaacaacatgaatcttgcatggttaataacataagacagactttttttttttttttttttttttgatgcccaaagatatatatgaatatatatcgagtaaaataaaaactcttgttggaattcttgtatacaactattttataaaacccaaagagaggggcaaaaattaatagagtaaatatcagctgttcttcatcaatctagagctccctttgggtatacatgcttctttgttgatgaacaatattatttgcgaacagcttaaatatgtactaaaaaaccatctcatttgaatcaaattaagcaaacgaaggggaaaaattaattgaaagaaagaacttcttttttttttggttagctaggttgctatgagcctctgatgatcatgccaccatctgctcctgctccggccactgcgcgaatatgtcgccggcggcgtggccgtccttgacaagagagttcacccatgacacgtccggctccgccgccgcggcgtgcgtcgccaccggcatggcggattggccgcggaacgcgaacgacgccgacttgcggagcttgtgcagctcgtcgccctggacgccccagtccagcttgccgtccggcgagccccagtccgagagaatggacggcgcgccggtcgtcgccggcgacatgagcgaacgcgccgccggggcgcggcctccgcggtcgatgaagctctggctgcgcttggcgaacgccgaggcgcgggagctcatgatcgccttcgccatggagtggtccagcccgaacgcggtgttcgcgccgcccaccatcggcgaggtcggcatgtgcatctgcgtggtgtccgccatggagctgtacgcgggcatgtcgccggcctgcttgagggacagcgcgtggagctgggacagcatggccgggtcgacggagccgagcaggtcggtgtagtccggcacggccctcgccggcgacgcggtggcgaggccgttcgccgcggcgccccagctcgccctcggcgacggcgcgccggacaccttgtcgaacagcttctgctggtactggtccagcgcgagcatctcgaggtcgaagtcgagctcccgcgcgccgagcgccgtcttgaggcggctcgctggggacgacggccaggcggggctcatcatcgccgccgccgccgccgccatgtcgagcccgttgggcggcgaggagcgcggcgacgatacggtgggctgcatgccgacggacacggcggaggggttgacggcgcggagctcgtcgggcttgtgggcgaagaagcagatgcggcgcgcgcagccgacctcgtccttgcagaggcgcgtcctgtactgcgccgggtggagccagcactcgaacacgccatgggcgtactcgcacgcgtcgcccttgcggcacgagccgcccttgcggaactccgggcaaggcacgcagctgtaggagtagcggcgagggtcgcggcggcgcgcgttctcgccggggtggacgaaggggcactcggtccagtcatgggagtaggcgcgggagcacggcttcaccttgaagctgtacatgcggaactcgtcggtgctgaacagtccgctcttgaggtcgggcagcgtcaggtcaggcgggtactccttcttcgcctcctgcggcggcggcggcgacggcggcgaggccgacttcttcggcgacgacgacggcgacacggccggcgacttgagcagcagccggatggccttctccgccgcggtggcgcgcgggaggaggtcaccggcgcggagccccgaagccgagagcgcgtcgaccgacgcccccgcggcgagcaacaggcgcgtggccgcgaccgcgttcgccgcgccaccggcagccgccatgtgcagcggcgtggccccatccgtctccgacgcgcgcgcggcctccgccggcgccgccgccacgacatacccaagcacccccgtgctcccgtacagcgccgccaccatcgccgccgtcctccgctccatcccgagcctcgccacgccgctcgccgaaggcccataccacaacccagccacgccaagagacaccttctcctcctccacgaccctcctcaccgccgccacgtcgtccgctgccgccagctcaagaagcaaggacgccgccatcaccgtcgcctccttctgctgctgcggcagcggcggtgtggacggcttgcgcggcccagagcacatgacacacacaaacaaacacgcacgcagagtgttcgaccgagttcttgttagtcaaaacaaacacctagttcttgatttcttgttaaattcagagaggagaagaagaacaagaagagggagaagaggaattctcgatcgatggatggatttggagagtggtgcgggcgcgtgggtcct

SEQ ID NO: 20772 - DNA, 1233 bp, Oryza sativa
  Clone ID: TF_OsC140365_1
cccacgcgtttttccattatggaccgcccgcggcagcagcacgagccggagcatctcggcggcggcggcatcgacgtcgaggtcgagctcgacccggaggacctccagccgtcggtgcccctcaagaaggtccccgcgggggacctcttcgaggcggcccgcgcgggggactgcgcccgcctcgccctcctcctcggcggcggcgccaacgtcaacgagcgcgaccgctgggactccgtcgcgctctactacgcctgcctcgccggccacgccgacgccgcccggatgctgctcgaggccggggccgtctgcgccgagcgcaccttcgacggcgaccgctgccactacgccgcgctcaacctccgcctccggaggctgctcaaggcgttcgaggccaggcccccgccgctgccgccgctccccgccgcgctcagggccacgttcctcgcctgccccgccaaccgcgccgccttcctcgagatgctccagtggaccgccggctccgaagccgccgccctcgccgctgctgctggatttgggccaacggacaatccatcaagtactagcctattccctccggacattacattctacgtggatggaaaaccaattgaagctcatcgggtcattctttgtgcccggtcatccttctttcggaggaaattcaatacagactggaaagacaggaaggaagtgagattttctagccagaagttatcttttggtgccttgtacagccttgtccatttcttctattctgatagactcgaagtggatgtggatgatatggaaaatttggcgcgggcgtgcaaagtttgtaagtgtgagggtttgcaaaagatattgattaaagaagctactctccagagatatgcagaacacaagtcaccgagagatttggacagttcacagaagaggttcattttacatgggcaatccttgccagaggaggatcgccttccatcagccctgcggcatatttttgaggaatgtctagctaactcaagagaacaagaatgttataacgatgaatcaaatgaaatgagcagagactctggtgtagatgctgctgctgatctttatataaaagtgattttagcctcaagatcagagtactttaaagctaggctatctagaaacatggattttcttgaagtcaagagtgggcttcaatcaactcagagccttccttttcttgaagagcatgacatgagtacagaagcatttgaaaag

SEQ ID NO: 20773 - DNA, 531 bp, Oryza sativa
  Clone ID: TF_uC-osflcyp015c11b1
ttttgatcattcatattgctgttccgagaaacagcggagggtattttggccatgtccttgcaaagcttgaacctagcattgacatgaaagataatcttggattaacaccgcttcagctatctattcttcttggcaaatatgctgcgatgcaaaaattgatagactttggggctgacattcatatccattctctttatggaggaccaattcacgcagcagtagcactggatgatgaaattgctcttgaagctcttatgagaaagaccaatacacgtcttttgctatgatgtgttttcacataatatgaatctagtgttttcacataatgtgtctttattaataggtggatgatattattgatggaggtataacacccttagcatgtgcggcatacaatggttcagttacaagcatgaaaacgttgttgcaggctggagctaatgttcagatttcaaagccaatcggcaaagctatagtagctgacctcacttcatctgaatctatggttcaaattctacttgatctggtgct

SEQ ID NO: 20774 - DNA, 461 bp, Oryza sativa
  Clone ID: TF_uC-osroM202020g09b1
tgtaacccaagaggttatactgttcttcacattgctgcgaggcgaagagagcctaaaatcattgtctcccttttaaccaagggggctcggccagcagatgttacattcgatgggagaaaagcggttcaaatctcaaaaagactaacaaaacaaggggattactttggggttaccgaagaaggaaaaccttctccaaaagataggttatgtattgaaatactggagcaagctgaaagaagggacccacaactcggagaagcatcagtttctcttgcaatggcaggtgagagtctacgaggaaggttgctgtatcttgaaaaccgagttgctttggcgaggattatgtttccgatggaagcaagagtagcaatggatattgctcaagtggatggaactttggaatttaacctgggttcttgtgcaaatccaccttcttgaagacaacggacaactgttgatct

SEQ ID NO: 20775 - DNA, 2140 bp, Oryza sativa
  Clone ID: TF_OsC4142_1
cccccctttgattttgagaaaatttgtttaaaaattcttgtcataggagcataggtagaagagattgctgataaagaaaaatggcattttgcaacacatttaacttgttcagtgttcaagctaacgttgaacctggtacaagtacaacatgctggcacgcatgtccacatctcgcgggtcgagggttcaagccgaatacaacacacggcatgttgcatttcatcataatttaaagtacttagcatcactttgaacaaggttttggtggtcacatgtatattcgcaaccttcttaaggtgtccgcaaaagacgtgcgcagcataatactttgcagacctatggttatcaacagcaacatgccactaggcacctttttgctcatgtctttagcaccttcgtgagcatttactgaattacggaactgtggacgatgaagcattgacttctcatctgctgctccattggatacagacagctgggcccctaatactgatctccagtaggggaaaaaatttctctttatgaatgttggatcccatcctttaagtgccttttttctcgcagcctttttttctgcagcaggcagagaagtagacatttgtgcaacagccttggttacatctttgtgaactatgtcgctgtaagaaatcttgttatatggacagaggatcatggtgtcaatgtattcttcgttagggcaaaacccgaattccttaagaatatatgaaacacgcgcaaggacctccacattgggcactaaatcatatttcatggtggacaacatgatagtggttctcgctaacatgaacttcatcaggtcagtttcattgttgtggacctctgaatgtgcttgaatgtagttatccaaaacctcaccagcttgcgaaattatagtgacaatcagacatttacatttcaaaagtgctcttctttcctccagcagcttctgcccctctgcagtatcacctttatcacacactagggaatcatagtcctcatatatacgttgcgcgataatgtcgaacccatcaggtttgccctcacggatatgttttcgggctgccaggagtaaaactgcggattctacaagcttgtcattcttcatgtaattccagagctcatcagctagattatctgttttttcagcaagcagtctaactgtatccaaaaaaaccttcatctcaggtagacacagcagatgaatgagcttgtagatataatcctcatgatactgcacaggagatagattgtcctccagatatttatgcaagcaagtatttccaactgcaacatggagcgggagtagtccgggaatgccagcatcattgactgtgtgtaaattggctgaagcaccatggcagaacagcaacttgatcatgtcaacagagaaccgttcagcagcttcatggagtggaaaaattccatatgggttaatgcagtttggattggcatgcatacaactgagctgaggtgccttgccctccaatacagttttcgcacatcgcaaggcattatgcctgacaatgcaggataaggtttctgaggtgatgttacacttaaatgccatggccgcagtacattccgcgaacaaacggaagaagcaccggacactgtcctttctcaagacggagtccaagcggggagatatatcaaagaaggcatcccgcaccacctgaggggtagggtctgggatgattatatcatttgttaaggacttggccatccaagcatattttattttaacccactcatcagccttatccaaatcagacttcttgataactagaaaagggcgggacgggtccatgttatctacggttgctccatcttctttacctttaccaacactttctcctatgaaagcatctggcagaacatgatcgggaattttcaccactatatgtttgtcgagggccgattccgacatgacctccttgctatgataaagattggggctttcctggatgagtagaaccagatctccagatgagatgaagggctggcttataaaatagtggtgggatgtaggaaagggggcggtggagagttcgccggaggcgatggcggtggaatgagcacctagggtttctttatgggaagatatttgctcgtgcggccggccgcccggggatccactatt

SEQ ID NO: 20776 - DNA, 371 bp, Oryza sativa
  Clone ID: TF_rsiceh_7309.y1.abd
cttcgcccccctacacatggctgccgagaacttcagcgtcgacatggtcaaactcctcttccgttacggcgcatcggcgaacatccgcaccaagggcgagtatgtcattgagggcctcctccctctccatgttgctgtcgagaggggccagcatgcacaagtacattgaggatcattgggctcatggggaccatatcatcaacctcatcttcctcctttgtcttcctgagatggtttcttcttcattcaattcctatccctattatattactgccagagcatttagcctatttcaaatactagcttggaccaataattaatttcagccaccactgacatgcagaaaatgttcttggacacgactagattaa

SEQ ID NO: 20777 - DNA, 550 bp, Oryza sativa
  Clone ID: TF_uC-osflcyp039a01b1
gtgattagtggccaacatagcacgatgaagatcttattggagcatcatgctgatcctaacagggttttcaatcttgatggtaccccgttgattatgtccatagtttctggatcattggaatgcgtgaagctattaatcaaagttggtgctgacatgaattttagagactccaatggcgttacttgtgtaatggttgcagcaaatcatggctcttctgtcatcatgaagtgcttactagatgctggtgctaatccaaacattccagatgaagtgagtaatattctttcctctatagcctgtgactggatgttgttgcgacaggctgtatggtcttgagagattaggataatctactcacttattctttttatcaactgtaccaatggataagtctgcatgagaagaaggcagtgcttctatgctgctctaaaggaatgcaattgttgaaatgtcatctcaaaggaaattgctcacattccactccaaagggtggatatatggttggattttcaatactgtttgaagcttcttgatataggaatgatgagaa

SEQ ID NO: 20778 - DNA, 1360 bp, Oryza sativa
  Clone ID: TF_OsC115542_1
atggaggctgtcctacgacacccatccctttcccgcctcaaaccccccaaccccaatgctcagagaactccagccctctccatcaccgtccctttccggcttcgtctccccaaccggcggctcaccgccgcggcggtgttccaggaccagaccaacccaagaaacccagcgagcaagggaggcgacgacgatgaggcgtacggcgaggtggaccgtattgtgtccagccgcaccatcaagaatccggtgttcgcggaggacggctcggccaccacggtcaccgccacggagtacctcgtcgagtggaaggacgggcacgagccttcgtggatcccggcggaggccatagcggcggacgtggtggcggagtacgagacgccgtggtggacggccgccaagaaggcggacgcggcggagatcactgcgctactcgcggacgagacgctgcggcgtgaccccgacgcggaggatgcgcaggggcgcacggcgatgcacttcgccgcggggcttggatccgaggagtgcgtgcgcgcgctcgccgaggccggggccgacgtggggcgacccgagcgcgccggcggcgggctcacgccgctgcacatcgcggtcgggtacgggcgcccggcggccgtgcgcgcgctgctggagctgggcgccgagccggaggcccccgacgggcagggccggacgccgctggagctggtccaggacgtgctcgcgaagacgcccaagggcaacccggcgacgttcgagcggcggctggcgctggaggcggcggcgaaggagctggagaaggccgtgtacgagtggggcgaagtggagaaggtggtggacggccgcggcgagggcaagtggcgggagtacttggtggagtggcgcgacggcggcgacagggagtgggtgagggcggcgtgggtggcggaggacctggtgaaggacttcgacgccgggctggagtacgccgtcgcggaggccgtcgtcaacaagagggaggcggcggaaggggaggggaaatgggagtaccttgtcaagtgggtggacatcgaggaggcgacgtgggagcccgcggagaacgtcgacgccgaactcctccaggagttcgagcagcggcaatctggggtggctgctggcggtgatgctccgccgccgccgccggtcgccgggtgacagcgtgtcgccgtcgacggagggtgttcgattcttcctggttttgctgtgtataacagaacgggataaaatgtttgtgctgctgcaaaatgtatcattagcgctttgataatttttgagttgaccagaactttagcctcagattgcaatttgagaaatgtgaagagtttcagaaaaaaaaaaaaaaaaaaaa

SEQ ID NO: 20779 - DNA, 1847 bp, Oryza sativa
  Clone ID: TF_OsC46535_1
acgggcctttctttttttttttttttagcttcaaactgcataggtgctcttcattgttaagtgctaatactagtacacattagcaggtaccaagtatccaagtacacaaaccatcaagatggtgcagaaaaaggtctgcttgggccacctcaccacagacctaaaacagctgagcaactatatacagggatgattgttttcatccaattacatgttcttaagtgttacatgcagctaaagcaagaccttttacaatctacagggcataaattctcttctcatgatcagagaatgcttccaggtctgatatcccctcatggatagaccaggagaaggacttgctgccacttgcccttttgatgcgccgctgtctatcttcaccaaacttgaagcgagggcgcaacaacagataggccaggaacaagagagtaccaatcatgattggccctccgatggctgatatggtgaaagccatccaggcattctgggggccaactaccacataggccaatgagataaaagccgcacatgtactaaggcatgctgaccacatcagcttatttacaatcttgataacccgcttttgagcaccggtttcccaggcaaccaaggtgatctgaactacgaccactgcaagggaaatgaaaagggcggtagcattcagcagacaaaaaactcggaaaccagtaaggttggctatgtgggcttcaccaatgtctcccccactatccctatcaacatagtactggcctggcaaattgaatatggctacgaatgcgatggaggcaatcagggttgctaccatagtaactgaattgatggtgttctgaacagcttctctgtgtagtttccggagctctttggctattcctgtcactcttttatttgtcttggcattctcattgagctgtgcttgaacattgtgcttgatatcactcacggttctcctaagctctgatgcctcatcaattttccccacattccgtgcattctttgcgccagcttctgtcagccactcaattatttccattttagactcaccataaggaactttctcagccaaatccatagctgtttcattctgattattgatagcattgacttcaagcgcctcgtagctaagcagaagttgtaccatctggggcctccattttcgtgtagctatgtgcaaagctgtatttgccttcttgtcacgcacatcgagtatggaaacatcagccatcagtaactcttcaactacatctgtatttttaccttttacagccatgtgaagtgcagtctgtcccttcctatctctgattggaacaatccccggatccctttctataagtgctttgacaatacgatggtaaccgattcttgcagcagtgtgtagtgatgtcttcccatttttccgcacaatccttatgcagctgtcatcagtgtccagtatggcgttaactacatccaagtgatcttttactgctgcagagtaaagagggctagtattggaagagtcacagattgaacatagctccggccaccgccccaagaactccttcacagccccggtgtggccttgcttggcggcgacgtggaaggcgtcgaggtcgaggcgggagcggacggtggcggcctcgaggtcgtagagcgggatgaggaggcggacgatctcctcggagccggcctccgccgcgacgtacagcgccgtctccccggcgtccgtctgcgcggcggcgagcgcctgggtggtgggcccggacgccccggcgtcggccaggaggccggcgacggcggcggcgtccgcggatcggacggcggcgaagagcgcctggtgggagagcggcgggagatccatcgtcgccggc

SEQ ID NO: 20780 - DNA, 2221 bp, Oryza sativa
  Clone ID: TF_OsC99825_1
ccagggataatcccactactggctactgcattcgcttatctcgctcgcgatgtcgctcgaaatccatgaagaggagggaggaggtacggcggcggcggcggcggtgaaggtgatgacggtgtcggggagcgggaagcgggggcggtacgtgcggcaggtgacggggcggcacaacgacaccgacctgcacgtggcggcccgcggaggggacgccggggcgctgcgccgcgcgctggacgaggcggcggcggccgtggccaccggggaggggagggaggcgctggaggaggtgcggcgggccgtggcggcggagcccaacgaggccggggagacgccgctcgtcgccgcggcggagagggggcacctggaggtggtaagggagctgctcaggcacctcgacgccgagggggtcgccgcgaagaacaggtcggggtacgacgcgctgcacgtcgcggcgagagaaggccgtcatgctgttgtgcaggaaatgttacttcacaataggttgcttgccaagacctttgggcctgcgaatactagtccacttatttcagcagctacgaggggtcacaccgaagttgtcaaattgttactagaactagatgattttggattggtggaaatggctaaagataatgggaaaaattccttgcattttgctgctcgacaagggcacgttgaaattgttaaagcattactcgagaaagatcctcagctagcaagaagaaatgacaagaaaggtcaaacagccttgcatatggctgtaaaaggaacaaactgtgatgtgcttagagcacttgtcgacgctgatccagcaattgtaatgctgccagacaaaaatggaaacaccgccttgcatgtagcaacaaggaaaaagcgagcagagatagttgctgttctcttgcgattaccagatacccatgtcaatgcactaaccagagaccacaagactgcgtatgatatagctgaagccttgccactctgtgaggagtcttctgaaataaaggatattttatctcagcatggcgcactcagatctagggagctgaatcagcctcgagatgagctccgaaaaacagtgacagagatcaagaaagatgtccacacacagctggaacagacaagaaaaacgaacaaaaatgtgcatgggattgctaaggaactcagaaagttgcacagagaaggcatcaataatgcaacgaactctgtaactgttgttgcagtactttttgccacggtagcctttgcagccatattcactgtgcctggtggaaatgccaacaatggagttgcggttgttgttcaggcagcctcctttagaattttcttcatcttcaatgctatagctctgtttacatcattggcggtggtcgtagttcagataacggttgtcaggggagaaactaagtctgagaggaaggttgttgaggtgatcaacaagcttatgtggctggcatcagtttgcactaccatttctttcattgcctcttgctatattgtgctaggccgccatttccaatgggcagcactactagttagtttgataggtggcatcacaatggctggtgttctgggtacaatgacatactatgtggtgaaatcaaagcgcatgaggaagataagaaaaaaagagaagatgtcaagaagaagtggatctagctcctggtatgataatactgagctctcagagactgagcttaaccaagtgtatgccttgtaagagaaaaggtctcctagattcagtctctgtctctgggattgatatgtacatgaaaattccagatatacacattaacagataacatagctcacagtatttcttgatttttacaattccttcctgtatcaaccaaccactcagaactaaatggaatacccattgtcccattgtgcaaggctccttcagctgcagaattttatggcaccaacgagctcaacctattgtacagtgagttgcatgtttttttgtttttgattttcattctattgccaactttcatgagaaaggatttttttttcttattctttctgtgcctacttatagtttgtgatgcgctcttcagttttcataatgtaacacagaacctgacacgttttagttccctttatgctattggtcatcttattcttacatgttgccctttgatgtaatttttacatactgattttatgttgtttcataaataaaattttactgtggatctaaaaaaaaaaaaaaaaa

SEQ ID NO: 20781 - DNA, 504 bp, Oryza sativa
  Clone ID: TF_LIB3434-005-P1-K1-C10
cgacaaggggcttgtggcgaggacgtcgctgatcctgtggcacacgcaccagaacgacgccggcgccgtgcggaagctgctggaggaggacgccgcgctcgtcaacgcccgcgactacgacagccgcacgccgctccacgtcgctgcgctccacgggtggcacgacgtcgccgagtgcctcatcgccaacggcgccgacgtcaacgcccaggatcgctggcagaacacgccacttgctgatgcggagggtgcaaagaggcatgctatgatcgagctactcaaggaacatggtggattgacatatgggaaaactggaagtcattttgaaccaaagacaattccaccacccctaacaaacaaggctgactgggagattaaccctcttgagttggatttctcaaaagctgttatcatcggaaagggctcttttggtgaaattctgaaagccaactggcgaggaacacctaatgctgtcaagcgcattcttccatctctatctgatga

SEQ ID NO: 20782 - DNA, 1556 bp, Oryza sativa
  Clone ID: TF_OsC54254_1
atgagcggggcggaggaggaggcggcggcggcgaggggagggggaagcgggagcgagagcggggggagcggaggaggtggacggggagggggagggggaggggcggggtcgtcggggagcagcggggcgcggcggcggttcgacgacaaggggcttgtggcgaggacgtcgctgatcctgtggcacacgcaccagaacgacgccggcgccgtgcggaagctgctggaggaggacgccgcgctcgtcaacgcccgcgactacgacagccgcacgccgctccacgtcgctgcgctccacgggtggcacgacgtcgccgagtgcctcatcgccaacggcgccgacgtcaacgcccaggatcgctggcagaacacgccacttgctgatgcggagggtgcaaagaggcatgctatgatcgagctactcaaggaacatggtggattgacatatgggaaaactggaagtcattttgaaccaaagacaattccaccacccctaacaaacaaggctgactgggagattaaccctcttgagttggatttctcaaaagctgttatcatcggaaaggatgatctttttagatgttatatgcaaatagagatagttgggtgttcaaaacttgccattatattagctggctcttttggtgaaattctgaaagccaactggcgaggaacacctattgctgtcaagcgcattcttccatctctatctgatgacaggctggtgattttttttggggtatgcagacaagatttcaagcatgaagtcaacttgctaataaagctgagacatccaaatattgtgcagttccttggagcagtcacagaaaccaagcctttaatgctcgttactgagtttttacgaggaggcgaccttcatcaatacctgaaggagaaaggtgcacttgccccagcaactgctgttaatttcgcactagacattgccaggggcatggcctatcttcataatgaacctaatgttgtaattcaccgggacttaaaaccaagaaacattcttctagtaaattctgctgccaatcacttgaaagttggagattttggtcttagcaagattatcaaagcccagcatgccaatgatgtgtacaagatgactggggagactggaagctaccggtacatggctcctgaagtattcaaacaccggaaatatgacaagaaagttgatgtcttctcgtttgctatgatactttacgagatgcttgaaggggatccacctttctctaactatgaaccttatgaagccgcaaagttaattgagctatgctggtccggggatatccatctgaggccatctttcctagagatcctcaagaggctcgagaagatcaaggagtacttagctgcgcacgatcaccattggcatttgttctcccagttccctgctctttttatgtttcttgagaatcagtacagtggatacaggaagtaaatgtgccatgtaatctgtttaaaagcacttcttttacggggattaaaaaaaagctagttctttgtgaactttgtaaacagaaaaaaaaaaaaaaaaaaaaaaaaaaa

SEQ ID NO: 20783 - DNA, 1906 bp, Oryza sativa
  Clone ID: TF_OsC4338_1
gcggctctccttctcttggtacactacaaaacgcgctccactggttcgtcctcctaccgccgcaaagaacgagctgttatccgggtacacgcacgaagcaatatctttttctttatgagtttgttgatgttgatagtcaaatattaaaatgtttaccttaggacaaaactagaacacaagtagttcgaaacagagggattacttgattttctgcaggtcactggctggaaactacactacctcatgggcactgtctttattacactatactgctatctaccaaagtggaactagctaaaagaattaggtgcaatccttgcttttaccaatgtgtgtcaatgtccatcattttaggtcattgattgtaatagctgattgccgacagaattgataatattaagtaatggttcaagttctcccattgcccaagatactagcatatcagcatcacaagtgacacagacagtaatacacagtaccagaaaagataagaacaaggttatatgtcatccattgtcaaggagaggaccgttcagaaggagtaccaagtccttttaggagacagtgacaccatcgagttctgcttgagctactgctgcaccgattgcatcgatcacctccatcttgcccttcgtcactgcttcatccataggggttttctcatggctgttcagtgcactgacactagccccagcgcatatcaacgctttaattacctcgatatgtccattgaggcatgcccaatggaggggtgtgttcttctctgagtttgtagcattaacattcgctccattttggatcaagtactgcaccacagcgagatgtccattggcagaggccatatgaagtgccgttcgtccttgcgaatccgcggagtctagggaaacaccggcggtgaacagcgcgacgacgtcctccaggtcatcgtacctagcggcgtcgatgagatcctgcgcctgctcggcggtcgccgccgccgccgttggttgctccgattccgcgcccatcgccgccgccgccgccgcctcagtcccagtagaaatctttcatggtcaggggcaagacgctttagctttagagggattgttttatgctttggtgccaaaagcaagctagtgcattcatcaacactaggcaaaaaatcaccatatagctgccaaaagttgtcttctacatcaaatgcatagagaagaaggcaagctaaccttagatcccaatctgtctcaggatctgttgattcaatgatgtcaaatatgggatggcctagtggaataatgtcggggaaaaacatccaagggcgtttttgagttatagtcagcatcagctccaatggaatctccataatcacaccatatttgattatttgcatagcattataaaaggcagcagaagatatgtaagcgtaaagtactctagctctgcggagtgggtcgacgtcccgggaggcatagacggccatcccatcggggccttccaagaactcaaccccgtacgcccgcatcatccgcgcgtaccctatccggtagaagtcggggtcggccggctccatctgcacacgacgacattgttcatcatgcatgcatgcgcgcgagcagaagagatgtgagcaacggaagcaactaggcgggaagagattgagcacctcgggcgggaaggggtcgtcctcctggggcggttcgaggagcctgagcgggggggcatcgtcgtcctcttcctcctcgccgacctcctccgccgccggtgggggtgccgcgggaggcgggtcccggaggcgagggcgtccggcgcggggaggccgcaagacgaggcggcgggcgcagggaacggcgcggcgaggcgggaaggtggaggccgggagggggagggggagcggcagcaggagaggggaagcggcgggagtcgccat

SEQ ID NO: 20784 - DNA, 1099 bp, Oryza sativa
  Clone ID: TF_OsC58045_1
cactgtccagatgctccctattgcgacagaaatggttggacatgccttcatgaagctgtaaaggaaggtcagacagagtttgtggaatttatcctaaggacaccacaacttcgtaagctcatcaacatgcgaaataacaaggacggacaaactgctctgcatgcagctgtccggatgtgcaatcctaaaattgttgcctcgttgttgtctcataaagacacagacttcacactgaatgatcacaaaactggccagtcagtaatttggcaattatgtttgggttcagagcgtgccaagactttaaactggaatgaagtgtccatgcttatgactaaagctgatcctgaagctgcaaccacgcttcacccgtcagttcgcaagggaaacgactaactgatgaattagcaaggaatgttaagtcactcactcaaacatacacaagcaacacttcgctagtggctattctcatggcgacgataacctttgccgcagccttcaccctgcctgggggatacagcaacgattctggaagcgagggacttcctgtcatggcaaagaagttagcgtttcaagcattcttgatctctgacaccgtagcaatgtgctcctcgcttgccgtcgcattcatatgcatcctagcaaggtgggaggatcttgaattcttgctttactacagatcctttacgaagaagcttatgtggtttgcatacatggcgaccactatagcgtttgcaacgggtttatacaccgtgttggccccacgaatgctgtggttagctgttggaatttgtttcctttcggttttactgcccattctcactaagctgctaggtgagtggcctgtcgtgaagctcagatttcgtttgggtaagactttcaagactgatctccttgatatggtatgacgtcatcaaatttatattatttgttctgctttccaacactacatataagttcatgcaaaatgtatgttgtaatatatacattttattttggtgatatgtctagaagatatcatggagagttggagacgattaaaccagaggcaatatttatgagttactccctctatctcaaaatataagacataattattttt

SEQ ID NO: 20785 - DNA, 1155 bp, Oryza sativa; identical to SEQ ID NO: 10941
  Clone ID: TF_OsC340376_1

SEQ ID NO: 20786 - DNA, 1345 bp, Oryza sativa
  Clone ID: TF_OsC506_2
atgggtcacggtgtcagctgcgcccgcaccggcgacgagcacgacttcttccgggcggcgcagctcggcgacctcgacgccctggccgccctcctcgccgccgacccttccctcgctcgccgcgccaccctctacgaccgcctctccgtcctccacatcgccgccgccaatggccgcatcgaggtgctctccatgttcttggatcgcggggcgccgccggacgcggtgaatcggcacaagcagacgccgctgatgctcgcggccatgcacggcaagatcgactgcgtgctcaagctcctccaggccgacgcaaatatcttgatgttcgactcggtgcacgcgaggacctgcctccaccacgcggcgtactacggccacgtcgactgcctgcaggccatcctcgccgccgcgcagaccacgccggtggccgactcatgcttccctggaagcacgtcgcttcatttggctgctcgtagcgggaacttggattgcatcaggaagctgcttgcctggggagctgatcggctccaaagggattcggctgggagaattccctattctgttgcgctgaaacggaaccatggagcatgtgcagctttgctgaaccctacatcagcagagcccatggtgtggccatccccacttaagttcatcagtgagcttgaaccagaagctaaggctctcctggaagcagctctgatggaagccaacagggagagggagaagaaaatcctgaatggcacaaagtactccctgccatccccttcgcccggtgatgacagtgccgatgacgatgcatgctcagaggtgagcgacacggagctttgctgcatctgcttcgaccaggcttgcaccattgaggtgcaagactgtggacatcaaatgtgtgcaccgtgcacgctggcactgtgctgtcacaacaaacccaatccgacgaccctgacaccgccctcaccggcctgcccattctgccggggcagcatctcacggctggtggtggcccaaacaaggtctgcttgtgatcctgacaagccgtcatccctgcagctcacccggaagcggtcgcgtcgatctcacaacctcagtgagggcagcagcagcttcaaagggctaccttcggccatgggctccttctcaaagcttggccgtggctcgagccgcatggcggacagtgacagcagcaacctggacaagcctgagcacgatctatgaaagcagaacaacgcacggacaatcgccgcatcatcctgagactgaggaccaactctgattaacactgaagtctgccgtgtggattgggtttagattgaaaccaattcatggagataacccccctttttgtggc

SEQ ID NO: 20787 - DNA, 1236 bp, Oryza sativa; identical to SEQ ID NO: 10948
  Clone ID: TF_OsC180673_1

SEQ ID NO: 20788 - DNA, 2882 bp, Oryza sativa
  Clone ID: TF_OsC14877_1
atgaacggcacgccgatctccgcgtccgccgcggccggcgtcgacggagtcggcgcggcggtggcgctggcggccgcgaccaagaagagtgccgccgcggcggccgccgtcgccgagatggcgaaaaccctcaccgtcgacacggacgacgccttcgcggggctcctcgagctcgccgcggacgacgacgcggagggcctgcgccgcgcgctggagcgcgccccgcccgccgccgcggacgaggcgggcctctggtacggccgccgcaaggtcctcgagcaccgcacgccgctgatggtcgcggccacctatggcagcctcgcggtgcttcgcctgctgctgtccctcccgtccgtcgatgtcaatcgccgctgtggctccgacggcaccaccgccctccactgtgcggcgtctggtggctcgccgtcttgtgtggaggccgtcaagctgctgcttgctgctggggctgatgctgatgccacggatgcttccggatatcgtccagctgatgtgatctctgttcctccaaagatgtttgacgccaagattgccctccaagatcttcttggatgcccaaaggctgggcatggcgttctccgggtggtgacaagggccgcaaactctatgttgtcacctgtatcatcccctacagcagaagatgcacgatctccatctgctgctgtgatgatgacgacaaagtttgcagatcttccaagggttgtgacatcggaaaagaaagaatatccagtggatccgtcccttcccgatatcaagaacagcatctatgcttccgatgagttccgcatgtactcatttaagatcaggccatgctcgcgggcgtactcacatgattggactgagtgcccgtttgttcacccaggggagaacgcacggcgtcgggaccctcgcaagtatcactacagctgtgtgccatgccccgactttagaaagggagtttgccggcgtggtgacatgtgtgaatatgctcatggcgtgttcgagtgttggctccatccagcacagtaccgtactcgcctttgcaaggatggcacaagctgtaatcgccgtgtctgtttctttgcgcatacaactgatgagctccgaccactatatgtttccactggatctgcagtaccatccccaagagcctcggcaacagctacaatggagatggctgcagcaatgggcttgatgcctggttctccatcatcagtttcagcagtcatgtccccatttacaccaccaatgtccccttcaggcaatgggatgcccccttcattgggctggcagcagccaaatgttccgacactacaccttccaggcagcagccttcagtcgagccggctccgtacctcacttagtgcaagggatatgcctgctgatgattactccctgatgcaggatattgattcacagcttataaatgatttgtgctattcacgtattggttcatcaacaggaaaccacacgtctcggaccaagtccctaaatccgtcaaacttggatgatctcttctctgctgagatggtctcttccccgaggtatagtaatgctgatcagggtggtatgttttcaccatctcacaaggctgctttccttaatcagttccagcaacagcagcaggcacttctttcaccaatcaacacagtcttctccccgaagtctgtggacaaccagcagttgccttcacactcatctctgttgcaagcatcacttggtatatcctcccctggccgcatgtctcctcgatgtgttgaatctgggtcccctatgaactctcaccttgctgctgctcttgctcagcgtgagaagcaacagcagacaatgagaagtctcagttctcgtgatcttgggccgagtgctgcaagagcatcaggtgttgttggctcccctctaagctcatcatggtcaaagtggggatcaccttcagggacacctgactggggtgttaatggtgaagaattgggcaagcttcgccggtcatcatcgtttgagctgagatctggtggtgatgatccagatctctcttgggtacacacactggttaaggaatctccaccagagaagcaagtcactactgctgaatccataaactctgttggaccttcaccactgatgcctcccagtgtaagcaacggtgaaggtcctagtctgaatgccccgctggatgggcatgaccaagctgctgttattggagcattgcttgaacagatgcagcttgatcagcatattggtagtctagcaacataagcgctgaatgagcctggaaagtgcaaggagttattattcttagttaatgaatttggagtaatttttttcctgttcattaagatggtcagcaagcaaaaggatggatagctgatggtggtgattcagagattggttttctttactttattgaggtaaatcatatacattattgaggttccagtaggttgaaagattgaagtaccttgattggggtcgtttcaagaccgacccaggtagaatcgcaccccggcagcttcaattcatcggtcaaaaatatttccctgttttgttaattaaccccgttaaaaaagaagactcgtttggtgtttcggaattcttttctttaccttagcggtgtttattttgtttattatgatattgatacttgatgtactgatgggtataaggttggttaccaggcatgctatagtggtatatcaagtcccaaagtattctttttctccctttcaccatttgtcgaggatcatactatggccttgttttggtcagatcttgaggcctgtataatccttggatttgtaataatgtaatattgtcattgaacttacattgctattgttttgcaatcgcaaatctcgctcaaaaaaaaaaaaaaaaaaaaaaaaaaaaaa

SEQ ID NO: 20789 - DNA, 1023 bp, Oryza sativa
  Clone ID: TF_OsC359_7584
ctttagaaacatgaaagctgccccttgtcgatagcatgctttgggccaactgggccgcaacattctgcacatgttagcatcagcaagagccccattgccggttgacaaacgcaaccagcacaggctcctgtttgctagcagggttgccttatcatgagcattagtggtaagttctattgcattagtgtagtgttgtcctgcaagcatatattcctctctctcgaaagcctctctagcttgtaatttcagttcagcacttttccttttagacagatcattatcccttggcttcaaaccaaaagtttgcacatgagaaataactccatcgatactccaatcaggcagtgttgaaattggtgaagttaaaggaaacaacattttaacaatgtcccttctgcctcgattagcggcaacttcaattggagtcctattaaattcatctggaatatttgaattagcaccagcatctagtaagcacttcatgatgacaggagagccatgatttgctgcgaccatcacacaagtaacaccattgggatctctaaaattcacatcagcaccaacatcagcgtgatgctccaataaaatcttcatcgtgctatattggccattcatcgcagctgtcagcaatggggtcccagtgatagaatctaaatccacatcaactcctcttgaaagaaacaactctactatttcgcagtgtcctgccaagaaaaatatggcataaggaccatagggaacccgtatggtcatatggatcgagccttcaacaatacaaactttggcattgaactggttgacgctgaggtggaggtcctccacgaggtacctgaggacatccatgcttcctcgggcggccgccaggtggagagcgcggttcccgtcggccctgcccgccaccgccgccacgacggcagcctcgccctgcccggtgtccagccctcgcgccatcttcctgaggaggcggaggttgtcatcgtaggcggcctggaggagcatcttctcctgctcctgcttccccat

SEQ ID NO: 20790 - DNA, 482 bp, Oryza sativa
  Clone ID: TF_uC-osflM202091b10b1
tcgcaccaacatggcctcccagaacgctctgcgttgtgccagggtcgcactccagggcacctctcctctcttgcgttgccgccgccgcgctgaccccaacacccgccaccgctacggcttcgcccccctgcacatggccgccgagaacttcagcgtcgacatggtcaagctcctcttccgctgcggcgcgtccgccaacatccgcaccaagggcgacaacgtcattgagggcctcctccctctccatgttgctgtggagaatgccagcatgcacaagtacattgaggatcattgggctcatggggaccatatcatcaacctcatcttcctcctttgtcttcctgagatgaaaatgttcttggacacgactagattaattgccaaacagacggacaacattgtcgacgaggtatggaattacattcagcatgaagagaagcatgtccaggcagcaattttgctgctcgctgctgaaaagcagc

SEQ ID NO: 20791 - DNA, 3351 bp, Oryza sativa
  Clone ID: TF_OsC64079_1
atggcggaggggcggcgctacgcgatcgcgccgcagctagatattgagcagatactgaaggaggctcaacgccgatggttacgtccgactgaaatttgtgaaatacttaagaattacaggagtttccgtattgctcctgaacctccaaataggcctccaagtggttcacttttcttgtttgatcggaaggtcctgagatatttcaggaaggacggtcataattggaggaagaaaagagatggaaagacagtcaaagaagcccatgaaaggttaaagtctggaagcattgatgtgcttcattgctactatgctcatggggaggagaatataaatttccaaaggaggagttattggatgttggaggaggattacatgcacattgtacttgtacattatctggaagtcaagctgaagtttcatttcctgcacatatatgggtatgaccatcaggctggaaaattaagctctcgtagtacgggacatgatgatgtactgcaagcatctcatgcggatagccctttaagtcaattgccttcacaaactaccgaaggagaaagctcagttagcggacaggcctctgaatatgatgaaacagaatcaggcagttatcaaggattacaggctacagcacctaatacaggcttctattctcatggtcaagataacttacccgtggttcttaacgagtcagaccttgggactgcatttaatggccctaatagtcagtttgatctatcattatggattgaagcaatgaaacctgacaaagggacccatcaaattcctctttaccaagctcctgttccctccgaacagtctccttttacaggaggcccaggaattgaatctttcacatttgatgaagtatacaacaatggactgagtatcaaggatgtagatggtgatgatacagatggagaaactccatggcagattccaaatgcaagtggtacatttgctacagcggacagctttcaacaaaatgataaaactttggaggaagccattaattaccctctcttgaaaactcaatcatctagtctttctgatatcataaaggacagttttaagaaaaatgacagtttcactagatggatgagcaaagagcttgctgaagtagatgattctcaaatcacatctagttctggagtgtactggaacagtgaagaagctgacaatatcattgaagcatcaagcagtgatcagtatactctgggaccagtgcttgcacaagatcagctgtttactatagttgatttttctccaacctggacatatgcaggttcaaagactagggtatttattaaaggtaatttcttaagttctgatgaagttaagagattaaaatggtcatgcatgtttggagaatttgaagtcccagctgagattatagcagatgatactcttgtatgtcattctccctcacacaagcctggcagggtccctttctatgtgacttgctccaatagattggcctgcagtgaagtacgggagtttgatttccgacctcagtacatggatgctccaagtccacttggttctacaaacaaaatatatctccagaagcgtcttgataaactattgtctgtggagcaggatgagatccagacaactctgtctaaccccacgaaggagattattgatttgagcaagaagataagttcattgatgatgaacaatgatgattggtctgagttgctaaagttggctgatgataatgagcctgccacagatgataagcaagatcagttccttcaaaaccgcattaaggaaaaattgcatatctggcttctccataaagtaggggatggaggcaaaggtcccagtatgttagatgaggaggggcagggtgtgcttcatttggcagctgccctagggtacgattgggcaataagaccaacaatagctgctggtgtgaatataaacttcagagatgctcatggatggactgcactccactgggctgcattttgtggaagagagcggacagtcgttgcacttatagcactaggtgcagctcctggagctgtaacagacccaacaccaagtttcccttcaggaagcacaccagctgatcttgcatcagccaacggacacaagggaatctctggtttcctagcagagtcttctttaacaagtcatctgcagactctcaatctaaaggaagccatgcgtagcagtgcaggagaaatatctggtctacctggcattgtaaatgttgctgatagaagcgcctcgcctttggcagttgaaggccatcagactggatctatgggagattcactaggtgctgttcgtaatgccgcccaagctgctgcccggatataccaagtttttaggatgcaatccttccagagaaaacaagcagttcagtatgaggatgaaaatggtgcgatatcagatgagcgtgccatgtcactcttgtctgctaaaccatccaaacctgcacagcttgatcctctgcatgctgctgcgactcgaatacaaaacaagttccgtggatggaagggaagaaaagaatttctgcttattagacagcgaatcgtcaagatccaggcgcatgtgcgaggtcaccaagtgagaaagcattatcgcaaaataatttggtctgttgggatagtggagaaggttatattgcgctggaggcgacgaggtgctgggttgcgtgggtttcgacccacagaaaatgcagtcacagagagtactagcagcagcagtggcaacgtgacccaaaacagacctgccgagaatgactatgatttcttacaagaaggacggaagcagactgaagaaaggctacagaaagctcttgccagagtgaaatccatggttcaatacccagatgccagggatcagtaccagaggattttgacggtggtaactaaaatgcaggaatcccaggctatgcaagaaaagatgctcgaggagtcgacagagatggatgaaggccttttgatgagcgaattcaaagaactgtgggatgacgacatgccaacgcctggatatttctaggatctaacgtcttgtgtatgcgcttgtaaattacttccaggtctttgtacatagcattaccaaatcgataacctgtagttgcattgctaaatttttgtatgttttgaagtttggttggtacaataatttttgtatgcgttttgtacagtaattcttctgtaaaatgtatcaaaatgatgtagctcgtgaaaagcttcagatagttggagaagctaggtctagaatctgcagatagtttgtgtaaggaaaaatgtttaatccttgctatgttttgactacggtgtctcgagttccaacggttgtccaggctgacagcgtcaaaaaaaaaaaaaaaaaaaa

SEQ ID NO: 20792 - DNA, 2250 bp, Oryza sativa
  Clone ID: TF_OsC1713_5567
agacacgaatcaccgtgatgttcatcagtcaccaccccggttagctactttgcttcaatataaaaaggagataaaccattctggttctgggtatcgaagtctccaggcaaaatgtgagaacatctgtggactcagggaaccagaggctctttgcaaaaagtgagacgccttggacaaaacgtgtaggagaggaccagggcgccttgcccaccttgcaaacacccatgctgttcacctagcctccgtgcttgcagatgccttcaaggacgccagagcttcccgtaatgcatcctccatctcagagttccctggatccaacttgaatccatcgtaaagtgtttcgcaagcactctcatagtccttcagtagcatcagagcagcaccctgtcggtagtaggccttcagccagtcaggccgcaatttcctgcattcataagcatccaacaaagccttgtgtccatcacccatgtgatgccagcaaaggcttctatttgagaacaaggttgcatcatcagggtaaaggtacagtgccttactgtagaatcctgttgcagatagataatcctttttctcgaccgccttattacccagtgactttaaatctgttgctttccttttattgacaggctcaccattatcagaaatgttacagttggcaccagtctcttccattaagtaattgaagcactctgtagaaccactgttttcagcagttaacatgcgatcttcactgacaacagcaccaaccttaatcaggagatttatgcattttaattcaccagaatccatagcagtatcaagaggtgtcagaccatctaccatcttgttaaaatctgcattgtggtccaataaaatcttcatagcaccatctcgcccttcagtagcagcaacatgaagtggtgtcccacagtaagctactgggtccacacaagctccttttgcaagtaatagctgtaccattccacattctcctaaacaaatggcgaaatgtataggggtgaggccgttatggctggctttgtttgcgtcggcaccacgatcaagaagatactcgacagtgcttacatgattgaagactattgcaataatcagaggagtcctacctgtcaagcacacagaaaagcttattgaagcaaagtaactctgtattacattaaaagaaacaatatcagtttttattttctttgaaatatatcgccataaaaagttataatggtaacaccattttctgagagcatggcatctaaaagttgctcctcaagataataaagtatgagaaaaataaaattttaggtatcataggaagtagaaatgtctgactgagtgcacgagataacattgggcagcctagttattatggaacatattgagtattataaccatgggaacataacagaatatggaaatgaacccattcattttgcaagttaggtgaaaattgatgcctattaaacattgcttcacagtgccatgcataatcttatcaaacacaagacaatttgagtacaacctaccatgaagttatcattgagacacattgatcaacaaaacaagctactcaacaagctagtgccccgcaccaatgtttttttagaaaaaaaaggcacattgtagattgtttaaaaatggtgtttttttttataacgctgaaaaggattaataagaacttaagagtacgtgcacgtgatcattcataacggtgcaaaaaggaggggttttgtatcgggcgagagaatgagagatggacttcctggtcagcgtcatccacgtccagccgcagctcctcgacgaggtagcggcacacctccagcctccctttgccggcggcgaggtgcagcgcccccatcccgcccatcggcgcacctctcaccctggccgcctgcaccgcctccccgattcgacccctcccatcatccagcaacgtcgccatccccctgacgatgtagaggtccccgttgtgagccgcgtcgaagagcaacttctccaccattccgtcggctgcacgggggagcgaggagcagatcgaattagtcgagttagggtttggtaagggaggcgcttaccgtagccggtgggggcggaatccgatgccatggaggctggctggtggagagcagagtgggtggtaccgtggtagggttttggggctggaggagagaagggagaaggggaaagagagagggggagagaggaggcgtacgcgggaagccaagggaagtcacggggagaagtatagtgtgtcatcagttc

SEQ ID NO: 20793 - DNA, 4180 bp, Oryza sativa
  Clone ID: TF_OsC3235_1
gaagggcaatactgaaatgaatgaaaaaattagcaagtaaatgagtgcaaatgcaccacagttttttgagcttttgattgcatcaaccaaagagattttggcaggaaaaaaaggcattgccagaagttaaggcaagcagggggtgatctcatacaacctatacatccatctgccacagctatagatgagatcacttctgcgaaaacggaagcaaagaaaggtttgagctttattctgactaaaggaacctagtgttgggtgaaactgactgtacatttgaatgtacattgaaccactgaaaatgtgatggtgagcctaagagagatcagtaactcttgagagatggctgccatggtcatggtcatcactggacctgtggcttgacaatcctcacgttgctatagaagcgcttgaagtccttcatcgcctgctcttcaatctggatcgagcgaatcgaggacggagcgtcggcctctggcttgaaccagcggttgggaacattgtccttgatgccaccaacctcaggtgatgtgccctgggaaggtatagcgaagcccgatgtcctggtttttggactgtgggagatgccagtttgccgtttctcctgttgcatctgtatgtccctgagagaaggccgcaatacattaggtgaggtagcagaagacgaccaggatagtgtgctcttatccccttcagaagcaggcacgacacgagcaggtgtgacagttatcggtgtagagcgtgcatcaggtataaacgaagaaagtcgcatgcgcccagcactgtcaggtgagtcctcaaagcggtcttttgccttggccgtgatcggctcgtttgttttcctctgctcgctttgaatatctcgaagggaagcagatccctttgttaccttagcaccaccccaggcaggaccttcatgctttggtgtgacagtcacaacaggggtaggcgggcttggttttggggtgtcatcaagagcaccactcagaaacaacgataagccacctttcctattcttcttctttgacgaagttggctgggaagctttgttttccaatggacaagagatagcctttgtgttaatgaaagtgacatgctctgagggtttgattgaatcagcaacgcttgcttccttttctgcagaaatatggactggtaagacttcctgaagatccttgacatagatttggtccctgtcctcccttttcaccaagggagtatcagaatgtgctgcctgcttgtttttccgcttctgtttcttagaaacactcgatttcttgtttgtcttttcttctgtaacacagactggagttcttaaatctgtgggaatgccgagttctgcaagttcaccctcaagggcagcccttgactcaagctttgctagctgctgattatcaagctgatgaccatccagttgtttagcctcgagcatctcaatctgctgcagtttcttgcgaagtgccctgatctgtttagaggcagcttgtccagcattgctatctttctcaaggaagttcccataacttgatattccatatgacttcgatgcagacttctgactgtccctgagcctaagaaatcctcctgcttcatctccctcttcatcactatcaatgacagcaggataagtagctgtcactgtgggaaggcgacgatgactccatggctctgacgatttttcatccagcaatctctctaagtttgcaagagtttcaggagaagcattcataactgatggagctgccactgtgaaaatgtaatcaagattgcgaatagctatatcctcgcagtgcttcttgagctccttagcttccaaggactcggcaacttcaagaagttgtatagaattctttggctccagaatatgctcaatcgcaactttctcacataagctcttcaggctaggtgctcccttttttattacaccatcgcttccagatataccgctgtcaggctgtacatcattaaacatgatgtcttcatccaattcttccatcccaccattccattctaacatggctttcttgcattggattttaggtttgggtgggtactcaggatggtatatgctagaaagcacaagcatatgtgtttcaccaacacaaactgacgttgctcgcttaacaccatgcactcgagtaaacattgggagatcatccttatgtttctttgcatcccacataaaaacatcaccacctgcggtagccaatgcagtccagtattttccagctgagatgttcacaacattccttccacacatagagaatatctgtcggcatcttaaatcagggtccgatgaaacccagtagaaaatagcaccatctgcggttaaaacagtggtgtgcatcactccagcagccactgagatcacctgaagccgctccatacgatggaacttcaggtttgtatttccacccttcttaagacatctagatattacagcacgacgtggagtcacaagccgatgaccccaagtaaacacctcgccatcagttcctaatgctacagtatgatactttgctgcagacacacatttaaatgcttttcctttcaagtactcgaccattcttggaatgcagttggatgctgaattagaagtgccataacctagctggccctccttattgctaccccaggtgaacacttcaccagtatcagcaacagcagctgagtgcttgttggcagcagcgacagaaataatccttgctttcagggaactaacgcgccgtggtgttggttgggtatccacagaagggtaaccaagctggccctctctatttgatccccacgtaaacaactccccagcctctgtagcaatcacagtatgatgtttcgctgctgccacaacattcactcgtttacggcctaatcctactgttacttggcgaggagtaatcacagcagttgtctggccactatggatatctggatgaccaagacgaccacctcgaccaaatccccatgtgtataattcaccatcagaactaactgctacactgtggaactttgatgcagcaactgttttgatgtatgacccatgcaaggcatctactttgcatggtagtttttgtatgtgggcattgcctgttcccagctgataatttgtcccacttccccaactgaagacttccattgcaactgaatcaggagaatctccattggcctgtgatacagggcctgagagaagatcaacaggtgtacgtcccttggtgtcttccaaagcaagggatgctccaaactgtagaagaacactagcaacacacaggtggccaaaatgaagtgctctgtgcaggctgctccagccagattctccatcccttgcatctggatcagcaccagcatcgaggagcctcctcacaattggtagatgatttctccacgttgcaaggtggagagcacaaagaccaaacacatttctgccatcaatgcttccaccactctttttcaacaaagctaaagcagattctacttcagctattgatccttgcttggaaacaagacacagatccttaagagagtttccaggagaaggtctacgaagacctgcttgctttgatgagcctggtggagatatcgatgcctccatgagacctcaggaaatcacgagtatctgataaaagcaggtaggctactgaactgcttggggcaagtctttcacaacggcaatgctattctgggctgtttcacttctaatggcacagctaaagtttttcctaataagattacaagtctggtgtaattacaattctatctcctcatggagaattggggcatcatctctactatgtaagactgttttgctaacctaaagaaactgccaaaataacctaggacagcatgatgctagagcttcatcttgtaataaattgttcttgttagagttccatgaagctaggatgacaattccatctcaagataagattctatataaagagccatctatataatatagatcaatcttgggattggacccagccaagaagaactctcgtcaagaacacatgctgtcctacgccgtctctccctccctctctctctctgtggcacgtatatgctcgcgggggggaggggatccgggcggggaatatgctccgcgagcgcaagggacgaaccgcctccaagctctccacccgcctctcgttctctctctctctcctctcgctcgctcgcgtgcgtgccc

SEQ ID NO: 20794 - DNA, 2064 bp, Oryza sativa; identical to SEQ ID NO: 10962
  Clone ID: TF_OsC341728_1

SEQ ID NO: 20795 - DNA, 2313 bp, Oryza sativa
  Clone ID: TF_OsC43580_1
gcatatccattacctgtgtctcacagccaaaaaaaacacttgttctccgatacatagcgttggcgataagcaacgccggcctcgtctttcttttcttgctgcttcttctttctcttttttggctgtttgctgacgagacaattagctatatatctattgaaaagattttatcattacagccatcctgaacaaaacagaatgctacaaacatattcacgagagacactactttggagcctctaatcagctggttttcttttgccagtttcaccgcatgggtcccataaaccagctgagtgcagcccagaacagcactttctaatattcgaagaagcttcgatatctaattgttataccactgtaagactatacaggtctattgatcgatatctcttgtcccagtaacatcacgagcggaaatttgttacaaaacttctgtcatttctttgcaaccttgggaggtggcgaagatgacgatgaagatgacaagatagaaaacatgctattatcagctctgtctttgctgaatgccttgcgcacatcctcctttaactcacagaaccgcatccttttaacattttgctcatcagaagtgccattttggaggtcgagtgcatcaggactatcgggcaaatcatcctccagaaatttgtcgagcacctgcgagcagttagggaagtagcgacgtcccagctcaactgttttcatgagtgcatccacccttgaacggagccttttgttttgtgttactggtgtctcgttcagatcgacttccttcaattttccagaagtgctagctgcaggaacaatgccaaattctggtgtggtgtctgcttgtgcaatttgcattgcaacctttgcttctgcaggaaaaaataatcttgcaaatgcaactctgttttcaaggtagagaagcttcatgtgaagatcgtcagccaacaaaggcgaggtgacagaatcttccactgccataggtttccttatcatctccctatctaatatatcaatacataatctgtctttgtttgactcttggccttgctccatctttgtattgtagtctttcatccttgttaacctccggcagatactcattgcactctggccatcagcagtcaattgtgatacagctgctcctttgtttaggagacacatgataatagctggctctctcctcatagcagccagatggagtgccgtgtatccacgcgaattcttcaaattcaagttggcaagtctcaagtctaacaactccgaaacaactttcgaatcacagtaagcagcagcatagtgcaatgcattggcatcatccaaggtgatctcagattcgttaagaagcaacttcacaagctcaacatcatcagaatccagtgccctgtggattcttctgacccttttctcatgtacagggtctgaaatgacggtgtcaccctcatttggctgagatttttggcgaatctcttttatctgaacagcaacttctggaggaagttccttatccaacgatacattatcaagatttgatcttgcaattctccgaatacatttttcaagcactggagtcagctctgaatgaaaagcaacttgcagaattggaagaacatcttctactagagtcttatcgacgaagttaagaagccgtcgctggaacagcgagatgagctcggtgatcttgaacgcccacgccgcgtacatttgctcgacgttgaacctgatcgccggcgggcacgagtcgtgcgggcacatggggtcggcgcaggacaccacgtcatccggcgccggccggagcttgcccgtgtacaggtaacccagcagcgacaggaaggcatcgcgccccacgcggcctcccggcacgagctcctccatcttgtaccgcggcctccccccagtcctctcccctcccccaccaccgccgccgccgccgccgccggcagccccatcgccgccgcggccgcgcgccgcgaagaggttgtagaagaaggtgctgcgggcggcgaggatgcagcggtggactggcacgggcgggccaccgtcggccacgtcgacgtcggcgtcgctgcagtcgaggtcggaatcgaggaggagccgctcgaggttagcgctaagccgattcaggctcaccacctccacgctactactccctcctcctcctcctcctcctccgccgccgccgccctccccggcggcaaccggcgccgcctgcgccgccaccgcccctgcccccggcggcgcaagagagaccgagcacgggctagacccgttcgagaggtacgaggacgacgacgcgatggtgatggacgacgagggctccat

SEQ ID NO: 20796 - DNA, 2377 bp, Oryza sativa
  Clone ID: TF_OsC102369_1
atggaggaggaatcccaatcccaatcccatttcccgctccggtgggagagcaccggcgaccaatggtggtacgcgacgcccatcgactgggcggcggcgagcggccactacgacgtcgtccgggagctcctccgcctcgacgccaacctcctcatcaagctcacctcgctccgccgcatccgccgcctcgagtccgtctgggacgacgacatgcgcttcgccgacgccgccaggaaccgcgccgccgtcgcccgccgcctgctccacgactgcgagccccccaggggcgccgccgctggcggcggaagccggcccaaccggctcatccgcgcgggctacggcggctggctcctctacacggcggccgccgccggggacgcggccttcgtgcgggagctgctcgggaggcagccgctgctggtgttcggcgagggggagtacggcgtcaccgacgtgctctacgccgcggccaggagcgacagctccgaggtgttccggctgctgctcagcgcggtgctgtccccgcccgagtgctccgccgggggagaaggcgacggcggcaccgccgccattgctgggggtttcatgttccggtgcgagatgatgaaccgcgcgatgcacgccgcggcaaggggaggcaactggaggtcctcagggagctcctgcaggggtgctccgacgcgtcggcgttccgggacgctcagggatcgacgatcttgcacgccgcggccgcgagggggcagcttgagctgtcacgaatgtttggttgtgaaggatcttattgcctctttcgatatagtcaactccacagacgagcaagggaatacggcattgcatctagccgcctttcgaggtcatttgcccgtggtcaaagccctcatcactgcatccccatcacttatatcagctacaaatgaagttggcgacacgttccttcatatggcgctgactggctttaggaccccaggattccgaaggcttgatcgtcagatggagcttatgaagcaattgattggtggagtgatcatggatttaagcagcattatcaatatgcaaaacgacgatggaaggacagttcttcacttggctgtgattggcaatctgcactctagccttgttgagctcttgatgactgcaccgttgattgaccttaatgtccgggacaatgatggcatgactcctctggatttacttaggaaacagccaccaacagcatcgtctgagatactcatcaagcagcttattttggctggtggaattgcaaattcaatggaccatgagaccagatcagccattgcttctcagctaaagatgcactgtatcgtaggcagcccgggaacatccttcaagatcccagatgccgagatcttcctccatgcaggtatcgatgcgtcagacatcagcgaaagaacgaactcattctctagcgttggacagagtgagccagaatttccggaatccagtcgtaagaagctgaactctatgcaaaatgcagcgaaacatctcaagatcctactcagatggcccctccgcaaggagaagaaatcatcatccggtgcccgaaatgaactggacgacgacgcatcctctgtggattcagtcaagagctggagccacggggagaccccgacaccgctgaggcagaagtactccaggatgagctccctgttcaacaacaagcggaccatggcagccaggatcggctcaccgagtccatcgatgaagaagagcttcgcagatggcctcgcacatggcgtgatgcagcccgaatcgccttcaggctcgggctcctggtcgtcgtcgtccttggtcgacaggattgaagccgtccatctggacaagaatggccaagcatctcctgataccagtgtggtgatcaggcgtacacccaagaagcacgggtctttgaacagcaggctcatgaaccaatacttctgcatcggagcgcaggggatagctgtcgaggactcaaccacggggcagcgatcaagtcggatgttcagaagttcacttctgtcagctgcctgaattcgtaatttagacatggtttgctttccttgacttcactgcttacaagttacagctgatctgttagtatgtgcgagtgcatgtgagaagactgtcatatgttgtgtttgtattactgatgcaaaatggtgagatctactaatgtaatgtagtgctgttggtagtgtgtaatgattttgttgggagagtgagtacaatggaaggcatggttttcaaaaaaaaaaaaaaaaaaaaaaaacaagacaatacgagctcactgagcctcgtgcctgccgcccgaaattacattggtggtacacgaacttgttaagtgggtgcaatttagcctcgtgccgaattcctgcagccc

SEQ ID NO: 20797 - DNA, 1482 bp, Oryza sativa
  Clone ID: TF_OsC68848_1
tcaaactgcatagaggcggatgccaacgattaatcttacgcaaaatatatggcacgctgagatatattggtgcacaagttccaactaggaatcctccgtactaccgttggaaatctcacatgatgcacatgacacagaagatgtaatttttacaggacaattggcaggttgagaatgacccatgctggcaacgtcaggattgccacatgatggattttcatacccttgaagctcttgtttgtcaccatcacacaccggtagaacattgtcacgagtacttgttgctttgtcgaatagcgtcaaataaatagaggcctaattaatcgttggttcctcaagttgacatttccaaagtttaattacagcttgtggtttagaagcctgcaattcagggtatatcgtcagctcaagcttgagtggccgagtttgatttcgtgcttcacggggtaaaatcaccgcccaaattttcctagtcaggaattgtggagcaaatgcttccaaaaatccaggaccatagttctccctcatccatccacaaaaaagagaaatacgtccctctatggctcgtacgacattcacatgacccttttctctagccaaatcaagtgccgtgtggcaatcatcatttgttataaacggattagctccatgagatagaagcgaatggatggtcggctcaggacctttcttgtcctcctggctgggtgtggatatcactgaaggtaatggacggtaggcgttcacatttgcacccaattcaatcagcacctgaaccacattgatcagatcaggccgcatgctcgcgaccatcaggggcgtcttcccttccttgtcgatccactcaagacctgcgccctgcgcccggagcgcccgaatcccatcggcgttgccgtagttgaccaccgaaggattggcctgattaaactttggttcctcaagttgacatttccaaagtttaattacagcttgtggtttagaagcctgcaattcagggtatatcgtcagctcaagcttgagtggccgagtttgatttcgtgcttcacggggtaaaatcaccgcccaaattttcctagtcaggaattgtggagcaaatgcttccaaaaatccaggaccatagttctccctcatccatccacaaaaaagagaaatacgtccctctatggctcgtacgacattcacatgacccttttctctagccaaatcaagtgccgtgtggcaatcatcatttgttataaacggattagctccatgagatagaagcaaatggacagtctgctcaagacctttcttggcagcatggtgcaatgcagtcccacaatatgacccaggacggtaggcgttcacatttgcacccaattcaatcagcacctgaaccacattgatcagatcaggccgcatgctcgcgaccatcaggggcgtcttcccttccttgtcgatccactgctgatacaccagctcctccttggattgctgcagccccat

SEQ ID NO: 20798 - DNA, 724 bp, Oryza sativa
  Clone ID: TF_LIB4371-012-R1-K1-H5
gtcgcgttttactccacccacacatcccccccccccccgcgccccgccgccgagctcgccgggcggccggcgagagggcgtgcgcggcgatggggcagggcgccagctgcgggcggcccatcgaggaggtggacttcttcggcgcggcgcattcgggcgatctcgcccgcctcgccgccgccgggcggtggcgcccttcccttctttgtcgcaccacgctcttcgaccgcctctccgccctccacatcgccgccgcccacggccacctccaggtggtgtccatggcgttggatctttgcgtgcacccggacgtcgttaaccgccacaagcagacggcgctgatgctcgcggcgatgcacgggaggaccgagtgcgtgcggcggctgctcgacgccggcgccaatattgtgatgttcgattcgtcgcacgggcggacgtgcctgcactacgcggcgtactacggccacgccgactgcctacgggccatcctctcggcggcgcagtcggcgccggtgtcgcaatcctggggtttcgcgcggttcgtgaacgtgagggacgacaccggagcgacgccgctgcacctcgcggcgaggcagggctggcggcgctgcgtccacgtcctgctcgagacggcgccatcgtgtcagcctccagtagcgcctttggattccccgggagcacgccgctgcatttggccgcgcgcggcggcagcctcgactgcgtc

SEQ ID NO: 20799 - DNA, 2353 bp, Oryza sativa
  Clone ID: TF_OsC22761_1
ttttttttttttttttttttgtcaaacgaaagttgaattgtaagaacaggtgaaaatttctcagggtatttgtctacttgcacgaaagcatctaatgttacagattattatacatcagaagttcaaacctgcatttctcatctattggcactcgaaatcgaatacaacacgatatgtatggtaatagtgatgtaaccgccaaaaaagaatacatatatagcacatacacataatctacaaaatcaaaccattcccatgactcaaccttgtataaacacctggatgaagcagagtggctcaaaggggagatcgctttccgcacctgttgttgtccatccaagtcagaaaattgttcaaaccttctctcctggatcttatgaactgtgtgactgtataagactggtatttgctccagaaatttgtgactagcttcgttgcactgtttgttgaagcgttggccatgcagcctcctcgtcattactgtatccatttacaagaaaatcagcgcagttcctccggcatcctcgactgtaaggattcctgaagcgtccgtcaggcccccgaagatatgcatagcgtgactggtttgctgcttcattagttgtgagattgcgtgctatcatttgctcttccaagaacttacgccataggggagtaatagaaacatagaatactttaagctgtgttgcttgtgctcctgtcagaataagcgctccagtcaataaaaagacatccatgaacatgaacagtacagcaccaggatggtttgacagcatgaagttaatccatgactcagaagatgagagtataatgggctctgtccaaagtctgtggaacccaatcgcagcgcccagaaatgctgtagttgttcccatacaaaggaacacaaaaaagtcccacttatttctccttccaacacaatttgatatccaaggacagtgatggtcaaactgctcaacacagtgcttacaagttggacaatgtttggagcgcattgggcgaattatcttgcatgtggggcataactgagaccaattgcctgtccaagcagaagaattaaggtcaatctccataagtggttcctttggatcaagtcgcttggtattggcttggatgtagcctggattttttctgcttactctgtagaacatcaccaatgaagcaaaggcaagagaaatagcaccccatgaccaaataccaacagcggcagttattctagaaaaattcggtgcaaaaataattgagttcagaaaaagggtgataaggacaataagaaagcaaaacaggatagaagcatatccaatcttccgcgatctccctgagcagtacttgtcttcaaatgttacttttgtagcattggaaaggatataggaaagatgccgatgacctttgtcgtttgcaagttccacaggagtaaacccaccgctatccttcaatgtgagttcctccttggtaccagcatgtacaagaacagtgcacacctcataatttcctcttattgctgcccagtgtaatggagtacaaccatttttgtcttgccttacttgattagcatccataaacagcagtaacctaattgtatcagcatttcctttgtaggcagcccagtgcaatggactcctcccatcattgtccaaacactcaaagtctgcaccgtactttgagataatgtggtgcaagaatgctgtttgtccatactgagctgcaacatgaactgcccggtagccattcacatcggccgcctcgaccctcgcaccgttctccagcaacacgtccgccgcagctatggctccacgcaccgccgcccagtgcagggccgtctgctgcgcattgtccccggcgttgacgtcgcctccatgctcgatgatgtagagcgcgacgtgggggtagttgttgagcgtggcccactggagcgcgtggtagccgttgccgtcgggcgccgcgagcgacgcgccgccgtcccgctccacgaacccgcgcagacgctccaggtccccgtacgccgcggcggagtacacgtccaccacggggtccccctccccgccgttcgcccgcgcctccctcacctccaccaccccctgcttcacccctccacctccgccgccgccgccgccgtcgccgaccacctcgatctccgccatcccgcgcctccctcacctccaccaccccctgcttcacccctccacctccgccgccgccgccgccgtcgccgaccacctcgatctccgccatcgaggcgaagctaggttttcctctctctctctctctctctctttctctctctgttttttttttttttttttgcgcgcgcgagggggaggaggtgaggttggctaggtcaagatcctcgtgc

SEQ ID NO: 20800 - DNA, 2891 bp, Oryza sativa
  Clone ID: TF_OsC6747_1
ctgcaggaattcggcacgaggtcaagctcgcgttcgtctacaaactgccctccatgtctctcccccgccgctttggatcaatcgtcagcgactcaccattcggcgactcggccattgacagcgatagtcgcacgggttcttgcttatttggatccgttcttccggggagcgagctaaccgggcgagcgagatgcagcaccagcaagctaagtttggttctgagtaaccgggctggtgggttagggtttgggggaaatcaagaaggcgcaagtggtccatattttcttggtggtgcttggtttcttttcaaccgtagagttcttcggtacttcagaaatgatgggtatgaatggcgaaaaaagaagaatgggaagactattgctgaagcccatgagcgccttaaggttgataatgttgatgcactgaattgctactatgcacacgcagacaaaaactctacatttcagaggcgtatatattggatgcttgatccggcttatgatcacatagtttttgtccactacagagatgttcaagagggcagcatttcagtatcagcactgaatgattcatcaacatccaatcagaatggcagtggtagcagagctgaggctcaaagttcacccggattgactagcgagctatttgccccatgtcttaattcatgcagtccaggatctgcggaagaagttagttcccagattatggccataaacaacgaaacaaatagcgttagtcaacctgattgggttcaacattgtaatcaggcagcgctgcgaaaacttaaggtgcagctgagtctggaagatagggaagatcatgatgtcgatgccaaagatattccatcaaacagtgaacctatcactgtgtatgggattcagaatgaagaaccaggcacttgtagaaatcttgcagatgtttttagtggactggagttcagcaaagaaaatcatcctgaagaaaccggactccctttttccagcactattgatgtgctgaaaaattcagacacttggttggaggaggatcagattgaagcaattctgcattcagcatctatgatagtgactgaaaaccaatggttcaatattcgtgaggtttccccagaatggtcctattgttctgaaagtacaaaggttatcattgcaggagacttccttcgtgatccctctcatggttcatgggcaatagtatttggcgatgttaagttgcttttcgatggtcatgtttctgagcaatttttaaagtttggcttgccattcccaaatcttgaatgcggactccaagttagcccatctgaaattatgaagggggcatctgagcggctgaaccgtgacaccgcagtaaattgtgtcatggaagtactgcttaacaacaagtttgaagagtggctgttttctaaatatgaacaaaatagtgaagggaatcattttctccctaggcaataccatggtgttatacatacaattgctgccttggggtacaactgggctttgaaacttctgcttaattcaggtgtacttgtaaactaccgtgatgcaaatggatggactgctttacattgggctgcacgatttggcagggaagagacggtagtgctccttcttgatgcaggtgccgcagctggtgcactgtcagacccaacagcacaagatcctgctgccaaaacacctgcttcagtagcttctgcatatggtttcaagggcctttctgcgtatctttcagaagcagaactaatagctcatcttcattctctcgaatcaaaagaaaacgggtcttctggagatcaaatatcaagagttgtgggcagaatatcagacacatctgcccatgcacaaagtggtagcgatgatcagcttgcactgaaggaatccctaggagctatgcgatatgctgttcaagctgccgggcgcatacaaactgccttccgtattttttccttcaggaagaaacaacaagcaggtcttcagaatagaggtaaccacattatatccattcgtgaggtaggtgctgcttcacacggtatgcttgagaaagccgcgttatctatccagaagaacttcaggtgctggaagaaacgcaaagaatttctgaaaatacgcaaaaatgtcatcaagatacaggcgcgtgtcagagctcatcaacaacataacaagtacaaggagttacttcgaagtgtgggcatccttgagaaggtcatgcttagatggtaccgaaagggtgttggtttacgaggattccaccctggggcaatagcaatgccaatcgatgaagaggacgaagatgacgtagccaaggttttccggaagcaaagagtggaaacagctctcaacaaagctgtttcaagggtatcatcgatcatcgacagtcctgtcgcgagacagcaataccgaaggatgctcaaaatgcacaaacaaaacaaggatgatgatgaaaaagtagaagtttctccagcatctcatgtttatggcagtggcagtcatcacatgtgttggctaagctacaacaagcaaccaatgttctaggcagtgcagtcatcacatgtgttggctaagccacaacaacaagcaatgcactagctggccagtattgccatgtccgaccttgttaaatgatctgacgagcagttggccttatgaagaacagtaaatccttggcgattcactgtgcagcgaatcctgaaaaaccagaggaatttatcgatgatccagtaccatcactggttcttcttgcccttgctctgaaaaaatgtgttttaccttttgtacataagaaaaatcatgtgcaaagctgactcttggccaatattcagaaaaggtgtaccctctttgcatttgttacccttgtgtatatgataatgaatgtgtggtgaatctttaaagtgaagctta

SEQ ID NO: 20801 - DNA, 1350 bp, Oryza sativa
  Clone ID: TF_OsC50757_1
ttcggcacgaggaagcgcgagggcttcactctctccacaacgacaaggacagagagaaaaaccccaaattccaatcccaaaccctaatccccgctcgccatgccgagggggcgcgtgcccggcggctcgaccgccaacttcagcgcccacctcatcgcggcccagctcgggatgcagtgccgcatgggtcccgcggcggcggagcagatgaggcgcgtcatcgcgtcgtcggactgcgacaccggccgcgtcatgaggatgtttggtgccatggaaggtggcgacagtgattctgattctgatgactctgcggagacggagaaagttgggccactgcatgaggcagcaagcgcagggaaaatggatacttgcaaacatttggtggagcagcttgggtttgacatcaatgctgaagcaagtgatgatttgggtatgacacctttggcttgtgcggtgtccaagggaaaagcaattgctgtgaggtattttcttgacaaaggtgctgatccaaataagcaagacaacatcggttttactcctctgcactatgctacaaaagaagggtatgatggactggcacgactactgctgtctaaaggggctagtgttgatgttatttcttctaaaggcacagccctgcatcttgctgcctccagttggaagtctggcatcatgaagattctattggagcacaatgcagatccaaacaaggtctccgcagattcagagacaccattagctgcaacacttattgcttctgatggactgaatgaacctgctgtgctgaagtgcataaagcttcttgttaaggctggtgctaatttgaaccgcgctattcctgatacaccactggtgatagcaactaacaaagactttgttgaatgtgttgagtacttgttggaggctggtgcaaacgccaatattccaactaataacggtggtaagacaccaatagaaatagccgcgaagtctggaagaaggaagcttgtggagattctatttccttgcacgttgccaattaaaggtgtgtcaaactggactgttgaaggaatcatcacccatgtgaaatcaaaaaaatcaaagaagaaagcatgcgctcaggataaggaaagtggtacagacaaaaaggctcagttgaaatcattgggtgcaagtgcagttcaggggaaggactatgttggtgcatccaaattctacagtgagatgagggtgagaggagtagcaactggcatttccttggtgaggttaaacatggaagaggatgaaaaagtgcctggaagttctaataccagttacatttagacttgcataggactgaaaccagattgggcaaaaggttactatcggaaa

SEQ ID NO: 20802 - DNA, 1674 bp, Oryza sativa; identical to SEQ ID NO: 10930
  Clone ID: TF_OsC75595_1

SEQ ID NO: 20803 - DNA, 1566 bp, Oryza sativa
  Clone ID: TF_OsC52071_1
tttatatcgcgagcgccgccctttttttttttggttgtttcgcatacctaacaaaaggggaacatcactgccaagaaaacaaagtttcggtgaaagttctctttcattggctacaggccacagccgataagcatctacaggagtagattagtagtcgattgcagtggaaacgtcacatgcccgatggaagttccagctccggagatggtgtatggaattcagaaacacgcttgaacaaacgtagcagcagccaaagcagccagccattgacgcttagcacaatttgctggccattgacgcttagcacaatttgctgacaatccattggattattgctccggttctgattctgcttggcaaactgggaggtggtaagtatccaattgccagtatttctgcttcaccccattccatatttcctctgaaagacaatctttgactgggagcgggatgaactgtgtcgagtagccaagatttgccaactctaacgctacgagctggcaatacacaacgtggaagaaggcattatcgccacagaggccattgaaatacgagtagatccctccaggcttcaatagcttaggaagatgttggtggaactctctcatatcctcgtagtattctccataggtgtcgaagaatataccatgctgttttgtaatgaaataaacatgaacaaacatttttggatagtaatgaataaggaggactgaattatccaatgcaatgattttattgagtatagcatcatatttatcactggctgcagaaatctgagacgaatccaaaaggtagaaatcctgctttgcaatcccttcaaaacaagagaccgacaactcatcataagagccgagctgcgggagcacgtcctgccaccgtccgaacacgaccttgacattcttcttctcgccccagccgagcttgagcatccgggcgtacacctccgggtgggcctcgacgatggtgtgctcctcgggctcgtacctctggatcgccgtgtccacgagccccatcccgaatcccacgttgagcaccttgccgccggagcacaccgcccgcgcgtgcgcctccatcagcggccgctcccactccatcatcacggccttgctatccgcgtccatcaccctctcctcgctgaatgaaaccctggattcgaggtagctctcggcgggggagtccgcgggccccgcttggcggcgagcgacggtgccgaggacgagctcggagcggagggcgtggtcgaggaggaggtcgaaggtggcggaatcggaggcgaggtctcccgcggagatccccgtgggggagagcgcgttccatggcgcgccggcgtcgaggagaagctgcacgacggcggcgtggccaccggtggccgcgtgcatcagcggggtcaacccggaggcatcgaagtgggtcgggtcggcgccttcggcgaggagcccggtgatggcctccgcgtcaccggactccgccgccgcgcagaggagctcctccggcgatttccccgccttgctctccgccgccgccgccattttcgccggccgcccggggatccactagtttagacgc

SEQ ID NO: 20804 - DNA, 649 bp, Oryza sativa
  unsure (1)..(649): unsure at all n locations
  Clone ID: TF_OsC55485_1
caaggatgtgctgacgctaaacaattctcttctcactgtcgcaaacatggatggtgagacaccactgctcactgccgtgacaaatggacacatgtctttggcctctattctacttgaatgctgctgcacactagggttcagtgaggcaatcttgcaacaagacagaaatggttgtaatgcactgcaccatgccattcattgtggtcacaaggaccttgcactggaattgatattaaaagagcctgccctatcaaaagctgtgaacaaatacagtgagtcaccaatgttcatcgcggtaatgagagattttacagatgtttctgagaaactgttgggaattcctggatctagccatgttggaacatatggccacaatgccttgcatgctactgtgagaaatggaaatgcagttatggctaaaaaaattttggagggtcgtccttggctggggaaagaacgaaccagagagaggaagaccccaatcctgatgacggtaatttgggacaagatagacgtgcttcgtgtgttgttggaacatgatgtgcttttagggtatgaatgctatgagatngtggtaatctgagccctcttcttgttgctgctgcatatcgaggtcatgttgatgttgctcaagagcttcttaaccact

SEQ ID NO: 20805 - DNA, 1040 bp, Oryza sativa
  unsure (1)..(1040): unsure at all n locations
  Clone ID: TF_OsC24838_1
gcacgaggcgaaaccgcgctgtacgtgtctgccgagaaggggcacactgaggttgtgagtgagatactgaagttttgtgatctgcagtcagcagggctcaaggctactaacagtttcgatgcgttccatattgcggcgaagcagggccatctggatgttttgaaggagctcttacaagcatttccagcattagctatgacaacaaattccgtaaatgccactgctgcgcgtgctgctgccactcagggccatattgatattgtcaatcttctgctggaaacagatgcaagcctagccagaatagctagaaataatggcaaaacagttttgcattcagcagcaagaatgggtcatgtggaggtggtaacagcattgttaaataaagatccagggattggttttagaacagataagaaaggacaaacagcactgcacatggcttcgaaaggccaaaatgctgaaattctgcttgaattgttgaagcctgatctctcagttatccatgtggaagataacaaagggaacagagcattgcatgttgcaactcggaagggcaacaccgttatagtccagactctaatatcagtcaaagagatcgtaatcaatgcagttaatagagcaggagagactgcttttgctattgcagagaaactaggtaatgaagaactttctaacatcctgagagaggttggtggtgaaactgcaaaagagcaagtaaaccctccgaattcagcaaagcagcttaagaagacagttagcgacattaggcatgacgtccaatctgggatcaagcaaacacgtcagaccaagatgcaattccaaaaaatcaagaagaggattcaaaagcttcacattggtgggctaaacaatgccatcaactccaatacttgttgttgcggtgcttattgccacagttgcctttgcagccatatttactatccctggtaattnntctggaagatatggaaagatccacatgatcccaacatgaccttagggcaagcatttgtagcaagcaatcccgcatttataatcttctg

SEQ ID NO: 20806 - DNA, 398 bp, Oryza sativa
  Clone ID: TF_OsC308714_1
cccccgatggaggagaaggggatggggaagcagcggtgggagaagatgctcctccaggccgccttcgacggcaaccttcgcctcctcaggaagatggcgcgcgggctggtcacgacggggcgcggccgcggcgaggcggacgtcctggcggccgtggcggacggcggcagcgggagccgcgcgctgcacctggcggccaccgaggggaggatggacgtcctcacgtacctcgtcgaggacctccgcctcgacgtcaaccaaaccaacgacagaggttctgatctctgattcctttctgcgttttttgggagaactgcatctacaagatatctgcttgatcatggtgctgatccaatgattgttggtaaatcaggatcacctcttcatgcggctgccgg

SEQ ID NO: 20807 - DNA, 1581 bp, Oryza sativa
  Clone ID: TF_OsC115270_1
atgcctccttccctctccctccaccaccacctcctcctcttccccttcccttcccatgtccaaaccctaaacccgctctccgcctctcctcgcctccacccacatagcaaatctctcctccccaggcgccgcccgctcgttacctctccctcctccttcgccgtcgccgccgtcgatgaattcgacgaggatttcgccatcggcgactgcgtcgtgttcgaggacgacgccttcgaggagcccgatgtcgacctcccctctccggcgccatcgaccacctcgcgccccaggcggaagccggccgcggaggccggcggcggaggggggagtagcctggtgccggagaggtggagggacgcggcggaggagataaacctgacgaagaaggagaagcgccgcatcgcgcacggcttgcgcttcgggagccgcctcgagcggcgggcgccccccgccgtggccgcgcccgatgagtaccgcgcgtaccgcgaggggaggctggacgcggagctcggacgcgtcgcgcgcgactaccccgagccgatcgagaggtcacccgtaccggatagagtggaggctccgccgcctcctgagcctggtgctcgtgtggcacctaggaatccgaggttggggctgggccgacggaagctgttcacagatgaggagaaggttcttctgaacaagagagtacctgatcttgaagctgctacttctagcaagtggcttccacttcacacaattgcagcatcaggagatttctatctgttggacaatcttctaaaacataatattaatgtgaatgcccttgataaggatggtttaccagctattcataaagcaattctttccaagaagcatgccattatcaactatctcctaaggaattcagcaaatccattcatccacgataaagatggtgcaaccctaatgcattatgcagtccaaacagcatgcagtcagaccataaagactctcttgctgtacaatgttgacattaatcggccagatgattatggatggacacctttgcatctagctgtgcaaacacagagaactgatatcgttaagctactcttaataaagggtgctgatagaactttgaaaactcaagatggatttacccctttggagttatgcctccggttgggtcatcatgcaaggacgtatgaacttatcaaattactcaagagctttcgtctaccaaagcaacatgacccagttcagcacttggatgatagaggttgctccttgaagggaatcaacaggttgtggtatgcccatgataattggaaggccaaagttccatgatatcaatgctgtataatcttaagaggttagccataaaaaactcaagatacccaaattattaatgccaaatataagtttagcgtgacctgcatacttttacatttccagtagtattattttctctttctaccccattaatcttagatattcctagcatcttggatacaaatattaatcaagaattattttgtttctccttcacgtcccgattgttagtgtaaattctcactgcatcggcagaacagatataatttttctcaccacatgtgaagtggt

SEQ ID NO: 20808 - DNA, 2080 bp, Oryza sativa
  Clone ID: TF_OsC1528_2374
ggtttttggtttatacatgtggcttcattatatgttttgaaacctgtaacaatgtttagtatgtttgttgtttgatcatgtgagggtcctaaatcctactagtaactcagtatttgctagtgaaagaagtcaggatatgctgttttctccccttctcatctatgaccaaaatacattctagaggcttattatagaaaaaaaagtgtttcaacaagcataccgccaaagattttctgtagtcaagtgcgcttaaacaccttccgggacattgaagcaacagtataaagcatccttctggactcacttgacaatgggggccagcccatcgaaccaagatttcccattgatttgattgggttacacgggtggtccatactcttggtccccttcgtgctcgcttcagcacttagcaagtccttcctgcttagttgacaggatggaactatctttagctgcaaccgtcgagacaacaccgatttccagtatgggaagaacatatctctcacttcgcgtatggctgatcctttaggtggttgctttcccaggatcattttactaacttcgcctatatcagaagatgacttgtccgcttcaatagtttccccatagcccactctttgtgaatctgacttgccaatcgacatccccccaccatgttggtagcattcaagttttccagtgtcaatgctttccccagaatgagcaatgccattgctttttagaattgatgaaacatgttcaacaatttcgtcatggcgcacctgtgaatgagtttgaatgtatccctcaagagcttcaccggctttgtgaacaatgccaactagtacaagtgctgtaagaagggcttccttcttgtctttcaatctctttagtgccctgccattctttccctccttaaccatatttaacccctcaagatgtatggtgttaagagcatcatcaatgtggcttttaacaatatcaaacccgttcagagaggctttgccactgctgttgttaaggcggccacggagctgcttttgagcagccagcagcaaaattgctgcctggacatgcttttcttcacgaatgtaattccatacctcgtcgacaatgttatctgtctgtttggcaattaatctagtcgtgtccaagaacattttcatctcaggaagacaaaggaggaagatgaggttgatgatatggtccccatgagcccaatgatcctcaatgtacttgtgcatgctggcattctcgacagcaacatggagagggaggaggccctcaatgacatactcgcccttggtgcagatgttcgccgatgcgccgtaacggaagaggagtttgaccatgtcgacgctgaagttctcggcagccatgtgtaggggggcgaagccatagcggtggcgggtgttggggtcagcgcggcggcgacgcaacagaggagaggtgccctggagtgcgaccctggcacaacgcagagcgttctcgttggccatgttggtgaggatatcaggtaaaaggaagtttccccgtcccatgaaacctgaccaacaattgtagacttgaaagaattgcttgacgctatccttctgaattgctggacgaagtttcggcaatacaacacggacgtacttacttaacttctcctggaacttttcctcgaaatatgctttatatttaggattttttggcacgataccatggataggatcacagttgacgagatcctcaatcttctgcttcagtgtccaagattcgtaatcttcggctccagcttcggcttcgctgggggtgactggtgaaggacagcttccatcttccatcgtcatgcagcaacgtccggggaaccggcggcggcggaaaccctagattgatcccctcccggccttgcccaggaaagggtatgaggcgaggggtcgccgctgctggagaggagagggtgcggttgcgctgggcacccgctggccgccgacggcagcaaggtagatcagtagtgcgagggtaggcggcggcgacggaaggcaggtatgggagcagtggaggaggctaggtttggggaagcctcgtgccgatcctgcagcccggggatccactagtt

SEQ ID NO: 20809 - DNA, 3458 bp, Oryza sativa
  Clone ID: TF_OsC29324_1
atggcggcggcggcggacgcgcggcgcttcgcggtcgtgccgcagctagatattgcgcagatactgaaggaggctcaacaacgatggttgcgtcctgctgaaatttgcgaaatacttaaaaactacaaaagtttccgtattgcaccagaaccaccaaacaggcctcaaagtggctcgcttttcctatttgatcggaaagtattgagatactttaggaaggacggccataattggaggaagaaaaaggatggaaagactgtcaaagaagcacatgaaaggctgaaatctggaagtattgatgtgcttcactgctactatgcacatggagaagagaatgagaacttccaaaggaggacttactggatgttggaagaggattttatgcacattgttcttgtacattatcttgagaccaagggtgggaaatctcgtactaggggcaacaatgacatgcatcaagcagctgttatggatagtccattaagtcaattaccttcacaaactatagatggtgaaagctcacttagtggacagttctctgaatatgaagaggcagaatcaggaggaaccggataccactctttcactcagatgcagcagcagcaaaatggaattggacctgtgactgatgcttctatgttcagttctcgtgtttctgcttcatccataggtaattatcagggacaacatgctatgggacatacaacaaacttctattctagtagtcaacatgattcacctcttgttctcagtgatccaaaccttgaacttgcaaataatggacatgagtcattgtggaatggggttatgaaacctgatgaagggactgttcaaatgactcatctacaacctcctgttcatcctgagcaaggcatgttcaccacagaaggccaaggggttgaatatttgacattcgatgaagtatattctgatggactcagtctgaaggatataggtgctgcaggtgctgatgtagaaccattctggcagttttcttcaaacagctatctaacagaagccattgcatttcagctctctagtgctactgctgatatatctgcaacagagaacagcgtccaacaaaatgatggatctctaggggcagctattggcttcccatttttgaaaactcagtcatccaatctatctgacatcctgaaagacagctttaagaaatctgacagttttacaagatggatgagcaaagagcttcttgatgttgaggattcgcaaattcagtctagctcaggggcatactggaacactgaagaggcagatagtatcatcgaagcatcaagccgtgagccactggatcagttcaccgtggcccctatggttttgcaagaccagctattcagtatagttgatttttcgccaagctggacatatgcaggctcgaagaccaaggttttagttactggtagattcttacatgctaatgaagtcacggagagatgcaagtggtcatgcatgtttggagaagttgaaattcaagcggagatttcagcagatgggactcttcgatgttattctcccccgcataaaccaggcagagtccctttctatgtcacctgttccaacaggttagcctgtagtgaagtacgtgagtttgaatttcgaccaagtgactctcaatacatggatgctcctagcccgcttggtgcaaccaacaaagtttatttccagatacgtcttgacaacctattgtccctggggccagatgtgtaccaagctactataactaaccccagtaaggagatgatcgacttgagcaagaagattagttcactgttggcaaacaatgatgagtggtccaagttacttaaattggctgatgataatgagcctcttagccatgatcagcaggatcagtatgctgaaaacttaattaaggaaaaattgcatgtctggcttctccataaagtaggcgatggtggcaaaggacccagtgtgttagatgatgaggggctgggtgttcttcatcttgcagctgcccttggttatgattgggccataaggccaactgttactgctggtgtgaacataaagttcagagattttcatggatggactgcattacattgggctgcattttgtggcagagaacggactgtagtagcacttattgcactgggagcagctcctggagctttgacagatccacatcctaattaccctgctgaaagcacaccagcagaccttgcatctgctaacggacataagggcatctctggtttcctggcagagtcctctctgacaagtcatcttcaagccctcaatctgaaggaagccaatatgtctgaaatatctggtctacctggtattggagatgtaactgagagaaatgcatctcagcctgcaattggagattccttaggtgctgttcgaaatgccgctcaagctgctgctcgaatatatcaagttttcagggtgcaatccttccagaggaaacaagcggtccaatatgagggtgacaaaggtggcatatcggacgaacacgcactttcactcctgtctatgaagccatccaagtcaggccagcttgatcccctgcatgctgcagcatctcgtatacaaaataaatataggggatggaaggggagaaaggaatttcttctcttcagacaacgaattgtgaagatccaggctcatgtgcgaggccaccaggtgaggaagcattatcggaaaatagtttggtctgttgggatagtggagaaagttatattgcgctggaggcgaagaagggctgggttacgtggttttaggcctacagaaggtgcaatagagagcagcagtggtggcacaagtagcaatttggtccccacgcgtccggctggagatgattatgatttcttgcaagaaggacggaagcaaactgaagaaaggctgcagaaagctcttgccagagtgaagtccatggttcaatacccagaagcaagggatcagtaccaaaggattttgaatgttgtttcgaaaatgcaagagtctcagaccgtgcaagaaaagattttagacgaatcaaccgagatggatgaaggtgatttcatgagtgaattcaaggagctgtgggatgatgatacaccactccctggttatttctagtgttctagactaactggtggtgtctctgtaaatctcttctcttcagttctgctgaattgacacctgccgataacccaaactctcaacatagcatgaatagcatgatcttaaaatcttgaatgcttggatttggattcagttgtggtattcttgcttttatgttatagcgttatgtacagtagaatcttattttatcattgaaggagccatgtatatgcagtatgaaactaatgcagaaagttggtggttgtatcatttgaattcaaagctgcatgtgtgctaagcaatttcttgcattagagaaattcgatgtagtgtggtaacttttattgaaaggatgcagtgtggtaattgat

SEQ ID NO: 20810 - DNA, 1582 bp, Oryza sativa
  Clone ID: TF_OsC180174_1
gtcgttggtagttacagtggaaagatgtgaagcagtctgacaggtgaggtgaggccaaaaggacgatgcagtagctgctcaagggttattcggatcttcagatcaagcagctctcttcagacactcgatcgcctcccttaacgcgttcttgacctcgtcgctcatggggtcaagtttcagtgcctccccgaatgcgtccactgctcctttgtagtccttcatgaaactgagagctgcgccctcacggtaccatgccttggaccaaccagggcgcagcatcctgcactgctgtgcatccagtaaagctctgtccccttctcgctgccgcagccagcaaaggctccggttggcaaacaaggtggcatcaagtggggatttatccattgccagggtgtagaagtagatggctgtaaggtagtcaccctttgcaaatgcttcctttcctttcgactttgcatcagacacttgttcttccacaggactacatacctgaggttcaatacgtgtggttctcatagttctaattatcccgtcaacattccaatctggcagacatggaataggttttgtccgaggaaatagaatttcaacaagctctcgttgaccacgagctgctgccaccatgataggaatcctcccttcctgctcgtcaggaatgttagggtcagctccagcccctaccaagaatttgacaacatcggttaaactgtcatcaaccgcttcagttaaaggggtaggtccattggtactattaccgttcacatcagcgccagcctcaacaagtagcttcacgcatttcaaggagtgcccgcagcatgccatcatgagtggtgaaaagatatgattgacaactgataacaacgagaaccaccacttacatcagcacgctgtgcaacccgaacattcatgggatgaacccgatcctctgatgcagacaagtacagtcgcaccacacgaaaattcagaggctccacaggaactcctttggacagcaatccccctacatcaggtatggctgggtcaccaccatgatcaagaaggtatattaaaacattaatgtcccccaatgcgcgagaaatcattgatgtgcacgcacctctgtgagagcctgagttgacatcaaggcccgattcctccaccaggaacttgcagatctccagatgcccatagcttgcagccaagtgaagcgcatttcgcccattcatgtccttgaatccccgcaggtccaacttcttggccatttcacacaggaggtggaggtcgccgtcgagggcggcctgcaggacgacggcggagggggaggaggccatttctgcggcggcgtcgccttcgcgggggcgagggttccagaaggttctagaaggagaggcgcccggcggtcaaacagaacgaaatcaacacccgattcgtcaatcgccacccagatttttgctatgagctaccgcgcagggaacatcgcagctgcaaccaccccagatttccccccacatccggttgcgtgcgttgcagtccactacgccacacgatcgcaccttgccgaatcaatgggagatgctcgcctccaaaaaaaaaaaaaaaaaaa

SEQ ID NO: 20811 - DNA, 2365 bp, Oryza sativa
  Clone ID: TF_OsC58329_1
cttatctctccccaactccgatccccacccccatggcgtcggagatcgaggtgctcgaggacaccaccaccacgatggccgcctccgccgcccccgtggcgcccgcgtccccatccccatcccccgccgccgctgccgacggcgaggagggggaggggccggcccctgcggcggaggacgactcgctgaagaacgacgtgtacacggcggcggcgtacggcgatctggagaagctgcagcggctagtggagggggagggccacccggtcacggagcccgacggtctcggctaccacgcgctccagtgggccaccctcaacaaccgcgttgccgccgcgcagtacatcctcgaggttgtcccccattgtgcttcgcgcccgagcgtggcgcgatttggctggccttcgagtagtcgttgtttgctagctagcgagggatttgggtgggggtttggtgtattcacttttagctcattggctggtgttttggataggctccattatttatttagctgcttgtgacatacccatggagcagatgtaaatgctgtggaccacactgggcaaacagcacttcactggagtgctgtacgtggacacatccaagttgctgagcttcttctgaaagaaggagctaaggtggatgttgctgatttatacggttatcaggcaacacatgttgcagcgcagtatggccagacagcatttatttatcatattgttgcgaagtggaatgctgatccagatgtccctgataatgatggaagaagcccactgcactgggggaacctggaggcatgcactgtgctagttcaggctggcaaaaaggatgacttgatggtgaaggataagactggtctaactccagcacagcttgctgctgataagagtcatcggcaagttgcattttttcttgacaatgctaaaagggtatatgatagaggatgtgatgggaataccaattttggaaagctatcgaaactggggctagctcctgtactttggtgtattattgttggcttgcttgctacatatatacactctgttatatcaggtcaatatatcatggatatgacagcaccatttgggctgtttgcatggtcaggagttttccttgcaactgctggcctagtcatgttctataaatgtagcaggaaagatcctggctacatcaaagcaaatatacgagattcacaaaatcaaagggatgatgaacctttgttgaagttggagttagacaatcccgcacttctgtctggtaactggtcacagctttgtataacatgcaaaattgtgagacctgttcgttcgaagcattgttctacatgtgatcgctgtgttgagcagtttgaccatcactgtccttgggtatctaattgcattggcaagaagaacaaatgggaattcttcatgttcatcactctagaagtttttgcaatgatcattactggttctgctgccattataaggatggtaagagatccggcttctccagcatcctttattccttggctcagctattctgcttttaaccatactggggcactttcctttttcataatggacctcttccttttcttcggtgttgcagttctagcagtagtccaggcatctcagatagcgaagaacattacaacaaacgagatggcaaattccatgagatacagttatctaagaggtccaggtggaagattcagaaacccatttgaccatggagcgcgcaagaactgctcagaattcttgttaaatggatacaatgaggacattgaacgtcttgatcatacgtcacacactgatgaggaaatgggaatgatacagatgacaaacgcagtctctcagaatggcgagggcccttcccaccatggtaacggcactggccattcttgtgctgaatcacatgctcactcaaaatctcacagtcaaattgtatgtgttcatgctgaggctccattatttatttagctgcttgtgacataccacataggtttcgctagcttacgttaatattgttggggtgctagctgtgtgaaaattcagatctattagatccagtattttttgtggtgaatacataggagatgaaggtagcaaggtgctcatgaatatccgctgatccgcagttcagaaatgtcttgtcgctcctgaaaagagggcaacaattttgtgcagatgcagcagcatgaaacatcttcattgctgtgtcccttggtgtcaatataactccagcattttagcttctggatcttacatctgtgggaaaatgtagttgtaaactaagataattgtaaatttattagcaaattctgaatttagatactcttgttgtgatctatagctgtactgacagtccagaaagttgtaataac

SEQ ID NO: 20812 - DNA, 2135 bp, Oryza sativa
  Clone ID: TF_OsC60113_1
tcagctttttgaaagtgccaagaaggcaccaacgtatgccaagatgtttgtgacaacgaagacagaatagttacgcgagtaagtgccggcaaacggatactgccgagcgacacgcctgtgatgtctctcaggcaataaactgctgaacataaacttcacgaagctgatccacgacgccggcttagtcaagatcatgatgctcaagaccaagacatagatcccattgattatgacttcgtatatcacaatattgattgtcctccttctcatgacggcgaccagagccgcccagaaagccacgatcatgccgatcatcgaaacccacatgaagtgcagagctaaaatgaagctcttccatgaaccagatgctttcccatacacaataagtatcactgcgacaacggaagtcgtcatggcgacgctgtcgaagacgatgaagaatttgtaggcggtcttcgcctggaggaccgccttgccatcgtccccgtagcccccgggcacgttgaacgtggcggagaaggcgacggtggcgacgagcacggccacgacagcgaggctgttggacgtcttccttatccaatctgttgtgtcattgcctctccattgattcaggtggtcttgcctctgcgggcaggattgtgccccgtaggcagacagtgtcaccacaaggcttattttagaccaggtatcttctctgcttgttctcatatctctcttcttcctctcctttttcccggattcagtctcaaggagaagatcagaagacatggagaggaagctagacgagttggcagcgagatcaaacggtgtgtacccatcgttgttcatgatgttgactcgtacgttgtctccggcggaaagtagtgcggctagtcccttacaggggacgcggctgcagccaccgcgaggtggagcgccgtgttgccatccttgtcctgcgcgttcatgatgccgcaaagcatcgggttcttgacggcgagcgagatgaccggcgcgtgccctttctcggccgcggcgtggaggaacgtcctgccgcggccgtcgcggagctcggcggcgtcgggccaggcagacatcagctcctcgacgacatggtggtggcccatccgcgcggcgacatggatggccgagaggccgtccgagtccttcaggaacgccgtggacggcggcgcggcgcgcacgatcgcgcttacgatggagcggtcgccgtcggacgacgcgagatggagcgggctgctgcctttgacgtcgcattgtccagacagagctggcttccatttcaataccaggtcgaccatttctgagatctggaagacggcagcgtgcagagcattctgcttgttcggcccaacgggcgatgcatcgctgcacgtggtaatgatcgctttcacggctgtaaccgacttactcatcaccgccaagtacagcggcgacacgccggcggcattcagctcggaggacagctccggcgccgccgccgagacaagggcctctaccgccgcgccatggccgttcctcgccgccaggtgaagggccgtatctccggcctcgttcttgcatcccaggatgctgtccagggccagcagctggacgatggccgtgacggccccggcgtgtccggctctcgccgcgcagtgcagcggcgtgtcctgcgacgagttccggcgagagaggaggctgctctccttgaacctgaggtacacctcccggatcagctcgtcgtgtccttgctccgcagccacgtgaaacacggtgttactctccgcgctcacctctgatatgttgcactggccatgccgctggtcagggggcccctgacttggcggggcccagggcgcttgcactgctcgccctgccccagggccgggcccttccacctctctaccattatgcggtaccatccaagtaccattgacttgatcaagatgtccctgcgcaacaccaccatgccgtggctgaagaaggagcgccatgacctcctcggctcgccctttggaggcagcgagatacagagccgggcacatctccaagccacctgcagaatcacctctcgccgtcaccgccgcctccgagccatggtgctgcgaagaacagcgcgcgagctggatgtcctgcatctgacgatgatgatccat

SEQ ID NO: 20813 - DNA, 1166 bp, Oryza sativa
  unsure (1)..(1166): unsure at all n locations
  Clone ID: TF_OsC20490_1
ggcccccccnttttttttttttttttttttttttttttttttttcgtggtgtttgggcttccctccgtttgcctgcctccttcggtgtttgttttttttttttttttttgagacaaaaacaccatcgagtactcaagctggtaatcagttatacttactgctagttcagtaagaaacacagttagtatcacgctcatacagttctgtccacatcccagcttgccatacgagaacaaaggatatataacaaaacgtagagggtgccatcaaattgcattctcgcgtcctacattagtctagtcagcttcttcctcttcctccatgtcatttgcacttattagatgcccaagtgaaactttggcttttttcagttccggtgacctcagtgcagcagcaatgccatcgcttttcctcttctcgccaaaccccgcttcatcttcgtcttttgtagcctcacccgaggacttgtcatcgtcaggcttctcagcaatcgttgacacagaatcatccttcttctccgatggaagctcacctcccttcttcaatgactgctcacattctttcaggaaatcacgaacatcatccttctctgcaacatgtagagccgtctgacccccttttgtctttgcggcgatgtctgcacctttcttgactaaatacttcacaagctccaggtgggagttctgcgaagcaaagtgcaacgcagtgaagcctttcctgttctttgctttcacagaggcaccagatgccagcagctcacggacaacctctacatggcctttctgagaggcaaaatggatcgcagcggtgtcatccatagctgcagctccaacatcagctttgtgcttgcaaaggcacttcacaagctcaacatgtccagcccatgctgccaaatggagtggggtgcgagagaggcgatctctggaattgagggcgagagggttggcctcgcacagagactccgccgccgccaaatctcccgaccgcgcggccttgtgcagatgcaagtcatcctcctcgcctcctccgcggcctcggcctccacggccacgaccgccgccgccgccgccgccgccgccgtgacgcctccccatctctacgctgcagccgctccggatcagagagcctgcagcccgggaattggatcgaaccctcgtgccgaattc

SEQ ID NO: 20814 - DNA, 1689 bp, Oryza sativa
  Clone ID: TF_OsC354856_1
tcacaatggcacgtagaacacctcccagcgcagtatgagtatgacgacggccggagtgcaggctccgatggcgatgaccaggtacgccagccaccgctccgtggggaggacggtgaggtagacggacgtcatgagggagacgatcatggcgaggcaggcgacgacggtgaggcggtgtccccaggtgagctggtcgagcttgaacttgacggggtccctccacgcccagatgaagcagaagacgacgacgatggcgctgcacatggcgacggtgttggacaccacgaagatcttgaacggcgccctgtcggcgtggatggcgagccccgtgttctggttgtagccgccgggcatggtgaatgtggcggcgaaggtgacggtggcgatgagggtggccacgagggtgtaggtgccgacgctgagctcgaagtactcgtcgttgctgccggagcccggccgccggctgcgcagcgactggtacgtcgccaccggcggcagctgctggttcttgcaccgccgcgactcgtacttcttgagcttctcccagaggtagacgacgtaggcgtccatctcgccgccggcgacgcgctcctccacgaggctgcgcgccgagtggccttcgcggttgaggaggcaggggtcgacgcgggggtccctgagcagcatcagcgccgacttgatgcgggccatcttcgcggcgaggtggagcggcgtgtcgccggagttgtcgccgcggttcaccacctcggcggggcggacgcggccgaggaggcaccggagcgcgtccaccttgccgctcgacaccgcgacgtgcacggcgttccggccctcccggtccagcatctccgccgcgtcggggctgtgccggagcagctccgccgccgctgccgtcgagccgtagtaggccgcgacgtggagcgccgactgctgccgctcgttgcggcggtgggcgaggtcgggcttgtggtcgagcagcatccgcaccatgcgcttgtcgttcttctgcgccgcgaagtgcagcgccgtgttgccgacggcgtccgtcaggtcgatcagccccggcgccgtcttcatcagcaatatctccaccacccgggtgtggccgccgaggacggcctggtggagggcggtgccgctgacgttgtcggcggtgacgaacttctcggggacccatggctggtcgaggatcttgtcgacgacgtcggcgaggccctcgcgggcggcgatgtgcagcggcgtctgcatgtccacgttgggcgtgtgcccgcagttgggctccgcctccagcagccgcagcgccaccgcgctccgccgctgcttcaccgcctcgtgcagcggcgtgttccgtgtcttgttcatcatcatcagtggctcctcctccggccaacaaggcccagccatggtgatgaaggtgatgagcatgtcggcgacggccatcttgccggccctggcggcgaggtgcagcggcgtgtccccctggtcgttcctggcgacgaggaggtcgccgtgctcggcggcggcggcctcggcgaacgcgacgcgcccgagcccggcggcgatgtgcagcgccgtgttcccctgcggcgtcgtcgagttgaggatcttgccgccgccctgctcctcccccagcagcgccgccaggctcgccgtgttcccctgcaccgccgccttgtgcagccgtggatccat

SEQ ID NO: 20815 - DNA, 1255 bp, Oryza sativa
  Clone ID: TF_OsC13066_3
attataggaagtccctggcttccagcatcactgctgtatcctccaggcagggtgaaagcagcagcaaaggtaattgttgcgatgaggatcgccactagcgaagtgttgcttgtgtatgtttgagtcagcgaccttgcatccttccttgacgcattgatcaacttttctttggcttcctcgtgaagattataaacggattttgcatttggaggatcagctttaatcataagcattgacacttcattccagtttaatgtcttcgcactatccaaggcatcccgtaattcccaagcggctgcattaccgtcactgccaagaattgtcaagtctattttcttgtcaagtaaagcagcaacaattttcggatcacacttctggatggcataatgtagagctgttttccccttgctgctacgcatgttcacgagtttctgaagtcgtggttccccaaggataaactcaacgaattccatattacctgatttgacagctttatgaagacatgtccacccatcttttttgcaatatggagcatctgggcaatatttgataatctctcgggcaacagcaacatgacctcgatgtgcagcagaaaggaggagaggataaccattttttctgttgataacatacccttgagatctgtcatgtttcaacaatacactcgtagcatgtcgatctttcccccacggtacagctagctgaattggagtattaccatcccttattttcttctgtggccagatttgggcgttcaacgaatgattcttttagcaatatctggatttccatttctaatagctgcatggagagcattgtagccataggttcctgaatgagaagaaccatcaattcccaacagtttctcaaaaatatctgtaaacttagaatccctcatcatcaacgcaatgtacatgggagactcgccgtatttgttgacatctttggacaaggcaggctgagtcgctatcaactccagtgccaggtccttgtggccgttgcaaatggcatggtgcagtgcattacatttgtgcttgtcctgtttcaagattacctcactgaatccttgttcatggcagtatttgagtagaaaagcagctaaagtaacatggccacttgttatggcagtaagcagtggcgtctcattcatcacattcacagtagtgagtagtttcttcttcacggttggatcctgtggaagtgaaagaacatctttgcaaaattccaaatggccacacaggaagcggacgcgtgg

SEQ ID NO: 20816 - DNA, 1758 bp, Oryza sativa
  unsure (1)..(1758): unsure at all n locations
  Clone ID: TF_OsC13066_1
tttttttttttttttttttttggaaaaaaaagatacaagtcattacataagctccacatgaataatgttcagagtacattatttagattatatacatgaagttaaagatttaacaatgtatgctattattgatcaaacaacacgtgacacatatatttgaacaataacgatataatatgctatcatttacaagatatatcgataatatcagaccatatcaaggaactctgatttgaaagcttggcccaaccgaattctgagctttaagacaggccattccccgagcaccttagtgagaattggcactaaaacagcaacagagcaaattccaacagctaaccatagcagccgaggggccaatactgtgtataaaccggttgcaaatgctgtagttgttgccatgtacgcgaaccacataagcttcttggtgaaggatctgtagtaaagcaagaaatcgagatcctcccatcttgctatgatgcatatgaacgcaacagcaagtgaggcgcacattgctaaggtatctgatatcaagaatgccttaaaggcaacgttccttgccattataggaagtccctggcttccagcatcactgctgtatcctccaggcagggtgaaagcagcagcaaaggtaattgttgcgatgaggatcgccactagcgaagtgttgcttgtgtatgtttgagtcagcgaccttgcatccttccttgacgcattgatcaacttttctttggcttcctcgtgaagattataaacggattttgcatttggaggatcagctttaatcataagcattgacacttcattccagtttaatgtcttcgcactatccaaggcatcccgtanttcccaagcggctgcattaccgtcactgccaagaattgtcaagtctattttcttgtcaagtaaagcagcaacaattttcggatcacacttctggatggcataatgtagagctgttttccccttgctgctacgcatgttcacgagtttctgatttgacagctttatgaagacatgtccacccatcttttttgcaatatggagcatagctagctgaattggagtattaccatccttattttcttctgtggccagatttgggcgttcaacgatgattcttttagcaatatctggatttccatttctaatagctgcatggagagcattgtagccataggttcctgaatgagaagaaccatcaattcccaacagtttctcaaaaatatctgtaaacttagaatccctcatcatcaacgcaatgtacatgggagactcgccgtatttgttgacatctttggacaaggcaggctgagtcgctatcaactccagtgccaggtccttgtggccgttgcaaatggcatggtgcagtgcattacatttgtgcttgtcctgtttcaagattacctcactgaatccttgttcatggcagtatttgagtagaaaagcagctaaagtaacatggccacttgttatggcagtaagcagtggcgtctcattcatcacattcacagtagtgagtagtttcttcttcacggttggatcctgtggaagtgaaagaacatctttgcaaaattccaaatggccacacatggaagatatatgaagacatgtgtttccttgtggattttttccaagcagaattgtaggatcatgtgaatccatgtacttcatcttcattgacctggtatcaccagatatggccgcttccaggagctcccaatctatggttgcagtactggctgcacaggctgccat

SEQ ID NO: 20817 - DNA, 1120 bp, Oryza sativa
  Clone ID: TF_OsC1713_4802
cttaatgatatagagtttatggaaactatgtgtagtgtcttgggttgggactggccttatgccatcccaatgcagcattgcacccacaccaccccaaacggcagttatagacgcgaaacaccgtgatgttcaacagtcaccaccccggttagctactttgcttcacttacaaaaaggacacccattatggttctgggtatcgaagtctctgggcaaaatgtgagaacacctgtggactcagggaaccaaaggctcttggacaaaaagtgaggcgccttggacaaaacgtgtaggagaggaccagagcgccttgcccaccttgcgaacacccatgctgttcacctagcctctgtgcttgcagatgccttcaaggacgccagagcttcccgtaatgcatcctccatctcagagttccctggatccaacttcaatccatcgtaaagtgtttcgcaagcactctcgtagtccttcagtagcatcagagcagcaccctgtcggtagtaggcctttggccagtcaggccgcaatttcctgcattcataagcatccaacaaagccttgcctccattacccatgtgatgccagcaaaggcttctatttgagaacaaggttgcatcatcagggtaaaggtccagtgccttactgtagaatcctgttgcagaaagataatcctttttctcgaccgccttattccccaatgactttaactctgttgctttccttttactgacaggctcaccattatcagaaatgttacggttggcaccagtctcttccattgagtaattgcactcatttgagccaccctttgcagcagttgagatgcagtctccactgacaacagcaccagcctcaatcaggaggtttacacatttcaattcaccagcagttatagcagtagctagaggtgtcagatgaccatctaccatcttgttaaatgatgacacaaaaatcagaacttctggaatctgaactcctgaatctgcattgtggtccaataaaatcttcatagcaccatctttccctttactagcagcaacatgaagtggtgtgccacggtttgcgactgtgtccacacaagctccttttgcaagcaatagctgtactgttccacaatctc

SEQ ID NO: 20818 - DNA, 2726 bp, Oryza sativa
  Clone ID: TF_OsC2195_1
gcacgagggagagaactagtccgagttttttttttttttttttagaggactaaccaaggaaggtaattccattgaacagagaaaaaattaagaatgtaacttacattgttttaacaaaatcattcattgataaatgaaaaatggacaattataatctctcttttgttaggaagagatcatggacataataaccatggggaacatatgaattttaacccactaaaataaagactcatctgagctaatcaaaagaatactagttaggaccccaagtaatgaggttgtttaccaatctctggaactgatttcagctaccaatctgtgaccaaatgttttgttgaacttgaccaccatctctgactttgcccaccaaaaatttcaagaattaaaaagaataaattattatttactaggaccaacaactattctttggtaaataaccttggcaaaataaaggcttcatccactttgggacttcatggcttcccttggaaatcacttctgatccaggtgcatctgctcaagccaagcaccgatcaccgtctggtccaacaagtcaccctgattgttcaggtcaggcctgttcatcaatgcagaagtaccaggcatgccttgtacttcgcccctcttgccattaagctcagcattgcttaccagtgactgcacccatgatacatctgtctcatcttctccaaaccctggttgtgcagggcgtctcaagcggactagctcctcgctatcgacaccccagtcaaccttacccatcggggaccccacggtgccccaagcactggaattccgtggtgaaccaacagaaggccgctgtgtggcaggggctcctacacgagcacttaggggtgatgtaggttccatggtacggggggaccggggagacatgccaccaaatggagaatgtgccaaagatgacggatcaagagcccttggggagtacattctgttggtgttaacaggtgataagaggcccttctgttgatgaagcttgttgaggagggctgatttgtgggctggtgagtagactgagtgaccttggtcattagggaacctcggagacattgccatgtctgaagcatacatgtcttcaagattggatggagcaattgttggcctgatactcagaccagctgaaaggcgtggttgggggcggctgctgggtggcaggcagagtgccccaaggtattgtgattcccattcgaggagcatgccaaggtcatcaacagcagcatcccttgcattgaaagaagaacgcagcctactgccttggagccaatgcgcagcagcagctcctccattgctcccagcagatggtgacacaggcggcggtgcaaagtgtctggtaggagaacctggaagaagcccgagcgcagctgcagcagtcatatcaatggatgaagaagcgcggggagacagcaggccggcaccactgttgtgaggcacatggcggagctcatcctcatcatgggcaaagaagcaaatgcgacgggcgcaagctgctccctccttgcagagccttgtgcgatactgtgatgggtgtagccagctctcaaacacgccatgcgagaactcacagctatcgccgctagggcagccaccaggccggcgaaagttggggcaaggcacagcagtgtatgggtgcttgcggggatcacggcggcgggcgttctcgccggggtgcacaaacgggcactcagtccagtcgtgtgagtaggcacgggagcagggccggaccttgaacgcaaacatgcggaactcatccgaagcatacacgctgctcttgatgtccggcagagttggatccaccggatactccttcttcccacgatccacagtgatgggagacagcgacgacgaacgcgacgagggcgacctgttgccctcatctggtgaggacgagagcggaggggatgacgaacctgaagccaccgaggtcgccacggcgagtgctcggcggcggccgaggagcacctcgagatcgccaagggcatctggcgaagccggaggagctaggatgacgtcggcggggaagcggccggcggaatcgggggtggccggatcggcgccagcggccaaaagcagcttgacaacagcgacggcgttgcgcgagccaccggaggcggcgcagtggagcgcggtggcgccgtcggctccagggcgacggttgacgtcgacgcaaccgccgaggcccaccagcagcgagaccaccccggcgctgccgtacgtcgccgccaccatcagcggcgtgcgcgcctcgtacgccttgctccgaccataccacagcccgaccccatcagccaactccgccgcctcctcgcctccctccgcgagcgcccccctgagcccatcaacatcatccgccgccgcgagctccagcagcgccgccagcctgtcccgccggccgccggcgagcggcggctgcgacggcacgacaacgagatcagcaagctcgcccattatctctcgccggatagattaaccaaagctcaacgcatctgtagcaaccgctagcgccctccggggttgatccaaaatcgaatccgacccaatccaatcaagcccggatccaccgctcctccctcccttccctcccctcccctgcgacgctcgccgcggcggctgcttctcgcccttggggaacaagtgagagagagagagagagagaaagcgagagtagcacggcgacgagaacctcgtgccgattcctgcagccc

SEQ ID NO: 20819 - DNA, 1535 bp, Oryza sativa
  unsure (1)..(1535): unsure at all n locations
  Clone ID: TF_OsC82589_1
gtaatccaagagagaggtactaggcaggtagcttcatggaggacatcgtcgcttaccatttcttggtttcaattgggtgatgctgtgttgcaggaagatgcctcgtttagttatattccccttcttccgactagatttggggaatttggctaaagaaaggtagacgcatcatggggctcttaggtatggtgggcgactcattcggntgctcagctactggtgagcggcttgtctctgctgcaagggatggagacatccaggaggctatggccctgttggagcttaacccccgccttgcgcgctctccccccccgcccccgtgctgcccgcgcccccccgccgccccctgacagcgactcgggcggcgccggctcaccgcttcacttggcagcccttcatgggcatgctgagtgcgtgcaattgctgttagaccttggagcctctgtttcagaggtcactatcaatgatggttcaactattgatctcataggttcaggaagcacacctctccactatgcggcctgtggtggaagtgctgtatgctgtcaacttcttgttgcagccggagcaaacatgagagctcaaaatactaacgggttgacccctttgatggtggctcgttcatggcacaaaagtagtgttgaaggtatcctaaccaaacggccagaagttccagtacgcattcttccatcatcatatctgtctctcccactgatgagcattgtcaaaattgccagggaatgtgggtggagaaaaacttctgtctcatctgtttgccatgacccatgcgccatatgtttggatacggaatgtacagtgtctgcagaagggtgtggccatgagttctgcaccaaatgtgcgctctacttgtgcgccaccgctagcagctcaacatctatccgtggtgttcctggctccataccttgccctttgtgccgccacacgattgtctcattcgttagactcacaagtacaaccccaataaaggagcttccgtggacgaacaaatcgttagctctatgtgcagcaggggcaagcaccggttccaaatatgctggtcctgcagcaatcactagttccaagtatgccggttctttgcaccgaaggtctgagatgcgcagcctgcgctcctcttcagttgatctaggctgctcatcgtttcgaaccgcgagctcagggaagctgtcgtcgataaagctgaattgcaccggagccgacgagacgatgccctgcctcgtcaattgcttcaggccggatgtgcagcggtcgtcttcgtatagggaaagaattaggagatattcacaattttcatagcattactgtctatttgtatttgtgcctcccatccattttgtgagtttccgggggtttggcagtacaaacttgtgcagtgtttgttcatgcttttctcttggcttcttcatacctgtagtctgttctgttcttctgcttgtggtcttgtaacatgacatgtgatcctcatggttaagatgtgtttgtgtacatgatctataaaaaaaaacttatctgaaacc

SEQ ID NO: 20820 - DNA, 1470 bp, Oryza sativa
  Clone ID: TF_OsC763_1
acggccgtccggccggcagctcgtggtcaagtcttatctgccttcctccctcctctcgccttccgcctcgcgtgcgctccaccaccgaaaaaaaggacaggttccacataaagaccaacgagtaaaagcttgatctgtccggtgccaaccaatcaacaaacaagtttcatgtctgatctcgacgttcagcttccatctgccttcgatccgtttgctgaggcaaatgctgaggactccggcgctggccctggagcaaaggattatgtgcatgtgcgcatccagcagcgcaacggcagaaagagtctaactactgttcagggcttaaagaaggagtacagttacaacaagatcctcaaggatctgaaaaaggagttctgctgcaatggtactgtagtccaagatccagagcttggccaggtcattcagcttcaaggtgatcagcgtaagaatgttgccacgttcctagttcaggctgggattgctaagaaggacaacatcaagattcacggtttctaagctgcctatagatgctcgtatgcaatatcgtgtgctgccagatattgggaagcctctgaagctaccagttactgttctctatatttgaagtcataagactatttgttgctattaaagcgattcttgcttgatgcaagttgtgtcctcattatgcactaccggcatattatgagtatggtttgtctgggatattgtcaatctaataaaagtacttgctatgggactgaaaaagaaaatgattagtaatggtactgtatcctactgatagtgtgtggcggcgcggtgattctgattaaagctttagaggatggaacagacatggatgaagaagacgctgagggaagaagggccttacattttgcgtgtggttacggtgagttgaaatgcgcagagatccttctggaggcaggtgctgctgtaaacgcactggataagaacaagaacaccccactgcattacgctgctggatatggtcggaaagaatgtgtggatcttctgctgaagcatggcgctgctgtcacgccccagaatctggacgggaagacccccatcgaggtggccaagctgaacaaccaggatgaggtcctcaaggtgctcgagatggacgctttcctataaagaaaccaatgccaaatctcacgctcatcatcaccggctcgtcgctttacagttcagatttttactgcatacccaaatcatcatcgactcttttagctttggttttggtgtggtggtggtacattcgttgaatcgttgctatgtttggtgctccgatttgtaatctgtttcacttccccgttacactgcatcactccgtttcatcctttgtattcctatgttgctgagtctggtgttgcagacgttgctcctgtttttctcaaaaaaatcgtgtcagattggtagtttatatagataagagatgcactgccccggtgtaaaaaaaaaacaaaaaaa

SEQ ID NO: 20821 - DNA, 1321 bp, Oryza sativa
  Clone ID: TF_OsC12078_1
tccaccccctgctactaccagtctctctgccttccaagaaatggccaccgcgaagccagcctctccctcgccgccgccgagcaccgccgtcgtcccggccgccaataccgcagcagccgcggacaagccggcggtcgagcagctcctggaggtggcggaggacgaggtcgtcatcgacttcaagcccaacgccaagtgccgcgctgacctccgcctccgctcgctgcacccgtccctccccgtcgccttcaaggtccagacctcctcccctctcaagttcctcgtcagccccccgcgcggcgccgtgcagccgctctcgtcggcctccctccgcgtcgtgctccgcccgcagcagcacgctcccgcgtccttcccgcgctcccgaggcgaccgcttcctcgtgctctcctccctctccgccgcgcacctcgactcctccgcctcctccagcgccgctaccggcggcaccaccgccatccgcctccgcgtgttcttcggcgggccgtacctgctccgcctcgcggcggaagccggggacgccgcggccgtgcgcctcatcctgcgccggcagccgcacctcctgccgctcctggagcccgaggcggcggtgcccgacggcgccgagcagtgggcgccactgcacgcggtggccgcgaggggggacaccggggaggtgaggcgcctggggccggactcgatgggagcgcgcgaccgtgaggggaggaccgccctccacgttgccgccgcggccggggaggcggaggcggcggcggcgctggtggacatgggcgccgacgccgcggcgaccgacgcgcgcgggaggactccactggacgtcgcgcgcgagaagggctatcaagaagtggtggacgtcctggaacggtgggaactggtcatgacggcggcgaggcgaggcgacctccagagcctcgagtccctcctcagcaagcgcgccggcgtccggggacgtgaccagtacggcctgacggcgctccaccttgctgccatcaaagggcactgcgacgtgatcgcgctgctcgccgggtcaggctgcatggacatcgagtgcgaggacgtggaagggcaccgcccgctgcacctcgccgtcgaaggcggcagcgccgaggccgtcgagctgctgctcgacatgggcgccgaagtgcacgccgccaccaggcggggcgcgacgccgctccagatggccgtgacgatggggtacgaggccatcgcgctgctgctgcgaggccgtggcgccgacgaggcggccgcgccggcgttgtgcatcgcgtcctcgtcttcctcctcgatatcgtgtgcgtag

SEQ ID NO: 20822 - DNA, 1726 bp, Oryza sativa
  Clone ID: TF_OsC306767_1
ggagagaacttgtctccacttgggttgtttttgcttttaggtcatcattccaaccagcagtttcttctccatctggagcaaataaaagccatcattcctgcggtctcgcatgctaaaatcaccacaagcttactgggacagtctgggctgaatgttgtaagaatccatatctcaaacaggatgtcaaagttgccattaacctatgcttcagttctaattcttccgaagaagacgccgttctccatactcccaccatgaattcaagcctaatgccaagtactagtactgcatatgcacaaaattgcagctgagctactagttaaactgtctctaaaccaacaaaaaagggcttcgggtcactcggcattactcagttcttcaggtccatcgcttaccagaacagtttgtccatctcatcactttcaggatccaactctataccatgggtcaacgccacgcaagctttctcataatccttctcaagcattagagcttctcctagccgatggtaggcctccgacaacttcgggtgatgttttgcgcatgtggttgcatctttcacagccttttttccctcacccatgcgaagccagcaaagacacctctttagaagagttgtggcatcacaaggatcaacttccagtgcctgtgtgtaccacactgatgctttttcataatcctgctcatcaaatgcttcattccctttttgtttcaggtcagacattttcgtgttaacgtaatcatcatcctctagcttcttgcgttccagattggcataagtaattaccccatcaacgctccagtcagcaacagttggaattgggttggtcaaaggaaatagaatctcaacatcttcccttgtaccatacacagcagccagctctattggcattctaccatgcgtgtcaggacaatttgggtttgctccagccttcaacaacaactttatagcttcagttaatccactccctgcagctctcgccagggggttgtttgtagcatttacatcagctccagcctggatcaatagcttcacacaaggtaaggaagtagtgaataacgccgcagataaaggtgttgcttgagaagaaggcataaccttgttgggatctgcttggtgctccaacaaaatcttcacagtactttcatatcctttaatagcagcaaaatgcagaggtgtcccatgatctgatttgccatcaacatgagctcctctagaaagcagcaattttactatttcagtcctcccagtcctaaataacacacaaaaagagcagttcactcttggaggaacatgtttcagtggagtattgtctgcatttttctccacattcaacgtaaggctgctcatcatgacagaatgcagattggatgtagcagggaatcctttctttgcagctgaatgaagaaaagtgatgtttccttcacgttcatgatggatatcagcaccatgatcaatgagatacctgacagagggcaggtccccaccggcaatggctcgctcgaggggagtcttcctacctggagtggtgtccggcttgttgacgtccatgttggccacctcgagcaagtagcggtagacgtgcaggcttctggcggcgtgcagcgcgttcatgccgtggaaggccgtgcgcgccacggtggccgcgatcccctccccgtcgtcgtccagcgtcgcggcgatctcgtcgccgagaagcttctcgaagaggtcgggcagcgacat

SEQ ID NO: 20823 - DNA, 2227 bp, Oryza sativa
  Clone ID: TF_OsC17869_1
atggctgaagagtatgagctgaacgagatagatgacaccctgcatggctctgtggggagcaggctctcgctgtttgcgagggagctcaagtcaaggagaagcagcagctggcatggcggcaccgccctgaggctgccaaaggatctgtatgaaagccttgtcatacaccccaatggcagatggtacaggatctgggcgaacatgatgttcctgtggtccatctactccaccttcttcaccccgttcgagttcagcttcttccgcggactccccgatcagctgctcgacctcgagtgcgtccagctcgtcttcctcgccgacgtcgccgtccacttcttcctcgcctaccgcgacccccacacctacaggatggtccacgacaagcgccacatcgccctccgctacatcaaaggcagctttgctctcgacgtgctcggctgcttcccctgggacgccatctacaaggtgacgggcagggtggaggcggtgaggtggctggtgtgggtgaggctgtacagggggaggaaggtgatggcgttcttcaagcgggtggagaaggacatccgggtgagctacctcctgacgaggatcgtgaagctcatcaccgtggagctctactgcacccacaccgccgcctgcggcttctactacctggccaccacgctcccgcccgcgcgcgagggcgggacgtggatcggcagcctctccctcggcgacgcccggtacatcaacttcagggaggtcgacctgctcacccgctacgtcacctccctctacctcgccatcgtcaccatggcaactgtcgggggttcaggctatggcgacatccacgcggtgaacacgagggagatggcgttcacggtggtgtacatctcgttcagcatcgtcctgagcgcgtacctgatcggcaacatgacggcgctgatcgtgaaggggtccaggacggagcggttcagggacaggatgaccgacctcatcaggtacatgaacaggaacaggctgggcagcgccatcaggtcccaggtgaaggatcacctgatgctgcagtacgagagcagctacacccgggaccgcgtaatcgtcgacgacatcccggtcgccgttcgatccaagatgtcacagacactgtacctggatatggtttcgagagttgggctgttcagaggttgctcggatgacttcctaagccagattgtgctgaaattgcatgaagagttcttcctcccaggagaagttatcttggagcaaggcaccgtggttgatcaaatttacatcgtggcacatggatgcctggaagaggtggccaatggggaagatgggtctgaagagatcatctcagaactgcggccttacggcatagttggcgatgtcgcggtgatctgcaacattccacagccatacacagttagagtctgtgagctttgcagccttctgagaattgacaagcaatccttgactagcatcttacaaatttacttcaaggataatagtcagatattgagcaaccttctaaaggggaaagaaacggagtcgaagcggaagcaattggaatcagatatcacatatctgctagcaaagcaagaatcagaactagtccttggagtaaacaatgctgcatatcatggggatatatttcgtttgaaaagcttaatcagtgcaggagcagatccgagtaaatcagattacgatggcaggactgcattgcatattgctgcactgagaggatacgaaaatattgtcaggttccttattcaacgaggagcgaatgtcaacagcatagacaggtttggaaactcaccactgctgcaggcagtaaaatcaggccatgacaggatcacgtcgctcctcgtggagcacggcgcgatcctgaacctggaggacgctggaggttacctctgcagagtagtcaggggtggcaggatcgatctgctgaagaagctgctcagattcgggatcagcccaaactgcaggaactacgatcagaggacgccgctccacatcgctgctgccgagggcctgcaccttgttgccagcacgctgatagaatctggagcagacatacaggccaaagataggtggggaaacacgccgcttgacgaagggagacggtgcagcagcaaaccactggtcaggatactggagcaggctagaactgttgcgactaattgatgaaaaacaatgtgtattcatggggaaactaattgcaatgaaatattctttctgaggc

SEQ ID NO: 20824 - DNA, 3965 bp, Oryza sativa
  unsure (1)..(3965): unsure at all n locations
  Clone ID: TF_OsC1991_2
atggatcgcgccaaggcagcggcgcgcgaggacaaggcggcggcggcggcgacggggaaggagaccgccgtgtcccgcgccgtcgcggaggacgacaccgcgctgctgctcgcggcggtgggaagcttcaggaaggaggcgatgggccgtctccggaagggctccgacgcgtcgcggatgctggaccaggagatgtccacgaggctgctccacctcgcctgcaagcacgacgccgtgcagtgcgccaggctcctcctcgagggagggcacggcatcacggcgtcgcccgtggacgccagggaccagctcacgcggacgccgctccaggtcgccgccgaggcgcactcggcccggtgcatcgagctgctgctctccaagaacgcgcgcaccgacctcaagctggtcgatggccgccctcttgtcgcgctcgagatcgctctcttaagcagaagagctcaagttaaatggtcactggacaactccattgaagatcttctgtcatctctgcaagaaaaggatctgaatgcagtgaggctcctggcagagaaaaccagagaggttggggaggtggcctacagatatgccatggaaggtcgtgttactgtgttggcaatgctgcttctggtggctgaagagaagatatcggcaccagtcagtgtagttatagagggcgtcaggacaaagaaatcaatctactactctattgtggatgaggctctgtccattggggatgctccagcccgggacagcaatgagaggagaaaggccctgctcagtgagattcagctacttaaccaatttggggcagcgttatggagagatcgcaacattgacaagagaagcttgccccctctgcttaaagctgccaaggttggagatgtaaatgtcacaaagatgctcctgatgggggatgttgatgtcaatgaagccgatcctgaagggaacacggcacttcactggtgccttagtggtagctcaagcacacaggagccaaggattgtgtggctcctgctgaagaatggtgccagagttttccaggggaacaaacttggtcttacaccagtacacagcgctgcagctaagggaaattataaagctcttcagtcacttctgcttcatgctcaagattgtgttgatactccttccaagaccaaagaaaccccattgttcttagcagtgaagaatggttctttggactgtgtaaagcttctcctgcgttctggggctagcaccaaagtccagaacctaagaaagcaaagaccaatagacgtggcaacgtcccaagatatgcgtttcattcttacctctgcaaatgtggctccatggaaccgtagctcacatccaaaaaaaagtgtgacgaataaggaaagctgcaaagagttcctggaagattttggtgattatgacagtgatgatttaaatgaaagctttactgggcttaaaacatcagcaagccatcgggatttccggtctagtaatggttctgcccaagggggcaagagtaagaaccattgtgctcccaagcaaggttccaagtttgtgcctcggcctaatcattggccgaagcacgactacactcggaaaatttttgttgggggcctcccaccttctgtgggcgctgagtacctcactgagttcttcactgctgaatttggacctgtggaggaagcagtagtcattgggataaggatgggtgatcgggtgcaatctcgaggatttggttttgtaaagttcaaaagagaagaggatgtgataagtgcaaaggaaactcatcatgtgtacatgcttgggaagagagtggaggtaaaggatgctgttgctagaggatccttgcctgcagaaatccagaaaattgctccattcaggcaccacagccaggaggttccaaaggtaactcaccatctgttggatggtgagctaaaggaggaacattacattaggaagcgccggcccttgccagagaagtgtcttccatcttggttctttatattcaggaagtggttgccaggatttcttgcagatgctaccgaacgacttggagataggtacccattgagctccctgaagggtgatttcagagcaatttgcagaatggagcttgatcatggcacacttggttatcctaagctcagtgatttcatgcgttcccttcctggtatctgcagaatgtgtgtagtccctgtaggaagtggtcctgccacacacatggtcctccttccaccggtctcgcgaccgaagtatgtacccttgctggaaccattctcttttgatcatgatgagctcccagaatcagtgtcagatcatcagtccccgaggtctccacttaccactaatatcaccgaggactcccctcataacacagacagtcagcagggtgatacttgcagtgagagcaatgtgcagagccatcagggcgatgagtgctgcgggagcaacactgaaagccagcaggatagtgcttccactgacaatggtagcttactgggtgaagttactgtcagtaccccaaagcctgattccattgagtccatacctacaggaaagtctgatttgattgagcttgtacctacaagaaaacctcatctgattgacacagtcactacaagaaaacctgatttgattgtgactgaacctacaagaaaaccaattgtgattgagcctgtgcctacaagaaaaccaagtgtgattgagcccgtgcctacaagaaaaccaatggcaattgagcctgttgtgcctacaagaaaaccaattgtgattgagcctgttcctacaaggaaaccaattgtgattgagcctgtgcctacaagaaaaccaattgtgactgagcctttgcctacaagaaaaccaactgtcattgagcctgcatctcttactcagaagattgtttctgagcctatgaggaagactgatttgtttgaatctggacttgcaaggaggattggtttgattggttccagaccaacaacatgcttcgttgactgtccagttgaaaggccagcagtaactccaagcaactgtgaggctgatatgagattctctttcttccaatcacaatgggacaggttcctggctccatatcccaagagtgattactgcatcatctgtcgatcctatgatgctgtgatgcagcttgtcccatgccttcataagatttgtgttgcctgcatgatgagatgcaatgtcagggcatgcatgacctgtggcactgctggagtcatggagcgtgcatcagatcaaaggtgccagctgatggtggtctgccgtggagctgaggcgattgtcagatgttccccctgtatgcacagcatcgcatgtcgaggatgcttcctggcttcagtaacattactcaagggctgcaccacttgtggctgcatgattgagcacttcaagttttgttgagtaggcttacttccctgatacagtaataccagaacttacattactaaaaagaataaagcaaacagtcccacaatctgaaggagagatcagttcactctccttcgattttgctgcgctcgtgggatgagctaacaggctactcggttaggtgcgctcactcctgcaagcttgaggagtgctctttttgcttagaaatatgttctctcgaatgcttgatggacatgcttctgtaagcttgtgatgaggagtgtgttccctcccattttggcaagcttacactatatatgccatgtaatgtccactatctatctataatggcactcttttttgtaaattcagtactatttaagtaagatggattctgtttaaaaaaaaaaaatnaaaataaaaaaaaaaaaaaaaaaaaaaaaaaaactaaanaaanaaaaataaataataaaaaaaaaaaaaaaaaaaaaacataaaaanaaataaaaatataaaaaaaaaggggggggcccttttaaaagaaccaaattttacttccccgtgattggaaatttaaattttttttttggggcccctaa

SEQ ID NO: 20825 - DNA, 1296 bp, Oryza sativa
  Clone ID: TF_OsC20391_1
gtagtggctcccccccacgggcccgggaaagagaaagaggatcgtctcggctcgtcgtcttctagctagggttcgtaagttctagggtttgcgatgatccccaactcctcctccctctagtatttcgagcgaattctccaacactttcacccagccgcgcgcgagaggagaaggaagatagatagatagatcgctccgcacatactatggtgctcaccccatcgccgtctccaccgccgatgctccccaagaagctccgcgcgctcggtccaggcttgaatccctttgctcccttcggcatgggtaactactattcctcctctcgctaatatatttctcctcgctcgatccatcttcccccacctccccccttctcaaacaattaatccccttcccgattcgattcgattcggttcggttcgctttcggactcggtttcaatttcgattctccctccgtcgtcgcggccctattctagccgccccctcccctccgctcgattgcctgcctccggatggtgcaattccgcagctctctcagcatgagccgggcacggacccgccacggcgatggcgacgaccgcggctggaaccagctccacgtcgcctcccgcaagggcgacctcaaccaggtgaggcgtctcctggatgatggcatggatgtcaatgcacctgcatgggggccaaaatcacctggcgctacccccctgcatttggctgctcagggtggacatgttaaaatcatggacgagctactggagcggggtgcaaatattgatgctcgcacaaaaggagcttgtggatggacccctctacatattgctgctaaggaaaggaacaaaagagctgtcaggtttctgattgagaatggtgcattcttgccacctgacatgaatgaccacaggttcaatcctcctctccattactgctctggattggaatgggcatatgagatgaagcgcatgcaagacgaaagtgattcgaccggtgaaacttctctgggctcggagagctagaggaaagcaatctcctcagtctggcaaagaggtcaatcttggatcaacagagtttgtaaacatcaagggtcacgtttactttgtgaaattggaacgaattaccatgtgaatcttacatgcgacatggtactagcatgcattgcgatgttgttgtggggttacttgtgttttcgataattgcattgtgttcttactacactggtagcatgtattctactacacattcttaatatcagaatcaatatccggtttgcgtcctaaaaaaaaaaaaaaaaaaaaaa

SEQ ID NO: 20826 - DNA, 1107 bp, Oryza sativa; identical to SEQ ID NO: 11007
  Clone ID: TF_OsC341610_1

SEQ ID NO: 20827 - DNA, 1715 bp, Oryza sativa
  Clone ID: TF_OsC207789_1
cgatcgcattcgaagcttcctccggtagctccggtgagggtgatggacgacctggacatggcgctgcctcaggccttcgagctcctcctcggcagagatcgagacgcctggccgcgcggggccgcgttcctcgtcgccgcccactacggggacgtccgcgaaatgaagaggattgcaaaggagctggacgaggacggcaaagggatcgaggcgactgtggctaacacaagcttcctcggcatgaacgcccttcacgcactgggttggctcggcaaggtgccggcctaccggtatctggtagaggaggtcaaaatggacgtcaacaaggccgacactgctcagggattcacacccctggagcatgccgtctaccatggtcgcctgcctgccaccagatacctccttgatcatggcgctgatgtgcatcaaattcgctctacgggaaatgtctctcttcttcactcagctgcagtaaaagggttctctgaagtagcaaaatttctgctttctagaggagttaatgttgatgcagaatcagaaatggggacaccactggctcttgctgctttcagaggatatgatagcactgtcaaggtccttttggagcacaatgctgatcccaacaaggttacaaacaaggcacttggtgcacctttagacttggcattaaccagctcttctgtgtcctgtgtgaagctgttggttcaggctggagctgaagtgaaagttgaggggccaaataatcatttggtaagagctgctgagaaaggcttaactgaagctattaaatgcatgttggaagctggtgcaaacccaaatgttcctgacaggctcgggagaatgccaatagagctggctgctgagtatggcacacgggaagatgttgagattctctttcctttcagctctgctattccaactgtggcaaattggagtgttgatggaataattaatcatgtacagtcagaaatcaagcaactagagatattatttactcaggacgataattttatcaaaaagagaaggtctgacatgaaacaacaaggggatgctgcatttaagaagcaggattatctaaatgcatcagtgttctacactcaggcactgaaggttgatccgtttgatggcacgttgttctcaaacaggagtctttgctggctccgcatgggtgatggagaaagggctttggatgatgccaatgcatgcgaaaagctacggccaaagtgggcaaagtcctactatcggcaaggagcagctctaatgtttctgaaggagtatgagagggctcatagggcacttggtcgagctttagagttggaccctgaaagtgaagagatcgagaatttgtattgggagtcgatggaactgtgcggttgatccctgaaatgccagctacagatagaagaagcacacgcagaactggaagctccttttgtgttatgaaagatggaacgacgcaaacgctcagtgatttgctgctttttgtgtacatatacttaggctgtcaaaacagaaacaaatgtctggtcttttatgtcgtgtttcgtcgtgacatcttcctggagtggctgttagactaaactagcattatcacattctatctgttgctagtatgggcacgaggatgatcaactgtctaagcaagctggaatgatatgaattctctgaaaaaaaaaaaaaaaaaaactcgagactagttctctctctctctctcc

SEQ ID NO: 20828 - DNA, 2650 bp, Oryza sativa
  Clone ID: TF_OsC16902_1
accgccaccacgtgcggcgatcgccgccgcgcgccgcgacactccccccgatcgagctagtgtgcttatccgccgccggcggcgccgcctctagccgcgcgcggggatggggagggggatagggtcgaagcggagggtggaggacgacgacggggagaatatgccggggaggaagaagaaggaggaggaggaggaggaggaggatgacgatggggaagaggagtacgaggtggacgtggtgcgcgaccggatcgggtcgtcgcgggggagccgcctggcgctgttcggctccgacctccgcctcggccgcttccgcccgcgccgccgccgcgtcgcccccgtcgacggcgacgatggcatcttccaggacttcgtcatcgaccccgacaacaagtggtatcggttatggacgaggttcatactagtgtgggcagtgtacagttccttcttcacgccattggaatttggcttcttcagggggctccccaggaacctcttcttcctagacatagctggtcagatcgccttcctcatcgacattgttctcaggttcttggtggcctaccgtgatcctgacacctaccgcatggttcacaatcccacctccatcgctctccgatattgtaaatcaagcttcatttttgatcttcttggttgttttccgtgggatgctatctataaggcttgtggaagtaaagaagaagtaagatacctattgtggattcggttgacacgagctatgaaggtgacagagttcttcaggagcatggaaaaagatatccgtataaattacctgtttactaggattgtgaaactcatagttgtggaactctactgtacgcacacagcagcatgtatcttctactatcttgcaacaacacttcctgaatcaatggaaggatatacatggatagggagcttgcagttgggagactatagttattctcatttcagggagattgatcttaccaagcgttatatgacatcgctgtactttgccatagtcaccatggcaactgttggttatggtgacattcatgctgtgaatgtcagggagatgatattcatcatgatttatgtttcctttgatatgattcttggagcctacctcattggtaacatgactgcacttattgtcaagggctcgagaaccgagcgattcagggataagatgaaagaagttatcaggtacatgaacagaaacaagcttggaaaggacataagggaacagattaaaggacatttgaggttgcagtatgaaagcagctacactgaagcttctgtccttcaggatatcccagtctcaattcgtgcgaagatttcacaaacactgtataagccatatatcgaaagcattccactgtttaaaggatgttcagcagaattcattcaacagattgtgatcaggctgcaggaagagttcttcctacccggagaggttattttggagcagggaagtgcagttgatcaactgtactttgtctgtcatggggcactggaaggtgttggcattggtgaagatggtcaagaagagaccattctaatgctagagcctgaaagttcttttggagaaatcgctgttctctgcaatatcccacaacccttcaccgttcgtgtctgcgaactttgtcgtcttttgcggcttgacaagcaatccttcacaaacatcctggagatcttcttcgttgatggaagaagaattctgagcaacctttctgagagtagcgaatacggcagccggatcaagcagctggaatccgacatcacgttccacatcgggaagcaagaggcagagctgacgctgcgagtgaacaacgctgcgttctacggtgacatgcatcagctcaagagcctgatccgtgcaggagccgatcccaagaacaccgattacgacgggcgatctcctctgcatcttgcggcttgcaaagggttcgaagatgtcgtccagttcctcctccacgaaggcgtcgacatcgatctttccgacaaatttggcaacacgccattgctggaggcggtgaagcaggggcacgaccgggtggcgacgctgctgttcagcaagggggcgaagctgagcctggagaacgccgggagccacctgtgcacggcggtggcgaggggcgacacggacttcgtccggcgggcgctcgcctacggcggcgacccgaacgcgagggactacgaccaccgcgcgccgctccacatcgccgccgccgagggcctctacctgatggcgaagctgctcgtcgacgccggcgccagcgtgttcgccaccgaccggtggggcacgacgccgctggacgaagggcgcaggtgcgggagccggacgatggtgcagctgctggaggcggccaagtccggcgagctctccaggtacccggagcgcggcgaggaggtgcgggacaagatgcacccgcggcggtgctccggtgttccggcccccacccgtgggacggcggcgagcggcggcgggaaggggtggtgctcggcgcaggagaagctcggcctcgccggctccggcgaggggctccggctgctcggcgaggacggcgccagagtgctcgacgtcgacatggtccacgacgggcagaagctctacctcgtcgtcggcggcggcggcgatgacggcggcacggaggcaaggcagtga

SEQ ID NO: 20829 - DNA, 2616 bp, Oryza sativa
  Clone ID: TF_OsC1434_2
atggggttcctcaaccttgtgggcaactccattgggtgctcggcttccggcgagcggctcgtctcggcggacagggacggcgacctgcaggaggcgcgcgcgctgctcgagtacaacccgcggctcgcctggtactccactttcggtggccgcaactcgccgctgcactacgccgccgcgcagggtcaccatgagattgtttctctgttgctcgaatccgaagtcgagatcaacctcaggaattacaggggccagcggatcctgtctggtgatcattcttgaatcgaatgcggtttgggcggcctcgtggattgggaaatttcagggtgaagtcttcgatgccacgcccccgtctctccaccatcttcgccggcgcggccacctccacggcgccggccccggcccccgcggcctcgccgtcggcgcgcgcacccctgcggcgacggcgacggctcggccccggtcccggcgcgcgccctcaacgggatcctcgccgcgctcgcccgcgccccgccttccgccgcctgcggtgacgcccccgccctcgccatcgagctcttcaagcggatggaccgatgggcctgcccccgccactctcctcccaccatccacacctacaacatcctcatcgactgctaccgccgcgtgcaccgccccgacctagggctcgccatcgtcggccgcttgctcaagaacggcctggggccggatgatttctcgtactcgctcatctacggtttcgttaaggatggggaggtggacaaagctcactgcttgttccttgagatgatggagcagggcgtattgccgaagatactgatttgtaactcaattatcaaagagctttgcaagatgaaggaaatggacaaggccgagagcattgtgcagaagatggtcgattcgggtattgcaccggacttgtttacttatagcttgattattgacgggctgtgcaagtcaaaggcaatggacaaggctgagagggttttggagcagatggttgaggctggtactcgacctaacagtataacatacaatagcttaatccatggatattccatttcggggatgtggaacgaatcggttagagtgttcaaacaaatgtcaagttgtggtgtcatcccgactgttgataattgcaactcattcattcacgctctcttcaaacacggtagaaccaacgaagcaaaatgtatttttgactcaatggttctgaagggccccaaacctgatattatctcctactctacgatgcttcatgggtatgctactgctactgacagttgtttggctgatgtgcataatatcttcaatttgatgctaactaaaggtattgcacccaacaaacatgttttcaacatactgattaatgcatatgctcgttgtgggatgatggataaggctatgcttatatttgaagacatgcagaacaaaggaatgatccctgacactgtcacatttgcaaccgtgatatcttctctttgcagaattggcaggttggatgatgctctgcacaaattcaaccacatggttgatattggtgtaccaccgagtgaggctgtttacggctgtctgatccagggttgttgtaatcatggtgagttggtaaaagccaaggaattgatttctgaaatgatgaacaaggatattcctcctcctggtgtcaagtatttcagttcaataataaacaacctgtgcaaagagggaagggtagcagaagggaaagatatcatggacatgatggtacaaacggggcaaaggcctaatgttgttacttttaattcattgatggagggatattgcttagttggtaatatggaggaggcatttgcattacttgatgctatggcatcaattggcattgaaccgaattgttacatatatggtacgcttgttgatggctattgtaaaaatggaaggattgatgatgcattgactgtattcagagacatgttgcacaagggagtcaagcctacaagtgttttatatagcatcattctccatgggttatttcaggccaggaggacaactgctgcaaagaaaatgttccatgagatgattgaaagtggaacaaccgtgagcattcacacatacggtgttgtgcttgggggactttgtagaaacaattgcaccgatgaagcaaatatgctgttggagaaattatttgctatgaatgtaaaatttgatattattactttcaatattgtgattagtgcaatgttcaaagttggcagaaggcaagaggctaaggaattgtttgatgcaatctctacttatgggttggtgccaaatatacaaacctacagcatgatgataacaaatcttataaaagaagagtcatacgaagaggctgacaatctctttatatcagtggagaagagtggccatgcttctgactctcgtcttcttaatcatatcgtcaggatgttactcaataaagctgaggttgccaaggctagtaattatctgtctataattggcgagaataacctcactcttgaagcttcaactatttctttactggcttctctcttctcaagggaaggtaaatatcgggagcatataaaattgctccctgcaaagtatcagttttttgagggagcctggcaagattaa

SEQ ID NO: 20830 - DNA, 1551 bp, Oryza sativa
  Clone ID: TF_OsC216950_1
atgccggtgccggggagccagaacgggcggccgaggccggcgaaggcggagaccatccacggcctcgcccgcgccggcgacctcgccggcgtccagaggaagctgcaggagaatcccgccctcatcaacgaccggaaccccgtcatgtcccaaacaccgcttcatgtcgcagctggctacaataacactggcatagtcaaattcttgcttgatttccaaggcacggataaagttgagctggaagcaaagaacatgtatggagagacacccctgcacatggctgtgaaaaacagttcttgtgaatcagcaaaattgctacttgaacgtggtgcacatatagaagccaaagcaaataatggcatggcaccattgcatttagctgtctggcatgcacttcaatctggagattgtagcacctgtactgaatcttgttctcatcacacattgccccaccaggaaggcaaaatcccttcgaatcatattcctggaggagctggtaaaacaatggttgctcggattcttggaaagcttcttcatatggttggggttctccctaccgacaaagttactgaagtacagcgaactgatcttgttggagaatttgtggggcacactggaccaaaaactaggcgaaagatacaggatgctgagggtggaattctgtttgtggatgaagcttacaggttgataccgatgcaaaaatctgatgataaggattacggtgtggaggccttggaggagataatgtctgtaatggacaatggcaagatagttgtgatatttgctggatactgtgagccaatgaagcgcgtcatcgcctccaacgacggcttctgtaggagggtcacaaagttcttttattttgacgatttcaccacaacagaattagcagagatcttacatctgaagatgaataacccaactgagagcagtttgctgtatgggttcaagctggacccaagctgcagcatcgaggtcgttggagagctgattgccagggagacaactgaacagcggcgtaaacagatgaatggtggccttgtagacacgctgctcatcaatgcccgtgagaatctagatctacgtcttgatttcaactgcgacgatgcgaatactatgatcacaatcacattggaagacctggaagctggccttaagcagatctccaaacagcggcagttgcagtgacaccaaccaatttggtgacaaatttttggttataattggaagctcatcgacatcagacaaagtttcagtcaggttcaaggattttgatggaatcaaatagtgtgatttggtccaatttttttgctggctattctttctgttgtatctattcacattggtaggtaagatttatgcccttctacaatagcactaatacgcatgtagttctttattattcccattgaggtatataagcctttgtaaatacatttcttgcattacgaagcatcttttagaggtgatgaaagtcttctccttctccaggtaaaaaaaaaaaaaaaaaaaaaaaaaaactcgagactagttctcgcccgcgccccgtgc

SEQ ID NO: 20831 - DNA, 3365 bp, Oryza sativa
  Clone ID: TF_OsC40453_2
attccaatccgacggcgccgtgctctcaaatcccgcgaggcgcctcgccgcccagataaaaatcccctcctctcccaaatcctctacgccgcggcgattccgagcagcgcaacggcgggcggcggcggcggctgccggatcgtcggatggcggaggttcgcaagtacgggctgcccaatcagccgccagatattccccagatactgctggaagctcagaatcgatggctacgtcctactgaaatctgccatatactgtcgaactacaagaaattctccattgcgcccgagccaccgaacagacctgcaagtggctcgctttttctgttcgatcggaaaatattgagatacttcagaaaggatggacataactggaggaagaaaaaggatggaaagacagtcaaagaagctcatgagaagctgaaagttggtagtgttgatgtacttcattgctactatgcccatggggaggagaatgagaacttccagagacgtacctattggttgttagaagagggtttcatgaatattgttcttgtgcactaccttgaagttaaggggaaaaataatttttccagggtggcaagcaaagtttcagccgttctaaagaagctgaagagagtgcaggattatctaatgctgatagtcctgcatgctcaaactctttcgctagtcagagccagtgtatctaaagaaaaattcggtgcaacagataattgtcgagcaagctccagataccaccctttcgttgagatgcagcagcctgtggatggagtcatgatgaataatatgctgggtgtttcagctccaagtgcaggatatcatggtgaaatgcagactacaacagctaactcagacaatcattttgctactcattatgacatagctggtgtgttcaatgaagctggagctggattaaggggcgtttccaaaactctacatgattcagtgcgttttgctgagccctatcctgaatgctcagctgagtttatggagccagcactctattcttctaatgccaccatggagtccaacaatctggatgataactcacggttggaaacgttcatgtctgaggcactctacaccaacaacctcactcagaaagaagctgatgcactgagtgctgcaggcataatgtcatcacaggcagagaataatagctatacagatgggatccggtatccacttttaaagcagtcatcactagatctctttaagatcgaacccgatggtttgaagaaatttgatagcttctcgagatggatgagtagtgaacttccagaagtagctgatttggatatcaagtccagttctgatgccttctggagtagtactgaaacagtgaacgtcgctgatggcactagcatacctataaatgaacagttagatgcattcgcagtcagcccttcactttcccaagaccagctcttcagcattattgatgtttctccaagctacgcatgcactggctctaggaataaggtcctaattactggtacattcttggcaaataaagaacatgtggagaattgcaagtggtcatgtatgtttggggacgttgaagtacctgcagaggttttagcacatggctctctgcgctgctacacaccagtacatttatctggacgagtcccattttatgtgacatgctccaatagggtggcttgtagtgaagtgcgagagtttgagttccgtgattctgatgctcgacaaatggatacttcagatccccagacaacaggcataaatgaaatgcatttacatattcgtcttgagaagttactttcgttgggaccagatgactatgagaagtatgttatgagtgatggaaaagagaagtctgaaataatcaacactattagttccttaatgcttgatgataaatgtttaaaccaggcagttccattggatgagaaggaagtttccactgcacgggatcagaatattgagaaattggtgaaagagaaactatattgttggcttgttcataaggtacatgatgaagacaaaggtcccaatgtgcttggcaaggaaggacaaggtgtgattcatttggtagctgcacttgggtatgattgggctgtaaggccaataattacggctggtgtaaaggtgaacttcagggatgctcgaggatggactgcgcttcactgggctgcatcatgtggaagggagcggacagttggggccctgatagcaaatggagctgaatctggtttattgacagatccaactcctcaatttccagcaggtagaacagctgctgatttagcatcagaaaatggacacaaaggcattgctggtttccttgcagagtctgctttgacaagtcatctttcagcacttacactgaaagaatccaaggatgggaatgtaaaagaaatatgtggcttaggaggggctgaagattttgcagagtcgagttctgctcaacttgcttacagggattctcaggctgagtcactgaaggattcacttagcgctgttcgtaaatcaacgcaagctgcagccaggatatttcaagcttttagggtggagtcattccacagaaagaaggtggttgaatatggagatgatgattgtggattatcagatgagcgcactctttcacttgtatccattaaaaatgccaaacctggacagaacgacgggtcacattctgctgctgttcgtatccaaaataagtttagaggatggaaaggtagaaaggagtttatgattattcgacagaaaattgtcaagatacaggcccatgtacgaggacatcaagtaaggaaaagctatcggaggatagtctggtctgtaggcattgtggagaaaattatattgaggtggaggagaaagcgaaggggcctgcgtggtttccaaccggtaaaacagcttgaaggtccatcaccgatccaacagcttgaaggtccatcgcagatccaaccagcaaaggaagaggaagaggatgaatatgattacctcaaagatggcaggaagcaagccgaaggcagattacagagagcactagctcgtgtgaaatcgatgactcaatacccagaagcaagagaacagtacagtagaatcgcaaaccgtgttacagaactgcaggagcctcaggcgatgatgattcaggatgatatgcaaagtgatggagctattgctgatggaggcgacttcatggctgaactggaggagctatgcggggatggggacgcaccaatgcccaccattttgtgacattgaggagttttactagatcagttaggctgcgacctctgttctttaccaggctagctgtaaattcttgtgctagatgttcagtgctcaccgttcgactctatatagcgttatacctaataccatgcgacttctatt

SEQ ID NO: 20832 - DNA, 2708 bp, Oryza sativa
  Clone ID: TF_OsC12642_1
atgcttttcgccaagctcgatgactcgcccatgctccgcacgcagatacagtcactggaagaaagtgctgaaattctcagggagagatgtttgaagtttcataaaggttgccgcaagtatacggaaggattaggagaagcttatgatggagatattgcatttgcaagctcactcgaaacatttgggggaggccacaatgaccctataagtgttgcttttggtggacctgttatgaccaaatttacaattgccttgagagaactaggcacatacaaggaagtcctccgctcccaggttgagcacatgctaaatgacagattgctgaattttgtggacattgatttgcatgatgttaaggatgcacggaagcgtttcgacaaggctagcctcttgtatgaccaggttcgtgataagtacctgtcactgaagaaaggcacacgagctgacataacaactgccattgaagatggatacgacctattgcatcagatggagccatatattaatcaggttcttgcttatgcacaacaatcaagagaaagggcaaacaaggagcaagcctctcttgtagagagaatgcatgaatacaaaaagcagatagatcgggaaattcgtttatcaaatggtttgactgatgcccataatggtgatggaattcaaacgattgctagaagttcacataaaatgattgaggcagtgatgcagtcggcctcaaaaggcaaggtccagaccattcgtcaaggttacctctcgaaaagatcttcaaacttgagagctgattggaaaagaaggttttttgtccttgatagtcgaggaatgctgtactactatcgcaagcaaattaataggacacctggtggttgttccagtcacccaagaagcattggcaaccccactgaacatggttctgggttgctgagcagactattctcatctcattaccatggcattatacatgatgagaaatctgttgcacggcatactgtaaatttgctgacatcaaccattaaagtggatgcagaacaatcagatctgaggttctgcttcagaataatttcacccacaaaggtctacacactacaggcagagagtgcaatagatcaaatggattggattgaaaagattactggtgtcattgcatctttgcttagctcacaatccccagaacagtgttttctgctaagccctaagagctgtggccatgatggcagtgccagtgaaagtagctcctttactagccaggatctggaaccttccatgtatgatgacttaacattggaaaagaacactggaaatgggcaacatgatgtcagaggcacacattatcacaagactaacatgaaacctgaaaaaccaattgatttgcttaggaaagttgatggcaatatcatttgtgttgattgtggttctatggaacctgattgggcatcattaaaccttggtgcacttctgtgcatagagtgctctggggtacacagaaatctcggagtgcatatatcaaagttaatcagcactacattgttccgcagcgctcatggattagatacggcatggcacttcactgtcagcaagcctaaacactcagatcctttctctgccaaagagaagtttatccatgccaagtatgctgacaaggaatttgtacgaaagtatagcatggatgagattcagctagctcagcagatgtgggataatgtaactgcaaatgacaagagagctgtatacagtctcatcgtgcaatcccgcgccaatgtaaatttagtttatggagagatgtcctatagttcacgttcgactactggaagatcatctcagcaagagcactcttcctcaccatctgatggaagccctgtatttttcgattgccattcacatgaaaaagtttctcctagagagcccctttctcctgccagcacaagttcacgtgtagatgatggggaagaaagatgcgaagatgttggaatggttgaattacttttgcagtacggagctaatgtaaatgcaattgattcaagaggccggacaccccttcatcagtgtatattgaaaggaagacacatacatgctaagcttctactctccaggggggctaatccacaagttgcggaccaagatggcaggacggcattacagtgtgccatcgacggtggaacaagcgacgacgagattcttgtgttgttagaagattatactagataaaatctggtggggaaaaagccctcacttcagtagcatttcttctgtgacacagaccacgcccgttgtgaagtcaagagtaacccggctccaggcttctcccagcttgtgttgctcaatgacccaagtttgtggcgtgaagtagcctatgggttcttctgaagcttcagcaacatgatgtgcctgctccttttcttctcctatatatataccatttcgttgccggattctcttagcgtaggctattcttatttatattcatcttgcaaacggcttggtttttgtttgcagatgattcatgcatagtatgtaagtttgtatatccatcatatcgagttgcttctttctctgtttttttgtatcatctcagaacctgaagtaggtccactagtttccatgaaggatggttggatgtacataccgagatgtgccattgtgatttattatggaatgtgaaatatcacctttttgaaaaggggggcaatttcgttcttgcctctactttgaggtcc

SEQ ID NO: 20833 - DNA, 1699 bp, Oryza sativa
  Clone ID: TF_OsC341609_1
atgactgaaatgttactgaattggaacaaggacctcacagaacaagttgacaaaaatcgaagcacgccacttcacttcgctgcatcactttgtaaagacttcgctgcatcacttagtgaatatactgtaataacgtggatgtcacgcactccgctcattccagtactgctagccaacccagttcagttgtaccagcaagattctgaaggattgtatccgatacacgttgctgcatcctcaggtgccattcggactatcaaatatttaattgaggagcaacctgatgagatcgctggtcttgtagattttaaggggaggactttccttcatgtcgctgttgaaaggggcagaaggaatatagttgagtatgctcaccgtactcgatcattggctaggattttcaatatgcaagacaatgatggcaacaccgcaatgcatatagcagtgcggaatggaaataagtacattttttgtattttactaaggaacaggaaaaacccagaaaaattgatattgctggcattaacacattgcaatgcaagtggtggttgccgtcgggcagatcactttcagaaaaaacaggcagacgaagcgaaggaatcagagaaactgacaacttcaacacaaactctaggcatcggatcagtactaattgttactgtcacatttggcgcaattttagccatacctggaggatataaagccgacgaccattacaatggcggtacaccaacacttgctggaagttcggtgataagtttgggtgctgcttttatgctaggtatgtatttggtactggctccagtggctcgatggactgcaattgcaatctgtgtaatgatgatgattgcatctctatgcttattcacggagccattgcatgcaccccgtgttgcaatagcgatgtatgttaggaagggaaatcaggatatccaaagaacatatattattaactgtgggacaccaaataacatgcatggtaactatcgacaggtgatacttgtagaccgtatcctgagggcactagggcccctcaccaactcatccggccttcctcttttccctcaggcggtgacaacgacagccacggtgacgacgcgtagatccatcgctggccgtgatgacgatggcggcgacagtgcttggatctgctgccgaccgtaaagacgacaaaatctggatccaccaccaactagcctcgagcgcgcagatcgaccgctggccgggacaacaatgacggccgcgacgacgatggcgacgacgcctggatccactgtcggccgccaccgcgtctcctccgcgagctgccgccacctagccccggtgagcccgctgccccccgccgaccccgccatcgcctcccctcctgccgccgccgccgccgcccctctcaccggatctggcggaggggagggcgtggtcgccactgccgcctccgctccaaacccgtcgttgttgtcgcacctcccaaaccatcgccatgaaggctcgaagcggctagatccagtggcccttgacctcagcaagctatcatattcaggttgccccgtgtcctcgggacgagctgaatcctcgggacgagccaagacacctgagcatgctcccattgttgtaagtaaacttctttgttgtattggataagcttgcatgcctgcaggtcgactctagaggatccccgggtaccgagctcgaattcgcc

SEQ ID NO: 20834 - DNA, 865 bp, Oryza sativa
  unsure (1)..(865): unsure at all n locations
  Clone ID: TF_OsC68618_1
gacagggtaaaaaattttaccaaggcatctaaacaaggcctaaaagtccaacattttgacggatccaaatccaatgagagatgtcaaattcagttataattttttaaacactgaaatgaaatttacttttcttccttattcattaaacaaaactctggaaggatgaatagaatagcaatccaatctcaccttaaccttgctcccaagtgaaataaaaaataatctagtgcactcttcgatacatacagaagcatacaggtactcatttgcggatgaacaggagcatatgcagagcagaaatgcagcatttgtctctgaattgagagagaggagtgtggctggcctggcctggcctggcctcgattgtttcattctatacgaaggcgtgcttctcgagcagcttgaggacttcctcctggttgttgagtttcgccacgtcgatggccgtcttcccgtccaggttctgcaccgtcacggcggcgccgtggtcgagcaggagggcgacgcagtccttgcggccgtagccggcggcgtagtgcagcgccgtgttcttgttcttgtccaccgcgtccacggccgcgccggcctccaggagaacctgcgcgcatttcagctcgccatagccgcaagcgaaatgcaggcctctcctccctcccgaatcctcctcgtccttgtccacgccttcctccaatgctttcttcaggccctcgacatcgccgacgctggcagtgtggtggatgaccgacctcccctttcactctctctttcccccgcgncncnccccccnanggnaaccncccccaatttgngtcggtttcattttcgggggggccnncatccaaaggtagnggggccccncggnacn

SEQ ID NO: 20835 - DNA, 2395 bp, Oryza sativa
  Clone ID: TF_OsC413415_1
atgtcgcggcgcagggcggccgctgtggcggcggcggcgcgggaggaggaggaggcgtcgcccgctcagcgtctcgtggaggctgccctacggggggacgtggtgaccatggaggcgtgcctggcggccgccgccgccgctgccgcagcggacgacgacacggacgatggcgtgcccgcggcgagccgcgtcggggtggcgcgcctgcgggtgaggtgcgctgaggtggccctccgcgaggaggcggccggggaggtgatcgtggagtcccgcgagctcaagaccgacgtctcgccgctcttcgccgccgcgcacgccggtcatgccgaagttgttcgcaccctcctgagtggaggtggtggaaaggtggctggtgtatcaagttgtaaaaaagtatactgctcggtatttgaggttgctggagctgatgttaatcaaaagttatttctaggctatgcaacaacagctgccgcacgtgaaggaaacatccatattctagagatgcttctgcaggctggagtcactcgggaagcttgtgaagattccctatcagaggctgctctttttgctgaggctgaagccgttcggctattagtctgttcagagatgatacagcctgaagctgcagcacatgctttggtgactgcttcttcaagaggctttgatgatgttgtggtcatactactgcagaatggggttgacgttaattccatggctagggtcctcttgaggtctgttaagcctgcactacatgctaatgtgaattgcactccactggtggcagcagtaatgagccggcaaatttcaactgtgaaactcttgattgaggaaggctcttacttggactgtcttgtgcaagttggttcttggtgttgggactctgcaacgggtgaagaacttcgtgttggtgcatgccttggggaaaaatacaacgccatttggtgtgcagtagagtactacgaatgcagtggtgaaatcctcaaattgctgctcgataaagcaccatggttgctggaaaccccacgcaagggtcgaaatcttctttgccatgccatactctgtcagaacccgaatgcagtaagcgtgcttctaaatgctggtgccaatcccagatttcccataatgatgacaaacggcacacacgtctcctacccaatacattttgctgcaaggttgggtcatgcgcccgtactgaaacaactcatgttggatggggctaatatcaatgcgcagacttctactggggacactcctctgatggtctctgcgaggtgtggacactccgattgctttcttgaactgatcaaatcaggggcagaccttgggatagtgaacaatgcaggtgacacagcaataatgcttgctaagaaaagctcatttagctcaaccatcatcgacattctttccagagcattgagttgcggaggctgcatcacttcatcggatatcaccgtcttctctccgctgcacttcttcgctgcaagtgacagtgcagaagctcttctaatgacgctacactactcagcagcagatctgaacaggcctgatggttcagggctcactcctgttatggttgctgcagagtcaggccatgctgacattttcaggcttctagtgatggcgggggcagatatcgctgccacgagtgccgaagggaaatccgcgatgtcgatcatccgaagcagagctcctgaaaccagagatcggttcgaacagatcttactccaggcttcgctcgcggatgcgatcgcaggccagcagccatctttcagacccctgcactacgcggcccggatcggcgacacctcctccctgacgcagctcctgaagatgggccacgatcccaacgcgatggacgaggatggctacacgccgctgatgcacgcggccgccgcaggcaagctggaggcgtgcagggcgctggtgtcgcgcggcggcgccgccgacgcggggagcgagacggcgctgtcggtggcgaggaggagcggcaggtcgaacaaggcgacggaggagtggctgctggaccacgtggcgcgcgccccacgtgctcgccggggaggagctgacgaagcacacgcgcgggggccggggtccgccgcaccgcaaggcggtgcggatgatgcggtccggcgtgctgacgtggggggcgacccgccggaggaacgtggcctgcagggaggcccgggcggggcccagcgcggcgttcaggaggaacaggaggatcatcaggacgggcagcgaggagcagctgatcctaatggtggagacggtgaccgggagggagatccacttcgaggccacctccgcgtccagcgtcgagctatgggtcagaggcatcaatctcatcgtgcaagactgcgcgtggtcaaggccggatgaagctgagcaagcatag

SEQ ID NO: 20836 - DNA, 1083 bp, Oryza sativa
  Clone ID: TF_OsC359_7318
tcctgcacccccaaacgaaacttggcaaaaaaaaaagaaaaacatgtattctcatagaaaactattgtgtgaagcaatacaaagagaagtacaggttcatagtgtcaatgacttctgcagtggggtaaaacccatactccttgaggatagttgaaacatgttccaaaacctccacatggggcgcctctgaatgcgcctgaacgtatgcagaaagaggttcaccagcttgggaaattacatcaacaagcaggcctgtgcaatcaataagtgccctcttttcctcccgaagcttctgtgccattccatttgaaactttcccccatctcaaggcaaatgaaagcctcagtatacgcttgtacataatgtcatacccatttttctttctacctcggatctgctcctgagcagccagtagtagaattgcggtctggataagttttccattctcaatataattccagagctcttcaaggagattatttgtttttcctgcaagtagtctagttgtatccaggaagatcttcatttcaggtaaacacagcagatggaaaagcttgtagatataatccagatgatcctggccgggagaaagattgtcctcaagatacttatgcaggcaagtgttctcaatcgcgatatggagcaggagtaggccatcgatgacatcgtcgccaaccgtgcgtacgttggctgatgcaccatggcgtaagagcagcttgatcatctcaatagagaacctttcagcagcttcatggagcgggaagtatccatatttggttacgcagttgggattggcatgcaccccaaggagctcaggtgccctgccctccaatacaactttcgcgcatcgcagggaattgaaactgaccatgcaggttaaggtttgtgcggtgatggtgagattccatgacatggtatagcccttccagttcttgaataatcggaggaagcaacgtgcactatcctttataaagatgggctccaattggtcatatttgtccaagaaggtataacacatccaacctcgggagcagggtctgggatgattatgtcatttgctagccggcgtgagagaagcggcgt

SEQ ID NO: 20837 - DNA, 1893 bp, Oryza sativa; identical to SEQ ID NO: 11014
  Clone ID: TF_OsC349299_1

SEQ ID NO: 20838 - DNA, 1641 bp, Oryza sativa
  Clone ID: TF_OsC298449_1
ctaggtgtcagatatcaagaatgcctgaaatgcaagctttctacccatgttaggaagcccctcacttccagcattattactgtgtcctccaggcaaggtaaaagcagcggcgaaggtgattgttgcaaggaggattgctactaaagaagtgttgcttgtgtatgtttgagtcaatgtccttatatccttccttgctttctcagttacttgatctttgattgtttttataagattatagatttcacctttgtcttccgggtcagctttcaacatacgcatggagacttcactccagttgagcgtcttagcatggtcggcggcatcatttggtacccagattggggggttaccgttgctgtcgagcactgtgacatcctgggctttacattgcagtaaaagagcgacgatcttcggatggcacttccggattgcataatgaagggcagtttcaccgtttctgtctcgcatgttaatgagtttccgcagctcctttgactgcaaaacaaattccacaaactttatgtgacctttttgtacagctatgtggagacatgtggtgccatcgttttcaactagaaatggagcatctggacaatgtttaagaatctccatagcaacaccaacatggccctggtatgcggcactaccaagaagagggataccacttgtgctgattatatatcctaaagagaaatcatgttccaacaatacttttagcacgtcaatcttgttctcaagcacaccaaattgcattggattaacccgtgcgctgttctcttctcttgccaatttaggacgagtctcaataatctttttggcgatatcagtattgttatttctaaaggcagcatgcagagcattgtatccggaggttccaccgtgagcagaatcaggaacctccaacagtttatcgaacacatcggtgaaattcctcatcaccgcgatgaacatgggcgattcatcgtgtttgttaacagctttcgtcaaggcaggctctttttctatcagctcgaatgcaagcttcctgtgtcccctgcggatggtgtggtgcagcgcgttgcatccttgcttgtcttgcctcaccatcgcctccctcgtatcaagatcgtcatggcggcggcagtagtaactgagaagaaaagaagctaaagcgacattgccgctttttacggtggcgagcaacggcgtctcgccatccgcgtttacagtgcagaggagggacgggttcagcatcaagatatccttgcagaattcctcgtggccatgggccgatgctatgtggaggcaggtgttcccctgcactgtccttccaagcagaaggcttgggtcatgcagagccggcttcacacccgatgtggctgctttcagcagacctctgtccatcactggcgaatctgcggttgctttgctgtctggaataggcctaagcggctgggatggccccttgggcctcttcaaagttgggcttgttatggcgaagcccccatccttcagcatacacccttcgcccaatgatgcatttggtcttgccagataccaacgcgattcttcagccttcgccatctctacttcatagtcttcgccatgggacttcgcccagatgatcttatcgtcatgggcctgaatcctcacaggttgcat

SEQ ID NO: 20839 - DNA, 1401 bp, Oryza sativa; identical to SEQ ID NO: 10999
  Clone ID: TF_OsC309277_1

SEQ ID NO: 20840 - DNA, 1669 bp, Oryza sativa
  Clone ID: TF_OsC26711_1
atggggaactctctggggtgctccgcctccggggagaggctggtgtcggcggcgcgggacggggacgcggtggaggcgcggatgctgctggagctcagcccggcgctggcgcggtactccaccttcggcggcctcaactccccgctccacttcgccgccgctaagggccacctcgacattgtgacgctgttgctggagaagggcgcggatgtgaacgtacggaactactgcgggcaggtgttccatttccgcactgcgcaagcatggagatggacaagagggaacagcaggatcttgaccggactagctgctcaggcatgttctggagccgaagaagctgccacagggaggagcagtgtaatgcagagatcaatgcttgattctttcttctttctggttgttaatatatctggattcatagcagctcaatgtgggagatgagcagcggttattttttttgcctccccagctgtgtttctttcccctatttgcagccaagattttcttgattggtgaagtgaatcctgcagcttttggctgctgtagtttttactgtattgtagcattttggttacaaatgtgtgtcgtccctgtgatcctagatagccccaaaatcaccagttactcctctttgtagctgtatgtaaattgcaggagttggttgggatttgttttctggtaaagatgttgagaatctatgtacaatggcatcagtcatttgccctcttaaatcttaatgataatactatatagatcctaaaaataaaagagcaaacttaatatagctaggccagattatgtgctctgtagaattgcaataatttcagaaactgttaagttaggaagagaatttgggttgctgcacaccgtagcctctgtggatgatagtgatctttgtgcagtttgccttgaaaggtcttgttcagtagctgctgaaggttgttgtcatgagttctgcatcaaatgtgctctttatctttgctcaacgagcaatacccgtgttgagttcactggcccacctggatcgattccgtgccctctttgtcggaatggaataatgtcatttaccaagttgccaagcacgccaacagaagggcttaaatctagctcagcactcacgttctgtaatccatgcatgctaaacacccgatctgtagactcaccagcaactatcagcaaagcagaaataaggcgcaaccgtgttgcagctgtctcttcagagctagtctgcccactaacctgcagcccatttccatcgtctgccctcccgacctgcaggtgcagtgacgatgatccatgtgatgccatagaaacacaggatggttccgaggtgcaatctcctcagccatcgcactgcgcaagcatggagatggacaagagggaacagcaggatcttgaccggactagctgctcaggcatgttctggagccgaagaagctgccacagggaggagcagtgtaatgcagagatcaatgcttgattgtttcttctttctggtgtggtactatatctggatacatagcagctcaatgtgggagatgagcagcggttattttccttggctccccagctgtggttctttcccctatttgcagccaagattttcttgattggagaagagaatcctgcagctctttggctgctgtagatttcactgtactgtagcatt

SEQ ID NO: 20841 - DNA, 1122 bp, Oryza sativa
  Clone ID: TF_OsC45222_1
agagcaaactgacatgacagttactacaataattcttggctagtatgaattatggtccagttgatcaaatctgattctagatcagaatggttcatacttaaaaaagacaggattcaaccaaaaaaaattagtacaggttttcgataccaaaatttgttccccttcgttaacctttgtgcagcataacattttcagccttcaagcattgccttggctgcatcaattagtgcaggtctaaagctatcagatgctcgaccaagtacggtatagccttccttgtcctcaatggcaacatcagcaccatgtctaactagcagaagagcaaccgctttgtcctcagaaataacagcatgcattagtggtgtttgtcctgttttgtcaactgcatcaacatcagccccctcctcaattaggaattcacacagttcagcatttcctgtactggcagctctatgtaagggtgtgcacccaaacttatctttcttgttgacatttgcactgtgcgctattagtgtttctgctatattaagccgtcctttactggcagcataatgaagagcagtccggccagcatcggttgtcaaatcaacattagcaccttgatcgagcaggatggagatgatctcagcttttccgctgctcgccgccgtgtggatcggcgcccacccctcctcgtccttcccgttcacaacgctggccgccgcgtcgccgcccatcgcggcaagcactctcaccacctgggcgtggccggaggcggcggcgacgtggaggagggaccggccgtcctcatcgcggagggcgagcgcggcggcgaggtcggcgggggagagggaggagaaggccgcggcgtccccggactccgccgcgctgaagagctccttctccgaatgtctcccaccgcccgcggcggcgctggcggcggcgccgtcgatgtccattgtagcagacatcgtgcttaggcaaaagcgaaggcgcagaagagaaatacgcttcgagcctcaggtttgcgtttccggacgcgtggggctcatctcgtgcgcgtctcaaatgagccacacacggctctaaagccacgtatcaggatcagaatcagatacggcaatgatacgataagcctcgtgc

SEQ ID NO: 20842 - DNA, 1358 bp, Oryza sativa
  Clone ID: TF_OsC35821_1
gcacgaggcttcctctcgtcgattccgcctcagatcggggaggaatcgcggcgagatcggccgctccgaatccgatccgcgcacgtggtctcgccggcggggtcaggttggttcgcgggagccgccgccgccgccgccgacgacgacgatggccatggagacgccgccgccgttccaggagtccgcccactgcgacgtctgccgctgcaccttcaccaccttccgccgccgccatcactgccgcaactgcgggaggacgctctgccacgagcactcgtcgtaccatatggctctcccacagtacgggatatacacggacgtcagagtctgctatgattgcttcaacaaatcctccagtcgtggtggtgttggcaatgccggttcacctgggagtgtatctagtgcagctgactccttttcagggttaaacttgggggaagatgatgcttcatcacctatgaaaaattcagcgtttcacagtgcacctgctgttattgagtgcaaatgtggaatgcctttgtgtatatgcgaggctccgaaaccagaacctgtgcctgtaaagttttgtgtgcctccgcctaacgagcatatgcagcagagtatcagcacaacttcctcaagtgcacagtcgaatcctaggccaaaaaaatcttctaccaatcaacaatctgctgaatcaagtgtcaagaaggcttcggccacttcaagcagcaactcaagctcattcttaaatcttggcctgatgagcaatgatactaatgataagggtccttctgaatatgatgttactggggagggactgagggaagcaattaagagtggggatattaaagctgtcaagaaacttctcagccagggagtggattctaattactgcgataagcaaggatttgctttgctacatttggctgcactatttaaccagacagagattgctcttattctcatggataatggagcaaatattcagagcaaaaatggacaaggggaaactcctttggattgtgctccagccatgctgcaatacaagatgcgccagaggatggaagaacttgcggcatcacaacgaccctagtgatatttttctcctcttgttcatgtgccaaagatggtgcccccccttgcatggcccagaataaaaccatttttaccaaccgaggggcctctttgctgtgggtatagtagtatttctgttggcaccatcgcctacaaaatgtcaaaacaacaccagctcataaactgcatgtttcgccagctaaaaaaataattcattgtgcttaatcttgccatgtcatcgtgcatacatatgttcatgtatatgtaatcatatgtcctggtttattattagcattggtctg

SEQ ID NO: 20843 - DNA, 915 bp, Oryza sativa
  Clone ID: TF_OsC1528_2259
gggtggaaacgatcgcactaatcctgtgcgtcgccttcgtgttaatatatatgtgatgggaacagcccccatcgtggcgatacagagttcggcgcagctgagaacaaccgaagccgagattgatgaaacgactgcatgcagtaacagaaaacagaaaacaaactctaacaaacatctgttatcgcatgtggaggaaaggctaacctgatccgcatggatagactaacctaatccaaactaacctcaacaactacatgcatgcaagctgtcaggtcgtcatcacatgatccgaacctttcatgctaactaacacggtcgccttcgcacgtgccacgacaagagcctccacggtggcgccatgcccgtgcctcgctgccatgtgtagggccgtgtccccggccgcgttctggcatcccaggatattctcctcgcagtcctgggccagatttacaaggatcgtcacggtgccggcgtgccctgccctcgccgcgcagtgcagaggtgtgtccatcgccgagttccggcgagagaggagactattgtccctgatgaacctatggtagagctcctggatcagctcgccatgccctttctccgctgcgacatgaagaatggtgttcctctccgccgtcacctcgagtacgttgcactgtctgtgctgaatgatgccagcgacttgacgatgtgctgctgcaccatcgccgggccgttgctgcagaagcaacgccatgacctcctccgctcgcccgctccgtgcagcgcgatacagcgacgggcacatctccatgcgaggcgcctcatcaccattcgacgccgccggctgatccattgatggagtatgcatgccgtacgtacgtgtcaaattaagcttattagagataaagaggatataaagtatatgctcggacgcgtggg

SEQ ID NO: 20844 - DNA, 655 bp, Oryza sativa
  Clone ID: TF_OsC97704_1
atgacgacgcagcaagcttctggtgcagatgcagagtcgggcatggatctggacggggtcaccactgaagggaacactgcactccatgttgtggccacctgcggtgatggcccgggctacttgaggagtgcaggcgtcatctacagcaggtcccaacatctcatgttagtgcagaacaacaacggtgacacacctctgcactgcgctgtccgggctggccattccaaaatggttgatcatctaattgatctggttgaaactaaggacaactcccctagcagcgcgagactggaggaactcctgagaaaggaaaactgccgtaaggagacggcctttcatgatgccgtctgcattggaaataaggatataatcaccaaccttcttaaatattattcagaattggccggcttccttatggatgcaacaggtacttcaccgttgtacctagctgtcttgcatcaacaggtcgacattgcaaagttattgcatcaaatgacagacgggaatctttcgtactctggcccaaatagacaaaatgcattgcacgcagccgttctacaagaccaaggtgcgtatgcaatttatatttgctgttttgaatttcattctagctatattccatacttattttgaatcatatatttgcttttatcat

SEQ ID NO: 20845 - DNA, 1523 bp, Oryza sativa
  Clone ID: TF_OsC763_2
ccggccgcggttcttcttcccaagttctcatcgagggttttcctctctctctctcgcatcgcatccatcccctcgtgtcgccgccggcggaggctgcggcgagccttcaccccccacccgcccaccgccggcgagccacggcgtgggcgacctcctctcctctcccgatcccctctcgcccttaggtaggggcttctccccagtccccaccacacgcgcgtgcgtggccgacgagcaccccaggttcggatcggatggaagaccagaagaaaaatgcaaaaccagaggggtcttctggctcgcaaaggggagctcccccggcacctgatgcaggccttcccaatccttttgatttttctcagtttagcaacttgctcaatgatccatctataaaggagatggcagagcagattgcaagcgaccctgtgttcacccagatggcagagcagctgcagaagagtgctcatgtgaccggggaacagggtggccctgcattggatcctcagcagtacatggaaacaatgacacaagtcatgcaaaaccctcaattcatgtcaatggcagaacgtcttgggaatactcttatgcaggatcctggaatgtccagtatgctcgagagtttgactagtccttctcataaggagctgcttgaagagcggatgtcccgtattaaagaagatccctctttgaaggggattcttgatgagatagagagtggtggtccatctgctatggtgaagtactggaatgaccctgaagttcttcaaaagattggtcaggctatgtcaattaattttccaggagatgctgctacttccactacattgtctggacctgaagaaactgaagaggatggtggagatgatgatgagtccattgtccatcatactgccagtgttggcgatgcggagggtctgaagaaagctttagaggatggagcagacatggatgaagaagacgctgagggaagaagggccttacattttgcgtgtggttacggtgagttgaaatgcgcagagatccttctggaggcaggtgctgctgtaaacgcactggataagaacaagaacaccccactgcattacgctgctggatatggtcggaaagaatgtgtggatcttctgctgaagcatggcgctgctgtcacgccccagaatctggacgggaagacccccatcgaggtggccaagctgaacaaccaggatgaggtcctcaaggtgctcgagatggacgctttcctataaagaaaccaatgccaaatctcacgctcatcatcaccggctcgtcgctttacagttcagctttttacggcaaacccaaatcatcatcgactcttttagctttggttttggtgtgggggtcgaacatccatgaatcgttgctatgtttggagaaccgatttgtaatctgtttcacttccccgttacactgcatcactccgtttcatcctttgtattcctatgttgctgagtctggtggtgcagaaaaaaaaaaaaaaaaaaaaaaaaaaacccccccacaac

SEQ ID NO: 20846 - DNA, 2790 bp, Oryza sativa
  Clone ID: TF_OsC35544_2
atgcctataaagagacttgagattgagaaagtaacggcccaggatgcagtcttagcttttaaaaatgatggaatcgggttgctgcacgctgcggcttgccagggccaactgaacgtttgcaagttcttggtggaggaatgggggggtgacgtgaatatggctggagcacaaggtttaacaccggttatggcagctgctgagtctgatgctgttccgattctgaaaggatagcttgatcatgggggtgatgttacaaacgcagatgtgataggaggcacagttatccaccatcctgctgaaacgagttgatggatggaaacagagttatcgctttcaaaagcaattcctgtcaagatagacagtgaccttggaacaccactctttcatgctgctaacgatgacaaggataagacacctaacattctgatgtatcacaatgcagcttaacaagcttgggattggggtgctgcacgccgcggcatgccagtgccatctgattgtttgcaagttcttggtggaggaattggggggtgacgtgaatattgctggaaaagaagatataacaccgtttatggccgctgctgagtttggtgatattcctacgttggagtattttcgtaatcatagtggagatgtaacaaaaggagatgttagagtacaaacatcccggagcggtgtggctgtggaataatctctcatgcgaaagtcaaagatataaggccaatgacaatagatcatgggccaaccacagttctgtacacaaacaggagcatttgtagattgctcatgggtgatggtgaagatgctcaatctgatggtaacagatcccgaatgatgcggcctaactgggaaaaagcttgttatcgttggagtgcaggtcacatgctactcaaggagtacaaacaactgtgggatgctctcatggatgcacaaaaattggatcctgggagcgttgaaattgagaaggaacaaagggaatatgatatccaagaaagtaaagatgttgtggagtcgaaggttggcctttatgataaacccactgcatcttatggggtcaaacctccaaatgtttcatctgttatgggaaaaacacaaattgatacatgcaaagatgtggtcttcttaaaagaagaggtagagaaaaggatgaggctggatgtttctggatccttcttcgtgtaccagatgagcacgttagaagcaggaataccattatcatcgtatgctggaaagacatggaatgggaacattgacatggatggtttgattgttgttcatgggagagtcagaatcaagaaaaagccatggaaaggcctcaactcaagcaagatgaacagtgactgcaccaagttgacttcgatgataagagaaatgtttgtcaaaaaaaatgttcatcctccgtacttgaagcaccttcttggaaagttagaagctttagctgtcgatgttttcacagtgcgtcagcagcttgcttttgactatcatatctctttgataccttctctgaaccgagtaaatttggtgtatcaaattaagagatgctatgatggctgggatgacagagagaaaatgtacttcagatttgttgcagacaattgcacagtcccagaagattggtgcaatactttgatgtctaagcatttgtttcgcctagtgattttggaaggacagaagaggaacatcatatacggctccaatggcatgagtgcatttcatttggtgagaaattacaatactcatgcaccagaacattcctggattcatgtgttcgtggattccaaaatagaacattaccaatggtttcaatgtgatagtggtattgagctaatggtcccaaaatatctaggagactttcttgcagaagctgtatttaagtttattgaagatgagtttgatttaactcatgtgaaaccaaatataaccaaatgcaattcaggtattccaacactgctacgacacaacttccatgaaggatctgaatgtaacagccatgacaagctgtcaagtccatttgatgggatgggacaaaaagtaatgcccagcgagacgttcgatcgttcggttgtctacgtggcaattatctatggcgaggctctcgatcggcttgctagctcctcggccatgtgctctaatggcgatttctcggtttgttcgcaggtaacccgtataaatgagtttatggatcgacccacttgcatctctaagtgcggcaaatcggaccacgacgtgaaaacacacgggttatcacttattttacatataaatgccgtcttagctcttaacaagcatgggattggggtgctgcacgccgcggcatgccagggccatctgaatgtttgcaagttcttggtggaggaattggggggtgacgtgaatattgctggaaaagaagatataacaccgtttatggccgctgctgagtctggtgatgttcctacggtggagtattttcttgatcatagtggtgatgtaacaaaagcagatgttagaggatgcacagttctccaccatgctgctggcacagatttatggcccatctcattcattgcaggatgctgtaagtctaacgtaattgtcaataatggagccggtagtcccctgatgagttcccttatctaccgatcattgaagtgtatgaagctactcataaaggctggtgctgatgttaatggcaagggtacagttgtaacccctttgatgcttgctgcgtcgcaaggaggctatactaacttcattcagtttcttctgaaggctggagcaaaccctaatattcctgatgatgtatgtttt

SEQ ID NO: 20847 - DNA, 1621 bp, Oryza sativa
  Clone ID: TF_OsC60712_1
gcgtgtgtgtgtacatgggtagcttagctctagttctactagctcttgccaacagcccagctaagctgagctgatctattcacgtctgtggcgtgagctagatcagcttattaactatctctctaccaaatcaagctaagttaattagctggatagctcgctcgcagtgatggtggttgtagtcgctgtcctcatgtccggcgtgggtgagacggctggcgcctcagcagggggtgcagatatatggggaattcgcttggctgcgtggggcttggggagaggttggcggcggcggcgaaggacggcgacgcggcggaggcgcagcggctgctggcggcgaaccccgggctggctcggtgcaccaccttcggcaacctcaactcgccgctccatgtcgccgccgccaaaggccaccacgagataatttactgtaataatatgctcaatgatcaaatcacagacgagattgctgcattgctgctggagaatggagcagatgtgaatgcgaggaacatctatggacaggtgtggagggtggagaacctgagtgggcggacggcgctgcacatggcggcggccggcggacatgtcaagtgcgtcaggctgctggtggcggacgccgccggcgacagagacgggtacgtgaacaaggcggcgaacggcggcgtgacggcgctgcacctggcggcgctgcacgggcacgtcgagtgcgtccacctgctcatcgacgagcgcgccagcctcgccgcgcagacgctgccctgcgccgcgccgcccatggcatccatcggcgccggcagcacgccgctgcactacgccgcgtgcggcggcgaggtcaagtgctgtcagatactcgtgtcaagaggagcagacagaacagccatcaattgcaatgggattgtggtagtcaggtggatcccaatcgacgcagccagaatctggggctgcaactggcttgaacacgtcctctcccccaagtcgcatcttccctgcacgggcacgcctccttccggctacctctcccagccactccccagcctcatcgccattgcaagggagcaaggtctgaacttgtcttcggaggtttctgatggcttcgatgaaggagcagatgcctgcgccgtctgtcttgagaggccctgcactgtagctgctgaaggttgcgatcacgagctgtgcgtgaaatgcgcgatggatctctgctcggtgatcaaatcctacgactcggcggggatcgccggcgagatcccgtgcccgctctgccggaccgggatagcctccttccggacaaccgccgccccgccgccgccgagcctcgccgggtcgcccgcccgccgcagccgccgcaacaactccggcggcggcggcggcgagcacgaggcctccaactccggcggcagcgagaagggatacggcagcatcgaccccgacgccggcgccgtcgtccccctctactacgcgccgcccttcgcgccttctgccatcctgacctgaggagcaaggtctgaacttgtcttcggaggtttctgatggcttcgatgaaggagcagatgcctgcgccgtctgtcttgagaggccctgcactgtagctgctgaaggttgcgatcacgagctgtgcgtg

SEQ ID NO: 20848 - DNA, 2384 bp, Oryza sativa
  Clone ID: TF_OsC339703_1
atggatttcggaccttgcaacgagacgctcgacaccgaactgctacacgtgctgacctccggcgacgaggtccgcatggcggacctgctgggcagagaacgccgtggccatggccactccctgtcccaggtggcgatacgcgtcgacgacgacgacgacggccgcgcgccggcgggagcgagccgcctccttggcgtgacgacgggcaacggcaacacggcgctgcacgtggccgccacccgcgggcacgccgcgctcgcggcgctggtctgcgcgacggcgcccgcgctggccgccacgcgcaacaggttcctcgacacgcctctgcactgcgcggccaagtccgggcaccgcgacgtggcggcctgcctcctgtcagagatgctgcgagccggcggcgcggcgtcagcggcgctgccgctgcggcgggcgacgaactgcctgggcgccaccgccttgcacgaggccgtgcggaacggccacgccggggtggtggctctcctcatggcggaggctcccgagctggcctccgtggccaacgacggtggcgtctcgccgctgtacctggcggcgacggttggctccgtggacattgtccgggcgctgctccacccgttgcctgatggaacgccctcgccggcctcggccgctggtccggacggacggacagctttgcattctgcggcaactactagcaaagagccctccctagctctggtttgtgatatccaaggatcatttcctttgcatgttgctgctgtgatgggcagtgttaggatcgtcgttgagctcatacagaaatgccccaacaactacaacgatttggtcgatgatcgaggaagaaattttctgcattgtgctgttgaacataacaaggaaagcatagttcgctacatttgccgagatgacaggtttggtatcctgatgaatgcaatggacaatgaaggaaatactcccctccatttggccgccgagtatgggcacccaaggatggtcagtttactcttggagacgatgagcgtcgatgtagccattaccaacagggatggtctaactgctgctgaccttgcttatcgccatctgcaacctggtttgcactattttctgaatcctcgagccgtggtaaagaatctcttctactgcaccagagcaccggttaccctagaaggggatcatgctaggactggcatcccatcggccatggaggatgccgatgctcccaaggacagtggtggcgtgacatccaccggaacagtcgcgtccgtgctgatcgccacggtgacgttcgcggcggctctcaccgttccggggggctacgtcgccgacgaccacccgaacgccgggacggcggcgtcggccgggcggttcgccttcagggcgttcgcggtgtcggacaccatggcgttcctctgctccatcgtgggcacctgcctcctcgtcgtcggcgaggcgagggaggtccggccgagcaggggccgtctccgcgcctaccaggggtcggcgtgggcgctcgtgacggccggggcgcagttcatggtcgccgcgttcgcgttcgggctccaggtcgcgctcggcggcggcgcggacagccggtggctggtggtgttcgtccacgcgctgtgctcggcatcggtgctgctctgcttcccgggcatctgggcgccgttctgcctcgggaaggcttgcgtcgacctcgagccggccacgcgggcgtggaggtcgccgaagtgcgcggcggcatcagcgagaaaggaggcttgccatgcgggaacgcggaggtcgtataactggcggttcagcttcttccagcgcttccgctcggcctccacgtggctggctctgggcttgttgggacacggccgccgcccaccactgcctgctctgatcctcgccatgggagccaccgctggcagtttgccgcctaatcagcgactccccatcgccaacgcgtccctccctcagttgccttcaccagcccagcaacaactccacggtggtagcttggtagatttttagggagagcaactgctaaagtgtcaaagctctccagggggtcgacggaggagtggaggaaggtgacatcggaggcacggaagttgtcgaagcacaacgtgttctgttgggcgtgcctcgtggacgacaaggccgtgccttggctgctatgcttcctctcctccaccaccgccgccatacaggataatgccgtggcgtcgctgctcaacctcttgaagcaccccgccgggcagatgaccatcatggaggtcggaggcgtcggcctcgttgtcgacgtgatcaacgtcgttgccaaggccgtggcgcagcataacgtagcggccatcctcttctacctctcgtcgaacaacccggatgcatcccggaggtga

SEQ ID NO: 20849 - DNA, 2674 bp, Oryza sativa
  Clone ID: TF_OsC264249_1
ggcacgaggtttttttttttttttttggaaatgatactgatatttcagagggaaagcactacaagcagtcagctaaaacaactttagccaagcaaacaaccaccaaaggctatacaaactccaggcccctgaaccaaaaagacatcatggcaagccaacccaagtacccaacccagccttcgagctgaaggccagcagctgggcacacccactacactcttcgcggtctcccactccctctacgcccctactctttacaggcacgctcgctgcgaactaccaaagcctacggggagcaacaaaacacaggggcgtctcactccttccctctcttgccgtacaccgccctggtcaccgcccggatgcccctcacccacagctccgcctcctcctcgccgccctggcacacgaagtgcacctccctccccgtcgccgtcgccacgcggaacagcccgggctcgtacgcgtcgcagccccgcctctgccggtgcagctggaacgccgagctgccaccgagctcggcctcccggcacaccacgttgcgccgccccgacccgccccaccggagcacgcccgccgcggcgaccatccgcagggacttgccgtgcggcttgccgcgcccgcacttggtgtgcttcttgacgtgggcgcccccgaggacgagctggcggcccagctcgtccatgatcacgtcctcggccttgttgaacgccgcggtggccctcgccagggagagcgccgtctcgccgcgcggggtccgggtgtcgcaccgcgcgccgtaggagatgaggagctcgcacacggccgcgtgcccttccctcgccgccagcatgagcggggtgtagccgtcgccgtccgggatgttgacgtcgcagcccgcgctcgccaggtggcgcaccgccgcggtgtcgccgcgccgggacgcgcagtggagcgcgtagaagccccccggcatgcccttctccagcgcgaactcgagcatgacctgctcgaacaggtccctcttcttgctctgctgcgccagcccgatggccgtctcgccgcgcttgttgctcagcttcacgttggcgccggcgaacacgagcgcgcggaaggcgtcgacgttgccctccttggccgcggccattatcggggagcacccgtccacgtcctgctcgtcgacgtccacgtctggctgggccaggagaacttccatcgcggcggcgtcaccgcagcgcgccgtgaacatcatcggcgagaacacgttccggtcgctcgaccgagggatcgtcccggaccgaatcacgccaagaacggcgcgctcgaagccggccttccagcccccggaacaagcgacggaagccgcggactcgccggccgagttcaacagcgcgacgtccgctccggcggacacgaggatcctcaggcaatcctcgcgcttgtggcgcgcggcgagtatggccgcaacgtcgccgccctccgccctcgcgttcacgtcgcatcccttgcctatcagcatctccaggatctccggctggccgaggcgcgcggccatgtgaacaggcctggacctggagctcctggacgtcttcacggccacctcgtggtccacgccggacgccagcagcgtctgcaccgcgccggcgctgccgcagaggacggcgtggtggaggagattccggccgagatgggtggcgcccgacgagtacccgttctggaggagcatgcggaggatggcgccggtggactcgtagtactccacggcgcaccagaccgcgtcgtaggggtccgcgaggccggcgccgacgcgcagctcctcgccggtggccgtgtcccatgaccacgctcccagcctcaccttggtgtccctctttactccggcctgaagtagctgacgaacgacggcgatttgccggctgacgatcgcggcgaagagtgccgtgcagtcgacattggcatgcagagaaggcttcagagagcgcaggagcacccgagaagtagcatttgggtcagctccacacttgatgagcgagtccaccacgtccacgaagccgcgggcggcggccgacacgagcgcgtgcacagcgacgcgagggcggacgaggtcggagcccatgaagatgacggcgagggcggcctgcccctgcagcgccgcctccacgacggcctcctcgcacgccggctgcgacgccccggcgcgcaccagcaacgccgccacctccgcgcgcccctcccgcgccgcggccgtcgccgggtacccacggaacaccttgccgttcacgtccgcccccttcgcagaggccctcatggccgtggcccgtgcgagctcatctgcaagcagcgcacggacgagcgcggcgtccccgttgccggcggcgaggaagagcggcgacacgtcggcgcggatctcctcgtgcgccgcccgcagctcagcggcggcgccgtcccgcagcgcggcctccgccacccgccgcgccttgagccacaccaccccggcgtagttcacgtccgcgcggccggacgcgagcagctccccggcctccctcgcgtccccgcgcgccaccgcctccaccagccgctgcgacgcggcctccgcctccgcctcgtcccgcagctgccggtggtggtcctccgccaccggccacacctgccgcccgccggcgatcgccgccgccggccgcagcagcactgccat

SEQ ID NO: 20850 - DNA, 2088 bp, Oryza sativa
  Clone ID: TF_OsC1713_3839
tcaatgtactcccctaatcttggagtacaacaccacgacaacaatcacaatgtaaggccagaattgcatcagcaaggtggccatgatggcgaacggcagccgccaccacgcccgtgcaatcccgagcctcttgagcagcatcacctcgccggcggccaccacaaagacgaaccacgcgacgtcggccagcgcgagccccgtgatgacgcaggcggcgatggccgtcgtgcgtgccacgggggccagcacgacgtacatcccgaacgcgaacgccacgccgaggctcctcgccgagcacgccatgaacgacgccgagaagacgaaggagatcatgcgggtgcgcatgtcgacggcggccaccccggcgtacgtgaggctgatgacggacagccccgcgcagatgaacgccagcgtgttggcgatgatgaacacgtcgaaggcgtagcggccggccagcctcggcgcgccatcgtcgccgtagtcgcccggcggcgcgaacgccgccgcgaacgccaccgtggcgatcagcaccgagccgacgccgatggtttgggtggattccgtcagcttcttcccttcaacctcctcgtctaccttcttgttgtgttttttgagaaagagatcccatcggtgattaccttgcttggcgttggcatctttcagcaacttgtatatcttgacccgttgattcaatccgaaataaacaccaactggtttctcgatccaagaaatatcaagcggggtttctcccttattgttcgtcaagttgagctcgacctggcgtctctccatgagagggttgaagatccacatgttgccggccttgacggcgaggtgcagcgccgtgttgccgtcgtcgtcctgcatgttcatcaccgccggcgagaggttcccgagcttgcaggcgtacgcgaccacggactgccgctgctcctcgacggcgacgtggaggaagctccgcccgcggccgtcacggagctcggcgcagcctcttaggtctcgacgcctgcgctcccccgagcacagcccggcgcacttgcggtggttgtcgagcccgagcaggatggagacggccctgacctggccgtcgtaggcggcgacatggatcgggaacgcgccgtcgtggtcaggctggtacgccgccgatgggtcggcatcgagcagcaagctgatgacgtcgtggtgcccccatgacgccgcgacgtggagaggcgtgctccctctgtgccggtcggcttgcttgatgagatccttgttccatcctagtatcattttcgtcgtctctgaaatcgataaatcattgaactcatatcgttctttgcctttctgaacagcggcgtgcaaggcgttattcccgtccggtccagcgtacgagagccccctgtcgtgctcatgcagcagccgtgcaatgtcgtcgcggcgccccagcgagacggccaggtacaacggcgagccgccgtcggccgccacgacgcgggcgagctcagggtcggcggacatcagcgcctccaccatcgccttgctgcccagacggacggcctcgtggagcgctgtctctcccttgctgttccgcctcctcgcgaacgccctcgccgccgcgtcgcccgcgacgccgccgccgccgcccctcctcgccaggtccaggagatgggagaccatcctgaccatgccggccctggcggcgcagtgcagcggcgtgtcgcccttcccgttgccggcgtcgaggaggtggctggccctggcgtggaccgccgtcgcgctctccaggaacgcgggctcgtcgccgctggacgccaccacgtggaggacggagtccagcgcgacggtgaccgcctccgccgatgttaccaccgcagctgtaggctcggcgtcgtcgtcgtcgtcgacacccacaccgacggtttcaacgtcctcgacatggaggacgacctccccaaccggcaatgccaccggcggcgacaccgtgccaagaagacgtttcagccggtcgcgatcgccgtggcgggcggccatgagcagctcgggacgatgcggcgcctgcaccccatcgttcggctcgctctgcgtcgtcgtcttcttggaatccat

SEQ ID NO: 20851 - DNA, 2915 bp, Oryza sativa
  Clone ID: TF_OsC658_1
ctcccgtcgctcggcgcgcggagcaaccgccgcatcaagctccgccgcttcatcatctccccctacgaccgccgatacagaatctgggagactttcctcatagttcttgtagtctactctgcgtgggtctcaccatttgaatttggcttcattccgaagcctacgggggctctagctacagccgacaatgtggtgaatgcattcttcgcggttgacatcattctgaccttctttgtggcttatttggataaaatgagctatatgcttgaagatgatccaaagaagatcgcatggcgttatagtaccacatggcttgttcttgacgtggcctccaccatcccatcagaatttgctcgcaggatactaccttcaaagcttaggtcatatggatttttcaacatgcttcgtctgtggcgtctccgcagagtcagctctctgttttctaggttggagaaggatagacacttcaattacttctgggttcgatgtgcaaagctcatttgtgtcacactttttgctgtgcactgtgcggcatgcttctactatcttcttgctgataggtaccccgtcccaacttctacgtggattggcaattacatggcagatttccatgaacggagcttatggattcgctacgtaacatcagtctattggtcaatcaccactcttaccaccgtgggctatggggatctacatgcagaaaatacaagggagatgatcttcaacattttctacatgctctttaaccttggtttgaccgcttatttgatcggtaacatgaccaatttggttgtccatggcactagtcgtactcgaaactatagggatacaatccaagcagcaacaagctttggagtaagaaatcagctaccacctcggctgcaagatcagatgatttcacatattagcttaaaatacaggacagattcagaaggtcttcaacaacaagagatccttgattcactgcctaaagctattaaatctagcatttctcaatatctgttcttccatctggttcaaaatgtttacctgtttcaaggagtctcaaatgatctgatttttcaactggtttcggagacgaacgcgtaatattttccacctagggaggatgtgattttgcagaatgaagcacccactgacttctacatcttagtttctggtagtgtggagttagtagagcagcaaaatggtgcagaccaggtgatacaagtggctacgtcaggagaagttgttggagaaattggggttctttgctacagacctcagctattcacagttcgaacaagatccttgtgccagttgttgcgtttgaatcgtacagcttttctcagcattgttcaatccaatgttggggatggaactatcataatgaacaaccttattcagttccttaaagagcagaaggagaacagtgtaatggctggtgtcgtaaaggagatagagagtatgctagctcggggaaatctggatttgccaattacactctgttttgcagtaactagaggagatgattttttgttgcatcaacttcttaagcgtggtatggatccaaatgagtcagataatgacgggcataccgcactgcatatagctgcttccaaaggaaacgagcaatgcgtcaggcttctattagaatatggagctgatccaaatgccagagactcagaaggaaaagttccactgtgggaagcgctgtgtgagaagcacgccgccgtcgtgcaactattagtcgaaggcggcgcggatctgtcgtcgggtgacacgggcttatacgcttgcatcgccgtggaggagagcgacaccgagctgctcaacgacatcattcactacggaggcgacgtgaacagggctcgccgggacgggaccaccgccctgcaccgcgccgtctgcgacggcaacgtccagatggccgagctcttgctggaacacggagccgacatcgacaagcaggacggcaacggctggaccccgagagccctcgccgagcagcagggccacgacgacatccagctcctgttccggtcgcgcaaggcggcgacggcgagtggccaccatcacgtcccaagctccaccaccaccagggtggcgccggcggcggcggcggcatcactgatcgggaggttcaacagcgagcccatgatgaagaacatgatccacgaagacgccgacctgcccagccgggttctccccgagaagctccggaggaagcgggtcaccttccagaactccctcttcggggtcatctcgtcgtcgcaggcgcagcgggagaccgaccacccgctctcgaggggtggcctcgcggcgacgggctccccgaacccgagcagcggcagccgcaacgccgtcatcagggtgacgatcagctgccccgagaaagggaacaccgccgggaagctcgtgctcctgcctcagacgctggacatgctcctcgagctcggcgccaagaagttcgacttcgcgccaaccaaggttctcaccgtggagggcgccgaggttgacgaggtggagctcatcagagacggcgatcatcttgtgctcgtcagtaatgaatgggatgcagagaagatgaaaggcaagagctagtaaaggagttgtgtgtttttttttctttttcttttttggttgtttactgttgatttccaagaaaggggagatagaatttaccccggagtccaacggttagctaaggaataactggaaatcattggtatagttattccaccatgaagagatggtgaaattgatgggttacgtccggtgttcgtaagtagagaagcgtaagaatttgattttgttatagcgtgttgtgatgttagcctgtttttgttttagttggcaagttgatctgctggcatgtacagttttacgcttttctaatttttgaaggaaaagtccaaagaatgtaccagtgcttc

SEQ ID NO: 20852 - DNA, 2832 bp, Oryza sativa; identical to SEQ ID NO: 11036
  Clone ID: TF_OsC658_2

SEQ ID NO: 20853 - DNA, 1248 bp, Oryza sativa; identical to SEQ ID NO: 11041
  Clone ID: TF_OsC254554_1

SEQ ID NO: 20854 - DNA, 2921 bp, Oryza sativa
  Clone ID: TF_OsC5083_1
ggtgactggtgagctgagctgagcttgcagttttggttcttggggtcttgaggagttgagctgtggtgcttaacacaggcatagctgcttgcttctttctttacaagttgttggcattggctccatgtgatcgatgagctgagagagctcagctcagctcagctcactttcgccactgcagcatcggcgagctagagctgtagatcttgggaagatccagcaatggagaagccggcgtcgtgctgctgctacttcccgctgcggtgggagagcaccggcgaccagtggtggtacgcgtcgccgatcgactgggcggcggcggacggccactacgacatcgtccggcagctgctgcacctcgacccgaacctcctcatcaagctcacctcgctccgccggatccgcaggctcgaggcgctctgggacgacgacgcgcgcttcgccggcgcggcggggcaccgcgcgggcgtcgcccggagcctcctgctggagtgcgagtgcagtaagaacgggggcgccgccgccgccgccgagaacacgctgctccgggcggggtacggcgggtggctgctctactcggcggcgtcggcgggggacatggcgttcgtgcaggagctcatggagagggaccccttgctggtgttcggcgagggcgagtacggcgtcacggacatgttctacgccgccgcgaggggcgggaacgccgaggtgttcaggctgctgctggaccacgccatgtcgccgaggtgctcgacgaattgccccaacggcggggaaggcgcgcgcggcggtggcggtggccgctcctcggtgttccggctggagatgatgagcagggcggtccacgccgccgcgaggggcggcagcgtggagatgctgagggagctcatcgagcgccgctccgacgtgtcggagtatctcgacttccgtggatccaccgtgctgcatgctgctgcagggagagggcagctagaggtgaggcatctacttcttggccattgcttacttcactacttctgcaaaatgcaccatagtgaacttctgtttgtgccaatatgcatggatgacaaggttgtcaagtaccttatggccactttcgacattgtcgattcgactgataatcaagggaacacggcattacatgtagcggcctaccgagggcatctgcctgttgtagaggcattggttgctgcatctccatcaaccatttcagctgtcaacagagctggtgatactttccttcattcagcaattgcaggtttcagaaccccaggcttccgacggcttgaccgccaaatggagcttatgagacacctgatacgtggaagaacatcaaatatccaaaagattatcaacctgaagaatgatgcaggcctcacagtccttcacatggctgtggttggttgtgttcatccagacctcgtcgaactcctgatgacaaccccatcgatcgacctcaatgctgaagatgccaatggcatgactccactggcattgctgaaacagcagctgcgctcttcaacatctgacaagctcatcaggcagatagtttccgcaggaggggtgctgaattcgactgttctgcgaactcggtcagcgatcgtttcgcagataaagatgcagggagggattgcaagcagccccggtacaactttcaagatatcagatgcagagatcttcctctactccgggatcggaaccgcggagtcccgacgccctagctcatgctctagcaatggcaagtgtgaccatgcccatcatggagatgcaaaatgcggaaatgctgaaaaccatggatcttcagagaagaggctgagctctgccagccgtgccaaggaccgtctcaagctgatgctgaaatggcctgatgcagagatcttcctctactccgggatcggaaccgcggagtcccgacgccctagctcatgctctagcaatggcaagtgtgaccatgcccatcatggagatgcaaaatgcggaaatgctgaaaaccatggatcttcagagaagaggctgagctctgccagccgtgccaaggaccgtctcaagctgatgctgaaatggcctcgtcagaagatgtccagaggacacaagaaatccgacgatggcgacgccatggattccatcaagaagctgagcgagcaggccccgccgccgccgcagtccggcaagatgaagggcaccaagacgacggcgctgaacaacaagaggaccctcgcggtgaagacctcgactcccagctcggccaccaagaagaagctcaacagcaagctcatcctgggcgagccgtcgagctcggggtcgtccgtgaacgacgacgcgtcggcggagatgccggcgcggcggcacgggtgcggcaacgggaggctgatcaacatctgcttcggcgcgcagggcctcaccgtggaggactcggccagcgggcagcagaccagcaagatgttcaagcagcagtacaacgacgacgacgatgacgccatgggcgagccgtcgagctcggggtcgtccgtgaacgacgacgcgtcggcggagattccggcgcggcgggcacgggttcggcaacgggaggctgatcaacatctgcttcggcgcgcagggcctcaccgtggaggactcggccagcgggcagcagaccagcaagatgttcaagcagcagtgcctcagggtgtcctgactcccgagtgactcacacgcgcacacggtataattagcctgcttttctttggttttctgactcgaattgagcttgcagttcaacggaacatatatggtttctgcatgttgaactcgtcgggcttgtgtggattttgttggctgctgcgtgtaaccgtatccttgcgtggcgtgcttggtttctggttgggcttgtgttaacgccttaacggcttacttcgatgcaaatatatttggtgaatgtatca

SEQ ID NO: 20855 - DNA, 787 bp, Oryza sativa
  unsure (1)..(787): unsure at all n locations
  Clone ID: TF_OsC26711_2
cggacgggaaaattcgagaccccgaaattccggcaatttcaaacgcgccccctcgccgccggcgagccccagcgcgatcctgagccccggcggtccgtcgccggaggtgttagcctcgtgaggtggctctcgccgtcgccggcgagcggcgtaggcggaggcggcggcgatggggaactctctggggtgctccgcctccggggagaggctggtgtcggcggcgcgggacggggacgcggtggaggcgcggatgctgctggagctcagcccggcgctggcgcggtactccaccttcggcggcctcaactccccgctccacttcgccgccgctaagggccacctcgacattgtgacgctgttgctggagaagggcgcggatgtgaacgtacggaactactgcgggcagactgcgttgatgcacgcatgccggcatggccactgggaggtggttcagatgcttctgctcttcagatgcaatgttaccagggcggattacttgagtggccgaacagcattgcatttcgcagcacatgatggacttgttcggtgcgttcgtcttttactcgcggactttgtcccaagtgctcccttagaggatggtgcttcttcgacggtggatggtgggngaatgtcagacgaatagtgggagcagtccttgttcttctttgggactgaaatttaatgaatctgctcgtttgagatatatcaacanacctgctgtgggcggtgttacagcacttcatatggcagctttgaatggtcattttgattgcatgcaattggtgat

SEQ ID NO: 20856 - DNA, 6019 bp, Oryza sativa
  unsure (1)..(6019): unsure at all n locations
  Clone ID: TF_OsC359_8351
atggcggaggagctccccttccccgctaacatcgaagtgatgcgccacacgccgcggttcaagctcatgcaggcggcattccacggcgacctccgcggcttgaagcggcaggcgaagattctggatatggggaggggccgcctgaggaaggccgtagaggatgtgagggtggaaggcgtgccgggcgaggaaggtacaggggtgctgcatatggctgcctcccatggccacatggagatgtgcaagtacctggtcgaaacgcttcaggtggatgtggatgatgcggatgacaaagaaaattttaaaatagactctcttgtcagctgtttttttaacaaaaggttttggccaaatgcccaaacccataagggtggtttggcaaggcaatccacaccaggtagaacatctctacttaaggcggtacattctgggcatcggggaattgccaagtatcttcttaatcatgacgccaatccagacctagccatgtgctgtgggcttacccctctacattctgccgctggattaggtgattgtgagtccgtaaaactattgcttgcaaaaggagcttatgttgacccaatgtctacttttgggacaccacttcatcttgctgctaaagaagggcaggatggcaccatgaagatattgttggacaacaatgcagattgcaacaagatggtaaacggtataacacctctcctccttgctatgaaagctgcatcagcaaaatgtatggagctgctggttgaggctggagctgatgctacttactctgatgtcatctggaattatatgtcaactacttttatggatgatgaagatagtggttcatctgtgttctcggattctgaaccagaagagattgatgccaatcaccatattcccgtcaatgacaaacctgtgaatcgaaggaaaattgcagagtttaagtcgttagggcttgaggcagttgagaagaaggattatctttctgcagcaggattctacagtgagattccggttcctccgacgctccggtgtacttcgaaatagtcgccgaggttcctccagcagcaganaagagtttgagtatgtgtccgatggcgggttctccgaggagtaggcttcgtccgtgccgtcgaggatgcctgtggagtggtgttcccgctgccgttcaagtcaaggcttagctccagttatcttttgttttccgctgcatttctgtaagnttttataatgtttgtaagacgtggatctgtatgtcaacattgtcgtttgtgtaccccggctggtcctggacgggggttttaatacacattctgcttggaattctattcgggaatttctgggcgtgacaagggagctcttgagaagttaaaaatcgtatgaagggctctcgccagtcggcttcaaccatagctacgtcatgagtgtccgcatcttgagtagtatctctatgaggtacggtcggtgtataaaggtgttcgacgaaaacatctgagggcgccgtctcgcgcttggatccaaaattggcaagtctgtcggcggcttcattgttgtgtcgaagaacgtgactgagctcgagtccctcgaacttgtcttccaatttgcgcacctcttgtcgatatgccatcatattgtcgtcaatgcaggaccactctttcataacttggttgacaaccaactgtgaatcgcctcgaacaatcagacgctttatccctagggaaattgcaatccgtagtccatgaaggagggcctcatactcggcgacgttgtgggacgccgaaaaatgtatccaaagcacatagctcaatctttctccagttggggaaatcaaaaccactcctgctccagtgcccgaaagtcgtttggatccgtcaaaatgcatggtccagtgctccatgttctccgcgggggtatcctcctggcactcggtccattcggcgacaaaatcagctaacgcttgggacttgattgaaattcggggcttgaatgatatgtccaaagacatcaactccaaagcccacttagcaatacgtccgtttgcttcgcggttgtgcagtatatcaccgagtggaaatgatgtgaccaccgttaccgagtgaccttgaaagtagtgagatagcttcctggtagtaattagaataccatataacagcttctgaacctgagggtacctcgttttggagtcggctaggacctcgctgacaaaataaattggtcgctggactttttggacatggccttcttcctcgcgctcaacgaccaagactgtgctcacaacctgggaggtggctgatacatacagcaacaacggctcttgcgggtgtggtgaggctaagactggtggctcggtgaggagtttcttgaaatcttcgaaggccttctgtgcttcgggtccccactggaagttatctgttttcttcagcagcttaaagaaaggcatcccccgctcgccaagccttgaaacaaatcggctgagcgccgccatgcatccagtcggcttctgaacatctttctgggtacttggcggtttcatgttgaggatagcagtaactttctccgggttggcttggatgcccctatgagacaccataaaaccaagcagcttccctgacggtactccgaaggtgcacttttcagggtttaatttcatcctgaaagcgcggatgctcgcgaaggtttcttctagatccaaaatcaaatcatccttttgcttggtcttgacgactacatcatccacataggcttcaacgttgcggccaatttgtgttgagaagcatctctgaatcatacgttgataagttgctcctgcattttttagtccaaacggcatggtgacgtagcagtatgcaccaaaaggcgtgatgaatgaagtcttcaagcagtcggattccttcagtcggatctgatgataccccgagtagcaatccaaaaaactgagaagctcacagccggcggtcgagtcgactacctggtcaatgcgaggcaacccaaaaggatctttagggcaggatttgttgaggtcagtataatcaacgcacatgcgccattgccctgttttcttccgaactagaaccgggtttgccagccagtcgggatgaaggacttctttgatgaagcctgctgctaacagcttggttaattcctccttgatcgcgtctttcctgtcttgtgcaaatcggcggagtcgttgtttgataggtttggcatcttctttgacatgtaaggagtgctcaatcacctctctaggaataccgggcatatcagatggtttccacgcaaagatatctttattgttctctcgggcagacgccatctcgtgagtttgggccatgtcgcaactctccttgtcgcatgtgacggcttgcttgatgtcgctccgtagggataggactcctcggggaccaggcatcttcatcatcatgtaagtgtagtgcgggacggccatgaacttggctaacgccgggcgtccgagtatggcatggtatgctgtctcgaaatcggcgacttcaaagctgatgttctctgtgcggaagttttcccgagtgccaaaagtgactgggagggtgatctggccgagtggagttgcggataatcctggaattactccgtggaaaggcgcattgcttggttttagctcggagcgaggaatctgcatatcatccaaggtcttggcgaagaggatattgagtgcactgccaccgtcaatgagggttctgcgaagcttgacattacggaccactgggtctagtaccagggggtaccgccccgggtggaccactcggtcaggatgatccgagcggtcaaacttgattgcaatctctgaccaacgaagatactggggcgtgtcgggctgaacagcattgatctcccgttcagtcaacttctgcttccgtttagactcataagccagggggccgccgaagatatggttgagctccttgcggtgatcttgaaaacctgccggggtgtcgccgtcgtccttcttccttgacgtgctttgttcttcgtcagagttctttcgtgcagtcttggtgtattgatccgcaaattgcttgtagacgaaacaatctttggccacgtggttggagttaggatggtgcgggcattgggagttcatgatcttgtcgaacgtgttgacgcgcgaacgctgtcgagaagagtgactggcggttgcaacaagttccgcaggcttacgcttgcggtccttatgattgttacttccacctcctcccgtagccggcgtacccttgttttgcttccaactgggacccgactgctttgatgcggtgacggcgtcttcggctttggcgtactcgttggctttttcaaacataagcttgactgtcctggggggcttacgcccgaacttgccgaccaattcttcgtggcgaatccctttggtgaatgcggcgatgatgacgtcatcggtgatgtcggagatcttgttacgttgttcagaaaatcgccggatgtaatctcgaagggattctccggacttctgaatgacgttgtagaggtcgtattgtgtgccgggacgctcgaaggtgccttggaagttggcgatgaagtggtcgcttaattcagcccaagatccaattgtaccacggggcaatccatggagccaagatcgggcggaatctgctaaagccactggtaaatagttcgccatggccttgttgtctcctcctgcgtcgtacttctctattccagtcggcttgaagccggctggccaatccactcgacgcagatcgtcggtgaaggctgctactccgtcaaggtcgtcgtcgtggcggttcggcgaatgatgatggcctcgagctgctcggcgctgtatgattgtgtcgcgaagatcgacggggcggcgacgaggtggtgagcgaggccgttccactcggcgctccctatattggtcgggaggtgagtgaatggaccgctcgtcgtgacccctgctcctgcgattagatcctgcgccggtgatgctgaggcttggatgacggtagtcatgagatcggaagtgagggactcggctaccagtcggcgtgtggacgctttcggagttaactgggactgaagccgcaatcatggtcttcgtctggttcaagatgttgacgacgtggtcggattgattgagctcgttttggttgaggagggtgtcgagaagggtgatcgcggcaaccgcattctgttgaggggtgcggaaaaccggcgtcccttcaacatcttgctggccgatgagatcacgcgcccggcgccctgcttccaaagctcgctgccgtcgatcttcagcctccttcgcggtccgctcacgctcctgctgctcacgccgtaatcgttcttgttcttgtgcttgatgctcctcttccagtcggcggcgctcagtctcgcgacgcgcttcggtctcccgggcttggcgttgctcctccgtctcgttattggccatgaagacgccaaagtagagaggggtgtagttgtcatctaggcttccgtcgaagtcgtcgagatccggatcgtggtagcgagagctaaactcgtcgtactccacgatgttggtggggcgcgagtcgacggtgggagagctgtagtcgccatctagctgatccgtcgaaaccgtgccgagtggttggaggatgacgccaacttccctgaagctaggcgaaatcagtgttgaagccgacttccgcctaggcctacgggaagaagacgctgtcgcgatggagacggccaccaaatcgtcggggagcttcatcaggactggtgggtaagccccatcatcttgatctggtgtcgttggagaagatgcgatctcggccgagtggtttgaagccgactcggttgagatggttttgaagtagctttcagccgcgttcgggaatccaaacgggactgaaagccggttctctcccgactggtttgattccgagtcaaggagagagatcttgccgaagttgttggtgacgaagtcgaggctgccgaaccgaaacgtctgcccgggtgggaagacgaggtcgtcgatgccggagacggaacccat

SEQ ID NO: 20857 - DNA, 1743 bp, Oryza sativa
  Clone ID: TF_OsC359_7958
tcaggcgttccagagcggcgagtgcgtcctgagccgtggcgagccggtcagctagatcggtgtcactgcgctgctcgcgcgacgccagcgccttctccctaacctccagctcggacgcccgcgctgccatcgctgcgcgctcggcccgggcgccttccaggtggcgagcctcgcggccgtatttccctgagcctagtaaggtggggtagtaagggaaactaataatgatgataaacaatgatatgcaattgcaagtgggcagataaaggaacaaatacccttggcttcaaaccaaaattttccacgtgagaaataattccatcgatactccaatctgacagtgttgaaattggtgaggttaaaggaaacaacatttcaacaatgtcccttctgccatgattagcggcaacttcaattggagtcgtattgaactgttcatctggaatgtttggattagcaccagcatctagtaagcacttcatgatgacagaagagccatgatttgctgcaaccattacacaagtaacgccattggagtctctaaaattcatgtcagcaccaactttgattaatagcttcacgcattccaatgatccagaaactatggacataatcaacggggtaccatcaagattgaaaaccctgttaggatcagcatgatgctccaataagatcttcatcgtgctatgttggccactaatcgcagctgccagcaatggggtcccagcgatagaatataaatccacatcaactccttttgaaagaaacaactctactatttcgcagtgtcctttcactgcagcaccatgaagaggtaacactattttatcaatcgcaggattggaaccatgatcgagaagatatcttgtagcagcagctctcccatgaattgaagacaggaacagtggtgtttgacctgccaagaaaaacatgactggttgacgccgaggcagaggtcctccacgaggtacctgaggacgtccacgctccctccagaggccgccatgtgcagagcgcggtgcccgaagccgctgccctccaccgccgccacgacagccgcctcgccctgcccggtgtccagccctcgcgccatctcccctcccaccacccaatcccccacccaatccctttccttctccggatccgcagtagacgagaaaaatggcgccccccaatcgccccgtcgttgtgcccctcctctctctctctctctctcgcacacccccaccccgccgccgcctccgcctccgtacccctacgccgtgccatcgcgcctccaccactcgtcgcgccctccacacgccgccgcatcagcgcacgcgtcttccccctctctcggtcgctccctccgcatctcccctcctcaacccctcgatccacgtcgccgcagccccctccctcggtcgctccctccgctttcctcccccgcatcgctcgcgctcgctatccaaccgccgacgccactcctcccacctcttcgccgcgccccgccacgcctccaccgccggcgcccccatcgccacgctgcgctactccgcggtgctcgggattgaggccgccgtgctcgttggcacagctcgggactccacctcctccgcccttcgtgccgctcgggaggagttgcgacggggtcgagcccctcatcgccgactacccttctccgctcgcagccaccgtcgtagcgtttaagtctctgcatatgctgaatctgaaagtaccagcctgctcttttctgctcgttgg

SEQ ID NO: 20858 - DNA, 3150 bp, Oryza sativa
  Clone ID: TF_OsC134_92
tgaacatggatggtacatgatggtcacctgtagcaaagagaaggccattccttgacggtaatagcctttcgcccagtccggttgcatcttgctgcagatctgagcatctgagagtgcctcatcgcctatgccaaggtttaaccagcaagcactcctgtttgaatataactttgcgtcggtgttgtcgaacttcattgcaaagcagtattttgcaccttttgaactgaaaaaacatttgcaaccaaacatgagcatgaaaaatcgggaatgagcaaaagttgttaccatgctgtatagcagtattgcagcatcgtagtcctcgttgttgaaagaggagttgccttgtagtttgagttcatccttccttttacatgatgcatttcttgcccattccttgtaagcaggatattttacatatctgatgatcccaccaacactccaatctagaagagtaggtacttggtgggtcaatggcaatagaacctcaatgacttcccgttcggcatggattgcagcaatttctattggtaacctatcaagttcgtctggaatgtttggatctgccccagattccaccaagcacttgatgaatccaatggacccggtacgactacatgctgaatgagcaacttcatgcattccaatgatccccccaaaagtgaagaaaccaacggtgtgaagacgatattggcaatcttgttgggcgcgtccgcgtacatcagcgccgtggttcagcaagacgctgacgacggcggcgtgcccccgtgcagcggcgacatgcagcgccgtgccgcgggggttcgccgcgcccacgtcggctcccctgagcagcagcagcttcgccagctcgcgatccccgttgtaggcggcccagtggagcggggtgtcgccgccgttggggtccggcgtggacgggtcggcgccgcggtccaggaggtaggccgccgttgaggtgtgcccgaacgtggccgccagcagcagcggcgtctcacctgcgtgcgccgcggcgtcgaacacgaagcacgaaatcaggcgctccgcgagcatagacgagacgtgcgaggaacgagcggcggccgccggccgggaggggggcgcacctgaggcggagagcgcgtcgacggggaggccgaggcgctcgagcaggaagcggcagacgtgcgtgcggccgttggccgcggccaggtgcagcgccccgcggccgcaccgcgatcggactccgccggcaccctcgccgccgccaggcgccgccgcgtccacctccgccgccatcctagcgaggtggtggaggtcgccgaggacggcggcgcggaggagcgcgccggcgcagcggtagtagtaacattgccgccgcctctcttcctcccgcgcttcgccgccgacggcgacgccgacgcctggtgcgccggcggccggcgccggaggaggaggagtcgccgccgacgaggacgggcagagcacgttcatctccgacgaactgcttccattggtgacattctcacccgatacgaacgagtacacgacaatgcaattatgcaaaccgttctctctggtccgacagcccatgcccaagccagcacggcgccgagccgccgactcgctgacgacgcgccgtggggcgccgggcagattggcagccggcatggccatgggcgacatggcttgcttgctaggcgcctggagagcgagacaggaggcggcggcggcgttgtgatgtcgccgccgtacgtcggggtcaggcgtggacgggccggcggcgcgctccaggaggtaggtaggccggccgccgcgtctcgcggtgtggccgaacgtggccaccaggagcagcggcgtctcacctgcttgcgcgcgcgcggtgtcgacgtcgaggacggcagcgcagcggtagtagactagtagtggtacgctgccgcctctcttcctcccgcggatcgacggcgacgcgtcaggctcctgaccagctatccccgaggcttgtaaaagaatttgaatgtagtggtcacgctcaatccgcatcattgtcctttgaattacttctacaaatagcattgcaaaatcaggtaagagacctcgaaccataattgttactatgacaagaagtacgatctccacaacattgaggacaaaccctactccagaagtgatcagagaagtagtgtgctcaggatgatcatgaaaagttatgatgaaagtcaccaagttcgttatacaacttagaataaggtcaaatccagtagcaactttctgagatcttttgggaacactcccctctttagtggctcttttacaagcacagatacacatcaagtaagtgaatgtcgacatgcaaagtaatgcatgcatcaggataagagcaaggttaagatcctttttgctggccattattgaatacgtcaaccaaattatgctgttaattgatccagccaacatggcgggggcaccatacacttctattgtcctctcaaaatttcctgtgtagacttggtagaaatatggtactatagataaagccacagggaccaccgtgccaatagatgatgcgagcttgacaatggttggccagtggccaccgcctgacgcctccacactgctgcggtcaccattctcctctcggaggccggcttccccaaccccgccgtgccgcgctactaggtcttcggtggcgacgccggtgaaggaccgggaggtggcgccgtggagatgtgccgatgaggtagcggaagcccgtcgcagagcgtaggcgacctgcggctgctgcttgcgtgggggaagttgtgcagcgcgggcgcggtcgccataggcgtcggggaaggagctcccgggggcggcagatgcgggcgcggcatcggcgtggagggcggcggcgagaagcgccacggcgagaagcgccatggccagaagaaggccgtgagcttggtggagaagccgtagcccatcgcgcttgcgttgcgcctcccaccgtacgatggcctgcccgtcggcgtacgcgtcgtggtgaccacgccacgcgcggtcttcatcagcgccaagcggatggcggcggcgcggcatgtgcgggaaggtgcccgaccgcgtgttgaactcgacgcgccgtgtggcggccggaagccggcaccagtggaccgggaggaagagagtcggcgacaccat

SEQ ID NO: 20859 - DNA, 1088 bp, Oryza sativa
  Clone ID: TF_OsC22948_1
gtccggattcccgggtcgaccacgcgtccggccgcctccgctgcgtctggcacgagcgtccccgagcaagcccagcttcagctctatgggctctacaagatcgccaccgaggggccctgcaccgcgccgcagccgtccgccctcaagctcaaggcccgcgccaagtggaatgcttggcataaattgggtgctatgccgacagaagaagctatgcagaagtacatcacagttgtggatgagctattccctaactggagcatgggttcgagcacgaaaaggaaagatgaagataccacagtatctgcttcaagttcgaagggaccaatgggacctgtatttagcagtttaatgtatgaggaggaagatcagggaaatgactctgaacttggcgatatccatgtttcagcaagggaaggagcaattgatgacatagcgaagcatctggctgctggtgtagaagtcaacatgagagatagtgaaggcagaactccactgcattgggctgtcgaccgtggccatctaaattctgttgagattcttgtcaatgcaaatgctgacgtgaatgctcaggacaatgaaggacaaacagcgcttcactatgctgtcctctgtgagcgagaagatattgctgagttgcttgtcaagcatcatgctgatgttcaaatcaaggatgaggatgggaacacggtgcgggagttatgcccttcaagctggtcttttatgaacctggcaaactgacgacacgatgccctctgcactcttttggttgcctaccagcaagaaaccgcactgtctatgttagccaaactagatgagttgttttacgaacctcatcgaataggtcactgtcaaaaggatatttctgtattagtgaaaggagattatcttgtactgcctatacagtttacactgctagtttgtttgtgctgaacatcaatgttggccaggtctgtaaatcatgggcacctaatttctgaatgagcatgatcggacttctcttcttttgaaaaaaaaaaaaaaaaaaacttaatgagcctcgtcaggcatttgcacccccactgttcctactatgtaaaaaaaaaaaaaaa

SEQ ID NO: 20860 - DNA, 612 bp, Oryza sativa; identical to SEQ ID NO: 11055
  Clone ID: TF_OsC35544_4

SEQ ID NO: 20861 - DNA, 5326 bp, Oryza sativa
  Clone ID: TF_OsC9301_1
ccaccgtcgggtgccactccgtctccgcgctgcggaagaacttccccatcctctcgctgctgtcgtcgtccccgtcgtcgccctcgttcctccactccgactccggcggctcttcctccgacggctccgacgacgacgacgacgacttcttcggccggcccagccgccgatcctccgccgcgggggcgggggcgggggcggcggcgccgtcgctgcagcccgcgggctgcgcctcgttcgacctcgcctcgcatccggacctcaagctcgcccgccgcatcgggagcgggccgccgggccccgcggggcaggaggtgtggtccggcacgctgtctcgtggtggtgggggaggtggggccaagaggtgtaagcatccggtggcggtgaagagggtgcccgtgaccgcgggggatgtgcttgagggcgttcaggaggaggtggagcggctgaggcgcgccgcgacgtggtgccggaatgttaccacgttccatggtgctgtgagggtcggcgggcacctctgcttcgtgatggatcggtacgcggggtctgtgcagacagaaatgcggcagaatggcggtcgcctaacgttggagcagatcctcagatatggagcagatattgctcgtggagtagcagaactccatgcagcaggtattgtttgtatgagtataaagccgtcaaatatccttttggatacaaatgggcatgcagttgtttccgactatggtctttcggccattcttaagaacctcactagtcgtagagtgtctgatgattccaacatggttggcttggatgctacacttcttagccccaattatacagctcctgaggcttgggtgccattgaagaagtcaatgaatctgttttgggatagtgcaaatggaatattaccagagtcagatgcatggagttttggatgtacacttgtggaaatgtgtactggtgctgttccatgggctgggctaagtgcagaggaaatttgtaagtctgttgtaaaagagaggaagccaccgcctcaatattcaagggtagtcggtgtaggacttcctggggagctctggaagatgattggtgactgtttgcagttcaaaccttcaagaagaccatctttccaggacatgctaaaaacttttctgaggcatcttctagatataccaaggagcccacctgcaagtcctgaaaatgatttcacaaatgcaagcatgcccaacggtacggatgtgccaccagcctcagttctggacatggtccaggacaatccaaatgctttgcatcatcttgtatgtgaaggagatgctgctggtgttaggaatcttcttgcagaagctgcctcagatggaaatggccgtttaattcgttcgctcttggaagcacagaatgcagatggatatactgccctacatttagcatgccgaagaggctcagcagaaattgttgaagctattgtggcttatcaagagaatgtggacttgttagataagaatgaaaatcctccaataatatttgctatggctgctggctctccacagtgtgttcgcgcacttgtaaggagatcttctgatgttaattcgaggcttagagaaggtcttggtcctactcttgctcatgtttgtgctcatcatggccaaccagagtgcatgcgggaattgctcatggctggagctgatcctaatgcaatagacggagaaggcgaatctatcctgcatattgctgtggccaagagatatactgattgtgctatcgtcttattggaaaatggtggttgcaggtctatgggcataccaaattctgtgaataaaacgccattgcatttatgtattaaaacatggaatgcggatgtggtgaaaagatgggttgaagttgcatctgaagaggagatagctgaagcaattgatgtacctagccctgttgggactgctttgtgcatggcagctgctcttaaaaaagagcacgagaaagagggtcgagagttagtacgggtattgctttctgctggtgctgatcccacagcacaagatgacccacactgtcgaactgcactgcatactgcagcaatgatcaatgatgcagaattggttaagattattttggaagctggagttgatgtaaatataagaaatgctcagaacacaacaccacttctcgttgcactgaacagaggtgcaaactcctgtgttggtttgcttttagctgctggagcaaactgcaatctacaggatgacgacggcgataacgctttccacatagctgctgatgcggctaaaatgatacgtgaaaacctctcatggattgttcaaatgttacaacagccatcgccggctgttgatgtgagaaaccacaggcaagtttatgatgtatctggtgttaagctaaacttacttcaatacaacgtgatgcaaagtaaaagaggctggacattgcgagattttctggagaggctcccacgagaatggatttctgaagaactgatggaaactttagaagaaaaaggagttcatctcaccccaaccatatatgagttcgcagattgggtgaaatttagaagaacagttactgaaccagcttttggctggcaagcccatgctaggtttcgctctgtgctgatcatgattgttttaaaagtttacactgatgtactggatgttgtcaaaaatgatggcatcctggtcgtcccaaagaaagaaaatgatgctcgctgcaaatgttgctcttctgcctactgcaaaaaggcaaactttaaaaatctgataataggagccactgttctgattttcatgtcaatgttaatgagaattccttccatcaatatactaaccgaagatttgtggagaatgtctcatggatcaaataacaaattcactcatcttagtagatttggatggcgtggtcagtcacgagatagcattgggacagttctctgtgttgatgatgatggaatcttgagggttggttttccaggagcttctaggggatggagagctgatcctgctgaaattgtaagggttgaagaatataaggttggtaactgggttcggattcgtccctcattaacggttgctgtacatggcatggaatctattactcctggaagtgttggtattgtctactcaatcaggccagacagcagtcttctattgggactttgctatttgtcaagtccatggctttgtgaaccagaggaggttgaacatgttgatcccttcaagtgtgaagctcatgtttcttcaaatttccagattggtgaccaagtatgcgtaaaaaggtctgttgcagagcctagatatgcctggggtggtgaaacccatcacagcgtgggaaaaataattgacatcgagagtgatgggctactcataattgatattcctaaccgggctgtacattggcaggcagatccatcagacatggaaaagatagaaaagtttaaggtcggtgattgggttagagtgaaggcagcagtaccatcccctaaatatggctgggaggatgtgactcgtagcagtattggggtggttcatagtctagaagaagatggagatatgggtgttgctttctgcttcagaagcaagcctttttcttgctcagttgcagatgtggagaaggcacagccttttgaggtaggagaaaaaattcatgtgttaccttcaatatctcagcctcgccttggatggtcaaatgaaactgcagcaaccatcggggctatctcaaggatagacatggatgggactctaaatgtcaaggtgtctggcagaaatagcttgtggaaggtagctccaggtgatgctgagaggctttcggcttttgaggttggagactgggtgcggttgaaatctagtattgggagcaggcctacttatgactggagtgttgggaaaataagtattgcagtagttcatagcattcaagactctggttacctggagttggctggttgtttcaggaaagggaaatggttaactcataacacagaaattgataaagtagagcctctcaagattggtcatcatgttcggttccgtgctggaattacagagcccagatggggatggagagatgcaaagcctgattccagaggcataattgctggtgtccatgctgatggagaagtaagagtagccttctttggtgtgcctgggctgtggaaaggtgatcctgcagatcttgagattgagcaagtttatgaggtgggtgaatgggttaggctgagaaataatgcagatgattggaagtcgctcaaaccaggtagcattggcgtggtacatgggattggatatgaagatgatgtctgggatggaaccattcatgtggcattttgtggtgagcaggaaaggtggatagggccttcaagccagcttgaaggagtcagcaagtttgtcgttgggcagcgcgtgcgggtcaaactctgtatccaccagccaagatttggctggtctaatcataatcattctagtatagggaccatctcatctattgatgctgatgggaagcttaggattcatacacccgctggtgcgagagcttggttgatagacccagcggaggttgaaaaggtggaggaagaggaagaagtctgtgtcggggactgggtaaaggttaaggattgtgttgcgacccccacatatcagtggggtgacgtgaaccataatagcataggggtaatccaccgggccgaggatggtgaactttgggttgccttctgtttctgtgaaagacaatggttgtgcaaaaggtgggaagtggagaaggtgaggccattccgattaggggacagagtacggatacgacctggccttgtaaccccacgttggggatggggggaggagacatatgagagtaaaggtgaggttgtaggcgttgatgcaaatgggaaactgaggatcaagttcagatggagggatgggctttggattggagatcctgccgatatcgttcttgatgatatcccatcactgacagaggcttctaatggcttttgttcatagtctcgcggtattcttttgaccccattacctgatttcttgctcccttccattgtgcagtatttcaaatttagtaaggtcccaatcatgcaatggagttgcaagttgcacataggcaccatcgcataggcatggcgggttgtatttcgtgttgataaagcagggggaaaagaacgaaatgaaggctgaaaaagaactttgaaatagacatgataaccaccacctaggttttttacatgtataattatgggcctgactccttttgtatcatattacccgtgtacaggtttggacctgaacattaatttaattgatagtgtccttggatctttaaaaaaaaaaaaaaa

SEQ ID NO: 20862 - DNA, 425 bp, Oryza sativa
  Clone ID: TF_uC-osflm202110g02b1
gttgtttttactgttgctgtccaccggtgaatatggggatcctcaaaatcatcgtggggccccggtgacttggctcctaacaggaccatgatcatgttgcgaaggttctgcttgagcatggagctgatcccaacagagtatcgaaccatgttctttgatcactcatgggagatcgctgcagccactccttgaaatgcatgaacttactgatcaaggctattgctgatgggaatgattgaagttgtactgtaccataaacgaccattttagtggtgagccatgatgatggatcagccgatgtcgtcacaatcttgctagaggtctgagctgaccctaacattcgtgacgaggatgggacgattactatcatgacggcagcaactagcggtcaactagtgcttgttgaaattgtgtttcctacgaca

SEQ ID NO: 20863 - DNA, 1080 bp, Oryza sativa
  Clone ID: TF_OsC116644_2
tcagttcgccggtgagccctccatatccaccgcctccggtcggcaatggttgccgccgtggcctctcaaacccctctgatcttcttccctaggtcgttctggagcctgtacaccccttgccgccatcgttgtcgtcctccccgtgctggtcgccgtcgtcgtcggtgaggccctcctcttttcctcctccctctccttgccgtgccgccgctcgccgtcatcgggccggcttgtcccgagctgcgctccagtacccgtggaccggtggtggaccaccacggtggtcccggtccacagtggacctggtgctatgtcaccgacggatggggaccgtgtgtcggcaccccctactctagattttgaaatttggtagcagatgccgcgtgaccatgatcttcgaagtgagcttagcagcactgcatatgcacaagttaaaacatcagtaactgccaagctgagctccttgtttcttcttgtctcatctgcaccattgacaagcaatatcattgttatatctctatttctactctgtatagctaaatgcaacggtgtccacccatcgcgaagacttcgcttctcctcctcgctagctcctcctcctccccggatgttctgccgccgcgccgccgcatcctcgctggatatcctccccgcgtggactgccgctgccggagcctctgattcttcttcttccccgccaccggagccagtgcttcttccccgcgtggactgccactgcatccccgccgccggagccggtgcttcttccccgccaccggagccgccgcggccggttccaacctcggcaccatccgccagcaccgacgacgaggtccaccgccgcgaccggagccgacctcggccccatcccccgcgcgatgactccgggatgctcctccttcccttgatccgcaactcctcactccagcgtgctccgtgcctccccgccgctgagacactccaccgcggccaccgcgccctgccctcgccggcgccgtggatctgtatgtcatgaagcctgtctccgcttccaacggcactctgccgcgcctccagtggtgccgccgttgtaagggtcat

SEQ ID NO: 20864 - DNA, 2217 bp, Oryza sativa
  Clone ID: TF_OsC3304_1
gttctcttgccatttatggataacgctttcacttttgttttctttcagagaaaaacacccagaattcatgtttcatttttacccaatatttgcaatacagaatccctaaactcaaggatctgtagcttcctcacctagcctggtgcgatgccattagaattgtagaaatatgtcttaggtctcatcaaaattccaggttattaaatcatcacagcaaagcaaaatcgtatatcagttctttcctcatcacaaatcttccagggctactgagcaacttttgtgttgcccctttgcctcgccaggcgaacacatgcttcaaatctcttgactgcctcagcacacttgagtgggtcctgtgcattgctcacgtaacactggcggcagtttgacctctcctcagtgcatggcgtggggttttggtacggcagcttgaactccttgtcacgcaggtcttttgatttcttgatgagttcatcacgcatcccagcatgctgcttatccagcttctcctgaaccttttcgctctcttccagaacggcacggatggcttccagctctgaaaaagcaggtgggggtggtggaggagcaggggttacggggagatacatgggaggctgcagtggccagccaggaggagccttgggttcagaagctgggagttcccttgagttgtcctggggctcttgttgatgttgtttgacagtcttcttaggcttgggtttcctggttttctttttgatcttctcgtcatcacgagcaagctggtcgattagcttggtgctaataagctcgccgttctctggctcaagctgcaccccctcatagaaggcattcgcggcttcttcgaacctctgcagcaggcgcagtgccgcgccttccctgtagcaagctttcgcccagtctggcctcagcgctcgacatgctcttgcatcctccagagcacgttcagcttgccctgcccgtagccagcaaaggcttctgtttgaatgcaacgtggcgtcgtttggatttaactcaatagcctgtgtgtaggcatctactgctactaggtagtctttatttctgaaggcatcatcacctctcgattttgcctccaatgatctctcttttgcctcagatgacacctcaacaagttgtggtacttgtaatctgtctgctttctgagttgtagcttcctttacctgtgccttttcctcgactgatttagtgtattctataattccatcaatactccaactcgaaacacctggaattggtgatgtcaaaggtaaaagaagttccacaacttcacggttattcctcaaagcagcaacctgtattggctttagtccatcatcatcacatgcattggggtcacttccagctttaagtaaacaatttattatttccatgtttccaccatctgcagcaatatgtaatggggttgctccaccagctctgatattcggatgtgcacctgcctgaattagaatatccaagcatgggagggaacccgctgcaacagcagacaacaaaggcgtaataccatcatcgttttcagtatttggctgccaagcaataactagcttcagtaaaaaagttaaggaaaggccacatgaacggctgattgaaaggtggttgagtgctaaacaaagagaagccttagcatcgtgttgaagcaaaagtttgactgcctcttgctgtccatgaccagcagcccatatgaggggtgtgccggcatcgctttctgattcaacatcaacccccttggagagaaatagtttcataaggtccaggttcccatcgtcgtccttggggtcgacggggagggcgaggtcggagatgaggaagtgacagacgtgggtgcggccctcgcgggcggcgaagtgcagggcggtgcgcttgttggcgtccttgacggcagcagcgacggcggcgacgcccttgccctcctcgtcgagcgccgcagcgagcttcttgagggaggcgggatcgccggccatagccgcttcgaggaaagcttgcaccttgctccgagctgagagggcggcggtggcgtcggccatggatgatggaagggagctacccgacccgagcaggggggaattgaagccggaagggtgttccagaagcttctggagacgagacgggaggtggaggtggcggcgtcgagtctcgagtaggaggaggaggaggaagcctcccgtcccgtcgccccgcctgccgccctcctgcagc

SEQ ID NO: 20865 - DNA, 1054 bp, Oryza sativa
  Clone ID: TF_OsC10700_1
gcacgaggccggcccggccgccagtggctcaaccccgccgtcactatcttcatccgccgtcccgacgccgcgagcccaaacccctaaccccggagagcctcctcgccgcagatggcagtccccggccgccgcgacgacctcgtcggcgacgacctcgtcgacgacgacgggatcggcgaggagtacatggccccctccgacgacgaggaggcgcaactgcctgacgaactcttccgcctcgccgacgccgcccagtccggcaacgtcgctgccctccgcgccgcgctcgataattattctggcaacattgatgatccaatagaagatggtgatactctgcttcacatagcatgcttatatggccatctaccttgtgttcagctactgttggaacgtcaagctagcttggaatgcaaagatgaagaaggagcaattcctcttcatgatgcttgtgctggaggctttagtgatatagtccagtacattttgaattttgctgcgaacattgatggctgcgtaacaagaatgctcaacactgttgattctgaaggcgacactccactccatcatgctgccagaggggaacatctgggtattgtggatctcttgcttaaagctggggcatgtgccaagaaggagaatacttatggccaggtccctgctgagatggctgatgaaggcactgaagtccggaaactgttaattcaagagcaagttgaggccagcacacatactagcaattaattgacgtatggcaatccttagttgaaattggtaaaatgagttactgtcaggctgaatatctgtagtcattggaactgtgtagtggtatgcgggaaacatcggcaaaccatccatcaccacccttttgttttgtattggcttgttgccatctgcctctatctttctatttcgtatgtttgggcttgcttgatgtctagcaagatttgtgaagaatcatttcatcaatagttgatagatccatgacgacaaaaaatgaaaagattggggtctgtatcctgccatgtcagggaggtagtcactgtacctccac

SEQ ID NO: 20866 - DNA, 1335 bp, Oryza sativa; identical to SEQ ID NO: 10929
  Clone ID: TF_OsC10700_2

SEQ ID NO: 20867 - DNA, 1964 bp, Oryza sativa
  Clone ID: TF_OsC566_5
agcgtgaaacttcgctgaaatggttcgattctgggccaccaaacagaacggtcaaaaggattaatttgcacagattatcaccaagctaagcgtagttggaacaaaaaccaggggattactctatgccggtccaggacccttcctcccccgtgccggcggcggcgcggccgaagcgcacgtcgtcggcgccgatccggccgtcggactacacgcacagcccggcgcaccaccgcgtcgcgctgcgggacgccgccgggctggcgggcgtcctccatgggctcccgccgctcgcccacccgagccgcatcctcaccgccgccgacgccgcccgcgaggcccgcctcgcggcgtccgtgtccggggcgctcgaccgccgcgacgtcccgggcggggacaccgcgctccacctcgccgtgaggctcaggctcccctccctcgcctccgcgctcgccgccgccggcgccgaccccacgctccagaaccacgccgggtggacgcccctccaggaggcgctctgcctgggttgcaaggacatcgccgcgtgcctcctccgcgcccaccgcctcgccgcctgggccaagctccgccgccgcgcccccgcgctgtccgcggcgctccgccgggtccaggacttctacctcgaggtggacttccacttcgagagctccgtcgtgccgctcctctcccgcgccgcgccctcggacacctaccgcatttggaagcgcggcgcggagctccgcgcggacaccacgctcgccggcttcgacggcctccgcatccgccgggccgaccactcgttcctcttcttcggcgaggaggccgacgccggcggccgccacctccccccgggctcgctcctcgtgctccaccgcggcaagcgcgaggtgcacgacgcgttcgcggcggcggcggccgccggcgacgaggattcggccacatctgacgcggccgcgtatcgaccggggctcaacatctcctccgcgaggctcgtgccgaggacgacatggctacggaaggagaagacggagagcgtcggggagtggaaggctcgggtgttcgacgtccacaacgtcgtcttctccttccgcacgctcaaggcagccaacgccggccgcaaggacttcaccttcgagctcgccggagacgacgacgacgacgacaacaacgacgacgaggaagacttcctccccctggagatccgcgacgatgacgaggacggcgacttcctggtcgccgacatccccccgcccccgtcgcgccgcagctgctacgtgcccggccggcgcagcgtggcggcgccgccgtcgcacatggcgacgccgcagaggcggcggaacagcgtggacgtgccgcggcggctcccggcgtgcgcgtccgtcggccgcggcgagggcggcgtgttcggccgccacgccaccacgacggggggagccaggtggaaggaggaggagacggtgaagacgctgcggccaaccgtctggctcaccgaggacttcccgctcaccgtcgacgagttcttgccgctgctcgacatcctggccagccgcgtccgcgccgtgcgccgcctccgcgagctgctcaccaccaagttcccgccggggacattcccggtgaaggttgccattcctgttgttccaacggtgagggtagtgatcaccttcaccaagttcgtccctctcctcgagccggaggaattcttcacgccgatgtcaagccccagcctgttggtgagcccgggtccgggatccatcatgcacaaaccagacactcagaagagctcctatttgaagtggggcttgaagaactccagatcgaagccggtgaacctgtcgcaggttgcggacaacaccgacccgttcacgatcccgagtgactacacttgggtaagcctcgggtctaagggccaagacaagaagtcatccaagactaagaaggggaagaccaaagagaccaagcttagctag

SEQ ID NO: 20868 - DNA, 1809 bp, Oryza sativa
  Clone ID: TF_OsC47742_1
gtgggcatcttatacttgtatggagtatatcagtatatgctagttgcagacgttttacagtgcaactgtaactgttgctacaatgttactgaaagagaaacagaagaaaacaaaaacaacagtctgtatattccagtttgtattgctttcaatgctgtctgatgtacaaccgcattgtgatcgacagtgaagcaacaagttgcaaaactatttccagtgaaacacaaatctatggtatataatgagttgattttctatcaatcatgcatacaatcctccacacgaaatcaacaacaggcccaactgactgttaaaaataggatctcgatgaacgtgatgaacgagtggtgctgccctcatttcgatctttcttccacatgccctcaaagctcaggaagcatttgagaggtttcaccttccaacggtttctctgagatatttcattctggatataagacaattgttcaatgatcgttctaaagtcaggcctgctagcaggattttcactccagcattgttcaatcagctctctcaatccgtaagcataatgctttggaggagctctgaaaggtggcctttctttagaattatgtgccttctcaatttcattatttttcttgtcataaaaagggagacatccttcaatcatctcttgaagtatcaaagcaaatgagaagacatccactttagtatcatattcttcatttcgcaggacttctggagctacatacctacatgcattgcctggagaagttacagctttctcttctctaacttttcttctccattttagcatcttacacagatcgaaatctgccaccttcagatgtccagtgtcatccctcaatatgtttgaaggctcaaggtcacggtggatgatagcttgaggtttatgctcatgtaaataattcatccctcttgcaatatcaagagctaatttcactgcatatgacggttccagagcccctttcctactcaagtgcttgcgcaaatcacccttgggcataaattccattacaatcatcattgggctgctttgtgttacagcacctaaaaattgcacgacattcggatgccgtattagttgtagcacatcaagctcatctctgaatgcttgtactttgttctcgtccataattagatcgtcatcaagcttcttaacagcaaccagaatgcccctccatgttgctttcctaaatgtaccctttgatataccatttccattagtgaaatctagctcgttcggggaaatctcgtactcaggaacctcacggacatttttaacatgcataggagcaatcttaagcttggagccatgcttttccaagatcttgatcacatcatggttctggtaatgcaatgcgtctgccaaaggcgtgctgccccactggtcctcggcgacggcatccgccccacgctggaggagcagctcgacgacctcggcttgcccctcgcaggcggcgatgtgcatcgccgtgcggccgtcggagtcgcggaagttggggtcggcgccggcgtcgaggagctcctggatcccctcgacgtcgccctcgtgggccatgtacatcagctggaagcccatgaccccgaccgcctcgctcgacccctcctccgagctctcccccgcaccgccgcggtcgggcgccatcgacgactgcttccccagcttaaaccgcggggtcgccgcggccgtcggcgtgcttggcttcggctccatgtggcggcgcgggcgcgggcacgggaggcggctagggttccgatggggaggacgagacgagacgagagatcggatcaatcaaagcctcgtgc

SEQ ID NO: 20869 - DNA, 3427 bp, Oryza sativa
  Clone ID: TF_OsC40453_1
atggcggagacacgcaagttcttgatgcccaaccagcccccggatatttcgcagatggtgctggaggctaggaagcgatggttgcgacccactgaaatatgcgaaatactctcaaactacaggagtttctctctctcgcctgagccaccaaacaggcccggaagtggctctctttttctatttgaccgcaaaacattaagatacttcagaaaggatgggcataactggaggaagaaaaaggatgggaagaccgttaaagaagctcacgagaaactaaaagctggcagcattgatgttctacactgctactatgctcatgtagaggataatgagaaattccatagaaggacctattggctgttggaagaggatttcgcgcacattgttcttgtaagctatcttgaagtcatgggtgtaaagcaaagttttagtcgtgctaaagaagaaattatgccgttatctggtgctgatagtccatcgtgttcaaattcgattactagtcagaaccagatgaccccacaaataatggatgcagctgaaagcccaattagtgggcagatttcagagtatgaaggtgctgaaccagcgaaattcggtgcagcagataattgcccagcaagctccagatacaaccctctcattgagatgcagcagcctctggatggaatcgtgatggataacattttatacccttcttcttcagccatctgtaaccaagtttcaggttatcatggtgaattgccaccaggaacatctaatctaaatggtcatacattttctcacagtgacatagctagaatgtttgatgattccagctctgggctaagagacatttccagaaccctgtttgattcaatgccttacgatgagcatttctcaggatatgcaaatggattcatggagccaactcttcattcttctttttccatgatagaggctaacaatctggaggatagctctcttctggagacatatacatctgaagctctttacactaacaacctcagccagaaggaagctgatgcactaagttttgctggcatatcatcgccagaggtgaatggtaataaatatactgaaggaagcaccaagcatccgctcctgaagcaattgtcattagatctatttaagattgagtcttctggtttaaagaaacatgacagcttttcaaggtggatgagtaaagaacttggagaggtggttgatttgggtatcaaatcaagttctgatgctctctggagtagcattgagattgtgaatgctgccgatggtcctagtgcaccaactaatgaacagttagatgcttatgcagtgagcccttcacttgcgcaagaccaactattcagcattcttgacatttcaccaagctgctcatatattggtttgaagacaaaggttctggtaactggtacattcctggcaagtaaagagaatgtggaaaattgcaagtggtcatgcatgtttggggatgttgaagtaccagctgaggttttagctgatggttccctacgctgctatgcaccagaacatcaatctggaagagttcccttttatgtgacatgctcaaacaggatcgcttgtagtgaagtgcgagaattcgagtaccgggattctgatgctcagtacatggagacatcacattctcaagccaatggtataaatgaaatgcatctacaaattcgtcttgagaagctactcactttggggccagatgacaatcaactgcttgtttgtggaaatgaaaaacttgagttaatcaatgctataaactccctgatgcttgatgagaaatggtcagatcagggatcaccatccggctctaaagatgttgtcaccccaaggaaccaaagtttaaagaaattgatgaaagaaaagcttcattgttggcttatctataaaatatatgattgtgagaagggcccaaatatactgggaaaggaaggacagggtataattcatttggcggctgcactgggcttcgattgggctataagaccaatactagttgctggtgtcaatgtgaactttcgggatgctcatggatggactgcacttcattgggctgcgtcttgtggaagagagcgaacagtgggcgtccttatagcaaatggagctgcagcaggtgcattgacagatcctacttctgaatttccttctggaagaactccagccgatttagcctctacgaatggacacaagggaattgccggttttctcgcggaatctgctttgacaagccatctgtcagcacttactttaaaggaatcaaaagatagcaatgcggatgaagcatgcagattaacaattcctgaagatctccctgaaatgaattatggtcagcttgctgtacaggattctcatgctgaatcattaaaggattcattaagtgctgttcgtaaatccgctcaagctgcagctaggatattccaagccttcagggtggaatcattccacagaaagaaggtcgtggaatatggagatgatgattgtggattatctgatgaacacacattttcacttatttctcttcaaaaggtcaaacaagggcaacatgatacacgtttgcattctgctgctgtacgtatccaaaataagttccgaggatggaagggaagaaaggagtttatgatcattcgccagagaattgtgaagttacaggctcatgtgcgaggacatcaagtgaggaaaaactataaaaaagtagtctggtcagtaggtattgtcgagaaagttatattgagatggaggagaaagggacgtggtttgcgtggctttcgacctgagaaacaattagaaggccagacacaaatccagcctgcaaaaacagaggatgaatacgattacttgcaggatggcagaagacaggctgaaggcagactacagagggcactggaccgggtgcgctctatgacacaatacccagaagcaagagaacagtaccgtaggcttacaacttgtgttgctgaaatgcaacagtccaggatgatgcaggacgagatgctaagtgaggcagctggtgctgacggaagtgatttcatgaatggactggaggacttgatatgcagagacgacccccaaatgtctgccatttggtgaagtcgaagttgttacatcagttaggctgatcattgccttgttcattgccatattagccttgtaaattcttccgcttgtatttcactcactgcttaatatctagctcatgctgttagtattatgtaactctgtgcactgatcataatagaatatttctctcctgtatgttacagataagttaagctgtaaattcttgtgctagatgttcagtgctcaccgttcgactctatatagcgttatacctaataccatgcgacttctattaaaaaaaaaaaaaaaaaaaaaactcgagactagttctctctctccctcgtgccgaattcctgcagcc

SEQ ID NO: 20870 - DNA, 3762 bp, Oryza sativa
  Clone ID: TF_14346031
aggacaaagaaatcaatctactactctattgtggatgaggctctgtccattggggatgctccagcccgggacagcaatgagaggagaaaggccctgctcagtgagattcagctacttaaccaatttggggcagcgttatggagagatcgcaacattgacaagagaagcctgccccctctgcttaaagctgccaaggttggagatgtaaatgtcacaaagatgctcctgatgggggatgttgatgtcaatgaagcggatcctgaagggaacactgcacttcactggtgccttagtggtagctcaagcacacaggagccaaggattgtgtggctcctgctgaagaatggtgccagagttttccaggggaacaaacttggtcttacaccagtacacagcgctgcagctaagggaaattataaagctcttcagtcacttctgcttcatgctcaagattgcgttgatacaccttccaagaccaaagaaaccccattgttcttagcagtgaagaatggttctttggactgtgtaaagcttctcctgcgttctggggctagcaccaaagtacagaacctaagaaagcaaagaccaatagacgtggcaacgtcccaagatatgcatttcattcttacctctgcaaatgtggttccatggaaccgtagctcacatccgaaaaaaattgtgacgaacaaggaaagctgcaaagagtttctggatgacaattttgttgattatgatagcgatgatttaaatgaaagctttaccgggcttaaaacatcagcaagccatcgggatttccggtctagtaatggttctgcccaagggggaaagagtaagaaccattgtgctcccaagcaaggttccaagtttgtgcctcggcctaatcattggctgaagcacgactacactcggaaaatttttgttgggggcctcccactttctgtgggcgctgagtacctcactgagttcttcactgctgaatttggacctgtggaggaagcagtagtcattgggataaggatgggtgatcgggtgcaatcccgaggatttggttttgtaaagttcaaaagagaagaggatgtgataagtgcaaaggaaactcatcatgtgtacatgcttgggaagagagtggaggtaaaggatgctgttgctagaggattcttgcctgcagaaatccagaaaactgcttcattcaggcaccacagccaggaggttccaaaggtagctcaccatatgttggatggtgagctaaaggaggagcattacattaggaagtggcggcccttgccagagaagtgtcttccatcttggttctttatattcaggaagtggttgccaggatttcttgcagatgctactgaacgacttggagataggtacccattgagctccttgaagggtgatttcagagcaatttgcagaatggagcttgatcatggcacatttggttatcctaagctcagtgatttcatgcgctcccttcctggtatctgcagaatgtgtgtagtccctgtaggaagtggtcctgcaacacacatggtcctccttccaccggtctcgcgaccgaagtatgtacccttgctagaacctttctcctttgatcatgatgagctcccagaatcagtatctgatcatcagtcccctaggtctccacttaccactaatatcaccgaggactcccttcgtaacacagacagtcagaagggtgatacttgcagtgagagcaatgtgcagagccatcagggcgatgagtgctgtgggagcaacactgaaagccagcagtatagtgcttccactgacaatggtagcttaccgagtgaagttgccttcggtaccactgatctggttgagcttgtacagacaagagagcatgatctgattgctcctgcgtcaacaagaagatttgattttcttgagcctgtgtctacaagagaacccaatgtgattgaaactgtatctcttaatcagaagattgtttctgagcctttgactgatttacttcagtctggacatacaaggagggttggtctgattgattccagatcaacatgccttggtgacttcctggttgaaagggttgcagaaattccaaccagacatatcaatgaggactcaaatgcgcagatttttgtggttggctgtcatggtcaattgacactgcatgtggaccttaagaaaaaaacaagctcgatgatacaggcatacgaagagaagactggcataaaccatgaatatcagtatttcatctatgaaaggaaggtaattgatccagacgatactttgagctgctatgggatagaaaaaggatctactattcatgcttgtagtagattacgaggtggtgctagcatgacattagggcagtatctaaatcgttataaggatgatttgcttgaagatgttatccttcctgatggaagagcttaccccgtgatgaaaccagagccaagtggagttcttagatcatggttgaagtgcttcacaacagccttctctaaaggctactgttggggagagaattttctgctcagtaattttaaagtggttaatgggaaggttgaagtaattaaagaagctaaacatcagataaggactgattttctgcaggctcatttgcgaaagatagatgagaccataagatggtatttttgtcgagatggggaacggtttcctccctatcttgacgagctttgtgacttcctaaagttgcgaagaggacttgtgctatcagaagatgccaaagagttcattgacgatcatgtctgtttcatgaattcgtacgagagaggaatgctagggattaagctgtataaaaaactcaacagtttatctccaggtcagaaactaaaattgttaagagctttagggaaaatcgcctgggatttgagcttgatggatgacgttgacaaattaccactattatgtgatataattgttcaagctaaagctgaggggaagccgtttccacgcacaatacttggtggctttcgcttgctgagagattattttgcacatatccctgaacatcaatacgacaaagcaactaaaccttggaagaggaagtttagaatttatattgggattgaactgatgattccggttcacctaaagaaactactccccagaatcatcaaatgctttcttgatgccaaaattgatatcaagcgcgagttgttatcaagtcatactatgcgttgttctatctgctattcagcagggacctcatcaactgtgcccagattttcagccactccagaaactagacagactgcagggggaataactaaatctataaatgaactagggacgtcatcaaaagcggttgcatcttcaaccaccccgcaaactggacatgcgacaaagggaacaattggaacttcaaatgaactagggacttcatcaaaagcggttggatcttcaaccaccccacaaactggacaggatacaaagagaacaactaggtcttcaaatgaactagggaccttgtcgacagcagttggattttcaaccaccccgcaaactggacagccgacaaagggaacaattagatcttcgaatgaactagaaacctcatcaaccgctcaacgaaatacatggagtacaggacaagccgctagaaatttatttgcacattcctcaggagccccatcagcggtgcaacaacaatcccaggatgactgggaaacagttcaaaaacgtaaaggctgaatggttgatcattagtattatcaaaaaaaaaaaaaaaaaaaaaaaaaaaaaaaaaaa

SEQ ID NO: 20871 - DNA, 1353 bp, Oryza sativa; identical to SEQ ID NO: 10898
  Clone ID: TF_OsC286871_1

SEQ ID NO: 20872 - DNA, 1051 bp, Oryza sativa
  unsure (1)..(1051): unsure at all n locations
  Clone ID: TF_OsC9959_2
cccgcgtccggcggaaagcttctccatcgatcgatctctcctctctctcccgcgggggctctccggcgcacggtgccctctcgtgcctcggagaccccgatccgccgccgccgccgccgccgccgtgcctgagtagtacagtcttgttgtcgaggtgaggtgagtggtgggaggagaaatggacaccgggatgagggtggcgctgcaccggcaggtgtcgtcggggtcgctgaaggagagcggggagctccggcggcagtcgtcgctggagtctccccggacggggagggcggcgacgaggttcctgttcgggaggcagtcgtcgatggacccgaaccggcggcgcgggcggagccagagccccgtcggcctcgccgaggacctgaccgtgccggacaacctcgacgccaccatgcagctgctcttcctggcctgccacgggcgacgccgccggcgtcgaggccctgctccgcggcggcgtcgacgtcaacagcatcaacctcgacggccgcaccgcgctgcacatcgcctcctgcgagggccaccccgacgtcgtccgcgtgctgctcacctggaaggccaacatcgacgcccgcgaccggtggggcagcacggctgtagctgatgccaagtgttatggccacacggaggtgtacaatcttctcaaggctcgtggtgcaaagatcccgagaaacaggaggacaccgatgatggtgtcgaatcctggggacgtaccagagtacgaattgaaccctagtgagctccaattcaagaaaggggatganggtggtcaaggggcgtgtaccaagttgccaaatggaatggaaccaaggttcatgttaagatacttgatagagaatgctactgcgatcaggaagtcataaactctttcaggcatgagctgnaccgtattggagaaggtccggcacccgaatgtggttcagttcgtcggagccgtcactcagaacatacctatgatgattatttctgaatacctcccaaatggtgaattatcaagctgtatttcgaggaaaggaaagctacatggtca

SEQ ID NO: 20873 - DNA, 1488 bp, Oryza sativa
  Clone ID: TF_OsC238283_1
atcgaggagacccacaagtcgctgtccatggactgactaaaggagcgcataaatgggcaggggttcagcggcgtaacgttcgacgtggagggacgccgggcatggtcttccgcgagttagtctagggccacgccgccgaccagcccgacacgccgcccggcgcccaccatcctggatcaccccggcccgcgctcaccttccgctggtgcgctcacctcctctccgtgcgacgtcgggggcttcgccgccaccggcgccgcgacggcgcccggcgccgtgataccggtcagctcgttcaggtacgaggtgttcctgctgctcctccacatcctgcacgccggccgcgtctcgatgttgaggctgaagggcgagccagggccgggctgcggcgaccgcggctgctcgcacaccctctgcttcgccgccttcgtctgcgccctcgacgccgtcgccgccgcgcgctccttgggcgtcgtggagctcgaccacctcacccagaagcagctggcaggcatggtggagaaggcgtcgatcgaggacgtgatgaaggtgcttatggcgtcgaggaagcaggacctgcaccagctgtggacaacgtgctcccacctcgtcgccaagtcggggctcccgccggaggtgctcgccaagcacctccccatcgacgtcgtcgccaagatcgacgagctccgcctcaagtccatgtcgcgccgctcgccgttcctctcgcaccaccaccaccacccgcacgcggccgccgccggcatcgaggcgtcgtcggcggccgagctcgacgaccaccacaagatccgccgcatgcgccgcgcgctcgactcctccgacgtcgagctcgtcaagctcatggtgatgggggaggggctcaacctcgacgacgccctcgcgctgcactacgccgtcgagaactgcagccgggaggtggtcaaggcgctgctggagctcggcgccgccgacgtcaaccacccggcgggccccgccgggaagacgccgctgcacgtcgcggcggagatggtgtgcccggacatggtggccgtgctgctcgaccaccacgccgaccccaacgtccgcaccgtcgacggcgtcacgccgctcgacatcctccgcacgctcacctccgacttccttttcaagggcgccgtgcccggcctggcgcacatcgagcccaacaagctccgcctttgcctggagctcgtgcagtcggcggccatggtgatgtcccgggaggacgcccagaccgccgcggtcaatgcggcgcccatctacggcgagtcccccggcggcggcggcggcggtggcgtgtacaatgccagtggcaccagctcgagcatggtgaacctgagcttggacaacaggatggtgtacctgaacctggggatggacgcgcagttcgggaagatgaacgacggtggcgacggcgacgacggcgggagcagagggccatcgtcgttgttctccccacatggcttcccctga

SEQ ID NO: 20874 - DNA, 2745 bp, Oryza sativa
  Clone ID: TF_OsC23574_1
atgtttttcaccaggctggatgactcgcccatgttcaggaagcagatacaatcccttgaagaaggttctgaattgctgagagagagatgtttgaggtttcataaaggttgccgcaaatacactgaaggactaggggaagcatatgatggagatattgcatttgcaagttcactggaagcatttggaggggggcataatgatccaatcagtgttgcttttggaggacccgtcatgaccaaatttacaattggcagagagtgcgatggatcagatagattggattgaaaaaataactggtgtcatcgcttctttgctgagctcccaatcgcccgaacggcgtcttctgtcaagcccaaagggtagcggccataatcgaactagccagcgaaagtagttcctttagtagctcgacagaacttgaccattccattagtgaagactagcattgctggaaaggaactctggaagcggactgcactttcaaatatcgaggccaagaaaagatttgaatttttagaggctgtcagtgggacaatggatgcacatctgcgctatttcaaacaagttcttgcttatgcacagcaatcaagggaacggtctaactatgagcaagctgctcttgtagagaggatgcaagagtttaaaaggcaaattgatcgggaaagtcgttggtcaccaaatggcataaacgattcccctaatggtgatggaatacaagcaattggtagaagttcacacaaaatgattgaggcggtgatgcaatcagcttcaaagggcaaggctcacatttcagcatggaaattcatgtcatattttaaaagtggttatactaaccaaagaagtagcgctccgtcagagcatggttctgggttgcttagcagatggttctcttctcattatcatggtggagtacacgatgagaaatctgtagcaaggcataccgtgaacttgctaacatcaaccattaaagctgatgctgaccaatcggatctgcggttctgcttcagaataatttctcccacaaaaaactacactttgcagcgtcttctgtcgagcccaaagggtagcggccataatcgaactgccagcgaaagtagttcctttagtagctcgacagaacttgaccattccattagtgaagactgcatgctggaaaggaactctggaagtgggtattttgaccactctggcagagccatccagcatcaccgaaccagcatgaaacctgacaagccaattgacttgcttaggaaagtggtcggcaataatatttgtgctgattgtggtgcagcagagcctgactgggcatccctaaaccttggaattcttctatgcatcgaatgctctggggtacacagaaatctcggtgtgcatatatctaaggtaagatcactgacacttgatgtcagggtctgggagccatctgtaatcaatctcttccagtcattaggaaacacatttgccaacactatctgggaagatatgttaccttcatcaagcagtgttgatcatggtgataattcaagggctgatggactagaaaacacatcacataacttaattttcagcaagcctaaacactcggatcatattgctgtgaaggagaaatttattcatgcaaagtatgccgagcgagattatgtgcgaaagcttaatatggatgatagcctggtagctcaacagatgtgggaaaatgttagttcaaacaacaagaagggggtttacagtctgattgtggggtcaaatgccgatgtaaatttaacttatgggcagacatcatttaattcggccctaacccttggaaaagctctacttttacaagagcagccaacttcaccatcagatggaagttccagatgttttgatcgtagttcacttgaaaggatttctcccagggactctctttctcttgccagcacaagtgcacgtatagatgaattggatgattgtgtcgagggattgtcattgcttcatctagcatgccgtgttgcagatgtgggtatggtcgaacttctcttgcaatatggtgccaacgtaaattctgcagactctagaggtcgaacgcctcttcatcacagcatcttgaaaggacgacatatgtttgcaaagttgttgctatccagggaatgtgtcaatattatcaaattaggaattgtacctggagagatgatcagtggtagttggttcctacaatgtggttcttggggcgctgattcacaagccacggaccgagatggtagaacagcattacagtatgctattgacagtggaactattgacgacgaagagattcttgttttgttagaagacccaagtagataatccattagctaccaataccccttcagttcagcagagcaaagctttgtgtgctcagttgcctccatgacagagtcaaccggcacagcaagctccaagtttgtgtcgccgatgatcacaatctgtgacgagaacagtattggtgttctggagctgcattgtgccctcctcgttttccgggtctcgtcttagcgtgacgaatgaccagaccccaatttccttctggttgcagtttgcaaagctcttttggtctttctttttcccctgtttgctgatgatgcactgtgagttttgtacattgcaattggccccaactccccaacatgaagttgctgcccttctgatgacagatgatgatgtacatatagtgatcccatgtaccactatgatttttcctgcaagcattactagtttggtgaacatgac

SEQ ID NO: 20875 - DNA, 1578 bp, Oryza sativa; identical to SEQ ID NO: 10902
  Clone ID: TF_OsC199536_1

SEQ ID NO: 20876 - DNA, 2216 bp, Oryza sativa
  Clone ID: TF_OsC506_1
ctcgcgcctccccgggcccggcgactcgtccctccacggcagcgccacccactgcgccttcgccggcggcggaggaggagggaggtgcggccatgggtcacggtgtcagctgcgcccgcaccggcgacgagcacgacttcttccgggcggcgcagctcggcgacctcgacgccctggccgccctcctcgccgccgatccttccctcgcccgccgcgccaccctctacgaccgcctctccgtcctccacatcgccgccgccaatggccgcatcgaggtgctctccatgttcttggatcgcggggcgccgccggacgcggtgaatcggcacaagcagacgccgctgatgctcgcggccatgcacggcaagatcgactgcgtgctcaagctcctccaggccgacgcaaatatcttgatgttcgactcggtgcacgcgaggacctgcctccaccacgcggcgtactacggccacgtcgactgcctgcaggccatcctcgccgccgcgcagaccacgccggtggccgactcatggggtttcgcccggttcgtcaacgtcagggacgaccacggcgccactccgctgcatctcgcggccaggcaggggcggccggggtgcgtgcaggtgttgctggagaacggcgccattgtgtcggctttgacaggatcatatggcttccctggaagcacgtcgcttcatttggctgctcgtagcgggaacttggattgcatcaggaagctgcttgcctggggagctgatcggctccaaagggattcggctgggagaattccctattctgttgcgctgaaacggaaccatggagcatgtgcagctttgctgaaccctacatcagcagagcccatggtgtggccatccccacttaagttcatcagtgagcttgaaccagaagctaaggctctcctggaagcagctctgatggaagccaacagggagagggagaagaaaatcctgaatggcacaaagtactccctgccatccccttcgcccggtgatgacagtgccgatgacgatgcatgctcagaggtgagcgacacggagctttgctgcatctgcttcgaccaggcttgcaccattgaggtgcaagactgtggacatcaaatgtgtgcaccgtgcacgctggcactgtgctgtcacaacaaacccaatccgacgaccctgacaccgccctcaccggcctgcccattctgccggggcagcatctcacggctggtggtggcccaaacaaggtctgcttgtgatcctgacaagccgtcatccctgcagctcacccggaagcggtcgcgtcgatctcacaacctcagtgagggcagcagcagcttcaaagggctaccttcggccatgggctccttctcaaagcttggccgtggctcgagccgcatggcggacagtgacagcagcaacctggacaagcctgagcacgatctatgaaagcagaacaacgcacggacaatcgccgcatcatcctcaaaacatccgttggtatcagaaacccagatgaaaatccaatggctaatttggagcaactttgatccatggaaagttaaatagatagggactaaataagtagaaccctccactccccattgtctgtgtgcccaccctatttttcggcttgccgggttaagcttagcatatgcataggagctctgaaagaccagagagagagtgagtgagtgagtgagagcaattcatcatcaatcacacagtgagtgttggtgtggttaagggatgcatgcagcagagatgtgaaacggggttcatgttcgtcacctctaaagttagcctgccatggcatgtgagctctgcgccggcctgacccctcctcctctgtgtgatgaatcatgcccccatttttggcccttgtctcgtgttataatggtgcgagttcatgtcctggtgatgctgcagccatcagcagggtggtccattggatcgccatgaattcagcagctgcggtctctgcctatgtgatgacattgtatgtaccgtactccagtgtgtaccggttctttgaactgtggtggcgtgtcactgtctctgtcagtgccactgtccatcgtcgtccggctgttacagccggattgttactgctagtaattggcttccttcgttcgttcgtgatggcatcagcatcagattgtttcttttcttcaggctgataaaatgaagactgttgttgcctgtaaaaaaaaaaaaaaa

SEQ ID NO: 20877 - DNA, 671 bp, Oryza sativa
  Clone ID: TF_OsC35544_3
ccggccggtcgtccgccgcccgaccgatgacggcaccagcggcaccagtgcgagcgctctcctggggcggccttagatgggtacctcggacgactcgaagggtgcttcctctcctcatcttcgccgtgtccatcccacccgatcgatctgtgagaagatattataaagagccttgatatggggaaaggaaaggcccgagatgcagtcttagctcgtaaaaaggatgggattgggttgctgcatgccgcagcatgccagggccatctgactgtttgcaagttcttgatggaggaattgggggggttgccatgtctacgtttggtagtatgatgtgaagtataccaatgtgctgtttatcacatatgtttaacaccgtttatggcctgtgctgagtctggtgatgttcctactgtgaagtattttcttgatcatggtggtgatgtaacaaaatcagatgataaaggatgcacacagttctccaccatgctgctggcacagatccccctcaatatccagttcattcttatatatattaccaattgtattgttgtacaaggctctataatactgcaatactattaatgggagtatgtttcaatcacagcaaaaaaaaaaaaaaaaaaaaaaaaaaagccgagaggcacccaagctctgcgctgacgcgctgcatg

SEQ ID NO: 20878 - DNA, 2059 bp, Oryza sativa
  Clone ID: TF_OsC3119_1
aaaaatcctcttcttcaggccatcaacactagtagctgcagctggatcgagcatatgctcatctcctggtggatcgatcacattggagactacagctccaatattacaagatgaacattgcttgatggtttgaaactttttgaacaaattagctagcatgcaacagtttgctgcgcgcgcaagcgaatcaatcatgcgaaagatcgaacaatccacatcaaataccactaaattgttgcccatttatcctagctatatagtagctagctacaccatttgctgctcatcttgtcaaccatgcataaccccacaaatctcaacacggctagtagaagagaaggatagggaataatattacttatgcgaagccattggggaagtacatggcgggcggcgggctccctcggccgttattgcttttcctcccctcgccggcggccacggccgccgccatttcctggccctggtacatgagcgtcgagttcatcgtcaggctcaccaagctgtcgtcggcgtcgctcctcgggaagttgccgccgtcgcttccgccggcctcggcgccgccggtgacaggcgcgccgtcgtcacgcgtggtcaccatcaccgccgactgcacgagctcgaggcagagcctgagcttgttgggctcgatgtgcgtcagccccggcacggcgcccttgaagaggaactcggaggtgaggctgcggagcacgtcgagcggcgtgacgccgtcgagcgtcctggagttcgggtcggcgtggtggtcgagcagcacggacaccatgtccggggagaccatctccgccgccaggtgcagggcggttttgcctgtcgggccggcgcgggagttgacgtcggcggcgccgagctcgagcagcgccttgacgacgtcgcggttgcagtgctgcacggcgtagtggacggcgagcgcgtcgtcgaggtccaggccctcgcccatgaccatcagtttgacgagctcgatgtcggcggcgtcgagggcgcgccgcatgcgccggatcttgttgtcgcggtccgccgcggaggacgccgggttcatggggaggtagtggtgcgtcaggaacggcgagcgcggcgcggccaccgcggcgagcggcgacttggcgcggatctcctcgatcttggcgaccacatcgatggggaggtgcttggcgaggagatcggcggagaggccggagcgcgcgacgaggtgggagcaagtcgcccacagctcctgcatctcgaacttgcgcgacgccatcagcaccttcatcacgtcgtccaccgacgcctccttcaccatgctctccagctgcttctgaaccagcagggcgagctgctcgacgccgaaggagcgcgcagcggcgagcgtgtcgagggcgaggtcgacggcggcgccgcaccgcgtgtgccagcaaccccgggcgccgcaccccgggagcggcccgctcttgggcgccgccaccgacgcctgcccgctgtacaggaactgcagcacgagcacgagcacctcgtaccggatcgagctgacggggatgacaagctccggcgtggcaggcgctcctccaccaccaccggcgccgccacgccctccaccaccagagccgccgccgcctccccccgccatcggccagtttaacggcggcggtggcggcggcggctggtgattcggatcgagcccgcagaacaacttcctgaagaacaagctccgcgccgccagcacgcagcggtgggcgtgcacgaggcggccctcgacgctgaaggcgacgtcgctgaaggcctggccattgatgagcaggttgaggtagtcaagcgacaaggatttgagcgagtcctcggagctcatgatctcatgtgcagcttatcaccaccagataaaagcgccggattggccccaacttttcaggcgcaggaaggtgaggaggagggatttggatagagattttgaggaagcaaaccaagcaagagaggtggaggggaaagggagggagcaacacaaggtagaagcaactgttgcaagaggaaaaagaaaaggttagggtgaaggagaggtgtgtgtgag

SEQ ID NO: 20879 - DNA, 2407 bp, Oryza sativa
  Clone ID: TF_OsC5805_1
atggcgtcggagatcgaggtgctcgaggacaccaccgccgccgccgccgccccggccgccaccatcggaggcggagaggtcgcgggcgcgggcgcgggggaggagggggaggcggcggcggatgcggaggcgctcaaggacgacgtgtacacgggcgcggcgtacggggacctcgagaagctgcaccgcctcgtggagcgggagggccggccggtgacggagcccgacgccctcggctaccacgcgctccagtgggccgccctcaacaaccgcgtcgccgccgcccagtacatcctcgagtatgtcctatccttttcagttgtttgctttggtgggatgacggttctcagcttgttgtctggacagcatggagcagatgtaaatgctatagaccatacagggcaaacagcactccactggagtgcggtacgtggtcatattcaagttgcagaactacttctgaaagaaggagctaaggtggatgccgctgatttatatggatatcagactacacatgttgcagcacagtatggtcaaacatcatatctttatcatattgttgcaaaatggaatgctgatcctgatgtccctgataatgatggaagaagtcctctccactgggctgcttataaaggatttgcagattctctcaaatgcttttcattaggttgcactcctttgcattgggctgctatccgcgggaatttggagtcatgcactgtgctggttcaggctggtaaaaaggaggatcttatggtgcaagacaataccggcttaactccagcccaacttgctgctgataaaaatcatcggcaagttgcctttttccttgggaatgctagaagagtacatgagagaggatgtgttatctcaggacaatatagcagtaatatgacattactatttgggttattttcatggttgggaattttccttgctactgccggattggttatgttctataagtgtagcagaaaagatcctggctacattgacaagaatacaagagatgcccaaaatcaaagagatgatgaacctttgttgaagaggggtctagacaaccctgaacttctggctggcaattggtctcagctatgtataacctgcaaaattgttaggcctgtacgctcaaaacattgctctacatgcgatcgctgtgttgagcaatttgaccatcactgcccttgggtgtctaattgcattggaaagaagaacaaatgggaattttttatgttcctgatcctagaagtttctgcaatgattattactggtgtgacggccgtcataagagtagtaggagacccagattctcctgcatcatttggtggatggcttaattattcagccactaaccatccttgggtggtgtcttttgttgtgatggatctctttcttttctttggcgttataactctaactgtagttcaagcatcacagatatccaggaatttaacaacaaatgagatggcaaatgccatgaggtatagttatctcagaggcccaggtggccgattcagaaatccatttgaccatggggtgcgtaaaaactgttctgacttcttgctgaaagggtacaatgaggatattgagagggtagaacagacattacaacctgatgaggaattgggaatgattcaaatgacaagaagtgcagtctcacagaatggcgagagcatgtcacttcatgctaatggcacagaccatggttgtgctgatccacaagggaactcaaaatcccatcgtcactcgcacggttcatcacaatgttgcagtcacagtaagagacctgacaagacccccttggggctaggattgggccttggtcgtaacaacccatctagccgctacacacgttcacttccttccattcattcggagagtagtgcttatttgcccttgtgattcttttggagaaggcgagctagatcgtatttcaacttgtaggtgtttattgcacaaccacagctttcttttggctatttcttcctgcagtatttgtcgcttggatctggtctcatcgacattgccagggtgtggtatatttggaggcccaatcaaccgactactgaaattgagaatatgaaggagatgcaagttttatgaaggcttcatgaacatccttagcctctcaggaacaccagcgaatgtctgtctaggcgtagcaatattttttgtgcaaaagtgcatctttgtacaatgtctcaacattttgtatgtacaagagggttagctgtccagatactatgatgttttcaagtacagctgtatattggaagaactgtaaatttatatagcgaaaccaaatgctggcaaatgtttgtttctctccaaaaaaacgagcccaaaacccgggggttcccctggtggacttgcattgtcagcttgatcaaaaaaaaaaaaaaaaaaa

SEQ ID NO: 20880 - DNA, 5063 bp, Oryza sativa
  unsure (1)..(5063): unsure at all n locations
  Clone ID: TF_OsC1528_2163
atggttaattaccaagtaaattttctgtgcttgtccatcagaagagctcatgatcattaataacataacaaaaatagaacacgtaaaatataagaaaaatattgtntaggtagtgctctaattacataggtgcaggggcaggtgagatatggttcgggttccagcgtgcttgataatcctccccgatccgaattggagtgattatgtaccactcccaaaccagcaaacattatataagttatatgaaagaagagaagccagttgtagatggaagcgacggccaatggatactgcctcttgacggcattagtccggtgactgcgccacacaaacctccagaatatacgcatcgtcgttacaggttcaacccatgttccgacattgacaaccaaaacgatgaggcacacgtagataaccatgaacacgatggagactgccctcgaggttctcatcgtggcgcgaaaagccgcaaagaaggccaggatcaggctgacgagcgagacccagataaagtgcaacgccgccacgaagctcttccacgagccggcggagcgcgatgccttcccgtagacgagtaggatcacggcgaccaccgatgccgctacggcgacggtgtcgaggaccatgaaccatttgaatgagaacctgcccttgaggttcgccgtgccgtcgtctccgtagctgcctggcatgttgaatccggcggcaaaggcgacggtggcgatgagcacggccaccaccgcaaggctgtcagttgtcctctctatccctttacctatgtcgcggccgctccacggctttagatggtcattcctttgtggtcggccttgtgccccaaaagcaactaatatcaccacaaagcttaccatgttgaacaaattggtcgatgtcgaagcgagatcaagcggcgagtgtccatcgtcgttcaagacatcgctttgcactttccccttatggagtaaggcattcacaatgtcaggcgagccggcaaccacggcgatgtggagcggcgtgttcccaaccccgtcctgcgcgtccagaaggccaccgacctgcttgtgtttcttgatagcgagggacacgatcgaggactgcttctccctgaccgcggtgtgcaggaaggtctctccatggccgtcacggagctcaacagcatcagggcagatcccaattagttgcttgacaacattggcatgtcccaacctagccgcgacatgaagagcggagaggccatccgagtccttcatgtacactgtgccagttggcacgatggctaggattgcatgtacgattttgcggttgccgtcggatgccgcgaaatggagtggggtgctgccattgcagtcgacctggctagccagttctggcttccattgcaataataagtgaaccatctctgccaaagacacaaatttatcaatcgagttgacaaacacattcttgttttgtgcttgagatctgctcatcactgccaagtacaacggtgacacaccggctttgtttagctcggtctgtgaattagtttgggtggaaacgatcgcactaatcctgtgcgtcgccttcgtgttaatatatatgtgatgggaacagcccccatcgtggcgatacagagttcggcgcagctgagaacaaccgaagccgagattgatgaaacgacttaacaaccgttctctgacaaagtgatagtcaacttctatgtgtttcgttctggcatgaaacactggattagctgacaaatacttagctccaagattatcacaccatattttagcagcttttggacttttaatctctaactctgcaagtaaagtctgcacccacattatttctgcagtggcattggcaatagctttgtattctgactctgtgctagatctagacacagtggcttgttttctagcattccaggagaccagatttgaacccagaaatattgcaaatcctcctgttgatcttctgtcatctaaacagcctgcccagtctgcatcagagaagccactaactaaagtagatcctgacttatgaatttcaagtcctaaccgagtgcattgctttaagtacctaagaatccttttcacagcaatccaatgtacagttgtgggagcatgcaagaattggcaaactttattaacagagaaagctatgtcaggtctagtaagagtcaaatattgcaaagcaccaacaacactgcgatagtgacttgcatcttcaggccctaacaatgagccttcatgaagagagagtttctcacttactgaaagaggtgtattagcaggtttacaatctatcatgcccactttcttcaataaatcattggcatacttgtcttgattcagtacaatgccattctgaaccttgcttacctctattccgagaaaataatgcagctcaccaagatctttgagtgcaaattccccttttagattctgaagtaaagctgcagtggccttctctgaagagctggctacaatgatatcatcaacatataccagaacaaacatagttatatcacctttattcagaaagaacagagacgtatcagcttttgatcctttaaaaccaaggtccatcaactttttacttagtctagagaaccaggctctaggtgcctgttttaacccatatagagctttatcaagtttacacacatgatgtggcttagtaggatcctcaaaacctggtggctgtagcatataaacttcttcttctaggtacccatgcagaaaggcattttgaacatctagctgtctaagactccaacctttagacactgctaaagacaatattattctgatagtggcagctttaacaacagggctaaaggtatcttcataatcaataccatacctctgtttaaatccttttgctactaaccttgccttatacctatctagggtaccatcagctttccttttaattttatacacccacttacagccaataatatttctccctctctgaggaggaacaagatgccaagttttattcttaactaaagcatcatactctgaatccattgctagtttccaatttttatcctttaaggcttctaaatcatttgtaggttcacctgaagcagtaaaccaagaatgcttatatttaatagtaccatcagtatataccttttctttgcgaactccactttgcaacctggtgcgcggtcctgccggtgcctctgaacctgtgtcagtcacatctgcatgctgtaatgtattagtctcatctgtgacagcctgtgcatgttcctgcgctggtgaggactgctcctgctcctgcaccacctgcgactcctgctcctgcaccgcctgcgacactgagtcttctgctgtctcctctgctagcgatgatgctaccccccgtggcacagaaccaggtgtgggacccggatgacggcctgatgacgtggccgcaggggagtggtggacgacacggtctggttctggaccaaaactggcatccagaggaggcgtcgccggcggatcttctgcatcagcgggatgtactgcaccatctctatgtggctcattagcacgattagataaagcagcagaaacatcagcagataatggattagtcactggatgcatgcattgttcattcccaacagaccgtatgggtcctagcagttcaggagtgagaatatcaatctcagaacgaagacgggcactagcattggcatgaagttcagtgaagggaaaaatattctcatcaaagacaacatcgcgagaaatatagatgtgtcctgcaccacttgctgtgtggatttgttcaccaccgttgtatttttccttcatagtgagcttgtccagctctcccgtgacatgatctgtagcaccagtgtcgatgtaccaatttgtgtcaactccataggagttaaccgctgcagctgcaacatgcttggcgtcaggaacgtaatcctcgtcgtacctataccaacaatctgctgccgtgtgcccccgtttgaaacacacttggcagattggtcttttatcaacgcctcctggtgtgcggcctcgaccacggccacctcctccgttgccgcgaccatggccgccgccgccgccgccgcgcgaacctccttggccaccattgctgttgccacgccccccgtggctgaagcctccacggttggcaacattgacggtgacctcctgtgcgccgcggtagatggcttggcgagcttcaaagttcaacacttgagagtacagatcactcacagagattggttcaacccgagcgcagacagccgacaccacctcgctgtagccctcgccaaggccggtgatgatatactgaatcagctcctcttcatcgatcgggcgacctccggcagtagccatctcatctcctaaggatttcatttttgcaaaatactcaggagttgacatgttacctttctttgtattggtgagagcaaaccgagtgttaatcgctcttgctcgtgtgtgggtggagtacatctgctcgatggcgctccacacttcagccgcggtgtcgcatgtagcgacctgcatcagcacctctcttgtcagcgacgagagaaggtaccccagaacttgctggtcggtggcttcccagtcttcatgggctgggttcggctccttcttggtggcgccatcttttgtgacagcgatctctgccggcggccgcttggttgcaccggtgagatgcccctgaagccgcgctcctctaactgcggcgcttacttgcaccttccagagcgcatgatttgccttcccaagcttctctgagattgggtggccttggaacggatttgtggcagccgtactggacgacgaggccatgagtattgatctcttagggaattgatcaacgctctcaacaactttcatgctaactaacacggtcgccttcgcacgtgccacgacaagagcctccacggtggcgccatgcccgtgcctcgctgccatgtgtagggccgtgtccccggccgcgttctggcatcccaggatattctcctcgcagtcctgggccagatttacaaggatcgtcacggtgccggcgtgccctgccctcgccgcgcagtgcagaggtgtgtccat

SEQ ID NO: 20881 - DNA, 1082 bp, Oryza sativa
  unsure (1)..(1082): unsure at all n locations
  Clone ID: TF_OsC35544_1
atggagaatgaatatatatacagagaagaagaagagtcaatcaaggaagacgaagagtcgtggcccttccggagaaatcagcctaacgtaattatcaataatggagccggtagtcccctgatgagttcccttatctaccgatcattgaagtgtatgaagctactcataaaggctggtgctgatgttaatggcaagggtacagttgtaacccctttgatgcttgctgcgtcgcagggaggctatactaacttcattcagtttcttctgaaggctggagcaaaccccaatattcctgatgatttgggttggttgccaatagagcatgctgcattacgtgattgcagggaagaagttgaaatgctatttccattgacttctccaattccaaatgtcccaaactggagtgttaatggaataatcgctcatgcaaaagtcaaaaatacaaagccaatggatcaacatcagaaggagagtagaaaagtcgttttgaaggcacaggcagatttggtattcaagcagaagaattacgccgctgcagcaaaaatatatgatctggcaatagctcatggaccgactgcagttttgtacgcaaacaggagcatctgtagattgctcatgggtgatggtgaaggtgctctttctgatgcttacagatgccgaatgatgcggcctaactgggcaaaagcttgctaccgtcagggtgcagctcacatgctactcaaggagtacaaacatgcgtgtgatgctctcatggatgcacaaaaattagattctgggaatgtcgagattgagagggaactaaggaaagctagggaattaatggcgaaacctccagatgagcagtgaggcagaataactgcataatcgtccatcagtaccctatagctagctgccacttcttttcttagccatgccctattttgttggatatgtgatgaaatgtaaagcatgcacttctcggaactctcacctatcggcggccagggactgtcctctggaggtctcgtactcacctctgcgatggagaaccagccataaatccttatantctatgtgaggccgctcgcancccctggcattgt

SEQ ID NO: 20882 - DNA, 970 bp, Oryza sativa
  Clone ID: TF_OsC8940_1
gccggtgctggtgctctcgatttccggcaagcggatggaccaggcggggcggaagaagtacgtcaagcaggtgaccggccggcacaacgacacggagctccacctcgccgcgcagcgcggggaccttgaagctgtgcgccagatcatcgctgaaatcaacgcgcagatgaccggcaccggggaggagttcgacagcgaggtcgcggagatccgcgccgccgtcgtgaacgagcccaacgaggtggaggagaccgcgctgctcatcgccgctgagaaggggtttctcgacatcgtcgtcgagctgctcaagcactccgacaaggagagcctcacgaggaagaacaagtccggattcgatgttctacacgttgccgcaaaagaaggccaccgagatattgtgaaggtactcctggatcatgatccatcccttgggaaaacgtttggccaatcaaatgtgacacctctgataactgctgcgattagaggccacattgaggtagtgaaccttctactagagagagtttctgggttggttgagctatcaaaggggaatggaaagaacgccttgcattttgctggccgtcaggggcatgttgaaattgttaaggctttgctggacgcagatcctcagcttgctcggaggactgataagaaaggccagactgctttgcacatggctgtgaaaggaactagtgctgcggttgttagggcactagtgaatgctgatccagctattgtcatgctgcctgacagaaatggcaacttagctttgcatgttgctaccaggaaaaaaagatcagagattgtaaatgagcttctccttcttccagacatgaatgtgaatgcacttactagggatcgcaagactgcgtttgacatagcggagggtcttccactttcggaggaatctgcagagataaaggattgtttgtctcgtgctggtgcagtcagagcaaatgatctaaaccag

SEQ ID NO: 20883 - DNA, 2566 bp, Oryza sativa
  Clone ID: TF_OsC50099_1
gcgggagcgggcggatgggaaccgcgcgtcggctccatggtccacggaatcctcgcatacctggccttgaacgccgaagcagtaccagcaagtactgcagaagaatgacttcttccaggccggccggcaacaagccgaggacaggttcaatagatctgtggttcgcgttcaagccctgttccgttcttacaaggcacaacaggagtaccggaggatgaagattgctcatgaggaggccaagattgagttcagtgaagggcagctaggagcagcatgcaggagttgaaatggtttttagggacagctagtttctctaattcttgtcttgtacattattggaaatgctagaacaacctgcagtttgccgacgctgtacattttaggaccatctgaatgatctgatacagcttttgctgaccccttatggctgatgaatttgatgttagccctgtagtaactgtggtggtttgcgtttggctggctttaagctggacataaacagcgtgtgcttcaatgtacatgtagatgcaatgcaagtacatatcatgttgtaaatgctaataagattagcaataatcagcaaagccctgagccaatgacaaggagtgtggtttttctctgttaatttgatccattacacctctcctctgacctctgcagattcaacctctgcaaatcatggcctcaatcaagtaaatgcaaatcattttggagctctgaagcatcaaggagatcagactcaatctcttttggcgtctgatgtagattctcaatcagatcaatttataagttcttcggtgaaatctccaatggatggtaacacatctattcctaatgaggtgcctgctaggcagaacagtcttttccacagagcttctgtccagtgaccaatgaaagactattagaaatcaatgagatctccccagaatgggcttactctacagagactaccaaggtcgtggtgattgggaatttctatgagcaatacaagcatttggctgggtctgctatgtttggtgtctttggtgagcaatgtgttgccggagatattgttcaaactggtgtttaccgtttcatggttggaccacatacacctggaaaagtggatttttatttgactttggatgggaaaacgccaatcagtgagatttgcagtttcacgtatcatgttatgcatggtagttccttggaggctaggctgccgccatctgaggatgattacaaaaggacaaatcttaagatgcagatgagactagctcgcttgttgtttgccacaaacaagaaaaagatagcaccaaagttgcttgtagaaggcaccaaagttgccaatctcatgtcagcattaccagagaaggaatggatggatttgtggaatattcttagtgacccagaaggcacatatgttcctgttactgaaagcttgcttgaactagtgttgcgaaataggttgcaagagtggcttgttgaaatggtaatggaaggtcataagtctactggtcgcgatgatctaggacaaggagctatccatctgtgttctttcctaggttatacttgggctattcgattgttttctttgtcggggttctccttggatttccgtgattcttctggttggactgctttacactgggctgcataccacgggagggaaaggatggttgccactcttttatctgctggagcaaatccaagtttagttacagaccctactcccgaatcccctgctggactcactgctgctgatcttgcagcaagacaaggttacgatggcttggcagcatatcttgctgagaaaggattgactgcacattttgaggccatgtcactgtccaaggatactgagcaatcaccatcaaagactaggctaacaaaactacaaagcgagaagtttgagcaccttagtgaacaagaactttgcttaaaagaatctctagcagcctatcgcaatgctgctgatgctgccagtaatatccaagctgcactcagggagagaactcttaagcttcaaacaaaagcaattcaattggctaatcctgagattgaagcatctgagatagttgctgctatgaagattcaacatgcatttcggaactacaacagaaagaaagcaatgagagctgctgcacgaatacagagtcatttccgtacatggaagatgaggaggaacttcattaacatgcgaagacaagttatcaggatacaagctgcgtaccgaggtcatcaagtgagaaggcagtaccgcaaggtaatatggtctgttggaattgttgagaaagcaattttgcgatggagaaagaagagaaaaggccttcgtgggatcgcatctggaatgccagtagttatgactgtggatgccgaagcagaaccagcaagtactgcagaagaagacttcttccaggccggccggcaacaagccgaggacaggttcaatagatctgtggttcgcgttcaagccctgttccgttcttacaaggcacaacaggagtaccggaggatgaagattgctcatgaggaggccaaggtaattttttttaaaactttctccaataattgctggcatgtgccg

SEQ ID NO: 20884 - DNA, 1848 bp, Oryza sativa; identical to SEQ ID NO: 10919
  Clone ID: TF_OsC47045_1

SEQ ID NO: 20885 - DNA, 2923 bp, Oryza sativa
  Clone ID: TF_OsC168710_1
ggtgcaacgtcttctggtagcaatgaagacctcgagcttcgagagcgctagtagcagcggcggcagcggcggtggcggtggcggcggtggcggcgagggctccggctcgttcaacctccggaacctatccaagctcatcctgccgcctctcggcgtgccggccggcggccacgcccagtccggccatgccggccccaacgacaggcgtgtcatctcgcctctcgactccagatacaggtgctgggacacgttcatggtggtgctggtggcgtactcggcgtgggtgtacccgttcgaggtggcgttcatgaacgcgtcgcccaagggcggcctcgaggtggccgacatcgtcgtcgacctcttcttcgccgtcgacatcgtcctcaccttcttcgtcgcctacatcgactccaggactcagctcctcgtccgcgacaggcggaggattgccaccagatatctgtcgacgttcttcatcatggatgtggcgtcgactatcccgttccaaggccttgcctacatcgtcaccggcgaggtcagggagagcccggcgttcagcctcctcggcatcctccggctatggcgtctcaggaaggtcaagcagttcttcacaaggctggagaaggacatcaggttcaactacttctggatccgctgcgcccggctcatcgcggtgacgctgttcctggtgcactgcgcggggtgcctgtactacctgatcgcggacaggtacccgcacagggagaagacgtggatcggcgcggtgatcccggacttccaggaggcgagcctgtggatccgctacacctcctccgtctactggtccatcaccaccatgaccaccgtcggctacggcgacatgcacgcccagaacaccgtcgagatgatcttcaacatcttctacatgctcttcaacctcggcctcaccgcctacctcatcggcaacatgaccaacctcgtcgttgagggcacccgccgtaccatggaattcaggaacagcattcgtgctgcctccaatttcgtgggccggaaccacctgccgcctaggctgaagcagcagatactggcctacatgtgcctcaagttcagggcagagagcctgaaccagcagcagctgatggatcagctccccaaatccatctgcaagggcatctgcgagtacctcttcctccccgtcgtcaaggacgtctacctcttcaagggtgtctcaagagaagtgctccttctcatggttacgaagatgaagccggagtacataccgccgaaggaggacgtgatcgtgcagaacgaggcgccggacgacgtctacatcgtggtgtccggcgaggtggaggtgatctactccgacggcgaagccgaggagcgggtggtggcgacgctggggacgaggggcgtgttcggcgaggtgagcgcgctcagcgaccgcccgcagagcttcacgctgcggacgcggacgctgtgccagctgctgcgcctgcgccaggccgcgctcaaggaggccatgcagagcaagcccgaggacagcgtcgtcatcatcaagaacttcctcaagcatcagatcgagatgcacgacatgaaggtggaggacttgctcggggaggacgccgccggcgagtacgaccacggcaacataccgtgcaatctgctgacggtggcagccaccgggaacagcagcttccttgaggatctcctgaaagttggaatggatcctgacgtcggtgactccaagggaagaactgcactgcatatagcggcatcgaaggggtacgaggactgcgtgctggttctcctcaagcaagcgtgcaacgtaaacatcaaagacgcgcagggcaacacggcgctgtggaacgccatcgccgcgaggcaccacaagatcttcaacatcctgtaccacttcgcgcgcgtctcgagcccgcaccacgccgccggcgacctcctctgcctcgccgcgcgccggggcgacctcgacacgctccgggagctcctcaagcacggcctcgccgtcgactcggaggaccgggacggcgccacggcgctccgcgtcgcgctcgccgagggccacgccgacgtcgccaggctcctcgtcctcaacggcgccagcgtcgacagggcggccagccacaacgagcagcaggcggcggcggcggtgtcggtcgacgagctgcgggagctcatgaagacgcgcgagctcgcgcacccggtcaccatcgtcgtcgactcgccgtcgccggccgccgcagccgtcatccgggaggtcggctcgtcgggggacagccggaatgggcggcgccagagcgcgagatcagacggcgcgcactggccacgggtgagcatatacaggggccatccattcgtcagaaaccgtagctcagaagccggcaagctgatcaacctgcccggcaccatggaagaattcagaatcatcatagaggagaaactgaaagtcgacgcgaggaagacgctgatcatgaacgacgaaggagcggagattgactcgatcgacgtgatccgggacaacgataagctgttcatagtgaccgaggagcatatgacagcagtagcatcgatggactcggtgtctggatcatagcatattcgagtttgctgaataaggccttgtccagcttggagggatttgagtgggaatgtttttgcatcacaataggtgtaaaactagtctccccaatctgttccttttagggattaaccgaacaaagcctaatcaagttttctattggcgacaatccaacaatgtgagaagtgccaatataattgaagtgattaatggttttgtagtgtattggattaggagatagatatgccataaacagattcacaattgctactacctccgtttcaaaattgtactccatctattttatattataaaacgttttgattttttttaaaaaaaaaaaaaaaa

SEQ ID NO: 20886 - DNA, 1014 bp, Oryza sativa
  unsure (1)..(1014): unsure at all n locations
  Clone ID: TF_OsC116644_1
atagcaaattggaggaatcatcccattaaaaacaatangaggaatggcccaggcaacanttgctaacatctaaatcttttttttttctctgattcttgtgacagagctgagtcacatttttctatttgccggaacaagtttgacaagctttgccaaatcataagacttgaaatctcttccaaaacacaagcttatatccaaggcagtccttccatccttggttcttctcgtcttatctgcaccattgacaagcaatatctttgctatatctctatttctactctgtatagctaaatgcaacggtgtccagccatcattatcagcaacattgacatcaaccctattcttaatcagtaacttcacagtttgcagggcaccaacttgaactgcataatgtaatggtgtggctccatccctatctctgacatgaggatttgcccctcttcgcaggagatggctaatgacggcctcctttttgcctatgacagccttgtgaagtggggtgaaaccatctttgtcaagtaaattgatatcgacaccactatcgagcaggctgtccatgagaggtatctgcagcgccaatgcgtaactatgaagtggatgccatttcggtgatgatattttggtgatatccggggtctcgttctgatccaggatagccatttcttcaggcgtcaagagaagctcgatttctcctcgaagctcctcttcttctcgctgctcttgccgccgcgcggcgccgagcctggagaacagcgagggggaagggaacgaggagaagctgctcctccgcccggtggcctcctgccgctcggcctcggcctctgccccatccccatcctcgtcgtcgctcccggagccgccgtcgtccggctcctcccagaacacgtcgccgtgggaagggcgcgcggcgcgcggcgccgccccggggccaaccgagagaagcggcggcggaggaggggaagggtggtgcgggggcggtgggaggcgcggagagcgcgcgcgccggggcat

SEQ ID NO: 20887 - DNA, 3414 bp, Oryza sativa
  Clone ID: TF_OsC60670_1
atgggcagtctctgtctcgagcgccggaagcaaccggacgatcccctctccatttcgcagcagctccacctgtgcctccttcctctcctcttctgcgcggcttcaaagttttcggcttttgagggagttcttgctcaatatcccgatttttctttcttttttttctctgcctctgcgagaaatcgaggttttgatatcaacgtgcttcacaaagaagcaaggagcaggtggctaaagccttctgaagtctactatatcttgcaaaatcatgagaggttcccaatcacccctgaaccgccaaagaagccacccagtggttctctattcctttataatcgccgtgtgaatcggtattttcggagggatggccatgcatggcggaggaagaaggatggaagaactgttggggaggctcatgaacgattgaaggttggaaatgttgatgctctcagttgttattatgctcatggtgagcaaaatccatgttttcagaggcgatgtttctggatgctggaaccagcatatgaacatattgtgctggtacaatatcgagaagtaggagcagctgagggtagatataattcagcatcactgttgaatgggccaacagattctctttcagtcttgagttatccaaatgctacatatggaaaccaatatcttggctccacttctggcgttagtgatggtagtgaatcactccattctaatttgagctctgtaacggaggtaagttcctattctgcaaacaaagacaatggtattctgcaaagcatacaggagctcagccagtcaactataatgggtgcaccggcgcttggccagagtagtctggagcaaagtattgaagttcgctgggtagataacagtaattcaacaaataaatctgggctcaaccgagctttgaagcaaattgttgagcagttaagcttgggggatgatgaggatgatgactacatacaccaagcacagccttttgacttcattacaaatattgaagctccagataggcagcgtgatgcaagcagaaatgtttcagaatatcaaccaccaggaagtctatacaacagtgatatgcagcagatttctgctgctaaaagatttcttttggagacagaagactctattgattcaccatcttataactatgtgcccagagaagaaggaaacaatggcactaatactctttcagttcatgactatagtcttcagagcagtctgaacccagattggaaaaaaacagcacctctaacacttcaaagcaatttgtatggctctgaaataccaagcttattgttggaccatggtcagtttgaatcattgtcctctggtgaaaatacaagattgatcttgggtcaaaacccccggtttagcatccgtgaggtctctccagaatggacatactgctatgagatcaccaaggtcatcattactggagatttcttatgtgatccatcaagctcatgttgggcagtaatgtttggtgatagtgaggtgccagctgaaattgttcaggcaggtgttcttcgctgccacacaccattacatagtagtgggaagctaacaatctgtgttacttctgggaatagagaaatttgcagtgaagtcaaagactttgagttccgtgcaaagtcaacagcttctagtttcctagacatttcaccatcatctagatctctgaaatctagcgaagagttgttacttcttgcgaaatttgtaagaatgctattgtgtgagaatggaagtcatgcaaattcaaacggtgatcctcagtctgtgcagtgtccaaaacttaagatgaatgacgagcactggcagcggttgatagatgaactcaaaggaggatgtgagaatccattaaacgtgtctgattggattatggaggagcttcttaaaagtaaattgcagcagtggttatcagttaagctacaaggatatgatggcatagcctgttctctgtccaagcatgagcagggtattatacacttgatctctgcactaggctatgagtgggctctgtcttcaattcttagtgctgatgttggtataaatttccgtgatacgaatggatggacagcacttcattgggctgcttattttggaagggaaaagatggttgctgcacttcttgctgctggggcgtctgctccagcagtcacagaccccactgcacaagatccagtgggaaaaacagcggctttcctggcttctgaacggggacacttgggccttgcagcctatctttcagaagtgtcactaactagttatcttgcgtcgctcactatacaagagagtgatacttcaaaaggatcagctgcagctgaagcagaaagagcagtagagagcatatcccagaggaatgcccagctgcatggtggtacagaagatgagctctcgttaaaggactctttggcagccgtgagaaatgcagctcaagcagcggctcgaattcagaacgctttccgtgccttctctttcaggaagagacaacaaaagactgctcgacttaaggatgagtatgggatgacccaagaagatatagatgaacttgcagctgcatcaaggtcatattaccaatctcttcttccaaatggtcagttttatgataaagcagctgtctcaattcagaagaaattcaaaggttggaaaggacgaagacattttctcaacatgcgcaggaatgcagttaaaatacagctgtattttacacaagcacaaggaccttaccttagcggcccattctttgtacaggctcatgtaagaggccatcaagtgagaaagaaatacaagactttcgtcagcactgtcagtgtgctagagaaagtgatactgaggtggcgtcggaaaggacatggtctacgtggcttccgagctgagcaaacagcaatggctgaagcagaagaggatgacgaggatgatgatgatgacgacttcaatgatgatgaagcggtcaaagtgttccgccgacagaaggttgatgaatctgtcaaggaggctatgtcaagagtactgtccatggtggactctcctgaagcaaggatgcaatatcgtcgaatgcttgaggaatttcgacaagccactgctgaatagggtgcatcagatgaagcggcatcaacactcgacaatgatttactaacaagaatcgacgacttcatgcactgaaacaatgcatcagacaaggggcgatcacggagctgtctacagttaattaggaaatagatagtctgcagctaatttatgacctgatagtgttccgtttgtacagtctttgcctgatggatctatctaatgttctgagtaaattattgttatttaggaacactttacatatgtaattcgaggggaaataatataatgttctgagtacattattgttgcttaaaaaaaaaaaaaaaaaaaagaaaaaaaaaaaaa

SEQ ID NO: 20888 - DNA, 816 bp, Oryza sativa
  unsure (1)..(816): unsure at all n locations
  Clone ID: TF_LIB4506-035-R1-K1-H9
ccacgcgtccggatggaagttccagatgttttgatcgtagttcacttgaaaggatttctcccagggactctctttctcttgccagcacaagtgcacgtatagatgaattggatgattgtgtcgagggattgtcattgcttcatctagcatgccgtgttgcagatgtgggtatggtcgaacttctcttgcaatatggtgccaacgtaaattctgcagactctagaggtcgaacgcctcttcatcacagcatcttgaaaggacgacatatgtttgcaaagttgttgctatccaggggcgctgattcacaagccacggaccgagatggtagaacagcattacagtatgctattgacagtggaactattgacgacgaagagattcttgttttgttagaagacccaagtagataatccattagctaccaataccccttcagttcagcagagcaaagctttgtgtgctcagttgcctccatgacagagtcaaccggcacagcaagctccaagtttgtgtcgccgatgatcacaatctgtgacgagaacagtattggtgttctggagctgcattgtgccctcctcgttttccgggtctcgtcttagcgtgacgaatgaccagaccccaatttccttctggttgcagtttgcaaagctcttttggtctttctttttcccctgtttgctgatgatgcactgtgagttntgtacattgcaattggccccaactccccaacatgaagntgctgcccttctgatgacagatgatgatgtacatatagtgatcccatgtaccactatgatttttcctgcaagctttact

SEQ ID NO: 20889 - DNA, 402 bp, Oryza sativa
  unsure (1)..(402): unsure at all n locations
  Clone ID: TF_jC-osflLIB3479017f08a1
gtcgtcgctgccgtcctcgcagaggacggacgaagaggagccgcagtagctgtggcaatcctcctcctgggtcgcctccatgggggcggcggagcgggctaaggcggatgcggctnctnctnanaaatnggagcctcctcgcctcgccctatcccaccaagcccacgtacgcgcacacgtacatacggcgatgcagaagtcgaagcagcctcagacagagccgtagacgaagatccagaaccggggcgtgcggaagctgccgtcgatgaggtacgccgccgagatccggaacccgactaagaagaccccgatctggctgggtaccttatactccgccgaggtggcagcccgcacctactacgactcctaccgatctctccgcgggcccacagagcggaccaa

SEQ ID NO: 20890 - DNA, 440 bp, Oryza sativa
  Clone ID: TF_uC-osflcyp004g06b1
ccgcaaggggatccgccagcgtacgtggggcaaatgggcagatcaaatccttggtcctcagcaagggtgtccgtgtttggctcgcaacatataacactgttgaggaggcagatactgcatatgacgctaaagcccgcaagaaccgtgtcatgaatgccaaggtcaactttcctgatgatccaaatgttgctcagaagctccacctgaagcagaacgctgtcatgcatgacaaactagcttcacctctgaagacctgtggcgatgatgctttctttcagctcaacagttcatacaatgatctgtctagcaatgcttgcaaaggcgcctgcaaagtcggcagagactgctgaactatgcccttagtcaaacctgttgctttcactgtgaaatttctgattaacatgctctttgattcatcagcaactcattcggttcttcag

SEQ ID NO: 20891 - DNA, 1181 bp, Oryza sativa
  Clone ID: TF_OsC172723_1
atgtctgagctggcttattcacccacacaggaggtgaaagtgaattccttgttttgcaatggcataacagaacggtcaagccgattctcaccctccatttggttagctcctgacatcacagagggctatcgcaaatgtcagcgtcaagtgttctggtattcttttctgaagctacacgtaactctagaagtatttcagcaagaagggtggaaagattcgttaccggttgattttccaaagcctagtgacaatgaaaattctgtggaagttgcacaccctaacataaagccattcagtgtgcacccgctgcccctgactaaaaattctgatgtacttctggaatcttcaaatgggtctgattctttaaaggaagagaaaaaccattactatccaggcaaggaaatcaagcgcagaaaacgacatagaagaaagcagtatgtggaccaagaaccatgcataatgagaggggtctacttcaaaaacatgaaatggcaagctgctataaaagttgacaagaaacaaatccacttaggtactgtcgggacacaggaggaagcagcccgactatatgatagggctgcttttatgtgtggaagggagccaaactttgaactttctgaggaagagaagaaagaactacagaattacacctggaaggacttcttggatatgactcgagacaccataaccagcaaaaaacaaaggaaagttggattaataaggcgcaataagacggactcgctggtaggacagagtgatggtgatactgagatgatcaatggtggcggctcatcgcactcggaagatggagatgctgagacctcagcatcttaattaagactgccaccagagttcatggacagccagattgggtctttcaacagattcgtttcaatgaagacataatttccatttaggtttttgttctctcaataattaatttcatgtgcataagggccctgatggtctgataaaggttaggctagagaaatcatgccatcccatataaagttggagatggtccattataggaacacatttctctgagcaaatgagcatcatgtatagaaacaccattcctgaactgtgtatatctttaccccaatttctctacatgtaactagattacacatttaataaagaatttatttttcctttcaaaaaaaaaaaaaaaaaaaaaa

SEQ ID NO: 20892 - DNA, 426 bp, Oryza sativa
  Clone ID: TF_uC-osflM202047f04b1
ctctctctctctctcctccaccttgtcgtagagaggaggcggccatggaagctgccgggatccatgcgcccaccaccaccacctcctccgactccggctcgtgcgtcaccaatggcacgcgagagaagcgcgagatctctaagcacaagcagctcaagcggaagaggagcacctctcctgctcctcctcccggctgcggcggcggccaaggacaggaagcggcggtggagactgacgctgacgctggcgccgccggcgaggaggagagcagcagtgtggctgccgctggcgccggcgagggcgagcgcaagaggggtgacgccggcaggcacccgtcgtaccgcggtgtgaggcggcggagctggggcaagtgggtgtcggagatccgcgagccgcgcaagaagtcgcgcatgtggctcggcacct

SEQ ID NO: 20893 - DNA, 3339 bp, Oryza sativa
  Clone ID: TF_OsC75926_1
aaccccggagggagatctatgagagaatctactgtaaaaaggcagggccataagtttacagtttacacagatctataataacagatgtgggggtaaggagaaaagagaaaggagaaaatggagcaaaaacagcagtgctcctgtagagaatggcatgtcaataaaaagaaccaaaactttacaccacttggaccaacccacttgcaagctcttccctctgcttaccagccagacacggtggcttgcaacagcagaagcgtgagcccgtctcaactctcaaccaggcatcctaaacaatatcatcaggtatatatgtagactgtagttatgtaccggcagtcttcagtagttcagttgctatgtgcctatgtatgagcagatccaattgcttccttttttttttttttttacacacaaaaatgcttaactgaaccaaacatagtactacatgggagtaatagtagtacacaaggaaggaaggaccaggcctaatacttgctgatccatccaacaacttatacaatccattatctaagataacactttatacaatcaaacaaaaactccttaagaccaagccaagaactagaagaaaatacagcaagcatcacaaactagtaagtaagctacaggaggttcttacttaaaaaccttaacaaccttcttaacctgaaaggctaatacgacttacttaaccacgcgaaatcaagatcgagcaagaagtatggatggattagtgcttactctaatatggcaactaatccaaccaagacaggggcgagaggaagagatcaacaagagatttttaagtatgaatgtcttcatacttagaactaatccaatcctcgtggtggtgttgctcctcgccgtgcggttgcaggtgcgggtggtggtggtgcttctgctgctcgcggtggtgggtcggcgcgaccatcatgccggtctggagcgcgtcgacatgggagccgacctcgatggccttcttccggatcgaggccgcggacagcgtgccgccgtcgggctcgcggggctcgcctgcgccgccaccctctgacggcgaagccagcaaggagatctcctcggggaagttgagccgcgccgaccggccgcgaaggtagaacaccgcagggtcgtcgtcgtcggagtggcggcgaggtggccagatccggcctgggcttgccggatctggcctcgggcagcgacggcggcggctcgccggcgaggtcagcggcgcccggcctcctccgcctccgctctctccctccagccatcgccgacgaagctcatcatcatcgtcgccgaccgccctctcttcgcccgcatcgccgccaccttcgtcctcccgctctccctcctcttcctcatccacatcgccatctcccacaccctcttctcccacatcgactccgccctcgactctgccgcccccggcacctccgcccagcgccgcctcgaccacccgctcgccgacgactggctcgccctccttctcttcaaggccgccgagctcctcccgcttgatctgcccagccaaacgcttcattttatcatcgtatacgtaagggatcccctcgaacatcaacttactaccattgaccggcaccggcacaaattcccgacaaggctctcccatgacattgatcgaattgtgatagtggtagtatctgatcaggctttctgtcttatgggttgtcctcccgtagacattctgtgacatgtgtacgccggcagagtatgcgtttcgggcctggatcgcatatttgcgatctcgcctaactttggtaattgaattgcggaagacaagcttctcaaaaccccattcccttgagtaatccttgcttggatcctgcacgcagagcttgctggacatgggattctgctcgatggtgaactgcgagtatcccgagagcttgccgagcacctggtcgagcgtctgcccattgggcaggtaaatgtactcatcgacgtcgaagaagaaggtccaattggcggcgtgcctgtaccggtgcaggcagtcgttcaccaccaagaactggttgtagtagtagccgtcgtactccgcctgcgcccggatgtcctgcaccgtgagccggccggcgcggacccacggatccagcaccgccttcacctccgggctgatgccgccggcgtcgtggaagacgaagtgcgacctcggcccgaagaagtgcgcgtggtaggccacccactcccgcatgcggctggcgctgaggttgccgtacagcgacgagccgcagtagaggtagtcgtacgggaacggcgggctgaagcgggactcgtcgtacgagcccggggcctcctcgagcgccacgaagcgctcgtagcggcgggaggtggtggagtagtaggcgtggacgagcagcttgccgccggcgttgtcggcgttggggttggatgggaaggtgcagttgacgacgacgacggtgtagacgcggccgtacccccagtccgggagcatcttgtacgccttggtgcggacggggcgcggcgacgggttgccggcggtggggttgggcagccactcgcatttgaagtaggggttgctgaacacatgggtgggcttggacgctaatcccacgatggcgaacgtccgcggcccgccgcggtacgcgcccatctgaacgaacagcgccgccgcgctgccgtacggccggagctcacgcttgttggggtcctccacccgcgccggcctcgccgccctagccaaccgcgcggggactgcgctagcaacggcggccggcgcggtcttggccgtgtcggcggtggagttctccgaccggatgacgcctgcgctcgcggcggcggcggcgggcgtggcgatgagggaacatggcgaggccgagacagaggcggtggagcgcgccgcggtgagcaacgagccgtacggctggagctgccacaatgcgacgaacaccgtgaggaaggcgagcgagagcacgaacgacttgatgtcgacgcacgggacgaacactccgccgccgccgccgcccgcgtctttcctcgccccgttcttcatagctacctacaccccgccgcgcgccccctcgccgccggacgccgccccgcagcagcacgacgaaccgcgtggcgaggcagatcggcgggcagagaaggccaaggtatcacgcctcaagaggggcgaggagaatgtagacgccggtgatgcgagaggcggaaggggacgggagcggaaggtgatgaggcaggctgctggtgtcgcgcgtgaactgaaccctcaatccagcgatcgccccgtcccgggtccggcggcccgggcggccacacgagacgagcctcgtgccgattcctgcagcccgggga

SEQ ID NO: 20894 - DNA, 467 bp, Oryza sativa
  Clone ID: TF_uC-osroM202039a06b1
gtttccttcgcgtgagcggcagcaagtgttcagggcgggcttcttctcgatttagctttcttggtttcttgatctgtagcttattagcggccatgtgcggcggagcaatcatctccgggttcatcccgccgtcggccgctgcggcggcgaggaggaggaggacgacgacgacgtggtcgtggtggtccccccgccggcggcggcgaggttcgtcgtccgtgccgcggccaaggcggcgcccccaactgcagatgggatgttgactacaaagcttgtccaacatgatggacctactgctagatcagcaaagcacaagaggaagaatcagtacagggggatccgccagcgtccctggggcaaatgggcagctgaaatccgagaccccacaagggtggccgtgtttggcttggaacatataacactgctgaggaggcagctagggcatatgacgctgaagcccgcaagat

SEQ ID NO: 20895 - DNA, 289 bp, Oryza sativa
  Clone ID: TF_uC-osroM202016h11a1
ggtcaccggactcgggcgttggcgagggcggaggcgccggagccgccggcgtgggcaccggccagcacttacgtggcgtgaggaagcggccgcggggccgttacgcggaggagatccgcgacccggccaagaagagccgcgtgtggctcggaactgctccacacgggcgaagaggccgcgcgctcctacgacgccgtggcgcgcgagtaccgtggtgccaaggccaagaccaacttgccctaccctaacggcgcgcccgccgtccgtgtgaacagtggcagcagtaaca

SEQ ID NO: 20896 - DNA, 978 bp, Oryza sativa
  Clone ID: TF_OsC337824_1
atggaggatgaagtcgtgggcggtggtgggggtagccatggtgtcaagctggagtggaggaggccgacggctgctataggtcgggctagcgaccgagctcttggaggtggcaacaacaggaattcttccttgtcgtgccaacaggggagtagctgggcgcaggcggcggagcggcgcccgggcgagcgcaggcggtgggggaagcagcggcacgggcagtgcccggcgagggagctgttgcctgcagccgtggccgtggagctggaggtggggccaggcgtcatggaggtggacacggtggactcggagccccggcctactcccgcgccgcatcctccctctctccgcgtgctcgctgtcaacccccgccccatatcctccctcttcgctcgtgggctcgctgctggtgccagtgttgagagggggtcgccgcccgctggatgccggatgccacggctgctgctctggaccgccgccgtcgttggggagctggcgcgagcggccctcgagcggcgagacgcggaagtcggaggacggcatcggaggaaaaagagagagatgctatgggtgttggaggacgctgggtggcggaggcgggaggcacaaacggtggggtgcgaggagcttggccgcgccctgcttgaactgcagggcgccaccgaccaggactttgacgctgtcacggtacagcccagacatggcactgccgtgcctgggccaggccgtcgggcctcgggccatatggcctcgattccacgcggcgcgtggaaccgcacacgcttttggctcggctcctttggcagaactaactatgtggcgctcgcctattaccaggccgcgtaccggttccgcggcaacacggcgtggctcaacttgcccgacaacgccgcatcccgtgggttgcttcacgcctccgtggacgccaagctctaggctgtgccagaacatcatggccgccaagaacgccaagtcctccat

SEQ ID NO: 20897 - DNA, 1117 bp, Oryza sativa
  Clone ID: TF_OsC1517_1590
attgatttggtgagtacagcatgcctaaagaaaaaggaggtgcaaacaaaaagctcaaagcggaaaagaaattggcttgataagatgcacaagtccacagagaaaggaagtaagaagggaggtaagaaaaaggaaaaaggatcaaaggaacaaggaactataaagaagggagggaaaaaaaaggaaaaagaagcaacggtacaagacagtgcagcggtgcaaaatatttatcctaatacttctttgcccatggaagaattgtctgaaccatacatggccatcaataccttctctcagatattgacggggccaattacagatgatgttttggctgatttctagtagcatggacagttgctgcaatctgaaatataacagattgtttagggggatagcttttgcttttgtcgaagtgtaaagttcagggaattgcagaattgcatttctgaatagcagagcattttgtgcatctctgaacttgcaacattcagaattaccttttattcaattccaaacaatttacaacacaatgacaatcacaagttacagtcttgctagctctagcacaaatgtcacttcacaagcaagacaaccttcctctgttactcactgaaaatttcagacatagcacacgatgaataaaacacactggaaatttcagatatatcgactccaatcactgctatcctacagacatcattttcagatatgtcgactccaatccctgctatcgtacagacatcttctagcttaattggaatcacggctgtggcaaccctccagcgggtcctatccattctgagacgaggagcaactccattctgagacgtgctacaattgctgcgccgcctgacgaggccatgctgctgcagcagaagctgtaccatggcgtgcggggcagccgcagtggggcaagtgggtggcggagatccggctgccgcagaaccgggtgcgcgtctggctcggcacctacgactcagcgacggagcagcgctcggcgaggacggcgacggagcagcgctcggcgggatggcgcggcgctgctctcggcgaggacggcgccgctctaggtgacgacggcgacgggacggtcctccatccctgcagcccggggatc

SEQ ID NO: 20898 - DNA, 1230 bp, Oryza sativa
  Clone ID: TF_OsC331943_1
cctatccctatcctagatctgaccatagggaggcggccgccggtggcggtagctcgtccacggcggcttcagcagcctccaaggtcatcgttgatgacaatgactcctactccgacccggacgccaccgactccgactccgactcggactccgccgacgccggcgaccacgatatcagcagccgaagcagcaggaccaacgccgccgccgccagcccgggcggtgggcggtggacttccgggacagccagctcaaggtccggcaatggctcggcacgttcccctccgaggaggaggccagggccgcctacgacgccttcgaggtgcaggtaccgcgcctccctgtcccgcggcggcgccggcgcctcctcccccgccgtcgccatcgcgccgtcacctgcccgcgtcaagatccaactaccggcgccgcggccgtccccgtcgtccaaggaggcgccgccgccgtcgtcgtcagcttctgccgcgacgccgccgccgctgaatccgccgccgttcgtcgtcgatacattcctgggggaggatgaccacctcgccgccgacgaggatgaccgcttcggcttcggcctcgccgatcttgggcacctcccgctgccacgccgggagccgcgccgccgcctggcagacgcacgagttgtccagcgacatgaggcgccggcagcacgccgtgtcgtgggggtcctccctgctctcgtcgtcgtcgtccacgttgcgccggtgccggtggcgccgccgccgcccacgcccctcctcgtcgccgccgcctcctccctgctcctcgccgtcggcgtcgtagtagtagtcgccgtcgtcgtcatactcgtcgccgccgccgccaccgccgccccgagactggagcccgtgcctgcggctcccgccgccgtcattgatcggtcaggattgtcccaatccaacgcccgacgacgctcccacctccctcacccccttcctctctccgccctcccagagacccggactcatcctctctctcgcgttcatccaaaaaatcatgctgccccaccctcacaccaactgcacagcgacgcctcctcgcaacccctccgcccacgcatcgcgccgccgtcgatttctgcctcgagagcatcgttgcacgccgcgtgtcaccagatcggcgtcacagtcgccgacatcgatctcgctccactatcggagtcacaaacatcggcaatcaacccgaggctcagcggagtcg

SEQ ID NO: 20899 - DNA, 1335 bp, Oryza sativa
  Clone ID: TF_OsC9802_9
caaatccgatgaggagaagtaactgaaagggagaggtggaacctgagggaaacttctctctcagcatggggtccatattcccctcctcaccgctgctcctttcttcggcatggtcggcgatgtcgtagccgccggatccggctatctctatcgagtccagtcgctttttggcgaggcgctgccgcgaccgccgccggatcggggtcgtccatcgccgtcgcgagcgccgtgtggctctcacgtcgttgggggctgccgaagccgagcggggaagcacgtgcgcgatctccggttagttgaagaggacgggggtggcgcggcccttgatggcacggcggtggcaaacgtgcagagccagatgcgcgagttcttgcgcagctctcagatctccgacacccacttgccccaactccacatgctgctgctagatccaacgggcggcgagcttcgtcggtggagagcttttgcgccgactgctcgagcatccagcaaaatgtaaggtggaggtggtccggtggttgggtcacggatcggccagggtggcgagcctgggggaattggcaggcaggcaaaggagggaaagacgggccaaacattaaaaaaaaataaaggttgcaagtggaagaaaacaaactgtagaaggcaaatccggtgacttggagctgctaaggggctgtttggtttccagggacttattccaagtccatgtcacatcggatatttggacactaatttggagtattaaacatacattaattacaaaacctattccataagcttggactaattcgcgagacgaatcttttgagtctaattatgtcatgattttgacaatgtgatgctacagtaaacttttgataattatggattaattaggcttaaaaaaatcgtctcgcggattagctctcatttatgaaattagtttttttattagtctatgtttaatactctaaattagcgttcaaacatctgatgtgacttgggctaaaaagttttagccccatctaaacaccccctaagcaaatccggcgacttttgctatctcgctgttctgattgccagcaaatttgatgatttggagctgctaagcaaatccggcgacttctgctatctcgctgttctgattgccagcaaatttgatgattgccactggttgcatgttgtttgctattgacttgatttgttgttggctgtgggatgtgaatccgatcgtcaaagcagtcggtttcggtgacagtcatagcagtcggtttcggtgaataatagcagtagtttggaaaagttttggctataggaatctttgcatgtcaatccgtgccctaccctgtttcagtg

SEQ ID NO: 20900 - DNA, 1014 bp, Oryza sativa
  Clone ID: TF_OsC778_1
ggctgcaggaattcggcacgaggctcagcatcgccggcgaagtgaaccagagagagtcatccatggaggtggaggaggcggcgtacaggacggtgtggtcggagccgccgaagaggccggcgggaaggaccaagttcagggagacgaggcacccggtgtaccgcggcgtgcggcggcgcggggggcggccgggcgcggcggggaggtgggtgtgcgaggtgcgggtgcccggggcgcgcggctccaggctgtggctcggcacgttcgccaccgccgaggcggcggcgcgcgcgcacgacgccgccgcgctggcgctccgcggcagggccgcctgcctcaacttcgccgactccgcgtggcggatgccgcccgtccccgcgtccgccgcgctcgccggcgcgaggggggtcagggacgccgtcgccgtggccgtcgaggcgttccagcgccagtcggccgcgccgtcgtctccggcggagaccttcgccaacgatggcgacgaagaagaagacaacaaggacgtgttgccggtggcggcggcggaggtgttcgacgcgggggcgttcgagctcgacgacgggttcaggttcggcgggatggacgccgggtcgtactacgcgagcttggcgcaggggctgctcgtcgagccgccggccgccggagcgtggtgggaggacggcgagctcgccggctccgacatgccgctctggagctactaatcaaaatctcgcactgaaaagtgtggacaaattttgattctccagaaattgggggaaaaaagagaacagagtattggtgaatttagaacagagtaggcaatgagactgaggatgaatggcaatttttgtaattttggaatgtgccagatttctccctccttttgtgattccatctgattttgaatgtgcagtcaatgaattcctgtaaatttacttctcctctccaaagagctattttggtcaagttcttcaatgattttatggattttggatttacgttaaaaaaaaaaaaaaa

SEQ ID NO: 20901 - DNA, 277 bp, Oryza sativa
  Clone ID: TF_uC-osrocyp021d02b1
tttcttgtgggcggacgcgtgggttgtgcaccatggccattgtcggatttgatgggcctgctgcaaagcttgccaaaagaaagagaaagaaccaatttaggggcattcgccagcgcccttggggtaagtgggctgcagaaatcagagatcctcgcatgggtgttcgcgtctggcttggctctttcaacagtgctgtagaagctgtaagagcttatgatgctgaagcactcaagatttgtggtaagaaggccaaggtgaattttacagaagcttcaac

SEQ ID NO: 20902 - DNA, 812 bp, Oryza sativa
  Clone ID: TF_OsC18518_1
gaaaagcttggtacggcctgcaaggtaccgggtcccggaaatttcccgggttcgaccccacggcacgagggcaaagccgacgcgagagcgagcggccaccgcgcgctagtagtagtagcgagccactatagatttggctcccgtataaagggtcgctgagacttgcttgtcgctggcagtggcagctgccgatccgtccgtcaaggcacagcgcaagcacaggctctcgctcgtggaggcgaatggagctggacatgggagcgggaggaggcggtggagtagtgggaggtgggcgagcggaggcgcactaccgcggggtgaggaagcggccgtggggccggtacgcggcggagatccgggacccgtggaagaagacgcgggtgtggctcggcacctacgacacgcccgtcgaggccgcgctcgcctacgaccgcgccgccgtcgcgctccgcggcgtcaaggcgcggaccaacttcggcagcggcagcagcggtggtggtggcgtcggcgggcacggccatggccacagccacgcccagctgccgcagcttcaccaccgcatgcacccgccgcggccgccgcagggccctggtcacttcggcgggctcgacatcagccacccttcgccgtggcactatgtctacttcccggcgagggtgcaggcgatggcgccggcggcggctggccatgtcgcggcgcacgtcgccgcgtcgctgccgtcgacgacgctggagctccggacggggccgagcgccggcgagctcccgttcgacctcaacgagccgccgccggcgctgctgttcggctcgtga

SEQ ID NO: 20903 - DNA, 2168 bp, Oryza sativa
  Clone ID: TF_OsC917_1
agctgctgctgctgcttcttcttcttctatctgctactagtagctcgcagaaaaatactcgcctcgatcgacaagctctcgttgttaccttaccatggacatggacacctcgcaccactatccatggctcaacttctccctcgcccaccactgtgaaatggaggaggaggagaggggcgcggcggccgagctggccgcgatagccggggcggctccgccgccgaaactggaggacttcctcggcggcggctgcaacgggggatcaagcggtggcgcttgcccgccggtccagacgacggcgccgacggccgccgagctgtacgagtcggagctcaagtttctcgccgccggcttccagctgagcggcgcggctggggcggcgccgccggtgcccgcgctgttgccggcggctgctctagagcagaccgacgagacgaagcagctggccttgccgccgcaggccgcggtggcgccgccgccggagcagaagaaggcggtggactcgttcgggcagagaacgtctatctaccgcggcgtcacacggcatcggtggaccggaaggtacgaggcgcatctgtgggataacagctgccggcgtgagggccagagccgcaagggacgccaaggtggctatgataaggaggagaaagcggcgagggcgtatgatcttgccgcgttgaagtactggggtcctagcaccacaaccaactttccggttgccgagtacgaaaaggagcttgaggagatgaagcatatgacacgccaggagtttgtagcttcacttaggaggaagagcagtggattctctcgtggtgcttctatatacaggggtgttacaagacatcaccagcatgggcgatggcaagcaaggatcggaagagtggctggcaacaaggatctctacctcggaacattcggcactgaggaggaagctgcagaagcttatggacatccgcggcgatcaagttccggtgcgcctgaatgctgtcaccaactttgagatcggccggtataacgtggagagcataatcagtagcaaccttccaatcgggagcatggccggcaaccggagcaccaaggccggcctagagctcgctccgtcgagctccgccgacgccatcgccgccaccgaagcgaaccacaccggcgtcgcgccaccgtcgacgcttgcgttcacagctcttccaatgaagtatgatcaggcagattacctgtcatacctcgcattgcagcatcaccagcaaggaaaccttcaggggctaggcttcggtctctacagctcaggtgtaaacctggatttcgcaaatgccaatggcaatggagccatgtcaaattgctacaccaatgtctcattacatgagcagcagcagcaacatcagcaccagcatcagcaggagcagcagcaagatcaacaggatgatcagtcacaaagctccaacaacagctgcggctccattccgtttgcaacacccatagctttcagtgggtcatatgaaagctccatgacagcagcaggcacctttggatactacccaaatgttgcagcctttcagacaccaatctttgggatggaatgatttggggaggtggcactttgcaggcaaaaaggatgaagagcctgatccctgatcagaggtgatgaggatcaagactgacatagttcattctcacacaacaacaacaacaacaaacataaagagcaggggaaaagagaggtaatgtagtagtagtggtatgatgataaagtatgatgcaaacatagtaggaagcagtatgcaggagagagatactgacaggtcagagacaggaggagaagactctgctaacaaaacgatgcagcgcaagcatattgttttattttactgcccttttacccttttgtagctttgttttcttgtgcttttgtcatcgctgagctttgtttgccgctcagcttcttttgagcttttctttctactgacatgattctgcaagtgccatgatagcttagcccatgtacaatggaagcagggacgtctctttgtagcttttgcttcttttcttttgttagatcgcctttggtagcggcccctgtttactcaagaagttgctctccctccacaagtatacaatgaaatgtactgcaggaactaaacaatataagtttttgtaaaaaaaaaaaaaaaaaa

SEQ ID NO: 20904 - DNA, 1140 bp, Oryza sativa; identical to SEQ ID NO: 11133
  Clone ID: TF_OsC302166_1

SEQ ID NO: 20905 - DNA, 914 bp, Oryza sativa
  Clone ID: TF_OsC319797_1
gcacgaggagtttttacaggcccctttcatccaggctctgcaagaaccacccctgttcttcgctttttttgaagaaacagggcttaatcaatcaattattttagttcagattctgcacaaaacaaaacttttttttcttttagttcttggtagcctttagtgttgttgctaatggcggccatagatttgtacaagtatcagctgagctcctcgtcctcgtcttcttcctcggatcaggagctcatgaaagcgctcgaaccttttatcaggagcgcttcacccacctccacctccacctccacctccacctccacgccattgttctactcctctagctccatctccaccaccaccaccactcccttctcctactcgtctccattgccgcaagaatcgtactacctccctgcttcttcgtcctacgccgccattgttccacctccgacgacgacgacgaacaccaccacctccttctcggagctccctcccctgcctccctcctcctcgtcgttcgcctcgccggcgaatgctgcggcggtggggctggctcaccttggcccggagcagatccagcagattcaggtgcagttcttgatgcagcagcagctgcagcagcgggggatggcggcgtcggcgtcggcgtcggcggcggcgtcgtaccttggcccgcgggcgcagcccatgaagcaggccggggcggcggcggcggcggcggccggcggcaagatgtaccgcggcgtgcggcagcggcactgggggaagtgggtggcggagatccggctgccgaagaaccggacgcggctgtggctgggcacgttcgacaccgccgaggacgcggcgctcgcctacgacaaggaggcgctccgccttcggggagactacgtgctccttacttccgcactcttcgccttggg

SEQ ID NO: 20906 - DNA, 2052 bp, Oryza sativa
  Clone ID: TF_OsC48348_2
ttacccatacccatgcccatttacccatcgggcatagcttttgaaccaataagatacccatgggtataaaatggagaacaaacccaaccctaatagggtttttacccgcgggtaaacgggcaaacgggcacaattgccatccctagtgtttgctctggaagcaacttggtagctggcaccaaactgcttccatgcccagcttggaacagctaccccctctgatggcttcctcttctgatccgatgatctggatgcatcctcattatttgggaataggggatgaggttgggcagtccagattggcggatgctcggtcagaagagggaaccgatgagggcggctagcaagttcagagggagcttcaaatgatccatggtggatttgcaggccaagggagccgctatccctcttggggctctgctgtgaggctgcaggctgagatattctcaggttcagatccacatcggctccttgagcagcagcatcagtaggcagctcaccatcatatgtgctgggctcgaagttggtgacggcttctctgccattgcatttgatcgcagccttatcataagccttcttgccaaggaattggcccatgcgagcctcccagcggccgcacttgtggagggtgacacccctgtactttgagctgccgcgggagaagccggtgctctgtcgccggagaacgtgcacgaactcctccttggacaagctcttcatctgcctcatgtcctcctcgtagtcgctcaggttgaagttgatgtcagcctctactcccctgaacttgatcgccgccctgtcgtacgcccttgcagctgcgtgagcagtgtcgaatccacctgtgattgtttgggagaagatgaaggtgtttgttagattgttcatggcgatgtcgcgttggattgagaggaggaagatgatgtgttcgatgaaattacctaggtagacttgcttgccgcaatcccagatgtgggattcccagcggccggtgcggcggtagaaggtgacgccgcggtattgcgagctgcgagagcgcggcccgcggcggcttttcttggccgcctgaggctgcggctgcggcggcggcggcggtggcgccgggggaggcgcgtgggcgaggattctgatgtctgggtgtgggcgcggtgggtcggggcggaggaagccgagctccgcccaatgctgcggcgagggagcggcggaagggaatagctcccgggtgacgagcagctgctggtgttggtggtgcggcggcggcgagggggtggcctcctcctcctcgtcgtcgtcggcgtcgttctcgcccgacgccgacgccgagctcctcaggatgctgaactcgagcaccgccgcgggaggcggcggcggcgacggcggcgtcgagctcgacccctcttccgccggcgcgatggccgcgccagacgcctccccgttgagcaccgacgactccgacgtgccggagtcgctcctcgccgccgtctcatgcttctccaccaccccttccgccacgttgttcagatccaactccattcacagaagcagggcaagccaatcgagtcgtaacaccctttccgatcgattcgaacccctttgcctggccactcaaccaaacccaaaaccaaaacaaaaaaccaaaaatctccgccgagttcacaagctagagcaaaccgcaaccaatctcaacgacggattgagcagctggctcccgctcgggctggaaattggcgcggcgtggagtctatttcaagaagaagaaccagaggaggaagaggtagaagcaggagagggccgactcgttctggcggtacatttagccgggcacctcagccacagtccttagagaacatccctaccctacccactcccccccgtcgccggagacgaatccacgacgatgcttaccaccgtacgtacgtcgccgcgctcacgaatcaacgaaaaatgaagggaacagaacaacaattcaccaccacaccacaccacggggaagaagaagaagaagaagcagaggtgggtgaggtgaggtggtggtggtggtctccggcgccggcg

SEQ ID NO: 20907 - DNA, 1429 bp, Oryza sativa
  Clone ID: TF_OsC120_1
gcccgggaacgcgctctctctctctcctccaccttgtcgtagagaggaggcggccatggaagctgccgcgatccatgcgcccaccaccaccacctcctccgactccggctcgtgcgtcaccaatggcacgcgagagaagcgcgagatctctaagcacaagcagctcaagcggaagaggagcacctctcctgctcctcctcccggctgcggcggcggccaaggacaggaagcggcggtggagactgacgctgacgctggcgccgccggccgtggtggcggcgccggcgaggaggagagcagcagctgcggtggcgctggcgccggcgagggcgagcgcaagaggggtgacgccggcaggcacccgtcgtaccgcggcgtgaggcggcggagctggggcaagtgggtgtcggagatccgcgagccgcgcaagaagtcgcgcatctggctcggcaccttcccgacggcggagatggccgcgcgcgcgcacgacgtggccgcgctcgccatcaagggccgcgccgcgcacctcaacttcccgagcctcgcccacacgctcccgcgcccggcctccacctcaccctccgacatccaggccgccgccgccctcgccgcagctgcagccgccaccgaccaatgcgagtcctcctcctctgccgtcgccgccgccaccgccaccgacgccgaggcggcggagtccacctcgtcggccgcggccagcccgtgcgccgccaccagcagcgtcgaggagaacgcgctgttcgacctgcccgaccttctcctcgacctgagcgacgggctctggtgctcacccgtctggacgacagcgccggccgatcagtacgacgccggcgacgacggcgacgacgccgcggcgccgctcctgtgggccgagcagtgctggatggacgccccagcggcgcccgtgcagcctgactaattaagccaatccacctgctccgactcgccggccggccattgcaccggttgggttggtcgcagcagtcaacctatcgacaccatgggcgtctttttcttttctctctgtttttttttcttttttggaggtgccttgcttcgtgtgcagtgaaacggcgccacgccgcgtttgcggtgggcgatcaggcgatgtgatttaattaattacggaggggaagtcgttttagcgcgaggtgaaacagcggattgcatcgatcggcggcaagaactgcctagacatttcattgatcaaattactaattactccccttcgtggttgtgtgtaaatcaattcggcaaacattttgggagagcctcgtgtaatttcgtctttttcttcttcttcttttttatttttacagtagtagcgtgcattgtaaattttagagatgtgctatatatgcctatggcctaaaaagtattcagagacgtgctatataaaaaaaaaaaaaaa

SEQ ID NO: 20908 - DNA, 1142 bp, Oryza sativa
  Clone ID: TF_OsC251239_1
gcacgagggcgcgaacacctccaaactcccgagtcccctctcctctctcgtcttcctctccacgacgacctctccgcttcaattctgcgccgccgcctcagagcgccatggacttcagcggcgacatcgatgacctgatctccctccagctcctccacgatcagctgctcggggtcgaggccgacgcgtgcctcccggtggcagttcatcacgatggcgtcgccgcgttcgccgagcatcagcagggtttccatcccgcggcgttcttgccgcagcagccgatgacgatgacaccggctgggtacgtggacatggcgaatgatcagtatttgggtgcgcatgccgccgctggcgaggcggaggcggtctaccgggcggcggcggcggagccggtgatgatacggttcggcggcgaggtgtccccggtgtcggacccccggaggccgcccctgacgatctcgctgcctccgacgtcgcacgcgtgggcggcggcggaggcggtgcacccggccgctctgctgcaggcgcagaccgcggccgcggccgccgacccgaacgacttccggaagtaccgcggcgtgcggcagcggccgtggggcaagttcgcggcggagatccgcgaccccaagaagcggggctcgcgcgtgtggctcggcacgtacgacacggccatcgaggcggcgcgcgcgtacgaccgcgccgccttccgcatgcgcggcgccaaggccatcctcaacttccccaacgaggtcggctcccgcggcgccgacttcctggcaccgccgccgccgcccccgccgccgacgacgtcgacccacggcaaacggaagcggcacgagacggcggcggccgacccggacgtcgaggtgatcggagaatcatccaaatccgtcaagaccgagacgtacacatcgccggcgtcgtcgtcgctggcctcaacgacaacctcaacggtgacatcatcatccacgtcgccttccccctcgtcggaggcagctgcctgcggcggcggcggcggcgagctgttcgtcccaccgatgccgtcgagctggtcgtgggatcagttggaggggttcttcggcatcctctcgccgctctcgccgcacccgcaaatgggattcccggaggtcgccgtaaactaa

SEQ ID NO: 20909 - DNA, 807 bp, Oryza sativa
  Clone ID: TF_OsC2721_1
gttcgaaattcatcgagaatgtgaactctgaacagaagaatccccacaaacgtgcagtcattttcaatgacaacggggaacatacaatctggaatgataggttatattgagcagaacataaatattgagttgctcaggtgttgtacagatctaccctactcaacctataatacatgctcaaaatctttcttgctgagacgaatttgctagtcaatcgaaaattgagctgtaatttgtagattataacgcagagatattaacaagctgcaaccagttgtatctgtatgtaccactaagctccaaatatgactgaaacaaccctaatatgcgatgcggctccaccaagtcaagttttcattctggcttagacgcaagcagcttcaagcctgccccttctatacagtgcatacccttctccatgtagttgcttcgatcaaagttggtcaccgcatttttgccacggatctcaatagcagcaatgtcgtaagcctccgctgcttcttcctcagttttgaaagttcccaggtaaatgtctcttgttccagcaaccagtcctatgcgtgcctgccacctcccatctttctgccttctagtaactcctctataaatagaagcccctcttgagaagcagctacttcttcttcttaggtatgttacgcattcctctcgagacatgtcccttatgtcctccagttccctttcgtattctgaaaccgagaaattcagctttgtattttggccccagtatttaagagctgcaacatcatatgacctggcagcttttcctcggtatcataacttcctaaa

SEQ ID NO: 20910 - DNA, 1419 bp, Oryza sativa
  Clone ID: TF_OsC156_1
actcgccgcgcaccgcgggttcccccgacgggcccaagttcacaacccaacacccaaaagcaaaagaaaagcagcaaccaaagatgtgcggcggagcgatccttgcggagctcataccgagcgcgccggcggcgaggcgcgtcacggcgggccacgtctggccgggcgacgccaacaaggccaagaagaagggcgcgcgcgccgacgacttcgaggccgcgttccgcgacttcgacaacgactccgatgacgaggagatgatggtggaggaggcggaggaggaggaggcgacctccgagcacaagccgttcgtcttccgcgccaagaaggcggcggcggcggcgtcgagcaggcgcaggaagccggcgcagtacaggggcgtgcggcgccggccgtgggggaagtgggcggcggagatccgcgaccccgtcaagggcatccgcgtctggctcggcaccttcaccaacgccgaggccgccgcgctcgcctacgacgacgccgcgcgcgccatccgcggggacagggccaagctcaacttcccttccgctaccacccctgacacccgcaagcgcggccgcgccaccgccgccgccgccccggccgtcaaggcgaccccggtcatcaacctcgtcgaggaggaggacgaggaggaggtcgccgccgccatggcgtccatcaagtacgagcccgagaccagcgagagctccgagtcgaacgccctcccggacttctcctggcagggcatgtcggcctccgacgagttcgccgtcgccgcggcggcgctgtcgctcgacagcgacgacgacctcgccaagaagcgtccgaggaccgagccggaggacaccaccgactccggctccggcgacgacaccgacgcgctgttcgacgcgctgctgttcgccgaccagtacaaccacttcaacggcggcgcctacgagtccctggacagcctgttcagcgccgacgccgtgcagaccaccgccgccgccgccgccgccgaccagggcatggggctctggagcttcgacgacggctgctgcctcgtcgacgtcgaggccagcttgtccttctaggctctagccgtcgtctccggcgaccctgtgactcgatcttgtaccatgtcatgtacatagaagagtggttttgccaagcaagcatgtgttcgtcctggttcctttcggtaatgaaaaattatgtgaggcttctcgttctcgtaaaagatctttttggctgtgcctttgatgcaaaaaaaaaaaaaaaaaaaacgcggcccgggccccggtacccaattcgccctatagtgagtcgtattacaattcactggccgtcgttttacaacgtcgtgactgggaaaaccctggcgttacccaacttaatcgccttgcagcacatccccctttcgccagctggcgtaatagc

SEQ ID NO: 20911 - DNA, 3398 bp, Oryza sativa
  Clone ID: TF_OsC21519_1
cacgcgtccgcccgctgccgctgccactgcacacgcacgcagcgagtcgcgacacgagaccgtaccgtggaaagaagagagcgaggcgaggacaccactccgctccgctccaccgccgggtcgccgcgccgcgcgcggcccgagctcgccgatcgagagccatgagcctcatcctttcccggcggcgcctcgccgccgccgtccggcggtcaggccccgccgcgctcgcctccaggtggatgcacacgccgccattcgcgacggtgtctcctcaggaaatttcaggttcgagcccggcggaagtgcagaattttgtgcagggcagttggacaacatctggtaactggaattggctagttgatcctttaaatggtgaaaaatttatcaaagttgctgaggttcaggaagcagaaataaagccatttgtagagagtttatctaattgcccaaagcatggacttcacaacccacttaaagctccagagaggtatctcatgtatggagatatatctgccaaagctgcaaacatgcttggtcaacctgtggtttcagatttctttgctaaacttatccagagggtatctccaaagagctatcagcaagctcttgcagaagttcaagtctctcaaaaattcttggagaacttttgtggagatcaggtacgctttctggctcgatcatttgctgtacctggcaaccatcttggacaaagcagtaatggttaccgttggccatatggtccggttgcaattatcacaccgttcaatttcccattggagattccattactgcaactaatgggagcactgtatatgggaaataaacctgtcctcaaagttgacagcaaagttagcattgtgatggaccagatgcttaggttgcttcacgcatgtgggatgccagcagaggatgtggacttcataaattctgatggtatcacgatgaacaagctgctgttagaggcaaatccgaaaatgaccctcttcactgggagctcacggatagcagagaaattggctgctgatttgaaaggcaaaatcaaattggaagatgctggttttgactggaaaattcttggtccagatgttcaagaggttgattacattgcatgggtttgcgaccaggatgcttatgcttgcagtggtcagaagtgctctgctcagtctattctattcatgcacaagaattggtcgtctagtgggcttcttgataaaatgaaaagtctttctgaaagaaggaagcttgaagacttgaccattggcccagtccttactgttacaacatcaagcatgatagagcacatgaaaaaccttctcaaaataccaggatcaaaggtcctgtttggtggtgaacctctggagaaccattctatcccagaaatatatggtgccttcaaaccaactgctgtatttgttcctctatcggaaatccttaaaagtggcaattttgagcttgtgacaagggagatctttggtcctttccaggtggttacagagtattctgatgatgagcttgaattagtattagaagcctgtgaaaggatgaacgctcatctgacggctgcagttgtttcaaacgaccctttattcctgcaggaagtacttgggcgatcagttaacgggacaacatatgccggcatccgagcaaggacaactggtgctccacagaaccactggtttgggcctgctggtgatccaagaggtgcagggatcggaactccagaagccattaaactcgtttggtcttgccacagggagatcatatatgacattggccccttgcctaagaaccgggcactaccttccgctacataaatactatgtcaaggctagattagcttgtagcatgttattctgaataatttgccccgtctgggcaatcatgtgtttcattaaccccgagagcataataaaaaggcaggaaatggttgtgaaaaaaaaactgaataaaaaaagatagctacatgctacattggaggccaagaaccaagttacatcatgatggtgaagaatgagattgaaaactactcaggatcatctccagcaatgatcatcaatgcgctggaaggcggcgccgaggcgggcccggttgtcaggaggagaaggagggagccgtctttgctcgcaccgatcaatggtgatggtgacaccaatggtggtggcattggcaagtcgtccttgtcaggcatcactgtcaagaggagctctaggtttcgtggagttagcagattcagagcttgtagagatgacaagaagatgttgtcatgtaggcatcggtggacaggtcgtttcgaagcacatttgtgggacaagaactcgtggaatcctacacagaggaagaagggcaagcaggtctatcttggagcatatgatgaggaggaggcagcagcaagggcttatgaccttgctgctctcaagtactggggaccaactacctatacaaattttccggtaatggactatgaaaaggagttgaagataatggagaatcttactaaggaagagtatcttgcatctctaaggaggaagagcagtggcttctcaagaggtgtgtccaagtacagaggggttgcgaggcatcatcaaaatggaagatgggaagcaagaattgggcgtgttttcggaaacaagtacctctacctaggaacctacagtgagtacaagaacagtgcttatactctattctacattgtgaattggtattccaatgcatccaaaacttcacatcttaacatcggcccatctgccattcttcctaaatctttttctccaggcactcaagaagaggctgcccgtgcctacgacatcgccgcgatcgagtacaaaggcgtaaacgccgtcacgaacttcgacctcagatcatacatcacatggctgaagccaacccctgctcatgttgccatgaaccctgcagaagctcttgcaatgcagatccctgtagatcacttcctcccaatggaaacccagatgatgatgctccctcagagcaatcctttcacctcatatcacaatgcacaatcactgggtggtggtgacggtggcagtagcagtactaataatcaagaagcctccatgataatctctcccagtggctcatctagaaagagatcatcatccactgctcttagccttcttctgaaatcgtcgatgttcaggcagctggttgagaagaattcagatgcaggtgaagaaaatggaggtgagatgagagagccgggtgcccatccaggagaaggatatgaataccacaacttcttccagggagatgctgctccggacatggacatgtgtgatctgctttcatcaggaaatgtgcatgctgcaagtggtagtgctggatttgaagaggacatcgcatgttatagtggttttggaagcatgcagtcgctgcagcaatag

SEQ ID NO: 20912 - DNA, 2101 bp, Oryza sativa
  unsure (1)..(2101): unsure at all n locations
  Clone ID: TF_OsC4061_1
gnaattgtatacgactcactatagggcggctcggggcccgggccccccctcgtgttgttttttttttttttttttttttttttaacaacgacgctaaataataataatagtagtagtagaggtaattcacattacaagttcttataacacgctaataatattacaagacataataataataataatgctactactactgtttacaacctgtaagatcagcagtagaaggtaataacagactttagaagagcaatggacgccacggccggagtaaccgaccagtgaccggccaccggagacgcacgccggacacaaaaacgccggctgccggtagcatcggcgtctccggttgaggaagaacaccaaccaaccctagcatctacagaggaaacaagtccggagagagatcgatctacgtacacaaacgaaccaaaccaaaaggattagggactataaaactgctaatccatgcccgtccgtgcggtgcagaatgtctaaaatcccatctgcacggcggcggcggcggcgacgattaggctaacgacggcgtgagtactagccaagaagtggtggtggtgttaattggcggcgaggagggagtcccagtcgatctcgtaggacgggtacttggtgagggcgaaggcggcggcctcgtcccacggcgcctcgctgaagtcgagctgctgcatctccggcacggtcgccggcgtctcggccgtggtggcggcggaggacggcgacagggagggcgacgagtcggcggactccaggcaggacgacgcgtcgtcggaggacggcgacgagcagttgctggtgggcgcggaggatgttgcggcggcggaggcggagacagaggacttcttggcgttcttggcggcggcgatgttctggcagagcgtctggagcttggcgtcgacggaggcgtggagcgggccgcgggaggcggcgttgtcggggaagttgagccgcgccgcgtcgccgcggaggcggtacgccgcctggtcgtaggcaagcgccgcctcctcggcggtgtcgaaggtgccgagccagagccgcgtgcggttccgcgggaggcggatctccgccacccacttcccccagtgccgctgccgcacgccgcggtacagcttctgcggccgcggcggcgtcgccgccgcccccgccgccgaagccgacgacgacgacgccttcatcggctgcgcgcgcgggccgagcgggccggcctgcgccgcctgccgctggaggtggaggcgggcctggatgtagtgcatctgggccgggctgagctctggctgctgggccagcccgccaccgtacgcgaacgcgtgcgggaaggagaatggcgaggtgggactaaactgggaacaaaccggaggcgagccggaggcatctcggataaaaggctcgagtgctctcatcagctcctcccctgacagatctatagctgcagccatctactcactcttttttttgggatttttttttctgatactaaaacagtagtaacaaagatttgcctggttccgaatccaaaatcaagaacaggcaggaaggagggagaaatcgacagccacagtaaaaaaacagatggctttttggtggtagatctagcaagtgaggtgtggaaaaagaacccctcttggctaccaacctaacactagaacacaaagaagatgaaagaaaaacagcagatctgggagccctggatctaaaaggccctgggtctctcgctctctgcaagcaacctaaccaagaaaccgtagaagaacaggtgggggagccagaggaggaagaagaagaagagggtttcgagaaaactttaccttgaagacgctcgaagtcgctcagatctaaagcttttcttacctcgctcgagctcacggtggctgtgggtgttcgtgggcttggagatggtggcggcggcggtgggaggatggctgtggatctgggtgtgtgtgtgggcgaaagtgggaatggtgggcggggaggtgtaagggacgccattggagctcttttatagcaaagctctccagctccagaggccatgaccggttaatcccatcccttaattagtaatttccctcgtcttatcgcccaggat

SEQ ID NO: 20913 - DNA, 1869 bp, Oryza sativa; identical to SEQ ID NO: 11154
  Clone ID: TF_OsC70902_1

SEQ ID NO: 20914 - DNA, 1029 bp, Oryza sativa; identical to SEQ ID NO: 11155
  Clone ID: TF_OsC338711_1

SEQ ID NO: 20915 - DNA, 881 bp, Oryza sativa
  Clone ID: TF_OsC19805_1
gcacgaggccctcttctccccgtgagccaatccgccccggctcagctcaacccagcagcgcagcagctcaagccttctcgcgttgcagcgccgcgccgaggaggtgtttgttgatttgtggagatggtggggggagaggtcatgtgcgaggcggcggcgccgaggtacaggggggtgaggaagcggccgtgggggaggttcgcggcggagatccgggacccggcgaagcgggcgcgcgtgtggctcggcacctacgactccgccgaggccgcggcgcgggcctacgacgtcgccgcgcggaacctccgcggcccgctcgccagaaccaacttcccgctcgtctcctccctcccgctcccgtcgccccactaccacctccccgggaaggcggcggcggcggcgccgccggtggccggccccgcgtgcagcgcgagctccaccgtcgagtcctcgagcgggcctcgcgggcccagaccggcggccacggcggcggcggtgccccggaggcgggtcccgcggcccgcgccaccggcgcccgacgccggctgccacagcgactgcgcctcgtcggcctccgtcgtggacgacgccgacgacgcctccaccgttcggtcccgcgtggcggcgttcgacctcaacctcccgccgccgctggaccgggaccacgtcgacctgtgcacggacctgcggctctgataggaatccacaccgaatcgaagcaaccggagaagacgattctactgctcgtcatcttttcccaattagatgcttgtattcgactcgacaatagtctgtaccactattctttacgcgataattgacaaggaatggccctcttgagtttcaaaatcaaaaaaaaaaacctcgtgcaaaaaaaaaaa

SEQ ID NO: 20916 - DNA, 915 bp, Oryza sativa
  Clone ID: TF_OsC143164_2
gcggagaacagtagtaaaggtttaagaatcctattaagaatggaacaagaaatgaagcaacgatcgagcaatgaaatgggtgacagatcatcgatcatggcatggaccagaagctgccgtcgtcgagcatcatgatctcccgtagagccgtcccagatctcctggtccttcgccgccgccgccgtcctcgcgtgctctggcgcgtgcaccggcgacgacgcgttcgagccgcagttctcacagaagttgtgatggaagagtggacgtggctgctgcgcggccgtggacgccgggaagttgagcttggcgcgctggccgcggaactcgagcgcggcgacgtcgtaagcgcgcgcggcgtcctcggcggtgtcgaacgtgccgagccacttgcagacagcgcggcgcgggtcgaggatctccgccgcccacttcccccacggcagacgccgcacgcccctgtacctgctcccctcgccgccgctccgcctccgcggcatcatcttgcccacgccgcccgtcacgccgccgatggccaccgcgcccgtggtgcactccccctcatcctcctcgtcgctgcagctcgagccagctgccgccgccaacaccaccacctcgcagtccacgccgatgcacccgtccaccccgcacctggcgcacgtagccgcaccggcaaccacggtcgccatcgtcggctccggcagcagcgtcggcaccgtggtgtcaccggacacgacggagatgagcgcgcgcatgaacagcgagtcctcccgctcgctgttggggagatggaacccgccgccgccgcgctccaccctaggcaccatggctgaaccaaacaaacctcggcgagttcggtcggtgtcacgcaaaagttggcgcgctatcgtgatccgggcgctgctgcggacgcgtggg

SEQ ID NO: 20917 - DNA, 1797 bp, Oryza sativa
  Clone ID: TF_OsC183204_1
atggcgaagagatcgtctcctgatcccgcatcatcttctccatctgcatcatcctcgccgtcgtctccttcctcctcttcctccgaggattcctcttcgcccatgtcgatgccctgcaagaggagggcgaggccgaggacggacaagagcaccggcaaggccaagaggcccaagaaggagagcaaggaggtggttgatccttcttccaatggcggtggcggcggcggcggcggcaagaggagttctatctacaggggagtcaccaggcatcggtggactggcagatttgaggcccatctgtgggacaagaattgctccacttcacttcagaacaagaagaaagggaggcaaggggcttatgatagtgaagaggcagctgctcgtgcatatgaccttgcagctcttaagtactggggtcctgagacagtgctcaatttcccactggaggaatatgagaaggagaggtcggagatggagggtgtgtcgagggaggagtacctggcctccctccgccgccggagcagcggtttctccaggggtgtctccaagtacagaggcgttgccaggcatcaccacaatgggcggtgggaggcacggatagggcgggtcctggggaacaagtacctctacctgggtactttcgatattttgtacaatctatcacaaaactacagatttaagaacttgttttacaaaaatacagattcagtggcttcgtttatcacaaaactacagctcagtgacacagaggccaagctacctgcagatactcaagaggaggcagccaaggcctatgatcttgctgcaattgaataccgaggtgccaatgcggtaaccaacttcgacatcagctgctacctggaccagccacagttactggcacagctgcaacaggaaccacagttactggcacaactgcaacaagagctacaggtggtgccagcattacatgaagagcctcaagatgatgaccgaagtgagaatgcagtccaagagctcagttccagtgaagcaaatacatcaagtgacaacaatgagccacttgcagccgatgacagcgctgaatgcatgaatgaaccccttccaattgttgatggcattgaagaaagcctctggagcccttgcttggattatgaattggatacaatgcctggggcttacttcagcaactcgatgaatttcagtgaatggttcaatgatgaggctttcgaaggcggcatggagtacctatttgaagggtgctccagtataactgaaggcggcaacagcatggataactcaggtgtgacagaatacaatttgtttgaggaatgcaatatgttggagaaggacatttcagattttttagacaaggacatttcagattttttagataaggacatttcaatttcagatagggagcgaatatctcctcaagcaaacaatatctcctgccctcaaaaaatgatcagtgtgtgcaactgattctctctgtgtgtgtgtttctgggtgttgaaaatcttgagatatacagggaagttttcaggtttttatcttggggtatatttctctgtccatggcactgccacaaagaagcaagcttctgtaggcgttctgttcaggtggggaagacttcatatgcttctccctatggtcctagtctcctagaaacccaaggcattcaacttggcatgagacaagtgtctgtgttccttttcttgtaatacccacaaggctgattgattaactagggagacattttctcccttaccctagattgagctagttaattctgattactcaaaaaaaaaaaaaaaa

SEQ ID NO: 20918 - DNA, 430 bp, Oryza sativa
  Clone ID: TF_uC-osflcyp034f01b1
aaaagtcaatccacgccaccatcgatctctctatccaatccaagcgcgcaaatcaatggcagagcatttcagccacgccggcatgtacatcggctacacggcagacgccgccgcgtcctcctcctcctcctcctcgtcttcgtcgtcttcctcctcggagatgcttcggttcgacacgggctggcccgacgagacacctgcgccatcctccgtggcggggaggaggaggagcgcgggcggtgatcatcgtcaaggtcggggacagacggaggcggcggcggcgttcatcggggtgcggaggcggccgtggggcaggttcgcggcggagatccgggactcgacgcggaacggcgcgcgggtgtggatcggcacgttcgacagcgccgaggccgccgcgatggcctacgaccaggccgcgctctcgcgcgtg

SEQ ID NO: 20919 - DNA, 1633 bp, Oryza sativa
  unsure (1)..(1633): unsure at all n locations
  Clone ID: TF_OsC1760_6
atctggagctttcatttgtcttaacactccaaaaaaaagtgaaaatctgaccataagcagagctggcattttattccactccacacaaaagagagagagagagagagagagcatancaattatacttcttttttgcatgctgtccctcgtagtagtattacaaatctcgtaatctttatttcctccttctagaactccctaccagctcagccattttatcttggaaaaaatataaaaaaaataaagaagggaaaaatctccattaatttctcctacagtatttagctgtataggaggagcaaagctggttgagctcaaaactgctagctccaactcgcgatcatcagtagctccagagtgtgacgtcgccgccgccgtagccgccggcgccaccatcgtcgtcgccgtccatctgccagctctggtactcgccgccgccgcccatcccgtcgtagtagtaggacggctggtcgaagtccatgttgccgtagtacgcgtagtcgtagctggacggcgtcgccgccatgtcgtcctggtactgcatcatcatggcgggcgcggcggcggcggaggcctcgacggcggcggcggagctggaggcggcggcggcggcggcgtcgtgcgggcatgactcggcgagctcgatggcggcgcggcggatgtcgtcgggggtggcgagggtggccgggtcgacgcggaggaggcgggccgagtcggcgaagttgaggcacgcgccgcggccgcggagggcgagcgcggcgacgtcgtgggcgcgcgcggcggcctcggcggtggcgaaggtgccgagccagatgcgggacttcttgttgggctccctgacctcgcacacccaccgccccgcgggcccccgccgccgcacgccgcggtacaccgggtgcctcgtctccctgaacttggtcctccccgccggccgcttcggcggcgccgacgtcaccgtcgcgtactcctcctgctcgtagtactccatgtcagtagtgtgtgttgctgctggtggggcggtggccggtgtgcccacgcgccgccgctcgtcgctcctccggacggcctctccatttccttttgtgtttgtttctgctgacggcggcagcggcagctcacaggtgtacaacgccactgacacgtgtccgtggtccaggtgagacgccgtcgccggtgaccaaaagagcggcggaagatcaacggacggcgacgacgacgaggaagaagcggcgacgctcttcgggttgacggcggcgacggtgctccggcgatcttcggcgacggcgaaggggcggacgaggacggagacgcgacggcgaccacgatgacgaccttcccgagcgacggcgacgactggaacggcggcggcgcacggctggagcgacggcggcgctaggtcccatgatgctagagcgtttccgacgacgagaggcgaaggcgagggtggcgacgggtagaggagagctcggggaactttcttgggagccagttgaagcagccctatagcaacaactatgtcgaggctcgatttgatgagagcgagacgcctctcgttgcacttctgcagtttcatctggtattgctcgttctttaacagctcctggtgtttaagctccttctctagtttcttcat

SEQ ID NO: 20920 - DNA, 904 bp, Oryza sativa
  Clone ID: TF_12581491
actgcttgagacgtcgcacacgtcatggagaagaacaccgccgccagcgggcaattgatgacctcctccgcggaggcgacgccgtcgtcgccgaagcggccggcggggcgaaccaagttccaggagacgaggcacctagtgttccgtggggtgcgatggcgtgggtgcgcggggcggtgggtgtgcaaggtgcgtgtcccgggcagccgcggtgaccgtttctggataggcacgtctgacaccgccgaggagaccgcgcgcacgcacgacgccgccatgctcgccttgtgcggggcctccgccagcctcaacttcgccgactctgcctggctgctccacgtcccgcgcgcccccgtcgtctccggactccggccaccagctgcccgatgtgcaacgcgctgcctgcaaggccatcgccgagttccagcgccgggccgggggagcaccgccactgccactgccacctccggcgatgctgcatcgaccgctcctccgtcggcacccgttctgtcagccaaacaatgcgaattcatctttctttcttcactagattgttggatgttaatgtcaaagcttatcagcagtagcagagcaaaaggatcgttgtgcctgcgaaaaaatcccatttcattttgcatggttacaaattcttacactgctcttttgctcgaatacattatattgcagatgaattcaatgatcgttttaatccacgaattatcaaaatatcaagtctttctgctactaaccatgataacacaccacctttttcaatggaggaggtaggcgcggacgccctcgccatcatcgtcgatgtcgccactgatgacgaggtccgcgccgctcaccagctcgcacgcctcgtcgtcgtccatgctcgccacctcggtccagcagctgaacc

SEQ ID NO: 20921 - DNA, 433 bp, Oryza sativa
  Clone ID: TF_uC-osrocyp005g12b1
tgttcgtgacatgaacggcctcaagctcgccggattcagcaccacgaagctgggcctcggcagcagcaggaagaggacgacgcgccgccgagggatccggcagcggccatgggggaaatgggcggcggcgatcacggaccccagcaagggcatgcgcgggtggctcggcacgttcggcaccggcgaggacggcgtcatggcgtacgacatgaaggcacgccggatccgccgcaagaaagccaaggtcaacttgcgcgacaccgtcgccgacggtcccaagcggccacggcgttcttcggcgaaacattcgccgcataagcagaaggccaggtcctcggcaccgtcgactgcgagcctgaacgccagcgatgccaagtccaagaccaacaacaaccgggtcagctcgggtgggagcaggaccgacactaccgac

SEQ ID NO: 20922 - DNA, 923 bp, Oryza sativa
  Clone ID: TF_OsC272545_1
ctgcaggaattcggcacgaggatacacaagaatgcccttcccgccttgcccgtaacatccgctggtaattacgaaattaccctcccgcctccgggattcccatggacgccagcctccgcacactgcctccggcgagcttccccggcgaggtccgctccgccgtctcctccctcctcctctctcccggcggcagcgccctcgacaccgtgttctcccacctcccgccgcccgtcaccatcccgcctctcggctccagcgtctactaccgccagagcgagctcctgcgccacttcgccgcgtcgcaggcggcgcaggcgcagagcgccaccgccgccgccagctcttcgtcggccgccgcggcgggtctcgacgatggcgcgccgcggaagctgtaccgcggcgtgcggcagcggcagtgggggaagtgggtggccgagatcaggctgccgcagaaccgggtgcgcgtgtggctcggcacctacgactcgccggagaccgccgcgcacgcctacgaccgcgccgcgttcaagctccgcggcgagtacgcgcgcctcaacttccccggcgtcatggacggccgcgactgccccgacaacctgcgccaactccgcgacgccgtcgacgccaagatccaggccatccgcgtccgcatggcgcgcaagcgcgcgcgcgcgcgccgccagcgcgaggagagcaagaagagccaacgcgccgaggacgcgaaggcggcgacgccgtctcgccccgtggcctccgagcgcgccgcgtccgagacgacgacgacgacaaccacgacgtcgtcgtcgtacgggtcaccggacggcgtgctctccatgagcgcggcgtccgtcgacggcgactgcccgctcgagcggatgccgtcgttcgatcccgagttgatctgggagatgcttaacttctag

SEQ ID NO: 20923 - DNA, 1830 bp, Oryza sativa
  Clone ID: TF_OsC44972_1
tttttacatcaaaatgacttataatatgaaacaaatggagtagctgacaatggaactagtaaaaaaaaagagcttgaactataaacgctggtgatacatgagtttctgtgctacagggctatgtcagggaaggaaaagaataatctgaaggatgcattgcattgcattcctgcatgcatcagcagccaaaacttttgatcagttccatgtcagtcctaggcctaccactcgtttcagctaatgaagctaatagagccagtaagtccacctactccatcccaaacaaatagttgtagaagtggggagccgtgctcgtgttactcgccacccatgtcccgttgctaccggtggagcccccgtagagtgctgatccagaagtcatagctgctgcagcagcataaggaatgttgttaccggagtagctgttgctctgcttgttgctgctgccgccgttttgctgcctccccatcgctgcgccggcggctgtgccccatatggcgctgctgctgctgctgttgctgttgctgccgctgtggctgctagtccccattgtgaagtccacgttcacgccggaggagcagccgtaggtgtcaaatgcagaagcaggaaactgctgctgctgctgctgctgctggtggtggtggtagtgcagggcaaggagggaccagtagtccttctccgacggtggcatggcaggcgacggcagcggcagcgatgggtcagaggggaacttagaggcgcgcgtggcggctccgccgccgaccggcaggtcgctgttgaggatgctgtcgacgtcgtagcggctcatgtcgaagttggtgacggcgttgagccccctgaacttgatagcggcaatgtcgtacgcctcggcagcctcctcctgcgtgctgaaagtgcccaagtacaggtccttgtttccggccaccctgccgatcctcgcttgccaccggccgtgctgatgatgtcttgttactcctctgtagatggaagcccctcttgagaagccgctgctcttcctgcgcagcgacgcgatgaactcctgccgcgtcatggacttcatctcctccagctccgtctcgtagttggcaacagggaagttcgtcgtggtggttggaccccagtactttagggcggcgaggtcgtaagctcttgcggccttctcctccttatcataacctccttggcggcctttgcggctttggccttcccggcggcagctattgtcccacaggtgcgcctcgtacctccccgtccaccggtgcctagtgacaccacggtagatggacgtccgttgcccgaacgtctcggcggtcctcctcgccggatcggccagctccgccgccgcgtcggtcgccattgcgatggtcaccccgccggcgttctcaggcgctgggtaccggcgcaagaacccggcggcgatgctaccaagctcgccgcagctgagctgatcctccggggcagctgccggagcggcggcgacggcgccgccgcctccgcctaggccgccgaggaaatcctccatcttcggagcgccctccgctggcccctcctctccaagtggaggtgcagatgtggtagagagggcctcaaggaggccatggtggtagttgttagcgagggagaaggagagccaatggtgaggataagccgagctcatgtccatgtccatggcgatagatatgatcgatgcgccgatcttgaagagcacttgaccagcgtttgtttgagcttatgagagggaaggataactataaagctattgctcgatgtagaccagtgttgtgctaaggagagaatgagagaatacccaagtgtgtgttatcctcgtgc

SEQ ID NO: 20924 - DNA, 936 bp, Oryza sativa
  Clone ID: TF_OsC2061_1
cactcgagcagagcaaatacagttcaggaatcaggagcaagcagaaacacacacacaaatccgaagatgtgcgggatcaagcaggagatgagcggcgagtcgtcggggtcgccgtgcagctcggcgtcggcggagcggcagcaccagacggtgtggacggcgccgccgaagaggccggcggggcggaccaagttcagggagacgaggcacccggtgttccgcggcgtgcggcggaggggcaatgccgggaggtgggtgtgcgaggtgcgggtgcccgggcggcgcggctgcaggctctggctcggcacgttcgacaccgccgagggcgcggcgcgcgcgcacgacgccgccatgctcgccatcaacgccggcggcggcggcggcgggggagcatgctgcctcaacttcgccgactccgcgtggctcctcgccgtgccgcgctcctaccgcaccctcgccgacgtccgccacgccgtcgccgaggccgtcgaggacttcttccggcgccgcctcgccgacgacgcgctgtccgccacgtcgtcgtcctcgacgacgccgtccaccccacgcaccgacgacgacgaggagtccgccgccaccgacggcgacgagtcctcctccccggccagcgacctggcgttcgaactggacgtcctgagtgacatgggctgggacctgtactacgcgagcttggcgcaggggatgctcatggagccaccatcggcggcgctcggcgacgacggtgacgccatcctcgccgacgtcccactctggagctactagagctcaatcaactgtacaattttgcctcttttttctctcttttctggcttccgatgccaaaattttggtactgtacggacactactttcggtaatgtgatggaacaagttgcaaacacagagcatcttcatttgagtcaaaaaaaaaaaaaaa

SEQ ID NO: 20925 - DNA, 1043 bp, Oryza sativa
  Clone ID: TF_OsC270762_1
atctgctggtctcgatctcctcttcccttccctatctatactctctctatctcgctgctgttgcataatcatatcgacttcttgcaagctaggttcgatgtgttgagacgcatactagcttaattagcagctggccggcagatattctcttggtacagcagccatagctaggggggagtaggtgcactgtagcttaatttgggggatataggtcatcccaaggtgtatatatgtcgatgggtgtgccctaatggtacatggctgacctgaccgagcatccgtcgccgactgctcctcctcaagtgcaaacagctggcctgccggcggcggcttctccgggtcctgcctcgcctcattcaccgtcggagcaaggggacaagacggcgcccggggcagccacggcgtcgacgatgacgacggcgagctcgggcgagccgtcgccacggtcctcggggaagcacgccttctaccggggcatccggtgcaggagcggcaaatgggtctcggagatccgcgagccgcgcaaggcgcgccgcatatggctcgggacgtacccgaccgccgagatggccgccgcggcctacgacgtggccgcgcgcgcgctccgcggggccgacgcggtgctcaatttcccgggcgccaccgcctcccgccctgtcccggcgtccgcatccccggccgacatacgcgccgcggcggccgcagcagccgcggccgccgcgcaccttgagcggccgcacggccccaccggcactgcctatcctgccaccgccgcagcggagcaccaccagcagcagcagcagcaacagtacggcagtggcagtccggccgccgacgacgtctcaggctacccgccgatggagggagggattggcaatgacgatttcatggacgaagaagccatcttcgagctgcctcagctgctgcgcaacatggcggctggcatgatgatgagcccgccgaggctgagccccaccacctccgacgtgtcgccggagccgtcggaggccggcgagagcctgtggagctaccgtgatccctag

SEQ ID NO: 20926 - DNA, 1099 bp, Oryza sativa
  Clone ID: TF_OsC75926_2
aaagggggaaggacggattaattaatcgctgcttatctagtcgataataacacggagaagagagagaggaaaaaaaaacagagaggatgacttgttttatcactgttacagctgtcttttttgacatttggaaagaccgccacttgtggcgtcctcctcccccgtctccaccgccctcctcccgacgctgcccttcccttgttcttatccaaaaccgcatcgaaaaatctcgccacgaagccgccgccgccgccgccgaggtggagatgaggggtggacgaataggtggtaggtggatggatgcagcgagcgtacgtggtggaggtgatcatacgctggctgcatgttgacgaagccgttgatcgatcttggccggcggaggcggttttgttggcttctactcggcgtcggagttctccgggcttggcgcctggttgagatccgggttcttggcgcggccgctccacgccgtccgctggtgcttctgctcgtggtggtggtgttgctcctcgccgtgcggctgcaggtgcgggtggtggtggtggtggtggtggtggtgcttctgccgctcgcggtggtgggtcgtcggcgcgaccatcatgccggtctggagcgcgtcgacgcgggagccgacctcgatggccttcttccggatcgaggccgcggacagcgtgccgccgtcgggctcgcggggctcgctcgcgccgccgccctcggacagcgacgccagcgaggagatctcctcggggaagttgagccgcgccgaccgcccgcggaggtagaacaccgccgtgtcgtaggcgcgcgccgccgccacgggcgtcgcgtacgaccccagccagatgcgcgtccgcttgtgcggctcccggatctccgccacccacttgccccacttccgcatccgcacgccacggtactgccgcctcggctgctgctgctgcagcggcagcaccgccgccgccgccgcctgctcctccttggcagcaaccgccgccgcagccgcggcgagaggagccatagccgcagccgccgccgccgcagcagcagcagcagaagcagccgagtcctcgctggaggagcggtggtactcgccctgcat

SEQ ID NO: 20927 - DNA, 741 bp, Oryza sativa
  Clone ID: TF_OsC313387_1
ctgcaggaattcggcacgaggctcctccgttcagttcagaggcgcctagcaatagcagctcattgcctcatctctgcctcccctgtccttctgggggcagagaatctctccactgctggaaaaatggtacagccaaagaagaagtttcgtggagtcaggcagcggcactggggctcctgggtctctgagatcagacaccccctccttaaaaggagggtgtggctgggcacctttgagacggccgaggaggctgcgcgagcctacgatgaggctgctgtgctgatgagtggccgcaacgccaagaccaacttccccgtgcagaggaactccaccggtgatctcgccacggccgcagaccaggacgcccgtagcaatggcggtagcaggaactcctccgcgggcaacctgtcacagattctcagtgctaagctccgcaagtgctgcaaggcgccatctccgtccttaacctgcctccgcctcgaccccgagaagtcccacattggcgtgtggcaaaagcgcgcaggggcccgtgctgactccaactgggtgatgacggtggagctcaacaaagaggtagaaccaactgaacctgcagctcagcccacatcaacagcaacagcttcgcaagtgacaatggatgatgaggaaaagattgcgctgcaaatgatcgaggagttgctgagcaggagcagtccagcttcaccctcacatggagagggagagggtagctttgtcatctga

SEQ ID NO: 20928 - DNA, 1757 bp, Oryza sativa
  unsure (1)..(1757): unsure at all n locations
  Clone ID: TF_OsC126_1
ccggccgggctctgtaaaaacaagcaaacaaagaaagaaaagcatcacaaatctcacgcactgtctctcgttcgcgcaaagcacgctgcttttctccgctttgcgagcaccatagcctagcccaccatgtgcggcggcgccatcctctccgacctcatcccgccgccgcggcgggtcaccgccggcgacctctggctggagaagaccaagaagcagcagcagcagaagaagaagaacaagggcgcgaggaggctgccactgcgccaagaggaggaggatgatttcgaggccgacttcgaggagttcgaggtggattccggcgagtgggaggtggagtccgacgccgacgaggccaagccgctcgccgcgccccggagcggcttcgctaaaggtggattgaaaaacactactgttgctggtgctgatgggcctgcagcaaggtctgctaaaaggaagagaaagaaccaattcaggggtatccgccagcggccatggggcaaatgggctgcggaaatcagagatcctcgcaaaggtgtccgcgtctggcttggcaccttcaactctcctgaggaagctgccagagcttatgatgctgaagcacgaaggattcgaggcaagaaggccaaggtcaatttcccagatggggctccagtggcttctcagaggagtcatgctgagccctcctccatgaacatgcctgctttcagcatcgaagagaagccggccgtcatgtcagcaggcaacaaaaccatgtacaacacaaatgcttatgcctaccctgctgttgagtacaccttacaggagccatttgtgcagattcagaatgtctcatttgttcctgcaatgaacgcgattgaggatactttcgtgaacctgtcctctgatcaagggagcaactcctttggttgctcggactttagccaggagaatgatatcaagacccctgacataacttccatgcttgcaccgaccatgacaggtgttgatgactccgcattcctccagaacaatgccagtgatgcaatggtacctcctgtgatggggaatgctagcattgatcttgctgacctggagccgtacatgaaatttctgatcgatggtggttcggatgagtcgattgacacccttctgagctctgatggatctcaggatgtggccagtagcatggacctttggagcttcgatgacatgcccgtgtcggccgagttctactgaggggtttggggtgtagcaactggtgcctgtatatataaggacaaatggaataaacattctggacatccaagaagcggcatgtgtctgtcgggcgcttctagttgcgctatatagctatgttagtatgttagtatgtgctgtgtctagcttagatgctgaagtctcaagtactatttggcagtgaaactatctatctgtaactgctatatgaggctggaacaagttacttagcttctaccttatctgtacttgctatagtggctgtgaaccttgtggatctgaactctgaagccaatgtttactatataatgtggttggttttataaaaaaaaaaaaaaatggacccctgtcaatggtcatgctatggctggggataagaacaattaatgatcatatttgactagaaaaaaaaaatccaaaatatcccataaagtaaaaaaaaaaaaaaaaaaaaaaaaaaaaaaaaaaaaaaaaatacctcgaggcccagctacgcgaccacttctgtacangtccnatgatgtctataagtagctcgcccc

SEQ ID NO: 20929 - DNA, 557 bp, Oryza sativa
  Clone ID: TF_OsC264665_1
cgggctgcaggaattcggcacgagggcgacgcgttctcactcgctcggacaagctcctccatctctcgatcgctcacgagcagcggtggacatggccggccacgaggtgaactccagctcgtcgtcgtcgggggcggagtcgtcgtcgtcctcgtcggggcggcagcagtacaagaagcggcccgcggggcgcaccaagttcagggagacgcggcacccggtgtaccgcggcgggcggcgccgcggcggggcggggcggtgggtgtgcgaggtgcgcgtcccggggaagcgcggcgcgcgcctgtggctcggcacgtacgtcaccgccgaggccgcggcgcgcgcgcacgacgccgccatgatcgcgctccgcggcggcgccggcggaggcggcgcggcgtgcctcaacttccaggactccgcgtggctgctcgccgtcccgcccgccgcgccgtccgacctggccggcgtccgccgcgcggccaccgaggccgtcgcgggcttcctccagcgcaacaagaccacgaacggcgcctccgtcgcggaggccatggacg

SEQ ID NO: 20930 - DNA, 822 bp, Oryza sativa
  Clone ID: TF_OsC101322_1
cggacgcgtgggcggacgcgacactgcaaaccactctctcggtctctccatccatccacctctctcgatcgtctcatgagctagcgcgccccgcgcgtacagccccgcatgtctctctccttggggtttagcgccggcgccggcgtcggtgccgatcgcctcgccgccgcgcccgcgctccaggccgccggtgctctgccgccacgcgtggacgtgtctctgtcgctggcgcgcgcggccaacgggcagccgtcgtcgtacctcccgctcaacgagaacgactcgctggacatggtcctcttcgacgtcctccgcgaggcctccgcggtggcggcgctgtcgtcgtcgtcgtcgtcgtcgccggagctgggcgcgcggacgacggcgccggtggtcgccggccaccccgccgggcgcaagggtggcggcggcggaggcggaggcaggggagcggcggcgaggggcggcgccgctggcgggcggcactaccgcggtgtgaggcggcggccgtgggggaagtacgccgcggagatccgtgacccgacgcggcacggcgcgcggctgtggctcggcaccttcggcacggccgaggaggccgccgcggcgtacgaccgcgccgcgttccgcatgcggggcgccaaggcgctgctcaacttcccgccggctgtcgccggtgacggcgcccgtcgcggcgccgccgcggccgcgaagcaggtcggcatgagcgacgtggtaccaagagcatgtcatgtagtttgttactctgtgcttagtgctcacattttttatgatatctttcgtggtgtgataccaattccgtga

SEQ ID NO: 20931 - DNA, 1473 bp, Oryza sativa; identical to SEQ ID NO: 11186
  Clone ID: TF_OsC399311_1

SEQ ID NO: 20932 - DNA, 1728 bp, Oryza sativa
  Clone ID: TF_OsC53745_1
aatccgcccccagcctcccccttctcctcctcctcccctttctctctacccgaggcgacccacgcgaagcgaacccccgcgcgagacgagagtagtaaaccctagaaacctagaggagatccccaccaccaccatgacggtggatcagaggacgacggcgaaggcgatcatgccgccggtggagatgccgcccgtccagcccggaaggaaatggcgagcccggggatctcgcggagaccctgcttcagtccaagagaccgtcaagcggtgggccgagctcaacaatcagcaggagcttgatccacagggtccaaagaaggcaaggcaggcacctgcaaagggttcaaagaagggctgcatgaaggggaaaggaggaccagagaatacacgttgtgacttccgtggtgtgaggcaacgtacctggggcaagtgggttgctgaaattcgggagccgaatcggcaaagtagactctggttggggaccttcccaactgccgaagctgcagcttgtgcttatgacgaggcagccagagcaatgtatggtccaatggctcgcactaattttggccagcatcatgcccctgctgcttccgttcaggtggttgcacaagcagctgtcaaatgtgctttacctggtggtggcttaacagcaagcaagtctagaacatccactcagggtgcatcagcagatgttcaagatgttttaactggtggcttatcagcatgcgagtccactacaacaacaattaataatcaatctgatgtcgtctctaccttacataagccagaagaggtttctgagatctctagtccacggggagctccaccagctgtcctggaagatggttctaatgaagacaaggctgaatcggttacctatgatgagaacattgtcagccagcagcgtgcccctcctgaagccgaggctagtaatggaagaggcgaggaggtctttgagcctctggaacctattgccagcctaccagaggaccaaggagattattgttttgatattgatgagatgctgagaatgatggaagctgaccctacgaacgagggtttgtggaaaggcgacaaagatggatcagacgccatcctggagcttggccaggatgaacctttctactacgaaggggttgatccaggcatgctggacaacttgctcaggtctgatgagccagcatggttattggcagatcctgcgatgttcatctccggtggcttcgaagatgactctcagttctttgagggcttgtgatttccccttggcggcagccggccatactaaaattttctggtgctttggtcggctagctcctgcacatcgccctcaggatcagcaagagaaacactggaccggattgggttcgttggtggaactggatgagcatctagtagctaaggaaaaaagatccttttatttagttctgtaggcaatggaactccttgagaactccgtttcagtgtttgttaatttgataacgcttgcttgtttgtgtgtgtatatcgatctcttttgaagccatgagaaaaaaaaaaaggactggagaaaatgtgtataaaaaaaaagcgttcttcagcctttcttagccttcatattttacctatgcacgtgggatgttacagttttagagcttgtgagccttctctaaaaccggggattaaaatgcgactaggcacgatatgttcaatctaaaccgaactccactagggtgtatcctcgtgcca

SEQ ID NO: 20933 - DNA, 1196 bp, Oryza sativa
  Clone ID: TF_OsC77854_1
tttttttttttttttgtttgttttttttttttttttttttttttttttttgtttactattcctttttatcattatgccaaagagtaatatcaaccgaacacccccaacatcacatggtcctatctctggagctggtaaacaccagcatgacaacacggcagataagaatatctcgaaaaacacatacaagcgcgggaaaactaaaaagggccaacttggtgttaaaaagaaaataaataaaacaaaaaacaatttacaagttgtattcttttatctatcgtccagcgagcttcgcagccttcgatggaccctctagtagctttggaacctctgatgaggcttctaattttttcaaaccatcttcacagtagttactaatatcaaagttggtcacagcatgggcaccacgaagctcgatggcagctaggtcataagcttcagctgcctctatctccgtttcaaaggtaccaagatagatgtctttggtgtctctactttctccaatcctaccaatccgtgcttgccatctaccatcctttcgccttgttacacccctatatgatgaagttcctcttgagaaacagctgctctgccttcttatgtacaccacaaattcatcttgggacatggtcttcatcctctcgatttctttctcataatcagaaacattgaagttaagtttggtgtttggccctgcaccccaatatttaagggctgcaaggtcatgtgcccttgcagcattctcttcagtaacatagcttccatgcttccccttgcgcttgcggccctcgacctggctgctgttgtcccagaggtgcgcctcgaacttgccgctccacttcaacctcgtgacgccgtggtaccgcgacgaccgcggcgcggcgtacttgcgcatggtctccgccaccagcttccctcctcctcctcctcctcctccctccgccgccgcagccgctttcccatcatccccgccgccgtccgcgacggccagctgctcgtcgagcgccgcgatctcctcgccccccgccgcggccggctgctcctccgtctccggaggaggaggaggcgcggggtccgaggcggcgggttgcacggtggccatcgccgcgaggtgaatcttcttcttcttggatttctcctcggcgaaatcttcgagagctcgtcgcggcgcaaaccctagccgccggcccttgtcc

SEQ ID NO: 20934 - DNA, 700 bp, Oryza sativa
  Clone ID: TF_OsC154008_1
gcactgcgcactgagcacctcgacacggcgcgcgcgcggccatggtgaagaacacgagcaacatcgccatgatctatctccattctccagctagcttctcatgtagtaataagccgatggcaaattcgtccaatcgatcggcaatacaacgagtacgtcgaagaggagccaagtagtcagtgaggccgtacaagggggtgaggatgcggagctgggggtcgtgggtgtcggagatcagggcgccgcaccagaagcggcggatctggctgggctcctacgccacgccggaggccgcggcgcgcgcctacgacgccgcgctgctctgcctcaagggctccgacgccgtcctcaacttcccctcctccgcctcgtctcgccgccgcctcgacatccaccgggggggcacggactcggcggcgggcgacatgtcgccgaggtccatccagcgcgtcgcggccgccgcggcgggggcattcgacgccgccgccgccgccgtcgtcctccggcggcggtgacgtgctggaccacgcgacgacgccgtcgtcgtcgtcgtctgccgcggccaacgtttgctcgccgccgctggagggggaccatgagctgtggacggagctggacgcgttcgcgtcgccgaagttcatggatctaatggccccggcggcacggcgttctcgtcgccgtgggaggagcccgaggagga

SEQ ID NO: 20935 - DNA, 1452 bp, Oryza sativa
  Clone ID: TF_OsC6832_1
atgcgcagcagcagcagcaaggccacacccacaacctccccggcgttccccgtcctcggctttccccccagtgccaagagtccaagacccaacaagggggaggacggaggaggcgaggcagaggcatctcaccgaagggggaagggcgacgccatgtgggacctcaatgactcgccggcggccgaggccgcgccgccgccgctgtcgccgtccgccgacgactccggcgcctcctcgtcctcggccgccgccgtcgtcgagatacccgacgacgccgacgacgactcggccgctgtggttgtcgtcacgcgccagttcttccctccggccgtcccgggcggcggcggcgaccccgcccccgggaacgcgcgcgccgggtggctccgcctggccggagccgccccgccggtcgctgcagcggggccggcggcgtcggcggcggtgtccaagaagagccggcgcgggccgcggtcgcgcagctcgcagtaccgcggcgtcacgttctaccgccgcaccgggcgatgggaatcgcacatatgggattgtggcaagcaggtctatttgggcggatttgacactgctcatgcggcggctcgggcgtacgatcgggcggcgatcaagttccgcggcgtggaggccgacatcaatttcagcttggaggattacgaggatgacctgaagcagatgagcaacctgaccaaggaggagttcgtccacgtgctccggcggcagagcacggggttcccccggggaagctccaagtacaggggcgtgacgctccacaagtgcgggagatgggaggctcggatgggccaattcctcggcaagaagtacgtctacttggggctgttcgacaccgaggaggaagctgccagggcgtacgaccgcgctgccatcaagtgcaatggcaaggatgcggtgacgaacttcgatccaagcatttacgccggggagttcgagccgccggcagcggccacgggtgatgccgccgagcacaacctggacctctcgcttgggagctcggcgggctccaagaggggcaacgttgacggtggcggggacgacgagatcaccggcggcggtggcggtggcgcgggctccgaccagcgcgtccctatggcgttcgaccttgactggcaaacggcggcggcgaggagcaccaaagctaagttcttgagcaatggtgatccggggacagcgggaggcctgtcactgacgatcggcgcaggcatggccgggcactggcctccccagcagcagcaggggtggggcaacgccggcggcatgagctggccgctcccgccgcacccgccgccgccgccgaccaacgccgcggccgccgcaaccgctacagcagctgcagcatcatcacgattccctccctacattgcgacgcaagcctcaacctggctgcagaagaacgggttccattccctgacccggcccacctaa

SEQ ID NO: 20936 - DNA, 2275 bp, Oryza sativa
  Clone ID: TF_OsC58470_1
atggccgaccaacgccggagatttcgcggcggaggagattggcaggcgagcgtcgacgatgtggtggacgacggtggcgagctcgaggccgcggcggcggcggcggcgaggggatcggtgctgtccggggagtaccaggctcaggagatgtccacgatggtgtcggcgctgacctgggtcgtcgccgccggccacgacgaccacggcggcgggcagtggtctggccttgtggacgtgccggcgacgacgctcgccggcggcggcggcggcgactacgggcatggcgcacaggggagctattattactacggcgcagcgccgacgtcgacaccggagttcgtagcaggagggcagcaagagcagctcagctccgacgtgccgcagggcggcgctagtctcggtctcgccatggacgagcactcgcccacatacaccgtcgaagcgtcgtcctccgccgatcagcacggcggcggcggcggcgggcggctgattgagaagcagcagttgctggtagattaggcagatccaaatacgaaagtcagtgttcacaaggccgcccgcgtctggctcggcaccttcgagaccgccgaggccgcggcgcgcgcctacgacgaggccgcgctccgcttccgcggcagccgcgccaagctcaacttccccgaggacgcgcgcctcagcagcccgcccgccggcgccggcgccggtggcgccaccgcagcggcgcagacggtgccggtggcctacccggccagcgcggtctcggactacttgcacggcggcgccgccgctgccatgagtagctctttggggccttactcctccatccccacctcctcggtcaccgtcgcctccgtgccgtcgtcgtcctctgccgcgtcgtcttcttcgggttacggcgcgccggcggagcacggcgaggcggtgcagtggaccagctggccggacgctcagctgcagccggcgcccgcgcgggcggagcaaaccacgggcggggcgaccacgccgacgacccgcgcacacgccggcttcttcgtcctcttcttcttcttcttctgcttccacccccgcgacccgacgccgcccaccacctcggtttcgttggcatcgtcatcctccaggtccacggccactagctaccatctagaagcttccggaagcttcgggaaggaagccgccccccgcgccgccttgccgggcctcgcaatgccggaggagaaggagtacgcgcccgtgcccctcggccaggcgccggaggcggtggaccccgaggacccggtcaagtcgccgccgcggcccacctcgccggcgaactccacccgcaaggcatgttttgctgttcttcaaagctgggtgtcaagaaaatttatgacaggatgcgtagttcttttccctgttgctgttacattcttcatcacctggtggtttgttaagtttgttgatggatttttcagtccactgtatgcaaagcttggatttgatatatttggccttgggtttttgacttccttgctattcatattcctagttggaatatttgtttcttcatgggtgggttcaactgtcttttggattggagaatggtttattaagaaaatgccttttgtaaggcacatatattctgcatcgaagcaagttagcactgctgtttcaccagatcaaaatacaacggcatttaaagaagttgcaataattagtcatccccgtattggtgaatatgcatttggattcataacatcgacgatgatccttcagactgacaaaggtgatgaagaactgtgcagtgtatatgtgccaaccaatcatctatatatcggtgacatcttcttggttaggtctgaggagattataaggccgaatttgtccattcgagaagggatagaaatcattgtttctggaggaatgaccatgccgcaggtgattgcagcaccaggacaaacaccccataagggtcagagcacccgtttaaacagaatgatgagtgcgtgagtacatcaggtctgcccagagttgctgagagagggcaaatcggtggatgacaaagctggaacaaggtgattgagaagcagcattgctggtagattaggcagatcaaaatacgaaagtcagtgttgactagtccgcatcgcttaggtttgctcgctgagtgaaaagttgtgtaatctttcaatcacgctccaaatgtatatcagtactgtgaccaatagtatttatactcctttcaaaagaaaaaaaaatcgatagcatttgtaccttgtttaaaaaaaaaaaaaaaaaa

SEQ ID NO: 20937 - DNA, 1385 bp, Oryza sativa
  Clone ID: TF_OsC2062_1
gctggatgagccagcagccgcccccgcccgcggttgcttcccctccccaccacgtcaaaacccaaccccaaccatgatgctcctgcgccaccaccaccacccccacagcggcgccgccaccaccagcagcagctgcagcggcggcggcggctgttagagaggagggcacacaccaccaccgacaccgacacgctcgccatgccaccaagcgaggcggcggcgtgaggcgacgcagatctgaacggaggaggaataggaagaagggaggaggaggggagggagaggagttggaagacctggaggaggaggagatctctttcttgttcccgctcgatggagcggggggaggggaggaggggagattgctccgtgcaagtgaggaagaagagaacgcgaaggaaaagcgatggccctgattcaatcgctgaaaccatcaagtggtggaaggagcaaaaccagaagctccaggaggagaatagctccaggaaagcgccagccaaggggtccaagaaagggtgcatggctgggaaaggaggtccggaaaattcaaattgtgcttaccgcggtgtcaggcaacggacatggggtaagtgggtggctgagatccgtgaaccaaaccgtggaaggcgcctatggctaggatcatttcctactgcgctggaggctgcgcatgcatacgatgaggcggcaagggcaatgtatggtcccacagcacgtgtcaattttgcagataattccacagatgccaactctggctgcacatcagcaccttcattgatgatgtctaatgggccggccactataccttctgatgagaaggatgagctggaatctcctcctttcatcgtggctaatgggccagctgtgttgtatcagcctgataagaaggatgtgttggaacgtgtagtccctgaggtgcaggatgttaaaacagaagggagcaatggcttgaaacgtgtttgtcaggagcggaagaatatggaggtatgtgaatcagaagggatcgttttacacaaagaagtgaacataagttatgattatttcaatgtccatgaaattgttgagatgataattgttgaattaagtgctgatcagaaaacggaagtacatgaagagtaccaagagggagatgatgggtttagccttttctcctattagagtagtagtcatgctgcgggtcaataggaatatttcattctagctgctaggggatacttcaaatatctgcaacctgaagctttgtagtcatttacggttttcgtcttactgggtaatagctttatatatactataagccaactggtacaagaagttgtactgtgtgttgagtgcactgtggtaaaaatgaatctatatttaatgagcttactctgtcaaaccaaaaa

SEQ ID NO: 20938 - DNA, 1693 bp, Oryza sativa
  Clone ID: TF_OsC45729_1
agaaaaagcagcagaggacatttcatatctcatctcacctattgccagtacatgcaccagtcccaaaacgacattgagccaaaagatggcacacagaaatcacccaaaggccaacccccatctccactctcgaagtggcagccatgcatggcaacagtgcagggcgccactctagtggccagaggcagcacaagtgagggaggaggtgaaagagacaaggcacaataggggtgatcagaaactatgacagagtacagtggaacagtgaccactgggaagctatctccactgtcagcaatggaggcaggcggaggaatagttactggatagcaagaaaagggcaaagcttcgctccactagacactggtgcgagtgggccccagctttagtgcccactgttcaaattacaactctggtagcacggtcacgattcgtggtttcgcactcagaaatgaagataaaagaatcatgagcgtgagaattctgatcataaccaggtggaacatagagagggatatcatatggagaaggtccctctctggacaaacgacgaatgttatcagcaagcggcggtggatgcacggtgaggtttcgcctccaccagaataggtggcagtcaggcggtcggggggaagtagaactggtggtggccgggaaatggatgggggcgggaggaaggcgagcgggcggcgtcggcgacggtgcccgtagagaatcctgatgatgctgcagtagggagtaatggcaaaggggagccctgcatttgccatgaccacgaagtagggaacgactggggacccaactcaggtcttttctccataggtacttccctgaggttcacaaagaagcccggacaaggagatgcatataaatgtggatgctgggacatcgatgtgccctgaggaagcacaggccactgaggacttattggctgagtaacaacagaacttgaagcttcaggagaatcacaattcaactggaacccagttagggtaccatcacttttcagctcatgaacgttaggctgtgaaattctcagatttaagtcaatgatgtctccatcaaccacttcattgtcggtttcaggtagaacatctccatcataagaactaggatcaaaattagtaacagcttcccttccattgaagcggatagctgcccggtcatatgctcttgcagcctcaatttcactgtcaaacaatcctagatagatgtacttcttgccgagcagctggcccatccgagcttcccaccggccacacttgtgcagtgtcacaccccggtactttgagctcccccttgcaaatcctgtgctttggcgccgaagtatgtgcacaaactcctccttggtccaattgcgcatctgcttcaagtcgtcctcatagtcattcagattaaagttgatatccgcgtcgaggcctctgaacttgatcgccgcgcgatcataggccctcgctgcggcatgagctgtatcgaaaccacccaggtacacctgcttcccgcagtcccagatgtgcgactcccatcgcccggtcctcctgtagaaggtgacgcccctgtactgggagctccgagacctcgggccgcggcggctcttcttcccgccggcgggggacctctggctctgcgccaccccgagatccgccgcgcggcgcggccacggcccctccccagccgccgccggcatcggcat

SEQ ID NO: 20939 - DNA, 1617 bp, Oryza sativa
  Clone ID: TF_OsC3062_1
aaaaaaagaaagaaaaaataaatatctgccacgcaattacactgttccgtttccacgcgggagacgtgccattcaaggcagctcacgcacaaagcgagcgcccgccttgggccccacgccaccaccatttactactactgctcacttcactagggagtacaaactccgctgggtttttttttactgcgccgaaataataataataaaattaatataatactagtagtaataacattgctgctggttgctgctgatgccccgtctcccgccaacttttcccgccccgagagcgcgaaatgggtggaggggggcagcggcgtcatttcacgctgacggcgttgctcgccgtcagccccgccgtcacgaagtcctccccttcccaccacggcagccagtcgaactccgccgccttggtggaaggcggcggcgccgagaggtcgcccagctcgacgaggaggtgctcgaaggatggcgcggtcacctcgtccgctgccgcgtaccggagcacggaggtcggcgacgcgaacgggttgaacgagctgtcgttggcgcggtcctcctccggtggcgccggcgtcggatcggggacggaggccttggcggcggcggcggtggaagagcttggggtcttgtccggggtggtgtgtcggcgagggtggagcttcatctgcttggccttggcggagggggtgtcggagtcggaggggaagttggtgacggcgtgggagcccttgatgcggagcgcggcgtcgtcgtacacggcggcggcctcctcggcggtgtcgaaggtgccgagccacagccgcttctgcaggctcgggtcgcggatctccgccgagaacctgccccacggccgccgccgcacgccgcggaaccgccggctcgccgccatccccgcgcgccgccgggccagcgccgccgtcgccgtcggaaccagccgcctcgggtgcttcggcgccggcgccggcgaggcggccccgacgtcgatgtcgatgacctcccggacgcgcggcctggagcgctcgtccccggaggagtcggtgtccgtggcgtcggcgtccacgaagtagacgcggacacgcttgggccgaggcatgctagccccaacacggcggctcctgccggcggcgagggagtccgccggagacatcgccggaggacgcatatccaccgcccgctacgaggacgtcaccccaaatctcatccaagaaaacgcacgaaccaacccagcaaacaaactcacccgaattggaggtaaaacccaaacaaacaagacctcaaatttctccttcaaacttcccaaatcaacttcaaaaaaacacaaaagaaaatcccaaagatttctcagatctaagcactcccccagtgagtgaactatcactaccaccactagctcaccgctcactctccaagaaccgggtcaaacaagcaaaggcacccggaaaatcccaaacccccaaaacctcaaaaccagagagatccaagaactcctcaaccgaggcaaaagaaaacacgaaaccctccgtcgatctcaggataatccggggggttttaagaggggttttagctttgaggttaagggcgggaaagggagaggagggggatttcctcgtgccg

SEQ ID NO: 20940 - DNA, 660 bp, Oryza sativa
  Clone ID: TF_OsC329744_1
atggcggcgctcttcgaggccgcggagacggcggccatcgtggctgcgctgacgcgcgtcattgccgacggcgggcgtggaggcggcggcgccgtctgcgtgccgccgcccgcgccgtcgttggtcgtgccgccgcgggcgggaacgggcggcgggcggcgcgtcgacgttgcgcgggaggaggagatggtcggcgtcgtctccgcgggagatcacgccggcggggcaagcgtggccgaggcggcggcggcggtggtggtggcggcgccggcgacagcgcgcaggtaccgcggggtgaggcggcgcccgtggggcaagtgggcggcggagatcagggacccgaggaaggcggcgcgcgtctggctgggcaccttccgcaccaccgaggacgcggcgcgcgcctacgacgccgccgtgctccgcttccgcgggcgccgcgccaagctcaacttccccgaggaggcgtcccgcccgcgccgcccgtggaagggtcacgacgtcgatcacatgtcctgctcgccaccatcgatcgcgaacgctcgctttctgggttcgtggatcttcggacctccgccgccgtcgcggtccgtcgcggcggcgacaacgactctgcttggtgggagccatggaagcaacggagcagataatgggagggaatag

SEQ ID NO: 20941 - DNA, 1054 bp, Oryza sativa
  Clone ID: TF_OsC198236_1
ccgccgggccaggcccccccgcgccgcgctcgctcgctttgcaagcaaaacgccccaactctcccgcacgcacacgcgcccttccaccgactcgtcagcttagagcaccgcaagcgcgcacagcagcaaagatgtgtggcggcgcgatcatttccgacttcatcccgcagcgggaagcccaccgcgcggccaccggcagcaagcgtgccctctgcgcctccgacttctggccgtcggcgtcgcaggaagccgccgacttcgaccacctcaccgccccctgcaccttcacccccgaccaagcggcagaggagccgaccaagaagcgggagcggaagacgctgtaccgtggcatcaggcggcggccgtgggggaagtgggcggcggagatccgcgacccggcgaagggcgcgcgcgtctggctcggcacgagcgggcgggccgaggcggcggcccgcgcctacgaccgcgccgcccgccgcatccgcggggccaaggccaaggtcaacttccccaacgaggacccgccactcgacgacccggccgccgacggccacagccacggcggcgccgccatcccgtgcagggagttcatggactacgacgccgtcatggcgggcttcttccaccagccctacgtcgtcgccgacggcgtgccggccgtgccggcggaggaggcgcccacggtggcgtacgtgcaccaccacctgccgccgcagccgcagcaggacgcggggctggagctctggagctttgataacatccacacggccgtgccgatgtgagatcgatctgatgatcattcagatcgatgctagctcatgtgtttttaattatatcttcacagcagaaacaaaaaaaagttcaattcagtttattttgttgttatacgttttaaaatgtttcattaggttttcatgttataggagtgatttatcggattgaactctcaagtgaccgacttctgagttcttcgtgtaaagatgaatgctccaaggaataaaatgcaatttgtatttaaaaaaaaaaaaaaaaaaaaaaaaaaaaaaaaaaaaaa

SEQ ID NO: 20942 - DNA, 218 bp, Oryza sativa
  Clone ID: TF_LIB3433-061-P1-N1-C8
ggcggcgccgcgacgggcgccgtcaccggcgacagccggcgggaggtggagcatcgccttggcgccccgcatgcggaacgcggcgcggtcgtacgccgcggcggccttctcgggcgtgccgaaggtgccgagccacagacgcgcgccgtgccgtgtttggtcacggatcttcactttgtacttcccccacggccgccggttcacaccgttgttgtgcc

SEQ ID NO: 20943 - DNA, 887 bp, Oryza sativa
  Clone ID: TF_OsC3842_1
ccctaggaagaaggaaacccatagacgtgcaggatgttatcacccacctcattctttgcaaacgttgttgttgctattgttgccatcgtgacaggttgacttgctggcaggatgaagttggtccagaaaagagggtccgcagaaggatcagcagggttccaggtatttttcatttgtgcagtaacagaggccaacgtgtatggagctctttgcacaagcaacccattcacgttcatgttcactgcagttgtgtcatgtccagttgcaggtactggggtaactgtctttccttcatccatttctttgctaaaagtacattcttcagatagtttggtagatttttctgagaagcttttgaaggcatcagactgagttaagatatcacatgctgataggaccacggaagagggctttgagttagaatgtaggccatgggaaggaaacttataaggctcagtccgttgcattgagctttcaatagcacggatttcatcagtaacctcttccattttagatgtatctgactgccgtgtcttttttgggagccaccaccttatgtaatttgtcagatcaattttcctctctaagccaaaggttcctgcaaatttcccatccagcgtgatgtccttccctaaataagcaaatacataatgaacataagcaggaaagtttatttgtgtcccagctccccagtatttcaatgcagcaaggtcataagctcttgctgcagcctcttcatcatcatatgcaccttgtttcccttttttgttctgattctgattccatgtgcttttatcccagaggtgagcttcatatcggcctgtccacctatgccgggtgacgccgcggtagatggagctgcgcttcccggcggcgcagggcggcat

SEQ ID NO: 20944 - DNA, 411 bp, Oryza sativa
  unsure (1)..(411): unsure at all n locations
  Clone ID: TF_286671
cacgcgctcgctcgctttgcaagcaaaacgccccaactctcccgcgcgcgtctggctcggcaccttcgccaccgccgaggcggcgncccgcgcctacgaccgcgccgcccgccgcatccgcggggccaaggccaaggtcaacttccccaacgaggacccgccactcgacgacccggccgccgacggcacagccacggcggcgccgccatcccgtgcagggagttcatggactacgacgncgtcatggcgggcttnttncaccagccctangtngtngncgagggttgtcggncgtgcgggngaggaggngnnanggtggngtacgtgaanagganttgtngntgagncgtagtaggacgngggggttggagtttggagtttgataagatnagaaggnggtggatgtgagat

SEQ ID NO: 20945 - DNA, 1377 bp, Oryza sativa
  Clone ID: TF_OsC23083_1
atggaggaggggtttgtggctctcaagaggacggagcatgtcgaggtgacgtccttggcggtggcggtcgaggcgacgccgtcggcgaaggggggaaaggggaaggttgtggtgggtggtggtggcgccggcggcggcgttgggccgacgagggtgagggtgttctgtgatgacttcgacgcgacggactcgtcgagcgatgaggatgaggaggaggtgaccgcgcggcggagggtgaagcgctacgtgcaggagattcggttacagcgcgcggcggcggtggccgtgccgccggtgaaggtgaagggcgaggaggtgttcccggccgcggtgtcggcgaagatggcggaggccgcgaaggcgagggtggtgttggcggctgggaggaagaggaaggccggcggggtggacggcgccgagccgcggttccgcggcgtgcggaggcggccgtgggggaagtacgcggcggagatccgcgacccgtggaggcgggtgcgggtgtggctcggcacgttcgacaccgccgaggaggccgccaaggtgtacgacacggcggccatccagctacgcggccgcgacgccaccaccaacgtccaccagtccggggactcggcaagcctcgacgtcccacccgaggtcgccgagcgcgtcccgcagccgccgggggcgtccaagaacgcctccccggccacctcctacgactccggcgaggaatcccacgccgcggcggcctccccaacctccgtcctccgttccttccctccctccgccgtcgtcgcgaccgccgacacggccaacaagaagcagccgccgccgccgcctctcgtcgtccgcgagaccgacgagtcggtcgacgtcttcggctgctccttctccgacgacggcggcttcgccggcgagctcccacctctctacaccgacttcgacctcctcgccgacttcccggagcccccgctggacttcttgtccaacctccccgtggagcccttctccctggctcccttctccagcaacaatgggtcaccggacctccacctcgacgacgccccatcgccggcggcggcacaagtggacgacttcttccaagacatcaccgacctgttccagatccccgtcgtctagtgcagcagcaagaactgtaaaacaccggattaggagactaatccggcccaattttgtttgcgttttctcttttttttttcttctttattttttcgtttttagaggagaggagagttgagttaatgattccccgtcagtctagctgcggcagaacacccaccaccgcttcgtcaggggggaaagccttgacgaggcgagagagatgagaaagtcaaaagagagggcataaaacgggatccaatgttgttgggggtt

SEQ ID NO: 20946 - DNA, 1100 bp, Oryza sativa
  Clone ID: TF_OsC6641_1
tttattttattgttgtgcattacaaaaagtacacaaaaattgtttgttcaatacagtttagtagtcaactctatggataatttacaaactctgctttgttcaattagtacaccagagccaatagaaaatagaaaaagaaaaggagaaaaaaaaaactctagttaatctgccttctttgtttcaagctattccaacggctgggatctaatcacaacgttcaaaaactagacgctgcaccggaaaatggcgggaaccaggtgtccgcttcatccagcttcatcaggtcctgcaagccatcccagagctggttgctgccggcttcgtccgcgcccatctgccaatccaccggcgtcgtcgtctcctcggcatccgcgctgcacggcgacagagtcggagtcatctgctctgccgttgtcgtcgccgccgtgacagcatcgccgccattgccgtttctttggctgggcatgggcaaaggctcggagcacgggaagttgagcttcgcgcgcgcgccgcggaactcgagggcggcgcggtcgtacgccctggcggcctcctcggcggtgtcgaacgtcccgagccacttgcgcaccgcgcggcgcgggtcgcgtatctccgctgcccacttcccccacggccgatgccgcacgccgcggtacacgttcttcttcctcctccgcctaaccctcttcccgcctgatcctcctgccaccgcggccgcagcagcagcagcagcataatccgtcgccattaccgcctcctcgttccccgccgcctcggccccaaagaagtcgcacccgagacagccgtcgatgccgcacagagcacacgcctccccgcacgccaccgtgacgatctccggcggcggcgtggtgcacccggacaccacgtaccgcagagccgcgacgatgatgctgtgctcctgctcggacgagatccaccgcgcggagctcggagcctgatgactacccccacgctcatcaagcttggtcttgcaagaatcctgcctcgccgccgccatggccggtatcaccttctccgtcatgagtgttccagtgatcagtagggagctaagtgagccggagctagtagtgtgcctcgtg

SEQ ID NO: 20947 - DNA, 712 bp, Oryza sativa
  unsure (1)..(712): unsure at all n locations
  Clone ID: TF_OsC6832_2
agaagagttcgtcacgtgctcgcggcaagagcacggggttccccngggaagctccaagtacaggggcgtgacgctccacaagtgcggangatggaggctcggaatgggccaattcctcggcaagaagtacgtctacttggggctgttcgacaccgaggaggaagctgccagggcgtacgaccgcgctgccatcaagtgcaatggcaaggatgcggtgacgaacttcgatccaagcatttacgccggggagttcgagccgccggcagcggccacgggtgatgccgccgagcacaacctggacctctcgcttgggagctcggcgggctccaagaggggcaacgttgacggtggcggggacgacgagatcaccggcggcggtggcggtggcgcgggctccgaccagcgcgtccctatggcgttcgaccttgactggcaaacggcggcggcgaggagcaccaaagctaagttcgaccagaactcgaaccatccccagatgcctccggtcctgcaggtcacccacctgccattcagtcccaggcatcatcaccaattcttgagcaatggtgatccggggacagcgggaggcctgtcactgacgatcggcgcaggcatggccgggcactggcctccccagcagcagcaggggtggggcaacgccggcggcatgagctggccgcacccgccgcacccgccgccgccgccgaccaacgcc

SEQ ID NO: 20948 - DNA, 1540 bp, Oryza sativa
  Clone ID: TF_OsC7160_1
ctagaccacttgccagctcaactagcactattataccaaccattatgctaatgctgtctcatatctaatgtgtgttaatagtttattagctctccaagaacaatccaatcttcagtagtacaaatatatgagagagcacaaagcttcaagcctccttcagactacaagccattaaacagagacgaccaacgacttaaccacacttcttctttgtgctgtccaacctccattgttgggtgtgaaagctttggctcatctgccatgtgtggaggatccattctcggcgaccttcacttgccggtgcggcggacagtgaacgccggtgacctgtggggagacgccggcaagggtagagatggtggcgacggcttgaagaagaggaaggggagttcttgggatttcgatgttgattgcgatgatgatgatgatgatgactttgaggctgattttgaggagtttgaggatgactatggcgatgatgatgatgtgggtttcggggacgacgaccaagaatccgacatgaacggtctcaagctcgccggattcagcaccacgaagctcggcctcggcggcagcaggaagaggaagacgcgataccgagggatccggcagcggccatgggggaaatgggcggcggagatcagggacccccgcaagggcgtccgcgtctggctcggcacgttcggcaccgccgaggaggccgccatggcgtacgacgtcgaggcacgccgcatccgcggcaagaaagccaaggtcaacttccccgacgccgccgccgccgccccgaagcggccacggcgttcttcggcgaagcattcgccgcagcagcagaaggccaggtcgtcgtcgtcgtcgccggcgagcctgaacgccagcgacgccgtgtccaagtccaacaacaaccgcgtcagctcggctgggagcagcaccgacgccaccgccgccgccatcgccatcgacgacggcgtcaagctcgagctgctctcggagacggatccttctccgcccatggccgccgccgccgccgcgtggctcgacgcgttcgagctgaacgatcttgacggatcaagatgcaaggacaacgcattcgatcaccagattcacaaggtagaagcggctgtcgctgatgaattcgcgttctacgacgatccgagctacatgcagctgggttaccagctcgatcagggcaactcgtacgagaacatcgacgcgctcttcggcggcgaggccgtcaacattggtggactctggagcttcgacgacatgccaatggagttcagagcttattgagcatttgattctatttaggagggagtgaattatttgggaggaagaatcgatgttgtaacttgtaaaatctctgatgatgatctctgcatcatatgatcaatttgagtgcagttttgtttttgtaaatacgaattctttattatgatgttaggttcttaatttgcccttcttcatcagggatttgttcaggcttgggttgtaacccctgattgcacgagggaaagttcgcgttttttgttgtcacccaaaa

SEQ ID NO: 20949 - DNA, 600 bp, Oryza sativa
  Clone ID: TF_jC-osroLIB3475060g11b1
cccacgcgtccgcccactcgtccgttcctctgtttcctttcctactacagtagagtagctccatttccatttgagttttgatttttgaggatatatgatgcagccaccgtacacgtacagcaacagctaccaccatatccatagcagcttgccgccggagatgagcgaccgcgacgtcgacatgcacatcctcaccgctctcatggccgacatggccgattcgtcatcctcctcctcctcctcctcatcatcatcatcatccgacgactccgacatgcgagcatcagcagcagcagctgagcctgagcaccggaggagccctgcaccgccgacgccaccgaggcaacagcagatgatcggggtgcggaagcgtccatggggcaagttcgccgccgagatccgcgactccacccgcaagggtgctcgcgtgtggctgggcaccttcgacagcccagaggccgccgccatggcctacgaccaggccgtcttctccgtccggggcgccttcgccgtcctcaacttccccctccaccgcgtttcaggagtcgcttccaggccactccccttcgggcgccgcccgggagggaatcgcccgggtta

SEQ ID NO: 20950 - DNA, 1433 bp, Oryza sativa
  Clone ID: TF_OsC703_1
cgcgccatagcgacctctctcccggagaaagaagagcgcgccgcgccatgtgcggcggtgcgatcctcgccgatttcaccccggcgagggtgccccggcggctgaccgccgccgagctcctgccggtgaccccgactccccccgccgccgagaggagaaccacccggaagcgcaagtccgacgtcgacttcgaggcggagttcgagcttttcgaggacgacgacgacgacgatgagttcgagctttccgacgatggcgacgagagtttggccgtgtcatgtgtgtcgtcccccaagtcgaaggcagtaccttcgttttctttttcgtcggatgtctcctcgagctccaggccgcggcggcgcgtggcggcggcggcggccggtcgtcggaaggcgagcaagaagagcaagtacaggggcgtccggcgccggccgtcggggaggttcgcggcggagatcagggaccccaagaaggggcggcgcgtgtggctcggcacgtacggcagcgccgaggaggccgccatggcctacgaccgcgaggcccgccgcatccgcggcaagggcgcgaggctcaacttcccccgcgacggcgatggctcccctcgccggagtaacgaccggccctgctggaccatcgacctcaacctccccgcggcggccgtctccggtgacgacgacgacgccatggccgtcgacgccgcagacgcagacgcaggcagtgctggccgtgcagcagcctatgcagatcaagaagcactgagcgcggcaaagtgcaagatcaagcagtgtcctcgcgacgaacagatggcgagcgccacacctgagctcatggaggaggacgcgagcagcagcagaaacatggtgcccctgtccatggcgctgcagctgcagtatgcggcgatgatcgccgaatgcgaccgcgagatggaggagatcgccgccgtggagagggacctcgagaggcgcaggaggcaggtgttcgagcgcagaggccacctggtcaggcaggcctctcttctgctcgactgacgatcttgctgaactgaactctgaatgtttgagcttgtctgaagtctgaactctgcactatgccatatggtgtttcaccttcactgtgaggctgacatgtgggccagacgtccgtttgccttgcttgcttttgagctgcaactgggcgttgtgctgcaagcctgcaaagtgcctgtgtaaagtttgtgggattgtgtgtgtggatcttgtatccttgtgactttgcaagctttaattttgtgaggaacaatagtattttagattggtgtgtaaaatatagaaataaataatagtagcaactaaattttggttttcagctcttcatcagatggtttgtcatgggaacaaaatttcaaacatgagcaaattaaggtcaaaaaaaaaaaaaaaaaaaaaaaaaaaaac

SEQ ID NO: 20951 - DNA, 1918 bp, Oryza sativa
  Clone ID: TF_OsC4185_1
tcacgcctccgcctctgcctccgcctccggcgccggcgtcacctcctccctccgcggcatcgcctccagcgccggcgccgcctcctccctccgcggctccacctcaagtgtcggcgtcgcctcggtcttccccagtcctacgattgagttttgtttttttcacaactgaattttcgatgaagatttgcacattaatacagttaattcacagtagttctattacaggtagttaccaacaattgattacaacaacctacatgcacaagtatttgtacatttgtagagttgtacaactactacactaacgagtcactgcttactagacatcggagacgccggacacaaaaacgacgccggcgagcagcctccggaacctaaaaaaccaacacaaaaagaaaaggatctacacaagaacgaacatataatccatcgcctcgccgccgcgcagaatgcctaaaacctcatctgcgccggccggcaatggcgggctatggaagagaagagctagttattgttgttgagcagcgagtcccagtcgatctcgtacgacgggtacttggtgagcgcgaacccctccgcctcgtcccacggcacctcgctgaagtccagctgctccatctccgccagcggcgacgccgccgcagacgacgacgacgtctccgagccgccgtcgtcgccgccgccggagtggtcggagccggaggacgacgacgccgcggcgaccaggggcgcattgatgggcatggccctgccggcgccgcccctggacctggatgaggcgttcttggacgcggcgatggtgtcgcagatggcctggagcttggcgtccacggcggcgtcgagcgggccccgcgacgcggcgttgtccgggaagttgagccgcgccgcgtcgccgcggaggcggtacgcggcctggtcgtaggtgagcgccgcctcctcggcggtgtcgaaggtgccgagccagagcctggtgcggttgcgcggcagccggatctccgccacccacttgccccagtgccgctgccgcacgccgcggtacagcttctgcgcccgcgccgccgccgccgccggagcagccgccgaagcgggcttcatgggctgggcccgcgggccgagccccgactgggcctgccgctgcatgtggagttgggcctggacgcgctggatctgggccgggctgagctgggccgggcccatgtagtggaacccgtggactccggccgaggagaagttcgccggcgccggcggcaagccgggatgaaacggcggcggcgcgatcttctgcatctgcggcgacggagcctctcccagcgcccgcatcagatttccttctatagcagctgccatcgaatatctttttttttgtggattttttctaacctaaaaatctgaataacaaaccacctgttctttccaaaatccaagaactggcagacgaaaagagaagttctagatctactaatcactttacaaggggggtataagctaagctaactagcacaaggaggtgtggaaaaaattaaccctcttggctaccaaatcagaccaataatcttacaccaagaacagatcagaacaccagaaactaaaaggctctggaactctctgtcctgtacaccaacagaagctcaaaaacaaaggaaaaaaaaagattgatcctcagatgaagtgatctacctgctggaagacccaagaactcgctcagatctacggctcacctacctctctcaaacctcacagagatggagtctgggtgattagggcttttggattggattaggctttctggatgtgtgtgttcttgatggctcggagtagtgggtctcagcctcctgctggcggattccttagcccctgccgtcggggagcggcccgtgcgcgcgaagcttcctcccgggccactgcactgtgggcccat

SEQ ID NO: 20952 - DNA, 2092 bp, Oryza sativa
  Clone ID: TF_OsC819_1
gcctccagggccggcagtgccggccgcccccctccccccccgcatgcctctccctctgcgccctccgcgtgagcggcagcaagtgttcactgcgttcttcttctcgatttatctttcttggtttcttgatctgtagcttattagcggccatgtgcggcggagcaatcatctccgggttcatcccgccgtcggccgctgcggcggcggcggctgcggcggccaagaagcagcagggcaggagggtcacggccgacgtgctgtggccggggatgctgcggaaggggaaggcggcggcggcggaggaggactttgaggccgacttccgcgagttcgagcgtggcatgagcgacgacgaggcggaggggggcggcggcgaggaggaggaggacgacgacgacgtggtcgtggtggtccccccgccggcggcggcgaggttcgtcgtccgtgccgcggccaaggcggcgcccccaactgcagatgggatgttgactacaaagcttgtccaacatgatggacctactgctagatcagcaaagcacaagaggaagaatcagtacagggggatccgccagcgtccctggggcaaatgggcagctgaaatccgagaccccagcaagggtgtccgtgtttggcttggaacatataacactgctgaggaggcagctagggcatatgacgctgaagcccgcaagatccgtggcaagaaagccaaggtcaactttcctgatgaaccagctgttgctcagaagctctccctgaagcaaaacgctgccaagcaagagaaactagctccacctctgaagacctgtggcgatgatgctttctttcagctaaacagttcagacaatgatttgtttgcaatgcttgcaaaggtgcctgcaaagccggcagagcctgttgatctcatgcctccagtcaaacctcttgcttccactgagacattcgagatgaacatgctctctgatacgagcagcaactcatttggctcttcagactttggttgggaggatgacaccctgaccccagactacacttcagtcttcgttcctaatgctgccatgccagcatatggtgaacctgcttacctgacaggtggagcgccaaagagaatgaggaacaactatggtatcgccgtgccccagggaaatggcatgcctaatctcgcacaaaacatgcccaccttcgatcccgagatgaagtatttgccattaccttatgttgagagcagctcagatgaatcaatggacaaccttctgcaaaatgatgctacacaagacggggcaagcaacgagggcatctggagccttgatgagctgctcatggcagctggtgcctactgaggagacgaaatgttctggtcagtgtggtctgtcactagcaaaccatgttgaatgtgtatggccaagatgaagagctggtgatgtctgctatgttttgtagagggatgctaccaaagtaatgctagaatattacaagctgctatcagctgtactctctatgacaatgtttatactatgtttgctgtatggtgtggtctatgatttgaagtatgttggagactgattcaaataactgccttggccatgtgtgtgctgtaatgtgcttattaagttatatagttgtgctcatattgcgtatctaaaaaaaaaaaaaaaactagagactagatctcccccccggcccagttctgcctgcccgggctctcaacagcccctccgtcgctcccgagatctagtgtttgccagtccctttcgttgagagcagctcagatgaatcaatggacaaccttctgcaaaatgatgctacacaagacggggcaagcaacgagggcatctggagccttgatgagctgctcatggcagctggtgcctactgaggagacgaaatgttctggtcagtgtggtctgtcactagcaaaccatgttgaatgtgtatggccaagatgaagagctggtgatgtctgctatgttttgtagagggatgctaccaaagtaatgctagaatattacaagctgctatcagctgtactctatataacttaataagcacattacagcacacacatggccaaggcagttatttgaatcagtct

SEQ ID NO: 20953 - DNA, 1599 bp, Oryza sativa
  Clone ID: TF_OsC45661_1
gcccgagcggcccgacttccgccccatagcatcgccaacagaaggaagcaagagatagttcgagtcgagttgagttgcatccgtacgtactggggtagaggagagtaggagtgtgctagtgtgtgaggtctactgaaatggacagctccagctgcctggtggatgataccaacagcggcggctcgtccacggacaagctgagggcgttggccgccgcggcggcggagacggcgccgctggagcgcatggggagcggggcgagcgcggtggtggacgcggccgagcctggcgcggaggcggactccgggtccgggggacgtgtgtgcggcggcggcggcggcggtgccggcggtgcgggagggaagctgccgtcgtccaagttcaagggcgtcgtgccgcagcccaacgggaggtggggcgcgcagatctacgagcggcaccagcgggtgtggctcggcacgttcgccggggaggacgacgccgcgcgcgcctacgacgtcgccgcgcagcgcttccgcggccgcgacgccgtcaccaacttccgcccgctcgccgaggccgacccggacgccgccgccgagcttcgcttcctcgccacgcgctccaaggccgaggtcgtcgacatgctccgcaagcacacctacttcgacgagctcgcgcagagcaagcgcaccttcgccgcctccacgccgtcggccgcgaccaccaccgcctccctctccaacggccacctctcgtcgccccgctcccccttcgcgcccgccgcggcgcgcgaccacctgttcgacaagacggtcaccccgagcgacgtgggcaagctgaacaggctcgtcataccgaagcagcacgccgagaagcacttcccgctacagctcccgtccgccggcggcgagagcaagggtgtcctcctcaacttcgaggacgccgccggcaaggtgtggcggttccggtactcgtactggaacagcagccagagctacgtgctaaccaagggctggagccgcttcgtcaaggagaagggtctccacgccggcgacgtcgtcggcttctaccgctccgccgccagtgccggcgacgacggcaagctcttcatcgactgcaagttagtacggtcgaccggcgccgccctcgcgtcgcccgctgatcagccagcgccgtcgccggtgaaggccgtcaggctcttcggcgtggacctgctcacggcgccggcgccggtcgaacagatggccgggtgcaagagagccagggacttggcggcgacgacgcctccacaagcggcggcgttcaagaagcaatgcatagagctggcactagtatagagttagcactattagctcgatcttctctagctagtgtcttttttgctcccatgcatcataattcaggtggtagctagcttagtcccttgttgatcctatctactaatctcacttggttttttttgttaatttattcgcccatgttcttgcttgctttgctgtaaatcttttcatcccaagtgtacactaatgaagcatagccctagaaggctagaccaactgacacacaagaagaagaagaaacatttgaaattatccatcaaaaaaaaaaaaaaaaaaa

SEQ ID NO: 20954 - DNA, 473 bp, Oryza sativa
  Clone ID: TF_OsC149947_1
aaaaaaaggaagggaaaaaaagagaggaaaaaacaaggggaggaaaaggaagagggggaagggagacgccactgccaaaccctagccgagcaccccctcccctcctcctcccccatcggagcctcctcgcctcgccctcgcccaccaagcccccgcgcgcgcgcacgtgcatccggcgatgcggaagtcgaagcagccgcagccgcagccgtcgccggagatccggtaccggggcgtgcggaagcggccgtcggggaggtacgccgccgagatccgggacccggcgaagaagaccccgatctggctgggtaccttcgactccgccgaggtggcggcccgcgcctacgacgacgccgcccgatctctccgcgggcccaccgcgcggaccaacttccccttggccgcgccgtccgcgcccccgccccggccgccggcggcggcggcggcggccgccacgtccagccacagcagca

SEQ ID NO: 20955 - DNA, 673 bp, Oryza sativa
  Clone ID: TF_OsC160593_1
gcacgaggctgcaacctggcaacgcgcacccacgtcggcgaagtgctcgatcactgcccccattggcggcggcgacgatcacccgcgaagccgccgccgccatagacaagcctacaagctgatggcgaggccgcagcaacgataccgcggcgtgcggcagcgccactggggctcctgggtctccgagatccgccaccctctcctgaagacgcggatatggctgggcacgttcgagacggcggaggatgcggcgcgggcgtacgacgaggcggcgaggatcatgtgcgggccccgcgcgcgcaccaacttcccgctcgccgacgccaccgcggcggcggcggcggccgccgcgtcctcgtcgttcctctccgccgcgctcgtcgccaagctccaccggttcaacctggcgtccgtgcaggccacgcagcggcagagggaggccgccgccaccgccgccgcggcctcttcggcctccgccacgacgccgccgctcggcaatgccgccgccgccgacgacgacgcgcggaccaccacgacgtacggcgcggaatggagcggcaggttcctcgaggagcagcacgtcgagcagatgatcgacgagctgctcgactccaacttctccatggagatctgctactagcactgtgtgacacacacacacacactctgttct

SEQ ID NO: 20956 - DNA, 219 bp, Oryza sativa
  Clone ID: TF_2799366
ggcacgaggaccccaagaagcggggctcgcgcgtgtggctcggcacgtacgacacggccatcgaggcggcgcgcgcgtacaaccgcgccgccttccgcatgcgcggcgccaaggccatcctcaacttccccaacgaggtcggctcccgcggcgccgacttcctggcaccgccgccgccgcccccgccgccgataacatctacccacggcaaacggaagc

SEQ ID NO: 20957 - DNA, 624 bp, Oryza sativa; identical to SEQ ID NO: 11214
  Clone ID: TF_OsC363381_1

SEQ ID NO: 20958 - DNA, 834 bp, Oryza sativa; identical to SEQ ID NO: 11215
  Clone ID: TF_OsC60460_2

SEQ ID NO: 20959 - DNA, 1110 bp, Oryza sativa
  Clone ID: TF_OsC267094_1
gtttatcggcatagatttaaagataatgacatgtcaagacctgacaaggaaaataaaagggattcaaaagcacaggctggtgatctgatggatgatggtggaatgtagctcggtcgccggcgacgtacggacggcggcggcggccgtgatttcatgtgcggtggtggcaaggtggcgagcccgccgggaccacgactgccgcggctcgccggcgccggcggcgaggaagaagaggaggaggcggcggctggaatgctgtcgaggcatggacaggcgagggagatgtctgtgatggtgtccgcgctggcgagggtggtcgccggcggcggcggcggcgaggcggaggagtggtggccgccggcgtacggcgcggcgccgctgccaccgtctacttcccctgcatctcacgagcacgcagcagccatggcggcagggcagtacgcgccggcgacgtcgtcggcgatggcgtcaccgcgcgagcaggcctcctcgccgtcgtccggcgacgccgccggcggcggcggcggcggcggcaggaagcggtaccgcggcgtgcggcagcggccgtgggggaagtgggcggcggagatccgcgacccggtgaaggcggcgcgcgtgtggctcggcaccttcgacaccgccgaggccgccgcgcgcgcctacgacgacgccgccctccgcttccgcggctgccgcgccaagctcaacttccccgaggacgccgcgctcctgccgcctccgcctccgcctcctgcgccggcgccggcgccgccgcagtcgcaggggatggtcggcgtcggcgaggagtactccgagtacgccaggttcttgcagggcgccggcgagccgccgcatttcctcgagcagataatggaggactcgcctcggccatcgacggcggccggcgcgtcgtcgtcgtcgtcggggcagtcgtcgtttccgttgttctacagcttcgctggacatgagcttggcggcaacgaagcgaaccttgcccgcccgccggagagcggcggcgctggtggtgacggtgggaggggctcctcgccgccggtgacttggccgggctatgggtggggtgcgccgccgccgtgggacccatcgagatag

SEQ ID NO: 20960 - DNA, 1387 bp, Oryza sativa
  Clone ID: TF_OsC143388_1
gttaccaaccattactctctcataaagaactcggagaatgcatgcttttacatccatctaacaaatctagtcctctcatcgttcttcctcttctaatttgcacccaaaacatgatcaaagaaaaagaaaaagaagaaaaaagagaaaacaatggagatgcatcccatattcccataccaccaaatctaatcaacgaacaaaagaaaaaagatcagagcagaacgcgatcagacaatctgcgacgtccatctccgtctctccgtctcatcccagccgtccgtgcttaccttattcttccagaagcgaaagagagcaggacagaatccggcggctactgcgtgtgcggcggcggcgggtggtggtgatagctcgactccgaccatgacgccgccgtcgccgggtagaccagggcgttctcccagttccactcctccgccgccgacatgctctggtgcgagccgccgtgggacgagtagtagttgcccggcgcggaggaggtggaggaggggacggtggccacggaaacagagggggtagggaaagagtagtaggagccgaggaagccgctcatggcgccgccgccaccgcctccgtagggattggtcatggagccaccgccgccgccgccgccgtagaacggaagaagggtgccttggttgggggtggcggtggtaagcctcccctgcagaagcatctggtagcgcaggtactcggcgctctgggaggcgccggggtagatggccgcggaaggcgatgccgccgcgaccggcgccgggggcggcgccgcggtggtggtggtggcggcggtcgggtagaggcgcgcgtcctcggggaagttgagcttggcgcggctgccgcggaaccggagcgcggcctcgtcgtaggcccgcgccgcggcctccgccgtctcgaacgtgccgagccacacccgcgccgccttgtgcgggtcccggatctccgccgcccacttcccccacggccgctgccgcaccccgcggtaccgccgccgcggcgtgtcgggcccctccgcgttcccgccgccgcccaccggcgagtggtgctcgtccatggtcgccgcgctcgcgctctgggtgtccgagctctgctccgatcctgcgaactccggcgatggcgcgcccccgcaggcgtatcccgccagctcgtgcattgcctgctcctcccgcctcctctcctgcacgccacgcgccgccgccgccgccgctgacgacgacggcgacggcgacgaccacgcccactggtcgccgtcgccgtcgccgccgccgccgccgccgcccgccacgacgcgcgccagcgccgacaccatcgtcgacatctcctgcgcctggtaataccccgacatgagctccgacgcccccgccaccgtcat

SEQ ID NO: 20961 - DNA, 230 bp, Oryza sativa
  unsure (1)..(230): unsure at all n locations
  Clone ID: TF_569065
ggcactacagaggtgttcgacagcggccatgggggaagtgggcggcggagataagggacccgaagaaggcggcgagggtgtggctggggacgttcgacacggcggaggacgncgccatcgcctacgacgaggcgncgctccggttcaaggggaccaaggccaagntcaacttccccgagcncttccagggccgcaccgacctcngcttcctcgtcacccgtggcatcccc

SEQ ID NO: 20962 - DNA, 783 bp, Oryza sativa; identical to SEQ ID NO: 11224
  Clone ID: TF_OsC407003_1

SEQ ID NO: 20963 - DNA, 2041 bp, Oryza sativa
  Clone ID: TF_OsC19777_1
ggcggtcgcggcgcccccgggctgcaggaactccgcgcgcggcgcctcaaccccaccccaagaacaccaaagccacatcccatcccatcccagtccacggtgaggttgagcgatctgagaaaaatcatcagcgacgagcagcaacaggtttgttctctgaacttctctgatctttttagaagcaggtaacacacaagaaaggtcctgtcccaagaaggtacttctttcgggtttattagatcgaaagaggagttcttgtgcgtacaggttctttctcatcccatcaacttctcctaggaggaacagagatccagagaaccttttttctcttctggattcttgccgatttttaggcttcctttgcttttctaaggccagaaagggttgttttgcaatacccttctagttcatcctctcaaatttttcttctttctattcaaaagctctttctttctttgcaccctttgtttctctacttttattgaggaacagggctgatttttcacttcttgcatccaaaaagcaccccttttttctttcctgtttttaagatttccatacccttgccatcttcatcttctacctccatccagtcctcatggccgcagcaatagacatgtacaagtataacactagcacacaccagatcgcatcctcggatcaggagctcatgaaagcgctcgaaccttttattaggagcgcttcttcttcctccgcttcctccccctgccaccactactactcttcttctccttccatgagccaagattcttacatgcccaccccatcttatcccacttcctctatcacaaccgccgccgccaccaccacctcgtctttctcgcagctacctccgctgtactcttcgcagtatcatgctgcttcacctgcggcgtcggcgacgaacgggccgatggggctgacccacctgggcccagcccagatccagcagatccaggcccagttcttggcccagcagcagcagcagagggccctggccggcgccttccttcggccgcgtggccagccgatgaagcagtccgggtcgccgccgcgcgcggggccgttcgcggcggtcgccggggcggcgcagtcgaagctctaccgcggagtgcggcagcgccactgggggaagtgggtggcggagatccgcctcccgaagaaccggacgcggctgtggctcggcaccttcgacaccgccgaggacgccgcgctcgcctacgacaaggccgccttccgcctccgcggcgacctcgcgcggctcaacttccccaccctccgccgcggcggcgcccacctcgccggcccgctccacgcctccgtcgacgccaagctcaccgccatctgccagtccctcgccacgagctcgtccaagaacacccccgccgagtcagcggcctccgcggcggagccggagtcccccaagtgctcggcgtcgacggaaggggaggactcggtgtccgccggctcccctcctccgcccacgccgctgtcgcccccggtgccggagatggagaagctggacttcacggaggcgccatgggacgagtcggagacattccacctgcgcaagtacccgtcctgggagatcgactgggactcaatcctctcataaacaagcagaagcagctactactagtctattactagtactagtagtagtcttcgtcaagctagagtcactcaactcaactagctgtgtaatcttctctgaattccgtggcttccatggctcggtggcattttagacgtcggccatggctgctgcgagtagcagtaactagtcagtactcagtagtagtaaggtcgttggtattacgtcgtcgtgcaagtgtcgttggtgtactcagtgatctgatctcctggttgagctgccggttgtttttttcacggcgcggccggtcgagaattaagctgtaatcccttgttacatgttggaaattcagtagcttatgtaactatatgtacctttctcaaaaaaaaaaaaaaaaaaaaatatgtgagtaattgtgtaaaaaaaaaaaaaaaaaaaaaaaaaaaa

SEQ ID NO: 20964 - DNA, 512 bp, Oryza sativa
  Clone ID: TF_uC-osflcyp143g12b1
ctccctctctctcttcttcttcttccttccctctcaacccgacgacccacgcgaagcgaactctcgcgcgagacgagagtagtaaaccctagaaacctagaggagatccccaccaccaccatgacggtggatcagaggacgacggcgaaggcgatcatgccgccggtggagatgccgcccgtccagcccggaagaaaatgtggaggcgaggaaagtactggaaaccttgattccgtccaaccgataggaaaaagcgaccacggagatcacgcgatggacctacttcagttgcagagaccatcaagcggtgggccgagctcaacaatcagcaggagcttgatccacagggtccaaagaaggcaaggaaggcacctgcaaagggttcaaagaagggctgcatgaaggggaaaggaggaccagagaatacacgttgtgacttccgtggtgtgaggcaacgtacctggggcaagtgggttgctgaaaattcggagcccgatcggcaaagtagactc

SEQ ID NO: 20965 - DNA, 1004 bp, Oryza sativa
  Clone ID: TF_OsC116_2
atccaacgtccgcctaaagaaaaacacgcacacacttcttctgcttccctccccttgtttccgctccacttcccttccaagcaagaaaaccgaggcttcagcttagctaggaccgaccgatccgatgtgcggcggtgcaatcatctacgactacatcccggcgcgccgccggttgtgcgcctccgacttctggcccgacgccgacgactccgacccccacacccccgctcccgagaaaccgccgcgcgcgaagagggagcggaagaaccagtaccgcgggatcaggcagcggccgtgggggaagtgggcggcggagatccgcgacccggtgaagggggtgcgcgtctggctcggcacctacccgaccgccgaggccgccgcgcgggcctacgaccgcgccgcgcgccgcatcaggggcgccaaggcgaaggtcaacttccccaacgacttcggcgccgcccccgcgccggccgcggcggcggcgaaggccgtccctcgcgtcgcgcccacgccggccgtgctcccgccgcccaagatggaggcggtgtccgagggcgccggcgcctgctcctccgacgaggtcaaggagctgtccgaggagctgctcgcgtacgagaactacatgagcttcctcggcatcccctacatggagggcggcgccgcctccgccgccggcgccgaggaagccgcggcgcccgccgggctctggaccttcgaagactacgagctgccgtcgctagcgctctagtaaaaatgtcacaataaaaatgacatgtatgtgaaaaaatttttccctacccgtagtaagtaaccagtgtctttttttaccgtactctatgcgttatttttgttgaaattaatccattgttgaagttgtaactgtgcatggtcggcgccagtctcagtgaagcttttgctgaatccaagtttttctctaatgtaaatatgaaatttccagttaactcagcttgaaattctaaaaaaaagtgctaaaagcactatgg

SEQ ID NO: 20966 - DNA, 726 bp, Oryza sativa
  unsure (1)..(726): unsure at all n locations
  Clone ID: TF_8955884
ggatcggcacgagcggcgacaccatagtcttctcccgctcggcgtacggccccgacaagctgctcttcatcgactgcaagaagaacaacgcggcggcggcggcgcaacaatcgtcccggtacaanggggtggtgccncacccaaacnggangtggggggcgcaaatctaccaacggcacncncgggtgtggctcggganattcccccacaaaaaagcggcggcgcgggcctaccanatngcggcgctccngtnccgggggcgcgacacngccaccaacttcccccgggccgcggcgtctgncgcccaaactcccgttcctctccgcgcactccaaggncgaaatngtccacatgctccngaancacacctacccccacaaactccccaagggctccccccnggcgccgcatnggcgcccncccccanccacccgtcctgggcgcgcgaaccnctgttccaaaaaggcgtgacacccancnaatncgnaactcaacncctccttgtgccccagcacaccccaaaaaaantcccctcncccgcgggaantccaatccnctccnccncncacggnaaggggtttnctcacttcaaganggnaaggaagttnngatccgtcctatgaaacancaaatctttacaaggtgacatctagaagcccccgcaaagcacaacgncacacttagttcctatcgggatcacgaagggaaggaatcnnaagactttcc

SEQ ID NO: 20967 - DNA, 1421 bp, Oryza sativa
  unsure (1)..(1421): unsure at all n locations
  Clone ID: TF_OsC164210_1
atggataaccacgccgtcgcggtccagcaacgcgacacggcgccccggccccgcgcccgcgcgcgcgcctccgtatccagtatccagggggggggggggcctggctgggctgaccacgtcgccctcccacgcccgccacgttgccacccgcgccgccctcccaccccatgtcggcgaccgctcgcgttcgcgtcctcctccatccatccgcatcgcgccgtgctgccaagcggcgcgccgcctcacgtgtcggccggggcgcgcgacacgggcggcgcggcggggctcgcgcgaccccaccactcatttccccaggagaaaaagccgaagccaagacacgcaggtgtcgcctcgcctcgcctcgccctcgcgccgctgcggaattccgcgaggatggataggagggaggccaccgtcttcttgcccccgccgccgccaccgcagccgacgcagccgcagcagcagcctgcggcggcggcggtgagggctccggtaggcgggaggggtgggggaggagggaggcagtatcgcggggtgcggatgcggaagtgggggaagtgggtggcggagatccgcgagccgaacaagcggtcgcggatctggctcggctcctactccaccgccgtcgccgccgcgcgggcctacgacaccgccgtgttctacctccgcggccgctccgcgcgcctcaacttccccgaccagctcgacggcgcgggtggtggtggcgcgggcgccggcggcgccgaggaccacagggagctcaccgccgccgtcatccgcaagaaggccgccgaggtcggcgcccgcgtcgacgcgcagcactccgtcgtcggcgccgcggcgcccgtgccgctccagccgccgcagcccccgccgccccagcgccgccggaccaagaaccccgacctcaaccgggagcccaccccggacacctccgacgacgagtagtaatccgagctgattttgcctcccttcttccatccatctagttcgtagtccttagccaccccaagacacagagagagagtagcagctagtagctatagctagtcagcgaagcggatagcgccaaggaggcggtcgtggacgggggcgcacgcaaggtgttcggcgaaatgcgattgaggtcggaggagcccacaagtatatccaataatggagccgcgacgtcgccgtcaagccggggaagtggtggttagcaagtaggaatctagagctcagctcgtcgtctgttccggcgacggcgactgtactaggagcgtgcgtgtcagcgtgagcatgtagctaaaagcaagacggctatgtacctcacccttttcgcttaagcgttggtttgtaaagggaaaatacccagcaagcaagacaaaaaaagctgcttcaagaanctctcgaatcaaaaaaaaaaaaaaaaaaaaaaaaaa

SEQ ID NO: 20968 - DNA, 1516 bp, Oryza sativa
  Clone ID: TF_OsC3461_2
cacacttcgtccgcaaaagcgtccacgaacacgttaaaaaaaggtcgaagagaagtgggagacccaaaccgcgaacaatgtgtggaggcgccatcctcgccgagttcatcccggcgccgtcgcgcgccgcggcggcgaccaagcgggtgaccgccagccacctgtggccggccggctccaagaacgccgcccgcggcaagagcaagagcaagaggcagcagaggagcttcgccgacgtcgacgacttcgaggccgccttcgagcagttcgacgatgactccgacttcgacgacgcggaggaagaagacgaaggacacttcgtgttcgcgtccaaatctcgtgtcgtcgccgggcacgacgggcgcgcggcggcgagggcggcgagcaagaagaagcgggggcggcacttccgaggcatccggcagcggccatgggggaagtgggcggcggagatccgcgacccgcacaagggcacgcgcgtctggctcggcacgttcaacaccccggaggaggccgcacgcgcctacgacgtcgaggcgcgccgcctccgcggcagcaaggccaaggtcaacttccccgccacgcccgccgccgcgcgcccacgccgcggcaacacgagagccaccgccgtgccaccgccggcgacagcacccgccgccgccccgccgcgcggactgaagcgagaattctcgccgcctgctgagaccgcgctacctttcttcaccaacggcttcgtcgacctgacgaccgccgcggcgccgccaccggccatgatgatgacgagctccttcaccgacagcgtcgccacgtcggagtccggcgggagccccgccaagaaggcgaggtccgacgacgtcgactcgtccgagggcagcgtcggcggcggcagcgacacgctgggtttcaccgacgagctggagttcgacccgttcatgctgttccagctcccctactccgacggctacgagtccatcgacagcctcttcgccgccggcgacgccaacagcgcgaacaccgacatgaacgccggcgtcaacctgtggagcttcgacgacttcccaatcgacggcgcccttttctgactatcactagaccacggagccggatagggagcacatgaagaagacggtggggatgtttagatccacggccatgttcatatcacagacgatggctcccctgaagcaccaatgttgcatgcagctgcgagggatgatgcctcagtgcaactgtgacaccagttaccagatgatgcagagcatgcaacaagttatttgtgctggactcgggcagcagcagatgatgatgaacatggcgatgcagatgccatacatgtgcaacatggcccctgtcaacttccaactctcttcttgtggttgttgttgatcaaacgttggttacatgtactctagtaataaggtgttgcatactatcgtgtgcaaacactagaaataagaaccattgaataaaatatcaatcaatttcagacttgcaactattgggtatttggatttcc

SEQ ID NO: 20969 - DNA, 622 bp, Oryza sativa
  Clone ID: TF_OsC160593_2
tcactcctcgctctcccgccgcgagcgcgcgctctctctcgccgcgaccacgcgcaatccgtcgccgagctcgaggacgtcggcaatggcgcggccgcagcagcggtatcgcggcgtgcggcagcgccactggggctcatgggtctccgagatccgccaccctctcctgtagtccagcgtcgccctgggcacgttcgagacggcggaggacgcggcacgcgcgtacgacgaggcggcgcggatcatgtgcggcccgcgcgtgcgcaccaacttcccccacgacgtcgccgacgaggccgcgccgccgccgccgccgcacagcgccgccgcagcctcctcgtcgttcctctccgcggcgctcgtcgccaagctccaccgcttcaacctcgcctccgtccaggctgcgcagcgcggcaacagcaacgacgacgactccaccacctcctcctccgccgccgcgtcgtcgcgcgccgtgattccgtcccttcccgccgccgccggcgcattgggcaatgcggcggcgacggcggagtggagcggcgggttcctcgaggagcagtacgtggaccagatgatcgaggagctcctcgactccaacttctccatggagatctcctgctga

SEQ ID NO: 20970 - DNA, 2434 bp, Oryza sativa
  unsure (1)..(2434): unsure at all n locations
  Clone ID: TF_OsC1774_1
ccgccgccagctttgactagcagctagcaagtgtacacacatctataaattgtagtaaaccaccttagctgaggtgatggccatggcgatgatgagaagggtggtgatggtggtggcggtgctgtgtgcggtagcaactatggccatggcacaagaggcgtccaacgtgcgtgccacgtaccactactaccgtccggcggaaaacaattgggatttgggggccccggccgttagcgcgtactgtgccacgtgggatgctgacaagccgcttgaatggcgccagaagtatggatggaccgccttctgtgggcccgttggtcccactggtcaggatgcatgtggcaaatgcctcctggtgacgaacacggcgacaggggctcagatcactgcgaggatcgtgcccacgcgtccgcccacgcgtccgcccacgcgtcgaaccgattgagggaaaaaaaaagagaaaaagaaaagaaaaaaaagaagaagaagagagaactcgaactctcgcctaccatttcgcccccctccgcaagcaatccaccactgcatcggcggcgagggctcaccggcggcgagccatgtgcggcggcgccatcatccaccacctgaaggggcacccggaggggtcgcgccgggcgacggaggggctcctgtggcccgagaagaagaagcccaggtggggcggcggcgggaggcgccacttcggggggttcgtggaggaggacgacgaggacttcgaggccgacttcgaggagttcgaggtggactccggggactcggatttggagctcggggaggaggacgacgatgacgtcgtcgagatcaagccggccgccttcaagagggccctctccagagataacttgagcaccattaccactgccggatttgatggtcctgctgcaaagtctgccaaaagaaagagaaagaaccaattcaggggcatccgccagcgcccttggggtaagtgggctgctgaaatcagagatcctcgcaagggtgttcgtgtctggcttggcactttcaacagtgctgaagaagctgcaagagcttatgatgctgaagcacgcaggattcgtggcaagaaggccaaggtgaattttccagaggctccaacaactgctcagaagcgtcgtgctggctccaccactgctaaagcacccaagtcaagtgtggaacagaagcctactgtcaaaccagcattcaacaatcttgccaatgcaaatgcgtttgtctacccatctgctaacttcacttcaaacaagccgtttgttcagcctgataacatgccatttgttcctgcaatgaactctgctgctcctattgaggaccctatcatcaactctgaccagggaagcaactcatttggctgctctgactttggctgggagaatgataccaagacaccagatattacatcaattgctcccatttcaaccatagctgaagtcgatgaatctgcattcattaagagcagtaccaacccaatggtccctcctgttatggagaacagtgctgttgatctgcctgatttagaaccctacatgaggttccttctggatgatggtgctggtgactcaattgatagccttctcaacctggatggatcacaggatgttgtcagcaacatggacctctggagctttgatgacatgcccgttagcgatttctattgaggaattcgaagtcttctagtcggagcatgtacacagggaaaaaaaaggaataaatactattggagattgggaggcacctgcatggcaccttgggggtagcatatcgttatgtttagcttagatgcaaaaggctgcatcctgaaactctttggtgattggacctgttccctatccgctgtctatgtatggcagccatctatgagactcaagaactgcttttttttttccgttctagttttctgtcgttgctacctgtatatggctatgaacatcgtgaatccatggccattatgttttaatctatgttgttgactgctctttctttcggtctttgctgtgctgcgctatgttggtgataactagctaccatattgattttctgtacataattcatttgttgaatccgaaattaaatagtgcattgactatatatttatatattatatgtccacagccacgcccaaggctaccagaagggccacctcatccgccagtaccagctcgaaccctgcgcgccacaccagcagctacccctatctacccctcctatcacttcccctactcccacccccccctccgacgcgcccgcattcctctannnnnnnnnnnnnnnnnnnnnnnnnnnnnnnnnnnnnnnnnnnnnnnnnnnnnnnnnnnnnnnnnnnnnnnnnnnnnnnnnnnnnnnnnnnnnnnnnnnnnnnnnnnnnnnnnnnnnnnnnnnnnnnnnnnnnnnnnnnnnnnnnnnnnnnnnnnnnnnn

SEQ ID NO: 20971 - DNA, 1138 bp, Oryza sativa
  Clone ID: TF_OsC1713_4843
tttttttttttttttagatggaagatttatgatgtatatatgaattgatttgatgttataacagcaggggcaccaagggcaggagtactgctgatgaaccactgcattgcctcttcatcaagaactgcctcttgccccatttccacctgcctctcccgcttcctggcaatctgccgccgccgccggtgatgtccatgcctgaacagcctcactgacgctgtgttgcttcgcctgcttgtaatttggcttctcgtcgccggtggcctgccgccgtgtttgttcttcttgcagtcgatgaagagcagcttgtcggggccatactgcctgagccggagaaggccacggtgtcgcctggtcggaggcccttctccctcacgaatcggctccaccccttggtgagcacgtaactctggctgctgttccagtacgagtaccggaatcgccacaccttgccgtcgccgtcctcgaagttgaggagcacgcccttgccggcggcgtcggagctgtggcggcggagcgggaacgggaaatgcctctcggcctgctgcttgggcaccacgaggcggttgagcttgccgacgtcgctcggcgtcacggccttctcgaacagcggctcgcgcgcccaccgcggcgtcggctgcgcgcgcgagccgcggcggaggccctgctggagctcgtcgtcgtaggtgtgcttccgcagcatgtccacgacctccgccttggagtgcgcggccaggaacgcgagctcgccggcggacgcgccctccgccgccggggcgcggttggtgacggcgtcgcgcccccggaagcggagcgccgccacgtcgtaggcgcgcgccgccgcctcctcgtcggggaacgtcccgagccacacccgcgcgtgccgctcgtagatctgcgccccccaccgcccgttcggctgcggcaccacccccttgtaccgcgacgacggccgcgtcgccgtcgtcgacgacggcagccgcagctccgccgcctggacgacgtggatcaactcgtcttcctccattgcggccaactcctcctcctcctcctcctcttgctttgaatcggtcgtcgacgacgacccaccggagccggagttgcaggagaagacgaccatggcagcttcttgctccat

SEQ ID NO: 20972 - DNA, 860 bp, Oryza sativa
  Clone ID: TF_OsC6641_2
tcaattccaagaatctgacgactgtgggaaccagctgagcccgccttcgtccagctgcatcaggtcttgcaagccttcccagagctggtcccctgtctcgccgccgccgccgccgccgccgcctcctcctccctgcggccaccgcgtgtgctctacttgctcgtcggcgtctgcgctgcgcggcgacggagacaatgtgtcggacttggcggcggcgctggcgtcgccattgctgtcgtcgtgcgcggagagctgctcggggaacgggaagttgagcttggcgcgcgggccgcggaactcgacggcggcgcggtcgtacgccctggcggcctcctcggcggtgtcgaacgtccccagccacttgcgcaccgctcggcgagggtcgcggatctccgcagcccacttcccccatggccgctgccgcacgccgcggtacttgttcttcttcttcctcctcctcctctgccccgccgcggcgccagccgccgccgcggcggccgccgccgccaccttctccgcgccatcgaacgacaccaccccggactccccggcgaagaactcgcacccgaggcactggtccatcccgcaaaccccgcacacctccgcgcgcgccgccgggaacacctccggcggcggcgtcctgtagccggagatgacatggagcagcgtcgcgacgatcacagagtgctccctctcggccgagatcgccctcccggcgaagggacgcggcggcggcagcggcggcggtggctctgcagtggcggagctcggcgaggcatcgtcgatgtggccgtcgaatcggatcatgtactcctggttgcctcccatggcggagatccggttggtcatgtgagttatgt

SEQ ID NO: 20973 - DNA, 2183 bp, Oryza sativa
  Clone ID: TF_OsC48348_1
tcaggcggttggcgggaagtagaaggggtgatccgccgggaacggcggctgccggcgggtggcggcggcgacgccggcgccggcgccggcagagaatcctgatgatgctgcagcgtggagcaatggcaagtgagaaggggcctgcatttgccaagcctgtgttgggaacggcatggggccctgctcagcccggcgggccgttggcctctcctgtaggttcgggaggaagccaagacaatgagatgggtacaaacgttgatgctgagggggcagtggtgtgctttggtgatgcacagtccattggggagacgagcccattggctggtggactgtaatatttgaagattcaggggaatcacaagttaactggaggccagttgtggcgacatcgcttttggagtcacgcgcattaggttgcgaaatccgcaaatccaaatcaagatcgccatcaacaattgcctcatttccggcgtctggtaaagcatccacattgtaggatgcaggtcggctccggcggcggcgtcgataggagcctttggaacattttttgggcgttttatgtgtggatgcaaatacagtcatgaatcccaattaactaatcactacaagaaacacccggccgcccgccggcgcagacgaaaacgttgaaacgccgggacggccagaaaaaaattgccggttcccgcaaatttcagtgggtgatggcttcttctttttatcaaggtggtggtgatggcggcttgacgacgaagacgacggcgccgtcgggtcgaaccggagggtggcagtgtgttgggcagcagctgctgtcgtggcggctttggagaatcctgatgatgctgcagcggaggacgacgacggcgacgacgacgaggaggagaagaagggcaatggcagcgtgtgaggaggagcagggtgatgatggctcacctgcttccatgcccagcttggaacagctaccccctctgatggcttcctcttctgatccgatgatctggatgcatcctcattatttgggaataggggatgaggttgggcagtccagattggcggatgctcggtcagaagagggaaccgatgaggacggctagcaagttcagagggagctgcatcattctttgctctcttgaattcagaaccttcaaatgatccatggtggatttgcaggccaagggagccgctatccctcttggggctctgctgtgaggctgcaggctgagatatgctcaggttcagatccacatcggctccttgagcagcagcatcagtaggcagctcaccatcatatgtgctgggctcgaagttggtgacggcttctctgccattgcatttgatcgcagccttatcataagctcttgcagcttcaacttcggtgtcaaatagcccaaggtatatgtacttcttgccaaggagttggcccatgcgtgcctcccagcggccgcacttgtggagggtgacacccctgtactttgagctgccgcgggagaagccggtgctctgtcgccggagaacgtgcacgaactcctccttggacaagctcttcatctgcctcatgtcctcctcgtagtcgctcaggttgaagttgatgtcagcctctactcccctgaacttgatcgccgccctgtcgtacgcccttgcagctgcgtgagcagtgtcgaatccacctaggtagacttgcttgccgcaatcccagatgtgggattcccagcggccggtgcggcggtagaaggtgacgccgcggtattgcgagctgcgagagcgcggcccgcggcggcttttcttggccgcctgaggctgcggctgcggcggcggcggcggtggcgccgggggaggcgcgtgggcgaggattcgtgtctggtgtggcacggccgctgcgcgagggcggcatcctccgccgcgcggcgcggcggctgccacgccggcgccggcgacggcgccgcgggaggcggaggcgggaggagctgacgcgtcacgatccccgaggcggccggcaactgatgctgctccccggagcactcgtcgtcgtcggggctgctcgcgaggaggtcgaaccggaataatcctccgccaccgccaccgccaccgccgcctccggcgtccccggagtttagcaccgaggagcggcttcgagcggtggcgaggcaggagcagcagcaaccacagcaccaggtggtggtcgccat

SEQ ID NO: 20974 - DNA, 2125 bp, Oryza sativa
  unsure (1)..(2125): unsure at all n locations
  Clone ID: TF_OsC34060_1
cttcgcttcgcttccaaatcgcccgcaatttcncccccaaaaacctcccctccccccaccaccaccattaataaacccctcctcctcctcctcttctccggccggggcctcgccatctcaccgccaccgcctcctcactcactcacttcctgccacgtcattcgcgccatcgatcgcgtcgtcgcctcagctgcctagaggaagaggaggagtagagctcgtcgtctccgccgccgcagctggtgctcgctgttgatttatgtcgcctgctctaccccccttctccatggttctgagctccagtcgccgccaacggtttcttcctgctcccttctcatcctcctccttcaaaattggtatacgaggggcgcaagaacacagcaaaatcccttcacgatctccagatttggatttggggtgaaatactttggctttcttcatttagactggtgacaattgaagatagcccccaaattgccttaagatttggtttggcttgagtggatcaagtacagaatccgaacttttgcaacctgacattcttctagttcacaaagtcggccagatttgagatttctctcggacatctctgtacacacaggagctctcttttgctccagttttaaacagaagttggacaaaggctctgtttctggttttttgagtttctgcgataagcttagagagcagacaacaaacttttgtcctgattcatctaaactcttacctgactgcaatcaaggccaattgtaatccaataatctctgatcttgttctggttgcacgttgagatgatggtgccctcttcacggaaagtccgtgttttctgctctgatcctgatgccactgactcctctgatgaagatgaccagaataagaaggaaaggagattttcaagggaaatactaattccaatggaaaactccaaggcatccaaacctgttaagacccttgttcaatgtggcacaaagactgtaaaggattccgagaaggaaccgacgagcaaatacaggggtgtgcgccggcgggcgtggggcaaatgggctgcagaaatacgtgaccctgtgcgaaaatcaaggaaatggattggcacatttaacagtgaggaggaggccgctgcggcatatcttgcacaatcaaaccagttccatgaagagttgatggccttgaaaatccaatcttctgtatcagagcaggaagatttgtcaagctctgttactatatcctgcgtgtcctcatctcagtcatgtgaccagaagattcaggcaaagccacaagaacacaagagagtgtcagtggtggttaaccgtgagaccgttgagcagaagtttaaggcacagccacaagctcagaagattaaggcacagccagaagtgcagaagagagtgtcagtgaagattagccatgagactgaggatgagcacttgctgaacttgccgtccacgcctaaaggcaaagagatttcgatgggcgctgttcttggcaggatagatgagattcctgtgagcaactgtgtgggccatattgatgaatttccacctgatgatttcactaggcttgcagatgcgttcccagttagtgattttatcggcatggcagatgtgccactgggcgatgattacattggccttgcagacatcagccacctgccgctgcctatcacagatctgaagttcgacctcaatgcagaactcaactgggacgggttcgactttgcttcattggaacaagaactcaactgtctttgatggcttgaatcctgttctatgtgaaaacctcttgttgattgaattgagtgcaggaggtagattcaggtatccatctttcacattgctggcaggccgagtgtatgatctggagattttcatctccaattttgccggaaaattgtacagtccccctacagcaaacaaatgagtaccgcagtatttatgtatatgttcaccaatctcaaaaatgttaatgagattgtggtgacagaccgtccttgatctcagtttggttgtgtatttgttggacgccattattatatttgttaattttgatattgttcttgtgataaagaagttatgtacaaatgtaaatataggcctgataaaatccagttattgtaaataaccttact

SEQ ID NO: 20975 - DNA, 1163 bp, Oryza sativa
  Clone ID: TF_OsC111_3
cccaagcatcagcatcacaacccaccaatcgaatcgatcgaacaagacacgacaccatgcgccgccgcgtctcctcctcctcctcctcctcctcgtcctcgtcgccggcgaggcatcacaaggcgcggcgcagcaggaggaagctcgccgtcgacgaggactgggaggccgccttccgcgagttcctctcccgcgaccacgacgacgacgacgacgaccacgacggtcagcatgtcgttgttgcgccgttgatccgtggtagtgacaagtgcgtccacggccacgaggtggtggcgtcgacggtcggcggtggcgcaagcggcggacgacgacgagccgacgacgacgacggcgagcggcggcggcggcggcggagggagaagcggagctacccgtaccgcggcatccggcagcggccgtgggggaggtgggcgtcggagatccgcgaccccgtcaagggcatccgcgtctggctcggcaccttcgacaccgccgagggcgccgcgcgcgcctacgacgacgaggttcgccgcatctacggcggcaacgccaagaccaacttccccccatcgccgcccacgccgccgccgccggagaagccagcggcggagaggagcccctcgacgacgccgacgacgaccacggaggactccggcgactcgcgcatactcatcgagtgctgctccgacgacctgatggacagcctcctcgccgccttcgacatgaccaccggcgacatgcgcttctggagctaacgaacaacagagcagattcagggcaacataaacggcacgtttttgcaaccttgacatgcgactcgcctaataatcttgtcaaacaagggccgccagcttaattagctttttccaaaggtggggaacaattttgggggatgcaattaggacgcacagagatgaccccaacttgtcaatgggaattgaactctgatgacctttgtaatgataatcaaggcaccacattgtggggttaagcaaagttttggcaaattagctttgccttgcaggaataaatcagcatttctttttttttcctttcactggaccccaataaggtaatttgcatacatatgtcccatggatcgaacaatatgaaaagtaattgtatagtgttggttgcagaggttatcaacacttattcgggtt

SEQ ID NO: 20976 - DNA, 987 bp, Oryza sativa; identical to SEQ ID NO: 11235
  Clone ID: TF_OsC393619_1

SEQ ID NO: 20977 - DNA, 957 bp, Oryza sativa; identical to SEQ ID NO: 11236
  Clone ID: TF_OsC393619_2

SEQ ID NO: 20978 - DNA, 1497 bp, Oryza sativa; identical to SEQ ID NO: 11082
  Clone ID: TF_OsC917_2

SEQ ID NO: 20979 - DNA, 225 bp, Oryza sativa
  unsure (1)..(225): unsure at all n locations
  Clone ID: TF_3106746
ggccatgggggaagtgggcggcggagataagggacccgaagaaggcggcgagggtgtggctggggacgttcgacacggcggaggacgccatcgcctacgacgaggcgtccgttcaaggggaccaaggccaagctcaacttccccnagcncntccagggccgcaccgacctcngcttcctcgtcacccgtggcatcccccccccnnnncacccacnncctacncct

SEQ ID NO: 20980 - DNA, 1245 bp, Oryza sativa
  Clone ID: TF_OsC2775_1
ttttttttttttttttttactgcaataattttctactatattttattctaatcgaagaacatgtctatatctcacatcaaaggtcttatttagatgcaacatactaattccacaacaccttatcgaagcctaccatactgcatcacatatatcagcaaccataccgtatatacacatcataaccttaccaaatcaggtcacatgcagagtcatcttcacatcataagttcaatactaaccaaaattacacaataccaagtttccaatgatgctatgcataacaataaagctgctaacgatagtaattacggataattggaccctcaggccccgccaacttcttccacacaggcggacacagcatggaaggcacggacacgggttccacagcccgatcgcttcttacgcttgcctgaaatcatcgtccacattggctccggagcaagcacctggacctcacagctactggcctcctccttgacccgaccgccacagctctcaccttcctccttcacccgtggaagaagggtcggcttagctgtcccaattggcaaggtgattggcctcacagctgcttcaggcggtgaaatagttggcttgggtagctccggcggcagcgagtagcagcggacggaggcgaagttggtggcggcgctggaaccgcggaggcggacgctggcggcgtcgtatgcggcggcggcctcctcagcggtgtcgaaggtgccgagccacaggcggcggcggaggtgagggtcgcggatctccgccgcgaacctcccccacggccgctgccgcacgccgcggaaccgcgcggtcggcctcgcctcccccgcccccgcctccatcacgcggcgcttcacgcccccaccaccaccaccaccaccacccaccttacccctccgccgcggccgaggctgcgccaccgcaaccgcctcgtcctcgctggaggacgagtcggtggcgtcggcgtcgcgcacgaggatacgcaccacgcgtccccgcggcgccgcccccgccgccagctcgtgcaggctagggtttgtacccatgcctcgggaaacccacctcaatccatacagggtgttcgatcgatgtggctacgcgtagcctccgcgccccgccatgggagcgtggggggtggaaggcgaggtgggggggctagggtttagggttagggtttggttccgatcgatgcggcggcgtgcggcggggtggggttgcaatggaagcgcactagtttagagc

SEQ ID NO: 20981 - DNA, 993 bp, Oryza sativa
  Clone ID: TF_OsC143164_1
ctagacggcggccacggcaacgtggccgcacgggatagacgatgccgtggcgtacaggctcgccgccatgccgtcgcgctggacgcagaagctgccgtcgtcgagcatcatgatctcccgtaggccgtcccagatctcctggtccttcgccgccgccgccgtcctcgcgtgctctggcgcgtgcaccggcgacgacgcgttcgagccgcagttctcacggaggttgtgatggaggagtggacgtggctgctgcgcggccgtggacgccgggaagttgagcttggcgcgctggccgcggaactcgagcgcggcgacgtcgtaggcgcgcgcggcgtcctcggcggtgtcgaacgtgccgagccacttgcagacggcgcggcgcgggtcgcggatctccgccgcccacttcccccacggccgacgccgcacgcccctgtacctgctcccctcgccgccgctccgcctccgcggcctcctcttgcccacgccgcccgtcacgccgccgctggccaccgcgcccgtggtgcactccccctcatcctcctcgtcggtagccgcaccggcaaccacggtcgccatcgtcggctccggcagcagcgtcggcaccgtggtgtcaccggacacgacggagatgagcgcgcggatgaacagcgagtcctcccgctcgctgttggggagatggaacccgccgccgccgcgctccaccctcggcaccatggtggtgcgaaacggtgcatctccagcgagacgcacacggagacgacggctgctgggctcgcggggcacgttctcatcgtggggtgggaactggtgcggcacaagggagagacgggctaggacggcgctgtcgccgtcgccatcgacgtcccgccgccgcgcgcgtcccatcgccgctgccgcgccgcgcgccgtctcgtcgcctcgcgccgcgagcccgcgccttgcgccccgcgctgcgccgctgccgcctgctgtgccgcgcgccgtcgccat

SEQ ID NO: 20982 - DNA, 2434 bp, Oryza sativa
  Clone ID: TF_OsC1639_1
ttttacgcgtggggccgttttggtcggggttttagcgagcgcgtgggaggccggaggcgacgacgacgaccgcgccgccgtcggagaagaaggccgcggaagcaccagtaccagcacccgtatatgtcttctagccccttctccgatctggtggtagtcgtgctcctcgtctgcgccgtcgtcgccgcagccgtcctcctccccctcgtctgcgcccgccgatctatgcaccagaggctccacggctggaacaagtccacgtcgatgctcagggacgggttcggggtcaagtattccgggttcctccacataaggccgtgtggtttctgtcgaggagattgacggattcgatcgattcgtgttcgtctccgtcaaatttttgcacaagagaaaaaaaaagtttcccccttttagagtttttccccttcagttttgtcagttttggtgaggaattttagagttcttttccggcaagagttagaagaagagagaaatggccccttccaagcagcagcagcagctgatgctcctcaagaaggtgatggcgaagaagcccaagacgaagaggctatccgggtttggccttaaaccctctgctgctttctccaggccccatgtgccgtcggcggcggcctccctgcagccaagccgtcgcgtccgcgtcgtgttcgaggaccctgacgcgacggactccgactctgacgacgacgaggacgccggcgccgcctcaaagaagcgctactttgagctcttcattggcaagccagcttcgtcgacgaagcaggcctctccggcgtccaccgtcgctgcctacgccaacatcggcaaggttgggagcacctgctaccgtggtgtgcgcctccggaagtggggcaagtgggcggcggagatccgcaaccccttcaccggccatagggagtggcttggcacctttgacactgctgatgcggcctccgccgcctaccagtctgcctcccgcaacttcgccgaagagaagcgccgccgtggtgtggcctcctctgcctcacctgctagttcggcgacccctactccgactgcgtcctcgtcgtcctcgacttctgccgcgccattcgcccacccttcgccgtcgtctgtgctcgaagccaccaagccagctccaaagccagagtcgccgccgctgccggagcaagctgcaactcccctcctggtggaggctaccaacgagaccgccgagctgccggatgacccagagttctacaaggatatactgcgcggtctacagctgccggacattgacccgatggatttccgagctgggctggatgctctggatatctccgatgtgccggcttacatgaatggcgaacaagacgtactcttcactgaggacatgctgcttggagacttcgctgaagaagatgacctcgacctcgacgacatcggtgatgacttctgcgaggatttcccagagatacccagcggctacgacttcggccgtggtgatatgttccggcaggtggatttctgcgtgtgaattaagagcttgctaaagttattcatgttggtgtgatgggcctgtgagtgtgggtgcttgggaggagatttcttgggttttttccccgagcaaaatcaatctgctcgtgcccttgagatttcagttccgcccataagaactccaacgcacatttagcattcggagagtaattttgttaggttaaaagtatggtaagttataggtggtatgttatgtttttctttttcttttctcaatgttatctggtacctaagtttgtcaagaaaatcatagtggacaagtcaagtatttggggctgtcgtctctgttatggaaagaaaaataagtttttgattacacgataaaaaaaaaaagtcaaatttttgcacaagagaaaaaaaaaagtttcccccttttagagtttttccccttcagttttgtcagttttggtgaggaattttagagttcttttccggcaagagttagaagaagagagaaatggccccttccaagcagcagcagcagatgctcctcaagaaggtgatggcgaagaagcctaagacgaagaggctatccgggtttggccttaaaccctctgctgcttctccaggccccatgtgccgtcggcggcggcctccctgcgccaagccgtcgcgtccgcgtcgtgttcgaggaccctgacgcgacggaccgacctacgcagttttgacaggatctatgcttcgtgttgccgatcaggagtatactactgctactatccctctggctattgccgcttacggcgaagacaaaacatcaaaatcgcaaacgtgtccatatactactactgctggtgacaagtccgtcctcctgcgagaagatccaaagctgccgcgtctgaccgaccagctgccggtcgacatggtgagctccgcccccgatttctcaacgttttcctga

SEQ ID NO: 20983 - DNA, 703 bp, Oryza sativa
  Clone ID: TF_OsC257865_1
gcacgagtcccctctcctctcgccccccgcacgaggcccattcccaatccccaccgcctcgattccgattcccatctcctcgattcccgagcttggcgcgggcatgcgtcgcggcggcgcggcggaggaggacgcggaggcggcgaggttccgcggggtgcggaagcggccgtgggggaggtacgcggcggagatccgcgacccggcgaagaaggcgcgggtgtggctggggacctacgactccgccgaggacgccgcgcgcgcctacgacgcggcggcgcgggcgctgcgcggggccaaggccaagaccaacttccccctctccctcccccacgcccaaccccagctccaccaccaccaccaccaccacctcacctaccccgccgccgctgttgtcgccgctaggccggccactagcagcctcagctccaccgtcgagtcgttcggcacccggccgcggccggtgctcccgccgcggccgcccccgccgccgccgatccccgacggtgactgccgcagcgactgcgggtcgtcggcgtcggtggtggacgacgactgcgcggacgccgccgcctcgccctcgtgccggctcccgttccagttcgacctcaacctgcctcctggtggaggcggcggcggcggcggcggctttggctgtgcctacgacgacgaggagctgaggctgacggcgctgcggctctga

SEQ ID NO: 20984 - DNA, 531 bp, Oryza sativa; identical to SEQ ID NO: 11135
  Clone ID: TF_OsC366234_1

SEQ ID NO: 20985 - DNA, 1227 bp, Oryza sativa
  Clone ID: TF_OsC155_1
cagacgcgtacgtccacgcgtagaagaacgcgtccggagccagcgactgtgccaatgtactactcctaccccctctcctactcctgttaacaagttgtgctgctatatagaggagcagccgagcaagtgtgttgccacaagaaaagccttgtgagttggtaattgatagtagcaagacaatgtgtgggggagcgatcatcgccgacttcgtcccgcccgccggcgcccgccgcgccgctgcctccgacatctccgacaacgccgtcctctccgctgccggtgccggtgacgagtcgttcgcggcggccaaggcgccggcgccggggaggaagacggcgtaccgcggcatccggcgccggccgtggggacgctgggcggcggagatccgcgacccgaggaagggcgcccgcgtctggctcggcacctacgccaccgccgaggaggccgcccgcgcctacgacgtcgtggcgcgcgacatccgcggcgccaaggccaagctcaacttccccccgaccatcggcgccgccgccgcgccaccgccgcccaagaagcgacgcaaagccgccgccgcggcgaaccaccaccaccaccaccaccagcaggagagctcaggctcctcgtcggcgtcgtcgctgcctcccaccccgccgccggccgccgagcaccagctccgcgagtgcatgtccgggctggaggcgttcttgggcctcgaggaggaggaggacgacggcggcgccggtgagccatgggacgccgtcgacatgatgctcgagtaggctcgccgggaatggcagcgttgccatgctcatgcatccaagcttattcatgcatgcagcagcaagatatacaactttagtactactactatgttaattactacttactgcgtaggtaaatgaaataaaatggggttggttaattagggtgttcttctgggaatccttggctttgctaattgctagtactactatgtactttggcgttaagcattgcattgccaggtgatgcatgtcatgtaatcgtggtaattatatggccgtcctcctagagctagctagcagattagatttactatataaagtggtagtagaaatatatgtcctcctagagctaactagtgtcttgtaatgatttcagacttcttgggcaacatgagcaatgcatttcgacttccactttacatctatttaaaaaaaaaaaaaaaaaaaaaaaaaaaaaaaaaaaaaa

SEQ ID NO: 20986 - DNA, 1153 bp, Oryza sativa
  Clone ID: TF_OsC111_1
gcacgaggcacaccttcaataacttgcaaggataactcaaactacttgaatcagatcagacaaaaacatcataagaatatcacgatgtgtggaggagcactgatcccgaacgactatggcgacaagccgccgccgccgccgtcggagtcgtcggagtgggacgccacaacgaagatgaagaagaagaagaagcgtggtggcggcggcgacgacgactgggaggccgccttccgggagttcatcgctggcgacgacgacgacgacgacggcggcgtttccatgttcccttctggtgcagggacgatggagacgaccacagaggtggcgccggcggcggcggtggtggagaggccgcggcggcggcgaagggtgaggcggagctacccgtaccgcggcgtccggcagcggccgtgggggcggtgggcgtcggagatccgcgaccccgtcaagggcgcccgcgtctggctcggcaccttcgacaccgccgtcgaggccgcgcgcgcctacgacgccgaggcgcgccgcatccacggccacaaggcaaggaccaacttcccgcccgacgagcctccgctgccggcgccatcgcaggcgccgttctgcttcctgctcgacgacgacgacgacgacgacggcgtggcccgtggaaacagcccggcgtcgtcgtcggcgccggacagagcctccgcttgcacgacgtcgtcgacggtggcgtccggcgagcgaggcgatgagctcatactgctggagtgctgctccgacgacgtgatggacagcctcctcgccggcttcgacgtgtccagcgaaccacgcagtgttttgggaatggttaattagcagcgcgcacgcctgattagatcggtacatgtgaagtacaagagaagtagttactactagctaggagcaaattaacttggagtgcaagaataaaatatgcatgtctctgcactactactgtagtgttagcaagtttgctcattgttctgttgtatcctttcatgtccatttcagacttcccaatgctacataaggatgtacatatgtatgatgttgtgtgccttgttaatcaatgaatgtaaatatctttatattgcttttgtacaacaaaaatggttatgttgagactatctatacggaataatgtatcatatat

SEQ ID NO: 20987 - DNA, 994 bp, Oryza sativa
  Clone ID: TF_OsC111_2
cacacaccttcaataacttgcaaggataactcaaactacttgaatcagatcagacaaaaacatcataagaatatcacgatgtgtggaggagcactgatcccgaacgactacggcgacgacgactgggaggccgccttccgggagttcatcgctggcgacgacgacgacgacgacggcggcgtttccatgttcccttctggtgcagggacgatggagacgaccacagaggtggcgccggcggcggcggtggtggagaggccgcggcggcggcgaagggtgaggcggagctacccgtaccgcggcgtccggcagcggccgtgggggcggtgggcgtcggagatccgcgaccccgtcaagggcgcccgcgtctggctcggcaccttcgacaccgccgtcgaggccgcgcgcgcctacgacgccgaggcgcgccgcatccacggccacaaggcaaggaccaacttcccgcccgacgagcctccgctgccggcgccatcgcaggcgccgttctgcttcctgctcgacgacgacgacgacgacgacggcgtggcccgtggaaacagcccggcgtcgtcgtcggcgccggacagagcctccgcttgcacgacgtcgtcgacggtggcgtccggcgagcgaggcgatgagctcatactgctggagtgctgctccgacgacgtgatggacagcctcctcgccggcttcgacgtgtccagcgaaccacgcagtgttttgggaatggttaattagcagcgcgcacgcctgattagatcggtacatgtgaagtacaagagaagtagttactactagctaggagcaaattaacttggagtgcaagaataaaatatgcatgtctctgcactactactgtagtgttagcaagtttgctcattgttctgttgtatcctttcatgtccatttcagacttcccaatgctacataaggatgtacatatgtatgatgttgtgtgccttgttaatcaatgaatgtaaatatcttt

SEQ ID NO: 20988 - DNA, 1008 bp, Oryza sativa
  Clone ID: TF_OsC10760_1
ccctggcggaacccgcacccttcagcaacagcttagaattcagctcagtaaatctgttgattgctcgtttcaaatcatcatcggtgtttcgtttcttgatttcttgatccatccatggcgacgacagtggattggtgtggccgtggcagcaatcttcctgctgcgatgtatgacatggtggtggatagcaaggagctaatgggcgcgcttgctccgtccatggtgtccttctcctacccgtgttccgagcagagcgcgagctcgcttcttgctggcgccaactacctgactcccgcgcaggtgctccatgtccaggcgcagctacagcgcctgcgccgcccgggcgcggcgagcggctgcctcgccgcggcgccgccgctgccgatgaagcggcatggcgcggtggcggtggcggcggcggcggcggcgcgggcgccggtcaagctgtaccgcggcgtcaggcagcggcattggggcaagtgggtggcggagatccgcctgccgcgcaaccgcacccgcctctggctgggcaccttcgacaccgccgaggaggccgcgctggcgtacgacagcgccgcgttccgcctccgcggcgagtccgcgaggctcaacttccccgagctccgccgcggcggcgcccacctcggcccgccgctccacgccgcggtcgacgccaagctccacgccatctgccacgggatggacctgccccaaccccaaccccaaacccagagcaatgcgacgacgacgacgatgtcgacgacggcgacgaacaccccaagccccttcttctcctcggagagcccggtggtcaagagcgagcccgtctgctccgcctccgagagctcttcctcggccgacggcgacgtgtcatcgacgggctcctccgacgtcgtcccggagatgcagctgctcgacttctcggaggcgccatgggacgagtccgagagcttcctgctgcacaagtacccgtcgctggagatcgactgggacgcgatcctttcctga

SEQ ID NO: 20989 - DNA, 4887 bp, Oryza sativa
  Clone ID: TF_OsC396045_1
tcattcgtaattggatgatggttcgttgaggtcaaagtcaaacactatcggcctctcattcccagcagcaccttgggtcaacgaggatgcgacatcggtggcagcctgagccgacgaggagggaacgtcgatggcagcctgagctgatgaggaggggacgttgatgaaagcctgaaccgacgaggaagggacgtcgacagcggcttgagctgacaacgatgcgacgtcaacggctgcctgagccgacgaggatgcatcgtcagcagctagagacgacgaggtgtcaacgtcgaggagcattgacatcgagctcagcagcacgggctcgccctgctcaccgtcgggcacatcagcgaagaagatgtttggatcaaagtccagagcctcgtggacggcgtagtttgtcggcacaccgccaggagggatcaccacctggaagaaggaatcgctagccgccggccgtgccgccggcggtggcggcggcgcatgcgatggccctgcagtgtaggagaagacaccgttggggaagagagttgccatgacaacttcatgggctgtcagaacccgcttttccggtaaaggcgtagctgctgcggttgcgagctcaggcgtcgctggaaccggtggcggtgcagctgcgccagaggcagcgagtgtagaaggcaccggcgaaatcacaacatttggttgcattaacggtgcagttgctagtgctgatgcagatgcaggcaccaatgccggttctgtagcaggtgtgggtgccgacggcgatggagtacccacggtcaccgcagtcggaatgcgtccgcgtccgcgcccgcgcccattccaaactccacggccacgactagcaaaggttgcctcagcaacacgcccgcgtccgcgttccggtccaccgcttttggagagggttgaggctgtttggagcttcctcttcttgggtacaggtgcagcagctgcggctgcaactgcaggcggcggcatcgggaccaggatggcttcaggcaccgccgtcggcggtgccaccgccggtgcagcagcagaggcgcctggcgcgagtgtggatgaccccggcgaaatagtggcattcggctccattgttggtgctgatgcaggcaccggcactggagctgcagaaggtggcagtggagcacctgcggtcaccaccgccgaagtaagtccgcatccacgcccacgcccacggtttccacccgcaacggcggcatcggcaacacgtccgcgaccacgtgcacgtccacggccgcgctctccaccgcttgcgaagagggttgaggctgtctggagcttccttttcctatcgggtgcaggtgcagcaactgcggttgccgctgcaggcagtggcggcggtggcggcgggatcgcttcagctgccaccggcgccggtgcaaatgcggctgcagcagaagcgctggctgcgagtgtggacgacaccgtcgagatcggtgcaggtgcaggtgctgatacaagtgccttcgccggagtggcagcaggtatgggcgccggcggcggtggagcacccacgatcaccaccgtcggagcgcatttggtttcggacccacgcccatggccacgaccggcagcgttggcgatggcaacacatccgcgtccccgtccaagtccgtgctctctgctgcttgcagagagagttgcgggtgtagcaggcggtggtgcgagcgcttcaagagccgccagcgatggagccggtgccggtacagcataagcgggcgcgagtgcggatgacggcggagaaatgacagcattcggctccaccggcggcgcaggtgcatgcacagcaggtgtgggcaccggcagcggtggagcaaccacggtcaccgccgtcggagcgcatttgcctccgcgcccacgcccaccaccgccaccgcgcccatgtccggtaccgacaccgcggagaagtccacgcccaccaccaacaccgacactggcgccgcgcccgcttccccttccaccaacaaatgcaccttgggtcgacgaggatgcaacatcagtggcagcctgagccaatgaggcgggaacgtcaatggcagcctgagccgatgaggaggggatgtcgacgacagccagaaccgacgaggaagggacatcgatggcagcctgagctgacgatgatgcgacgtcaacggctgcctgagccgacgaggctgcatcgtcggcaaccagagtcaatgagttgtcaatgtcaaggagcgtcgatgtcaagctcagcaacacgagctcgtcctgctccccgtcgggcacatcggcgaagaagacgtttgggtcaaagtccggagcctcatgtatggcgtagtttgtcggcacaccgccgggagggatcacctcctggaagaaggaaccgctagccaccggcggtggcggcgcatgtgatgacccggcagtgtaggagaagacaccgttggggaagagtgttgccatgacaacgtcatgggctgtcagcaccggcttttccggtaaaggcgccgctgctgcggttgtgagctcaggtatcgccggcaccggtggccatgcagctacgccagaggcagcaagtgtgggcggcaccggtgaaatcacaacatttgactgtattaacggtgcagttgctgatgctggtgcaggtgtgggcgccgacggcgatggagtacccacggtcacctcagtcggaatgcgtccgcgtccgcgcccgcgcacactccaaactccacggccacgaccgacaaaggttgcctcggcaacacgcccgcgtcctcgtcctggtccaccacttccggagagggttgaggctgtccggaccttcctcttcttgggtacaggtgcagcagctgcggctgcggctgcaggcggcggcatcgggatcaagatcgcttcaagcgccgccgccggcggtgccaccgccggtgcagctgcagctgcagcagaggcgcctggcgcgagtgtggatgacacgaccggcgcaataatgtcattcggctccagtgatggtgctgatgcaggcgccggtgctggagctgcagaaggcggcggtggagcacccacggtcaccaccgctggagttagtccgcatccgcgcccacgcccacggctgccaccggcaatggcggcatcggcaacacgtccgcggccgcgtgcacgtccacgtccgcgctctccaccgcttgaggagaggcttgaggcagtcaggagcttccttttcctttcagctgcaggtgcagcagctgtgcttgccgcagcaggcaatggcggcggcgggatcacttcagctgccgccggcgctggcgccggtgcaaatgcagctgcagcagaggcgctggctgcgagtaccggcgagatcacagaactcggtgcaggtgcaggtgctgatacgaacgccttcgccggagctgcagcaggtgtgcgcgcctgcggcggtggagcacccacggtcaccgccgtcggagcgcgtttggctccgctcccacgcccacggccgcggccggcgaccgcagcgttcgcgatggcaacacatccgcgctctccgccgcttgcggagagggatgcaggtgcagcaggtggcggcggcgcgagcgcttcaagagccgccggtgctggagccggcgccggcgcagcataagcgggcgcgattgacgctggagaaacgagagcatccggctccaccgacagcgcaggtgcatgtgcagctgctgatgcaggcgccagcgtcggggctgctgcacctgcagcaggtgtgggcaccggcggcggtggagcaaccacggtcaccgccgtcgtcggagcgcgtttgcctccgcgcccacgcccgccaccgccaccgcgcccaagtccacggccgccaccaacaccggcaccggcgccgcgtccccgtccaccaacaaatgcagcttcatcagatccagatgacgtcggagctggcacctgcaccggcaccggcaccagagcaacatcagatgacggcggcgcgggcacctgcaccggcaccggagatgcatcagataacgtcggcgctggcaccggagctgcatcagatgacggcggcacgggcacctgcacaatcaccggagatgcatcagataacagcgtcgctggcacaggagctgcatcagatgacgacggaggcgctgccacctgcaccgtcaccggagacacatcagacgaaggcggcggcgcaggcagcaacaggagaggagcaggagcaggagcctcgctcgcctccgcctctgccgccgccgccccacgttcctccaccacacgctcgcggcgagctcgagctcggtcgaagaacgctagcatggaccgcatctccgccgaaagcggcgacggcgtctgcgcgggatcgccgaagttggtcgccgccgcctccccgcgcagcacccgcgccgccgcgtcgtacgcccacgccccctgctccgccgtgtcgaacgtccccagccacagccgcccggcccccgtcgggttgtggatctcggcgacatacctcgtcccaaacctcaccctcaccccacgatacttcgtctccgggtcaatctcctcccactcctccgccgccgcctgacgacgccagcgccgccgctccacggcggggacgacgcgaacctcgccctccaccaacggcgaaaccaaaacctccgccgacgccgacgacgacaccacctgatccccctccatgacgggcacaatcacgagctccaacccggaaccggccctcaacctctccctctccccgggcgacagcagaaatccgccgccgccgcccgcggcggcggcgcggcggtactcgttcccccgtacctgcacggcgaggcgcgccgactgctgggagtactccaccagcaagcctttcatcgcctccgctactctctcctccggatccat

SEQ ID NO: 20990 - DNA, 543 bp, Oryza sativa
  Clone ID: TF_OsC332429_1
atgagcaccaccaacagctcatcctctgtctctgtcccagccatggacgcccatggacaggaggaggaggaggagccgatgcaggtgcagcaacagcaggcgttccgcggggtgcgcaagcggccatggggcaagtttgcggcggagatccgcgactcgacgcgcaacggcgtgcgcgtgtggctgggcacgttcgacagcgcggaggaggcggcgctggcctacgaccaggcggcgttcgccatgcgcgggtcggcggcggtgctcaacttccccatggagcaggtgaggcgttccatggacatgtccctcctgcaggaaggggcgtcgccggtggtggcgctgaagcggcggcactccatgcgagcggcagcagcggggcggcggcgcaagagcgctgcacctgcaccggcggatcaggaaggcggaggaggggtgatggagctggaggacctgggacctgactacctggaggagctgctagccgcctctcagcccatcgatatcacctgctgcacaagcccaagccaccactccatctga

SEQ ID NO: 20991 - DNA, 1200 bp, Oryza sativa; identical to SEQ ID NO: 11101
  Clone ID: TF_OsC341110_1

SEQ ID NO: 20992 - DNA, 727 bp, Oryza sativa
  Clone ID: TF_OsC251034_1
ccgggctgcagcacgtcgggcgaggcctcgctcgcttactcggtgtttaggcatggacgtttctgctgcgctcagcagcgactactcgtcggggacgccgtcgccggtggcggccgacgctgacgacggctcctccgcctacatgacggtgtcgtcggcgccgcccaagcggcgggcggggcggaccaagttcaaggagacgcggcaccccgtgttcaagggcgtgcgccggaggaaccccgggaggtgggtgtgcgaggtgcgcgagccgcacggcaagcagcggatatggctcgggacgttcgagacagcagagatggcggcgcgcgcgcacgacgtcgccgcgctcgcgctccgcggccgcgccgcctgcctcaacttcgccgactcgccgaggcgcctccgcgtcccgcccatcggcgcaagccacgacgacatacggagggcggcggctgaggcggccgaggcattccggccgccaccagatgagagcaatgcggccaccgaggtggcagccgccgcatcgggcgccactaattcgaacgccgaacagttcgcctcccacccgtactacgaggtcatggacgatgggctggacttggggatgcagggctatctcgacatggcgcaagggatgctcattgacccgcctccaatggccggtgatcctgccgtaggtagcggcgaagacgacaacgatggcgaggtccagctatggagctactga

SEQ ID NO: 20993 - DNA, 923 bp, Oryza sativa
  Clone ID: TF_OsC303620_1
gacctgtcgacctcgtgctcacactctgtagctgctaagcttggtagctcgccatggccatggcgaaggagctccaagaaacctcctcgtcttcgtcctcctcggctgcctccacgtcctcctgctcctccgccgtcacggacgcgtggtcgtcgccggccagacccaatgctgtggccggggggaagaggaagaaggaggtggtaggagaggctgatgaggctgcaggcggcggcgcaggagaggaggaagaggaggaggcggaggcggcggcggcggggaagtcgtcggcggcgacgaagaagaggaagcggagcagcgacgggaagcacccggtgtaccgcggcgtgcggatgcgggcgtgggggaagtgggtgtcggagatccgcgagccgcggaagaagtcgcgcatctggctcggcacgttccccaccgccgacatggccgcgcgcgcccacgacgtcgccgcgctcgccatcaagggccgcgccgcgcacctcaacttcccggacctcgccggcgtcctcccgcgcgccgcctccgcctcgcccaaggacgtccaggccgccgccgcattggccgccgcgttcaccacgtccccgtcctcgtcgccctcctcctccttgtcggccgacgacgtcgcgccatgcgtcgtccacgccgacgccgacgagcagcctgccgctgccgccaagaacgacgacgacgacggctcaaccaccgcgccggtggcggcggcggcggcggcggcggcggcggatgagcagcagctgttcgacctgccggacttgctgttcgacatccaggacgggccgttcgggttcccggcgatgtgggcgccgctcgccgacgtcgacgaggtcaatgcggagctccggcttgaggagccattgctttgggacttgggagtaacagatgcttaa

SEQ ID NO: 20994 - DNA, 1145 bp, Oryza sativa
  Clone ID: TF_OsC375_1
agccccgggctgctggatttcggcacggggcacacacccaaacccaacctcccaaaacacccacccggtttaccagagatccgcgcccgccacttgtaaacctgctgcacccatggcgcccagagcagctacggtggagaaggttgctgtggcgccacccaccgggcttggtcttggcgtcggcggaggtgtcggagccgggggtcctcactacaggggcgtccgcaagcgcccgtgggggcgttacgcagcggagatccgtgaccctgccaagaagagccgggtgtggctcggtacctacgacacggcagaggaggccgcccgcgcctacgacgccgccgctcgagagttccggggtgccaaggcaaaaacaaactttccgtttgcatcacagtcgatggtcggctgtggcggcagccccagcagcaatagcacggtagacaccggtggcggcggggttcagacgcctatgcgggccatgcctctgccgccgactctggacttggatttgttccaccgcgcggctgctgtgactgcagtcgccggcaccggcgttcgctttcctttcagaggatatcccgttgcacgtccagcaacgcatccttactttttctatgagcaggctgcagcggctgccgcagctgaggctggataccgtatgatgaagcttgcaccgccggtcaccgtggcggcggttgcacaaagtgactccgactcctcgtcggtggttgatctcgcgccgtcacctccagcggttacggcgaacaaggcggcagctttcgatctggatctgaaccggccgccgccggtagagaactagctcaggatgggttagctgacgactttgtagtttctctcttattttcttctttgatggatatttctctccgatgttttggtcctctgtgtttttgtttagtagcctgtgagagacggaagagccttgtaaatagtttttctgccgagggcgaaattcatcttgggatctgttaattagaacagatcatgccggcgatgagatggactaaaccgtggagtgtatgtattcctttatattagtatgaagaaattattcagaaagtcacaaaaaaaaaaaaaaacactgagtttgattgacgttttcacgtgccgaattcctgcaaaaa

SEQ ID NO: 20995 - DNA, 702 bp, Oryza sativa
  Clone ID: TF_OsC120_4
cagtccaccacagcgcgcggcgccatggacgactcgtcgttcggttccgagccgaccacgtcctcctcgggcggggaggcgccggcctccccgccgtccaccgcgtcgtcgtcctcagacggcgccggcggcaagaagaagcggccgcgcaaggacgggcaccacccgacgtaccgcggggtgcgcatgcggagctggggcaagtgggtgtcggagatcagggagccgcggaagaagtcgcgcatctggctgggcaccttcgccaccgccgagatggccgcgcgcgcgcacgacgttgccgcgctcgccatcaagggccgcgccgcgcacctcaacttcccggacctcgcccacgagctgccgcgcccggccaccgcggcgcccaaggacgtccaggccgcagccgcgctcgccgccgccgccgacttcccggcctcctccgccaatgcgggcgccagcaataaccccgacggatcggacgacgcgagcgccgggtccgcctcgccgcccccgccgccggacgccgctgacgacgcgctgttcgacctccccgacctcctcctcgacctcagatacggcccgcccagctcgggcctctcgtgcgcgtcgtcttgggaagacgaagtgggcttaatctccggcgccggtgccgccgccgccggcgtgttccgcctggaggagccacttctgtgggagtactaa

SEQ ID NO: 20996 - DNA, 1371 bp, Oryza sativa
  Clone ID: TF_OsC7483_1
atgagcacaaaaaagcgagcgaggtgggacccacctcctgaggaggaaaacggtgggcccacccgtcagtcggcgcaggtccggtactacagcactgcgagactgccggtggggccctcgggtctcaggtggggagcagttgctgccgtcctgcagccgcatccgcccaccccgtgcacccggtctaccgtacgcctccccctacctgcagatgggccctacctgtcagtgaaagtactgttcccggttcacgtgtcattgtcactactcgatagtatttcaaatttccgggtgctgtcttcaagcaatgcctcgaaaacagagctagttaagaaatattgccaaacgatggatggcatccttgatcacttggaggtggccctaaacagagcttttcctcagattactccagatggtgaactaagtaaagtgcttgaagaacttggcgctaccatcaatgaagcgactgagctagttggaggctggaatcaaatgatgagcaagatttattttgttattcaggctgattcaattattgccaagatgcagatatatgtattcgaattatgccaaattgtcaattctctcatgcagattgagtcaatgcatttggaggatcttgaacacgatagctgtggaaaaatttcagatgtcattagggaggcttccagggctttagcaggggaagttatgccaaattcagaggaatttggaaagattcaaactactttgagcttatccacaaatcaggagttgctgatggaatatgttgcacttgttaagattaaaacaaaaggtaatcatgaagataacaaagaaatggatgatattaacgatattgttgaattagtcaaccatatgcttgacaaacatgtggaagaaaagcaaacacgtagcattaatggagtgaccattcctgctgatttttgttgtcctctttcccttgaactaatgtcggatccagtgattgtggcatctggtcaaacgtatgagcatgtttttatcagaaaatggtttgatctgggatacaacatttgtccaaagacacgccaaatattgggacacaccaaattgattcctaacttcactgtcaaacagttgattgaaaattggtgtgagatgatagagtgtcatcatttgggccgtgtcgtgcgcgacggcggcggcctccggcgtggcgtaggaccccagccacagccgctcccgcgtgccgggcacccggatctccgacacccacttcccccaccgccgccgccgcacgcccctgtacctgcaccgctcctcctcctcgccgccgccgcactccgcccggctcattgcctcctccggcgagctgagatcaacctcaccgtgatctctctccgttcttga

SEQ ID NO: 20997 - DNA, 1134 bp, Oryza sativa; identical to SEQ ID NO: 11107
  Clone ID: TF_OsC371165_1

SEQ ID NO: 20998 - DNA, 2014 bp, Oryza sativa
  Clone ID: TF_OsC16652_1
ctcccctcgagaggccgagagagccgagctacagacctccgcgctgacgccaccacgcggggcgaccccaacaaaagaaatggtgatgcgaacctcctcccccgaacgcccaactaaacaagcatcagctactcgacccacctatctggcctggctcactctttctccgtttattttttatttactcttcgtaactaaaaatgccatttccaccacgtgggtgagtgcgcgcgccggcggaaagttcaacgaagcgtcgtagcgagcgcggccacctacgtaaagctcgccccgtctccgcctcggcttgccattcaactcgaacacaccacacactgaagtgtgtaaccaagtttgagacagaggcgaggtcgggtcagcaaggaagacggcgatgacggcgcgaagcatgttgcggaaccacccggaggcgtcggtgctcgacaccatccggcagcacctgctggaggagccgcgcggcggcggcggtggcgaggcggcggaggcgagcttcgggagcctggtggccgacatgtggagcgactcgctgccgttccgcgacgacgacgccgacgacatggtggtgttcggcgcgatgcgggacgcgttctcgtgcgggtggctgcccgacggcgtgttcgcggaggtgaagccggagcccctgctctcgccggactcgtcgtcgtacgacgggtcctcttgctgcttcggcttcgcggacgtgtcggagccggtgacgccgagcgacgcggcgtcgggggcggcagaagcggcggccgcggcggcggcggcgacggcggagcacgggaaggaggaggaggccgcggctgcggtggcgagggggaagcactacaggggggtgaggcagcggccgtggggcaagttcgcggcggagatccgggaccccgccaagaacggcgcgcgcgtgtggctcggcacgttcgacaccgccgaggacgccgccctggcgtacgaccgcgccgcctaccgcatgcgtggctcccgcgcgctcctcaacttcccgctccgcatcggctcggagatcgcagccgccgccgccgccgcagcggcagcggcagccggcgacaagcggccgtcgccggagccggcgacctcggagtcgtccttctcctcctcatcctcctgcaccaccaccaccacctcctcctcaacctcctcctccggctccccgaaacggagaaagagaggcgaggccgcggccgcgtcatgtccatgcccctggtgcccccgccttcccagctgaactggccggtgcaggcatggtaccccgccgccgcaccggtcgagcaggtggcgatcaccccgcgcgtggagcagctcgtcatctaaagcgcgcgacgcacagtgaagcaagcaaaccaagccagcaatggtcgacgtcatatcaccttgacgccccaacggattgaccagcgagcacgagccagccattgctttgcacggcgcgagacggcaaagggatcaggcgatggaaccccgtgagcgcgacggcgcaagcgagcagcatccccgcgaaagctccaccggatgcaaaattgcaaacgcgataagctcgcgggtgcaactggtgaaattgggtggtgcaatcgtgtgtgggcgagctctagcagatagtagcgtggtggtggtggtggtattgttgtcccggcgcaactcgcccaagtgggggggtgaggaggatactctgtgtctactagcgtgttcttgtcagggaatgcacggtgtcgtcaagtgtgcaaatcctaagggtcataattcgcgtcattgtcactagtggatcacccgagtgagtttgtgagggtttcagtgaaaaaaaaaaactgtacaaacgatgtcttgtggtgtggagaagcagcagagatgaagaacaatcaatcatcccctttgttcttttgatcttaggagtccaaatgataggtctaatcagtaatcacaaggtcgcaaacatttaaacccagaaaaaaaaaaaaaaaaaaaaaaaaaaaaagggcgg

SEQ ID NO: 20999 - DNA, 972 bp, Oryza sativa; identical to SEQ ID NO: 11115
  Clone ID: TF_OsC418377_1

SEQ ID NO: 21000 - DNA, 966 bp, Oryza sativa; identical to SEQ ID NO: 11118
  Clone ID: TF_OsC343773_1

SEQ ID NO: 21001 - DNA, 430 bp, Oryza sativa
  Clone ID: TF_rsiced_10763.y1.abd
gcacgagggacacactgccacagacacaatccatagcttagctcctctccactggagggatcgatcgatcgatggactgggcgtactccggcaacagctacggctacggctactactcgtcggggacgtcatcccctccggcgggcggcgaggacgcgtacatgacggtgtcgtcggcgccgcctaagcggcgcggggggcggaccaagttcaaggagacgaggcacccggtgtacaagggcgtgcgcagccggaaccccgggcggtgggtctgcgaggtccgggagccccacggcaggcagcgcatctggctcggcaccttcgagaccgccgagatggcggcgcgcgcgcacgacgtcgccgcgctggcgctgcggggtcgggccgcctgcctcaacttcgcggactccccgcgcaggctccgcgtccc

SEQ ID NO: 21002 - DNA, 1133 bp, Oryza sativa
  Clone ID: TF_OsC16240_1
ttttttttttttttttttttaagaacaaaataacgtaaatttctcattaatcagagattgatgatcaatatgttacatcgaacaacaaaatgttttctttttcttttcttgtttttttccttctttctttaaaggaactgtaacaccgggagtagtagccttttcctcatacctatctccccgtgcaaaaaggacacgatctatgtacacctagttgatcaatcctggcaattaaacggacgattaacctcttactattacacgtcgctctagacttttctacgagggatttgtgggggggtcttgtcgtcgtcatcgggcgctgcaacctacgcctcctcgatcggcggcggcaggttcaggtcgagccccacgccgacggccggcgaggcgtccaccacggatgacgacgagccggtgtcgctctgctcgtccaggcgagctacctccttcttgacgctgacgacggccggccggcgaggcaccggtgccgcgacggccacggtcaccgcgaccctggggtcgaggaacaggaacggctgggcggccaccatggccgacatcccgaggctcagatcgagcgaaggcgaggcgggcacctgggccttggccgcggccgccaccggggcggcggcgggcgtgtcccgggaggacgactcgaccgtgctgctggtcgggctgacgacggccagcgccgccgccttgggcagcggcggcggcggggcgtggtggtgggcgtgcgcgaaggcgacggggaagttggtcttggccttgggcccgcggaagtggagcgcggcgctgtcgtaggcgcgcgccgcggcctcggcggtgtcgaaggtgccgagccacacccgcgccttcctggccgggtcacggatctccgccgcgtacctgccccacgggcgcttcctcacgccgcggaacctgggctccatgccgtctcctccgccctccgccacggcgacggcgacggcctcggcggcgttcctgggagccatgtccgttcttgttcgggtcgagcaccacgagcagagcgagctaaggcgggcgagagcgccaagtgttcgaccggtggatggtgggtggttggtttggcgccggtggtgcgtcctcgtgccgaattcctgcagccc

SEQ ID NO: 21003 - DNA, 395 bp, Oryza sativa
  unsure (1)..(395): unsure at all n locations
  Clone ID: TF_jC-osflLIB3479036h12b1
cccacgcgtccggtccatttctttgcagtcctcgcatgcgcaacgtgtccactgtttagatggatgcacacggtgacgagtcgttcgcggcggccaaggcgccggcgccggggaggaagacggcgtaccgcggcatccggcgccggccgtggggacgctgggcggcggagatccgcgacccgaggaagggcgcccgcgtctggctcggcacctacgccaccgccgaggaggccgcccgcgcctacgacgtcgcggcgcgcgacatccgcggcgccaaggccaagctcaacttccccccgaccatcggcgccgccgncgcgccacccggcgccaagaagcgacgcaaagccgccgccgcggcgaaccaccaccaccaccaccaccagcaggagagc

SEQ ID NO: 21004 - DNA, 1443 bp, Oryza sativa
  Clone ID: TF_OsC11135_2
atggagcaggagcaggatgaagaggaggaggaggcggaggcctcgccccgcgagatccccttcatgacgtcggcggcggcggcggccaccgcctcatcgtcctccccgacatcggtctccccttccgccaccgcttccgcggcggcgtccacgtcggcgtcgggctctcccttccggtcgagcgacggtgcgggagcgtcggggagtggcggcggcggtggcggcgaggacgtggaggtgatcgagaaggagcacatgttcgacaaggtggtgacgccgagcgacgtggggaagctgaaccggctggtgatcccgaagcagcacgccgagaagtacttcccgctggactcggcggcgaacgagaagggccttctcctcagcttcgaggaccgaaccggcaagctatggcgcttccgctactcctactggaacagcagccagagctacgtcatgaccaagggttggagccgcttcgtcaaggagaagcgcctcgacgccggggacaccgtctccttctgccgcggcgccgccgaggccacccgcgaccgcctcttcatcgactggaagcgccgcgccgacgtccgcgacccgcaccgcttccagcgcctaccgctccccatgacctcgccctacggcccgtggggcgcggcgcgggggcgttcttcatgccggcccgccacgctcttcgagcatcaccgctttcgccagggcttcgacttccgcaacatcaaccccgctgtgccggcgaggcagctcgtcttcttcggctccccagggacggggattcatcagcacccgcccttgccaccgccgccgtcgccacctccgcctcctcaccaactccacattacggtgcaccacccgagccccgtagtcaccgccggcctgcccatggttgtcgactcggtgccgcacgtcaacaacccagcggcggcatcgaagcgcgtccggctgttcggagtcaacctcgataacccacatccggacggcggccagtcgtcgagcggccacgacgccaatgcattgtcgctacggatgcccgggtggcaaaggcctgcaccattgaggtcgctggaattgcctccacacatgccggctggtgcagctggagcggagtcctctgccgcgtcgtcgccgtcgtcatcgtcgtcatccaagagagaggcgcactcctcgttggatctcgatctgtgaaggagggatcaggccacctcgatcgatcgggagcgtaccaaaggaaagttcaaaaaatccatcttccgtctgctgccttcttctacttctccaccttttgcaattctccatcataactttgatcatagagttagcataacttttggtttccttttttgtttttggccattcacattcttatgtttgtttgagaatatatagagaaaaattaggcgaattaatgaattattaatgtttttatttgggttt

SEQ ID NO: 21005 - DNA, 483 bp, Oryza sativa
  Clone ID: TF_LIB4309-024-R1-K1-C1
caggtgtgggggttcaccggtgagcgagcttggacgtggcggagggcggaattgtgggggttctttcagttctccgagcgattcggggaagggggagaggagaggtggtggatgtgagatccgatggctgctgcagcgacggcggcggcctcgccggttgaggggctcaccggcggcggcggcggtggtggtggaggagtggacgggctgttcgtggagctgtggcgcgcgtgcgcggggccgctggtgacggtgcccgccgtcggggagagggtcttctacctcccgcagggccacatcgagcaggtggaggcatcgacgaaccaggtcgccgagcagcagggggctccgctctacaatctgccatggaagatcccgtgcaaggtcatgaacgtcgagctcaaggctgagcctgatacggatgaggtgtatgcgcagctcaccctgcttccgggagagcagcaggatgggaatgggagtggt

SEQ ID NO: 21006 - DNA, 2604 bp, Oryza sativa
  Clone ID: TF_OsC1713_3674
ctagttcggacttccattcggatcaacaagcttcaatccccagctcacgtcgtcgcagtgccgaacgtggggcagtattgtcccggtgtccactccgcgcttcgtcttgcagtcgtagaacggcggcgagtggaagcacggctccatggacacgtcccgtccgcacggcgggtccggcaccgccgtgatgttcaccggcttgtacatcacccacggcctcagcccgccgagcccctgcgccacgtacccgaacgtcgaccagccgctggtcaccagcacgtcgcacaggctcaggaggtacatctccgcccacgccttgccgtcgtgcgacttctcgccgaagtgctggtactcctcgtggctcggctggtgcacgctcacgtcctcgccggtcgccgtcgcgcgctcccagtacatagccttgacgcgctcgtagaaccacggccggagagaggtgatcaggacggccttggagttgttgctcccgccgtgcggcgtcgtcggtggcgtgggcatggccgcgtcctccaccgcgtcgagtacctccgggagcagcttctccttccacgcgcacgacgtgatctgctcgaggacgacgtgcggcgacttcgcctgccggtggtcgaagacgcgcacctggacgccgaccagctgccgcgccgtcgcgaggtacgcgcggtagtaccgcgcgacgaggccccagacatggttggccgggtggaacaggtaccggccgaggtggtggaacacggcgtcgcgctccgggaagagcgcgtcgagctcgtcctggaacgtggtgaccaggaacagcgacggcacgatgtaggtgtccgtcctcatcaccagccactggatgttcgacagcagccgctggtcgtcgtcgcagaagaacatcttgtcgccgtcgccgtagtcgtggtccaggtggaggtacgcgaacgccggcatctgcgccgcgggcatgtcaccgtcagtactcccgtccgtcccgagcaccttgttcttcagcatgttgccgtagctctcggcggtgtcggcgctgaagttcgcgtagctcgacgccagcgggaagtcgcgtgggagcagccacgtcgtgccggggaacggctcgcagaagagctcgtccatctcgttgctcgggtcgacgaggaggacgcggccggtgagcaccgcgtagaggaaggccgacgcggcggcgaggatgcggttcccgaggccgcggtacgagatggagaccacgtacttgcactgctcgtcgtccggcgagtgcgcgtcggcctcggcggcgccgccgtccctcagccgttgcacggcgcggttgtacgactccgtgttggggccgcaccgtctctggagctcctcgtgcatccgcagccgcgccacgaggtgcggagatggtcgtcggcccgggttccggcggtacaggtatgactcgtacctgctgcgacatgatttctcgtcgaatccttcgggcaagaggccgccgaggagtttgtcagcggcgcttcgtgccaatggaatcgatttatcgtcggaacctcgacgcagggccttggtggcggcgatccagacggcggggcgccgcccgccaagaacggcgaagaccgtcgccatgacaaaggcggcgagcacgacgtaggccacggagctccatcgcttctcggcagcagccaccgccgcagctggcttcctcttccgcggcacggagcgctccagggactcctcgcccgcctccagcggcctgccgtcgcactgctgctgatccgctcctcgcgccgccgcggcgctctcggcgcaagccttgggcttgcgttgctgcacctgcattgctgttatatcgccttcgctgagcggacggtgtagtgtggtgcacacgcattgcctcttcatcaagaacgcctcttgccccatttccaccgccctctcccgcttccggcaatcgccgccgccgccggtgatgtccatgccgaacagcctcacgacgcgtgttgcttcgccgcttgtaattggcttctcgtcgccggtggccgccgccgtgttgttcttcttgcagtcgatgaagagcagcttgtcggggccatacgccgagccggagaagactatggtgtcgccggcgcggaggcccttctccctcacgaatcggctccatcccttggtcagcacgtaactctggctgcttcccctcgccgtcctcgaagttgaggagcacgcccttgcagagttgcaggtggccgcggcggcggtggcggaggcgtcggagctcgtccgccgcagcgggaagtgcttctccgcgtgctgcttgggcaccagcaggcggttgagcttgccgacgtcgctgggcgtcacggccttctcgaacagtggctcccgcgcccacgacggcgtgggctgcgcgcgggcgcccatgccgcgcccccggcggagcccctggcggagcttgcgcgatggtaggccagcttggagacagggcaggcggtggcgcggtcgccgtcgccactccggcccccggccgccgctgccgccgaggcgttcgaacggggaagagaaaagggggagagaagagagagaaggagggaggaggaagggaaggataaaggatgacat

SEQ ID NO: 21007 - DNA, 5667 bp, Oryza sativa
  Clone ID: TF_OsC788_1
atgcggctcgaagaagaggtggagcgggaagacgacccccggcaggaatcaagattcttagatgtaccggcttccttggttgcaagctaggaacacacaacccacacgcctcgctgcctcgattgattgattgattccttggagaagaagaaggaggaggaggagatcgagcagccgctgacgctcgtcgtctacctcccgatctgatccgaggagcgaagcgaacaggggcaagatgcattcgacgaatctgctgctggaggagcccatcaggatggcatccatcctggagccatccaagccgagctttttcccggcgatgaccaagatcgtggggacgctgggtcccaagtcgcgcgccgtcgacaccatctcctcctgcctcaaggccggcatgtcggttgccaggttcgatttctcgtggggagacgctgagtaccaccaggaaaccctcgaaaacctcaagctcgccatcaagtccaccaagaagctctgtgctgtcatgctcgacactgtcggcccggagttgcaggtggtgaacaagagtgaggctgcaatctcccttgaagcgaatggcactgttgttctcacccctgaccaggggcaggaggcctcctccgaattgctgcccatcaacttctccgggcttgctaaggctctgaaaccaggtgctacaatttttgtggggcaatacttgttcactggcagtgagactacttcagtttggttagaggtttctgaagttaaaggagatgatgttggtttgtgtgataaaaaattctgcttctctggctggttcactgtccacccgtagattgttctcagcttcatatcgatttaagtagagtgtttaatgaggagacggaagttgttagacgagggagatcttcaaaaaaggattgacttggccctctatgcgaatgaatggcaacgtttaaagtgtatgactgtgacgagcatcttctacaaaactaaggaggagtcggtcagagtaaattttaccatatgatccgaaaatgtagtccgtcaaaaacaattactctgttcggatgaggttcaggatgaggtttgaaggagaagaggcaccagagcagagtgtttactggtactataattggcagtgagaatctcgacccagtgtggcctgaatcaagttggagatccctgaaggtgcggtgggatgaaccatcaactattccgcggccagatagagtctctccttggaaaatagagcctgcttcatcacctcctgttaacccccttcctctttctagggttaaaagacctaggccaaatgctcctccagcatctcctgaatctcctattcttacgaaagaagctgctagtaaggttgacactgatcctgctcaaccacaaagaagtcaaaacggtacggtcttgcaaggtcaagagcaactgaccttgaggagcactcttacgcagagtgacgactctgatctaactgctaataagacaatgaggcgggcttcttgcccaaatgcagccaaagcctacctgttgaaattttagtctattccccctataaaacatttcatctagggtggaatttctctggctcatttgaagcatgacaaatcggctcatagatatagggctctttccgctgctttctgatcccaaagcatccagctggattcaaacaacctctatcataatgaatccgttttgaaggttgctcttgctgacggtcaagtttctggtgcgaaaaagtcgcatttatcgcgttgttgtctgccagaaaatgggacattccgcggttgagaagatcagatgacgttggactattagacaaggagcgtgtgctcgtcgtcgagtaaactatgacatgttctgccagattttgactgggccaaaaaggtcgcttcttggctatgtataatcctatagcttcaaatgcgcagtttttcctatggtgtattcataggattttcccttgcagcttgaaaccattatgatttagttgaagtaaattaaatttgcgcgagttttacctaatggtgttaatcagagggatttaccttaacatatattgaaacaactacgttttagttatgtaaagttatcagatttcaatgcatcatatcacttcgatgggcaaatggaataatgaaatcggtaatgtaccctttggtcttatcagaaaaaaaaaataaaaaaagcggtcaaaaaactcaacaaagttccaaaagatgttcaaagcaagaagcagacgaacaacaacccgaaggatgtacatgtcccccaggccctggaaccaatggatgatcttattgcatcaaatggatacaggcgtcgggaatcacacaatattgagcgttatacccattttaatgactacgaggagattgagaagtggaaactcctgcatgacactaatggggctaggcatggcatagagaccacgaatgttgcagaggcgtacaatgaggaatttcgcaactttgtgccggtacatttatattttatcgaaggaggagttctgcacagtacatcgaagttgaaaaggcccaaggaaagatgactcttcaaaaaatgagaaaggtcatctgccgatgcccaacaaatcagataactaggttcagtgaagcgagatgatacaagaggtagatcgcatggagtcttgagagagagatgccattctgcgggtcccagtcaagtaaaccccctgatgtgttggtgatcacccctgcccccccttttgcttatctgatggctgatgcaatgcaaaccctatggctttagctagtatgagatgtagactgcctattgtttatccttttgttcctttttcttctcttggcagaaagatttagggccaagatttatcattattgctattgcccctctcaactcctcccaactctctgatgtaaatatttatctacgtagccagccacccagccagaagtagagcagtagtagtagagttaccccctaccttgtattaaccagcagcctattcccccggataaatttgtgtaagctctgtagctcgagataaaaaaaaatggcgatcgaacgaacgaacaaatggcgtatgtattgtctgatctttgatataaatatttatcaatgaatgtatcataaatggaaacaaagcaacaacgtgcgaggaggaatagaaggggctctcaagatatggaagaggagtggccttacccgttgcttagcaaagagatcgatgcacggcatcgtgcaaagaagatatatgatgggaattcttgctctagtctagctgtcctgataccgcgtacagccggatggttgtcagctgcaggtcttcttaccttcgtgcagatgacgcaggcaaggatgcattacgacgcaagagaacctaaacaaaaactaatgggggcacatagcaaacgacgccaaaatatcgacaagtccctacttatggcactggttgataggtggaggccagagacacatacattccatctaccgtgcggtgaaatgaccataactttgcaggatgtgtcaatgctcacggggctgccactagccggccaggcaattgtacttccggaccctccggaagattggagagatgatattgtatcacgatatgcctgtattttgtcacggtacgctaccggtgatacagacgatgatgaggacaaaatatttttctctgaaaaagaaactcatggccccacattgaagtggttgtcacagtttgaggtgcgatatatgcccgacgatgtccaggagtaccaactgacgttgtaccttgaggcttatctactttggctgtttggttgggtcatgttcaccggctcgcacgggaaccctgtggacgccaggctaatcccccttgctcgccaaattgctgaaggtaatatatcgccttctacacagtttacctggggatcagccatccttgcagccacataccgtggtttctgcgacgcttgtattaagaccgggcaaagggaggcgattttcacggggtgtccacttttggtcatgttgtggtcatacgagcgcttctcgttcggacgtccatacatgagcgtggccgtggcccacaaggatgattacactgacgcagttgatgatcgtcctaccttcggaactcgatggtgctacggaccgccacagtgggcaagaatccaggtgcacaatgtgtacgagtacttcaccgaggcgttcgaaagccttagggaaaacgaagttcggtggactccgtacacgaacgaagaggccattttgcgtgcaccacatggagtaagcatcttatgctaccgcgatgaagcgtactggatgacacgaaaaatgctggtgtacgacatatttgtcgaggggcaaaataggcaagctgacaataggttttgtcgatctatgcactcaaggatgaccccatggatagaggcgtggtcccaggccttgaatgatgtcgtccatgagaccagggcatacgaccacaacacttacaaacaatacatggcctggtacacatcgcagactcgcatccggctgcttgcaccggaggatcccgacgagcgaggtccaccaacaattgatcaaatatatgatatgcagctagcaccccccgctcacttgacgaccgacattgcaggggagctagtaaaggaggcgaaaacattatgggagaagcttagagatggaatggcgggtacgaatcaggaagtaatggctgcggtcgactccctccgccgaaaaggaaagcgaatcatgcgcctcgcatcgtgccgtcattcctcggacatctataatccggcaacatcaagaaggacgttcgagccaatgcgtgagcgtccctctacctcttcccggccgtccacctcatcccgcccttcagcatccgcgcgacgatccagtgatggtcgtgtaggagtaaggtcaacttcctttcgtgagccacccactattccgactatcccaaaaatcactgaaatttctgaacgcctaggaggctttggttcaactcaagcacaaccggaatgggtacccccatatagctctacgcccatcacctctcaatggcagggtgagagtgcgtcgtttgctgagggaacgcgaatggtccgtcccgtgcctcatatgcctcctgctaggccacaaatgattcgtcaaatggctcccgatgtgccaacctcacactggcaaggaggatttgcaccatttgcagggactagccaaggtatccctaccataccccaaatgtctgcagattttatcggtcaaggagggtttacgtcgttaggcgggcctactcagccggttccactgcatgcacctacatatggcaccaacccatggcaaggacaatccatggattacggtgggtcatttcgccctgaactaatgtcagggtttaggccttacactacatcgtacggcgacatgtcctgcttcggtggagggtcgtcatcggtacccaatgagcttcgcacttcacaaactgatgatgcaccccaagtgacacagcccatacaaccagaggttggcgaaggaaacgacaatgacccgcgtagatctaaccgtgagcgccatgagccgaaccgtctgtcactctcaggcccgcgacatgccgtaggacaaaggaaaaaaactacaaaaaaacgaggtggcacatctatgactacgactgaccatgacgatgatgacgagtacaactga

SEQ ID NO: 21008 - DNA, 3120 bp, Oryza sativa
  Clone ID: TF_OsC789_1
atgaagctctcgccgtcggccggcggcgtctccgaccagccgccgtcgccgccggaagttgcagaggagcagaagtgcctaaattctgagttgtggcatgcatgcgccggccctctcgtttcgctgcctgcggtcggtagtcgggtggtttattttcctcaaggccacagtgagcaggtagctgcatcaacaaataaggaaatggagtctcagatccccaactatcctaacctgccgccgcagcttatatgccagctacataatgtgaccatgcacgccgatgcagagacggatgaagtctatgcgcaaatgacgctgcagccactcagcccgcaagagctcaaggatccattcctacccgccgagctaggcactgccagcaagcagccaacaaattatttctgcaaaacgttaactgctagtgacacaagtacacatggtggattctctgttccccgtcgagcagcagagaaagtatttcctccgctggatttcactcagcagcctccagctcaagagttgatggcgaaagacctccatggaaatgaatggaaattccgtcatatctttcgtggccaaccgaagcggcatcttctgactacgggttggagcgtctttgtaagtgcaaagagactggttgctggagactctgtcctttttatctggaatgacagtaatcagctgcttctgggaattcgtcgggcaaataggccacaaacggtcatgccatcatcagtattgtctagtgacagcatgcatattggtctgcttgctgcagctgctcacgccgcatcaacaaatagccggtttactattttctataatccaagagcaagcccttcggagtttgttataccactggctaaatatgtaaaggctgtctaccatacccgcatatcggtgggcatgcgtttccggatgctttttgaaacagaagaatccagtgttaggagatacatggggacaataacaggaataagtgatcttgatcctgttcgttggatgaactcacactggcgctctgtcaaggttggatgggatgagtcgactgctggagagagacagccaagggtgtctctttgggagatcgagcctctgacaactttcccgatgtatccatctccttttcctctcagactaaagcgtccatggccaacaggcttaccttctttatatggcggaaaggaggatgacttggcttcttctcttatgtggcttcgagatagtcaaaacacaggtttccaatctctgaattttggaggacttggtatgagtccgtggatgcagccaaggctggatagttccctacttggtctgcaacctgacatgtaccaaacgatagcggcggcggcggctttacagaacaccactaagcaagtatcacctgccatgctgcagttccagcagccgcaaaacattgtcggtagatcttctcttctatccagtcagattctgcagcaagcacagcctcaatttcagcagatgtaccaccaaaacatcaatggcaactcaatccaaggccatagtcagcctgagtacctccagcaaccgcttcaacattgcccatcatttaacgaacagaagcctcagttgcagccgcagcaacagcagcaagaatcacaccagcagcaacctcagcatcaacaaatgcaacaacagaaacacttgtccaactttcagactgtaccaaatgcattgtcggttttttcacagctttcctccacccctcagtctacaccctccacattgcagacagtttcaccattctcacagcaacataatttccctgacacaaatatcagttgtctctctccatccaatgtctcatccatgcacgatacactgagatcattcccttcagaagctgcttcagacctcccaggtgtgccaagaatcacccctgtacctgtctctgacccatggtcatctaagcgagttgcagtggaatctacgatcacttctcgcccacatgacatttcatcacagatagagaacttcgacttgacaccttctagtattcctcaaaactccacgttagcaccactgcctggaagggaatgcctggtggatcaagatgggagctctgatcctcaaaatcacttcttgtttggtgtaaatatagactcacagtcacttttgatgcaagatggcattccaagccttcacaatgaaaacagttcaagcacaattccatattccacatccaacttccttagcccttctcaagatgattatccattgagtcaaacactaactactccgggctgcttagatgaatcaggatatgttccatgttcagataatgctgatcaagtgaagcgaccgcatgcaacctttgtgaaggtttacaaatctggaaccgttggaaggttgctcgacatcactagatttagcagttatcatgaacttcgtagtgaggtagggcgcctttttggccttgagggccagttggaagaccctttgagatcaggctggcagcttgtatttgttgaccgagaggacgacgttcttctagttggcgatgatccgtggcaggaatttgtgaacagtgtgtcttgcataaagatactttcgccgcaggaggttcagcagatgggcaagccgggcattgaactcttctcgacttctgcaaggagacttggcaacagctgtgacaactacatgagcaggcaggaatcaagaagcctaagcactggaatcgcgtcggtgggctcagttgagttctgagaaatagggagctcatagcacccggcgttaggcgtccagttctgtacgtctctgtagctcttagttctgtgacctggaacccaagcacataggtcaagtgtagctctaagttatgcgctgtctggtaattatgtcatattacattgacttttagtggtacctattacattttggtatacatgccgacactttgtttcctggaatactgatcatgttaacttagggcatctaattattaggttcatgttgagtagtgctgtagtgccgcaggcgctagctttggccatattctgtatattgatgatgttttcctcctgcaatgtactgttaatgacagcaagtaaggttttccatgcaactgtgaaaattcagttcaagaactattgagcttat

SEQ ID NO: 21009 - DNA, 3021 bp, Oryza sativa
  Clone ID: TF_OsC788_8
ctctcctcttctcctctccacaaaaacatttctactgcttgctcgcgtccgattccccacctccctttccttgccttcctcgctgcctcctcctcttcctcctccgtctccgctagggtttccgcgccgccgccgccccgatccgagatgccgccggccgccatggctccccctcccccgccgcagggctcctccacaggggatccgctctacgacgagctgtggcacgcctgcgcggggccgctcgtcaccgtgccgcgggtgggcgacctcgtcttctacttcccgcaggggcacatcgagcaggtggaggcgtccatgaaccaggttgccgacagccagatgcgcctctacgatctgccctccaagctgctttgccgtgtcctcaacgtcgagctcaaggcggagcaagacaccgacgaggtctacgcgcaggtcatgctcatgccggagcccgagcaaaatgagatggcggtggagaagacgactcctacgtccggccctgtgcaggcaaggccgccggtgaggtccttctgcaagacgctcaccgcgtctgacaccagcacgcacggcggcttctctgtactccgccgccacgctgatgagtgcctccctcccctggatatgacccagtcgccacccacacaggagctcgtggccaaggatctgcacagcatggactggcgcttccgtcacatctttcgcgggcaaccgaggaggcatctccttcagagtggttggagtgtgtttgtcagttccaaaaggcttgttgctggggatgctttcattttcctcagaggagagaatggtgaactccgtgttggtgttagacgagctatgaggcagctgtccaatgtgccttcttcagtcatatctagccaaagcatgcacctgggagtccttgctactgcatggcatgctatcaacacgaagagtatgttcaccgtctactacaaacctaggacgagcccttcagagttcattataccatatgatcagtatatggagtccgtcaaaaacaattactctgttgggatgaggttcaggatgaggtttgaaggagaagaggcaccagagcagaggtttactggtactataattggcagtgagaatctcgacccagtgtggcctgaatcaagttggagatccctgaaggtgcggtgggatgaaccatcaactattccgcggccagatagagtctctccttggaaaatagagcctgcttcatcacctcctgttaacccccttcctctttctagggttaaaagacctaggccaaatgctcctccagcatctcctgaatctcctattcttacgaaagaagctgctactaaggttgacactgatcctgctcaagcacaacgaagtcaaaacagtacggtcttgcaaggtcaagaacaaatgaccttgaggagcaaccttactgagagtaatgactctgatgtcactgctcataagccaatgatgtggtctccatccccaaatgctgcaaaagcccaccccttgacatttcagcagagaccccctatggataattggatgcagttgggaaggcgtgaaactgactttaaggatgtccgttctggctctcaatcttttggtgattccccaggcttctttatgcagaattttgatgaggctcctaaccgtcttacttctttcaagaaccagtttcaggatcaaggttctgctcggcacttctctgacccatactactatgtatctccacagccttccctaactgttgaatcaagcacacagatgcacacagacagtaaggagttacatttctggaatggccagagtactgtgtatggtaattcgagagaccgaccacagaatttcagattcgaacagaactcatcaagttggttaaatcagtcatttgcccgacctgaacagccaagagtgattagaccgcatgcatcaatagctccagttgagttggaaaaaacagaaggcagtgggtttaagatttttgggtttaaagttgatacaaccaatgctcctaacaatcacttgagctccccgatggctgcaacacatgagcctatgcttcaaactccatcatcattgaatcagttgcaacctgtacaaactgattgcattcctgaggtatcagtaagcacagctggaacggcgactgagaatgagaaaagcggtcagcaagctcaacagagttcaaaagatgttcaaagcaagactcaggttgcttcgacgaggagttgtacaaaggtccataagcaaggcgttgcacttggcagatctgtggatctttcaaagttcagtaactatgatgaactcaaagctgagctagacaagatgtttgaattcgatggtgaattggtgtcttcaaacaaaaactggcaaattgtttatactgataatgagggtgatatgatgcttgttggagacgacccatgggaagaattctgcagcattgtgcggaagatttatatttacaccaaggaggaggtccagaagatgaattcgaaatcaaatgccccaaggaaagatgactcttcagaaaatgagaaaggtcatctgccgatgcccaacaaatcagataactaggttcagtgaagcgagatgatacaagaggtagatcgcatggagtcttgagagagagatgccattctgcgggtcccagtcaagtaaaccccctgatgtgttggtgatcacccctgcccccccttttgcttatctgatggctgatgcaatgcaaaccctatggctttagctagtatgagatgtagactgcctattgtttatccttttgttcctttttcttctcttggcagaaagatttagggccaagatttatcattattgctattgcccctctcaactcctcccaactctctgatgtaaatatttatctacgtagccagccacccagccagaagtagagcagtagtagtagagttaccccctaccttgtattaaccagcagcctattcccccggataaatttgtgtaagctctgtagctcgagataaaaaaaatggcgatcgaacgaac

SEQ ID NO: 21010 - DNA, 3271 bp, Oryza sativa
  Clone ID: TF_OsC790_1
ctgcaggaatcggcacgaggattgctgcgacggtccaggtttggttagttgttgagggaggaaaaaatggaagatatttctgggcgcaagagaggaaggcaggtgtttgctgctgctgctgggagcatgatgggaagctgaccagcagcttctccggtatcctggtgcggcggagtttcgtgctctttggcgacgggtgcactggtgattggagatgaagctctctccgccggcgtcggcggatatgccgcaggccttgccggagaacgacggggaacaaagatgtctgaactcggagctgtggcatgcatgcgctgggccccttgtgtctttgccagtggtcaggagcagggtcgtctactttccacagggccatagcgagcaggttgcggcatcaactaataaggaagttgatgctcaaatcccaaattatccaaacttacctcctcagttaatctgccagcttcataatgtcaccatgcatgctgatgcagagacagatgaagtttatgctcagatgacattgcaaccattgagcccggaagagcaaaaggagcctttccttccaatggagttgggtgctgctagcaagcaacccactaattacttctgcaagacattgactgcaagtgacacgagcactcatggtggtttctctgttccccgccgggcagctgagaaagtcttccctccactagatttttcacagcagcctccggcacaggagctgattgcaagagatttgcatgataatgaatggaaatttcgccatatatttcgtggtcagcctaaaaggcatctcctgacaacaggctggagtgtgtttgtgagtgcgaaaagactagtagcaggagactctgttatatttatctggaatgataacaatcaacttcttttgggaatacgtcgtgcaaatcgccaacagactgttatgccctcttccgtgttgtcaagcgatagcatgcatataggtcttcttgcagcagcagctcatgctgcagccacaaatagtcgcttcactattttctataaccccagggctagcccttctgaatttgtgattccattggccaagtatgtgaaagctgtttaccacacacgtgtatctgttggaatgcgttttagaatgcttttcgagacagaggagtcaagtgtcaggcgatacatgggtacaatcaccagcataagtgatctagattcagtgcgctggccaaactcacactggcgttctgttaaggttggttgggatgagtccaccactggtgataaacagccaagggtttctctttgggagattgagcctttgacaacctttccgatgtaccccagtgcttttcctttaagacttaagcgtccgtgggcttcaggactgcctatgcatggcatgttcaatggtgggggaaatgacgattttgcacgctattcttctctcatgtggcttcgagacggaaatagaggaacccagtccctgaattttcaaggacatggagtctcaccatggcttcagccaagaatagattctccattgctgggccttaagccagacacgtaccagcaaatggctgcagcagcactggaagaaattcgatatggggacccttcaaagcagcatccagctactctgcaataccaacagactcataatctgaacagtggattaaattctctgtttgcaagccatgttctagggcaggtgcagtttcaacctcagcagtcacccctgcaagttgttcagcaaggccattgtcagaacactggtgactctgggttccttcaaggtcagcttccacggctgcagttgcataacactcagcagctgctaaaggagcaagagttgcagcagcagcaaagacagcatgttttacaagagcaatctagtcaagagatgcaacagcagctcccatctagtgatcatcatgttgctgatgtagcttctgagtctggatctgctcctcaggcacaatcatcattgcttagtggatcatcattctacaatcagaacctcttagaaggaaatagtgatccccctttacatctacacaacaatttccacaacttctctaaccaggaagcctcaaaccttcttattttgcctcgaagtagccaattaatggcatcagatgggtggccttcaaagcgattaactttagaatctgctgttcatcctgaagctccgtccatgcaccccaagattgagaaagtaaatcaccagggtatatctcattttcctggcgcctttccaccacaatcagcaagaggctgttccatcgtccaggattgcagggcagatgctgagaaccgcctactttcatcatcatttgaactccaggatggcatgacaagcatcataactgatgctaacagagaaactgatactatggccatacctttgttgagatatagtggtgcagatttgacaactgaaaacaccttagcaacctccaattgtttaggtgaatctggaacgttcaatcctcttaataacatatctgtaaatccatcacaaggagcaacctttgtgaaggtttacaaatcagggtcccttgggagatcacttgacatctccagattcagcagctactgcgagttacgtagtgagcttgagcgtctctttggtcttgaaggccaactggaggaccctgtaagatcaggctggcagcttgtatttgtcgaccgggaaaatgacattcttctcgtcggcgacgatccatggcaggagtttgcaaatagcgtatggtgcatcaaaatactctcgccacaggaggtgcagcagttggttcgtggtggagacggccttctgtcctcacctggagcaaggatgcagcagagcaatgcctgcgacgactattctgcaagccacaacatgcagaatatcgccggaaacattgcatctgtagcgcctctggactactgagatgtagaccagaatccaaactaagcacccttaagactgcagggtcaccattcgtgatcgcctgcattccatgcgatcttcactagtcctgtccgaatcagtagcaactcagtcaataatatagctagatgatccgttgtattccatctgatcatggacatgctgtatgatagctgctttagctctattaaatctctaatggcaggcaactaggcaagaacagttctatgatgaatgatggcagtcgctgtagaattgaccttattctgtagctataatatgatgtctagaactgatgattccaatttccaaatggagcccggaacatattaaaatcaatcatttgtcgccttcttc

SEQ ID NO: 21011 - DNA, 2352 bp, Oryza sativa; identical to SEQ ID NO: 11267
  Clone ID: TF_OsC794_2

SEQ ID NO: 21012 - DNA, 789 bp, Oryza sativa
  unsure (1)..(789): unsure at all n locations
  Clone ID: TF_LIB4506-019-R1-K1-E8
cggattcccgggtcgaccccgcgtccgcttcttcttcttctctcctcacttcgctcgctccctcggtcgctcggccgccatgtcgtcgcaaggagcaggaggaggggtaggggacccggagctgttcgcggagctgtggcgggcctgcgcggggccgctggtggaggtgccgcagcgggacgagcgggtgttctacttcctccagggccacctcgagcagctgcaagagccgacggacccggcgctgctggcggagcaaatcaagatgttccaggtgccgtacaagatcctctgcaaggtcgtcaacgtcgagctcaaggccgagacggaaaccgacgaggtgttcgcgcagattaccctgcagcctgacccggatcaagagaatctgccaacattacctgacccgcccctgccggagcagccgaggcctgtggtgcactccttctgcaagatcctgaccccatccgacaccagcacccatggcgggttctccgtgctccgacggcatgccaacgagtgcctcccgccactggatatgtccatggcgacaccaacccaagagctcatcacaaaggaccttcatggatctgagtggaggtttaagcacatctacagggattgtagtagctttatgtgcatgctggcgcttattcgtgcnattctcggttccctaggccaaccccgtaggcatcttctgactactggatggagcacgttttgtgacatcgaagaagctgatttctgcngacgccgtttgtctacttgaggagtgagacaggagagcagcgt

SEQ ID NO: 21013 - DNA, 3013 bp, Oryza sativa
  Clone ID: TF_OsC789_2
atgaggctttcgtcgtcgtccggcagcgtcctcccggctcaggcggcgtcgccggaagctgtagaagaacaaaaatgcctgaattcggagctctggcatgcgtgtgccggtccccttgtttcgttgcctgcagtgggtagccgagtggtttatttcccacagggtcacagcgaacaggtagctgcatcaacaaataaagaaatggagtctcagatccccaattatcctaacttgcctccacaacttatttgccaacttcacaatgtgacgatgcatgcagatgcagaaacagatgaggtttacgctcagatgacgctacaaccacttagcccgcaagagctcaaggacccatatctaccagctgaattaggttctgccaacaaacagccaacgaattatttttgcaaaacattaacggcaagtgacacaagtacgcatggcggattctctgttccccgtcgagcagctgagaaagtgttccctccgctggattttactcagcagcctccagcacaggagttaattgcaaaagatcttcatggcaatgagtggaagtttcgtcatatctttcgtggtcagccaaagcgacaccttctaactacaggctggagcgtctttgtaagtgcaaagagacttgtcgccggggattctgtcctatttatctggaatgacaacaaccagcttcttctgggaattcgtcgagctaaccgcccacaaactgttatgccatcttcagtcctatctagtgatagcatgcatattggtcttcttgctgcggctgctcatgctgcttcaacaaatagccggtttacaattttttataacccaagagcaagcccttcagagtttgttatcccactttctaaatatgttaaggctgtatatcatacccgtatatctgtgggcatgcgtttcaggatgctttttgagacagaagagtcaagtgtacggagatacatgggcacgataacaggaattagtgatcttgatgctgctcgttggccaaactcacattggcgttctgtaaaggttggctgggatgaatcaactgccggagagaggcagccaagggtgtcgctttgggagattgagcccttgacaactttcccaatgtacccatctccttttccactcagactgaagcgtccatggccaacaggcttgccttcattacatggtggtaaggatgacgacttgacttcttctctcatgtggctccgagacagcgcaaatcctggtttccaatcattgaatttcgggggtctcggtatgaatccttggatgcagccaaggtttgatgcttccttacttggtctgcaacctgacatgtatcaaacgatagctgcgactgctttccaggacccaacaaagcaggtctctcccacgatattgcagttccagcagccgcagaacataggtggcagagctaatacacttctgccaagtcagattttgcagcaagtgcagcctcagtttcagcagcagcaatacctccaaaacatcaacgagaccacaatccaagggcatgctcagtctgagttccttcagcagcagctccaacgctgccagtcgtttactgagcagaagccacagctgcaaacccagcaacaacagcaagaatcacagcaacaacagcagcagcaatcgcagtgtatgcaagtcccacaacatcagcaaatgcaacagcagaagaacatgaccaactatcagtctgtacctaatgcattgtcaccgttttctcaactctcctctccttctcagtcttcacctatgacactgcaaacagtattaccattctcccagccacagagctatccagacacgagtatgagctcattgtcaccatccaacacatccaccatgcataatgcattgaggccattttcatcggaagcaccttcgcacctaagcatgccaagaccgactgcagtacctgtccctgacccatggtcatcgaagcgagttgcagtggagtctttgcttccctctcgtcctcaggttacatcgcagatggagcagttggactcaacagcacctagtataccacaaagctctgcgttggcgccgcttcctggaagaggatgcttggtggatcaagatgggaactctgatcctcaaaaccatctgttatttggcgttaacatagattcacagtcacttctaatgcaaggtggcatcccaagcctccagggtgagaatgattcgacggcaattccttattccacctccaatttcctgagcccgtcgcagaatgatttccccttggatcaaacactaagtagtgcagactgcttagatgaatcaggatatgtgccgtgttcacagaattctgatcaagtgattaatcgaccacctgcgacctttgtgaaggtttacaaatcgggaacctatggaaggtcacttgatatcactagatttagtagctatcatgaacttcgtagagaactagggcgcctatttggccttgagggccagttggaaaaccctttgagatcaggctggcagcttgtattcgtcgaccgagaggatgatgtcctcctcgttggcgacgacccttggcaggaattcgtgaatagcgtctcctgcataaagatactttcaccacaggaggtgcagcagatgggcaagccctttgagcttttgagctcggctcccggaaagaggctaggtagcagctgtgatgactatgtgagcaggcaggaatcaagaagcctgagcacaggaattgcatctgtcggctcagttgaattctgaagcaagggcgctaacgagcccttcaatcaaatctagcctgttacctatgtttctgcagtttttcttcccctagttttgagacctggaactgaaagaacatagatccatgcttagctaagttatgtaccatctaataattatgctatatgatatcaaattccaagtagaaactatcaacttttggtatatatatatataccaaaactttgttccatgaaacactaatcctgtgaatgtaggccatctaaattatcaggct

SEQ ID NO: 21014 - DNA, 2952 bp, Oryza sativa
  Clone ID: TF_OsC785_1
acggcaatagcttcgcgtagcttagctcggcttccccctcattcatggccattaccacgatgtgtcaccccaccccaccaccgcccgctgctccacttctcctcctcctcctcctcctctcctagtagtagcaagcttccggcaccacccccacccgcttcatttatcacttgtctccccctctccctcgcctgctccgctgctcttgtgcttcgcgcctcgcctgacctcgctgtcgctgccgccagccatgaccgggatcgacctcaacaccgtcgaggaggacgaggaggaggcggcggaggaggtggcggcgaacggctcgtctccggctccggcgagggcgggcgcggtgtgcctcgagctgtggcacgcctgcgccgggcccgtggcgccgctgccgaggaaagggggcgtcgtcgtgtacctgccgcaggggcatctcgagcacctcggcgacgcgcccgcggcggcggcggccgcggccgccgtgccgccgcacgtcttctgccgcgtcgtcgacgtcaccctcctcgcggacgcggcgaccgacgaggtgtacgcgcagctctcgcttgtcccggagaaggaggaggtggcgaggcgggcggacgacggcgagggcgaggacggggacggcatgaagcagcggttcgcgcggatgccgcacatgttctgcaagacgctcacggcgtccgacaccagcacgcacggcggcttctccgtgccgcgccgcgccgccgaggactgcttccctccactggattacagccagcagcggccgtcgcaggagcttgttgccaaggatttgcacagcactgaatggaggttccgccatatttaccgaggccagccacgtcggcaccttttaaccacaggttggagtgcatttgttaacaagaagaagcttgtttctggggatgccgtactatttttgcgaggtgatgatggggagctaagactgggagttcgccgtgcagctcagcttaaaaatgggtctgcttttccagcactttacaaccagtgttctaatcttggtacacttgccaatgttgcacatgcagtggctacagaaagtgtgttcaacatatactacaatcccaggttaagtcagtccgaattcattgtaccctactggaagttcatgaaaagcctcagccaaccattttctgttgggctgaggttcaaaatgagatatgaaagtgaagatgctactgaaagaaggtacaccgggataattactggaagtggtgatacagaccctatgtggcatggttcgaaatggaaatgtttgttggtgaggtgggatgacgacgctgagttccgtcgaccaaacagggtctctccttgggagattgagctgactagttcagtgtcaggatcccatttgtccacaccccattcaaagcgattgaaaccatgtcttccccatgttaatccagaatacatggttccacgtggaggtggttgtcctgattttgcggaatctgcccaattccacaaggtcttgcaaggtcaagaattattgggttttaaatctcatggtggtactgctgctgctacttctcagccatgtgaagcaaggcatttacagtacatcgatgagcggagttgctccagcgatgcgagtaacagtatcctaggggttccaagacttggtgatagagcaccacttggaaacccaggattttcctaccattgctcaggctttggggagtctcacagactccaaaaggtcttgcaaggtcaagaattatttcgtccctaccgaggaactttggttgatgcgtctatgggtagtaatgggtttcatcaacaagatagtcctcgtgcaccaggtgtggtgaataaatggcaggcacaacttcatggccgtgctgcttttcatggaccaccagcactggctcttccatctcaatcatcatctccgccatctgtcctaatgtttcagcaagctaattcaaagatgcccaggttggagtttgggcatggacagttggacaagcacgagaatgataggcgtgttaggtttggtccttctgaaggaattgaaagaagagagcaaagaataccactccagccttatcctacttctggagaagtgatagatggacaggttacagttgagaagtctcactcccctggtcgacatggaaaggatggtccagataacaaagctgttggcacaaatagttgcaaaatatttggcatctctttgactgagaaggttccagcaagagaagaactagatgatggcgacgccaactattcactccagtctttgaagcaagtgccaaaatccctgggcaatagttgtgctaccgttcatgagcaaaggcctgttgttggcagggtgattgatatttcaactatggatatgatgatctgatttatgagctggatttgcaaaattatctggaggtgaagtaacactaggattgcttccaaccacatattttgctgtggatctccagatggtggccgagtatcagggagatggagggactgatgattctgatatttttatcttagatgtaggcgttggagcacttatcatgtgacatagtacctagctgctcgtctgcatttgttgcctctgcaactttaactgtcagcggcatttgtcgccgctggaaccatctaagtacgtgtttataagctgtaagctatgacaagcgcattagagggtgctggtactgttagaacattaattaatgtcagtagcatgctttgatcttaaaaaaaaaaaaaaaaaaaaaaaaaaaaaaaaaaaaaaaaaaaaaagggggggagcctcgtccgaattcctgcagcccgggatgcttttcctatgttgaccggagttcagtataacatgatggtggctttgggagacctcatgttttgaaaccttggtgctgatcgctgatttgtaactataaatttagttgtatttctaccacttagcttatt

SEQ ID NO: 21015 - DNA, 2678 bp, Oryza sativa
  Clone ID: TF_OsC795_1
gcagcaccacccggtgaccacaccaaaccaccccaaacaccaccacccccacctccctccctcctcacacttgtccgctctcttcttcttcttcttctctcctcacttcgctcgctccctcggtcgctcggccgccatgtcgtcgcaaggagcaggaggaggggtaggggacccggagctgttcgcggagctgtggcgggcctgcgcggggccgctggtggaggtgccgcagcgggacgagcgggtgttctacttcctccagggccacctcgagcagctgcaagagccgacggacccggcgctgctggcggagcaaatcaagatgttccaggtgccgtacaagatcctctgcaaggtcgtcaacgtcgagctcaaggccgagacggaaaccgacgaggtgttcgcgcagattaccctgcagcctgacccggatcaagagaatctgccaacattacctgacccgcccctgccggagcagccgaggcctgtggtgcactccttctgcaagatcctgaccccatccgacaccagcacccatggcgggttctccgtgctccgacggcatgccaacgagtgcctcccgccactggatatgtccatggcgacaccaacccaagagctcatcacaaaggaccttcatggatctgagtggaggtttaagcacatctacaggggccaaccccgtaggcatcttctgactactggatggagcacgtttgtgacatcgaagaagctgatttctggcgacgcgtttgtctacttgaggagtgagacaggagagcagcgtgtcggagtgaggcgtcttgtgcagaaacagagcacaatgccggcatctgttatatcaagccaaagcatgcatcttggtgtgcttgcaagtgcatctcatgctatcaagactaattcaattttcctagtgtactacaggccaaggttaagccaaagccaatatattgttagtgtgaataagtaccttgcggctagtaaggttggatttaatgtgggcatgaggttcaagatgagttttgaaggggaagacgtcccggttaaaaagttttctggaactatagttggtgaaggtgatctttctctgcagtggtcaggttctgaatggaagtccttgaaggtccaatgggatgaagtcacaaatgttaatggccctgagagggtttccccttgggaaattgaaacatgtgatggcactgcacctgccatcaatgtacccctgcagtcagcaacgaaaaacaagcggcctagggagccaagtgaaactattgaccttcaatcactggaaccagctcaagagttttggctatctggaatgccacaacagcatgagaagacaggtattggttccagtgaacctaattgtatctctggacatcaagttgtttggccaggcgagcatccaggatatggtgccgtgagtagttcagtttgtcagaatccgctagtacttgaaagttggttgaaggatttcaactcttcaaacaagggtgtctcccctaccttgtcagagatttctcagaaaatttttcaggttaccagcaatgaagcaagaattgctacatggcctgcacgttctgcttaccaagctgaggagcccacttccaagttgtcttcgaacaccgctgcctgtggttaccgaactgaagaagttgctccaaatgcgtccaaggttgttgaaggaaaaaaggaacctgccatgtttcgtctgtttggtgtggatttgatgaaatgtaccagcatatctactaccactgatgacaagtcaagtgtgggagcaggagaagcttcagccaaaggtactggttctcacgaagactctggtcagctgtcagcattctcaaaagtgacaaaagagcatattgctgcggatgaaagcccccaagagatccaaagccatcagaattacaccgctagaactcgcataaaggttcaaatgcatggaaatgctgtgggcagagctgtggatctagctaatctagacggatatgagcaactgatgaatgagctggaagagatgttcaatataaaggacctcaaacaaaaatggaaggtggctttcactgatgatgagggtgacacaatggaagttggagatgatccttggctggaattttgccagatggtcagaaagattgtgctctatcccattgaagacgagaagaagatcgagcctcacccgaagttactgtcttcagctaatccagagcaggatcagaagactgggttttaggagggaggctagggctgaaaggtggattttttagcctttcaccattgaagcgttggtggctatcgttttgtcgttggagatggtcgtagctgaaaaaatggtggctactggctagttcatcgtattgatgcaacagatttgttgctggtgtcaaaactgtttcttcacaagcattttgaagaacaaattgatgtaacataggtttcaagaaaaaaaaagatttgacaatgtctctttagtagtttgctcaagtttagtcaaaaccttaatggtgcttaaggaataacgtgaagctataaaactggtgtgtaagttctgtaaatattataagggagattataattttgtgatattagctttcaccctttaatttattggtatatattgaaaaaaaaaaaaaaaaaaaaaacctgcagcccggggatccactagtttagagcgc

SEQ ID NO: 21016 - DNA, 2256 bp, Oryza sativa
  Clone ID: TF_OsC86356_1
atggggattgacctgaacacggtggaggaggaagcggaggagggggcggcggcggcggtgtgcggggagctgtggcacgcgtgcgcggggccaggggtggcgctgccgcggcgcggcagcgcgctcgtgtacctgccgcaggcgcacctcgccgcggacggcggcggcggcgaggtgccgcctgccggcgccgcggccgtgcccccgcacgtcgcgtgccgcgtcgtcggcgtcgagctgcgcgcggacgcggcgacggacgaggtgtacgcgcggctcgcgttggtggcggagggcgagatgttgcagcggaacttccgcgagggtggaggtgaagatggtgcaggggagatggagggttgtgatgcagaaaagaagccccggatgccacacatgttctgcaaaactctcacagcatctgatacaagcacccatggaggtttctctgttcctcgccgggctgcagaggactgtttcccacctttggtgatacacttaaaagaaaaacttgtaacttttaatgactataagacagttagaccttctcaagagctgattgccgtggacttacatggcacacaatggaagttcaggcatatttatagaggtgatgatggccaactaagattgggtgtaaggagagcagttcaacttagaaatgaggccctctttgaacctgtcaacagcagcgattcaaagctacgcattctatcttctgttgccagttccttggaaaataaaagtgttttccacatttgtttcaacccaaggagtggtgcgtcagaattcattgtaccgtattggagattattgaagagcctgaaccatccattttccattggaatgaggttcagagtttgctatgagagtgaagatgctaatgagaggtccgctggattaatttcaggcattagtgaagttgaccccataagatggcctggatcaagatggaaatgcctactggtaagatgggatgatagtacagatagcagccaccaaaacagagtttctccatgggagatcgagagagttggtggcagtgtctcggttacccattccttgtcatctgggtctaagcgaaccaaattgcactttcctcaaggcagtttggatactccatttcttaatggaaatggtcacccggactccatgggaactgaaaatttccacagggtcttgcaaggtcaagaatttaggggttctaggtcccatggtgttgtatgctctgaatcacctggtgtaccaaactttcaatctcctgacaataggagattttctgctgatatgcggggctacatgatgccagcaagtgggcccccacagcggaacacagagtttacttatcagcccataggcttcagtgagtctcttggattcccagaggtcttgcaaggtcaagaaatgtcacaagtagttcctttgttccgaggagctacttttggcgctcgtacacagaatgacagagttgtctctgctaattctgtgcatagatcagctgcacagagtggattgctagcttcaactctagggcatcccatctcgcagtttactctgtcatcgtcaaaggtatcttctccctcgtcggttctgatgtttaaccaagcgacagctccaaatcatgaaacagtaagcggaaccaacaacaaaggtatgcatgtcagccagtttgcttcccaggagatgctctcagaaactgtaacctggcccggcacacaacgtcaaacgccgagcgaaatcacgagcaaccagttcgccctggcgagaatcccagctcctccaagcggagctgaatccggattgcccaagagggatgccgggagaagcagctgcagactgtttggcttctccctgacaggcaacatgctgggagaagatggagaaggcctagatgatggagccattgaagctggttgcgaaaacccgcccgtgctggagctgtttgggcacagccattctactcccggtgctcttcatgccctgtgtgctgctgctcccctgggaatgtgatgctgctgcagtactgatggtttgctctggggaaatggtcgttgcatcaagctacctagctgaaacaaactgaataatgtgttagctacttcctagatttcttcggcacattcttgtaaggattgcagcggcgccatttgtatgttggtgccacatgatgcatgtaagactgtaactgtaccttgaaatttcggctgtttgtccgtagcttatgacatgaagactatgcagaagcagatcctcgaactt

SEQ ID NO: 21017 - DNA, 2385 bp, Oryza sativa
  Clone ID: TF_OsC12032_1
atgggcatcgacctcaacaacaccgcgagcggcggcgaggaggacgcgccggcgccggggccggtgtgccgggatctgtggcacgcgtgcgctgggccggtggtgtcgctgccgcggcggggcagcgcggtcgtgtacctgccgcaggggcacctctccgcggccggcgccggcggcgggatccgcggggaggtggcggttgccctccctccccacgtggcgtgccgcgtcgtggacgtcgagctatgcgtatttgagaggaacttgcatggtggtggaatcgaaagggaggatgacatggaggatggtgatgaggaaaggaagtccaggatgctgcacatgttctgcaaaacactaacggcctctgatacaagcacacatggagggttctctgttcctcgtcgggctgctgaggattgctttccacctctggaccacaaacagctaaggccttctcaagagcttgttgccaaggatttgcatggagcaaagtggaggttccgccatatttatagaggtcaacctcgcaggcatcttttaacaactggatggagctcctttgtcaataaaaagaaactggtctcaggggacgcggtgttatttctccggggtgatgatggtgagctaagattgggtgttcgaagagctactcagcttaaaaatgaagcgattttcaaagcttttagtagcgaaagttcaaagatgcgcacactgtcggctgtggctgattccttgaaacatggaagtgtttttcacatttgttacaacccaagggctactgcttctgagtacgttgttccatattggaagttcgtgaaaagcttcaaccatccagtttgtattggaatgaggttcaagtttcattttgagagtgaagatgttaatgagaggcgttctggaatgattgccggtgttagtgaagtagaccccatcagatggcctggttcaaagtggagaagccttctggttcgatgggaggatgctactgactgcaacagccaaaatagagtatctccatgggagattgagatagttggtggttcaatctctgttgctcattctctgtcggcatccagttctaaaagaaccaaattatgccctcagggcaatttggacgtgccagctctgtatggaaatggtcgtccagactcggtggaaactgaaaagttccccagggtcttgcaaggtcaagaattgatgggttctaggacccatcgtgctacttgttctcctcagtcaatcgacattacaaaaagtaagtcttttgatgcttggagattccttactgatacacgaagctgcatgttgggcagttcaacaagcagacttccagtgcagtactctggctatacccaccaatctgtaagcttcggtgaatctattggattcccagaggtcttgcaaggtcaagaaatttctcagacagttcctccgtttcaaggaatgttgcctgatgcatgttcagcgaaaagcagatatgaattaaagaattatgtgtgcaccccagctaccatgaatggactatcatctgcaaatgaaggatattgtctctccctgtcaactgtgccaccttctccaccttccagtcttatgttataccaaacaggggtaccacagcttgaattggcaagcaagaacaatgacaaaagtggaaatgacagccaaccagccttgcgacagcacaagttgctcagtgaaactagctgggaccagtttaaaattggaaaggcttcaacacctgggaatgctactaagcctggtaatggtggaagggaggttgacagaactagttgccgcctttttggtttttccttgaccgagaagattatcccaacagacaaagatggtgaaaaggaagtgagttatgaaactgattgccaaaatccacggatgctagacttgtttgggtacaattgcagtacgcctggtgctcttcatgccctttgtgctgctcctttgggaatatgatgctacttgagtaactgggagggatacgtacatgtggagacgcagccactccacgcttcatcccagatgtaaacggcatcggtctggttatggtcccaccgttcctgatgctttgcatgtaggtattgctgcctcacgcctgaatacctacgtgcggtcaggcgaataaagcgactcgattgtatgtttgactgcagctctagctgtcgagtcggaagggcgatgatgtttatcgtcgttaatgtaccatcggcaccctgtttatgcagaaatgtagacctaattattatgaacctatttccttagttctatgtatggttagcttctgatctagacctagttatgagcctatttcagaagtgctatgtatggtttgcttgtcaacatttgtttctgtatcggtacaaatcctcgtgc

SEQ ID NO: 21018 - DNA, 3865 bp, Oryza sativa
  Clone ID: TF_OsC792_1
ggggcgaccaaggtgaaccaggagctgtggtacgcgtgcgcggggccgctcgtctcgctgccgccgcaggggagcctcatcgtctacttcccccagggtcacagcgagcaggttgcagcatctatgcgaaaggacgcagatgcgcaaattccaagctatccaaatcttccatcaaagctgatatgcatcctccacagtgtcaccatgcttgctgatcctgacacagatgaggtttatgctcgaatgactctccagccagttagcaattgtgacaaggagacattgctagcatcagagcttgcgctgaagcaaaccaggccacaaacagaattcttttgcaaaacactgaccgccagtgatacaagcactcatggaggtttctctgtgccacgccgtgccgctgagaggatttttcctcgtcttgacttctccatgcagcctcctgcccaggaactgcaggcccgggatttgcatgataatgtttggacatttcgtcatatataccggggtcagcctaaaaggcatttactgactacgggctggagcctatttgtcagtggaaagagattacttgctggtgattcagtcttgtttattagggatgcaaaacagcagctcctcttggggatcagacgagcaaataggcaacctacgaacctctcatcatctgtcttatctagtgatagtatgcatattggaattcttgctgcagcagcccatgctgcagcgaataacagccaatttacaatatattataacccaagggccagtacttccgaatttgtgattccttttgccaaataccagaaggcagtgtatggtaaccaattatctcttggcatgcggttcagaatgatgtttgaaactgaagagtcaggaacaagaaggtacatgggtacaataactggtataagtgatctggatccagtaaggtggaaaacatctcattggcgcaatattcaggttgcatgggatgaagcggcaccaactgagagacgcaccagggtttccctctgggagatagagcctatcattgctccattcttcatctacccctcaccattattcaccgcaaaacgtccaaggctacctgggatgacagatgacgagactgaaatggacggtcttctcaagagggccatgccatgggttggtgaggagatttgcaagaaagatctgaatattcagaacagtgtagtgcctggtctaaatctagctcagtggatgaacatgcagcacagctcctcgcttcctggcacggttgtgcaaccagagttactaaactcattaagtggaaaacctgtacaaaatttggctgcagctgatttatcaaggcaaatcagttttcacccgcagttcttgcaacaaaacaacatccagttcaacactgcgttggtacctcaacaaaaccaacagacagaacaattagcgaaagttatccctacaccaaaccaattgggaagtgttataataccgcagaaggtggttcaggattgcaactctgaacaaaggcagcatgtggttactcaaccagtgcaaggcagccagccaaacataaacattccacagcctcagcttgttgttcaggctcagcttcagcaaccgcaagtcattctccaggcgcaactgcagcaacctcaagttgttgtccaggcccaactccagcaaacgcaaccttcggtccaaagtcacactgtcttacaaggaggtcttcaacaaatccagcttctccagcagcaacagccacatgtgcagcaccagcagataccgcaacagttacatcatcagcagcagcaaacacaacagttgcaacctgtccagcaggttcagcagtcagtacaggaacatcagcaaataaagatacaacctgttcatgtttccatggatgcaagtatgaatacgcaggtggcagatcatcaaatgaaactacaactactcaaggctttacagccacagcagcctctgatctcagagcagcagaagatgcttttggatttgcagcagcaagtgataaattcacagtcagctcctcagcagtgtgtacaggtaacaaaccaagctattagtttacataacagtaacactattcaatacccgacacagcaaaaggttcagtctcaccaagttcaagacttaactgggaatgtcattcctaattcaaaatcagacatcgctacttccatgggtgctagttctttgcatgtagctggtggacgccaattattgaagacagatgatgttccgtctacttcaacatcaccatccactaacagcaatcctgttcttctgcaatccatcccaagtagctccaagaaccaaagtttaactacagcaggaaagacatctcaatcatctgttgtgttgggtcctacgatcgaacaggacacaaagccatatcaaaatgtaaagcaaacagttatgattcccaagacgacagaacaaaggccagctactggacaagactgcataaataacaatcctcaaatggattacttggacacatcctcttcagctacttcggtttgcctttcccaggctgatggatcattgcaacaaaactttccaccttcatccttccaccagcatcacttgctaaaagacacagttccagatagcgagtttgaggttacagatccaagaaataaccttctatttggggtgaatattgatggtcaactgggtttaccacttaatgcagacctgcttgcgaatgacattggaaccgataaatacatggatcagttgccaggaaatggcatttctaacttcatttcatcaaaggattctcaacaagagttatcatcttcaatgatttcacattcatttggagttgctgatatggcattcaattctatagattctgcaatcaatgataccccattcttaaatagaaattcccggtctgcagcaggtcctgcacatcaacggatgagaacctacaccaaggtacacaagcgtggtgcggtgggaagatcaattgacatcaatcgatattctggatatgatgagctgaaacatgacgttgctcggatgtttggtattgaggggcagcttggtgatcaaaatagagttggctggaagctagtatatgaagatcacgagaaggatgttctactagttggtgatgatccatgggaggactttgtgaaatgtgtacgatgtatcaggattctttctccacaggaagaaatgcagatgagattagtcggcgactttggagacagctttctacccaaccaagcttgcagcagctctgatgggggtcatccctggaggataaccggcgactagggggtagaaactgatcaaaacccactttacatacatactgtagttgctgtcgcctcaagaccgacttttttttgactgttagtctcatgacagtgcaaaggatggtagtaggcaatgataattttggcttcgaaactttgagcttacagtaaatttatcgacaagaaaactcaataaatatggatacaagaggaaggctgtgttggagtgcccagaagcctccatttataagtttactccattattcagactattgtctctgttgcagtcttgtagatgtgctaattctctgtatgtttttatggccttgttaccctcttgtatagcccgtccatatgtctatactacagtgtatatattgctgctgtataagctgcagaatggagattgtcagatatcaccatctgtaagctgttacagatctaaatgggtaaaaaaaaacaacattttatacatgaggaatcgctgatcatgtatttgtatgagagttttctacagtctttgggagctagtgttgagttgtacatttggggatacgaaatatttcaataaattagtaccaaattcttattgc

SEQ ID NO: 21019 - DNA, 545 bp, Oryza sativa
  unsure (1)..(545): unsure at all n locations
  Clone ID: TF_LIB3475-006-P1-K1-D7
cccacgcgtccgcccacgcgtccggttccaggtgccgtacaagatcctctgcaaggtcgtcaacgtcgagctcaaggccgagacggaaaccgacgaggtgttcgcgcagattaccctgcagcctgacccggatcaagagaatctgccaacattacctgacccgcccctgccggagcagccgaggcctgtggtgcactccttctgcaagatcctgaccccatccgacaccaacccaagagctcatcacaaaggaccttcatggatctgagtggaggtttaagcacatctacaggggccaaccccgtaggcatcttctgactactggatggagcacgtttgtgacatcgaagaagctgatttctggcgacgcgtttgtctacttgaggagtgagacaggagagcagcgtgtcggagtgaggcgtcttgtgcagaaacagagcacaatgccggcatctgttatatcaagccaaagcatgcatctttggtgtgcttgcaagtgcatctcatgctatcaagactaattcaattntcctagtgtactacag

SEQ ID NO: 21020 - DNA, 3168 bp, Oryza sativa; identical to SEQ ID NO: 11274
  Clone ID: TF_OsC21910_1

SEQ ID NO: 21021 - DNA, 321 bp, Oryza sativa
  unsure (1)..(321): unsure at all n locations
  Clone ID: TF_8856660
ggtcaggacgcatggcntgcagtggtgccccggcatgcggttcaagatggcgttcgagacagaggactcgtcgcggatcagctggttcatgggcactgtcgccggcgtccaggcctccgaccccgtccgttggccgcagtcgccatggcgtctccttcaggtacacctacacggcaccaacatgagacaaccccaactcgatcacgatagagtcgtagagttcttgatcaattggcctcctcgcaggtgacctgggacgagccggagctcctacagaacgtaaagcgcgtgtgnccgtggctnggtggagctcgtggtcga

SEQ ID NO: 21022 - DNA, 3271 bp, Oryza sativa
  unsure (1)..(3271): unsure at all n locations
  Clone ID: TF_OsC793_1
atgagctcgtcgtcggcggccagcatcgggccgccgcagccgccgccgccccccgcgccgcccgaggaagagaagaagtgcctcaactcggagctatggcacgcctgcgccggcccgctcgtctgcctccccaccgtcggcacgcgcgtcgtctacttcccgcaaggccacagcgagcaggtggcggcgtcgacgaacaaggaggtggagggtcacatcccgaactaccccaacctgccggcgcagctgatctgccagctccacgatgtcacaatgcatgcggatgtggagactgacgaggtgtacgcgcagatgacgctccagccactgaacccagtaaggcgcctggggtttttgcatgatgtttgcagtgctgaggttttgatgcaggagcagaacgatgcgtaccttcccgcggagatggggataatgagcaagcagccgacgaattacttctgcaagacattgacggcgagcgacaccagcacgcacggggggttctccgtgccccgccgtgctgctgagcgcgtcttccctcctttggatttcacacagcagcctccagcccaggagctaattgcacgggatattcatgacatcgagtggaagttcaggcacatctttcgaggccaacccaaacgacacctgctaaccactggctggagcgtttttgtcagtgctaagagacttgttgctggagattctgtgcttttcatatggaacgagaaaaaccagcttttacttggaataagacgtgccagtcggccacagactgtgatgccttcctctgttctttcaagcgatagcatgcacataggtctccttgcagcagcagctcatgctgctgctacaaacagccgtttcactattttctacaacccccggacatcaccccattatttatgggaattttataattgggcctctataaaaatccataatatactaatgcgcccaatgcacactttaatgaaacacaggtatatggggactataactgaagttagtgatgcagacccagtccgttggcctagttcctattggagatctgtgaaggttggttgggatgaatcaactgcaggggaaaggccaccaagagtttctttatgggaaattgaaccattgacaacctttccaatgtatccatctctgttcccactgagagttaagcatccttggtattcaggagttgcttccctgcatgatgacagcaatgctttaatctggctgagaggagttgctggtgagggaggttttcagtctctgaactttcagtcacctggtattggctcctggggacaacagaggctccatccatccttactgagcagcgatcacgatcagtaccaagcagtagttgctgctgctgctgcttcccaatctggtggttacttaaaacagcaattcttgcaccttcagcaacctatgcagtcccctcaagaacactgcaacctcaacccattattgcagcaacaaattctgcagcaagcaagccagcaacagataattaatcctgatgcccaaaatatccaaacgatgttgagcccaagtgctatacaacagcaactccagcaactacagcaaatgcagcaagttcagaatgatcagaagcagaagattcaaccagatcaaagctaccaagttcctacaagtgcagttctcccaagtccaacatcattaccgagtcatttgcgagaaaaatttggcttctctgatcctaatgcgaattcttcaagcttcatcacctctagcagtagtgataacatgttggattcgagcttccttcagggaagttcgaaagctgtggacttatctcgatttaatcagcctgtagctagtgagcagcagcagcaacaggcatggaagcagaagtttatgggttcacagtcagtgtcttttgggggctcggttttgcataactcacccacaagcaaagatggttctgttgaaaacaaaattggtcgtgatgtgcaaaaccagtccctttttagtccacaagttgactcttcatccctcctgtacaacatggttcctaatctgacttcgaatgtttcggatggcaacttatcaacgatcccttctggatcaacttatctgcagaatgcaatgtatggttgcttggacgactcttctggtttattgcaaaatacaggagagaacgatccagcaaccagaacatttgtgaaggtttacaagtcaggttcggttgggaggtcgttggacataacccggttctctaattatgctgaacttcgagaagaactgggtcagatgttcggcattaagggtcaattggacgaccctgatagatcaggctggcagcttgtattcgtcgacagggagaatgatgtgcttctccttggagacgacccttgggaattcattaacatctatatgaatgtgagcaatgctaaaaagtcttacattatgaaacggagggagtacaatactttggtttcctggtttccacaactaatagcttatcgaggaaagactgttcttccttcaataatatgtgttggtcagtcactatatgttgatgctcagttacccaagacccttcgtctgggtcaaatgttcggcattaagggtcaattggacgaccctgatagatcaggctggcagcttgtattcgtcgacagggaaaatgatgtgcttctccttggagacgacccttgggagtcctttgtgaatagtgtatggtacatcaagatactttcacctgaggatgtgcataagatgggaaagcaaggaaatgatccacggtatctgtcctgaagtgagagaacatggtgccatttctgggcttccaggaggattctgcagtgcatggtggcactcttgctctcgacaatgcacgtcgtcagaagtcccaaatttgtatcttgcatgtacgccgtacatgtttccagaactctctgttacctattcggtgcaggccaccggaaccacgaaacctgatattttgtaggttccacttaggaatcagtatcggtttaactcttatcctagatgatttgtaactcgcacggcagtccactgttttcatgtttcatcgagtcttcctagacattaaacttagttgatattgtatcaggatttatgtgtattgagattcctctacatgctttcaaccaaaaaaaactgcaataatcgaagcgcacgaggattgtttccaaaaaaaaaaaaaaaaaaaaattttnaccgattgtccggttatgtcagtttcgagaggagctgtcaaaaaaaaaaaaaannaaaaaaaaaaaaa

SEQ ID NO: 21023 - DNA, 4293 bp, Oryza sativa
  Clone ID: TF_OsC787_1
atgcctccccgcactcgccatggtcgtcgtgagcccacgcccgatcccgtcagtgagaatgaggattcaagcggagatgagtatgttcaaagtgatgatgacaatatggaaaatgttgagggtgatgagatggaagtaagtgatgatggtgatgacaatgagagtggaaatggtgaagatgatgaggcaagtgatgataggagtcctctcgattccaccatccaatttgtgcttaatttgaggaatgctcaacaatacactatcctccgtcatcataatcaattccgaaggcctaacgattgtaatgatccaagatttcatacacggttccaaaagtccgtgtatgcacaagtgtatgccaacaaagccttcgccgaacacaagtggatttcttggaagcacattggtgagacaccggagtttgagaatttgcaagagatgttccggaccgttgggattgatagaattgtcaccatgaagcaaccttttgatgaagatctcatccggcaattctatgccaccgtatgggtgtccggcgattgtgatgcaatgaagtggatgtcgaggaccctccgatgctctatcaaccgccgtgaatccaaggagctcttgcacattcgcttcaacaacggggatgaccttcatgatgagcacacccacaaccccttccccattgatcacttttctcagttttatgaagaagggggaaggcacacatatggcaaggtggcgggtttgagggctctcccaagtgtgatcaaccgcatagtaagggccaccatcctcccaagatgcggcaacaatgatgacatacgcggagttgcttggcatgttattgatgccattatggatggtcgtcggtttgatgttatcaaccttatgatgaaggagattgccatctcaaaggggactcttggacaaggaatctattatgctccctacataatgaggttgattcaaagcaagttgggacaaattggtcacaatttaaaagaacataaggagtacaagcctcgtctccaactctcctcccctagagctcctcgtgtgcgccaaccaacattcgatcaaggtgcaagctcaagtgcagcccccccttctcctcaagggtatgatccaagtgcttttttccatctacaatatgcctactttggaatgcaacccaatgacttcttcaacccggtccttggggctattcataccctaagtgaaagcattcaacgcttatccaccgggcatgaagcattgcatgaggatgttcgtggcttgtgcaccgatgttggcaacttgaatacttcggtgggaagattgcatactagggggcggtcagaccggccacatagtggcggtctgaccggcgtgccctggccggtggtgtgcgaggcttcgcaaatactagtggcgcattatgaatgtcctaaggtatacacgctgcacaattgcacagtacactatactgatggagtatgcaactgtgcacgatgtgagttctgtcccaaaaaaactgcgtttggatacaatgcaaaggagaaggccaagacgggtgttctgagaaatgccgcagcgctgctcgacgaaatgcagctcatgggagaaacacagggtgccaagaaggtgatcaactcggagctctggcacgcttgtgccgggccgcttgtgtgcttgccgcagcgggggagcctcgtgtactacttccctcaggggcacagtgaacaggttgcagcgacaactagaaagattccaaattcccgcattccgaactacccaaacctgccatctcagttgctgtgtcaagttcacaacatcaccttgcatgccgacaaggacactgatgaagtttatgcacagatgacccttcagccagtaaactctgaaacggatgtattccctattccaactcttggtgcttataccaaaagcaagcaccccactgaatatttctgcaagaatttaaccgcaagtgatacgagtacacatggtggtttctcggtgccacgaagggctgcagagaagttgttcccacaactggattactcaatgcaacctcctaaccaggagcttattgttcgagatttgcatgataacatgtggacattccgtcacatttatcgtggacagccaaaacgacatcttctaacaactggatggagtctctttgttggggcaaagcgtctaaaagcaggggactctgtcttatttataagcatgcacattggcgttcttgctgctgcagctcatgccgcatcaagtggtagttcatttactatctactacaatcctaggacaagtccttcgccatttgtaattcctgtagcaaggtacaacaaggcaacatatatgcaaccatcagttggaatgagatttgcgatgatgtttgagacagaggagtcaagcaagcgcagatacacaggtacagttgtgggaataagtgactacgaccccatgagatggcccaattctaaatggcgcaacttacaggtcgaatgggatgaacatgggtatggagaaagacctgagcgtgtgagcatatgggatattgaaactccagaaaacactcttgtgttcccttcgtcgaccttgaattcaaagcggcaatgtcttcctggttatggagtttcagtgcctgggatggaaattggatcagcaaatatgtcatcatttccaagggctcagggtaatccctatggcagtttgcagcacattccagctgttggatcagaattggctatcatgcttctcaaccaatctggtcaaacccttgggagtccccttagttttcaccagtcctcatattctagtattatccaaaatgtgaagcaaaattatatccctcctctaacagttagcacttcagcttgtttgacaaagcaagaaagcctgccttcagatgatgcccagcaccagttccatatggcaaatatgcagaatggtgatcttgaaggctctgaagtccagcctgtcattgattcgatttctgagtcaaagttgaatgctacatcaagagatccaagaaacacagattcatacacaagtcgaagtacttcggagcaaaacagtaagggtgagcctagaggcaagactcgtaggagtaagaagggcttgcctcacaaaaccgtttcagagaaatctgacctttcttcagccccttcttggatctgtgacaatcagcaggttggtttagaatcgaaactggttggttgtgatgaacaagtaaactgtggaaatattgaagattcatcaggtgcacttactcaaggtaattttgttggacagccgcatggccatcaggttgaacaaaagggagtgctgtcgccaccaaaggtagaatcatcaaaatcacctgatggaggaaagtctgtcaattcgtttccaaaccaagggtgtttttcgcagttcattgatggtcttgattggatgactcagccttcctactaccaagactccaatgtaattcaaccagccggtgtgtcagagaacattttcagttcttctgcagatatacctccctcaatgattgctgatactatggagacttttcaggcttcatgtctttctgattgccttcctaattccatacaagaattcatctccagcccagatctgaattcactaacctttctttcacctgacatgcaaaatttggaggtccaactccagcatgatggaagcaatttgccaagcacgtccaactcgtttgtacagatgagtttttctgaagagagtgcaagtcagagtgcaaacttaagtggacttcacatggaatctacacacagaagcataaacaccacttcatgctctcaaccaatgtctactgggggctttgatgcagggatgtactcaaagttgccacgtttaaaagaatcccaaatcttgtctttgccagagattcataccaattccatgggaacatcagcttgcagtatggatgcaaccgagtacagccttgaccgaagtgcgaagccgatgaaaccaccagtgcggacatatacaaaggttcaaaagcaaggatcagttggaagatctatcgatgttacagggtttagaaattaccatgagttgagatctgccatcgcttgcatgtttggtctccaggggaaattggagcatcctggcagttcagagtggaagcttgtatatgtcgactacgaaaatgatgttcttcttgtcggagatgatccatgggaggaattcatcaactgtgtccggtgcatccggattttgtcaccttcagaagtacaacagatgagcgagaatggcatgcatgttttgaacgactgtattcaagcagcttag

SEQ ID NO: 21024 - DNA, 2832 bp, Oryza sativa
  Clone ID: TF_OsC1528_1701
atggccacggtggaacggcgcgggagcgccacggaagacgaggaaacagctgccaccggcgggcgcaacgctgccggccgtgacgccgctggctgcgacactgctagccgtgacgccaccgggcaaggggctgcaggtacaggcaccggcgggcgaggcgccgctgccgggagaggcgctggcgggcgacgcgacgccgccgggagaggcgcaggcgagcgcggagaatcgccgggcgggagcatttcgtcttcgcacgggaacgagaggagagagaggcaggagtgtgagattgggagcgatattcgcgagaatactcgccccctcggtggcgtcgacggcgagggcgcgccatgcgcgccgcccccctcccccatccctgctggccccgcttcgtcgacggtctccgcggcgtcgagcgcgcccgctacccgcgactacctcggcgggatcactggccaccgcctcggccaggaggacgactccggcggccacgagtacacatccgtctccggcatccacgtccccagcagcagcggcgtcgccttcgtgtcgttcggccagtgtcctcaggaggtgatctccaccgacctctgcctcggcttggggcccatcgccgccaccgcaccgctgcaacctcctccacctccagcggcggcagcggcagcggggtctccgtctgctacgacgccggagccaggacatggggaagcgacaccgacgacaagttcctccgcgcagtttcagacgcaggcgcagcaggttacgcgcgacatgtggatggcctgcgctgcacccaagtccggccgtctccccaccgttggatcattggtctactacttcccggacgggcacgccgagcagtgcctgtcacgtccgcaggagccgcttccaggcagaattttcctatgcaaagtcacggacgtccgcctcggcgcagcagcaacaaacgaagccttggcaaccatctctctcgtcccgatcgccgccgacgaccatgccttccagcttcaggctcccgctgatccagaccctgctccagcccagtcccagagtctcgtttcattcgtcaagcctctcacctataccgatgtcaccaagaatcggttcatggtgcccaaggacgatgccgctgcgggagttcttcctcacatacagttgaacgatgatgtgcctctccgaatcaaggacttgagcggaaaggagtgggcgtttaactacacctggaaagctcacacccgcatgtttcgcaatggttggatggagttttctaatgccaacggcctcgtcactggcgacaatgccgtgttcatgcgtcgcggcaacggcgagatgttcatggcggtgcggcgcacgcgcaacaggccggcgcccttctcagtggaggaggtcatcgaggccgtgtggcgggcagcgcgccgcgagccgtttgaggtcagctattgcttgcgccaggatggggacgagttcgttgtaccacgtgacatcgtcgatgatggcttacgcgccaggtttgctccaggcatggctgtgaacttcgtatgggctgttgaggatggcaagctgccaaccatcgggccacagggggaggatgtatgcaacgcttgtttcagtgagcttgaagaccagctggttgcgtgctttccagagaccgtgcgaacaagcagcaaagcatgcagggcatcccggtttctggtgttctggtaaggtgtccaggattgattccacaaaatcttgtatgttagagctgcgcacggctgtctcatataggttgagtttcttccagacttcccctgctaatttgcaacgaagaatgatgtgatttgctgtttcaatagctgggcaggacatacagtgcgggttggaatcccattttttattaaccctgtttgcattggtgttgagcctgtcccggaatgctaaccacaaaaagatcctgcaagtgttggggatagccttgttccagataagtgttgccggctgccaaaggatgccatgataagtcaacaagttgtagtttgctgatgttgtgatatctgtggaaccaagcagcagtgttcttttgtcggggacattctgttgtatgtgttggtccaacaatatatccatgagggactgtaactcggtttgagcccgggaagagagaaccgggtgtagatcaattgtccaggtgccgttagtgtgttgggaggagactgtacagttgatatttgttgcgtaggaagctagtgtcggatatatgaggttgaatcgtcctgctgctgtccagtggtctcgccaaaactgcactagctggccgttcccaatcgttaccttagtggaggcaataattggctcgataacggaacaaactgtcttccaaatcggtgtttctgttggttttgctttaatagggatctcatttgccatgtgttgcgtgcgcaaccattgaaaacatggttctgatgagtctgataacaacctgcatcctatcctcataagtagagccaggttgtgagctctcaagtcaccgattcccaatcctccttgttccttgttgagagtgacagttggccaggccactaaacattgacctccttttactttcttatcccctttccaaaggaatgccctccttaggcgatcaactgcttcgatggttttgtctggccacttgatgcaggacatgaaataatttggtattgccgacataactgagttgatcatgatgagtctttcaccccaactgagaaggcctgggatccatcctgctatagccttcgatccactcccgcttgtggtaagcacggtaagtctcccagggtttcccgtgaaccggtccttaactgccat

SEQ ID NO: 21025 - DNA, 1590 bp, Oryza sativa; identical to SEQ ID NO: 11283
  Clone ID: TF_OsC378934_1

SEQ ID NO: 21026 - DNA, 2980 bp, Oryza sativa
  Clone ID: TF_OsC794_1
ctctttctctctcctttcccctctctctctctctctatttagttcttttgcccccatgtcagctgcagtctgggggaatctgaggctgctgctcacctgagagactgaaaggaggcagaagcagcagcagcatcagcatcagcagcagagcagatagctgagctgcagagggggaggagagaagatagtagtggtagtagtagctgagctgtgtcaagattgcccttcaaattcatcatcttttgctcttgtgagaaaagcctttttcagctatgagctctgattgatgatgacgatgatggcggctgtgcagctggaaaagcttcttcatccttgtggtagtggtaaaagctgtgggaaatttcatccataaagatcgccgtggccctcgaattccgtttcagtttgtttgtgtcggagctgatcgccggaggtgaacgattcttgcgtcgaagagatgataactttcgtggattccgcggcgaaggagcgggagcgggagagtgacaagtgcttggacccgcagctgtggcacgcctgcgccggcggcatggtccagatgccgcctggtgagctccaaggtgtactacttcccgcaaggccacgccgagcacgcgcaggggcatggccccgtcgagttcccgggcgggcgcgtcccggcgctcgtgctctgccgcgtcgcgggcgtcaggttcatggccgatccgggacaccgacgaggtgttcgccaagatccgcctcgtccccgtccgcgccaacgagcaggtgtacgccggtgacgccgacgacggcattggcgccagccttagcggcaccacctcgccggcggccaccgggaacagctctctcaactggaacaccgagaaaggtgcctcggagggctcgggctccggcgtcatccagaacagccccaccgacaacacgtcgttcggagaggctccagtggttcagggagaacagcaccgtctccgagctcgggctggcgtggtctggaagttccgccacatctaccgcggcacgccgaggcgccacctcctcaccacggggtggagcaccttcgtgaaccagaagaagctcgtcgccggcgactccatcgtgttcatgcgcaccgagaacggggatctctgcgtcggcatccgccgcgccaagaaagggggcgtgggaggcccggagttcctgccgccgccgccgccgccgccgccgacacctgccgccggcggcaattacggcgggttctccatgttcctgaggggcgacgacgacggcaacaagatggcggcggcggccaggggcaaggtcagagcccgtgtccggccagaggaggtcgtcgaggcggccaatctcgccgtgagcgggcaaccattcgaggtcgtctactacccgagggcgagcacgccggagttctgcgtgaaggccggggcggtcagagcggcgatgcggacgcagtggttcgccggcatgaggttcaagatggcattcgagacggaggactcatcaaggatcagctggttcatgggcactgtatcggccgtgcaggttgctgaccccattagatggcctaattcaccatggaggcttcttcaggtttcatgggatgaaccggacttgttacagaatgtgaagagggtgagcccatggttggttgagcttgtgtcaaacatgccggccatccaccttgctccattctcgcctccacggaagaagctttgcgtgccgttgtaccccgagcttcccatcgacggccaatttccgacaccgatgttccatggaaacccgctcgcccgtggggttggtcctatgtgctatttcccggatggcactcctgcaggcatacagggagccaggcatgctcaatttggtatatctttatcagatctccaccttaacaaactgcagtcgagtctatcgccccacggccttcaccagcttgatcacggcatgcagccgaggatcgccgctggtctaattatcggtcatccggctgctcgggatgatatctcatgcttgttgaccattggtagcccccagaacaacaagaaatcagatggcaagaaggcgccagcccagctgatgcttttcggaaaacccatactcacagagcagcagatatccttgggtgatgctgcttcggtggatgttaagaagagctcttctgatggtaatgctgaaaatacggtgaataagagtaactccgatgtttcaagcccgagaagtaatcagaatggcaccacagataatttgtcatgtggaggagttccattgtgccaagacaacaaggtacttgatgttgggctggaaacagggcactgcaaggtattcatgcagtcggaggatgtcgggcgcacacttgatctctctgttgttggttcatatgaggaattataccggcggcttgctgacatgttcggcatcgagaaagctgagctgatgagtcatgttttctaccgtgatgcggctggggcactcaagcacactggagatgaacctttcagcgagttcacgaagacggcgcgtaggctgaatatactaacagatacaagcggcgataacttagcgaggtagggtaaattaaagctattctcaattgtacagctggtggagcacggtggcaattttgaaggcaaaaattgccggtttcctagtactggtgcaatttcaaggaggcaattcagttttctttaattagagctcccagaatgggattgactgtaatccggtacccatatttatcggcagatttaccagactggatctatcctactgtcatgtaaaccgatcatattgcatttgatcgttggtgtgtactcggccatgaaccgttactaaacgaatgcgattacgggaatttttgcgcgcaaatgcgttgaattgtctgaaaaaaaaaactacatctgcatgctctgtttgtagtccacaaaaaaaaaaaaaaaaaaaaaaaaaaaaaaactcgagactagttctctctctctctccctcgtgc

SEQ ID NO: 21027 - DNA, 3405 bp, Oryza sativa
  Clone ID: TF_OsC2423_3
atggagatggcggcgaatccaggtggttcaggaacctgcagcgatgcactattccgggagctatggcatgcttgtgctggtccgttggtcacggtcccgaagcgcggcgagcgcgtctactactttccccagggtcatatggaacagcttgaggcgtctacaaaccagcagcttgaccagtacctgccgatgttcaatctaccatccaagatcctatgcagcgtggtcaacgtagaactccgggcggaggctgattcagatgaagtttatgctcaaattatgctgcaaccagaagctgatcaaagtgaactcaccagtctggatcctgagcttcaagatcttgagaaatgcacagctcattccttttgcaagacattaacagcttcagatacaagcacacatggcggtttctctgttcttaggaggcatgctgaagaatgccttcctcagctggacatgtctcagaatccaccatgtcaagaactggttgccaaagatctccatggaactgagtggcatttccgtcacatctttcgtggacaacctaggaggcatctgcttacaaccggttggagtgtctttgttagctcaaaaagattggttgctggcgatgcatttatcttcctgaggggcgaaagtggtgagctacgggttggagtaaggagacttatgagacaagtaaataacatgccatcatctgtcatatcaagccacagcatgcatcttggagtccttgcaacagcttcccatgctatctccactggaaccctcttttctgttttctacaaacccagaacaagccggtctgagtttgttgtgagcgttaacaagtaccttgaagctaagaagcagaacttgtctgttggaatgaggtttaagatgagatttgaaggtgatgaagctcctgaaagaaggtttagtggaacaattattggtattgggagtgtgccagcaatgtcaaaatctccatgggcagattctgactggaaatctctgaaggtccaatgggatgaaccttcggctattgtccgtccagatagagtttcaccatgggaactggaaccattggatgcgagtaatccacaaccacctcagcctccattgaggaataagcgtgcaaggcctccagcttcaccttctgtggttgcggaacttcctccaagtttcgatgtggactctgatcagatctcacagccatctaatggcaataaatccgatgcccctggaacaagcagtgaacgttctcctcttgagtcccaaagtcgtcaagtgaggagctgcacaaaggtaattatgcaaggtatggcagttgggagggctgtggacttgacaaaactaaatggttatggtgatcttcgcagcaagttggaggagatgtttgatatacagggggacttgtgtcccaccctgaagagatggcaagttgtttacaccgatgatgaggatgacatgatgcttgtcggggatgatccttgggagaatgcatctaccatggttcatgcatcatgcatagctgaccctggaccagtgtggatcccatgccaggaaggatggctggggaggcagcatttccatcacctggcactccctgcgtgattgggccatccgtgttcaatcctgctgtgtgggggtagtaggatgccattggcatcctttatccatgtcctcagttttggtaaagctggtgactggtggtagacctgcaagaacggggcccggggctcgccatctcgtcgctgcaaccagtaaatagagctcgtcaagcagttcatgttccgtttcttcatgcaatgcatggagtatcatcatccgtagctaagcatcagttcttcagaggcggcaaaccagcgacgcggagaggcggcgacccagcgtggaggcagcgacccagctggcgggctccgacggcgcggagaggcggcgaaacggcggcacggagaggcggcaaaccggtggcgcgaagaggcggtgaggagaggcggcgacccatcggagaggtggcgaaccggcggcgtggagaggcggcgaagggagcccgcgactcggcggactggctccagcggcgtgggcttcttccacgcgtcgtcatcgtcgctcattgccggagcgaatggcggcagcgacggcggtggcggagctcgaactttgagttggggaacgtggtggcggcgacttggcaggctggctccgacagtggcgctgggttggtgtgggcgctggagcacgagagaggaggggattattgacgtggggaagagaatccatgtggggccaccatttggcgaggggaaccgccggcgcagcaccctcgtcctcccgcacgtccgatctgcccccttccacgccgtggttccgggagctgtggggggtcaacgccgacaaatagtagcagccgccgtcgccgaagctgatggtaatgaaaacggaaataagcatttcacttgtcacagggagaatgcaaactatggtctaaaatctgcatctgaaaataaaattgagctgctgaggggtgctcatagttgggccgacagtaatttaattgaggatgtactggcctctgtgaacaatgatgttggtgaagcatctgctttgttgaaagctatggcgtctccttgttttccaataagggaggatggactacctgatcagctttcttctgagattaataaaacacatggtttaccatcaggaaatggtacagcagaaaataatcttgtaaatgactcgcagttgttgcctctgccaatgaatatgtcgtctgtacccatagaaccggaagtggaagagctcgatgacgattactttaaccacaggaaagatgcattgaagattatgagggctgccacgaagcattctcaggctgcgagtaatgctttcttgagaggtgaccatgctgctgccaaggaactttccctcagagctcaagaagagcgatccgctgctgaagagctgaacaagaaggcagcaaaagaaatatttcgcctcaggaacagcaataatagcatttggaagctagacatgcatggtctacatgcatcagaggctgtggaagtactggaacggcatcttcacaggatagaattccagccaccagggaataatgcagcttcatctgatgaagtagctaggtctgaacccagagtgtctggtccaagcattgagcccggcccagggaaggtggtgtttgttcgtcccatacaggctatcttagaggtgatcacagggattggcaagcacagcaaagggcaggcctcactacctgttgcagtcaggggcttcctcattgaaaatgggtaccgatttgatgagctgcggcctgggcataagcttctcacttctcagcctgaagttaaaaatcacaaaggaatcaaggtgaaggaagagttcttttctatactttcttaa

SEQ ID NO: 21028 - DNA, 2868 bp, Oryza sativa
  Clone ID: TF_19352036
atggcgtcctcgcaggagaaggccaagacgggtgttctgagaaatgccgcagcgctgctcgacgaaatgcagctcatgggagaaacacagggtgccaagaaggtgatcaactcggagctctggcacgcttgtgccgggccgcttgtgtgcttgccgcagcgggggagcctcgtgtactacttccctcaggggcacagtgaacaggttgcagcgacaactagaaagattccaaattcccgcattccgaactacccaaacctgccatctcagttgctgtgtcaagttcacaacatcaccttgcatgccgacaaggacactgatgaagtttatgcacagatgacccttcagccagtaaactctgaaacggatgtattccctattccaactcttggtgcttataccaaaagcaagcaccccactgaatatttctgcaagaatttaaccgcaagtgatacgagtacacatggtggtttctcggtgccacgaagggctgcagagaagttgttcccacaactggattactcaatgcaacctcctaaccaggagcttattgttcgagatttgcatgataacatgtggacattccgtcacatttatcgtggacagccaaaacgacatcttctaacaactggatggagtctctttgttggggcaaagcgtctaaaagcaggggactctgtcttatttataagggatgagaagtcacaacttcttttgggtgttaggcgagccacgcgacaacaaacaatgttgtcatcttctgttctatctactgatagcatgcacattggcgttcttgctgctgcagctcatgccgcatcaagtggtagttcatttactatctactacaatcctaggacaagtccttcgccatttgtaattcctgtagcaaggtacaacaaggcaacatatatgcaaccatcagttggaatgagatttgcgatgatgtttgagacagaggagtcaagcaagcgcagatacacaggtacagttgtgggaataagtgactacgaccccatgagatggcccaattctaaatggcgcaacttacaggtcgaatgggatgaacatgggtatggagaaagacctgagcgtgtgagcatatgggatattgaaactccagaaaacactcttgtgttcccttcgtcgaccttgaattcaaagcggcaatgtcttcctggttatggagtttcagtgcctgggatggaaattggatcagcaaatatgtcatcatttccaagggctcagggtaatccctatggcagtttgcagcacattccagctgttggatcagaattggctatcatgcttctcaaccaatctggtcaaacccttgggagtccccttagttttcaccagtcctcatattctagtattatccaaaatgtgaagcaaaattatatccctcctctaacagttagcacttcagcttgtttgacaaagcaagaaagcctgccttcagatgatgcccagcaccagttccatatggcaaatatgcagaatggtgatcttgaaggctctgaagtccagcctgtcattgattcgatttctgagtcaaagttgaatgctacatcaagagatccaagaaacacagattcatacacaagtcgaagtacttcggagcaaaacagtaagggtgagcctagaggcaagactcgtaggagtaagaagggcttgcctcacaaaaccgtttcagagaaatctgacctttcttcagccccttcttggatctgtgacaatcagcaggttggtttagaatcgaaactggttggttgtgatgaacaagtaaactgtggaaatattgaagattcatcaggtgcacttactcaaggtaattttgttggacagccgcatggccatcaggttgaacaaaagggagtgctgtcgccaccaaaggtagaatcatcaaaatcacctgatggaggaaagtctgtcaattcgtttccaaaccaagggtgtttttcgcagttcattgatggtcttgattggatgactcagccttcctactaccaagactccaatgtaattcaaccagccggtgtgtcagagaacattttcagttcttctgcagatatacctccctcaatgattgctgatactatggagacttttcaggcttcatgtctttctgattgccttcctaattccatacaagaattcatctccagcccagatctgaattcactaacctttctttcacctgacatgcaaaatttggaggtccaactccagcatgatggaagcaatttgccaagcacgtccaactcgtttgtacagatgagtttttctgaagagagtgcaagtcagagtgcaaacttaagtggacttcacatggaatctacacacagaagcataaacaccacttcatgctctcaaccaatgtctactgggggctttgatgcagggatgtactcaaagttgccacgtttaaaagaatcccaaatcttgtctttgccagagattcataccaattccatgggaacatcagcttgcagtatggatgcaaccgagtacagccttgaccgaagtgcgaagccgatgaaaccaccagtgcggacatatacaaaggttcaaaagcaaggatcagttggaagatctatcgatgttacagggtttagaaattaccatgagttgagatctgccatcgcttgcatgtttggtctccaggggaaattggagcatcctggcagttcagagtggaagcttgtatatgtcgactacgaaaatgatgttcttcttgtcggagatgatccatgggaggaattcatcaactgtgtccggtgcatccggattttgtcaccttcagaagtacaacagatgagcgagaatggcatgcatgttttgaacgactgtattcaagcagcttag

SEQ ID NO: 21029 - DNA, 3140 bp, Oryza sativa
  Clone ID: TF_OsC436_1
atggctgctgcagcgacggcggcggcctcgccggatgtggggacctgggggggggatggcgagggcggaggtcggcggcggtggtggtgagaggagtgctgctcccgcggatgtatcccggaaccccgaagcccaaggccaggggggaggcgtgggggaggacgcgctgttcacggagctgtggagcgcgtgcgcggggccgctggtgacggtgccgagggttggggagaaggtgttctacttcccgcaggggcacatcgagcaggtggaggcctcgaccaaccaggtaggcgagcagcggatgcagttgtacaatctcccatggaagatcctgtgtgaggttatgaacgttgagctgaaggccgagccagacaccgacgaggtttatgctcagctcactctgcttcctgaattgaagcaacaagaagataacggctctactgaggaggaggtgccttctgctccagcagctgggcatgttaggccacgggtgcactcattctgcaagacattgaccgcctcggacacgagcacacatggcggcttctcggtgctgcgacgccacgcggacgaatgcctcccaccactggatatgagccgtcagcctccaacacaagagctggtggccaaggatctgcacggtgtggaatggcgctttcgtcacatattcagaggtcaaccacgaagacaccttttgcagagtggctggagtgtgtttgttagtgccaaacggcttgttgctggggatgcctttatctttctcagaggtgagaacggggaactgcgtgttggagtcaggcgtgcaatgaggcagcaaactaatgttccatcttcagtgatatcaagccacagcatgcatcttggggttcttgccacagcatggcatgctgttaacacagggaccatgttcactgtctactacaagcctaggacaagtccagccgagtttgtggtcccttacgatcgctatatggaatcactgaaacgaaattactccattgggatgagatttaagatgaggtttgaaggtgaagaggctccagagcaaagattcactgggactattgtcggaatgggggattctgatccagctggctggcctgaatcaaaatggcgctcccttaaggtgagatgggatgaagcttcttccatacctcgccctgaaagagtttctccctggcaaatagaacctgctgtaagccctcctcctgtcaacccactaccagttccaagaaccaagaggcttcgtccgaatgctaccgctttgccggctgactcttctgctatagcaaaagaagctgctacgaaagttgtggtcgagtctgaaccaaatggtacgcaaaggaccttccagacacaagagaatgcaaccccaaaaagtggtttcggcaatagcagcgagttagaaagtgctcagaaatcaatcatgcgtccatctggatttgatcgtgagaaaaataacactcccatacagtggaagctaggttcagatggttggatgcagatgagcaagcctgagagttacagtgagatgctatctggatttcagccacctaaagatgtacaaaccccacagggtttctgttctttacctgagcagattactgcaggccattctaacttctggcacacagtaaatgctcagtatcaagatcaacagagcaatcacaatatgttccccagctcatggtccttcatgcctccaaatactcgccttggattaaacaaacagaactattcaatgattcaggaagctggtgtgttgtctcaaaggcctggaaatacaaagtttgggaatggagtttatgctgcactgccaggccgaggtactgagcaatactcagggggttggtttggccatatgatgccaaattcccacatggatgatacacagccacgcctgatcaagcctaaacctctggttgttgcccatggtgatgttcagaaagctaaaggtgcttcatgcaaactatttggaattcaccttgacagcccagcgaaatctgaacctttgaaatctccatcaagtgttgtatatgatgggacgccacaaacaccaggtgctactgaatggcgccgaccagatgtaactgaagtagagaaatgttctgatccttctaaggccatgaagccacttgatactccgcaaccagactctgttcctgagaagccttcttctcagcaagcttcacgaaacatgtcgtgcaaatcacaaggtgtatcaactagaagctgcaagaaggtccacaagcaaggcattgcacttggcaggtctgtggaccttacaaagtttaatggctatgaagagttgattgctgagctggatgacatgtttgatttcaacggtgaactgaagggtcctaagaaggagtggatggttgtctacactgacaacgaaggtgacatgatgctagttggggatgatccctggattgaattctgcgacatggttcacaagatcttcatctacacaagagaagaggtccagcggatgaatccaggaaccctgaactcaagatcagaagatagtcatgctaattcaatggaaaggggctcagtcggcagagaaatgcgaggctgcttgtcaacctcgtctcttaattctgagaactgctaatgctttcccatctggtaacgtcttttgaagtaacatgggagacaagaacgcgatgcatcgttataagaaaatgcatttcgtagtggagttaatgctttttttccccctttgatgtattggataagcccaaagtaccctatttgtagatggtgcttgtccttggtggtcaagttgcactcttatttgctgcagttttggttttctattttggtgaggtaagttgtcagccgccagtcctaccatataaatgttggtatgcgtagaaaagtaagctcagccctcccaccctgcacttcctctctctcagcactaagctgccacctccttgtaaatagcccctgtttaattgagtctaatatattatctaccttaactgacaaaaaataaataaatcttgctaaattatagcagtagcctggtaagattattgtagcccctgcggtaatcggtctgcccctctagaaggcaaggcaatttgaccctaaaatgttgccattttaaaaaaaaaaaaaaaaaaaaaaaa

SEQ ID NO: 21030 - DNA, 2579 bp, Oryza sativa
  unsure (1)..(2579): unsure at all n locations
  Clone ID: TF_OsC445_6
atggtgattagtaggacattggtggtaaggggttttgatgaactttgggagacgattcggccggttttggtttcatcagatggtccagcttccatgagcaaaaatggactgttgcttgttgtttcggaggagttttggattggcaaggtttggtgggtgagcggtgatcgcatttgggggttggagatgaaggaggtgggggaggtggaggaggtgaggtgcttggacccgcagctatggcacgcgtgcgcgggcgggatggtgcagatgccggcgccgcgttcccgggtgtactacttcgcgcagggccacgccgagcacgccgacggcggaggcggggcggcggcggcggccgcggagctggggccgcgcgcgctcccgccgctcgtgctctgccgcgtcgaaggggtccagttcctggccgatcgggactccgacgaggtgtacgccaagatccgcctcgcgccggtcgcccccggggaggccgagttccgggagcccgacgagctctgcccgctcggcgccgccggcgacgcggcggagccgtcgccggagaagccgacctcgttcgccaagacgctcacgcagtccgacgccaacaacggcggcggcttctcggtgccccgctactgcgccgagaccatcttccccaagctggactacagggccgacccgccggtgcagacggtgctcgccaaggacgtccacggcgtggtctggaagttccgccacatctaccgcggcacgccgcgccggcatttgctcaccaccgggtggagcacgttcgtgaaccagaagaagctcgtcgcgggggactcgatcgtgttcctgcgcaccaggcacggggagctctgcgtcgggatacggcgggcgaagcggatggcgtgcggggggatggagtgcatgtcggggtggaacgcgccgggctatggcggcggcggcttctcggcgttcttaaaggaggaggagagtaagctgatgaagggccatggtggtggtgggtacatgaagggcaaggggaaggtgaggatggccgatgtcgtggaggccgctagcctcgcgtcgagcgggcagccgttcgaggtggcgtactacccgagggctagcaccccggattttgtcgtgaaggctgcgtcggtgcaggccgcaatgaggatccagtggtgctccgggatgaggttcaagatggcttttgagacagaggattcatcaaggattagctggtttatggggacaatatcttctgttcaggttgctgatcccaacagatggccgttggcgccgggtaaacgagctccggtgacatgggatgaaccggacctgttgcagaatgtgaaatgtgtcagcccatggcttgtggagcttgtgtcaagtattccaccaatccatttaggaccattttcgtcacctcgaaagaagttgcgggttcccccacatcctgacttcccatttgagggtcatcttctgaacccaattttccatgggaacccacttggtcctagcaacagcccactatgctgttacccggacaccgctcctgcaggcatacagggagccaggcatgctcaatttggtttaccactaacagaccaccagcttaacaagctgcaccttggtctgttacatagcggcagttttaacagacttgatgctattactccaccttcccggatatcaaagggctttgtggtcagtagtgcaccagcccatgacaatatctcttgtttgttgtcaatcagtacaccacaggtcgcagagaaatctgatgacagaaagacgacaccccatataatgctgtttggaaaggctatatttactgagcagcagataacttcaagcggatcaacagagacactctcccctggagttactggaaatagctcacctaatggcaatgcgcacaagacaggaaatgcatctgatggttctggttcatcaatttgcattggtttctcatctcaaggtcacgaggcttctgaccttggtttagaagctggtcactgcaaggtatttatggaatcggaggacgttggtcgcaccattgatttgtctgtctttgggtcatacgaagaactgtatggtcggctggctgacatgttcggaatcgagaaagaagaaatcataaaccatcttcatttccgtgacgcagctggtgtagtcaagcatccgggtgaggtaccattcaggtgattcatgaaagcggcacggaggcttacaataatagccggcgacagggagagaattgagagacctctcatcgaatgcttagttgagcaggcgtgatagttcaataaactcccgtttgaatttaattctgaaatatgaatcgtagcgtgaaaagacttcctttgttacatgtacttgcgttgggctgttaactaagcagacctgctttgtattgtcagtgttgtggattgctcaagttaaggtgtgtgtgtttttatcttgccccncggtctgctctccaagctcgcagccgacgcggtgttggtacacaccccctcctctgtgaatgccatctccgccctatgcgaggcgactggtgccantgtggccaaaattgcttactctgtggggaa

SEQ ID NO: 21031 - DNA, 2616 bp, Oryza sativa
  Clone ID: TF_OsC793_3
ccccaccatggtggcgatctccgagctcgggtgagcggaagagaaagaatgcggccgatttgaggagggggatggggttttcgggtggatttgtgaggggatagattaagagtttgtgcttctctggtttggtcggaggaggaggagatgagctcgtcgtcggcggccagcatcgggccgccgcagccgccgccgccccccgcgccgcccgaggaaggtgggtggctagagaagaagtgcctcaactcggagctatggcacgcctgcgccggcccgctcgtctgcctccccaccgtcggcacgcgcgtcgtctacttcccgcaaggccacagcgagcaggtggcggcgtcgacgaacaaggaggtggagggtcacatcccgaactaccccaacctgccggcgcagctgatctgccagctccacgatgtcacaatgcatgcggatgtggagactgacgaggtgtacgcgcagatgacgctccagccactgaacccacaggagcagaacgatgcgtaccttcccgcggagatggggataatgagcaagcagccgacgaattacttctgcaagacattgacggcgagcgacaccagcacgcacggggggttctccgtgccccgccgtgctgctgagcgcgtcttccctcctttggatttcacacagcagcctccagcccaggagctaattgcacgggatattcatgacatcgagtggaagttcaggcacatctttcgaggccaacccaaacgacacctgctaaccactggctggagcgtttttgtcagtgctaagagacttgttgctggagattctgtgcttttcatatggaacgagaaaaaccagcttttacttggaataagacgtgccagtcggccacagactgtgatgccttcctctgttctttcaagcgatagcatgcacataggtctccttgcagcagcagctcatgctgctgctacaaacagccgtttcactattttctacaacccccgggcaagtccatcagaatttgtcataccactgtcaaaatacatcaaggctgtttttcacacccggatatcggttgggatgcggttcaggatgttgtttgagactgaggaatcaagcgttcgcaggtatatggggactataactgaagttagtgatgcagacccagtccgttggcctagttcctattggagatctgtgaaggttggttgggatgaatcaactgcaggggaaagaccaccaagagtttctttatgggaaattgaaccattgacaacctttccaatgtatccatctctgttcccactgagagttaagcatccttggtattcaggagttgcttccctgcatgatgacagcaatgctttaatgtggctgagaggagttgctggtgagggaggttttcagtctctgaactttcagtcacctggtattggctcctggggacaacagaggctccatccatccttactgagcagcgatcacgatcagtaccaagcagtagttgctgctgctgctgcttcccaatctggtggttacttaaaacagcaattcttgcaccttcagcaacctatgcagtcccctcaagaacactgcaacctcaacccattattgcagcaacaaattctgcagcaagcaagccagcaacagataattaatcctgatgcccaaaatatccaaacgatgttgagcccaagtgctatacaacagcaactccagcaactacagcaaatgcagcaagttcagaatgatcagaagcagaagattcaaccagatcaaagctaccaagttcctacaagtgcagttctcccaagtccaacatcattaccgagtcatttgcgagaaaaatttggcttctctgatcctaatgcgaattcttcaagcttcatcacctctagcagtagtgataacatgttggattcgagcttccttcagggaagttcgaaagctgtggacttatctcgatttaatcagcctgtagctagtgagcagcagcagcagcagcaacaggcatggaagcagaagtttatgggttcacagtcagtgtcttttgggggctcggttttgcataactcacccacaagcaaagatggttctgttgaaaacaaaattggtcgtgatgtgcaaaaccagtccctttttagtccacaagttgactcttcatccctcctgtacaacatggttcctaatctgacttcgaatgtttcggatggcaacttatcaacgatcccttctggatcaacttatctgcagaatgcaatgtatggttgcttggacgactcttctggtttattgcaaaatacaggagagaacgatccagcaaccagaacatttgtgaaggtttacaagtcaggttcggttgggaggtcgttggacataacccggttctctaattatgctgaacttcgagaagaactgggtcagatgttcggcattaagggtcaattggacgaccctgatagatcaggctggcagcttgtattcgtcgacagggagaatgatgtgcttctccttggagacgacccttgggagtcctttgtgaatagtgtatggtacatcaagatactttcacctgaggatgtgcataagatgggaaagcaaggaaatgatccacggtatctgtcctga

SEQ ID NO: 21032 - DNA, 3372 bp, Oryza sativa
  Clone ID: TF_OsC791_1
ggggagaagacgaaggcgccggcgatcaactcggagctgtggcacgcctgcgcggggccgctggtgtcgctgccgccggcgggcagcctcgtcgtctacttcccccagggccacagcgagcaggttgcagcctctatgcaaaaggatgttgatgcacatgttccaagctacccaaatctgccttcaaagttgatttgccttctgcataacgtcactttacatgcggacccagaaacagatgaagtgtatgcacaaatgactcttcagccagttacttcatatgggaaggaggccctgcagttatcagagcttgcactcaaacaagcgagaccacagacagaattcttttgcaagacactgactgcaagtgatacaagtactcatggaggcttctctgtgcctcgtcgagctgcagaaaagatatttcctccactggacttctcaatgcaaccacctgcacaagaactacaggccagggatttgcatgataatgtgtggacattccgtcacatatatcggggtcagccaaaaaggcatctgcttaccactggctggagtctatttgtaagcggcaagaggttatttgctggagattctgtcatttttgtcagggatgaaaagcagcaacttctattaggaatcaggcgtgctaaccgacagccaactaacatatcatcatctgtcctttcaagtgacagcatgcacatagggattcttgctgctgcagcccatgctgctgccaacaatagcccatttaccatcttttataaccctagggccagtcctactgaatttgttatcccatttgctaagtatcagaaggcagtctatggtaatcaaatatctttagggatgcgctttcgcatgatgtttgagactgaggaattaggaacacgaagatacatgggaacaataactggcataagtgatctagatccagtaagatggaaaaactcgcagtggcgcaacttacaggttggttgggatgaatccgcagccggtgaaaggcgaaatagggtttctatctgggagattgaaccggtcgctgctccatttttcatatgtcctccaccattttttggtgcgaagcggcccaggcaattagatgacgagtcctcggaaatggagaatctcttaaagagggctatgccttggcttggtgaggaaatatgcataaaggatcctcagactcagaacaccataatgcctgggctgagcttggttcagtggatgaacatgaacatgcaacagagctcctcatttgcgaatacagccatgcagtctgagtaccttcgatcattgagcaaccccaacatgcaaaatcttggtgccgccgatctctctaggcaattatgcctgcagaaccagcttcttcaacagaacaatatacagtttaatactcccaaactttctcagcaaatgcagccagtcaatgagttagcaaaggcaggcattccgttgaatcagcttggtgtgagcaccaaacctcaggaacagattcatgatgctagcaaccttcagaggcaacaaccttccatgaaccatatgcttcctttgagccaagctcaaaccaatcttggccaagctcaggtccttgtccaaaatcaaatgcaacagcaacatgcatcttcaactcaaggtcaacaaccagctaccagccagcccttgcttctgccccagcagcagcaacagcagcagcagcagcagcaacaacaacaacaacagcaacaacaacaaaaattgctacaacagcagcagcaacagcttttgctccagcaacagcagcaattgagtaagatgcctgcacagttgtcaagtctggcgaatcagcagtttcagctaactgatcaacagcttcagctgcaactgttacaaaaactacagcaacaacagcagtcattgctttcacaacctgcagtcacccttgcacaattacctctgatccaagaacagcagaagttacttctggatatgcaacagcagctgtcaaactcccaaacactttcccaacaacaaatgatgcctcaacaaagtaccaaggttccatcacagaacacaccattgccactgcctgtgcaacaagagccacaacagaagcttctacagaagcaagcgatgctagcagacacttcagaagctgccgttccgccgaccacatcagtcaatgtcatttcaacaactggaagccctttgatgacaactggtgctactcattctgtacttacagaagaaatcccttcttgttcaacatcaccatccacagctaatggcaatcaccttctacaaccaatacttggtaggaacaaacattgtagcatgatcaacacagaaaaggttcctcagtctgctgctcctatgtcagttccaagctcccttgaagctgtcacagcaaccccgagaatgatgaaggattcaccaaagttgaaccataatgttaaacaaagtgtagtggcttcaaaattagcaaatgctgggactggttctcaaaattatgtgaacaatccacctccaacggactatctggaaactgcttcttccgcaacttcagtgtggctttcccagaatgatggacttctacatcaaaatttccctatgtccaacttcaaccagccacagatgttcaaagatgctcctcctgatgctgaaattcatgctgctaatacaagtaacaatgcattgtttggaatcaatggtgatggtccgctgggcttccctataggactaggaacagatgatttcctgtcgaatggaattgatgctgccaagtacgagaaccatatctcaacagaaattgataatagctacagaattccgaaggatgcccagcaagaaatatcatcctcaatggtttcacagtcatttggtgcatcagatatggcatttaattcaattgattccacgatcaacgatggtggctttttgaaccggagttcttggcctcctgccgctcccttaaagaggatgaggacattcaccaaggtatataagcgaggagctgtaggccggtccattgacatgagtcagttctctggatatgatgaattaaagcatgctctggcacggatgttcagtatagaggggcaacttgaggaacggcagagaattggttggaagctcgtttacaaggatcatgaagatgacatcctacttcttggcgacgacccatgggaggaatttgtcggttgcgtgaaatgcattaggatcctttcacctcaagaagttcagcagatgagcttggagggttgtgatctcgggaacaacattcccccgaatcaggcctgcagcagctcagacggagggaatgcatggagggctcgctgcgatcagaactccggtaacccttccaatggttcatatgaacaattcgaatga

SEQ ID NO: 21033 - DNA, 2490 bp, Oryza sativa; identical to SEQ ID NO: 11256
  Clone ID: TF_OsC793_2

SEQ ID NO: 21034 - DNA, 3111 bp, Oryza sativa
  Clone ID: TF_OsC2423_1
atggctggctccgtcgttgctgctgctgccgccgccggcggtggcacagggagctcttgcgatgcgttgtacagggagctatggcatgcttgcgctgggccgttggtcacagtgcctcgccaaggcgaattggtttactacttcccccagggccatatggaacagcttgaggcatctacagaccaacagcttgaccagcatctgcctttgtttaacctgccatctaagatcctctgcaaagtggtcaatgtagaacttagggctgaaaccgattcagatgaggtttatgctcaaattatgctgcaaccagaagcagatcaaaatgaactcaccagcccaaaacctgagccacatgaacctgaaaaatgcaatgtccattccttctgcaagactttgactgcttcagatacaagcacccatggtggattttcagttcttaggaggcatgcagaagaatgtcttcctcccctggacatgactcagaatccaccatggcaagagcttgtggctagagatctccatggaaacgagtggcatttccgtcacatctttcgagggtccccccaccactcccttattttaggacaacctaggaggcatctgcttacaactggctggagtgtttttgttagctcaaaaagattagttgccggtgacgcattcatctttctgagaggtgagaatggagagctacgagttggtgtcaggaggctcatgaggcaactaaataacatgccatcatcagtaatatcaagtcatagtatgcatcttggagtcctagcaactgcatcacatgctatatccaccggaactctcttttctgttttctacaaaccaagaacaagtcagtctgagtttgttgtgagtgctaacaagtaccttgaagctaaaaacagcaagatatctgttggaatgacccgtgcggcccctgggccccccccgcgcgtgcctaagccacagcaaccgcatccctccttccacccccaccacctcccccgccggccgccgtgtcccctccgtcagccggcccagcgtctgcctcagctccccccggcatcgccgctcgccctcccgtgtgtcatgttcaactttagtactgaccccgcaccagcggcgtcccgctccctggccaagagacacgcagccccggagaagaggccggccctctggccctcctaccacgaccgccaccactagacccccctccctccctctgtgggcaatgccttcaaccatccgcaccctcaaactcaacctcacccggcgcccgcggcacccgcggcctacgtgatcctgccacgccgccaatctgcgaagagagccgcttgacaaaggtccttgggtatgggaggcgacgtgggcgttacatggcggggtcaggttagatcggttgtgatatgcagaggaacatgttcgaagcgagcagcggtagtacagatcgcggctcgcgcaccgcgtcgcgatgcgttgttgcccgcagggtggtggatttgggagggatgcttgtgggggaggaggcttgggaggcaccttgatggatggggaggcggattcatatggactcctacgatgcagccatgctccttgccccaagctctaagctgcctgtcctaggtgactccatcaaattgagcagtatgaccaccgcccatgcagccttcgtctggggcagagtgctcacaagtaccttgaagctacaaacagttggctatctcctggcacgggtttgaagatgagattcgagggcgatgaagctcctgaaagaaggtttagtggaacaattattggtgttgggagcatgtcaacgtctccatgggcaaattctgactggagatctttgaaggtccaatgggatgagccttctgtggttcctcgtccagatagagtttcaccatgggaactagagccacttgctgtgagtaattcacagccatcacctcagccaccggcaagaaataagcgggctcggcctcctgcttcgagttcaattgctccagaactacctccggtcttcggtttgtggaaatcttcagctgagtccacacaaggcttctcattttcgggactacagcgaacacaggaactatatccttcaagccccaatccgatcttctcaacatcattaaatgttggattcagtacaaagaatgagccatctgctctaagcaacaagcatttttactggccaatgagagagacaagagccgactcttactctgctagcatcagcaaagttccatctgaaaagaagcaagagcctagttcggctggctgcagattgtttggaatcgagataagctctgctgtggaagctacatctccactggctgctgtttctggtgttggtcaagaccaactagctgcctcagtagatgctgagtctgatcagctctcacaaccatcacatgccaacaaatctgatgctccagcggcaagcagtgagccatctccccatgagactcagagtcggcaagtgaggagctgcaccaaggtcatcatgcaaggaatggcagttggaagggcagtggacctgacaaggctccatggatatgatgatcttcgctgcaagttagaagagatgtttgatatccaaggagagctctctgctagcctaaagaaatggaaggttgtttacacagatgatgaggatgatatgatgctggttggggatgacccttggcctgaatttgcagcatggtgaaaaggatatacatcttgatgcgttggaccctcactaccttgttgcaatgtctgatcctcctgtcgcgtgttctcgtcaatgcggccctcctgatactgtacatccaaagagctgttctcttcaacggtctgtgcttccaaatccactggatcaatgctggcggttttgggggatggaaggagggatactcgacaaagagggcaagtggtgtttgtcgagagccagtggtcgatgcaatcgatgtggaagggcctcagggcattgatatgcttgctattgcccttcggaaacattctctaaatgtagctcaaggctctaatttagaagcacttccattcattactgaactaattattgagatattggtggtccagacccaacggaaaacctacatcgaagtgctttcatga

SEQ ID NO: 21035 - DNA, 3293 bp, Oryza sativa
  Clone ID: TF_OsC2629_1
atcacgaaatgtagcttggtaaatacccccccttgctaaccatcagagtggggttccctggccagtggtagacgattttatgttctccattgtctcggtcacagatgaaataacgaacagcggtgccatgagaacatcctgcgagcacccagtctgcacgatgctgttcaccttctccatttcttcctggagtttcattatcctccccatatattctttatctaccacgcgcagagaaattgggttaaaataagaaccttcctcttggaaaaaaggtagtcctgaatctctgtagatgtcgtcgattaaaaagctggtagaatcgttcttcaatagctcgaatgatttgtctttcatgttatctgtcgttttataattttgctgtttttgaaaacggtaagctcaaatttaatataatcgaacacaaaccactcgcaatgcagtgacctgtttgagcaattattgctgttccagaactcatcctcaacacatctctatcacactcaaattcacaggtccaaaaacgagacactcaaaacagagagatacggataccaggatatgacaggcttcagcttcactggctctcagatggttgcttggccactgaaagagggagaagacatgatggttagcatctctgtcacagaggccatggcgcttaacgctgccttcaggacatcctgggagcatccaggcttcacaatacttttgaccttctccaaatactcctgcaattgtttgatcctccccatgtagtctcgatcttcgacacacaatgaaatcggctttgtctctccacctggtccctcaaattgcacgaggaccagggtttctgtaacatgtcttccatccaaggaatgctggaagagttttgtctcaaccaactcatatgcttttacgataaccatattaggatgtgattgaagagcacactccaatgccacatgagaagccttccgccccatcatgcgaataaagtagtaatacttctcagccgaaagagcatcggtgcatacattgcttataagttgtgagttcaccttgcatatggtatcaaaaccaacggttgtctcaacaaactgattcttaaggtccccattcaaagttacaggaacacctacaaccttcgttgcacacttagcctcagcaaaagtctcagcaagttgagcagcatccgtattggatgtaacacctccaatgattactaaagcatccaacttcaaagcctgacaactagccatggcaccattgacctgctctgttgttctaatttgatcctttgtccggccaagcatatcataaccaccttggtttttatatgaagaaagaacttcgtcggtgatctccaaagttttctgtgcgagaagaccatcacttccaccaagaaaaccaataagtttgctgtttgggttgtgagccttaattgcctcatggagtccccagatgacattatggcctcccggggactgccttccgcagaaaacaacaccaaccctgacaacaggatgctctgatatgacagtagcatcggggacattagccgtcttccggagaaaatgggccaggggctgcccgtatgtgtgggggaacgcgtggctgatcacatgagcgcctgcaggatcagcagcaattgcagcgtcaccatactccactctcacagtggtgccagtatacacgaccagcgccggtgagatggactgatccggacgccggagcggcgcgggatctggcgccgcgcggtccggaagcacacagatctggaggcaggggggcagctcgggctggtagagcgcgcgcttcttctgcacctccagttgagcagcatccgtattggatgtaacacctccaatgattactaaagcatccaacttcaaagcctgacaactagccatggcaccattgacctgctctgttgttctaatttgatcctttgtccggccaagcatatcactaaccaccttggtttttatatgaagaaagaacttcgtcggtgatctccaaagttttctgtgcgagaagaccatcacttccaccaagaaaaccaataagtttgctgtttgggttgtgagccttaattgcctcatggagtccccagatgacattatggcctcccggggactgccttccgcagaaaacaacaccaaccctgacaacaggatgctctgatatgacagtagcatcggggacattagccgtcttccggagaaaatgggccaggggctgcccgtatgtgtgggggaacgcgtggctgatcacatgagcgcctgcaggatcagcagcaattgcagcgtcaccatactccactctcacagtggtgccctggaggcaggggggcagctcgggctggtagagcgcgcgcttcttctgcacctccgagagctcgcgcggcacgccgtagtcggagtccatcgccggtgacgcagcgcggcgcggcgcggcgctccgattcgttctgtgttggtagcttgggggggtgggcttgggcttgaccacgatacagtagtgcacgtctttggcggcctgaaagtctctccaacttgacgccatagtttacaaattgttacctgctcatggcctcccaggtgggcaacctgcctccataacttgaggcagttgagacctttgccatagaacttgggaggcttgaactcgaggccgtgctccctgtggaagcgctccagctccaccatgaacgccgcctgctcctcctccgttccagagtcgtcaccgtcgaggaaggggtcgggctcagcgggctggttggcgcagcccgccatcacggtggagctctcgccctccgccttcgcctccgccctcggcgacgcatcgggggtggagtcgtcatcgtcatcctcctcatcatcatcctcctcctcctcctcctcgccgtcgtcgccgtcctcctcgtcatcgccatcctcatcgccgtcgtggccgtcgtggctcatggcgtcctccccgttcatctccacccccctcgcccccacggcctcgtcctccccctcgtcgtcctcgcgctcacggccgccgcccgcccctgcattgagctccacccgatccagcgagcccgcgccctccgcgtccgcgtcgctcttcggctcgggggtcgggggagtgccgccgccgccccacgcggccctctcctccgccacgggcaccgcctcctcctcctcctcctcctcctcaacctccacggcacggcctgccgcctcctcccctctggcctcctcggcggcgcgcgcgtcgtcgtggtcggagccggagccggagccggccgtggcgccgttcat

SEQ ID NO: 21036 - DNA, 3106 bp, Oryza sativa
  Clone ID: TF_OsC59278_1
gcacgagtgctcccgccgtcatgtctcgagccttctccgcccaaggtgcgccctcccattgcggcggcaggctgtgtggaggtttgtcctggattcatctcgtcatctcgtcccgcagccaaagcttttacttttgttgtttcctttggttggtccgggctcgatcgcgatggaggcgggctggcttgggctcgcgtccaattcgcccccaccaccgcgggtacggtacgttgttaatggtttcggagtggggagtgttgtgagcgtcttcgggaagcgctggggcgccgtgtgggatgtctctcgcccacggtgccctttattttttctatatcattattccccggagcccgccagatcgaatcctcgctccccgccggcggcgccgcggggagggagcggtctggggatggagaagccgtcgattgacgcgattctgtgtcgcgggggctccggttcggccgctgaatgccgccctgtgtgcctccgcggcgtgggttgacgttggggaagagagacgagagacaggggggtagggtcgctgcggcggccatgtcgcaaatccagagcttctcgcggcagaactgcgtgctcctcgcggtgctgtgtgggaagcacgctgagaagcgtgcccaggcgaggtcggggctggaggcgaagcggctgcggccgtcgtacccgttcccggagctcagctcgtcggggagattggaggtgcacacgctgttcaacccgacaccagagcagttcctcgaggcgcagcgcgtggttcagcccaacttcttgtacatagaggggacaacagctttaggatgagaagtcgattgactcaatcgtctgggggcaagaatcctactctaacctgcctgctgactggcgaatctaggtagtatgtatcacgacctgagatctgcagctgcttcccgattgatgtattgctatctcgtgtagctgaaatctagggggtaaactgtaagtgagtataaggagaacaagtacttaagaaaaaagaggaaacccattcctgccatgcattaatgtcagtggttcaaagttcggtgagccatacttgggatgcttttcagcttgctcatgcatcctttcgattatactgtgtaagaaacaaccatgtacaaagtgttaagcttgggcctcgtctactaggggatgctccaaagataaatataacccctcctgagaatgagatggttgaggaggaaggttcttcagatgtgtttccagctataaaaatttatgatgatgacatcaacatgaaatttcttctttgtggagttcctagcacaccggatccttgtttgttaggttcattagaagatggcctgaatgcacttctgaatattgaaattcgggggtgcaaacttcagaatcgaatcagtgcttctccaccaccacttcatgctgcatccttaccacgtggaatggttacaatgcgttgcgacatcactacgtgcagttcttctcatgtgtcacttcttgtttctggtagcgcacaaacttgttttgatgaccagcttttggaaagccacatcaaggatgagatcattgagaagagccaactagtccatgctctgccaaataatgatgataagttatcatcaagtgtgcctttcacttcaatgtccacagcttgtggggcttctacctttgaagtttggatgacccttcctaagtgggcagcacaggttctgaagcatttagcgccagacatctcatacaggagcttagtggcacttggaattggttgtataaatggcacgcctgttgcttcatttgataggcgagatgcagaccgccttcttttcttttgtacaaatcaacacaaagatttggctattgaaaatggcccatactttcatctgccaagatggtcagcatctcttaccaaggaaagagtgaaggtgggtctggaatcgaaaccaaaattgttaggtgcgaatggaattcctgaggacaagaaacgtctgatcgaagggccttcctcatcttccaaggcaaaattgaagcctgcaactatgaggcccattcctcactctagaaagcaacaaatgcatccttttatgggtttcctggaagctactgttcatgaaactagtcaggttaagccaaacttgccagctgctcccccagtgaagcataattcggtacctgctgctccagcaacacatagaaaatcaacttcagggccatctcatgctcagtcaatcattcaactgaacccactgcctctgaagaaacatggatgtgatcggttgcctattcagatgtgctctgaggaggacttcttgaaggatgtcatgcagtttttaattcagaggggtcataatcgactcgtacctcatggaggactagctgaatttcctgaggccgtccttaatgcgaagcgccttgacctatataacttgtacaaagaggtggtgtctaggggtggcttttatgtaggcaatggtataaactggaagggtcaagtcttctcgaagatgcgtaaccatactgtgacaaatagaatgaccggtgttggaaacacactgaaaagacattacgaaacatatttactggaatatgagctagctcatgatgatgtagacggggaatgctgtttgctttgccacagtagcgctcctggagattgggtgaactgtggtttgtgtggtgaatgggcacattttggttgtgacagacgacaaggcctaggcactttcaaggattatgcaaagacagatgggctggaatacatctgccctcactgtagtctagcaaactataagaagaaacctcctccccaaaaggtagctaatggctttgcgaatacagtgtctgtatcacgaaatgtttagttttcctttcttcttttttgccctgtgtttcggggagaagagcccagtagagtagagaataggcaggctgctgatagagagaggaaggtgtgtagtgttgtgatctgtattaccctattaatttggttcagcgtaggaagcttaagttttatatagaatgtaacaactgacaacacagctaagctactacggtagctggtcaaattaagttaagagcctgttgatatatgtttgcgtcgtcctgcagcccg

SEQ ID NO: 21037 - DNA, 2403 bp, Oryza sativa
  Clone ID: TF_OsC2705_1
tttttttttttttttttttttttttttttttttaacactaaaaacaattgatacaccatcagtaatagtttcaagggatggtcaggcacagttgtcaattcagttatacagatacaacagcaatgcacaaggcaacagttacatccaagaatctatcttgtcttcatgttctgagtagtatgagaactgagtattaggaataacctcacaagctacatgctacaaattatcaccttttctttagttgagaaaaaaaaaaggaagaaagaaaccatgaacatgtttagcatcaggctattaacattctaaactaatagagctgaacttaagctacatatcacaattaacgaactacaagatacataactagaccatctagttaactagaattaatcaatacagaatagacaacatggcaggagtaatgaagcagaaagtaactagtttgcaacgaagatcaggatgaacaggcccaagtcaatcacataaacccccacctacaaaagcaaccttgcatgttgcgcttcatcttgtagagcaccatttactttgactgctcgaatggtgcacggacaaatagctgtccatggagagtgacaactgccgaagtttgatgaggatcaatgcgggagggcaaactaataaccttcttgaatggagtaacaccccaaggattgtctagttgctcaggctctccagtaactatcaaacggccagcaggatctgactgaacatgtacctcctcacgcagaaggccaggaaccaatgcatagacttcatagcaatctttggttctccgaacgtttatctttacccaatcagctggagggccaaggtcaagaaccattgagtcattttgtagcttgtcaggtttatatggtacaatcctgtcatcttccaaggtcggtgtccttttcctcttggcagaaccgctgcttttaggagttttatccttttttaagacagacaccgtccctttatctttaattattggatcagcaatttcaccattgccaagcaagcgctgagagtgccagccttgcatagctcgggttgcagattctcttctagctcttccagaaccagaagcatggatgccaacctgactttcagaagtaatcctctctgttaaattagatgcagcaacttgaaactcgcccgtttcgattttgtgtttctcatattcaaggagtgccttctcatagaagttacggaaggtccatgaaacagttgtgcatgtcttcggaggtttgaaagactctcccacttgccgccacagtttgcacgatgtcacctgttcatgcacccccaactagctacccaacctagtcacttgtctgcaaaacaacccagtaacttgttttcataacttgaggcaattcaacccttcaccatagaacttcgggggcttgaattccataagcttctccctgtaaaaccgctcaagttccttcatgaaagcagcctgctcctcctcagtccccgagtcatcaccaccacagctgtaatcaaacatgaaggagttgcttgcaagcttggacagcaccgggtcctccacgtcctccccagctgacgctaacataagctgtttctcaccatcagcacccttgttatcaccattgctatcgccgtccgccttcaaatgcccatcaccattctccaatttttcaaccttcatttcagccacctcatttccgccagcatccgtcttaccgttactagtcacaggaatatcctttgccttatccgctgcggccccaccctcctgctccaccgcctcctcctttgcatccatgccttcaggctttgctgaatccttcacggaatcaacggtatcggcagcctcctcaatgccatcctcacccttaccagatttctcctcttccacagcattggcttcatccacagggccatcggcgcctggctccgcctcgctttccacaggcgcagacctaaactgggccatgggggttcagcttcaattaggctcaaatccagatgctcgccgtccgggcgcgcgcgcgcgacgacgcctccacacagcgtagaaggctagggcagagagagtgagatagagagagagggtcggggaaggagaggaggagggccgtcgcccgcaccgtgcctccgaggaggagccgcgacgccgcggccgcgcctccgcccgccggaaacagcgtccccgcgggcgaacagacacgagccgaggcggggagggtgtagagccgtagcccgtcggggtcgacggggagagagagacgggagcggtgaggtgagaagggctccccctggcgagcggcggcggcggaggcggaggcggaggcgagggcggcgagcggccgaaaccctagccggagacgggggagacgacgacgggagaggaagagagcgggcggcatgaac

SEQ ID NO: 21038 - DNA, 5376 bp, Oryza sativa
  Clone ID: TF_OsC135913_1
cctctggcaagctacaaatatttgattaatagtaaagtacttaaggttcaaaccgcattacatccattgacagcaccagatcataataaaagaattgcctcaagatttttcatgttaaaaatgagatacctaaagctgacaagagaagattgatgtaaatatcataacagccctaaaaaattacatgtgttttctcccatgggcaactactattgcactggttagcgcccactcttccagcttcataacaaaatgccggcggtgtgtgcgctactgcttaggacgttgatggccaaagcaatattgatctttgcagtctgatactaacttcagttccttctagacaggcacagttagactttcgccttcaaaaaaaagtccatacacatggctgttcgatggaatacccttttcctttctctccacgtcctgtttgtttcgccatgacaacgtagatgttttattaaaatgaaccttacatttgttttctcccactggctattactcttagcactagctagctccaactcgtacctggcctttttcaaaagatagccggtttcctgtgaggtcgtgaatatctgttcgttgtttctatcagtcctcatgggctaaggaatcaaatctataactgaactggcgatcatttatgccagcagccgatgttgcctttagagcaatcaaaagagatctgtgcatgacactaagatcttctccatggtaagagtctgcatcatgcaatatttgcataaggtaggacttaaatttatgagctttctcagcaatttcttctaataaatccaactcctcaatccctgaatagaaacccttggcaaaagagcggagcccgattaatgcaggaagtgctggacgattccctttagatatcttctcctgtagtctattctgtaatgggtccccactttctaaatgaaagcaaaaaggacaggtccattcacgagtcacttgtgtagaagcaggcagtggttcgacacaggagctatgatacctcgcttgacatatcatacatctaggggtaatatgatctcccacatcacaagagcagatggcacataatcctttctggttacagtcggaatataacatacaagcattgtccattgatcctctaatcttcagaagcgcggagagcaaagaatcactgttattgccatcaggaaacagagtacagtggcagtgagtaagccactcctcgatctttttaatctcagcaaccaccttatccatctcagtacaatcgaatgccacagactgaccactgtctctcaagcttaatagtccatcccaagattgatgatcaggaaacatgaagaaggcattgcattgttctgcccatgaattgtgcttgttgatagcatcctcaagtttggcaatcatcataggataaggaacagcaatttcctgatcaccaacaagtgcatggaaaatgagatatatcagtttgaactttgaaatacttgccttatactccgctaaaatattttcaacatttaacaatctggatgtttcagacatttctgaaccaggaagaaacataagtgcttttcttagccaagatgatcccctcaccaatagttcagctaaggaacaatccgacaatgaggcaggaaggttgacagcttgttgaattaatttttcagcatcctgcaacaaaggagtcacaccgcagaaagacaatgcattcaatatccatccaagtgtgaaaaaagaatccttcagctcatgaacaaccttaaattcaaaaccgagagatagtcctttttctatttctgcattaattttatcttgcagctcctctagttttcttttaagtggatcaatagtagagtcgattacatttgaatccagtaaggatcttgaactgtgtatcagacttagtgaattatgctcccattctatgacattgttgagaacagaattaattgcagaagtgtcaagaatgactttcatacttgcaggctggccgattaaatcctttaggtcatcaacattaagaaaacctccagatgcaggtttatcacttctaggcctcagataggcctgacatttgtccatccacaacttagcagtagcaacctctgctttcatatccagttcagatggaaggataacatgtatgttctctgagcacagaatatggttttcaaactcagggagagcagctgagtgctcaagaataaagctagccttctcttcccaagtgatggcagctttgaggttatgggacagatcaacaaatggttgctcctcttcaatggttaatatggaagcttctttcagcacttctttgaccacctccatagatgtttgtgttgcaagagcctcggatgcttgcttcctgcagaaggatttctttagctcttcctcaacaacggaaaattcctcaaacaacatgccttttactcctagtgattctccatccttcagaatgccagtcaactcctcaacaatgttgtcataatcattcctttcaagaagtttgccgactatgttattagcatgattgacccatgagcaagcacctgaataccgttgcatcagaatgttcagctctggaatactgaagttggcaccatccaccacaagaaggaagctctccaactcctcagatttcagttcatttaggaaatctatgtcgacgatgccccgtttattctgttcaaggcaatcacatgctttcttcaaccaggactttgcggaagaaatctcacaagacagtgctgatgtttctgttagttcaaccgggaactctaaagccctagagtacagtgtttccaagtaatcaacctttgagcgagatgataatgcattgtttatctcattaatcattatttctcctttgtccacatatacctgcaattgtgcaagacttggttcataacatggtttgcatcttacagcagctaattctttgatttccacataatttactttctcggaacaattctctttacaatgaagaaagccatcaatttgagagaggcattttctaacactggaagcccatttcctaccttctattaattttgctgacatattccgcacagaatccatattatgatcaccccaaagaaactgttcagcatcttctaaggcagtggcatatgcagtatctaaaaatggcatatggagaatatggtcagcttttgaaagccagtcttctgcaagttgtgtatatgacatatactgatctttgtcctttctcgttggcaaaaaaacatcactatgtaaaagggagttctgcttaacattctcccttggtagattagcctttgagacctcacaaactaaatcacccaactctgcaagggtatggcggtaaagtaagcgatgtttctctggactgcattcacaaaggtgcttccagtgctgggaaaaagagaaaatgctcttaataaacttggctaatatcaatgggatgagtgcactgtcaatgtcacatgacatgagatggcgatatactagtaggtctacctcttcacttccaatgaagtttggattattcttcggtggcatcagattggatttgacaatcccagtaatccatagctcctcacgacattttttctccttcacaaatagcctctctatttctccttgtaagtagggaagtgattcattgtccacgccgttctttgcaaccacatacaaaagctcctcatgtgacaaaacaggtgctttacggtacaggcgatatagttcagcaccaatgccaccatgaggtaaccaatcggcaggagcaaaatttacagcctcagcacaatttaaaccaggttcctgtatcacactataaacaggaacaccatttgcttgtaaaatcgatggactcagcatcgtgacaaggtgaaaaagcaggtcaggctgtgcatcaaatagatcaggcaaagcattgcgcataacctgcagatcacaaaaggttaagtattctaacataacaagtctcagtgttgccttctcaaaagcatttgcttctgctccaggtaccccataccaacatttcggctcacccacgtgcatggagtaactgtgtaggtgaaaaagactagcactcacagcggctctatgattagacatcagatgaccagcaatgttatcccggactgtctgaagaactgagcctggtaggtttgggaaattattcagattccatgggctcgagcaatacttgtgccacataactgggtccaccgacgatggcacgggatcacaaaggcgaggaaacccacttccataaattgaagtgtccaaatcactcccatacataacctcaagctctcctacctttccctctacaatctcccaaaattgcttctcaacctgaacacgactgggattcttgtgtccaaaccacctttttctcaccctctcctcaaatttccggaaagtttcaacttggcaagtcttcctcctgtggacaaatccaaaacaattcctatcagagttcatgcactctgagcaataccagtttcccggaggcacactctcgagtggtggagacaagcaatatagatgccatcccttatcacagcgatcacagagcagcatgacttccccatgcaagccactattacactgctcacagacctgatccattgcctcattgaccacagtagccgttgcatcaacctttctccttttctgcttgggagcagatgctgcagttttggcactagtgctgcctccacagtgtcccattgtgttgctggttttcctaagccttttcttctggcgcctaatactaatattagcagaggaagcagaaaccggcggttgatcatcatgtgattgtgatggcaatctgtttgtgaagtgctcatattgatagagatgctcataatagagctgcgcgatgacgtgctcggagacggagaaggcatgcctcggcgccttgtcatcaacgaggcggagcacgtcggcccagcgcttccccgcgcaggcgccgtcgtagccgccgaagcgcttgacagcgtggaaaaggcggcagaggtcgagcgggcgtccgtcggagagggcaggcaactttggctttggcttcttgcggcctcggtgtcggtggaggaaacggcggtaatcgaggaggaaggtgtcgggatcagcgggggcgaggcgggcgaggaggcggtggatgggctgcctctttgtggggaaagagagggtgcagacgtcgagtgccgggggaggagaccaggagggcggcgggacgatgcggcagatgccgtatggctcggcgaggggccggatacgggccacgtacgccagggggtcgccgaactcctcctccgtggggcggaacaccggagcctcagggacggaagatccaacgccgctgcctctggctgcggcggagatccccat

SEQ ID NO: 21039 - DNA, 719 bp, Oryza sativa
  unsure (1)..(719): unsure at all n locations
  Clone ID: TF_LIB4309-005-Q1-K1-A4
gtggaagaggagaaatctggtaagggtgaggatggcattgaggaggctgccgataccgttgattccgtgaaggattcagcaaagcctgaaggcatggatgcaaaggaggaggcggtggagcaggagggtggggccgcagcggataaggcaaaggatattcctgtgactagtaacggtaagacggatgctggcggaaatgaggtggctgaaatgaaggttgaaaaattggagaatggtgatgggcatttgaaggcggacggcgatagcaatggtgataacaagggtgctgatggtgagaaacagcttatgttagcgtcagctggggaggacgtggaggacccggtgctgtccaagcttgcaagcaactccttcatgtttgattacagctgtggtggtgatgactcggggactgaggaggagcaggctgctttcatgaaggaacttgagcggttttacagggagaagcttatggaattcaagcccccgaagttctatggtgaagggttgaattgcctcaagttgtggagacaagtgactgggttgggtggctatgatcaggtgacatcgtgcanactgtggcggcaagtgggagagtctttcanacctccgaagacatgcacaactgtttcatggaccttccgtaacttctatgagaaggcactcctttgatatgagaaacacaaaatcgaaacgggcgagtttcaagttgctgcatctaa

SEQ ID NO: 21040 - DNA, 1190 bp, Oryza sativa
  unsure (1)..(1190): unsure at all n locations
  Clone ID: TF_OsC325_1
cggacgtgtntgcagctaattaagtgggtgggttcgcttgcttgctttgcttttgcttggagacgggagcgacgctggcttcagcgattggcgtggagaagctagattgttggtgcgactttccgaccgcgaaaatagtagggctggcaaaccggtggccggccggcgatccggccgaggggatggggagcatcgacggccactcgctgcagcagcatcaggggtactcccacggcggcggcgcgggagggagcaacgaggaggaggaggcgtcgccgccgcccggcggtggctcggctacggggtcggcgggccgccggccgagggggaggccgccgggctccaagaacaagccgaagccgcccgtcgtggtgacgcgggagagccccaacgcgatgcgttcccacgtgctggagatcgccagcggcgccgacatcgtcgaggccatcgcgggcttctcccgccgcaggcagcgcggcgtctccgtgctcagcgggagcggcgccgtcaccaacgtcacgctccggcagcccgcggggactggggccgccgccgtcgcgctgcgggggaggttcgagatattgtccatgtctggcgccttcctcccggcgccggcgccgccaggggccacggggctcgccgtgtacctcgccggcgggcaggggcaggtggtgggtgggagcgtcatgggggagctgatcgcgtcgggccccgtcatggtgatcgcggccacgttcggcaacgccacgtacgagaggctgccgctggaccaggaaggcgaggagggcgccgtgctgtccgggtcggagggcgccgccgcgcagatggagcagcagagcagcggaggcgccgtcgtgcccccgccgatgtacgccgccgtccagcagacgccgccgcacgacatgttcgggcagtgggggcatgcagcggtggctcggccgccgccgacatcgttctagcactggcaccggttaatcaatgtctctctacctagctagttagccttccacttctttccctagttgtttgagtaggttaattaatcatttaccatgttaattaatgtgctatgtaatgcataagtactcgtgtgatcttatcgttccattttcttcagagtttgaagaatgtaaaattactgtgcgtatcaagatcggcagtggttgctcacttgctccttcaaaaaaaaa

SEQ ID NO: 21041 - DNA, 1066 bp, Oryza sativa
  Clone ID: TF_OsC151708_1
atggccggggtcaccagcaagcgccgatcctcctccgcctccacctcctcctcctccggcgacggcgccgccgtctccgaccggccgcggggggtgacccggaagcgcaggtccggcggccgttgcccccgccccgccgcctccctgaggccggccgcgccccgaccctcctctagcgatgcacgtgcaagaactaggcacaaatcggggatatgtgttcttagtggagtaatttctattactaatggtgggtataactggtgtaggaaggtaaacatgttggatttgaatagagctatccttgattcagatcaccacactgctggattgagagtaattctgcaaaaggaactacggtacagcgacgtaagccagctagggagaattgttctcccgaaggtattggcccaacaacaagagcaggatgtcatcggagcaaagaaggcaggtgatcaacaagctgccactgtgccacaagttgacgagcatatctctaccctcttccccatttttccaattgcacaagtcgatgactatctctctcccatggcaccacaagttgatatctctgccttcgtgccacatgctgatgagaaccatgagatatttgacgggatactgaattctctgccagagataccagtagccaatgtgaggtattctgacttcttcgacccattcgatgatggtatggacatggcaaacactctgaacgccaacgccaaccagtctgctagtctgcatgtcactgatgataagtctgggcattccttgattcccaacccaaagtctgggcctcacatgtgagactgacagggaagtggtatttcataccatggtcagtttgtatgaagctcagaaaccccttccctggcgccattgttgtacatccaaataattggtgtccttattttgacgctgtatatgctaactgctacatgcagttttatgtgtaaaatattttgttcacaacccaactggaggtttaatcagatgaaacattgtaactctgttcagttcagctcagaaatgtaattgtttctttcagtaaaaaaaaaaaaaaaaa

SEQ ID NO: 21042 - DNA, 819 bp, Oryza sativa; identical to SEQ ID NO: 11312
  Clone ID: TF_OsC413392_1

SEQ ID NO: 21043 - DNA, 1652 bp, Oryza sativa
  unsure (1)..(1652): unsure at all n locations
  Clone ID: TF_OsC170713_1
cacgagggttggtagtgaggggggagtggtccaaagaaagtgtggttaggaggaaaacaagagagagatgatatggggcaaatggacggcggcgacggcggcggcggcggccacccctaccactaccaggctctcctggccgccgtccaccagcagaccgtcccctttcccaatcccttccccgccccctcctccggagccgagcccccccacccgcacaaccacaaccacaaccacaatcacaaccacaatattcacaattctcacaatcacaaccacaatcacaatgctgctcctcacccttgtcacactcccactcccactcccactcccagaggtttcgccgactggagcgcctccaccagcgccttcacctcccttgccgcgcactcttctactgcccccagcaatgccgttcactacagcttctccccctgctatgccttctggacacattacatgctcaacaagaacgcctaccccacctccttccctgcgccacacgacgaccacctgcgccttgccaacaacaatcatcctagagacgcaccaggtcctgcatccagctacggggtcgagtcttttacttcaccgtccatggcaccgaatatttgcacccacatgcctcccatagaaggacccatatctgccaaggaagataagaaaccagagattttgcctagagtggttaagagcagtgatgaattggaaaccagaaacagcaatgttgaatttcactctgagacagttggtactctccctgagtcgaagcaaggccatgacagtcgtgctactaaactactcaactcgggagaataccaagtcattctgcgcaaggagctgacaaagagtgatgttggaaatgttggaagaattgtgctacccaagaaggatgcagaggctagtcttccacctttgttgcaaagggatcctttgatactgcacatggacgacatggtgctcccagtgacatggaagtttaagtacaggtactggccaaataacaaaagcagaatgtacatcggatttcgcaggtgaatttctgaagacacatggtcttcaggctggggatgtccatncattnatcctacaaaaaaccttggcctcctggccaaattttattattcccgaggaggagaaggcccattncatccagccagaccacaaatccctagatgcatttggggttaattgcaacagtgttagttgatgccatttgaagggataggtacgtggacttaccataagttggctatccaggagaagttgaaagtgtcatcgatttttatatcactggtggccaccatcacatggacaaagattaaagcgcatgcagcttggacctgtttaactctgaatgaatgaggacgaaaaaaagacaagattggtagagtattggaagtgttggcaatgggcttctacagcttatcttgggttgagaaaagcacttgtcagtttatttaattcagttatgttggggagcttgacttgtagttttcagaacaatatatttgcagcttctgtaaatatgttttggatctataagataaaagagagtggtgtgtgattttgcttttggatggtcatccatctatttctcatactaatgcccggaatgtctgttcattgtccaaaaaaaaaaaaaaaaaaaa

SEQ ID NO: 21044 - DNA, 1593 bp, Oryza sativa
  Clone ID: TF_OsC80572_1
atggctgatgctaggggctcctcttcttcttccggcgatggcggtggcggcgagggcaacggcggagcaggccatggtgactttgtggggggcggccagcacaactggtaccatgggatccttggggccgtgccgccgcccaacgttgggcgacaaaacatcgtgcaccatcagtaccctgctgctagcttgatccagcagcaccaccagtcgccaacaatgccgctaccgatggcgcagctcccctacgtgccccaatacaccgtgctgcctacgcccgccgtgctcccgtcgcaccaccaccaccacggccagtcgcagatatctcaagaaaacttccaagactgggttccctccaacaatgttgcagctccgcatgttcccagcgcttttcaggattggaggcaaatgtgcaatgggtcggcattcatgccttttggccaaactgctgccaatagcaatgttttttaccagaatctgaccttcaattcatggactagcaataacatgccgaggaaccctgtctacactagtttccaccctgctgcaattgaggatcaccatgctcctctattccatagcaacaatcatgacatagacccagagtttttgggaaaccgacacttgcatggagttgacatcgccggagctccacccgcaaaagccacctcacctgccaccgccggaggtctgctcacgaacacagcccctgccaccgtgtcacagatccatgcgagatgccgccgtcgccaaatctaccgctgctgtggccttcttccgcgagcacctccaccatcagatccgtgcgcgttcgcgagggccgccatcaccgctgccagatccgcccgcggcctcctctctcatttgtacggtggcttggtgttttggcttgttgggaaaaggaagctgggggagaaacgagagaggaagagaaaagtggtggctgggatggatccaccaattgtcttcagaaggagcgatatggagagcgaaaaaaacgatgataatccagatcaaactccggttagtgagcctccaagcatgaatcagaacggtgaaaatcttattattagattcaactgtagagaataccgtgttatcttgcgcaaggagttaacaaacagtgatgttggtaatattggaagaatcgtgatgccaaagagggatgcagaggctcatcttccagcattgcatcaaagggaaggtgtgacgctgaaaatggatgacttcaagtttgaaactacatggaattttaagtataggttctggcccaacaacaagagcagaatgtatgtcttggaaagcaccggtggttttgtgaagcatcacggtctccagacaggcgacatattcatcatttacaaaagctcggagtctgggaaatttgtgagctccgtgccatttacttccacaacgtacggagaatccgacggtgaggactacaacggtgatagaagcggccccggtgccggagaggtggccgacgaagatttcagaaagcctgagtttggttggtattgttgcgcgaagataaacaggaaagaaagtgagatcagggaacaagtgtctaaggagaaagtgaactccaactga

SEQ ID NO: 21045 - DNA, 2187 bp, Oryza sativa; identical to SEQ ID NO: 11314
  Clone ID: TF_OsC159728_1

SEQ ID NO: 21046 - DNA, 804 bp, Oryza sativa; identical to SEQ ID NO: 11315
  Clone ID: TF_OsC413391_1

SEQ ID NO: 21047 - DNA, 1722 bp, Oryza sativa
  unsure (1)..(1722): unsure at all n locations
  Clone ID: TF_OsC11135_1
gattcctcctctctctgctcttctccctctccctagctagagcttggcttgcttcctccaaacacagctcgagatcaataggaattcataggaacaacaatacaatacatacacgcatacataggtagatcatatccccctctctagtatcctatagcttacttctttgtaacagtgcctatcctcgaacatcttgcagaggaggaagaaggaagaagaagaaggaggagttgggagagaggagcaagaaatacagccaagaatttgaggaaatagtgatagttttctatggagttcactacaagcagtaggttttctaaagaagaggaggacgaggagcaggatgaggcgggaaggcgagagatccccttcatgacggccacggccgaagccgcgcctgcgcccacgtcgtcgtcgtcgtctcctgctcatcacgcggcttccgcgtcggcgtcggcgtctgcgtcagggagcagcactccctttcgctccgacgatggcgccggggcgtctgggagcggcggcggcggcggcggcggcggagaagcggaggtggtggagaaggagcacatgttcgacaaggtggtgacgccgagcgacgttgggaagctgaaccggctggtgatcccgaagcagtacgccgagaagtacttcccgctggacgcggcggcgaacgagaagggcctcctgctcaacttcgaggaccgcgcggggaagccatggcggttccgctactcctactggaacagcagccagagctacgtgatgaccaaggggtggagccgcttcgtcaaggagaagcgcctcgacgccggggacaccgtctccttctcccgcggcatcggcgacgaggcggcgcggcaccgcctcttcatcgactggaagcgccgcgccgacacccgcgacccgctccggctgccccgcgggctgccgctcccgatgccgctcacgtcgcactacgcccccccctcgccgccggccacgctctacgagcaccgcctcaggcaaggcctcgacttccgcgccttcaaccccgccgccgcgatggggaggcaggtcctcctgttcggctcggcgaggattcctccgcaagcaccactgctggcgcgcgcgccgtcgccgctgcaccaccactacacgctgcagccgagcggcgatggtgtaagggcggcgggctcaccggtggtgctcgactcggttccggtcatcgagagccccacgacggccgcgaagcgcgtgcggctgttcggcgtgaacctcgacaacccgcatgccggcggcggcggcggcgccgccgccggcgagtcgagcaatcatggcaatgcactgtcattgcagacgcccgcgtggatgaggagggatccaacactgcggctgctggaattgcctcctcaccaccaccatggcgccgagtcgtccgctgcatcgtctccgtcgtcgtcgtcttcctccaagagggacgcgcattcggccttggatctcgatctgtagcgacctaaagagagaaaaacaaaggaaagttcatcaacgattcttttttcttcttctgttttgatttggtttgttcttcttctcgcagcaacatcgatctcactttctcttgtgattccattataacctgaaatttgatgacagcattaggatttgacatttttgttttgttggccacttaattggaatctttctgttggtttgagaagantatagagaatntattaggag

SEQ ID NO: 21048 - DNA, 1657 bp, Oryza sativa
  Clone ID: TF_OsC55481_1
tattgtgtctgctctcagcataagcatgcattgcatggtttcgaggcccatgtcgtcgccggcgcagccgcccccgacgcggccgccggtggccgccccgcaagcgcaattgcgcaatggaaggcctagaatggatgcaaaggcgagatctcagttgcttccacgctattggcctagaataacagatcaagagctacagcacctatctggagactcaaattctgttattacccctttgtttgagaaaatgttaagtgctagtgatgctggacggattggtcgtttggtgttgccaaagaaatgtgctgaggcgtacttccctgcatggatgcaaaggcgagatctcagttgcttccacgctattggcctagaataacagatcaagagctacagcacctatctggagactcaaattctgttattacccctttgtttgagaaaatgttaagtgctagtgatgctggacggattggtcgtttggtgttgccaaagaaatgtgctgaggcgtacttccctgccatctctcaggcagaagggcttcccttaaaagttcaggatgctactggtaaggaatgggtgttccagttccgcttttggcccaataataacagcaggatgtatgtattggagggtgtcacaccttgcattcaatcgatgcagttacaagcaggcgatacagtaacctaaaattgacaaaggtgcattaccacaaaaggaagggccaggaacttcaagttcctccccactacctgtcaagagaaaggcaacttctgttggtccgaagatcaaacggttccacatggacagtgaggaatccatggaattgaagataacatgggaggaagctcaagaattacttcgtcctcctcctaaggccccttcaattgttgttgttgatggccatgagtttgaggaatatgaggagccaccaatacttgggaggaggacatattttgtgacagaccaatcaggtgagaatcatcaatgggctcaatgtgaggattgctctaagtggcgtaaactgccggtggacgcccttttgccctctaagtggacctgctctgacaataaatgggattctgaaaggtgacctgctattttagaaccattcagccttttgtatgctgtatttatgattagctacaatagaaaaagtgctgcaaaaaagaccaaagggaaggtagatactgacaatattgatgtttcagatgggctggacacactcgcaaatcttgcaattcttggtgaaggtgaatctctcccttcccagccaaccacaaggcatccccgccatcgccctggctgctcatgcatagtctgcatacaaccacccagcggaaagggaccaaagcacaaacagacgtgcacttgcaacgtctgtatgacagtgcgacgccgtttcaggacgcttatgatgcggcgcgagaagcgccagcagtcagagaaggactctggggtgcctcgcaaaagagagccaggtcaatccagcgagccagttccacaaacaacaagaggacctcctctcctgtcaagaaccagattgacctgaacagtcagcctgagcgggaagacgacctcgagatcgtgaagttctcctccgcttcctccgcctccggcgccgtcttcaccacctccggcaccgtcacctccacgggaa

SEQ ID NO: 21049 - DNA, 3645 bp, Oryza sativa
  Clone ID: TF_OsC1713_4735
ctaagactgcgacagcccgacaaatccaacagcaatgtcactgcaatttgagaggtccaaatacagcaggttcctgattgctgtgggcaacagataaatggggtcagccagggatgatggcattgtctgttctttcatcctggtaatcttgtcttgggcagagtagttcagatcatcaaaagcaggaacctgaagcatccggtgatcctccttcatattctcatcagagcataggaagcccatgatccccaaaacaccacggcataagaggatgcaatgcgacgtcgctgcggcgggaatacgaaaaactggatctgacaggcttcgtaattgtatcaaagcatcaagcgtaggaatagtatcacggatctttgcggatgttgactgacttttgtggtttctccccatcatggacaggaggctgtagtagtgcagatcttggaggcaatcttttagcgctttgtaggtgaaattttgaactgtaggaagcggagaattgggcggcgacggcgacccagatttaccgaaggatgaaaccatggttcttacccgaaccagcagctgaaagaggcgattgatatgaacctgagggtctgagtagcctagagtagggagaatgtgcatccggcgcttcgagtggatgaagaggcggtcacgggtggcctcgctggcgccacggtagaaggagaccatgtccccggcgtcgaggcggttcttcctgaagaagtggctccatcccaacgtcaagctgctgccgcggtagaggaaacgccatgaattgccggcatcgtcctcgaatctgaggacgacgccctccctctcgttcgcgggtacgtcccgcgggaagtagcactccgcgtgctgccacgggatcaccagccggcccagattcccgacgtcgctgggcgtcaccaccttgtcgaatatgtgctccttctcgacgaacccccggccccggaccgcgtagccagagaaatcgtcgccggcctgatactcaccatcagacacttcctcaccatccgagagttccctgtgccctaatgtgcccctgggagtacgtgagtcggtccgggggtacggcacgggcaacccgtcctgcctatacaggtgtgacctctggctgctcctgagtgtgcgcctctggagctcctccaagcggcgtgagacgaagaggccccagtaccgaagatcccggcgtgtgggcgagggatcgacgctccgtgagaggaagagctggcgaacgcgcccgaagaggtggcgaacgcccctgcggagctcgcggaagcgccggtcgtgcctgcgaacgcgctcgaaggcagacgaggtccggtgctgtaggtcgcactgctccgaagctaggggcgctcgaaggcaaacgaggtccgtgcgaaacaggtgccgtaggtcgaggtcctgctccgacggtaggcgcgcgaggccgtggttgtaccggaccagctggaggtacgacgtccacggcgctctgttcaacctcacttggactgcggtgatatcggcactgatatcccgtgcggcatcagcccccacgaagtagtctcggtcacggtgcgtgggatacgcgtccgtgacagcggcaacgtgcggctctggggcgtctggagtgaaggtcacacgcgcacgagtgcgaggaaggtaccagcgaaggtagtcacggtagttctcctccgtgtgtgggaagagctcgttgatcacctcctctgtagctaacacccagtcgtcaacgtactgctgtacacgtggagcccaaagtgcgcctgctagctgtccccgtcgagtcaacgagtggtcggcagggaggacggtcggctgcacgttacccggaaacacctgcctaagtccgaactgtctcatcacacgctgcgggcagtgaggctcaacgaaaatgtcgaacaccatcggcaggatggtgagccagtaagcctgatcgcgtgtgcacaaggacgaaagtcctagcggtgctctcgcagcgacggcctcttctgtgtacggctcccagatgacgtcgctcggctggagacggtcaaactcgaacacgaagtccgggtaacctcgtctcacctggacgtgagcgtaacgacgcccacgtcgacaccagtaagtccccatcgtgggaccgtcctctggccactgcgtgctgcgaccaaccccgtagggtgcgctgtccaccactggtcgacctatggcaaacctctcggctgcccaaagctgaagcaacatagggcagccagcgatgatcgctcccgcgtcagtcttcgtgcacgcctcacagagggcacggtacgtggctgctagcatggcagaaccccagctccactgcggcacgtcctgtggctgagcatccgcgatggaccgtgggtagtggaccagccggaagtccacagcgtgcccgtgggtgctagtgaacatcacccacccgaacaaccacaacaggtacgcctcaagggagcgtcggaccgagtaatcatcagcgtcagggtgcagaaggtccgtctgctcgaagcgcgcagtgatatcctccttccacccaacaacaccgtccacgggaccaactggtgctcccgccagcggtagcccgagcaggtacgacacgtcctgcagtgtcggagccatctccccacagggaaggtggaacgtgtgcgtctcaggtctccagcggtctaccagagcggcaaggagtgaccggtctgcatcccaccgcttcgctgggtcacggtcgtccgccgccgcctcaacaagcgcgtaccaaggaacgtgacgggggtcgacacgcaaccactcacgcgacgtgcgtggacggaaggtgccgagctgtgcaccctcgactgctgacgggaacgagcggtggttcctgtcaatcccacggttcaacagcgccggtgtgtcgtacgccataccatcacttgcctgtctagatggactagcatctgcgccgcttggaacttctgcattcttcgggcatttcttgtaagtatggccgcgcagatcacacttgcgagatccatcggtgtcgaacaatagagaccacttctccttaggctcattctcaatccactgagtgaaatttctgatggacgaccctgacctacttctcattgttggtgggtcatcatgtaatgcaccaagaggtatgggaggctcgtcaccttcaacttgtggtctgcgagattgctcatctgtttgcttcgttgtcaactcatccaacttgtcccacaactcattaaatttcttctcttggttctgtgcacagagcctcttaaagagctccataagatgcttgttcttgaattgcttgtagaaatttgcacccatgtgacgcatgcaccaccgactccgaatatcaggccacttagctggaagtcccttctcatcccaaccgttcgcctccttcatctcatccttatgagcataccttgcaccctcaattacctcgttctccttatactcccagggtacatgatcaccctctgatataacaagtccagagaagtcctcatttgcccaattagtggccattacatcaccttcctcatcggatgatgcgtcgtcgtccgcttcctcattatccgaatcttccctctccatttcatcaacaattatacagactctctccccctcatccgccat

SEQ ID NO: 21050 - DNA, 1302 bp, Oryza sativa; identical to SEQ ID NO: 11320
  Clone ID: TF_OsC80572_2

SEQ ID NO: 21051 - DNA, 942 bp, Oryza sativa; identical to SEQ ID NO: 11322
  Clone ID: TF_OsC255862_1

SEQ ID NO: 21052 - DNA, 1033 bp, Oryza sativa
  Clone ID: TF_OsC77518_1
cggttcaggatctaccggctctcctctccggctccatgcaccactacccaacttttgccgccaacacatctttgtttcgatcgaccgatcgatcagctctagctcagccgcagcaatggccatgcaccctctcgcccaggggcacccccaggcgtggccatggggtgtagccatgtacaccaacctgcactaccaccaccactacgagagggagcacctgttcgagaagccgctgacgccgagcgacgtcggcaagctcaacaggctggtgatccccaagcagcacgccgagaggtacttcccgctcggcggcggcgactccggtgagaagggcctcctcctctccttcgaggacgagtccggcaagccatggcggttccgctactcctactggaccagcagccagagctacgtgctcaccaagggctggagccgctacgtcaaggagaagcgcctcgacgccggcgacgtcgtccacttcgagcgcgtccgcggcctcggcgccgccgaccgcctcttcatcggctgcaggcgccgcggcgagagcgcgcccgcgccgccgcccgccgttcgcgtcacgccgcagccgcctgccctcaacggcggcgagcagcagccgtggagcccaatgtgttacagcacgtcgggctcgtcctacgaccctaccagccctgccaattcatatgcctaccatcgctccgtagaccaagatcacagcgacatactacacgcaggagagtcgcagagagaagcagacgccaagagcagcagcgcggcgtcggcgccgccgccgtcgaggcggctcaggctgttcggcgttaacctcgactgcggcccggagccggaggcggatcaggcgacggcaatgtacggctacatgcaccaccagagcccctacgccgcagtgtctacagtgccaaattactgtgacccacacacccttggctactgggactaccagaacctgacccacaaaactggatgcagccatgcaggggcccaactcaaaaaccggacctacaagacgctatga

SEQ ID NO: 21053 - DNA, 3333 bp, Oryza sativa
  Clone ID: TF_OsC29041_1
gggttcagcctcgtgcctcgatctttactgcctggaacgaccctcgagatgagtgaggacggtgatgcggaaagcttttctttttctccttctattgatcggagtgcagatggcggggatggctgcggcggcggcggcgttggtggcggcgaagaggtgcatgaacgccgcgtgcggggccccggccccgtccccggcgggaggggagtggaggaagggctggccgctgcgatccggtggcttcgccgtgctctgcgacaagtgcgggttggcatatgagcagcttgtgttttgtgatatatttcaccaaaaagaatctggctggagggactgctcattttgtgggaagcgtctccattgtggatgtattgcttcgaagaactcctttgatctacttgatagcggtggagttcaatgtgtcacttgcattaaaaattcagcagttcaatctgttccaagtccagtcgtccccaagcttttttcatcccaaaataaccagagactttttggcaaaagcgatgatttattgtctggtagaccactggagacatcctcccttatggtcgatgccagaaacgatgatcttactattatcgctaagaacaaccttccattcatggtgaaaaacgtagaagctgggcaaagcagtaatattttgaggcaaaaagaactagagaatggtgcgaggcagattaaatgggaactacctacccttagtatcggggacatgggaaggatacctttcctaactagatctcaaagtgcattggagtctcgaagagatgaaaataaagacccaactacagaaagcacgacaagtgaatcactttctgaggcatgcctcaacatgagcttgggaattgctagtaatggaaacaagttggaggctacttcaactgtggaaagacctatgctatcaccaacaacaggatttcctgaaggaagagagcttaccactgcattatctccatttcagcatgcacaaagggctcgtcattttctgaccagaccgccaagggttggtgaaggtgctgtttttgatccaacgaaagatatgcttccgcatcttcgtgttgcaaggccacctgcagaaggtaggggccgcaatcaattacttcctcgatattggcctagaataacagaccaagagctacagcaaatttctggagagtatccttattatatttatcaacttcttggtgatattatgcataattcaaattccaccattgtccccctgtttgagaaggttctaagcgccagtgatgcaggccgcatagggcgccttgttctaccaaaagcctgtgcggaggcatatttccctccaatttctcagccagaaggtcgtcctttgacaattcaagacgcaaaaggcaaagaatggcattttcagttcagattctggccaaataacaacagcagaatgtatgtcttggagggggttacaccatgcatacaatcattacaattacaggctggtgatacagtgacttttagtcggatagaacctggagggaaacttgttatgggcttccggaaggccacaaacactgtcagtttgccagactcacagatttcagctattgccaacggttccattcttggggatacattattttctagtacaaatgagaatttagcaatagtaagtggttattcaggatttcttcagtcaataaagggggctgcagatctccatacaagctctatatacgatcatcatgtgaactcagctgacggggatgttagttggcttaagacagataaattcggcagcaggccagatgaggggtctttgcagtttttaaagagaggccgcaatattggttccaaaagcaggaggctttcaatggatgctgaagaagcctgggaactaaagctttactgggatgaggttcaggagctgttgcgtcctgctccaactgcaaaacctactgtcgtgatgattgaggactacgaaattgaagagtatgatgaaccccctgtgtttgcaaagagatcaatttttaccatccgttctactggggaacaagatcaatggattcaatgtgatgattgctcaaaatggcgccggttaccacttaatgttattgttgcatccaagtggacatgtgctgacaacacaatcgactcaaaaagctgttcctgctctgcacctgaagaattaacccccaaagaattgcacattgttcttcagcaatacgaagatatgaggaggcgaaggaacagctttggttttaagcagaacatccccgaaatggatgcggtcagccttgatgcctttgccactgccgcagtctatggtgatgtcgggaaccaaggttccccttctgttgcgacaaccacaaagcacccccggcatcgccctggctgcacctgcatagtgtgtatccagccacctagcgggaagggcccgaagcacaacccagcttgcacctgcaatgtctgcatgaccgttaggcgtcgcttcaagacactgatgatgaggaagaagcaacggcagtcggagcgagaggaggccgaggcgagcaagaagatcgcttggatgaacagagatgagcctgagggaagcagcctgtcaagatccccacagacggttgacactacccgagacggagatgtgaccatgttcgacaaggttgacatcaacaagggccacatagacctgaacttccaccctactgccgtccgagacgaggagcggcatggcgggcagcctcgggtgagcatggtcagcctcctggaggtggccaaccggccactggagaactacatgaagcagaacggcctgacgagcttggctggggagcaagggagctccagcacatgtacaggtgcagccacggttccgcagccggctctggtggagagcgaagagcggacgtccaacaacgacggcgggcgtgtggcgacggcagagcagccggagagcatggccgtcgacgaggctggagataaccagccggacaaggctgccggtgactctgctgctgctttagcttgagcttgaggctgaccgtgttgagtgtgtggatggcaggatgggtattgaatttgttgtgtgtgcatcttatcggcttccccctttttttacaggaacagcagctggtgagttttgatgttgagaatctcatagggtttcattgtgttcttgtagtccttcacttgctttcttgtgtaaacacacgtgtagaaggctgtatgatactgactgtaccttgtaatttttaaccacgaggctcaccttatttgctcatacctcggtgggcagctagttgttgtatgtatccaaagccaagacatccagtaataactcacctgatttgccgctct

SEQ ID NO: 21054 - DNA, 532 bp, Oryza sativa
  Clone ID: TF_uC-osflcyp024e03b1
tttggcctagaataacagaccaagagctacagcaaatttctggagattcaaattccaccattgtccccctgtttgagaaggttctaagcgccagtgatgcaggccgcatagggcgccttgttctaccaaaagcctgtgcggaggcatatttccctccaatttctcagccagaaggtcgtcctttgacaattcaagacgcaaaaggcaaagaatggcattttcagttcagattctggccaaataacaacagcagaatgtatgtcttggagggggttacaccatgcatacaatcattacaattacaggctggtgatacagtgacttttagtcggatagaacctggagggaaacttgttatgggcttccggaaggccacaaacactgtcagtttgccagactcacagatttcagctattgccaacggttccattcttggggatacattattttctagtacaaatgagaatttagcaatagtaagtggttatttagggattcttcagtcaataaagggggctgcagatcttcatac

SEQ ID NO: 21055 - DNA, 2285 bp, Oryza sativa
  Clone ID: TF_OsC51357_1
atggcgaaggaggaggacggcggcggcggcccggagttcgtgaggtggagggaggacttcgtgtcgcaggagaggggcagccgcgtcgtgcattactacctcgaggacgccgcgggcgcgtcgcacctcgccgtcgtcggcacggagcggagcctgcgccacatgctctatgtggtctcggaggatttccgggaggcgcagggtgccgatggcggcgggccgggggtgtttgcgcgcaagtggcggtcacgccgtgaggtggtggattggctcgcctccttccttccggcgaagtccctcgcctcgaaactttcaaaatttggatcacatatgggtaatgacattggattggatggatacagtgaacctgatagctttatgggtcacaatctggggaaagcctgtagctcggacattatgtggtctggttcgtcctggacttgtggcaagcagctttaccactataaagctttttgtcgtaatggtaccacaatatctacccactcttttgtgcttgtcatgtctgaggaggaaagtcgctatcttgcatacttggaagatatgtacgaagataagaaggggcagaagaaggttaaagtgcgatggtttcatcaaaaccaggaatttgcttgcgctatacctcctccccctcctcatccttgcgaagttttcatcactccttattctcaagtaatcagtgtggagtgtgtcgatgatattgcaactgtgttaactcctgagcactatgaaaaatgcgtcaatacattgccaaattcttctatggtgggaatccgtttctgctttcgccaatacagtaaaaataagtttaaacgttttgacctgagatcattgcgtggatattttagtcaagctgttgttttgtccttaaaacttcccccagagcaagaaaaggatgatggttctgatatcataaaaacttttgagcaatggacacctgggaagacaaagtttcctaagcagtttgagaggctttactcaaaatgtttgggaactaaaatctgccgaggcccacaagaagactccatagcatcttatcagaaaccaagcagtaagcaatctcccagaaaacatctctcagtcaagttcatagggccccagaatcagcgtatgccaacctacaatgttggtgacagaatagaggtcttgtctcaggacagtgggattgtaggctgctggttcaggtgtacagttctcaagtcatgtactaatcataacaaattgaaggttcagtatgatgatctccagaatgctgatgatagtgggagattggaggagtgggtacctgtatcaacattggctcgtcctgataaactgggattgagatgcccagagcgacgcagagttaggccacgccctcaacaaaatagtttggctgacggaactaatcttttacctggagctgctgttgatgtatggcaatttagtggctggtgggaaggagttctagtcagtgcagacaacatttcagctgatagcctacaaatatattttccaggcgagaacttctttagtgtatgccagctaaagaatttaagaatttcgaaagattgggtcaagagccactgggttgatatagaaatgaaaccagatgtgttatcgaaaataccttcggttggtgttcaaacaaggcaacctgataatctgacatctgttgagaggccggactccagaaattctgcaatgtctgaccaagagcttgcagccatacaaacaaactctagtgaagataaacaaacaggagctgatcagccagcagaagttagtttgactgatatggcctctgcttttgcagaggaccagaaacaaacagttctaggaaagcgacctagggatgatgatgctgaacaacattgcaatggggaagtaggcatagatgttggcaaattgtgaagtttgggaagcgcaacctcattagacgtatgtacatagctatagatatggtaattggaccccagcagaggggttttttactaggttgctgatatcagtgagcatcgacatcttttttcatacacgtgttcccttgttttactgttagcttcccactttcaggctttctgtcaccagatacagaggttgcaaactaaatattacccttaccagtcatattgtatagcagtctgattgatcattgcttctcttatgttttcctccggagtctggactatagtttcagtttattctcaattgttaatatagtttaagttcatatgaaaaaaaaaaaaaaactaccctgctggtgctaaaaaaaaaaaaaaaaaaaa

SEQ ID NO: 21056 - DNA, 2897 bp, Oryza sativa
  Clone ID: TF_OsC28675_3
atggacgagctcgcggcggcgtcggcggcggcgaggaggaggtgggtgcagtgggaggaggtcgtggtgtcgaacgaccgggggaggcgcctcgtgcactactacctccggggagcggccgcgggcggcggaggagggggagaggtgagggagcttgcggtggtggggcgggagcggagcccgcggcacatgtcgtacgtggtgcaggggcggttcctgcggtcgctggcggcggcgggggtgggggtgggggtgggggtgggggcggcggtgggggcggtggtggcagtgccgtcgccgtcacggtcgccgctgccggcttccgcggagggcggggcgccgaggaaatggaggtcgaggcgggaggtcgtggactggctgtcctccctcgtttccggatgtaattacggatcttcttcaatgtctaataggttcaatgaaaatccatatgatgacattgagttcactgatgttgctgcttcaaaggatgtttcacatacatcatcagtaaggaataactcaaaagagttcacatggttaggtcctgcatggctttgcgaaaagcgatggaagcactacagatctttctgccgtaaggggattactatttcggtgcataattttgtctacatcctgagtgaggaaaagaagaggctcatcgcccaagtggaggatctgtatgaagatactaattcaaccaacgttgtcatggtacgatggttcgacaaagttgatgaggttggtgtcgaattgccacctgatgttggtgacagagagattttcttttcccctggtctgcaagatctcagtgttgaatgcattgatggattggctgcagtcctgagtgctcaacacttcgagaagttccagagtagtccaaaacatagctattggcagccttatatttgtcgccgacagattgatgaagatggcgtcaaaccttttgatgtaacccaattgcaaggttattggagtcaagaagtgcttaggacaatgttcaatgcagcttcttctcttaaggtacgtttcaaggtcactaaaggtgcttctagttcagatggggcacaaaagaggaagcgtgatgcattcagtgaaaccgatccacagcagtgtgttccttccgctgcattcggttctgatagtctcaagaatgatttggaacataaaactcaaaagcagctatatcctggtagccgtgctgaagtcctatcacaggacagcggtataaggggctgctggtttagatgctttgtattaaagaggcgcggagacaaaatcaaggtgcgatatgaagatcttcaggatgctgatgagacaggaaatctggaggagtgggttttgctaacaaggattgctaaacctgatcagttgggtatacgcatccctgaaagaccaatggtgcggccatatcatgtacatagcaaggatccatgctctttcgatgctggttccattgttgatgcatggtggaatagtgggtggtgggaggggattgtattgcagcagggaaatgacagacgccttcaagtttattttcctggagaaaagcagattgctgatttttgtgaagatgatttgaggcattcacgtgagtgggctggtggcaaatggaattccttgggggaaagaaaagatatcacacacctgttgccccccacttcagttcatgaagagggaggtttgcttagcaaacctgtttcacaagaaggcaatccctcttcaaaattagaatctgacaagaggtgtgatgacaaatcattgggcaccaagatttcacatgatcagaagcatcagaagcgtgttctggctgatctcacaaatgctctgaaattcgataacctgaaatggaggccaagaaagcggagcagaagatctggttccaaaaggcagtcagacactagcagtggcagtggcagcagcagccagggcgacatggaggagtccagcccctgcggaagttttgcagtgcttaattcagcgcccgatgaagaagtatgcaagagcagtggagaacctcttttcatgagggtttccaacctgacaactttgctctatggttttgccagattcttctaccgttctctcttctccggcgagccggaagccgacgaccggtcgtcgcgcgccgccgccaagtggacagacggtgttcatgagtggcaaggtgattatggtgaattggaagtgcagagggggaatggtgtgttctactgcatgaccgtcaggatgagcatcgactgcaatgggtgctaccagaggatcaggagggcactcctccagatgcaagaagatctggatagccacctgatcgaccggaagcagcagcgggtgagcgtctgcggcgccttcgtgccgcaggacgtcgccatcaagctccgcaagaagaccaaccgccgcgtcgagatactggagatcaaggagatcgacgccggcgacggccaccggctgtgagtgatgtccagatgaagtcactccacgactgacatgttttagccttttctttccggatttcaacagccttggcgagatgtgagtttgatgcatccccaggttatttagtcacaactcacaactggtatcctgatcatcttgagagctctgaatgcttattcgctcggatgtccaggatgcaagcatggaggagcacactgttgtatttatgactgatctagatgagttttaccattttgtctcactttagggtcttgtagggtgttttaaccgtcttgttgtttagttggtgttacaaagatagctggctcattccacctcggcagtttccagagtcccttttttgtctttgtttcagcagtccaatatccaatttaatttgttcatcagctgttatagatgttcttatagtatactctctgaaatgataatatttacatcgtcat

SEQ ID NO: 21057 - DNA, 1809 bp, Oryza sativa
  Clone ID: TF_OsC98543_1
gcacgaggcctcctcctgctacctgggagccacgcgcccccggcctccacctcgccgccctcctcgccggcggccgccacgcgcttatggtgagtgcacagtgagctacaagttaccattatcagaatggatggtatgaaggatggccgggatgaggaagttgccactgatgcggttggtgctggtggagttgatgtgggcggtgagacatcaaaattgattgatcaagactgcatggcaatactcgacgtgctggcgaggaggcttatgagtggtgagtctgaaccttacattggaaagataataaagatatggcagcaaaatcaggctaagaaagtaaagattctttggttttttctcccggatgagattcgaaaacatttaagtggccctgtaatggaaaaggagatatttcttgcttgtggtgaaggcgttggccttgctgatatcaacccactggaagctattggtgggaaatgcactgtgctttgcatttcaaaggatgagaggaatcgtcaaccttcccccagggaactagcaatggctgattatatcttctacaggttttttgatgttaacagttgcacactttctgaacaattacctgagaaaattgcaggggtggaaggaaatcttttgcttaattcaaaagttgagcaagtgacatcctgttcagaccaggaagtgcatggtgttgatcagaagatgcttaatgtcccagttccccttccccagtcaacggttatggaggatgaaagtccagttgctgcagtttcccttcccccgtcagtattcaaggaggaaaatgtggcttcagccattccctttccccagccagtggtcaaggaggaaagtgcggctgctgccattccccctccccatgtagcactgaaagaggagagtgtgtccaaatctacagagaacattaccaaacctgcacagaaagttctccctggggagaggccaccaaagagggtcaaattttctgaaaatgttacagtgcaaaatgtgccattagatgttcctgaaagaccaagtcgcactggacctttggaactagcaggtagacaagctgacagaagcaaatggttcaagattccatgggataccagactacgaaatgctgatgagcaggggacacttgtgtacattcaaaatcttgacatacagtttgcagctgctgacatagaggagcttatacgtgatgctttacaactaaattgtatcgctaagcctattaaccacccaacttatgatgatccaaacaatggaaaagcatatgctatattcaaaacaaaaagtgccgcagactctgctatttcaaaaattaattcaggcttggtggtcggtggaagacccctttattgcagcaaaggattgcttaaggttccaaaaccttcagaaactcttctcgggcacttaacaatcaacaatattagaatgggtataagacaacgagaagaacaggtgctgatgttgtcctatgaagtttgctctatttcttttctctgtcttaatatttttgcacaaccattattctttctccagaagaaggcagtttcaacctcgcattgttctcaacccaatacaatggagtatgatttggccttggattggatgcttgtccgagcaaagcaagaaacgaaatttaggacacttcacaagctcctgaatgcagccaccggcctcggtaggttaaaaattgacaccgcaaattctggtgatcgcctggtaggtattgttggtatagctaaagatgatcatgtcttcgttttggatgctcttggtgaaccatatgctggttcttga

SEQ ID NO: 21058 - DNA, 2831 bp, Oryza sativa
  Clone ID: TF_OsC866_1
ggcacgagatggaaccctaaactccaccgctcccatctcgtctcgatcccctccatttcaaatccacactccgcctcccctctccggccgccgccggcgagatggatctctccgccaccccgtccagatccaaatccggcctcagatcctccccgaggaagcccgtcgccgcccccgccgtggcccagatggacctctccaccccgtccaagccgacccccaggcggaagcccaaggcgccgcccggtggcggctccgatgtcccccgtgaccccgtcctccgtccgccgctcctcccgcctcctcgagacgccgaccaaggtaacttccgagacccccgtgaagcccaccccaaccccgaagcggaacgcgccgcgccgtcgccgtcgccgaagacgccgacccagtccgagcccaagcggcagcggcagaggcagaggcagcagccgaagaagccgaagaagagggcgtactaccggaaggtggtgtacgacggcggggagttcgccgccggggacgacgtgtacgtgaagcggcgggatggcgcggagtccgacgcggaagacccggaggcggaggagtgccgcgtgtgcttccgcgccggcgccgcggtgatggtggagtgcgacgtgtgcctcggcgggttccacctgcggtgcgtgcgcccgccgctgcggcgcgtgccggagggggactgggcgtgcccctactgcgaggccgagcgcgcggggaaggccatcgagaggcccaagccgccggaggggaagcgcatcgtgaggaccgccaaagagaagcttctctccagtgatttgtgggctgcacgaatcgagagtttatggagggagccagatggaatattctgggcaaaggtaagatggtatattatccctgaagagactgcagcaggaaggcagccacataatttgcgtagggagctgtaccgcaccaatgatcttgcagacattgagatggaaacaattcttagacattgttatgtcatgagccccaaagaatttaaggatgctagtgatcaaggagatgacgtattctactgtgaatatgaatatgacatacactggcataattttaagcgtctggcagacatcgatgatgaacctgagacaaaggaagatcctggcgacgagccatacaatgctggtaatgattatgtcagtgactcggatgaagattctgaatatgatgaggaggaagaacctactaaatgtagttctgctagaacacatcaatcacatgcgttggctgcgaatctgcggaaagggaggacatatggcctacaaaaaattgggatccgtaaaattcctgaacatgtccggtgtcatcaaaagaccaatctggagaaggcaaaagcaaccctgttattggcaaatcttcctaagtcgttaccttgtagggataaagaaatggaggagatatctgcatttgtgaaggatgcaatttgcaatgatcaatgtataggacgctgcctttatattcatggtgtaccaggcactggcaagactatgagtgtacttgcagttatgaggaggctaagatccgagcttgattctgggaatctgaggccttattctttcatagagattaatggtcttaaattagcttctccagagaatatctacaaggttatatatgaacagttgagtgggcatagggtagggtggaaaaaagcccttcattatttaaccgagcacttttcaggtggcactaaaattggcaaacaagcaaaccagccaattattttgctcatcgatgagcttgatcttcttttgacgagaaatcagtcggtgctgtataacattcttgactggcccaccaggccaaattcaaacctagttgtcataggtatagcgaacacaatggatcttcctgaaaagttattgcttcgtatttcaagtcggatgggtatccaacgactgtgttttggcccatataattatcggcaactgcaggagatcattacaagccgtttaaagggcattgatgcctttgaagaccaagctattgaatttgcttctagaaaggtagctgctatgtctggtgatgcaaggcgagccttagaaatatgtagacgtgcagcagagtttgcagattaccgcgttaaacaatctgggcacacttctgtgaatagaggaaaaaatgttgtttgcatgggtgacatagaagctgctattcaggaagtctttcaggcaccacatattcaagtaatgaagaactgcccaaaatttggaaagattatattggtcgctatggttcatgaattatacagaagtgggctaggtgaagtgatgttcgataagctggcagcaactgtcctctcttggtgccatgtcaacagagaattattgcctggctatgataatcttctgaaaatctgttgcaagcttggtgaaggtaagataattttctgcgaggaaggcactaagcacaagttgcagaagcttcagcttaactatccaagtgacgatgtaacttttgccctgaaggaatccccagatattccatggttgtccaagtacctgtgaagtttacacttgcagcggttgtactttcccagcatttcattcatttactcctggagttggagagcaacgatcgcaactacttgcccttgatcagcaaatctcggaatttatgtgggtccaattgttcatcttccaaaagatatcgactcgaaggatgccgctgcaacaaaatgtaaatgcagtgtcgcaccaggactgtaacatatgtatgattcgaaggagattgtaggtcgccattttattttcgccaatctgttgttacccaagaaaaaaaaaaaaaaaaaaaaaaaa

SEQ ID NO: 21059 - DNA, 1122 bp, Oryza sativa
  unsure (1)..(1122): unsure at all n locations
  Clone ID: TF_OsC3802_2
gcagcaacagcatcatcatgcggcattcacttatcaataaacaggtcacagaactcagggacacccaaattatgaaactacagttaagctatcatcaacatcatccacgctgggaacgttttcctgtaccaggcaaaaagctaaaacacgctgacactcatccagtccacactggctacaactgaacgagccaacagcatcaatgaagttcgttcttttgcctagactgatggaaacgttcccaaattcgggcaaatgataagttaacgcgatcttggacctagcctagctcttcatctgcactgtacaccctccacgttttgactttgcaccagcaatgaagagctgacgccataaacagtgcatctcctcaccaaaaatgaaataatagtaggctgataccagttgacaagctaaaaccttgaatccacttaggctcatactttgatgatgctggatatgcatgtgaaggtctctttgcaccgttttccttgacacaatctgagcacacaaagtgatctagttttttggcctgctcaatcgtcattcccatacatgaaggatgaaaccagtccttgcagccatcgcactgcaccatgagatcatccgggttgtatggcatctcacacttgcagtatacggcgacgcggtcgggggtgaaggcgccggtggcggccttgtactcgaagcggcagaagaagtcctcggggccgacgttgtcgagcttggtgtagttcttgaaggagtggacgacgcacttgccctcgatggtgtgggcgctctgggtgtcgaagtggtcggagaggaacagctccttggcgccatggaactgcctcctcccgcccttggactcctccggccggtagtaccaccgcacccgcacccgcacgctccccctcccgtccgtctccagcctctccaccctccccacgtacggctggttctccgagtccgccgcccgcatcagcacgcagtcccccactcgtacgatcttgttggtgccggagatggtgtaggagtcgacgtcccgcttgccctgcttggtcttggccatggaggggattgggaggaaaccctagaggaggaggaggtggggggagaggtgtggnccacagctccccc

SEQ ID NO: 21060 - DNA, 829 bp, Oryza sativa
  unsure (1)..(829): unsure at all n locations
  Clone ID: TF_OsC97337_1
gcacgaggggtcccccgcgccgcggctccccccacctccggccccttgcccccaccccccctcgccgcccccgtcgagtcccatggcgaagtcgcggccgcccaagcggatcctcgagtcctacaccatcaagggctccgacaaagtcatcaagcattatgggagttcagtctctggggactgtgtgctaatgagggcatctgatacatcaaagccaccctatgtggcaagagttgaggctattgaggctgcagggtcacgaggcacaaatgtgagagtacgggtgcggtggtactatcggccagaggagtccatgggtggaaggcgtccatttcatggtgccaaagaggtgttcctctcggatcactatgacgtacagagtgctgacaccatagagggaaagtgcaacgttcacagcttccgtagctacacaaagcttgattctgtcaatgctgaggacttcttctgtcgctttgagtacaaatcagccacaggaagcttcgtgcccgaccgcattgctgtgttctgcaagtgtgagatgccatacaatcctgatgaccttatgatccaatgtgaggaatgctctgattggtttcacccttcttgcattggaatgactattaaagatgcaaaaaaactagagcattttttctgccagagctgtactgcggaaaatggaaagatggctgagaattctcatgaagctacagcgcaatccgaagaaaaggtgacttttgtcctgttcgtaatgtcgcaaggctccagttgggaaacagtaccaatttattcatatggcagtanaaagtctggtgtgattttacaactataa

SEQ ID NO: 21061 - DNA, 4740 bp, Oryza sativa
  Clone ID: TF_OsC65931_1
atggaagcttcagtttctcaaatccgccgctctcctcctcgaatcgaaaaaagaaaaaagaaaaaccacaattctctttcgggcaaagcccccccgactcgtggcaactgcgactccctccctcccgtgtggaacgcgaagtcagcaagtgaatgccactggacacgccgattgacttccaactacctttcgctggtggtggtggtggttggggaggaattgcccccgtgctttgctcctcctcccatggagaccccgccccccgaccccgtctcgcctccgccgcccgccgccgacgagggctcgccgggaggcgacgacggggcggaggacgcgggggggttcagcgccgggctggattcgctgtggacggccctgttcggctccccggaggagctggagcccatgtggtccccgccgagggggttcggcgtgggggccgagttcgccgcggcggaggtggagcccgagatcatggacgtcgcggggggcccatgggacggcgcgccctggaggtcctccggggtcgtcgccggcgagggcgcggccaccgcgctcgttccccccacggccgccgcggggttcgcggagttcgagcccgcggcgccgatcgattcgtatccggcgggggcggcggcggcttcgttgggcgacgttcctgaggtgagtgcgctcgattccggcgttgattgttcgcctgacccgccgccatcgtcgtctcctccggtggattttgatgcgcgggggtttgaccccgtcgccgactccgccccggcgatggagtctccactaccgccgtctgtcgcttcctcggaagccaatttagacgggagaatgctcgattgtacgctcaactccgtgccatcgccacctcttgcttccccatatgaggtcggtttgggggctgaggatcctatcaaggattcttccccttcggttgcttggggaacaaccatggatgcgaaggatcccgaggtggatgctacttgtgcaaatggtacagctctgcggagatcacggaggatcatgaaaatcaagtcagcggcgagctccatgcctttgaatcagaatggagactcatctagagcttccaagcgacgagttgcggattcaaggaagagtagaagcagtgaagggagcaaactccctgcgttcacagggccaatttcagtaaacacagttgatttgattaacggggtgaaggttcaaggattgcaagaaattgttgccgtggaaaacgtaagttcctcttacgacaataatcagaaagcaggtggtctctacaatcaggttgtggtggctttaccagcagcgagtaatagtttgttgaaagacaaaggagcttctgttcttcctcgaaggaagactaggttagcctcaaaggtattggtgaattcagacagggtgtcagctatatcaccagtggtaaatggtggacctcctgtgcagaaatcagatgtttgtatacctactaaaaagcataagcttgctgttgaagagtgcttgacaagtctggatggagtggatggtggtggtattgtgttgtgcaactcaaagttgaaaagtgcaaaatcacgagtggtcagcaagacgcctcaagggagaggaagaagatcccctcaacctccaaagacacagagggccaggacgttgtcggttaaatacttggaaaaattaaagagggcagaaaacaataataataatggctcaatgtccaaatcaccaagagttccaatgataccagaaaataatggctcaatgtccaaatcaccaagagttccaataataccagaactgagcactaagcacgaacttgttttggacaagcacatggttgattcagtgatgttggaaacggacgatggttcctgtttctttgtgggggatgcagttcctgatgatgaggctaggaagcagtggcctcaccgttacgaaataaatgatcaaatcatgaaaaaggataagaggaccagcagccaaacatttgccaaactagttaccgtatctttttgtgtagtctttatgtatgtttatctacagatgcttgatttcaggggtccagagggaaaaccaaattatattggcaggttgctagagttcttcgaaacaaaaactggtgaatgttacttcagagtgcaatggtttttcacagctgaagacacggtcataggagagcaagcacaatcacatgacccgaggaggctcttttactcagacctgacagatgacaatttactggactgcattgtctcgaaagtgacaatcgtgcaagttcctcctagtgtagatggaaaatcaaagtcagttccttcgtccgactattactatgacatgaaatactctatcgactatagtacattctctaccatagaaatggaagacacagatgatttaatgcagtcatgttacactagtagaatcaatgacaaaatgaagaagatagatgtcaataagaagcacaagtctcctgtgctagagaagatggagctctctttgctagacctgtattgtggttgtggaggaatgtcaactggactatgccttggtgctcgtggtggtggtgtgaatctttcagcgagatgggccattgatgatgatgaaattgcatgtgaaagcttcaggaacaatcatccagaaacacgggttcggaatgaaaccacggatgatttccttgaactgttaaaagaatgggagaaattatgcaaaacatatgtgaaacatagtaggactaaggcatgtgttgacagtacaacagaatccaataatgaaactccagattgttctaccgtcccacctgaggagtttgaagtatggaagctagttgacatttgctttggtgatccaaataaagtcagcaaacacggcttgtattttaaggtccgttggaagggttatggccctcatcatgacacatgggagccagttgaaggattaaggaactgcaaagaggcaattagggattttgttattgaaggccacaggcaaagaatactaccacgccctcgaagaaacatagctgtgttcttgcttcgaccatcgaagttccctctgggtgatgtggacgttgtatgtgggggtccaccatgccaaggaattagtggctacaaccgcaatagagaattcgaggcaccatttaaatgtgagaaaaacaagcagatcatagtttttatggatgttgtgcaatttttgaagcccaaatatgtgtacatggaaaacgtccttgatatattgaaatttgctgatgcaacacttgcaagatatgctttaagtcggctagttgcaatgcattatcaagcaaggctagggatcatggctgctggatgttatggccttccacaatttcggatgcgtgtatttttattaggctgtcattctaaggagaaattacccccttttccactgcctacgcatgaggcgattgtgaagaatggctgcccgttggcttttgagcgtaatttggttggttggcccaatgacacaccaatgcaactagcaagaccaattgtccttgaagacattctttctgatctcccagaagtggcaaatggggaaagccgtgatgaaatgctgtatgtaaagggtcctcaaactgaattccaaagatacattcggtcatttaatgttgaagtgcatggtcccagagctcatgttacaaaagattccaaatcctcaaaattgtatgatcatcgaccattggtactggataatgataactaccaaaggatattgcaaattcccaagagaaagggagctaattttagagacctttcaggagtcatagttggtcctgacaatgtggctagattagatccaacgaaagaaagagtacttttgccatctggtcgtcctctggtgcttgattgcatactagcttatgagaatggtaaatctttaagaccttttggtcgagtatggtgggatgaggtagtgggaaccgtgctgacagttccaaatgcccgtatgcaggccttgatacatcctgcacaagacagactgcttactattcgtgaaagtgctcggttgcaaggctttcctgacaattacaggtttcgtggaacagtcaaagacaggtatcgccagattggaaatgcggtggccgtacctgttggacgagcacttggatacgccctggcgatggcctacctgaagaagtctggagacgatccccttatgttgctgccgcccaactttgcattctcccatgacttaagagggtttgcctagtcaaacacccttgtcagaaggcacaaatttgagttccttccctcgttggctttgattgaaattcaccatctacattaatgctctgctaccaaagctgctcctcttcttgttggccaccctttctcgtgaatagtgaatagcattaggagttaggacatgccatttatctgttgggatcagatcaaggaatctgggttccccaatctgatgatcagctgtttgttgtagcaaaatcattccttgatttacagtagttgtgacatccaccacactagttaattagaaggattccatagggcaagtgtagtgactcatatcgggagcctatgttgtagtgtaaaagaatgtatgtacaagttagatgattaggaaaataaaatgtatggacatcatcttacctgttgttgtgttagccagcgatgaacacaatgtaacgacttcaataaatctacattgagctgcagatttccatggaacaaaattaatctattgcgtgataaaaaaaaaaaaaaaaaa

SEQ ID NO: 21062 - DNA, 5490 bp, Oryza sativa
  Clone ID: TF_OsC13482_1
tttttttttttttttgactgaaaaatagcaacagatcattgcttatcggtccactaaatttcttaaccattgcaaggcaccgatggatacaccagaatgcgctttacaggcattcaggaactgcagatcgagtgtcatcccccaggatagtccactagagttacatgggcaaacagatgtaacgtttccacataaaatacatgttacatctaaatcatatgtaaggctgcagatgtgctccaaaaagagaaaattggtctgtcataagaaactaaaaacaaacaaactgaacctaattacagcggcttcagatgtttcttgaggcccaggacctataccgtttccatctccagtcataccctcccaagcaaattagaagcatgcctgagtccctgacagctaagaaaatctagcaaagcaactgccaatgccaaggaaaattgtttccaggaaagtatgaaatatgaacatttacagcaattacatcaaagcatcattcctctcacattcacatcatcacaaggaaagtatccatgtatgaattgtatattccagcaagggtgcagtacacgaacccaagtaccacatgcagctgcctaagctcattggatgccgaagtcgctgagaaatgataccagcaaaagctcattgccatgacaattgtttgtatgaagatcgttcggcatcccaactgccctctggttccttcctctttattccaacacctggaggcatttgatacattctcgtatgctcgtccacaaaggcatgtggtggcgcaataaaattttgtctaactggtaaagttactctatcgtccttcacttctacatccacacttccagggccagaattaagatcaagaccctgtcttccccatttccgattattgtcatgtccaacagtgctgcttccttcagggaggtttattgcatattgtcgagtatgctgagcaggtaatgcacctgctggcccaacaagcgtcggagcaattgtagggaaataaggaattcctccaggtgcagaattcgcatatgatgtagacccaattgaaaaccccggtgcttgaaggtggacactaggagtaaaagggaatcctgcatactgatacgcaggaggatgaaacatcatagtcggtgaagtagaaataactggagtccggctgggatcacttccatgttggacaccatctgccaacgatgtgatgatcctctgggttccacttccagctgctgtctcgactgggtgaggctgttctcctctagaaggtaaaaacgactttatagctacaggagcacaagcattggcagaagcaaaccatggtgatatgttactcatttcagcactgttcattctcatgctagcgacttgaggtaggaatggtatgctactggtatttttagatgacagactccttggtgcatgttccgtaccagcttcatcaagagttggtccattattaagatcaaaatcccttgagctatttgcatcggaactagagaaaactccaggtaatggtcttgataataatgggacttcaaccctgtggttagtgttagacacaatttgcccattctctgcaacttcatcggccctattcaagtcaagcttaaagccaacactacgtacaggaccattgcttcttctagtgttgccagattcagaaccagttgtctgaacagaactctgagagacgtcttcctcaagaaattgctcatctgcaacatttaagtcaatgtcaagtgctgggcggtttttccctgcagcatcagaaaccagaatgccagatgcactgagagtcatctcaaaaattttccttggctccgctgggcgaaatgcgcttgtggctgctgaacctttccagccagtctcagacttcaaccttattaggttgtccgggggaacaaaggggcctttatcaggagcagctattgggtcctcgttcccacttgcatcaggtgatacaaacggagaaggacgaggtaaatgaatcgctgaagaacacacagcaggagaggtagctggctcagacagatgcccctcgtctccaggtattccttcattcaaatcaaagtcaagcttggcagtggcatttgacctggtcttggcagagaatgaagaaccatcatcagatgagacaaggtcgtctttcccacctgcatcatcgctagatttctttgagctgcgttgtgcactatgttcagtttcctgtgagacagtgcctccaggtcttgtgtgactgcttgattcactggaattgtcttttgattctttagaactaatcccattttctggaccatgtttgactccagttgctacagcaagttttgtaacatcagctggatgttccttcttttcatcctctttcagcaccgtgttactaccaaccagcaaaccatcagccttattcacctccacagtcgatgatgaaaatgaaggcttcaatttcaatttatttgcagtactgtcaccagatttatcaatgtgttctgaataatctggtagacccagaagatgcttttgatctgttggctttaacaaaccatgagcttgtttgtcaccaccacataatggttcctcggcagggagcatttttctatttgaaacagccagcttacattgatcacctaatgtggagcccacatcagaactggttgtacaaccatcttcaactttacctcgaacagtaaatgcagacctatattcactcgtagtagatgattttatatttgagtttgtatcaatcttgaaaccaataggttgtttggcatttgactttacaccatcatcaccacgtgaaggtggatgtgaacatttatcggtgtcctctacttcacgattttcagtcttcgctttagaatctatttctggtagaggggacgatccagcagatgttgtgcccttgtcaccctgtgacaacaagttgtttacagacagcatattaacatcctcccggtgcagctcctttccaaccaaacctacaccacttttttcactcttctcagagatgactttctcaacttcatttgatggccctgcatgctgtggcaagctcacatcacattccacttttagcttcccaatgttgtctccttcacagccctgttcatttgctgatgaatttctaggcgaaggagatgaggaaatcaactcagatttagatatttctccagcgacactggcaagaagattcattgctgtatcatccccagcttgcaaggaatgactagcttcagagtacttgatttcaatcaaagcattcatagggttgaacaatttagtcagcccagtctcacttgaacagattcccttttcatttgcatatgatgaacaagcaactcgtgaaacaggtacatctctgccagctccttcagttgtcttgctgtcatcagtcaacatagcacgaggtgatttatcgccttcctcagaaactgaagctcctttaacatcattgctgtgccaagactcagcatttgtatcattgcctaaatgaggattggaattttcagtcttcattttcactctacggtcactttgttcatgtttgtctgccacaggagatgaagctctactcccagtaaatgatgggtcctcaaaagaaccgccacttgcgctcctagcagggcttcgaccaggatttgggaaccggacaatcaatctatggctgttaccctgatctgattgtatgtcagctcctttctcacatgctgtgccagattgtgacactttttcctgcactgaagagtgatcaagtgaagacgatcttgccacggcagcttctttctggatccctgaaccaagaagcccattgtttgttcttcgatgcacacgagaagaactaccggaagttttataggcaacaccagaagctgcagttgagcttcgggcatcctccttcgaagaaccgattgtttttgcatgttcactagaacatgactggctgttgttcagagactggcttgaactgctgcttttctcctctttcactgcaggcagctcagagccacaagtgccaccagttgatttggagggttgctccttcaagttggttacagcatttcctggttgcatatgttgcaattttgaagaaccagatatcactggactcgatttcgcagcagcatcggcggctacaggtttagaagtcaaggccttcgatgaagaaagctgagacactgggcttttcagactagactcacttgagccacttcgtctgtttccagcactagaaatttctggaaacccaggtttgcctggccaggatacagcctgacctgataccactggtttcacatcatttgacttcatttcagcatcaacgcgcttcttccaattttcgacaagacactttgccttcttctgtatctccggatttttatggcttcgcagatgattaacagacttcccaatactgcaactttgtaaagcagtaagattaataggcaatttcgccagtgcacgaagcagcgccaggacaggttcttccataggcttatcagtttctttaggactaccaccttcaccagacttccctttatgagcttcttgaagccaatcatcaaacacaggaaggcctcgcagttgcacaaacctaccaaggcagtcaggactttctgtagctgcaataatatcagctagaattacccggccaggcaaatctatctttcgctcagttcgatcaagttgcatgagatgtaccagcttctctacagcttcagcatgtggaagtccacctttttctgttatctttgtaatttcagactttagattctccaccttaaagttgcctgattcgccatcctcagcctttaggggacgctcacggtctcgcttagctggatcagttccttgctcacccctgtccctcttcttccctttggaaagaccgcagttttgggcaccatcagaaccagacttttgctgggcagacgacggtccattgagccgctttggtgagcgcccacctgactgaactgctgcatgcatttctagctttgttctgtgtagaagccgatttacttcttcctgccgctcatttatataatcctggtcggtaagccaccataaacacttgttgtcaatatcatacacgcgccgacacacaaatgaagaaattccagctggaagctcaacgcctttacgcaaaaaagcaactttgcaaggatgcagcagtgagacagcggatgtctcgtcctggtggaaagaatagaagatctcgtttggtgcggcgcacagctgtgttcccttgttaagcttgatgtcagctggtctatacagccaacttacacgtaacttgggaaagccttcctcctttttctcaatccaacgtatcaacccaatgaaagggggaacttcaacagcctgaaaaagagcgcagtcgccaacacggaattcacgcccgtccgccgccttcgcgccacccatgcatagccttgcatcatccccgccgccgatccctcctcgccgtcccccggcgccgcgccgcaccat

SEQ ID NO: 21063 - DNA, 4635 bp, Oryza sativa; identical to SEQ ID NO: 11342
  Clone ID: TF_OsC57123_2

SEQ ID NO: 21064 - DNA, 774 bp, Oryza sativa
  Clone ID: TF_OsC33365_2
atggccaagacgcggcagccgcagaagcgggtgctggagtcgttcaccatcaaggggcccgacggggtcatcaagcgtgaggacccctttcttgatccttttatctatttatctaggtttttgttgttttgggggaaattttggatcgtagaatcaagatactacctaagatttcgtagcatcgtggaaatgaatactggggatactgtgctaatgatggcacctgactcatcaaagaaaccatatgtggcaagggttgaggaaattgaggcaacaggacctcaagcctctcaagtgaagatcaaggtgcggtggtactaccgcccagaagagtccattggtggccggcggccattccatggttcgaaggaagtatttctttctgaccactatgattcgcagagtgctgacaccatagagggcaagtgttatgtccacacctttcgagattacaccaagcttcgatctgtcagcgctgaggacttcttttgccgctttgagtacaaatctgccacaggcagctttgtgcctgaccgtatagctgtgttttgcaaatgtgagatgccatacaatcctgataaccttatgatccaatgtgaggattgctctgactggtttcatccttcctgtgttgaaataaccatcaaagaagcgaagaaactagagcatttttactgtaaaagctgtattgctgaaaatggaaaggatctacaaaagtccaatggtgctactgtgcaatctgaagaaaagggttttcgtttttacccctacttt

SEQ ID NO: 21065 - DNA, 5855 bp, Oryza sativa
  Clone ID: TF_OsC57123_1
atggtgaggcgggcgagcgtggcggcgtgcctgacctgcccgctctgcggccgcctcctccgcgacgccaccaccatctccgagtgcctccacacctcttatggtattttcaattgtgttttgttcagagttgatcacagtatgcaattcgtaaggtcaaggatatttcctttcaaacgaaggaaggttgagaacccagaaatcatttgtccagttgcgtcacctgtcaagaggaaagaaagatcactatcttcacttacaatccctgctcctcaggtgtctatacagaaatgtttgacaaagaggagaacgaaagcttcgtgcttacgcaactttcctttgcattctacctcgaggggcagtaaagatacatcaaagaaacttgggggttggagaccattgggttgtcaacttaagcttggcaaagacaaaaaatctctcaaatcaagtgtaaaagatacaaacagaaccaaaagtaagtctggtgatacagatgatggtgctcctgctagtaaagcaaaggctagagaaccctttacaagatatgggcgtgcagctaagaggactggaagaaagaaattgctcatgttgaagaacaaaaagaaaaggttcaaggcaaagcagcccagtaaaaagaggagattccgagcactatggttttatctacttgctgcttttgaccagagaggagtaccaactttaccacaactaccagcaaagtatttgaggatcaaggatgttgatttgcctgcttctattatacagaagtaccttgcacagaaacttaacctctcaagtgaaactgaggtagaagtgttgtgtggtggcaaagtagtgaaccaagggatgacactgcatgatctagcagattgctggcttgagaaaggaccaaagagccgaatgcgctcatcgttttgtctctgccttggttgcttgtgggggttcgtcgctgatcgtggtgtcgtggggagagctgatcgcggtcgcgtgatgcggggagctatggcgaaaagtccacgttctgttgttaccacaggaacaaaaaggcgtagagcaaaggttcataaagaagatgagcctgttgagaatgaaaacttggagagtgaatttgatgtttccaagaaagagagcaatggtgccactgaacctggtaatgagcctgttgccagcaagagaccgaagagagcagctgcctgttctaacttcaaagagaagtcattggacttatcagaaaaagattcaattatcacaatcaaggaaagtcgggttgaagagaaggaaatagaggctgttaatttgacaaggacgggacctgaagatggtcaaccttgcagaaaaatcatcgatttcatcttacatgatggagatggtaatctgcaaccctttgaaatgtctgaagttgatgacattttcataacagctcttatcatgcccttggatgatgatctggaaaaggataggggaaagggaatatgttgttcggggtttggacgaattgaaaactgggcgatttctggctatgatgaaggtgctgcagtaatttgggtctcaacagaaacatcagattacaaatgtgtgaagccagcaagcagttacagatcttattttgaacactttagtgagaaggcacgtgtctgtgttgaagtctataagaagttagctagatcagttggtggaaatcctcaggtggacttagaagaattaattgctggtgttgtccgttccattaattcaaacagaagcttcaacggaacagtaaccaaagactttgtgatctcctctggtgagttcatatataaacagcttattggattagaccatacagctggcaatgatgatgagatgttggccacactgccagttcttgttgcactgaaagatgaatgtaaatcaagagcaggattcacacatttgccagctatgccctcgaatggaactctgaggattaaggatgggcaagacaagggactgactgaggatgaggatgcaaaattagcaagactgttgcaggaagaggaagaatggaaaatgatgaagcagagaggcaagcgtggaacttcacagaaaaatatctacatcaagatttgtgaaactgaaattgccaacgactacccacttccagcctactataaaccatataaccaagaaatggatgagtacatatttgatagtgatattggtatgtattctgatgatgtacctgtaagaatccttgacaactgggctctatacaattcagattccagactcatttctttggagctcatccctatgaaagctggtgcagaaaatgatattgtggtatttggatctggttttatgagagaggatgatggtagttgctgttcaacagctgagctagcacagttacattcttcctcaagtaaatctggccgggaagatccaggagttccaatttatttgagcccaattaaagagtgggttgtagaatttggtggttcaatgatctgcataaccattcgaactgacgttgcttggtacaaattacgccagccaacaaagcaatatgctccatggtgtgagcctgtgctgaaaacagcaaggctagctgttagtatcatcacccttttaaaagagcaaagtcgcgcttcaaagctttcttttgctgaagttatcaagaaagtagcagaatttgacagtagacaccctgcatttatatcatcgaaagcaccaaccgttgaaagatatgtcgtggtgcatggacagataatacttcagcagtttgcagactttccagatgaatctgtcaaacggtgtgccttcatcacaggtcttctagcaaagatggaggaaagtaggcacacaaagttggccatcaagaaaaaatctcaacagatgagaggggagaatctgaacccaagcgcaaaaatgggtccaatactgagaaagaagcttatgcgtgctacaactacaatgttgatcagcaagatatggggtgaatactatgccacttatttccctggggatacaaaggaagaagatcagaatgaaccaaaggaaattgatgatgatcaagaagaaaatgaagacaatgatgctgaagaggaggtaaatgttcaagatgagaaggccacaaggactccaccatcaacacggtctagaaagtcgtcagcagatactcgcaaggaaatcaaatgggaaggtcaaacagctggaaaaacagtgtctggagaagttctgtacaaatgtgttattgttcaagacctcagtatttctgttggtgcgacagtcacaacagaggatgattcaggagaaaccatcatgtgttttgttgagtatatgtatgagaaacttgatggtaaaaatatgattcatgggataattctgcaagaaggttcacagactgttcttggcaatgctgcaaatgatagagaggttttcttgactaatgactgtttagaatttgaagcaagtgacatcaaagagttggtgactgttaatatccaatcactgccttggggccacaagtacagaaaagagaattctgaagctaagagaattgaaaaggccaaggcagaggagaggaaaaggaagggcctgccagtggaatatatttgcaaaagcttatactggcctgagaaaggtggattcttctcccttccgtatgataaaattggaaatggcacaggcatctgtagctcctgtgagagaaaaccagttggcaatgaattcaagttactttctgagagcagctttgtctttgagaatattacgtataacatccatgactttctgtatatcaggcctgaatttttctcccaaggggagggccatgagacctacaaggctggaaggaatgtgggtctaaaaccttatgcagtctgccatctgctgagtgttcatggtcctgctggatcaaggaaagctaatccagaatcgacaaaagtgaaagtaagaaggttttaccgacctgatgacatttcatcaacaaaagcctactcatcagacatccgagaggtgtactacagtgaagatataataagtgtacctgtggtgatgatagagggaaaatgtgaggttcgactgaaggatgaccttccaaattcagatcttccagcggtggttgaacatgtcttttgttgtgaatatttatatgatcctgctaatggagctctcaaacagctaccgcccaatgttagacttgtgacactgacaaggaaggtacctgcttcaaaaaagaacaaaggaaagcaaatttgtgacattgagctaggtggttcagacaaaccaaaggatgggcaatcagagaactgtcttgcaacacttgacatttttgctggttgtggaggtttatctgaaggattgcagcgatcaggattgtcacttactaaatgggctattgaatatgaagaacctgctggggatgcatttggtgaaaaccatccagaagctgcagtatttgtcgaaaactgcaatgtgattctgaaggcaattatggacaagtgtggtgattctgatgattgcatctccacttctgaggctgctgaacgagcagctaaactttctgaggacaagattaagaatctgcccgtgcctggcgaagtagaattcataaatggtggccctccgtgtcagggtttttctgggatgaacagattcaatcaaagtccctggagcaaagtccagtgcgagatgatcttagcattcctgtcatttgcggagtatttccgtcctagattctttctcttagaaaatgttaggaactttgtctcgttcaacaaaggacagaccttcagattgacactggcatcactcctggagatgggataccaggtccgatttggaattttagaggcaggggcttatggtgttgcgcagtccaggaaaagggcattcatttgggccgctgcacctggagagactcttccagagtggcctgaaccaatgcacgtctttgctagccctgagctgaaaataactctacctgatggcaagttctacgccgctgtcaagagcaccgctgcaggagcccctttccgctcaattacagttcgagatacaattggggatctaccagctgtggaaaatggcgccggcaaaccaacaattcagtacggaagcggtcctgtgtcttggttccagaagaagattagaagcgacatggcttcactgaatgaccacatatctaaagagatgaatgagctgaacctcataagatgcaagcacattccaaagcgcccaggttgcgactggcatgacctgccagatgaaaaggtgaagctgtccacagggcagatggtggacttgatcccttggtgcttgcccaacacagccaaaaggcacaatcagtggaaaggactgtacggtaggttggactgggagggcaatttccccacttctgtaacggatcctcagccaatggggaaggtcggcatgtgcttccatcctgagcaggataggatcattactgtccgtgaatgtgctcgatctcagggctttcctgataactaccagttcgctggcaacatccagagcaagcacaggcagatcgggaatgcggtgcctccacctcttgccttcgccctcgggaggaaactgaaggaagctgttgatgcaaagcgtcagtaggtgctcagagtccttctccgatgatcgagggagatgattctcccctgaaaagaaacaaacaaccaaacatatgagtgtacttattttaattgtgcgctgcatttaactttgtgtgttgattaagattttagtcatatagatccttggtaaccttgtacattttagaggttgtgttgtgattgatacccttgattcaggggtatgatttagtggctgtattcagatatttaaacaaaataatactagttagtgatggttgaattgtt

SEQ ID NO: 21066 - DNA, 1240 bp, Oryza sativa
  Clone ID: TF_OsC3802_1
ggccggaaggagataagctaagctagtagtacactactggagtacatgagaaattctcgatcatcatcagtcacagagcctcacaagggctcacatctcacaaaggaaatgttgctgacaggaattaagttaacacacacacactgcacgcagagctaaccaagtcatcaatcaccacaggtgttgttggtgttcaactctctccccccacctctaaccaaacgaccggcgcagcaaagccgtggccgtagcgacggctgagctgcgccgaagccgttttcctaacagcaacacaacataatgttcttttttttttcttttcttgaacaggctaagaggcggcgaaggccgaattctgcagacgccttggttctcttgcactgtacacctcaaccttcgccacggaaaagcacaaggtatccctcagcagcagatgttacccagtcaagagttttcacctcctctgcctttttgactcagccttaggctcatactttgatgaacctgcatatgcatgtgaaggtctctttgcgccgttttccttgacacaatctgagcacacaaagtgatctagttttttggcctgctcaatcgtcattctcatgcatgatggatgaaaccagtccttgcatccatcgcactgcaccattagatcatccgggttatacggcatctcgcacttgcagtatacggcgacgcggtcgggggtgaaggcgccggtggcggccttgtactcgaagcggcagaagaagtcctcggggccgacgttgtcgagcttggtgtagttcttgaaggagtggacgacgcacttgccctcgatggtgtgggcgctctgcatgtcgaagtggtcggagaggaagagctccttggcgccatggaactgcctcctcccgcccttggactcctcgggccggtagtaccaccgcacccgcacccgcacgctcccccgcccgtccagctccatcttctccaccctccccacgtacggcggcttctccgtgtccgacgcccgcatcagcacgcagtcccccactcggacgaccttgttggtgccggagatggtgtaggagtcgacgtcccgcttgccctgcttggtcttggccatggcgagggggcgaggttttgggaggtggaggaggggggaggtggggagagaaaccctagaggcgacgacgatgagatgggtggggagctgggagaaagggccgcgttccgatccggccggaggaccgggccgtct

SEQ ID NO: 21067 - DNA, 5561 bp, Oryza sativa
  Clone ID: TF_OsC12270_1
tttttttttttttttttttatatgcaagataagcgcaatatcgcattactcatcgatcggatacatcattaaatcacacgataatacagccaacaaagcagtcacgtcaaacgatcggcctgcaatatgcacgacagtatcccaattcccacatacacggtacgccccggttcccatcgatgattcgccatctcgcaacaccacacagtttccactttccacactcacgcaccgaagaaatagtcaagtctagctcgacgcctccgatcatacggctagcgatgctgttgccgccggggtggctcccccgagtcggcgctggagtgggtcccgtactcgctgctgtcctcgatgctgctctcgaaggccaccttcctcaacctgttgatgtcggaagcgtagttgccggagtcgtactccgaccccgtgctgaacatcatgctctgcccgggcttcaccccttcgttcaggtcgtccagcgacgcgtcgccctccagcgcacggacaatctgcttcatctttgggcggcgcttggcggagtggcggacggcggcggcagcgcatgcggccatgcgctccatctccagccggtcgaacttgttctccaggcgctggtcgatcagctcgtcgaaactgccgtcctccgacaaggcgcgcgccaggaggggcctcgcccagtcaaccaagctgtcctccatgtagttcgttgggtcgaccggtcgccggccggtgatcagctcgagcagcatgacgccgaaggagaagacgtccgatttgtccgtcagcttgccgctcgacgcgtactcgggagccagatacccgaaagtccccatgacgcgcgttgagacatgcgtgttggtgtccgtggttagctttgcaagcccgaaatccgcaaccttagcatcgaaattctcgtccaagaggatgttggccgccttgatgtcacggcggatgatcctaggatggccttcgtacgtgacaaccacaatgcaacaaatcagatcgttagaaggacgtacagacaggatttgtccctgcagaaatcttcgtgaaggtacgcgaggcccttggctgagccgagcgcgatggcgagcctcgtcgtccaggccatcaccggcacgcccttccgaatggcgcgttacgatggctgggaaaagagcaggaaagatatggagaccgtggaggtggtgctcaagggtgtcgttggggacgaactcgtagacgaggaggcgctgggatgagccggcgatgcagtagccgacgagggagacgaggtggcggtggtggacacggctgatgatctccacctcggcctggaactcgcgctcgccctgcccgctcccggccttgagctgcttcaccgccacctccttgccgctgcccgcgaggacgcccctgtacacgtacccgaacccgccctgccccagcaggttcgccgacgagaacccgcccgtcgccagcgccagctcgtcgtacgagaaggagctcttcgagaaccccagcgccatgcccggtgacggcggcggcagcggccccgccccgtgcgacccgctcatctcgctgctcggcggcgcctggcctggcgagtactgcgcgtgccagccgccgccttggtccacgctgttctgccacctgggcatgctgttcgcgtagtacactttcccgttctcgtcggtgtagtacggcatgtgcatgtggggaggtctcttcttcttcttggagcagcacacgcaggcgcggacggccagcagcagggcgaaggtgaagaacccgatgaccatgccggcgatgatggcagcctctggccccggcctgttgccgttgctttcgctcttgccacggtcactcgagctgcctccctccttggagctcccactgtccgaggaggagccaccgtcgccgctacgcttcggagcgggttgagactggacggcctttggcgctggcggcgagccatgcgatggtggtggggacccgccgccgccggtattcgccggtggcgccgactgcgacggggaaggtggcgacggtgctgagcccgaggaattggtcggtggggccgacggtgtggacggtggcgggctggcaggaggcggcgatgaccccggaggaggtgactgcgacgacggaggggacgacgacgtggagctcggcggtgatcccgtggagctagagctgtccgcgcctgccgatgaatccaatccatttccatcaaacagattatctagcggggaatcgtccatttcccgccggacgtcgagacggatctcgccccggcgatgatcaagacgattccacccctcccacgagaggatgttctggaatggaacggcgcggcgcgcctccccctcctcggctcctcgtcgcgataaaccccttctagaatctaggatcaagggaataaccacattcactttaagaaaagcaaacatcatgcaaaagaaattggggtttatgaaatattcaaacaactgttccgaatcagctatttcacttccaggagttcctgccgaagatttaacaaccgtctcttgatcagcataaataaaactctctggcaatttgagtactgctcgatctccatcagattcaccccggtaggccagcccaagagcataccccaaagctcgagcaactggaattgcaaccgcattgccaacctggatatatttctcctttagtgggccgatcaatctgtaatagtcaggaaaaccttgcaaccttgcattctcgcgaatagtcagaactcggtcttggctaggatgcaaaataatctggttgtgaggctcagctctggtaactacagtgggaacagtttcatcccaccacaggcgtccaaacggtttagttgacttccccttgacgaaagatatggcatagtcaggcaccaaaggcttcccagatgacagtcgttcacgggaaatgtttggatccagccgcacagtattatctgggccaactatgacgccctttagatcacgaaagttcgctcccttttttacaggtatccgctgcacacgctcataatcatctttgtttagctttagaggttgatgatcaaacaatttaccttcttcagaaggatcatctccacgaaaagagtaatcctgaatgtctttacggttgttccggatataccgttgaaattcagttttgggggcaacactatactctattacatctttaggttgatcatttccaaccttgggtaaatcagatatggcatctgcaaggagaagagcctttcgtaggcaacgggtgtctacctcattgtatgcaacaacactttgcgaaaatgtagttggtactattccacgcacaacagcatcatgggtaggaagtgggaattttggtaataccattgatggaagggctccccagagaaatgcccgcattctgaactgcggtagcccataatatcctgccgccatcatcccaagcctagcttgataattcatagccacaaggcaactcattgcatagcgtccaaggaatccatctgcaaatttcaatatgtccacaacattttccatgaggacatatttgggcctcagatacttcactatatccataaaaacaaccaactgtttgttcttttcatcctcaagtggatcattatgctttctgaatcggttgaacccactgatgccttgacatggaggcccaccacatatgacatccacagcaccgggcaagggcaaaatattttccttgtgtcctttctctacaaattctttaatacgctcagggcaatcactgagcccatcaattggctcccatgtatcataacttggatcataccctttccaccgcaccttaaaccacaagccattttttcctgtgttacttggatcaccatagcatatctcaaggagctcctctacatcgaatatatcttctggaagaggctcatttacatcgtcagcatcatttaagggcatatctatactaggttctagtgtatcgtttttgtggacaacatattttctacaaagtgcatcccactgctgaataagggcaagaaaatcctcagttttctcgttccgcacctgcgagtatgggtgattatgtttgagacaagcacaagcatatttgtttatgtcaacagcccacctagtctctaaatttatgccagaaaatgcaaaacccaaacaaagcccagttgacatagcgccacatcctgagtaaagatcaagcagagaagctgtctctgtttgttcactatatggtgccacaatatcagccgacaattttcccttagaagaattgtcagcatcatcgcaggaaatatttgatgttgcctcactccccaatgcaccatcattatctgctggaagatttgcaaacgtggaatatgcaacagagtaagacatgtcatagtacaggtcacaatcagatatagcatgagctcttgcttgaggcgtcatatttggatcaacatgggcaatctttacttttgagactatgcactcaatcaagttgtcattcttctcctttgaaagaaaaacacgcttatggttatgtctatgatcatgcacctttaacaactttgatgagatgaccgtatctgctgtacggaaaaaccactgacaagagaaatatgatccacggtcgactccttcaaaaaattcagtaatccgtccaatgtaattttcctcatcaggaccagccttgacatagacatcatcatcaagatgatagatttcatcatccacattagcagccaggtagtgacatcgagccttcatttcttcatcttcgtcaggctcctgcttaagaagcgaatcagacccctttctactgtacctcacgggccatcgttgtcgcgcttcatcatccggtactggatcgcccacaaagtggtcatctgagtcctccacccttctcgcagtgcttggccgcgccaccctcttcctcgtcgcagccttctcggctgatccttctccgacacacttacccatcctctcctctgcttccagcacgtcggctgcctcctcctcctcctccatggccatctgttcggcgtccggctcatccgcgcacacgtcttcggccagcgcgccacccgcatcgttcaccttcatcttctcgggcgcctgagccgccgacttctcggtcgtctccttcgtcttctccttggccgtcttcttacgggtacgacgcttgaccttctccaccccgcgctgccgcttgccgcgtgactctgcgggcgacaacccactgtcgagctcggtcccctcgggctcctgcgccgccgccttctccacgtcctccggcttccattcggtcgctccctcatgggcactaggcttctccttcgccgtcctgcgctggcgcttgcgcaactcggggcgcggcatctcgcggtcgatctcgtcgagctcggccaccccctccgccgccgccgccttctccacgtcctccggcttccattcggtcgctcccttacgggcaccaggcttctccttcgccgtcctgcgctggcgcttgcgcgactcggcgcgcgacatctcgcggtcgatctcgtcgaggtcggccaccgcctccgcctcggcctccat

SEQ ID NO: 21068 - DNA, 5321 bp, Oryza sativa
  unsure (1)..(5321): unsure at all n locations
  Clone ID: TF_OsC13482_2
aataacgaaagatacagaaatagattatttcttggtctactaaatttcttatgactgcaaggcagagatggttacaccagaatgccccttgcaagcattcgggaactgcagacagtctactggatagtccataaagttacatgagcaaactgatgcaacggttacacgaaaaatacatgtcacatctaaaatcatatgtaaggctgcagatttgcccaacaatgtgaaaatggtttgtcataagaaactttaaacaaacaagctggactaattacaacggcttcagatgtttgttggggctcaggacctatacggctataccattccatctccagtcatatcggagcaaattagaagcatatgcctgacagctacgaaaatttagcagtgcaactgctgaagccaaggaaaaatgtttccaggaaagtatgaaatatgatgaacatttacagcaaagtatcattcctctcacaattcacatcatcacagggtcatgtatgaactgtatattccagcaggggtgcaacacaccagagcccaagttccacatgcaggtgcctctgcaaataaaagcaccgtacgttgagtgaggggagagggtgctggcaagtgagaaacaagtgggttgttgnnnactggnggcaagtccatacaagctcactggaagctgaagtcactgggaagggagaagtgataacagtgaaaagctctcattgccatgataattgcttgtatgaagaacgttctgcatcccaactgccttctggttccttcctctttattccaacacttggcatttggtacattcttgtatgctcttccccaaaggcatgtggtggcgtgattaaattttgtctaactggtaaagatactcgttcgtcctttatttctgcatctacacttccagggccagaattaagatcaaggccctgccttccccatttccgattactgtcgtgtccaacagtgctgcttccttcaggaaggtttattgcatattgcctagtatgttgagcaggtaatgcacctgctggccctaacagtgttggagcaatgctaggaaaatatggaactcctgcaggtgctgaattggcataagatgtcgagccaattgaaaaccccggtgcttgaaggtgcacaccaggagtaaaagggaatcctgcatattgatacgcaggaggatgaaaaaccatggttggtgaagtagaaataactggagcacggcagggatcacttccacgctggacaccatctgccaaggatgtaatgatcctctgggttccacttccagcagctgtctcaactgggtgaggctgttctcctctagatggtaaaaatggctgtgcagctacaggagcataagggtgtgcagaagcaaaccatggagagatattactcatctcggcactgttcattctaccgccagcaacttgaggtatgaatggtatactgctggtatttttagatgatagactccttgctgcatgttccgtgccagtttcatctagagttggtccattattgagatcaaaatcccttgagccatttgtatcagcactagagaaaattgcaggtaacggtcttgacgataacaatgggacttcgaccctgtggggagtgttcgacacaaaatggttctctgcaacttcatcagctctgttcaaatcaagttcaataccaacacttcgtacaggaccattgcttcttctagtgttgccagattccgaaccagttgtctgaacagaactctgagagatatcttcctcaagaaattgctcatctgctacatttaagtcaatgtcaagtgctgggcggtgtttatctgcagcatcagaaactggaatgccaggtgcgctgagagtcatctcaaaaattttccttggttctgcaggacgaaatgcacttgtggctgctgaacctttccagccagtctcaggctgaaatcttagtaggttctcaggaggaacaaagggacctttagctgtagcagctacttttatcggagcaggtagcccacttgacataggtgatataaatggagaaagacaaggtaaattaattgcagaagaacacacagcaggagaggtttctgcctcagactgatgcacgtcgtctccaggtattccttcattcaagtcaaaatcaagcttggctgtagcacttggcctgatcttggcagcaaaagaagaaccatcatctgatgagacaaggtcctcgttcccacttgcatcatcactcgacttctttgagctgcgccttgcactacgttcagtatcctgtgagacagtagttccaggtcttgcatgactacttgattcactggaattgtcttttaattctttagaactaatcccattttctggaccaaatggtacacctgctggtacagctagttttgtagcatcagctgaagtggaagaaggttgttccttcttttcatcctctctcagcactgcgttaccaaccagcaaaccatcagccttattcacctccacggtcgaagatgaaaatgaaggctccacatccaatttaacagcagcactgtcaccagatcggtcaatggcttctgaattatctggtagacactggcgattcttctgatctgttgactttaacaaaccatgagattgtttatctccaccacgtaattcacttgtagtagatggatatatattcaattttgcgtcaatcttgatatcaactggctgttttgtgaccgacttgtcaccatcaccacctttatctgtagtcctcacttcatgattttcagtcttagcaggagattcaacagccttaacatctattccaggtggagagggtagcccagaagatgtgaccttattgtcctttgcatcccctaggtgttgttcctcctttgcgaccaaacctgcaccaattttctcacccttatcagagatgattttctcagcatcatttgttggccctgcatgccgtgacaagcccatatcactttgtacttttagcttcccaatgttatctccttcacagccctcttcatttcctggtgaatttctaggtgaagcagatgaagaaatcaactcagatttagatatttctccagcaacactggcaagaagattcattgctgtatcatctccagcttgcaaggaatgactagcttcagagtacttgatttcaatcaaagcattcatagggttgaacgaatttctccccccattttcacttgagcaagccgccttttcattagcatctgagcaaacaactcgggaagcacatgcatctttgccagcttcttcagttgtcctactgcgatcatcggtcagcatagcataaggtgatttatcaccttcctcagaaactgaagctcctttaacatcattgctatgccaagattcagcatttgtatcattgcctaaatgaggatttgaattctcagttttcatttttactctgcgatcactctgttcatgcttatctgcaagcacaggagacgaagctctactcccagtaaatgatggatcctcaaaagaacccccacttgcacttctagcagggctacggacaggatttggaaaccggacaattaatctatgcccattaccctgatctgatggtgtgtcagttcctttctcgcatgctgtgacagattgtgatgctttttccggtaacagagagcggtcaagtgaggtagaccttgccacagtagcttccttttggcctcctgaactaagaatcccattgtttgttcttcgatggacacgtgaggaactaccagatgttctaccagcaatgccagaagctgcagttgaactacgggcatcctcctttgaagaaccaattgttttcgcatgttcactagagcatgactggctgttgttcagagactgacttgaactacagcttttctcctctttcaccgtatgcaactcagggctacaagtcccaccagatgatttgcagggttgctccttcaagttggttacagcatttcctggttgaatatgctgtagttttgaagaaccagatatcaagggactcgacttcacagtagtatcagacgctccaggtttgacggtcaaggccttcgatgaagaaagctgagacactgggcttttcagattaggctcacttgagccacttcgtctgtttccagcactagaaatttctgcaaacccaggtttccctggccaggatacagcttggccagatacaactggtttcgcatcatttgacttcatttcagcatcaacacgcttcttccaattttcaacaagacactttgccttcttctgtatctctggatttttatggcttcgcagatggttaacagatttccctatactgcaactttgtaaggcattaagattaataggtaatttcgccaatgcacgaagcagcgctaggagaagttcttccataggcttatcagtttctttaggactaccaccttcaccagacttccctttgtgagcctcttgaagccaatcatcaaatacaggaaggccccttagttgcacaaatctgccaaggcaatcagggttttctgtagctgttataacatctgcaagcattactcgaccagcaaaatctaacttccgttcagttcgatcaagttgcatgagatgaactagcttctccacagcttcagcatgaggaagtccacctttttctgtaatctttgcaatttcagacttcatattgtctcctttcaggtttccaggctcagtgtcatcagtcttaagggtgcgatcacggtctctcttaatttgatcaattccttgttcacctctttccctcttctttcctttagatgaaccgcaattttgggccccatctgaaccagcctttaattgctgggaagctgatgggccagttagccgcttcggtgagcgcccaccttgctgcacggcagtatgcatttcttgccttgttctgtgcagtagccgatttacctcttcctgtcgttcatttatataatcacgatcagtaagccaccataaacacttgttgtcaatatcataaacgcgccaacatacgaatgaagaagttccagctggcagctctgcaccttttcgcaaaaaggcaactttacaaggatggagaagtgagacagccgatgtctcgtcctggtgaaaagaatagaagatctcgtttggagcagcgtcgagttgtaagcccttgttgagcttaatgtcggcaggtctgtaaagccaacttacacgcaacttgggataaccttcttcctgtttctcaatccagcgtatcaatccaatgaaagggggtacatcgacagcccgaaaaagagcgcaatcacccactctgaactcacgtccgtccat

SEQ ID NO: 21069 - DNA, 2535 bp, Oryza sativa
  Clone ID: TF_OsC58534_1
atggcgcccagctccccgtcctccgccgccgcgcccacgcgtacctccacgcgtaagcgcgccgcctccgcctccgcctccgccaaggccaccgacgagccctccaccaagcgcacccgcaggcccaaggcggagaccaagcccaggaagaagaaggacgaggtaaaggaggaggagaagccgcccatggaggacgacgcctgcggggaggagccggatgcggaggagatggccttgggggaggaagccgaggccgaggaggcggaggcggagcagaagcagctggacgcccccgcccccggtgtggcgaggaagcgggtggcgcagcccagcagggtccgacacggcagcgacggcgaccacgacccggagttcgtcggcgaccccttccccgccaaggaggcgcgcgacaagtggccgcagcgctaccagcgcaacgccgccaccaggaggcccgatgaggaggaggacatcaaggcgcgctgccactacagctccgccaaggtcgatggcacgctctactgcctccacgacgacgtctatgtcaaggctgaggaagataaggccgactacatcggtagaattactgagttctttgaggggactgaccactgccactattttacctgccgttggttctttcgggcggaggatacggtcatctcatccataatgatggagaatgctgatgatgaaaagcatgatctcaagcgtgtttttctttctgaagaaaagaatgacaatgtgcttgattgcatcatttcaaaggttaaaatcgtgtatattgatccaaatatggaatcagaagccaaagctcgacggttggctgattgtgatctgtactatgacatgtcgtacaccgttgcttattcaacatttgctaatatcccacttgggtcagaggcatcttcagtgggaaaggctacactccttgatctgtactctggttgtggcggtatgtctaccgggctctgtttgggtgcggcacttgctggactcaatcttgaaacgcgatgggctgttgatttcaatagttttgcgtgcgagagtctcaagtataatcatccaagaactgaggtccggaatgaaaaggcggatgagtttcttgctcttcttaagggatggcatagcctttgtgatgaatatgtcaagaaagatattgatttcagttcagctggtgcctcagagaacgaagaggatgatgatgagcctcttgaaaaggatgagtttgttgtggagaaactagctggaatctgctacggtggcagtggtagagaagatggcctctatttcaaggtacaatggaaaggctatggccgtgaagaggacacttgggagcctattgagaacctcagggattgcccattgaaaattaaagaatttgtgcaagaaggatacaggagaaaaatcttgcctcttccgggtgatgttgatgtcatttgtggtgggccaccatgccaaggaataagtggtttcaatcggttcagaaaccgcaaagagccactaaaagacgagaaaaacaaacagatggtgacattcatggatattgtggcatacctgaagcctaagtatgtcctgatggaaaatgttgtagacatactgaagtttgcagatggttaccttggacgttatgccttgagccgtctggtggctatgaagtaccaagcacgacttggaatgatggttgcaggttgttatggcttgccacaatttaggatgcgtgtgttcctctggggagctcttcctaccatggtgctgccaaagtatccgcttcccactcataatgttgttgtccgtggtggtgccccaaatgctttttctgtaaacaaccatcagcctaatgaagtgatggaatatggttcttcccccaaaacagaattccagcgctatatccggcttagccgtaaagaaatgctggatagttcttttgaagggaaggatggtccagatctaggcaagcttttggatcaccagcccttaaagctaaataaggatgaccatgagcgtgtgcagcaaattccagtaaagaagggagccaacttccgggacctgaagggtgtcagggttggggcaaacaacatcgtggagtgggatccagacgttccccgtgtatatttatcttctggcaagcctttggttcctgactacgcgatgtctttcatcaaagggagatcactgaagccatttgggcgcttgtggtgggatgagacggttcctacagttgtgacccgagcagagccacacaaccaggcgagagttctgaccgtaagggagaatgcaaggttgcaggggttcccagactactacaagatgtttggccctatcaaagagaagtatatacaagttggcaatgcagttgctgtacctgttgctcgtgcattgggttactcccttgggcttgcataccagcgtgagtcggaggggagcagccctctgttcgtcctgccagacagcttcacggaagtcgggcgacaggcggcgccggcaagagcatcctctgttggtatccctgttggcgaggttgttgagcaatag

SEQ ID NO: 21070 - DNA, 1204 bp, Oryza sativa
  unsure (1)..(1204): unsure at all n locations
  Clone ID: TF_OsC33365_1
ccggccaggagggaggaagaggaggaggaggagaggagcgcgtgaagcatttcggctcaaaggggaaataaaaaggggaagattttttttgcatctcatcctctcgctctcgccgtctctcgccgctcccccccctttccaggctccaatcccgccgccgcgtaggatggccaagacgcggcagccgcagaagcgggtgctggagtcgttcaccatcaaggggcccgacggggtcatcaagcctggggatactgtgctaatgatggcacctgactcatcaaagaaaccatatgtggcaagggttgaggaaattgaggcaacaggacctcaagcctctcaagtgaagatcaaggtgcggtggtactaccgcccagaagagtccattggtggccggcggccattccatggttcgaaggaagtatttctttctgaccactatgattcgcagagtgctgacaccatagagggcaagtgttatgtccacacctttcgagattacaccaagcttcgatctgtcagcgctgaggacttcttttgccgctttgagtacaaatctgccacaggcagctttgtgcctgaccgtatagctgtgttttgcaaatgtgagatgccatacaatcctgataaccttatgatccaatgtgaggattgctctgactggtttcatccttcctgtgttgaaataaccatcaaagaagcgaagaaactagagcatttttactgtaaaagctgtattgctgaaaatggaaaggatctacaaaagtccaatggtgctactgtgcaatctgaagaaaaggtgcagtccaaacgacggcggaggtgatgccatggagacagaatctcaatacctccaaagtggatgtaacaattctgtggggagcaaagcctcatcactcctctagatcttctctcttctcttcctgtgcaaggctgcttgcagccagtgaccagtgtactgtgtacatatttaccagtgttttctttttgcatcgtttgcatggtcgtcgtagcgtcgtcgcatgtactagcttggagtcagtcagtcagttagctcgagcaaagggatcaaactccctcttggtcataaactcataagcgatgatgatagatgaaactgggcactacctaccgtggttgtgttgttgtccatcaataataccttgacgacaaactacaaaaaaaaaagtgaaaaatcaaanaaaaa

SEQ ID NO: 21071 - DNA, 4937 bp, Oryza sativa
  Clone ID: TF_12002700
aattcctgcaaacagaaataaaaagccagttgtgtgacttggaaaccaaattacataaagaggaattatctgaggaaggctacctggctaaagtcaagtccctcttaaataaggatttgtccttggagaacggaacacacactctcactcaaaaagccaacggttgtcccgccaacgggagccggccaacctggagagcagaaatggcagactcaaatagatccccaagatccaggcccaagcctcggggacccaggagaagcaagtcggacagtgacaccctttttgaaacttcacctagttccgtggctacgaggagaaccaccaggcagaccaccatcacggctcacttcacgaagggccccactaaacggaaacccaaggaagagtcggaagaggggaactcggctgagtcggctgcagaggagagagaccaggataagaaacgcagagttgtagacacagagagtggtgctgcagctgctgtggagaaactggaagaggtaacagcgggaacccagctgggtccggaagagccatgtgaacaggaagatgacaacaggagtcttcgacgtcacaccagagagctgtcattgaggcggaaatcaaaggaggatccagacagagaagcaagaccggaaactcacttggacgaggacgaggacggaaaaaaggataaaagaagttccagacccaggagccagcccagagatccagctgccaaacggagacccaaggaagcagagccagagcaggtagctccagagactcccgaggacagagacgaggatgagagggaggagaagagacgaaaaacgacacgtaaaaaactggagtcacacaccgttcccgttcagagcagatcggagagaaaagccgctttaagcaaaagtgtgatcccgaagatcaactcaccaaagtgccccgagtgtggccagcacctagacgaccctaacctgaagtaccagcagcaccctgaggatgctgtggatgaaccccagatgttgaccagtgagaaactgtccatctacgactccacctcgacctggtttgatacttatgaagattctcccatgcataggttcacttccttcagtgtgtactgcagtcgcgggcacctgtgtcctgtcgacaccggtctcattgagaagaatgtagagctctacttttctgggtgtgccaaagcaattcatgacgagaatccatctatggaaggtggtattaatggcaaaaacctcgggccaatcaatcagtggtggctcagtggctttgatggtggcgagaaggtgctcattggcttctccactgcatttgctgaatacattttgatggagcccagcaaagagtatgagccaatatttgggctgatgcaggagaaaatttacatcagcaagattgttgttgagttcctgcaaaacaatcctgatgctgtatatgaagacctgatcaataagattgagaccactgttcctccttctaccattaatgtgaaccggttcacagaggactccctcttacgccacgcccagtttgtagtgagccaggtagagagttacgacgaagccaaggacgatgatgagacccccatcttcttgtctccctgtatgagagccctgatccatttggctggtgtctccctgggacagaggcgagcaacaaggcgcgtcatgggtgctaccaaggagaaggacaaagcacccacgaaagccaccaccaccaagctggtctatcagatctttgacactttcttctcagagcagattgagaagtatgataaggaggacaaggagaatgccatgaagcgccgccgctgtggtgtctgtgaggtctgtcagcagcctgagtgtgggaagtgcaaggcgtgcaaagatatggtgaagtttggtggcactggacggagtaagcaggcttgcctcaagaggaggtgtcctaacttggcggtgaaggaggcagacgacgatgaagaggctgatgatgatgtgtcagagatgccatcacccaaaaagctgcatcaggggaagaagaagaagcagaacaaggaccgcatctcctggcttgggcagcctatgaagattgaagagaatagaacttactatcagaaggtgagcatcgatgaggagatgctagagtgggcgactgggtctcggtcatttccagatgattcctccaaaccactctatctagccagggtcacagctctgtgggaagacaaaaatggtcagatgatgttccatgcgcactggttctgcgctgggacagacacagtcctgggagccacctccgaccccctggaactgttcctggtgggcgagtgcgaaaacatgcagctttcctacatccacagcaaggtcaaggtcatctacaaagccccttctgaaaactgggccatggagggaggcacagaccctgagaccacactgcctggggctgaggatggcaagacttacttcttccagctctggtacaaccacgattacgcaaggtttgaatccccacccaagacccagccgaccgaggacaacaagcacaagttctgcctatcttgtatccggctggctgagctgagacaaaaagagatgcccaaggtcctggaacaaattgaggaggtggatggccgggtctactgcagttccatcaccaagaatggtgttgtctaccgactgggtgacagtgtgtaccttcctcccgaggcctttactttcaacatcaaagtggctagccccgtgaaacgcccaaagaaggatcctgtgaacgagaccctgtaccctgagcactaccgcaagtattctgactacatcaaggggagcaacctggatgctccagagccctatcgcatcggtcggataaaagagatccactgtggcaagaagaaaggcaaggtcaacgaggcagacatcaagctgaggctctacaagttctacaggcctgagaatacccacaggtcctacaacggatcctatcacactgacatcaacatgctttactggagcgacgaggaagctgtggtgaacttcagcgacgtgcagggccgctgtaccgtggagtacggggaagacctacttgagagcatccaggattattcacaagggggccctgaccgcttctacttcctcgaggcctacaattcaaagaccaagaactttgaagacccaccaaaccatgcccgcagccctgggaacaaagggaaagggaaggggaaagggaaggggaaggggaagcatcaggtgtcagagcccaaagagcctgaggcagccatcaaactgcccaagctccggacctctggtgtgttttccggctgtggagggttatcggaaggattccaccaagcaggcatctcggaaacgctgtgggccatcgagatgtgggacccggcagcccaggcatttcggctgaacaaccccggcaccacagtgttcacagaggactgcaacgtgcttcttaagctggtcatggctggggaggtgaccaactctctgggccaaaggctgccacagaagggcgatgtggagatgctgtgtggtgggccaccctgccagggcttcagtggcatgaaccgcttcacactcccgcacttatctccaagttcaaacaactccctagtggtctccttcctcagctactgtgactactaccggcctcggttcttccttctggagaacgtcaggaacttcgtgtcctacagacgctccatggtgctgaagctcacactgcgctgcctggtccgcatgggctaccagtgcacctttggtgtgctccaggctggacagtatggcgtggcccagacacgaaggagggccatcatcttggctgcagccccaggagaaaagctgcctctgttcccagagcctctgcatgtgtttgcgccccgtgcctgccagctgagcgttgtggtggatgacaagaagtttgttagcaacataacgaggctgagctcggggcccttccgaaccatcaccgtgcgagacaccatgtctgacctccccgagatccagaatggagcctcgaattctgagatcccctacaatggagagccactgtcctggttccagaggcagctgcgaggatcacagtaccagcccatccttcagggatatttgcaaggacatggcccactggtggctgcccgcatgccgcacatcccactgttcccaggatcagattggcgtgacctgcccaacatacaggtgcggctgggagatggcgtcatagcccataagctacagtacacctttcatgatgtgaaaaatggttacagcagcaccggtgccctgcgtggagtctgttcctgtgcagaaggcaaggcttgcgaccctgagtccaggcaattcagcaccttcatcccttggtgcctgccgcacactgggaaccggcacaaccactgggctggctcttacgggcgtctggagtgggatggtttcttcagcaccactgtcaccaaccctgagcccatgggcaagcagggtcgggtgctccacccggagcagcaccgggtcgtgagtgttcgggaatgtgcccgctcccagggctttccagatagctaccggtttttcggcaacatcctggacagacaccggcaggtgggtaatgctgtgccaccacccctggccaaagccattggcctggagattaagctctgcctgctgtccagtgctcgggagagcgcatcagctgcagttaaagcaaaagaggaggctgctaccaaggactagtgttttcacccagagccccacgtgcactgatgtttttaaccctttgagccccatcatttgaagtcttgtgctcagtgtctgtggccatggctgacactaagctgtttgtatgaggtttgttttgtgaccaagctgtgtagtactttgtgcattctgaattttaaggtttttttttttgtttggtttggtttggtttggtttttttcttatcctgtattctatcagata

SEQ ID NO: 21072 - DNA, 2302 bp, Oryza sativa
  Clone ID: TF_OsC5082_1
atggggcggcggcggcgattcgcgcagctcgccaccaccagcgacgacgacgacgacgacgcccccgccgccgacgcgccgcccaaggcgaagcccccgccgccgccctcctcctcctcaggccccaagaagccgaagcagcgccgcctttcctccgcggcggccgacgacgacgacgacgtcgaggaggacgacctggagctcgaggaggaggaggaggacgagaaggatctggaggagatgcggaggaacgaggaggaggagcggcgggaggagacgcagacccgccgccgccgccgccgccggggccgcaagcccaagcgccccgccgaggagagcgaggaggacgaggaggaggaggaggaggaggccaaggcggaggaggcccgcgaggaggagaacaccgaggcggtccccatcggggagcccgtcaagatcaccggcagggggaagaagcagcgcaagcattacacctccttcgagtacgagggcaacaccttcgagctcgaggacccggtgctgctcacgcctgaggatagcaaggagaaaccttatgtcgccatcctcaaggatataacagaaactgagggaagcttatcagtaactggtcagtggttttatagaccagaagaggctgacaaaaagggtgggggaagctggaaagcaagtgacacgagggagttattttatagtttccatattgatgatgtgccagcagagtcagttatgcacaagtgtgtagtccatttcattcctcaacataagaaaattcccagccggaaggaacaccctggattcattgtccaaaaggtctatgacacagttgcgaagaaactttggaacctaacagacaaagattatgaggataacaagcaacatgagattgatcttctcgttaagaaaacaatagaccgtattggacagctttctgatattgaacctgcagatgctcctggtgacaacaatgatcagctctcaaacaagcgaggactgcggaagagacctgtgcttcctatagatgtttcaagagatgatgctttagcaggcaaatcagagcaatttggaaaagcagagacacctggaagtgataagctaaagaattatgccacccttgtcaagtataaagctgttactggtgatcaatatcgtgataggtggcttgataaattagtggatactattccactaacatcaaaggaaagtgctggggcttctcatgctgatcctggtggtgctaccaaaagttcaactaatggttcatctgcaaaggaagacaatgaaaaatcttattcacctgatgtgattgtttcaataatggcctccttagaaagatctacttatgaagctcttggttctgacttccagaagtataaccagaaattgagacagttactgttcaacatcaagaatagccctgtactacggaaccggctgatgaacaaggagcttgatcctccagtcctgttaacaatgtctcctgacgaactaaaggttggcttgacagcagcagagagaacatctgaacctgaagaatcaaggaagttgcagatgactgatgcacgatgtgtaagatgtgcagaaaaggaagtaggtgtatctgatattattcatgctggtcatggagatcgctatcagaaggtggtggcatctagaagagagaacgaggtcgttaacgtaggtggcgataggaccttgaggctagcgaggctagtggccagtggtgggagcgtgggcacggcaccatgggcaacagccaagttcgatgtcatggagaagcagctcacgagcccacgggatcatcagccggacaagccgttggccgatgctctccacaagagcgcggcacccgtacatgcccacgctggagaagcagaaatcgttcggcaagcacaagccagacgagccctcgtcggcgccagcagctggccacgagtagatcagacggtccacacgcactacacctctcgtcagaactagtagctagctagacacgattagaagagcacgcgcacccacggttcgcatcgtcattagggagtttcagagattacgtgtacagatgtaattgtgttttgtatgtcgtgtactaccatctgagggaggctgagcagatcagacaaactctaggttggcatcctcctgtcgcctctaatcgtgtgttttaacttgcatcactgtcaatgcatttcagtgctgtggacgcagccggtactcctgtacatcgtgagggtgtcaatggatcgtttttggctactgctcatgttttgtgtgtgtaaaaaaaaaaaaaaaaaaaaaaaaaaaa

SEQ ID NO: 21073 - DNA, 3129 bp, Oryza sativa
  unsure (1)..(3129): unsure at all n locations
  Clone ID: TF_OsC6126_1
gaggnncgcncncnacgtcccgtgatctccaggtcaaagaaaaactggcaggagaagagaagaggagaggaggaaaagggaaataaataaaaaggagaggagaggagaagggaagagaagcgaagcgaggccttcttcgccgtgggaataattttgcgctcgggggatcttgatctgaggaggagggggttgttggtgttggggagagggagcgatcggagccagggcgcggatcgcaggcggtgagatttgtgttccgggacaagccatgagcagcgcaaccaccggttgttaaccaagcaacccccctgtaaattgaaagcaaccgaagcgaagcgcaaagaaatggtttttcagaagaggtcatcgctggagatggagtcgggaggcggaagccacgtcgcggagatgccgcgcgtccccaagtccgcgaggggcaagagatcaattcggaagaaggagagccagggtcaggtgatgtgcgcgttcgacctgctcgcgactgtggccggaaagctgcttgatgagggggagggttctctggggaacgcgagctcaggcaccccggccgtggacgcgtcgcccaaggatgtccgcgtgaagcaggagcagtgcgatgaggaggcgaagcatttcaagaatgaggtgatggatcaggatagctgcaatgagagtgcattggtctcccacattgcgtttcagcggccggtgaatcaccatgggcggaagggggaagatccggaggggagtcatgctgtgattgaggaccccaaggccaagtccgaggcactggacaaggaatcctcaatgataagctgcaccaaggctgaattgggttgtaattttgcagcgatcgctgataggtggtcgcctgaatccgtggagtcaggggccttcactggggatgcagctgcaatagcgatgccggctaccacatcaggcttccacaagaatgctccagatatgtataatctgctcgatccaatggatgtggatgtaaagccgcctcctttggtcagctctgacagcaccggcgaaatgccgttgtatggcaataaaattcgccgatcgacctctttcccgagggtccccaagggaggggcggggtttactgtagatagagatgaagatgatgatgataaatcttccgggtgcactcatccgagcaccgctactaacaggggtttcaggcccaattgtacagctggtcatagtagggtaaagaagttgctcgcctgtaagcacaggaaagttgctccagccaggatgcacaaaggagatctttcctatagtggtgagcattgtgagatcccattcaccttttccttttttgaggagcactgcattgatggcactcatattcaaacctgcttactctattcttacttgagttcgttgatcctgctagatgttgaccggaagccttctttccgcaacaagaaaatgtattatacacgacaaaggacacaaaggagcacattcaagcggaggaagatgtttgatcgtcattcagcccaagtttctgaagaatatgcaaaggcaaacacaaagtttgctgcaagagactcgcacgcggtttctttggaagcaaacaaggggaccaattcaacagcattccagaaatcacaagagtcaagtgactgccacgtaaaacttaggatcaagtctttcaaggtgcctgaacttctaattgagatcccagaaactgcgactgttggttcactgaagaaaactgttctggaggcagtaaatgccatacttggaggtggtctgcgtgtcggtgtgctccatcatgggaagaaagtcagagatgataataaaaccttaatgcaggctgggatttctcatgatgaggtactggacaacctgggtttttctcttgaacccaattgtgcaccgcatccgtcacaactctcacctcccgaagataatgaattcatggaaactgttgatactactgaacccctagctaggattgcacctgctgactcatcttccaagcatggtgaagttgatgcttcacaggagcttgcattggcacccttatcagcaaactaccaagggagtgatcatgactttgtgcactctcctgggggcatgtcttcacctgataaggcatccacaaactcgcgagctattgttccagttactcctgcagattccaatgctggggctatagttccagcaaacaaagcaaagaggtcacctgaacaagggcaacgccgaatcaggcgtccgttctctgttgccgaagtggaagcccttgtgcttgcagttgaaaagcttggaaccggaagatggcgagatgtcaaacttcgggcctttgataatgcaaagcaccggacttacgttgatcttaaggacaaatggaagacgctcgtgcacacggcgagcatctcgccccagcagcggcgtggcgagccggtgccacaggagctgctcgacagggtcctggcggctcaggcctattggtctcagcagcaagccaagctccagcctaagacgcccccgctggctgaggctctcctgctcacctaataacctgatctcagctaatggtctcttaggaaaccattccagcttttgtataaagtcagtcagtccattcaaaggaggttaaggaagatattagaaaaaaagatatatataaaaaggtacaagaaatattgaccgatttgttgtaatatctactcaccaattattctttcaagccagggttctctctccttgtgaatttaaccaaaggtatggggtatttctttggcaactttgtacatgatggtgatggaggaagaagatgatccatgaactgagatctgcagtgactactaactcacaatttttttacaattgtggtttaaaagagaagagattaaagcttcagattcttttgtcaattcaattcattcttttgttaggatgagaatggtgaaaagataaggagggatggatcattgcttccccttttttttttcctttttttgttatcctaggtgtactatgttttcttcaccaatcttgtagttatcttggtcccctcaaagttgtacttgatcattataacaaatattaaaaagaaattgtttattctccttcttaccccccttaaaaaaaaaaaaaaaaaaaaaa

SEQ ID NO: 21074 - DNA, 457 bp, Oryza sativa
  Clone ID: TF_LIB3431-053-P1-K1-F4
cgctcgcgtacacgctcaggctcacggcgagcatctggcccgagcagccgctttcacagccgctgcctcacgagctgctggacagggacgtgtatggtcatgactatcgggctcagctgcaagctaagatgcaccctatgactcccgctctggctgtggctttactgcttaccttataacctgggcttatctagaggccatttaagataccgtatcaggtctggcataacgtcagacggtggattcagaggaggttaaggaagatgttatatataaagaggtacatgaaatggtgcccgatatgttgaccgatctgctgacctatctacttaccaagcctgcgttctagctaggggtgtatctaactcggagtatagccaatggtatggggaacttctttcacaactgtgatcatgagaggaatggatccagaaactgatacatgaactgacttctg

SEQ ID NO: 21075 - DNA, 2961 bp, Oryza sativa
  Clone ID: TF_OsC1905_1
ggaaaatcctcgcttcttctcttccacggggaaggtctcctccaatcctttcccctctccctctcctcctcctcctcctccctgcgccttccacttgcagcgattcctcctccccgcccgctcttctcgaaccttctggaaccttcccccatcccccacaagaagcagcagatgggcatcgtcgtcgtcgtcgtcaaccaatcctaggcgacgagcgctgcggcggcgcgcgccatctgctcccctccgccgtgctccggtgctccccgatctgcgcctcccgctccggttggtcggctgtcggaacacgcagctgcaaaaccctagccgagctgcggcgatctcaacgctggcggcgaggccctcctcttcgtcggcgtcgacggaaaaatatggcgcatgttttatttacttccccttgctgtcactgaacacatttcctaaagtcaaggacaagacatggtgttgcagaagaggttggactatggatcccatggccatcgtgctcccattaagccacgtgtcgcaacattggcgccggttaaacgctccacaagaataaggaaaaagcagatgtatgcacttgatttgcttgcgacagctgcagaaaaattgttggctgatcaagacaatttatctagtggacctaacataaatgaaacaccagaaggttatgttacaagcatgaaaccagttaaagcagaacagtttgatgaagcgtttccgttgagaagcgtggctgtgaaaaaagatgactgcaaaggttgtacagtaggctgtgcaggcatctgtggctttctcagacaagctaatatgtgcttggctgaaaactcgtcgactcaaaatctagctgattcagtactagagtcactaacagcaaagcctgatgtgttggctaaggactcatttgttagcagtaaaaaatcatgtcgattgggttttggtcttggcacaattccggagtatggatctgttggagtatgccaaccttggtccacaagatcagcagaggttaaacaagtgcatcgggcgagaccaacagcaatcagaagtcaagaagatagtgatgctgcagctctatgtgctttggtcgagaccatggatttggacaccaaacctcttgctgaggctagctctggtagtaactcaggagtgcacatctgcggccctgacagggggcataactcccatccctcgtgtttggctaaagtgcagcatgctgcagacagagatgatgacgaaaattcttctgggtgtgtacatccaagcacctcaggaaataaccgtggttatattccacattatataggtgaccgcaggataaggagattgtttgcctccaggttaaggaaggcagctcgcaacaggatatgtggagagatgtcttgtaaaggtaacaagctgagtttgtgtgaaaagaagatgcccactacgcgccgaagagtgcaacaaacaactttgaagaggaaaagacttgctcaactttactccgaaaaatcatctgatgaagtcaagttaaccatcaaatctttcaacatccctgaactactaattgagatccctgaaaatgcaacagttggttcattgaagaaaactgtgtcagatgctgttactactataattgaacgcggtctccgtgtcggtatacttcttcaaggaaaaaatattcaaaatgacaacaagacgcttcgtcaggctgggatttaccgtggtaaaaaactaaatgacataggctttactctggaatgtgaagctgggcaagattctcaccctggtgtaatagtgccagaagaaatggattttgttggtgcatctgttgtggacaagtctgctacggtgaaatgcgaagaacctgctgagaaccagcagcttatgcaagattttccaggctgcagcttgagtgatcctggttctgttgattatcccgtggaatggagcacacaagaaacatcagcaagctcccaagccatcgtcccttttgcagatccaaactcactggcgctggccaatgtgccgctttctaggtcaaagcgaccagattttgggcaaagacggataaggaggcctttcactgttgctgaagtggagttgctggtggaagccgtcgagcaccttggaacaggaaggtggagggacgtcaaattccgcgcatttgaaaatgttcatcataggacctatgttgatctgaaggacaagtggaagaccctggtgcacacggcgagcatagcgccgcagcaaagaaggggagctccagttccacaggaactcctggaccgtgtgctcgccgcacaggcctactggtcggagcagcaggcaaagctccatggcgatccccctgttcctgaaatctgccctacctgatcctgatgatgattgatggagaaggcaagaatggccctcgtgtacaaatcggtgtaaaaattgttcagaagggattggttggttgacgtttgattgaaatttgtcgacagttgaaaactcacaacttggtccttcctactgttggttcgttaacaggaggaggaagaagaagaagaagaagaagaagaagcttatttgtaaatttcagcagagtttactgtctttgcaaaaatgcaagtcgttttggacaagttgagctggtttttgcatttgcttggacgtgatcctggctgggccgttgtgatgatgaggtgaggcccaagcccatgaaacaagatgggctttgtcatcgtgggaagcagaccttggctgttacggctgctgttgtctttatctaccggcctggccttcttatccaactgcaactaacaccaaccggccagctgccgtcaggcctgacgtcagcacaagcatggaagcagacgaactccacgtttagctccatcagaccatcaccattcggcgcggattctcgattagcatgtgcactcgtatcatcacaattagagcaagttcaatagaatagccaaccgttggctc

SEQ ID NO: 21076 - DNA, 1851 bp, Oryza sativa; identical to SEQ ID NO: 11363
  Clone ID: TF_OsC47793_1

SEQ ID NO: 21077 - DNA, 1817 bp, Oryza sativa
  Clone ID: TF_OsC156600_3
atgcagtcgaggtgcccttccgccgccgtgttcacccccaccacctgccgcctccggttccgcgtcctccaccgccggttctccggcggcgtcaccgccgagaacgaggacgccgacggcggcgaggaggaggaagaggccgacgccgccgccgtcgccggctgggtggaggaactccgcgagctgcgcgtcgccgagctccgccgcgaggtcgagaaatacgatctctcgatcgggtcgttgcaatcaaaagtgaaacggctcaaggaggagagggaaaagagcatctccggcgagacgaagccgccgccggcggcggcggcggtgaaggaggaggaggaggatgtacggaagggatcaccggaggaggccggcgccgtggaggacagggtctccggccacgaatccggccggtcatgcaaggagtcgaactcgtcagatctgaagcggccggagaacgaccccgcggtcgccgacgacgacgaccgggaggcggaggaggaggaggaggcggcggcggcgcccgcggccggcgacatcgccgtgaaggaggaggcgtcgggcgagtcggtggctgggtcgaaggaggcggacgtcgagaaggagagcagcgacgtgcagagctccgccagcccgtcccgccgccggcgacggaagggcggaggcggcggcgaagaggcggaggcggcgtcgccgtcggtgtccgtgcccctccccgccgccgaggccgagccgctcgtcgccttcctcgagtcggtccggaccagcaaggccggcgccgtgttcgagcggcggctcgatagccaggatggggagaggtacagtggcacgatcaggcgccatgtggacctggagacggtcaggtcgaggctggtgggtgcaacggcggcggcggcggcggcggcgtgctacgcgtcggcgtccgagttctaccgcgacatgatgctgctctgcgccaacgcgctcgtcttcttcccgcgcggctcgccggagcacgccgccgcgctccagctgcgcgcgctcgtctccaagcaggtctccaaggaccggcagcctcacgccggggcgaaggcccccgcggcggcggcggaggaggaggagaagaagaagccggccaaggccgacgccgacatcgctgggccgctgctcgagaaggcgccgatcatcgtctgccggaagcggagctccatcgcgaaggccgcggcggcggctgccaagggggagaaggcggagaaggcagagacggacaagaaggagaaggacggcagcgaggagaagaagaaggctgcggcggcagcgacgacggcgacggcggcggccactgccaaggacaagaaggctcggggcatgaggacgaacaagagccggggacccgcgaggaatcagaagacggcgaagctctcggagaccggcgaggggaccaagaagtccgacaagaagggcggcggcggaggcggcagctcttcggcaggggcggcggcgggcggggttgccaagaagcgaaacgccgtggatttcctgaaccggatgaaccagaacggctcgccgtcgacggagagggtgtcgttgctggagacgctgaagctctccgcggcggcgacggagcagcaggagacagtcgtcgtcgtcgtcatccgggaagggcgacggccggaaggaggccggcggctcaggctccaagaagggcgccgccgcctcgacgccaccagggaggaggatcggtcggccaccgaagcgggcggccgcgccgccgacgccgccgccgttccaagagggccaaggacgacaagccgaccaggaagcgcgggaagaagtga

SEQ ID NO: 21078 - DNA, 1485 bp, Oryza sativa
  Clone ID: TF_OsC84045_1
atggtggtggtggtggtgggaggcggaggaggaggaggaggaggaggaggggtgaagaaggaggagggggaggaggaggcgaggggaagaggaggaggaggcggcgtggtgggagggtgggggacgtgggaggagctggtgctgggcagcgccgtcatccgccatgggggcgttgcgtggggcgccgtcgccgccgaggtccggtcccgctcgccgtgcgccttctcgcctgaggaatgtgaagctaaattttcagagatacaagcacgctactctgcatgcgatgcttggtttgaggagctccgtaagcggagagttgctgaattaagaaatgatctgaagaagtctgaaaattttattggatccctgcagtccatgatcaaaagcctcagcaatagcaagcatgatgatggcaactctgaatgtcacactagtcatactgagtcatgttcaaataatgaaaatacagctgataacaattcatcaagctaagcattgtccaaagatagatcatctgctgctagttttacagaggaagaaagcgacagtcagaactctgataaggtgcaacactgcgatactgattcaattcaagtgaacaatacttcagcagaggctttggtaaaaccccttgttgaaaaaaaggtttgtgctgaagatggtttgctttggggctctagaaagaaaagggccgtgagggataggaggacttttctgatggctgataatagttgcagagctggcgagaatacatctacatcacacatacagacagatggttcctctgaaggctatgcaaagaagggcttgaaaactccaaatctagaatctggtgtgtctgtcgttgagaaagcaaaaccaaacttggcagagattttgaaaactatatctactcaaagtgactgttatatgttgcaacgccgacttgatgtccagcggaagcggactagatacaagaagatgattcgccggcatatagacttccgtatccttcattcaaagatcaagagtggcgcaacatcttctaccaaggagcttctaagagacattctactgtttgtgaataatgtccttgccttctatccaaaggctacgttagagcacatggctgcaattgaacttcgaaatattgcattcagaacagtgcaagagagcgcaagcatgccctctaagagttgtggagtaacaggagcagcaactgcccctttagtgaagaagaacacccgacccgtgcagcctggaagtcatgggcctcatgatgcaaagagaagcaaagtttctttaaaggggactggaagtactgtcaagcagggtgaggccaagggatcgcgtggtggttcatcagtgacagctaatgtaaaaactatgcagagaaatccaccggccaagaagagaggcgttgggcggcctccaaagaatgggcagaagcgtgctgctgcacagcaagatagccctaacaaaggcaggaagaggacccgacgctga

SEQ ID NO: 21079 - DNA, 675 bp, Oryza sativa
  Clone ID: TF_jC-osleLIB3474035c11b1
caccgtctctctcgccggcgaagagaagggggaagcgcggctgcggcggcggcggcggcgcgcggcggaggtagggcttgaggtcctgaggtctctcctccgtctcgatctgcctcctaaccccgaagcgagagggattttgcgcggggagggtgggggtccgtacagcccggccgccgtatcccggggtggcgctgaggctgccatcagcttgcctctatctgaatcttctggccctgaaaagaagctaaaattatttttctttgtcaagaccaaaaagtatttattcaaaccaaacactatgaccacacaagcttgtaagaagagaagagcagtttatataagcagtgaatcagaagactctggtacagactctgaggttgagggaagcaaactctccaaaaaagatggggtcacgtcagtctatacatgtggtcaccagccaacctctaagaataaggttgatccgatgaatactagcaagtcaaggcagtgtggaagtattctgaagaagctcatggatcacaaaaagggatggatttttaatacaccagttgatccagtggtatatggaattcctgattactttgatgttattcgcaatccgatggacttgggtactgttaaaaggaaactcacaagcaagcaatattccaacccttatgagtttgcagc

SEQ ID NO: 21080 - DNA, 1677 bp, Oryza sativa
  Clone ID: TF_OsC18330_1
tcaacctcgtttcttcttcttcttgtcaggaacatttggagtggtaggcgtcactttgaacggttgggaggacgagccggcgaactggctgaagcccagctgccggccggggatgaccagcttgggcggcgcgaatggcccgaactcgacggcggctggcttgctggcactgcccttcttcttccctggcttggccgccgttacgccggccttcgcgccgccgtcgtcgtcaccggctctggtcacagctggtttctgatcgtgtccctgctttgagctgctctcctggcgctcatggccgagcactctcctggctctctccatgaacgccggcctgccgatcagcacgaggagcttgagcacctcgtccgtcttcagcctgcaccgcggtggcgccttgttgccggcagcgtcggcagatgatgcagcggcagcgccgccgcctccgaacgccgcgctcggaggagacggcggcgggcagcggccgttgcgggaggaacgacctgctggccgtgccggcgccggagctggaagcgaaaccacagttcggcagtagcccggcgccgggcgggcctgcctggcccgtacgtcgcactcgaggttcctgaactcggcggcgacgcgcgccttaagcccggcgtgccggacgaatcgccggaggctatcctggtacgtgtgcgccgccgtctgcggccggtaaacgagagtggcgtgctggccagtggagacgacgggcactggccgccagccgccgtgatcagcctcgtcggcgtaggctaaccgtctctgctccacggtggcgctggcgccggcgccaccgtgctccgccgtccccggcgtcaccgatgcagcttttcttgctcttcttcccggcgcaccgttgctctccctcgctgcccgctgcctcgttgtgctcttaaccgaggtggcggcggcgacagcgccggttttggcggcgatcttcttcctcgccggcgcgctcggccgctgtggtgtggtcggagcggcgccgccggcgccggagccggagcctactttgctgccatcgaatttcccgtttagcttggccggcgactggctcaccagatttttctggcgccacgctgcgagctctgactccgagtacatctggttgctcttcagggacaggaatacctgcttggcttgatgtagcagtgacattgcctctctgtaaggtatagtgtcctcgctgtttatggacattgctttctggaacaccatgtaaacatcattctcgaattgctccagtgtgttgtacatgccatccttgttcttctgccttaatgttgcaaagtcaccgggcctgttcacccgttctgcataatcagttacttggatgtcatcaggcattgcaaataactcatgagtgtctctcatctctagtgtatcaagaatgtactcaatgatttgtactgctgaacttttgcttgacaaattattgatatcggttgttgcacacagtgcttggctagaagaagcttctccctgcaaatgctggatttcttcattcctttttctcttccctcgaacaccagcaatgctgtttcggattatctgccaaggatctaggagacaaccagtggcagtagtgtcatcgttcttctgctcttcaagcttcagtaatctagcacttcgcctcttcccttttccagacat

SEQ ID NO: 21081 - DNA, 883 bp, Oryza sativa
  Clone ID: TF_OsC76474_1
aaagaccattaacattttatcatttttattgatgatttacggggtctatacacaacgaataacacggtagtgcattttacactaccagctttattttttaacaaggcccttgatgttccttttgtcgaatcggtaattgatttttcttcacgaagatctaatgatcagaagcgttagttaaaatcaacttgggcaagcaaaacaatgcattaaatagtgttaagctgttgagcatcttgaaaactactttagtattcctctaacaaaattttccgcagtaacacctgtagaatcatactgtggctgcgaggcaaattctgcttgcacaaaaagaagcctgttaactgggcactaaccatcaagcaccactctacaatgatgaaaaggtttgttcgatccaatcagatagcctccgaatttttttggtcatatcagtgctctttgagaaataagactgggcatttgcaagcatcacagtcgcatcatgtcgaatagcttccagagttctgtagtaattgttctcaagccttatcctaatcacctcaatggaaaactggacaggaaacctgttaatgaaatctgatttctctgcaacactgttcaacttcagaacgccatagcgatcctgatttctgtgagacaattcgagtaagttgtccaactctgatagcaatttgtcctttataccaagatcaatgtgtggatgtttccatgggacccacagattaccagtatcatggagttcccaggggctatgtgggtgatcagaaccatcattcttatactggataacatatttctcccatggactctcaggaaaatcaagtgatttaggttttacggctgatacccttccttcccaccaacttcccggacgcgtggg

SEQ ID NO: 21082 - DNA, 659 bp, Oryza sativa
  Clone ID: TF_jC-osflLIB3477P007b02b1
caggaaccccatggatcttggcaccgtcaaggagaacctcgccttcgggaggtacccctcgcatgaggcattcgccaccgatgtccgcctcaccttcagcaacgcgctgcggtacaatccggccgaccaccatgtccaccgctacgccagtaacctcctcgccaccttcgaggggttgtacaaggaggccttgtcctggttcgagcaggagtgccagcgtctcgagccgccaatgccgctcgctttgccgccgccgccgcagcccccggtgcctatgccgatgcaggcgccgccaaggattgggggtggggggaggaggccgaagcccaaggcgagggagcccaacaagagggagatgagcgacgaggaaaagcacaagttgagggtggagatcgggaatttgcccgaggagaaaatggggaatgtgctacagattgtgcagaagaggaataccgatccggcgctaatgggagaggttgttgagcttgatttcgacgaaatggatgtcgagacgctgtgggagctcgatcgatttgtggtcaattgcaagaaggcgctcagcaagagccggaggactgtcgcgatgaacggtgatgctgttgatgcgactgctattgttccaattgaggacgataccgtgcaagtggatgtgcatcatc

SEQ ID NO: 21083 - DNA, 366 bp, Oryza sativa
  Clone ID: TF_LIB3434-060-P1-K1-C1
ggcaacaacttactaatctaatgcgttcattgttgaagaatatgaatgagcatcctgatgcttggccattcaaagagccagtggattcacgtgatgttcctgactattatgacattatcaaagatcctattgatttgaagacaatgtcaaaaagagttgagtctgagcagtattatgtgacgctagagatgtttgtagctgacatgaagagaatgttcagcaatgcaaaaacttataactctcccgatacaatctattacaagtgtgcctcacggctcgagagcttcttctcaaacaaagtagcatctcagcttgcccaagcctcaacgaagaactgacatggtctttggtacatctgatatagtc

SEQ ID NO: 21084 - DNA, 3577 bp, Oryza sativa
  Clone ID: TF_OsC51154_1
cggacgcgtgggccgcttcgaaacccccgacgcgaaggaagcgagacgaaaccctcgcgcgagccgcctccgccaccgccgcctccttccgaccagccgccgccgccgccgccgcgtcgccgaatccgggcgggggctaggcgcgggctccccgctccccgccgatcgaatccttcgagggagcaatggccggcgtggtgtggatgaggacgtgaggtgggagcgatggtggggatggaagggaagggggatgcatcggtgacaccagtgaggactagtgaccggctgcgtaagcggcccaagtacttcggtcgcaattatatgtactacaatccagccatacgcaagaagatgaagtctaagaagagagcggctgcatcacagattgccaagaagctgcttcgcaagtcagctgccagggcaccgcctgctgatagtgcacttgagataattgagagggttgatagagtgatattggatttgcttggtattattgttagtgtttggtcaaatctacgtcgttcaacacgaaagcgaagaatgtctgtaaatctggaggactatgacaccgatagttctagtatggaagatgatgatcttatgaggcccagatatcgatcttcaaagaataaagtggatgacgaagtgtcagctaggccaaagcgcaagaagctgtccaactctagctccattcctcgccgtgagggtttacggcctagaagatctatccgaggacaaagacttcatccataccaagaatctgaggatgaccaggaaagctctgaagaacagcctgcacaagataggagggaaaatggtaatgatatcgaagaggatggcaatgaggaggaagttgatggaggtgatgaagctgaagcggatggagatgatgaagatggtgaggaagaacaagaagggaggaggagatatgatctcagggatcgttcagaagttcgtagaccctccccacggaaggaagggaagcacagaacacaatcaccccgtagagtactagtacatggaattggtccaaagaacagcaaatatttgaaaaagggtggttcacgcatgcataagcgccctcgattctcattgccagatgattcagatgattctcttcttgtggatgagccagatgaaggtccatccatgccatggatgcgtggtgggagaggaggtatgccgtggtttttaggtggattggatatgcattgtccaggagcatggggtctgaatgttggagcatccggttggggtcatcagggtgacaacacagtgagtacttcttcacttatgccagggatccaaactgctggaccaagttccaagggaggagctgatattcagcctctccaggttgacgggagtgtgagttttaatgatataggggggctgtccgattacattgatgcattgaaggaaatggttttcttccctttgctttatccagatttttttgcaaactatcacattactcctcctaggggtgttcttctctgtggccctcctggtacagggaagacattgattgctcgtgccttagcgtgtgctgcctctaaagctggtcagaaggttagcttttatatgagaaaaggagctgatgttcttagtaagtgggttggagaggctgaaaggcagctcaagctactgtttgaggaagctcagaagaatcagccatcaatcatattttttgacgaaatagatggtttggcacctgtgaggtctagcaagcaagagcagattcacaattcaattgtttctacattgcttgctttgatggatggtctggattcacgtggacaagttgttttgattggagcaacaaaccgaattgatgccattgatggagcattgcgtaggcctggccgatttgatcgtgagttcttttttcctctacctggttatgaggcaagggctgaaatactggacattcatacacggaaatggaaggaccctccaccaaaggaattaaagacggagcttgctgcaagctgtgtggggtattgtggagctgatttgaaagccttatgtacagaagctgctattcgagcatttagggagaagtatcctcaggtctacacgagtgacgataagtttgtcattgatgttgattcagtcagggttgagaagtaccacttcttggaagctatgtctacaataactccagctgcacatagggggtcgattgtgcattcaaggccgctgtcaccagttatcgctccttgtctaaaaaggcatcatgaaaaaataatggaaagaattgctgatattttccctttcctatcatcagtagatgttagcaagttctctgccctttcctatggatcatccatccctcttgtttatagacctcgacttttgatgtgcggtggtgtgagtgttggactggatcatgttgggccagctgttttgcacgaacttgagaaattttctgttcactccttggggttgccgtctcttctgtctgatccaagtgcaaagacacctgaagaagctcttgtgcacatttttggggaagctaggagaacaaccccgtcaatactgtacttgcctcagtttcatctttggtgggatacggcacatgaacagcttagggccgtgttgttgactttgttgaatgagctgccatccaaccttccagttttgttgctaggaacctcgtcagtggcctttggtgaccttgaagaagagtgtgcttccatattttcttctcgtaatgtatatgaagtggatcaaccaagtgatgatgatagaatgagatacctgcatgcactgtttgagtcattgctctcatttcaaatggaagagtctaggagtaagtctaaagaccagaagtcttctgttgatcttcccaaagcaccaaaggaagtggatggtcccaaactttcagagctaaaagcgaaggcagaagccgaacaacatgctgttcgacggatgagaatgtgtcttcgagatatttgtaaccgcattctgtacaacaaaaggttcgatgtgtttcactgtccaaattctgtagctctgttctctgactatagatctgtagttcacaatcctatggatatggctactgtcttacagcaggtggactctgggcagtaccttactcgggcctcatttatgaaggacattgatcttatagtctcaaatgcaaagacatataatgggagtgactacaatggatctcgtattgtcagtagagcatgtgaactacgagatgtggtgcaaggaatgttgtcacagatggacccatctttggtgtccttttgtgataaaattgctgaacaggggggaccactacaggttacggatgatggagatagctctattcttcaagcagcgcctgttgctcagctggtatctggtactaggatgagcgcaaggcttcgtaatgtacaaccagaagtaaatctatcacgaagttatgaggcgttgaagcggcaaaagaaaagcaccgaaactgaacaaggcatggttaaagaatcgacaacaagagatgacaagtctcttggtgatgttgatttgtcaaagccaatctccccagaagaagctccaaaagaaccggttcaaatggtgttct

SEQ ID NO: 21085 - DNA, 1750 bp, Oryza sativa
  Clone ID: TF_OsC57969_1
tctccccccgatccgccgccgcctctcccgattcgccgccgccgttgacccgccacctatggcctcagggccgccgtcgtcgccctccagcaaggcgttctcccgcaaatcccacgcccacgcctccggccccaactcctccaaggcggcggcggcgggcggtggcggcgggggtgtcgcggcggccttcgatgctcacaacgggacgcacgtccgcaccgtcaccttctcgctgtcgtcctcgccggccgcccgcagggagctccgccgccggctcaccgccgagctcgcgcaggtgcgcgccacttgcaagcgcctcagctccctcccggcccccgcgccttcctccgcgctctccgccaccgacccttccaccccgctgcccccgcacccgccggtctccaagcacaagtcgaagaaggggaacccctcctccaacccgggcctctccgcggaggcgcggcggaagctctacgcgcccgtgttcaagagctgcggcgcgctgctcgctaggctgatgaagcacaagcacagctgggtgttcaacacgcccgtcgacgccagcgcgcttggcctccacgactaccacaccatcatcaccaagcccatggacctcggcactgtcaaatcgcggctggccgctgggcactacaagtcgccgcgggagttcgccggtgacgtgcgccttacctttcagaatgccatgaggtacaaccccaaagggcaggatgtgcacttcatggcggagcagctgttgaacatgtttgaggagaagtggccagaaattgaggccgaggtagcacagctgtcaccacagccgccaacgccatcatcggctgcacccaggaagccgaaggagatagataattctaaggtgttagagaggtcggactcaacagtacatgctgcggggatggaggccactccaaagcagaacactggtcggcccccagttttaaagaagcccaaggcaagggagcctaataagagggagatgaccttctgggagaagcagcggcttagtaataatctccaggagttgccaccagagaaacttgacaatgttgtgcagattataaagaagagaaacttgtcactcagccagcatgatgatgagattgaggttgatatagatagctttgatgttgagacattatgggagctcgataggtttgttacaaactacaaaaaaagtataagcaagaacaagcggaaggctgagaatcccgtggcagggcaggatgagatgaatcatgatatagagctagagaagacagagcatgcaaggttggatgaagtagagcaggatcagatgcctccagtacaagagacgttacataatcctgagccagaatcaattgatatcgaaccacctaaagaaaacacagcagatgataatgagaggtatgtaggctcatcatcacctgttcatttggaagatcagaagggggagaatgcgggtagatcaagtagttctggaagttctagtagcgattcaggctcttcgtctagtggtaaatgctctcatcctttgcagaaatttatattagcagcatttctgtttgcaattaactctataaaggatattttcatatacatctgcataacatatgaaatttaccgtgagaagcatatgcagatacagacacagatagttcatcagcagatggctctgatgctgcacagtcacccagaacgtaacatctataggccaggggatggctttggtacggtttatttggttttttaa

SEQ ID NO: 21086 - DNA, 2849 bp, Oryza sativa
  Clone ID: TF_OsC1956_1
atgacaccgacggtcctcatggagtttgggcagcaaaggcagattaagcggggctacgatgaaatggcgttccggggcatggcgtcagcggcgccacggggttacgcggagaccgttggcgagtcggagggcgcggcaggcagccccgttcgtgttgactccgaggactcttcggcccccaagcgcaagtgcatcagcctaaacagcgacggcttcgatgtcaagcgggagattttcgtcccagccaagatgtcctcctccgagaggaggcatctccggaagaggttccgcacagagcttgattcggtccggaatctcctcaagaagccggagtttgctgtccctgtccctgtcaatagagctcccgcgctctcgtcctcggctgcccctcgaggtaagaagggacagcgtggtaaccatgtggtccgtggtgccaaggggcgtttcttgcctacaaagccccgacctgaggcttccacggtgttgactgaggatgcgatttttaagcaatgcgatgctattctgaaaaagctgatgactcagaaatgtagtaacatattcgactccccggttgatgctgttaagctgaatattccagattattttcaaatcatcaagaaaccgatggatcttggaactatcaggaataagcttgactctggttcctacacgagtccatctgaatttgcagccgatgtacggctgaccttttcaaatgcgatgacttacaatcctcgtgggcatgtagtgcatgattatgccattcaactaaacaagatgtttgaatcaagatggaggacaattgaaaagaagctggcttccattgccacagaggcgcacgtcgaggttgacagggctgactcaaagaggaggaagactccccctgtggactgcagtgaggtgtcaacagagtgtgtgaggccaacagagtctgttagaccaacagagtctgtaaagccaaaaatgacattcgaggagaaagaatcatttgggaactgtttggcatctttgtctgaggatccggaggtaccttcacacatcattgatttgttgcagcaatgcattgacaacaacacagatcagcttggtgatggagagatagagattgatatccatgctgtcagtgatgacctactattcgagttgaagaaacatgttgacaagtatttgcaagagagagagcagagccagcaggcaaaatctgagccttctgagaatgaggctgctaatgtatctggccttagccactcctctacaaatccctgcaaaggtggtgatccagttgaggaggatgtagatatttgcgggaatgcatcccctatattgatagaaaaagatgcacacaacaatcctaacaagtgtggtagcccaagtagttccagcagtgactctggatcttcttccagcgattctgagtcgggcagtgacagtgaaagcgaacaagaaaaaggtggtagcccaggaaagccgaagggaagtaagagatctgaacaactggtggagcaagaaaagagtgatgttataagtccagtcgatgccatccgtcctgctgatgatgtggagctccgtgagcaggataacgagtcaaagcctgccccagagggggagaattcaaaacccgacaggcaagtctccccagacaagctcttaagagcagccctccttaggagtcgttatgctgatgtgattgttaaggcacaggggattctcagccagggtggagacaaacaggaggagctggaaaagctccagaaggaagagaaagcaaggctgttggctgaaggaaatgcagctatggaagctcgaagagctgaagctgaagctgaagccaagcgtaaacgggaccttgagagggagaaagctcgccaggccctgcaggagatggagagaacggtggaaatcaatgacaacctccatctaaaggatttggaaatgcttggaacggcaaccacagaacatattgtgagttctgttgatgagactagtcctgagcattcccaggatggcatgcccagttttcttcctggatcaggcaatccattggaacagctgggactcttcatgaaagcagatgaggaggaagaggaagaagatcctagcagtgtccccagcactaaagatgcagaggaaggagagatcaactagtcccagtgcttgtgggctagttgctgaattagctgtgcatatggtagacgctccttccttctgcttccaaactagctcgaacaaggccctcaattttgatgctgctggatgtcgtaaattatgcgcctggagtatcgcggtaacctgccctacaaatcatcatatgtgcttggaggacggcacagccataatggccgcgacttgcggtactccgagctgttgtcgggtgtatgtatgtagccatctttgaagtgccatggccaggccgcaaggtgggtaagcaatgagaggaccaaatggttctttgcacatagtgaattagtgatccaggtgctaaagctcccagcggcaaaaggtgttgcccagcggcttatagatttttcgttcgttcttctctagttttgggtttgtccaattgcttcctgctgtaaattcgaattttgatgtagtggaggaagcgatagttgtttgctgggcatatgggcaaataggaaaaagcttctgcttttcttgtttacagggaaaaaaaaaagaaaattcatgcgtcttttagcgcaatttgttgtctcctgtcagatgtttgtcgactgtttgttgtggatgttcaatattctcaatacacaagatatttcttgtctttcctcaaaaaaaaaaaaaaaaaaaaaaaaaaaaaaaaaaaaaaaaaaaaaaggagggcctcgtgc

SEQ ID NO: 21087 - DNA, 2205 bp, Oryza sativa; identical to SEQ ID NO: 11368
  Clone ID: TF_OsC1956_2

SEQ ID NO: 21088 - DNA, 6196 bp, Oryza sativa
  Clone ID: TF_OsC48901_1
atgggcgacggcgagcgccgcgaggacgagaacccgaccaccagtgccgcagatgacgatgatgatgaggattatgatgaacctggtggagggaatcacttcttgggcttcatgttcggcaatgttgatgattctggtgacttggatgctgactatctcgacgaggatgcaaaggagcacctttttgcactggcggacaagcttggcccatctttgaaagacattgatctgatcaagccttctgcagcaccaactgatccttctgagcaagactatgatgcaaaagcagaagatgctgttgattatgaagatattgatgaagaatatgatggacctgaagttgaagcagctacagaggaggaccatttgctatccaaaaaagattacttctcttcaaatgcagtttatgcttcggtcaatagtaaagtttcagtgtttgatgaggagaactacgatgaggatgaagaaccaccaaatgataatgatttgcctagtgataatattgtgcaaaactgcacttcagcttcagctgagcaactggatatggcaccgtcaaatgacaaccttgctgttgaaaagatgtctagttcgttatcagaaccagaagaaagttttgaaagtgaagcttttcagaaagaaatggttgctgaagagcaacttgagtctaaaactgcaacttccctcccagttttatgcatagaggatgggagtgttatattgaagttctctgaaatttttggagcccaggagcctgtaagaaaagccaaaatggaccgccataagcgcccagtgaataaagagctccagattacaaatttcacagatattgttgaagaagacgaggaggtatttctacgcagcactattcaaaatttgtcagctttgaagcatatcaagacgaacgataattttgttgagagtgacagtgatgagtcaacttcagatgttgccttaagactgaaagactcgtgcctttccgaacaaccgatgaaagataaagatattcctactgctgtacaatctccagttttccctgatttttatccactcgagcatgaaaattgggaaaatgatattgtttggggcaattcaccaacaaccgcaattcagccttgcttaacaagctgtgcaatatccaaagaaagcttggatgaccacaatgaagaccaggccgagggttatgtctctgggtgttgggatgtacagaataaatttcatagttcttcagtaatggcagatccttttgggcatacagaaatacctgattcaactagttaccgttcccctgagaacagctattctccattaagaaaggagactgctcaggagaataacagcttagatgaaccaaataacataactcaaccggttaaaatcgacaccacacggcatttaaacaagctctctttactgaacaaggagttgttagaaggatcttggttggataacatagtttgggatcccagtgaggatgtaccaaagcccaagctaatctttgaccttaaagatgatcacatgctttttgaaatattagatgaaaagaatggggatcacctccgctctcatgctcgtgccatgattgttactcggccaatgaaaacttcagcagtggaaaatgttgaccataacaatcaagcaattgcattgagtgggagattcaacatttccaacgacaaattttattctaacaggaaaatgtcgcagcaagctagatctcatgctaaaaagcgtgctacaatgggcttaaagttggtacattctgttcctgctcagaagctccagaccatgaagccaaagttgagcatcaaagaaatcgcaaacttccatagaccaaaagctaagtggtatccacatgaaaataaacttactgctagatttcaaggagatgagtgcagtcatgggccaatgactgctattgtgatgactttgggaggaaaaggagtcaaatttctggtcaatgcagaggaaactccactttctgtaaaatcaaaagcttccaaaaagcttgaatttaaaccttctgagaagatcaaattgttctgttctggaaaagagcttcaggatgacatctccttggctatgcaaaatgtgcgaccaaactctattctgcatgttgttcgcactgaaatacatttatggccaaaagcacagagattgcctggtgagaataagcctctacgtcctcctggtgcattcaggaaaaaatctgacttgtctgttaaggatggacatgtatttttgatggaatactgtgaggagaggcctttgcttcttgcaaatgcaggaatggctgcacgactgtgcacgtattaccagaagacttcaccttctgaccaaacagctacatccctgcgaagcaacagtgatggactgggtacaatgcttgctattgatcccgctgacaaatctccttttctggggaacattcgttctggctcccaccaatcatgtcttgagacaaatatgtacagagcacctgtatttcctcataaggttgcgacgacagattatcttttagttcgttcacccaaagggatgctttctcttcgtcgcattgacaagttgtatgctgttggccaacaggtgaaaaagtcagtctcctggatttatcacagattgactagaagggcaactaatttcaaaattttattctcctggcaggaacctcatatggaagtattttcacctgggacaaaaaatatgcagaattatattctgaatcggattcttgtgtatgtatatcgtgagttccgtgctagggagaagcctggtattattcctcagattcgagctgatgaattacctattcagcctcctataacagaggctattaaaggaccaaagggacatttgttctatattcagagacctgattttcggattccatcggaggaagaactgagaagattattgacacctgaaaatgtctgctgttatgagagtatgcaagctggccagtatcgtctcaagcacttaggaattgagaagcttactcagcctgtgggacttgcatctgccatgaatcagcttcctgatgaagctattgagcttgctgctgcagctcatattgagagggaattgcaaatcactagctggaatcttaccagcaattttgttgcttgtacaaaccaggacaaggaaaatatagagagattagaaattactggtgttggtgatccatctggccgtgggctaggatttagctatgtacgagtaactccaaaagcacctgtatccaattcaacacataagaagaagtcagctgctgcaaaaggcaccactgtgactggaacagatgctgatctccgcaggttgagcatggatgcagctcgagagttgctactcaaatttggcgttccagaagagcaaattgacaagttaacaaggtggcatcggatcgcgatggtgaggaagctttcaagtgaacaagctgcatcgggtgttacaatggatgaaattccagttagtaagtttgcacggggacaaaggatgtcttttctgcagcttcagcagcaaactaaagagaaatgtcaggaaatttgggacagacaaattcagtcactttcagctatggacggcaatgaaaatggcagtgacacagaagctaacagtgatcttgactcatttgctggggatcttgaaaatttgctagacgcagaagaatttgatgatgaagatgttggtaatacagacataagaagcgataaaatggatggaatgagagggcttaaaatgagaaggtgtcatactcaatcccaaattaatgaggaaattcaagatgatgtagcagaggctgctctagtagaaaaactgcttgaagagagtgatagtgatatgaagaggaagaagcagcctgtggaaactacaaattatagcactcctatgtataatcagggcaataaaatgaagcagggtaaggctggccaaatgattaaatcgtctgtatatgccggtgcattaaccccaaaagagagcataccaagagaagccaaggaggttgaaaattttgctgaaggaagtttaccctcaaaactaagaacaaagacaggatttgatgcaaatgatgatattattctagtaaaaaggaaaaatatcccaggaaaggatgggttcaaggaaaagagacagggtgcaaggggagacactcttgtatgtggagcttgtggtcagctcgggcacatgcggaccaacaaactgtgccccaagtacggggaggaccctgaaacatccgaaatggatgtcaattccatcaggtctcatcctcctgatattgtgagtaatgctcaaataaaaacatcaaacaagaggttggtagcaaaagtttcgtctgaagcttttgaaactgaaggacctgaaagtattgaaaaggctaaacctgtccctgtaaaattcaaatgtggagcacctgagaagtcattggataggaacatgtcaatctcagcttctttggtttctgataaacgtatgatggatgctacagattcgaaatcaactggaaaggttaataagattaaaatatctaacaagataaaatatgatgattatcctcctgatactcctaagccatctgttgtaataaggcctcctgctgaagtggagaaggatctacctcgtaagaaaattattatcaagcagcccaaggtgcttggagatcagcaaagacctactgaacttaggagtggtcaggagcccagaaagacaaggaaaattgttgaattgtcaagctttgagaagagagacagagaggatgataatggtttttctggacaacctattcagatcaattcctcacatgatagggggtggggtctggtgggaaaaagaagcaaaggaataatggaaagtagtgaatcctggagagcttttgaggagcaacgagagagacaagaacagagactaattgaagctaggatatatgatgcaaggagagaggatgagctccagaaggcaaagaagaaaaacaagaaaaagaaaaaacatgaatttcgagatgatgacctacttgatcctaggccatacaaaaatgacagaagggtacctgaaagaggtcgagcggcaaagagacgtaccccagctgatatgacagaatacacaccaccagctaagcggcacagaggaggagaggttgagctctccaacatattggaaaaaatagttgaccacttgcggacaatgagctgttcattccttttccgtaaaccggtgacgaagaaagaggctcctgattactttgacataattgagcgtccaatggatcttggtactataagggacaaggtgcgaaagatggagtataaaaatagggaggattttaggcatgatgtggctcagatagcactgaatgcacatacatacaatcttaaccgccatccccacatccctccgcttgctgatgagctcttggagttgtgtgattatcttcttgaggaaagcgcggatgtgctagatgatgcggaatacgcgatcgaggactagtgcacactaaccagatatggcatttagatcttgctatattctaacttagatgctgtaatgctgacctgtaggaggggggaagagcacctgtagaatttttcattttaggctctggctatggtatacctgggatccccaattccaactattttgcctcttgttggtattgggagttgggagttggaatgtacacaaactctaggttagacattgagggcccactgtaactattggcctcttgctgtaaaaatgtagcgatgtaattttttgtccatatccatggccttgggtgtctcaaattctgatgttgtagcattaaatcctatgtgaatggcatctaaccatatgagtcaaaggtgcaacacgtcaaagtatgtgctaaaggttgtacccggtctaacctgattggtgaaggtcccttcaaatcctgcatgattagaggcttaccatacaactatgcgaagtcaaaacctgtaattgtaactgtaacgtgagagatggtgtaccggcagtacaagttgtttgagttgctgccagatgatgatgtatttgatgttgcatgctttgaatgagtattcaccgctcaacgatatcattggatggtgcagttcatagtttcatacctttggtttttggtttgtgatgttgtagcaacagaacaacaagtaatcatccattaaacaatcaagtccctttctcctaaaaaaaaaaaaaaaaaaaa

SEQ ID NO: 21089 - DNA, 504 bp, Oryza sativa
  Clone ID: TF_OsC48683_1
atttatcctggccttttctagaaccagtagagggtgtcattcttaccatacctgattattttgatattataaaaaatcctatggatcttggaactattaaacaaaatctggaatctggaagttatactactgtaaatcaatggattgcggatgttaggcttgtatggagtaatgccatgttatataatcctcctggaaatgaatttaacacaatggcaaaaactttatccgatacatttgagaaaaaacttgctcagatggttcataaactaagttattcctcttcacagaaaagagatcagctacgtagtactctagagacgttagtagcacaatataagaattatgagtcagaattgggaatgctcacaaaacaggcagaggatgaagctagagagcatcctgatttgtctccccccatcaaaccaagttctgcactactcaggtcacctttgaattttaatgagaagatgaaattatatcataatatcaactcgctggata

SEQ ID NO: 21090 - DNA, 1752 bp, Oryza sativa; identical to SEQ ID NO: 11372
  Clone ID: TF_OsC105877_1

SEQ ID NO: 21091 - DNA, 2763 bp, Oryza sativa
  Clone ID: TF_OsC35984_1
atggcgaagacccggaaggccgcggccgctccgccacctccgcccccgcccccacccgcggagaccccagcgaggaggaaggggaagaagaaggggcggccgtccctcctcgacctgcagcggcgcagcctccgcctccaggcccaaaaccctagcccggccccgtccccctcgcggcgggacgccaatccgtccgacgaggacgacgacggggtcgggagtggggggcgccgacggcagaagcggctcaagagcgtcctctccagcagcggcggcggcgaggtcgggcgcgctccccccctcttacctgtcgcgccaatttttcgaaatttgcccgaggtttttgggggcctccccgaggagaggagaggggggtttttgccgtgggacacgcggcgatgcggttgccgtagtggttggatctgcgattttggaatttttttgaggggggtgggtttcgtggatgatgaggcgcccgcggccgccgtggtggtgaaggtggaggtggaggagaagaagaagaaggtctcgtcgaaagcgaccgggaaaggggacgctgcgtcggatggcgggcccactacggggactcccctcccggacaaaaagttgcttctcttcatcctcgacaggctccagaagaaggacacctatggagttttctcggagcccgtcgaccatgaggagcttccagattaccatgagattatcgagcatcctatggacttctcgacgatccgcgagaagctgttgaatgactcgtataccaccctagagcagtttgagaatgatgtgtttctacttacatcaaatgccatgtcctacaattcagacgacacagtctactatcggcaggcacgatctattgaagctctggccaaaaaggatttcgagaacctgaggcaagctagtgagcctgaagaagaacaacaacccaagactgtacccagaagaggcagaccaccaaaatatgcaaagaaaattgagaagactgaaaatgatgtttcaccagatttatccaatgcaaaaacaaaatctgcagaccatgctgaaacaattagaaaaaggttgactggggacagaactcgaaatgcaaatatcacaacaagagactcaccctttcttcaacataatacacctggttcttttgctggtaaaagaacagatagatttggtgattattcagggccttcgaagtacggaaagaagaccaccccgactatttcagatgatgagcgtcgtagtacatacgatcagcaatacttccatagtagtcctctgttttctgcccttggtggtgagaggaaagtacttgtgccggtgggacttcaacagcaacatgcatatgctaggagcttggcgcggtttgctgcaaaatttggtcccgtaggctgggacatagcagcaaagagaatcagacgactactgccttctggaacaaattttggcccaggatgggttgtggatggtgagccacctgagaactctcagtggcctcgagttcccatgctctctgatccatccatccagtctactggtgttccagctagcaacgtaatatccaagaatgatgaatccaatcagaagtctggactgacttcgaacgaggattctggtgaagagcatctagctagaaccgagccagtggcttctacatctgcatgcgttaacacaaactctgtatctgccaccaagctagctaccaagtgtgaaaacggggctaatgtgtcatgtgatggtgtgggtagtactggacagacacctcccttgcagcagcacagccatagtcgagagatccactcaaatatgaatggcttcactgccttgccaaacacaattagtcaatacgcagggcaaggattcttgggacagatgcagttgacacatgctcaagttcttgggatgttttccggagtcaatggcagaacaaatggctttatccatgggcacccactggtggctaatagcattaaagcaccacaaaatggggatgttggaaaggtagccactaatccatcaccagatgcaggtcatgattcagaagctgcattatcacaaaccatgactagttctgctccaagtttaagtgctggtgttcaaccatcaggttccatgccaagcgaaaagttagcaaatccaaaaaagcacccggacttggcattgcagctctgaagacaattagccattgacatagttcagcttagcgccgtccttgattggaaacatgattcagaatcccagcttctcgagtccttattctccgcttctgctatgctgatggatattgtagcagcacactgagtggttctgagggagaattaacaatggatttctcgtcgaagaataattcattgtgaggcgaggtcatgggaaggagtaactagagccgatgaatcgtttgactcccagcaaatttgttgtaaaagggtaggtagtctgtatagattctaatcttatttccgatgataatgtttcggatgggcagcatctggcatccaatgtgtaacattatactagtggaggtatacaagcagggagggaggcaagtgcataggtgtgcctttttcctgcgaggattgatccgattccaggttgtatgagactggcggatggacgactgctgcaactccaccccagttgagctgagtagcaagtagcctgagtcaccaaaatcttgctctgagcccctgacatgattctgtgttgacattttcactgacatgattatgtagtgttttaacatttgttgatgttgctcttgactgt

SEQ ID NO: 21092 - DNA, 568 bp, Oryza sativa
  Clone ID: TF_uC-osroM202030e06a1
gcgagaagaagctccgcctcgtcatgggcctccccgacggatcggccaagggagaaaagacgaggaaagcgacggatgggagtgaagagccgtcagattccgggcccacgacacctttgccggacaaaaagttgttagtcttcgtccttgataggctgcagaagaaggacacatatggtgtattctctgaccctgttgaccccgaagagctgcctgattaccatgatattatcaagcatccaatggatttttcaacaattcggaagaagctcaataaaggggcttatggcaacttggagcaatttgaggatgatgtattcttgttaacctcaaatgcgatgtgctacaattcaccagatacaatatactatcgacaggcacgggcgatccaagagcttgccaagaaggactttgagaaccttaggcaggatagtgatgcaagtgagccagaaccagaaccggaaattaaaccagatcctgaaccaaagccacaaccacggaggggcaggcctccaaataagaacactatcaaacagaaagttgggaagccaccggtagaacgcgctac

SEQ ID NO: 21093 - DNA, 2279 bp, Oryza sativa
  Clone ID: TF_OsC34269_2
ttttctcctcttttttttttttttccccttgcccaccaccaccaccgcctctctcgccggcgaagaggaagggggaagcgcggctgcggcggcggcggcggcgcgcggcggaggtagggcttgaggtcctgaggtctctcctccgtctcgatctgcctcctaacccgaagcgagagggattttgcgcatggccttggcacagccaacattgacacttacccagcgctgtgggcctgcgagatatggtgagagcttgcctctatctgaatcttctggccctgaaaagaagctaaaattatttttctttgtcaagaccaaaaagtatttattcaaaccaaacactatgaccacacaagcttgtaagaagagaagagcagtttatataagcagtgaatcagaagactctggtacagactctgaggttgagggaagcaaactctccaaaaaagatggggtcacgtcagtctatacatgtggtcaccagccaacctctaagaataaggttgatccgatgaatactagcaagtcaaggcagtgtggaagtattctgaagaagctcatggatcacaaaagtggatggatttttaatacaccagttgatccagtggtatatggaattcctgattactttgatgttattcgcaatccgatggacttgggtactgttaaaaggaaactcacaagcaagcaatattccaacccttatgagtttgcagcagatgtgaggctaacattctcgaatgcgatgaagtataatcctccaggaaatgatgtccacggaatagctgatcaattgaacaaaatatttgattcggaatggaaattattggaaaggaaatggaaagacagaaatttggtacaagagcagccatcactgaaggtattaaaggctcagcctgctgttaccccaaaacctgtgctacctaagggggtgactgcaggcacaaattcagctgtgagcaagacactggcaactgcattatcctccaaagtaaaaattaaattttctgtgcgaggctctgagctgacctcttccaaagacacgcctttgcaagcagttggcagaagagacggcacaattaaccaatctctcccttgcaccaaggacaatgctaagacaccaaggatacaatcaagtgaggacagatctgaatcaactggagatgaatatttgcctggcgatgatgcttcaccaagcaaggctcttcgtgcagcaatgctcaagagtcgttttgctggtacaattgtcaaggcgcagcagaaagcacttctggatcatgggaagaaaatagaccctgcgaaattgcagttagaaaaggagaggctggaaaaaaggcagcaagaagagaaagcaagaattgaggcccaggtgaaggcggctgaagctgctgcacaattaaagctagacgaagaaatgaggatgaagagggagcaggaaagacgagcagcacgcctggcactacacatgatgaagaagactgttgatattgacaacagtgacttccttaaggacctggaaaacttaagcaaaaagtgggagctgaatccccctggcaaacttattgttgattttgtcgacgggatcgatctaccacctggcttagggagtccgctagagaggcttggccttttcatgaagaaggatcttgaggaagaggtcgaacatgaaatggaggacagtgtatcaccatctacggagatcgacgtggaggaaggagagatcagcttctgtcaatagcacggctctaaaatatccattgtttcttcctttttttctttccccccatcagactctgaagcaacatgctcgcatggcttataaaattgtgcgcgagtgctgtgttatttattctgcctccagacaacatcataacataagccgagtaaaatgaagcgttggttcatctagtttgtgttgtctaaccagaaaacaaaaatgtcagctgaacactgaagtggagttatcggttgcgtggacttcgccccgattttgtcggttctgtgaaaccctgtatgttgtaggtgttccacgtatgcaattctgtaaaaaaagaaaaaaaaaaaaaaagttgtatgtaatgtgatgttagactgttagtatataataatattatagttccatatggcgcaaaaaaagttggcccccttttaaacccgggccccggaaaggttttaagaatgcggctgtgtgttgttccccccaaaaaaaaaaaaaaaaaaaaaaaaaaaaaaaaaaaaaaaaaaaaaaaaaaacccaaaaaaaaaaaaaacccccaaaa

SEQ ID NO: 21094 - DNA, 2376 bp, Oryza sativa
  Clone ID: TF_OsC6193_1
atggggaagacgcagaagttctccaaggggcacccgctcggcttcgtgccggattaccggcacggcgtggagacggtgggggagtcgaagggctgtatcgggagcccggagcggatcgtatcggggagctcgtgtgctgtgccgaagaggaaatgcggaatcctgaagacagaggatggaggggagcttccggggttcaatgtgccgcgggacgtcttcatgctgccgaggatgtcgccttcggataaaaaggacctcgagatgaggctccgcaaggagcttgagcaggttaaggccctacagagtaggctgtttttgaggccggctgcggtgagcatgaatggcggggcggcgtcagcttctggagacgtagttgcaaagagaaacgatgcgaagcttaaacggagcaattcagtgcagtctggcagaggagtgccaccatcagcagccacacctgtggtcaggtctgcaaactacgcagaagcttttaaacaatgtggcaaccttctgaagaacctcttcaagcatcagtgggctggtccgttccttgcgccggttgatgttgtacagttgaacattcctgattattttgacataatcaagaagccaatggatttgggtaccatcgagaaaaagttgaatgcaggcatgtactctacaccttgggattttgctgcagatgtgaggcttacttttgacaatgccgtgacttataacccagtcggtaatgacgtgaatttaatgggcaaaactttgaaatgtatttttgaaactagatggaagtttatcgaaaagaagcttccttcactagatgataaattctctgtgagaagagagccatcacaaaagggtgcagttaagaaagataccattgagaaagattacccttctgagaaaaagcactcgacaaaaggtgtacacaagaaagatatgtttaaaaaagaggatgcttcaactaagccagctttgcaaccaaagaagagaaaagcttctcccttggttcagggttctcttgaaatacctgtagtagaagctgataaggtcattgatgatgctcaagtggtacagccttctaaggtgattgatgatgcccaagtggtgcaggcttttaaggtgattgatgatgctcaagtggtacaggcttctaaggagattatgacggacagacaaaagtatgagctaagcgtaagacttcaatcatatggtgggttgattccaaatcatgtagttgatttcataaggagccaccttcctgatgataatgagggtgatgaagatgagttagagcttgacatgaatgtcctaagtgatagtacattgtttgaacttcagaagcttcttgatgactatgatagggtaaatcagtcaggaaaccctacaaaagatgagcatcgtgaggttgagtttgaaagtgaatatgggcttagcaactcatcgatgcatcatgaagaaggtaatgagctcgttgaagaagatgttgatattggtgggaatgatcttccacctttgacgtatcctcctgcagtatttgaaagtgaaactgcagaaagaagcagcaagcatagcacttctagcagttctagtagtgattcagaatcatcctccagtgattcagattcaagcagctcttctggaagcgatctggatgtcaatgttcctccatcaacaagtggggccaaggacaacacgcaatctgcggttaggttggatcaggaaaacgatccactgagctcgaccaatctaccacaacaaagtagtgatcctgtacctatttctgccgaagatgagggggagaatgtgtctgagaaacaggtcccccctgcaaagcaataccgagctgctgttttgttaaaccgctttgctgatacaatttttaaggctcgtgagaaaactcttgatcaggtcgcgaaaaaggatcctgagaaacttcaacacgacatggaggagcttgaaaggttacgaagagaagagagagctcggatacaagctgaggcaaaagcagctgaagatgctcgcaagagagctgaggcagcagcagctgctgaggctgctgcagaagctaaacgccaaagagaacgtgagagggaagcggctcgtaaagccttgcaacagatggagaaaactgtagacatcaatgaagggaacctctttttgaaagatcttgaaatgcttggaactgttacatcaggtgaacagtttcccagctcggttggtgagacgagtccaactcatacgcctgaaggccttggatttcagctaggtagcaaccctttagaacagcttggtttgtatatgaaaaatgatgatgaagaggatgaggaaggtgagtctgcagatgaaccaacgattgatgttgaggagggcgaaatagattga

SEQ ID NO: 21095 - DNA, 2153 bp, Oryza sativa
  Clone ID: TF_OsC11739_4
tttgaagaagaatcggcccaaatactaattaaatcttttgacaccaacaatacaattataaggttcaagtacaaccctactccagcgcggtaagcaatgtggcaacatgtgactatcacaattatcttgatacaaatatgaagcttacagccttacacatagataattgtcatacaatagacaggtatctcccaactaatttcgtacctaaatcaagctatagcctctgagctcaaagatatgtttcaactaacctgttttattccaaccagctcccgtgacttcagggtacagctttctttcccaaagtcacaacgctgccttgagcttcctttacacgaaacggctgctgctaagcagccattggagggacaaaactcctaccgtttcattatcgctgttatggccgcatgcagagggcttcccttcattgaaacctgccgctgttgctgtcggaacagagaatggcgtcccctgaaaacagaactctggttgctggggaaaagccgtgcgcagagttgcaagaatgattggttctccttctgtatgggataatcctccatttcaatctcctggcttgtttctgttggctccttatgttggtgttgtgcaatttcggagccatcattgggctgactggatgtatgttcctcctgactgatcaaatccgtatagtctacctcttctttttcgtcaaagtatggtctggagccttcatcctcataatcatgtggcagtggctggttgttgaagaatttcacatgattttctatcagagtccctgaatcatctgctaccactgttcttctgtacatatcagtttgtggtggttgctcctgactagaggtagtgtcatgactaccagcgttattaatgcctgagtctacctccatgatttgctggtcagaaatgttactattcactgcagctgtatcgttttcaatgacagccaagatttcatccttttcctttttgcggcgtgtaacttgacaaacagcacatgcacagtcatttttgtgtcgatcattccctaggcgccgccgtttttgcttagacttgccttttgaacctttgacatcctcatcgcctgtgttatcattgccaccattctcctgcgcatcagaatacaagcctgctgccagccagtttttcatgaagcccttcttcacccgtttcataagctctataatgtaatcacctttactgttgtacttggtacaattatcccatataaattgcacgtccttatacacatcctccgagttcatatacttatcaccacgttctagattttgacatattgtgccaaaatccataggagtatcaataatatcaaaataatcaggtattcctagagcaacagggtccaccggtgtgttgaacggctcagctgcatccatcttcatgactttcttaatagcttcaagtgcagcagttagctctctgtcatctcgctgacgttctggcgtagcctgctttacctccaactcttgtgagcttctcggctccaatgcagtctcgctttctacattttccaatacggtttcctgcttgcttggaagaggttcactgactgaatcagctttcctgtcctgatttttatcttctaccgaagataatcctacagacttgatatttatgcttgctacttttcttgccatcttatccttatcagaaccactcaattctgctgcctgcgcatctttctgtccgtctggtgatacaatagccttctccgcaacttctttgctcgcttcaggagcagcacttgcaggtttaccaccaccaccatcaacaggtgcttttgcttctgaaggaccctggtgcgtctccaacactttggcagatttgaacttcaacctgactcggctatagacttttggcttagcattctgtacgtcagtagacacggctggcttctccggctcaggaggtgctggttcaggcactggtggcggagcaataacaggcgcattatctgcctgatgatgcgctgggctggtgccgttctcctctgtgcttgggctggagggggactttgaggaagcatccacggtgctcgggctggacggggacattggagaagcatccgctgtgatggaagctttcaacttgcccttcttgcccatcttacgcccacgcttgcgcttcat

SEQ ID NO: 21096 - DNA, 2259 bp, Oryza sativa
  Clone ID: TF_OsC11739_1
tcacctctccctctctcttctccatgggccgcggacggcggagcagcgtgcgggtgggcgcaggcggaggggcagcagctgcacgagcggcggccggcgagggccgtcaccgcgtcgtcggccggatctcctctcccgcctcgcgcccgttggcctcgtctggctctccatcgaagaggatgcggcgaggagggagttggcaaaggggcggacgggaggatgcagcggcactcgatctctccgcggcggagagcgcggacgggaggatgcggccggcggaggcggcgtgcgagcggagcggaagcggaggcgcggcggtggcggcaggcgacgccccacgcggccaccgccaccgaacaaaaaaacaagaaggacgcttccgccgccgaccgccgctcgccgcactccggttgccgtgccgccgctcgtcgccggccaccctccgccgttcgtcgctagccgcacgccgccgagcctgagagccgatgcacgtcgctggcccccaagccgccggtcgacgccggcaactgtccgccgaccaccgtgcaagctagccaggtgcccaggtccaacctgcatggcaaagaggaggcctaggaggttgcactcctcgtcggcgacgaaaagcagcgacgacaccgactcgatggcgccggagcgcgtcccgcttcttgccgtcggagcgcggcctcgccgagccgcgggtttgtcacgaccgttccaggtgagcatctccaccagccggtccaccatcgccgctgacgtgccgacccgccggagcgcgacctcgctgagccacgggttcgccgcgacgttgacgaggatcccgacacggccgcggccgcccgtcgcgccatcctcctcgccggcggcattctcctgcacatcagaatacaagcctgctgccagccagtttttcatgaagcccttcttcacccgtttcataagctctataatgtaatcacctttactgttgtacttggtacaattatcccatataaattgcacgtccttatacacatcctctgagttcatatacttatcaccacgttctagattttgacatattgtgccaaaatccataggagtatcaataatatcaaaataatcaggtattcctagagcaacaggatccaccggtgtgttgaacggctcagctgcatccatcttcatgactttcttaatagcctccaactcttgtgagcttctcagctccaatgcagtctcgctttctacattttccaatacagtttcctgcttgcttggaagaggttcactgactgaatcagctttcctgtcctggtttttatcttctaccgaagataatcctacagacttgatctttatgcttgctacttttcttgccaccttatccttatcagaaccactcaattctgctgcctgcgcatctttctgtccgtctggtgatacaatagccttctccgcaacaacttctttgctcgcttcaggcgcagcacttgcaggtttaccaccaccaccatcaacaggtgcttttgcttctgaaggaccctggtgcgtctccaacactttggcagatttgaacttcaacctgactcggctatagacttttggcttagcattctgtacgtcagtagacacggctggcttctccggctcaggaggtgccggttcaggcactggtggcggagcaataacaggcgcattatctgcctgatgatgcgctgggctggtgccgttctcctctgtgcttgggctggagggggactttgaggaagcatccacggtgctcgggctggacggggacattggagaagcatccgctgtgatggaagctttcaacttgcccttcttgcccatcttacgcccacgcttgcgcttcatcttcctattagtttagctatcacctcaccacacaggccagcagagaagtacacacttctccttcctctcctggtgccctcatgctgggaggtgaaggaccacgcaggccccacctccaatccaatcggatgaagatcaagacgacgttgttgctgatggcggagggcggagtcttctccctggcgggggtggcggagaaagcggagaagagcggcgtggaatcgacggtcggtggtcttgcggcaaggcgttcctccttcttttcctcccgcggcgcggcgcggcgctgcgctgcgctgatcgggggcggcgagggaggagattagggttagggttaggggaggctgcggcgtcggcgtgacgagggagaccgcggcccgaattcctgcagcccgg

SEQ ID NO: 21097 - DNA, 1513 bp, Oryza sativa
  Clone ID: TF_OsC48985_1
cgcctttttcgctcgcagacggccgccggcgacgcgcgtggcggcgagccctagatatggtgccgggaggtggagtcccacagggggcggagggagggagggctatggcggcggcggagacggccgccactgccgccgccgccggggagagggccccggggacggaggtggacgcgttccggcgccaggtcgaggacctcgtctccaagaccgaccagctggagaggagggtgaatgaagtggtgggattctacgacgggaagaaacatggcagtggtggccggaaggctggtcgcaaggatagcagcctttccaaagggatgcctgatcttatgcgccagtttggcacgattgtgcgccagatcacatctcatgaatgggccgagccatttctcaagccggttgatgtggtaggccttcagcttgatgactattacaagattatcaccaaacctatggatttttcgaccatacaaaagaaaatggaagggaaagatgacaacaagtataacaatgtccgagaaatatattcggatgttagattaatttttgccaatgcaatgaagtacaatgatgaacgacatgatgttcatataatggcgaaatcattgcttgagaaatttgaagagaaatggctccagcttcttcctaaagttgaaaatgaggaaaggaaacaaaaggatgaggaatccaacggtgttccaaaagtgaacatttctccagaagaagctattgcaaaactagcaaaagatactgacaatgagctgattgaaatcaacaagcagttggaggagcttcggcaaatggtggtccagaaatgccggaaaatgactacatatgagaaaagaaaactgggtgcaggtctctgccacctgtctccagaagagcttactaaggcattggagatggttgcacaagacaaccctagcttcgaagctaaaggagacgaactggaacttgatatggatgctcagagtgagacaaccctctggaggttgaaattctttgtgagggaagcattggaacgacaggccaacgtcgcttctggcaggactgatgaaaatgcgaaaagaaagagggagatatgcaatgctctggccagaactgcttcaaaaagagtcaagcagcaacctaattagtggcctctgaccattgtgcatttgtgtcttcacttgttgtttagaatgtttctgagaaatagccttgcaaaataatctcttccttctatggagcatgtaaataactagtctctgcttagctgtgtgaggttgcaacaatagcgaaatgtttcccaaaaaaagggtcttatgttccacctgtagattgtgtgttccatgcaattgtaccatcaagaaaaatctagtatagcgttgctggcgccatttaaaaaaaaacaaaaacccataaaaaaaaaagaagagcaaactgtgaaaaaaaatccataagaacaaaatgtgatttttgttttcaaaagaatgaacaattcttagcattccaaaaaaaaaaaaaaaaa

SEQ ID NO: 21098 - DNA, 2171 bp, Oryza sativa
  Clone ID: TF_OsC166303_1
gcacaaaaatggatttatttgaataaccaccagcaatattggaaaaacagactgccatcaataggatcattgaaacataaattaaaagtaggaactcaataataacagaaaaaccttaaattaactcactaggttagattatagggaaacaaatacagcaataaaaacacaaaaactacttaataaaacctacctacatttcaagatgaattggcggcatctgatccatctgaagaggagctatcactgtctgagtcactagaagaggatcctgtatcactgctggagctgctagagctgctcgatctacttgcattttgtccattattatcagcttgttctggcacagaagtagctaatttctcatccacaatcaaattttgctttggagattttacaccaatattaggctcttgacttggttgttgtggggcaacatgttgtgcatgcaactctgcatcctgccttgcaagcatggctcgctcagccttcctcttttgcttgctcaggttcttcttgtagttggccacaaatctatcaagttcccaaagtgtctcagtatccatgctatctatttcaacctcaatctcatcatcatgctgtctaacagacagattcttgttcttaatgatctgcacaacaacatcaagcttctccggtggcaaattctgaaggttgttactaagcttccgcttctcatctattgtcatatctctcttatccggatccttggcctttggtttcttcatcgatggagtcctggcactataagtgggagtatgacttaatggccttgacttggagtccaacaccatatggtgttttacagaatctgaccgatcaaggaagcgcacgtcaattggtggaggtggaaacttatttggcaatggcggacatgaggcaaggtactgaacctcagcctcaatttcgggccactgcgcctcaaagattcccaacaactgctcagccatgaaatgcacatcctgccccttgggattataggtcatggcattatggaacgtcagccgtacatcatcagcaaactccctcgggttcctgtactggccatgcgtgagtcgggtctttatcgtgccaagatccattgggtgcttgataatagcaaaataatcatgcaaaccaagcgcaacagcatctacaggcttgttaaacacccaaccaaatttgtgcttcattagcctagaaagcagcgacatagatttcttaaaagcatgagagtatagcctctgctcagcatcataaccagcaccatgagatgctaaggaacgatgcttcttcttgtggtgcttgggtttcttacgaccatgtgaatctgaaggcggaaacttatccttggcaagcaagaactctgaattttgatacaactgattcgcctttggtgtccgcttctccttctcgaaggactctgtgtgagtcactgacacggttagtggcccgcgctgcatcactgagcggaccggaacaatagcaccagcaacttgaccaggtatgggcgtcacaggatcagcgagtgcgaactgcgagtgcgcatacccaacaggaagctgaggcggcggcaccaccacaggcaaagcaagggccgctgcagactcagccgcgatggcctcagcggccgccttcagccgcttggaaagcccacgcacctggtcgagctccgacgcaagctgccgccgcagctcgctccgcgccctccgcttccgcgccttctcctcggcggccgcccggacgtctccatggccgttgggaacggccccgccgtcccgattaggccccgcggagacgtcgtcggaagcgggcgcggcgggctccccctgctgcgcgggggcaaccggggcgctcggcggagggggatggggggaggaagcgggcgcggcgggcggatcaggccgaggcgccgcaggcccatcctcggggcggcgaatcgacctccgaatcgaggctagggtttgcgcgagggggctggagctagggctagggttcggagggggtttagggtttttgcgtgggtacttgcgccggtacaccctgatctccggcgcccaccgcgacgtcaccggcccctcctccaccgcctccgccacggccggggccgcggggctcgccgcgggccgctcctccccgccggcgccggcgccaggaggggacgaggccat

SEQ ID NO: 21099 - DNA, 1334 bp, Oryza sativa
  Clone ID: TF_OsC59345_1
cgccgtcgcttcggccaccggcggcgactgtggccccgtccgtgccggatccctccccgtcgggccacgtgacgatccgcccctccgagctgtcccgcagggaggcccaggtgctccgcgcgcggctcaccggcgagctcagccgggtccgcgccctcctctccgacatcgacgggtgggaggcgcggcggcggcggccggcggagcctccgcggcagcgggggcacgtgtcgccgcccccggccctccaggcggcgatgcggaagcggtgcacgcagatcctgacgcggctgcggaagcagaagatcagcgtgtggttcaactcgccggtggacgtcgagcggctgaagctgcacgactaccacgccatcatcaggaaccccatggatctcggcaccgtcaaggagaacctcgccttcgggaggtacccctcgcatgaggcattcgccaccgatgtccgcctcaccttcagcaacgcgctgcggtacaatccggccgaccaccatgtccaccgattcacacggggatgatgcccaagtctcccgattaggtggtgcttctccctctaacaattaggattttagtggttttattaggtgactgaggtccattttggcaacgtatttttagtagcgtggtataggaaattggatgggttctctgttcaagttgttgtgagctatgttcgtgtgtccgcctgcattcaccttaggttgttggtagtaatggatagctagtttatgtgggtagtttggcaaacgaagaccattgtaaagaagggaatataatcgaaggaaaagagaaaggtagcaatgtgttagcatttaaaaaaaacgctaatgggagaggtcgttgagcttgatttcgacgaaatggatgtcgagacgctgtgggagctcgatcgatttgtggtcaattgcaagaaggcgctcagcaagagccggaggactgtcgcgatgaacggtgatgctgttgatgcgactgctattgttccaactgaggacgataccgtgcaggagaatgacacgccggagaagagggtttcagaggttgatatggttgatgagtatgttgatattggcgatgagatgccgacggcaaattaccagtcggtggagattgagagggatgcccaggtgactgaggtccattttggcaacgtatttttagtagcgtggtataggaaattggatgggttcttgttcaagttgttggtaatccattcaaattgctatgggacatacaccttttgggttgaaggtgttttcccctatgctgactccattgtcattgcaaccaaaccaaacatccttatattctgtcttgactcttga

SEQ ID NO: 21100 - DNA, 1904 bp, Oryza sativa
  Clone ID: TF_OsC82910_1
gcgcgcgcccactctcgccagcgcagcagcagcagcacgcgaaaccctcgccggcgacggcgacggtgatggcctccgccctgctcgccggccggggcggggttaaccaccaccaccaccaccaccagtggggggagacccgtgccccgctcgcgcccgtggcccccaattccgatcccaaccaccctctccagcagcgcgccaacggctcggccacgaggccgccgccgtcaagctacgtggcgctgcggccgggggcaatggctcaccgcgaggcccgcgcgctgcgggaccgcctcgccggcgagcttggccaggtccgcgccctcatcgcccggatcgacacgtggcagcagggtcaggtgaagcgccatggctcgcctcgccgggacctccccacgccgccggcgaagctcagggcggcgatgcggaagcgttgcgagcagatcctggcgaagctgcggaaggacaagcggagcatctggttcaacgcccccgtcgaggtcgaccgcctcgggctccacgactaccacgcagtcatcaagtgccccatggatctcggcacggtgagggcgaacctcgccgccggaaggtacccctcacacgacgacttcgccgccgacgtccggctcacgttcagcaacgcgctgagatacaaccctgcggggcacgaggtccacaccttcgccggcgacctcctggcgtcctttgagaagatgtacaaggcatctatgtcttggttcgagcaggaactcaagctccttgagccgccgatgccagtgccgccaccggaattgccaccggcgacagctccggtgcaggtgaaaccaagggcagcgaatgtgaaaatgcggaagccgaaggcaagggagccgaacaagagggatatgacgctggaggagaagaacttgttgagggttgggttggagagcttgccagaggagaagatgcataatgtgctgcagattgtgcggaagaggaatggcaatcctgagctggttgggggtgagatcgagctggatattgatgagatggatgtcgagacacagtgggagcttgatcgattcgtcaacaacttcaagaaggcgctcaacaagagtcgacgggctgccattgttaatggtgaaaatgccgatgtcattgatgcttccgtggctaatgatagtgatatgctggtgaatggcagtaccgctacgatggtggacaacggtgatgtgacaatggcaatagagagcaaggatcctgacaagatcactacacaggccgagcagttggatgagtatgtagatatcggggatgaaatgccaacagcaacttaccaatcagtggagattgagaaggatactgaggccgcgagcagtgggtcctcatcatccagtgattcagggagctcaaaggacagtgtctcagaatctggcaatgcccattctctggtgtaaggcctccattctaacagtaggatacgagtaggtggatgattaatttccttttgtgtgattggtggtgtagagacaccaaaagtgtaggtgttttgtaagttgattaagaggagttggtatctgtttggatttagtcaagattaatttgtagcgagtgaactggctttgtggctattctgatagcgcaggtgtcctatgtacatataagtgaaaaatggagactacggtagcaattggtagactggtagttcaccaggctttctgatctgaagaagtgaatatggttcatgtggctgtctgttcttctagttctcaatgcagttgttttgttacaactgtcatatactcttaatactcttacgtaatttgatgtgtcattatgggtgattgtaactgtggcaattgaagtagcaacatataatcttttctgggagcaagacatctcccagaaaagattcctcgtgc

SEQ ID NO: 21101 - DNA, 4507 bp, Oryza sativa
  unsure (1)..(4507): unsure at all n locations
  Clone ID: TF_OsC13486_1
nnnannnnngnaattgtaatacgactcactatagggcgaattgggtaccgggccccccctcgagttttttttttttttttttttgtgaaatggcacataaactcactctgatagcataaaagtacactgaatctttgccaagagagggttattaacagttcgcattcagcatgtcatttgaactgaatggatcaagtaacacagttcctggcacagaatatgaaagtgggaagcaatttcattcagaaaagaagatctagtctaacaatctattcaatgctgaaccatttacaacaaacatacaatgtgacaaggggcattacataggggcgaccacgtagtcttctagtctaccgaaagaacgatatatcctaagttctggtgcaaaaatttccaccgtggaaagctatagtgtggtcaggcgggtgcgctaagtattttggatcatgagaatgctctaccaagaagcatgccaccacagcatttactcaaaatgctggattctgaactccggtaatgaacaaaatgcccaagcatatataatgatgtcatcctaagcaggtgttcatccatccattttctcatatctttgcacatggaggatgagtcacaaacaatgtacgatggtctaccatgaatcgtcatcgctccattgctgtcgatccatctaatggatgtcccaatctgctgtttgcgctttgcgcctaacttccatttgtctttaattgttcaagttcaagtctgccattcaatctgtggtcacatccgttcattatccgttccaagcttacaactgcaaagcaaggtctggctgttgtgcttccaaattgatgcccgaagactgtcgagctggtggtgaaccaggagaagggaacccgatgttcaagtctgggcgaagcatatccttgtttggtttctgttgcatcgggggaaccaggccttgccattgtggttggccctgtgatcttgagaagtctgtctggaccaactgggggaatattaccaaacccttgttttgccctggactttctctaaccatctgaacgggttgcctaaagaactgtggaacagcagtcatctttgcttcatcaggacgggcatttgcaaatggcatcttccagccagaattactatcatggaaagttggactgacaatggttggtttgctctctgacgaagcaccaaatgagatccaagattgagccactggagcagatggaatgctctgattctccctgacagctggtggaaatgctgagaaaatattccgggaagaatcaggccctctgtttgttgtatttacctgcacaggcattacagttgatcccactgattttacattgtcattgacattcttttgcccgttcaaattcattgcaaagctggccgcatttacttgttgatttttagtgataaaacccatgctgctcattggtctgcttttgtcggttgtcccatacttcccatcaccaggtcgtccatggtatacccatgtattttcatttctgggttgtggaacagctgcttcttgcgactggaagaagggtttaggctgcccacttgtattgtttaaggaaggcatatcatgaacaccagaagcaccttttgcacactcaagcctctggtgtgccatttcaagtggatgagaacttttaggtgtctcgctttttctcatttgctgagttatagctgcttctgctggttggaagaagggtctgggctggccagtcattttgttcaaagaaggcatatcaagcacattggaagctccttttgaaatttcaggcctctgtggttgcttttgaagagggcgagaactggaggacgagctccctttccttgtttgttcactgggtgcccttttggtctttgcaacacttccaggcgcccgatgattttcatgcagagatggtgcttcagtgctcctctgctggggctcagctgtaacaccgaataatcttggcttaatttctggactttcaagagggccaggaactccaaccacattattaccagtggttattcgattaagtagactcaaactcatatcctttggattgacactttctgttggtctgatcctttcattattcctagtcattgaagcactcctttgtacattagcctctgagctaaccagacttctcggttggttttgcacaaacagaataggtggtaatggtggctcgtattctccaacccaaccacgtccaaactttacatcagtgggtaatacccgttgaatgcgttcagaagcaagtctccagccttgagtaccaagtgagccagcaaaacgagcaagacttcttgcatatgagtgctcagaatgaggtccaacattaacaagctcttttggctcctcacagaatacgtcgaaaattgtgtcagattccgatgaaggctgttcttcatatgtatcatatgttttgcgtcgtgtctcatctactacaattgacttgtagcttggcttcactgaactttccctagctgaaatatcatctggcttctcagatcttatttcatcaagtggggaactgatatctttgtccataaacccgttggctgcaatacaatcttggggctcaacagcatttgcctgcgacatgcttaaaccattagaatcatctcctgcagaagcaatggttgcagcagaaacatctgaacccaaagcatcttggctattcatacgcactggcttcttaacagtctctccattgcaggagtaacccatatcatcctgtccatctccacaaatagacttattattcaacccttttttgtgggagtgacctaggtcatctctatttcggcaaatgggcttctcaactagccttttcggggacaagacgcctacatgttctccatttgtgcaaactggattctctactgaatctcggtgtgatgagaaatctggttcttcaccattcgtgcaaacaggctttcttatgtgttttttctgcgatggcaattcatcttttgaactccgggaagtgggtctcttgtcatgctgtttgtggaaagatgcaactctatcattttctgaatttctggagatgactttccttccttgctccttgtggaatgaagagcttatatcatcccctgagtttctggaaatgggcctcttaacttgttctttttggaaggaggaacttaaatcatcgtctgaattcctgacactggatttcttaactcgttctttctggaaagaggaacttaagacatcctcagaattccttgaaattgtcttcttaacttgatctttgaactttcgatcatcctctaagtctttggaatttggtctactaacttgctctttgtgggacatgaagcctagatcatcatctgaatacctcaaaacaggcttcttaattggttctctattgctagggtgtggtctaattttctgttcactctttattaggttttcagtgggaatgccttcatctctcagttcctgaaacttttttcttgccaattcatgtatggaatgggcctgtctgaagtagattgtatcaggtgcattgtactgcatcgcattactgcaaattaagaatacatcatccagtagaaagacgaaatctacagatgtaattgtaaacctgtgattaatttgatataatgctatgccattgcatctgttgggctgtaactcaaattgctcgaacgagcgatatgcattcctggcaagcttcctcctgacggtgccaaagtccattgggtgctcaatcacatcatggtagtcaggcaactcctccggatcgacgggctccgcgaacactccgtaagtatccttcttctgcagcttgtcgagaatcatgtccagcgccttccggtcaggcagcggcgtcgtcctcgccatccctggcaccgggaggcgcttcgtcctcggcgcgctggcggcgtcgctcctcccaccaaccagcttggggttggcggtctctccccgcacctcccgatggcgagatctgtcgccgcgcggctcgatccggcgcttcttgggcggcttgacccgctcctcgccgccgctgacgtcgtcgccgccgttgccgccggcctcctcctcctcctcctgctcctgctcgccgccggaggagtccgagtacgaggggggaggcgggccccgccggtggtggttctggtcgggggcgagctgtgagagcttcacgacgagcttgagcttccgccgccgtcggtcagaggccgaggagcccccacccccacccccgccgccgccgccatggccgtccgagtcggagctcgacggctccggcgacggcctccgctgctgctgctgctgcggcggcggcggcctcgacggcgacgacgacggcgaggaagggaacgggaagaagtcgtccaccagcggcctcgacgacggcgccgccgccctcctcggccgcagcgaccgcggcggcggcgccgccgccccggcgggccccctccggcgcgccgggtggtggtggtggtggtgcctgtcaggcggcggcgacggcgaccgcggcat

SEQ ID NO: 21102 - DNA, 1849 bp, Oryza sativa
  Clone ID: TF_OsC187148_1
atgggtgccgcgagcgagcgaaagtgcacggcgtgcggcggcaccggtggcgacgaagtgcagatcgacatcgatcggcgaagaacgtctcactggtgctcctcctggagtacatcatccgcccgcccgccccgaccccgttcctcgtcctcgcccgcgccgacgggctcgacgacaccaccggcgcccccggcgttccgcctcgagatgggcgtggtcggcctcgccgagaactaccacgcgtgcgtcggagggggcggctccgtgcttgaggtgtcgtaccacggcatggccgtcgccatgggccgcgtgccgcggttctgcgtccacgggaagcgggcgggcggcgagcgggccgacggcgtggccagcgcggaggcgacgtcggtgcgcgaggagctgcgcggcctgatccggagcgagcggcagatcgtgggggcggccgagttcagcgtggaaggggagatcaagggcttcggctatctccgctgcaaggcgctctgtgttgttggtcgccgtggcctcggccggcgcgagcggcaagtcggcgcggttcgagctgctccggccgacctgacgcgcatgcaccgggagcggatggcattcatctcgtcgcgcgggaggcgccgcgtggcggagaccgcgtccgccttcgtgatgctgctctcctccggcgtgtacaccgggacgggccagtcgcatcccgccacctccagccctactatgcctcgcccaaagcgccgccggtcgcccttgccgccgccggcgccgcctggcttccccacggagcggaaacaccatctgccggagctgcagcctccagcggtggccgcggcgtctcctggcgtcgctggagttcccgccgatcttggcgacgcgctcctgcgctgcggcaagctcctggacaagctcctggagcacgaggacgggtgggtcttcgccgagccggtggacgcgcgcgccctccgcctcgtcgactactacctgcgcatctccgaccccatggacctcggcaccgtccgccgccgcctcgagcgccgccgctacgcggacccgtgggcgttcgccgccgacgtccggctcaccttcaacaacgccatgtcctacaacagcgcgggcgaccccgtgtacgagagcgccgccgagctctccgaaatcttcgaggccgggtggccctccgttctcgcggcgccaccgcgcccgcccgacgccgagcgcaagcggaggctcagtggtttgctcccgcggctgccggtgggtgcacaggtgacggtggccgagatcatgaagaagcgggacgggtgcctgcgggaggtgaacgggatgatggaggtggacctggacagggcggactccgcgacgctggacgagctcgaccggatggtcgcggagcacggggccgccctcgccggcgtggttaaggtgaagcagggtgcgttggtgatcactgatcaggagcacaatgcaaatttcagtggatggactatcagtctattcacagttgggctcctaggatgagaactgctgatatatctttgtttcagaatgctgttggcttcaacaggacttcgtgagaccactgagtccataacaccgtagttatcatatcctagatatgtcaactttgcattttgtcagatgtcataccgttgtgtttgtaagttggaaccagcgggggttgtatgttgggatcacgggttttctgatactgaaacgtttggtgaactagaaggggaaatatgcaaaatatgcgtgcaactcttatgtagtgtaaaactgaaaactattatatgatacataatatatgtctgaaatgtctatgttattatgaaaaaaaaaaaaaaaaaaa

SEQ ID NO: 21103 - DNA, 729 bp, Oryza sativa
  Clone ID: TF_OsC346887_1
atggatggaacggacgtgacattcgacattggtcaggacatattctcagcgcacaagtgcatactcgctgctcgttcatctgtcttcaaggctgagttctttggcgccatgagtgccaaagcccataggaccatcaaaattgaagatatggaagctggtgtgtttagatcactactgcatttcatctacactgacgctctgcctgagacggctttagatgttgtgatggccatgaaggcaaacttcagctcttgcgtggcgcggcaagaatgatcggtacaatgtagagaggctgaagctgatttgcgaggagaagctgtcaaagcacattgactccaacatggtggctaccactttggctctagctgagcagcatagctgccacggattgaaggaagcatgcttcaagttccttagttctgatgccaatcttgagaggatgaaggccagtgaaggttatgagcatttgaaggttagttgcccatttgttctcaaggaacttattgcgagattcatctctccggaaatggaagctgcaagggaaataaccatggatcttcagtaaacttgaagatttgggttgaaacttttgatagtttgtgttataattttgagaattataagaagttctggagatccaataaagataccagaaaaggaaaggaaatggtgttctgcacccatggacggatctacagtagaaaggccggtgtcaggcgacaccgataa

SEQ ID NO: 21104 - DNA, 1482 bp, Oryza sativa
  Clone ID: TF_OsC60230_1
tgtactcgcacgccgcgacgcctctgctgaacatttcgctctcttccaagatattttttcctcccacgattccttcctcccatccctgtggggattcatcggctcatccgtactagcacaagatgtgcgagggtgtgcgggccgccggcgacgccgccgccgccgccgacgtcgacgtcatcacctcctccggccgccggaggatccccgcgcattccactgttcttgcgtcggcgtcgccggtgctggagagcatcctgcagcgccgcctgaagaaggagagggacgccgccgccggcggcggcaaggtccgcagggccgtcgtcctgatccgcggcgtcaccgacgacgccgcggccgccttcgtccgcctcctctacgccggcagcagtggtgatgaggaggagattgacgagaagagcgcggcgcagatgctggtgctggcgcacgcgtaccgggtgccgtggctgaagcggcggtgcgagggggcgatcgggtcgcggctcacggcggagtcggtggtggacacgatgcagctggcggcgctgtgcgacgcgccgcagctgcacctgcgctgcaccaggctgctcgccaaggagttcaaggccgtggagaagaccgaggcgtggcgattcctccaggagaacgacccctggctcgagctcgacatcctccagcgcctccacgacgccgacctgcggcggaggaagtggaggaggaagagggcggagcaaggggtctacgtggagctgagcgaggcgatggactgcctgagccacatctgcacggaggggtgcacggaggtcgggccggtggggcgtgcgccggcggcggcgccgtgcccggcgtacgcgacggcgtgccggggactgcagctgctgatccgccacttctcccggtgccaccgcaccagctgcccgcgctgccagcgcatgtggcagctgctccgcctccacgccgccctctgcgacctccccgacggccactgcaacacccctctctgcatgcagttcaggagaaaggaggaggagaaggcggcagcgaaggcgaaggcaaaggccggcgatgatgacgataagtgggggcttctggtgaagaaggtgagggttgccagggccatgtcttctctgggcaagaggaggcagatgagttgctcccagtgctgagcaagtgcaatcacagcatcagcctgagacagtcaagagaagagtattgtagtatagaagggtactactatgtagttaggcatagtgcatgagtgtattgaagtgagctattttttggtttgttcaagatggtttggtctctcaagtttgagttgctttactgtcttcaatttgtagagttcttttgtgaggtgagagaaatgggctgaaatctgttgtaaaattgcctatatcgtaaataaacttttaatagtgaggtatatgatcattacagtttcatacctggatgattacattgataaaaaaaaaaaaaaaa

SEQ ID NO: 21105 - DNA, 2157 bp, Oryza sativa
  Clone ID: TF_OsC6748_1
acgcgatcgcgcctgtcaaggcgacgggcgtgcgccatgaaggcgcagaggacgagcggcgcgcaggggcttaaggcagcctactacagctgccgagggaggtctacgccgtcgtacctggcaaggagagactcgttattcgccacgtggaagaagagcttcgggcacaaggcgacatgccccagcgtgaagaggtccgggtccatgtaagtgatcttgtgccgggcctgttctagtccgtcgccaccgcgacgtccggtttagtcggctatcatggtcgaggcgtcgaagcaaaagtatcttcgaatcgccctcttgatcggcattgcaccgttagcttgttgggtagaacacaatttagtgttgagagatgatcttgcgatgtcgaagcggatcagagccgacgggttcttcacgatactgggcaacatgtccctgatatacagctacacggcgtaagaggaccagccggtgttcgtctaaatacaccgtttcgagctgcggcacgacctctttgggctgatcaacaccgaaggcagcggcaacgtcgtatgccacgtctgcggcgaggtcttcaccgcccacaggggcctgctcgcggcgcggtcaccggtactcggagctgcactcaacggcccaaggatgggatctggtggcctttatggcggcgtaactataaagacaaacgccttggatcctctcgtggacaagccactgctcaggtacctcgacaccgactcgctgccgccgcagatgcagcagggcgagctcgaggaggagggacgcgccatggcgcagcatctcctcgccgcagccgatcggtacgggatggaacggctgaggctgctatgcgaagctcagctttgcaagcacatcgaggtggccagcgtggcgagtatcctgatcttggccgaccaacacggatgctccggcttgaagaacgcttgcttcgagttccttaagagccctgggaagtttgcagctgccatggcgacacaagagtacgattacctgaagacgaaccactgtgctctggcggatgaggtcgtcaagggaaaccaggcaaaatggatgctagctactgttgaaactttcatgaggcaccgactgaactctaagagcattttagagactgctacaagagaaattgcgctccacgcctccacatcaaatgagacaccccctgtgtttctcgacctggaggaatcccttcgggccaagggcgatatgacgctgcgcgaggaggccacattgaaggtcttgaaggtggtcgcgaccctgggcaaggccatctccaccggggcgatcgccgccgtggggtattatgttcccggcattgttggagctaaatttggtgaaccatctcttcctcggctaccaagattcgccatggctgctgtcacttcatggtttgctggaaaggtgatgtattatgcaatcttgcaaggaagtactgaattcattttgaaacatggagaagaacgcatgaagatggagctatctaacataatactcaataagcacagtgatgataaaacactggttgaagctgtaaaaacgcagttctttgctgagcatctgtttagtgatcagtatcaagataggacacttttcaggtggcatctacgccgtacttatgttgacagcgcctttatggaaagggtgaaggagatcgaagtgaagagctcaaatgatgggcctggattaatttctggacagagaattataagcactagaccatttggagacctcatggaggacccactggcgtgtatacttggttctccagacagcaacatggaaagcaacaagtctgctgagcacacgggtactatcgtgaagagaagggagattgcttgcccacctgcagttctggttgaaccaatcaggttgcaacctaatgtgcccatctgcagtttgttagcacgatcgcgaacagggtcaaatttggaggtgaacccggtgattcttgacctggaggaatctctactggccaaggggaacatgacgcttgaggaggaggtcacaatccgggtcagcaagatgaccgcgagcgtgttcaaggtcttcgccaccgcggcgtttggtgcgtcgagttattatgccctcggcctcggtgagctttctctgcatgcgcgcgcccgtctcgatctgtga

SEQ ID NO: 21106 - DNA, 1616 bp, Oryza sativa
  Clone ID: TF_OsC2144_1
ggtccaaacatcactatgtatagatcgcctttatatatacgtacatgtcctttgcatctttgaacagacaaaaaaaagtattttctttgatggaacacaaatacagtacttaatacacgagttccgcttgagttcattccagctacaacaagcttgaaacaccgacactacactgtctaatcgaatcgtgcaccaccttcaattcccctcctgacatcacaggcttatgtcacactcctacgagagcccaccaaccccacccatggcagcagcaggggcatatggcacgccattttccgcggtgttccctcccacgacgaaaaattgcacgcgaggaacacgcacgaaaaggtcccgcacgccatccacatggccctgtgtacgtaacacagttctcacggtcatctcaacctggcggcccctccgctgctgctgtacctcgcccacgacgcggccaccacctccggcaccacctcgcgctcgcgccccgccgccagccgcgacatcgccctcgccctcgtcaccttcttcaccagcagccgccacgtcttgtccgccttctccgcccgcatcttgcccttgaaatgactgcacagcggcacgcggcatgggcggtcgccgtcgtcgtgcggcgccgcccggtcgcagacggaggcgtggaggcggaacagctgcaccatgcgcttgcagcgcgtgcacccgccgcccggcgcggccttgcgggcgccgcacgtcgcgtagtgccgcatcagcaggcgcaggccgcggcacggcggcgcgtcggtgtcggcgtcggcgtcggcgtcggcgcaggagcagccgtcgtcggagaagatgtgctcgagggagtccatggcctcgccgagctggcggtacgcctcccgggacgccctctcccgcgcccaccgctccctccgctggtcggcgtcctcgaggagctggaggatctcgagctccagcgcggcgtcgtggcggcgcgcgaagcgccagccctcggaccgctcgacggcggcgaagtccttggccgcgaggcgcgcgcaccgcaggtacagccgcggcgcgtcgcagagcctggcgagcttcagcatgtccaccgcgtgctccggcgtgagccgcgccgtcacggacgcctccgccgcgcgcttcagccacccgatcctgtacgcgtgcgacagcgccagcagctgcggcccgtgcgcggtcaccacctcctcgtcctccggcgtcaccctggaagcgtagagcaactggaggaaggcgaagacggcgtcggaggagacgccgaggacgcggatggtgcactcggcgttccacccccgccgtgcccgctcgatcatccgctccagcaccggcgacgccgtgccaagaacgaacgaatgggcggcgatgctcttcccgtccgacgtgacgacctgcacgtcggcggccaccgccggccggagcgcgtccagatccgcccactgcgtcatcgatcagaaaatacccaaattctcgtgattaacaattcaacaggccggctaaccaagaaacgatctactacggaaaccaaacagagcaacgcaacaacaagatggatcgatcgatcggtctcgcaacgatgatctgagctgagaaaa

SEQ ID NO: 21107 - DNA, 2563 bp, Oryza sativa
  Clone ID: TF_OsC3651_1
aaaatggcacaggtgttggatgtagggctcttaaagacaaacgatttggttatcacaaagagtatattaactttgtttctttacagtaacccgcctcacaccagtattagacttcatgccaagcttcagcatggctttcttgctttttttctcactacgactctgcttagatcttccacttgcatcacctccgtcagcatcatcgtcatctttgtcatcaagaaatggagtgcctccgatccttgggcggcttcgtccgcaccctgccgccgccgagcacgtccgatcgcaagaacgggttgagcgccccgacctttttgtttttttttttggcgtaggaagattataataacaaagcttgttgtgatgatgacagcattttctgaaacagaacacatgcatatgatcactgctgtgaatgaagaaaacaggtaacaactaacaacacagttaaatcctgattatcaacacaagagttttgtcattcttatttctttgttgcaagaaaaataggtttcactgaaaacaagaatcactggaacaaccagagaatttttcttaagcattcactgggcttctgatggtgcgctgttcagtacttaatggtgcttgttctcaaataggccatcgggtccccatgggaactccttgttacggatgtgcagataggggtacgccggcggctcgtcgaagtgggggtggcccttggagaggttgtacgccgccagcagggtgcaggtgacgatcccggcgtaggtgatcttctcccacttggccgtctcatgggcgtcgtcgtgggcggaggaggacatgcggcgcctcgccgcgggggcggcggtcgccttggcgcgcgccgccagcgagcggaggccggatctcgccgccgccgatgccatgggggaaggtgggtggtggcgccgctggttttgggggaaacgggtggagagatcgagattagatgccggccggtgtagtccaggtcgaggtagccggccaggatcctctgcacggcgtcgatgtcgtaggccgttgtggcggcggcggcgtcgggcgaggaggacgggatgaggaggtcgtcgagcacggcctggccgagctgcgccgccattcgcttctcgaggtcgagccggcacgccagcgtcgtgtcgaggtggatcgcggcgcggagcagcatcgacaggaagctcaccgacagagtgttcctctccctcggcagcaggctcacgatcgtctcgagcaccacccgcttctcgtgctcctgcctcgcgcccatcttcttcctgtccctcccgtgcatgtccagccgtcgaagagatttctgggcgtagagcatgatgagtgtccccatggcgatgcccttgaagcccctcgccttcatcgcgatcatgacgcgctggaacgtgtcgatccgcagcgccgtcagctcgtcggcgcaccagtcgtcgacctccctcgacgccgcggcgcccacgccattgtagccgccgccgccgccgccgccgggggtgcccagcgacatgctgaactggccgtcgccgccgcagacgatggacgcgacggcgtcgatgcacctggcgacgagccgcgccttctcctccgacgccgggaggagctcctcggccttgcggagcacggcgaccgcgccctcgaggctcgccagcgccacctcctccaggtaggcctccgtcctgccgaccaggttgcccggcctgcactcctcggtcatctcgaggtgctcgccggcgcaacgcagcatggcgacgttgtccacggtgatctcgaagttgacgccgtagcagaacttgacgacgagctcgaacgacttggagccgccgggcatgccggcgatctccaggtgcgtcgccttgttgccgccgactcctgacacctgcttcttgatgtagccgcacctggatgccaatggaagcttgtgcaggttgaaggcggcatcgtcgactttgatggtaatatcgcttgggagttcttgcgaaagtatcgggtgcagtgagtgacgcaggtgcggcaccctccggattgagccgcggttgccattggacccgcgtggtggctggacgccacacaatggcaattcgtacggcggcttgtggatggaatcggtcccgaatggcttgtgcttgctgctgccccacttgccctttttccgctgttcttttctcaccgccgccaccccgccatgacgagcgcctccgagctcttcaccgcccgccgcgcccgcgccgcccgcctctccgaccccgatccggacccggatccgcctgcggacgcgctccatgacccgcacggcctcgccgatcgccgcggccggcgccggggctgccgcccgcgccgccagctcgacgccgccggggacgtccgccagcacatagacaatagcaacattggggactctgcaactaggaggaaccgactggataggctgatgttcagaacaaatgagcggcttcctggtgttcgggaacagggatgctccatatgaagcaaataggtccagctcatcattggcccatccaagtagcgagtcagatgaagaaaggtcacccat

SEQ ID NO: 21108 - DNA, 1767 bp, Oryza sativa; identical to SEQ ID NO: 11422
  Clone ID: TF_OsC359_6807

SEQ ID NO: 21109 - DNA, 1046 bp, Oryza sativa
  Clone ID: TF_OsC97452_1
gcacgtcgccaccaccgtctccgcttccctttccattcgcgccgccacctcgccgtcgcacccagcggcggcgccgccgtgccggaggagcggcgatgtggtgccagtcgtgcaaggaggagtacgaggaggaggacgccgggacgtgcaaggagtgctacgaggaggcgagcgagacggaggaggagctcaagcgcgagatcgacgacctccgctcccgcctccacttcctccgcctcccttccccttccctcgacgcctcctccctctcccactccgacctcctcctccacgccatccccgccgatgcgcccgcccgccccgacacccccgccgtccccgcccaccgcgtcatcctcgccagcagatctcctgttttcagagctatgcttgagaacgagatggaagagagccggagtggcatcatcaaaatatacgatgtgtcctacgacgtccttcgtgctttcgtccattacatgtacacagcagaagctctccttgacgagcagatggcatctgatctcctggtgttggctgagaagtacgaagtgaagaacctgaaggcctactgtgagaaattcttaacatccaaagtgagcaacgacaatgccatcacgcattatgcgtttgcgcatcgccacagcgcgaagcagctgctcgagacatccctggcagcgatcatggacaacatgtcaacgctggcagatcgggaggaatacaaggagcttgttgagaaggacccaaggcttgttgtggagatatatgaagcctatctgaacagacaagtgaacactgctgctgggaaggagacagattccagtagtaggaaggggtaattcaaaagaaaactgctatcagagatgtaattaatgttctaaccaagcttttgcatgttcatgctaggcaaagactggcacatcaaattgtcatcctgcggtgtaggcgcagaacagctatttctgtatatgcttgaattgatactgtgtgctcgctactgacaaaaaaaaaaaaaaaaaaaaactcgcttcaatataaaaacgaaaaaa

SEQ ID NO: 21110 - DNA, 1503 bp, Oryza sativa
  Clone ID: TF_OsC299619_2
atggccaccgccgcctgcggcgagagcccttcgcggttgggctccgcctccgccatcgtcgccgacacggagaccaggtaccacctcctcaagatcggctgctactcgcgcaccaaggcgacgacccccaccggctccttcctcagttccggccagttcaccgtcggcggccaccgctggcgcatcaattactaccccaatggggaaagcgccgactccgcggattacatatcgctttacctcttgctagacgacaaggccaccaatagcagtgtgaaggtgcaggcacagttcaagttccagattagttccaccgaccaggtgaagaacacaccttcattggcatccacgaatgtaaatacatatggtgaggattctagctggtcttggggtcacagaaagttcatcaaacgggaagatttcgagaagtccaatgatctcagggacgactccttcaccatccggtgcgacgtagcggttatcggagagatccgaactgagaagacgaccgagatcccatcagccacaacattcgtcactgtacccccgtctgacctgaaccagcagctcgtcgacctgctggagaccgagaagggcgccgacgtggtgtttgaggtcagcggtgagacgttcgcggcgcacagatgcttgctagcagcccggtcgccggtattcagcgcggagctctacggcttgatgaaggagggcgacaccgccggagtcgtgcgtatcgaagacatggaggcgcaggtgttcaagctgttgctccgcttcatgtacaccgactcgttaccaaagatggaggaggaagacgtcatgtggcaacatctgcttgtcgcggcagatcggcatgatctacagaggctcaagctgatctgcgaggacaggttgtgcaactacattggcgtcagcacggtgttgaacatcctggtgcttgctgatcagcatcactgcgacgggctgaagaaggcgtgttttagttttcttggctcactggagaacctgagtgctgttgtcaccggcgatggcttggagcatctgagcaggagctacccctctcttatgaaagaactatttgttgtgatggcacttccaccgaatcatgcttagaacctttctcatcaggtatactatgaaaaccaaaacttcaatgttttactgcttttgatcaagaatagtgacttgactggagttaatttgaagaaaacaggctggcagggcccgtcacttgtgtctgaatatgatgtatcatattcttcaggggatccaggaaaattgccaccaatcgagcgtgtgactgtggagaatgctcaaggggtggatcactgccccgtttcagcttccggcagagagtggtgctcagcttgtggactggtggctgatggcaaggagcgtaatgcccggatcttcgagcagagatcgcgcacagcaggtcagctatttagtggcatcagagagatcatgatctggaaggaggctggaatttttcggcaatgtgattag

SEQ ID NO: 21111 - DNA, 1566 bp, Oryza sativa
  Clone ID: TF_OsC243412_1
cgatcaaccaaacctgttgcgttgcacgcgatctccaactagaagaacatggcgtccaactctccggcgacctccgacgccgccaccggcgacgtgccggagccgagcaggtcgtccagcgtcgtcaaggcaatgtccgggtaccacgtgctcaagatggaggggtacgccgccggggtcaagggcctcggcgttggcaagttcatcgactccggcagcttcgacgtcggcggccatcgctggtgcataagatactaccccaaacgcagcccggcctcccccggcgacggcgactggatatccatctacctgaacctgtgtagcacggccgccgccatcggcgacgccaatgcaagtttcaccattagtctcctcgaccaggacgacgacgagcatcagccggtggcggcgcacagccggagctgctcctcaacggttaccttctcctccgccgccaccaaggcttggggtttcccccgattcgtggagaggaagacgttggaggagtcgccatacctgagggacgacagcttcgtcctccgctgcgacgtcaccgtcttcaaggagaccatcatcgagccagctgctccgacgccgctcgtcgccgtgcctccgccggacatgcaccggcatctcgggagcctcctctccggcgggcatggggcggacgtcacgctccaggtcggcgacgagacgttcgcggcgcaccggtgcgtgctcgccgcccggtcgccggtgttcatggcggagctcttcggcccgatggcgacgagccgtcacaacgacagggagacgatccgtgtccacgacatggagccgagggtgttcgaggccatgctccacttcatctacaacgactcgttgcccaaggtagacgacgacgaggtggtagccatggcgcagcatctgctcgtcgcggcggacaggtacggcatggagaggctgaagctgatgtgcgaggacacgctgtgcagccacgtcgacgccagcacggcggctacggcgttgacgttggctgagcagcatcactgtgaggggctcaaggatgcttgcttcaaattcatggcggatcctgataatctcaaggtcgtcatggagagtgacggctatctgcatctgacaaggagctgctcttatgttcttaagaagttggctacttgaattgggagctgttaattaatgaggttcagtggcataccttttttataattaataaagttgatcatactttattgtaattacgtcctgattactgtatacattttgtgtacaagcttcattatgatacgagtctccatatatggataatgcatctttgaaaaaagaaaagtcttcagagtccctccgttccatgttataagacgtttggtttataaaaatttacacatatatttctttagataaatagggtcttcctatttcgggggctttagtagggtttactattattcaggggttatgatctgcgcctgctagagatgcttttgtgtgtactatccataccatacatgtaaattttactcatataaagtggattcgaactaaaaaaaaaaaaaaaaaaaaaaa

SEQ ID NO: 21112 - DNA, 1035 bp, Oryza sativa; identical to SEQ ID NO: 11441
  Clone ID: TF_OsC389532_1

SEQ ID NO: 21113 - DNA, 1065 bp, Oryza sativa; identical to SEQ ID NO: 11434
  Clone ID: TF_OsC389533_1

SEQ ID NO: 21114 - DNA, 2582 bp, Oryza sativa
  Clone ID: TF_OsC100212_1
atgagcttgcttgaaaattcagtagattctaacctacaaatccatcgaacgactaataataggaaggcggcgctggcccgcgaggtccgcacgcaggtcgacgccctccaccggtgcttctcctggcgccacgccgaccgcgccgccgccaagcgcgccacccacgtcctcgccgagctcgccaaaaacgaggaggttgtgaacgtgatcgtagagggcggcgccgtgcccgccctggtgtgccacctgaaggagccgcccgcggtggcggtgttgcaggaggagcagcagcctcggccgttcgagcacgaggtcgagaagggggctgccttcgctctcggcctcctagcagtaaagcctgaacatcaacaacttatagttgacgccggtgccttaccactgctggtgaatcttctaaaaaggcacaaaaatgctacaaacttgcgggcagttaacagtgttatcaggagagcagctgatgcaatcaccaatctagctcatgaaaatagcaacatcaaaacttgtgtcagaattgaaggcggaattccacctcttgttgaattgctagaatcacaggatctcaaggtgcagagagcagctgcaggggccttgcggacgctggctttcaaaaacgatgaaaacaaaagtcagattgttgattgcaatgcgttgccaactttgatattaatgcttcgatcagaggatgctgcgattcactacgaagcagttggtgtcattggaaacttggttcattcatccccaaatatcaagaaagaggttctcaatgcaggggccctgcaacctgtaattgggttattaagttcctgttgtacggagagtcaaagagaggctgctttgttgctagggcagtttgcttcggctgattctgattgcaaggtccatattgtgcaaagaggtgcagtccgtccgctgattgaaatgctacagtcagctgatgtccaacttagagaaatgtctgcttttgcccttgggaggcttgcccagagaagttcatttgtttcccaggacacacataaccaagcaggcattgcatataatggtggtttggtgcctctactaaagcttctagactcaaaaaatggatctctgcaacataatgctgcatttgccctttacggagttgctgacaacgaggactatgtgtccgacttcattaaagttggaggtgtacaaaagttgcaagatggagaatttatcgtgcaggccacaaaggattgtgtagctaagacccttaagaggttagaggagaagataaatggacgagtgttaaaacacttgctttatatgatgagagtaggagaaaaatctgtgcagaggcgggttgctctggccctggcacacctctgtgcgcctgaagatcaaagaacaatttttattgataataatggccttgagttgcttcttgatcttctggtttcggtgagcctgaagcatcagctagatggttcagtagcactatacaaattggccaacaaagctgcagcactttctcccatggatgctgcacctccatctccaacaccacaggtttatcttggtgagcaatatgtgaacagttcgacactttcagatgttaccttcttggtggaaggaaagcgcttttatgcacatagaattgcattacttgcttcttcggatgcatttcgtgcaatgtttgatggcggatatagggaaaaggacgcgagagacatagaaattccaaatatcagatggaatgtgtttgaactcatgatgagatttatctatacaggttcagtggaagtaactagcgatatctctcaggatcttcttagagctgctgatcagtatctattagaaggcctcaaacgtctgtgtgaatatacaattgcgcaggatgtgaatgtagacaacgtttctgacatgtatgacctatctgaagcttttcatgcaatgtcactcagacatacatgtgtcctatttatcttggagcagtttgaaaagatttgcgtcaaatctgggtcaagccagctgatccagcgtgtcatcccagagctccgcaacttcttcgctaaggcgctaaggccaagccacaggaatgcgcagccatgagtccgtgccccttccacaatccttgacaccacccacacatctgacagtcgcttcgggagatcttgtacagctaaaagtttctttttctggcgttggacattggcattcgatggcaccaacaacattgtaacatccttttattcgactaaaacagagcccaaatcatggtaagagcatatggcttagccagccatgtctcggaccagcctaggctgggataggtttacttcgtttcgccttggcatagtcaccgagtttagggccactttcccagtccagagctccgtgtatgtccgtctctttgatgatgcagaggataagatcgatctgtgtattagtgctgtagttgcaatcagtttcgtctccttcgtgttgtttaacaatgcagaaatgctaatcagattggcgttttctcccaaaaaaaaaaaaaaaaaaaaaaaaaaaaaaaaaaaaaaaaaaaaaaaaaaaaaaaaaaaaaaaaaaaaaaaaaa

SEQ ID NO: 21115 - DNA, 1036 bp, Oryza sativa
  Clone ID: TF_OsC951_13
tataaatacttgttgtttatgtcatgaatcggataaaactttataattcttcctgcctattatctcccacaaatccaccatgaaagaagggcaagatagcttcatcttctcgtacccttggctttccatgacgccttccatcttcttggaggtggccaagaactcgatgcacgcctccttgagcttctggcaatggtgctgatccgccattgccagcgtcgccgcgacggtgtccacggcgatgctcttgcagagcatgagctcgcagatcagcttcagcctctcgacgtcgtaccggtcggcggcctcgagaaggtgcatgatcatctgcgccttgtcgtcgtcgtcgtcgtcgaggtcgtccatggcggcggtcgtgtcggtgtagatgaagtggaggagagcccggaacaccgccggctcgacgctgtcgatggcgacgcggccggcgttcgcgtccgtggactccttcattggcccgtagagcgccgccttgaacaccggcgaacgcatggcgagcaccgcccggtgcgcggcgaactcctcgccccgcacgacgagcgtcacgtcggcggtgcccttgtcgccgaggagcccggcgaggtggccgaggatgttcgacggcggatggtcgagctccggcgcgtcgccggcggtgacgacggggtccaggacgacgttgacgacgcactcgatggtgaggcggtcgtcgcggacgaaccccatctcctccagctcgcgccgccgcatgaacctcaggtgcccccacgccgggaacgcctgggacgatctagggtttctagggttttgggttgcggcggcggcggcggcgagagggcgagggcgaggtcgagatggcgtcggagagggtgaaggggacggtgaagtggttcgacgccaccaaggggttcggcttcatcacccccgacgacggcggcgaggatctcttcgtccaccaatcctcggcaggcttccctgagcccgcggcagccatggcggtcggccaatgccaatgtgctcgccaccgtctgcgccg

SEQ ID NO: 21116 - DNA, 4194 bp, Oryza sativa
  Clone ID: TF_OsC951_1
ctaaaccttgcgtggagttttgatttcgatgaggccaatccgagaacgaagttcgatgaatctgtcccccccgagtcccttcgtcaggatctccgccaactgcgcgacagtgccgatgaacccggcctccaggctgccctcctcgatgcattcgctgatgtaaaggtatcgtgtgtctgtatgtttgctgcaatcatggaagagagggttcttacggggcatgattgtgaagagtgggtcaaacttttacgtgactgcgtccgcctccacggccccgtgctcagcaaggaggggcgccagccacacgcgttggcaggccaccgttgtcgctgcgatgtactgagcttcgcgtggcgacggggccagagccttctgtttctgcgacagccgcgcgtgctgcaagtgcgggagggaggggcacatggccagggactgctcccaggggaggaggcggcggtggtggctacggtggtggtggcggcggctaccgcggcggtggtggtggcggcggcggcggcgggtgctacaactgcggcgagaccggccacatcgctcgcgagtgccccagcaagacctactaggcgctgctcgcggcgtcagatccagctccctcccatgatgcgttttgctccccctccctcactgaatcaccgagcagcgggtgatcagttctatcttattagtagtcgtagatctcgttaggaaagctatggatctatcggttcgtcgtcgtcgtcgttctatgtaatgggatgggagtcttggagtggtttaatctttttgtttcgttgggtcggtttgagagacaagccatggatttgcactgtctgatctatctatgaatctatctattatgaaccgagaagaaaatattcatcagctcgctcaagaccgacggctaccgcagcctcaacgacggcgacgtcgtcgagttctccgtcggatccggcaacgacggccgcaccaaggccgtggacgtcaccgcgccggggggcggtgcgctcagcggcggatcccgtcccagcggcggcggggaccgcggctacggcgggggcggaggcggcggccgctacggcggtgaccgcggctacggcggcggcggcggcggctacggcgggggcgaccgcggctacggaggcggcggcgggtacggcggcggcggcggaggcagccgcgcgtgctacaagtgcggcgaggagggccacatggccagggactgctcccagggaggaggcggcggcggtggctacggtggtggtggcgccggctaccgcggcggtggcggtcgcggcggcggcggccggcgccacaaccgcggcgagaccggccaccgcgctcgcgagcgccccagcaagacctactaggcgctgctcgcgccggcgcgactccaggtccctctcatggccccttgcgccccccccgtcgttgcactgccatcggccgagctactcgcgaccagtttctatcttctaaggagcgccagatcctcgtcacggaatgtatggagctggcgtgtcgccgtagtacacctaccgacgcaggcgcctgggctcttgcggcgatcaggtcgtcgagcagctcgcgaacggcctggccgggccgcttggggggccgaagcccgtcgtcaatgcgagggtgccgaagtggcgcggcatggtggtccgcgtcgagatcatcctccacgtcaggcggaggagagacgaactccaccggcggctcttcggccagaggcggagttggcggagtcgagcctgatgcaggcgagcgcggcgaggccggagctcccccgtgctccgtgccgatttgcgtcggggccgccgtcgctaggtggtacaccgtggtgtactcgatggtgaagccggagtcgacgttggcggccgcctcgccatcccaattccactgcgcctccttgtcgaacaccacgtctcgggagacgtggacgcgccgcgtcgccgggtcgtagacacggtacgccttggagccaggctcatagccgacgaaaatcatcggccggctgcggtcgtccagcttcttcatgttcggcgccgtgaccttcacatgtgccacacaccggaacgcgcaggtggtgcacggccagtgggactccattccaaagctcgtatggggtcttgccaccaatgctcttggacgagctcctaggagtcctttggccttaagcatgcttcgcgccgtgcccacaacggactggttccggcgttcgacgacgccgttttgttgcggcgagtagggagccgtcagctcgcgttgcaccccgagctccgcacaatactcggtgaagtggccgacggtgaactcgcccccgcgatcggtgcggagtgcccaaagcttgcggccgctcttgcgttcggccgccgcctgaacgcgcttgatggcagccggtgcaccgtctttggtggcgaggagcgtcagccacatgtagcggctgtagtcgtcgacgagcaggaggaagtagcggttgccgctgggtgtcgccggtgtgatcggaccacaaagatcgccatggatcagcgcgagcagctcagtggcgttgtggagtgcctcttgcgcgaagggggcacgccggtgcttgccggcgaggcacgcctcgcatacccgttcgacctgcgacaagacaggcaaaccacgtaccagggactcacggcccatcttgcgcaatgcagcgaagttgatgtggccgaaacgagcatgccaacgccacgcgtcctcccccgcgcgcgccatcaggcagaccggccgtgcaaggttgatgtcgagcaagtaaagccggcccgggctgcgagctatgcaagcgagcagacgacgccgctcatcccacacgcgcatgacgccatcctcgaccaccaccttgaagcccgtctcatccagctgccccacacttatgatgttggcggcgagacgcggaaggtagtatgtgttgtgcagcatgcggtgttcgctgttcttgcaggcaaacagtaccgtcccgcgtcctccgatgcggacgagtaagctgtccccgagccagacattgccagcgacattggtgtcgatgtcagagaacgccgccctcgagccggtcatgtggttcgacgcgccggtgtcgaggatccagcacttgttgtcgtggtcggtggcgtcgtccagcgcggtgaacaccttttgctcaaccagctcgatgacgtctgggcgaggctgcggcgcgagcggcgatggcgtcgcgcactgcgcgcccgtctcctccacctcatcaatgcagctgcctgtcatgagcatgagcgtgggctcatcctcgtcctggaccacgtgggcctgctcctgcttgggcttgctcctgcaatccttggcacagtggccaagtttgccacagttgcggcacttgtcggtcttgcgagctgggccaacgccagtgctgtccgcgttcccgacgccaccgccgccgccgctagtgtgcccttgtccgccgcggcgcttgccacggccgttccctccgccattcctcttcttggcctcctgctgcttcttcttgtgacgttcaagccactcctcctcagtgaggtagagcttggccccggcacctggtgaagacgaggacgacgactggccggagtcctcaaccgccttgaggcgtccagtgacttcctccagcgtcaaagtggagatgtcaagtagggtttcaatggagagaactagctgggagaacctgggacgcgcgacgcagagatatttctcgacgactttgtcatctggctcgggatcccccaatgtggacagctgcgtcacgacggtgttgaggcgcatggcgaaatcctcgaccgactccccgtcgcgaaacgcgagagcctcgtattccgagcgcagcttctgtgcactcgccttgcgaatgcggtcgttgacgacgcgcatggtcttgatgcagtcccacgccgccttcgccgtctccttggtcgccagcgtggagatcatctccgcggggaccacgctgcagatggcatcgagtgtcatccgatcttcatggagctcaacctctcctgggtcgattgctccccacaagcagcgagcttgcaacttgatcttcatcaacagtgaccatacgttgtaattcgtcttcatgagcaccgggttgtttgccggacctcccgcctccttgaccacgcggtgaatcaacagcccgcgatcattcccgccactgcccat

SEQ ID NO: 21117 - DNA, 1325 bp, Oryza sativa
  Clone ID: TF_OsC12993_1
ccacgcgtccggttcgtccgccctccacctccgacgcggcggcggcggcatgaagcggcaccagatggagtcggtgccgaggacggtctcgacggtggtgcccaacacggcggaggccacccacgtgttcgacatcgtggggtacagccagatgaaggggaggggccgcgaggagcacgtcacgtcggggaccttcgtcgtcggcggcctccactgggccatcctcctcttcccggacacccacgtcatcctcctcgacgacgaggaagacaacgtcaccgccttcctcgagctccagagccaggggggaagcaaggtgcgggcgtgctgcgacgtcaggctggtcgaccagaccaccggcctcgcctcctctgctgcgccggcgcagccggatgccaagacattcaaggtgttcaatgccgatgaatccaacagggtcagctgtctcaagatgaagaggaccgaattcgaggcgccgccgtatctcgtcgacgatcggattaccctggagtgtgtggtcactgtcaagaaggagccgagggtgtcgagagctagaccagtcccgaggatcaaggtgccgccgagcaacatgatgcagcaactcggcgatctgctggagtccaaggagggggcagatgtggtgttcgatgtcgcgggggagaccttcccggcgcacaagcttgtgctggcgatgcggtctcctgtcttcaaagcggagctatgcgggccgatgagggagagcgggacagagcctatcagcattgtggatatgcaaccggttgtgttcaaggccctgctccagttcatctatactgattggttgccgtcaattcgtgatcttgagggagacgataacagcgagatgatccggcacttgcttgtcgccgcggacagatatgctgtggacaggctgaagctgttgtgtcaaagcatcctttgcaagaatcttcgtgttggtaacgttgcaactacactggctctggctgatcaacatcattgtggcatgcttaaggatgcttgcattgaatttatgtcatgtccaaacatgttggatgatgtagtggcatcccaagggtttgtggatcttgaaaacacagctccttctctcgtcgcttaggcaaaggaaaaaatgggcaggttcaagaaaatgtcgaggatgacaaagagcaatgcaccggaagatgaacctaacagtaattcgtttagtttataagtaatatggatatctgtctacttttactggatcaggtccttgtggttactttactctctatataaatagaaataacttaaacactggtattgcttgcaaaaaaaaaaaaaaa

SEQ ID NO: 21118 - DNA, 924 bp, Oryza sativa; identical to SEQ ID NO: 11445
  Clone ID: TF_OsC356569_1

SEQ ID NO: 21119 - DNA, 1215 bp, Oryza sativa; identical to SEQ ID NO: 11477
  Clone ID: TF_OsC299619_1

SEQ ID NO: 21120 - DNA, 1188 bp, Oryza sativa
  Clone ID: TF_OsC299619_11
atgggtcaatgcgccatgtctcacacgcgctctaccaccgccggcgccgccggcggtaagccgccgatcgcgccgccgccgacgtcctccgcctccgccattgtcgccgacacggccagcgggtaccacctcttcaagatcaacgactactcgcgtaccagggacatcttccccaccggcagtgccctcaagtcccgcgcgttcaccattggcggccaccaatggcgcatccattactaccccaacggcaacacggaggagtgcggcgagtacatctccctgtttcttcatctcgacgagattgtcaccgacaagaacgtgtacgcgcagcacgggttccgtttattcgacgagtttgccggtgataatgatgacgatgatgaactgcagccttcctccatcgctgacctcgggcaggtcagtacctttggtggcaacaacattgggttgggacgactgaggtttatcaaaagggaagagttggagaaatcgaagtatctgaagaacgactccttcaccgtcagatgcgatgtcgtcgtcaccaagcggatccgctcggaggagacgccattggtggtgaggacctctccaaagccaaaggtggcgaggctcgtcaccgtgccgccgtccgatctgcaccggcatcttcaggacctcctctgcgccgagaagggcgccgacgtggtgttcgaggccggtggcgagacttttaccgctcaccggtgcgtgctcgcggcccggtcaccggtcttcagcgcggagctgtttggatcaatgaaggagagcgacaccacggtggtcatccgcatcgacgacatggaggcacaagtgtttagggccttgctccgcttcgcgtacaccgactcgttgccggagacgaaggaggaggacgagggcgccatgtgccagcacctgctcgtcgcggcggacaggtacgccatggagaggctcaagctggtgtgcgaggagaggctatgcggccgcatcggtgtgggctcggtggcgaccgtcctggcgctggccgagcagcaccattgtgatggcctaaagaaagcatgctttgattttctcagctctcaggagaatctgaaagctgtcacggccggtgagggattggagcatttgagcaggaactgcccttcccttgtgaatgagttgattggcacgctcggcaacttaattcagtga

SEQ ID NO: 21121 - DNA, 1935 bp, Oryza sativa
  Clone ID: TF_OsC5514_1
gcgaggcgcgagcgagcagggcgccgtcgttcgtcatgctgcttccgccgcatcctgatatttatactcattgacgcttgattgcccaagtttggtggtaaacctgaaatctgtttacgatgaaagtggaggagaaaaaaagatctataacagttgcccccttcgagtgtgcttgggatgaggagtttcggttcagggagactggtcgcgggtgcatcacctttgaggcatctgcacacaatgatgttaccctggtgttccgcgaacaacctgggagccagcattatcactacaaaatggataacagtcgtcactacattgtgatcttgggcagccataggaacaaaagattgaaaattgaagtagatggaaagactgttgttgatgttgctggcattggcctatgttgctcctcgtcttttcagagctactggatcagcatctatgatggactgataagcatcgggcaaggaagacatccaaataacaacatcctgttccaatggcttgaccctgatcccaaccgaaatgttcagtatgtgggactatccagctgggacaagcatgttggatacagaaatataagtcttatgccatcagctcctcaaaacagcatcctttggagccaaattgagtgtgcatatgttgagccggatggtgctggagggcatacaagaaaacaagaatcaaaagatggcttagaccaaagggcacttgcaaactttctagagaactgggatttctcagattctatatttgtggttggcagcgaaagaaaggttgtcccagctcacaaagttgtcttgggttcttgtggtgatttcccttttaacctgatgatgagtcgaccagctattgagcttccatctgtctcctacccagttctgcactcccttcttgagtacatctacacaggttctacgcagatttcggaatggcaactggtttcactgctggagttgagttcacaatttaaagttaaaccattggtaatgtattgtgaagaaattattggctgtttgaagatgagtgatgcagtttctgagtctagcaaaaaaatacagttatcaagtggtggttctcaagctcatcaattttattatttccctttcaaagctccattaaatacacagaaaattgaacagttccttgtaaatggtgagcacagtgatgtaaatatctatgtaaatggacatggtcttgttactcatgctcacaaactcatccttagcttgtggagcatgacatttgacaagatgttcacaaatggaatgaaagaaagcagtgcttcaaatgtatttttcgaagatgttcccgtcgaagcattctttctcctcatccaatttatgtacagtggggaacttaaggtggatatcgaggaaatcacaccagtgttggttgagttgctcctattgtcagaccagtttgggatcacggctcttcagtttgaatgctgtaaaagaattatggaattcctctcaaaggattcgtgtcctacaggaagaagctcatccaccagggctaatttctagtttttttatgggataatcggatatggcttctgcaaatttggtgaatttgctagctggttcagtgtagacttacccctgaaagtttcttgcaggacacagtatgttcagttctacgagcagtttcgtcaattccatcttgtaaactgcttgaagaaatgtgcaagaggaattttgcagaacactttgattattgcacaactgcttgcacagactttgtgttgttggatgaggcaacatttaaggatattcttcagcatgggcatatgactgtaacatcagaagagagggttctggatgccatattaacatggtgcatggaggcttgtgactgttttaactggacctctgtgcacgagctcttaagcacttcaagaccagagaaactctttggagggaggctcac

SEQ ID NO: 21122 - DNA, 2319 bp, Oryza sativa
  Clone ID: TF_OsC299619_6
atgggtcagtgcgccatgtctcccgcacgctctggcaccaccgccggcagcggcggcgggccgacgccgtcgtcgtcgtcgtcgcgatccgcctccaccatcgtcgccggcacggccagcgggtaccacctcctcaagatcgacgactactcgcgcacccgggatctcttccccaccagcactgccctcaagtcccgcgctttcaccatcggcggccatcgatggcgcatccaatactaccccaacggcaacacgcccaactgcggcgattacatatccctcttccttcatctcgacgaggaagtaaccagggaagtgtacgcgcagctccagtttcgtctgctcgacgacgagttgggtgacaaattaccgccgccgccgccgccgccgtcgctggatgcgaacaagttcttcagccatgccagttgggggcaaccaaagttcatcaagaaggaggaattggagaaatcgaggcatctcaagggcaattccttcaccgtccggtgcgacgtcgtcgtcatcaccgagttcgtcgcgaaggatatgcccgaggcggcgaccgcgacggcggcgagaagaagaacccctgcgaggggaactggaagcttcgtcagcgtgccgccgtccgatcttcaccggcatctcggtgagctcctcctcggcgagaagggcgccgacgtggtgttcaaggtcggcggcaagaccttcaccgctcaccggtgcgtgctcgcggcccggtcgccggtgttcggcgccgagctgctaggctcaatgaaggagagccgcaggaaggccgtcgtccgcgtcgtcgacatggaggcgcaggtgttcaaggcgctgctccgcttcgcgtacaccgactcgttgccggagatgaaggagaaagacgaaggcgccatgtgccagcacctgctcgtcgcggcggacaggtacgccatggagaggctcaagctggtgtgcgaggagaagctatgcgagcgcatcgatgtgagctcggtggcgaccgtcctggcgctagctgagcagcaccattgtgatggcctgagaaatgcgtgctttgatttccttagctctccagaaaatctgaaagctgccatggccggcgacggcttcgagcatctgagtaggagctgcccttctcttatgacggagttggttgccatgctcgcagcagcagcaacaagcgacgggcctactttgccgccggtgatgagccatggagcattgtctccgacaaccgccgccgccgtgtccgcgtccgccatcgtcgccaatacctccagagggtaccactacctcaagatcgacggctactcgcacaccaaggccacgcccaccggcgaggccctcttctcctgccagttcgccgtcggcggccaccgctggcgcatctgctactaccccaacggcaatgtcctggaggccgcggactacatctccatgttcctcgtgctcgacgagatcgtcgtcaggaacgtcaaggctcagttccagatttgcttcgccggccaggttgagaagcaggcgccgtccttggcatggaagaccgttcgagcgttcaataagcaaacttcttcgtcttcttcctggggttaccccaagttcatcaggagagaagatttggagaaatcggagtatctcagggacgattcgttcaccatccggtgcgacatcatcgtggtcgacaattaccgtgccgaggacgccagcagcggcgctgccggcttcgtctccgtgcccccgtccaacctccatagccacctcggcgacctcctcaagaacgagaagggcaccgacgtagtgttcgaggtcgccggccagaggttcacagcgcaccggtgcgtgctcgcggcacggtcaccggtcttcaacgcggagctctttggcatgatgatggagagcgacaccaccaccaacgatgccatccaaatcggtgacatggcggcgccggtgttcaaggcgttgctccacttcgtgtacaccgactcgttgccggagacgatggaggagagggaggacaccatgtgcgagcatctgctcgtcgcggcggatcggtacaacctggagaggctgaagctgatctgcgaggaaagattgtgcaagtacattggcataggcacggtgatggacatcctcgcgctggctgatcaacaccactgcaaggggctgaagaaggcgtgcttcgattttctcaggtcgccggcgaacctgagtgccgtcaccggcagcgaaagcttcgagcatctgagcaggagcttcccctctcttatgaaggagcttgttgacattctaggaacttcacataattatgcttggtga

SEQ ID NO: 21123 - DNA, 1062 bp, Oryza sativa; identical to SEQ ID NO: 11466
  Clone ID: TF_OsC356517_1

SEQ ID NO: 21124 - DNA, 1387 bp, Oryza sativa
  Clone ID: TF_OsC16921_1
gcatgtggggttacaagcgtttcttcaaacggtctgccttggaaacatcagattatcttaaagatgattgccttttggtgaattgtactgttggtgttgtccaatcacatactgaagggccaaagatatatacaataccagtgccaccatccaatatgtctcagcatattggccagctactgacggatggaaagagaactgatattacatttgaagttgatggagaggtgttccctgctcacaaggttgttcttgcagcccggtcaccagttttcagggcacagcttttcggtccaatgaaggataaaaacatgaagcgtataacgattgaggatatggaggcttcagtttttaaggccttactccattttatgtactgggatgagttgcctgatatcgaagagcttactggcctaaatacaacttgggtatccactttgatggctcagcatttacttgcagctgcggatcgttatgcattggagagactaaagttgctctgtgagctcaagctttgtgaagatgttgcaataaacacagttgcaaacactttggcactggctgaacagcaccactgttatcagctaaaaactgtttgcctgagatttgtggctttgcctgagaatttaaaagctgtcatgcaaaccgatgggtttgattatttgcagcaaagctgcccatccttgctgaccgagcttctggagtatgtggccaaggtaggggagcattcggtgagcccctgcttgtattcgaacgaagtccttgatggtggcgatgccaatggaagacgtgtgaaaccgcggatttaacggcagccctgataaaaacctagctggatttccttgtgttgtttccgtgtaaagtgttatagttctataacggcacttttctggtgccatattatatcatgcatgttgtagtgtcttgtgacttctatacctccccctatcgttgctactctggagctgagttgttgctaatatatgtgttctactgactagtgtactgcaaaattgcattgctgcgaagcacatggagcttcgcagcctgtgaccataaagtgcactcaggtggcacggcaaaggtggactgggcgcaaggttttgtcggtggaaataacggcgcagaatgtttctatggaagtttaactttgtgcttaggtcagctttgtcgatttgtagtcgtctgtatgactgtaattcaattggaatggtgaaatgcaatgaaatgtatcggttagatcgtgtcaaaaaaaaaaaaaaaaacccgcggcccttttgcttttgtgttcggtttttctattttttctattttctttcttttttttattgctgtggcagagttgtaaactattcgcgatgattttgttgcagatatattttttccc

SEQ ID NO: 21125 - DNA, 891 bp, Oryza sativa
  Clone ID: TF_OsC109153_1
atggcgtccatgtacaggcttccaaggaacgccatctgcgctgcgtgctatgaaggtgccaaggccatcatcgccttcttcaacgacgacgacgacgagcacgccgatgctgatcaaggctcggtgaagcccagcagattgacaaagctcaatagcacaaccaagggattgagagatgcgtgggaggaggtgaagcagatgcgatgcagagaggaggagaccaagcagagggcatcgtttctccagcaaggcttcgcggcggcgtggaaagacggcatccacaccgacatcgccgtcaggcctggaactgggcccccaatccaagcccataaggccatccttgcgaccaggtcggaggtgttccgccacatcctcgccggcgacgacgactgcaaggcccccgccggcgactctctgtcgctaccggagctgacccacgacgagctctcccacctcctcgccttcctctacacgggctccctggcgacgtgcacggaggagcggcacctgcacgcgctgctggtcgccggcgacaagtacgacgtgccgttcctccggcgagcgtgcgaggcgcggctggcggcgggggtggaggcgggcaacgtgctgcggacgctggaggtggcggagctgagctcgagcgcggcgctcaaggagcgcgccatgggggcggtggtggagcacgcggaggaggtggtgttctcgccggagtacgaggagttcgccgtcaggaacgccgccctttgcgtccagatcacccgcgctctgctcgccaataaagcatttcccgccaagacgccttaatattctttttttttccttcgttgatttagaatttagttagacgacgtgcgatgtatacgtgtaaatgatagtacatgcatctctttt

SEQ ID NO: 21126 - DNA, 1185 bp, Oryza sativa; identical to SEQ ID NO: 11415
  Clone ID: TF_OsC341870_1

SEQ ID NO: 21127 - DNA, 1146 bp, Oryza sativa
  Clone ID: TF_OsC341874_1
atggcagctgccagcaccaccgatcaaggtgtagccgttatcaacgacagcccactgtgcaagctcctctcttccggcgacggtcggcacgtcacgttccgggtcgactacgcggccgcgaggcgacccgccgtcgccggccgtacgctgcgcacgacgtgcgccatcggcgacagcggcgcgtacaggtgtgaggcgtccttcaggctgctgatcgggcggagaaagctggccgccttcgccgtgggtgtgtccggcccacgctaccgagacgtgcacaaggtggtggtcgatctcgtcctcgtcgacaatgccaggtcggtggccctgcagccgcctacgagatccatggctatccaggccgccgccgggagcaaccaaggagggtgcgggttgctcgtctccaaggattacctcgaggagaactgcgtgcaggatggcgtcctggtggcggtgtgctccgtgctctttctcccggagttgccaccttgcctatggctggactcgctaggccaccgtctcgccgccatgtcgaacaagaaggacagtactctcaccgacgtatgcttcgacgtcgatggcgagaggttcaacgcgcaccgcctggtgatggcggcgcagtcggaggtgttcaggagcttgctgttcggctccgatgacgccgagaccaagacggagaccgcagtcgtcaccatcgacggcatcagcgccaccaccttcaagcacatgctccactacatctactgcaaccagctaccgccaccggccaccggcgacggtgacgacgatgacggcgaggcagaccatgtcacgaggatcgccgagctgcagcggctgctcgtcgcggccgacgcgtacggggtggaggcgctgaggcaggcgtgcgaggacacgctgtgcgccgggatcaacatggacacggtcgcctcgacgctggcgctgacggagaaggggtcgtacccgaagctgagggggtcgtgcctcgagttcctgtccaacacgcagatttactcggtggcgaccaacgacgagtgctacgaggtggtgcagagctacccggacgtgctgacggagatacgggacagttgtctaatatattatcgttatgctactttcgtcgttgttactgagttagaggatttgtga

SEQ ID NO: 21128 - DNA, 2021 bp, Oryza sativa
  unsure (1)..(2021): unsure at all n locations
  Clone ID: TF_OsC404288_1
atggccgcttcctcaccaccgccatcactgtggaagatgacgacgggagggacagcagcaacaagaggaggcggtggcactgccgacacaagcaagtacaagatgatggcgcttggatctacagctacggctgcaggtcttcatcgtcggctgtcgagctccagccaggcctcttcctgtcagtgctgcctggacgctctgtgtggtgggggtttttctccgaggcgtcgatgcctcgttcatcttcaccggcggaaggagcagaaaggaggacgacgatttgaacagtcgacgcccgctatttccgttttttctatcttcgtcttcctctcctctccgctctcctgcttgcttcttctccgctgtctctccgatgggctcagcttcaggtgagcgagtacacctcgtctcttctgcgtcagctttgtgttccagtgtacgtgctgctgacatgtgcgatcaacgattgaattgaagagcatgatgtcagggagcacctcctggtcgtggacggcgtcggggaagaagggacgccggtggtggcggcggggggggcgggtgttgacngtccttaaatcataatatctgaccgtcaatacctggacgtgccgcgaggggtggtcgtcggtgtcatcgggcccagcggcagcggcaagtccacgctgctccgcgcgctcaaccgcctctgggagcctgcgccgggtgctgtgctcctcgacggcgtcgacatctgcggtatcgacgtcctcgcgctccgccgcaaggtcgcgccgccgccctcctctctcccgcctcgcctgccggcctctgcagtctgcacccgccgctttgccacatcgggcatttgaattttgccatggctgaatcctaatgtctaccttgttaattttgcctccctcattttccggagagaaaattgccttctccaactgagaagcaacaatgttagaaattatatcctccaaaatattaggatggctttgggttaaatactgaaattcatctgtttctatgatcttagccagtgctgttggggagctaaagaactcgatgcacgccttgttcagaccacgacaattgtgcttgtcggttagcaccaagagggttgctacagagtcagcatcgatgtggttactcaacctttcttcgcatttaacctttagcctttctaggccatatttgtccgcagcaacaagtagatgctgagccattgtcgcatcttcttcttgatccatctctagcaacgtatccgtgtagatgaagttaagtagagctttgaacacttgtgcatccatgtcatttatctctatcacgtcgtttacgtttacaccctccttcattggcccaaagtgctccgccacaaagacaggcgagcgcaccgcgagcaccaatctgtgcgcggcgaaggtctcgccgccaactaggaactctacatcggcgcaccgtttacttgagagaagatcgccgtaatgcaggtgcatgtccgacgacggtggcaccgcgatgatgggtggcggcgtttccttggtgattaccacatggaccccgatagcgaagcaatcgtcttggacatgtcccgatttttccaagtcgccctttgcaatgaaggtttcaaaccctaggttgttagccatgtcgtcttggttcgaagtgctcaacagtcgggtggcgtgggtgtgagacggcactggtttcccgtgctggtcgagcaggctgaaggtagcctgcaccatgacagcctcggcgatggcgtcatagagaacgaggtagatagagatgaagtccttgctaatgtcgttctttccgtgtgggtagtagcagatgtaccaagtgcggtctcccgcgttgaacgggaaggaactgagagatctgtaacagtggacttgtaaggtgcgggagtagccatcgatcttgagcacgtgataggcttgcgttgtgacgacggtggaggcggcggctgaccgagacggggtgggacagccgccgccggcgacattggacgcgatgctcgccgtcgccat

SEQ ID NO: 21129 - DNA, 1929 bp, Oryza sativa
  unsure (1)..(1929): unsure at all n locations
  Clone ID: TF_OsC26378_1
aaactcgaccaaacaaaaatatcaattagaaaacttttgacnaccggggaaagaggttaatttggattgacagagattacatatgagaaagaaaactcggccatgcattttctataataaacacaatgactcggtgagattactttgacactaacactaatgaccgggtttgcagaaactacgtggacttaatacccactaattaaaaatctagctaaactaattgtttcatgacgagttcagtcaaaactgaaggacatgttgccttcagatgctcgaagccatcggtagccatggccgccttgaggttgcccggagaagacaagaactcgacgcaagcctccttgagcgcgcggcaatggtgctgctccgccagcgccagcgtcacggcgacgttgcccatggcgacgcggcggcgcagcctgtcctcgcagatcagcctcagcctctccatcccgtacgcgtccgccgcggcgagcagccgccgcgccatggcgtcgtcatcgtcgtcgtcgtcgggcagcgtgtcggtgtagatgaagtggagcagcgccctgaacgcgtcggcgtccatggcggcgagccgcagcgtcgccggcgacgacggcgaggcggagagcttggccttgagtacgggtgacctcgccgcgagcacccaccggtgcgcgtggaacgtcgtcgtctcgccgtcgccgccgtctagctcgatgacgacgtcggcgccttccttgctccagaggagctcagcgaggtgccggtgcaggtcggacggcggcacgacgacgccagcgtcggcgccggcggcgagagcctccgacgaggcgtcgtcggtgcggcgcgccggcgagccggcgtggtcgagcacgctgaaccgggcatggccggcgatgccgctccggccgcagccgccgccgccggcgacgtcgacgaagagggagatggagtcggcgcagccgtcgtcgaggccgttggggtagtatcgcatgacgaagctgtggccgccgacggcgaacctcctcgacgtggcggactcgccggtggcgaggatgctcttcgtgttggtgtacccgtcgatcctgaggatgtgggacccggtcgccggccgcgacacgatggcggaggcggacggcggcgaggcacggcagccggcgacgccgcggcggatggcggcggagagcagcgaagcacacgacatgagacgagagtttggaacgtacatcttctcttcattttctctgaagaaatgtggtgtcggatggttgggaagataatctttcaccatattttcttcattttctctgaagaaatgtggtgtcggatggttgggaagtagagcggttgcatctgcaatggcagcttccaacaccttcacctcttgaaccctagctccctcgcaattaatccatacattgagatccataagagaggtgaggttgcgaatgccaagatcaggatgatcagcgaatgcagattttgccttgtgtgctctaacaacaaccgagatttctctgaccttctgcatggatccatcctcgaagatcaggccgacgaacgatccatacagacggaagatcttcaggcatcggaatatgcatttgctgataatgagaatttccatgggatcatctgattctgaacgcagctccaggtctagcaatgcaggcaagtctccaaggatctggaggatttgctttgtcacttgcttagacctgatgcatagcctgtagagattattcattgaagccatccaatctgggatcctttggaaacagcatttcggaatgtataattcctgacagttcctgtagagattgcatttttccgactccgtcaggtaacttaactgaaatagatccaccacgttgttaagatcagagttttgcaatttcacactgctctctagatccaacactcttaaagctttgaatt

SEQ ID NO: 21130 - DNA, 1116 bp, Oryza sativa; identical to SEQ ID NO: 11463
  Clone ID: TF_OsC174949_1

SEQ ID NO: 21131 - DNA, 465 bp, Oryza sativa; identical to SEQ ID NO: 11468
  Clone ID: TF_OsC340718_1

SEQ ID NO: 21132 - DNA, 1098 bp, Oryza sativa
  Clone ID: TF_OsC391235_1
atggcgggctcctccccgtcggctgcggcaagcggcggcggctgcgaagcggtgccgagcacgtcgaccatcgtggccgagatggcgacgggctcgcacgtgctcaccgtcgacggctactccggcaccaaggggctcgccgtcggcgtgcacgtcaagtccggcacgttcgtcgccggcggccacagctggcacatcaagtacttccccaacggcgccaccgacgagacctccgagtggacgaagggcgccgccgcgaccgtcaaggcgcggtgcaagctcaccctgctcctcgacggccgcgacgggagggcggcattgccgccgccgccgccgttcaccaagagctgcgagctccggaccttctcctccggcaagggcggctccgatcagtggggccacaagaagttcgtgcggcggaaggagctcgaggacccgtcgaagcgtctcctccgccatgaccgcttcagcgtccggtgtgacgtcaccgtcgccgtggggatccgcaccgacgacaccaccgcgaagctcccgccaccgtccgacctgcaccgccacctcggccgcctcctcaagacgaatgcgggcgccgacgtcacgttcgacgtcgccggccacaagttcgccgcgcaccggtgcgtcctcgccgcgcggtcgccggtgttcatggcggagctcctcggcccgatgaaggaggaggacaccgagagccacgtcgtggccatccgcgacatggacgcgagggcgttcaaggccatgctccacttcatctacaccgactcgctgcccaatgtcgacgacggcggcgaggcggcggccatggcgcagcatctgctcgcggcggcggacaggtacgacatcgagaggctaaagctgatctgcgaggacaagctaagcggcggcgtcgacgcgaccacggcggcgacgacgctggcgctggcggagcagcacggctgctgccggctgaaggaggcgtgcctcaggttcatggcgtctccggccaacctcaaggcggccatggcgagcgatggcttcgagcatctggctagaagctgcccttctctcctcaaagaattagttgctaatctcgctgtttaa

SEQ ID NO: 21133 - DNA, 1125 bp, Oryza sativa; identical to SEQ ID NO: 11471
  Clone ID: TF_OsC393414_1

SEQ ID NO: 21134 - DNA, 1548 bp, Oryza sativa
  Clone ID: TF_OsC45143_1
tcacgcacccaatccggttctatcctccgcgcatctatcacccggcgccggaatttccgcccgcattccgcgtcgcaagcggaggaccctatgcgccgattccccaccatcatcgatctcctccgccctctcatccacacggcgccagggaagcgacgccccaaccgaaccggactgccgggacaccgacgcccatcccgttcactcgactgcccctctgcgccgagcatgcggatcaacgtcagacgcctgtcgctccactagtcctacactgataatttaatttccaattgatgagtaacgatgttgtaaattaaatccttcaacatagttggacggccctggattaaacaccggaaattatctgctttcatggccaaagacaatgctctcgaagaggcaaggaaattgaagcacaccttcttgagaccatggcattggtacttgtctgctagcatcagcatggtaaccactgaacttgtatcaatatagctgcacaacctatcttcgcacattatcttcagtcttgataggctatacttattggctgcaacgagtagttgaaccatagtcgtctcgtcttgacctatctctggccaagtgtccgtgtagataaaaacaagcagagctttaaacacttgtgcatccatgttgtcaatttttatgacatccgtggtgcctccctccattggtctgaatagctccgccttgaacaccggcgaccgtgccgctagcaccaacctgtgtgcggcaaatgtctcgccgccaaccacaaactcgacatcggtgccctctttgcttgatagaagatcaccataatccaggtgcatgttcgatgggggcaccgtgaaggatggtggttcctccgtgatgaccagacgaaccgcgatagcgaagcagtcgtcattgagatattccgatcgttgcaactcgtcccttctaatgaagttttcgaacccaagcgcgctactattagccaccgagaagttatacaatgtggtggtgacagtgtgtgaccgcaccggattcctgtgtcggtcgagcaagctgaatgtaacctgcgccatgacatcgtcattgaccgtgtcatcgtcaagatggatgaagaaagagatgcagtgcttgttggtttctcgccctccgtttgggtagtagctgatataccaggtgcgacctcccgcactgaacggagaggtacggagggcctggccacgaccggctttcaaggtgctggagtacccctcgatcttgagtatgtggtaggttcgtcccgcggtgatggtggtggtggacctcgacggcggaggaccggcaccgacgctggacgtgagcgccgtcgccgccgccgtcgtcgtcgtcgtcatacctgcgtctagcccgacgtccgacggagatgtaggagctgaggcctccacctcgacggacgcctgcccgtacacatcgagtccaccgcagctcccctgtcgacggcgaactgctttactcctggctggtctcctctgcgcctccaccagccccgcggtggccttcatagtaaaaggttatccc

SEQ ID NO: 21135 - DNA, 2652 bp, Oryza sativa
  Clone ID: TF_OsC15_30
accagcacgggtccatagataaattcatagtgggctgaaactgtttatgagcttagctgttcattacatacgagataacgcaacatcagatgcaagcaaatactcctacctatacatagcattgctattagtaataccaaatgtttgagattgggactaatcacctcggtgattaattcagctcttccttccacgcacagccctgaggagatcattcatcaccagcggcgagctcgccatgagatgcttgtaaccctcggtcgccatgacggcgtcgaggttcgcggcgacgacctcgacgcacctcgccttgagccgcgggcacccatgctgctccgccagcgccagcgtcgtcgccgccgtctccacggtggcgccagcgatgagcttctcctcgcacatgatcttcagcccgtcgagcccgcacatgtccgccgccgccagcaggtgctgcgcgacgacgacgccgtcttgttgatcgagctccggcaccgagtcggtgtagatgaagccgagcattgctccgaacacctgtggctcgatgtccctgatctcgacgctccgggagctcttctccttcatgtcgccgaacaaggaggccatgaacaccggcgacctcgacgcgagtattgccctgtgcgccgggaagcacttgccggacaccaccagcgtgacgtccgcccccgtcccgcggcgcaggagctcgccgaggtgatggctcaaggacagaccacggccggagaacgggggcagaacattcgccggcgctgccggcgccgccgcagcgacattgtcaggtatctccgtgatcaccgtgatggtgcactcgacggtgaaggcgtcgtcgacgatggcccccgacgcctccagggcgctccggcgaaggatcaggacccacgcggagctctcgccggcgcgcttgaacgcgtgcgacacgtggccgtcgacggcggcagaggtggtggcactattgctgatgaggcggcatcggagcgcggccttgacgtcggcgcggcgaggaggacgagcttgagggcgacccagtggttggagtcggcgatgaggctggcggtgtagcggagctcccagtggtagccgccgacggggaggcgccgctctcggctcgccgccgctagtgcccaggaagccaaacgccgccgccaagctccccttcgtctcccgcgccgcctccggccccatcttgctcagctcttctccttcagctccggcgacgccttcttctccaactctggagaccccgccgaaggcattggaactagggtttagggtcccggcatcccgggtttggatagggtgtgaggcagagggaaggtagggggaagtataagaaggaggatcgccaggcttagagggattgccgtggaaggcgacggtgtttagatcctccggtgttttgaccccggttttgtctgaggtggtggccgagtcagcgtgagacccatgtgggccccacatgtcagaatgccaggtcatctcttcctcttcttctctcccttcctcgtctctccctctcacttctctcctctctgcagggcggctggcgggtggggaggaggtccggcagccggtggcggcgcgtgcgacctcggggtcggaccctcggagaggcccgggaggcggctgcggcggcggcgacgacgacgacgacacgagataagggaggcggcggcggcggcgacgcttgagaagggagaggcggccggtggcgccggcgcgggaagaagctgtcttcggcgtcgtgcccgctctgccctccaccgcctgctttgcccgccgctgccccgcgctcacacactcccgccggcgacgccgctgacggcgcgggcgtgagaactgcggccatggacgacgacggcgtcgacatcctcgctccccccgtccccctccccgtcggcgccatcttcctctcccgcagcgcgcctgcccgccgctcgtctgctccgtcggccggccgttccccgcgcagtcggcggtggcgaaggtgaccatgccggcgtcgaggtcgtagccgacgtggatgttctgctgcgccaggttcccgaggatggacaccgactgctgcttcgtcgtcgccaccattgccaggcacaacgtcccctcctgcaccgtcacggacgcgttctccggcttcagcgccaccgccgcacggccgccgccgccgccgaactccagcgtcaagtccggaatcgcttgttcggtttgcttcttgcaatttgcaggagtaacaaagcttatttttgcattgccggagtccacggtgatgcgggagctcgccgccaaagccaccgtcttgttgccgaccttgacgaagtcgaggaccacggtgtagtacgtgtccacgtccccggcgacgagcggcgtgctcgctgcgccgagctcggtgacgttggcgagggtgccgaagttgagcgccgacgatgtgttgacggagtgcgggacgaggcagtaggagaatctccggtcgagcgacgcctcgccgccgagctgcgtcacgtgggagaccgcgtcgccgctgagcccgaccagcccgtcggccgggaacgagccggccgtcgtggtggagcagccgaacttgacgcaccaccgcagccgcgtcgcccgtcgccgccaccaccgcagccgcgtcgccat

SEQ ID NO: 21136 - DNA, 903 bp, Oryza sativa; identical to SEQ ID NO: 11453
  Clone ID: TF_OsC389531_1

SEQ ID NO: 21137 - DNA, 1116 bp, Oryza sativa
  Clone ID: TF_OsC346893_1
atggcaaaccattgcaacaacacctcctctgtcacggttgctgaagttgcaagagggtcgcatgtaatcaagattgatggatacttaaggaccaaggagctgatggagaatggcaagtatgtttcatctatcccattcagtgttggaggtcatagctggttcatcacatacttccccaatggagttaacacagagagtaaggattacctgtcggtttttctgaccattgattttgcttgcgccgggggcgtgaaggcaaccttcagctttgcattgctagacaagaatggtagatcagtgcaattatacagcaaattgtaccctttacacaccttcacggaaaaaggttcagattggggccactctaagttcatgaagaaaactgatttggaacgctcagtacatttgagcaacgattcattctccatcatgtgcgatttgactgtcatgaaggatatctgtagcaaagaaaccacacaaaagcagtttgtggtggttcctcctagtgacctgcaccagcatctgggagacctcctcttgaagaacatggatagtacggacgtgacgttcaacgttggtcaggatatattctcagcgcacaagtgcatactcgctgctcgttcatctgtcttcagagctgagttctttggcgccatgagtgctaaagcccgtaggaccatcaaaattgaagatatagaagctggggtgttcagagcattgttgcatttcatctacactgactcactgcctgagactgctcaaaatattgtgatggctcagcacctagttgtggcagcagatcggtacaatgtcgggaggctgaagctaatatgcgaggagaagctatcaaagcacattgactccaacatggtggctaccactttggccctagctgagcagcacagttgctatggactcaaggaagcttgctttgagttccttgcttctcgctccaatcttgagaggatgatggccagtgatgattatgagcatctgaaaatcagttgcccgtctgttctcatggagcttgttgcgagccgccccccgccgccgctctggtcatcgtcgtcgctcgggaaggccgccgtcgggttcgccaagtcatcgccgtcctag

SEQ ID NO: 21138 - DNA, 1047 bp, Oryza sativa
  Clone ID: TF_OsC951_10
ttagtggattttgagtaagctgccgatctggtagaagaagtatttgaagagcgagatacagctgagctggtcaggatgccggcttatcaccacctcatcgttcatacccatggcgatgacgaactcgacgcaggcttccctgagcccgcggcagccatggcggtcggccaatgccaatgtgctcgccaccgtctgcgccgtcaggctcctcgcgagcatgtccgcgcagatgagcttcagcctgcccatgtcgtaccggtcggcggcgacgagcaggtggcgggcgagctctcgcctgtcgtcctcgtcggcgtcgaggtcgtccatggcggcgagcgtgtcggtgtagatgaagccgagaaggaccttgaacacggcgggctgcatgtcgccgaccttgatggcgccgccggcgttgttgcgcatcgggccgaacagctcggcggcgaagacggcggagcgcatggcgagcaccacccggtgcgcggcgaactgcactccccgcacgtcgaacgtgacgtcggcgtgggacttgaggtcgaggagccggccgaggtgcgccgcgaggtccggcggcgggacgtcggccgccgtcagcggcgcggcggcggacacccgcggcttcccgacgacgcgcacggcgcagtcgatggtgaggcggtcgcggcggacgtagttggcctggagcgcctgtatcgcctccaccttgacgccgtacatggcggcggaggaggagcggagtacggtgctgaacgtcctcggcgcggcgagcggcgggtgcacggacagcgcccggccggagtcggcgcggacgaagcggaggtcgaaggtggcggcggcggcggcgcggtcggtcaggagctggacgtagacggcggcgtggtcgcggtcggcgtgcgtggcgccgcgcgggtagaagacgacggcccagtcgtagccgccgacggtgaaggcggccgaccggacgtactcgccggcggcgaggagcgccctcaggcggctgtacccgcggatcgcgaaccggtggtggccctccaccgtccccat

SEQ ID NO: 21139 - DNA, 1355 bp, Oryza sativa
  Clone ID: TF_OsC50081_1
tcctcctcctcctcctcctctctcccctcgtcgccgccgtagccggggggcgccgcggcgaagccgccgatgcggccgggtccagccgcggacgccgccttcgtcgatccacgccgcgccgttggtaggaagaacatgctatgtgtttgagcaaagattttctgaattagtcgtctcctgcagcaggctattaggttattagtgcaagacaacttcctagttcattttgtaaattgtaactcttcgcacaaacagtcaaatagtctccactctccagtggctattgaccaatcaccatggagaccccgacaaatctcaccaacacaatatctgcagttcacctgttaaaaatcaatggatattcagtaaccagagcacttggttgttcagagtatatctcgtcgaggagattggctgcaggtggatatgattgggaagttctttactatccacgctattatgagcatggtgtgtactggatagcacttcgacttatgtttatgagcaaggaatgtaagcatgaggtgaaggcagctcttaaatgtcagttagtacatgaggcacaaatttatctgccatccggaagtaaaagtgtatcctctaaatatacagggcaacgagattgcgggccagcgctcctgcttgtaaaacaagatgatttgccaggatccaattatttcatcggggattcctttgttgtggagtgcaccatcactgtgttaagagagccacaggaagctgtgactaatgtttctccaaatgtttccaatccatgctgtgacttgcaaatgcaccttggtgaactcttgctgagtgaaaagggggcagatgtcacgtttgttgttgcaggtgaatctttcttggcacacaagatcatcctcgctgctagatcccctgtcttcatggctgagttctttggacccatgaaggagagtagctcacagtgtgtggagatcaaggacatagaggcatcagtcttcaaggccatgcttcatttcatttacactggtacatcaccggagcttgatcagcagcatgtcgtcagtgactcggagcaggacatcacaacaatgacacagcatttgcttgttgctgcagacaggtatggattggacaggctcaaactgatctgccaagataggctccacgatgacatcaatgtggagactgttgcgacaactttggctttcgcagagcagcatagctgtacacagctgaaggacaggtgcatcgagttcatcatctcttctcgtgcaaatcttgatgctgttatggcaacagagggttataagcttgtgatagcaagctgcccgtcggttctaagtacccttctgagggcagcggttgggagatag

SEQ ID NO: 21140 - DNA, 1845 bp, Oryza sativa; identical to SEQ ID NO: 11482
  Clone ID: TF_OsC299399_1

SEQ ID NO: 21141 - DNA, 951 bp, Oryza sativa; identical to SEQ ID NO: 11483
  Clone ID: TF_OsC340717_1

SEQ ID NO: 21142 - DNA, 2343 bp, Oryza sativa
  unsure (1)..(2343): unsure at all n locations
  Clone ID: TF_OsC1713_5345
atgggtcaaaccacttccaagtctgccggcgacggtaagcccaaacccaaaaccacctcggcggcggcagcggcggcggccgtcgtgagcgagacagcaaccgggtcgatgaccatgaggatcgccggctactctcaaaccaaggggatcggcgtcggcaacagcatcaactccagcaagttccacgccggaggccacacctggtacatagcctactaccccgacggcgaccgcgaggagtactccgactgggtctccgtctacctctgcctcgcccggccagctgccggcgccgcggccgacgacgtcgtcgaagcgaaattcacgctcagtctactcagcgggacgtacggtgcggtggtcgaagagaagatctgcacggccaagaaattctccttcgccaatggctactggccaagttgggggcatacaagattcatcaagaggaagaagatggacagtcgattgtggtcgtgtctacatctagacggtcaaagtttctatatcagatgtaatatcaccatggatattatccgctgtgaggcggccaccacggcggtggcggtgccaccgccggacctgcaccggcacctcgccgccctcctcggcagcggggtgggggccgacgtgcgcatcagggtcggcggcaagctgttcgcggcgcacaagaacgtgctcgcggcacggtcgccggtgttcatggcggagctcttcggcaataatggcgggaaagatcagaaggaggcgaaggctgctgctgcggcaactggcaatggcgttattcggattgatgatatggatttgagggtgtttcgggccatgcttcagttcatctacaccgataccctgcctaagatcgacaagggagacacggcgttcatggctcagaatctgctcgtcgcggctcataggtatgggattgagaggctcaagtcgatcagcgtcgacatgatacgcaaagcggctagaacgatgaacctgatagccatgatcattagaaataatgatgaaggaatcgccacccagctgcgcacgcgcgggcggctgggcctccatctccccgatgctccagaaaagcctcatcgatgccggcgtctgttcgagctgacgctgtgctacttgtccctggactcgacgctgctaattcaagctgctggtgatgcatctacccgaagctgcgacctcgccgagatgccggacgtccttgatttgcaagcttcaccgcactggagcgggctaaccatggaggaggtcatcgggaagccgccctgccggagcgcgccgaggatcgccggagctgccaccgactgccaagatttctatccattcccatgccggaggtcaagtatcacgcatggcgtcgaaaccagcacgatgacgatggaggcaagtatagctgcagcacaggaggaaggacgacggggaggacgacgagnctaggactgttgaacaccaccggcaacaagctagcagatgcatgctaattaagctaattattgcggcaacgtggccgaccaaccggagggtgacacatcatcaccatgctacagtgctatgcacaagaagttgtccctgcgatggctaaacaaantcctgttatttcaagtttttttaattagatgcagagctgtgattaaatggccggctgccatctacatcaaccactagtgctgtcaaaaaaaaaagctcgaggctcgcgagctaggctcgattcaagctcggctcgagctccaattgagccgaccccgagcttgggcaaaagctcgcaagctttaccgagccgagctcgagcttctaccgagcttaactgtgtacaatttatattgtgtaaaatcaaaggtgtttttgattattattctgtgatgaataattggcatctaagattattggttttgatatttggaatttatttacgaagtggttttcgagatgattggaatttgcaggtgaataggaactgctggtcgtgatgtggtccggtcagaccgggcatgtgctgtcggctagagttcaatgcacgtggttggtgaagattccatattgcatacgatggaggtattgtgtgtgtatgggatgcagactcgaatttggaaggagtccaaatttggtatgattggttatgtaaagtttgtttcttgtacgatgaggtttcctatgcggattaggacttctagtatgagtttggttcgtggctttaggctgcctacctcatgtataaatagagagggagcgtccaaccagacgatcaacaccggtcagaccggcggcacaggcgcagtcagaccgatctacatcggtcttccccgccgagactctcgccattttccccattccttgctacag

SEQ ID NO: 21143 - DNA, 855 bp, Oryza sativa; identical to SEQ ID NO: 11495
  Clone ID: TF_OsC299619_8

SEQ ID NO: 21144 - DNA, 774 bp, Oryza sativa
  Clone ID: TF_OsC346729_1
aaattcgatgataagctgtcaaacatgagaattggtcgacggcccgggcggccgcaaggggttcgcgttggccgattcattaatgcagctggcacgacaggtttcccgactggaaagatggatcgtgtggacacagccttgccatgtttctcaagtcagtgtatgaatatatccttgcgcacactgtttccccctatttttacttttcttaaatatatattatatgccggtgatgacgacggcactatacccatcccgcggtcgaacctcaacggccagctcgacgacatcgcggaccgtgccgacggctcggacgtgttgttctccgtcggcagcgagacgtttcatgcacaccgcgccgtgctcgccgcgcgctcgccggtgttcaagatggagctcctcgggtccatggcggagtccaccatgccgtgcgtcaccctgcacaacatcgacccggccacgttcaaagctctactacacttcgtgtacatggacgccttgccgtcgccgaccgaggcggtacgcattggagaggttgaagctgatgtgtgcacagaagctgtgggagagtgtgtcggtggagacggtggcgatgactctaggctacgcgcctacgccgagaggtaccattgcccggagctaaagagcaagtggctcagcttcttgatggcggagatcaacttcaagaaggtggccgtcactgatggctactttcatcttaggcgggatttcccgttaattatcgaagagataaaaaagcggattgagagttaa

SEQ ID NO: 21145 - DNA, 2552 bp, Oryza sativa
  Clone ID: TF_OsC8342_1
cttcgatcgatcggctcgtctctccccttccccacctccatgccaccgacacgcgcctcaagctagaaccctagccccgatccccgatggccgcgccgcccgtctcgggggatggggcggcggcggcggcccccgtggtggccctgggcgccgcgggggcggtgggggggccgaggccgtacgaggtggccgtcgcggcggcggagctccggcccgtggactgcaacctcgcggcgctgtgcgaccacgtgcaggcggaggggttcgggtccggggcgttctccgacgtcgtcgtcgaggccatgggcgccacctaccgcctccatcgcctcatcatctcccgcagcgcctacttcaggaatatgctacatggtccttggagggaggctggagctcccacagtggtgttgcatatagatgatccaaacattgactcagaagcaattgcaatcgcgttagcatatctttacgggcaacccccaaagcttaatgataacaatgcgttccgagtacttgcagctgcatcatttttggatcttcaggatttatgtacaatatgtaccgactttattatttctgagctttggacatcaaactttttgcaatatcagctgtttgcggagagtcaagactatggtagtcatggggaacgtgtcagaaatgcctgctggggttatctttgccaaagtgccacattggaactacgagaggtgctcccaaaactttcttcacaaactttgcatgcgctccttacatctgacgaattatgggtacctaatgaggagaaacggtttgaactagcattatatgcgttgcttgcaaaggtcactctgtctgatgtagaagttagtggaaatgaaaatttgaaccttacgtcaagctctgcgaattctgatcattccatgaggaagggaaagagtccaatgaatgaagctggtgaggagcagcttatggggtctgaattgcagaacttaaaattacatgacaacacagagactataagtgcccataacactagtgatattccagatatggtaatcccgcaggatagcacagcatactccattgagcaaaatgctgaggcttccaggaggaagatgcttctgtgtcacagagtacaagcaatagttgctgatacttgcacaaattgttgccttactggtaattcatgtgcttgtaaacaagcacatgtgagttcacatcatcactacaggcaagagcatgatcggagcagtgcttccggtactgtaggtaatatctacctcacagatgcccatggtgaaggaaatgctgtttttgggcctgtccgtgtcaatgtcagaggagcagttgatggacttgctggtattgggagaggaaattctaatgttcctggtgcagcttgggctcccacacgttacgtcttctctcgtgttccttatggacttggttcaagaaatggtcaacaaccattcgcaaatgatgaatcagaacctagagtcgactacaatggtgatatttcaggagatggtctgactgcattggttaatcttagccaagaaagcagtgcttctcatcatcagacagaaagtatatttgagacaggcattcaagttagatattctggtgctgcttctgtttcaaccccaggtggttccccacgcgtccggcaagagtcaaaagagcatgaacttggatccaacttggaaactacagagaacacaactatctcgttggacatgaaaacaccacttagtcacttcccacctttccgctttggagttgagtttgaagatgtgcacaggctcgcagatagtcaggtgaagcattcgactgaagtattttatgcaggctctctttggaaggtaagtgtccaggcattcaacgacgaggatcctcatggacgtcgcacccttggactctttctgcaccgacgcaaggctgagcctttagacccattgaggaaggccaacatgtatgtagaccaccgggaaaaggtcactgctcggtatcagcttatctgtccatcgaagagagaggtcatgattttcggaagcctaaagcaggctggcacactcctacccaaagctccaaaagggtggggttggcgcactgccatattgttcgacgaacttggcgatcttctccagggtggatccctgagaattgctgcagtagtccagcttgtctaagccaaattgcccttgtatatctagaaacaatagtagtgttagcttattgcaaatggaaaaaagaaggcactaaatggcacttgcaaagtatggtaatgtcactgtaatgcaatggttctattgtatttattcccaaacgtgacgccgtcatgcttgtgtgtgtaataggaactaatatatagccaagtcatgcattcgatatcataggaccctagatgggttcttgtggttagtttttttttttaattatttttttacgctcccgctacattatatgtgttgtagcaacgcatacatgttgaaaacaaatatattgctggtaatttgcattataaatagacataaatgcagagttactttcaaaaaaaaaaaaaaaaaaaa

SEQ ID NO: 21146 - DNA, 4488 bp, Oryza sativa
  Clone ID: TF_OsC31069_1
acataagatttctactgttcatacatattaggcggttggaaggatcacacaacttaaaaagatcaaagtcgcatatagagatgtagataactgatcatgactttcataactactaagatgtactactacaaaagtgatagcttaataaacttctcagcaagacttgtcaatccaaatatgtgaaaccttactaaagctgttgccgcggtttttgctttgctatttgttaatctttctatttatagtaataatcatagtctacgtaaacatacagattggaacacaggagttgttcataaacaacataactctatttaggaaccccgatatggcagtagcaattatcaataatcataatacaatccaaatattaaaacctgaattgaaatcttgagtctgaagaacctgtctcccaagagagactaacattaagctaaccaatcaaggacctttgtagcactgctagtccttgcacagcagagagcctgttaacaaaatgaccatcaccacatctgtgcccaatactaatctaaacatggatgacttctccataaggagcgaacacaggtttcatgacaactccagtgacgttggggtcgagacccccaacgaatatggtggtattgttagtgtcattctcagactgagctccttgagcatttggtactctctcctgaacccctgttgttttcttatttgccgctggaccaatacgcatcggtctggaagagcaaagcattccattcatttcagtcattgcacgagcttgctctgtaggatcaccaaatttcacaaacccataaccctttgaacgcattgtcattttgtcagttacaacttttgcacccttaaccgaagggtaatggaccctgaatgtctcttgtagtaggtagtctgtaacatctgcagccaaatccccgacaaaaatggtgtagtcaggggtatcatcacgcttctcgccagcactggcccaattcaatcggaagaccatctcaacattcggcatcatctgtccattataagtctgaagaattcgatcagcagctgcacgacttgtaaactcaacaaagccataaccctgaagctgtccactttgtttgtcccggataagcttcacagattgaacctccccggtggccgcgaagcagttgtagatgtagctctcgtccatccagggctgcaggtcgccgatccagagcgtcttcacctcgtccgcggccgcgggggcgggcatcgcctgcggcggtggcgcggcgtagtacggctggggcgggggcacctgcccttcgtgcggcagacgatgtggacagccggcatcatccggcggctgttggtgtggaggcttcgatcagcagctgcacgacttgtaaactcaacaaagccataaccctgaagctgtccactttgtttgtcccggcataagcttcacagattgaacctccccggtggccgcgaagcagttgtagatgtagctctcgtccatccagggctgcaggtcgccgatccagagcgtcttcacctcgtccgcggccgcgagggcgggcctcgcctgcggcggcggggcggcgtagtaggcgtggggctgggggacctgcgcgtagtgcggctgcggcgggtgggtggcgacatctcggccgtggtcgctgtcgaggccctccgccatcctggtgtggcggcatcggcggcgggaccgcgccccactccggcggctgccccggcgcgggctgcggcggcggaggcgggccgcgcatgccgggctgcggctgcgacggcggctgctgcatcatggcgacgagatggcgtaggtagcacggacgaggaggaggatgacccgagtgcttctcgcgaatggcggagccggacgcccacgagcctccccacggaaggccgccgcgattgggggacgggccacaaagagaaccgtgacgctcccgcggaacgccacgtcccagccccgcccgtcgcgcagtatccgcgccaggtgctcgtggaggctcggcggcggcaccgtgacgcgggggcccctctccttggccggcgcgacgctcaccacgcgcgggccggtgaccacggtgaccacgcaccgtatggtcagggtgtcgtcgtcgaggcacgagtacgacgacgacgacggcgacgacgacaggttggatttctcgacgaacttgaggacgtcggcgctgcggctcgtcggcgtgaagtagtgcgaccgcagcgtgtcgccggcgagcggcgacgccctgccgtccctggccaccaagctcaggctgtacttggctctcacgagcctctccttgccgcggtaggcgaggcaggccgacgcgtagccggcggaatcctggtcgaggccatcggggtagaacgcgacataccagtcatggccggcgacgctgaagtcgccggagcagacgtgccttccggcgccgaagccgtccatcaacgagtagccgaccacctcgaagtcgtgcgtcccggtgatgccctcccacacgctccgtgaggacgtacgggcagccgatgaagtcaacatgtctgccacaacatcccaataatccaggttcccatatccgtatatgtcgttactcatttgcagggaaccattttttcttcccaatcgcggtcgtcgctgcctcgcgcgcgtagggggaaaattgttcccgcgctccttttctcgccctcctcgccagtcgccagcaacaaaattcctcttcctcccaggcgtcggcagcggctttccaggcggcgaagcaacggccaaccccttcctcgcaggcgtcgtcgactgagttccacgcggagatgcagcggtcgtccccttcctctcggtcgcaggggtcggcgtcggtgttgctccaggcagcgatgcagcggccatgcccttcctctcaggcgcaggcgccggcgttgctccaagcggcgatgcagccgccgtcctcttcctcgcaggcgtcggcggcggcgctgttccagggggcgcccgcacgtcgaccaccgcctcctcgatttggggccgacggccctctgcgccccgcaccgccgcctcgccgtcgtctcggtctgcctcatcctcaacctccacgaagctcctggcgtcgatttctccacagcttattctgtgagtgatgaagaattcctccataggagcaatttcggtaaggctgtccccaatgcaagcctgtctcagctgcgagcagtgatgttgttctgctaaaacaagagtggttgccactgtttccacatcaatggtttcgctgagccgcctctcacaaatcagcctcagcctgtccactccgtaccgatccgcggcaactagcaagtgctgcattgctgcagccttgccatctctgcagctatctggcagcctatcgggggtgtgtaaatgaagtgaagaagagcctcaaaaacctcaggctccatgtcgtcgatcttgatacattgcgtgccattttctttcatcggaccgaaaagctcggccttgaacaccggggaccggaaggcaagaacacatttatgagcacggaactcttggccacccacggtgaatgtcacatctgaaccttcaccatcctggagcatgttctcaaaatcggtatgcaggttggacggtgggacaacaacagaattgacctcaacatccttggtgtgggattccctgacgacggtcagcaagcacctgatggtcaggcagtcgttgtggaggaacggcgagctctgcagcttcgatttctcggcgaatttgatgaatccccaattgtcactcgccggggagaaggtgtgcttcatgtaggaattggtcacctgcgacaatttgccgtccttgccgagcagattcagggtgaacctggtcctgacctccttctccctgccgcagtagtagaggaacgccgacgcgttcccgaggcaggtgacggtggagccgtcggggtagaacctgacggcccagtcgacgccgccgacggtgaaggtggatgagctgacgtacctgccgatgcccagcccctcgatcagcgagtaacccgtcaccttgaaatcgtgcaccgcggtgacggactccgtgacgctcaccgacgacgtcttgggcagccggcagccgcccgccgccgcggggaaagccgggtcgcggtgatcacccatggcggcagcggaggcggcgtgatagagggacggcggcgcgatcagctggatgctatgcggcccgatatccatgacctcatcacaatccaaggcctcagaaatcgatcgattccgacaagcgggatagcccacccgccgcggcggcggaggggggatcagcgaagccgagcggaatcgggggagatcatccagattcggggaggatcggaggggagcgcggctctggtagggagagggatcacctgaattcctctcgcgaatggcggaggcggacgccgacgaggctccccactgacggccgccgcggttggaggaggcgcaagaaacggaaacgaaaccctccctgagacaaac

SEQ ID NO: 21147 - DNA, 824 bp, Oryza sativa
  Clone ID: TF_OsC128453_1
cccgggctgcaggcacgcggcgcgagggagagggagactcgggcggggtccctcccccggcccgcccccccgcgcctcggcgacctccgccccgccccctaccgccgctccgtccccctcttcgtccccatcccgtgctggtacctatcggtggagaaggctcgatatgtatacgtgaggctgttcccggagcccgggcgggtggccaaggaacggcccccgctcgcccgcttccttctccgagcttgctggtccggcccgccacgccgctcctgcgtctcccctgtgcatgagcatctcctccgaagcagcgaagactttttctggcaacttgatacgatgtacgctgggcgtttcactattgatgttgagtttttggacctgaagatagcctctaacaatgctgcagaatcatctacctcgatttggccaaatgaaagcatagcggtgcagaacattgctagtaagagcagtctcggatgcctttcgcgcatgctcacggagtcgatacatgcagacgtcaccataaatacgactgatggtgtcctcaaggcccataaggccatccttgcatcatgttctcctgtgtttgaaagcatgttcctccatgatctcaaggaaaaggagtcctccacaatcaacataaatgacatgtgccttgagtcttgctctgctctgattggcttcatctacgggaccataaagctagaccagttctggaagcaccgcctctcgctgctcgccgcagcgaacaagtacagcatttctgatatcaaggactgctgcgaggagagcctcctggaggatataaactctagcaatgt

SEQ ID NO: 21148 - DNA, 786 bp, Oryza sativa; identical to SEQ ID NO: 11503
  Clone ID: TF_OsC346888_1

SEQ ID NO: 21149 - DNA, 1176 bp, Oryza sativa; identical to SEQ ID NO: 11396
  Clone ID: TF_OsC386240_1

SEQ ID NO: 21150 - DNA, 634 bp, Oryza sativa
  Clone ID: TF_OsC306844_1
ggagagagagaactagtctcgagttttttttttttttttttttttcacacatctaaactagcctagatgacagataataattatacacgggattagcaccagatcgaaccagatgacgataattatacataggtctagctatttgacactccagagtagaatcacacactagctctgaattgacaccatcctacttaatatgcttctgctgaatattcagggttcagtgaacaacaagcttggacatgagctccttgagaatggcagggcagcttgtggtgagatgctcgaagccgtcggtcgccatggtcgagctcaggtggtcggtgtatatgaagtgcagcatcgccctgaacaccggcgcctcgatgtcgttgatgcgcgttggcgtggcggcggcggtgctccgcggctgcgccatcgggccgaggagctccgccttgagcacggacgagcgggcggcgagcacggacctgtgcgccttgtacgtctcgccgccggcctcgagagtgacgtccgtgccgtccccactggtgagcagcttgccgaggtggcggtgcaggtcggacggcggcacggagacgtaggacggaaattcggcggcggcgaccatggacgacagtagctgggcaga

SEQ ID NO: 21151 - DNA, 1626 bp, Oryza sativa
  Clone ID: TF_OsC31069_3
ctaaccaacatcccaataatccaggttcccatatccgtatatgtcgttactcatttgcagggaaccattttttcttcccaatcgcggtcgtcgctgcctcgcgcgcgtagggggaaaattgttcccgcgctccttttctcgccctcctcgccagtcgccagcaacaaaattcctcttcctcccaggcgtcggcagcggctttccaggcggcgaagcaacggccaaccccttcctcgcaggcgtcgtcgactgagttccacgcggagatgcagcggtcgtccccttcctctcggtcgcaggggtcggcgtcggtgttgctccaggcagcgatgcagcggccatgcccttcctctcaggcgcaggcgccggcgttgctccaagcggcgatgcagccgccgtcctcttcctcgcaggcgtcggcggcggcgttgttccagggggcgcccgcacgtcgaccaccgcctcctcgatttggggccgacggccctctgcgccccgcaccgccgcctcgccgtcgtctcggtctgcctcatcctcaacctccctactccggtgtgcaggcgacagagtccatggagggacatgctccatgggagacactgaatcccctctcacacgaagctcctggcgtcgatttctccacagcttattctgtgagtgatgaagaattcctccataggagcaatttcggtaaggctgtccctgattcgttcgatgtttaggatccgcggcaactagcaagtgctgcattgctgcagccttgccatctctgcagctatctggcagcctatctgtgtaaatgaagtgaagaagagcctcaaaaacctcaggctccatgtcgtcgatcttgatacattgcgtgccattttctttcatcggaccgaaaagctcggccttgaacaccggggaccggaaggcaagaacacatttatgagcacggaactcttggccacccacggtgaatgtcacatctgaaccttcaccatcctggagcatgttctcaaaatcggtatgcaggttggacggtgggacaacaacagaattgacctcaacatccttggtgtgggattccctgacgacggtcagcaagcacctgatggtcaggcagtcgttgtggaggaacggcgagctctgcagcttcgatttctcggcgaatttgatgaatccccaattgtcactcgccggggagaaggtgtgcttcatgtaggaattggtcacctgcgacaatttgccgtccttgccgagcagattcagggtgaacctggtcctgacctccttctccctgccgcagtagtagaggaacgccgacgcgttcccgaggcaggtgacggtggagccgtcggggtagaacctgacggcccagtcgacgccgccgacggtgaaggtggatgagctgacgtacctgccgatgcccagcccctcgatcagcgagtaacccgtcaccttgaaatcgtgcaccgcggtgacggactccgtgacgctcaccgacgacgtcttgggcagccggcagccgcccgccgccgcggggaaagccgggtcgcggtgatcacccatggcggcagcggaggcggcgtgatagagggacggcggcgcgatcagctggatgctatgcggcccgatatccat

SEQ ID NO: 21152 - DNA, 1458 bp, Oryza sativa
  Clone ID: TF_OsC56854_1
ctcttctcgccggcgtcccctccacctccatcgcgctcgctcgccgcccgatcccatcacctccgccccgctgccccgcacctagagatgccgtcgtcgtcgtcggcggcggcggcggcgtgcgggcccccggagttcacgccggggtggaagacggtgtcgacgtgcgccccggacgtcgtcggcgagggcgtccacgtgttcgacatcttcgggtacagcgaccacaaggggatgggcgcccacgagcccatcaggtcgggggccttctccgtcgccggcctcgactgggtcgcctgcctctacgccgacggctacggcgtcgccggcatcgacgacgtctccgcctacctcaggctcctcggcgacgcgcccaccccgcgcgtgtgggtctcctgcgaggtcaagctcgtcgaccagcgcaccggggtggcctccacgccgcagcccttcctcaggtacgccctggcgttcggcgacaagtgcaaggccctccactgtatgatgatccccaggggccagatcgaggtggagccctacctcgtggatgatcgcctcaccatggagttccatgtcgtcgtcaggagagacccccgggtgtcgaggaccgcccggttcccgcgcatcttggtgccgccgcccgacatcaagcggcagtttgccaacctgctgcagagcaaggagggcgcagatgtcaccttcgatgtcgcgggggagccgttctccgtgcacaagctcgtgctcgcgatgcggtcgccagtgttcaaggcggagctctgcgggctgctgagggagccgggaacacagcctattaccatcgttgatatgcagcccgccgtcttcagggccctgctgcaattcatctataccgatcagttccccgtgacgcgcggtttcgagagacgcgacaattgtgaaatgatccggcacctgctcgttgctgcggacagatacgccgtggataggctaaagctgctatgccaaggtatcctttgcaagaatcttaatgttcacaatgtcgcgactacgctggcactggctgatcagcatcaatgcgacaagctgaaggatgcttgcatcgaatttatgtcatgttcaaagaagatgaagggtgtagtggcgagcaaagggtatgaggatctccaaagaatggcaccttctgtcttggcggatgccgtggcgcagatgtcgaagctcaacaaaatgtcaaggggtagtgttccacaagatgagtctaagagctgttagtttaatttataagggatatggatattctttcttctcttcctaaatcaggtatcgtagtcagtttactctacattttgggagcacctttctggtggttatctgtttatatgatatagttaggtttattttatctctttgcaagctttgtttccattaactgacatataacctgttgtccttccacaaaatttattttgtgtgctcttgatc

SEQ ID NO: 21153 - DNA, 1345 bp, Oryza sativa
  Clone ID: TF_OsC191632_1
atggcgtcgaggagcatatcaagctgcacaactgagacggcaaaaggcatccacaggttcgagatcttcagttacagcatgatgaacaccgaagccgaagacgactccatccggtccggcgtcttcaacgtaggaggattcgattgggcgttgctttactaccctgacggcatcgacgacgacagcaagggctacatcggcgtctacctcgagctgatcagcaagaacggcgagccatgggcactcgtcgacgtgaatctgatcaaccagctgcaacccgggcaacctcgtcagctgttcaccaagaccgatgtgcctaccccgttcagatcttcaagctttcaggagtctaccttggggtctctcaagtgcatgaagaggagcgatattgagagcactccagggttcatcgtcaatgactgcatcgtgatcgaatgcaatgttactgtcatctatgagccaaaagtgtctaaaaccagggcattgtgtgacgctgaaactagttcggcattgcgcgagatcgaggtgcctcctatggagatatcgtcggatttcgccaagatgttgaaggacggtgtaggagcagatgtgacattcagagttggagaagacacattccgtgcccacagggcggtgctagctgcgaggtctccagtatttcatgctcagctctgtggaccgatgaaggagaagaaggagacacaaatgcaggagataaccatccaagacatgcagccatctgtcttcgaggctttcctctatttcatctacaccgattgtgttccaagaatggatgatcttggcaatggtgagaagatgcatttgatgatgcatttgcttaaggccggtgaccggtatggattggagaggctcaggatcatgtgcgagagatttctagctacgaacctcgacacggagcatgtatctgcgatactgggtctagctgacttgctagatctcaagaagctcaaggaagcttgcatggagttcatggtcccatctgagagaatggatgccgtggctgcaagtcaagggtaccagcagctgaagagagcatttccctctctggcgtttgaagtgtgggagaggaggagccgtgttcgcaggaattaattaacatcttcttgattcagaagatatatgtgcgcgatgtctggagatttcctttttggttatgtttgttttggtacatttgatgatctgacgaatgttctctcaacaatgtgatgactgatacggtgcacgcgctggttgcaccttaatgtaatgtggctatctggatcatgccaatggttttacctttagaatcgagttgttttttacaaaaaaaaaaaaaaaacggtcc

SEQ ID NO: 21154 - DNA, 2232 bp, Oryza sativa
  Clone ID: TF_OsC3707_1
cacgtggctggacgtgtcgcgtgtcctgtttctgtttttctttgggttgcctgccgcgccgctcattcttccttgcctctgctgggatgctaaccttttcacaatcgactggttcagtttttttttttttttttttgccagtaaaagagaccggttttagtcctttttttttccacttgtcatttgcaaagtttctatcaacaaaagggtttaagcatagaagaaggggaaaaaaaacaatacgatatctgcagcatgtgatgtttcgcactatcacccactcgagcgcaaagccaacttgagtttggcagcagtacattagacagtgggttgctttatcgtcaattcagctctcagatgcaacacgccgtcgaggaagaagaggctgtcgtcagccatgaacgtcgaccatggtatcgcaaagagattcctgtaaccaaccgccttcccaccggtgaacgtgtagttacccttgtacttgctcacaaactctcctgacggtcttgtccttgcagcaaactcataatctactgtcacgctcattgagcccttctcttgcatccctaagaagagaccgaagcagtagaacgtactctgctgttccatgttacagtgtgctgagaggaagaagccctgccctgcaagatggaaggcttgagagtacatccgacctgacgggaagagccgggagcactcttcgcgctttagatccaagtatgctatacactgtgggtagggtcggtcaaactcaacaactttcaaaggtctgtacttgtaagcccgctctgcaaatttctgacaggttgttacgtctgctgcgagagcacgttgcctgtgtggagcatcagctttatatagaagtgcctcagtgacacacttggttgcttgctcatggtccagatcggtgcatattaggaccttccgcagcttcctacaggtcatgtgactgaatcgcacgagcggaagcaaacgagaactcaagatctcacgcctttcctctgatttagggtattgtgcgcgagcccacctgatcaagaaatcgtagatagcatcttcagatgccacctggaggtcattacttgacaagatggcttcgattccagcaagagggatgttcatcacttcatcttggaacttagtcaaatccttgtatttgttggaaagatattccttggctgcatctgtcagaggttgaactgcagcagccatcgaaatggagcatggaagatctaggtagagtagtgcagattctgtagtcatagtcaagcttgtgagcaactgactgcagtacctcatgcacgaaataacctcaaacttgtcggcagccatcagaatatccagtagaagagtagggtcagttgatgtcaactttccactgtacataaagcttaaaagctccataagggcattttcctctgaatcagtaattctaagggttgcctgcctctcatcagattctttcatgccatttgagaaaagcttgaaaaagaaaggactttttgctgcaagaatcgctgaactgatataaatgttctttactcttagaactggtgtgctcaccccaccactccaaggtgagtccatacttggtccatcatcaccatcagggccaacactgggtggagagtcgtccatcattgctacaggttcttcttgattttcttcatatgcatcacattcttctggttctactttgcaatttatctggtctggcatgactgcttcagactctttctccttgaggagctcctcgcggcggcgcttgcggtggcgcgcccaatccgaaagcgagccggccccgccgtcccggctggagccgggcgcgtggtcgtcgtcgtcgtcgtcgtcccccgcgacgacctcgatccggagcacccggtcggagaagttgaccgagttgaaggcgaactcgaagctggggcccccaccgcccccgcccgagaagtccgggtccatctccgcctcctgcgccgccgccgcctcgctcccggggcggcgcccgcggtacgacgaggaggaggaggaggaggcggcgccgccgtcccggctcgagccgggcgcgtggtcgtcgtcgtcgtcgtcgtcccccgcgacgacctcgatccggagcacccggtcggagaagttgaccgagttgaaggcgaactcgaagctggggcccccaccgcccccgcccgagaagtccgggtccatctccgcctcctgcgccgccgccgcctcgctcccggccat

SEQ ID NO: 21155 - DNA, 2369 bp, Oryza sativa
  Clone ID: TF_OsC43419_1
acccgtgcctcccccggctgccgggttccgtcattgacgatgtggaccattcagcataactttgattagaagaatcacttttcacagttcgataacaatgcgttacatgtcatgatcctcttttgatgtaaaaacaaaagggattttacttgccgtttccaaactgtctatttaggttgctcaagtagaaaacaacagtaagtccgaatcacacaacatttttcacactaatttggacacagcaagaacagagacgctgttagttaaacgccgtccactatctagggttgttttatggttaattcagctctcaagtgtagtaccccctcgatgaagaagaggctgtcatcagccatgaacgatgaccatggaattgcaaatagattccggtatccaaccgcctttccaccggtgaaggtatagtagcccttgtacttgctgacaaactcgcctgatggccttgttcttgcggcaaactcgtaatctacagtaacactagtcgagcctttctcttgcatccctaggaacagaccaaagcaatggaatgcactttgctgatccatgttacagtgtgctgagagaaagaagccctgccctgcgagatggaacgcttgtgagtatatccgtccagatgggaaaagccgactgcactcctcacgcttcagatccaagtatgctatacactgtggatatggtcgatcaaattccaccaccttaagtggacgatatttgtaagctcgctcagcatatttcctacaagtcaaaacatctgcagcaagggtacgctgtcgatgtggtgcatcagctttgtatagaagtgcctcggtgacacatttagttgcctgttcatgatccagatcattgcatgcaaggaccttccgcagctttctgcaggtcatatgacaaaaccgaaccagtggcaacaaacgagtacccaagatctctcgcctctcctccagttttgggtattgagaacgtgcccacttgatcacaaaatcatagatggcgtcctctgatgccacctgcagatcattactccataggatggcttcaataccagccagaggaatattcatcgcttcatcttgaagcttggtcaaatctttgtacttgttggcaaggaatgccttggcagtgtcagtcagtggctgaactgcagcagccattgaaatgctcgaaggaaggtctagatagagcagtgcagattctgtagtcataggcaagcttcttagtaattgactgcaatgcctcatgcaagaaacaacctcgaatttatcagcaatcatcaagatatccagcagaagggttggctgatttgttgtcaactttccactatacataaagctcaaaagctccatgagggcattttcctctgtttcagatagacatacaatgatcagataaaagctatctgaagcagttattctaagagtagcatgcctctgatcagattctttcatgccatttgagaaaagcttataaaagaaagggctttccgcagctagaattgcagaactgatgtaaatagactttactctcaagacttgggtacactccatactccaggatgaatcgcagctgtctccatcctcaccatcttgtccaatatctggtggagattcttctatcatagctacaggttcctcattattttcctcataggtatcacattcttctgcttcaactttacaggtttccagatccgtgtattttcctgattcacattcccgagatctcgctctccggaagtaccgcaccgcgcttgctcccaatcggcagtgcgggcgaccaagagctatcccgcggagggggaagcaactgtctctgttggtggcccattttttttttgaatcaaaattaggatcacgaccaaagtattttccgacagctttctcgcggcggagctcctcccggcgtcgcttccgctggtgcgcccagtcggcgagcgaggagcacccttcccccgcggcgcccttggcccccgccgcgtcgtccccggcgacgatctcgatccgcagcacccggtcggagaagttgacggagttgaaggcgaacgcgaagctcgggcctcggctcgcccgcgagaagtccgggtccatcccccctctcctccccttccaatcaaccaaaccgcactcgtgcgcccgcgacctcctctcctcacctctccacctccaccgccaccgccgcctccatcgccgaaaccctaaccctagcgagagcagcagcagcagcttccagaaggagaaggagcccgcggaggcgaggaagaagaggcggaggggggcgtggtcgtaaatacgcgcgaacccgaggggccaatctgcaaaagcggacgaatcgcaaagcctcgtgccgaattcctgcag

SEQ ID NO: 21156 - DNA, 1757 bp, Oryza sativa
  Clone ID: TF_OsC157448_1
tggatcccccgggctgcagggctgagcgaccgtcccccgacgccgacgccgacccccgtctcgtgagggagggagggtcatcgccatcgaatcccaaaaaatcacccgccgccgccgccgccgcatcctcgaatccaatcattcaatcaaggaggaggaggaggatttggatttggatttggatttggatttggaattagggttagtgctcccccatttttttgagggcagtcgatcgagcttagctagggttggatgcgatgacggcggcggcgtcgtggtcccggtcggtgacggagacggtgcgggggtctcaccagtacacggtgaaggggttctcgatggcgaagggcgtaggggccgggcggtacgtgagcagcgacaccttcgcggtgggcggctaccactgggctgtctacctctaccccgacggcaagaaccccgaggacaacgccaactacgtctccgtcttcgtcgccctcgcctccgacggcgccgacgtccgcgccctcttcgagctcaccctcctcgaccagtccggccgcggccgccacaaggtccactcccacttcgaccgatccctccaggccggaccctacaccctcaagtaccgaggctccatgtggggctacaagcgcttctaccgaagatcactcttagaatcatccgactttctcaaggacgactgcctcgttatgaactgcactgtaggcgtcgtcaagaaccgtctcgaaacaccaaagaacatccacatcaatattcctccatccgacatgggccgttgcttcaacaacctcctcaatctccgcatcggctgtgacgtatcttttgaggtgggtgatgaaagagtccaggcgcacaagtggattcttgctgcccgctcccctgtattcaaagcccaattctttggtcctattgggaatcctgacctacacacagtcattgtcgaggatgtagaacctcttgtcttcaaggcaatggtgaatttcatatactctgatgaacttcctagtattcatgaactagctggatctgtctcaacttggacatcgacagtagtagtacagcatttgttggcggctgctgacagatatggactagatcggctacgtctgctatgcgaggaaaagttatgtgatgaactcactgctgaaacagttgcaacaaccttagccctagctgaacaacatcattgtactcagctgaaatctgcttgtctgaagttcactgctgttcgggaaaatctgggagctgtgatggagacagaaggatttaattacttggaggagacatgcccgtccctgctatctgacttgttagctactgtcgcagtagtggatgatgatgctgcgtcattcaaccggaagaggggagtcggtggtaacgaaggagcgaatcctgtggagagcgtggaggctagtgataggcgcatccgcaggagggtttagccgggttagaactaatgtaggctttcttcttggttcctcctctctatgcttgccatcaactgtacactatgatcgtagtttgtgtgatgtgctgtcatgttattagtggtgaaagtttaatttggacaccgttaaccaacctcttgccgtgtgaataatttcctattttgactacgccgtttcgcagcagagattttaaaaaaaacagtggattggatgttatgattggtatctgctgattataagatccggctagcatttccaaaaaaaaaaaaaaaaaaactcgagactagttctctctctctctcc

SEQ ID NO: 21157 - DNA, 1677 bp, Oryza sativa
  Clone ID: TF_OsC20177_1
gcacgtggccgtcccccccccaaaccctagacggacgacgacgctctctcggcgcgcctcgccgccgccggccgccgcggggggtggcggcaccggccgcccagtcgcgggacatggcggcgccgccgccccgctcccgcgcccgggcggggacggcgcgccgtcgccgacgagctcgcggtcggtgacgcagacggtgaacgggtcgcaccggttcgtgatccagggctactcgctcgcgaaggggatggggtgtgcgggaagcacatcgcgagcgagacgttcacggtgggcgggtaccagtgggcgatctacttctaccccgacgggaagaaccccgaggacaactccgcctacgtctccgtcttcatcgcgctcgcctccgagggcaccgacgtccgcgccctcttcgagctcaccctgctcgaccagagcggcaagggcaagcacaaggtccactcccacttcgaccgctccctcgagtccggcccatacaccctcaagtaccgcggctccatgtggggttacaaaaggttctttcggcggactgctcttgagacatcggattttcttaaagacgattgcttaaagataaattgcactgtgggtgttgtggtgtctactatggattactcaaagccacattcgatacatgttccagaatctgacataggctaccattttgggacactgttggacaatcaggagggtgtggatgttatatgtaatgtggcaggagaaaagtttcatgcccatcagttggtcttggctgcccgatcttctgttttcagatctgaactttttgagcatgaatcagatgaagagaagaatgaagttgatactagcaatgaaatcaaagagattgtcattgatgacatggagccaaaagtgttcaaggctgtgcttcattttatgtacagggacaatcttgttggtgatgatgagttgtctgcatcaagctcggactgctctatctttgatactttagctgggaaattattggctgctgctgacagatatgagttgccaagactacggttattgtgtgaatcttacttgtgcaagcatatttctgtaaactctgtggcaactaccctagcattggctgaccgacatcatgctatggagcttaaatctgtttgcctaaaatttgctgctgaaaatctttcagctgtaatccggaccgacgggtttgattacctcaaagacaactgccccgcgctgcaatcggagatactgaggacggtcgccgggtgtgaggaggaatgcagcagcggagggaagagccagagcgtgtgggggcagctctcggatggcggcgataccagcgggcgcagggtgaggccaagggtctgaacacccagccactgctatgccaaaagcggcttgttttaaagtgtaactgtgtaagcgaattgctgctgtacaaatgggacggctaattggtttgtggcgacatttaaaataatagcatcagtctgttatactacccctacattcgttcaaatttcaatagctggtttgggcagtagctccgcagatggaagggattatgtttagtgatctgagacagtgatgtgtagtcagtagtcagctattctagtttcgatttgcaatttataaacttcagtttttagcctgctcgtgtcttggcccccccttaaaaaaaaaaaaaaa

SEQ ID NO: 21158 - DNA, 1469 bp, Oryza sativa
  Clone ID: TF_OsC42903_1
tttttgtatttttaaaactattttcccgatcgaatacacatacaaccttattttgatcgttaagatggtgcatatgctctctctagctatatatctactcctcgtctccctcttacatgtcgctatatagccttagctactttttgcatgtgtgcgtgtgtggctaataacctaagctaagccgattcaattgatttctagccggcggccgggtgcggccgggtggtggtccagaacaaggcgagcgcgcggaggcggccgaagtagtcgtcgacggcgacgaagcagcgcgccgcctgcctcaccgtcagcatccgccgcagcgcgtgcagcgtccgcatcctctcctcatccgcctgtcgtaggaagatggcgaggttggcgagcttgtccatggcgagctgcaggttgctgtagctgccgtactgccccatgaagctcgccgcagccatggcggcggcggcggaggggtggtacatcaccggcggcgtctgctgcgacgacgacggcgcgtccgaggaggagacgacgtcggagagcgaccggagcagcgcctgcaggccgccgtcgagcgcgtcctcctcctgcctcgccgcctgctgcgcgctgtagacggcggcgagctgctgctccgtcaggggctccacatgccggaccacaaccttgataagctccgaggggcggaagccgcctatccagaggaagcattgctctacggcgcccttccacaggccggagaggaggtggagggggtcagcaccaaccagcctagccttgtgagccatcagcaccccatagtgtgacatggcttcatcgacatggggctgcagctcgccatccggtcggtgctcctccacagcggcccggagccggctgatcacttggtggtgtgcctcctgccaccgctcatactccaagttgaacaatgcagcgtctgggcttagaattccagcaccgcagaatgcaccctgagctcttgtgaattgtatctcctgttcaagatgcgccagcctgatcctgcctgtctctagctgctgaatgtaagccttcttccttagcctgctctttcttgcggcctctctattctgcgccagccttctcagcgttttggggtccggcgtcttgggccccttgagctctgaacttgctgacgctgccatggcgccgccgctgccactgccaccttctttctttggtgttggagttggctctccatccattggctgggaggggaagatgttgagagtctcttttacaaaattaagtggtttgtggggttcttcttgagtagatggcttatcttgttcctggccatcaaagtagaggaggagagcttgatccaaatcagatggcatgtcatatccttcagggttccttcttctgtggagtttcagccacattgtatcatcaaccgtgtgaagcactgaagctttcaggctgaccaacctttctgaacatttcagctgcat

SEQ ID NO: 21159 - DNA, 300 bp, Oryza sativa
  Clone ID: TF_13447549
agaggattttggcaaacaggcagtcggcgcagcggtcaagggtgagaaagttgcagtacatctctgagcttgagcgcagcgtcaccactctccagatggaggtgtcagcactgtcacctcgtgtggccttccttgatcatcagcggtcgctgctcaccgtcggcaacagccatctcaagcaaagaatcgccgccctcgcacaagacaagatcttcaaagatgctcaccaggaggctctgaagaaggagattgagcggctacgccaagtgtaccaccagcagcagatcaaggccaccggag

SEQ ID NO: 21160 - DNA, 1349 bp, Oryza sativa
  Clone ID: TF_OsC728_1
tgcaggaattcggcacgaggattttcgccatctcctccgcctcgtggtcggcgctccacactctaccctcgccgaagccttctagaagatccgccgccatggacgaccccggtgcggccgatccgggggcgcgcccccaccacgtgtcgccggggcagccgccggtggtgccgcgctccccgaccccgctcgacctgtcgagcgccgcggcggcggcggccgcggcgtcgtacaggaggctctcgccgtcgctccgaccgcccgcgcacccgcaggcgcgtctcccttcgccgtacccccagatcccctcctcgtcgtcgtcggcggcggcgggctcgtcggggcaccacgcgcggtcgctctcgcagccgctcttcttctcgctcgactcgctcccgccgctgccgtacgccgatctggccgcgccgcccgccatcccgccctccccgccttcctcgagctccgacccgccgccgccagggctgccgccgcggaagggcgggcaccggcggtcgcagagcgatatccccttcgggttctcgcacctgagcccgcccctgccgcctcccgcgcccgtgaagcgggaggccgccacggcggcggaggggtgcagatcggacggcgatgacttcgccttgtacgacctcgtcaactcctacatggacctcgacgggatggaggctctcaactcctccgaggagcggcacgaggaccgcgacagccgcgccagcggcacgcgcaccgggagcgtggccgacagcagcgagaacgaggccgagagccactcgactccagtggagaggaaggacggaggaggcaaatcccggcattgccgcagcttatcggtggacagcttcatcgagaagctcaacttcgacgagtcaccgaagctgccactgccgtctcccagcggtggcctatccagaagcgggagcgggtccttggatggcggcgctgcatctctgtttggtgctgagtttgccaatggggagttcactgaagctgagaagaagaagatcatggcaaatgagcgccttgccgagatcgctttgactgatcctaagagggttaaaagaattttggcaaatcggcagtctgcggcaaggtcaaaggagcgtaagatgaggtacattcaaaagcttgagcacaaggttcaggtgttgcaaacagaggcttccacactctcacacagtttgaaatgctgcagaaggactccctggactagccctcaaaacaatgagttaaaattaggttgcagcatggaccacagcccagtttaaaaatgccctgatgaagcattactgccgaggtccagcgtctgatactcgccgctggcgagataactgacg

SEQ ID NO: 21161 - DNA, 1818 bp, Oryza sativa
  Clone ID: TF_OsC593_1
tcgagcggccgcccgggcaggtcgcctcgcctctctctcttccttctgaccaacccgacctcggcgcctccccccatttctctctctctctcttcgcgttgccgtctcgaccccgcctccaccgccgaagccgcccgaggcggcggccgccggcagctgggctcctccgaatccgaacacggcgggggctctcccctcgctccccacggcggttggcacctgctggctctcgatccaacgtgtacagctaatttgatctgttggcgccttagctagaaaggtggcgactctggcatctcagtgatcatagggcatttgaaggtggcctgcatccctgttacaagtaagggacaacaaagcaatttgttgtctctttatttggagctgggaagaacccggcatggcagatgctagttcgaggactgacacatcaacagtcctggataccgacgataagaatcagatggtagacgggcaaagtggagctattgtgccttctaattcatctgatcggtctgacagatctgacaagcccatggaccaaaaggtgttacgccggcttgctcaaaatcgtgaggctgcaagaaaaagtcggctgagaaaaaaggcatatgtacaacaattagagagcagtaagctgaaacttgcaagcttggagcaagagatcaataaagctcgccaacaaggaatttacatttcgagctcaggagaccaaactcatgctatgagtggaaatggagctatgacttttgatttagaatatgcccgttggttggaggaacaaaacaagcagataaatgagctgaggactgcagtaaatgctcatgcaagtgacagcgacctccgtctcattgtagatgggataatggcgcattacgatgagatattcaggctgaagggtgttgccgcaaaggctgatgtgtttcatatactttcaggcatgtggaaaacacctgctgaaaggtgcttcttgtggcttgggggttttcgttcctctgagcttctaaagcttcttgtgaatcagctcgagccattaactgagcagcagttgttgggactatcgaacctccaacagtcctctcagcaggctgaagatgctctatcacagggaatggaagcgttgcaacaatccttggcaggtacgttggccgggtcccttggtccatcaggatcttcagggaacgtggcaaactacatgggtcaaatggctatggccatgggcaaacttgggacccttgagaatttcctccgtcaggctgacaatttgcggcagcagactttacatcaaatgcagcgaattctgacaatccgacaagctgcccgtgctctacttgcaatacatgattacttctcacgtttgcgtgccctgagttctctctggcttgctaggccacgggagtaacaacacatagggtgcatcaccgttaatgcttcatgaactgatctgggaggaacggcggagcgggactgattgcggatgcatttgcagaagattggtggctcagttccctcggcacaagttgtattgacaccttttggtttcatgttgtacctgatgttgtacaagtagggtaaagcttgtaacttgtaagttatggtgaatttatgattggcagattgtacaattgtattagcaataaaataaaaggtagataaaggctggaagaatacccagcgatcttacagtggtcggaaacgaaaagcaaaggggacatctcgcacgggatggtcgattgttctaactgaatagataagcacttaagcagggcctttcttttatgacaaccgaaatataggtgaaatggaaactatgggtag

SEQ ID NO: 21162 - DNA, 1549 bp, Oryza sativa
  Clone ID: TF_17025921
actcactatagggctcgagcggccgcccgggcaggtgtcgctcgtcgacccctctccgccgccgaggctcgctgtcccaagctaatccgtccgcttcgttgaggattccattgaatgcttggctgtggtggagtgctacactgctagtagcagcttgcatctcagcaatttgggtgaaccccccacattcttgaggcagtaacaattggatctacatcttgccactacaaaaggatcaacgatctgtactagccttcatttgtgggttcctcattgggaattgggattctttacaatggcagatatgagccctaggacagatacatcaacagatgataccgatgataaccacatgcttgaaccaggtcagcttgctcttgctgctgcttctgactctgacagatccaaggacaaacatgaagatcaaaagacattgcgtcggctcgcccaaaatcgcgaggctgcaaggaagagtcgtttgaggaaaaaggcatatgttcaacaattggagaatagcaggctaaagcttacacaactagaacaagaattgcaacgagctcgtcagcagggcatttttatatccagctcagtggaccagactcattccatgagtggaaatggggcattggcttttgatatggagtatgcacgttggttggaagaacacaataggcaaattaatgagctaaggtctgcagtcaatgctcatgcaggtgataatgagctccgtggtgttgttgacaagatcatgtcacactatgaggagattttcaagcagaaaggaaatgcggccaaagcagatgtctttcatgtgttatcaggcatgtggaagacaccagctgagaggtgtttcttgtggctaggaggattccgaccatccgagcttttaaagcttctttcgacacagcttgaacctctcactgagcagcagctgtcagggatagccaaccttcagcagtcttcacaacaagctgaagatgctctttcacaaggaatggaggcccttcagcagtccttggcagaaacattggctgggtctcttggttcttctggatcaacgggaaacgtggcaaactacatgggccaaatggcaatggccatggggaagcttgggacccttgagaatttccttcgccaggctgacaacctgcggcagcagactcttcaacagatgcaaaggatactgaccactaggcagtctgcccgtgcgcttcttgtgataagcgattactcttcgcggcttcgtgcccttagttccctctggcttgctcggccgaaagaatagcaagcgcaagtaacttgactgcaaccacatttttcgggtttgggaggtgatggtgatcttacctggaagagttgacaatcctgcaaaggacttgattcggagatatttgcacatactataatccaaaagagatccttgtgttcaggtagcttagtcttatggttaagtgcattaggccctggcccatgttgtactgttagccgctgtaaaatactgttccattattacttatgtatctgtaatatcctaattttcagagaatgc

SEQ ID NO: 21163 - DNA, 460 bp, Oryza sativa
  unsure (1)..(460): unsure at all n locations
  Clone ID: TF_LIB3431-020-P1-K1-E3
cccacgcgtccgcccacgcgtccggagcaagaagaagaggaggcagatgagaaatagggattctgccatgaaatcgagggagaggaagaagatgtatgttaaggacctagagactaagagcaagtatctagaggccgagtgtcgtcgcctcagctacgcgcttcagtgctgcgcagctgagaacatggcgctgcgccagagcttgttgaaggataggcctgtcggtgccgccacagccatgcaggagtctgccgtactcacggaaaccctgccgctggtttccctgctttggctcgtgagcatcgtgtgcctactcccggtgcccggtctacccaaccgaaacccggtggctcgaagcagcgccggaagagatctcgcgacggtaaccggaaagaagacaagcagtgaacaacagctagaagaaacattactactccatgggaggcgtngcaagggctcg

SEQ ID NO: 21164 - DNA, 2073 bp, Oryza sativa
  Clone ID: TF_OsC192_1
tccttctccatctccctctacacatctctctctttctctgtctctccctctcttcatctaggctgtgaagaaaggaggacaaggctcgtaggacgtgttcaaaaggacaagatcttctttgcagtacacagtggatgaaactccaaggctgattcaatttgccagtgtgtgagaaacgagaaacaaccaagaggctcatcaggatcaagtggctgatcatcatcatctctctctaggatgtagagctagtggtgatcatggtgcaaggtgaggagagttcttggaggatggcagcaagcacccaccatgagagagcaatacctctcaaccaagcacttgcttatggagtccaagcccatgcttctccttctgttgctgctgcaccacctgccagcttcttggacttccagcctgctgccgcggcagctgcctacttcggcgagctggaggaggccctcatccatggcgccaacgccggcggcgtcgtcgatcccggcatgatcagagccgacgtgcacagcaagtcggcggcagcggcagcgacggcaggatatctcgcggccaggccccccacgctggagatcttcccttcatggccaatgaggcagcaacagcagctacacagtgggaattcgcagtcagtcgggagcaccactgactcgagctcagcccagaacacaatgccgcagatggagttggtgtccccagcgagtatcagggcctcctccgagcaccagcaccagcagcagcagccggggcaggaggtcatgatggtgaccactgatgattacagctacaagccaggcctcgctgctgcctccccaagctttcagcagcagcatcagctccagcaccaccagcagcagcagctgcacggaggaggagaccatgacaagaggaagcatggatccacaagaaaagatggcaagtcagtggatgccaagacagaacggagattagcgcaaaacagagaggctgcgaggaagagcaggctgagaaaaaaggcttatgtgcaaaacctagagaccagcagggtcaggcttcagcagatcgagcaagaactccaaagagcacggtcacagggcctgtttcttggggggtgcagagcagcaggcgacatgagttctgtaaaatcgtttgcaggcgcggccatgttcgacatggagtacgcgcgctggctggacgacgacagcaagcggctgaccgacctccgtggcggcctgcaggcgcacctgctggacaccaaccttggcctcatcgtggaggagtgcatgcagcactacgacgagctgttccagctcaaggcggcgctcgcgcgctccgacgtcttccacctcctcaccggcacgtgggctacccccgccgagcgctgcttcctctggatgggcggcttccgcccctccgaccttctcaagatactgatacagcagctggacccgctgacggagcagcagatgctggggatctacagcctgcagcagtcgtcggagcaggcggaggaggcgctcgcgcaggggctgcagcagctgcaccagtcgctcgccgacaccgtcgccgccggcacgctcaacgacggccccggcgtgcccaactacatgagcctcatggccatcgccctggacaagctcgccagcctcgaaagcttctaccagcaggctgacaatctgaggcaacaaacgttgcatcagctgcggcggattctaacaacccggcaggcggctcggtgtttcctctccattggggagtattaccgccgcctccgtgctctcagcaacctctggtcttcacgtcctcgcgagaacttcattggcaccgagagcgtcagtcccacaggaaccgagctgcaaccgatgcataatcagcctcagcagaatcagtactcaggattttgagagcttctcctggaggatgtaaactccggccaaaagtgatgttagaaagagagggtgggagagggagaggggttgtaatgttctattattaaagtattgagaaagcaacatcactaggaaaaggaagaggcaaaaatttgttgaggtgcaatgcaatgctggtcactggctcacttgttcc

SEQ ID NO: 21165 - DNA, 1865 bp, Oryza sativa
  Clone ID: TF_OsC596_1
atggagggtggtaggctaggaggagcggcggcttcagcatcggcggcggcggcggcggacgcgcgcggcgggatgtcgggcttcgcggctcctcagcacgccatagtgaagcatggaccagggagtgtgacacattgtggtggaaaatggacttttgctgaactatgccagtctgaacaaatttgggttcttgactgctactgcatgcaatgggcatgcaagtttgcgaccaatgcaactgaatgccatacaaatttgaacaacgtgcaacctactcaagttactgattttggggcacttgcgcagtctgctggattccgaatagaagatctcgctaatctcagtacaaatggtttgttcaatctgaagtcaaatgctcataccattatcaatgaccccctccaatttgagaattatgtaaagtctatttctccgtctaatattactacacccccggccgggtcagtagttgaccctcagacactggtcccacaaaagggagcacaactgaattgggtaactataaggactggtaacgttgagaattggggggagtcgactatggctgatacaagtccaaggactgatacatcaacagatccagacactgatgagaggaatcagatgtttgaacaaggacagttagctgctcccactgcttctgattctagtgacaggtcaaaggacaaactagatcataagacacttcgccgccttgcccaaaatcgtgaagctgctaggaaaagccgtttaagaaagaaggcatatatccaaaaccttgagagtagcagattgaaacttactcagatagagcaagagcttcagcgggctcgtcaacagggcatttttatatcaacatcgagtgatcagtcccactcagcgagtggaaatggagctttggcatttgacatggagtatgcacggtggttggaggagcataacaaacatataaatgagttgagggctgcagttaatgcacacgctggtgataatgatctcaaaagtacagttgatagtattatggcacactacaatgaaattttcaagctcaagggtgtggcagccaaagcagacgtttttcatgtgctgtcgggaatgtggaaaacccctgctgagaggtgcttcatgtggctaggtggcttccgatcatctgagcttcttaagttactggcagggcaattagagcctcttacagagcagcagcttgctggcatagccaacctgcaacaatcctcccaacaggctgaagatgctctttctcaagggatggaagcactacaacagtcgcttgcagagaccctggcatcaggatctctcggccctgcaggatcttctggtaatgttgcaaactacatgggacaaatggcaatggctatggggaaacttggtaccctagaaaacttcctacggcaggctgataatctgcggcttcagactcttcagcaaatgcagcgcatattaaccactcgccagtcagcacgagctctacttgcaataagtgactacttctcccggcttcgtgccctgagttctctttggctcgcccgtccaagggaataaataaattgaattgattcgtaagtaggatattgttaggtaatgtatctctagtgttatatcagataggaattgaggtattccctacttcctagattcttcacaatgttcatgtattggtgacagactcggatcactatctttccatgtatgtcttcaagtgaatgttcaatgcatattgtagtctgtatatgacatcatatgatgagttgttgggcaaatttgtaacatttttgagaaaagtgggggatgtaaatacttgcagaataataaaaaagcataaaaaaaaattatattggagcctgcag

SEQ ID NO: 21166 - DNA, 1595 bp, Oryza sativa
  Clone ID: TF_OsC100050_1
atggcgaacgcgaagctgcccaagcaggcgctgctgccgccgcgcagcccgttcccgacggcggcggcggcggcggggccgtacgccggcgaccacggcccgatcgcgcggccgcagggtgcgccgcaccacaggcacgggcacggccacgggcaccaccagcgcacgtcgtcggagagcttcatcgaggagcagccgtcgtggctcgacgacctgctcaacgagcccgagacgccggtgcggcagcacggccgggccggccaccgccggtcgtcgagtgactcgtttgcgatgttcgacggaggcgccgccgccggcgcttacgccaatggctttgaagggatgggaggaggaggaggaggagggcaggccgcgccgtggggtggtgtgcaggagtactatgcgaagccaagctcgtttggtaggcaccagggccggccatgggagcagggcatgaacaatttggtgaattacaggcaaagcggcggtccaccgatgccggcgaaggagaaggttggtgggcaccatgggtcgccgagcgtgttgagggatcatgatcatggtatggacaggagatcctcggacgaatcggggcatgatcagaaggttgggcctgagaggaaggagggcgtgccgccgaagcatgcacaatccgaggcggacaccaagcgcgctaaacagcaatatgctcaaaggtcccgcgttcggaagcttcaatatattgcagagcttgagagaaaagttcaggcattacagtcagaagggatagatgtgtctgctgaaatggagtttcttagccaacagaatattatgcttgacttggaaaacaaagccttaaagcaaaggctggaaagtctagctcaagagcaactaattaaacgctttcaacaggagatgtttgagcgggaaattggtcgtctcagatcattgtaccagcagcagcagcagcaacagaagcagccgcaacctactactaccctcagtcgaagtaacagcagagacctggattcacagtttgctaatctgtctctgaaacacaaagaccccaactctgggcctcttcgtactcagtcctcgtcaatcttgtgagttccacacaaagttgccacaactcctagataactctttgtggctgtcatctgcatcaagaaaggagcaggcgcacctggaatcgtgtacccccatctatggtgaataataacactggaaaggctaataactgtggatctgatctttattcttttggaatatgcacctggcggtcatcctcagctcacttccattgttgatgctcgaccagtcggaggtgtttagggtttttctttgtagtttgatgcttttattatcgcatcgttgtaccattttcgaaatgctagggttctaatttgttaccgtcctgttccctgtgatcatgcattatgttagcgatatttggattagtcttgcctttatcaatggaatgtggagcactagtcagcatctggtacatacagatgttttgaaattgtgccacatccttgagaaaccgtatgtgttgtaacattgttattcaataagctagtgcaaatgaagtattagcgttgttcagtgttccc

SEQ ID NO: 21167 - DNA, 1178 bp, Oryza sativa
  unsure (1)..(1178): unsure at all n locations
  Clone ID: TF_OsC239382_1
atggcgcagctcccgcccaagatcccggtggcggcgccggggcaccaccagcactgggcctcggccgggggcgccggcgacgcggcgtgggcggatgagttcgccgagttcgcggcgtcgcggcggggcgcgcaccgccggtcgctgagcgactccgtggcgttcgtcgaggtggcgccggcggggtgcggggcgggcggcgagttcgacaggctcgacgacgaccagctcatgtctatgttccccgacgagggcgggtcgtcggccccggggtccgacaacggcggcagcgacagcgacggcggcggcgacaagcacgccgcggcgcagagcgacgacgggcagcacgccgccggggagccgacgcaggagcaggcggcggccacctcgccgacggagctgatccgggaccccaagagggtcaagaggatactggctaatcggcagtcggcccagaggtcgcgagtgaggaagcttcagtacatctccgagctcgagcgcagcgtcacaaccctgcagaagtggcgccagtttgagaccgaccgatggacacagccacactggttggctggcaatagcacacaatgtggcgaggagatgagcgagagcaacgaggtatccgtgctgtcccctcgggtggcgtttctggatcagcagcggacgatcctgaccgtcggcaacagccacctcaagcagcggatcgcggctctagcacaggacaagattttcaaggatgctcatcaggaggcgttgaggaaggagatcgagaggctgaggcaggctgtcctagcctgttacaggctgacggcacctgacctcttgtgcatgatttggttcccgcttctcggtgaaagaaaccaccggaggcgaaaaacctgcgcagcatatcgttatcgtggaacaccgttactgctccagtttcaaggacaagtcgcacagcgtgcaatacaacatctgcattattcagaatttgcagtatatggatctggatcagcgatgattaaccatgctacatgtggtgttcttgtctcaagatactgattgattggagttctggtttacaatgggaattgtgggagatgtcaataagaaaatgtgaactgcaataagattaactgtgatttttgaaagccnnaattaataataataaaaatatttaaatttaattatataataaa

SEQ ID NO: 21168 - DNA, 1021 bp, Oryza sativa
  Clone ID: TF_OsC17917_2
cccagcgtccgctttggaaagtgagttcaagtagactttcggaatacaaagtagaggatcttgcggcagctctattgaattctttcacctacaacattgggcaggtatttccagatatctgagttactaggtgtcattcaccaataatgtgctgacctcattttgtttctcttttagatagcctactttgtagctaatctttctggtctgaagagaattttcttccgaggtgcttatatctgtggccatgagaagactatggacaagatttcccattccctcagtcttatgaacgactcgggtaggccccaaatttgttgagagatgaggtgcgtgagcaacatggaaacggatgcggcaaacagtttgttactgaggtgtgtaaggttgttctacaccgtaacagtttggcagtagttttaagtcaatcatgatttttacggaggaagtgtgcacacaaggtgttacccagttagcagtgctcatgcctgttgagctcaggttgtatagttacttatttttctgtacttattggtgttggtgttcccttatctctcttgttctgtatcttgtatatatggcagcagccgggataatgaacatatccggtgtcgttgtattatttgcaaaaatcaaaacatcccttatcaggttgagtattggtccaaaagccaagttcaaacaacatttctgtgccatgaggggttcttgggaacactaggtgcattttggagctatgagaacatgggtattgacggcttggcagcacatgaagtcataagggaggtcttgcttggcgctccttacactgggcagcttccatctctgcctctgactcaccaacaggacaatggagaagatacgaccattgaaggagaagtagaacggcttcgacatgacaatgctgtgctgaaggctgagcttgaacggttacaaagggagaacacagagctcaaagcgaagctggtaaaatctggcaaaccaaataccttttatcattaaacataggatgcagtagtga

SEQ ID NO: 21169 - DNA, 1866 bp, Oryza sativa
  Clone ID: TF_OsC55794_1
ggtcgggcgggcttgcctgctctcccgcctgcccgtcttttttgggcggccgcaagctgaagccagattgctagaaggtagttcttgaggactgaagcaaggtagaagaacttgagcttctggttcgtgtggagctactgggataagttggctgctgattgctgaagatgggagaagctagcagtagttcaggacatccaaggcagaatcctcatgttcttggctatggcttccatggagctatgcccaactccttgccttctgcaaacttgttcgagcagcaaggaggtgctaactattttggagaactagaagaggctctgatgcaacaggtggccacactcaggaggactcaacaaactgcaaccaccacctccacccttcatcatggagacaccacccccttctccaccactgctactgctgcggctacagctaggcctcctcctacactggacatcttcccatcctggcctatgaggtctctccacacacccaaggagggttcaaatgtgacagcagacacaacagactcggagagcagcagcaagaacaacagcaaccaaaatgcctcatcagaccagcatgtgctagtaggagacatggcaggccagttcgaccaaattccacagcaggaacaacacaagaagatggcaactaacagtcccactcatagcagcaagactggcaaggcgcttgatccaaagacgatgagaaggctcgcccagaaccgagaagcagcacggaaaagccgactgcgaaagaaggcttacatccagcagcttgaaagcagcaagctgaagcttgctcagatggaacaggatatccacagagctcgttcccagggcttactgcttggagctccaggtggaaacaccagctcaggtgccgcaatgttcgacgtcgactacgcccggtggctggaggaagacagccagcgcatggctgaactgcacggagggctgcacgcacatctgccggacagcgacctcagagccatcgtcgacgacacgctaacccactacgaccacctcttcaacctcaagggcatggcggccaaggccgacgtgttccacctcatcaccgggatgtgggcgaccccagctgagcggtgcttcctctggatgggcggattccggccctccgagctgctcaagacattgacaccccagctggatcccctgactgagcagcaagtggttggtatctgcaatcttcaacagtcatcgcaacaggcagaggaagctctctcccagggcttggatcagctgcatcagtcattagcagaaaccgtggctggagggtccccgttggatgaccccaacgtcgggagtttcatgggtcacatggctattgccctcggccagctatcaaatcttgaaggttttgtcatacagatcaagataggagttgcactctctctttgtgtgactcaacttcataaatgagtcaggcaggcagctcgatgtttcttggccattggagagtaccataatcgcctccgtgccctgagctcactttgggcttctcgccctcgagagtaaaccccatgcctgatactggtggcagatgaaggcaattgtggggaactaagcattgcagcacatccatctgagagccaatattcagccttctgaaatcctgtttcaaatgtattttgcaactaaccttcaaagtagggagcaaaagcttgttttttaaatgaaatctagcactctagcagatatgtgagaaactcagaagagagttgggaaacaatggaaggctccagctgcactagcaaaattttcagatggaatgaatgggattgcatgattttcagttactgatcataaagcaagtagttcacgtcctttcctggatgat

SEQ ID NO: 21170 - DNA, 2243 bp, Oryza sativa
  Clone ID: TF_OsC594_1
cgccacctccgcctcgcgcccgccaccccgagaccttctcgaagcttcctcccccccaaaccgaaaccgctcctcctcctcctcccaaatccaccacggcgacgccgccgccgcagagcccctagctcccggaggtccctcgcccccgccagctccgacggcctcacggaaggaggagtaacgtgggcgttgattggatttttttgttttccccccaccttgagtgagtctgtgccgtttccccggcggcgagggagggcagagggctgatcatggtcgtgcgccgccggtgccttgccgagatttcccccaaccgccaccgacgatcgttcacttggcacaaaggggagtagcactgtccaagctgttgtggtccgtcagggagattggccaacctgtggggtttcagatcgacataagtacgtcagtatttcagccatcgatcaatctggcggttcatagggctgtgcttgcaacctttctggcagaaaggagagagcaaagtgatttgctgtctcctgttgattgtggcctgttgaggcccagtaatggcagatgctagttcaaggactgacacatcgattgttgtagacaacgacgacaaaaaccaccagttagaaaacggacatagtggtgcagtcatggcttctaactcttcagatagatctgacagatctgacaaacttatggaccaaaagacaattcggcggcttgctcaaaatcgtgaggcagcaagaaaaagtcggctgaggaaaaaggcatatgtgcaacaactagagagcagtaagctgaagcttgcacagctagagcaggaacttcagaaagctcgtcagcagggaatcttcatctctagctctggagaccagacccatgccatgagtggaaatggggcattgacttttgacttagaatacactagatggctcgaggagcaaaataagcagataaatgagttgaggacagcagtgaatgctcatgcaagtgacagtgaccttcgtcttattgttgatggcataatggcgcattatgacgaggtattcaaggttaagggtgtagctgcaaaggccgatgtgtttcatatactttcaggcatgtggaagacacccgcagaaagatgcttcctgtggcttggtggtttccgtccatctgagcttctaaagctcctagcaaatcacctcgaacctttaaccgagcagcagttgctgggattaaacaacctccaggaatcttctcagcaggcggaggatgcactttcacaaggtatggaagcactgcagcaatctctggcagatactttggctggatctctcggttcatcagggtcttctgggaatgtggcgaactacatgggtcagatggcaatggccatgggtaaactaggaacgctcgagaatttcctttgccaggcggacaacctgcgacagcagacattgcatcaaatgcaacgaattctgacgatccggcaagcctcgcgtgctcttcttgccatacacgattacttttcacgcttgcgtgctttgagttcgctgtggcttgctaggccacgggagtaacaaaatggtcatgtgtgcctgtgacgaggttagacgctcattttgatggactgcagataattgggtttttccctgtacaattgtgtttggcagctgtggactaaagttaaaaactgtacctaaagtggtgtatgcaaataggtgaagcctctaagtaagttataacgattgcattattgtgttagcaataaaagttgggtaattcaggatgtgtcctgagttgttttgttgtagtagaagaactgcatgtagtggctggaaatgcagtgttgaatgtaactaaagctctgctgctcacgttgcataatgttgtgtagtaatagttagctagtgatgcccattttacctgcactcctctgggaagctgaaactgcaacctgaagcaaccacggtgcagaagaccgcatgcatggtaaatgattaaaaggatatatatgggctcaacatcgctgccaaatcctgagataatgaacaggcatgctaaactgctacttccacatgaaacctcccagttgacatgaagaatgagctgttcagttttatggtttctgtgttgcactgtacataattcctgtacgggtctgaatttatcctgaaatcatgctaaactgcagaagcatatgaaatctccagaccggttgacatgaaaaaaaaaaaaaaaaaagcgggggatccactagtttagacgca

SEQ ID NO: 21171 - DNA, 1443 bp, Oryza sativa; identical to SEQ ID NO: 11515
  Clone ID: TF_OsC65434_1

SEQ ID NO: 21172 - DNA, 495 bp, Oryza sativa
  unsure (1)..(495): unsure at all n locations
  Clone ID: TF_LIB3433-057-P1-K1-E1
cggacgcgtgggggaaaactgttagatgccaagactgaaaggcgattggctcagaacagagaagctgcaagaaagagcaggctgaggaaaaaggcttatgtgcagcaacttgagactagccgcataaggcttcagcaaatcgagcaagagcttcagagagcacgctcacagggcttgtttcctggaggatgcagtgcacctggagatatgagctcgggtgctgtaatgtttgacatggattacacccgatggatagacgacgacagcaaatgcatggcagagctccagggcgcgctacaggcccagctccccgacggaaaccttggtgccattgtggaagaatgcatgcgccactacgacgagctcttccaccttagggccgtgctcgccagcttccgcgtgttccacctgatgactggcatgtgggcggcgccggcccgacggtgcttcctnncttttggggcgttcggccatcagaaattctcaaaatgctga

SEQ ID NO: 21173 - DNA, 594 bp, Oryza sativa
  unsure (1)..(594): unsure at all n locations
  Clone ID: TF_LIB4371-001-Q1-K1-H2
ccctagcaacccattgcagtacctgatgattgatgccacaagtggtgtgaactgtaatgttggtgcagccaatggaactggagacacaggtgatgctgtatgccacgctgatcaagagaagtcacttaaaaggcgctcaggccaaagatcaagggtcagaaaacttcaatacattgctgatcttgagagaactgttgactcacttcagaacataggggctgatttggctgtgagggtggcatctcttttccagcttcgtaatgctctatcaatggaaaacaagcaactgaggaggcagatcactagtcttcagcaggcaaaactaattaaggatggccaaacgcagatgctgaagaaggaaaccgagaggctgaagcagctctcagtgcgccaccgcaggagcaggagcgtcacctcttgctttgaggccaactcatttggaggaggagacccatctgcgatcaactggcagatgctcgacatgtcaaagctcagcttgaacggggncgctttgttgttcctcctagaggcggctacggcatgtgaaaatttgacagcaacaaccaacattgcctgcactgatcttcacctgtg

SEQ ID NO: 21174 - DNA, 1582 bp, Oryza sativa
  Clone ID: TF_OsC739_1
ttgtcggcgaacgcgcagcgcgcgaccaccgttgcttggagctagctcgcggggatctgcagatctcgcccatggcgtcctcgtcggacgagcagccgaagccgccggagccgcccgcggcggcggcggtggcggggacggccgtggccaccgccgccgcggcggtgccgacgcacgccgagtgggcggcttcgctgcaggcgtactacgccgccgcggggcacccctacgcgtggcccgcgcagcatctgatggcggcggcggctgcgggggcgccgtacggcgcgccggtgccgttcccgatgtaccacccgggcgccgccgcggcgtactacgcgcacgcgtccatggccgcgggtgttccttacccgacagctgaagccatggcggcggcggcggcggcggcggcgggggcggtgccggaagggaaggggaaggggaagggcgccgccgcgtcgcctgagaagggaagctccgcggcgccctctggggatgatgcatcccggagtggtgacagtggcagcgaggagtcgtctgatactagagatgatgacactgaccacaaggattcgtctgcacctaagaaaaggaaatctggtaatacatcggcagaaggtgagccgtctcaagctacgcttgtgccctatgctgctgtcgagtcaccgtatccgttgaaggggaggtctgcgtcgaagcttccagtttctgcaccagggcgggcggcacttcctaatgccacacctaatttgaacatagggatagatctttggagtactcccccagccttagctgtgcccgcagggcagggggaagcaagtcctgggttggcacttgctcgacgtgatggtgttgctcacctggatgagcgtgaattgaagagggagaggcgcaaacaatctaacagagagtctgccaggagatcaaggttgcgcaagcaggttggatacctctatgggtctggcagtagatggcagacctggaaagaaacacttattctgcttggtgctgccatatttctggcaggaggaatagagtgcaggatagatgcatacacgactgatgggtatgatgtcagcacttcaccagatgttggcttgtctgcacacgggcaatatgcacaacaagccatgctccaagaaactgacaaacagcatgctcctcacaagaacactaataataacagcaacgggaactatgtaggtggcagccacaaaccagaggctaactctaggtgagagagaatcatgaggaagtaacgacaaagatgagatgaggtgttcttcttatctaaccacaacacccatcatcaaaccagtgtgtgttcttttttagcaaaaagctgttgttttagttcttctcacaactcaccggggccctgtagagctgcccccaaatcgcagccatatgtattatttatggctcgttgccgagaagaaatgagtttgtgttttgtgtttgtgtggtgtgtgttttgtaaaccgattgatgtagctattgtaacaaacctagcgcttagaatttttatgtttgctaacatttgatgagggaatgtaaccggccaattcggtggcctgatcggttt

SEQ ID NO: 21175 - DNA, 583 bp, Oryza sativa
  Clone ID: TF_OsC207527_1
atgtcatatgcatttaacaaattgctcccaactacccatttcaggcagtatgctcagaggtctcgtgttagaaagctccagtacattgcagagctcgagagaagagttcaagctttacagacagagggtgtagaagtttctgctgagatggattttcttggtcaacaaaatatcatgttagatttggagaataaagccttgaaacaacggcttgagagtctatctcaggaacacctaattaaacgctttcaacaggagatgtttgaacgggaaattggccgtctcagatcattgtttcagcaacagcaacagcagcagcacataccacagcagcagggtcctacccacagtcgtagtaacagcagagacctcgattcgcaatttgcaaacatgtctctaaaacacggcgatcccaactcagggcgtgatgctgttccaggccttcgcatttagggattcttttcccccagcttatgattctgtgagtttcacatagcttcgctatccctgtcataccactatttgtggtcattagttgcatcaggaggggagcagcgacgatgaacctggaatcacatccaat

SEQ ID NO: 21176 - DNA, 904 bp, Oryza sativa
  Clone ID: TF_OsC2449_5
ttatgccgccctgctgctgccacctgccgccgccaggttgccgctgccctggtcctcgaacgcgccgatgatgccgatgacgaaggccgtggagaaggactgcatcgccgtgctgttgggcgccctgtggaactgaagcggcaccgggaagaaggcgtggcccttgagctggttcgtgccgttggtcaacatgagcagcccgttcggggtcaccgtcgccatgtcatcgaagctgagattcgcggcggtgaacccgttgaggacaaactgctcgtcgccttccgcctcccgcaaacctccgcagcccgtcggcgctgcctcccgcagacctgacgatttggggatttttggaagaactagtaggttttgggtgaagaaagggggagggaaatcgaatcgattcccgatggcggcggcgccgattgtggttgtcgacggccgcgcggcgcggcgtgctcgcagaggcagccagcgacggcggtcgcccatcctcaagatcattcgagtatgccttctttctctcccttgcctgttgcgctgatacccggttcctcagcaaccttttgaggcgcttgtgctccttatccgcggggctgcgcccgcggcggcgcgcgctggcctgcgccgtcgacgactgcgcgcgctccgccccgccgccgccgccgccggccgccctccccgacgtcgaagcgccgcccggctccagccccagctccggcactctccctatctcctcgtcgctctccattccttccttgatctccatgtggtggccgccggagctggacgacctctcggagctggacggccgcgagctcgtcgcctgctcctgcattctcgccggcgaggagggattcgcgtgcactcctccgcttgcttcagcttcagcttccccactctgtcc

SEQ ID NO: 21177 - DNA, 1578 bp, Oryza sativa
  Clone ID: TF_OsC2527_1
aaacacagcaatttaagcaatgcaaagattgcttcatctcatatgtgttcgatggaagtcattgcaaaattctacaaaaaagataaaacttgcatgataacctcagcaaatcttccgcgataacgactgatgttctctcaactctctccctctcttaatctccctctcctaaaagatggacccataataataaacctatggttggtcaggttagtgaactgttaaccacaaactaatgatattgcaagcaattctgtcacaggtgaagatcagtgcaggcaatgttggttgttgctgtcaaattttcacatgccgtagccgcctctaggaggaacaacagcgccgccgttcaagctgagctttgacatgtcgagcatctgccagttgatcgcagatgggtctcctcctccaaatgagttggcctcaaagcaagaggtgacgctcctgctcctgcggtggcgcactgagagctgcttcagcctctcggtttccttcttcagcatctgcgtttggccatccttaattagttttgcctgctgaagactagtgatctgcctcctcagttgcttgttttccattgatagagcattacgaagctggaaaagagatgccaccctcacagccaaatcagcccctatgttctgaagtgagtcaacagttctctcaagatcagcaatgtattgaagttttctgacccttgatctttggcctgagcgcctccaccccatgctccttccagtaacagcccaccatccagcctcactcacgacttcaggtataggtgtcaagctctcatccccatttctttgcttcacctcctgcagtacagcaccaccctcaccatcctcccactgcctcttagccccacccaacctaactccatgagattcccttcgtgccactttcttccttttaagtgacttctcttgatcagcgtggcatacagcatcacctgtgtctccagttccattggctgcaccaacattacagttcacaccacttgtggcatcaatcatcaggtactgcaatgggttgctagggacattctccaagacagcgttaaccatggaactctctgaactggtcagcctagtcttctgtctcggcgaatttggtccataaacacagctaccttcgatgccagcaccacttccacccccttcagccgcagcattgaacgactccccagcttcgccaaccggctgcggatccccttcatcgatagggtagattgggctctggaacgacgtcagcacatccaagatagcatcagaatcgctgcaggctctcctgagaggaggaagggtgtggctcttcccggagtccgcgaggagatcatcgagccagcacggcggctcaccgacgaatggatcctccgacggaaacctgcagctctgcgtgaacaagctgtcgtccctccttgtgatctgaggacccagcggcgggcagcggggagggaggtgcggcgaccgagacatggccgagagaacacgctcccgacgtccgctcgcctcgcgtgtgccggcaccggggggggggcgtgggggggacgcggcggcggaggagggagaggagggg

SEQ ID NO: 21178 - DNA, 2100 bp, Oryza sativa
  Clone ID: TF_OsC595_1
atgagccagttgaagatgctcatggatgtgacattacatgggatgatgtggatgaagctgttggtacgacacactatcttcgaggtcacaatgttccaaggagagctcacaatcgtgttgggcatcaacaagcttgaaccaggtcagcttgctcttgctgctgcttctgactctgacagatccaaggacaaacatgaagatcaaaagacattgcgtcggctcgcccaaaatcgcgaggctgcaaggaagagtcgtttgaggaaaaagtctcgcacagtgccctccaattctgggcagttgcagggcatttttatatccagctcagtggaccagactcattccatgagtggaaatggggcattggcttttgatatggagtatgcacgttggttggaagaacacaataggcaaattaatgagctaaggtctgcagtcaatgctcatgcaggtgataatgagctccgtggtgttgttgacaagatcatgtcacactatgaggagattttcaagcagaaaggaaatgcggccaaagcagatgtctttcatgtgttatcaggcatgtggaagacaccagctgagaggtgtttcttgtggctaggaggattccgaccatccgagcttttaaagcttctttcgacacagcttgaacctctcactgagcagcagctgtcagggatagccaaccttcagcagtcttcacaacaagctgaagatgctctttcacaaggaatggaggcccttcagcagtccttggcagaaacattggctgggtctcttggttcttctggatcaacgggaaacgtggcaaactacatgggccaaatggcaatggccatggggaagcttgggacccttgagaatttccttcgccaggtaactttgatctggctcagcacgccgcagtggcagtacatcggcttcttcactgtgatgccggcgtatgggttaacctgcacaggagatcccatcacttccattggcttatggtgtgattggttgggatacggagagtgcgcaggggacgactggcacgttattgactgcggggcagattgccacacaagcgagttggtgatcgaaaacttgaagccccggtgcatcagcaatgcaaggaggcgagcggtgttgcgagcatcatcgagcccacagtgggcacggccctcccatgagaaggagcagcagaggacggactgcattgaatcccaaaaatcgcacgaatatagtaccaagctagcagacttcaatgagatcgggaggtagatgtcgcaacgctacgggagtctcttaaatctgcattcaagttccaacattacgcggccatgccatcttgcccatgtcacaacagcgaagttcttgtgctaaatgcctatttcctccaaccacttggcatccatgggccatgcctcacttccttccccacctcgatctaccgcagtttgtggattgccagtaaatgccttggacatgtatgactactgttgctggctgaacgtacagtgggagcaacgttctagtagcaccccttcagcggctacacttcttgtcgggatcactgaggaattaatagcaactgtggtagattgaatggccacgttgtagcaggttaatgcatcgaaagtgatcgaacctgggcgaattaagcagacggtggcagccgtagacctagcagtcatggcgccagttgctatgccattaactcagatgtccccgccggcggactccttggtggagcaagagatggcaacacagcagaagaccgtggagggcacgacgaggacctggccagcagtggcgccatcatctcagttatctccatcagaggctggtttctcgaactcaaaggagcaagaggcagcgccagcgtggtcctcggaggcgggcggaatggcatggcacgaaggtgggtcggcgttttgcgtgaaggtggagcacagtgatggcgcgtgttgcgcgcagccaggctttgcttcctcccatgtgttggctgttgggctggccgggtcgactattgctgaagacaacggggacctccaaatggtcctggtttaaatggagatcgccgcccaggccctcacctgttcagccgcgacgcgactcgtc

SEQ ID NO: 21179 - DNA, 1500 bp, Oryza sativa
  Clone ID: TF_OsC1713_5044
ctacgtcatcaacgacgccacgccgccgttcgacaactgggccggggcggcgccgccgtgggcgccgttcgccgtcgagcgtaggaggcgggacagccctatcagcacggcggcgttgcgctgcgcctcgccgaggcggcgccggagcacgcccgcctcggcgtggtgccgcgcgttcgcgccgcgcacggcgagcgcccgccgcgccgtggcgtccagcctcgacgccagcgcgcgccgctcggcgcggagctcgtccgcggcgcgctccagctcctccacccgctgccgcctccgcgcccgcgaccgccgcgccgactcccggttcgagatcttcctcctcagccgccgccgcctctcctcctcgccgtcctcgccgccgccgccgccgccgcctccgccgtcacagtacaacaacacatcaccaccaccaccactcccatcgccggcacctaccaccggcgacaagccggcggccgcatccgaggcaacaccatcgtatccgaacgccgccgcgtcgacgccgaacaagccgaagccgacgtccatgtccgggaggccgaagtcgagcggcatggcgtcgtggagggacagcattgcggcgatcagggaccgccagaactcctgctcaagatcgtcgctcgctcggacgccaccacactcgtctgctcccagacggacgatgcgactgaggaagcagacaaggcggcaaaggcggggaatacggatggcgacggagggggcggacaaggcggcgaggccgggggaggaatagcgagctttcgacttgctgtaatcttcccaccaaacgtatctcagagcttaagcagcttagatagatatggccatggaaattcagatatgaagctgcagaaggaaggagacaggaggctggtgctaggtctctttctcgaggcttttggcattgatctctgcatctgcatgttgacacatgtcttcttgagtgtcttctctttagtgaaacgggaaaccgagcagcatgcatatatgggtgtgatgttgaggaatgaggacgatggttcagatatgcaggttgaaaatggcatcaaagtgaacaggtccttagctattagattggctatagatgaattggagctagtagtgggctatactattaaacttgctcttattgaaatgggacagtgcagaatggacaatgcaccaactgctgcagcaaacagaagagtgcatgaaattgcatacagattcagagatgcagacaaagcagatggagaggagatagatagtagtatgctttgtgggctggaatttctttttagcaataattggaggcccattcgattcacagaaactgttgcatatgcccccaactatgcatgctctttcagtcacctcttgcaacagctgctcaggatgtcgattgcttttttttattgggaaaaaatcttttcgctggcggttctcttaagggtccgcctgcgaaaagcgaaaatagattttcacaagcggttctcttaa

SEQ ID NO: 21180 - DNA, 1640 bp, Oryza sativa
  Clone ID: TF_OsC2757_1
tttttttttttgagagtaatagtagtagtaattatatattgcacttccttgatttgttttgacagagaaacagaaagcttactgcctcattaatccttacatagttggagtacatgatgatgatgatgcatgcagaaggcttaacttaaccatcacttgatttaccaattacacaagataattaggccattaattagccctagcagctagcttagcttcgttaggtgcagtgcttagttgcttacccccagtggcaagtactgtaattttcttcatcttcttcttggtctctgccatggcagcttcagcttcagtgtttgagctagcaaagctggaacagctcgggggaggatctgaagaggtcgtcgaaggcggcggagtcgaaggcgaggagcgggtcggtggcggcggcgacggtgagggcggcggcggcggcggcggcggcgccgttggtgttgatgcaggagaggatgtcgttgagggaggcgaggcgcgcggcgagctcggcggcctgggtgcggaggacggcgttctcggcgtcgacggcgaggaggccctgggtggtgaggccgagcgcggtggcgacgtgcgcgttctcgcggcggaggtgcgccacctgcgcggtgaggtcgtcgaggtggcgctgcttccgcatccgcgaccgccgcgccgactccctgttcgacagcatcctcttcgcccgccgctgctccataagcgccctcagctcctcctccgccgccgacgacgacccccccgccgccgccgtcgccgccgacaccgcgctccccccgctcccgcttgacgatgccatcaatcaatcgatcgcaaagatttcgggagaagaagaacaacaagcaccactagattgctacaagcttagcagcagcagcagcagtgaagaacaagaagtgcatatactaaactgaaaccaaaatccaaaacgaacacgacgacgacgaagaacacacacagagatcgacaagaacgacgacgacgaacacgagatcgattattgtagaaggaagctagagagagaggaggagagggaaatggatggcgagtagcttatgagaagacatagaaccagtagaggaagacgacggagaaagactggacgagatgggtgcggcgccggagtgtggagttgatcataaaccccgagaggaggatctcactgatcacaggcgacatcgatcaggaactccagcacgaacggtataagcatgtgcctccctcctttcttccttccccctctctcactcgatcaacaagaacagcatgcaagaacaagaacaaagctctagctccctccctccctctccaatggcggctggggttataaagagcgaggaggctggctagcctagcaccggattcgatcggagcggtcggtggcaaaaggctagagctgagctagctactgccactgatcgatgcagcagcactgggcaagctgagccactggtgctagctacaactcgaggcgtctggatgtgtctcttgatgccaagtgccaagaagaggatggtggtggttgttggtagggaggaggagatgatcgaggagggggggtgtgggagcagcaacacgaggtggatttatagagaggacgcacccatctctctctctctttccag

SEQ ID NO: 21181 - DNA, 5561 bp, Oryza sativa
  Clone ID: TF_OsC799_1
ttgcgtctccccccaccaactagctctccggcaccaggtagctctctctctctctctctctctctcgcgccgccgctacctcgccgcgccgccgcgggtggggagatttgaccggcgttgactccgggatggacgggcggttcccgctgccgccggcgagcggaggggggcgggggcaccaccggcgggcgcactcggagacgttcctgcggctgcccgacgcggacctcctcctcgacccggagggggacttctccttctccgacctcgacttcccctccctctccgacgactccccggccatctccgacccgaccccgccgccgccgccgccgatggctgcgacccccgcgccggcgccgcggccaccgggtggggcgcacatgaggagcctctccctcgacaccgccttcttcgagggtttctcgttgcagggtgggggaggaggaggaggaggaggagggagtgggggaagtggtgggcataagaggagcgggtcgatggatggggtcaactcgccgttcgagggtgagtcggcgctctccggtgggctaccggactacgcgaagaaggccatgcccgcggagaggatcgccgagctcgcgctcatcgaccccaagcgcgcaaagagaattctggcgaacaggcagtcggctgcaaggtccaaggaaaggaagatcaagtacactagcgagctggagaggaaggtgcagacactgcagaccgaggccaccacgctgtctgcacagctcacgcttctccagagggatacatctggtttaactgccgagaatagagagctcaagctacggttgcagtccatggaagagcaagctaaactacgtgatgctctgaatgaagctctgcgagaagaagttcagcgacttaagatagcagcagggcaagctccaaacatgaacgggaatcccttcaatggtggactccaacagcagattccgccctattacacgcaacagcagcagcagcagcagcaacagatgccttatttaggcggccaccatgctcagcaacgccatccaagccatcagcagagctcatcaaatggcggccagtcgctgagtggtcagtccctaaacgactccatggatttcatgtgaggagaagaaactcggggcccctattaaaccatataccaactgcagctcagcattgtaaagatagctgatgtacaatgtaatgcatatgaatcattgaatagggtagctagccgttctttgtaccagtaaacgcggtgtaagggcggtcagaccggcgtcagcgacaagcgacaggagctgatctcggcggtcagaccggagatacaatctcggtcagaccgacggcaaccaggcgatcagaccggcgcaacaccttcggtcagactgcgatccgtcgaatttgagggaacaaataacataaaagagcttcgtcgagatcttttcaaaaaggagtacattaaatttgagatgaaacctggagaagctttggatgactatctttctaggtttaacaaaattttgagtgatcttagatctgttgattcttcttatgatgttaattatacacaatatgagatttctcaccactttttgaatggtcttgatatgtctatttggaagatgaaagttacatctattcaggagtccgttgatatgtctactttgactttggattcgctttacacaaaattgaaaacacatgagatgaatattctttctcgtaaagttgattctaactcgagtgttttggtttcttcctcaacttctttggatgttgattcttcttcatcgaagtcttccgcatttgctttgtttaatgccatgtccgatgatcaactcgaacagttcgtggaggaggacttggttttgttatctaacagactttctcgagctgtgactaatcttgggagagcgaggggggaagataatggtgatgagaagaccaatgacaacaagccgaagggtacattcaaagggaggaagatcaaggagaatctcaagaaggcttttgatcaagtctacaccgcgtttgagccactaagcgatgtagatggtgagagtggagatgaagataagggaaataacatctccggtgtttgcttcatggcgcgtggtgaattagattcagagtgtgaagacaatgaggtaagtgctcttgaggaagccattaatattttgagtgcaaaaaatatgaagtgtgagaagttgtatagaaaacaggagtttatcattgaatctcttaattctgaaattgctagattaaaatatcttattcctaatgatgatgattgcacaaattgtgaggttttaatgaatgaaatttctaaaattagagatgttaatgctgcacatgatttgaaaaatagatcttctctagctcttagttttgctttgcacacacgcactttggatgagttgtgtttaactaaaaagttattgcaaaaatatcaaattgcttttcatgctagtttgatgtttaacatgatttgtgctaaaaagttaaaacaacctcatgatgttttggattgctcaacatgtactttgaataagttgaaattaaaagatgctttaggtcgtgttgggtacatggaagatgttgtgaaaaccaatgaagtgctttcttgtcccaagtgtggtaaaagcaaaggtgtcatggtagattctgaaaattgtgctaatttggaaaaagaggtttcttatttgaaaaattctttgcaaagattttctgatggtgttggtgctagaagtggtgagattttggttaaacctgatactaataaaactgtgtttaaatctgctggttttgttaaggtaaatgagaaatttgaattgaagaatgtagctttggttgaggacttaaagtataatttgctttcggtttcacaaattgttgatgaagattttgaggttcactttaagaaaactggaagtaaagtttttgattcttgtggtgattctgtgttgaatatttctcgctatggaagagtgtttaaagctgattttgataatcctgtttcacctgtgataacatgtttggttgctaagtttgataaagatgtgatgttttggcatcgtagacttggacatgttggttttgattatcttactaggttaagtagtttggatcttgttcgtggtttgcctaaacttaagaaagatcttgatttggtttgtacaccgtgtcgtcatgctaagatggttgcttcttcacatgctcctattgtttctgtgatgacggatgcaccgggacatctattacacacggacactgttggtccagctagagtgcaatctgttggaggaaagtggtatgtgttggttattgttgacgatttttctcgatattcttgggttttctttatggcaactaaggacaaagcttttcaacactttcgtggtttgtttcttcgattgaatcttgaatttcctggttctttgaaaagaattcgaagtgataatggtggtgaatttaaaaattcttcatttgaacaattttgcaacgaaagaggtcttgaacatgaattttcttctcctcgtgttcctcaacaagacggtgttgttgaaaggaaaaatcgtgttttggttgagatgactagaacgatgttggatgagtatcacactcctagaaaattttgggctgaggcggttcaaggggaggatggtcatatttttgaatacgagagcgacaacgatgacgacgaagtcggctcggccggtcagaccgggcgccaggccgatcggaccgccggcacacctccggtcaggccagcgcatgacgtgcggtcagaccggccagggtcatcgggttcgggtactattgatgctgatcaagatggacctccagagattacaacttcgaccagtactgatacagaacgtgaatcaacttcagaagtcgctgctcctttgcacattcaacgacgacatctgccggaacaaatcattggtaatataggtgagcggactacaaggtctaaggtaatgactcatgatgtttgtgcaaattctgcatttgttgcttcttttgaacccaaagatgtgtcacttgcattaactgatgaatcgtggattaatgccatgcatgaagaacttgaaaattttgagataaacaaagtttggactttagttgaaccaccttctcgacataatattattggaaccaagtggattttcaaaaataaacaaaatgaggatggtttgattgtgagaaataaagctagacttgttgctcaaggttttaccaaggtggagggtatggattttgatgaaacttttgctcctgttgctagaattgaggcaattagacttttgttggcttttgctgcttcaaaaggttttaaattgcatcaaatggatgtgaaaagtgcttttctaaatggttttatacaggaggaagtttatgtcaaacaaccaccaggttttgaaaattctgattttcccaaccatgtttttaaattgtctaaagctttgtatggtttgaaacaagcacctagagcatggtatgatagacttaagaactttttgcttacgaaaggttttacaatgggaaaggttgacaaaatgctttttgttcttaagcatggtgataatcaactttttgttcagatttatgtgtatgatatcatctttggttgttcaactcacactttggttgtgaagtttgctgagactatgcgcagggaatttgagatgaccatgatgggtgagttatcgtacttcttgggattgcaaattaagcaaacacctcaaggtacttttgtgcatcaaacgaagtacatgaaggatcttttgagacggttcaagatggagaattgcaagccaatttcaacaccaattggttctacaactgtgttggatcctgatgaagatggtgaagctgttgatcaaaaggagtatagaagtatgattagatctttgttgtatctaactgcttctaggcctgacatacaatttgctgtgtgtttgtgtgcgcgctttcaagcttctcctcgtgcttcacatcgtcaagcggtcaagcgaataatgaggtatttgaatcatacacttgagtttgaaatttggtattctacttcatcttctatatgcttaagtggatattccgatgctgattttggcggttgtagaattgataggaaaagtactaatggaacatgtcattttcttggtatatcattgattgcatggtcttctaggaaacaatctagtgttgctcaatcaactgctgaatctgaatatgttgttgctgctagttgttgttcacagattctttggcttttatctactttgaaagattatggtcttacttttgggaaagtatctctcttttgtgataatattagtgctattaacattgctaagaatcctgttcaacactcacgcacaaagcacattgatattcgttttcatgttttgagggatcatgttgagaagggagatgtgatattgcagtttttggacacaaagttgcaacttgctgatatttttactaaacctttggattctaatcgttttgcttttcttcgtggtgaattgggaataattcatccttttggcatgatttga

SEQ ID NO: 21182 - DNA, 1567 bp, Oryza sativa
  Clone ID: TF_OsC411_1
agcgcgcctcagcctcagtacccaccacctccacgctcgcgccgtcggcttcgtgctcctgcgccgccgcaccgatctgcaccgtacgcgggcgtcgatccatccaaggaactcataaaaagtcatgggaaatgacgaagctgtagttactcagaagatggggaaagcaccatcgccccctaaggatcatccagcccttagtccataccttgattggtcaaatatgcaggcatattacggcccagggatcttgccaccaacattttttagccctggaatagccgctggtcatacccctcctccatttatcttgggtcctcagcctctggtgccatccgcttttgggaagccatatgccgcaatttatcctcctggtggagctttttcacatccgttcatgcccctaatggtgagcccattgagcatggagccagcaaagtctgtcaacagcaaggatagctgttcaaataagaaaatgaaggaaattgatggtgcgactgtgtcaactggcagtggcaacagtgaaaaaacaagtggagattgcagcttagaaggatccagtgatggaaacaaccagaaggcaagtggaactcccaagaaaaggagcatagatgataggcctaaatcaggcgtggaaactggtggagctttaacacctaatgatagacctagcgaacaagcagctttgccaaatctatgcattccggttacagcaatcaaaccagacgtgagcactgctagtgacttcagagttattgccaccccagtaactgaagtgccaactaaggatgataaggaatcgaagcgcgagagaaggaagcaatcaaacagggagtctgctcggaggtcaaggttgaggaagcaggccgagactgaggaactggctagaaaagttgagctattgactgcggagaacacatcccttagacgtgaaataagcaggctaacggaaagctccaagaaacttagattagagaattctgctctaatggagaaactaacggaaaccgggcctgatgaagcacaagaagtgcctccagtcaaaacaaaagcacagcaagctcgaggcgtcgaaaatttcctgtcaatgatagacaagactggcacgccgagaagcagcgggcacatggatcatgccattgccacgcccaagcttcgtcaactcctgggctctggtctggcgactgatgctgtagccgcaaggtaatcttaacgacttgaccctcccgccgttcgtgctcaaacgcagcatgtggcctggtgaattttataagctcaacctgcccgcacgattaacatcgaagtattaggtacgattttgtcactgtattcgcccttgtaaattactagtagctgccttttagacgagcattccaaccgctccaccgggatatgaatgcccccctggccgtcagttcttccctgagtttttactctactctcgtagatctgtaacatcagtgctggctcgcgttgttcatatcaaactgatctctgtaaatactgtaacactgacagaaagccttctaactttgatcttttacctttacctgcttttggatgatcc

SEQ ID NO: 21183 - DNA, 2341 bp, Oryza sativa
  Clone ID: TF_OsC79483_1
ggcggctcggctccgccccagctccgcccgcgggccgcccgccctccctccgcttcccaatcgggctcgatggttttgttgaatactaatgccaaggacagataatgctgcttctgccaattcagttgaaccagacaaatcagaagaatgtttggagtttgatgatgaggaggaggaggtagaagaggaggaaattgaatatgaagaaatagaggaggagatagaagaggaggaggctgtagaggaggatgaagatgtcgtggaggaagttgaggaggtagatgaggaggaagatgaggaggaagatgaggaatctgatagaaactgaaggtgtaagtaaaactgaattggtgttcaccagaaggatagttacgtgaaaaggggaagcgatgctgagcttcttgcatcttcctcatggtcatgctccatggattgctcacttgacgaaacctcctgctgctgataagaaggatgatagagtaccactacctagttcaaatggagctccattgctcccgagttatcctccacttggatatggtatcatgtcagtaccaggtgcctatggtgctgctcctgctagtactgcacagcctatgctgtatgctccaagagctcctccaggcgcagcaatggttccaatgatgttaccggatggtcgtctcgtattggaaatgtaccccatagttggacaggatgatgatttcagaaaggcgtgtggaggaacgttggtccaggagtattaaaaggtgctctcatgaaggtctcaagtgcaaatcgcaatcggggttatggtttccggcagtagcacgcccggggcagtgcagagtatgcaaggcaggagatgtcttccccaacattcaaactagattcaaatgctcctacagtcagctgggcagatcctaagaataacgactcgggctctacttctcaggttaaatctgtatatgtgaaaaatctgcccaagaatgttactcaagcacagctgaaaagactgtttgagcaccatggagaaattgaaaaggttgttcttcctccttcaagaggaggtcatgataataggtatggttttgttcactttaaggacagatccatggccatgagggctctgcagaacacagagagatatgagcttgatggtcaggtcctggattgctcacttgcgaaacctcctgctgctgataagaaggatgatagagtaccactacctagttcaaatggagctccattgctcccgagttatcctccacttggatatggtatcatgtcagtaccaggtgcctatggtgctgctcctgctagtactgcacagcctatgctgtatgctccaagagctcctccaggtgcagcaatggttccaatgatgttaccggatggtcgtctcgtatatgttgtacaacagcctggtggacagttgccgctggcttcgccgccgccgcagcaagctggacatcgtagcggcactggaggacgtcatggcggcagtggcggccgctatggcggtggtggtggcagctccggcagtagcaggccagaggaatgcgtttctgaaacaagactgtacttgcgtattttacctgtatcgcagagtgctgaatctgatggtgcactgtaccgtcaattcacccctgtaagccacatggactatgagatttctgggccagaatctgaggtagacagtgaggtgtggcttggctgggtggcacagccacagattccaaccagccttgatgacttcctgccaagcatcaggacaacatgcacacacactcatacttgcaacccgcctggtccatcggcaacagagcacacgcatacatgctaccacacccacacccatgtcttcagctcagatgatgatagttgtggaggtgacaaagccaagccaaagaagagccgcaagccattgggcaaccgcgaggctgtccgcaaataccggcagaagaagaaggctcatacagcacacttggaagaggaagtgaagaggctccgtgtcattaaccagcagctggtgaagaggctgcaagggcaggctgcacttgaggtggaggtggtacggttgaggtcgttactggtggatgtgcgatcgaggatcaatggtgcattgggtagttgcccgatccaagcacaatgtggagttgataatgttttgggttgtgatggaatggctcagtgctttgctggaaagccggagttgggtgtgagacagagttgtgcaccttctacagtgaattgccatatcagctcggattcagggcagaacctggtggtgccccatgctttaagccctagcgatgttattggaagcttcatggtctcatctacctcaaaggatgagtag

SEQ ID NO: 21184 - DNA, 1964 bp, Oryza sativa
  Clone ID: TF_OsC59278_2
atggagttcgggaacggcgggtcctcctcgtcggagcgcagggcggcggcggagggggcgacgctggcgagacagggttcggtgtattcgctgacgttcgacgagttccagagcgcgctcgctggtggcggcggcggcggcggtggtggaagcgggttcgggaaggactccggctccatgaacatggacgagctgctccggagcatctggaccgcggaggagagccaggccatggcctccgcctctggctccgccgcgggggtgggcgtggccgtgggggcgccgccgacgtcgctgcagcgccagggctcgctcaccctgccccgcacgctcagcgccaagacggtggacgaggtatggcgcaaccttgtgcgcgacgagccaccgccggtgggggcggcggatggcggcgatatgccaccccagcggcagtcgaccctcggggagatgaccctggaggagttcttggtcagagccggcgtggtccgagaaaatccacccgctgcgccgccccccgttcccccgccaatgccgccgcggccagtcccggtggtccccaagaccactgccttcttgggaaacttccccggtgccaacgatgccggcgcggcggcgctgggctttgcgccgctcggcatgggggatccagccttgggcaatggcctgatgcccagggcagtgccagtgggcttgcctggcgccgccgtcgctatgcaaacagcggtgaaccagtttgattctggcgataaggggaacagcgacctgtcatcgccgacggagccaatgccttattccttcgaagggttggtgagggggagaaggaacggtggcggagtagagaaagtggtggagaggaggcagaggaggatgatcaagaacagggagtccgcggcgagatcccgcgcgcgcaagcaggcttacacattggaattggaagctgaagttcagaaactcaaggagatgaacaaggaattggagaggaaacaggcagatatcatggaaatgcagaaaaatgaggtagaagaaatgataaaggatccatttggaagaaggaagagactttgcttgcgaagaacactgactggtccctggcctttcacagtgctccaccctggactggtgctatgggacggcacattggatttttgctgccgtggcgctcgaacccgcgtctcaagtaggaacctcgtctccatgttgagcgacgcaggacttcgtcaaaacgatgtcgcgagcagaggagaagactggaggcacgcgcgctgtgggcgtcgtggcttcgcccacgcgtgccctcgcagcgaaatccaagggcgaaatccccgatacgccctccaaatccactcccaccacagcaaaatccagggcggcctcgccatctcatcggacggcaccgcagctgccaccagggtgcccgacgagcagggaggcgcctagatggcatgcaaattcccaccttcatcagcgactgtgcataatttaatctgttgtaaaccaatggtggacgaacttgtgcttgattaatcttctagtttcatttttcctgctagctgattctgagaaggcttccaaaactgacatgtagattatgtgtagacgaatgaagctgtcagaacaacttcctgtaatccttgagaaaacttgtatagtgttgtctaggtttgtatcatgctagtctttctatctagtgtcccaccctagagaccagacatcttggatgagttcagaggtcgatttaagcaagtcatggggaccaagaatcatactgcaacctgcctgatgactagctaagctaggtagtatgtagcaatatctgatatctgtacctgcttcctgaagtatgtattgttatctagtgtatctgatatctagcgtgtaaactgtaaaggagtataagcagacctagttctcaagaaaaaaaagtataagcagacctactaattgcttataagcctgttacttgt

SEQ ID NO: 21185 - DNA, 733 bp, Oryza sativa
  Clone ID: TF_OsC59278_5
ggaacggtggcggagtatagaaagtggtggagaggaggcagaggaggatgatcaagaacagggagtccgcggcgagatcccgcgcgcgcaagcaggcttacacattggaattggaagctgaagttcagaaactcaaggagatgaacaaggaattggagaggaaacaggcagatatcatggaaatgcagaaaaatgaggtagaagaaatgataaaggatccatttggaagaaggaagagactttgcttgcgaagaacactgactggtccctggtgatgacgagtggtcgatggcatgcaaattcccaccttcatcagcgactgtgcataatttaatctgttgtaaaccaatggtggacgaacttgtgcttgattaatcttctagtttcatttttcctgctagctgattctgagaaggcttccaaaactgacatgtagattatgtgtagacgaatgaagctgtcagaacaacttcctgtaatccttgagaaaacttgtatagtgttgtctaggtttgtatcatgctagtctttctatctagtgtcccaccctagagaccagacatcttggatgagttcagaggtcgatttaagcaagtcatggggaccaagaatcatactgcaacctgcctgatgactagctaaactaggtagtatgtaacaatatctgatatctgtacctgcttcctgaaatatgtattgttatctagtgtatctgatatctagcgtgtaaact

SEQ ID NO: 21186 - DNA, 1425 bp, Oryza sativa
  Clone ID: TF_OsC78129_1
acaaggatcaatgagaattactcgaaccttgcaaaagagaatcattcgcaccacatcgatcaacacaagaatcacgcccatcagagtgaatctttcgttgaaagtttaaccacagagtgaaatttgcaagaggaagagacgtgcagatcgatagttaagaaaagagttcgtcgtttcagctcttgttcacaacagccagcatccccaagtacaaacccccattgattttcctacagagatcgagtttaaatcatttcgctatgaacattgtggttggttgattagaaagaggccgaagtagttcgtcgcagctgctgcttcggctccggctggggcacaatctgcattactggttccagcttctgcgtcaagaatgctttcaggaaatcgacgcagctagggaatgttgagaaatcagcaacagccttgtgctccctgaggcgctggttctcctcctccaaccgcgagatcttgttctcgagctcgttcgtgtatgcctgcttccgtgctcgggaccgcgccgccgactcgcggttcttgatcatgcgcttctgcctccgctccaccgtcttctccaccacgccgtccacgccgccgccgcgcttccgccccgccacgcccacctgcgagaggaaccccgcgacgccgtgcccgtccacgcggttatacacgccgtccaccaccgccccggagccgcccacgtactgcagcgtcgtcgtcgtcggcggcggcggcggcgggtagtgcccacgcagccaatgcgcgccggcggcggaggcggcaccgtcgacggcgacgccggcgcgcgagaggaagtcctcgagcgtcatctcgcccatgggcgtcgcgtggtgccggccggtgctggcgccctggatgtcgcgccacacctcgtccaccgtcttcctccccgccgtctccgccgccgccgccgcggcggggagcaccgtgcgcaggaggtcgtccaggttcatgctccgcagcggctcgcccaggtggctctccacctcgttcagcgtcaggctgtacaccgacccctgccgcgacagtgccccttcgccgccaccgccgccgccgccgtggcacgacatgcacgacattgcgtggactcccatccacacacgcacacacactcaccctacccacgtgcgatcagctagctgagcaagcaaagcaggggaaggaagggaccagatgagaagagaatctggagagagaagcaggggaggaagaagaggaggagatggtgatgatgaggaggaggacattaataatctagggttgccacccacaaagagggtttgggcagtgaaagctactgatgtggggggaggagtcctgaaagggaaggggaggaggaagaaagaagaagaggagcaagcaacttgagctgagaaaatgcttcctcgtgccgaattcctgcag

SEQ ID NO: 21187 - DNA, 516 bp, Oryza sativa
  Clone ID: TF_LIB3434-035-P1-K1-D6
ctgcagtaagcagaatcaaagcagattaaccctcatctacttctggccctctaagagttctccactaagcaagcgaaaacagccatgctgcaccaccattaccatggcgaggtggccagcctgcactgcctctcacctgcaagcctaccattcagttcccactaccacagcaacatgatcaccatggcaccctcgcccttccacttcccagcagctacctgtgaacctatccaggaattgctccctgtggtagcgggcaatcgtccagccggctctggcagcacagatgacgcctaccagatggcagcggaggaggagcggaggcggcggaggatgatctccaaccgggagtcggcacggcggtcgcgcatgcgcaagcagcggcagctcatcgagctgagggggcaggttgtccacctccgtgacgccaaccggcgccttcttgatgagctcaaccaagcaatgaggggctgcagtgatgtccactgcgagaacactctgctcatgaaggagagg

SEQ ID NO: 21188 - DNA, 1225 bp, Oryza sativa
  Clone ID: TF_OsC11304_1
gtttcgggagaggattttagtgagggatttgaaggattttgaggtgggagaggagatggagttgccggcggatgggagcgcgctggcgaggcaggggtcgatctactcgctgacgttcgacgagttccagagcgcgctgggaagcgccgagaaggatttcgggtcgatgaacatggatgagctgctgcgcaacatctggacggcggaggagtcgcaggccatagcgccggcggcggcggctgcttcggcggcggcggtggttggggacgcgcagcagcagcagcagccgatccagaggcaggggtcgctgacgctgccacgcacgctgagccagaagacggtggacgaggtgtggcgcgacatcatgggcttgggcggcagcgacgacgaagaccccgcggcggcggcggctgcggcggcgcccgcgcagcggcagccgacgctgggggagatgacgctggaggagttcctggtgcgggccggcgtcgtgcgggaggacatggggcagaccatcgtgctgccgccgcaggcgcaggcgttgttccccgggagcaatgtggtcgccccggccatgcagctcgccaacgggatgctgcctggtgtcgtcggcgtcgcccccggcgccgccgccgcgatgacggtggcggcgccggccacgccggtggtgctgaacgggctggggaaggtggagggcggggatctctcgtcgctctcgccggtgccttacccattcgacaccgcgctcagggtgaggaagggccctaccgtcgagaaggtggtggagaggcggcagaggcggatgatcaagaacagggagtccgctgctaggtctcgcgcgcggaagcaggcttatataatggagttggaagctgaggtggcaaaactgaaggaacagaaggctgaattgcagaaaaagcaggtggaaatgatacagaagcaaaatgatgaggtcatggagagaatcactcagcaacttggaccaaaggcaaagagattttgcctccgacgaacactgactggtccatgctgttgcatctgctctgtatgttgctgttgcgttgacatgtcatcccgtttacagttcagtgattctgttctgtacccaagtttaagaggattcagtttcagtgatctgcattttaaggacaaagaagaaagactgatatctcagatgggtgaaaagcgtggcaatggcctggctaagaacattttcggaagattgtaa

SEQ ID NO: 21189 - DNA, 1242 bp, Oryza sativa
  Clone ID: TF_OsC7199_1
caaaccctttatcgccagagcaaagaagggggaacatcgccaggaaaagatcggtggcgagagaaggcggaaagcgaaggaaagcgaggggagcaaaaggagagagagagagagtcttttcaattttcttttgtttttcttttctccctgcaagaggcagctcggcgttgctgcgaattccatccatgtcgctcgccgtcctcaggatgaggttttgatgcccgaatccggccttttctctgtctatttcagcacctcatcgattttttttggctcttgtgatgccctctgtcgtagagctccccaatcagggcttcctcacttgtgccatgtttgttgctcactcctttcttgattattagttggtagctcaccagtttttgcaggggttttggcagatcatgtagtctgcctgctcaatccctggtcagttaatctagaaacctcattgaataaacaagttcagaggttcttgattccttttgttgcaattgcaattgcaactttgttgtgcaaattgtccattgacccatacaaaggagattgttcttggcgcattctgcggcaatggacgatgtcccaagtcaattgctcttctcccatccggaggtgcctgatagcttcgatgatttcttgaacaacatcacaacctgcacccacacccacacctgcaatcctcctggtccgtcggcaaccatgcacacccacacatgcttgcacacgcacacccaggtcttcgcctccggcagtggcgaagatgacatcaaggaggacctgacgaagacccggaggccgctggggaacagggaagccgtgcgcaagtatcgggagaagaagaaggcgcatgcggctttcttggaggaggaggtcaagaagctccgcgccgccaatcagcagctgctgaagcgattgcagggccatgctgcgctcgaggctgaggtgatcaggttaaggagcatcctactcgatgtccggggcaagattgatatggagatcggcacattcccttaccagaagccgtgcagtgttggctctgtggcatgcactgatccaggtatgtgcttcaatggcaattctgagattggaggggtctgggaggagtgctctagaccagtgggtgcagatcgcatgatcgacaaagatggtagcatgtcacaggaaattgatatcccaggaccggtgcattccatttccatggatgttgtcggaagcttggtgacttctgcttctctatctgagtga

SEQ ID NO: 21190 - DNA, 1567 bp, Oryza sativa
  Clone ID: TF_OsC207355_1
atgaacggtggcattggcgacgcgctgatgcagccgcagcacgtgcaggtcatgtcgtcgtcgttgccgatggtggcgtcgacgttcgtggcggagccggcggcggcggccaacaagccgagggccgcggggctgccgcccacgccgccgcaggtgttcgccgcccagcgcgcggcggcggcggcgggcggcgacgtgtgcatggaggagtcggcgcaggggggtggtggcgggctgccgccgcgcaaggcgcaccgccgctccagcagcgacgtgccgttcgggtacctggccgggcagcaccagctcctgccgcccaaggtggaggccgggtggggccacctcggcgccggcgccggcggcgcggcggccgccgatgacctgttcaacgcgtacctgaacctggaggggctggacgggctcaactcctccgacgaccgccacgacgaaggggacagccgcgggagcagcatcaagaccaacggcgccgacagcagcgagaacgagtcggaggagtgcgccgacgacacccgcggcgggatccgcctctggtccgccgacggcggcgagaggagggagggcgtcaagaggaacgccgcgggggagccggccaccgcgccgctggcccgtcacgccaggagcctctccatggacagcctcatcgggaagttcaacttcacggcggggacggcggcggctgcggggaacggtgtcgcgttggggccgaacaggttcagcctggaattcggcagcggcgagttcaccccctccgagatgaagaagatcatggccgacgagaagctggccgagatggcgctcgccgacccaaagcgcgtcaagagggtgctggcgaacaggcagtcggcggcgaggtccaaggagaggaagatgaggtacattgcggagctggagcagaaggtgcagatcctgcagtcggaggcgaccaatctgtccgcgcagctcacgatgatgcagcgcgactcggcggggctcgcgacgcagaacaacgagctcaagttcaggctgcatgccatggagcagcaggcgcagctgcgcgacgcgctgaatgaggccctgacaaccgaagtccaacgcctaaaactcgccaccgctgagctcggcgattcttgctcgtccagcagtctagctcagcagatccaactcaatgctcagaatcagatgtttcaactgcagcagcagcaggctacgcagataccattctatcaactgcagcagtcacaacagaacggtgcagcgaagaacaatgaatcaaaagaatgattccagaggcattttgggctggttcatggaaagagaatattggtttagatgagcgcaattcgcatattcctaactcatttgttttaatgttgttaataatcaccttgcatttttctagtaggtggtggttggtgaacctccttttacctttctatgttcattgattctttgggtgatacagttgtcatttttaaggtaccaaactgatggaagttgtaggtgatggttattctttggtactaatatctatggcgggtattttgagtaaaaaaaaaaaaaaaaaaaa

SEQ ID NO: 21191 - DNA, 1776 bp, Oryza sativa
  Clone ID: TF_OsC1437_1
ttgtcgcgtgggctcgcctcgcctcgctgcccctagcctaggcgtgcgctaccagccagcacaggtggtgatctcatcatcccccgcccgcccgcgcgcgcgttcgcgctcccccgcccccaccaccccagatcccgaggccccgctccgccgcccgcgggatcgcgggccccgacacaagattttgcttaatgctactttatgcgtgtgtggataatggagtaatcactgctctgtgtatctgagctcacaccatgggtagcagtggcgcagacgcaccgactaagacaagcaaggcatctgcacctcaggagcaacagccacctgctagttcaagcactgcaacaccggctgtttacccagattgggccaactttcagggatatcctccaattccaccacatggcttctttccatcacctgtggcgtcaagcccacagggtcatccttacatgtggggagctcagcctatgataccaccatatggaaccccaccaccaccatatgtcatgtatcctccaggagtatatgctcacccatctatgcctccgggcgcacacccatttactccatatgccatggcctctccaaatggcaatgctgatcctactggaactacaactactgctgctgctgctgctgctggtgagacggatggcaaatcctctgaaggaaaagaaaaaagtcccattaaaagatctaaaggaagtttaggtagcttgaatatgattacagggaagaactctactgaacatggtaaaacctctggggcatcagctaatggagccatttctcaaagtggggaaagtggaagtgaaagttctagtgaaggaagtgaagcaaattctcagaatgattcacatcacaaggaaagtggacaagagcaagatggagaggttcgaagttcccagaatggtgtatcacgttcaccatcccaggcaaagttgaatcaaactatggcaatcatgccaatgacatcaagtggtccagtacctgctccaactacaaacttgaacataggaatggactactgggccaacacagctagctccactccagcaatacatggtaaagcaaccccaactgcagctccagggtctatggttccaggagagcagtgggtgcaggatgaacgggaactcaaaaggcagagaagaaaacaatccaacagggagtctgctcgcagatctaggttgcgtaagcaggctgaatgtgaggagttggctcaacgtgctgaagttttaaagcaagaaaatacttcacttagagatgaagtgaaccggatcagaaaggagtatgatgagcttctatcaaagaatagctcattaaaggaaaaacttgaggacaaacaacacaaaactgatgaggcaggagttgacaataagctgcaacattctggtgatgacagccagaaaaaaggaaactaattgagctatcgtgcaatgctcctgagcataaccctaactagattattggcaggcgcaactgtagtatgtgtattaacttcatacttattgcagttaattgttaccaggttgtgataatgttaatgccaactttgtgtggctggttcctgtttcagatctgtcttggcttatcttttagaagtcaagatatgactggcaatgtaggttgtgacccagttcactgtatctgttagaaatagtttataaactcatgtttacaaatctgtattgttgactactattgttatgtacacctgaagatgaaccagtattttatataagatgcagtcaggttgaacagttggtttta

SEQ ID NO: 21192 - DNA, 941 bp, Oryza sativa
  Clone ID: TF_OsC175078_1
atggcttctggtgaaaacaatgttgaagaggagctgagaaagacccgtaagcctctgggaaatagagaagcagtgcgcaagtaccgagagaagaagaaagcgcatgcagctttcttggaggaggaagtcaagaaacttcgcaccacaaatcagcagctcttgaggagattgcaggggcatatatcactcgaggctgaggtggtgaggttaagagcccttttgtttgatatccgaggcaagattgatgcagagattggtactttcccctttcagaagcagtgcagttttggttctgttacttgtacagaccattctccgtgctttaacactagcactgaggtagcagtccgggaagagagctctagaccaacaattgtggattgcgggattgatggaactggcattatttcgcacgagcttgatattcccaaaatggtgaattcagtggatgtcattccaagctttgtgaattctgcctcattgactgaatgaaactgatcaagttcctcataagttctccatgctagctccggttgcttgatgttgcgaccttgtgggtaatagctttccgttgttatagcctgctcgaataaaatggtggctatgatacgagtaaaagtctaaaattagtctaccatgcagatgttactgactgtaagtgttgggtacttatgatttattatgaagtgtgatatgtgctgtactgtatgatagtattagaagaggccatagtcagtatgccaaatgtggtttacgttctgcagaatactgcaagcgtcaagacgagctgaactttattcctgatgttggtttctcttgctagaactattttcgccagatactaatactaatatatcttttcaggtagctgttataatgagaccagagatgtatgtacatgccattttttttgctcgctggacaaaaaaaaaaaaaaaaaa

SEQ ID NO: 21193 - DNA, 825 bp, Oryza sativa
  Clone ID: TF_OsC21252_1
atggcgtcgtcgagggtgatggcggcggcggcggcgtcgtcgtcgtcgtcgcccccgcccccgcccccggcggcggccgcggccggcggggccgccgatctcgcgcggttcaggagcaccagcagcggcatcggatccatgaacatggacgacatcctccgcaacatatacggcgaggccgcgccgccgcctggggccgccggctcggccccggccccgcccccggcgggggaggcggcgggggcccccgtgggggaggtcgacgcgccgcgaacggcggaggaggtgtggaaggagatctcgtcctcgggagggctatcggctcccgctccagctcccgcggccggcgctgcgggtaggggtggcgggcctgagatgacgctggaggatttcctggctagggaggatgaccctagggcaacggccgtggaggggaatatggttgtggggttccctaatgtaacggagggtgtgggtacagcaggaggaggaagaggcggcggcggcggcgggagggggaggaagcggacgctgatggatccagctgaccgcgcagcgatgcagcggcagaagcgaatgatcaagaaccgcgaatctgcggcgaggtccagggagaggaaacaggcgtatatcgcagagctggaggctcaggtcgcggagcttgaggaagaacatgcacagctgttaagagaacaggaggagaaaaatcaaaagaggcttaaggagaaatggcacgtgtttatgcagatcaaggaacaagccgttgcagttgtcataaggaaaaaaacacaagatctacgaagaaccaactcaatggaatggtag

SEQ ID NO: 21194 - DNA, 829 bp, Oryza sativa
  Clone ID: TF_OsC15853_3
ggagctgcaagcaactggaatagaggtaagagacagtttggtctcgacaatttgccatgtcagattctgatcgaattggcacagaaagatgcttagtaaattcatctaacacaaatggtgatgtcctactagaatcatgagctaaacaattagatgctactacacgtgatgataactctcaaggcgcatcattaggctgagcatcagaatcctgttgcttctggtgggtgccattggtgtcgttctgttcattcatataaggtattgaatcactgttcccctctagtttttccttgagtgaagcattgtgtgaaagaagtgcctcgtactcctttttgatccgttcaagctcagccctaagagaggagttttctgcccttaaattgtcagcgcgtacagaaagctcttcacactcagcctgcttgcgcagccgggatctacgtgctgattcccgattagactgcttccttttctgcttcttgagctctctttcatcccattgctctcctcgaactgaaccagacgatgctttgccatgcattgcaggaacaggcgaagaaccagcagcaccccagtagtccattcctatgttcaagtttgttgtgggagcaactcccccgattactacacccgtttgagttggagccatcgacatgttctgatttaatgctgtatgtgatatgccattctgagaactaccatcttcctttacatcattttcctttgaatgtgaatcctggagcaacataaaacagggttgataggattttgaaagttggcgtcccttccattactatcactctcactagcactctcgcagcatgtacaa

SEQ ID NO: 21195 - DNA, 375 bp, Oryza sativa
  Clone ID: TF_435943
agatggcgagcacgaggctgagcctcgagctggggaaggtcggaatccagtcgtcgccgccatgctccagcagctcaagcgccggccaccccgcgatgcagcccgccgccgcggccacggcggcgccgggctacggccccaggccacgccacatgctcaccgaggccgagaaggaggcgaagcgtctccggcgagtgctcgccaaccgggaatccgcccggaaaaccatcctccgccgccaggcgatccgagatgaattggcaagaaaagttgcagatttgtcgtcgcagaacgagaccatgaaaaaggagaaggacgtggtgatgcaggagtatctctcactgaaggagacaaacaagcagctgaaagaacagg

SEQ ID NO: 21196 - DNA, 975 bp, Oryza sativa; identical to SEQ ID NO: 11566
  Clone ID: TF_OsC341905_1

SEQ ID NO: 21197 - DNA, 1169 bp, Oryza sativa
  Clone ID: TF_OsC782_1
ggatttcgggtcgatgaacatggacgagctgctgcggagcatctggacggcggaggagagccaagcgatggcgtcggcgtctgcggcggcggcggcggcggaggggggcctgcacaagcaggggtcgctcaccctgccgcgcactctcagcgtcaagacggtggacgaagtgtggcgggacttacaacgagaggcgtcgccgggggcggctgctgctgacggcggcggcggcggcggggagcaccatcagcccaggcggcagccgacgctcggggagatgacgctggaggagttcctggtcagggccggggtcgtcagagagaataccgctgcggcggctgctatggtagctgcggccgccgctccgccggtggctccgcggtcgattccggctgtcaacaacagctccatcttcttcgggaactacggaggcgtcaatgatgctgctgctgccgctgctggtgcgatgggtttctcaccggtggggattggggatccgaccatggggaataggctgatgtccggagtggcagggattgggggtggtgcgatcactgttgctccggtggatacatcagttggacaaatggattcagcgggcaagggggatggggacctgtcatcaccgatggcgccggtgccgtacccctttgagggggtgataagggggaggaggagcggtggtaacgtggagaaggtggtggagcggcggcagaggaggatgatcaagaacagggagtcagcagctagatctcgtgcccggaagcaggcttacacaatggagttggaagctgaagttcagaaactcaaggaacagaacatggaattgcagaagaaacaggaggaaattatggaaatgcagaaaaatttcttcccagaaatgcagaaaaatcaggtattagaggcggtcaacaatccttacggacaaaagaagcgttgcctaagaagaacattgacaggtccctggtaaaatttgagttattgataaccggagcttgacaagacacaccatattttaaccttaaggttcttgtacatattgtcaggatttcaaaactcatctctctgttgtaaattgatgatcaacagagtcgagtgtactagtgcttaacttgccctgtcaccttcaacttacagttctgcaagtcttctatcgtgctcttatgtcc

SEQ ID NO: 21198 - DNA, 1860 bp, Oryza sativa
  Clone ID: TF_OsC1049_1
ccgggcaggtttttactgtccccatgcagacaatgccaaagggataaacagagttaaaattggtgaaaattcactcgaatccaaatgtaaacaacccatttttctcctgttccaatcccatccattccattccattccttctccctgtgctcggattcctgttcttgcagctgatccctagatcttcctctttgcccgagaattttccgcccaattccccactccgattcctcttctttcgcccaaattttggctcaacatttcgcagcgcaatctcgagctgaatcttggggggtaaagctttgcttcttggaatcttggtgcggtttttgggggagatttgcgagcgtttggagccgagaagatgaacagggagaaatccccgatcccgggagacggcggcgacgggttgccgccgcaggccacccgccgggcgggccctccggcggcggcggcggcggcggagtacgacatcagccgcatgccggatttcccgacgaggaaccccggccacaggcgcgcccactccgagatcctgagcctccccgaggacctcgacctgtgcgcggccggcggcggcgacgggccgtcgctgtcggacgagaacgacgaggagctcttctccatgttcctcgacgtggagaagctgaacagcacgtgcggggcgtcgtcggaggcggaggcggagtcgtcgtccgccgccgcccatggagcgaggccgaagcaccagcacagcctgtccatggatgagtcgatgtcgatcaaggctgaggagctcgtcggggcgtcgcccgggacggaggggatgtcgtcggcggaggccaagaaggccgtgtccgcggtcaagctcgccgagcttgctctcgtcgatcccaagagggcgaaaaggatttgggctaacagacaatctgcggcaagatcaaaggaaaggaaaatgcgatatattgctgaacttgagcgcaaggtgcaaaccctgcaaacagaagcaacaacactgtcagcccagttggcactgctacagagagataccagtgggctaactactgagaatagtgaactgaagctacgtctgcagaccatggagcagcaagtccacttgcaagatgctttgaatgacaccctgaagtctgaggttcagcggcttaaggttgcaaccggtcaaatggcgaatggtggagggatgatgatgaacttcggtggcatgccacaccaattcggaggcaaccagcagatgttccagaacaaccaggccatgcaatctatgctggcagcacaccagctgcaacagctccagcttcatcctcaggctcagcagcagcaggtgctgcaccctcagcatcagcagcagcagccattgcaccctctacaagcgcagcagctccagcaggcggcacgagacctcaagatgaaatcgccgatgggcggccagagccagtggggagatggcaagtcaggaagcagcggcaactgatgcgtcatttacaaatttacaaaaaaattcgccaaagtttcggtgtaaggttgtggtttaacaaccatggagatggtctgtttcattgagatgatgatgatgtgcaagagtagttatcatcatcatcatcggtaggttcaggttggcttcagcttcagtcaaacagttgggtggatgttcagttggagagtttatctgtagctggttcagtaaggaaatggtcgaataatcaagaattccaggttaaaatctttcgtttctttggtaaggtagcacatcaccaagatgtactgttgtagtgttgtccccagttccatagattcaagtagccaaaaaaaaaaaaaaaaaggggggggcccgcgcctcgtccgaattcctgcagcccgggg

SEQ ID NO: 21199 - DNA, 1613 bp, Oryza sativa
  Clone ID: TF_OsC173090_1
ccgctttcagaactacgccctccccggactccgcctaccaccattttccttcaactttgcgggtaaccagaggcgaagagttttcgtgcaccgacttaccggaacgtaatcgcctattcttcccctactttgtggactttttggttgtacgtgtttacctagatgtcacggcctggcgcggcggaggagtatgctcatatttgctcgctgacatatatttctaatctattgagatgctctggtcgctcagtattccacatagagggtattatacgtacctgcatcctcagtacaaccactatatcaagtcataagattttcatgctttgtaaacgggcatcttgaggtcaaatcattttaattctagtaagtatccagattcattaacatatatatgaatgtgggcaatgctagaaagtcttataatatgagaaggaggaagtatctagatgtaatcaaacggtcacaaaaacaacaagaaaaaatctgtctcctcatagcgtccatgtctgcttgaagatagctatattccactggtagctttctgatatttctgacttcacctcagccacgcgcgttggttttggagcagtctcagatcttctccggttactacttattatcacaggcagtagcttcaggcaatgacaaggctgatgctgcctcaaaatgtgtcacatctccagcatggattctcttctgcaggttctccaagcttgcgacacgccgcacggacggtgacctcaaggccattgctgcacttggcacaggaattgcttcatctgggaggctacagtttgtccagtcgtcttcgacgagagcagcagcagcagcagcagaagctgcgtctgatacacctgaagaaacgggcatgctgcttgcaggcatttcagatgtagtgaacaattgaagtcctattccagttactctcctcaccgcttcttcagctatattcacctttctcctcatagcgttcatgtcatcttgaagattgccatattctgtggtagattgcttatatttctgagtcatgtcagacaagcgcttttgcagagatgcattctcagatcttaactgggaaacctgtgattctagatcgtttaggtgagcttgcttcctttttcttgacctcctggctgattcccgatttgacagcattctccttgtccgctttgcattaacggggtccgtatcttcctcaagatcgccatcatcatctgactgttcctttgatgtaccactattagctggtttaccttgatcgtcatcttcatgtatggcatttgagtttgttactctggttgatccatagccattaaaagaatcttgagaaaccaattgtgaagtgtctgaggcttgtaaattgaggtagcccaaagaagattcttgcagtttagcttccatcgatttagccacggccgcgcagtacaggtcgagcttcgtcttcagcaccgccgcgtaggcgcccggatcgccgccgccgccgccgccgccgacaccggcgccgccgcgcttcattctcgcaaagaaaaaaagttgcctcctttttcagagaggagtagatttttttcagagaaaactgagcaaccttgcagcccgggggatccactagt

SEQ ID NO: 21200 - DNA, 2410 bp, Oryza sativa
  Clone ID: TF_OsC1936_1
gtcggaggaaggcgatgatgaagaagtgcccgtcggagctgcagctggaggcgttcatccgggaggaggccggcgccggcgaccgcaagcccggcgtgttatctcccggcgacggcgcgcgtaagtccggcctgttctctcccggcgacggcgagatgtccgtgttggatcagagtacactggacggaagcggcggcggccaccagctgtggtggccggagagcgtccgtacgccgccgcgcgccgccgccgccttctcggccacggccgacgagcggacgccggcgtccatctccgatgaccccaaaccaaccacctcagcgaaccacgcgcctgaaagcgactcggactccgattgcgattcgctgttagaagcagagaggagtccacgcctgcgtggcacgaaatccacagaaacaaagcgaataagaaggatggtgtccaacagggagtccgctcgacgatccaggaggagaaagcaggcacagttatctgaactcgaatcacaggtcgagcaactcaaaggcgaaaactcatccctcttcaagcagctcacagagtccagccagcagttcaatacagcggtcacggacaacaggatcctcaaatcggatgtagaggccttaagagtcaaggtcaagatggctgaagacatggtcgcgagggccgcgatgtcgtgtggcctgggccagctcgggctggcgccattgctcagctccaggaagatgtgccaagctttggatatgctcagtttaccacggaacgatgcctgtggtttcaaaggcttgaacctgggtcgacaggttcagaactcaccggttcaaagcgctgcaagcctagagagcctggacaaccggatatccagcgaggtgaccagctgctcggctgatgtgtggccttaagacacttcatccgtgttcgagagagcttgagattctaagaagcagccggtgagaatctgaaaaggctagttgttcagtttcctatttttagtttatgtttgaattctctggctactaatgctcaaaatctgggagagaatctaaatcgtttgggacagataaaaaattatgcgagaaggtgtagctgacagaaaccttcccaaacaaatctccatcagaacctatatgtaaagtaatacggtatcctctgttactaggtgcatgtgcataactgacaagctgctaagtactaggtactacagtctgaggcaagtatttctggtgttttggtgctgaagaactatgttttagtgcgtttgatctgcggcaatcaaggccatctgatcgaaatttgattggtataaatctgatcgaaatttgattggtataagtataatagtttgattttgatcaactctagtcgtcagcgcctttggtgtatacgctctgtaacatctgttacgaattgatctgttcagtatacttcaacagtcctgcattggttcagttcttggcgtagctctggtgcttctggtgcgcatagcatcggtgtgaaatgtgccacttttcatggcagttgtaatagtaaacgactgcaaaattacggtgtactataattcctaaacaaatatgtgacaattacgatgaaaattatcactaagatgttattaccattatttttcgtacacaaatctcttaatttttacaaaatttgttactagcatgtgaactctctaatcccacactatccttattctttttcaagaaaagtacggttggtggtggggatggttgacatatggatcctctggcctcacatgtcctttccctgaaagttggtgatgggatggtgacagattaaccactcaccatcaccattgtttttttctttaaggaatatagattgaatacataagatttaagatttatggggaaaagtatagttcgccaatcttcaagatggttgtgtacaactgattttccaaagttttagtatgccccgaaccaatgaaattcgttcatctttttttagcatgtcggaaatgatgtgaaaattgcacttacacttgaggttttcttgtggatacaaattgctcaacaaaccatattaagacctgaaactataacatcaatcattagtacatcttttaggttattcaaaagcctgaacaaactgcatagtatccccaaatcccatttgccccatccgcaaaacaaaatgagcggcaatggataaatggaaacgaagctagctgcgaaaggagttaaattaagctccccatttaataattgaccaaggttccaacctacgtccaacaacaaattttatataatactcccccaatcccagtgtattccaaaggatttcaaataaatgtccccttagttcccaaaaaaaaaaaaaaaaaaaaaaaaaaaaaaaaaaaaaaaaaaaaaaaaaaaaaaaaaaaaaaaaaaaaaaaaaaaaa

SEQ ID NO: 21201 - DNA, 1230 bp, Oryza sativa
  Clone ID: TF_OsC103554_1
atggcttcgcatgctggaggtagtggcggcggcggcggtggaagtggccgggatgctggctcggcgcagcgcgggccgatgcaggggttggcgaggcaagggtcgctgtatgggcttacactcaatgaggttcagagccagttgggggagccgttgcttagtatgaaccttgatgagctgcttaaaagcgtgtttcctgatggcgcggaccttgacggtggcggtggcggtggcggcatcgcgggccagtctcagccggccctggggctgcagcgccaggggagcatcacgatgcctccggagctgagcaagaagacggtggatgaggtgtggaagggcatccaggatgtgccgaagaggggtgctgaggagggtggccggtggaggcgggtgatgatgtccatagtaaattttgtagattatatggggtctgcccacatatttcgcatcctttggcggtaggaaaaatcgatatagcttgagattccatcttccccctccagccggtggtggtttagagcttgtaaacaccagcacgggcagagccctagccatgtcgccccagctgctgatctcttcggaggctttgtcactagtcagtatgcttacatggcaactcacctggcacctcagccattagctgttgctacaggtgctgttttggatccaatttactccgatggccagatcacttcgccaatgctcggggctctttctgatcctcagacacctgggcgcaaacgctgtgccacaggggagattgcagataagctagtagaaagaaggcagaagaggatgataaaaaacagggaatcagctgccaggtcaagagcgaggaagcaggcttacactaatgagcttgaaaacaaagttcttcgtctagaagaggagaatgagaggctaaagaagcagaagcctacattcatactgtccagcaaagtgagccgcaagcaggtcaccaaagccatgagatctgccaccatttgtgtcctctgcatttgcattctcatgatcctgcaatgctttgccagcatcagtgcagtggatcttggcgatgctgcagcttcagcgtcagggggagaaggcctgatccggccgaggaagctgctgcagaatgcgccggcggcgaggtcaccgccgtcgcgctccgccgccgccgtggaggtcgaggtcaatgcgagcctggggaagcagaagccgtcgagcaagtcgaatcccaggcagaattag

SEQ ID NO: 21202 - DNA, 705 bp, Oryza sativa
  Clone ID: TF_OsC11304_2
cgccggtgccttacccattcgacaccgcgctcagggtgaggaagggccctaccgtcgagaaggtggtggagaggcggcagagtcggatgatcaagaacagggagtccgctgctaggtctcgcgcgcggaagcaggcttatataatggagttggaagctgaggtggcaaaactgaaggaacagaaggctgaattgcagaaaaagcaggtggaaatgatacagaagcaaaatgatgaggtcatggagagaatcactcagcaacttggaccaaaggcaaagagattttgcctccgacgaacactgactggtccatgctgaagccagagtctccggtttcgccgtggcgctcagcttcagagttgcttctctccttgttggtgaatggtgatgcccacgcgtccgggacggtcgaatgctggcgtcgattactcactaggtttagctgcgagatcgttgcgtgagcaaaggcatactatctaatctgtttaactccttatttagggaaatctggcatggtgaaaacggggcatgccatctgtgtttgttgtttttgtgcagctgttgcatctgctctgtatgttgctgttgcgttgacatgtcatcccgtttacagttcagtgattctgttctgtacccaagtttaagaggattcagtttcagtgatcaaaaaaaaaaaaaaaaaaaagactattacaaataggaaaaa

SEQ ID NO: 21203 - DNA, 1938 bp, Oryza sativa
  Clone ID: TF_OsC405_1
gttgttacttacgcatattttgccgttagttaattattatccggtaaagaagattagtagtaatccaaaattttcccaaccccaacctcggaacaaaaaccgcgtagtatttgtcgtaaccaggagcatccgagtcattaatttacacccaaacacaaaaaattagcagcacgcagccgccttcccaatcctctcctcttctccaagcggcaattcgcgcgaggttttctccgatcaaaccctcgaatccccccctcgcgaatccatcggagggtagccccgcgatccgcgtcggcgagagcggattccgattccgcgatggagcgggtgttctccgtggaggagatctccgacccattctgggtcccgcctccgccgccgcagtcggcggcggcggcccagcagcagggcggcggcggcgtggcttcgggaggtggtggtggtgtagcggggggcggcggcggcgggaacgcgatgaaccggtgcccgtcggagtggtacttccagaagtttctggaggaggcggtgctcgatagccccgtcccgaaccctagcccgagggccgaagcgggagggatcaggggcgcaggaggggtggtgccggtcgatgttaagcagccgcagctctcggcggcggcggcggcggcggcgacgacgagcgcggtggtggaccccgtggagtacaacgcgatgctgaagcagaagctggagaaggacctcgccgcggtcgccatgtggagggcctctggcacagttccacctgagcgtcctggagctggttcatccttgctgaatgcagatgtttcacacataggcgctcctaattccatcggaggcaatgctactccagttcaaaacatgctaagtggcccaagtgggggatcgggctcacagttggtacagaatgttgatgtccttgtaaagcagcccaccagctcttcatcaagggagcagtcagatgatgatgacatggagggagaagctgagaccactggaactgcaagacctgctgatcaaagattacaacgaaggaagcaatccaatcgggagtcagccaggcgctcaagaagcagaaaggcagctcacttgaatgagctggaggcacaggtatcgcaattaagagtcgagaactcctcgctgttaaggcgtcttgctgatgttaaccagaagtacaatgatgctgctgttgacaatagagtgctaaaagcagatgttgagaccttgagagcaaaggtgaagatggcagaggactcggtgaagcgggtgacaggcatgaacgcgttgtttcccgccgcttctgatatgtcatccctcagcatgccattcaacagctccccatctgaagcaacgtcagacgctgctgttcccatccaagatgacccgaacaattacttcgctactaacaacgacatcggaggtaacaacaactacatgcccgacataccttcttcggctcaggaggacgaggacttcgtcaatggcgctctggctgccggcaagattggccggacagcctcgctgcagcgggtggcgagcctggagcatctccagaagaggatgtgcggtgggccggcttcgtctgggtcgacgtcctgagaccgaaacccagagctgcttcggttctgaaagacactgcgagcaggaaatgatgattggacaggcgtagacattgctaatgctgtgaggttgatgattgttggtcgtcgtcgtcgtcattgtgcattctttgtaagggacacctcttagtaccctcttcttctaagggacttagtaccccttgtggatctcatcgtcctaaatactatacacattagccaaatgttcattggtgtgatggcgtcgtccctaatttgaacgactgatttcaggcagctgctatgctatcattcaataatactttgatcgatgcttcctttaacaaaaaaaaaaaaaaaaaaa

SEQ ID NO: 21204 - DNA, 948 bp, Oryza sativa
  Clone ID: TF_OsC65391_1
ttgttgttttttttttttttttttttttttttttttttttttttctcatacaatttatattaatttgggtcttgcagcaagcaagcaaacaagggtatgcaaaagttagccggtgacacaaacaattaagcatgcatgtatgcatccatgtgtagcggatgatcgacacagtaacaaaatagagtacttacgtactaccggaatgcatggaaagccaagccggcggatcagagtgagttgttgttacttgctagagactcttgctggagctggacagccaacccaattaaataatggtccccaatccaatggctgcccgctaccttgcctatgcttaattaattaaaggcttaagctgctgcgttctgatcaagtggatgagcttcttcggtgggaactctgcttgttggtaggctgctggatcagagcagccatctccgtcttaagttgtttgcagtgcctcttgagcttgagattctcattcaccagccggcgaacttccttctccagctcctgcacatacgccctcttccttgccctggagcgcagcgccgactccctgttcttcatcatccggatggtcttgcgctcctcctcttcctcgtcgccgccgccgccaccgccaccgcctatgcccacctgcagcagcagatccagctcctcggcgccgcccacgccgagggatagatggggagcaccatcggcggcgctggtaccggcgctggagatggaaaggaaggagctgcagctgctcaggcttagctgcgggctgcccacgccgcccagctgctccgccatgcctaccctattattgtgcctctcttttctttttcttcttttagttaagctaaagctagtgtgtgagtctagtagactctaagaatatccctcctcctcctcctcgtcccccccctttggtactccgtcgcatcagcagcaaaagtgcgc

SEQ ID NO: 21205 - DNA, 1768 bp, Oryza sativa
  Clone ID: TF_OsC1934_1
aaaaaacccatgggttgcgtagccgtagctttcccaccatttccttctctccgaagcctcctcctctccgcttcctcccgcgaaaccaaattccaaagcatttgatcgaatttctcccaaacttttccagcgttttcaatttcgccccgatttcggttcgaaaacccctcgcgaattcatttcaaactcgtccgagagcgcaatggagcacgtgttcgccgtcgacgagatccccgacccgctgtgggctccgccgccgccggtgcagccggcggcggccgccggagtagatgacgtcggcgcggtgagcggcggcgggttgctggagcggtgcccgtcggggtggaacctcgagaggtttctggaggagctcgacggcgtccctgcaccggcggcgagcccggacggcgcggcgatttaccctagcccgatgccggcggcggcggcggaggcggcggcgcgctggagtaggggctacggcgatcgtgaggcggtgggggtgatgcccatgcccgcggccgcgcttccggcggcgccggcgagcgcggcgatggaccccgtggagtacaacgcgatgctgaagcggaagctggacgaggacctcgccaccgtcgccatgtggagggcctctggtgcaatacattctgagagtcctctaggcaataaaacatcactgagtatagttggttccatcctgagttcacagaagtgcattgaaggtaacgggatactagtgcagaccaagttaagtcctggcccaaatggaggatcaggcccatatgtaaatcaaaatacagatgctcatgccaagcaagctacgagtggttcctcaagggagccatcaccatcagaggatgatgatatggaaggagatgcagaggcaatgggaaatatgatccttgatgaagaagataaagtgaagaaaaggaaggaatccaaccgggagtcagctagacgctcaagaagcagaaaggcagctcgcctaaaagacctggaggagcaggtatcactattaagggttgaaaactcttctctgttgaggcgtcttgctgatgcaaatcagaagtacagtgctgctgctattgacaatagggtactaatggcagacattgaagccctaagagcaaaggtgaggatggcagaggagagtgtgaagatggttacaggggctagacaacttcaccaggccattcctgacatgcaatctcccctcaatgtcaactctgatgcttctgtgccgatccagaacaacaacccaatgaactacttctccaacgctaacaatgccggtgttaacagcttcatgcaccaggtttctccagcgttccagattgtggattctgtcgagaagattgacccaacagatccagtgcagctgcagcagcaacagatggcgagcttgcagcatcttcagaatagagcttgtggtggcggcgcaagttcgaatgaatatacagcatggggatcgtctctgatggatgcaaatgagcttgtcaacatggagcttcagtagtaggagcatatcctaacaacatgatgagagcatttggaggtgcaaatttgcaacctgcaaatgctgttttgtagtagtagttgttgtcgctgtttttgtctgaaactgtagtttctatggattttggacttgctgaggaacatctgcggctgttgttgtttcaaattgagaaaatgagggacaatgggacatggtggtctcccttaatatagcgaaaaatggttggaataaaaaaaaaaaaaaaaaaaaaaaaaa

SEQ ID NO: 21206 - DNA, 1605 bp, Oryza sativa
  Clone ID: TF_OsC1934_2
atggagcacgtgttcgccgtcgacgagatccccgacccgctgtgggctccgccgccgccggtgcagccggcggcggccgccggagtagatgacgtcggcgcggtgagcggcggcgggttgctggagcggtgcccgtcggggtggaacctcgagaggtttctggaggagctcgacggcgtccctgcaccggcggcgagcccggacggcgcggcgatttaccctagcccgatgccggcggcggcggcggaggcggcggcgcgctggagtaggggctacggcgatcgtgaggcggtgggggtgatgcccatgcccgcggccgcgcttccggcggcgccggcgagcgcggcgatggaccccgtggagtacaacgcgatgctgaagcggaagctggacgaggacctcgccaccgtcgccatgtggagggaattattaggtcacatacccttggaagatgaaattattttagtagaaaaaaagaaactgttatattggaatctggcctctggtgcaatacattctgagagtcctctaggcaataaaacatcactgagtatagttggttccatcctgagttcacagaagtgcattgaaggtaacgggatactagtgcagaccaagttaagtcctggcccaaatggaggatcaggcccatatgtaaatcaaaatacagatgctcatgccaagcaagctacgagtggttcctcaagggagccatcaccatcagaggatgatgatatggaaggagatgcagaggcaatgggaaatatgatccttgatgaagaagataaagtgaagaaaaggaaggaatccaaccgggagtcagctagacgctcaagaagcagaaaggcagctcgcctaaaagacctggaggagcaggtatcactattaagggttgaaaactcttctctgttgaggcgtcttgctgatgcaaatcagaagtacagtgctgctgctattgacaatagggtactaatggcagacattgaagccctaagagcaaaggtgaggatggcagaggagagtgtgaagatggttacaggggctagacaacttcaccaggccattcctgacatgcaatctcccctcaatgtcaactctgatgcttctgtgccgatccagaacaacaacccaatgaactacttctccaacgctaacaatgccggtgttaacagcttcatgcaccaggtttctccagcgttccagattgtggattctgtcgagaagattgacccaacagatccagtgcagctgcagcagcaacagatggcgagcttgcagcatcttcagaatagagcttgtggtggcggcgcaagttcgaatgaatatacagcatggggatcgtctctgatggatgcaaatgagcttgtcaacatggagctcccacgcgtccggcatatcctaacaacatgatgagagcatttggaggtgcaaatttgcaacctgcaaatgctgttttgtagtagtagttgttgtcgctgtttttgtctgaaactgtagtttctatggattttggacttgctgaggaacatctgcggctgttgttgtttcaaattaagggagaccaccatgtcccattgtccctcattttcgaaaaatggttggaat

SEQ ID NO: 21207 - DNA, 719 bp, Oryza sativa
  Clone ID: TF_OsC12563_1
ttttttttttttttttttttttacagatacaaactagtatactattgtataattttattcatcgttgttttgtacaaacagcgacatgtaaccatataagcagcaaggaccggtgaacacgatggcaagacatgtgggtccaggcaggtttacaagcatcacagcatatatgtatatcaactactaccataataccttcacatcacttagtctgaaagaagacttaatgtgcaaatcctcttcagagcctcagaggctagtgccacaccagaagcaggatgagtgtgccactcgccggtcaccgctatgcccgtttcaccacatgcagctgccgctgcggcgcagctgggctgccacccctatttgcattcatcttctccttggactgctccatcattttctcaaccagcatttgcttctttgtcagtagaaccgtcttctctgcctctttgagacgagcgttctcctgcttgagatagttcagttcagcttcgagctccaccgtataagcctgctttctagcacgggaccgtgcagctgactcacggttcttgatcatgcgccgttggcggcgctccaccgtcttctcggcgcagccatcctctctgtggggacgctttcttgttccattctcaatcatcatcccattcccaatacaattcatcatatcagcatgtgtcatggcactcatcccatctgatcggacgccgtgggtcgac

SEQ ID NO: 21208 - DNA, 1287 bp, Oryza sativa
  Clone ID: TF_OsC1243_2
gggcagctcagctttgtggggggcgaaaaagaggagctttcccttctccttcttctccttctcctccctcggtgatctgcctcgctggggcatctctaaaagcatccgactccgacgccaccaccaccagttcaccaccgctgaaagaatcagcagcagcagcagagaccacacgaggagatgaagaagtgcccgtcggagctgaacttcgaggcgttcttccacggcgagaggggggaggacgacgccgacgccgccgccgaccagaagcccggcggcggcccgcacccgccgccgttcgccatgttctccgccgccgacctctccagcttcggcttcgcggactcggtgacgagcaccatcactggggtcattcccaatcacatatggccccagtcccagagcctcaacgcacggcatcctgcagtctacacaattgagtcgcaatcatcaatctgtgcagcagcaagtcccacgtcagctaccactctgaacatgaaggagagccaaactctgggaggcacaagtggttcagattctgacagtgagtcgctgttggatatagagggcggtccatgcgaacaaagcacaaacccactggacgttaagagaatgagaaggatggtttccaaccgggagtctgctcgtcgatcaaggaagagaaagcaagctcacttagctgatctcgagacgcaggttgaccagctccggggcgaaaacgcatcgcttttcaagcagttgacagatgccaatcagcaattcacgacggcggtcacggacaacagaatcctcaaatcagacgtggaggccctccgggtcaaggtgaagatggcggaggacatggtggcgcggggggcgctgtcgtgcggcctcggccacctgggcgggctgtcgccggcgctgaacccccggcagggggcgtgccgcgtccccgacgtgctcaccgggctggactacgccggcgacgaccccttcaccgggctgtccccgccggagcaggtgcagatgcccggcggtggcgaggtgggtgacgcctggggctgggacaaccactccaatggcgccatgtccaagtgaaaactacttcttactgctttgtcagctcagctacgtataaaaatgtgatgtcccaagtgaacggacttgagtttttcagagtcctcgtgtcgtgtcaagtgtcgtcctgtaatagaactgactagctatatatagtacacagtatttggtaagagactgaaaaactacgaagtataaatgttgtggaggttagagcttttctctgatttt

SEQ ID NO: 21209 - DNA, 1275 bp, Oryza sativa
  Clone ID: TF_OsC271_2
gcagctgctccatggaacagctatttcgacgacatcctcaaggatacggagcaccatgcatgcacccacacccacacctgcaacccgcctgtgcatgacctctcacacacccacacctgcgtccatgtccacaccaagatcgtctccgccccatccgacactccgtcggatgctgccgagaccgccgagtccccgacggagaacaatgcctccaagaagcggccgtcgggtaaccgtgccgctgtgaggaagtacagggagaagaagaaagctcacactgcctcgctggaggaggaggttgttcatttgagggctctaaaccagcagctcatgaagaagctccagaaccatgccacgctcgaggcagaggtatccaggctgcggtgcctgctcgttgatattagaggaaggattgaaggggagattggggcttttccttatcagaggccagtgaagaacatcgatttggtttctagtgttgatcagggaagttatcttggtggtgcccaggttatgaactcctgtgactttcgatgtgccgaccagatgtattgcagtccagggatgcaggtgagaacaatgggcgaggatggcgctgtgagtggtcaggtgttggggcaaggtgcctgtgatattgccagtatccaatgccaaggtgcaaaatctggatctgcaaagctcccagtctgtggggctatggagcatggttattacggcatccctaaggcagtaaggcgctgccagggtgtaaggcgtccactccgccttacgagaaagctagaggagaaagggcaaaaacaagtgataaacccatcctagctgtatgccaaattctgaaaagaaatgaaggatccccatcgccaagacttcaagtcagggcattcaagaaacatcgcataaattgctagcgtctatctctaggaatgtgtgttattctgtcgccgatgatgcttccacagtgcctgaggcgatttaagttcgttagctatgaagctatcagtatgtcctctagtttgcttagctttccctccgtttttttcttgatgttggaaatggacaatattgctgctagtgactcccaaatgctccctgataaaaaacttaaagattcagcatcattgttttatgccaggatacatgtccagatttggctaggcctcaagttttgatgtgaatctcttgtaaatacatcatgtatgaaatctttgtagtaacatggattcaatcattgtttggatgttccatcgattttttaattaatcaatatgttgcgtt

SEQ ID NO: 21210 - DNA, 1820 bp, Oryza sativa
  Clone ID: TF_OsC196_1
ctttggagctgagctacatagcacatccgtggagtctcttgtgctaagcaatttaccgttccagtgctctactttgtaggccatccatattagacggaagaactttatcagtattattattggaggagaccaattcaagaatgatataatggagctttaccctggctatcttgaagaccattttaacatccacaagcttagtatcagcagcgcctctcctccggagtacatgacctcggcgtcgacgcagttcgcggcaccggtcagaatgggggcgtacgaccggcctccgccagttggcatgtggagtcacgagcagttcaaggttgacaacggccaggccacgagtgcatccacgatcatggaggcagagatgaaatttgagaataggctagaagaaattccccaagtagttctggaggaagggagaaatgttgatcaggaggcaagcaagccgccagacaaggtcctcagaagacttgcacaaaacagagaggctgcacggaaaagccgcctgcggaaaaaggcttatatccaacagctggagacaagccggttgaaactagcgcagttagagcaagagcttcaacgggccaggcagcaggctgtgtatgcaaatgggagccttcgagaaccaaatcttggatttacaggaccgatcgatccaggtgccttaggttttgagattaagtacagccattgggtggacgagcagaatcgcaacactggtgagctgaggaatgcgctgctgcaggggcagacgacggaccaggacctggagctcaagttgctcgtcgaggctgggctcgacaactacaaccgcctcttcgagatgaaagaggaagccgccaactccgacgtgttctacatcatgtcgggcatgtggaagacccccaccgagcggttcttcctgtggatcggtgggttccggccatcggaggttctcaagaatttgagaccgcagctggagcctctgacggacaagcaggtcgtggaagtgggcggcctgcagcaaacctcgatgcaggtcgaggacgccctctcgcagggcatggacaagctgaagcagacgatcgcggactccctgacggcggccgacccgttcgactcccccgaggcctacatggtgcacatggccaacgccgtggagcagctcagatccctcgtccagttcgttacccaggcagatcatctccggcagcagacgctgcaggagatgcacaggatcctgacgacgcggcaggcggcgagggggctcctcgcgctgggggactacttccagcgcttccgagcgctgagctcgctatgggcagctcgcccgcgcgattcagggataagctaaacaccgtaatatggtcacggtagaagctacagatatcagtagcaattcgtcgtgttagttcgctacttcagtgtcaggtcaatggccagtgaaggatgaagagatctttctacctgtgcttcgtcgaagaagaacaactcgtgatcgactttctgcagcgccgctgcaactgcaatccaaggaatggtgtatgttcgcctgctgagatgaagaaataaccaaaattaactttggtctttctgatgtgggcacaagagaagatgtaatataatatgtaaatatatacatgttttgggtatcattgccagaggcctctacagctggttttatagacatgtgatgtaattatctgtaactagtgttgctcggttcctcctccctagtacggcagacataggtgacatactgccattgtattgtatgggagaacaaattagttcacttgagaactagaaaaacatgcagtgatgttttgctg

SEQ ID NO: 21211 - DNA, 590 bp, Oryza sativa
  Clone ID: TF_OsC285906_1
gcacgaggcctcgtgccgaattcggcacgagggagagagactagtctcgagttcttcttttttgtgtgttgggacttgggagagtgagaaaaatgctgtcagtgcaggaggcgcttgactttgacctggacgcgatgacgtccgggttcgggttcacgccgtgggcggctgacacgtgccctaccttggagcagctgatggcgtcgtccgcgtcgccctcgccgtcgtcgtcgcttgatgacaacgcggcggcggcggaggaggagaacggtgaggtggaggaggaggaggagcggaggcggcagcggcggaaggtgtcgaaccggctgtcggcgcggcggtcgcgggcgcggaagcagcagcggctggaggagctgcgtggggagagcgcccgcctccgcgccgagaaccgggagctggcggccaggctgcacgccgtggcgcgccacggcctcgccgcgcggtgccagaacgcgcgcctccgcgccgaggccgccgcgctcgcccgccgcctcctcgcgctccagcggctcgcccgcggccgccacatgatgatcacggcgtcgccgccgcagttctcgcgtcgctga

SEQ ID NO: 21212 - DNA, 714 bp, Oryza sativa
  unsure (1)..(714): unsure at all n locations
  Clone ID: TF_OsC1713_4810
tcgatcgaattaaggatcctgcagctacaagcaagaaggtgcaggtgcagggtgcggccatggcgaactaccaccaccaggagtactaccagatggcggcggcggcggcggtggcgtggccgagggagccggacagcccgcagctgagcatcatgagcggctgcagctccctcttctccatctccaccctgagggacgacgacgacggcggcggcgtccgcctcgccggcgccgcgctgcccgccacgccggtgtcgctcgccgggatcgccggcggcgccagtacccccggcggcgacgaggtggacatggaggtgcggcagcagagcggcggcagcggcgacgaccggaggaccatccggatgatgaggaaccgggagtccgcgcttcgctccagggcgcgcaagagggcgtacgttgaagagctagagaaagaggttcgccggctggtggatgacaacttgaatctcaagaagcagtgcaaagagctgaaacaggaggttgctgcactggtgatgcctacaaagagctcactgcgacgaacttcatcaactcaattctgaaggtcgaccaaaacaagcaagattatctgacgatacaaaatcattagaaagatctaaattatgtgtatttgcaatccggtgtgcgtttgtgcaggggtcaggcatgagagaggatatngtgtgtaggtgatcgatggatgctatgaactac

SEQ ID NO: 21213 - DNA, 1471 bp, Oryza sativa
  Clone ID: TF_OsC60_1
cgactcctataggggattgggatcctactagccggccgggttccccatcggtctaattgcgccccttatgcattagagcccccggagtcccctctgtttcgcagataagtcctttggttcccatctttttattacattcaggtcctcctagtttcttttcctttcgagtctactccttgcattcttgcgaggaagcccctcgggttggtcgaattttagtttccactccctctcctcgcggagtcgttgctgttcttgttcttggtcgaggttgaggttggtggcgtagatccgatctgaggaatgtttacctatcctttcctctaacgttcgccgtactccgatgaagttgaacgtgctccgccgccgccgttcccactccttctccgtcgccttcctctactggttctacgtcttctcatgaactcatcgccttcctcccaagaacaccatctccagcctctaattgattatatcttgatttctttttcatcctcctactagtttctttcttgtttctttggaatttttttgatctcttgaagagatccggttcttggattaagttttggacaagaaccgtactgtgaccatgtcgtcgccttcgcgccggagctccagcccggagagcaacaccagcggcggcggcggtggcgccgacgagcggaagaggaagaggatgctgtcgaacagggagtcggcgaggcggtccagggcgaggaagcagcagaggctggaggagctgatcgccgaggcggcgcgcctccaggccgagaacgcgcgcgtcgaggcgcagatcggggcctacgcgggggagctgagcaaggtcgacggcgagaacgcggtgctccgcgcccgccacggcgagctcgccgggcgcctccaggcgctcggcagcgtcctggagatcctccaggtggccggcgcgcccgtcgacatcccggagatccccgacgacccgctgctccgcccatggcagccgccgttcgcggcccagcccatcgtcgccaccgccatggccgacgccttccagttctgagccaccatggagagctcgcacgccatggccattggcatcaatggcatggttgcagctgcattacaactagtagtactagcctctgtggttgtgtctgatgatgcttattatgtttaattatggtttgcttcatgttgttttcattaatctagaccattaataagcaatgtgtgttgtaatcttgtctagtcttatgtgagatgtgttcatctccagtgctccttgctaataagggtggaagagaacaatccgatttgatgtaattcttggagagcacatgtgtgctggtttgtgatgtgatgaactgatgattgtaatattttgacattgaacctatgctataatgtttgcagcaatgaataaaaaaaaaaaaaaaaaaaaaaaaaaaaaaaagggggcccagcccgcagcccggggatccactagttctag

SEQ ID NO: 21214 - DNA, 878 bp, Oryza sativa
  Clone ID: TF_OsC31203_1
atggcggcgcaggagcaggagcaggagaagcagcaggtgaagacgagcacgacgagctcgctgccgtcgagcagcgagcgctcctccagctcagcccccaacaacctcaaggaaggaggaggggtggagagcgacgaggagatacggcgggtgccggagatgggagggggcggcgggtcggcgtcgtcgggggcgggggcggacgagcggcaggggaaggaggacgggaagcagcagggtggtggcggcggcggggcggcggcggcggggggcgggcaggagcaggcgccgccggcgaggaagcgagggcggagcgccggcgacaaggagcagaaccggctgaagcggctgctgcggaaccgcgtgtcggcgcagcaggcgcgggagcggaagaaggcgtacatgacggagctcgaggccaaggccaaggacctcgagctccgcaatgccgagctcgagcagcgcgtctccaccctccagaacgagaacaacacgctccgccagatactcaagaacacgacggcgcacgccggcaagaggggcggcggcggcggaggcaagggcggcgatggcggcggcggcgggaagaagcaccatttcaccaagagctaggaggagaggggctccggtgccggcgccgccggaggcagggttgtggtaggaattgaattgttcatctgctctgaccattgttaggaaacatcatcaatgttgttgttgttgttgttgttgacgtttttccttttttttcttcctctctgttcaactctacgcttagtcgactgcttcggtgatggttgcaattactgttgctgaacattgtgtcttgtattttattaaatgtgtttttacagccccaaaaaattaaaaaaacaaaa

SEQ ID NO: 21215 - DNA, 1473 bp, Oryza sativa
  Clone ID: TF_OsC32579_1
ccggccgggccttttccccttctcccctccttcctcactaaggttcccttgcttcagcagaacccctgctgggcaccctcctttttcaaaacatcctttgctctccagccacttcatcttgatgttcttaatctccaatagtcttgccctgtgcgaattttttctttgagaaccaaagtttcctggggaaattctgttgaatttttcctttgagaaccaaggcttcttggggagactctgccaaaatttttatcaactagcaagttgaaaatacatcattgtacatatattttgtctgcacatttatatacagtagcaaaacctgtttgtagaggaaattattatagtgtttctggctggttgatccatgatagattaaacaagggaaggttgtgacttggtagatgtcaccaatcctctccgaggtcatcctctccggatttatgatcagctcgacgctccggcgaggctctcatcttgtcctctctttctccgtcgtcttcctttactggttctatgtcttctcagtaacatcctagctactgttctcttttatttgatccatccaataccagagaatagaccaccatattctacataatacttctcattggaaattatagcttatagacaaaactgagggtgacaatactgtaaggtattttcctaactgtagcaccaaggagggtactcaggacttttattaggatgaccctgtcaggtgggaccctgtcaagcgggataacctctggctcaagccatgggacccggagctcagggtcagagggtgatatccagctgcaggtccaaatggacctgaagcggaaaagaaggaaggaatcaaaccgagagtcggcaaagaggtctaggttacggaaacaacagcacctcgatgaccttacctcacaggtgaaccagttgaagatggagaaccagcagctcaccacaacattgaacatggtcacccaaagctgtgccttcgcagagtctcagaactcagtgctgcgcactcagatgatggagctggatagcaggctatcagcgctccgtgagataatcttctacatgaacaatggaaaccaatcaccttctaatcctacaatagcagcgactacatacccatccaccactacaatgactgcagcaactactggccattacgattattatgatgttttcactgcaaatgcatggggctcagggatgcaaatgatgcagcagcccatagatcagtttctgtaccagtgctagctagcttctagccaggaagtcgatagagatagtggaccaaattaagaaacagggcattgagatattgggcgtggtgaatgttgtagctaggtccatattaattatattgtgtcaccagtggttgtttatcttttgctttgatttgtgatcggttgtgggggcaggaaaaaaatggtgttgtacctttctgctgttggtggtaagaggccaaatggctattgg

SEQ ID NO: 21216 - DNA, 1526 bp, Oryza sativa
  Clone ID: TF_OsC2044_1
agctctcgtctcgtctcgcggcctcgagccctcgaccaaccaaccacccgcttcttctctcccgtctcccgaaacctccgagagctcagaagaaaaaagaagaaaaaaaagagaaaaaaaaactggtggaaactggaaggtttgcggcggaaacgagggggagggatggtggcgaggagggcgtaggcggggggtgggggtgaggcggatgatggcgtcgagggtgatggcgtcgtcgtcgccgtcgcacacggcatcggatctcgcgcggttcgcggcggggaggggtgggggcgggagcgcggggctggggtcgatgaacgtggaggagatcctccgcggcatctacgccgacatgccgacgccggcgctgcccctcgtcggcggtgacaggccgatgtcgccgctcccggcgccggatgtcgccgccgcgccgcggacggcggaggaggtctggaaggagataactggtgcgggcgtcgccgccgccgccggcggcgtggtgccccctgctgctgctgctgctgctgccccggccgtcgtcgctggcgctggcgctggcaccggcgcggagatgacgctggaggactttctggcgagggagggcgcggtgaaggaagacgaggctgtggtcaccgatccctcggcggccaaggggcaggtggtgatggggttcctgaacggggcagaggtcaccggaggcgtcaccggcggcaggagcaggaagaggcacctgatggatccgatggaccgcgccgcgatgcagcggcagaagcgaatgatcaaaaatcgcgagtcggcggcgaggtcacgggagaggaagcaggcctatattgctgagctcgagtcgctggtcacgcaactcgaggaggagaacgccaagatgttcaaagaacaggaggagcaacatcagaaacgacttaaagagctcaaggaaatggttgttccagtcatcattaggaaaacgtcagcacgagatcttagaagaacaaactcgatggagtggtagacgtgagccaagctcagttgccatccccatacagtttatgtagcatttgctcctgttttgtcaattcttctgttttatcggcagtagcctagttgcggtgaatacatgagtatttaggtgacacgaagcttaaatgtctggagtcatatgctacggaggggagagtgcgtacgagctacaaaagcaatcatatgtgtagggaggggagagtgcatatgagctataaaagccatgttccaatttgtcgcgggagtgtattctgtcccatttgttgtctgtttcattttcagtttaacaattaggtgtagtgaggaagaattacgagtactgagtagtactaaacagggtgactctaggtatgctgatatgatatctagttaggcattacttctgattctctgtttggtgccacgactcaaattgtctgtacatacacgttggatgtaaagtcacattatcaagtgaaatcatgatgtatttcctccagaattttttttaactgaaaaaaaaacaaaaa

SEQ ID NO: 21217 - DNA, 2329 bp, Oryza sativa
  Clone ID: TF_OsC11088_1
atggcggagccggccctgctggaccccaccgccgccttcgacctccgcctctacccggcccacctcttcgaccacgaactccctctcgccggcggcggcggcggcgacgacgacgacgacctcccgctcgacgggctcgagttcgacctgcccggcgatttctccgtggaggacttcctcctccggtctccggagcgggacgactccggcgagggctctgctgccggatccgggcccaccgcctccccgtcgtcgtccccgaccacctcggcgtccaactccgccgtcgccaacggcagcggcggcgaggtcaagcacgaggagtcggatgaggggaggagcggtgggggtgaccccaagtggagcctgaagcggaagcaggcgagccccggcccgagctcggacgcggccaagtgccgccgatccggggacggcgacgtttctccgtcggcgtcggcgtcgcggaccgctgtggattccgacgagggggggacggtgtgcgaggaggaggaggacgagcggcgggcggcgcggctgatgcggaaccgcgagagcgcgcagctgtctcggcagaggaagaagcggtacgtggaggagctggaggagaaggtgaaatcgatgcactcggtgattaatgacctcaattctaggatctcctttgtcgtggccgagaacgcaacactgcggcagcagcttagtggcggcagtgtgaattgcccaccacctggggtgtatccgccggcgccaattcccggcatgcatttcccatggatgcctgggtatgcaatgagaccccctggttcccatgtacctcttgtgccaatcccccggttgaagccgcaacagccagtgccttcatccaaagtagtgaagaaaccagagagcaagaagactgtggagaacaagagtaagagcaagaccaagaccaagaaggtggctagtgttagccttcttggtttgctgcttattatgcttgtctttggtgctttcattccagggtttaatcataactttggaatgtgtgggcagagtgataatgctatgtttaggaattttggtcagtctcatgctagggtgttgagtgtcagtagccaggataaaagtagtttgaacaatagcgacatgattggtgttgatgttggaaagatgacggggaatactgatgggccagggaagaaacatcagcctgcacacaactcaagtgagatcctccctgctttgttgtatgtgccgaggaatggaaagcatgttaagatcaacggcaacctgattattcattctgtgcttgcaagcgagaaagcagtggcacataaggcctcaaaagatgatagtgatcagtcagctagagatcacaaagagactagtgttgccatagctcgttatctttcgctgcctggaaaggatgtgaatcgacaggagacatcctcggcagatggaccattgccacaatggtttcgtgaaggaatggaaggacctatattaaattctggaatgtgcagtgaggtatttcagtttgacatttcgacggcttctagcaatcctggtggcattatacctgcatctcctgttgtgaactcgtcaagtgtcaatgctaccgagaaaatcccagcacattctgctgcttatcatggcaagctgaaaaacagaagagtcatgtacaatgaagcgattccactcaccgggaagacggcgaacaacacagagccttttaacagaacctctgaaagcagcagcaagttacctgatagcaagccagcatcatcagttgttgtctcggtgctagccgatccaagggaggctggtaatggggatggcgatccgagagtatctccgaaacccctgtccaagatatttgttgttgttcttgttgacggtgtgagatatgtcacttactcctgcacgcttcctttcaagagctccagcccacatcttgtgaactaagcggctgggttgttcgccaaaaactgacagatgaatagatttatacaatgatctgatgctgtttcctaaccaaggactaaacttcctatgcactcaggctgaggtaattcaagtttgtcgaaggttcggagtgatgagtgcgagtttagttaatgtatgcagtttttgcagtgctgtgataatcgggttcgtttgctgtacctctagctgtaacggtgatgtaatcatgtaatactgtttgatcgttgagatataagtgcaactagtaatatgggtagtcgagaacacgtgcagaatatacatgcctttttttaccttagtttcaatgaatatcataaacaaagctacagtacatcaggttgctgaaaaaaaaaaaaaaaaaaaaaaa

SEQ ID NO: 21218 - DNA, 1276 bp, Oryza sativa
  Clone ID: TF_OsC2449_1
gttgttttttttttttttggggtttagatcaaatatactggtagtatatacttcaagaagaatgtacccgaaaagttctctttttttccctgggttaatccaaccaaattaagttccaagttttaggatcaattcaaacccaaaagcatattcgagcataaaggggtctactacttgctgacatcttctcctcttatgccgccctgccgctgccacctgccgccgccgggctgccgctgccctggtcctcgaacgcgctgatgatgccgatgacgaaggccgtggagaaggactgcatcgccatgctgttgggcgtcctgtggaactggagcagcgccgggaagaaggcgtggcccttgagctggttcgtgccgttggtcaacatgagcagcccgttcggggtcaccgtcgccatgccatcgaagctgagattcgcggcggtgaacccgttgaggacaaacttctcgtcgccctccgcctcccgcaaacctccgcagcccgctggtgccgcctcccgcagacccgatttggggattttcagaagaactggccctcttctgctcacagttgtattcttcagtatctgtctgagcatctggttctcattctgtagggtggagaatctttcttccaactctgagttcttcttctccaagtccttcaccttcacctcaagatcattcaagtatgccttctttctctcccttgcctgctgcgctgatacccggttcctcagcaaccttttgaggcgcttgtgctccttatccgcggggctgcgcccgcggcggcgcgcgctggcctgcgccgtcgacgactgcgcgcgctccgccccgccgccgccgccgccggccgccctccccgacgtcgaagcgccgcccggctccagccccagctccggcactctccctatctcctcgtcgctctccattcccgaaagaggaacagtaaaatggaaatcaagaaagggaaggagaagggatcgaagtggcgcttccttgccttccttgatctccatgtggtggccgccggagctggacgacctctcggagctggacggccgcgagctcgtcgcctgctcctgcattctcgccggcgaggagggattcgcgtgcactcctccgcttgcttcagcttcagcttccccactctgtcctctcctctcgtccttgctgcttgcgtgaagcatggaccatgagagctttttggctttaactggcgcgcgtgccgcgggagagggaaggaggggatcggtgagagatgcgcgtgttgtcgccat

SEQ ID NO: 21219 - DNA, 525 bp, Oryza sativa
  Clone ID: TF_rsiced_11007.y1.abd
tctctctgtgtgtttgtgtcacactcacgctgagcttgcgagcttgcttgctcagaggaggtaaagaaaccgaccgcgaggaggtctcgtcggccgcccccgccggtgtcccgccgccggggaccgccgcaagaggcggatgatcaagaaccgcgagtccgcggcgaggtcccgcgcgcgcaagcaggcccgcgtcaacaaccgggagaccgaggtggagcagctcaagcaggagaacaagatgctccgcgtcaagtacgagcagctgaggaagacggtggaggtgccggcgccggtgaggaggactctgcagagggtgctctccgcgccattctgattcttcctcctcatcgatctcctgctgctgctgctgctgctttgtgatgatcttggatttgtttttggagatggtggtggattagtagcttgtgttgctgtgatgatgcttaattagcagcaaagctagctaatccaggcatgtacattcaggtggacgaacttagctactatggttactactactac

SEQ ID NO: 21220 - DNA, 1315 bp, Oryza sativa
  Clone ID: TF_OsC3007_1
tttttttttttccaacttttttttacattgatgatcacaagaggaattgatataatgacatagtttataacattacataacacaaacaacataattaacccttacaaaacaccacatggacacagacaaaagaccatcacttattcagacacaaaatcatcatcagaagagtagtagaagaagaccatagagcagcagcagattaaagccttgaaattctcaaagcagccaagagaagaaaaaagatgaagacttcttgatgccaaccacagcttagctcagagctcactctcccatggcgcggcgttcgttcagtactggagcatgtgcgcggcggcggggcaggggatctgccatggccggagcagcgggtcgtcgggggggcactcctcctggatgtccatggcgacgccgctgaactcctcgacgacgcggagcacctcgttgacgctgcgcagcctgtcgccgagctcggcggcgcgcgcccggagcaccgtgttctcctgctccacgcgcgcgtactgcccggcgatttcgctggcgcgcgccagcacgcgcgcgttgtccgcctgcagcctcgccacctcctgcaccagctcgtccaggtgctgctgcttccgcagccgcgaccgcctcgccgactccctgttcgacagccgccgcttctccctccggtggtccgccgccaccaccacccccgccgagtccccgtccgacgaccccgccggcgacagcgacgacgacgacatttccacaaacaccttgtctacaaacagctgcttcttctgctgctacgattatttaatcaaccgaagaagaacacgaagaagaagaacaacaacaagagagctctactactactagtaacaatggcggattgacgcggagaagatgattcccccagaattatgagatcacataaaaccagtagaggaagacaaccgagaaggagtggaggaagcaggagcggcgcaggtgagtggcgatcttcataaagctcagagatttcttctctgctcgcctcggcaaaccatggccagcgagctcaactcctccctccagcgcaaacaattcctcccaaatcccaacaacaaaaatcacgatctttctcaccaccaagatccaacccaagaacagcaaccacaaccaaaattcgacaccgattcgatcagcgggagctgatctgctcgaagaggacggaatcgagctgattggagaagaatttggggggagaaatggatcgagagatggagatgaatggcaaccacccaaatcaaaggatgagccccggggtggggcagcccggggatccact

SEQ ID NO: 21221 - DNA, 717 bp, Oryza sativa; identical to SEQ ID NO: 11590
  Clone ID: TF_OsC542_34

SEQ ID NO: 21222 - DNA, 1367 bp, Oryza sativa
  Clone ID: TF_OsC359_7290
atggacccgcgattcccgccgccggcgccgtccgggggagcgccgccgagggggcaccaccggcgggcgcactcggagacgttcatccggctgcccgatgccgacctgctgctcgacccggacggcgagttcggattctccgacctcgacttcccttccctctccgacgactcccccgcggcgtccgacccgaccccgcctcctcccccgccggcgctgccgcaggcggcgccgcggccgcctgggggtgcacacctgaggagcctctccctcgacgccgcgttcttcgatggcctcgcgttccagggaggaggagggggtggtggtgctgggagtgggagtagcggcggtggggctgggcataagaggagcgggtcgatggatggggagagctcgctgttcgagggcgagtccgcgccgcccgactacgccaagaaggccatgcccgccgataggctcgccgagctcgcgctcctcgaccccaagcgcgcgaagaggattctggcgaacaggcaatcggcggcgaggtcgaaggagaggaagatcaagtacaccggtgagctggagaggaaggtgcagacgctgcagacagaggcaaccacgctttcaacacagctcacgctgctccaggcgtactgggatgctatgatcataaaaagtgttagtctctgtttggttgtatttattctcaactgtgagtaccgctatagttctgtacttgcaaattgcactttccaggacaagcagggccattacaaggcaattgaaatcaaagaatccaaatatatttatccagataagcaaagcaacctgttgagaaagccttctctgtttaatgcagctctgaatgacgccctacgagaagaagttcagcggcttaagatagcggcaggccaagttccaaacatgaacggaaactccttcaatggaggactccagcagcagcagcagcagcagatgccgacctatttctcgcagcagcagcagatgcactacttaagtggccaccagggacgtcatcaccacccaaataatccccataactctttgaacggaggccaatcgatgagcggccagaccctaaatgactccatggatttcatgtgagcaggactcaagcacacctcaagttgcacgctaactgcaactcatgtactgtaaagatagctgatgtataccatatgcatatatgaatcattcgtagggtagctagctgatctttgtaccattactgaaaatgcaattcatcctcctgttcaatcatctgttaatgccttagtctgaaggttgaaagaactgtgtttaacatgtttgcgacggttgttttgtaaagatgttgttatagtgaatggaatgggttctgattg

SEQ ID NO: 21223 - DNA, 856 bp, Oryza sativa
  Clone ID: TF_OsC799_2
ccacgcgtccgtaccggactacgcgaagaaggccatgcccgcggagaggatcgccgagctcgcgctcatcgaccccaagcgcgcaaagagaattctggcgaacaggcagtcggctgcaaggtccaaggaaaggaagatcaagtacactagcgagctggagaggaaggtgcagacactgcagaccgaggccaccccgctgtctgcacagctcacgcttctccagagggatacatctggtttaactgccgagaatagagagctcaagctacggttggcagtccatgggaagagcaagctaactaccgtgatgctctggaatgaagctctgcgagaagaagttcagcgacttaagatagcagcagggcaagctccaaacatgaacgggaatcccttcaatggtggactccaacagcagattccgccctattacacgcaacagcagcagcagcagcaacagatgccttatttaggcggccaccatgctcagcaacgccatccaagccatcagcagagctcatcaaatggcggccagtcgctgagtggtcagtccctaaacgactccatggatttcatgtgaggagaagaaactcgggggcccctattaaaccatataccaactgcagctcagcattgtaaagatagctaatgtacaatgtaatgcatatgaatcattgaatagggtagctagccgttctttgtaccagtaaacagaagtaattcttgtatgacataatcctccctttccccctttgttcattcctggattaatgcctagactgagtaactatgttaaccatttaacacttgtctgtaaaaaaaaaaaaaaaacttgtcttgtaaagtggtcgtttgtaac

SEQ ID NO: 21224 - DNA, 2033 bp, Oryza sativa
  Clone ID: TF_OsC737_3
ccggccgggacaatcagagcgaaatcgagagagagggcggcggcggcgacttcgtgcgcaagagggaggcggcggcgacttcgtgcgcaagagggcgtgccacgggccagcgacgccagtgtcctcccttctccatcctccttcctctcatccctcctcccgccgatccctttcccttctccatcctccttcctctcatccgccgccgcgccggctcgtggctgagctgctcctgcacctcctcctcccagtcccgcgcccgcagctcccgcctctccccccgcttcttccgcctctcccgccctgtcagctccccctcacctccatagccaagtgctagccaataagaaaattttctgccgcatccatgatacttagagactccactgcttcattgaccaagaaaatatagaagatcaaaggtgtcttgtagaacttaggtgttaaaaggaatagagtaatctagggaggaataaagcatgggaaaaggagaggtagccactaggtccaaatctcaaaaatcatcggcgacacagaatgaacagagtacacccactaatcctcctactgcatatccggactggtctcaatttcaggcatactataatcctgctgggacagctccaatgaccccaccgggctttttccatccaaatgtggctccaagtcctcaggggcacccatatatgtggggtccacagatgatgcctccctatggaacaccgccgccatatgcggcgatgtatgcgcaagggacaccatatcagcaggcacctatgctaccgggttcacacccatacaatccttatcccgggcaatcaccaaatgggacagttcaaactcctacatctgctggcggaacagagacagataagtcaggcaaaagtaagcggaagactcccctgaagagatcgaaaggaagcttaggtaatcttgatgtagttgcaacaaaaaataaaaaggcgcccgcaaaaccttcagcatcctcatccaatgaaggttcttcacacagtgagagcggaagtggaagttcttctgaaggaagcagtacaaattcaaaaagtggttcaaggacaaaggatggttctgagcatggccagggtaatgatgctagcaacaaaggagctactgctcagagttctgcggttgagcccgtacaagcatctactgggccagttgtgcttaaccctatgatgccatactggcctgtccctcctcccatggctggcccagcaactggtgtaaacatgggaatggattactggggtactcctacttcagtacccatgcataataaagttattgcagcaccagcatcagctccttcatcaaactctcgtgatgttgttctcagtgatccagccatacaggatgagcgagcgctcgcgtggcaaaagcggaagcaatcaaatagggaatcagctcgacgttcaagattacgcaagcaggctgaatgggaggaagtagccaatcgagctgatttgctaaagcaggaaaacagctcacttaaggaagaattgaaacaacttcaggagaagtgcaatagcttgacctcagaaaatacaactttacatgaaaagcttaaagagcttgaaggcgagaaatcaaatggaaactggtataaagagtgaaaagctgtaacttatcactttctgacttctgatataaattggaggcgacatggtaggtccgataattaggaggtattcatgtatgctattagatttttggccgagaggtagaattgtatcataggatttgacatgatggctacagattcttcttccagttgccgcggctgctgtactctatgctttttttttttttctgcacttgtgtaagattctacgaagtaccatgtaaaagtccccaagtgatgtttgaaactctgggggttagcttctgagatagttgatgtagagctgctcattgagcgtctttacctgaattgatgtgtgtcacagttatagtttgtgacttatcattcagataattagaggcacaaatttgtataacaaaaaaaaaaaaaaaaa

SEQ ID NO: 21225 - DNA, 531 bp, Oryza sativa
  Clone ID: TF_OsC342012_1
ctagctgtctccgccggcactgctgtctggccctcttctgtttgctgttgtgttcttcagcacctgcctaagcatctggttctcgttttgcagggtagagagcctctcctccagctctgagttgctcctctccaggtccttcaccctcgcctccagctcactcatgtacgccttcttcctctcccgagcctgctgcgctgacacccggttcctcagcaatcttttgaggcgccggtgctccttgtcggcggggctgcgtccgcggcggcgcccgctgctgctgctgccggcgacgccggcctgcgccgcgggcgacgacgacgacgtcccggccgccgtcgccgccgcgtcacctgcaacccgaacactacctctgcccgacgtcgacgtccccggcagcgccagcccgaactccggcaccctccctactatctcctcgtcgtcgctatccaccctttctagaagtcccccgccaaccgctttgactgattgcttcacgacctgcccgtcgtccttccttttaatcgtcat

SEQ ID NO: 21226 - DNA, 1647 bp, Oryza sativa
  Clone ID: TF_OsC15853_1
tcaaggcgcatcattaggctgagcatcagaatcctgttgcttctggtgggtgccattggtgtcgttctgttcattcatataaggtattgaatcactgttcccctctagtttttccttgagtgaagcattgtgtgaaagaagtgcctcgtactcctttttgatccgttcaagctcagccctaagagaggagttttctgcccttaaattgtcagcgcgtacagaaagctcttcacactcaggctgggacaaatagtttggtgcctcaataagcctatccatgatgttctgcttgcgcagccgggatctacgtgctaatgcaggattagactacttacgtgtctgcttcttcagctctgtttcatcccattgctctcctcggacagaagcagatgttgctttacattgcatggcaggaaaaggcgcagatccagctgcacctgattactccgtcggtatgttcgagtttgttgtgggagcaactccccccattactgcttccggttgacttggagccatcaatattttcttagtaaatgctgtatggattatttgatattgagaacaggcatcttcctttacatcattttcctttgaatgtgaatcattttgagagttggcatcacttccttcactttcactctcacttccactctcactgtgggaggtaatcccgttggcagatggaccagatgttctgccaagctcatttttcccgttaatttctgaagcacctggtgcagttccagcagtttcaacatttccatttgccagcatagggtagtgattaaatggatgcacaccctgagctccccacatgtagggatgagcctggggacttgcagcaacaggaggtggaaagaacccatgcggtggaattgccgagtaggcctgaaaaccaggccattcagggtaaactggagctgtagtgccagatgtagtggctggagactgctccggttctgatgcctttgttgccttggacggcgtgccaggatcattagtacccatcaggcatcccaaaacactcaaatttaagaatgacgcatcaaccaagaactccacagatccacactcctgggaggctccaaggcagacgcgcatatcaaattcttgcaatcctttggccaagagtgattggcagttccaacgcaggcgcccttggtactccaaggaatgacagatgtcaccatcaatgacggatatttgctttctcattgctagagcagctgattttgtattatatttcacttgatatcttccagctggagttgagtcgttgttgatcgagatttctggaacaacttcatccaagaactcatctgcgacatcaccatcctcatcaatccttagcttccttgtataccacctaaagccctgaacgccgccgtcgccctggggacagggcacgagcaccggcccgggcccgggccgctcgacggggacggggacctggacgctgaacccgcgcctctgcacgttcccggcagccgccgcggcggccgcggcggcgacgaccttatcctgcgggacttcggcggcggcggcggagtcccccgcggcgccgtcgtggtggtggtggtgggggtggtggtcggcgtcgtccctggagattccaaacatgccggcgatccggcggaagaaacccat

SEQ ID NO: 21227 - DNA, 2526 bp, Oryza sativa
  Clone ID: TF_OsC1438_2
gaggacgaggcggagatggcgagcacgaggctgagcctcgagctggggaaggtcggaatccagtcgtcgccgccatgctccagcagctcaagcgccggccaccccgcgatgcagcccgccgccgcggccacggcggcgccgggctacggccccaggccacgccacatgctcaccgaggccgagaaggaggcgaagcgtctccggcgagtgctcgccaaccgggaatccgcccggcaaaccatcctccgccgccaggcgatccgagatgaattggcaagaaaagttgcagatttgtcgtcgcagaacgagaccatgaaaaaggagaaggacgtggtggcgatcaggacgatcaagaaggcggccgtggcggagccgatggacacggcgccgccggcgcagcagcaagcggagacggcggcggccgtggcgccgccgacgacggccaccccgccgtcgacggcgccgcagccgagcttcctgtacaccgcggcgccggcgggcgtggcgccggtgccgtacgtgtggggctcgtggccgccgtgcgggccgacggggtacgagccgccgccgccgctctgcctcccgccctgcgcgtggtactaccccgtcgtcgccgatccgcgcgtgtcctcgccgccgacgtcgacgtacccgcagtcgtaccaagaacagccgacgagcagccctggcggcgggacggccgaggaggacaccgacgacgacccgtgctcgctgacactcgccatcgacgtcgacaagaggagcgcgcctggcgccggcggcagcgcggccggagctggacagcacgcctccataagcgacagggagaaggcgacggcggcggcggaggcgaggaagcggaggaaggagctgaccaagctgaagcagatgcacggcggcggcggcggctcccgtcccggcggcggaggcgagcactgcgcctgcccaagcctccgcgccgcgggatgccgccgcgctctgtgctcccttctccggcctcggtttgctcagatccaccgcgtcgcgccgtcgatccgacgccgatgcggccgccggcgccggcgacgacggcaggcgcgggggggaaggtgacgccgaacctggcgatggacgcggaggggacgcggctgctcaacctcaccgtgctgcagcgcctcgaccccgccgtcgaggacatcctcatcaccgccgcccacgtcacgctctacgacttcaacatcgagctcaaccagtggagccggaaggacgtcgagggatcgctgttcgtggtgaagaggaacaagcagccgaggttccagttcatcgtcatgaacaggcgtaacaccgataatctcgtggaggatctattgagtgactttgaatttgaacttcagcctccgtatttgttataccgaaatgctgcacaagaagtaaacggtatttggttttataaccaacaagactgtgatgctgttgcaggtgtttttggaaggatattgaatgcttacgccaaagtgcctccaaaagcccaaagtacctttccacaaaaagtgagtttgaggaattggaagctgttcctacatccgctgctatagatggcccccttgaaccttcttcgtcgtccactgttctagtttctaatgcccctgatgaatcattgactgattatttcagtggcgctgttaatgttgggaatgtatcaattacaccaatggttggaagaactcatcagcctatcgagtctgttgcatcctcacacgtaccattgatcatcccatctgctgctcctacacatcaaatgggtgttccttcaggggctgcgtcagctccaccactgcccgtcattgacactaacgttcattctagccactcaacaaatcttgtaactccagccttttttgcacctccctcatcgtcttctgcatcattggtggcaccagcttcatcctttatgcccacagcatcaccttttcatccaacttctgccgatgctcaccgtccagcatatggacatggtacaccccttcttcaaccccttccgccgccaacaccacctgcatcacttacccctgtacacaacgatgagcctgttatttcgagggataaagttaaagatgctctcctgaggcttgttcagctttggcttctttttatatcggatgtccgcgaagagattgtgcagctttgtcttgatgcattattgatgtaggagttacagaatgcacatgcgtagactgcttactcagcctttatggagtgtctggccttgacgagagttcacctgttctttcgtagttttgtgtgctttagttctcaaaactttatgtacagctttggcttctttttatatcggatgtccgcgaagagattgtgcagctttgtcttgatgcattattgatgtagagtttttatagcaatggctggtagtatttcttccaaatggttgtacttgtatagtatttttgtttcctgttggaaactcgaaatcggaagctggactatgtgtggcaacgttaaaatactgtccattttgtgtgataaacaaaa

SEQ ID NO: 21228 - DNA, 1747 bp, Oryza sativa
  Clone ID: TF_OsC7438_1
gggcccccggcctccagcccccagctcctttgttaggttttcttccagtgagctctttttgctcatattcagatcttcacttatttcctagttgttactactgcctttgagtattgacagcttcatcctgccaactcagctcaatcttcctctgaagtttcagtctttgtttctgaatctcttcagtgttcagaggggaagttctgccaaaaaatttctctggccatccattttccaaggggagattctgccaaaattttcatctctgtccatcaatattcctggggaggttctgccaaaattttctctgaaatcggttaatttataaggggaggttctgccgaaattttcgctggtcatcaatcttccctttgttgacataccctgcataagtatatacaacaaacatataactttttgcaaggtaagaaggagtttttatctgttcttgatgatagactcctagagaagttgtcctagttgtgtagatgttgttgctcatcatccctgagcacctcctctctagatttatgactggcccagccataacccagcttgttcagtccttctctgttgtcttcctctactggttctatgtcttctcagtaagctccctgtagttgtagccttttgaaattacaagacttatttatacaacataattatcaaggcatccacatataaactacaaggtatatatatatatatatatatatttacaaaaagaaaaggaataagagggagtaaaattgttgccggtgcgaaaaaaaaaattgttgagaggtgaccatgtcgagtgggacctcgtccgggtcgagccagggaacccggagctccaggtcggaagatgacctgaacctccaggcccagatggagaagaagaggaagaggaggaaggagtcgaaccgagagtcggctcggaggtctaggatgaggaagcaacagcacctcgacgaactcacctcgcaggtgaaccagctgaagaatcagaaccagcagctgagcatggcactgagcctgaccacacagaaccttgtggcagtgcaggcacagaactcagtgctgcaaacccaggagttggagctgcagagcaggctgtgtgccctaactgacatcctgatgtgcatgaacaacaccagtgctactcctactcctacaattccagccaccactacaagtgcttgtgatatttttggtgccagctcatggaaccagccacccatagacttgtaccagtaccagtgcttctgatctaggaataagaagagggttgttgtggtagtgtgggtaggaccagaagccatcaagtaatgtttcaatcatgtagggccattgttgtcactgttaatgtatgcaattcaatcttaattgcctgctgtaggggacagggatatttgctctttcttgtagctgttggtggtagagggattaccagatggcaaaatggtgctttggcaatgtgttaggtggggctggttttggttgttaagggtagggaggagaaaattggtaggtttttcttgagcatgcaagaggggaggcaaaggattttgtgtaatgatgctcttcaaggaaagtattcataattatgattataatgtaatatgtggatttggtggatcttcataggccaaaaaaaaaaaaaaaaaacttttacatcctctgtctgtatgtgtgacgatactgctcaattaatactctgtgggggtcccgattccccatatacactctattgaggttctaatcc

SEQ ID NO: 21229 - DNA, 682 bp, Oryza sativa
  Clone ID: TF_OsC1517_1366
aggagtacaacactcttgcaacagcacccaacaatttggagactgcagagaaaagggtgttcttactagctaaggaattttcaacatggcagttacagcttgaaccacctttaattccagggcagcttacttctactattaacatgattcagaagtcggccgagttaacccgccggagctgattctttggctcctgttgcggcacatactgcactaccggttcaggtgccttgtgcatcctgagccgcttgttctcctcctcaagccgcgagatcttgttctccagctcgttcgtgtacgcctgcttcctggcgcgcgacctcgctgccgactcgcggttcttgatcatccgcttcttccgccgctccaccgtcttctccgcggcggcgccctcacccgcggcgggggcgcgcttactccctgacaccgggccgtcgtggtacagcgcgtccagcaccggcccggcgcccagcccgacgtccaccgtcttcctccccgccgccgccgcccccgcccccgccccaccgccacccgtacggagcaggtcgtcgaggttcacgccgtgcagctgcccctccacctcgctcagcgcgaggccgcacagcgacccctgcctcgacacgcccccgctcccttggtgcgacgacaaaccagtctcaaccagaaattgcgccagcacaaa

SEQ ID NO: 21230 - DNA, 1605 bp, Oryza sativa
  Clone ID: TF_OsC20200_1
ccacgggtccgcgcaggcacgcacggcaccggcggcggaggacgcggcaggagcagcagccgcctcctccaatccccgagccgaacactcgctggcgggcgcgcgcgcgcgcagccggggaaccgggggggagacagggtggtggtggtgaggcgggggcgagcgcaatgcaggagccaaagcacaccgatccggcggccatgcgcggggcgcaccaccgccgggccagatctgaggtcgccttccgcctgcccgacgacctcgacctcggcggcggcggcgcgggggcgttcgacgagatcggctccgaggacgacctcttctccaccttcatggacatcgagaagatctcctccggccccgccgccgcggggggctccgaccgggaccgcgccgcgggagacgtcctcgccgccgcgccccaagcaccgccacagcagctccgtcgacggctccgggttcttcgccgccgcgcggaaggacgccgccgcatcgctggcggaggtcatggaggctaagaaggccatgacccccgagcagctctccgagctcgccggcatcgaccccaagcgcgccaaaagaattctggcgaacagacaatctggagctcggtcaaaagagagaaaagctcgttacataacagaacttgagcggaaggttcaaactcttcagactgaagccactactctctcagcacaactcacactatttcagagagacacaactgggctttctgcagaaaatgcagagctcaagatacggttgcaggccatggaacaacaggctcaactgcgagagcctctgaatgatgcactaaagcaggaactggagaggcttaagctcgctactggtgagatgaccaattccaatgagacatatagcatgggactgcgtcatctcaccagtacacacccctttcttccctctcgcccagcataatgcagcccgccagaacggtggaacccagttgccaccacaatgtccaaccaccccgtcctaatgtgcccaatcacatgctatcccatccaaacggtttgcaagatatcatgcagcaagaccctcttggccggcttcagggtttggacatcagcaaagggcctctagttgtgaaatcagagagcagctcgatctctgcaagtgaaagcagcagcaccttctaaccaggcctacccaccgagcccacagttccattagattcgtttgttcatagcctgacatcctcgcgctgctccctgttctgtaagcttattatttattcaattcgttcgatttagttgaaattgttcgtaattgcagtggctgatctattcccttctgtggacatgattcctgtacccctcacatccatttgttttgggttcatctcctgtgtgctgtgtttgggattatcagggcaccaggactggctttctccgagaatactgtgttctttgtggtcgtgtggacttgttcaccatggattcaattcaaccttttgaaaagatgcatgtattctctgattttttttctcagtcatgtacatgtcactgttatgctagtttgattgatgtgtactgtggaatttgtggataacaaaaggagttaagattgggattgctgggaacc

SEQ ID NO: 21231 - DNA, 1670 bp, Oryza sativa
  Clone ID: TF_OsC340_1
atggcagagtccagaatattcggaggtctcaagcccaccaagtccaggttactgggccctactatcagaggcccaccacccaacggcgcggccactcatgccccacgtcgcatcctcttctccttttctccggagagtcaatggctcggtcaaagctcaacgagagcatgtcttcctcctctccgttctccgtgtctccccgccccatccgccgctagccccgcctaccctcgcctcgcctcctccgccgcctccgcctccgcccccgcccgcctccgctcccgcattaccctccccggtggcagatctcccgtccccccaatggacccggccgcctccgccgcggagtcgtcgtcgctgtcgtcgcgcgacgtcgccgcgatgccggactcgccgccgcggcgggcggcgaggcaccggcgcgcgcagtcggagatcctcctcggggcggcgctcccggacgacatcgccttcgacgccgacctcggcgtggtcggggaggtcggcggcggcggcggggacgactacgaggaggaggaggaggatgacgaggaggaggagatggagggggcgggcggcagccggatgttcgagatgttcctcgaggccgggggcaagctcgagaccccggagcccgcggcgccgctgccgccgccgcccgctcggccgcgtcaccagcacagcatgtcgatggacgggtccacgtccctggcgtcgtccgccgcgggtgtggcggggaggatgggcgcggacgctaagaaggccatctctgacgccaagctcgcggagctcgccctcgttgaccccaagcgcgccaagaggatcttggcaaaccgccagtcagctgctaggtcaaaagaaagaaagatgcgctacattgcagagcttgagagaaaagtacagactctccagacagaagcaactacactatcagcacagttgtccatgttacagagagataccactggtttaacaagtgaaaatagtgatttgaaaatacgggtgcaaacaatggagcaacaagtcaggctgcaggatgcactaaatgacaggctaagagatgagattcagcagctaaaggttgcaacaggtcaggttaatgccaactgcggcaaagtgggaaactttggcctctcctcatttggaggcgccaatccacaaggttaccagcgcagtcacatacaatctcttctggcagcccagcagctgcagcagctacagatccactcccagcaccagcagcaacagatgcatctgcagcagcatcatcatcttagcacggtccaacagcagcttctgcaggaggggttgcccttgccaggggatctgaagatgaaaggaattgtggcggcatcccatgcacagaacgccggcgcatctgaaagccacgctctgaggagtgagccgtgagttggcataggctcatggcggttgtcagtaataataacatgttgtatctgagtgactcatgcataggctagcgcagtatctaggtaaaatttcagactatctatgaagcacttagatgcctgcagcctgtagaatgtagatcccattcagttgtaagttgtagaactgatgaggcaaaactgagtaattcaccggtgccatggagtatgttcacgtcacctgcagcccggaaaaactcgagactagttctctctctctcc

SEQ ID NO: 21232 - DNA, 3189 bp, Oryza sativa
  Clone ID: TF_OsC1713_5475
tttttttttttttttgaaccaaaatagtgtattcctttgatcacaaaataaccatcacaaaactgtcagcaattttgagcatatatttgcaatttgagctctgaaggtaatgagtagtggaaagcatgtacaatttgatcacaaggtctctcatcttgatctatttatcgttatccctttcttttaccaactcatttgtaccaaaagaatcaatcatatggcaactaaaaccccatatgaaaaaaaaaatcctgtcgctcacatccatgtagatcacctgacataatctgcaccgtcaagaaaatgagcatactgtgtcccattcagtttgttgctcacatcatcccagttcctgacaaggcctggaagaggactagtgtgaattttcacctgcctgctgaccagctttctcaccggaactccgaggaattcttgtacctggaacaatgcatttctgttgcggacaatatcctcgtagtagaggatcatgtgccgtgtggtgttgaagtggtccaagcaatctctgatgtatttctcggcatttctgatgtttggaatcagatttgacacatccagcaccggcttgaatttcgctaatatctcagcctcttcttttgagtgtacatgggatttgtgggttccattcagctgcttcgcatctctgtcgtaatcattagccaaaacagagataagcctgcgcaatgtatttctcctgaagagaaatatcacggaaacacccttcttgtttaaataactagctatatcatcatgatggtccataaacccctgatttagcatccacttcaatccaaatgcagccgtgcactcattctttgctgcactggtgaaccaatccaaattatacaatttgtcaagggtctgtaagatagatgagatattctctcttctatccaccctgttaaatatttcaccatttgagctgatgttagggtggctgttcagcaaagtctcaaaccatccacttcccgaccgttgcatagatacaagcacaaaggatcgaaccagattgcaggaacactctcccctgctataactctcaggtttcggaaagtgcacataacgcagctcctcatgaggaagatgaggctttcggcaatgaatttctgcctgcacttctccactgttctcctcagatctattctctagtgttatctggttaaaggagatgtagcatacatagaatccaaatattgcaatgaggaagacaagaatcggtcgcggtggaaacggtgctcccttggaacttttaagtgaatatggatgaagtgggcccgaagtaggtgggacccacatgtcagtgacacctactgcaggtgcggtccagcagacgatttgcatccgggccaggagcgctgctatttcttccaataatctgaccgacaacagagtgttccatccagcaaaaacatttacactatctataagaacgacaacgaagatgcgggacagagaatttgaggagatcctcccctcaccatccctatcgctcgcttcccttggatcagccaggacagagactacaacggacgaaactggcttacgaccagcatggctctgactatggttcttggggggtgctttgaaatgatccgtgtcattggatgtcgaacctcgtaaagggatggcttctgagtacgaaatccttctgttcttcaccttctgaacagggccagaaggaagattttcagtataattttgtgacgtgttagtcactgacccagagtagacaggcacaatgccatttgcatcagctgttgttggagataaatcaaattggaatacttcagtgcacatcccggagttcaacatgggacctgacattgcttcactaaaccactgcggcagcatcccatcatcctccctgtatatgcttccatctccaggagccagagccatcagttcattcattcctttagcagaatccatgacttctccagcttctaacggagctacatagccagggattgctaagctagtctcctcctttccttggtttccagaacccttctcgccatagttagacaaacgggaagaggctttctcactcgcaacaatggacttaataaccagatttccattgatcttcacatgcttcccattcctcggcaaatataacaaagctggcagcgtttcgcttccattctgaggtaccttcggatcaacaccatttgagacactattttgtggcccttcaacagccagaattctcccatgatgtgacggaacaatcgcagcgccttccccagtgtacgctgcaccatacatccgatttaccgcaggaaccaaacacccgcagaccatcatcaagaacagcaatccaagcaggctaacacctgcaaccttcttggtcttccgggccttcttggccggtggctccggtgtggacgcaggctgctgcgtcttgagccggggtatcggcacaagcggcacctgcgagccacgcattgcgtaggctgggtggatccatggcatcggcaatgggtaaaccgcagggtacatgggcattggcggcggtggcgcggcggcaccagcaccggcggcgccacccaattgctgcttgagggcggcgttctcggccgtgacgcaggagatcctggcggtgaggtcggcgatggtggcctgcatcaccttcaccttcccctccagctcctccacgtactgcttcttcctctgccgcgactggtgcgcgctctcccggttgcgcaccagccgcgcgcgccgcttcgcctcatcatccttcccatccttgccgccgccgccgtcactcccgctcctcgacggcgacgacgaatccgcggactcctcgttcttggaacccccgtcgccggccgacgacgtccccgcttccggcgatccggcggccgaggacgacgacgacgtcgtcaccggcggcggcgcatccggcgggaagagatccacatcgaagtcgaagtccagatcgtcgagatcgaaatcctccagcgcgaaggcgtcatccccgagggtcgggaagtcggggaaatcgtcgccgggggggaaggggaggtcggcgaagggcgcgagtaggtccggctccgccatggatcccggtcaccggcggcgcatacgcggcggcggcggcgatggaggtggatgggatcacggacgcggtggtggttgcggaagcgtgagggctctgcaatggaaaag

SEQ ID NO: 21233 - DNA, 1274 bp, Oryza sativa
  Clone ID: TF_OsC1243_1
gcgatcaacacaaaaagcttctctttcccttctcctcctcggtgatctgtctcgccggggcatctcgaaaagcatccgactccgacgccgccgcgcgccaccacccggccgatcgccgacgccgcagccgctggaagcagcagggacgacggagaatcggagatggacatcgaggcgttcatccacggcggaagcgggggcggcgacgccgacgccgaccacccgctcggcatcttctccgccgccgacctctccggcttcggcttcgcggactcgagcaccatcacagggggcattcccaatcacatatggccccagtcccagaacctgaacgcacggcatcctgcggtctccacgacaattgagtcgcagtcatcaatctgtgcagcagcaagtcccacatcagctaccaatctgaacatgaaggagagccaaactctgggaggcacaagtggttcggattctgaaagtgaatcgctgttggatatagagggtggtccatgcgaacaaagcacgaacccgttggacgtgaagagagtgagaaggatggtgtccaatcgggagtctgctcggcgatcgaggaagagaaagcaagctcacttagctgatctcgagtcacaggttgaccagctccggggcgaaaacgcatcgcttttcaagcagttgacggatgccaaccagcaattcacaacttctgtcacggacaacagaatcctcaaatcagacgttgaggccctccgggtcaaggtgaagatggcggaggacatggtggcgcggggggcgctgtcgtgcgggctcggccacctgggcgggctgtcgccggcgctgaacccccggcaggcgtgccgcgtccccgacgtgctcgccggcctggactacgccggcgacgaccccttcacggccgggctgtcccagccggagcagttgcagatgcccggcggcgaggtggttgacgcctggggctgggacaaccaccccaacggcggcatgtccaagtgaaactactggtcctacttctatgtcagctcagctacgtttgaaacgtgatgtgtccaagtgaacggacttgagtttttcagagtcctcgtgtcgaagtgtcatgcactcttccctattcctgtaatagaactgactagctaagagactgaaagtctgaaactacgaagtataaatgtggtggaatttggaactaaaaaaaaaaaaaaaaaaaaaaaaaaaaaaaaaaaaaaaaaaaaaaaaaaaaaaaaaaaaaaaaaaaaaaaaaaaaaaaaaaa

SEQ ID NO: 21234 - DNA, 2059 bp, Oryza sativa
  Clone ID: TF_OsC14251_1
tgtcacttcgtcgctctcgaggccggcgttttaaacgccccccccacacggctcctcgctgccgacacctgtccggtttcctctcctcgcctcgccgcggcgcccgcgtcctcctcaccaacgccagagctccacatcccacctctcctcaggttcccgtctctgatccctcgttgcgttacggggaagcaggcgtggtggttgctccccgtgcggagttttcgattggtttggttgggtgagtttggtgctggggtgttggggattggttggttggagtttggagatggattttccgggagggagcgggaggcagcagcagcagcagcagctgccgccgatgacgccgctgccgttggcgaggcaggggtcggtgtactcgctcacgttcgacgagttccagagcacgctgggcggggtcgggaaggacttcgggtcgatgaacatggacgagctcctccgcagcatctggacggccgaggagtcgcacgccgtcggcgccgccacgacgacgacggcgacgacggcgtccgtggcggcggcggagcacgcggcggtgggggcgccgcccgttcagaggcaggggtcgctgaccctcccccgcacgctcagccagaagaccgtcgacgaggtctggcgcgacatgatgtgcttcggtggcggcggcgcctccaccgcgccggccgccgcggagcccccgccgccggcgcaccggcagcagacgctcggggagatcacgctgaaggagttcctcgtgcgggccggcgtggtgagggaggacatgtcggtcccgcccgtcccgccggcgccgactcctacggcggctgctgtacctcccccgccgccgccgcagcagcagacgccgatgttgttcggtcagagcaatgtgttccctccgatggtgcctccgctctcgctgggaaatgggctggtctcgggagctgtcggacacggcggtggtggtgccgcgtcgttggtttcgccggtgaggccggtctcgtccaatggcttcggcaagatggaaggcggggacctgtcgtcgctgtcgccatcgccggtgccgtacgttttcaaaggtgggctgaggggaaggaaggcaccgggcatcgagaaggttgtcgagagaagacagcggcggatgatcaagaacagggagtctgccgcgaggtcgcgccagaggaaacaggcatatatgatggaattggaagctgaggtagcaaaacttaaggagctgaacgatgaactccagaaaaagcaggatgaaatgttggagcagcaaaagaatgaggggttaggtggcagcatttaatgagccgacaagttggaccgacagcaaagagaatttgccttcggaggactctgacgggtccatggtgatcgaagctaaaggcctagttacctgtaactagaacacagtcctttcaatgtgagcagtgatcatagtagttgtaggatggtgaagctgaagacctggttacctgtaactagaacacagtcctttcaaagtgagcagtgattacagtagtagtaggatggtgaagctgccagttacctgtaactagaacacagtcctttcaaagtgagtatagtagtaggttagttcagaatcgccagatcgatctgcccttgtaggccaaccattagtccgtgggcttgtctcttgggcggacaggctgcctgagatattcactcgataggttttagttgtctgagttatatccaagcattgtatgtaacctatttaaccatggtgcctgctacctgtattgtattttgctgctgtaggaacctatgtcggtgttaccatcttgttcttaatttgtgtacttctcttgccattttggataagatgtatctgaacttatacatatgtacttttccttgccattttggacaagatgtatctgaatttacatgaacccattttggacaacgtgtatctgaatttatatgaaccatggcactgggctgtgtgtgtatactgtatagcattgtgccaaatttgtgagaaacggattgcttatcatggataacacttggacaagatgtatctgaattt

SEQ ID NO: 21235 - DNA, 622 bp, Oryza sativa
  Clone ID: TF_OsC1713_4787
cccacgcgtccggagagagagagagagagagagagagagagccagagacaagcttagcaacaacaaccaaaagcaaggagcactaactgcagctgttggcgatcgaattaaggatcctgcagctacaagcaagaaggtgcaggtgcagggtgcggccatggcgaactaccaccaccaggagtactaccagatggcggcggcggcagcggtggcgtggccgagggagccggacagcccgcagctgagcatcatgagcggctgcagctccctcttctccatctccaccctgagggacgacgacgacggcggcggcgtccgcctcgccggcgccgcgctgcccgccacgccggtgtcgctcgccgggatcgccggcggcgccagtacccccggcggcgacgaggtggacatggaggtgcggcagcagagcggcggcagcggcgacgaccggaggaccatccggatgatgaggaaccgggagtccgcgcttcgctccagggcgcgcaagagggcgtacgttgaagagctagagaaagaggttcgccggctggtggatgacaacttgaatctcaagaagcagtgcaaagaggggtcaggcatgagagaggatattgtgtgtaggtga

SEQ ID NO: 21236 - DNA, 1881 bp, Oryza sativa
  Clone ID: TF_OsC87823_1
aatgaaactaatttagtgttataaatataaattttaaagaagttttttttttttttttttacaaagttactgttccttgccttgtaaagaatatgggcccatatacccaagtaaaaagggtaggttacatttcatttagtttggtctccacaaatttcaattctaaaaagtgtttagcgatctcacaaggtttgaggttggcatgcagcacaacacccctatgttacaacactgctaaaacgtggtacattggtctcacctagcaagcttccatgcctgagcagggaacagcaattggaaacggtattttgagtagtagatggtcacctgaatatactgaccaaattgacacctaacactgtactgccgaatgttatgtgagtagtagcgtgagcttgcaaaatccccaggccgcatgcgcgtagtctctcctctgtgacagggaaaatggcagattagcttgcagcaacaacatcagtggccgggccggagccgaggagttgtcgaagcttgggttcagcatgctctgtgtgtctgacactcgtcttgttcgtgttgtcgatcattgacaaaaagttctccacgacgcgaggagaggaggctgtggtggttttctgcagagatgtttctgcctgggtcgatgctgcaggatccttaagcttccccattagagccgaattctccagcctgagcttctcggagctttctgatagcctactgatttcagatctaagtgacgtgttctctgctgtaagtgattctacttgtgtagccagatcctccgtttcagcctgctttctcagccttgatcgtctggcggattccctatttgattgtttcctcttttcacgctttaattccctttcatccttgatcagtaattctgttgatactcctgtatgacttggaacaatcacaccaggcggtggagatattggtgtgcccaatgccctcgaattagcaacattagtagcactgggcctaattacttgagctggaaagctgtgatttggcaaaatcgcagtacttcccaatatatggctgggaggtaaagcattttccatctttgcagctgctgatgtttcagcaccagctccatcatccaatctccgtttcctgccagtcttgcccacctttagatcatttacatcactagagccttctgcactgtaatccccactagacgtcattgtttttttactgtcaccactcccagtggatactgcagccccatcaacttccttaagtttcttgttggagcctttttccttactgcttgcagacttggctggttccatgctcaatggatttgccatcatgggcataagagggtgtggataagctccaccgtgtgggtacattgcagcatacggggtcccaaaagggggtggcattataggctgaggaccccacatatatggtggaggagcatggcctgaagctattgctggggcaaaatatgtcggtggtaagacaccagggccataatatgcctgaacagcggaccaatcaggaaatggacatggagttggttgatccttaggaggggaggttgttttcccaatcttttgtgtagcaacagcttcatcatgagccatgccttttatgaaagcctgctgtcttcaattcaattgcctcttgtagagagatttaaggaagagagccacttagaacatgctcgctcgccggctccgtaccggaggagccgcacaggggttggaggagtcgcgaaggagagggagctcgccgccgcccgcgcgcgcgtgccgggaagcgagacggcggtggaggagaccctcggaggaagcacgcggagagagagaggagacgtgaaagccagattgatctccaatgagcgccctcggccgggtgcctcctgcc

SEQ ID NO: 21237 - DNA, 1080 bp, Oryza sativa
  Clone ID: TF_435945
cggcgagcagccagatgccaagatcctccccgcggctactcctcccatgtcggacgaccacagcggcggcggaggcgagcagcggcaatgccggcgagggttcgcggtggacgtggtggagctcggtgcggccctggctctggccgacatggccggcgccgccgtcaaaccggccatgcagctgcagctgcagccgaccgccgctcaggaggaggacgaggagatggcgaccacgaggctgagccttcagctcggcaacaacgtcggcagcatcatccagtcctcctcctgctccagcagcggctccagcgccggcctccccgcgccacccgccgccgccgccgcgccggccaccgcctacggcaccaagcccctccacatgctcaccgaggaggagaaggaggcgaagcggctgcggcgagtgctcgccaaccgggaatccgcacgccaaaccatactccgccgtcaggctattagagatgaactggcaagaaaggtcgcagatctgtcaacacagaatgagagcatgaagaaggagagggagacagtgatgcaggagtacctctcactgaaggagacaaacaagcagctcaaagaacaggcacagcatcatctttcgctttccttgttctaattaatctcttagtagtataatcttcttcttttttgttctcttttactacaaaattattattactcctaccattctgaggccaaagagagcccaagagaatctactctactctactctaccatgttcccaaatccaaacctccagttactttaatccctaatcccttttctcttttacttgtactacaaattaagctaagtaccattctgagttaaggccaaattaaagagaatctactagcatgttcctccatttgccacatgactgcactttactgctgctactggtcctagtagtggtcaaatcaatttggccattgctgtacggctgtagctagctgctggcgaattgggaactgaaaatgtttttattggatgctctggcacttgtgtagtgctgtgtatgtgccacactgacatctgtaatggatataaccattttttcta

SEQ ID NO: 21238 - DNA, 1424 bp, Oryza sativa
  Clone ID: TF_OsC39545_1
atggagcaaactttggacgtacctagatcgttgagactactggcgccaaaagctcaacaacaaatggatgaattttggagggatcgacaaaaggagattgaaacaacaaaggactttagcgagcatgcgatccctatggcccgcttgaagaagatcgtatcttctcaaaagggtaacatgatgatgacctttgacatgccagcattcttatcgaagatgtgtgagctcttcgtacaagaacttgctgtgcgtgcatgggcatctgctcaatcccataatcgttgcatcatactagacacggatattgctaaagccattgcctccacagagtcttatgactttcttgttgatatcctccataatcatcgtgtgaaacacaaatccactccttgttctacacttactacaaagcgttgtaggttagtcgatcaaccttccacatctcacatgccctaccaacatcagctgccacaatttgctcctacatatactccggccatccctattactcctagtttaatgccaccaatttctcactatataccgttccaatatccatccttatcacaagaagtgtccccgatgatggcttctgcacccatagtgaatagatcaatgttgctcattcacaacatagcaaggggtctaggcttacaaggaaacaatatcagcacgttcgccaacaataatatcccagacaatattgttggttgtagtagccccacagttcttgcaagtatgatgagtcctgctttactagaagttgcagggacatcactaaatccaccaaactctcattccatctgcacaatgaacatgatcaactcgagtgatcctagtggatctagtattggtgacattaatgttgcaaatcaagcaagtcttgctccctctggacgttttaaccctgctatccttcgagagtcatcatgtccttcgttcttatatagtaacaatgacacaattgttgctataccggagggtgtagatattagtggcaccatggatgttgctagtgatgttgctgctatagttatcaatggtcaagaagaacatgagagggaaacaaatgttgagcatcatcagcaaaatgagatatatgaaagcattgatataggaataatcaatgcaagtgttgcggatgataataaatatagtattagctgggatgaattgggaatggctgatgattcattgctagacaaatttttggaggagtttcaagtaagaaatgacggtgttttgcgcactgggattgagttgcatgaagacccattccttggtgacgtgatgttagcaaacccaagtacaagcaatgccaataagtaatttagttggcaagttttgtttatatctcttttgtaagaatgaggttgtaactttttcttgttgaatataatgttgtttgtttgcagaggcggacc

SEQ ID NO: 21239 - DNA, 792 bp, Oryza sativa
  Clone ID: TF_LIB4830-003-R1-N1-A5
ccggccgggaacctcacatatattgtgttcatcctcataccaccaaccaattagtgccagtagcacatttctgcagttgtagttcaagtaaggtatatcattcagagcaacaaagggaagcaatgaagcaaactttggatgtacatagatcgttgaggccaccaatgccaatggctcaacaacaaatggatgaatcttggagggaccgacaaaaggagattgagatgacaaaggacttcagtgagcacatgatccctatggcccgcttgaagaagatcgtatcttctcaaaagggtaacatgatgatgacctttgacatgccagcgttcttatcaaagatgtgtgagctctttgtacaagaacttgctgcgcgtgcatgggcatgtgcccaatctcataaccgatgcatcatactagacatggatattgctgaagccgtagcctctactgagtcttatgactttcttgttgatatcctccacaatcacagtgtgaagcaaaaatccactccttgttcttccaccaagcgttgtaggttagttgatcaaccttctacatctcacattccccaccgacatctgctgccacagtttgctcctacatatactttggccatccctattactcctagtttaatgccattaatttctcaatgcacaccatcctcttttccatccttgccacaagaaaagttcccattgatggcacccacacccattgtgaatagatcaatgttgtttatcaataatatagcaaggggtctgggcttacaagggaacaatatcaatgcag

SEQ ID NO: 21240 - DNA, 1379 bp, Oryza sativa
  Clone ID: TF_OsC36885_1
ccggccgggaaaaaagatcaatcatcctatagttgctcccctatttcagcatctcaatttaagaaaggtgtgaaggcatgccgatcccggaaaaggacggggtggaggacaatcaagaggatgatacattttcaaggttgcaattgcttgcacaacaacgacatgccatggagaagttctggaggatgagccaggaacagatcgaagaatccgcaggcaacgaagagcttatactgccgatttcccgtgtcaagaatatcatccatgcaaaggagggtggtatgatgttatctgctgataccccagcttttgtaacaaaactttgtgaacttttcgtccaggagctcatccttcgtgcttgggtgtgcgccaactcacacaatcgtgaaatcatacttggcacagatattgctgaggcaatcaccaccacagaatcctatcactttcttgctaatgtagtccatggccaccaggcgctaggaagcaacataccagagataggggtttctgcttggaagcgccataagctagatgaaatgacctcactctgccatcctccccaagcagtgcaggtcacagatttagctaaccatccacccaatattcctgtttgtcctcctataggtcaatcgggtactcagcacacaacatctacacatgttttgatgatgcaaggagaatctattcacaaggcaagtaaagaaaaatccccactgaaggaagtgatggtgccgaccaacaaggtgggcatgaccaacagctcttatggagttcctaatggtggtggtgctactagtagtaaagttgttattgatagcccgaaaggcgaaacagcacaagttttctcttcccagcatgcatgtccttccctagaagataactatgttattcccattcctgctggacatggtgatagttttcgtactcttgatgaggccaatataccccagctacatcaggagcagaaaaactttatttcacaagatgctattgttggtgaaaacattccgctgaatgagtctttggaaaagagcaagcataaggatgaggacttactttttcctgacaaagatcttcctgagtgatctacaagacagaagatgaatgttcatgacaatactaggaatacaaataagcaacgaactgaagaaggatgcatcctggttaatccatcgaccatgtcttagtagagttttcttctgtgtttctgtgttgaagctttatgatttaccttatactttagtcaagatgaataagaaataagtatgtgtttccgtgtgaggcggtaatatgtagtaccttgtatttccatccatcttcgtatggacaataataataagacctctgtttgcttcatgataaaaaaaaaaaaaaaaaaa

SEQ ID NO: 21241 - DNA, 983 bp, Oryza sativa
  Clone ID: TF_OsC321147_1
cccgggctgcaggaattggcacgaggccaaaccaaatattttgaactctccggactccggccgccgccttccagaggaacgtcgcggctgccggtgccggtgccggagaagacatggccgggaagaagaaggccctaacaaatcccgcctctccctccgcctccgcctccgcttccacccctaagaaatccaccgccacctccaaggaccgctccacgccgaaaccccgcaaaaaccccaaccccaaggaggaggcaccaccgccgccgcccgccaacaacaagcgcctcaacccccaagggggatccaaccgtaagaagaaggccgatgcggggacgccctccaagaagccgaagcgccagccgccggagcccaaacctcggaagcacaagggggccaagagcgagaagccgcaccgggtttccggcgaaggggagaagcccacgcccacgaagaagaagaagaagaaggagagcagcaaggagcccaagcgcgagaagcagcaagcgtccgcgcctatgtcgactccctcgaagaagaacaaggaagccaaacgcgacacaggaggagcggggaagcccacgcccaccaagaggaagctcggcgacgtggatcccccacaggagcgaccgtccggtgaaggccaggcaagctctcccacgcccgccaagaagcggaaggacaaggcggcggcggcggaggcggttgccgaccacggcgccggcagcttcccgatggctcgggtgcggcagataatgcgggccgaggacgccaccatccgcccctccaatgaggctgtcttcctcatcaacaaggccaccgagatattcttgaagaggtttgcagacgatgcttatcgaaatgctttgaaggatcggaagaagtcaattgtgtatgataacctttattttgttccacagaaagttacagctgaagatgctttgaaggctccagttagcagccaagtgaaccaaccacaataa

SEQ ID NO: 21242 - DNA, 453 bp, Oryza sativa; identical to SEQ ID NO: 11610
  Clone ID: TF_OsC353113_1

SEQ ID NO: 21243 - DNA, 1295 bp, Oryza sativa
  Clone ID: TF_OsC44121_1
ttttttttttttttttttacattttttttttcatgccagcacttttgagtattggattagaaactgatgaaaggtaaggtacagttactacattagttgcaaatcacctaccaaatcacaatcttttttttttctactgctgccatagcagagcagaactaacattaggaaagcctaagacctaatcagattacccgtttcagccaacaatcatgggaatagttttgacaagagcactgagttttagaggccctaagttcacaggacaatgtatatcaatgtcacaacttcactgtatcatctttagctactttctggcagagagtgctgctcttcaggggcctcttcctgttgctcttgaggctgctgccacacatacgtcaccgggtgaccttgctgtccaccgtacatcattcctgatccaggcccctgctgcgctggcacgtagtaatatggatatgtgtctgctgcgccccccacattaggcggtaggccaaccctcggaagcccaagcccttcttctttcatttcatccctgggaactatgtccaccaagaagtcatagatatcagtcctggtgatggcagctgcaatgtcattcttctgcaaggtccggcgcttgttctcctccgtgtgcatccacgacctcaatgttaactctaatatgaatacctcgcatgcctttgcgaagacaacgggggcttctgccgagatcatccggacatcctcatcagccttcattatcttctttatccttgcgagtggcaagctgtggttcttgaagtcggttgtttgctcaatctcttccatttggttagcccagaactcacggagttgctgctgttgctgttgctgcagctgctgatgaaattgctgggcttgttggtagactagctggtgctgagcactgagttgagctggattagtggggaatggtgctgatggctgtgagccaggaggaacaacagcaggagctccaggaaccatggcttgaggtggatatgcagcagcaggaggaggatatgcttgtgacccaccagtggcaacacccatcacaggctgaggctgtgaggatggttccatgtcagctcttgtccgtccaaagccaaaggcccgagagacgacgcccggatctcccgcgccggcgggagcgggagcggcggcggcggagagcgctccctccggcgaagggccgcgccgcccacctccctctcgtggagccctcggcgtcggcggcggagagagagagagagagggagacgcggtcgccctcgggccgattcctgcagcccggg

SEQ ID NO: 21244 - DNA, 1055 bp, Oryza sativa
  Clone ID: TF_OsC179782_1
aatggagcccgcatttcccaacggaggtgcggctgctccaccaccgcccatggcggcggagcagctgccgccggcggcggcggtggtccgggagcaggaccgcctgatgccgatcgcgaacgtgatccgcatcatgcggcgcgtgctcccgccgcacgccaagatctccgacgacgccaaggaggtgatccaggagtgcgtgtcggagttcatcagcttcgtcaccggcgaggccaacgaccggtgccaccgcgagcaccgcaagacggtcaccgccgaggacctcgtctgggccatggaccgcctcggcttcgacgactacgtcccgccgctcaccgcctacctccgccgcatgcgcgagtacgagggcggcggatcaggtggtggtggtggtggtggccgtggcgccgccgccgcccccgccgtcgtgccgccgccgccgccgccgcctcccgaggacgcgttccgctacgtgcaggtccatcatcccgtgtacgcggcgccaggtgagccggtgcaggggtacggttaccccgtggccatgtcgtctgctctgccggcgccgcacgtgcacgtcggcgtccgcggcggcgggcagcacgaggtgttcggtggcgggccggcgcccctggctgtctactacggaggagcgccgtacggcgaggccagcagccgcggcggctgctctgccgccgacgaggggagctcgtcgtcgagcgcctcgccggcgccggtcggccccaactatgagtaaaaacaaaagaagaagaaaatcaaactcttccccggctgacaggtgatcgagctcgtcgtctacaaattatcaatcgtctgtcgatcgattagcatgtaatctaataaaaaaacttaagctagcttaagacttaattagacatgttctgttcatctttccgccaccgtttcatcgaaagagattaagaatgtggtagtagctagaaatcatttcgagctcgaattacttaatcgtgttgattaattgcaatgatgaactaacaagaggaaatgatgtagtagtattaaaaaaaaaaaaaaaa

SEQ ID NO: 21245 - DNA, 971 bp, Oryza sativa
  Clone ID: TF_OsC117223_2
ggcgtacgcccacgccttcccccctctctctcctctcctctccgcgactccctccacccccgcgcgcgcgcgttttttttttttcgtaagggtttttggagggcggcgcggggatggcggacgcggggcacgacgagagcgggagcccgccgaggagcggcggggtgagggagcaggacaggttcctgcccatcgccaacatcagccgcatcatgaagaaggccgtcccggcgaacggcaagatcgccaaggacgccaaggagaccctgcaggagtgcgtctcggagttcatctccttcgtcaccagcgaggcgagcgacaaatgtcagaaggagaagcgcaagaccatcaacggggaagatctcctctttgcgatgggtacgcttggctttgaggagtacgttgatccgttgaagatctatttacacaagtacagagagatggagggtgatagtaagctgtcctcaaaggctggtgatggttcagtaaagaaggatacaattggtccgcacagtggcgctagtagctcaagtgcgcaagggatggttggggcttacacccaagggatgggttatatgcaacctcagagcaattttcacatattggtagttctgcaatcttttgcattcccatacatgtatcaggtggcacaaatctattgcaacaaatatgaagtgtcaagggagcaaatatgggatacccctcagataatggaactctccccatggataccgtacaccataaaccgtatttggaaagagactcatggtagccaggatattcgtattcagggaaggccgcgcgaggctgcaaatagcgctttggactggcaatggccatcaaagcactcatcgctggctagcaacttctatggtacacgagtggtgggaggccatcatgagtaccagagaagcaccaaaaaggacactacgcacgttaactttgctagtggcctgggagatctaggatga

SEQ ID NO: 21246 - DNA, 941 bp, Oryza sativa
  Clone ID: TF_OsC91871_1
gatcaaatctagaattaaatttactcagattcaaaaatacccaactccaactatgtcaatcgtcataacgtgcagatcaaaataattaatcactacaaaaattaaattggacgtacaagaattattcatataaaatcgatcattttgcatactccgattaattactccatatccatcatgtcgccgggccatcttagctgctagcttcttcatcctaacctcatcttccatgtccttcaatcaatctcagcacatccatccccacctagctctcaagattaggaggaaaggttgggtgttgggtgagaagaagacgacgcaaagaacggtggctagaactgcctggagctatccgtcgacctgtccatggcgttgaacatgaaatgaccggcggtggcggcggcggcggaggaggaggaggaagggtggtcggggcccgcggcggcgccggcgccggagcgggaggtggcggcggcggcggcgcggtcgccctcgagctcgcggtacttgttgaggtacctgcgcatggggtcgacgtagtcgtcgaagccgagggcgccgaaggcccagcagacgtcgtcgccgttgaccgtcttgcgcttctccttgtggcacttgtcggaggcctcgccggtgacgaagctgatgaactccgagacgcactcctgcatcgtctccttggcctccttggagatcttggcgttgggggggaggatctgcttcatgattcgccccacgttcgcgattggcagcaacctgtcctgctccttgatgatctccgccgccgcctgatccgccgcctccccctgcagctgctgctgccggcgatgcccgtcggcgtggtggccgccatggtggtcggccatggctaagctcgagctctctctctctctctctcttcagtggtggtggtggtgagttcttgggctagtggaagcgct

SEQ ID NO: 21247 - DNA, 1864 bp, Oryza sativa
  Clone ID: TF_OsC210306_1
atgttatcctctatgttcctcttcctcctccctctctcccttctctctttctctctcttgggcaatctgtgggcaggggcggcgacgtcggcgggcgagggctggagcagcgtcgggctgcggctcatgctactaggaggtgctactccatttttctacattaacatcgagacggtgatcatcaccaacatgaactactacccggaggggtccaacccggtgtacttcgccgtgctcgtcaagtacgaggacctcgacggcgacgtcgtgcaggtcgacctcatggagtccaagtcggcgtacggcggcgccatcggagtgtggacaccgatgagggagtcatggggctccgcatcggcagtgacatcggcaagaccctttgtcaccaacaacgtcatcccagccatctggtctcgaatcgcgccatcactgcctccgtcaccccttccgcgccgacctcgttccgcgctcgcccactgccgcgcctctcccgcctcggtctctccctctgcccgcgcctccccgacgccaccctcgccgcgctcaccgccgcaccgtccatctcgcagtcgacatctcctgctctcggggattcctgctgctgcgcttgtcgttgcatgcccgaatctgaatgatctcgacttctccaatgaccactatggctcgacctcaggaatgcggcggcggcggaggtggccaagttgtgtggggttttgggggggttttggcgatggagatggtgatcgttattccatcaccttctctgcatatattgtagtgttaagaactcaagaggcatatgtgcagatcctacagcagttgcataggagtacatctttagaaatggacccacattcacacaagaaggcacatgaaggtctgattggtgacaaccctgacgcgtatgccgtgacgacataccaacctgtgctgatggtagaaccatcagccgctgctgccttccctccagctccccaggttgctccagcctatccagtgaacccaatgcagcttccagagcatcagcagcacgcaatccagcaagttcagcagctccagcagcagcagaaggagcagctccaggcgttctgggccgaccagatggccgaggttgaacagatgactgagttcaagctccccaacctcccgcttgcaaggatcaagaagatcatgaaggccgatgaggacgtcaagatgatcgcgggcgaggcaccggcgctcttcgccaaggcctgcgagatgttcatcctggacatgacgctgcggtcctggcagcacaccgaggagggcaggaggaggacgctgcagaggagcgacgtcgaggcggtgatcaagaagaccgacatcttcgatttcttggtggatatcatcactgatgataagatgaaggatgatggcatgggctctcaggctgcatccatggtttcgccatatacctcaggaggaatgggattttcctttgatctgtacccgaaccagcatcacctcgcatatatgtggcctccacaagagcagcaggagcagtggcctccacaggagcagcaggagcagaagcagaagcaggattctgatggtggtggacaagatgaatgagataaatcacattctgtgattacttattgtcgtagtgtggtttggttagcttgagtttggttggaaaaactttttttttccgtagactgtttttatgtttgttttgctgccttctggtagcgataggagggcgatccggtctgaaactgttggtagcattcatgatgaatttctcagtggttataatttatgaatcttagtaacagctgttgcaagaacaaatatttcctctggttagaattgttttttaaaaaaaaaaaaaaaaaaaaaa

SEQ ID NO: 21248 - DNA, 817 bp, Oryza sativa
  Clone ID: TF_OsC265473_1
taattttttttttttgaatttgaaacccaactttgcataaacttgtgtcagcatcacacctgcttgcgtaatagagtttagaaaagtttctttattcatagattctgaccttgtgatcgccatggcgactggcctctctccctgagccaaacctctgggcactattcagctccggtgcatcgccggcgacggcgtccttgccggtgagcctctggacgacggacttgaagtcgtcggcggtgtcggcctccacgtacaccgtctcgatgatcttcacggtcaccggcttcgcttcatcctcccgcatgcagttggcagtggtgctctctggatttttacggaggaggaagaagaggtcgaggtggtttgcattggcgtctgctctttgggccccgtagttgacaagcgatgatccaggatctccattaagtacaacatctttctttactggcagttcagaagctcttgaaccctttgtgtcaccctcccggtagagcctgaggtagagcttgagaggctcgacatagtcctcgaatccgagcgtgcccattgaccagatcaggtcgtccccattgatggtcttgcgcttctccttgaggcacttgtcgcttgcttcgctggtgatgaagctgatgaactcggagacgcactcctggacggactccttggagtccttggcgatcttgccgttctccggcacggcccggcgcatgatgcggccgatgttggcgatcggcaggaaccggtcctgctccttccctactccgcctccgccgccgccgccgccgttctccgtcccgtcgaacccctccgacat

SEQ ID NO: 21249 - DNA, 618 bp, Oryza sativa
  Clone ID: TF_OsC68950_4
ttactgcggctggacatagtagtaggccatggggtcggtggcgggcaaaccggcggcggggtgggggatcccggcggcaacggcggcggcggcctcggcgtccttggcctcgtcgcggggcacgatgtcgacgaggaagtcgaagacctcggtgcgggcgatggcggcggcgatgtcggacttctggagcgtgcggcgcttgttctcctcggcgtgcgcccagccgcggtgggtgagctcgaggatgaacatctcgcacgccctggcgaacacgacgggggcctcggcggcgatcatgcggacgtcctcgtcggccttcatgatcttcttgatgcgggcgagggggaggttgtggttcttgaagtcggtggtgtgctcgatctcgcggtactgctccgcccagaagttctggagctgcgcggcggcggcctgctgcgaggcggcggtggcggcggcggaggcggcggcggcggcggggggaggcggggcgtagagcggcggcgcgtgggcgtagggcccgacgggtggggggtaggctcccgccggcgggtaagggacgggggcgcccagcacggggggcggaggaggcggaggaggggtggtggatttgggctccat

SEQ ID NO: 21250 - DNA, 1231 bp, Oryza sativa
  Clone ID: TF_OsC26303_1
tttttttttttttttttttttttttattgggaatcagagtaaaattgctaccattacagagagcatctatttctcaatagtacaacacgctagttcaggacgaaatacaacatgaatatttatgcctcccaatacagattatatggaaccgaatgacagccaaagaccaattgttaaattatcctgaatatacatacaacaacagagctagaccacgaaccgaaactatcctcacggggagtaatttacatctgagaagcagccttggctcgacgcttccaagcagcatcagttcctggttgacaaacatgggacctagaggtggtagcaagttacttccttcactgctcaccatgaggtgtaggtatatatattagctaacgactgcagcaccaaataaaatccacctagcaacagttgcatgaaaaggtcctatcttcagtttgagacatccccattatggtactgaggttgcatataacccattccttgattgtatgctgcttgttggcccatcccttgggcacttgaactgcttcctccatgagaaccaagtacatcctttttcacagagccatcaccagcctttgcagttaatttactatcaccctccatctctctgtacttctgcaggtagaccttgaggggctcgatgtagtcctcgaagcccagcgtggccatcgcccacagcaagtcgtcgccgttgatggtcttgcgcttctccctctggcatttatcgctcgcctcgctggtgatgaaggagatgaactcggagacgcactcctgcacggtctccttggcgtccttggcgatcttcccgttggccgggatggccttcttcatgatgcggctgatgttggcgatggggaggaacctgtcctgccggacgcgtgggccacccccacccccacctccccctcctccccctccccccctcgggctcccgctctcgtggctcccccctcctccccccgggctccccggcccatccgccatcccacctcccccctccttatatagaagcgcgggcgcgcgcggagagggcgcgacgtggagaggagagagaggggggttgggcgcgaggtggtgaagcgaggaggagagagagagagagagagagagagagagggggggggagaggagagagagaggaagcgggggtgggaagcggagcggaggtgaggcggagaggcgagagggggagatcggacgctggagaagagaagcggcc

SEQ ID NO: 21251 - DNA, 1032 bp, Oryza sativa
  Clone ID: TF_OsC83094_1
cggcacgaggcgcctctctctcgatccatctcccccctctctcctctcctctctctctccgttcccaatctgcggaggcggaggcggagctagggcgcggcgtcgccggcgaggagttccgcaggcgcggtgtggacggggctcctctgcttccgcacacggcgggcggcgacggcgagcagggttggaggggcggcgcggcgacctcctcgttcctgccttgcctgcctccatctggtgttggaaatatcataagttttgggacaagcaagagaggacatggagccatcatcacaacctcagccggcaattggtgttgttgctggtggatcacaagtgtaccctgcataccggcctgcagcaacagtgcctacagctcctgctgtcattcctgccggttcacagccagcaccgtcgttccctgccaaccctgatcaactgagtgctcagcaccagctcgtctatcagcaagcccagcaatttcaccagcagcttcagcagcagcaacagcgtcaactccagcagttttgggctgaacgtctggtcgatattgaacaaactactgacttcaagaaccacagcttgccacttgctaggataaagaagatcatgaaggcagatgaggacgttcgcatgatctccgcagaggctcctgtgatctttgcgaaagcatgtgagatattcatactggagctgaccctgagatcatggatgcacacggaggagaacaagcgccgtaccttgcagaagaatgacatagcagctgccatcaccaggacggatatgtacgatttcttggtagatatagttcccagggatgacttgaaggaggagggagttgggctccctagggctggattgccgcccttgggtgtccctgctgactcatatccgtatggctactatgtgccacagcagcaggtcccaggtgcaggaatagcgtatggtggtcagcaaggtcatccggggtatctgtggcaggatcctcaggaacagcaggaagagcctcctgcagagcagcaaagtgattaa

SEQ ID NO: 21252 - DNA, 903 bp, Oryza sativa
  Clone ID: TF_OsC1960_1
ctccgaggctttttccttccggccgggatcacaatccaatacaagttcacaacataagcatagtacaggtcattgagacttgagagagcatggcagggaacaaaaagcgtggtggcaggaacatggatcaggtcaagaaggcggcagtgagatcggatggggtgggaggtagtgcgaccaacgccgagctgccgatggccaacctcgtacgcctgataaagaaggtgctcccagggaaagcgaagatcgggggagcagccaagggtctcacccatgattgcgcggtggagttcgtcgggttcgtcggcgacgaggcctccgagaaggccaaggcagagcaccgccgcaccgtagcgccggaagactacttgggctcattcggcgaccttggcttcgatcgctacgtcgaccccatggatgcctacatccatggttaccgtgagtttgagagggctggtgggaataggagggtggcgccgcctcctccggcggcagctacaccgctgacgcccggtggaccgacattcactgacgcagagctgcagtttctccggtcggtgatcccctccagaagtgatgatgaatatagcggctcatcaccagccataggcggctatggctatggatatggctatggaaaaaatatgtgaacaacttgatgcatgtgtgtgtgtacactgcatgcatgcgtggagggtcaaacagagtcaagactcttgtggtggtttcaataagtctctagtgacaatataagttgtgtatcgttgtttcctttgtaaaaaaaaacgtcatgtatcgttgtgtgtcctcatccggtaatcctttacgtgggtgggttatgcgagaaaaagaaaatgacgttgcatcaaataaaatgcttgatgtttgcgtatttactgtatc

SEQ ID NO: 21253 - DNA, 1092 bp, Oryza sativa
  unsure (1)..(1092): unsure at all n locations
  Clone ID: TF_OsC197894_1
atggaggccggctacccgggcacggcggcgaacggcgctgccgccgacgggaacggtggcgcgcagcaggcggcggccgcgccggctatacgtgagcaggaccggctgatgccgatcgcgaacgtgatccgcatcatgcgccgcgtgctcccggcgcacgccaagatctcggacgacgccaaggagacgatccaggagtgcgtgtcggagtacatcagcttcatcaccggggaggccaacgagcggtgccagcgcgagcagcgcaagaccatcaccgccgaggacgtgctctgggccatgagccgcctcggcttcgacgactacgtcgagcccctcggcgtctacctccaccgctaccgcgagttcgagggggagtcccgcggcgtcggcgtcggcgtcggcgccgcgcgcggcgaccaccaccatggtcacgtcggtgggatgctcaagtcccgcgtgcagggctccatggtgacgcaccacgacatgcagatgcacgccgccatgtacggtggcggcgcggtgccgccgccgccgcatcctcctccgcaccaccacgcgttccaccagctcatgccgccgcaccacggccagtacgcgccgccgtacgacatgtacggcggcgagcacgggatggcggcgtactacggcgggatgtacgcgcccggcagcggcggcgacgggagcggcagcagcggcagcggtggcgccggcacgccgcagaccgtcaacttcgagcaccagcatccgttcggatacaagtagtaacaagcagcagaatggcgatcggtctgcacctgcatgcacacgtatcgcatgcagatcgagctagtagtgcaactggctaacttgaaccagttaaaaacttaagacttagtgatcgtgtgtggtttaattaatttgctacgttcaggtagtgatcgatgagattttaatttcctactgtcagtttaattcaccgttcatgtactcgatccagctagtactactcctagttacccttgttctaatcttaacgcaattgtgtcgatcggacgatcgcacgtttatcttcaagtggaatttgtcttataacnntaaaaaaaaaaaaaa

SEQ ID NO: 21254 - DNA, 1457 bp, Oryza sativa
  Clone ID: TF_OsC712_1
ccctcctttattccccgtctcctccgcgtgagctcgccggagcaccgccggccgatcccccccacccccgccacgcgagcagcgccgctcgcgcggcctgctgcccccgcctcaccctcgccggtgaacggcgcatgcccccccgacgttaggtgtcgcgcctggagacgcggagatggatccgatggatatcgtggggaagtccaaggaggacgtctccctccccaaatcaacaatgtttaagattataaaggagatgttgccccctgatgttcgagtggcaagagatgcacaagatcttcttgtggaatgctgtgtagagttcatcaacctcctatcttctgaatccaatgaagtttgcagccgagaggacaagaaaactattgctcctgagcatgttcttagagctctgcaggatcttggctttagggagtacattgaagaggttcaagcggcctacgaacaccataagcatgataccctggattctccaaaagcaagcaaattcactggtgtggagatgacagaggaacaagctgtagctgagcaacagaggatgtttgctgaggcccgagcaaggatgaacaatggtgccgccaaaccgaaggagccagaacctgaagcgcagcaacaaacacaacagccaccacagcctcagctgcaccctcaaccacagcaacccctgcagcctcaacttcagctccatcctcaaccacaacaacagccctcacagctacatcctcaacagctgctgcatcctcaatcgcagcaaactccgcagcctcaacctcaggtccaccctcaaccacagcagcctccacagctgcaaccgcaacctcagcttctccagcaaccgcagctgccccaacagctgcagccgcaatctcagctccccccacaaccgcagcagcccccacagctgcagctgcaatctcagctccacccacaaccgcagcagcccccacagctgcagccgcaacctcagctccatcagcaaccgcagccgcaggcagagctgcaatcacagtcacaaccacaaacagaacatggcttggacagttcatgattcagattccatgttgtgtagcctcagtataaggaaaagttggtgtacttccgctggcatttactaggactctgtgtgccccttgatagctttaggtttccatgcttcatgtacaatgtaaatccagtgtgatttcagttaccatgttgctaataatctgaagctctcttttgtcactgatgttattacttttccaaacaccctttctctgactctatgactgtagtagtatcatggcatgtatgatgccttgtcaaaagggactccattagcagtgtaacttgactttttccggtggcggttgtggtttccgtggcttttttaaaaaaaaaaaaaaaaaaaaaaaaaaaaaaaaaaaaaaaaaaaaaaaaaaaaaaaataaaaaaaaaaa

SEQ ID NO: 21255 - DNA, 2814 bp, Oryza sativa
  Clone ID: TF_OsC1528_1899
ttcattctccgacatctggcgcgccaggtagggggcgcgttccctgtcaactgcagaccttatcgctattctccgttacaaaaagacgagattgagaaacaggtgaaagaaatgattgatgctggtttaattacacctagtatgagtccctatgcatcacctgttttacttgtcaagaaaaaggatggtagttggcgtttttgtgtggattacagaagattaaatgctctcaccattaaaagtaagtttcctatgccggttgttgatgaattattggatgagctctcaggcactaaattcttctctaaactggacttgaaagctgggtatcatcaaattcgaatggtggaaactgatgaagccaagacagcctttaagacacatcatgggcaatttcagtttagggttatgccatttggtctcacgaatgcaccctccacctttcagtgccttatgaactcagtccttgcaccatttatcaggaagtttgtgttggtgtttatggatgatatcttagtttatagccctgaccttgatagtcatttgcatcatcttcagcaagtttttgttattttgaggcagcaccagttgtttgctaggaggtctaaatgctcttttgcttgcactcaactggaatacttaggacatatcatttctgacaaaggagttagtactgatcctgagaagacagcagcaatgctggcttggcctgtgcctacttctgttactgaattgaggggatttttgggactgacaggctattacagaaaatttgttcagggttatagtatcatagcacgaccattgacactcttgttgaagaagaaggcctttctttggactgatgctgctcagcttgcttttgatcagttgaagacagctatgagtaacactccaatgttagctttgcccaattttcagcttccttttactttggagactgatgcatgtgcttatggtcttggtgctgttttaagtcagcagggtcaccctattgcttattatagcaaaactttgggccctgttaatcagaaattgtccatttacgaaaaagagtttctagctattatgatggctgtggataagtggagatgttatctgcagagaggtccatttatcattaaaacatatcacaaaatcttgtgtcatttggatgatcaaatattggggactgaattacagcaaaaggcaatgactaaattgatgggtttgcaatattcttttcaatacaagagaggggttaataatattgttgctgatgctttatctagaatgccttcctcctctcaattttgtgctttttctgtggtccaaccgatctggattcaggagatgatcaattcttatacagtggatcctcaagctcagcagctactagctgagttggctgtgcattctcctaattctcaagggtattcattgacacaagggattattagattccagaataagatttggattggatccaatgcaggactgcatactaagttgattcaagcttttcatgcttctgcacttggtggccattctgggattgctgctacttatcatcggattaagaaattatttgcttggcctggtctcaagttggatgttgaaaattttgtgaagcaatgtcaggtttgccaacaggccaaacatgaacactgtcggcttcctggactgttagctcctctcccaattccaaaagaggcctggcaggacatctccatggattttattgaaggtttaccgcgctctgatggctataatgcaattttggtggtggtggatcgttttactaagtatgcgaatttcattcctttgcgtcatccattcactgcatcacaagtggctcatctggtggacaaaactgtatttaaaactcatggcatccctcgttctattgtgtctgatcgtgatcgtctctttactagcaagttctggacaactctttttgctacttgggacactcaattacagatgagcacagcatatcacccgcaaacagatggccaaatagagcgtgtcaatcagtgtttggaaatgtatttacgatgcatgactcaggctaaccctaagaagtggagccattggattcatttggcagaattttggtacaatacaaattatcatacatatcttggctgttctcctcataaggctctttttggggtggatcctcattattctcaagttcctgatctgacattggctactctgcctgatgtggtggatgttcagactgaaaggcagcacttgtctgaatttttacagcagcagttaactcgagcccagctgcgcatgaagaacaaggttgataaaggtcgttctgaccgtgtttttgctgtgggtgatgctgttttcttgaagttacagccttatgctcagtcctcagtagttaatagaccatatcctaagttggcttataagttctttggcccttttactgttttggagcgcattggagtggcggcttatcgtttggatctacctgccagcagcactgtgcatccggtgtttcatgtttctcaactcaaagctcaggtgccagatcatactcctgtttatacttctttgccatcccaagtggttcttgatgctgctgacgttgttcctgaggcgattttggagcgtcgactagtgaagcgcagcaatgcagctcatgtccaggtgttgctgaaatggtcttcattaccagcagatcatgctacttgggaggactatcatgttgtgaagactcgctttccagatgctccagcttggggacaagctgaaactcctgcgggcggcactgtcatgaccggcaatggtgacactgagaaagaggtttaa

SEQ ID NO: 21256 - DNA, 3453 bp, Oryza sativa; identical to SEQ ID NO: 11626
  Clone ID: TF_OsC351798_1

SEQ ID NO: 21257 - DNA, 4362 bp, Oryza sativa
  Clone ID: TF_OsC113064_1
gggggaggattagttttcttccttttcattcatgatgtcttccccaccgagtggtcccttgtcttatagaccttacagctaagcaacagcatgagctcgcaggcccaacaacccaacataactcatgtgagcgcgcaggcccatttcactctattcctggaacgctactgtagctgtccatcacgactactgtggcgcgtcgcactgaataccatcagctgtgacagtaccgcccgccaaagatgcagcttgtccccaagctggcgcagaagggaatcgtgtcttcaacacatcataatcctcccaggtggcatcatcagcagacagagatgaccacttgataagcacctgaacatgagctgcattccccttttttaccagacgcctgtccagaatcagttcaggccacacatcggcagcatccagtacaaccggtgtgggtagagaagtaaacactggagtgtgatctggcacatgagctttgagttgagacacatgaaacacaggatggaccgcactgccttcaggtaaagccagacgataagctgccgacccaactttctccaagatttgaaatggtccaaagaacttgaatgccagtttgggatatgggcgattcaccaccgaagactgagcataaggttgcaagcgaagaaagacatgatcaccaacagaaaaggaacgctcagatcgccctttatcagccttatgcttcatacgcaattgtgctcgttgtaactgttgctgtaaaaagacagacaactgattgcgttcagaaattaagtccaccacagaatgatgaactgaggacagcagcaccggcacttgactgatatgaggttccactccaaacaaagctttgtgaggggaacaacccaaagatgtatgaaaagatgtattataccagtactcagccaaatgcagccaactgttccatttggtgggagtagcttgaatcatgcacctcaaatacatctcgagacactgattcactctttcggtttgcccgtcggtttgaggatgatatgccgtactcatgttcaattgagtgttccatactttaaacaaatcaccccaaaaacgactagtgaacactttgtcatgatccgacacaattgactgtggtaagccatgggtcttaaacacaaatttatccactgtgaccgctacttgtgaagcagtataagggtgtctcaaaggaatgaaactagcaaatttagtgaaacgatccaccacaacaagtataacagtgtaaccatcagatttgggcaaaccttcaataaaatccatcgagatgtcgatccaagcttctttcggtactggtaaaggaactaacaacccaggcaatcgacaatgctcatgtttagcttgttggcagatttgacactgtttaacaaagttgaatactgcagttttcagaccaacccaagagaacaactttttgagccggtgataagtggccatagtgcccgagtgaccaccaattggagaggaatgaaaagcagtgattaacttagtctgcaaacccagattagctcctatccaaatgcgaccatgatgacgaatgagaccatcagtcaaagaataaccctgatcattaggagaatggactgccaattctaccaataacttctgagcctgagtatccacagcatacgagtttaacacttcctgcaaccaaatggggctagccactgacagagcagataagtgagactgaggaggcactcgagacaaagcatcagctaccacgttctccactcctttcttatactggaaagtatattgtaaccccatcaatttagtcattgccttttgctgtaaatcagtccccagaaccaggaactctttttcatatatagaaagcttctgattagccactcccaatgtcttgctataatatgcaataggatgattatgctgactgaggacagctcccactccaaacgcacaagcatcagtttccaaaataaaaggttgggagaaatcgggcaaagccagtacaggagttgaactcatagcaagtttcagcttctgaaaagcctgctgagcatcatcagaccactggaacgctttcttctgtagtaagacagttaaaggttttgccaggatactataatttttaacaaactttctataataccctgtaagccccaaaaaccctctgagttctgtcacattggcagggactggccaagccaacatagctgcagtcttagtaggatcagtactgactccttgatctgaaattatgtgtcccaaatactccaattgagaacaggcaaaagaacacttggaccttttggcatataacttgtgttgtctcagcagttcaaaaacttgtttcaagtgtgtgagatgagacggtaaatcaggactgtacactagaatatcatccataaacaccaaaacatacttcctgattaagggtgcaaacactgaattcatcacacattgaaaagtagaaggggcattggtcaacccaaacggcatcacatggaattgaaattgaccatggtgtgttttaaaagcagttttatattcatcatcctccaccatccatatttgatgatagccagctttcaagtcaagtttagagaagaaacgagtaccagcaagctcatcaagcaattcatcaacaataggcataggaaacttacttttcacagtaatagagttgagtttgcgataatccacacaaaaacgccacgtgccatccttctttttaaccaataaaacaggagaagcaaaagggctcatactgggagtgatcaacccagaatcaatcatgtccttgacctgactttcaatctcatctttttgcaaaggagaataccgataaggtttgctattcacaggagctgaaccagggaaaagagtaatagcgtgatcataaactctgtgaggtggtaaactgtgtggatcttgaaaaacatcagcaaactcatgcactaactgagaaacagcaggtggaactgaatcagcagaagggaagtcagctgtttccagcagtgcagctgcccatatatcacaccctttttgacacttaagaacctgagacaaagacatagcactcaactcagtttggggaggagaatcagggactccctgaagttcaacccaagtaccctgatacataaacttcaaagttttgttggcccaattgcaagacatatcaccccactgtgccaaccagtccatccccaaaatagcatcatgtccacccaaaggaacaactctcatatcataagtgaaagtacgcccttgaaaccaccaagtaaactgaggaaccataaactgacagtgtatacaatcaccattagctactttaaccagggagggagcaatgggctgcaactgcaatcccaagagttgagcaaagttatagtccaagaaactatgagaactgccagagtcgaccagtaagagcaacaccttattctggaccaaagctcggagtctgatagtgttcacatgactagcaccagacagggaattgagtgaaatatgacaattctcatcctggtcagagtcttcttcagcagtcactgcattcaaaagatcatccggaatcacttcagtaacttgcatagctttaatctgaccacccagcgcacactggtgctcaggagaatatttatccccacatttgaaacaaagaccattggctcttcgataatcccttaactgtcgagccttccatagttctgctcgttcaggcttaatagcaggagtatcagtaccaccctgaggcaactcccctttggtaggcaatggtttatacatcaatcgcttagattgcttagtactcaattcaagtagaacactctcttgcatcaatgccacagcagcagcttgctgaactgtggtaggcaactgaaccatcactgctcccactgatggatcaaatacacggatctgatagacaagagaatcaaattgatgcttatattcagccacagaacctgcctgtcttaaagtttgcagagcctgaatcttctcacgttgcgaggtgctctcaaactcacaaacaacagcatgtcgaaactgagaccaattagcaacttcctccacgagcttaaacgattgataccactgggcagcattccccgacatgtgaagaacagctgctgaaacttgaaatacaggaggaatctggtacatcggttctgaagccatggcttgcttgtgcagctgcgccgcctgcacttgctccttctgcaaagcggccacagcatccatggcgagatccaccttggtagcgacttgatcaattcggccgctctgcttggttaacttgtcgtccaaagcctccatacacagcgtgagggagtccagcttctcgagaagcttagcctccat

SEQ ID NO: 21258 - DNA, 3177 bp, Oryza sativa; identical to SEQ ID NO: 11629
  Clone ID: TF_OsC321575_1

SEQ ID NO: 21259 - DNA, 4265 bp, Oryza sativa
  Clone ID: TF_OsC136280_1
atgccggctcgcaccaggtccgttaacagtttggatagtgtggatggatttgacgctagagctgagatcctgcagcttaggcgggagatgacagatctgagtaatctgagaggtgagatgggagaaatcaaggaccttttgaagagtatttgcacagctctacctggatttcactctgctggtgcgagtactagtgggacggctggtgcaggtggatctgcagggacccaggctatggctggtgcaagtgtatctgcaggagcacaggctgctactgggacaggggctttgattgcaccattagttccccctggattttcatcagtggcaccaattttatctacgggaggaatgcagtcaggagtggctctacctcaaactgctgatgagactcaggtaaactcaactaatgcaattccttccagtcagatacatgctggtatgggaagtgtttttccatcaacaagtcttccaccaatttttccaatacacatgtctggtgctgttccttctgttggacatgtgaatttttctattgagccaaacactgttaacccaaattttgcaccaatattcacctcagcaccaatattcacttcagctactagaactcaggctggtcatttacctggggggttaaatatacatggagtggagtctcaggaggatgtgggaatgaatcattatggaatagaaacaaaccagccatggaggtatccgcagatgcagccaacagccagacctcatctgaatgctacagggatacatatggcaaatggaggaggacctgtttggccagaaggacccagacatctgtttggtgggatgcctaatccatatgctgacatgacactaagaagccagaggttggagttaacaatatttaatggagaagatgctattgggtggttacaacaatgcgagaagttctttgaaatgacaggaacaccagtagagcaatgggtgaatttagccactgggcacttggtaggaagagctgggaagtggtttagaaatcttgggataccatggcattatattaattggccccaattttacttgatgatttcagatagatttactgaggcaaatgcacacgaagctgtggagcagttgcagaatgtgaggcagactggttctgtcatgcattatattgataaatttgaggatagtgttgcattggttaaaagggatcatccctatctgattgagtattatattttgagctgctttattgggggtcttagagctgatatcaaacatgatcataagtgcaggacagggaaggtgatacatatgatggaagaagtagaggatgaagaagaggaatcaggaagtcctgaagaaaaccaggaaggggaatatcaaacagcacctggaagtcctgctaagaaagaagatgataatgaagaacaactgatgcagatttctactcatgcaatacagggtacatatggaatcaatacattctctttgattacctatgttaaaggaaggaaagttgtggcattggttgacagtggtagcactaataccttcatgaattatgaatttgcattgagaagtgggtgtgaaatcatagaatttgaccacaatagagtcatggtagctgggggaggaatacttaattccacagctaaaaccgaggtgatccagtacaaggtccagggatatcttttcggtaaagcattccagttgattcctttaaaggggtatgatattgttttgggggcagactggatatatgagcacagtccaattaatttggacttgaagcagagaactctgacaatgaacaaaatgctggacaaaaatgttatggggtttgtaattgaagtacatactctcaagactttggagatggagaatgtgccagtccctgattctgtagcaactatcctagctggatttgcagaggtttttgctgagcccaaggggttaccacccagaagagaatgtgatcatgctatcccacttaagatgggagctgaaccccctaatcagagaccatatagagtaccacaccagcagaagaatgcaatggaggaaattataaaggaactcctggagtctgaagagattaggcccaatttgagtccttactcttcaccagctgttatggtcagaaaaagggatggcagctggagaatgtgtgtggactatagacaattgaatgcaagaactattaagaacaagtttcctatgccaattgtagaggacttgctagatgagttgaatggtgctaaggtattctccaaactggatctgagatcaggcaaaaatctggaagagcatgaaaaacaattgcagtgtgtcctatctattttgagatcccacaagttatatgctaagaggagtaaatgcacatttgcagcaccaagtgtagaatatctggggcatatagtatcaggagaaggagtggcaaccaagcccagcaaaattaaagatgttctagaatgggcagtcccagtgaatataactaagttaaggggctttttgagattgacaggttactacagaagatttgttcaggggtatggtgctatctgtagaccactacatgatttattaaagaaggataatttccattggggtcctgaacagcagaaggcttttgaccaactaaagaagattatgactacttgtccagtattagctcttcctgatttcagcaaaccgtttgtattggaaacagatgcttgtggttcaagcattggggcagtactaattcaagagggcagaccaatagcttattatagcaaagctctggggcagagagcagcagggtcatccacttatgaaaaagaagcaattgccattttggaagcacttaaaaaatggaggcattatttgctgggtaatcaagtgattataagaattgatcagcagagtcttaagtatatggctacacataaactttcagaaggaatacaacacaaattattgctgaaactcctggagcttgactataacattgaatataaaaaagggaaagaaaatgcagcagctgatgcattatcaaggagagacaccaaagaagtggaagagaaggaaaaatgctatgcaatcacattggtctatcctgaatggatagaggatgtgaagagcagttatctaaatgatgcccaatatatgaaattggtggatggggaggaactaaatgaagaatctagcaatttttctttgggtgctggaatactaagatacaaaaacaggatatatgttggcagtactactaatatcaggaacaaactgatacaagctttccacaaatcagcttttgggggtcattctggagttaaagtcacttaccaccgaatcaagaagattttctattggccacagcttaagaaggaagtggagaaaattgtctctgaatgccccacttgccagattacaaaagctgagcatgttcattctcctggtcttctagatcctctgcaaatacctgaaatggcttggacacatatttctatggattttattgaagggctgccaaagtctcaaggcaaagatgtcacaccgtatgaagcactatatggtgtacatccacctcagaatggggagcaagctatccctggaaatgtaactgaagaaatcagaatcactgctcaacagagagaagagttgatgttgagattgaaagataacttgttgagggctcagaatcgaatcaggaaatttgcagacagacttaggtctgaaagaagttttcaggagggagacatggtgtatctaaagatgcaaccttatagacagaacgcttttggcttgaggggatcgctcaagtttcgtgcacagttctgtgggccatttagaatcctgaaaagaattgggaaagtggcttaccatctgcagttaccggaggaagctggaatacatccagtgttccacgtaagccagctgaagaaacatgtgggaaatttggttgtaccacttcctaatcttccattggtggatgaagatggtaacatcaagactgaacctgtcgctgtactagcaagaagggtagttccaagaagaaatgagccggtcactcaatggcttgttcactgggaaaatctatctcctgaggatgctacttgggaggactctgcttttattcaagcaacgtttccacattttcgaccttgaggacaaggtcgtgctcaaggggattggattgttagagatggagatttcagagaagaaatggagaagagtttcagaagtttcatttaaaaattcagaagttcagagttagagtgggataccggttgggtgac

SEQ ID NO: 21260 - DNA, 4550 bp, Oryza sativa
  Clone ID: TF_OsC22007_1
atggccgagcccaccatcgccgacctcttgaaggagatcaagaacatgtccgccgaactcacctccctgaaggccgatatggcgaccatgaaggacaaggcctcgacggccgcaagcaccgagactcgccaccctgatgggttgcgcgacctcgacctgcctccccggcccaagaagtgggattttccccgctacgacggcaccacggatccgctgctcttcctcaacaaattcgaggcgtacttccgtcaccaccgtaccatggccgaagagcgcgtcggcatggcgtcctaccacctggacgacgtcacgcagacttggtacacccagctgctcgaggatgagggaaccccgacgtgggggcgcttcaaggaactcgtgaacctgcgtttcgggccacccctgcgttcggccccgctcttcgaactttccgagtgccgacgcacgggaacagtggaggaatactccaaccgcttccaggccctcctgccgcgcgcgggtcggctcgacgagtcccagcgcgtccagctcttcaccggcggtcttctgccgcctctcagccacgccgtccgcatccaccatccggagacgctcgccgccgccatgagcctggcacgccaggtggagttgatggagcgtgatcggccggcgccacctccactacgtgctccgccgcgtgggctgctacctgcgcctgcgccacggctcgcgttacccgcgcccgcgcagcagttggcgctgcctgccccaccagcggccgccccacagggtcgcgacgcggccaacccacggcgcctgacgccggaagagatggccgaacgctgccgccaaggtctgtgcttcaattgcaacgagaaattcacccgtggccacaacaggttctgccgtcgcctcttcttcgtcgacggggtggagatcgacgacgtcgcaatcgagggtgacgcggcggccgccgccggggatacggaggcgcccgtgttctccctgcatgccgtcgccggcgtgcccatcgcggacacgatccagctccaggtgaccgtcggcgatgcctccctcctcgccttgctggatggaggctcgacgcacagcttcatcggtgaggaggcggcaaggcgcgccggcctcccgatccagtccagcccgcgcatgacggccatcgtcgccaacggcgaacgcgtggcctgccctggtgtcatccgggacgcggcgttcaccatcaacggctccacattccacaccgatctctttgtgatgcccctcgcaggtttcgacgtggtgcttggcactcggtggctcggcacgttgggtcccatcgtgtgggacttcacctcccggtcgatggcgttccagcgagacgggcaacgcttcgcctggaagggcgtggcctcgacctcaacaacgcacctgcgtaccctagccgcggccagtgggacgctcctggatgagctcctggtcgcctatgaggacgtcttcggcgaaccgacgggcctcccacctccacgtggccgcgaccacgccatcgtcctcaagcctagctccgctcccgtggcggtccgtccgtaccgctacccagcggcgcacaaggacgagctggaacgccagtgcgccgcgatgatcgagcagggcgtcgtccgccgcagcgactcgcccttctcctcgccggtcctgctcgtcaagaaggccgacggctcgtggcgtttctgcgtcgattaccgcgccctcaacgccctcaccgtcaaggacgcgttcccgattcccgtcgtcgacgagctccacggcgcccgcttcttcaccaagctcgatctgcgatcggggtatcaccaagtgcggatgaggcccgaggacgtccacaagaccgccttccgtacacacgacggcctctacgagttcctcgtcatgccgttcgggctgtgcaacgccccggcaacgttccaggcgctgatgaacgacgtgctccgaccgtttctgcgacgcttcgtgcttgtcttctttgatgacattttgatttacagtgagacttggaccgaccacctgcggcacctgcgtaccgtcctatccgtgctccgtcagcaccggctcttcgtcaagcgcagcaagtgcaccttcggctccccctcggtgtcctacctcggccacgtcatatccgaggcgggcgtcgccatggatccggccaaggttcaggctatccacgagtggctggttccccgttcggcacgggcggtgcgcagcttcctcggcctcgccggttactaccggaagttcgtccacaactacggcaccatcgctgccccgctgacggccctcaccaagaaagacgggttctcctggacggaggacaccgccgctgccttcgacgcccttaaggcagcggtgacttcggcgcccgtcctcgccatgccggacttcgccaagccgttcaccgtcgagggcgacgcgtccacccacgggttcggcgctgtgctggtccaggacggccaccccgtggcgttcttcagccgccccgtcgtgctgcgtcatcgtgccctcgctgcctacgaaagggagctgatcggcctggtgcacgccgtacgtcactggcggccgtacctctggggccggcgcttcgtcgtcaagaccgaccactactccctcaagtacctgctggaccagcgcctcgccaccattcctcagcatcattgggtgggcaagttgctgggattcgacttcgccgtggaatacaagccgggcgctgcaaacactgttgcggacgccctgtcaaggcgcgacacggaggagggcgccatcttggcactgtctgcgcctcgctttgacttcatcagcaagctgcatgacgcgcagcgccaggacccggcgctcactgccctccgcgacgaggtcagcgccggcacgcgcacgggcccctgggcgctcgtcgacgacctgctgcagtacaacagctggttatacattcccccggcatcgcccttagctcgggagatcatcgaggctacacatgaggacgggcacgagggtgtcaagcgcaccatgcaccgcctccggcgcgagttccacatccccaacatgaagcagctcgtccaggactgggtacgctcctgcgcagtgtgccaacgctacaagtccgagcacttgagcccggccggcctcctgctgcccctgccggtgccccagggcgtttggaccgacatcgctctagatttcatcgaggcgctaccacgagtgcgcggcaagtccgtcatcctgacggtggtggacaggttcagcaaatactgccacttcatcccactggcgcacccgtactccgccgagtccgtcgctcaagccttcttcgccgagatcgttcatctacatggcgttccgcagtccatggtgtcggaccgcgaccccatcttcacctcgacgttttggcgcgaactcatgcggctgatgggcaccaagctgcacatgacgacggcattccacccacagtcggatgggcagtccgaggctgctaaccgggtgattattatgtacttgcgttgcttgacaggggaccgtccacggcaatggctgcgctggctcccatgggcggagttcatcttcaacacggcgtaccagtcctcgcttcgggacaccccgttccgggtcgtctatggcagggatccaccctccatccgctcctacgaagcgggggacacgcgggtcgccgccgtcgccaaaagcatggaggagcgggctgagttcctctttgacatccgctaccggctcgagcaagctcaggcggtccagaagctgcactatgacaagcaccaccgccacgttgcataccaggtgggcgactgggcgctcctccgcctgcgccagcggcccaccacgtcgctccctcagtccggcacgggcaagctgaagccccgcttctatgggccataccgcatcaccgagctcatcaacgacgtggccgtccgcctggagctaccggccggcgctcgtctccatgacgtgttccacattggcctgctcaagaagttccacgggccgccaccgggtgcaccaccggcgctgcctcctctccatcacggcgccatcgcccctgagccggaacgtgctgttcggtttcgtttggcgcgaggcgtgcgccaggcccttgttcagtggaagggcgagtctccggcttcggcaacttgggaggacatcgaagttctccgtgccaagtaccctgcccttcagctcgaggacgagctgagtctcgaggaggggggagatgtcatgtgggggaagacctacaccaggagacaccgagccagagatgtgcgccgggcagcagaacgtgcgggcgcacgcatggacgcagaacgcgcggtgatcgcgggcacggcgcatgcaaccgaggatgaagcgatcagcgcaagtggctgaagttggaaagctatttttagttgttaagatattatttgctatctttgattagttccttgaatcgaggagtttgtttcctccgttggttagggccgatggccatatattccctgtaaaccgaaaagattagggaggcaagatcaattacctgctctcct

SEQ ID NO: 21261 - DNA, 1836 bp, Oryza sativa
  Clone ID: TF_OsC448_2
atggcgcgtgggaagaatcacccggacggggaggaggaggaggcgccggcggcggcgggggaggaggaggcgccggtggagatggacgaggagggggagatggaggaggaggaggaggaggagcagggggagggggagggggaggagagagacgaaggggaggaggaggaggagtgggaggatgcggaggaagtggaggggggagaggagagcgagcaggcggcggcggaggaggaggattcgccgctggtggtggtggaggccgaggcggcggcgcctgtggtggatggctccccgccgaagctggcggaggggtactacgagatcgaggacatccgccgccgccgcctccgcaaggggaagctccagtaccttgtcaaatggggttctcaatgggagggtggggcatgggacctcgcagccccggagctgtcaggaaggataagaacagaggactggaaagaccaagaggaaataacttattgtttgcctaaacaagtgcgtgttgatgtggaccatgtggtaaaagtgcccaggttgagaatggctgtggacactcatattgccatatttgggacaatacacctctacgagttcagctatgaagaccaagaacaggattgcgttcagaagaagcagcagtacggcaggcgtggatggccggaaagtgctaacacatgggagcccctagaaaacctgagtgcctgctctgacattattgatgctttcgagatgcggttacaatctccaaggcccggtcggaagcgtaagcggaagataacaactactccagtagcaggctcaaacccatctcatggtaaacggggccgccctcgcttggatgctaagtcccacactcgagctcctgcaccagaacctaagcaactgccctgtcggacaagttgtaggagagcgactaattgtagtagtaagacagttgcagggcttgatgcgtcagggagtgtggtgaggaaccagcttgcacagaacattgtacaggagggtagttccagtgtgatttcaaggacaccatgtcaggagctaccgctctcaattaggttgacggaccaacaaaacgagcatcaccttgtgaatggttcgtctaattctgagaacttagtgaaggtacctccatctcagggtggccaggtaactggtgccaagaagcgtaaatctggaaatgtgaggaggtttgagcagaataaaccaacacaaggacaaggagaatgtggagcattagtggtggctgaggatgttggttccactgaaggagaaactggcgataagaaaaagacagagggctgtcctaaccgagttcatatcaccaagatcatcaagccagtgcgatttgcagcagctgtgaacaacgatgtgcagcaagtttcaattacattcaaagcactcaggtctgatgggcaggaagtcatggtggacgacaaagaattgaaagcaaataatcccttgctgcttattagctactacgagcagtgccttcgttataatccgacttcgtgagagatgaactgaaggaactgggtttagctgcctgtgtatttaattagcatttgtgtgtttagaagcttgtagctctatgggcttgataatttagtctggtcttgcagtaggttgctaaatgcaagaaatgtattgcttggtctccccactgattgcttattcgcgccatcttatgtgtaacattttgaacagtggggagatatgtgtaatctatgcttagggatcttatgtttcttttctctatgtttagttatttgggatcgtcgtgacctgcatgcaaaaaaaaaaaaaaaactcgagactagttctctctctctctcc

SEQ ID NO: 21262 - DNA, 3807 bp, Oryza sativa
  Clone ID: TF_OsC346257_1
atggcggcactgaaaaagcaggtggccgatctcaaaggagtgaggatgttggaccaacagaggaacatttatctgggtcaggcaggagaagggaatcagtacgctgaggctgtcctcaaggggccaagattagaaatccctctgttcagtggagaagatccaatagattggcttaagcagtgtgagaagttttttgagattacgggtacccctctggatcaatgggtgaatttagcggtggctcatttgaatggcagggcattgaaatggttcggaggaattggtctgccatggcaagtgatagcttggccacaatggtgcagcatggtctgtactcgattttctgctgcgagtgaacatgaggcaattgagttgttccaaaatgtgaaacaatttggaacaacagtggagcaatatattgacaagggggtcctctaggtggatttagtaaagagagaccacccttatctccaggagcaatatctgaccagctgtttcattgggggattgagagcagatattaaatacgatgtgtgtgggctgctaatgccagaaaaatggtgggaaatttcaaccgaaacaggaatcagaatccacttggaggtaatcaggggcggaatgctaaccataggggacaaaacagaggtgagggagataggagagaggaaaagaagtgctggttctgtaaagaaccttggtttccaaggcaccagtgattatgcccttaggaattcttatcccttgaaaaatactgacacaaagaaagtagtagttgctggtggtggagaacttaagactgatgtcatggtgccagacatcagctatgagattcaaggagaatgctttactaaccaatttaagttgcttcctctcaagggatatgatattatctggggtgctgattggatctataattatagccccatttcgctggatttgaagcaaagaattttgggaattacaaagggaaacaaagtaatactcttacaagatttcactaaaccaaataagcactttcagatcagtggtaaaagattggagaaaatgttaaagaagggggctcttggtatggtgatacaagtcaatgtcatgtctgaaactgtggaggaagaagggcatgttatacctgaagacattagtgacattatacaacaatttccagctgtgcttaaagaaccaaaggggctaccacctaagcgagaatgtgaccatgtgattaatttacagagtggggctgtaccacctaacatcaggccatacagagtgccacattatcagaaggaagcgatggaaaatattatcaatgagctgattgaatctaaggagattcaaactagtgatagtccctattcatctcctgctgtgatggttcgcaagaaagatggatcttggaggatgtgtgtcgattaccgacaattgaatgcacagactgttaagaacaaattcccaatgccaatcattgaagacttgttagatgaattaaatggagcaaggatattctctaaactagaccttcggtcagggtatcaccaaattaggatggctgagaaggatgttcataaaacagcatttagaacacatcttgggcattatgaatatcaagtaatgccattcggtttgacaaatgaccctgccactttccagtcacttatgaatcatgtcctagcaccattcttaagaagatttgtgttggtgtttttcgatgacatattaatctatagcaaaacaagggcagagcatctggagcatgtgaagttagtaatgcaagctttgcaagacaaccatcttgtaatcaagcttaaaaagtgtgcttttggacttgcaagtgtgtcttacctaggacatgtaatctctcaggatggggtggctacagatcccaagaaggtggggaaaattaaaaattggcccacacccaaggatgtcactgatgtaaggaaattcctggggatgacaggatactaccgaaggttcattcaaggctatggtaccatttgtagacctattcatgacatgctgaaaaagaatgggtttcaatggggagcagatcagaccacagcttttgagactctaaagcataagctgagaaccagccctgtcttggctttgccagactttgatcaagcattcaccatagaagcagatgcttgtggagtcggcattggggcagtactaatgcagggagggcgacccattgcatttttcagtaaggctttgggacccaaggcagctgggcaatccatatatgagaaggaggctatggctattcttgaagctcttaaaaagtggaggcactatgtgttgggcagtaaattgatcattaagactgaccagcaaagtttgaaattcatgatgggtcagagattggtagaggggatacaacacaaattgttgctaaaattgatggagtatgattataccatagagtataaatctggaaaagaaaatttagtggctgatgctctgtccaggctaccacaaaaggaagctgttgcagacaggtgtcacccaatgactgtggtgatacctgagtggattgtggatattcagaggagctatgaaaatgatgtacaagcacacaaaattctcagtttgattggtactgcagcagatccagatagagaatataagcttgaagcaggattgctaaaatacaaagggaggatctatgtgggagaagccacggatatcagaaggcaattgatcacaacctatcattcatcttcttttgggggtcactcagaaataccagatatggcatggactcatattactatggactttatagaggggctaccaaaatcacaagggaaagatgttattctggtagtggtggatcgtctgaccaaatatgctcatttcatagcattagcccatccatatgatgtggagcaggtggtagaggcgttcatgaacaatattcacaaactgcatggtatgccgatggtcatcatcactgacagggaccggatttttactagcagtctgtttcaggagattttcaaagcaatgaaggtcaagctgagatttagtactgcttatcacccacaaatggatggacaaactgaaagagtcaatcaatgcctggagtcctaccttagaaatatgacgttccaagaacctcacaaatggtattcatggctggcactagctgagtggtggtataacaccactttccacaccgcaattcagatgactccgttcaaagcaatgtatggttattctcccccacaaatcaatgaattttcagtgccatgtaacatatcagaagaagctagggtgactattgaagaaaaggaagcaatactgaacaaactcaagaatagtttggctgatgctcaacaccgaatgaagtattttgcagataaaaatagaactgaaagaaacttagaagttggggatatggtatatttaaaattgaaaccctatagacagtctgcatttgggatcagagggtctctcaagctaagatccaagttttatggaccattcaaggttcttcagaagattggccaattagcttataagcttcagttacctgatgatgctcagatccaccctgtgttccatgttagtcagctcaagaagcatctggggaagcatgctattcccatgtccaatttaccctcagtaggaccagatgggcagattaaaacagaaccactagcagttctacagaggagaatggtacccaggaaaggagttgctgtgactcaatggttgatattatggcagaatttgtctcctgctgaagccacatgggaagacgcatcagtcattcaagcaatgtttccatcgtttaatccttga

SEQ ID NO: 21263 - DNA, 4113 bp, Oryza sativa; identical to SEQ ID NO: 11644
  Clone ID: TF_OsC15548_1

SEQ ID NO: 21264 - DNA, 4044 bp, Oryza sativa
  Clone ID: TF_OsC65320_1
atgtcgattgctgaaggagaagttgtcaatctgaaccagaaggtggtggatctcagcacgaacctcgaccgcatcctgggatcgctaaagggtgtggaggcttggattccaagcgtcgacgctggaatgcaaggcctccggcggtcggtggaaggaatcaaggcgcgggtcatcaagctggaggcccagtcgtcgacggcgacgcctccgccaaatgggcaccgcgtggacaacaagtaccagggtgaagcgactgcggcagagtctgcccaggagcgaaccctggtcaagagtaagatccaaatccctcaatctgcagttaatttcgaagttggggagagttcagagtgggggattgggaattctcaatttggaacacaggggcctagattacctaaaactgaattccctaagtttgatggagataaccctaagttgtggaagaaaaaatctgaaaaatactttgacatgtatcaagttccttatgcaacttgggcctcctttgctacccttcacttcgtaggaaatgctgctctgtggttacaaacttatgaggaattacatgctgtagaaagttggtcgggggtgtgtgtagcagttaatgggaagtttggtagggataggtatcaacaattcttagagaaacttgataacttgaaacaagagggaactatagaggagtattacagtaggttcgaggagttgatgcataaggtactggtgtataataggggttatgatgagaccttctttgtgactaagttccttgggggtttaaaaactgagattaaggcagcaattaagctgcacaggcctggtactgttgatgctgcgttgtctcttgctaaaacgcaggaagagctattgatggaggtgaatttgaaggcatatcacaagaccactataaaggagtcgttcaagaataatttcaaggtgccaagtctagctaagggcatccttggccctccacctgatgagatcaagaaaactgaagaaaggcctaaatgggaagaacaatatgactcattgaatgcagctagaagagctaggggagagtgctttaagtgtggagaaaaatttggtccaggccataagtgtccaaaggctgttcagctccatgtcttggatgaattgcttgaggtctttcagttttctgatgaacctgggcaggtggaggagagtagcagtgatgaagaactgcttttatctgaaaatgctttgtttggaactgagggcaagcgtactatatggttgcaaggactgattcagcaggtcctcattttgattgattcaggtagctcaagcagttttatggcttctcatttggtggacaggttgcatctggttcccaatagcatacctagtgctctggtgatgataatagatggtggaaaattgttttgtgatgagatggctgagcaagttgagtggtggtgccagggtaatacattctcttctaacttcaagattctcgggttgggtggctatgatttgattttgggaatggattggcttgaggctcatagtcccatgtggattcattgggggcgtaagactggtatgcataaaaagggggtgatttcacagttaatccagctatgttccattcaagaaatagctgcaaaccaggaggcaattccaagggaaattgaggcggttttgcagcactatcaaggactgtttcaagaaccaacagaactcccaccacacagaacctttgaccatgagattcctttgttagatggggccaagcctgtcaacattaagccctacaggtatgctcctaaacagaaggatgaaatagagaaacaggtcactcaaatgttgcagcatggtgttatacagcctagccatagtccttttgcttcccctgttctcttggttaaaaagaaggatggtacttggcggttctgtgtggactataggggtttgaatgacattactgtgaaaaacaagtacccaatgcctgtggttgatgaattgttggatgaattgtcaggtttaaaatggtttactaaactggatctaagatctggctatcatcagattcggttagtggaaaaagatgagtttaagactgccttcaagactcaccaaggacattataaatttcgtgtcatgccattcggattaaccaatgcaccagccacttttcaggggttgatgaacactatatttgcacatgccattcgcaagtttgtgctagtttttgtggacgacattttgatctatagcaagaccttggctgaacatgtctgccatctgaaatcagtactgacagtgcttcaacaacatcagctctacatcaaaagaagtaaatgctctttttcacaaccttctctggaatatttgggacatataattggtgctattggggttgccactgatcctcagaaggttcaagctataagggactggccagtacctaaaaatcttaagcaattgagagggtttttgggcctggcagggtattatagaaagttcatcagaaattatggggtcatcactaagcctttgatagagttacttaaaaggggtaccttctttttctggtctacactggaacatactgcctttcaagaagtgaagcagtgtcttcagcaagcaccagttttggccatgcctgacttcaaccaacaatttgttattgagactgatgctagtgacaagggtattggggcagttctcatgcaggctggccatcctattgcttttctgagtaaggctttgggacctaaagcacaagggttttctacatatgagaaggaatgtttggctattctcatggctgtggataaatggcatcaatatttgcaatatgctgagtttgctatcctaactgaccacagaagcttgactcatctgtgtgatcagaaattgtcaacacctatgcagcaaaaggccttcctgaaattgttagggttgcaatggatggaagttgtggtcgatggttatcaccatgatcctgctacaaaacagttattggttgaattaagtttacatcctgatggggtcaacaatttcacattggttaatggcattatcaaattcaagggtagaatctggctagggaaacacgtggaagcccagcaagctgtcttactctccctgcacaatagtggcgttggaggccactttggtatagctgccacttaccaacgaatcaagagcatgtttgcctggcctggactaaaaagggatgtcaaggcttatgttcagtcttgtgcaatctgtcaacaagcaaaagccatcatctctgacagggacaggatctttacaagtgctttatggcaggaactctttcgactctcggatgtcaagttgaatatgagctcgtcttaccaccctcagacggatggccaaacggagcgtttgaatcaatgtttggaagcttatttgcattgtgctgtttattcttcccccgctctgtttgcccgtaagccaactagcttcggtgtgattgatatgggtcaaagtactatcccggatgtgcaacagttgcttgtcaatcgggcgaaattgaacgagttgcttcaccatcatctggttcgagctcaacagcgcatgaaagcacaagctgacaagcatcgttcaaaacgccagtttgcccctggtgatatggtttacttgcgacttcaaccatatgttcagctaaccatggccaaacgttcttgtcacaaattgagtttcaggtactttggaccttataaagtcctggaacggattggagcagtggcttatcgattggcattgccggctgggagcttgattcacctagtggttcacatctctttacttaagaaggcagtgcaacctgatacaccagtcagttcagatctacccctgacttgttctactgatgaagttgaagtctatcctaaagccattctacgtcgtcagttgatcaagcgtggtggttcttccattccttctgttctggtacgatggtcagggcttcctgatactcttgccacctgggaaaatttggccgacttatggcgtcgttttccatctgcgctggcttgggggcaagccagtccttaa

SEQ ID NO: 21265 - DNA, 4062 bp, Oryza sativa
  Clone ID: TF_OsC355669_1
atgtcttccaccgtcaccaacgtcgccgacgattggaagaagggtctcgctgaggtcctcgaccgcttggactccatccgcggcaagctctccgacctcgacaatgaacagcaggcgcaccacatcgccatccagcgtttggaacgcgctggccgcgatcgctcgccgcgccgtaacaatcgcgaccgtgacgacgaccacgacaatgacggccgccgcggtgatcgtccgccacgctaccacaagattgactttcccaaattcaacggccaaggtgacccactccatttcctcaatcgctgtgaacaattcttccagggccagcgcacgccggaggaggagaaagtttggctcgcatcctaccacctgctcgacggtgctcggcagtggtatatgcgcatcgaacgcgatttgggcacaccgacatggcgacgcttctccgacttgctcaatctccattttgggccgccgttacgccaggcgcctttgggcaaactcgccgcctgccgacgcaagactaaggtggccgcctacatcgaccgcttcctcgacttgctcgctcgcgctggccctctcacggaggagcagcaagtagacctcttcaccaccggactccaagaaccactcagcatcgacgcgtcctcttcagcggcgccgaccccgtcgcaaccggatgcagcttcctcggtgggacaagcgtccacacaggttgcaggccgcacggttcgccgcctgtcccagtccgagatggacgaacgccgacgcaaaggattgtgcttcaactgcgacgagctctacgcccgtggccacaaaaaggtttgcaaacgcctattccttcttgatttggcttatgatgatgatgatgacgaggtggaaggcgctgcaccggctgtcgaaccggagacgcttcgcatctctctgcatgcggtcaccggcgtccgtccgtccaacgccatgcatctccatgtccgcttgggcgacgccaccctccacgcgctcgtcgacacggggtcgacacacaacttcctgtcccaggaggccgcagcacgggtgcacttgccgctcgtccaacgcgctggcctgcgcgtgacagtcgccaacggcgacaaggtgccctcgccagggatgttccaggacgcgcgcatctccattgacaccgaggtgttcatcaccgacctctacgtccttccattgggcggctacgacctcgtcctcggcatgcaatggttgtcaacgctgggccagatactatgggactttggccaacttaccatgtctttttggcacaaagatcacatggttctgtggcgtggcctgcccacgggcgcttcaccggctgcgcacgtcgccaccacccgcgacctgctcgacgacctcctcaccgagttcgccgacgtcttcgccacgccatccggccttccgccaccacgccatcaagaccaccgcatcactttgctgcccgacaccgcgcccgtggcggtccgaccttaccgctactcggcgcgccacaaggacgaactggaacgccagtgccgcgacatggaggcccaaggcatcatccgccgcagctcgtctgccttctcctcgccggtcctcttggtcaagaaggccgacgggtcgtggcgcttctgcgtcgactacagggcgctcaacagccgcactgtcaaggacaaattccccataccggtggtcgacgagctcttggatgaactccacggcgcgcgattcttctccaagctggacctccgctctggttatcaccaggtacggatgcgcgacgccgacgttgagaagacggcattccgcacccacgacggcctctacgagttcttggtgatgccctttgggctgaccaacgcaccggcgacattccaatccctgatgaacgaggtacttgagcccttccttcgccggtttgtgctcgtgtttttcgacgatatattgatctacagcccgtcgtggtcatcgcacctacaacatctgcgcgccgtcttcaacacgctccgcgcccacaagctgttcgtcaagcggtcgaagtgctccttcggggacacctcggtcgcttatttgggccacgtcgtctccggccagggcgtcgccatggacgcctccaaggtgcaggcagtggtggactggcctcgcccctgctccgcgcgagctctccggggcttcctaggccttgcggggtactaccgcaagttcatcaacgatttcggcgccgtggcggctcccctgacacgcctgctcaagaaggacggcttcttgtggtcgccggaagccgaggtagcgtttggacgtctcaaaaaggcgctcaccacggcgcccgtcctcgccctgccggacttcgatcagccgttcatcgtggagtgcgacgcatcaggcacgggcttcggcgcagtgctgcatcaggatggaggacctattgcctatttcagccgcgcctttgcgccacgccaccacgccctggcggcctatgagcgggagctcatcgggttggttcaagcagtccgacactggcggccgtacctttggggtcgccggtttgtcgtcaagaccgatcacttcagcttgaagtacctgctggaccagcggctagccacgctcccgcaacaccactgggtcggcaagctattgggctttgatttcgaggtcgcctacaagccggggcggcagaacacggtggcggacgcgctgtcccgccgcgacgagccggctgcctcgctttgcgccatcaccacgccggtgtttgactggctacaggatctgcacaccgccaacgacacggaccccgcgctggtcgccctccgggaccagattctggccggcaacaggacagcaccatgggcactcaccgacggcatcgtcaccttcaagcagcggatgtacattcccccggcgtcagcccttctccagacggccctggcaatggtgcacgatgacaagcacgaaggcatccagaagaccttgcatcgtctccgccgcgagttccatacgccgggtgaccgccgtgtggtacaggaattcgtcaaggcttgcgccgtctgccagcggaacaagacggaacatctccaccccgccggcctgctcctgccactgccggtgccgtcggccgtctggtccgatgtgtccatggacttcgtggaaggatttcctcgcgtcgcaggcaagtccgtcatcctcaccgtcgtcgaccggttctccaagtacgcgcacttcatcacgctgtcgcacccatactccgccgagtctgtggcgcgcgccttctacaccgacatcgtacgtctgcacggcatcccaacatcgatcgtgtccgaccgggatccggtgttcacttcgacattctggaatgccctcttcgcggccacaggcaccaagctgcacatgtcatcggcgttcctcgacgacattcgctaccggctggagcaggcccagcagcatgcaaagaagttctacgaccgccaccatcgggagctgcaatttgtggtgggcgactgggtttggctccgtcttcgccatcgcgttccggcatcattagcaactccggtaaaaggcaagcttgggccgcgctattatggaccatacaaggtactggaaattatcaacaaggtggcttatcgcctcgctctgccggctggggcgcgcctgcatgatgtgttccatgtcggtcttctcaagccgttcgtcggcacgccgccgacgtctccaccggcgctgccctcgacactacacggagcggcgttgcctcagccagcacaagtactcaagtctcgtatggctcgtggggtgcatcagctgctcgttcgttgggacggtctgccggcatctgcaacgtcgtgggaagacttggacgatttccgtactcgctatcccgcattccagctcgcggacgagctatttgtcgaggaggggagagatgttatgtggggcattcagtatcagcgccggaaccgacgccaacagccagagcaggcgccgtgggacaccaaggaagaacttggtgtcaatggttttaagaaaggagaggtcaatcctgtatgctcatttctgatatatggaaactag

SEQ ID NO: 21266 - DNA, 7001 bp, Oryza sativa
  Clone ID: TF_OsC4120_1
ttttttttttttttttttttttttttttttttttttttttttttttttttaaaaaggtaaccaggattttttttccatagacaaacatgtagtatttctaaattgtaaccctgggagtggggtggtaaacggactatctaaatcatacacgcataaataaatgaatacttgtccatgtccaaggtaccatgtctgaaaatatacacttcatgtatatagaggctttcgagagtttgctcccgctggactagagggctaaactactagtccctggatttttactctatctggattctgggctaagcatacaaacacaaaaggcaggtacctgatacctccacacactggaaaccattgggaaagggaaaatcccagcgctaaatggaagaaaaataagcatttgagctcattgctcaaaagttctaatgctcatctgtgatcatctcgtccaccttatcttcgtcagctgtctgagctgccgaaactggatttgccgcacctgaattttcgctctcatcagggggcgtccgtttctcctggtcgccggtgcttacggctttgcctggtacaccctcttgggttgactcctcgtcgctggatacgggcactacagcaggttcgctgctcgtcccaggtgcatcaaccaacggtaatacagaaagttcagtaggtgtattacctgatccagacaattcgctcttctgattgtcagggtcaggagtatccctcacaggtgatctacaagatccagtatccatgtcatctaccgcggagaactcgattctgtgagtaccagtctcaggaggctctggcctggacgggcaagtggcagcagcgacagaagcaggttctgaaacttccatggttctttctggttcttcaaaagtggaaggggttgacgcatcctgcccccgactgccagctgatgatgaagatggtgagttcaagttgagcgagggggtatcactgcttttaataactgcaggagaggcaggtgcggcttccatggatagtggtgctgacggagtagagttgtggtcaccttgcccaactgtagttttggaatgatctaccagggaggaagcttgctgaactttgtgaactctcctcttctttggagcactccttgggtccttggggagagagagacgaggtcctggaatcgggaatggaggtattgctggtttttgctctccaagtagtaggcacacagactgagcaatagctgaaacagttgctggtagctcacattcaggtggcttggatggaggtgcacgcacagcctcctgaagccagtgcggtagcttgttcggttttgaactttcaaaatcaccagagttctcagctagaggatctgacagctttgtgtgattcagattcatctcaatgggtaatttccctaacttcacacgccgttgcatctcatggaataatttggcctgtccgtccgaaaaaccatgaagtatgctctcatgagaacttgatccaacttcattctgctgaatggaattactgctgtgtctgtttatgggcagtgacccaatgctttccttcataaaaggattcggcataaatggtgggatcaaccccatatcaggtttctcccacttgtcaagtgggccaggaaaatctccactgtgtcctgatctatttttgaaatcctgccacggtgtcagtgatggaccaccctcacttaaattcatgtaattagtgggctcaacatgagaaaatctggttggtatatcattgcaacctaactgaatgtcagttaggtgggactgcaactttggcggctccatcctcagtttggaaaagctacttccattaagtgcccgagacatcattgcatccgatatgccaggaaatgatgtagagttggagcttctggtggctgtaggcattggttcctctataattttctgctcctccaaaatccatcttgaggccagctcttcatgagatcggtggctcaaaaacttcagctttggatctctaagcatggcctcccaatttcctcttccatgcctgcgaaccccaatccacaaagcatcgagttcatcttctgaccaatagtctggttttaaactcttcttcaggaatttatttgaggcattcttcaagaacttgcttgaggagtactgagcacgcatcattaatttgtccaagaccttcttatgattttcaggcatggacgaatggatttgttgaactgggttgattgccaaacctggaagaaggccagacatatctgccatgaacttgttcttctgctttgaagttccagcaatatctgccataaagcttggtagaaatgaactatttggcaattctgggacacaattacgaagatattcattgctagtgcccaaagacaagttgggaaatagatccggtactgacttcaaatgcttaagtggaatactgtcttccagactaaaattaggaagacccagtttcccttgaaatgaaggaatggacgatacaggattttctacatgatcaccaatccccttcccggatataggaggaataggttggaaggggaagtaactgtctggaatgatattattcagccttcgcaaagtctcctcggaggaaccaggaaacataggcttacaaggagttggttggccatcatgtttttgttcgctagaatgatcaacagcaggagtcaacagcggtttgttggctagttcaccactagctcttttttgctcctttgtgcttggcccacaaactgaccctttatatgagttcatctgatcagcatttggagcacaaaggccaagaacaggtaaaaggtgatgtggagttcctgaattggagatatctgctgcctttgggtgatgttttgatgaagcagcattgccagtaagcttggcataaagctcttgaggaatttcaggatatctcttggttttcttcgaggattgcttcatttctgcagttgattcaccgagacgtttagccccagatggctgcacaggattgggatcttctacaattctcaagggatttgcactggaatcatatagtttcatgaattcttcaagtctgtcatcagcataattcttaatcacatggcgctgagcaatcctttccttttgtctagctcggagtttttcatatttttccttcaaagccagtccagctgcagtgtattctcgctttggttcatcctcctcatcagagtcctcgcttaaagcttcattaggaatggttgcaaatgtttccctgtaagaaacagccttccttaaacgcttacctcgaccaagagatgcttcctcctcagtttgatactgctcccatctgacacgtaagagtttatcccattcattttcttcaacacgattagctgcatcctgctttgcttcagatgcctgctcgcaaccatcattatcaatatttgggatgtcctcggtggcaccagggtcatcattcagctcatcgttccaatctattgactttacagtgccaagcatatcattgtccaagtccccatcagtgctttcagctactgttgatggaacgttggatctgtcaagaagctttgtgatagcattttcatcccaaataaatttagcagaaccatcagcacatctgtcttcataaacatcgcctagtccaccagtttttcttttatgcttaaactcaacctctgctacatcatttttagcaccagaagcttcattattatctttaactgcaacatcgctattcctgaagagttcctctgttccccagcgaatgatatcttccacttccttctgtgattctgatttgttaacaaaaagttgatcaagcatcaattttttcttcgcaaggtgcaagatacgctcctcaacactagcacgcacgacaagcctgtaaactaaaagtctgtttgactgtccaattctgtgtgctctgttcattgcctgtatatcagcatgtggattgaaatcagaatcatatatgataacagtatctgcagttgccaaattaattccaagcccacatgaccgcgtagatagcaggaatacaaaacgactcttgtcctgattaaaacgagcaattgctgcctggcgttctgccacagatactgaaccatccactctttcaaatgttttcggaccaaactcccaagtcaggtaatcttcaaggatgtcaagaagctttgtcatctgagaaaaaataagaactcgatgaccatccttgtgtaggattttaagcatagagtgcaacaaagttaactttgctgaggcctttattcgcatttcatgcaagaactctggtgatcctgattcaggttcagttccaggaataagatacggatgattgcagactttccgaagttgcattactatgttcaacaatgactggtgagcaccacctttcccaatattgcgcaatacttggtagttctttgtaagcatagcacggtagtattcagcctggattgatgtcaattcaacaggcaccattcgttcagtctttggagggatattttgcattgcatcctttttcagtcttcgaagcatatgtggagctacaaggttcttcagctcctccactttctctgttgttgtaaggtcattgaatttctcctcaaatgaagctagagaagggaaagaagcaggttgtaagaagttcaataagttatacatttcaccaatgttattctgtaacggagttccagtcagcaaaactctatgctgaaatgataatgtattgagtaaactgaaaagtttgctgctagaattcttcagacgatgaccctcatcgactataagaacctcccatgacacagaccgaagatatgcagcatcaacaagcaccatttcataagtagtgagcaatacattgaacttatgagatttcttgattttacccatctggcttgcatcaccctcatgccactcatattgacgaataatagatcttgcccgtgcagaaccatgatactccacaacatttaaatgaggtgcccatgatgcaaattcagccatccagttgggcatagtagaaagaggaaccaagacaagacatggcaagttaatcttatattcacaacatagggatgatagaaaagcacaggcagacacagtctttccaagacccatctcatcagcaaggataacattttttgacttgtaccagcatttgcgtagccagttcaatgcttccagttgatgagggaagagcatgcctccctggagttcttttggctgctcaaccagcatattaaactcttggtgttcccttggctttgcatggctacctcccttatccttatccaaagcctgggattcaaattttttgaactgagtgaccaaatgtgcatacttcaccattgtaggttcatctaatctttcccacgtgcattcgtcatatggaagggcacaccatttgatcaaagcctcttctatttcatctgttccgtactttgctttgtagttttctagtttcctttttgctaatgctttcagctcagattcagaaatccagctgttatggatattcgatttgccaacccatttaactaaaaactcataagtagttccgtcgtgctccttcaattcagtttcttgtattttcccatgcaatttactatcaggtgtatgttcttgtttagtgtggacttctgtgtcagctttggaaactggatgtttggtgtcattcttttcttctggaatatcagttactgtctcatattcaccatttactgaagctgttacatatgtctgtactgctccagcatccttaacagtgacgatttgatcagcggaacatgctgatgctgtattcatgatttcttttgcgttaagtgattccttgtgtccatgggatctaacattactctccttttgagcatcagaacaatccaaattattttccccaccatcgtttgctaattcatcagcacatgcatcctctgtcacattagtatcactattagaagactgaatttcttcatgaagtccttttaaaagggcttgactaggttctggtgcaccggatgcactaggaggggccatatcaatctgctctgatgaagcatgggcaggtgaaatgatttggcttgtctgaagtcgacagcctaggatgcgatcaacctgcagatccccctgagttgttattttgtctcctgcaccaccatgctccttttcagttatatgaacagcattctcagggtgctttttatcaacaaatttcactttcttttttcctttcttggtacttgatgcaggtgttcttccatccaacgattttctttttgggggcggcgattcgctgtgctcaagagaagtagatggttccattgaagaatcactgtccacatctgatgccaaatattggaccttttttgcttcggatctcttactgtctctgtgattgtgttgcttcttgttcttatatttctttggagataattccatgggatgcagatgtttcttcactttcaaagcacttccgtgtttctcctgtttctcttctgaagactttccaagtaaccctgactttgatgatgtggtatctgtagatagttccttggttgaacgcttcttcaaatgtaatatcaatggtttccttttctcaacttcattgtcttttgcacctggttcatcatccctaaatgcagcaccacgtgatgtgttaaaagaggctttgttttgtggagatggggatgggctatctgatgtggtgcttgtgcgcattctccttgttctttcacgtttagaggtgtcagcatcagcattgtctaagagcttcaagctaactttttttgtacgacatcttgggcattgccaatttccaggtggtgcacgcttgagaggaggattaagacattccaagtggtatgttcgtggacagctatcacagcacagcaaattgccaccgagatcacattctacacactcgtagaagtacctccctttgtaaccaccaacacaattagcctgcactagatacatccttgctactttacttccaaccctaacatcattcaaatgtttcat

SEQ ID NO: 21267 - DNA, 5085 bp, Oryza sativa
  Clone ID: TF_OsC25749_1
ctacagcacaggaccatgcccgggacgaaaccgcctgggatgaacacttttttttggtctttcttttttgtatcatctcacttcaaccggagcccaaccaagaataccaccagagctgctagatttctgtaacctgtgatcatttttcatgtttgttggagattgataccaagcttacttataaaagtgattatcagccattgtttttcttcttttttgtaagaatgggcaactaaaccataattcattatattgcaacttaaaaagatcatacatgtattgatgttgaactatatagatcattgctgagatgaactttcttaaaacatcccaactgaaatattcttctattagatcacaaaactgaccgacaaaattttctagactcttcctcttgcctcaagtttttttttcaatgtcagaagaatcttgtgtgtgtacatctgctaaaggtgccagcatctcctcagcaacccctggcatttcttttagactcggattcaaaactgtggtccacatcaggttccagcacttcattatttttttttcttcaaaaagaatttcaattgaacggtcttcccccatttttacatgtgcggcatgctagaagctgatatttccttggagcgatgctgctttaagtgacaacattgttcacttgaacaactacagcaaaggcccatgcccgggtggaaaacgactgggatgaacacctctttttggtctttcattgccgtatcgtctcatttcaaccggagcccaaccaagaataccagcagaactgctagattcctgtaacctctttccatcggccatgattggaggagcctcctccaaaggttggttatccaattgattgacgaggacctcccttggctttcgagctcttaccacgaagattggcaaattccttttgtagaagagcactagcacgattatccaagttcggtgcacgcggtaaaaacgtctctcgttcaccaagggttgctggtgcaattttcgctgtcaagctaagttttggatctaatcgtatcttctcccaatttccatagccataccaatgaattccaaccatcaatcttgcatcatcagtttcagtccaaccacagcttgctgaccactgtggcttttgtaaggtgcctggatccggtattgtctaactggatctttgtaacgtgcaatgcgccttgccaggaactgtagctcttccacacgggctatcaactcatgcgccttaactgctacaccaaaaaaatccaacactgtgcccttggcatccatattatttttaacagcatcttgacaaccctcaatgagtagagtaaacagctcaagctgttgatcaaccgaagactttgctattgcaccaccaacatcatccacgattaacccaatttggcttgggtttccaaattttttaaccgctcgaacaaatcgggtagcatctttctttgacaaatttccaaatgaccattctcgtacttgatgtgctgaaccatctatgagtggtaatgacacagctgtgtccattgttctgctagaacgcctccttggcttttcttgtgcatcgattcctcgccttttcctgttgctattcttatcaagttggtgatcttcaacatagctcttcttatttcttgcagcacgaggtgctaaagtctcctcaaccatatctgaagcatctggttgaattaatctgctccagaatgtggcatcatcctcaccactagaaaagttggcaacagaagtatagaatttaagcatgatgtctgaatcacaggtcatatggtagtgcacagaacatgccttgaatgcactaagaagttcatttccttcctccccttcaccaccctttgtttcaactttctcagctctctcgagaatttcatcaatgtccatgctttcaagcttcttcttggtctcttcatcagtcttatcttctttgaataactcttctgctccaaatctcaatatcgctgaaagttcattcttgtcaaacatggaaccacctttttttgattctttcttctcgagcctgccctcagcatttagcttctgaatcactaggtgatcaagaacctgtaaatcattttgcggattccagtctgaatcaaaaatgatcacggtatctgctgttgcaagattaataccaagcccaccagcacgtgtagacagaagaaaacagaagtcatcacttccaggagcattaaaatgctccatggcctggtgacgaagatctgctctcgtactgccatcaagcctctgaaactggaatcctcggagggatagatactcagcaaggatgtccaacatcctaaccatcaacagcttgtccaataacactaatttcccactactcataacaatgcgttcaactttattgcgatcaccaatgctatctccaccataaccatgatcagcactttcaaataaaaatgggtggttgcagcactttttcaactcaacaacgatatttaaaagcgagacctgattcccacgaactcctttgttgagattctggaaattccgctccaaaatccatttgtaatactgcttctgtagaggagacatatcaacacgaagaatccgctcaattttcggaggtaaagatttctccacatcttttataactcgtcttagaatatgaggcctcaattccttgtgaagatttgcaagctcagtttcattgaaggaactcaaatttttgtatctctcaacaaatatatccttgctgttgaatttagatggatcaaggaaatgaagtaacgcccagagctcttcaacgctgttttgcaatggggtcccggtgatgagaagcttattcttagtgctgaattccaaaagagtcgtatacagcgatgcttcacaattctttaatcgatgagcttcatcgaccataagatagttccatttgatcttggaaagggcagctttgtccttaagtatgacctcataagtagttatcaatgtatggaattttacatgtcgaccacccttcttatttgtaaaaaattcatgctgctggcagatctctctgctagcacgatttcccacataaaccacaacattcatgtcaggtagccatttccgaaattctttcgcccagtttgacaatgttgacagtggaacaaccacaagaaacggaccattaatttcttgagcattatgaaggaaacccagcatggagacagattgaatagtttttcccagacccatctcatcagcaagaataacattagtgtcatttctccacccattaacaaggaagtttaggccttcaagctggtaatcacgtagtttgcctccttttagccattctggttggtcgtcaagcctccgcaaactagctttgctttttttcctttggaaatcaactgttttcccgagtatagatgttgcagcttcacgggccttgtactcatcaatagcatcctgagcaaattcaatatctgtatctttttcccaggttgattctgcataaggaagtccttgccatttgactaaatattctggcaccaggtcatcgccatcaactttgctaaccctatcagcaaatatgcgttcaacctggctgtactgtttaataagatccagctccatttccttgcccacatcatgcacctcaacctcctcacgtgataacgatcgcttgtacctcagctcgtcagtaactcttttcatgtaatttagaacctttttaaatccactaacgttttggagctcagataatgtcttccactggcaatgtaagaatgattggcccttccattttatatagaattctacatcatcccatgattgatccacatctgatgtgaagctaatcacagtaggttgagttgattggccattcctcagtgcctcttcagcaacacccttaggttgatgccaaaggattctttcaattgtttccccttcttcctcttctgggtcctccttcaagaccttttgttgcttagctaacttttcctcactatcatcactttcttcactttcagcatatgaaatatttctagctgtcctcctccttccagaagttcgaacctcatgagaatcaacatttgagaaaacatccttgcggcctacagttttctgatgcaacttgtcgggtttttttgctcggtgactgatatcagtatcactgggagcatcagagtcttttcctgaagaatcttcatctgtaaaagacacccctcgtttgcgttgaacctgtacaggaagctttcttcccttggaggttttagttccaccaaccttaagtcgcttacattgcctcttattctcaacaaaatcatcttcatcatcatctgagagctcaagctcatcatcttcttcttcgtcggagttctcactatccacaaacttatccttatcggcagccttttcagtatcactttctggctcaaaatccacatcgtctggatcatcttcgtctgcgtcatcatcgtcttcatcatcattctcatcattgtactcgtcatcatcttcatcctcataagcattgtattttgtcggcttcttcttttgtctagaggagacagattctgctgcagccccagaagtagaacagcttgggcggcgcatcccaccacgaagcaatgaatcactctgctcctctccatcctgctcatagtagtcatcagagagcatttcctcagcaggcacctccccatgccctcggttcagctcatcatcctctccactagcatccatgtcgtcatgtgaactagccgccgacccatattccattcccctgttactggtcaattgctcttccttagccgtctgtgtgggtccacaatccttcaaaaagtttgtaccccatgggccagaaggcccatttattttccgggcattctgcacagatttattctccgaggagttcggacctgaccggccaccatcatattgctcctcatcactatgataggcatcctcagccttctcatttaagttccattgcctagagttcaagtcgacatccctgtccccaactgactcataggcagcttcatcctcagccttctcattcaggttgtaccctcctgaatcagccctgcttccagagttgctgaagaatgccat

SEQ ID NO: 21268 - DNA, 8425 bp, Oryza sativa
  Clone ID: TF_OsC7793_1
ttttgttttttttttttttttgtgtttttttttttaaacggcgaaacatgcaccagcatgggccactaagattaagcaatatacaaaatgcacccacatttccaactaaaaaaacactcacatttttgtaacaacagggttgacagactggatccaatgctacaacaggtcaactcattgacagtaaagccccttactgtcaatgagatagcagagacaatacccacatgtcagaacaaaaaaaatatcagcagcccatcatattatcttcagcaggaaaaggggtaacctcaacatttccagacccgtatcaacaaggtttgatatttgcaggaaaggtagactgattatacaagatggatattcaaattgatgttagcacccgtcatcccccaaaaaagaaaccccgacccactgtacttctattgatgtccgtctcttgctatcagaatactaaaggggttagatcgactataactcaaatcagttaactattgcactagtaacctacaatttgactgaaccttcctcactacgattcatcgtcagaaaggcacacaacctctgtgctggagaccgtccctctggcctcactagtcagcgcaagcctagctgttagccatgtattcagtgatgctgatgcagaagaacctgagggattgacacctgaaatttgagatccagcgtgctggcttccagcacctgcattcagtggacctgaggtcctgtgaacaaccgtgttcaatgacaggggtgccgtgaggctaggatttgaactagatgggagcacaaatggcagtagggatgctaggatagatggtcgttggtgctgatttccatgactcgtggcataaggtgacggcatcctaagctgctggagatgaggagagggagcatgcggttgtgccccagcagctctgtaggtgccatgtggcataggcattggtgtactactaaaaggtgatgatgacattgctctatacatattgccaggtaagattgactgcggttgggtagcctgtgatgatggttgaaccaccagtgaaggttgcacatatggtcctgatgaatgaagcacctgtggtcgaactgctgatgacaaggtaactggtgatgctgtgacttgctctgctacaatccttgcagatggttcctgagaagactgaaccagctgcccaattgtgggtctcgtggatcccccttgagctgcagataatggtaggaatttccttcgaaaattctcagccagtgattggtttataaagactttcctgtagatagtatcaagttctgcctccttctgagcgtaaaaagaatcttccttttgaagtaatgagtcatatttctgttttagcttctccatttcttggttatactccactaggagttgttttctcttttgttcatgaactttactaagaacattgctggtatgttttaatctttccagctcatttttgagaggttcgtcactaaatctttgataattaaacactaatggtgccactggaagaggctgggtgagctgttcagaacttagtgcagagttggactgaacacctatctgattcatgtcttcagagcgtattccttcaagttggacagtctgtattgtggatgatagatccagttggggctgcaaatcacaagtttctgtcgtgcaagatcgctgcactaagtttgctcttgtttctgcagatcgctcttgcattgaacctgatggtagttcagactgcctttcatgtgttgtttccatgcacaaagcacccgttggttctactcctgtctgcagatcccatgaaggcactacactttgatgggcagtagtaatacttcgtggcacaggaataccagacagatcagtcctttcaaatggagcatcctgtgttgaggttaatctctgtgtctcacattgcaaattctgagctgctgcagcactcaacataccttcttgatttgcctctgcaagttgatttggcactggggttgatgattgcattaaaggctgcaaatcttcagctgcagcaatgcacaatactgctcctggatactgaccctgcactgagtttggaggttgcatttctggctgtaaatcctgaattgctgagctcgacataccttcttgttccagctcttcagattgatcctgacctgaggttgatggctgcatttcaggctgaaattcctgagttgcctctaaacctacaggacttgcaattgaatgtcgtgaagtttctggactttgttgggcagggtggcttgtattttgttgtataggtatatttgattgacaagtctgagtttcaacttctgtcgaaactaccaaggcagctgtttcgtgaatgatgtaagttggagattctgagtgtgaaggctcttcggcaacaatgtcatcaactacaactccggtatcaagtaaatgttgttgagttgttgcaccttcctgcaagaaaacaactgctcgatctgattgacaatctgtttgacttatgttgttactttcaagtgaagcatcaaacaatgaggttgatggttgcaattcaggttggaaattctgagctggctgtgtggtaagcaaacctgttcgttctgcttctgcaggtggaagtggtgaaggtgctagattttgttgggcagacagatctgtgctctgttgggaagacatatttgatatatttccctgacttccaacctcactcaaaccttgacatataaccaggctttgtggagtagcaaagattggagattccaaatgggctcgaacatcacaaacagtgttactatcattagcatcaactatctctcgagcatctcctaaatggccacaggtttcacctctctgtgacagaactgtttccagctgatgttttgtttgactgtcgtcatcagggtgcatcctttggagtgaagtctccagcactgaggctgattgttgcctttcaggctgcacatctcgggctgtctccctgctcagggtacttgctggttctgcttctgcaggtggattttgtgaagatagtgaactttgtacgagtggtacacttatactctgccgttcaagcatacttgattgatcagtctgggtttcaacttccgtagacaccagcaaggcagctggtttgtgtgcagcagtataagattgtgtctctgagtcaagtggatctgcagcagcagtgtcatcaacttttgctgtaactccagcagtagcatcaactgaggttaaatgacaggaagtagaaccttcctgcaatgggctagttgatgtatctggttgatgaactgtttgattattattatctgggcacatccttgcagatggagaatccaatgttgaggtcgttgtttgcatttcaggttgcacatcccaagctgttactcccaaattttcagtcagttttgcttctgcaggtggctgctgtgaagtctcaacagtctgtgagccaggcaaggttgataaattagattgagtagccacttccttagaagctgggaaaatcgtgaggttttgtgtagaagcaaccattgttgactccaagttggcataaattccaatggcaggagaagttgcaactcccggcaatgtactaggattggcattgtccctctcaacattctcagtacttgtatattcactggccgaagattcctgattaattgaatcatcatttgaaggcctaatactcggtgatttagctttttgtaagccaatgccatcaggactatagcaggtgttgttttctggaaaatcaactacttctggtgctggttggccagcgaccatgaccacttcaacagaaccatttctcactgtctgtgcagaaatgggttctgatggaactacattccttaccagtgtatttaccattttcaatctatcatgacaaagctgctgacaatctgaaacagcgcttccactgacatgggaattgctactttgttccttcaaatggatgaattcttgcataacaaagtttgaatctggtagagcaatctgctgatcaaaggtgtgatctaattggcctgattttgcttccaaacaaagtttttccttcagctgtcgctcttcagcccatgtattagattgcagtgactcaagtttgctgtgctggagtctcatgtgctccagaaatgcatacatcagcatagtgaaccactgaacagtttgttttattgtgtcatttcgggtctctacatcagcatgacttctacaaatatgttccagaactaaattgcacactgttttcagtctggcagttttattttgtgtgtatttctctaactctgaaatctgagactgttgtttatcaaagatacggtattctcttacagagaaaacattgtcaattaagttgattcttttctccacaatgtcaggaagttcatcagttgaaaaatggcattccatgtgagttcctggaacagctatcagttcctgctcttctgaaaccatttgtgcagcaacaaatgagccttcttgaagtgcaccattcatgaaattatcatgaagatccattctctgcttagggaaaatgtggtcatttctcaagatattagaggtctcctgctgtgaaggtttggtcttttctactgatgttgattgacaattgctgccagttgcacctgctttctttggaaattttctctttaggctgtcatagaccaaccttgccagctcctcattgcactcgtattttaaccttttttcagcaagggcaagtgactctttatgatccaccttaaagttatgaatagaggcaactcgccaacacaaagctatgttcaacgcatgaaatatgtactttggctcctgaacaactacatgattattcaaaagatattcaaagaactgctcaaccagcaacgtaacattgtctacttcaatgagaacttgtcctgctattttcgctccattaaactgtattgtattcggtagttgtaacaccttaattaatttcgacaactcttgcttcatttgggcatgaagattcttgggtgtactcatcaggctttccgacccttcagattgaactgatttttgctgcgtgacatcaactggttgaagagcagggccagatgtagtacaaatatcaggcaatgcatcatcgttacttttgtcagatacaacttttgaagatgaacccataatctcaccaacctttctatgcttctttctggcttcattgatttcttcagccggagcattgacctcatccatggtctgggactttgtaactcttgattgcagtggctcagatatacagctcacatgaggggatcttccatccaataaatttaaccagaactcagctggattatcctcaagcacagagattccctccttttcacccatcagagtaatatttcttgaatatagttccccactcatattagctttgcttatggacttcctgtgtacttcagtgctgtcttcaacagttgtggataactttgttaagaactcaacgattacttcatcaataaagtgtctctccatttcagaacttttacttgcatggtcatcttgctggacctcatcaagtctactgaagagaaatgcagcaccccatctgagtaaggaatgttttaaactagtccttagatcttgtatgttgttatcaataacaatgccctgcctcgcaagaacaagactcttctcctcaactgtaaaaggagtgtacaagcgaaaaatgctcacacgctcaaattgtgactctatcttgatcttttgaagagccttcaagtcgtttagtgggttgttgtcagaaccatatatgatgatggcatcaatagatgaaagcttaatgcttgggaggcacgcacgattttcaatcagaaagacaaatctaccattagtcttgttgttgaacttatcaattgctgcctgtttccttgacaatactgcacgatattcaacacgttcatatgattctgggccaaatctgtgatgcataagatcttccaaaatatttcccattttgtttccacctgctctatcagactggaaaagaagaatgacccttaaactcttcttcttgatctcgttaagcattttgtcgagaaccagtagcttgccacttgcatgcaccaccgtatctatattttcagttacattgctattgttgctaagtgagcttcgcagaaattcattaacgatgtaagggtgatcgcagcactttttgagagacagataaatatcatgaagagctccaacgctatcagtttccatctctgaccggaggacggatgactttgaaagcaatatggaacagtacatctctaactgcggttgtgaaatgcaagatggaacccagtactccaaaaattttgaagaatctgttttacgctcatatgcaatatgatgtgtgaatcttgcttttgacatcacaagcgcatcatcagcattgacatagtcactataacctttatcttctgaattaagaaaagctagcaggttcatgtactcaggaacattatccttgattggggagcccaaaagcaccattctaaaatcagtagaaattttcttgagttgttcaaaatatttgaatgcagagttttcataataatcaactataacagcttcccagcgaatgcgctctatagtttcaatatcctctaggatagcatcaggatgggataagagaacttgtaacatcatgcagcgtctgttgtcatagaactccaggtcttgaattaatttgagagtatctttctgcccatcatacacaacaacattgataaatggtgccaagtgattgaactgaatctcccatgcagaaagagaagcaggagtcgtgacgatcagtaaaggttggcagacatcaggtaatacagtcaacgtgaacaagatggtttttgttacgtattccttatcatcaacaaggacagcaccatgagatttgcaccagaactcaagaagttgattgatagaaaacaaatgatcgttgtcaaaaccaggaggccactcgtctggtaatctctggagtttctgaaatgtcttatgcttaacctttgtttctacgggaatagatgattgcttagcagctttacggcggttctcatacttccttttaagttcatcagcctgaggagtacgcaaaaagcatgcagtttccagttcccatgttgcatgttcatagccaagatccctccatttcactaaccattcaacattacaatgctcaatgttagcacgacttgaacaaaaaaaatcatcagcttcttttgggggcataagtggccttttcctcaacaggtggtgtggctcagtccattccttcttccaatttgtcttttctttatgatccctcttattaaacaaggacagaagatcacaacctccaggggtgtcattgataacaccttccggaacccagcgattatggacatgtgccagattcttatacttcacaaggtactgcttgccattctgcattccctccttgacattccacagagactcaattccatcagcaacagagtgtattccaaacagcaacctcaggagacaaatattccagccaatgatccagacaagaaacatggtagcttcttttgcagccttctccatcacaggacctgaatcacaaacccgattaagatctcctggggtaccacaagcaacgcatatgttggaattgccctccatttcatcagatgcggtcaccttgaactgacttgaagctacttctttttgaatgctaaggggttcaccatctccatgtccactctcgggctcctcgtaatgaataggagggattggggcactttgcaatgacgatatagaattttgccttgaatgcccagtaggccgatctctaccttcaacttcaagtctactctcagcaactttgttttgtgggcatgtttcgatagatatatgttgatgtaccagtgttgctctctgccacattcccattggaagtattttccttgcccgctctgtggagcttgcttttttggatcgcttgaaaagtgatctgtaggattttgcggtcattcttttccgcttctttgataaactgctagtgcttccaaccccgctgctatgctcttctgcaacatccttagaactagcggtggtggtgctagaagatctggtgggagctcttgatgttgaagaatttgaagcattgttactagccctttttaacattccgacgcgtgctacctcggctacttcgtcttgttgtgtgccggaaagccttggggaacatctcctggaggtcggcatgtctggccctccacgcagaggagagcggagagaggccatagccctctggttcgcgccgtttgtgggtgcagagaattgtggatttccagaagtacgcgaacgggttgggtacccggtgcctgcgtttgccctggccgtactgcctccaccccttccatctctggatgttcctccgggctgagtcttccacat

SEQ ID NO: 21269 - DNA, 4459 bp, Oryza sativa
  Clone ID: TF_OsC18281_1
atgagcagcctggtggagcggctgcgggtgcggtcggagaagcggccgctgtacacgctcgatgagtccgacgatgacctcccgccgcgcggcgggggcgggaaggggagggatcggcacagcgacggccccaccgagcggatcgagcgggaggacgcggttagccctcttacggaaatggaaaagatattagactgtgaagaaacaaaacctgatgcttctgaagagactagttcttctgagtccggatcaaagaagaaacctgtcaaacgatatcttataaaatggaaaggaatatcacaccttcactgcacttgggtttcagaaagtgaatatttggaaactgccaagatatacccccggctgaaaactagactcaataacttccataagcaaatggattcaacggataagtctgatgatgactattctgcaattagacctgagtggactactgttgacaggatccttgctaccagaaaaagctctactggtgaaagggagtactatgtgaaatggaaggaactaacatacgacgaatgtacttgggaaaatgactccgacattgcagtctttcagcctcagattgaacgcttcaatgagattcagtccaggaggaagaagtctactgacaagtgcaagagtgtcactcgtgagatacgtcaatataaggagagcccgaagtttctctctggtgggacactacatccctaccagcttgaagggttaaacttcttacgctattcttggtaccataataaacgtgtaatacttggggacgagatgggtcttggtaaaacgatacagagtattgcctttttgggctctctatttgtggacaagcttggtcctcatctggtcgttgcacccctttcaaccttgcgaaattgggagcgtgaatttgcaacttgggcacctcaaatgaatgttgtaatgtattttggatctgcagcttctcgtgaaattattaggaagtatgaattttactaccccaaagagaaacctaagaagcttaagaaaaagaaatcatctccatctaatgaagacaagaaacaatcaagaataaaatttgatgtccttttgacatcttatgagatgatcaatatggattctactgttctaaaaaccatagaatgggaatgcatgattgtggatgaggggcatcgtttgaagaacaaagattccaagttgttcggtcaacttaaagagtatcatactaagcatcgtgttctcttaacgggaaccccagttcagaacaacctggatgaacttttcatgcttatgcacttccttgagggtgacagttttggtagtatagctgatctccaagaggaattcaaggacataaaccaggacaaacaagttgagaagctccatggaatgctgaagccgcatcttcttcggcgattcaagaaagatgttatgaaagaacttcctccgaaaaaggagctgattttacgtgttgagcttacaagcaaacaaaaagagtactataaagcaattctcaccaagaattatgaagtgttaactcgtcgtagtggtggacatgtttcacttattaatgttgtaatggaactacgcaaactttgttgccatgcattcatgacagatgaacccgaagagcctgccaattcagaagaagctttaagattttctgatgtcattaacattttaattccactaccagctttttattactttcaaacacatattgatgcagaggtactggagttctctgatatctcttgctgttatcttttcatttcacgtcttaacaaacacaatgccatatttgaagttgttgacatctggaggcttttagaatcttctggaaaaatggagctgcttgacaagatgatggtgaaactgaaagagcagggtcacagggttcttatttattcacagttccagcacatgttggacttacttgaggattatttaagctaccggaaatggagttatgagcgtattgatggaaaaataggtggtgctgagaggcagatacgaattgatcgcttcaatgctaaaaattctactaggttttgctttcttctttcaaccagagctggtggtcttggtataaatctggcaactgccgatactgtaattatttatgacagtgattggaatcctcatgctgatttacaagctatggcgagagcccatcgcttagggcagacaagcaaggttatgatatataggcttgttagtcgtggtacaattgaggagcggatgatgcaacttacaaagaaaaaaatggtattggagcacttagttgttgggcgtctcacgaaaggcactaatattgtccaggaggagttggatgatattattcggcatggctcaaaggaactttttgacgatgaaaatgatgaagccggaaaatcttgccaaatccattatgatgatgctgcgattgatagattattggaccgtgaccaagctgacggggaagagcctgtggaagatgaagaagaagacgaatttctaaaaggattcaaggttgctaactttgagtacatagatgaagctaaggctttagctgcaaaagaggaggaggcacgcaaaaaggccgaagctgaagctgcaaactctgacagagcaaatttttgggataaattattgaaggacagatacgatgtacaaaaagttgaagagcatactactatgggaaaaggaaaaaggagccgcaaacagatggctgctgctgatgaggacgacattaccggcctgcatgacatgagttctgaagatgatgattactcttatgatgatgatgtgtcagataacgacacaagtttacaatcaggccttgctgggaggaggggcccatattccaagaaaaaacaacgtagtaatgttgattcacttccattcatggagggcgaaggacgggctttgagagtttatgggttcaaccaaattcagcgaacacaattccttcaaacgcttatgagatatggttttcagaactacgattggaaggaatttactcctcgattgaaggggaaaagtgttgaggaaatccagagatatgctgaacttgtcatgatccatcttcttgaggacatcaatgactcaggatattatgcagatggcgtgccaaaggaaatgcgcacagatgagacattggtcaggctagccaacatatcacttgtggaagagaaggtggctgccatggaacaaggaaaaataacaaaactctttcccagctatttgttatatgaatttcctagcttagttggtggaagagtatggaaagcggaacaggatctactgttgctgaaagcattaataaagcatgggtatgcaaggtggcaatatatatcagatgacagagataatgggatttttgaggctgcacgacaagagctgaggcttcctactgctaatgaactgattagttctcactcaaacaatgagacaaacggaaatctggaaagcacacaagaaggccagtcgaacccaacgagcatgatccattacagggatacacagagaaagatagttgagtttattagaaagagataccatcttttggagagatgtttgaatcttgaatacgctgtgattaaaacaaaaacccctgttcctgatgatctcgctgaacaagattttcctggtggtcatagaccggccgttccagactacagtgaaatgctgagagaattgcctgtccttgaacctatttccaaagaagtggcgcctgaaggcacaactgatcagtcacaagtttcccatctttacaacaagatgtgctttgtccttgaagacagtgctgttcctgcactcaactcgcatttcggtgacaaggcagcttcctccggtttagccaatagcctccataagtttgaagctgtatgcgaagacgttagtcgcatcttgagatcccatgaaaatggtaccactcccaaagaggaagttatgctagatgcaagctccaaagagaccacgtctccaaaagatccagcaaccgaggtgccttcgtcagcttccaaagaagctacgcctccagtacaagatccagtcatagaggcagtgaaggaggagccacccactgttaaggcggaggacaaaatggaaatcgatagttaatttgtaggaatcataacgataatatcgaacctttttcgtctaatctaatcgctaaactggctgtagcttttaccatattacaagttgtaaactaaaaaatcactctaagctagtctcatcctgtagaggcctggacatctccaggcctgagatgaacgattaccatcaaatctgtcgtactaaaggttaccaggttttgctagctcctgccccgctgcatctgttaaatgtttaactcttcactgtcgaataggtcacttgactggtttgccatcaggatgattaggcccattgtaatgaccctactgctaaagctgtgttgctaattgtggcattgtgatgtgaaaaaaaaaaaaaaaaaaaa

SEQ ID NO: 21270 - DNA, 322 bp, Oryza sativa
  Clone ID: TF_uC-osflm202108f08b1
ttttatttagggtttctagggttttgggttgcggcggcgagtgggcgagggcgaggtctagatggcgtcggtgagggtgaaggggacagtgaagtggttctactccaccaaggggttcggcttcatcaccctcgacgacggtggataggatctcttagtccaccaattctcgctcaagttcgacggctaccgcaacctaaacgaccgatacttgcgcgtgttcttcgcttgatccggtaactacggccgttccaatgccgtggacgtcaccgagcctgtgggcggtgcgctcagcggcagatcccgtgccagctgaggaggt

SEQ ID NO: 21271 - DNA, 271 bp, Oryza sativa
  Clone ID: TF_LIB4370-046-R1-K1-B2
accgatctagggtttctagggttttgggttgcggcggcggcggcggcgagagggcgagggcgaggtcgagatggcgtcggagagggtgaaggggacggtgaagtggttcgacgccaccaaggggttcggcttcatcacccccgacgacggcggcgaggatctcttcgtccaccaatcctcgctcaagtccgacggctaccgcagcctcaacgacggcgacgtcgtcgagttctccgtcggatccggcaacgacggccgcaccaaggccgtg

SEQ ID NO: 21272 - DNA, 1710 bp, Oryza sativa
  Clone ID: TF_OsC50687_1
gcgcaggcatcgcgcggacggtgacgaggggaaaaaaaaatcaatcaaaccctaatcagatcagggagaggcgagggctagggtttcgactcctcggcgggcgatccatggcggcggcggcgaggcatcgggggacggtgaagtggttcaacgacaccaaggggttcggcttcatctcccccgacgacggcagcgaggatctcttcgtccaccagtcctccatcaaggccgacggcttccgctccctcgccgagggcgagcaggtcgagttcgccatctccgagagcgaggacggccgcaccaaggccgtcgacgtcaccggccccgacggatccttcgtcaagggcggcgccggcggcggcggcggtggcgggggaggcttcggatcgcgcggtgggggcggatctggcggtggcggccgcagctatggcggtagctggggcggggggaggagatccggcggtggtggacccggtgggggctgcttcaagtgtggggagtctggccacatggccagggactgcttcaacggcggcggtgtcggcgttggtggaggcggtggcggcggcggcggcgctggtggtggctgcttcaagtgcggcgagatgggccacatggctagggactgcttcaacagcggtggtggtggaggtggtggtggtggcggcggcggcggcggcgcctgctacaactgcggcgagaccggccacctcgcgagggactgctacaacggcggcggtggaggcggaggcgggcgattcggcggtggaggcgaccgctcctgctacaactgcggcgaggctggacacatcgcccgcgactgccacaagtgatggattcacaacaccatctcccccccccccctcctcttagatctcgcctaaatcttcatcactcctaagtcgaattattgctttagttttgccgccgatctgggtcacatggagagcgcgttgcctgctataaaggaaccgcttgccttttgtttttacctctttttctttttttgctattgggatttcggtttagttttaacttctgctgctgctgctcgtgtgatgatgcttttgctgctatgagttggtctggtcctctggttcaggttaagaagacgtgatgtctggattggttttgtgtgttgggcgaggagattgacaaaatctctctcctttttgtggtttccccgagatgaaaaagatgattattgtcggttactccttaatatataccaaattaaaaaataaataagcaccgggcggcccccgttgatctttatttacctttctactctatattttcttttttgtcgcgcccgctccccaattcaatccacattcgattgcacttattctctctacacgcccccgccttttaggcgtgtgcgttgagaaacaacgcggtaccaatatctcgcgcctaatctttgttgtaatcatcgggttcggtgtgggcgcgttatggtttgcgggtctatgtctgctctttctcattgccccctactattgcgccgggcaagcgtatcagtatatattattaatatatcatgttattaaaacaaatttacattatatttttattacccacacagaacctcctctgccgctcttttatgttgtcatgctgttgtcgactcacggatgacgccgaggggccgagctcccttcttgtgctcgttaattcttgagatacctcacattcaacatcacaccg

SEQ ID NO: 21273 - DNA, 928 bp, Oryza sativa
  Clone ID: TF_OsC951_11
atggcgtcggagagggtgaaggggacggtgaagtggttcgacgccaccaaggggttcggcttcatcacccccgacgacggcggcgaggatctcttcgtccaccaatcctcgctcatgccccgcggcttcccccgcctcaacgacggcgacgtcgtcgagttctccgtcggatccggcaacgacggccgcaccaaggccgtggacgtcaccgcgccggggggcggggcgctcaccggcggatcccgtcccagcggcggcggggaccgcggctacggcgggggcggaggcggcggccgctacggcggtgaccgcggctacggcggcggtggcggcggctacggcgggggcgaccgcggctacggaggcggcggcgggtacggcggcggcggcggcggaggcagccgcgcgtgctacaagtgcggcgaggagggccacatggccagggactgctcccagggaggaggcggcggtggtggctacggtggtggtggcggcggctaccgcggcggtggtggtggcggcggcggcggcgggtgctacaactgcggcgagaccggccacatcgctcgcgagtgccccagcaagacctactaggcgctgctcgcggcgtcagatccagctccctcccatgatgcgttttgctccccctccctcactgaatcaccgagcagcgggtgatcagttctatcttattagtagtcgtagatctcgttaggaaagctatggatctatcggttcgtcgtcgtcgtcgttctatgtaatgggatgggagtcttggagtggtttaatctttttgtttcgttgggtcggtttgagagacaagccatggatttgcactgtctgatctatctatgaatctatctattatgaaccgagaaaaaaaaaaaaaaaaaaaaaaagggcggcgctcgcgatctagaactagcaa

SEQ ID NO: 21274 - DNA, 687 bp, Oryza sativa
  Clone ID: TF_LIB4309-007-Q1-K1-F2
gatcctcacaacccccacaccacatgggctgagtagctagttagctcctcttctcttcccctcctacctccactcctactccattatccagcagttcgatcgatccatggctatctagcttctgatcttgatccctttcttcttctcatcgtccttgtttgttcttattcctagctacttagcgagatctatcgatcagttcagacctcttaattcctgtcctgatcaatcacgttctgtctgtatcctttgattcgtcgacaatcctagtacttcatggagcagtgttagttagctagcaaaagtagtactttcatcaggagtgtctatcggcaaatagctaggttttctggcttaacacgtactttcattaatttggaagaacagcaagacaaagaaactgattaagatcagcgagtaatcgatgatggcaggagctcccccgatgcatatctgcatggactccgactggctcaagggcatcgtccccgaggagcacgggatggggtcgtcgtcgccgtcggcggagctgatcgcgtgcccgcgggcgccgatgcaggcggcggcggcggcggccgaccgccggcttcgcccccagcacgaccagccgctcaagtgcccgcggtgcgagtcgacgcacaccaagttctgctactacaataactacagcctctcgcagccgcgcta

SEQ ID NO: 21275 - DNA, 1296 bp, Oryza sativa
  Clone ID: TF_OsC69565_1
tcactccctcgcgctcgcgctgcctcgcaggtccgccgccgcgccgctgccgacctgcggaggcgggtcgccgacacccagcacctccgtcgacgcgacgctgcggcctgtctgcgactcctcctccttttggcccagccggttccaccactgaaccagagcatgcacttccttcttcagctcatcttcttcctctttctcagtgcacttctcaaacttccatgcacacaccatcaccaacacaacgacgaagactgtggttgcactggagtaggaggtgtatcctccagcgaggtgatgatcgccatacatgccccttgggtagccttctctcttcgatgatggcatcgcatggtggagctctccaccgtcttcgccgccgccgctgccatggccgtcgccgtctaggcctagctggaacatccccggcattgccattgccggcggtggcgccgccatcgccgcctggtgatccatggcgtggaagaacgggaagctctgcatctgctgtagtctccattgctcgaggccggtggcggcgccgacggagtagcagccggccgcgtcgacgggcggtggcttgccggcggccgccgccatgccagagaaggtggagccgaggctcatggcgtcgaagtcggcgaggcggagcagcggcggcaggatggagaggttgccgcccagcatcgccgggagggcgggcgcgttgggcgtggcgcaggtggaggacgtcgtcgtcgtcgtcgtcgaccccgctggcgtcgagccggcggtggtggtggcggctgaggcggagcccgccgcggacgccggcttgggcttggcgcgcttggcgtggcggcggtagccgccgccgacggggacgttgcggagcgcgccgccgcgggtccagtagcggcggcaggcgcggcagaagtggcggggctgggagagggagtagttgttgaagtagcagaacttggtgttggtggagtcgcagcgcgggcacttgagccccggctccggcagcgggatcctcgccagccgcgccctctccgacatcgacatcggcttcgccggccccaccgcgccgcctccgccgccgccatcggcaagcgtgcccggaatcattgactgctgctgcagaagctcatggctattgccgtcgccgccgccgccgccgcctccacaaccggcggcgacctgatgatgctggtggtggccgtgagcatgttgctgctgctgctgctggttgtggttgttgttgttgttatcattccagctcgaggaatccaggaaggcaggggggaagatcat

SEQ ID NO: 21276 - DNA, 1703 bp, Oryza sativa
  unsure (1)..(1703): unsure at all n locations
  Clone ID: TF_OsC1630_4
ctgatctgcgctcgatcctttctcgaatcggtgcatgcaacaccggcgacatgtctacaattaagatctctcaccgggggcccggccgggtcgattttggcttctgctctctcttcttctggatcttgttgatgtgggtgtttcttggtcgatccttcttgtttaatctgcctgtgccttgatcttggcgcttgcttttcctctgatctatgcacggatcggccatattcttctcgctctgtgtgtatgtgggggctagggctagtgaagcccatggaagagatgctgatgggtgcaaatccaaatcctaatgggagctcaaatcagccaccgccaccgccgtcctcggcggccagcgcccagcggcctatcgccccaccggcggctggagcggccgccggcgcgggcgccgccggagctggggctggcacggagcgccgcgcgcggccgcagaaggagaaggcgctcaactgcccgcggtgcaactcgacgaacaccaagttctgctactacaacaactacagcctccagcagccgcgctacttctgcaagacgtgccgccgctactggacggagggcggctcgctccgcaacgtccccgtcggcggcggctcacggaagaacaagcgctcgtcgtcctcggtggtgccgtcggcggccgcgtcggcctccacctccgcggcggtgtccggctcggtccccgtggggctggcggccaagaacccgaagctgatgcacgagggagcgcaggacctcaacctagcgttcccgcaccaccacggccgcgccctgcagccgccggagttcacggcgttcccgagcttggagagcagcagcgtgtgcaaccccggaggcaacctggcggcggcgaacggcgccggtggcaggggcagcgtgggcgcgttctcggcgatggagttgctgaggagcaccggctgctacgttccgctgccgcagatggcgccgctagggatgccggcggagtacgcagctgcggggttccatctcggcgagttccgcatgccaccgccgccacagcagcagcagcagcaacaagctcagaccgtgctcggtttctccctggacacgcacggcgcgggtgcaggcggcggctccggggtgttcggcgcgtgcagcgctgggttgcaagagagcgcggcgggcaggttgctgttccccttcgaggacctgaagccggtggtgagcgccgcggctggcgacgcgaacagcggcggcgatcatcagtacgaccacggcaagaaccaaggtggtggcggcggcgtcatcggtggccatgaggccccagggttctggaatagcagcatgatcggcaacggcagcagcaatggcggcggcggcggcggttcttggtaaggtggtgcgagctgctactgcttgcccgccgccgccatgcatggctcatgcatgcacgcgtggtggtcagcagctagcagcatgtggagatagagaaacgagatagagacaaggggggttaataagcctgtggtgattagtgttacatatggcgttttgtttctcaaaaaaaaaaaaaaannnncggnntcangnnnnnnnnnnnnnnnngnnngnncaagngtgtgtggttaattatcggcttgggggctggctaactacagcaggatacacagagttttnaagggtggtgaacttggtgatattatacagctgctgatctattcacc

SEQ ID NO: 21277 - DNA, 2505 bp, Oryza sativa
  Clone ID: TF_OsC1630_7
ctacccatgatgtaattctgactgcgctctctttccacaagtttttttctgaccctgcccctgttgctgctcccaccgttcatttccaaggacaatgtccaacggatcccactccgattgaaatctctgagtctcatatgggcccatatatcccatctcccggttactgttcaagtttaacacgacgatggcagtgctaccgccgtcgctgtgggcctctccctgccccaaccacaggacattctcttctctctctcccttctgctcaagaaatccaccagctgctgcatcaggaggtggagctcgctcgtcgtcttcgtcttcgttgcgcttcgtctcctcaggtgcccggaggagcaagaattgttgggggggcagcgaggtagacgcagttggagagccctcttgcatggatgcagcccactggcaccaggggctagggctggtgaagcccatggaggagatgctgatggcagcgaacgcggccgccggcgcgaatccgaatccggcggcgacggcgccgtcgtcggtgactgggggcgcactgaggggcggcggcggcggcggcgcgccgccggtggcaggtggcgcgggggcgggtagcacggagcggcgggcgcggccgcagaaggagaaggcgctcaactgcccgcggtgcaactcgacgaacaccaagttctgctactacaacaactacagcctccagcagccgcgctacttctgcaagacgtgccggcgctactggacggagggcggctcgctccgcaacgtccccgtcggcggcggctcgcgcaagaacaagcgctcgtcgtcgtcggcggcatcggcgtcgcccgcgtccgcctccacggcgaattccgtcgtcacgagcgcgtccatgtccatgtccatggccagcacgggcggcggggcgtccaagaacccgaagctggtccacgagggcgcgcaggacttgaacctggcgttcccgcaccacggcgggctgcaggcgccgggggagttcccggcgttcccgagcctggagagcagcagcgtgtgcaaccccggtggcccaatggggaccaacggccggggcggcggcgcgctctccgcgatggagctgctccgaagcaccggctgctacatgccgctgcaggtgccgatgcagatgccagcggagtacgccacgccggggttcgcgctcggtgagttccgcgcgccgccgccgccgccacagtcgtcccagagcttgctcgggttctcgttggacgcgcacggctcggtgggcgggccatccgccgcggggttcggctccagcgcggggttgcaaggcgtgccggagagcacgggcaggttgctgttcccgttcgaggacttgaagccgacggtcagctctggcactggcggtggaggcgcaagcggcggcggcgccggcgtagacggcggccatcagtttgatcacggcaaggagcagcaggccggtggcggaggcggcggcccaggcgggcacgacacgccggggttctggaacggcatgatcggcggcggcagtggcacttcttggtaatgcggcggcggcggccatgcatgcatgcatggctcatgcaaaagcctccgcgctgtggtggcgtgggttcaaattggagataggcagtagagacgacgagggttttaataagaggttggcattggcgataatccatcactgattcactgttactccgtataaggtgttttgatctctcttcttcttctttcccggtgttgcatcatcatcttggtgttctttcttctcccttttgctgtctttcatgtgattgttgatcggctttggtgctcaacacaacaaccgagctcacatgattcctcaaaaggatcatgatgcatgatcgatctctttctgaattctgatcttccagttctctccattgatcactgttactactagtcatcgcttgatcgatgtgtggttagagagctgcatgcgtcagtgcagtactagactagtagagcatgggaagcttctttttaggctggcttcgagtccgatggcgtgtacgtacgtggtacacaggcatgcatgtggtgtgtagctcattggttttgcaggggcattgtgaagcgaaggatgaagggaaggactcggttggggaggaagaaagaaaaatggacccccatcaccatgcatgtatgtcaaacttagctacagtatgtttggtaacggcaatgcatcaagcttttggttgtagatgtagatcttgggaagggtttgcagctgatctatgactttgtgttgatccaaacagtagtgattccatccttttctagcttaacttgttattgttgttaacttctatgggatgtgtagaggtcatataaagttatagtagtagtagttgcaaaaggggtttttgagcgcatgtaatttaatttgtatagtactcctactatcttattgttatatttacagccaaactataatgcacatctttttgctccttgtttctgaaaaaaaaaaaaaaaaaa

SEQ ID NO: 21278 - DNA, 1320 bp, Oryza sativa
  Clone ID: TF_OsC4233_1
ttttgcttttcttttgtgtttttttttcttgttgctctgtttttttttttttagaaaatagcaggaccattgtatgaaaaaaaaaagcccaagccttgataggagttatacacatgaaaaacaacccaaacttggttgagttagcccctctcgagagtaaaacacggccactaatctcaaaaagctaagattaacgtcatcattttcaccatataccccacgcgcaatttactaattaatcggaaactgatgaaatcatcatcgggtgtagttggaaacccccacacccacctgagccgccgccgccgccgccgggcgagtgggctcatgggaggttgaggaacacggcggtcgggtccgggtcggcgaacccggcgccggccggccagtaggacgccatgtcgaacgccggcggcggccactcgaagtgcaggtccgggtcggccagactcttggtgatggacgggtagtcggagaagtcgaggccgagggtgacggcggcggagtccggctgcaggaggtccgtgaacgagtcctcctccacggccgggacgacgagctccgtggtgatctcgctcgtggtgtcaggcgccggcggtgtcgtcgtcgttgtggaagtcgtcgtcttcttctccgacgtagcttcggtcgtcgtcttggcggcggagtcagcggcggcttcggtgaggacgggggtggtggcggcgaggggctcgggagtcgtgacgcggcgcttcttcgacgtcttctggcgcttggcggcgggtgctgcggcggcggcggatgacgaggaagacgacgacgacgaagacgaggacttcttgcgcgtgccgccgccgacggggacgttgcggagcgtgccacccttggtccagtagcggcggcaacacttgcagaagtgccggggctgggaggtgttgtagttgttgtagtagcagaatttggtgtcccgcgactcgcaccgcgggcacgggtcaccctcccccgccgccgccgctgccgccgtcgcagccgggccagcggcggcagcagcagtcgcagccgaaccaggctgtggcgtcgcgggagccgccgcgtagcccttgggacggcgcaggtcgacggtggcgaactgctgcgccggccggcggccggtctccggctgctgctcctgcatgcgcggcggcgccgtggctgctctggtccctccgcgcgcgcgcgccggtggagtcgggaggaaccgaggagcgggggcaagcaaatcgtcgaacgggtggtgggcggttggcggaagcgggagtctcttatggtcgcagtcgccctcgtgccgaattcctgcag

SEQ ID NO: 21279 - DNA, 528 bp, Oryza sativa; identical to SEQ ID NO: 11688
  Clone ID: TF_OsC373348_1

SEQ ID NO: 21280 - DNA, 1116 bp, Oryza sativa; identical to SEQ ID NO: 11690
  Clone ID: TF_OsC340203_1

SEQ ID NO: 21281 - DNA, 1106 bp, Oryza sativa
  Clone ID: TF_OsC23687_1
gcccaccctcaagtggggatcgctatcacgcgcccacagaaactgcagattaagcggcagagattgtagatagcgcgaggttattaaggccagcagtctgaccgcgcgcggcatgcccttctgctgctgcaaccgaccaaatggctcctgcggttgcctcctccccgtcactcgtgctctccgccgccgccgccaccgcctccaacaagcgcccggccgattccgatgcctcgccgccgcaccagggagatcgcacggggcagcaggagaagaagcagcagcagctggagtgcccgcgctgccgatccaccaacaccaagttctgctactacaacaactacagcacgtcgcagccgcgccacttctgccgcgcctgccgccgctactggacgcacgggggcacgctccgcgacgtgccggtgggcggcgcctctcgccgcggcggcggcggcaagcgccgcagggtctccgccgacgccgacccttcctcggcgtcgccgccgccacccacgacttccaccacggacgcgtacgccgacctcccagccggcttcccgttcctcagtgacggcgccttcctgccgcagttcggcctcgccggcgttgcgccggccgcgttctcttgggcatcggctgtccctgacttgtacaactgcgggatcgcgccgtgggacgatggaacggcggtcaccggcgcggcgtgggacaacttcgccgacatcgccggccttgatctcagctggccgccgccgggtaactgacgaacagtacacagctggtcgctcgtgttttggggggctccggttttagcaaagcagcctcaagtagtgcgttcttcgatcggtatgcaggtagtgtgttcttcgatcggtatgaagtatattttgctgagctagggattatgatataattattgggaatgtaattaagcagctcaattatccaacgtggtgtttgcagttttcttctctcaccaatttcatacgcttgcacaatgatgtggtgattatcattgggatcagtgaatcgtgatctgtagctggaagatgtgtttacgtatgtgcagtgttaatgacaataataagagtttgttgccatcaaaaaaa

SEQ ID NO: 21282 - DNA, 1482 bp, Oryza sativa; identical to SEQ ID NO: 11695
  Clone ID: TF_OsC265407_1

SEQ ID NO: 21283 - DNA, 1907 bp, Oryza sativa
  Clone ID: TF_OsC50405_1
gccacgcgtccgaaagatttcaagaaatccaaccaaaaatctcgcgctctcctatcctcgcgctccgcatgcctcctcctccttcggcgccgcatgagcgcctccgggttggcgttggcctgtcgtctccgggaggagtaatgcagagtgcggcggggaagtccgaaacggagtttgttcgttttggagcatgggggagtgcaaggtgggaggaggaggcggatgcggagtctgcttgatcaagctgttcggggagaccatccccgtgccagagcccggcgcctgcgcccgtggcgatggttgataaggaccttcaacacagtggcagcagcacgactgaaccgaaaactcaagagaacaccgttcaagactccacaagtccacctccgcagccagaggtcgtcgacaccgaggactcttcagctgataagaactcatcagagaatcagcagcagcagggcgatacggccaaccagaaggagaagctgaagaagcctgacaagatcctgccgtgcccccggtgtagcagcatggacaccaagttctgctactacaacaactacaacatcaaccagccgcgccacttctgcaagaactgccagaggtactggacagcgggtggtgccatgcgcaacgtgcctgtgggtgcaggccgacgcaagagcaagagcgtatcggccgcttcccatttcctccagagggtcagggctgctctgcccggtgatcctcctctctatgccccagtgaagactaatggcaccgttctcagcttcggctccgacctgtccaccttagacctcacagaacaaatgaagcatctaaaagataagtttatcccaacaaccggtatcaagaacaccgacgagatgccagtcggtttgtgtgctgaaggattgtcgaaaacagaagaatcgaaccaaacgaacctaaaggagaaagtttcagcagatagatctccaaatgttgcacaacacccatgcatgaacggaggagccatgtggccatttggcgtggcaccaccacctgcttattacacttcaagcattgcaattccattctatccagctgcagcagctgctgttgctgcatactggggctgcatggttccaggagcttggaacgctccatggccaccgcagtcccaatcccaatcggtttcatcatcaagtgctgcttctccagtatccacaatgaccaactgcttcagattaggaaagcaccctagagatggtgatgaggaactggatagcaagggtaatggcaaggtgtgggtgccgaagacggttcggatcgacgatgtcgacgaggtggccaggagctctatctggtcgcttattgggatcaagggtgacaaggtgggagcagatcatggcagaggatgcaagcttgcaaaggtttttgagtcaaaggatgaggcaaaggcatcaactcacacagcgatcagcagcttgccattcatgcaggggaacccggctgccctaacacgctcggtgaccttccaagagggatcttgacttgaacaacgccttggaaatttttatgctgccttctgctgctataaagacatagcgtgatacagctgaaattttgtacattagaggattgtaaagtaggtatgggagatggagtgtcagggtgtataacttaacatagctacaagcaagcccagtagctgtattagataacttgtacatagctatgtgggtttgagaaagatagggagagcaagttccccttataatatgtagataaataatataatgatttgaatatttagatcaaaaggaaaaaaaataacaataaaaaaaaaataaaaaaaaaatgtctgactccagggggggccccctgccccactgtagcactggaaatgtgatacttttctgcaataaaaaaaaaaaaaaaaaaaa

SEQ ID NO: 21284 - DNA, 1338 bp, Oryza sativa
  Clone ID: TF_OsC1634_3
tttttttttttttttttttttttttataaatgtctcctttatttattattgatattaccatccagtatgcatgtatacactccccaatttatccatgcaagttctataacaaaacacacactgacacacatgtaaggtgtatagatagtctacagcttgcaagaacatgagttatatgtgttccgatgtatctatgtcctttttcttccatcgggcggccggcttgctaggcgagttcggcaaggtcatcatgcagtgcggcgtttccgaggggacacaggacaaggcgcagggcttcgtcgtggcccgggagaaggttgaaccggaggaggaggaggaggaggagcagcgtgtcccggctgctgctacgtcggggcagcgcgcgtcgatcaagcgggaggccgcggaccgcgacgaggagcaacggcaagggggcggggacgcggcggggcagccgacgcagcggcggttgcaggactcggccgaggcgcgtgcggccgccgcggcgccgctgccgtgcccgcggtgccggagccgtgacaccaagttctgctacttcaacaactacaacgtcaaccagccgcgccacttctgcaaggcctgccaccgctactggacggccggcggcgcgctccgcaacgtccccgtcggcgccggccgccgcaagaaccgtcccctgggccccctcgcggtcgcccaccataaccaccaccaccgcgcggccgccggcttcgtcctcggcttccccaacccgtcctccccaacctccccgtcgccggggatcacgaacacagatcgactcccgaccgcgttcttcctctacaccgaccggtggccgaccccggagagccgccgcgttcggaaccttccatggggggatcttgaagaccatcttggaagagattttcttttatttgcctgcagcctatctgctggcttcttgaacttgaagcactgaagttaggtggtcctagacaatgctctatttttttttttctcagtcacagcatgggtattctatctccatttgggggaagtgtatgacatagctacttgtggagatatagttgtaaccataggtagcatgtaaatactatttagaaaatagctgtttaaatggatatagctagtatttggtttggagccaggagataagtaaggcccctggttttgtagataaataagaatcattagatggaatatatggcttgaggtatttcatttcttcatcaatctcctttaatagttttctaaggttgcgggtgtaatgtaagaatggaagtgatgaggttgcggaggcaagttgcgaactccgtgcaaaaaaaaaaaaaaaaaaaa

SEQ ID NO: 21285 - DNA, 1282 bp, Oryza sativa
  Clone ID: TF_OsC1630_5
atggctaagctagcttcatgcatgactgcatcgatctattcaacagctataaatccgaggaacaaactaaacagaaataataagggcatcgtccccgaggagcacgggatggggtcgtcgtcgccgtcggcggagctgatcgcgtgcccgcgggcgccgatgcaggcggcggcggcggcggccgaccgccggcttcgcccccagcacgaccagccgctcaagtgcccgcggtgcgagtcgacgcacaccaagttctgctactacaataactacagcctctcgcagccgcgctacttctgcaagacgtgccgccgctactggaccaagggcggctcgctccggaacgtccccgtcggcggcggctgccgcaagaacaagcgcgcgccgcccaagaaggccgccgcccacgcccagcccgcggtggcggtggcggcggcgctgcaaggccgccacatggagaccggactccacctgtccttctccgggatgcagcatcatcttgcgccgccgccgccggcggcggccaccgcggccgacccgctctgcagccttggactatttgactggaagcagtacgaccccgtcttcgccggctccggtggcggcggctcccccgtggcggcgctggagagcgctggtggctcggaggcgcagttcatgggtgctggcatgatgggcattggcggcggcggcgtcgcggagtaccatgcgctgagcgcgctccggttcgcggcagggctcggcgatcacctggcgctgccgttcggcgcggtgcgggcggagcacgacgccgtcgaggtgaagccggtggcggcggagaggctgctgtcgctcgagtggtgcggcgaggcgagccgcacggcggcgccggagagctccattagctcgctgggcgggctgggactgtggagcggcatgatcggcggcgggcaccatcaccatggctcctccgctgccatctgaggcgaagcaagctagcatgcatgcaatgcgaaggacacgtgatcgaacgccgcgagccgctgcaatctgtgcaagaaggaaaggattagcggtttgctaatagcattaacaaagtatgactacgtagaattgtttggctttaatttctttgctgctgttttccatcttctcccccactggtaatctcctacttattttcgtcgttttgtctttgtatttcccaactattccaagtcctggtgatgttctgctgttgttccagctcatgcatattgtcgtgcatggttctgttaaacacgatgctggcttgctagagatt

SEQ ID NO: 21286 - DNA, 1212 bp, Oryza sativa; identical to SEQ ID NO: 11694
  Clone ID: TF_OsC66169_1

SEQ ID NO: 21287 - DNA, 1627 bp, Oryza sativa
  Clone ID: TF_OsC197627_1
ccgggctgcaggaatcggcacgaggcaacaccatcatctgatccatttccacaaagcttctgaaagccaacacatacctcactgccttgccttcttctcagcttcaagaagccttttgagcttgtgatttctacatcatccatccatttcatcaccatgatccaagaactccttggagggacaaccatggaccagctcaagggcgccagcgctctgaaccacgcctccctgccggtggtgctgcagcctatcgtgtccaacccgtcgcccacgtcgtcgtcgtcgacgtcgtcgcgctcgtcggcgcaggcgacgcagcagaggtcgtcgtcggcgacctcgtcgccgcacgggcaggggcagggtggcggcgcggcggagcaggcgccgctgcggtgcccgcggtgcaactcgtcgaacaccaagttctgctactacaacaactacaacctcacccagccgcgccacttctgcaagacgtgccgccggtactggaccaagggcggcgcgctccgcaacgtccccatcggcggcgggtgccgcaagccgcgccccatgccggcgccggtcgccaagccgcccatgtcttgcaaggccgcgccgccgctcggcctcggcggcgggccagtgtcctgggcctccgggcagcaggccgccaccgcgcacctcatggcgctgctcaacagcgccaggggagtgcagggccacggcggcagcaatgtccaccggcttcttgggctggacaccatgggtcacctccagatcctgccaggcgctcccaatggcgccggcgccggcacggcggcgtcgctctggccacagtccgcgccgcggccggtcactccaccgccgccgcacatggactcccagctcggcatggggacgctgggccaccacgacgtgctgtcgagcctcggcctcaagctgccctcgtcggcgtcgtcctcgccggcggcgagctactacagcgaccagctgcacgcggtggtgagcaacgcggggcgcccccaggcgccgtacgacgtcgccaccgcgtccctcccttgcaccaccgcggtgacctcactcccgtcggcgctgtcgagcgtctccgccgccgcgccgaccagcaacacggtcgggatggacctgccacccgtgtcgctcgccgcgccggagatgcagtactggaatggcccggcggcgatgtcggtgccgtggccggacttgcccactcccaacggcgcgttcccatgagatagacgacggcgacgacgtcgtctcatgcaagcatgacattactagctagtgtagctctcgatcggtttagctttaatcatcatcgatcttgtgtggtttcggttaatcagtgtgaggactctgaggggtttaatcaagggtgttttagttactggtgttttggctagtccgtgggcgccggccgccgcccctttttttctgtttacttattattaggtttttacctagggtttggtggtaactgggtatagtgtttaagtcgtgatcaatgcatagatggggttgtactatgagatgtgtacgtgtgttgtcggtttcgttcaggttgatccatgtatggatgtaaggtttacattccctgcaaaaaaaaaaaaaaaaaaaaaaaaaa

SEQ ID NO: 21288 - DNA, 979 bp, Oryza sativa
  Clone ID: TF_OsC4233_2
ccttgcaaacttaagtgataataaatcttgtagctcagatttaataattacatagttcgttcatcttcctcctaagttagcatttggattggaaaataaactagaatctgatgaaactgagatggagcagaggtgaaatcaagaacttgatcgataaaacttggaagttttttgctaaccatcctctcgttcgtccgggagaggcttgtcatggcaggttaaggaacagtgatggatcggtgtcggcgaacacgccggttggccagtacggcccgaggtcgcagcccgacggccactcgaacgggctcgtgtccaggtgctccttcccgccgccgccgccgtcggcgacgccgagcccgagcgccaccgccggctgtgtcgctgccgccgcggtgaggtcttccggggctttcttggttgtggcttctggtgccgtcggtgcggctacgtcggcagcgtcggcggtggtgggcggcggcggcgcaggcacgggctgaggagggggcggagagacgcggcggcgcttggagttcttggagcgcttggggctcttggctggcgaagaaggcgacgacgacgatgaggcggcggcggcggcggcggaggaggaggaagtcgagctcttgcgggagccgccgccgacggggacgttgcggagggagccgcccttggtccagtagcggcggcacgacttgcagaagtgccgcggctgcgacgtgttgtagttgttgtagtagcagaacttggtgtcccgcgactcgcaccgcgggcacgggtcgcccacgccggctgccgcctcctccgccgccggcgtcagctgcgccgccgccgggtaccccttcggccggcggaggtccacgcccgcgaactgcggcgccggccgtcgccccgcctcctgcatgcgcgcccgcagaaaagctcggacgaacacgcgcgcgcgctctctcgtcggtgcagtgcaggcgagcggacgcgtggg

SEQ ID NO: 21289 - DNA, 1002 bp, Oryza sativa
  Clone ID: TF_OsC191412_1
atgctgccgtacgcgccgcggccgccgtcgctgctggtggatcgccggtacaagcagggcgccgaggcggcgcccaactgcccgcgctgcgactcgcccaacaccaagttctgctactacaacaactacagcctcagccagccgcgctacttctgcaagggatgccgccggtactggaccaagggcggctcgctccgcaacgtccccgtcggcggcggctgccgcaagaaccgccgcgggaagtcctcgtcgtcggcgcggtcggcggccgacgccgtctcgagcggccgcgacgcggcgttcggccaccggttccccggcccggtccggcctgacatggtcctggaaggcatggtcgggaacccggcgaaccccggccaggcgatgcccgacgtcgccgccgcggcggacggctcgaccatcgacctcgcaatgctgtacgccaagtttctgaaccacccgccgaccgacgccgggctcggcgccgtcacgccggagtcgggagggcacgtcgacgaggcgttcgacacgttcagcgcgtccagcgatctgagccccggcatcctggcggcggcgtcggcgcagttcgacccgaaccaggacgggttcggcgagtggtccagtccagcgagcggcaacgacccgacgagtactgcaaccaccgcaaccacctccatgctgtgcacggacgcgagcgtgcaagccgcgctcggcgagctcaacttcgccatggatcagagctgcttcgactcgctaggtttgcccacggacgtcgccggcgccggcagcctgtcgtcgtggtgctcgatcgtgccgagcttgtcgacatgggaggagcccaagtacgactcgttggattcgtttcccgacgacgccatgagcctccatgagtgcatgatcggcgctcctgatcatgattggagcgtggattgccaaggattggaggctctttacatgccataaatatatatacgattaaaattttttcttctaaaaaaaaaa

SEQ ID NO: 21290 - DNA, 2812 bp, Oryza sativa
  unsure (1)..(2812): unsure at all n locations
  Clone ID: TF_OsC8761_1
gcaagagttcttgtaaaaatgccaggacaggtgatggaagctgcgctgcagcagctgccggcgtccatggcgtcgggatcgctcctgctgcctcccgcctgcctccagcatccgcttccggcggcggcggcggcgtcaggcggcgtgggagggagtagcagggagcagtgcccgcggtgcgcgtcgcacgacaccaagttctgctactacaacaactacaacacgtcgcagccgcgccacttctgccgcgcctgccgccgctactggacgctcggcggctccctccgcaacgtccccatcggcggctccacccgcaagcgcccccgcccccccgtgcgccgcccgcccgtccacttcaccgccgccgccgccgccgccgncgncgntgcaccgnctcatcaccatcatcatcatcacggcgggccgctcacgccgccgccggcgacctcttcttcctcgcagcaggcgggcctgctcggctcgctgttcgcgctcggcgcggcgcagcttccgcaccgccgcctcgccatcgccattcccctcgcttccctcctcctcccgacaagcgccgccatgctccagcctccgattccccagaccaagaaacgggaggatggtgggggtgcggaggagggcgtccggattcgaggccttccctcccctacctggtaaggtgttcgtcgaggaggcaattggagctgaatatggggaaggttttgagacatttaggatggatggaccactcaaggtcgatgtggattatctgaacgaaaaattgcaagaatgcttccttcaaaggataagacatgctatgaagccagatgaagcatgtgggcttattttctcatgggacaacgtaattgctgatacagactcactaaagttggatgcctggagacagcttgctttggaagaagattctcagtggtatattgtctgcaaggtttgtgtttacctcactgccagggatgctaccttgatattgctaataaatttatttcatgcagggaaggatatcccaaatgctggtcatgtccaaaagagtattcttcatggtgctgccgaccatgtgcttagaaaggttttatgttgggcaaaagatgaaagtcaaatggaaagactgaaggcacggcttatagagttatactacgaaaatctcttcaaacttgatacaccagtaaatggattgcgggaatggttggatgctgtccagacagcaggcatcccttgtgctgtcgcatcgtccctggataggagatgcatgattgaagctttggatcgaatggaactaagcaaatacttcaaggcaattgtgactgacgaggatgatatggagtcaatagcacataggttcctctcagctgctatgaaggcatgcttctgctccgcttcaaaatatttagctgttttcaggatatactgctcacatgtttgtcaaacgtttctcttagaggcgtaaccgctgctcacaactgataccatgatggcagttgcactcattggtgctcatcctgcgtatgagctggtacaggctgatctcgccatcgcaaaagtacagggagctctcggtcatcacatcgcaaaatacagtgagctctcggttatcaatctcagaaggttgtttgcacataaggggttaagtttcatggacttgcagaagcagatcatcgagagatataggcaagagctggaacttgctgaacagcttgagcaaatattccagaggtcgcctcctagcaggctagtctttttgcaatgggagatttgctctggtccagcaaaaagtatctcgagacggcggattcggcgagatgtggagatcgaatctgtcgccgacgactctgccaattctgtccagaacatcaggctggtgattgacatcggcgacaggacgatccaggtccctctcaatggccacaccgtcgcgcagaacatcggccgtcaggctgccgccgccgtcgccggcgattcgtcagccggcggtgtcagtgagaaagccggtggcggcggcgaggagtggctgcaagaacaggacggcttgttgagcatgcgcgggtggctgatggcggtggccacgctgttcgccgccatggcgttccaggcggcgctgcagccgccggggtggatgccgaggccgcgcgactggttcgcggcgctgctcgccgccgacccggcggcggccgccgtcacgagggaccaggccgggaaggcgatgctgtacctgatcgtcaacacctgcaccttcgccacgtcgctcgccgtgctcctgatgctgctcgccgtgggcgacgccggcggcggcggcggcggatgcgcgtcgaggagggtcaccgcgaggctgatcgccaacatgatgacggccgtggcgctgttcgccgcggcgacgttcgcgctctgcgccgccgacgactaccggctcatggcgttcgtcggcaccgtcgtcgccgtgtacgccgccgtcaccgtcgtgttcgtcaggtgcaaccttgctctgccgttccggagaggcggcggcggcggcggccatggttgttgtagctgggtgtcaagattgtaagtcacctcccaagaggaagctgacagtagacaccatcttctaatgaattctttacctcccaatactgaaaaagagagaaaagaaaatagcaccatgcatcctccctactgtgctgtgtatatagcattccatgttggttagattacatagaaagctgatgttagatgatctgttgttgcatacctccattctggatgtactagatgtaaactgatgtttaaccattttaatcatgataaatactaccagtctacc

SEQ ID NO: 21291 - DNA, 522 bp, Oryza sativa
  unsure (1)..(522): unsure at all n locations
  Clone ID: TF_LIB4309-022-R1-K1-F5
gctcaccacttcacctctctctctctttcttctccctgtaacctcccaattcaaaaacaattataaaccaaacttgattaatatatatttctttatcatcatctcttcgaaatgcaagatattcatgatttctccatgaacggagttggtggtgggggagaggagaagaggaaggtttttnnntggangaatcggnggnggaggaggtggtgatcgaaggatgagagctcatnagaacaatatacttaaccatcatcaatctctcaagtgtcctcgttgtaattctcttaacacaaagttctgttactacaacaattacaatctttctcagcctcgtcacttttgcaagaactgtcgtcgttactggactaaaggtggtgttctccgtaacgttcccgtcggaggtggttgccggaaagctaaacgttcgaaaaccaaacaggttccgtcgtcgtcttcagccgacaaaccaacgacgacgccngatgatcatcacggggaggagaaatcgagtccaggatc

SEQ ID NO: 21292 - DNA, 1449 bp, Oryza sativa
  Clone ID: TF_OsC1633_1
gcccctccttccttgatggtcttggagctccaccgcggtggcggccgctctagaacgggccgctctactgggcgcccggcctgcgggggtggagctagctcgatctcgccgcgcgcgctcagctcgtcgacaaggcagcgtgcacccaccaagatagcgggatgatccagtgagcgcgtggaggcggtgtttgattctagattgttctagaaccgaacgagcgagcttagctagctagctagctgctgctgcttcgatcgatcggtcgttgcctcatgcaggagttccagtccatcccggggctcgccgggcggctgttcggcggcgcggcggcggctgacatccggcgcgcgcaggcgcagcagggcccggcgtcgcggtgcggcgggataccgtcgccggaggcggtgaagtgcccgcggtgcgagtcgaccaacaccaagttctgctactacaacaactacaacctctcgcagccgcgccacttctgcaagagctgccgccggtactggaccaagggcggcgtcctccgcaacgtccccgtcggcggcggctgccgcaagaccaagcgtagcggcagctcgtccgctgcgtcctcggccccgtcgacgccgacggcggcaactgacaacgccaagaaccagcggcgcgcctcggcgtcgtccccacgatccagtagcggcggtagcggcaacacgagccccacggccgccgcggcgacgaccccgacgacaccggccacgccgtcgtcgaacaccatcgccgtcataaaccacgcgacgacgacgacgacgacgacgaaccccttcccgacagacgtgccacctccggcgccgattttcgccgaccaagcggcagcgctcgcgtcactgttcgcccctcctccgccgccgcctctcccggtgttcagcttcgcagcgcaggcgaagaccgaggacgggattgcctccgttctactcgccggacagacgacggcgcccactgccgccaccgttgccgacatgacgccgttcacgtcgctggacgcggggatcttcgagctcggcgacgtgccgccggcggcgtactggaacgccgggagctgctggacggacgtcccggacccgaatgtctacctaccctagctcggtgtagttactcatcacgatcaccttgattaagtctttgattaagctgtggttaaaacgcttcttaaggacgaccactagctaccactagtatgtcttttactactacattcatctactctactgttctccctgtaagtttttttcttcttttccttgtcttctctagctgcacttctgctgctgcaaaggtacgtgtaactgtccaagaaagctaacatttgtgtatctactgcacgcgtgaaaaaaaaaatctgaattggatcgatcattgttgcaaaaaaaaaaaaaaaacagaacgcccagcttattcccttagtga

SEQ ID NO: 21293 - DNA, 246 bp, Oryza sativa
  Clone ID: TF_LIB3434-040-P1-K1-B11
gagaaggtgatccagcccgacggacagcggggcgtggaagagagcgcggcggcgcaagcgccacctcatccgcatccgcctgcgccgccggtgatggaggcggcggcggcggcggcggggacgtcgcagactctgcaggcggcgggcggtggcggtggcggaggagggggaggagggggagagccgctgccgtgcccgcggagcgggagcagggagaccaagttctgctactgtaacaactacgac

SEQ ID NO: 21294 - DNA, 1676 bp, Oryza sativa
  Clone ID: TF_OsC1630_1
gttgcgcgcggtgggcttgagggtggcggcggggtaggaggggagcgggggctgtggtggcgagcggcaatgcggccggcgctcctcctcttcttcatcgtttcgcttagcttttctttcttcttcgtcgtctcggttcactcctccgttcgatcgactttgcttgtttcaagcaagctagatctctcaccaacaggaggtgatcaatggcgagcggcggcgcattatccccggtggaggagaagcccacggtggtgaagacgaccaaggcggagcagcacgaggaggaggcggcggtggcggtgaagagcgcggcggagatgatgaagaagagcagcccgtgctgcccccggtgcaactccatcaagaccaagttctgctactacaacaactacagcatggcgcagccgcgctacttctgccgcgagtgccgccgctactggacccagggcggctccctccgcaacgtccccgtcggcggcggctgccgcaagagcaagcgctcgtcggcctcgtcggcgtcggcgtcggcggcgtctcctcctgctcctgcggtgggcgccgcgccaccggtggtgccggcgctgtcgtcggcgatcagcaagctgctgcagtcggagcccatggcggcgccgtgcgcggacttccccaacgtgctcccgaccttcgtgtccaccgggttcgagctccccgccgccgccggcgaccgcctctcgctggggtcgttcggggcgttcggcaacctgtcggcggcggtggcggctcccggcggtggtggtgggtcgtcgacgaccacgtcgttcatggacatgctgaggggagttggagggcttttcgacggcgtcggcaacagccatcagatgggcggcaatggcggcggcggaggcagctactacgcgcctctcatcaccggcgccggcaatggcatgctgatgccgccgccgccgctgccgccattttctggttctctgatgcagcatgggatgcaggggctgttcgccaatcatgcgatgggaggaggtggtggtggagtgatgaacgccggcgaggacggcagcgtgatggcggggctgggaggaggccagtggccgccggcgcttggtggtgcagacgagcagcagggcggcggcgacggtggcgaagctgtgatgacgaaggacaccggcggcggcgcatcgtcgtcggcgtcgaggccggactacttctacggctggaacagcgccgccggcggcgtcgtcgctggaggcggcatcggcggcaacgccgccgctgccaccggagcaacgccatggcagggcctcatcgacagcagctcggccatgatgtaagctcaatcaaatcaaccatgccaaggttggagagagatctcatccagaagttgttgctagcttcttggaatgatttttcttcagcttcatcgatcgctttagttcgttttttatccgtggatcaaattagttcgctctttggaaaaattcgtcgaaacagttttaaattttgctagacaaatgaatgtcgtcgtcgtcatcgtcgctcgtttacctgtaattagcttggagttggggttgtttgattgacctcatggaaccatgcaaaaggttctcatgtttaaggggagttaattaaatgtacatcattggtcgtgacattgcttaattgccgttggtttgtttctt

SEQ ID NO: 21295 - DNA, 2093 bp, Oryza sativa
  Clone ID: TF_OsC44472_1
gtcggatctctctctctctgtctctctccctctctctctcgcccatgtaccatctccatggacgacctcgccgccgcctcccctcctcacccgccgccgccgccgccggaatcccacgtgcctccgcccccgcagacgccggagaaggattcatgtgaggatacaggagacatgaggatcagtgaagaaaagccatgcacagatcaggagttagatgctgatcagatgaatagttctagctttaatagttccagcgagtgtgagaatcaaacacctagcaatgatgaaatgactggatcagagtccaaatctgaggcagctcaaacagagggtggtggatcgagtgaagagaaggtcctgaagaagccagacaagatcctgccttgtcctcgttgcaacagcatggatacaaagttctgctactacaacaactacaacattaaccagccaagacatttttgcaagagttgtcagagatattggacggcaggtggaagcatgaggaacctccctgttggtgctggtaggcgcaagagtaagagctccactgcaaattaccgcagtatattaatcacgggcagcaatctagctgctcctgctggagatgctcccctctatcaactctctataaaaggagatcaaacagcaacggcagttaaatttgcacctgattccccactctgtaattccatggcctctgtgctgaaaattggagagcagagtaagaatgccaagcctacctcaacagcacaacccagaaatggagaaacccagacctgcccggcttcaggaacaacttcagatagtccccggaatgaaccagttaatggagcagttagtgggcatcaaaatggaattgttgggcatagtggagtccctcccatgcatcccataccatgcttccctggtcctccttttgtgtacccatggagtccagcatggaatggcattcctgccatggcaccaccggtatgcacagcaccagctgaaccagcaaattcttcagacaatggaagcacagctagtgttcagtggagcatgccaccagtgatgccggtaccaggatactttccggtaattccatcttcagtttggcccttcatttctccctggccaaatggtgcatggagctcgccatggattcaacctaattgcagcgtgtcagcttcatctcctacaagcactagtacatgttcagacaacggctctcctgtcctaggaaagcactccagggactccaaaccgcaaggagatgacaaggcagagaaaaacttgtggattccgaaaacgcttcggatcgatgatcctgacgaagctgcaaagagctcaatctggacaacccttggcattgaacctggtgaccgtagcatgttcagatcattccagtcgaaacctgaaagcagggagcagatatccggtgctgcacgagtcctgcaggcgaatccagcagctctatctcgatctcaatctttccaggagacaacgtgatgtatattgaagaaatcgtgtgacaattgtagaacatgttactactataatttaagcaagtgctacagcctgaaggatgattggcgatgtaggcgctgctgcaaacatggaggcagcgtgatctgtactattgaaacctgaagagtactattcttgacatttttctataatttgcctgtggagcatgcaccagtctactgggttcatgatcaggctgtcagcatatgttttgttgtacaataataataattgttaatagctttgcctaaaggatactgatagtattctgctgatccttcagctctgtgatcaatggcccatatatttacctgacaagtttcagaaaggaaaaaaaaaaagatctgctgcctgacaagaggttcaactccgaagaaatggttagcatttttgtactgcgtctgcgtgatgttaccttgttgctttctttggttctctaatgatcccttagttacctctatgatgacttgcattagttgaagtacctctgtccttttgttcggctgtgttgcctttatactagcatctgtgtagaatgtagaccgaagtctcaagctttcctttttgattcagtacgcttattgtgg

SEQ ID NO: 21296 - DNA, 1459 bp, Oryza sativa
  Clone ID: TF_OsC161689_1
ttaacatgaaccatctagaccgggcatgtcatcttgcagccacccgttccagtactgcacgccgccgccgccgcagttcgcgtccggcgccgccgtcgacgccgctccgaccgcgccgccgacatcgccggtggcggcctgaggtggagccgcgaacgccgccatttgctgccacgcggtcaggtcgatgctgtagccgcctccgccaccggcggtagccggcgccatcagcatctgcctcaggagatcggggaacgacgacgacgtcggcggcgccgccgccggcgcgacgacatgggcagaagccgccgtcgaggctgtggcgccggccttgcctccgccggcggcgcgcttgctgttcttgcggccgccgccgacggggacgtcgcggagcgtgccgccctccgtccagtggcggcggcacgccttgcagaggtaccgcggctgcgtgcggctgtagttgttgtagtagcagaacttggtgttcgccgagccgcaccgcgggcactgcctcggcggcggcctcggcagcggcgggtgcccggcgtgcctgccaccctgcctcggcgccgccgccgcgttcaccgcctcgacgccgccgccgccaattccgccattggcagcagcggcgtatccctgcccctgcacgccaagatcgtcgtcgaacaccatcagctcatcgtcaagatcagtcaaccatcgagctaatccgtgacgtaccatgagaaggggaggaggaggaggaggaggcctaggcggggtcaggtaagagaggggcgacgaagcggaagaggaagaagagcccaggaacggcgacgacatggctcccgcgacgccgcggcgagggccagggtagcttcttgccggcggcggagacgacgacgacgagctgcgcctgcgcgcgcttgctccgcgccggggacgacgacgacgacgacgacgaggagtagtagtagtcgtaccacggtgaacccctgcgcatgtcggaccggtgagccgccgccgccgccgatcgaacactctccttcttcttcctccccccaaccagctgctgctgctcttctctcctctcccctcccctcccacctgtcctcccctctcccctcccaccggtggcagtggtggcgcaccctggcgcggtggccggagggaggggggagggcagtggcggtggcggctgctgctcctggctatggctcccctccctccctcccagatctggcccgaggaggaaggggggagggcggtggccagcggcgctctcctccctcccttctagatccagccggaagaggggaaccggccggcggcggcagtagcagtggaggcggcatgagggcgaaggtggcggccaccagaggcacggcggcgcacgacaactaggaggagagtcggcggcaccgctccccttcctccgtccctccctcccaaatccggccagatgaggggagccggccat

SEQ ID NO: 21297 - DNA, 957 bp, Oryza sativa
  Clone ID: TF_OsC69565_2
tcacagtatatttccagacgttgacaagtcaaacgccggcaggtcggaccacccgccgccgccgccgccgggagcagcactgccgccggcaccatcaccaccgccacggtggccgccgccgcctccccagaactgcaagcttccacggagaccgaggaactcaatcggcgagctcgccgtcgtcgttgccgcagacggtggtgggtggttgtcgatgtcgtccatcttcaccgaggccatctgcgtgatgagcccggcggagccggcgacgctggcggcgttggccggcatgtcgccgccaaggccgcccgccgcgacgtcgccaaatggatacgataccccggcggcggtggacatcagcggcggtggatggactgcggcgttggatcgggctaagaacgggaagtgcgggaggcgctgccgttcgagcccgaggccgtcgccgccgccgccgccgccgagctggtagtcgacggcggcagccgcgtgcagcgagctgagctccggaaaccctaacctcgacgcgccaccaccaccaccaccaccgatgatactaccatggccaccgccgccgccgccatcaaacccgaaagggagctgcagctgcgcatgcggcggcgccatgacgccgccggcgacggcggcggcgggcttcttggagttagagggcttggttccgcgcttgttgcggcggaagccgccgccgacggggacgttgcggagggcgccgccgcgggtccagtagcggcggcaagccttgcagaagtggcggggctgggtgagggagtagttgttgaagtagcagaacttggtgttggtggagtcgcagcgcggacacttgagccccggctccggctgcgggatcttcgccatcctggcgcgctccgccatcgacaccggccgcgccgaggaggcgccgccgccaccactcaccggaaggatcccggcggcggccat

SEQ ID NO: 21298 - DNA, 1784 bp, Oryza sativa
  Clone ID: TF_OsC7030_1
cagacagtgacagtcctcagttcattgaccttcacgaccgctcgtccggtaaccaaaacacataagctcagcttcagctcagtctcctccatggagcccaagtcttcttcttcctcacactatctgcagccatctgcaacattgccatcaacaagaagaaactcattccaaggagtgggagctgaagctggaggaggaggaggaggcatgaacccattcgggcccacattcagtgacccactctgcagcctcaacctcaaggagacctcagagttcgtgaggtcatccttccccatggctaccatggcgaggagcaacagcagcaacggcgccaccggcaatggcggccatggctaccaccgcgagacctccacggcctcttcatcctcttcctcctcggcctcagctcagaggaggcgagccgagcagcagcagcagcaggtgccagctactccagggcggccattgctgttcttcaattcctcgagccctgcacatcaccagctcgtctccgcgaggaggtcggtgccttccaagtgggaggatgcggagaagtgggtgaggcaggcgtcgtccgaccaccatggcggccatcaccaccaccatggcaagggctccaagcttcaggaggagaagagggcgtcggcggtgaggaggtcggtggatgctgacgtcactgctcttgctctctacactgctcctgctgcagaagtgttcctcaaagacaagttcactgacaatgtggagccctccaaggagagcttcgtgttccggagctcctactgcgagccaacaaagaacacggcggcgcaggcggtggccgccggcaacggcatcgaccaccggcgtgacatcggcacggagatgactccgctgggcagctccaccacctcgaggtgccacacgccgatcaagagcacctcgccggcgaggcacaacacgccggcgagccggtcgggccccctggtgccgtacgccggcggtggcggcggcgccggccaggacatctcggacctcgccgactgccacttcgccaagctggacctcggcgcgcagttcgacgccatgctcatcaactggagctccaaggaggaggaggaggaggaggtgtccaagagcttgaggcacttcgaggccagcgtcgccgccgtcggcgagaagcgcggcggcgccggcgactgccggtgggaggacgatgacagggccaagagctgcataaggtatcagagggaagaggcaaagattcaagcttggatcaacctggagagtgccaaggctgaagcacagtccagaaagctagaggtgaagattcagaagatgagatcaaacctggaggagaagctgatgaggaggatgacgaccgtgcaccggcgcgccgaggagtggagagcgacggcgcaggcgcagcacctccagcagctgaagcgcgccgccgagcaagtccggcgggccaaggccaccagccaccatcaccaccaccaccacctcgccggcagcaacgcctcctgcggctgcttcccctgcaatggcagcaacaacatcatcagtggcaacctcctgaactactattagatatgatcagctagccgccatggaagaaggatcaagaatgccaatttgttcgggagatcaacgggttcttgttgattgtagtggatgtttgggacgtgtgaagatggagatgtgggagataatggtgtcatgtgtatcaaaaaactctgatttttcaaggtgatatataccagattgctgaatgccaaatgtcatgaaaaaaaaaaaaaaaa

SEQ ID NO: 21299 - DNA, 1318 bp, Oryza sativa
  Clone ID: TF_OsC200145_1
caacattcatggctgctctattcaaagctgtggcatggagtacgagaggatacacaaagttcagatgggagtgatgtctccaaccaagctgaggatgaagctgctgggatcccatggcggcagcatcggcagggttgacgaggcaaagaagtcgccgcgagcgtcgccggcgaggctcgacgccgacgaggacgacgacgaccaccccaagaacagcctcctgccccaagaactcgacgaagattatcccaaggaccagtcggattcttctcgctcgcgctccgacgcgagccatgggagagctggcaatggctacgacagcggcggcttcgagttctacagggaggagaggccgccgccaccgccgccggcggcggtggcggtggtcggcgggacgttcttcaggcaggtgccgtcaaagtggaacgacgccgagaagtggctcgccgggagacacgtcgtgcactccaacccaatcttctccaagaaggccgccgccgcagcagcggccgtgtccggccgcgttgcgccggaggcctcggcgtcgtcgtcgccgccgtcggtggcgagcaggcagcgccagcagaagaggctccgcgtgtcgtcggaggcggcggcggtgtcgatgcgggacgtggggacggagatgacgccgatggcgagcaaggagcagtcgcggagcggcacgcccgccggcgccgccacgccgtcgctgagtccgctctgctcggtgccgacgagcccgaggggcgccgcgtccgcgtcgtcggcgtcgtcggagcgggagctccagatcaggacgcgccgcgagatcgccgcgctcgggctgcagctgggcaagatgaacatcgcgtcgtgggccagcaaggacgacgacgacgagctcccccgcgcctcgccggagaagagaccgagaccgagaccgagacctcactccggcgacggcggcggcgaggccaagaaaagggagttcgaggcgcgcgccatggcgtggcaggagacgcacaagtgcaagctcgcgttgaggtttcagaggaaggaggtgaagattcaggaatgggagagctgccagaaggccaaattcgaagccaagatgaggcacgcagaggtgcaggcagagcagatgaaggcgagggcgaagcagaagctgagcaggaggctgtcggcgttgagccacaaggcggaggggaagcaggcgagggtggaggctcgccggagccggcaggcggcgcggctggcccgccaggtgcaccgcatccgggagaccggcgccgcgccgtcgcgcctccgccgctgctgcagctggctgttcctctga

SEQ ID NO: 21300 - DNA, 855 bp, Oryza sativa
  Clone ID: TF_OsC75556_1
gaacctcgcatccatccatggccaccaccgccctctgatccgatcgatactgatcagccagtagctatgctgggttcggaccagctcgagcaccgcccggcgccgtcggctccccgcgccgagccggacgatgtcgccgacgacgtggaggtggaggcgttccgggacatccacccggagccgtcgcctccgcatctaccgccgccgccgctcaggcagccgtcgtgggacgccgcgagccaccgctcgctgtcgtcctccggcgcgggcggcggcggcgacgtcgagctgttcgccaccatgagccgcgagttcaccgccatggtggcggccgggtcgtcgtccgcgcccagccccgacgttcccggcgacgcccccgccgccgccgacctgaacctgctgcagctggcgcgcatcggcgagaacgagccggcggccgaggcgaacgcgctcgccatcgtgccggcggcggcgggcagcggcccgccggcgccggtggagcaggtgaagaaggaggaggtggaggcgaaggtggcggcgtggcaggcggaggaggtggccaagatcaacaacaagttcaagcgcgaggaggtcgtcatcaatggctgggagagccagcaagtcgacaaggccaccgcctggctcgccaagatcgagaggaagctggaggaggagcgggcgaaggcgacggagaaggctcgcaacgaggcggcggcggcgcggcggaaggcggaggagcggcgggcgtcggcggaggcgcggcgcgggaggaagacggcagaggtgctcgaccgtgccaacttctgcaaggccgccggcagggtgccatccaagcgctccttcttctccttctaa

SEQ ID NO: 21301 - DNA, 1404 bp, Oryza sativa
  Clone ID: TF_OsC44865_1
tttttttttttttttttttttttttttttgtttttttttttttttttttttttagtgtcgaactgaatgtttgcaagatttgagcaaacaaaccatttatgccgtatggataatacaagccaggggaaaaacaagggccactctgtgatcacaagcagcagagggcaacagcagcaacagcaaatatacaacttgttttaaaatcttttttacaattaggttctcggatgcgcacagctaagcaaacatcacacgaagaacggcagctagattaatccagcacacaaaaggcactgaaagaaacagagcagcagcagatcgatcaagatcgaaggtttgcagaggctggctgcaggaagctagaagaaggatcgcttggtaggcaccctcccaacagccttcatgaagttggcgagctcgagcaccttggcgagcttgaggcctctcttcgcctccgccgacgccctcttctcctccgccttgcgccgcgccttcgcgatgtcgttctgcgtcctctccagcgccttggcgcgctgctcgtccagctttctctcgatcttttggtgccttgccaaggctatctcgatcttcttgagccatgcggatgctttctcgacctgctcggtctcccacccgttgatgacaacctcctccctcttgaaccggttgttgatcttggccacctccgccgtctgccacgccgacaccttcgtctccacctcctccttcttcacctgcctcgcctccaccggcggcgccggcgatggccctgccgcggggacaacctccagctgggacgccctgctcctggccggcgtggcgatcgggtggctgtccggcacaattgccagcgggttggtctcctccagctcgtcctcgccgatgctggtgagctggtcaccgccgttgttgccgtcgttggggccagtctgcatggtcgtcccggcggcgaccatggccgtgaactcccggctcatcgtcatgaactgctcctcggacgacacggaccggtggctgctggccgtgtcccacgagtacgcggcggacccgagccgcgtgggtggcgtcgtcgtcgtcgtcggcgacggcggcgtcagagggtggatgtcgcggtacgtggtgacgacggtgacctcctcgtcgtcgcctgcagcgacatcgtcggcggcggtggcgggcgccgacagctgtagcgaaacctccggctccggctgcggcggcggcgcgtgctgctcatgcaacatgtgctacccgcgcggcggcgatggcggtggtcgtcgtggaggctccgccgccgtgcatccgaagcgccgccgtggttgctgctggcgagctgaggtggtgcgtcgtgtcatggaggatctgcgcgcgtattatcctgcagcccgggggatccactagttt

SEQ ID NO: 21302 - DNA, 3250 bp, Oryza sativa
  Clone ID: TF_OsC1311_1
gctttaatacgagacctttttctcaggaacacgctgtcaccttacctccacgctcccctcccgcggcagctgaacagagacgagctcaccccacagtcccccacttatcccactcaccaccacctccagtttttgtcctgacaccagctaacagttaaaccggttgctgttattagtacgcgccaccacgacgcccacgcacattatcccttcgtgcaaaagcctatcaacagctaagccaaacagggtcaggagccggagccgtccgggagagggaacactcgagcgatccgtccgtccgcccgcccgtcgtcgtcgcgcgccatggctgaggaggaggccaagaaggtggaggtggaggtcaccgaggccccacgcgtccgcttataggtgatccccaggcgtcggcacccgccgcacgctttcttgcataagaactcccccccctcctcgctccccgccgccgccgccgttttcttggagaggagaaatccgtaggctcagaggatttttggtagtcttgtttcgtgatattcgtgaagagggggggagctaaggggggattcgtaagatcagaattggatcacgcgggggcgcgctcgggatcgggggttccaaacacagcttcttcgttgaatttaagtggatgtactaatggagtcaaagggtggcaaaaagaagtctagcagtagtcgttccttgatgtatgaagctccccttggctacagcattgaggacgttcgacctgccggaggcgtgaagaagttccagtctgctgcttactccaactgcgcgaagaagccatcctgatagccctttcggcttctccatcctagtagtttaggatttcttgcaattccattttggcacttttcttctgacctatttctctggctgctgcttcctgataatcgaccagttctctagtcttgctccctgcactcctccctcctccatctccggcacagtgttctgaccaacctgctccaatgggtgtcttgtctgctgctgaccctcccccagtctcagcaattgggtttgagggctatgagaagcgccttgagatcactttctctgaggcacctgtctttgctgaccctgatggtcggggtttgcgcgccctctccagggcccagattgactctgttctggatcttgcacggtgcaccattgtgtccgagctgtccaacaaggactttgactcctatgtcctctctgagtccagcctgtttatctattctgataagattgtgattaagacctgtgggactacaaagctcctgctcacaattccaaggattcttgagcttgctgaagggctgtctatgccacttgctgctgtgaagtactcccgtgggatgttcatcttccccagtgcacagcctgctccccacaggagcttctctgaggaagttgctgtcctcaaccgctactttggccatctgaaatctggtggtaatgcttatgtgattggagatccagcaaagcctggccagaagtggcatatctactatgctactcagcacccggagcaacctatggttacccttgaaatgtgcatgaccggactggacaaggagaaagcttcagtctttttcaagacttctgctgatggtcacacatcatgtgctaaggaaatgacaaaactctcgggcatctctgacattatcccagagatggagatctgtgactttgacttcgaaccctgcggctactccatgaatgcaatccatggctcagcgttttctaccattcatgtgacccctgaggatggcttcagctacgccagttatgaggtcgtgggcttcgacgcctctactcttgcttatggcgacctggtgaagagggtcctcaggtgctttggcccttcggagttctctgttgctgttaccatctttggtgggcatggtcatgctggaacatgggcaaaggagctcaatgctgatgcttacaaatgcaacaacatggtagagcaggagctgccctgtggtggcctcctcatctaccagagcttcgacgctactgaagacgtacctgttgctgttgggtcgcccaaatctgttctgcactgcttcgaggctgagaatatggtgaaccctgctcctgttaaggaaggtaaactgggcaatcttctcccctggggagaggatgcgttggaggagaatgatggagtgtttgatgagtaagatgggacttctggtgacgattcgctgctttgttttcattccgtggcatttttatctgttgaggttgtcgtttggttattctgtgaagcagccagccaggctattagtattttcgcttgtaagcatgtgttctgatcttgggacgtatgcttggtctaaataataatggtgaactaaaagctctaggtggtcagctgcgtctgccacaatgagcatgcgtcgggagaaatgttgtcaaaacatatgaataagtatttgcgggaaatttcctttgccttctgctaaaaaaaaaaaaaaaaaaaaaaaataaaatttatacccgtcggggtctaaaaaagttctgcttgggactagatagtatgaaaacgattttcgacctcagcccccacgcgtccgcatgggaggaaaatgagaccgcaaaagctgagaacaaggcttcgaagaagctatctgctattctttcctgggagaacacaaagaaagcaaacatagaagctcaactgaagaagattgaggagcaactggaaaagaagaaggctgaatatgcagagaagatgaagaacaaagtcgcgatcgtccacaaggaagctgaggagaagagagcaatggtcgaggcaaagcgcggcgaggaagtcctaaaggccgaggagatggcagccaagtaccgtgccaccggccatgctcccaagaaactcatcgggtgctttggggcctaaagaaattttcgattcacaacgagcaaacgtgaaagtgttcatcagtggttgctttgcttctttcaccctcccaagtgcgtagtgtgtttgttggtgcaagaaaggtcgtgcctggtgtgtaaagtctggtgttgctgtatataacatattactcccaagacagatatgtttggtgctgtacatgtttgatgcttgacaggcaacattcttatgtgtagttaagaagccacattgttattgttattgacagtaagctgtttgttcttttactggtgtctgagtttgtcttgttttgattggccttcattggattcactagtagctgacgggatctttgtgcatgttagt

SEQ ID NO: 21303 - DNA, 1519 bp, Oryza sativa
  Clone ID: TF_OsC349_2
acacaaaacaggtagctccatatcttgttcatattgacatacacaatccttgatgatgacaaaaaacaaattacaggcagctcttgtccccctcaccataagctataaggggcagagcaccatccaacttatgctatttacttgttctgtctgtccctcccaactttgcaatacccttatcaagcacaagaaagtaaagagaaaaagaaaaaaaagagaggatatgatgacagtacatcatacatgtggatacaacactaaaacgagagttccacacagcaaccacatcacagcactgatccctgcgtgtgaagcgaagcggtgaacgatcagccgccggcgccggcgacgacgacgacggcgacggcggcgagcaaagcagagaggaggaggaggaggggaagagggtggcgcggtcgctcagaagaaggagcgcttggatggcgccctccccacggccctcatgaagttggcgagctccagcacgcgcgccaccttggtgcccctcttcgcctccgccgacgcccgcttctcctccgccttccgccgcgccttcgccacctcgttctgcgccttctccatcgccttggccctcttctcctccagcttcctctcgtacttcttgagccaggcgttggccttctcgacctggtcgccctcccagccattgatgacgacctcctcgcgcttgaagcggttgttgaccttggcgacctcggcgatctgccacgcggcgatcttggactccacctcctccttcttcacctgccccaccgacacctcgtcgccgtggccgccgcccgccgacgacacgtcgccgggggcggggagcgcgaggtgggcgcggcgaggggacgggatggggttgctgtccgggacgatggcgagcgggttcgtctcctcgagctcatcctccccgatcctccccagcgcgtcgtccaccccggcgcggctggagtcgccgccgttcgcggctgcggcggcggcggcgttggcgttggctgctgcggcgaccatggccgagaactccctgctcatagtagggaagagctcacttggggcggtgtcgctccccacggagcggatcgacgtgtgcctgctccccgccgcggactcccacgactccctcctccgccggtggtacgacgacgacggctggctcggcgtcggcgtcggcggcgggctcagcgcgtggatgtccctgaactccggctcctcgagctcctcctccaccaccacctcctcctccctctcctcacccccgctgcttctgacgacgatctcccggccggtgctgatgacaatctcccggtcgtcggcgccgcggctgctgctgctgctaccactagccgccgtttgttcactcaacatgtgtcgccgccgtgggtgaggtcgtcgtcgccgtcgccgccgccgccgccgctagtgctcagccactagcacacacgcgtaaccatcggcgtcttgctcttcttcctcctcttcgcttctccgagctgagctgcggacgcgtgggcgc

SEQ ID NO: 21304 - DNA, 391 bp, Oryza sativa
  Clone ID: TF_LIB3432-006-P1-K1-C11
cccacgcgtccgcccacgcgtccgcggacgcgtgggggctgccaaggacgtcgccgaggagaaggccgtcatccccgcccccgcgccgccggccgaggaggagaagcctcccgtcgacgactccaaggcgctggccatcgtcgagaaggttgcagatgaacctcctgccgagaaacctgctcaagggggctctaatgacagagatgttgctcttgcaagggtggaaactgagaagaggaactcattgatcaaagcatgggaggaaaatgagaagacaaaagctgagaacaaggcttcgaaaaagctatctgctattctttcctgggagaacacaaagaaagccaacattgaaactcaacttaagaaaattgaggggcaactggtaaagaaa

SEQ ID NO: 21305 - DNA, 612 bp, Oryza sativa; identical to SEQ ID NO: 11712
  Clone ID: TF_OsC339202_1

SEQ ID NO: 21306 - DNA, 391 bp, Oryza sativa
  unsure (1)..(391): unsure at all n locations
  Clone ID: TF_LIB3474-009-P1-K1-H6
ggcgtcatccagatgtggctctagcaagggtggagactgagaagaggaactcattgatcaaagcatgggaggaaaatgagaagacggaagctgagaacaaggcttcgaagaagctatctgctattctttcctgggagaacacaaagaaagcaaacatagaagctcaactgaagaagattgaggtatacagctgtttctgttatttttgttttccttctgaaagatatagtttccaattagcacactacttaaaggttaccaacattctttcttatcaatgatgatgaatggactacacgtgtacacagccttgactaattaactggtaacagttatagggaaagctgtaccttaactataggactacacatgtcatactngtatcatgtat

SEQ ID NO: 21307 - DNA, 535 bp, Oryza sativa
  Clone ID: TF_OsC84854_2
cctagaagttctaccatgaggcaatgtcggccaccttcttgaccgccttgttgtcggccttggccttttcgttctcctcccacgccttgatcagcgatatcctcttctccgtggcgaccgtcgtcaggagagcgtctctttcgtgtgagccacctgttgctgcagctttctcagcatcatcgacgacggtcatggccttcgactcctccggcgccggcacggcggccctctcctcggcgatgtccttggtcggctccggcgccggcgccggcggcgccacctccgccatctccaacaactcagccaaagaagctatctgcacgagttctctgacgacgtagcaaatatatcaaggaacaaatgagagaagcacacgaactgcttctacttcttgttcttctttgttttttaacaggagctggctggatggcgactgattagcccaggttggttgggagaagatcggacgcgtgggcggacgcgtgggcggacgcgtgggcggacgcgtgggcggacgcgtgggcggacgcgtggg

SEQ ID NO: 21308 - DNA, 1794 bp, Oryza sativa
  Clone ID: TF_OsC92114_1
ggagagagagagaactagtctcgagttttttttttttttttttttttttgcacagaaaaaggcaagaagcttgcatcttatatactgctccatagttacttacaagtgactcgtcttcttctgacttatatctactgaaaccaatcaaaagacaatattctacaagatcacggtaaaaacagatgatggcgcttcaagtcttgcgagacatagtgaggagagctttttgcttgcttcagttgcttgagcttagctacgctactacgagcaccagttccagcagccaatggaggacggcatcctgccggttctcctgatgtggtctgcctgctccgccgtctttgcagccgcacggctccgtttcagctccgccgcggcccgcttctcgtcggcagtgtgtctcgccgatgcgagctggctcatcagcttgtcctgcgcacgggctcgcatcctttccacgtcgacctcaatttttctcatttcagcttcgatttttgctctctgatgatcttcccatgcttggatcttaatctcttctcgtttaaatcttgctaaatatttagccttctctgcctcctcccacgctgctgcacgaatttctgttaccttctgtgtagattggtccatgggcactcctttaagcgaaagtgatgcatctttttcctcttccttgttgcttgcccatgcagcaatgttggttttaccaagctgagtgccgaggagcattatctccctcctagtcttcatttgcaattcttgttcacttaattccacgttgctacattcaccatggccaataacagcaccgattgcattggggcctattgtttttcgtggagtagttgggcgagaacaatctggactcgttgctctcaccggtgttcctgttcgggatggctcctggctcgcaataggggtcatttctgtacccatgtctctcattgacactgatcggactgttggtgggggaggtatgcatgttgtcgcgctctgaagcgtggcagatgaatcatggcgactaaaagtaacagctgaatcagctactgtaatttcttcagcaagtgcagactttgcacaagtctcaacttctggatatggatcaggtggggcccaattcaccgctttttgccacccaatttcccttttctcttggcttggatcaaccctcttagtatctatctcctctgtggcctccaacacaaccttcgtagccggcagcctcccgccaccaaagctagttttttccatcttcctctgtggcactccaccagccctaccaggacggtttgttgtcgggctggcgatccatttctgggcatcgtcccactttgatggtgcaggctttgagaatggaggaacgattgccgccgtcacagaccgagcagaggcccctcgctccttatggaactcaaagtttgaagccacactctcagagtcacaggagtcctcctcaggcacccttactcgtgaacccatggagtgggtgtcacgcgatcggtgcccactccctgtctccaacgaggatgaagattctgagatggtgctcaccacatctacatccttgtattcttcgcacatgctacctcctctgcgcgcatcggagtcggcgtcggatctgacagaggacttgggcaccgcgccgtactcgtcgtccacctccccggcgtccccctcctcctcctcctcctgccccttccgccgcttctccacccccagcaacatcgcgcgcagccgcttcggcgagaacccaccgccctgggtggggaacggcttctcgatgcgctcgtactccat

SEQ ID NO: 21309 - DNA, 1090 bp, Oryza sativa
  Clone ID: TF_OsC84854_1
tttttttttttttttttttttttttttttttttttttttttttttttttttttaaaacatctctatttttttttttttttttttttttttaatgtcaaatgggtaagcctcttatacatgagtactagccaagtaccacaggcacaaaaatgttacaatttcaccgccgaatccgaataaagaccccaaaacatcatgtctgtacataataaatgttccctttttcacatgagactgcaatagctgccctgtacatgaaattaaacgaaaacaaacaactgagaaaatacatccaaccactagctatctgaacttgacaccggtacactcacactgtcgcacacacatttacaacaacgacgacgacgacgacgatcaatggagatgaccgagaagagattcaaccgaagagcaacttcttgggcggctctcccttggcgcggtactttgctgcggcctcctcggccttcaccacctcctcccctcgccgcgcctccgtcgccgctcgcttctcctccgccgccctgtgcaccttcgccacgccgttcatcaacttctccacctgctccgccttcttcctctccaggtactcttggtacttcttaatctcggcctcgatctcggccaccttggagttctcccatgaggcgatgtcggccaacttcttggccgccttgttgtcggccttggccttttcgttctcctcccacgccttgatcagcgatatcctcttctccgtggcgaccgtcgtcaggagagcgtctctttcgtgtgagccacctgttgctgcagctttctcagcatcatcgacgacggtcatggccttcgactcctccggcgccggcacggcggccctctcctcggcgatgtccttggtcggctccggcgccggcgccggcggcgccacctccgccatctccaacaactccgcacgcgtgggtcggcggtgtcctcctccccgtggcgtccctcgcctggtgtccgcctcggccgtgtcggcctcctcccgcgcctgcttccgcggcatcctcttctccgtggcgaccgtcgtcaggagagcgtctgatgaacacgtagaaagacccgtccg

SEQ ID NO: 21310 - DNA, 752 bp, Oryza sativa
  unsure (1)..(752): unsure at all n locations
  Clone ID: TF_jC-osleLIB3474039a12a1
ttnnantaattttttttttttttttttttttttttctttttttttttttgttttnaaaaaaaacaaacagctttctgttaataacaataaccatggggctttttaactccccctaaaaatgttgcctgtcaagccttaaacatgttccgcccccaacatttttgttttgggagtaattttttttattccgcaacccccgatttttccccccaggccccaccttttttggcccaacaaacccccttcccccttgggggggggaaagaagccaacccccccctggtgaaccctttcccgtttgcttgttgggaatcgaaaatttttttaggccccaaaacaccccattatttttttgggaacatggccgggggccccgtacttgggtgccatttccttggcctttaggactttcttgcccccctttgcctcaaccattggttttttttcctcaactttcttggggaccaacgcgccttttgtctttattttttttggcaattccaccttttttttttttcaagggctcctcaattttctttagatgagcctctatgtttgctttttttgggctccccccacgaaaaaatagcaaatatcttttttcaacccccgggcccaccttttggcttttcattttccccccagccttttatcaaagaggtccttttttttaatttccccccctttgcaagaaaccaccatttttttttttttttaaaaaccccccttttagcgcaggtttttttttgggg

SEQ ID NO: 21311 - DNA, 1441 bp, Oryza sativa
  Clone ID: TF_OsC151462_1
atgcttctcggactagagaaaaatcagcacaacggggaggacacatcgcctgaggccaacgattccggcgagctggacgaccagagtaagtccactaccccagaaatggtgttgcacagctcaatcattctcatttacggattcaccatatcgttaattccctcaacatggggcatggagtgctctactcccaccgaagtgtcgagcaacagtggccacggatcaataaaccgagcccaagacgacgaccgcttcggatcccagggcggctcttgggtcccgccgctggagcagaagcccgaggcagtgacggcactgatcccgccgctctctaggccaacgcggtcgatttgggatgatgcggagaagtggatttctagccccacggcgaaccgcggtggccgtgtggggagtgcagctggggctgcgccgaagaaatcggcgctggcatttcctgaacatgtaagccggcctccagccgttgctaaggtggttgctgaggtccccatcaacactggaaccttggtgaagaattcagttgctctcgcacagcctatttcatttaatcctgcacaaagtgcttcgatagttgatgaaccagctcctgcagttaggtctgtttcgatgagagacatgggcacagaaatgactcctattgccagccaggagccctctcggactgggactcctattatagcttctagtccaacctcctctcggacaccaacaccacaacgtaatgcagaaatcagtattggtgaatttggtccaaataagatggaaatgtctgaggaggaactacaaatgaatacaagaaaggaaatcatggatcttggccaacggctgggaaagacaactatagctgcatgggctagcaaggaagagaaatctacaacaagtttcgcaaatgtcataaccgacaaggctgtagaaatcgacagagaggctcgtgctgcagattgggaggaggcagagaaagcaaaatatcttgcaaggtttcagagggaagaggtaaagattcaagcttgggaaaaccaccagaaagcaaaaattgaagctgaaatgaagaggatggaggcaaagatagagatcaagagagctcgcgagcaggacaggctttcgagcaagttggcagctgcaaggcacaaggcagaggcgaggagggaggccgctgagtccaggaagaaccaagaagcagcaagaactgaagagcaggcggctcagatccggaaaaccgggcacataccttcctcaatctcctgctggtgctggtgcctgtgattcttcactctgccatgatcatctgttatttgggtagaagaaaaatacttgctccttgcacgaccatgtccaatattcgctactggttggttcatcgttcagtgatcgatgccaatgagtcgccatttttgtccaaaaaacctgcagcccggggatccac

SEQ ID NO: 21312 - DNA, 410 bp, Oryza sativa
  unsure (1)..(410): unsure at all n locations
  Clone ID: TF_8954457
actggaaaagaagaaagctgaatatgccgagaacatgaagaacaaagtcgcgatcgtccncnagggaanctgangagaaganagcnatggtcgaggcnnaacgcggcgaggaaatccttnaggccgaggagatggcagccnnnttncgtgccnccggccatgctccccanaaactcatcnggtgctttggggcctaaaaaaattttcgattcccaacgancanacgtgaaantgttcntccctggttgctttgcttctttcaccccccccnatgcgtantgtgtttgttngtgcnanaaaagtcctgcccggtgtgtttantctggtgttgctgtttataacatattactccccnacacatatgtttggggccntncatgtttgatgcntgacangcgaccttcctatgt

SEQ ID NO: 21313 - DNA, 1013 bp, Oryza sativa
  Clone ID: TF_OsC1311_2
acatcatccctccgcgcaaaagcctatcaacagctaagccaaacagggtcaggagccggagccgtccgggagagggaacactcgagcgatccgtccgtccgcccgcccgtcgtcgtcgcgcgccatggctgaggaggaggccaagaaggtggaggtggaggtcaccgaggcgccacccgccgctgccgctgccgcggagacggagccggctgccaaggacgtcgccgaggagaaggccgtcatccccgcccccgcgccgccggccgaggaggagaagcctcccgtcgacgactccaaggcgctggccatcgtcgagaaggttgcagatgaacctcctgccgagaaacctgctcaagggggctctaatgacagagatgttgctcttgcaagggtggaaactgagaagaggaactcattgatcaaagcatgggaggaaaatgagaagacaaaagctgagaacaaggcttcgaagaagctatctgctattctttcctgggagaacacaaagaaagcaaacatagaagctcaactgaagaagattgaggagcaactggaaaagaagaaggctgaatatgcagagaagatgaagaacaaagtcgcgatcgtccacaaggaagctgaggagaagagagcaatggtcgaggcaaagcgcggcgaggaagtcctaaaggccgaggagatggcagccaagtaccgtgccaccggccatgctcccaagaaactcatcgggtgctttggggcctaaagaaattttcgattcacaacgagcaaacgtgaaagtgttcatcagtggttgctttgcttctttcaccctcccaagtgcgtagtgtgtttgttggtgcaagaaaggtcgtgcctggtgtgtaaagtctgccgcccctgtatataacatattactcccaagacagatatgtttggtgctgtacatgtttgatgcttgacaggcaacattcttatgtgtagttaagaagccacattgttattgttattgacagtaagctgtttgttctttt

SEQ ID NO: 21314 - DNA, 1894 bp, Oryza sativa
  Clone ID: TF_OsC299804_1
atggagtatgaaaggattcacaaggttcaggctggtgcactttctccgacaaagctaaggatgaagcttctgggaactcacaatcgtgtgagggtcatcagcaacagctcatcacggacatcaccttcgaagaacactgaaccatcgcaagcacagaacagactattagtttgtgatgttcttgaagaagtttcaggcagctctgatggatccaaatgctcctcagcaatcaacaaaactgaagctttagagaaggatccaccattggacatcaacaaggttgaggacatgaccaaaagttcagttcagcaacctgcatcaagcaactcaagcatgatacatccagttcgaaccatagaagaagagagtaatgactgtgatagtggtattgacaatgctagtaccagtagtttcgagttccatggaggagagaaaacagcagcgcagaatccaacatcaggatatttctcgagacagacttcctccaagtggaatgatgctgagaaatggattgttaataagcaaaatgttcaacaaaatatctctaagggcgcaccacagaaccagagtgcacagcagatgaattcagctgcaggcaggggttttattgtgcccaaaatttcaaaccgaaacataattcctcgccccatgcagaacatgaaaagaccgagtccagcttcttccgcttctcgaagcatattagagaggttatcttttggttcacatcaaccaaagttggttaggcatgcagatgtctgtacagttaataatgctggtgtcacctcagagtatcaaacaaaggcaaccgataacagttcatcaattgaaataaggccctacaaagatcccaaagctattcctgcagttcattcggtgtccgtgagagatgtgggcacagaaatgactcccataccgagtcaggatccttcaaggacaggaactccacttggatcaatgacaccaactcgtagcccaaattgctctataccatcaactcctgtaggaggacggtcaacagcatcaccaggagatgacaacacagatgatggaccatatttcaacagaaaaggtggcacaaatgaaatatcagacgatgaaatgagattgaagacaaggaaagaaattgccgccctgggtatacaactaggaaagatgaacattgctacatgggctagcaaagaggagctagaactagtctctgcatccccaagcattgctgatttggagcggatgaagaaagaatatgcagctcgtgcagcagcatatgaagaagcagaaaattttaagcatacagcaagattcaagaaggaagagttgaagattgaagcatgggagagccttcaaaaagcaaaaatagaatctgaaatgaagagaatagaggaacatgcagagaaattgcgaagcgaagccatggcgaagatggctgaaaagctagaaatgacacggcgtttagctgaagagaaacgagcctcagccaatgcaaggatgaaccaacaagcagcaaaggcggttcacaaggctgagctgattcgccagacaggacgagttccagggtcatgtatcctatgctgcagtggttgcttctgtcaacactagtgtatgcttgacaattagggagttaaatatggtcgtgaaaaatctaaaccccatgttctataatcagcattccttggttttagtatggaaaggaatgtctgatactttgattaggtattcagatgtacaaattcttgcttgtcataaaagtcaatccaatgcttacatttgcttggtcggctactcggttaaagaacacttggttgttgccctccggcccctcgcgctggaaaaaaaaaaaaaaaaaactcgagactagttctctctctctctctctcctcgtgccgaattcctgcag

SEQ ID NO: 21315 - DNA, 971 bp, Oryza sativa
  Clone ID: TF_OsC102438_1
tgcttagctagctgtttgttttggcgataccatttgcattgcttgcccagcatcgtcgtcgtcgtcgtcgggagcaaggaggaggagagaccatcgatcttgattgatttgaagctagatggcggaggaggcgaagaaggtggaggtgaccaaggacatcgccgaagagaaggcagtggtgccgctgccgacgccgccggccaccgagcacgacgactccaaggccatcgtcctcgtcaaggaagctgaggctacaggaggttcagctgaaagagatgcttatctcgcaaaaattgtgtcggagaagagattggtactgatcaatgcctgggaggaaagcgagaaagctagagcagagaacagggcggccaagaagctgtcatacatcacttcatgggagaatgcaaagaaagcagagatggaggctgagctgaaaaggatcgagcaagaactggagaagaagaaggcggcgtacgaagagaagctgaagaacaagctggcattgctgcacaagacggcggaggagaagagggcgctcaccacggcgaagcgtggcgaggagctgatcatggcggaggagatggccgccaagtaccgtgcaaagggcgaggctccgacgaagctgttcgggctcttgaaagcctgagagaaatcatgaggagttcatcatacatatatgctgggatttggtgttgttgattagtctgtgaacttacagaaatttgtatatgtgcaatgcatggcatccgtgtttgcgtcgtgtgtatgtcgtctaattgaagggccatttggtttgtattttgtcagttgggtggtttgatttctggtgcgttttgtaaaggaattgtgtatatgcataggggagtgcaggcaggggatgatggattatgaatacgcttattctttcatgaagatttgttagtaaaaaaaaaaaaaataattgttgtatttttttcaaaaaaaaaaaaaaa

SEQ ID NO: 21316 - DNA, 3286 bp, Oryza sativa
  unsure (1)..(3286): unsure at all n locations
  Clone ID: TF_OsC9553_1
atgccgcccaagaggaagcgcggtggcgggaggccgcgcaaggccccggaggacgccgccgccaaggaaaacggtgagaagacaaacaaggaggaggaaacgcaggcttctcctgaggagaatggcgcagggcagactcaggcctcgagaaccgcaagaaagcgcaggaagggtcctgttgctgatccctcttcgactgaacttccacccaggaagctcagggacaggcggaacgttccagcggtagactacaaggagaataagcacacaaaaaagatggatggaacttcaaccatgtgccatcagtgccaaaggaaggacagtggaagagttgtgaggtgccggaatggtgctgaaaaaaacaggaggcacagatattgtgtcaagtgcatcaaacgctggtacccgcatctaacagaggacgattttgagaactgctgtccagtttgtcacaataactgcaattgtaagacttgtctgcggacaaatgtaataaataagggtgacaaggagtttgccgatggtaagaacaaaattaaatactctctgcgtattgcacgctttttgctcccttggttgaaacaacttcaccaagagcagatgctagagaaaagtgttgaggccacaattaaagggatcgatgtaactgacttggaggttcctcaagctcagtttaataatgatgagcggatttactgtgataactgcagaacatccattgttgacttccacagaagttgtaaaagtggtcactatgatctctgcctcagctgctgccaggagttgcgtcaaggtcttactactggtactgttgtcacttgtgacacagctgttgatgtacctgaaatagaaggcaaggaaggtttgcaagagggaagtagtcatagcagtgctgtaggtcaaggggcttctgatcaacagaatgacaggttgataggtagtgcagctccttcagaggattgcactcctagtttgatatggagggcaaaaagcaacggaagcataccatgcccacctaatgcaggtggttgcggggattgtcttctcgaacttaggtgtttgtttaaggagaactttatttctgatttactggataaagtcaattcagtggtcaataaggaaacagagcaggagttgggaggctctagatgttcctgcttcactgaatccggtgaagtgaacaatgaaacatcacggaaatcagcttgcagagaggactccaatgataactacatatattgtccaactgctagagaagttcaaagtggagctttagatcattttcagcagcattggttgaatggtcagccagtcattgttcgtgacgtgcttgagctaacttctggactgagctgggagccaatggttatgtggcgggccttacgggaaaagagagacaagaaagagcatgaacggctctcagttatagctcttgattgtctgacatggtttgagtttatgtaccaccaggatgtgttggtggtgccagtttcatatctggggttcaacagcaccattgaaactactttatatttcaaactggttgatataaatattcacatgttttttgaggggtattcccgtggagctgttggttcggaggatttgcctgtgctacttaagcttaaagattggccacaacatagttcctttgaggagcgcctgccgcggcatggtgctgagttcatgtctgcactaccatttcgtgagtatacagatccaaaatctggtccccttaatctggcagtgaagcttccaaaacatgttaaaaagccagatcttggtccaaagacatacattgcttatggtgtcgcccaagagttgggaataggtgattctgttacgaagatccattgcgacatgtctgatgcggttaatattctcatgcatactgatgaggtagaactcaaagctgaaaggattacagcaatagagaaaaagaaagagagcttacgtaaagatggcaagaatcttcatgttctgcgaccagaccatgacgatgatacatcaatagctctcagtgaatcaactgaagtgccaagatctcgaggacttgaaaatggctcaagcattaagcagccagcaccaaatgttgctgtaatggaccagggaggtgttcatacagatatggtagctgatgaagctgagggaaacttgagtctgtctaatgggcaatcacccaatcaaagtgatgcacataatatggatattactttctccaagggggaaacagaccattctatctgcacaattaatgggggagaggagatgggcaatggctttgggagggaagataaatgtaaatcttctcatggtgtaggatcatctgaatcttctgattgtcaaagacgcagtaggcgacgtgatgcttgctcttccagtgcaacaggggaaataaacgaaaccagcatggagactaacaaatttaccatatctattgagcccaaagatgatcacccatttgttgagggaaatcagacagagggtggtgcattgtgggatatcttccgacgtgaagatgtcagcaaattgcatgattatctgatgaagcatgcagaagagtttagacattataattatgaaacagtcaaacaggtttctcatcctattcacgatcaatgcttttatctaacaaatgagcacaagagaaagctcaaggaagaacatggaattgagccttggacatttgaacagaaacttggtgaggctgtgtttatcccagcaggatgtccccaccaagtcagaaatttgaagtcatgtataaaggttgcacttgactttgtttctccggaaaatgtgcaagagtgcatcaggctgacagaagaatttcgcttgcttccgaagggtcatagggtgaatgaagataaactagaggttaagaagatagctctatatgcacttgatcaagccattgacgatatcacaggcaaaagttgcaatgaaaggacaaaggatgaaggggaagaggaggcgtctgccccaagtgttagttaacctgcagaggaaaatcaccaaaattagcctgcacaaggcncatgtgctggagtccaatatgcatgatttctgcggaggcatggtttgtagtttagaaaacggttcttctcgtgatagnggtgatggctagtggatttttttgcagcagggtttgtgggagctggntatcattntagctctgtaccatcatatacggagacgatagctntaactcaggacggnntgattttgntacttcatattgagttgtatgggagtttacccttgatttgatagcagagatgaagggggg

SEQ ID NO: 21317 - DNA, 448 bp, Oryza sativa
  Clone ID: TF_LIB3433-031-P1-K1-B2
catgctggagctcattgtacttcagacaaccaaggatacattgacaggagtggattcaaacgcaaagattcagactgttcagaccaacagaaaactggtggcgctttgtgggatattttccgaagagaagattctgagaagttacaagattatcttcggaagcatgcctcagaatttcggcacatacactgcaatccagtgaaaaatgtttctcacccaattcatgaccagactttctatttaactgtggagcataagagaaagctcaaggaagaacacggtgttgaaccatggacattcgagcagaagctaggcgatgcagttttcattcctgctggatgtccacaccaagtgagaaatttaaagtcttgcatcaaggttgctctagactttgtttcccctgaaaatgttggtgagtgtgttaagctgaccggagagtttagacgtc

SEQ ID NO: 21318 - DNA, 2754 bp, Oryza sativa
  Clone ID: TF_OsC160889_1
ctggcggcggaggaggtggacgccgcgacgatcgacggatccggcgaggcggcgaagcggaagagtggtaagcagaggggatcgggcgccaaggggaggcgccgggacggcgaccgggctgtccgcccgccggcgatgaggccggatgaagaagggcgcggtgttgcgacgaggcccggggcgctctgggaaaggaagccgccggccaacgccttcaacgcgccagacgatgatgaggatgtcgagaaaactgatcaacttctagagcctctcaacaagcccaaaagacgtgatgcagggaagaagaaaagacccagaaaaaagaaagtagatcaagagaacatcaaaacccacaggcataacgcaaatgcagtaaaaggcaagatgttagtcaatgataaggtttcgaagactgaaaagaagcaaagggaagaaaatgttgacaggtatcctgatttgcctgaaaatgaatttgctgcaaaatgcccttattgtcgcaagaattgtaattgcaaggcatgcctgcgaatgagaggtgtcgaagagcctccaagaaaggaaatttctaaagaaaatcagattcgttatgcctgtcatgtgttacgcttgttgcgtccttggctgatagaactgcgacaggagcagatggcagagaaggaattagaggctaagatacaaggtgtttcagttgatcaaataaaggtggaacaagctgagcttcgcaaaggtgagatccctggaggagaagaggtggaaattttggatcctgaagaaagagacaaggattatgcttttggtaagattctgtcagatggtgagaaccaaagggactctttgaagtgtcgcagcgacacccaaaacagtgagtcaaacaaaggcatggcttctgacgaaaaccaaaagaaggctctgttactttggaaagcaaacagtaatggtagcataccttgcccacgaaaggaaaaggaagactgcagtttttcatctctagatctgaaatgcttgtttccagagaagttgctccctgaattagaagatagatctgagaaggtcttctggagtgaaacatttgcaaaagaactaggtagaacaagtgagctgtgcccttgttttgatcactcaggcaagataagaagtgacagcaagaaattacgtcaggctgcaaatagggaggactcgagtgataactacttatactgtccggtggccactgatatccaggacgctgacctgttgcactttcagatgcattgggcaaagggcgaaccagttgttgtttcagacactcttaagctaacttctggtcttagctgggagccgatggttatgtggcgggcagtacgagaacgaaccaaagggaaggcagaagatgagcagtttgctgtgagggcagtagattgcctcgactggtgtgaggtggaaattaacatacacatgttttttatgggatatacaaggggcagaactcatcccaggacctactggcctgagatgcttaagctaaaggactggcccccttctagctcatttgatcagcgattgcctcgccatggtgctgaatttatcagtgcattgccatttccggagtatactgatccacgatatggtccgctaaatcttgcagtgaagcttcctggtggtgtcctgaagccagatcttgggccaaaaacttacattgcctatggattttctgaagagttgggcaggggtgactctgtaaccaaacttcactgtgacatgtctgatgcagtaaacatcttaacacacacagcggaagtgccctgtgagacttatgatgctgttcagattaaaaacacgcagaaaaagatgaaaatgcaagatgacatggaaatatatgggatgatagaatcaggcagtgaactcaagccatcagcatgcccagttgaattggggaacaaagctgttggtgaagcaccaaaggcctcatgcagcaaagaaaatgttcataccttgaaagacaagtctaatggttggtggagaaaatatacttttggtttggatataaacgcttcaccacctgatgatgctggaggtgatgccagggatgaagcattgtcctatgaatctgtggtacatagtgatgtagctcagtgtccaaaccataaccatgagaccaataattctgatgatgcacgtattggagctcagagatgtcaaaagaaagctaaaggtcgtcctccgaagacaggttcaggggtatcagagcaccaggaaagtggtggtgctttgtgggatattttccgaagagaggactctgagaaattacaagacttccttaggaagcatgcgccagaatttcggcacatccactgcaatccagtgaaacaggttattcatccaattcatgatcaagctttctatttaactgcggagcataaaagaaagctgaaggaagaatatggtgttgaaccttggacctttgaacaaaagcttggcgaagcagttttgattcctgccggatgtcctcaccaagtcaggaatttgaagtcctgcatcaaggttgcactggactttgtttcccccgagaatgttggtgagtgtgttaggctgaccaaggaatttagacgacttccatcttcccacagggctaaagaagataagctagagatcaagaagatggctttccatgctctgaatgaagttctaaactttctggatcctccttcctcagaagggtcgaaagaagcggcggagaagcctcgaagggggcgtggtcgcccaagaaaacactag

SEQ ID NO: 21319 - DNA, 3202 bp, Oryza sativa
  Clone ID: TF_OsC145726_1
gcacgagggagagaactagtctcgagtttttttttttttttttttttttgctttggttggtgactagttctctttcgagaaaatgcacattcaccatgataaaacagtgccaatctccagaatacagattgctcactgtaacaagttcaacatgttaagcaaagttacttaataacagtcaacagatgtaaaatttctcccagaagcggcagaagaattagttgtatcaaagtgacagtctctaagcaacccagtaaatctcattctgacaatctaatgctaaataattgctccacgtttattctgtttacatgagctcagccgttagtcctagtccaattccaatatacaggtgagggcttatgctatctgataacaattagaatgtgtcattgtgttcctttcatatgacaccatgtaatacatgtacaattgctatatctaatttaaatggagtatctcagctgcatggtacattccgttgtttggtgactctagccaagttctcagaaaccgcctgagttagattctgatcctcgaatttaaggtctagattaaacttgggatcgagggttattctctgaatttctctgacagcagaactagctgcatataaagagatttttccaatctcgagcatcttcagttttgcatcatgatcatttggtaggcagcgaatctcctgggccattcgggccgactcccccaaactttccggtgacaggaaatcaagagccaattgaaccgtagactggagatttttcacttggaatgggcagccagcaggaacaaatacagcctcaccgatatgttgttggaatgtccagggttcaattccatattgatccttcagtatccttttatgatacttgttgagatatatagattgttcataaataggattcttaacctgactactagctgccagttcttcccagttagcagttaaatattcattcagctttgaaatatcctgcctgcggaacacatcccaaacagaaccagcctgacttctttctgaaccattaacttttggttcctctgaatgtgacgagcaagataactcagttgaagagccttcgaaaccacaattaagtttggcatctgaagacttctcttgtaatcgcaaggcagacgcatgcgctctttcatcaaactttgagcttacatggtcaggtgattgttcccccatatccacattcaaattttgaacaggtgcatgagcatttacatgcattgtcattccattggcaatcttttcagatcgctcaggttgtagcctctttggacatacgtcatgccctttggctgtatgcattagcatatgcaccacatcagccatgttaatcattagatttgtcactgaatcacctttaccagcttcttgatgtcttccatatgcaattaacagcttcaagccaacttcaggttgtagggtgtctgggggcaatttagcagaaagatttaggagcccccacctggaatgtataaaatcaactaatggaaaattgacaataaattctggtctttggcatagcagaaactcctccaatacactgggtgggggccactctttcaatttcagcatcatcaattccccatcttcccccttgtgaccatctgaataacctttgataaactgtttcagctcaatatccacctctgcttggtttgagcaatccacagctttgacaatgacatcgtcatccacttcttcatccatgatttcctggattcctcgccaaatatttagtgggtcccagcttgatgacagagaaggctcaaacgcattcctgataactacaggttctccttttatccagtgtttacgaaaatgaataataccttcagatttcaagtcctctaatacaggagagaacacacagaaccgatcaataccaccattatttgaacatgttgagacaccaaagttacgatgaccagttaactctaatgttctgccatcattgcaggatgagcatccattctcaagaacatgtactttacaaccattgaccatttcctcagaattttttacaagcttactaatccagtttattttgaatattcgccttaacactaacttcgaggagccacaaccaccagcctcatgaggcccacaagtaatgcttccatcattattgactctccatgtagggaataaagatctaatgtcaatattttttatgtcccttcgttgtgggactgacttatcatttgcactttctgcagatggttccattcttgctcttttattcgaagtatctttacttctatctaccacacgaccttcagcatattctcctcttgcaacactggtcctagatcgccttatgtctcgacaacagtcaagacataagtcatacaaacaccttgggcagtgtcggtgataatcaaatactggcactttgcagaagtcactgcgaggataatttgaggtatcacagcacatttgctcatcaggattgaccttcgccctgattatatctgtcctaagtccataagcttttgtatcaacaccaatttcgaaacattgatcagaataaatctgctttaatactggaaggacagatgccagaatgctatgaagatattccaacttatctacagcagatatctcctgaacccttgcctttcgaacatcatcaattgggatatcagagtaccatctcgagatgcagttggtgcagtacccccttctgtcgcagcttgtacaacaaatggtattagcgaccctccggcactgatggcaggttgcggccgctgccgcccccgccgccgagctgcaggcaaccagccccgccgagcccctcccgaccagctccgccgcggtgcgcgcgccggcagcattgcccatgggcagcccgtggaccggctgcctcctccgtggcggcggcggcggcggcggcagcgccggctccgccacgtacaccggctcccccgcgaccctgccgtagatgggcctcgcgaccgccatccgcgcaggcggggtcgtgccccgcgcggcggaggcggaggcggaggacctgcggagggaggcccggagcgcggaggaggcggcgcgcttcttggcctggacgtagtgcttctcgcagacggtcttgtcgggcatggagggcgcgctgcatcgccactgcttgccgtcggagcgcttgcaccgcagctcctccggcacggcggccgccgccgccgccgcctccat

SEQ ID NO: 21320 - DNA, 2876 bp, Oryza sativa
  Clone ID: TF_OsC98891_1
atgggattaagcgattatgatctaatgggggtggcggtaccagggacgggtgttggtggaccccatcctgaagcccttaaagaaaggatgctttgtaacctctgggaggtgtatactttagctcagagaaatcgaaaatttaatgaacttctgaatgatgaagcgataatgatgaagccttcaaaagaatcgaagaaaagaggtgcaggaaagaaacaagaggaagaagagaataataccatatccattgaggatgaaatgtgtgatgcgaacaataagaaggggaagaagatgctcactggggaaaatgctttgatgtgccaccagtgtcaaagaaatgacaaagggagggtgatttggtgtaaatcatgcaacaataagcgcttctgtgagccatgcatgaaacgatggtacccaggtttgtcagaagttgattttgctgcaaaatgcccatattgtagaaagaactgtaattgcaaggcatgcctaagaatgataggagttgaaaagccccctgaaaagaagatttctgaggaaaatcaacgacgttatgcttttcgtattgtagacttgttgcttccttggttgaaagaacttcaacaggagcagatgaaggagaaggaattagagggtagattacaaggtattggaggattttctaactgcctatttacatttttatttgcaggtgtttctatggatgaagtaaagttggaacaagctgattgtgatatggatgagcgtgtttattgtgataggtgcaaaacttcgatagttgattttcatagaagctgcaaggcttgttcgtatgacttgtgccttgcatgctgctgggagcttcgcaaaggtgagattccaggaggagaagaggcaaagagtgtgcagtgggaagagagaggtcagaagtatgatacactgcaatccagtgaaaaatgtttctcacccaattcatgaccagactttctattgacccccagtactgaaacttgcaatgacatggctgttgctggggacccaaataaccctttgttactgtggaagggtaacagtgatggtactagctggatgtccacaccaagtgagaaatttaaagtcttgcatcaaggttgctctagactctgtttcccctgaaaatgttggtgagtgtgttaagctgaccggagagtagttattaagagagaagcatttgataaagcaataaacgaaacaagtgatcagtgcccttgcttttatcacacaagcaagataagaacaaatgctactcgagaggcagcaaacagaaagggctcaagtgataactacttgtactgtccagatgccaataatatccaggaggatgacctgtcgcctgaagagtggggaagaccaacccattgatgaatccatagaagaaaggaagcctgaatagcgagggagatctaaacggtgatctgaagattgaagagggcattgcgagagaagaaaaccaatggtgatgttgaagatgagcactttgctgttaaggcagtggattgccttgattggaatgaggtggaaattatatcgctctgggatagaattaaggtttcgacagttcaagaatcacctcagacatcatcatggtgtcgattttgttcatatgtggggtgattgtccttcactaaaatgatgtgattgtttgttgctgatagtggcaattgacttggattgccatttcccgagtatactgatccacgatatggcccgctaaatcttgctgtcaggcttcctgctggtgtactgaagcctgatcttgggccaaaaacttatattgcttatggatgttatgaagagttaggcaggggtgactctgtgaccaagcttcattgcgacatgtctgatgcggtaaatatcttgatgcacacagctgaagtgtcctatgacactgaacagcttgacaagatagcaaaaattaaaatgaaaatgagagaacaagatcttcatgaactgtttggggtttcagaatcaggcgccaagggtaaagctgatgatgaagcatcgaaaatctcatgtaacatggaaaacaaacacacctctaaccaaagtactaagggtttggacattaatgctttaccacctgatgattctggaagtgatattggggataaaccatcattttgtcaatctgaggtttctcacccaattcatgaccagactttctatttaactgtggagcataagagaaagctcaaggaagaacacggtgttgaaccatggacattcgagcagaagctaggcgatgcagttttcattcctgctggatgtccacaccaatcttgcatcaaggttgctctagactttgtttcccctgaaaatgttggtgagtgtgttaagctgaccggagagtttagacgtcttccatctgatcacagggctaaagaagataaactagagattaagaagattgctctcaatgctcttaaagaagtcgtaaatttcttagatcctttaccaaaagggtcaaagaacagggatgaagtggtagaagtgaccaaaccaaaaaggaaatacggtaaccgaagaggtgacctgaagagtggggaagaccaacccattgatgaatccatagaagaaaggaagcctaaaaagcgagggagatctaaacggtgatctgaagattgaagatcctgtccaacaatgaaccagtagatgactagatgagaagcctaaaaaaccattaatgctcttttgattattcagaggcccaaatgattgggctgatatcgctctgggatagacttaagtttcgacagttcaagaatcacctcagacatcaccatggtgtcgattttgttcatatgtggggtgattgccttcactaaaatgatgtgactgtttgttgctgatagtggccattg

SEQ ID NO: 21321 - DNA, 1300 bp, Oryza sativa
  Clone ID: TF_OsC80971_1
cggacgcgttggcggacgcgtgggcacgtgcgcgcgaacggagctcgtttcttctccccccctacctctgccccacgttggctcgcgtccgcggcccatctccaccgtccgatcccgagccgatggcggcggagcccccggcggacggccgcgatcccccggcggacgatggcgccgccggcgacggcgcggtggagtccgcggcggcggaggcgctcctgagcgcggcgtcggagcagctgacgctcgtgtaccagggggaggtctacgtcttcgaccccgtcccgccccaaaaggtcgcgccctttttcaccccttccaaaatttttttccatcgcgtccgtttggttcttccctttcgccctttcggtagctccgtgcctatctttggtgaatttgagaatagggttcaggctgttctattggtacttggagggtctgacatgcctcctggtttagtaagcatggctgtacctaccacattcgatgaaaagagtacaactgtggctgccagaagagttgcttccttaatgaggtttcgtgagaagaggaaggaaagatgttttgataagaaaataagatacagtgttcgtaaggaggttgctcaaaagatgaaacgacgtaaaggccagtttgctggaagggcagactttggtgatggttcatgttcttctgcaccatgcggctccacagccaatggcgaggatgatcatatccgagaaacgcattgccaaaattgtggcatcagctcaaggcttactccagcaatgcgtcgtgggccagctggtccaaggtccctctgtaatgcctgtggcctaatgtgggcaaacaagggcaccctaagaagtcctttgaatgcccccaaaatgactgtgcagcatcctgctgatctgagtaaaacgggtgatacagatgacagcaaagcaaatctgtgtgctgagcataatcaaaccactatgaaaactgacactgagatggtgccagagcaggagcagaaggcagacgtgttgccaccaaccaaagaagaagatagcatggctacctcgtgacaaaatgttcagacgcttgtgtataattgatacgtaggttatttttcaggaactcctgactttaggatggtacataaggcaacagaactaacaaagatcagctccgttgcgaacgatgcagacgcatcggcgcgccatatttatcaaatccatgtgttgttgtacaccctacccactcattctgtacgatttgaacacagatctgagtaatacaatccgttttgatcggttgtcaactatagtaaaaaaaa

SEQ ID NO: 21322 - DNA, 4357 bp, Oryza sativa
  Clone ID: TF_OsC32958_1
atgactatgatgacgcctcccccgctcgagccggaggaggacgagatgctcgtgcctcaccaggagctcgtcgctgctgacgccgcccagcccatggaagtggttgcgcaaacggaggcagctagcacggcggagagccagccagctgaggacccgcagacgtcgcggttcacgtggacgatcgagaacttcacccggatcaatgcgaagaagcactactcggatgcgtttgtcgttggcgggtacaaatggcgtgtgctcattttccctaaggggaacaacgtggaccatttctccatgtacttggatgttgccgactctgctaacctcccatatggttggagccgatatgctcagtttagcttggccgttgtcaaccagatccaacagaagtatacgatacgcaaagatactcagcatcaatttaatgcacgtgagagtgattggggtttcacatcttttatgcctttgagtgagctctatgatccaagtagaggataccttgtcgatgatactgttgttgtggaggctgaggttgctgtccgcaaaatggttgattattggacatatgattcaaaaaaagaaacaggttacgttggcctgaagaaccaaggagctacctgttacatgaactctctactacagacactataccatataccatacttcaggaaggctgtgtatcatatgccaaccaccgaaaatgatatgccatctgggagtattccgttggcattgcagagccttttctacaagctccagtatagtgacaatagtgtagccaccaaagagctgaccaaatcttttggatgggacacatatgattccttcatgcaacatgatgtacaagagctcaacagagttctctgtgagaaacttgaagataagatgaaggtgacaaatctgagaactgtcgtagagggaacgattgaaaagttattcgaaggtcaccacatcaattatatagagtgtataaatgttgactataaatccaacaggaaggagtccttttatgaccttcaacttgatgttaaaggttgtcgtgatgtgtatgcatcgtttgataaatatgttgaagttgagcgcctcgaaggtgataataagtatcatgcagagaatcatggtttacaggatgcgaaaaagggtgttctgttccttgatttccccccagttttgcaacttcaactgaagcgttttgagtacgactatatgagagataccatggttaagattaatgaccgctatgaattccctttgcaacttgatttggatagagatgatggaaaatatcttgctccagatgcagatagaagtataagaaacctttatgctcttcacaggtataaatttgatgatgagcgtgtaactaaagaagatactaagaaggcccttgaagagcaatacgggggtgaggaagagttgcctcaaataaatcctggtttcaacaacgctccatttaaattcacaaagtattcaaatgcctacatgcttgtctacatccgtgagagtgataaggacaaaataatgtgtaatgttgatgagaaggacattgctgagcatttaagggtaaggttgaagaaagaacaagaagagaaagaacacaaaaagaaagagaaggctgaagctcatctttataccatcataaaggtggctcgagatgagaatttgaaggagcaaattggcaaggatatatattttgacctggtggaccatgaaaaagttcgtagcttccgaattcagaagcagttactgtttaccactttcaaggaggaagttgcaaaggagtatggcatccctgtacaatttcagcgcttctggttgtgggctaagaggcagaaccacacatacaggcctaatcgtccattgagtcctcatgaagaaacacaatctgtgggacaactgagggaggtatcgaataaggcacacaatgctgagctgaagttgtttttggaagtagaacttggcccggatttgcggcctctccctccacctgagaagagcaaggaagatattcttctgttcttcaaactctataatcccgaaaaggaagaactctgttttgtggggaggctcttcgtaaaggccttgggtaaaccctcagaaatcttgaccaaactaaatgaaatggctggatttgtgccaaatgaagaaattgagctctacgaggcaagagctaaattcatgatgctatatttatgggataatctagtatatgtcactccattgaggtgtgctctaggaggaaattaaatttgagccaaatgtgatgtgtgaacatattgacaaaaaagccactttccgtgctagtcagcttgaagatggggacatcatctgtttccaaaaatcacctatacctgatagtgacactcaaatgcgttatccagatgtcccttcgtatctggagtatgttcataataggcaggttgtgcactttcggttattggagaaaccaaaggatgatgacttttctttggaattgtcaaaacttcatacctatgatgatgttgttgagagagttgcccgtcagcttggtgtggatgatccagcgaaaattcgtctaacatcccataactgctattcgcagcagcctaaaccgcaacctatcagatatcggggagtggagcatcttttggacatgctcattcattataatcagacatcagacatattgtattatgaggtgttggatattccactgccagaattgcagggcctgaaaaccctgaaagttgcattccaccatgctacaaaggatgaggttgtgattcacagtatcaggcttccaaagaatagcaccattgcagacgtgattaatgatttgaaaacaaaggttgaactatccagtcccagtgctgaattgcgcttgttagaggtcttttaccacaagatatataagatttttccactccatgagaagatagagaatattaatgatcagtactggacactacgtgctgaggagattccagaggaggagaaaaatctcggtccaaatgatcggttaattcatgtttatcacttcatgaaagaccctcttcagaatcagcagattcagaactttggagatcctttttatcttgctatccgtgaaggtgagactttagcagaagtaaaggagcgcatacagaaaaaactccaagtccctgatgaggaattctgcaagtggaaattcgctttcatatccatgaaccggccagattacctccaagattcagatgttgtatctgcccgtttccagaggagagatgtctatggagcctgggagcagtatcttggtttggagcatgctgatactgcaccaaaaagggcctacacagccaatcagaaaaaattaaccagaattactgccgcagttagtgcggcgctgggttccgtgatagtaatagctgatgaaatttttgcatcaacttatatattgacaatattgtccaaaaaattatatctcatgtcgcgtataaaatttggagtcacgcgttcgatattcttctctcgtcactacgatctcaacaaagctccagtccacttaacactgcaactcccaacctcaccaatggacaacccgacgccgtcgtcgagctccggcggtggcggcgccgccgccgccgccaatgccagctccgacgagcaccgcaagacgtcgccggcgacggccgctgatttcttcgacgaggagcacaccttcgacgatatcctgctcccggtggacttgttcgacttcacgcacggactcgacgccggcgacggctgttacgtagacgatcaggctgcgattgggcagaagccgctgtcgccggcgccggagccggcggcagagcagcagccgtcgccggcgccggagcacggcgacgatgagcggctggtgatgtactaccaaggacaggagtacatcttcgaccccgtgcagccgcagaagattgaaaatatcttccaccatctgaatggacaggagatgattccacagagcatcaggccacaacccactaacctggtaagacccatcactgttcccgaggacttcgacaggtttgctgcgctgacgcggtatagggagaaaaagaggaacatcaagttcatcaagaaggcggattacagtgcccgaaaggaagtcgctttgcggatgaaacgcagcaaagggaaatttgcacctagggttcagacctctgaaaattccttggcacacagaaaggggataactttctgcaccaactgtggtgaaagcagcgacgccacacccatgatgcgccatgctcccaatggaaccaaatcattttgcaatgcttgtgggttgatgtgggcgaactcgagaaaaataagaaagatcagaaacccaacttccggggagcaagaagatcaataa

SEQ ID NO: 21323 - DNA, 888 bp, Oryza sativa; identical to SEQ ID NO: 11732
  Clone ID: TF_OsC297303_1

SEQ ID NO: 21324 - DNA, 629 bp, Oryza sativa
  Clone ID: TF_OsC353595_1
atactactatggtcgccgccgctcgtcgtcaaccacagaggtggcatggccgccgccttgtactccggcatcagccgcccagacatgaacctcaagccacacgcgttgcagagggtcttgggacccaggggacccgtcagcagctacgacgttttctccgacgcgcagtgcatgcaccgccacgtacacgccggcctccatgcccaccttcacccccgcggggccggggctcttcttgccgcggctgccgctggagccgttcagccttgtggccgacagctttttagaggacgggaagtcggacgacgggcgggacgatgacagcgacgactaaaatgtcggatgtgggccaagggtgtgccacgcagcggcggtcgcggccgtcgcgcatgacctcttgctatgcgcgccgcgcccaggcgctgccgtgagacagctgtcttgaccaggccagttgccgccaccgttgttggccgcggaagcaggcgccgctgccgccgccattgcggcatgtgcagacgactagtaatcgagctcggcagcttccttggtctgaacccatcggtgtcgtacagctaaaaccgcgaagtcacgatatcctatagcaaattttggggctgcaggaattc

SEQ ID NO: 21325 - DNA, 1076 bp, Oryza sativa
  Clone ID: TF_OsC179266_1
ctcctcctctctgaatgtctactatctacatgagccagctacctgctactctccctctaatggagggggatcaggatcaggggctctacccagccttccatagagcaaaggaccctcctatcttgttccctttcatgatcgacagcgccgtcgagcaccaagggcaaatctatggagatcagggcttgaggaggcagcaggttttgggtgaatccaatcaacagttcaatgatcacatgatgatgggcggatcagatgtcttcctcacaccgtctccgttccgaccaaccatccaaagcatcggcagcgacatgatccagcgatcatcttatgatccatacgatatcgagagtaacaacaagcagcatgccaatggatcaaccagcaagtggatgtcgacgccgccaatgaagatgaggatcataaggaagggggcggcaaccgatcctgagggcggggcggtgagaaagccaaggagaagagcacaagcgcaccaggatgagagccagcaacaactgcagcaagctttgggtgtcgttagagtgtgctcggactgcaacaccaccaagacccccttgtggagaagtggtccttgtggccccaagtccctttgcaacgcgtgtggcatcaggcaaaggaaggcgcggcgggcgatggccgctgctgccaacggcggagcggcggtggcgccggcaaagagcgtggccgcggcgccggtgaacaataagccggcggcgaagaaggagaagagggcggcggacgtcgaccggtcgctgccgttcaagaaacggtgcaagatggtcgatcacgttgctgctgccgtcgctgccaccaagcccacggctgctggagaagtagtggccgccgctccgaaggaccaagatcacgtcatcgtcgtcggtggcgagaacgccgccgccacctccatgccggcacagaacccgatatccaaggcggcggcgaccgccgctgccgccgccgcctctccggcgttcttccacggcctccctcgcgacgagatcaccgacgccgccatgctgctcatgaccctatcctgtggcctcgtccacagctag

SEQ ID NO: 21326 - DNA, 1672 bp, Oryza sativa
  Clone ID: TF_OsC25297_1
tttttggtgttttttttttttttttataccaacagaattgattgatctctctcatagaggaggaagaacttgcaagggaggtaggtaccaacaaattaattaacaaaaaagcattgaaaaatatctggaataaggcaaaaaagagaaaaaaagggagaggaaataaacaagagaaagggagacgggagaatttcgcaaaaggatctaagcccgcgcgtctgtgctgtgcatgcatccatccatgcatgcgatgtgatgcgtagctgcgcctgcatggctcgctctggacgccgcgtgcgccgcttgatcagcacacgccgtagtcgcggaacatgagctccggcctcccggtcgccgcggcggatcccgcggcggcggcggcggcggctgctgctgcggccgcggcggcgtcgcggtggctgccgcggatgatgaggagctccttctggcggcgcagctccatgaccttgcggtgggagttggagtgctgcgtcagcacgaacgtggggctcgccgccggcctgtactccggcatcagccgcccggacttgaacctcacgccgcacgcgttgcacagggtcttggggcccaggggccccgtccgccactgcggcgtcttctccgacgcgcagtgcgtgcaccgccgcacgccggcctccatgcccacctccgcccccgcggggccggggctcttcttgccgcggctgccgcctcctgagccgttcggcctcgcggtgcccgatggcttgttcgaggacgggaagtcggacgacgagcacgacgacgacggcgacgactgggacggcgggcgcgggacgagggagtgccacgcggcggcggccgcggccgtcgcgcgcgacctcttgctacgggcgccgcggccaggcgccgccgtgaggcagctgtcttggccggccgagctgccgccgccgttgttggccgcggaagcagccgccgccgccattgcggcgtgcgcggacgactggtaattcggcatgtcggagtaggagtcgtcgacgaacttggatagccactccagctcggcagcgtcctcggtgggtatgtagaagtcgtcggcgaaggagagcatcgacgtctggtgatctgacgacgtggccgacggcgtggcgcccgacggctcgcccatgccgccgatgtggtggtggtggtggtgcccgtggtcacctgcggcggcggcggcagcggaggccgggaagaagtcgtgggcgccgggagtgttggagaggtcgaggaggtcgtcgacgcgcatggcgtcgcccatcgccgcctgatgaggcatcccgtagtaatggtggtggtggtggtgcgcggcggagtacccgccgccgccgcctcctccgccgtggtggcccatcatcggcgcggcggcgatgccaccggaggcgttgtggtacgtgctcatccccatgccgaggtcgacgcccatggccatttcccactccgacgccatcgcgagctagccactgccttggccgtacgtaccacacggtcacgttctgaattggcaagaagctggttgtcactggagttcccttgaaacgggcagtgcaactaccgcccgtttgatgcagtacgagctagagctatctatctttttgccactagctaagtgagtgtagtgatgactgatgagagggccggctccctgcag

SEQ ID NO: 21327 - DNA, 660 bp, Oryza sativa; identical to SEQ ID NO: 11745
  Clone ID: TF_OsC154673_1

SEQ ID NO: 21328 - DNA, 1475 bp, Oryza sativa
  Clone ID: TF_OsC84482_1
ggcacgagggagagagagagagagaactagtctcgagtttttttttttttttttttttttttttggttgttttttttttttttttttttttttttttttttttttttgcaagacaatggtgggataacaaaggtagcaaccacccattggtattaaactgatgatctccaacaactagcagattaatttctcaagttaaaaaacggctagagctaacaaagagttcatgacgcctaactagattctgctttcgttttctcagcatctaaggctgagagcccctaaaagctcaatgcagcagattgagatgtgattatcagctcacttctacgaccaaggagcccgcctaaaattcaatgagacagattaagatgttcttcactatcagcttacttctacaactgaagagttcctaaaactaaacgcaacagatcgagacgttcccgaccaccagttcacttccttgggtgtggaacagaattcctcagctgcatgaccttcttatgagaattggagtgtatgtcactcacaaaagttggactattagcaggcctgtattccggcagcagcctgccagacttgaacctcacaccgcaagcattgcatagcgtcttaggccccaagggaccggtcctccactgtggcgtcttgtaggacaagcaatgggtgcacctcttcattggctcctccgatagcagctcatcattcacataaacagccttcttgatcttcttcttatctcgccgctttcctatgtcctgttctttgtcaatctcttggccatagcgcttcttggaactggtggtgtgcccattcctcgcctcaatcctcagacgacaagcatcgcaggtaggccctgatggaccatcccaccactgtggtgattggctggacaaacaatagctacaagtgatcaccagttgctcctgctggaattgcattcctgcactcattttgtaattctcttcctcctcttgttcttgctcttggacaagttcttcatctttgtccttcttggggaggataagctcactctctgctagccagtccttatgatcgagcaggagtagcggtggctcgacaaacagcgtgatacaatgttggtcatcagtgtcgcttatgacagatgccaggctccttttcttttttcttgcattggtagatgagcgtggtggtaactttggttttgcagcaccttgacttgccattgtaataggcggtagttctgcagagacagggtttgtgcaggatgcagaggttgacaagcagtcctctacatagacagagagccactctatgccacttctatcactttccgtggcgggctggtgcgggaacaactcctccagcgaggaggcggccgcattcggcgggtgcacatccatgcccagcgacgaggaggagcagccgcacggttgaggagagagaaagaggagagagagagagagagagagaagcggaggaagaagaggggt

SEQ ID NO: 21329 - DNA, 930 bp, Oryza sativa
  Clone ID: TF_OsC86749_1
ccaccgcaccacgacggccgcccccgcgtcgccgcccgagtagcccgtatctggacgcccggccacaagccgccctcgtcgtcgcccgacatctacctcgtcaggaggacaccgaagctgccggtgacgcggcctccccgtaccaagcaagctccgcccacagcgcccgcgcccgcgcctccgccgccgccgccgcagccggcgtcgccgaagacgaagacgaaggcgaaggcgaagaagccgaagaggaagagaagctgcgtgcactgcggctcgacggagacgccgcagtggcgggaggggccgacggggcgcggcacgctgtgcaacgcgtgcggcgtgcggtacaggcaagggaggctgctgccggagtaccgccccaaggggagccccaccttctcgccgtccgtgcacgccgccaaccaccgccaggtgctcgagctccgccgccagcagcggcagagcaccaacccctccactccaccgccgccgccggtgtccgccgccgagccaatccccgacgagcaaaaagaagaggtggtaagcgtgccagtcgccgccgccgcgcccgccaccgacggcggcgcggcgagctcgctggacgcgctgctgctcgacgggccgtcggcgccgctcatcgtggacggcgacgatttcttggttagttaggtagccagaaaaaaaaaagaggaataatttcagctgagaatgagatgaggaataccaatttttcgtttgatttttcaggaaaaacagttttcccacctgacattgtgattcaacgtcgatcctgggaaaaatctttgcgtgaaatttagctagttttgctgcccagatgaactagttctggtgcttggtagctgatgaagttgaaaccggttttaatggatcaagggggatggatgttcaatgccaaaaaaaaaaaaaaaa

SEQ ID NO: 21330 - DNA, 2737 bp, Oryza sativa
  Clone ID: TF_OsC45687_1
cggcacgagggtagtactacatacacctcctcttatagccccggggttgaattccaccgacccgcggcacgcatccttttttctccatccccctccttccgttcttccatttacctccacctatatagcactccggaattgcgccatctctctgccttaggagtacagtgaagtgctctccatataattgcagtggtgcaaggcaggcagcaactttcttcttcttcctcctatcataatctgctcatccttttcctcctctggagcaaccatgtccatgcagaaggtgtactagatatatagagttagttcgcagctgctccctacttacataaacaaacgcattcagatagccagcttcttgatcggcaacagcagctagttagagtgcaacaagaggtagcagagacaattttttttggcaaggcaagcaaaagctgatcgaggagagcgatcgagcaggtgttgatcgatcggtgcgaggaaacagagacaattttcccacacagattgtgatttggtagcagcagcaatggcgggcgttggattcgtggaggacatgctgcgggagcagagcctcctggaggcgacctgcggcgacctcttcgaccacatcgacgacctgctcgacttccccaaggaggagtcggccgccgacgtgctcctgctcgacgcgccggcgccagggagcccgctgtcctcgcgcatcatcggcggccacgccaccatggcggcggcgccgccaccgccgccgcagatgatggcgctccccccgccgccggcccccgcgaaggacgacgcgtcggcgctgttcgacgcggccggcgcgctcggcgccgaggtgttcgaccgcaaggacgcccacattggcccgtgtgatgagctggacatggacatggcgcagctggagtggctgtcggggctgttcgacgatggaaccatcccgcacgagccgagttttccgggcgtcaactgcgcggcgccgatcaaggcgtcggcgctgacggcgaacgccggcgtcgtgctgccggacaaggcggaggaggcgctgttccgcagctccagccccatctccgtgctggagcacagcggcttcaacgtggcaaccaatgggggctcctcctcgtcgtcctcctcgtcggcgtcctcctcgtcggagtcgttctccggcagcggccgcgcgtggtccgcgcccgtgtcgccgcgcccggagccgcccgtgctcgtcatcccggcgcgcgcgcgcagcaaacggtctaggccgtccgcgttcccggctgtccgcggcgcgccggcggcgacggagaccaccatcctggtgccgacgccaatgtactcgtccacctcgtcgcactcggatcccgagagcattgccgagtccaacccgcacccgccgccgatgaagaagaagaagaaggccaagaagccggccgctccggccgccgcctctgacgccgaggccgacgccgacgcggcggacgccgactacgaggaaggcggcgcgctcgcgctcccgccgggcaccgtgcggcggtgcacgcattgccagatcgagaagacgccgcagtggcgcgcgggcccgctcggccccaagacgctctgcaacgcgtgcggcgtccgctacaagtccggccgcctcttcccggagtaccgcccggcggcgagccccaccttcatgccgtccatccattccaactcccacaagaaggtggtggagatgcgccagaaggcaacccggaccgccgacccgtcctgcgacctcctgcagtacatccgccgccgggattaatctcccggcggcggcggcggcgtcgtcggaggacggttggtcgtcggtctcagtcccccttagctatatatgtatacatgttagtatgtatgcatgcatgcttgcttcagtcgtcagtgcgtcgtcttcctcgtcatcaccatcaccatggacatggacatggacagcagtgtgatcatcagcagcattgccctcctgaagccatcatccatcatcgatcaccgcccgctctgcggcggctgccatcggcaccagcatcagcatcatcatcaatccatggatcgatcgccggggtcatactggcgttagtgcagctagggcttttcttggggttttatttttttcctttttgtctattgattaattggttccccttaaaaagatgattttttggttttgtatagaggtgggtgagagagagagaggaggaggccacgcagaaaatagatgaatcaccgtggttgttgcattgcagatttgcagttgcttgcaaaattaggtaggtgagaaggagagctaaaccagcagcagagggagacagatttagagaggaaaactttgcagctagtcagtcagtcaattaggaggaggaaaatgagatgtgttttttttaaggggggtgatgaggaggtggagtttgttggtttgctaattagaagtttcttcttgctagtagctactcaggggggacatccatcatagtttatattggagcttgatgtactgaactccgaaaaattctttttgcagttcatctatgtctagggattgataagtgttatttggtttctatactagcaattactttgtagcaattaattatatatctctatatgccttttttctgtttctcctgccttgttggttggtggtgcctccctctgtacaagttgtgatcatccaatttgaggagatatattcctttatgctctgaaaaaaaaaaaaaaa

SEQ ID NO: 21331 - DNA, 1240 bp, Oryza sativa
  Clone ID: TF_OsC98722_1
tggatcctcgcggttcccctccacgcgctccccgcttccctcctccattttgagatctaaatccaaatccctccccctttttcttctcaccctcaccacctcatcctccaccaccaccattccctcttcttctcctcctccttgcttctcccgccccttaacccctactgctccctcccagtagccggtgctaaccctagcttgctagctagattgctctctctggtagtagtagatccgtggagtggagatctgcccgcggatcgagcggcggcggcagagcaccagccgtgtctgcggcgcggtgtgcgcgggtgttgcggagcggcggctaagcggaggtgtgggaggagggggagtgctgcggcttccggggtgttagatccgccgatcctggcgccggagatggattcctcgtcggtcgagaaggggagtgggtcgatagatccggacgagcgcacggcctccggcgagcccaaggcgtgcaccgactgccacaccaccaagactccgctctggcgcggcggcccctccggccccaagtcgctgtgcaacgcgtgcgggatccggtaccggaagaagagacgggaggcgctggggctcgacgccggcgagggcggcgcggagcggcaggagaagaagaagagcaagagggagagaggggaggaggtgaccatggagctccgcatggtggggttcgggaaggaggtggtcctgaagcagcggcggcggatgcggcggaggagacgcctcggcgaggaggagaaggcggccatcctcctcatggccctctcctccggagtcatctacgcctgaaccaccaccctacctacctacccacctagcaacagcaagagagagagaagcagaggaaaggaggcagccatgggaaagagtgatttgcttgcttaacatgcatgatctcaaccgggagagactagacagatctctacccttttttttcttctcccctgcttagtttttccagctaattagttcgatcaaagtggaagccaagttaataatgatgatgatgatgtagtagctgctgttcttcctgttactgttacttgttcttgcctagctgtaatgttactagtagtgtttttagtagagcgtgtaacgttgcaatgtaagaaagagcttatgatccatcttctttctcttgttctttgcaagagattagctcctggatctgcaccaagtaatgcagtttttcagctgaaaaaaaaaaaaaaaa

SEQ ID NO: 21332 - DNA, 1341 bp, Oryza sativa
  unsure (1)..(1341): unsure at all n locations
  Clone ID: TF_OsC144448_1
atgccgtcctacgcgcaccaccacagttctctgggggatgacgaggaggagaacgggcgtttcttgagcctgtgtttgcttggtttctggaattttgggaatttatggtttttgctgtgtgtgtatgtgggtgccttttggacggagaaggatgggaagatggacgcgctgaaaagtagttgccggtcggaggaggcggccgacgagggggcggccgcggcgccgtcggcgtgggggatggttgagagggacgggttctccgtcgaggagttgctcgacctcgaggagatctgcgaggatgggaagatggacgcgctgaaaagtagttgccggtcggaggaggcggccgacgagggggaggaaaagtcgaaggacgactcccagccgtcgtccgtcgtaacgtacgagcttgtggcgcccccgccgccgcctccggagctgcttgacggaaaaggacgccgccgaggagaacgagcaggcgctggccctcgtcgccgcgccagaggaggaaaagtcgaaggacgactcccagccgtcgtccgtcgtaacgtacgagcttgtggcgcccccgccgccgcctccggagattgttgacctcctcaggacggagcttaccgcgcgctgccacccgcgtcctatccggtgcggactccgaccatctgcgcgctgtcaacggaggcgctggtgccggtgaaggcgaaacgcagcaagcgctctcgggccacggcgtggtctctctcgggggcaccgcctttctcggactccacgtcatcctcgtccacaaccaccacctcctcgtgctcctcgtcggcttcgttctcgtcgttctcgccgctcctcaagtttgagtggcacccgctcggcggcacgtcggacctcccggacgatcaccttctgccgccggggaagaagtccaagcacggtaagaacggcaagaacaagcctaagaagcgtggccgcaagccgaagcagctcccaccacatccctcgggcgcggcggcgtcggcccccgcgccgggcgaccggcgctgtagccactgcggcgtgcagaagaccccgcagtggcgcgcggggccggagggcgccaagacgctctgcaacgcgtgcggcgtccgctacaagtccggccggctcctccccgagtaccgcccggcgtgcagccccaccttcgtgagcgccatccactccaactcccaccgcaaggtgctcgagatgaggcgcaagaaggaggtcggctccggactcctcaccgccgccgccgccgcagcgcccgccgtggcgtcgttctaggtacngcccggcgtgcagcccaccttcgtnagcncnatccactccaacttc

SEQ ID NO: 21333 - DNA, 2005 bp, Oryza sativa
  unsure (1)..(2005): unsure at all n locations
  Clone ID: TF_OsC54448_1
ggttttccccccgtcgcgccgcgcccctgcccctcgccactccttccgtatcgctcttgcggagcccccccgccgaccgctctctcgccctccctcccctcccctcctcctcgtcgtcctccaatccgctctccaccgcgaacgcttcccaattaaaccctactctctctctctctctctctctctctccgccctcacgttatctccgcctccttctccacgcacgcacagaagagaaaaagaaaatcatgaaagaataagcattagcaaaaggtgaggtagaaaggagaggagatatagacgaattcggttttcaagaactgcgtggtggtgaagtagggatcgatggaggtggcggcggcggactacgccggcggggtccgtgtcaagaaggaggccggaggctgcggcggcagcggggacatgttcctcgtcgatgacctcctcgacctgccgtgcgacgaggaggaggaggagacggggttgtgcggggcgtacggcggcggcggcgccggcctgggagcgggcgtcgtcggaggtggcggggatgaccgcgcggccgggaacgcgtcggccgactcgtcgacggtgacggccgtcgacagctgcagcaactcattctccggcctcgccgacggggacttctccggcgggctgtgcgagccgtatgaacaactcgcggagctggaatgggtgtccacctacatgggcgaggagaccttgcccacggaggatctccggaagcttcagctcatctccggcatccccgccgcgccgcgcgcgccgcccgctctggccgtctccgcggtgcagctgccggcaggaggcgccggcgcgctgcccacggaggcgcccgtgccggggaaggcgcggagcaagcggtcccgcgtcgcgccgtgcagctggtcgtcgcgcctgatggtcctgccgccgccgccggcgtcgccgccgtccccggcgtcggcggtcatctcgccgtccgagtcgggcaccgcggcgccggcattcccggccaagaaggcggcgaagtccgccaagaagaaggacgggccgtcccccgcgccggcgccgaacgcggccgcgcaggcggcggcggaggggaggaggtgcctccactgcgagacggacaagacgccgcagtggaggacggggcccatgggtcccaagacgctgtgcaacgcgtgcggggtgcggtacaagtccgggcggctcgtgccggagtaccggccggcggcgagcccgacgttcgtggtgtccaagcactccaactcccaccgcaaggtggtggagctgcggcgccagaaggagatgcagctcctgcaccaccaccagcagccgccgccgcacgtgggcgcgggcggcggcggcgccgccggagggctgctccacgtgacgagcccgctgctgttcgacgggccgacgtcgtcggcgccgctcttcgccggcgcggacgaattcctgatccataaccgcataagcccggactaccggcgccaggctacctaggaaactattcattagcccaggaataattcagcgataaaaacagctaatttttttttgtcctgcaaaccgcattttgggtactctttatttctcagcttcttaagtttcttttttctttnnttgagaattttagtgtttttcccccttagaagcagactctgaggagtttctttcgtagcacatttttttttcttttgattnttgnatgcaggactcttagaagaagaggaacaggagcagttttcattgtttcnncnanaannnnnntntnnnnnnnnnnnnnnnnnctcttgaggggggcccggacccaattcgccctttatgagtgtttaccgccctacatggccgtgttttacacgtgggaatggaaaacctgcgttcccactaatggcttgagaaaatcccttttcagatggtaattacaaaggccgaccatgcctttccaaatgccccctaattggatggaacccctttacgcctttaaacgggggggttgtct

SEQ ID NO: 21334 - DNA, 1422 bp, Oryza sativa
  Clone ID: TF_OsC54448_2
tcctccccttccgtctctccgcgctccagctgcacgccaattaaaccctactcctcttgcgttgcgttatctgcggttccgtctcccactactcgcgcacacgtagaaacggaaggagaaacaaacaaaaggcgccgagtaacgcagatagagagttgtttccgcaccgagcgcgtccgcggcagtgtgtgtgtgtagcggtagcgcacgcgcggctcgcgggcgcgccggttgcaccagctgtgcgttgcggcgacgatggaggtgacggccgagttcggcggcgcctactacggcggcgcggcgggccgcgagaagaaggcgctgcagcaggggtgcggggaccacttcgccgtggacgacctcctcgtgttgccctacggcgaggaggatgaaacaacaagggagggtgaggccaccggcggtaaggaggaggctgccggctttgggaacgcgtcggcggactcgtcgaccataacggccctggatagctgcagcaattccttcggcctagccgacggcgacttccccggcgagctgtgcgagccgtacgatcaactcgcggagctggaatggctatccaactatatgaacgagggagacgacgcattcgccaccgaggacctccagaagctgcagctcatctccggcatcccctccggtgggttctcgacggcgagcgtcccgtcggctcaagctcaagctgcgtcggcggctgcctccatggcagtgcagcccggcggcttcctgccggaggcccctgtccccgccaaggcacgaagcaagcgctcccgcgctgcgcctggcaactggtcgtcccgcctgctcgtgctgccgccgcctccggcctccccgccgtccccggcatccatggccatctcgccggcggagtctggcgtgtcggcgcatgcgttccctattaagaagccgtcgaagccggctaagaagaaagacgcgccggcgccaccggcgcaggcgcagctctcgagcgtgccggtgcactcgggcggctcggcgccagcggccgcggccggggaagggaggcggtgcctgcactgcgagactgacaagacgccacagtggaggacggggccgatggggcccaagacactgtgcaacgcgtgcggggtgcggtacaagtccgggcgactggtgccggagtaccggccggcggcgagccccaccttcatggtatcgaagcactccaactcccaccgcaaggtgctggagctgcgccggcagaaggagatgcaccagcagacgccgcatcatcaccagccgcaggtggccgccgccggtggagtggggagcctaatgcacatgcagagctccatgctgttcgacggagtgtcgcccgtcgtgagcggcgacgacttcttgatccaccaccacctaaggacagacttccggccgcccatctag

SEQ ID NO: 21335 - DNA, 2679 bp, Oryza sativa
  Clone ID: TF_OsC155692_1
atgtcgctccggccgagcgagcggatggggatccgccagaagggctacaaggcgtcgatggacgcggcggaggggcggcggcggcgggaggacatcaccgtgatactccgcaaggccgaccgcgatcgcgccctcaaggagaagaggcggcgccccacggccaccgccgccgccgaggggttgccgcaggcggcgcactcgtcggccatcgagaagaagttggagagcctgccgatgatggtgcaggggttgtactcggatgacagcagcatgcagttggagtcgaccacgcagttcaggaagctgctctctgtcgaccattgtcctccaattgatgaggtgattagatctggagtgctccctcgctttgtggaattcctcaccagggaggagtacccccagctccagtttgaggcagcatgggctctcaccaatattgcttcaggaacagcagccaacacaatggcagttattgaacatggtgctgtgcccatctttgtgaagctcctcagctcaccaagagaggatgctgtctgggccctgggaaatgtggctggggattccacaaaatgccgtaacctggttcttatgcatggtgcaatgttaccgctactgcagcagctcaatgagcatgctaaactctcgatgctgaggaacagtgcctggaccctttctaacttctgccgtggcaagccgcagcctgacttcaagcatgttgaacctgcgcttccagtgctgcgggagctcatcctctctcaagatgaggagatcctaacggactcatgttgggcactctcttacctgtcagatggttctaatgacaatatacaagctgtgattgaaactggcgtgtgtgattggcttgttgagctccttagccatccttcacctgtggtgctcattcctgctctccgcacggttggcaacattgtaactggggatgatgcgcagacccagagtaaattaaccaaaactgcagatactggacaaaattatttgcaaaactacggatttaatccacaatactatggaaccacagatttagtgctgactttaagcatgtgtattgttggtcatccccaagcacttccctgtcttttcaatcttttgacaacaactcaaaagaaaagcgtcaagagagaagcttgctggacaatctccaacatcacagctggaactaaagagcagattcaggctgtgatcgattcaaacataattgctcctctattgcatctgttgcaacatgctgagtttgatgtcaaaaaggaggctgtttgggcaatttctaatgccacatctggtgggacattcaatcagatagagtatcttgttagtcagggttgcatcaagccgctttgtgatttacttgttcaccaagattccaaaacagtgttaacttgtttggaggcccttgataatatcttgagggttggggaggctaagaagaacttgggggcttgtaatatgaacatatttgtgccgatggttgatgaagctgatggcttggacaaaattgaggatctccagaaccatgacaatgttgagatatataataaggcagtttatgtgcttgagtcatactgggtgcaggaggatgaccaacagccctttcttattccatctgtatctgaatctgaatctgacaatgaaatgtttcagtttggcagtttcggtaaagtttcggtgaagtgcccgatttggatggaaatgcaccgtagctgtctgttcagggggctttccagaatcggagagtcaagttatccgagtcatggtttggtcctgctaacttgttatgaggcagcagtcaggcggttggttcatatggattatggttctccacacaagggggtgggtactggaaattggtcggtcggggaagggcatactcttgcttgtgttgtcgggttagctatttctttcgccttccttccactagcgagaacacggttgcccgtgctcctttattcacaacctccatgaacaaaccggaagcaagaactagagaaaaaatacgaacgattctcttctccaaccaacgctgtgttaatccggatgggctccaccgatcggaaggtggtggggatcggcgtggcggaggaagggaggaggagctgcgtcgaatgccgcgccaccaccacgcccatgtggcgcagcggcccgaccggccccaggtctctatgcaacgcttgcggaatccggtaccggaagaagaggaggcaggatcttgggctggacctgaaccagccacagaagcaggagcatggtgaggtaatacctgaagtaaaagacagtaacagcaacagcaacaactgcaacagtgggagtggaaatagcagcagcaacttgcaggttgttccgaaaaggaggcttctgatgggtgtggaggaggctgcattgttgctaatgacattgtcgtccccatctgcatccacattgctacatggctgacaatatcctgctcacccccaatcgccaaatgtccatagtacatactacatacaaagcacacaccaccaatggttccagatcatacatggctttttggttaatcaaggatcaaataggggcacgggcccttatctgaaaaacatgatgatgataatggcataatccgagggcagggatttgtggcaatctgtgacttcctttcgtctttttcgtccctttccatcgttatca

SEQ ID NO: 21336 - DNA, 2202 bp, Oryza sativa
  Clone ID: TF_OsC52874_1
tttctttcccctctcctcctctcctctaccttctctctaaaagactggatacagaacaaaaaaaagggaaaaaacagaaagaaaggaaagaaagaagaacacctaccaagcaagtcttggtctttgagttcatgggctgtggaattgttcccaggaatcccctctggctctgaaaagattcacaccgagcaacagttctttgatttttttccccctttgttttgctgaagaattgcttgtacagaactgcttctttcctgtttccgcttggttttccggtgtttattttgttggaattttcttgggccctttcttcttcgcttgtggaggcgaggggagaagagaggcatgggaaagcaaggaccttgccgtcattgcggagtcaccagtactcctctctggagaaatgggccaccagataagccagtgctctgcaatgcatgtggctcaagatggagaactaagggttcgctgacgaattacacaccaatgcatgctcgggatgatattgatgctgaggaacctagagctagcaagctgaaacctccaacattgaagctgaaggaacagaagcaactgaagaaaaatccaagccacatcacaatggagaatggaccattttctgatcaaaacttccgtaagatgggagatcctgacctaagtaatcgatctggttctggatcagcactatcatactcagagagttgtgccccctatggcactgctgatgcaagtgaaatgactgcttcagcacaatcacatgcttgggaatcacttgtgccatcaaagagaaggagttgtgtcactcggcctaagccttcacaaatggaaaaacttgcaaaggatcttaattccataatgcatgaagagcagctactttacctttcaggatcctcagaggaggatctaatttaccatagtgcaactcctgtggattcctttgagatgggatatggaagtatgcttctcagaccaaattcaaaatcactggaggaagaatcagaagcaagctctattcctgctgataataagtcatatattactagtgaatcttactcagggtcggtctcatttgtatatagtgaaagcaaggcaacaagcaaccaaaatgttataactgaacagccaaagaagtttctggtgcaaacatcagataatgctagaagggctaatctccatactgaaaatcaggatactctggagaatgcaaactcacctttagtttccctacatatggagggaaaagacagtgaagaaacaagagtaaagaccagtgcttcaaatcgccttacaaagtccaccatgaatcctctgaaaaggcctcatgacacccacttccaaagctccgtagaactaagaggaaccatgaggagtcctaaaagagtttctaaatatggtgatgctatgggtctaaagtgccaagcgtcgtttatgccgaaaccaggcaatggcaaagatttagcctgcagtgacagagcacttaacttattcatgttacccccggataaactatccatgctggttcctcctcagtatgccaacactgattctgatcaagacctgttgctggatgttcctcttaatgctcggcacccagaggccgagcttctttgccagccatctcaactgagctcagtagcccacagctccacctcagaggctgggaatgccggaggagaggggcgccttaagcagccctagttccagttccagttaacaagcaacttaggaacaggaagtagctgtagtttactttagtttccctggatcatggttccctttatttaccggccactgatggggcgttctgcggtttgttcatgctcttatcgtcgtcgccctggtttactaggcaatgtgcgtctgccaagttggcaaaaattgtgtgttcagctaacacttctagctgtgcttttggagtagacttgtgcttgtttgtagcatatggcttttggagaaggtatataactcaacatggctgtatggaaaagaggtaatctccttatgggtaaaatgaaaaaggaaagaaagatggaagttattaggagttcatgtttgtgttgcaatcagtgttggggtttgctcacttctttttacaattgagcaccatggtgtcttgatggcaggtcatcttgaacaagaaatttgagattggtgatatcattgatgaatggtatgtacagttgtacataaacttggttc

SEQ ID NO: 21337 - DNA, 324 bp, Oryza sativa
  Clone ID: TF_uC-osflcyp057d06b1
tttttgatcagaggaaggtcggcctccctatgcgtttgaatgccatcactgtggggtaaatgcaaaggctacacctatgatgcgtcgtggacctgatgggccaagaacattatgcaatgcctgtggcctcatgtgggcaaacaaggggatgttgagggacctatcaaaagcacctcccacacctattcaagttgtggcattagttaatgatggtaatggaagtgctgctgctcctaccaccgagctagaaattcctgcaccagccactgtcaatggccacgaatcatcaacgtgagtatagcgatgtttgtcttgtggaggatc

SEQ ID NO: 21338 - DNA, 1338 bp, Oryza sativa
  Clone ID: TF_OsC51531_1
atgtcccaccacgacggcagcaagccctaccagccacgccggggccccgagcgcccccctcctccggccccggcggacgatgcggcggcgcacgtcgcgcccacggtcgaccacctcgccgcggtggccgccgaggccgaggcgatggcccgcttcgaggaggagcaccgcgccctgggggcggaggaggagtatgaggaggaggaggatgagttggaggaggaggaggaggagatggaggaggatgaggacgcgcaacatcatgagggggtgggcggcgaggtggctgtcccgatggacgcggaggccgccgcgcagctggacccgcacggcgggatgctcgccgcctccggcgctgtccagcccatggcgtccaaccaactcaccctctcgttccagggcgaggtctacgtcttcgactctgtctcccctgacaaggttcaagcagtgctcttgctactcggtggaagggagctgaacccaggtttgggctctggagcatcgtcatctgcgccatacagtaagaggttgaattttccacaccgggtggcatctttgatgcggttcagagaaaagcggaaggagcgcaactttgataagaagatccggtattctgttcggaaggaagttgcacttaggatgcagcgcaatagaggtcagtttacatcttcaaaaccaaagggtgatgaagcaacatcggaattgacagcttcagatggctccccaaactggggatcagtggaaggtcggcctccctctgctgctgaatgccatcactgtggtataaatgcaaaggctacacctatgatgcgtcgtggacctgatgggccaagaacattatgcaatgcctgtggcctcatgtgggcaaacaaggttaaaatgccaagttcaaggtgtcatgccaacttggggatgttgagggacctatcaaaagcacctcccacacctattcaagttgtggcatcagttaatgatggtccatttttaagcagttgctgaagctcctacccccgagcaagaaattccggcaccagccactgtcaatggccacgaatcaccaacgtgagtataccaatgtttgtcctgtggaggatcgcgaacatcatgccggcattatatccatgtagtttaactgtctgtactataacttgatgagaacctgttaggtacctaggccatttctttaccatcatttagggtttgaatgttgttctgcatatgttgtaagccatgaaaaatcatgcttccggtcattatggccgtagcaattttatttcttgttaaaactcttgggtggaagtgagaacaaaaaaggtaatgaagtgaatattttaaaaa

SEQ ID NO: 21339 - DNA, 858 bp, Oryza sativa
  unsure (1)..(858): unsure at all n locations
  Clone ID: TF_OsC204425_1
tccngggttgcaggattcggcacgagtttttctttctttctttccttcctccacaactactccctcctcttctctcctcttctcctccctttcgctccaagaaacgcagccaagctccgcttcgcttgcctccacgccaccatctgcgcgcgccactccgatcgatcgatcgatcgatcgatgggttcttccgatcagaaggtgatcgggatcgccgcggcggcagcggcggcggcggaggaggctgggaggcggtgctgcgtcgaatgcggcgccaccaccacgcccatgtggcgcggcggcccgaccggccccaggtcgctttgcaatgcgtgcgggatccggtacaggaagaagaggaggcaagagctaggcctagacaagaagcagcaacaagaacatcatcctcatcatcatcaacaacagcagcagcagtatcagcggcagcaacagcaacagcaacaagaagatcacagtgatgcagcaagttcagtaaaagacagtagcagcagcagtagcaacaaaagcagcagcctccaagtgatctctgaaatcgtcatatcgcgatccaaatccgattgcgaaggcgcgatggagggaaattgtgtgcccttgaagaggttagtgcaacaagtagattttctactatcatctactgggattacagaaagctgccaatgtgttgctgtttcttgtgccaatcagatgggattacagaaagctgccaatgtgttgctgtttcttgtgccaatcagagttctgacaatggaaaacaacagctgtgacattttgcatatcatcagaataataggcagaggctgtggcattgagtccaagaccagaataatagacagataa

SEQ ID NO: 21340 - DNA, 1774 bp, Oryza sativa
  Clone ID: TF_OsC140039_1
gcgcgcggcgcgtacctgcccctccctccgcttcctcgcgcgccccgcctggccgacctccgcctctctctccttcctcgcggccccctcccgagcgagcgcggcctggttagccgctagccggtcgcgccctctcgcgtctgccatctacttgggtccgcgcccggcgccgccccccctctcggccggcgacctccgccagctccctccccctatggagggggagcaccaccatcaccaccaggatcatcaccaaggccacttccaagccttctccctgcagcctaaggatcccccagtcttattcccctttgtgatcagtagaagaagcagcagcagcagccctagcgacagcaccactctaagctatggttcagaccatcacttgacacagcagcagcagcatcagcatcaagccatgcttgagccccaaaatatgattggaggatcatccgctggcatctttgcgacgccgttcccgaccgtcaagagcatccgcgacgacatgatcgagcggtcgcagttcgatccatacgataccgagaagctgcaggcgagctgcgggttagccaaggtcgtcgccggcggcaagtggagcgcggtgccagcggccaagatgaagatcacgaggaagatgggtgagccgtcgtccggtgtcactggcggggctgcgacgacggtggcgccgaagaagccgaggaggaggccggcgcaggcgtacgaggatcacggccatggcggcgccatgggccaagcttttggcgtgattagggtgtgctccgactgcaacaccaccaagactcccttgtggaggagtggcccgtgcggccccaagtcgctttgcaacgcgtgcggcatcaggcagaggaaggcgcggcgggcgatgatggcctccggactaccagcgtcccccaacgccgccggccccaaggcggccgcacatagcggcgccgctgcggtggcggctgcgcagccgaaggtgaagaaggagaagagagccgacgtcgaccggtcgtcgctgccgttcaagaaacggtgcaaggtcgtccaggtcgaggatcatcaaacgctgcccgccgccacaaacgcagccgccgcagctgccatggaggagacggccgagtccgccaccgtcgccccgcccccggcgccgacgacgaggggtggtactctcgtcgacagcatcgggctcagctggagcaagacccatgccgccgccaccgcctcctgcagcttccggccgtcaccggtggctcccggcttcgcggcggcggtgcaggacgagatcactgacgccgccatgctgctcatgacgctgtcctgcgggcttgtccggagctgagaaagaaaagctatacttcatctctgcatgcatccatcgatcgatcgattggcaccaagctagagagaccaatcgatggagatggagagaggtgcaggctttttgcagctagtgcgttagcctgttcttgctcgctcgatcgatcgtacactgccccccagttggaatgtctcttggcgtcttgtttcctgttcgagtcttgtgatctctgttactttgtgcactgtactagagagtgagagagagagtgaggtagaaacatcaagaggagattagaggagaaagaataattaagagaaaagtgtgagctagctaggtaagatttactgtactgtgagttcaatttggagtaagcttttttgggctgcttcacggctaattatgccactggctgctatatatgtatgtttggtcttcgtttaaaaaaaaata

SEQ ID NO: 21341 - DNA, 1922 bp, Oryza sativa
  Clone ID: TF_OsC156502_1
ccccggcgcctggggtcggctcggggctcgctccctccccggcgtccgcgccgctcccccgccatgagcggccaccacgaagctaagccctaccagccccgccgcggcccggctcccgccgacgaggaggccgcccccgccgctgcggcggacgaggcggaggcggaggcggaggtggaggctatggagcggtacgagcaggagcaggagtacgaggagggggaggagggggaggaggaggagtacgagggcggggagggggtccccatggacgccgacgcctccgccgcggccgtggcggggatggacccgcacggggagatggtgcccgtggccggcggggaggcgggcggcggctacccgcacgtggcgtcgaacaccctcacgctgtcgttccagggcgaggtctacgtcttcgagtccgtttccgccgagagggtgcaagctgtgctgttactgcttggaggaagagagctagcaccagggtcgggttcggtaccatcatcttcagcggcatacagtaagaagatgaattttcctcaccggatggcatcattgatgaggttccgggaaaagagaaaagagagaaactttgataagaagatccggtatactgttaggaaggaagttgcacttaggatgcagcgtaatagaggccagtttacatcatcaaaatcgaaggctgaagaagcaacatccgtcataactagttcggaaggttcgccaaattggggcgcagttgaaggtcgacctccatcagctgctgagtgccatcattgtggtattagtgcagcgtcaacacctatgatgcgccgtggtcctgatggcccaagaacattgtgcaatgcatgtggacttatgtgggcaaacaagggtacgatgagagaggtaacaaaaggtccccctgtgcccttgcaaattgtgccagctgcaaccaatgatgttaacggaatcgtcgaggcaacaggtgtcgagcagcacaattctgcagtcgaggaggcagtttctgctgcaaatggccatgaatcgcagtcgggagtcgcgtgatgcttgagggttcggatttaggaaaaaggaggaagatgcgtatcaatcactattgacttccatccgcaccacacgagctaaacgggaccagcgcgacgacggccatgggcgtggcggcgatggcggcatgccggtctctccgagatgatatatgcttgtggtccgactttttctcccatgtgtataaggattctattgtggaggcccagggtagaaggatgaactgcagctctgaatccgagaggcgtcaggctctcgagtcgcacgttgcagatctcaagagtgataatgagcgattgagaaggctgtatactgaaactttgttcaagttcaccaatcagatgaaatttcacacagagtctcgtaatctgaaggaagaactggaaaaggcaaacacgagattgctatccatggaagaggagtataagagggaaatcgaacaacttaagcttggcagtgaaatgaacagcaatgacctggagaacaagctcagctgcgctgttgttcagcaagcaaccaatgaagctgtgataaagcaactcaatctggaactggaagctcataaagctcacattgacatgctaaatagcaggttggagcaggttactgctgatgtgcaccagcagtataaaaacgagatccaggatctgaaggatgtagtcattgttgaacaggaggagaaaaatgacatgcataggaagcttcagaatactgaaaatgaattgaggatcatgaagatgaagcaggcagagcagcaaagggattccatctcggtccagcacgtggagacactgaagcagaaggtgatgaagttccggaaggagaacgagtccctaaagcggaggctggcgatctctgaacttgactgctcatga

SEQ ID NO: 21342 - DNA, 4523 bp, Oryza sativa
  Clone ID: TF_OsC64218_1
atgcccgacgcggcggccgccgccgccgccgcccaggacgccgacgccgtgatgcgcgacgcacccgccgacgcagcagcaggcggcggcgacaacgacgacgacgacggggatgacggcacagaagaggacgaggaggaggatgacgacgaggagggcgatgaagaggagctgccgccggccgaggatccggcggccccggagccggtctcggcgttgttgccggggagcccgaaccagctgacgctgctgttccagggcgaggtctacgtgttcgaatccgtgacgcctgagaaggttcaagctgttctgttattgttaggaagaagtgaaatgccaccaggtttagctaacatggttttaccaaatcaacgtgagaacagaggttatgatgatttacttcagagaacagacattcctgccaaaagggttgcttcactcattaggttccgtgaaaagcggaaggaaagaaatttcgataaaaaaatacgttacgccgtacgcaaagaagtggcactcaggatgcaacgtaggaagggtcaatttgccggaagagcaaatatggagggagagtccctatctccaggctgtgaacttgcttcccagggttcaggccaagattttctatctcgagaatcaaagtgtcagaattgtggcactagtgaaaaaatgacaccggcaatgcgccgtggtccagctggtccaaggactctgtgcaacgcctgcggactgatgtgggctaacaagggtaccctgagaaattgccccaaggcaaaagttgaatcttctgtggttgcaactgagcagagcaatgcagctgtctctccgagtggaatcgacaacaaggaattggtggtaccaaaccctgaaaacattaccgcaagccatggcgaagtgctgcattctttcaaaggagattggggagagattggggagattgtcactcgttttccgcgcacacgcttcccaaactactcaacggtgtccctgaggggatcgagcgcgagggagatcacccgcgacgcgctgctgcagaaggtctccgaggagcgccagctccgcagccacctccgccgcgccgccgccgcggcgctctccatccagcagctaaccaagtctgcgaaccaccttatgtggccatttcaaaaagaagtccacagagtcattaggcatgtggctgttgttcatatgtggcgtgtttggagaagatactcagtcataagaattgtttcagaacagctccatgaagagtgggaagcattaataaaccagcctgacattaatctgacaaaacaatggatatcaagcatgatgcttagaccatttcttttcttcgttactcaaccatcaagctggtacaagggacaacaggacaagactctaaactcgatttcggcatgcttcaaaatcatcttgaatagcataaactcaatggatgcaagcaaaaatttatgttcctttgctgtgggcacgccagaagaaaggtgtaaccattcttgctgtaaggatggaaacatggttcagattactgacactgctatgaggttggctgtgtctttaactgattgcaaaacatggaaaaaaattacaagtgaggatactagagctgctgatgcatctgtggagagcttgattgaatttattggtgcaagccagagtggtacatatagttgtcttaggagatatatagtaaatcttggttctcatgccttggagaagaaaatttcttcaatctcaacagatgatcagttcctgattactgctagtgcagtcaccattgcgctacgacctttccattctatgagagcagggaggggtgctgatctaaatggtgcttcaaaggaatactttacacttatactcacaattccggatctttgcaaacgcttgccacctctgttgttgcctgctataaagcacatatctatactacaaccatccctagatattttactgatctccaaggacaaaatatttgaggaaataactaaattggagaagtcaggggtttctagtggtggttctggtaccattccctactgtggatgggctcttggaaatcttgtaactttagctacagagcatgatgatttatccaattcagggtgctttgttcaagggctagattgttgcctatatgttgatgcaattaactgtgtttcccaaagcttactgaaattttttgaggagaacaaggaaatgcttcttagttttggtgatagtgttgatacatctttcatcaaggaaaatgataccagtgacagctgcagcagaacactgtttatggatcttctgaagccaatttaccagcagtggcacctcaggaaacttttggtgttggcaaaggaggatgctgtgtgcaagaggcaaaataatcatgacccagatacacagacccattcgcgtagcctaaaattgctggacattgtatgcttttactatcacatgctccgaattttctctttactgagtccatctattggttcattacctattctcaacatgctctcattcacccctggatttcttgttgatttatggggggcattagaaatatatatctttggacaagcagtccacaaattacaaggaccaaaacatgaaagagaatcagctacaagtagttcaggtgagcatgtatcctccatgaggcaaagaagaaatttcaaggatacatcaaacaagtggtcgaatgtgttccagaagattacaggaaaatcaaatgacgcagaggatacaaatttggttgacaatcctttaaattctgagcagaatggtgaagcattaattttatgggatattgaagccatgagacaaggatctgagtgtattggaaaggatttaatgcaaatgttgtatctgttttgtgctacgtatggacacctattgcttgtgctagatgatattgagttttacgagaagcaggttccttttaccctagagcagcagcgaaagattgcatcttcactcaatacgttcgtatacagtactttcattcagaatggtggaagcagcagcaaaccacttatagatgtgactgtgagatgtcttaatctactgtatgaaagggacagcagacacaagttttgtcctatttctctgtggctggcacctgctaggaatggccgaattccaatcgcagcggctgccagagcccatgatgcagcatttgctacattgccaggaaatcagttttttggaattcctatccggagctctgtacttactacaataccacatgtatatccatttgaggaaagagtgcagatgtttagagaatttattgagttggacaaagcatcccgaagagttactggagaagtatctgggccaggtccaggatctattgagatagttattcgtcgaggtcacattgttgaagatggatatagacagttgaactgtcttggatcaaaattgaagtcttgcattcatgtgtcgtttgtcagtgagtgtggccttcctgaagctggtttggactatggtggtctatcaaaggagtttttgacggatctgtctaaagctgccttcagtccagaatatgggcttttttcacaagcatcagcatctgatagcagcttaattccaagcaattctgctaaacttttggataatggcatcgatatgattgaatttcttggccgagttgttggcaaagcgctctatgaaggaattctattggactattgtttttcacctgtatttgtgcagaaacttcttgggcgctatagttttttggatgaactatcaactcttgattctgagctttacagaagtctaatgcaactcaagcactatgaaggggacgttgaggacctatgtttggattttactctgactgaagagttgggtggtagaagaattgtccatgaactgaggcctggtggtaaaaacatctcagttacaaatgaaaataaattgcactatgttcatgctatagcagactacaagctcaatcgtcagatactgccttttgcaaatgcattttacagaggactcggtgatctcatttcaccatcttggctgagcttgtttaatgctaacgaatttaatcagctgctttcaggcggattacaggattttgatgtcgatgatcttcggaacaacaccaagtatactggtggttataccgagtcaagtcgatctgttaaactcttctgggaggttatcaaaggatttaagccaacagaacgttgcatgctactgaagtttgtgacaagctgttcccgagctccattacttggattcaagtatttgcagccttctttcacaattcataaggttccatgtgatgttacactttgggctacaattggaggccaggacgtggatcgtcttccatctgcttccacgtgctataacacactcaagcttccaacatacaaacggtcaagtacgctgaggagcaaactgctatacgcgattagctcaaatactgggtttgaactctcgtagaggtatgaagattttatgtggatagattaaaaaattgggtttggcacgtgaattgagtgccatagcct

SEQ ID NO: 21343 - DNA, 590 bp, Oryza sativa
  Clone ID: TF_OsC64218_2
agagtccctatctccaggctgtgaacttgcttcccagggttcaggccaagattttctatctcgagaatcaaagtgtcagaattgtggcactagtgaaaaaatgacaccggcaatgcgccgtggtccagctggtccaaggactctgtgcaacgcctgcggactgatgtgggctaacaagggtaccctgagaaattgccccaaggcaaaagttgaatcttctgtggttgcaactgagcagagcaatgcagctgtctctccgagtggaatcgacaacaaggaattggtggtaccaaaccctgaaaacattaccgcaagccatggcgaagtcatgggcgacagcactccggcaaatgaagccgagataggagcgccaaaggcgcagtcacaataagtttatgtttaacctgtcatgattgaaaccaaaagattctggattctttgcctacaggctatacagctaaacatcacaatagaaggtctttttcctgaccaaagtatactgattctcctcaagtgtacaattcttgcttgccagcacatgtaaatgtaattgtaattaacataaagagcctgattggtgcctgttgtgt

SEQ ID NO: 21344 - DNA, 816 bp, Oryza sativa; identical to SEQ ID NO: 11738
  Clone ID: TF_OsC406373_1

SEQ ID NO: 21345 - DNA, 2151 bp, Oryza sativa
  Clone ID: TF_OsC321679_1
atggaggagttgctcggcttggtgcggggcttcgtcgacgtcctcgtcctcgccggcggccgcacctcgtctggcgccgccgccacctggcgctccggtgacgtcaagaaggccctccaatgggccctcttcttcgaggaggttttcaagaacctgcgtgacgatggtcagtacgatgagtctgcaagtgagctcgatgctgcactcgttcaactcgcttcaagcccgaatttccccaagggtattgaggatatccgatcaaaaacacttgcgatggcaagagagttggttgtgaagcattttctgaaaacaacgaatgcggagaatttaggtgctgtacttcaagcagttgttgagatggatatggatggcatttctgctagtggtgaatgcaatgtgtgccaagagtatgtgcaatcgattttagatatgaatttacctagtttgatgcgaaccaagaatgcccgtgatgttggacattccactagctctgatgaattttgtgaagaatccttgtttacgggtaattcacagattctacttaaagaactacagaagaagctggattcaggatcgtgtatttctttggctgagagagaactgaacacacttctaaaaagcatgaaaaaggacagctttgatagtgcaggaagtacattgtgcacctcagcaactgctcagaaaacacaaatcatcgacaagtttatcctgtggaagcaatggaaagcaaagtgtttgtcgtacttgcttgatgagcgtaccattcggatcatgtcaggaactaatatgatctttaatgctcccaaggagcagtggatgggattgtttgaaccattaaaagtttctgcagattctagtcaaagtggcatcattgaagtcatggagctatgcttgttgggattggttgcaaggcaatggaactcattaatagagagcatcatgtcacatacttttagttcctttcctatatcaaaacaatatgctgatctgcaccagttgcttcaaggaacaactcaggatgaatgccaagacaagcttcttggtttcaaggagatggatatttgtgagtatgcaaggcaatcattagagagcgaaccgtacatattatggcttctacctccagttcttactgctgcagcaatgccgccacggtcaagcttgtttaagatataccttgttgaaatagataagcaactcggtgaagctgcttccaaagaccgaaaatgcaattgccgagcagatgtgatcgactagcagccaatctcttccaactttacatcagatctttatatcaacaaaagtgaatcacctaacggcaagctttcttctgaatcatatgctattgatacctctggatgtgattcttccttgccgccaacacagtcattatacaagggtaatccaagttctttaaggatggtttatcctaaagtatctgaacagaatagttggagtcaagaaccactgcctggaccatttgtttgtccaactagtgttgatttcttcgatcaacaagatatgactatttttgaccaacaaatacaagataacattgcagcaagtcctagcaccaaccttgcaaagcaaaatgagtggttctcatctggcacttccttgcagtatttggaaagttcggtgtctgctggttctgtgctgaaggctgttgatgcgacaagtacaacaccttcaaattatttgcattgtcatgcacagagaaatacatcaaatcctcccaacttcaatgaaatttgttctgaagcaactccaaaagctgtccagaaagttatgaaggttgacggcttaactatataccatgtaaaaagccatctacagaagtatcgcacagttcatcatcgacctcaactatctgatggtcgaggcatggaaaccacctgtgaaggattaagggtccagattggcttgcagaaacaacttcacgaacaacttgagatccaaagaaagctgcagctgcaagtagaagaacacagcaagtacctcgccatgataatcgagaagcagagcgagagcctaagacaactgggagcattaccaagatctctagatgcacccactcaggttttggataacagggaaacgtgcgagggacaaacaggagatgctgattcagcagagcaaaaacctgagaaatga

SEQ ID NO: 21346 - DNA, 876 bp, Oryza sativa; identical to SEQ ID NO: 11760
  Clone ID: TF_OsC95862_1

SEQ ID NO: 21347 - DNA, 1448 bp, Oryza sativa
  Clone ID: TF_OsC159_1
gaaaaaaataaataaaaaaaaatcgcttggcttccccccgtctccttgcgcctccgccccctactccggcgagccgagccgccgtccgccgccgccgcatcgcgagtccttccctcgtcgggcagtcgcctgccccaggatatcaattcagccacacattccctacatcgttgctagttacacatgtagcacctctggttgaaagccaatactactactgctacctaatccaaagcaaggtgctgtaaattcaggtgatgagcaaatgcaatgtatcagccaaatcctatttccagcagtggtcagactcatggcaatcctactgctcatgagcaaatggagttagggaacaatgctattgtccctagtaacggagggaacaataaccctaatatggcggcaagacagcggttacgttggacaaatgagttgcatgaccgtttcgtggaggctgttactcagcttggtgggcctgatagagccactcctaagggagttctgagaattatgggtgtgccaggactgacaatataccatgtgaaaagtcacctacagaaataccggcttgcaaagtacattccagacccttcagctgatgacaacaaggatgaagataaagatccaaggaatctgctttctgcacttgaaggttcatctggaatgcagatatctgaagccctgaagctgcagatggaggtccagaagcggctacatgaacaattagaggtgcaaaggcagctacagctgcgaattgaggcgcaggggaagtatctccagaagatcatcgaagagcagcagcgtgtcattggtgcaggagcttccagagccacgtcaagcgaacaattgcctgactctgagaaaactaacccaccaactccagtaccaatttctgaatctccagttcagggtgcaccccatagcaagaacagtcaaagccaagttgagccgacgaagagcccttcgcatgatgatgctctcccgtgtggtgaacctttaacacctgactccagctgccggcctggttcaccgacgctcagcccaaagcatgagcgtgcagccaagagacagaggggcagtgatgcaggcgatgtcacagcattcgcagatggagaatttgtacttccaccaggcatctttgagtcaagcacaggatccgagttccaagaatgttcgatgccttattcaggccattagcctatggtgctctgatcatcagtccatcaccttgacaaagcttacatggtaagatttcatctgtagccgttggtagattttggccttgtcaacacaaatacctttagacagagagtctaggtttcaaaaggaaattgggcacatgacatgcagagtagctgtaattcttgcactgttgttagatgttcatggggactaatgtaactgatatttaattaaaaaatattattttagaatgacttatgttatgctta

SEQ ID NO: 21348 - DNA, 879 bp, Oryza sativa; identical to SEQ ID NO: 11777
  Clone ID: TF_OsC159_2

SEQ ID NO: 21349 - DNA, 2412 bp, Oryza sativa
  unsure (1)..(2412): unsure at all n locations
  Clone ID: TF_OsC19751_1
ntttcggtttcgtgggcgggggagagatggcgccggtggaggatggcggcggggtggagttccccgtggggatgaaggtgctggtggtggacgacgaccctacatgcctcgccgtgctcaagaggatgctcctcgagtgccgctacgacgcgacaacttgttctcaggctacaagagcattaactatgctgcgagagaacaggcgtggttttgatgttataattagcgatgttcatatgcctgatatggacggattcaggttacttgaacttgttggccttgagatggatctcccagttattatgatgtctgctgattcaaggacagatatcgttatgaaaggaataaaacatggagcatgtgactacttaattaaacccgtcagaatggaggagttgaagaacatctggcaacatgttataaggaaaaagtttaatgaaaacaaggagcatgagcattcaggtagcctagatgatacagatcgtaccagaccaaccaataacgataatgagtatgcttcatctgcaaatgatggagctgaaggtagctggaagtctcagaaaaagaaacgggataaagatgatgacgatggtgaattggaaagtggtgacccttcttctacatcaaagaaaccaagagttgtttggtcagttgaactccaccaacaatttgtaaacgcagttaatcatctggggatagacaaagctgttcccaagaaaattttggagttgatgaatgttcctggtttaactagggaaaatgtcgccagccatttgcagaagttcagattgtatctgaagaggattgctcagcatcatgccggaatagctaatccattctgcccgcctgcttctagtggtaaagtaggctcactgggaggacttgatttccaagctttggctgcctcaggtcagatccctcctcaagccctggccgccttgcaggatgagctcctagggcgacctacaaatagtttggtattgcctggaagggaccagtcatctttacggcttgctgcagtcaaaggaaacaagccccatggggagagagaaatagcatttggtcaacctatatacaagtgccagaataatgcatatggggcattccctcaaagcagtccagctgttggaggaatgccttcattttcagcttggcccaataacaaacttggtatggcagactcaaccggcacattgggaggcatgagtaattctcagaatagcaatatagtcttgcatgaattgcaacagcagccagatgccatgctgtcaggaacccttcactctctagatgtcaaaccttctgggatagttatgccttctcagtcattaaatactttctcagccagtgagggtctctcccctaatcaaaataccttgatgatacctgctcagtcatctggttttctagcggccatgcctccatccatgaagcatgaacctgttcttgcaacttctcaaccatcgagtagtctgttaggtggtattgatttggttaatcaagcttcaacaagtcagcccttaataagtgcccatggaggggggaatctttctggccttgtaaatcgtaatccaaatgtagtaccttctcaagggatcagtacttttcatactccaaataatccatatttggttagtccaaattctatgggaatgggctccaaacaaccacctggtgttcttaagacagaaaactctgacgctctgaaccatagctatggttatcttggtggtagcaacccccctatggactctggcttactctcttcacaatcaaaaaatacacagtttggtttactgggtcaggatgacatcactggtagctggtcgcctctgccgaatgttgacagttatggtaatactgttgggctaagccaccctgggtccagttcatctagttttcaaagttctaatgtggctcttgggaaattgcctgatcaagggcgaggaaagaatcatggatttgttggtaaaggtacttgcattccaagccgctttgcagtggatgagattgaatctccaactaacaacttgagtcacagcattggaagcagtggagatattatgagccctgatattttcggatttagtggacagatgtgaaggcttcttgaatttgtaagtagggtaatcactggaaacaatttttagtgggttgatgaacggttgccgtgtttttcatttcatccttttttttttccttctgtaattggtttataaagggaataatttatgtgacagcatgtcgaatcttggtttatagaaggttgcggtttaaacaactttggattaaaaagcctcaaaaaaaaaaaaaaaaaatcctttgttcaggggatccacacagttttctgattttgttgccaatcttcttctctcaaaaaaaaaaaaaaaaaactcaagactagcctcgtgc

SEQ ID NO: 21350 - DNA, 1500 bp, Oryza sativa
  Clone ID: TF_OsC60587_1
ccccgggctgcaggagaaaaaaaaaaatccccccgcaccccgaggcctccctctcctctctctctcgctctcccctccccgcgcgtcgctttcgccggacaccaccgccccccgccgctttcccctcctctcctctcctcgcgtcgcctccttccttccctttttgacccccccaattcccaactgggaatcccccctcggacggcggcggaagcggaagcagcagaggagagcatctggttcccctgcgctgcccgctttttggtggtggtggcggcggccggcggcggatcgctgcctcgccgtgccggtaaggaatcgaggctcctgttgagaaactctactactccaccatacaattatgctagttatagaacaaccacattctcatgatgtaccatgcaaagaagttctctgtaccctttggaccgcagagtacacagagtaacgatcatatgagtaatattggagcttttggcgggtcaaacatgggcagccctgctaatcctgcagggagtgggaaacaacggctacgttggacctcagatctccataaccgctttgtggatgctattgctcagcttggtggacctgatagagcaacacctaaaggggttctcactgtaatgggtgttcctgggatcacaatttatcatgtgaagagccatttgcagaaatatcgccttgcaaagtacataccagaatctcctgctgaaggctcaaaagacgaaaagaaggattctagcgattccctctctaacacagattctgcaccaggaatgcaaatcaatgaagctttgaagatgcaaatggaggtccagaagcgactccatgaacaacttgaggtgcaaaggcagctgcagctgagaattgaagcacaagggaagtacttgcagatgatcatagaggagcagcaaaagctcggtggatcactcaaagcttgtgaggagcagaagctaccgcattcaccaccaagcttagatgactacccagatagcatgcagccatctccaaagaaacccaagatggacaacctgtcacctgattcggtacgggatgtgacacagtcagattttgaatcccatttgattggtccttgggatcaagaggctgcattccgagtggatgaatttaaagctgaccctggtctgaacaaatcataaagcaaaacctcactcatcggaaattcttgatccaagatgttaacctccactgcgggccgatcgcatgtgaatatatatcctcttaacaacagagcgagccttgtaaggatctttggatccacatctgattccttcaccacggccaggtgttgttgtcactgtagtattcatcatcatcatacagctcttgtaattatcaggatgtcctaaaagccctagcaagcaattttccttcttttgaagggaaattgccctgagttgaatcatgtagccagaaagagtacacatttacacgcaatacatttgctgtgaaaaaaaaaaaaaaaaaaaaaaaaaa

SEQ ID NO: 21351 - DNA, 1835 bp, Oryza sativa
  Clone ID: TF_OsC14889_1
atgcggcggagcggagccccgccacaagaaaattactcggagagccgcgtgcgtctagttcagataaacctcgcgtacagtgcattcatcccgacagattggaacaacttggagacagctgagtcaaggcctaaatccacgggattaaacaaggttcgagccttcgaggagccaatgaggcgagcatgttctgctgccccttcagggtttcagaagacgagcttgcgaattccatccccctccacccacgaagcaccaaccggcgcgcagcaaaagaccagaaaattaaagccaggagcagaaaacaaccaatcatatcctgttggagtgcgtctttacaaactagagctggagactaaaaagaaccagataagcaaagaaaatgatagcgaggatatcatgaacaccaagaagattaagctgcacgactgccacttcggctcgccgctatgtgacccttcgccggcgccgcacctgctgagctccgccgccgccgccgggctgtcgttccacccggggctcgtgagctcggcggcgcagcaccagcagcacggcgcgggcggctggctgcacgaggagtactacgcgccgaggtcgtcgccgccgtcgtcgcttctcgcgcagacctgcgtcggctccaacgcgaccgcgttctacgccgccgagaacctgccgcagttcgacttcccagctctcggtacggcggcggcggcggcggccaaggcgccgttccggtcgtcggagagcgagctgtaccggccggtcgacccgctgctcctccgtgcggaccactcggtgaggacgtactacgtccggccgcagaagcgggattccggcgagaggacaccattgccgccgccgtcgcagcaacagcatcaggacagaatccacgggctcttcgccggcgctcccaccactcggcttctcagcggcgaacccaaaatccactcgtttccacctcaagtggcggcgaagccgattctgccggcgatggatgcgccgagcctgcagaaccagatggagaatcagctgacaaggaactgcatcggcgcggcaactccggtgacccccaccggaaacctcgccggatcaggtgcgccgagcaagacgcggatcaggtggacgcaggacctgcacgagcggttcgtcgactgcgtcaatcagctcggcggcgcagacaaggcaactccgaaggggattctgaagctgatgaattcggatggcctgacgatctaccacatcaagagccatctccagaaatatcgcatagcgaagtacatgccagcgtcatctgaagggaagcaactggagaaaagagcaacaggaaatgacatgcagaatctggaccccaaaactggaatgcaaatcacggaagcactgcgtgttcagctcgacgtgcagaggcgcctccatgaacagctagagattcagagaaatctgcagctgaggatagaggagcaggggaagaggctgcagaagatgttcgaggaccagctgaaggcgagcaggagcgtgatggaaccgcaggagctggacgacgtcgtcgccttcgccgccggcgacggagacgacgacgcgttcgatgacgtcgacgtgcagctgctggccgtcgctggcagcggctatgacgacgccgggttccagtccaaaataagctaggacagccttttttgcgttttgtgttttggcactttgatttgacaaatattgttctggttcttcgacgtatgatacgcacaatgctattttttgcccgtgtagttggcgaaagtttcaaaaagatattttaagaaaaaaaaaaaaaaaaaaaaaaaaaaaaaaggggcctcgtgccg

SEQ ID NO: 21352 - DNA, 2860 bp, Oryza sativa
  Clone ID: TF_OsC77895_1
tcatttctctgtctttaataccatctcgatctcccatccgaggggcatacttagctgccccccgggtctgaaccacaccctcccgaccgatccccgattccacgtgccacaattaaccaaagtcataccatagcattgattcagatctctcattcctgatgtccaaacagccagccacatgtgcatcaattttcagtatctgaaaaccctctgaaaaaacagattcagtattacaacaatccacatacattgtaacagatggatcatgcttgattctccaagtaagattttcgaagatgatctagtcggaatccgaagtaagatccatttcagggtgaaacgggcggagcaacttcgctaggtgctcccccatgtcctccacctcctccctcccgaagccccagtcatggaggaccagagacccgatggcgcctctcgcgacaccgtgcttctggaggctccccgatcgcctctctatgaaaggcaggacggcgctgcttgatcgtaaccgtgccgccattggtatcgattcgatgtcaagtgagccctttggctgggattcttctgtatggtcactaaggatctccccgtgccggccaatgttgcctctgaagattgacgggaacggaagggggacagggagggggcaaagagatgctgagagatgggaaaattttggctttgtctctctggcttcgtagactgaacataccgagtccttcacttgtgatatggaagtcctttgcccgcctctatcaagagctccatgaaccactagcgattcaactgaataaggatcttcgtcctcatcgctgatttcaggggtcaaagagtgcagcttcatctctatgttccccatagcatctctatctgtcaaagaaggggcaggcatcgctacatccagagcagtaaccatgttcatcaggttgcaaaaggacgaaagttttgaaaatgaaacagcatcatgaagagctctcataatggactccctttgattcctcctggatggtccaagggtcattggatccctcacacagtaaagcaatacaagtgtatttgtgtaatcatcagcaatgttctccaaaaactgtgcagctacactggaaaaacctcctgaatcatccacaataaactggatgccctgaatatggtcacattcttcaacaaagaaccttagcctctcattcatttcctctatttgcgaccagtctgaaacaacctcttgtgcgctgccatagttatcgaacttgtcaaagtcgagattaccggatgaactcaaagagccaagagaccctcgagaatcaacagacaccagacgagggcagtaggtagcaacaccctggtgcgtctcgccggagcggtagaggacgtccatgtccagcgcggcgttcttgaagaccggatcggcgtcggggtcgtcggcgagcccgagcaactcatcctggaagttccagaagtgggagccgacgtagttggcgaagccgccgacctgcaccgtcaccgcctccctcatcgccgccgccgccgctcggcgagctcctgaaccgcaaccgcaccggcggagtcgacgaagaagcttccctcgcagcagaaatctccacagacacgccggcgaggtttccccggtggggaatagcgccggcggcgaggtgctcagccaaacggcggcggcggcggcggcggcgcgagaaatcgtggaggttttcccctcactaccactgtggattgggttcccgtcctcctcttcctcctcaccgccgtcgcagctatcgccggcggtcactgacacggcgtggctcgacgacacggtgagctggagggggccctgcggcgagccagactgcgatgtgctgtgctgcgaggtggtgtattgctccggtggcagcggccatagacggccgccaaccgtctgatggtcaccgccaccatcaccgccgtcggatgcccgccgcgtgtgcagccggtacttctgcaggtggcttttgacttcatcattagtgaggccatcaaccttcatcagctccctaatctgcttgggagttgcagcttgtgggccaccgaggcgctggagcgcggcgacgaaccggcggtggagctccggagaccagcaccgtctggccttccgttgcaccgcctgctgccgctgcgctacagcgacatccgtgacggcgctgctggtggcgctcggcgccgccggacatgccggggcgtcggccatcgccacccgggaggagagggacaggtctggcacggcggcgtcggctttctccagtgattttgcaaacgccggcaaggtggccagtggcatgaacgcattggacaccttgtgctgctgcttcttgacgctgccgccattgctggtgctggtgcttgtgtggctcccgcagctccacagctgcgccgagctcatccagctccgcttgtcgttcgcgtccgcctccgccttcaccccctccgccgccgccgacgccgccgacttcctcttcgccgtcgccggcggcgcgaacatctccggtggcggcgccgccgccggagcctccacctgccgccgccgtagcagccgctgcttctccacctcgtccttgagccactcgatcacgtcggcgatgaggtggacgctgatggggagctcgcggcggaacacctccatcttggccttctcggcctcgaggctccggatgcaatcctcgaacctcgccgccgccgccgccgccgccgccgcctcgccgccgcccgccctcgccagcgcgcccgtcgccgtcctcgccgccagcatccgcatgtcgacgccgccgaggacgaaggccgccgccgccgccgcctcctcgtgctgcgccgccgacgccgacgacgaccccat

SEQ ID NO: 21353 - DNA, 1113 bp, Oryza sativa
  Clone ID: TF_OsC847_5
atgagggaggaggaggaaccgagctggttcgcgcggtgggaggagcagctgccggcgccggacgagctgatgccgctgtcgcagtcgctcatcacgcccgatctcgcggtggccttcgacatcccgacgcatgggggtggtggtggtggtggggtgggcgggggtgttgtcgggggtgatggggtgggaggtggaggtggtggtggtggtggtggtggcggtggcgtgggggcaggggagatgaacggcggggcgtcgtcggcggccgggtcgagcggcggcggcggcggcgggggaggtggcgacgagccggcgcggacgctcaagaggccccggctcgtgtggacgccgcagctgcacaagcggttcgtcgacgcggtggcgcacctcggcatcaagaacgccgtccccaagacgataatgcagctgatgagcgtcgatggcctcacgcgcgagaacgttgcgtcgcacctccagaagtaccgcctctacctcaagcgcatgcagggggtcggcaacggcggcggcggcggaggagggggcggcgccggcgccggcgggagccactcctccggctccggcacggacgccgccacggagcacctcttcgccaccgggccggtccccttcctcccgcccggccgcgcccccgccggcggggacccgtacccgccgttcgcccccatgggcgggcaccaccaccacccgccgcagatcggccacttccaccaccaccccgccgcgcgcccgctcggccactacggctccggcccgggcgccggcttcgaccacgggttcctcagccgggccgtcgccggaggcggcccgcccgtcggcccaccggggatgcaccaccgcatggtcggccccgccgccggcatggcgatgatggcgccgtcccccttcgccgaagagctggagctcggatcccgaggaggcggcggcggcggcgggcgccgcgagcttactctgttcccgacgaccggcgaccactgaggcaagcagacagacagaccgacggcggcgagccggcgacgggcaccgggcttccgtcctcgggtacatacaattcgttcgcttcatctccccctctgctagttccccaccagatcg

SEQ ID NO: 21354 - DNA, 1299 bp, Oryza sativa
  Clone ID: TF_OsC353740_1
atgctgcaaaggaacctgccgaatctctccctccggataagccctccggccgtctcgtcggcggcggcgccggtatcctccggaacaccgacgacggcggcgaggacgactctgccgaccggagtgattacagacgcagaaggaggaggcgaagtagcagcgttctttggaaaccctagctccggcagcgagccccccggtctgagcctggggctcgggccgacgacgccggcgcacgcggacgccggcggcggccgccatggcgaccaccacctgcagccgcaggggtgcgcgccgttcaagcgcgcggcggccagggcgtcccagctgccggcgggctcgaagcggagcgtccgcgcgccgcggatgcgatggaccaccgcgctccacgcccgcttcgtgcacgccgccgccccccccggcggccgcgggggagcgacgccgaagtcggtgctggagctgatgaacgtgaaggatctgacactggcgcatgtcaagagtcacctccagatgtataggacagtgaagagcacagacagatcatcccacattgcctcaggagaggcgcagctgcagcagcaggcaggaatggaggtggccatggaggcggcagctggaggaggaggaaatggtggtggtggtggtggtggggtggtgctaccgatgatgccggcatgtgacgacatggttgggatctgtagctcccctgcgccgcctgccgcagcgactagttccgctgctgcctacttcctctgcgcgacgacgacgtcaacagcaactgctccactggcagtagtgccatcgcctcctgctccaaccattcccacaaggtttcatgaatgcatatatggagatgttgatgtagtaatacagtcaatttcaatgttaataaatgttttgctacatggaattgataagagctgcctcgctttaacttttcttgagcacaggaggactgaccaaacgccagcgctggaaaagggtgtcgcgattgttgactcgttgcaccggtgtcagaagcataactactcaccagtgcttcaagatgctcttcatcagggagctgaagaagatcatcttattaccgggaacctaccaatgggaggagcatcagcacaagcgagcattgaggccatggcgactaccaactcttcaagccctgcaagctcatctccatcacttgcaagcctggagcagctgctacctgaagactcgtttgcgcccaacctggagatctccctcgggagacataactggaacatggaccatcctgaagaactcagcctgaaatacctgtga

SEQ ID NO: 21355 - DNA, 1299 bp, Oryza sativa
  Clone ID: TF_OsC140091_1
tcacttccttcctggaggtgagatcttcgcctgctcattggcggcgggccacgtggcaccagatgcgagggcttggtgtgctttctccatcatggaccgcatgtatttctcctgggcctcaaccctcatctggaggtgcttttctgcctcttgttgttcttggctctgggccttcttatctgccccattcacatgcacgttgcggccataggagatgttcctagccttggctccaacaattggactactcatcctctcacttcctacaggtagcactgtttgctgtggaggtggtgatctcatgtcaagcttagagctcatctgaccctcaaaccccttactgcccatggagtctcctcctgacatggtgatggcctccatcatcatcgtcgtcgtcgccggcgccgccatctggagctgatgatcgccggagatcttcgccggctcgccgccgccgtcgtcggcgccgggccacaccattgggctcttcccagtactggagctgtaattgaatgccaagaaggtatcaattgatggcctgatctccatctgctcatgctgctgatgcaggtgatctagatggcttcctccatataactgcagatcatcttgcagagaagggaagctcatggagctgccaatgtcaaggacagcttggctgcctagagatttgtatcctgcgtgccacgtggcgcaatctcctgaggacgagatggcttggtatgctttctccaggatggtctgcatgtatttcccctgggcctcaaccctcatctgaaggtgcttttgcacctctaattgttcatggaatcttctctgaacttccatcttcatccttagtgcctcattcacatgcacgtcattcatgcttcttcccatgatgcccgaagaagacgctgcattccgttgcatgtccattgcatccttaaccgagtggtcgttgaaatccttgtgctgcttcccaagtctgaatttctgaagatggctcttgagatggtaaagtgtgagtcccttgactcccataaccctcatgatcgtctttggagtcgccttgtccgggcctccgagctgggtgacggcgtcgacgaagcggtcatggagctcgacggtccagcggaggcgtggcttggggtcggtggtgaggacgaggccggagtcaccctggacgcacaacggcggccgatcattcgagctcgccgccgccgcggcgccgccgacgccgacgccgccactgagctgctgccgaatttgtcccgaaataatgtggccgggcaggagggcgggaaatacccgccccat

SEQ ID NO: 21356 - DNA, 617 bp, Oryza sativa
  Clone ID: TF_jC-osleLIB3474027c12b1
ctctcctcctccccctcccctcctcgttccgcgtgccgcgagaggatcgaaccctattcctttgttcttgaatctcttccaaatctgtaacagagagagagagagagggaggagatctagtgagtctagagagagagagaggttcttaagaggaggaggaaagctagctaggagaatagaatgttcccttcttcttctccttctccttctccttcctcctccaagaagcagcagcagctcagtggcggcgtcggcgtcggcggcgccgcggcggcggcgagctcgaatgatcggccgccgttgtgcgtccagggtgactccggcctcgtcctcaccaccgaccccaagccacgcctccgctggaccgtcgagctccatgaccgcttcgtcgacgccgtcacccagctcggaggcccggacaaggcgactccaaagacgatcatgagggttatgggagtcaagggactcacactttaccatctcaagagccatcttcagaaattcagacttgggaagcagcacaaggattttaacgaccactcggttaaagatgcaatggacatgcaacggaatgcaacgtcttctttggggcattatgggaaagaagcatgaaatga

SEQ ID NO: 21357 - DNA, 765 bp, Oryza sativa
  Clone ID: TF_OsC282077_1
gcacgagggtcgcattgctaattaggcttctagtattctagattgaaggaagctaatatgggagcgagaggaagaagagatcgaatgggcagcgccggcggctgcggggggtcgccgccggtcgtcgtccggcggtacaaccggagcgaggcgccgcggatgcggtggccggaggagctgcaccgccgcttcgtccacgccgtccgccgcctcggcggatgccacgaggcaacaccgaagcgaattatgcagctgatgggcgctaagggagtcagtatatcgcacgttaaaagccatcttcagatgtacaggaactccaacaacagtagcaatgttaaccgtcgtcatcctgtcaccccacaaatcgattggacgacgacggcgcagcaggatgaacagcagagacgacagatgagcagcttcagcttccttgcaacaagaacggtgccagcagctggaattgggagccatagccaccagagacctcaccggcggcaagcgctgcacgccggagacgacgacggctgcgagctgacgctgtcgatcagcggcggcgccgctgaagaatcgaaagacggtggctcgagcatcaccgacgacgacgacgagcttctgatccagccaccggcgcctaacatcatcaacgacgacggatcaacgcggcatggtcatcgtcatccttttgcttgttccacacagccgctgccgccggcggccattaaccttgaacttacgatttcttctccttgctgctggctcacctag

SEQ ID NO: 21358 - DNA, 1671 bp, Oryza sativa; identical to SEQ ID NO: 11790
  Clone ID: TF_OsC50227_1

SEQ ID NO: 21359 - DNA, 1841 bp, Oryza sativa
  Clone ID: TF_OsC11289_2
ctatctgtcaataccggacactttacctcctagagctgtttttgcggtggtttttgcacacgtggatgacactttggatgccacatcagcgaacaggatgttttgaccaactttttcatgagctgcagcggcagcggcgcggggaaggagcatctccgacaagctgttgcggtcatcggtggaggaggtttgcgcgccaagccgccgaaggagataggagaaagaggaggaggaggagatgggccccggcctgatccaccaccaccgcctcctcgacgccgatgtcggcggcggccggcggggggagcagcgccggcctggtactgacggccgaccccaagccccgcctgcggtggacggccgacctccacgaccgcttcgtcgacgccgttgcccagctcggcgggcccgacaaagcaacacccaaaactatcatgaggaccatgggtgtgaagggtctcaccctttttcacttgaaaagccaccttcagaaatacagattaggaaagcaatctggccaagagatggcagagccatccaaagacgcttcttatattttcgggagatcgtggggacgaggaaatacacgttcccgagggacctaaccaggacgtcgtcgttggtcatgatgcgcgtgatcctagtcgccgagatggaccacgagagaaacttgaatgacccggtcggggtcgtgaggattacctcctctccgagggtcaccagcgatcgcaacatcgactggctactggagatgttgtacaacatagtatctgaggcaactgaatggcttcagcatatctgaccatgatctaacctctgctggtgtcatgttgagctcttcagacaccttgagcccctccatcttccaccagctctctgtcagctcgatcagcctgcacagtcccggaggcaaatcctccccttttgcagctgatgctgacctgttctttcagaaggcgcctgaaaaacgcaagtcatattgagatacagataggtgaagatccatgacctgcttccttctggaaaagccagggggaattctgatgatatcttgcaggacgcccagcaattgtcctgtttctagtagctagactagcactgaacaaggctctcttaccttgatctatttcagttaatctagactgacctttgttaatatcctgtggctagtagtcgtagactgatcaagaacctttatcgatgcgtaagtatcttgtaattcagagtcctagctcccaaattaacacacttcggttatttgtatgcttttaaccccatataattgggaatactgaaagtgcaactcatattacatggatgtctcaaaagattatcaacctatgcggaacgaggcgggcggcggcggacagcaggctgctgtgcgtggggagtagtgcctcggcgtccttcgcggcgacgttgtggccgagacggaggtgggggtggagaagagccgcggctgggggcgacgtcgacgccgccggtacaggcgacgcggcaggacgtgcaggccgccatcgccatggcggtcgagctgcgggcgctccacgccgcggtggtggcggcggcgccggcgccagccgcagcccggcctcccgccggccgcgtcccccgcgctctccaggacggcagcggcagcggtggccaccgttggcgaggactacccggtgtttactccggtgatgatgcttttcttgcatacagtcacattgcatgctcttcttgccgacgaggaagatggcaatgacgaccaccgtcagagtcacctgcggaggtgacgacgcggatgacgcgacgaagacggcgacgtcggcggcggggttcctcccggcgaggtccat

SEQ ID NO: 21360 - DNA, 790 bp, Oryza sativa
  Clone ID: TF_OsC11289_3
gagcagcaacagcagcagaagaagagaagagcaagaggaggaggaggagatgttccccggcctgatccaccaccaccgcctcctcgacgccgatgtcggcggcggcggcggggggagcagcgccggcctggtactgacggccgaccccaagccccgcctgcggtggacggccgacctccacgaccgcttcgtcgacgccgtcgcccagctcggcgggcccgacaaagcaacacccaaaactatcatgaggacaatgggtgtgaagggtctcaccctttttcacttgaaaagccaccttcagaaatacagattaggaaagcaatctggcaaagagatggcagagcaatcaaaagacgcttcttatattttgggagctcaaagtggaacaaatctatctcctacagttccaactccagatttgaaagagagtcaagaactaaaagaagcactcagagcacagatggaagtgcaacgaaaattgcatgaacaagtggaggtccagaggcatgtacagatccgaatggaagcgtaccagaactacatcgacacgctactggagaaggcatgcaacatagtatctgagcaactgaatggcttcagcatatctgaccatgatctaacctctgctggtgtcatgttgagctcttcagacaccttgagcccctccatcttccaccagctctctgtcagctcgatcagcctgcacagtcccggaggcaaatcctccccttttgcagctgatgctgacctgttctttcagaaggcgcctgaaaaacgcaagtcatattga

SEQ ID NO: 21361 - DNA, 1965 bp, Oryza sativa
  Clone ID: TF_OsC1962_1
gcacctagtcaccaccgcaccaaccgcgcgcgaccggccccccgtcagtcgcaagctgagcctgagcgagcaactgatgccgctagctatagctgctgcctgcagcacgcagcgcccgtaacctaacgtatcatttacttccattgcactgcacatcctgtgagttcgttgtctgagtgagagctggacgtgctgcaccgagctcctggccgagatgcttgccgtgtcgccggcgatgtgccccgacattgaggaccgcgccgcggtggccggcgatgctggcatggaggtcgtcgggatgtcgtcggacgacatggatcagttcgacttctccgtcgatgacatagacttcggggacttcttcctgaggctggaggacggtgatgtgctcccggacctcgaggtcgacccggccgagatcttcaccgacttcgaggcaatcgcgacgagtggaggcgaaggtgtgcaggaccaggaggtgcccaccgtcgagctcttggcgcctgcggacgacgtcggtgtgctggatccgtgcggcgatgtcgtcgtcggggaggagaacgcggcgtttgccggggctggagaggagaagggagggtgtaaccaggacgatgatgcgggggaagcgaatgccgacgatggagccgcggcggttgaggccaagtcttcgtcgccgtcatcgacgacgtcgtcgtcgcaggaggctgagagccggcacaagtcatccagcaagagctcccatgggaagaagaaagcgaaggtggactggacgcctgagcttcaccggaggttcgtgcaggcggtggagcagctcggcatcgacaaggccgtgccgtcgaggatacttgagatcatggggatcgactctctcacccggcacaacatagccagccatcttcagaagtaccggtcacacagaaaacacatgattgcgagagaggcggaggcagcgagttggacccaacggcggcagatttacgccgccggtggaggtgctgttgcgaagaggccggagtccaacgcgtggaccgtgccaaccattggcttccctcctcctccgccaccaccaccatcaccggctccgatgcaacattttgctcgcccgttgcatgtttggggccacccgacgatggacccgtcccgagttccagtgtggccaccgcggcacctcgttccccgtggcccggcgccaccatgggttccaccgccgccgccgtcggaccctgctttctggcaccacccttacatgagggggccagcacatgtgccaactcaagggacaccttgcatggcgatgcccatgccagctgcgagatttcctgctccaccggtgccaggagttgtcccgtgtccaatgtataggccattgactccaccagcactggcgagcaagaatcagcaggacgcacagcttcaactccaggttcaaccatcaagcgagagcatcgacgcagctatcggtgatgttttatcgaaaccgtggttgcctttgcctcttggactgaagccaccttcagtggacagtgtgatgggcgagctgcagaggcaaggcgtagcaaacgttcctccagcgtgtggatgatatttgcatgatagattgatggttccgttactgactgattgcttatctggtcagttcaccaaaaaatgggaaaattcgccgacatgtccttttatttttcttttggccctagcgtttcttggacatctcgtttaatttttaacttgtgcagagttcgaaagacatctttgtttcgactccgggagaaattaacctgcgtattgtaaatgtaaaatgtatttgccgtgagttctcagcagctaagaataaattaaataatggtcctccgagtagggtttacttgaaataaaaaaaaaaaaaaaattcaaacgctctaatatctaaattccgcattgtactattttcacaaaggaaagtagcccccgcaattgcacaggcttctt

SEQ ID NO: 21362 - DNA, 2098 bp, Oryza sativa
  unsure (1)..(2098): unsure at all n locations
  Clone ID: TF_OsC50788_1
atgtctcgtccccaacctccaccgcttctccccgtcctccctgaactcggcggcctccaggcactcacctcatcctcggcttccctcgccacgtggctccgcggtggtggtcgggaggaggttgcagctatcaatctagatggcggtgatgcggtcatactggtcgttgtcccacctcacctcgccggccatggtggacaagggaggccgccccactacagcattgaacggaggaggtcacaacctcaattcgagtgccatgcgtatgtcaagggtgtaaaatatttggtattcgagttcaggggtgtaattcggctgacggcgatagctcacggagtggtaggcgacgtatttcttggcagcgaggcacctgtggtgacttcgtcaatttcaaaatatgctggtctagtcttcggaggtgctcatagggatgtgtcagccctaggagaggagaagctttctttttttggaaaatcgagtcaacaaaagagaataagcaccaatcagctctacaattctggaattccggtgactgtgccatcgcctctgcctgctataccagctaccctggatgaaaacattcccaggattccagatgggcagaatgttccgcgggagagagaattgagaagcacacctatgccacctcatcagaatcagagtactgttgctcctcttcatgggcattttcagtccagtaccgggtctgttgggcctctgcgttcgtcccaggcgataaggttctcttcagtttcaagcaatgagcaatatacaaatgccaatccttacaattctcaaccgccgagtagtgggagttcttcaacgctcaattatggatcacaatatggaggctttgaaccttccttgactgattttccaagagatgctgggccgacgtggtgtcctgatccagttgatggcttgcttggatatacagatgatgtccctgctgggaacaatttgactgaaaacagttctattgcagctggtgatgaacttgccaagcaaagtgaatggtggaatgattttatgaattatgactggaaagatattgataacacagcttgtactgaaactcaaccacaggttggaccagctgcgcaatcatctgtcgcagttcaccaatcagctgcccaacaatcagtttcatctcaatcaggagaaccttctgcagttgctataccctcgccctctggtgcctccaatacctccaactccaagacacgaatgagatggactcctgaacttcatgagcgctttgtagatgctgtcaatctacttggtggcagtgaaaaagctactcccaagggtgtgttaaagctaatgaaggcagacaatttgaccatttatcatgttaaaagtcaccttcagaaatacagaacagctcgatacagaccagaattgtctgaaggttcttcagaaaagaaggcagcctcaaaagaggacataccatcaatagatctgaaaggagggaactttgatctcactgaggcattgcgtctccagttagaactccaaaagaggcttcatgaacagcttgagatccaaagaagtttgcagctgagaattgaggagcaagggaagtgccttcagatgatgctcgagcagcagtgcatacctgggacagacaaggcggtggatgcttcaacctcagcagaaggaacaaagccatcttctgatcttccagaatcttctgccgtgaaggatgttccagagaacagtcagaacggaatagccaaacaaacaggagctagaatgtttttattggaattaaatattcaaactacagtaccccaaacacggcagcgacgattccgtgttaatgggatgatctttaggtttcagaaggcagcacaagcaaatttgcactgatgtactctttgtcaggtggtttgacttcttgctttctttgttgttagggactggatagcatggattaggaatttgattatgatgaactaattcaagaaattgccataatctttggtaccttgtgcgcctggaacatgtaaatggtaccaaacaacaatatgatatgtttaccttcatgttcaaaaaaaaaaaaaaaaaaaaaaaaaanaactcgagactagttctc

SEQ ID NO: 21363 - DNA, 762 bp, Oryza sativa
  Clone ID: TF_OsC245016_1
ccttgtcgttccccgggctgcagccgagatccccccccacttgcctcccacgtctctcctatggcgactactgctgccaccgcgccggatctgtcactccacataagcccgccttcgccgccggacatggccgccggcggcgagacgatggagcagttggctgagccaaagctgtgcctagggtttggcacggcggcggcggcggcggcggagcagtacaacaatggcggctgcaacctccagcagcagcagcggctgcaccaacctagccagatccagagattcaagaagagcgccagcggcggcagccctgtgtgctccggcggcgccaccggcaccggcggcgttgcggcggcgagatccgggaatggcggtggaggtgggaagaggagctctagggcgccgaggatgcgatggacgacggctctccatgcgcactttgtgcaagccgtcgagcttcttggaggccatgaaagagcgacaccaaagtcagtattggagttgatgaacgtgaaagatctcacgctggctcatgtgaagagtcacctgcaggcaacttatttgcttgacctggtgcagatgtatagaacagtgaagggaaccacagacagaacatgtgctgaaggccatgggcagatgagagatatgggctttctgaggagaggaggtggtggagtggatggctttgacgtgcttggtaacacctcttcaattgcaatcgccaatattagggccttcaatctcaaggatgcaaatatataa

SEQ ID NO: 21364 - DNA, 2461 bp, Oryza sativa
  Clone ID: TF_OsC1963_1
ccgcgtggctcccgggccgcccaagcaggccgtccccccgctgccgccgtcgccccgccgctccgtccacgcggatcttctgctccttcctatccattccctagctacctggagagatctccattagagcgaccttgccctcatgcactaccaccatccatgcatatgcatcgcgtcgtgattgcttgccctcttcactcccagctttgcctcttcatatcctgcacacccatcgcatatagaccttctaccatagagtggttgaattgaatctacgtgtgtatatagctgagaatcagaggcttagcgctggaggtttcggagtacatagatgtcgtggtcgcctgccgatcttgcgaggtggagaggggagagattttgggatgcttgaggtgtccacgctgcgaagccctaaggcggatcagcgggcgggcgtcggcggccaccatgtcgtcggcttcgtcccggcgccgccgtcgccggccgacatcgccgacgaggtcgacgcgttcatcgtcgacgacagctgcctgctcgagtacatcgacttcagctgctgcgacgtgccgttcttccacgccgacgacggcgacatcctcccggacctcgaggtcgaccccacggagctcctcgccgagttcgccagctccccggacgacgagccgccgccgacgacgtcggctccgggccccggcgagccagctgctgctgcaggagccaaggaagacgtgaaggaagatggagccgccgccgccgccgccgccgccgccgctgactacgacgggtcgccgccgccaccgcgggggaagaagaagaaggacgacgaggaaaggtcgtcgtcgttgccggaggagaaagacgcgaagaacggcggcggcgacgaggtcctgagcgcggtgacgacggaggattcctcggccggcgccgccaagtcgtgctcgccgtcggcagagggccacagcaagaggaagccgtcgtcgtcgtcgtcatcggcggcggccggcaagaactctcacggcaagcgcaaggtgaaggtggactggacgccggagttgcaccggcggttcgtgcaggcggtggagcagctcgggatagacaaggccgtgccgtccaggatcctggagctcatgggcatcgagtgcctcactcgccacaacatcgccagccatctccagaaatatcggtcgcacaggaaacatctgatggcgagggaggcggaggcggcgagctggacgcagaagcggcagatgtacaccgccgccgccgccgccgccgcggtggcagccggcggcgggccaaggaaggacgccgccgccgccactgcggcggtggccccgtgggtcatgccgaccatcggtttccctccgccgcacgcggcggcgatggtgcctcccccgccgcaccctccaccgttctgccggccgccgctgcacgtgtggggccacccgaccgccggcgtcgagccgaccaccgcggcggcgccaccaccaccctcgccgcacgcgcagccgccgttgctgcccgtctggccgcgccacctggcgccgccgccgccgccgctgccggcggcgtgggcgcacggccaccagccggcgccggtggacccggcggcgtactggcagcaacagtataacgcggcgaggaagtggggcccgcaggcagtgacaccggggacgccgtgtatgccgccaccgttgcctccagccgccatgttgcagaggtttcctgtaccgccggtgcctggaatggtgccgcaccccatgtacagaccgataccgccgccgtcaccgccgcaggggaataaactcgctgccttgcagcttcagcttgatgcccacccgtctaaggagagcatagacgcagccatcggagatgttttagtgaagccatggctgccgcttcccctcggcctcaagccaccgtcgctggacagcgtcatgtctgagctgcacaagcagggcatccccaaggtgccaccggcggcgagcggtgccgccggctgatacacatcgatcacaccgatcgtctcctccgccgccggcgaaaaaaaaaaaaacctctcctctctgctccggccggtctccacggtgagaagaggcaatgcaacccgtcgacttgtcgtagcttcgtcagtgtgaattgattcatcatgcattcacccaatgcgtgtagacgagctcgatgtgtaaactagctagtgtgtcttgtgtgtttgcattgacatatctgggtttttgctctcatggaatgtgcatgcagagacgatgcaggcgacatgcatgcctacctgagagttgcgtgtaaaatataaaatgttttgagatggaacgtacacggactgctatatatattttggacagctggtaattaaattgagaaataaccaaggaacttacacttaaaaaaaaaaaaaaaaaaaaaaaaaaacaagagaagcactcgtcccaactcctgcagcccg

SEQ ID NO: 21365 - DNA, 708 bp, Oryza sativa
  Clone ID: TF_OsC1713_3708
atgtttagatggggcctcacgctcgtggccgccgagaagctcgacggcgtggacgaagcgggcgtggagggagctcgtccaccgcatccgcggggcgcgcatgctgcggcgggacgccgggaggaggcgcggcatgaagcgggaggaggcgaacccgccgccggcgccggcgccgccgtagccgtgtcaccggcacggacgccgccgccgccgtcggctgccgcagccgccacggcagcacatcggccgccgatgtactgccctcctgctgctgctgcggcgtcgacagaaatgtaaatttcacaaatataaatgcgacaatcaaatgagacaaggagacgagagatttttcaccgaggttcggaaactcgccggtttcctactccccgttgaggcgagccaaactctaccgctcaaccacgaagccaccgcacgcccccttcgtcaaggggtgggcaaaatggatgaacacaaagctcaagtggggggccggtctgaccgcgcatgtgccgccagtcagaccggccttatgcgccggtcagaccgccgttgtggcgccggtgcgaccggccagggcacgccggtcagactgccagtgtggccggtctggctgcccctgttcaggccgaacccaatggttgcatcgatgacataccaagccaccccctaatatcatcattgttaccaaggcgagggaggatagtagct

SEQ ID NO: 21366 - DNA, 3374 bp, Oryza sativa
  Clone ID: TF_OsC7848_1
atggcgacgcgcggggaggcggcggcggcggcggcggcggaccgggacatggagctcttccggagcgggtccgcgccgccgacggtggagggcgcgatggccagcgccgccgcggccgccggcgacgtgttcctggacgatgagctccgggccgacccggtgtaccagagctactactactccaatgcgcacctcaacccgcgcctcccgccgccgctgctctccaaggaggactggcgctcggcgcagcaccgcctccgctcctccgccctcggcgggatcggcgacggcaggaggcagccggccgcggcggcgcagggggatgggctcgtggggttgcccgggatcgacctcgatcggcaggggagcttctccagtatcttccagtttcatcttatccaatccaaggagagctcgtatcagctggacatgggtaagcagggcgccgaccgcaacattagtgactttctggattcttctcggccacagtatgctctgcatcgtgagactagtagagctatgggtggtctgcagagtgacagcaatatacaaagcttggctgaagttcagaacaatgattcatcagcacatacatatgcctctcttttaggatcatctctttctagaagcgcatctccagatcctgagcttgttaggagggtccccagtccttgcctccctccaattggtgtgaaagtcagtgctgatgataagaagaacaatggtggttcatcttccttccgtcgaagttcgtctgctattggtgaatctgataatctgatagctgctttatctgggatgaatttatcatcatctggagcagctagtggacagcaaactgtgacccagtctgagctctaccaggatgttgataatgtccgtaagtttctatttgatcgtcagggtgatcaatcaaatggcaaccagcaacactcctatatgaaacatcccgaacaaggacattttaaggcacctgatggttactctgcaaactcgcctaattcttctatgataagaaatcaaattaatgctgctagtttcacatcgtttgacaatctgtctgctggatcaggctttgcttctcctaggatcggttctaggtccccaggtgggactttatcttcaaggcagaatttggttggtggatctaactttctgaattacaatggaattggaagtccaaatgcagcaacttctcttcaaacagccattgatccgtcatatattcagtaccttcaggcagctgagattgctgcccaactcgcagctagctgtgatgatcctctcatggccagtggccatctgggaagttcttatatggatttacttggtcctcagaaagcttatgctagtccattgcttcagtcacagaagaactgtggctactatggaaaccttggatttggccttggttattctggaagtcctttgatgagtcctgttcttccctcttcccctgctgcacctggtagtccacttaggcatggtgaacgcagcatgcgcatgcaatcaggtataagaaactttggtggttcctttggttcatggaatcctgacctaggtggaaagatgaacatcaatatgatgccttcactcctggaggaattcaagagcaacaaaagcaaatcttatgagctctcagaaattgctggtcatgttgttgagttcagtgctgatcaatatggaagccgattcatacagcaaaagctagaaacggccagtactgaagagaaggacatggtcttttcagaaatcatgcctcaagctctcacgttgatgaccgatgtatttggaaattatgttgttcagaagttctttgagcacggaagccctacccagataaaggaattggccgaccagcttattggacgtgttcttgctctcagtcttcagatgtatggatgccgggttatacagaaggctatagaggttgttggtttagatcagcagactaaaatggttgctgagctggatggacacgtcatgcgctgtgtacgtgatcaaaatgggaaccatgtaatacagaaatgcatagaatgcatccctcaacatgctatccagttcattgtctcaacattctatggtcaagttgtgatgttatccactcatccatatggttgtcgggttatacagagggtgctggagcattgtgatgatcctacaacacagcaaataatgatggatgagattctccagtccgtttgcttgctggctcaagatcaatacggcaactacgttgttcagcatgtactggagcacggaaaaccacatgagagatctgctattatcgagaagttaattggacaaatagttcaaatgagccagcaaaagtttgcctcaaatgtcattgagaagtgcttagcctttgggaatcctgtagaacgacagattttgatcagtgaaatgcttggatccactaatgagagtgaacaccttgaggtaatgatgaaagatcagtttgcaaactatgtggtgcagaaggtgctagagacttgtgatgatcagcagagggaggcgatccttacaaggataaaagcacatctgaacacgctgaagaagtatacctatgggaagcacatagtagcacgcgtagagaagcttgttgctgctggagagaagcgactagggcttcaaccagcatgcaccagtgccgcctgaagggcaagcaatgctgtacagctaacagtggctaggtttggtttgcacgctcctggtcgtcggctccagctaaaaacgtaggccagtatggcctatttgagaaataataaaaatacgcatcttaaaatcgcttgcactggagagtgtatattatgtagttgaggagcacgccgcaggcagcagggatggatgatggattgagtgagtgatgtgtgcaagtgctaatccaatatggaaggaagaagttgtaaagatgaggaggaagaagaagatgagtatacgtactctgctgtacaaattttatttagcactagagagatgaaaagaaaagagagaggaagctgttagctgtcaatatgagtgagtgatgggttgttgttgatgctgtaacataactagagtactactcagggcacaaaactagcctaagccctaagccttggtttttagtttttacagtttgaagctgaagctaattagtatcagctttgctgaacctggtttgttaatttgtcgcgcgccccccgtcacgctcgtcctgcgcctgtacgtggcgccccgcgcccgggagaacgtcgccagccacctccagaagtatcgcctctacgtgaagcggatgcagggcctctccaacgagggcccttccccctccgaccacatcttcgcctccacccccgtcccccacgcctccctccacgagcaggttccttctcctt

SEQ ID NO: 21367 - DNA, 1298 bp, Oryza sativa
  Clone ID: TF_OsC47644_1
ttggttttagctgcatccggggtattaattgcaaaaagaagaagaagaaggaatcaagaaaacccaaattgtgatgatgagatcgagacgcgaaatatatatctcttctccgatcgattgcgacgacgatgacgacgacgcagtggatatgatgtgcgtttcaagccattgctgctgatcattcttcgccatgacaagcttcagacgaactggctctggctaagctggggttggcgaaagatgatcagcaccaggttggtgtatatcacatatatatttcacatctcaggagaaatttttttttgatcattagcctctgtgattgccatctaatcatgatctgcaccgtgccagtcaggcctccctagagtgaactcgagactagggctactcagctcatggttggacacctgcgagctgctcgatctgcacggttccaagttctcaataggagaagacaatcctacggagcgatgggcgtccatgttgcaagaattggacgacagccatgggtcccttgaggagttgctccacctggtggtgctggtgttgccggccgacgactggtccatgtcgccgccgccgccgccgccgaccgagctggcggcgccctccgacgccgaccggccgtgctccgcgaacgccgccgcggccaccccgccgccgccgccacccctcaggcacatgctgtcgccgccgcccgacgccgcctgcccgccgccggcgaactcctcgtcgccggagccgccgtccgccggccctgaagaggctgcaggcttgtcagtgctcttcacggtgcgatacatctggaggtggctcttgacatgcgctagcgtcagatccttgacgtccatgagctccagcaccgacttgggcgtcgccctctcgtggccgccgaggagctcgacggcgtggacgaagcgggcgtggagggtgctcgtccagcgcatgcgcggcgcgcgcatgctgcgcttggcggggagcttgggcatgaagcgggacgcgagggcgccgacgaacggctggccgccgtggaggtggtggtggtggtggtgcgcgccgccgatgacgccgggggcggcggcgccggggacgccgtagctgcggagggtgtcggagacggagagcatgccgttgagcctccccgaggcggcggacagcatccggtggtggggggaggagaggaacgccgccgtggggtcgagcggcgacgacgcggcgcccggcggcgccgcgagcggggacggcgacgtggagggccacgtggatgggtggtggtacgagctgtagaatcccat

SEQ ID NO: 21368 - DNA, 762 bp, Oryza sativa
  Clone ID: TF_OsC12030_2
tcacagcttcgagggtgtttcacgagaaacgagatcagcagaaattagtaatagcaccatgacgagggacatgaagaatctactttcgtggttctccttgcaagatatcttcatgttcctgaccatatggttcagttgatgtgctttgggtttactaatctggtgtaccataaagggctcctctcttcttccctgcacccaaaatcccagtgcctgatgaaggcttgaagcagcagcagcaggagcacgagcacgagcggcagctgcagcatcgtgttgatctgatctcctcctatccatggacacttcttgcagtcgcatacaatcatcgatgaagtaccgggtgcctgcaggaggagcactactcctcatgtcactgctcccttccatgcatctgtatttgcctgaagcttctgtccctaccttggccctttttatgggtgggcacatgaattccttggggctctgctcatcactgccgaatgagtgctgcttcagatgtagctgtggctgcatatcgttttgtccaatgccatgccgtgtgcctctgtacatctgtaggtgacttttaacgtgagatatggtaagccctctgacatccatgagctgaagaatgagcttaggagttgctttttgttggccgccaaggcagtcgatggctcgcacgaagctgcggtggagctccgcggtccatctcagcctcggcaccttggacctgttgtactgcctcgcggctcccttcctctcgccgctaattcccat

SEQ ID NO: 21369 - DNA, 659 bp, Oryza sativa
  unsure (1)..(659): unsure at all n locations
  Clone ID: TF_LIB4370-035-R1-N1-F12
aggaaaaaagcaacatttttattcacccaagcatagcaagttcatcacactgtgatcactgatcatcagttcatcacaagaaaaaaacgacaatatgcgaatcttgtatatatttatgtataatatgtatgtaaatctcagggcgaaaatttggggtctgcccgacactttgcaagcctcatgggtggtagcagctcttcatctacacatccacaacaacccagctcatgatcagttcatcacttgagctctcaacagctcaatcttccctgtatacatggccaacactaccatcctcctcagagtttctgaatccattattggcaattttgcatcgatgcgcaagccgaaaatccatcaatctacctctctgtctagcaagattccacgagcacgatctttcgatcattttcggacatagccttccgacttgtcatcatcctcgcagcagctgcgncggccgggtggccgccgagacggccacccctgagccggagagctgaaggggaccttgaggtgatccggattgagagcagcttacttcctgagaagcccagagatcaccaacaagtacaatcgaatggctcgctgaagctgtgcctggtgatttccggttgtgcagccgatacttctggagatggcttttcacttcgtcgttg

SEQ ID NO: 21370 - DNA, 3462 bp, Oryza sativa
  Clone ID: TF_OsC7848_2
atggcgatgcgaggtgagccgtggcggcgccaggagggggagcaggcgcaggcggaggccgatcgggaacgcgagctggacctcttccgcagcggctccgcgccgcccacggtcgagggctccatgggcgcgctccacgccgccgccgccgccgacgtgttcctggaggacgagctccgggccgacccggcctaccactcctactactactccaacggcaacatcaaccctcgcctcccgccgccgctgctgtccaaggaggactggcgctccgcgcagcgccttcgccccggcttgggtgggatcggcgacgggaggaagcccagaggtggaggtggaggccgcggcggcggcggcgctggagggatgggtccaggggatggcctcattgggatgcccggtctcgagattggccgccagaatagcttctccggttttggcactataaaacgcctttctgtcgcaaaagtattggtcctgaaacttcttataattctattcaaggctaaagaaataacttctgacctatatatgctgcaggatgactcgtatcaacacgatacggatagacagggtgccaactgcaatggtacagacttgttgagttcttctaaagtgcagtatggtctacatcgtgagactggagctattagtggccttcactcagacagcaaagcaccatgcttgccagaaaaccagaatgaatcatcacactcatatgcatcaataataggatcatcactttcaagaagtgcatctccagatcctgaactagtgaggagagttcctagtccttgcctccccccaattggtgtgaaacttggtgctacagataagaagaataatgttggttcatcttctttcaattgtagttctcccaatattattgaatctgatgatttggtgtctgctctatctggtatgaacctgtcgtcatcaagagcaatgaacggaaacacaatggaccaatctaagctccatcaggatgtggatgatgttcgtaagttcctttttgatcagtacatggatcaaacaaatggcaatcagcgccattcctacatgaaacgttctgaacaaggacacgtgaaggttcctcaagaatattctggtgcttctatgaatccttctgttatgagaagccagatcaatgctggtggtttcacatcatttaacaactcatcggtgggatctggctttgcttctcctaggcttggatcccgatcaccaggtgggagtttatcttcacggcaaaatctaactggtgcatctaaccttccaaactacgttggaattggaagtccaactgcagcttctgcccaccagatgcctgttgatccactgtatgttcagttccttcgggcagcagaaattgctgcccttgcagctaactgtgaggatcctttgatggatagggctaatctaggaggttcttacatggatctatttggccctcagaaggcgtaccttagtccattgcttcagtcacagaagcaatatagttactacgggaatctcggggttggtcttggctatgctggtaactctttaacaagtcctattcttccctcgtcaccaggtggacctggtagtccacttaggcacggggatcgcagcatgcgctatccatctgggatgagaaattttggtggttcctttggctcctggaattcagatctcggtggtaagatggaggccaatttagttccatcacttctggaagaatttaagagcaacaaaagcaaatcatatgagctctctgaaatcgctggtcatgttgttgagttcagtgcggatcaatatggaagtagattcatacagcaaaagcttgaaacagccagcactgaagaaaaagacatggtttttgctgaaatcatgcctcaggctctcacattgatgactgatgtctttggaaactatgttgttcagaagttttttgagcatgggagctcagctcagataaaggagttggctgatcagctaattggacgtgtcttagcactcagcctccaaatgtatggttgccgagttatacagaaggccatagaagttgttgatttagatcagcagactaaaatggttgctgagcttgatggacaagtgatgcgctgtgtacgtgatcaaaatggaaatcacgttatacagaaatgtattgaatgcattccacagcatgctatccagttcattgtttcaaccttctatggtcaagttgtgatgctatcaactcatccatatggttgtcgggtgatacagagggtgctggagcattgtgatgatcctaaaacccagcaaatcatgatggatgagatcctacaatctgtttgcttgctggctacagaccagtatggtaactatgttgtccagcatgttctggaacatggcaaaccccacgagagatctgctattattgagaagttgattgggcagatagtacaaatgagccagcaaaagtttgcttcaaatgtcattgagaagtgtttagcctttgggaatcctgtggagcgtcaagtcctgattggtgaaatgcttggctccagtaatgagagcgaacatcttgaggtgatgatgaaagatcaatttgcaaactatgtggtacagaaggtgttagagacctgtgatgatcagcagagagagatgatccttacaaggataaaagctcatctgaacacactgaagaaatatacttacgggaagcatatagtggcacgcgtggaaaagctcgtcgcagccggagaaaatccgagtattatgggcgaggaggcgccggaggagtacgagctgggcggcggggaggacgagcgggtgatggagtgggagacggggctgcccggcgccgacgagctgaccccgctgtcgcagccgctggtgccggcggggctggcggcggcgttccgcatcccgccggagcccgggcgcacgctgctcgacgtgcaccgcgcgtcggcggcgacggtgtcccggttgcggcgcgcgtcgtcgtcgtcgtcgagctcgttcccggcgttcgcgtcgaagggagcgggaacgggagcggacgaggcggagtcagggggaggcgcggatggggggaacgggaacaccaacaacagcagcagcaagagggcgcggctggtgtggacgccgcagctgcacaagaggttcgtggaggtggtggcgcacctggggatgaagaacgcggtgcccaagacgatcatgcagctgatgaacgtggagggcctcacccgggagaacgtcgccagccacctccagaagtatcgcctctacgtgaagcggatgcagggcctctccaacgagggcccttccccctccgaccacatcttcgcctccacccccgtcccccacgcctccctccacgaccaggttccttctccttaccacccccacccccaccaccactcctacaacaacgccgcctatgccgccaccgtctcctcctaccaccactaccaccacgccaaccactga

SEQ ID NO: 21371 - DNA, 542 bp, Oryza sativa
  unsure (1)..(542): unsure at all n locations
  Clone ID: TF_uC-osflcyp085b05b1
tttaatctctcctcctcccagcaaagaggaggtggtggagatctcccaatccgcgggaatcactcgctgttcaccccgattcggcctccgctcgagctctgaatctcgggagctcctgatctggaggatgccaaatgtatgaaccaaagcccttctcaagcattgtactagctcacaacgatccagtttcccacaatcaacaaattgaacgtattaacaacaatgtagtatctaatagtggtgggaacagctcaaacagcaactttgccgccagacagcgcttacggtggactgatgacctccatgatcgttttgaggatgctgtaacacagctcggtggacccgacagggcaactccgaagggaattcttagaataatgggtgttcaagggttgaccatctatcatgtcaaaagccatctgcaaaaatatcggcttgctaaatacattccagatcccacagctgatggtgccaagtctgacagaaagatctcggagatttgcttgctgacattgaaagctcctncggaatggacatagggg

SEQ ID NO: 21372 - DNA, 502 bp, Oryza sativa
  Clone ID: TF_uC-osrocyp028f03b1
tgtgaatcccccctcggacggcggcggaagcggatgcagcataggagagcatctggttcccctgcgctgcccgatttttggtggtggcggctgcggtcggcgggagatcgatgcctcgacgtgccggtaagcattctcatgatgtaccatgcaaagaagttctgtgtaccctttggaccgtagagttcacagagtaacgagcatatgagcaatatcggagcttttggcgggtcaaacatgggcagccctgctcattctgcagggagtgggaaacaacggctacgttggacctcagatcttcataaccgttttgtggatgctcttgctcagcttggtggacctgatagagcaacacctaaaggggttctcactgtaatgggtgttcctgggatcacaatttataatgtgaagagccatgtgcagaaatataggcctgcaaagtacataccacaatcttccggctgaggctcaaaagaccaaaagacggattctagcgattccc

SEQ ID NO: 21373 - DNA, 1518 bp, Oryza sativa
  Clone ID: TF_OsC102690_1
cggcagcggcacggggaccgcagctccggcgcctcagctccagcttcagctttgggcttctcctatagcctcttttgacatcatatcagtgcagtggccggcggcgatatcatgcagcagcagcaacgagactagagctctcttcatcatcatatcgtcaagctgccatagatcgatcagagctggctgctggccggccggtgatccttcctataatttcctagctatgggaagtgcaggcaaggaggaggaggaggaggacggcggcggcggtgcaccggcggcggcggccaacaactacgggagctcgacgacgagcagtactacggaggaggagggatccggggagagcaggcggcgcacgtcgtcgtcgtcgtcggtgcgcccctacgtccgctccaagaaccctcgcctccgttggacgccggagctccacctctccttcgtccgcgccgtcgacaggctcggtggccaagatcgcgcaactcctaagctcgttcttcagctgatgaatgttagagggcttagcataggccatgtcaagagccatctccagatgtataggagcaagaagatcgatgagtccggccaggtgataggtggtgagtcatggagatcagatgatcatctgcaaatgcaaggtggtggccatgggggacaagcgtacaaccttggccatctttccctgcctgctctccatcatcgctctatcactgctggctccggtaccatcttccagtccaggtttggcaattcatggtccccatggagatgtcatggatcatactggctccctgcaggccatcacctgcttgttggatcaaaaccctattacccaccagcagctgaagctgaagctcctttccgcagatcaagtgctaggtatgtagctagagctaataccagcaaccatccagattttgtccaaggctcttcttcatctccagatgataatatcatgaaccatcaaagaccagttctgaaagagatgatctgcagtgagggtagtaaccatcaagaaggccctcttaatctggatctctcactcgatatctgtccgcggggcgagaagaggaagagagaatgcagctggaggaaacaagaggaagatcatgatcatgctactgttgctattggtgctgatcaagaagcagagagttgtgctactgggctctctctttctttgttctgatcatgtctcccctgttgaaagatgcaccatcactagtcctaccagtactatattgctgtactggcctggtgatatatcactagctagctatagtagctagatatcatatgttattgtggatgataaatcaaattagggaagaaaactcatgcagcagggacaagtactcttcatctcaccatatgactacactgtggtgatattttgtggtacttgtccttttatgcatgtatctagaggaagataaatatttattatgcatttcggttgttcattatccttcatatattttgactcattaatctagctgatatcccgattaatct

SEQ ID NO: 21374 - DNA, 499 bp, Oryza sativa
  Clone ID: TF_jC-osroLIB3475017g11b1
cccacgcgtccgaagaaccctcgcctccgttggacgccggagctccacctctccttcgtccgcgccgtcgacaggctcggtggccaagatcgcgcaactcctaagctcgttcttcagctgatgaatgttagagggcttagcataggccatgtcaagagccatctccagatgtataggagcaagaagatcgatgagtccggccaggtgataggtggtgagtcatggagatcagatgatcacctgcttgttggatcaaaaccctattacccaccagcagctgaagctgaagctcctttccgcagatcaagtgctagtgagggtagtaaccatcaagaaggccctcttaatctggatctctcactcgatatctgtccgcggggcgagaagaggaagagagaatgcagctggaggaaacaagaggaagatcatgatcatgctactgttgctattggtgctgatcaagaagcagagagttgtgctactgggctctctctttctt

SEQ ID NO: 21375 - DNA, 1543 bp, Oryza sativa
  Clone ID: TF_OsC43828_1
tccgtccacaatcaaaccacttccatctctcaattctcaagcacacacacaatccaacaagcttctcgaaattctcgatcgaggtggagtggtggtgtatgcgcgatggggctggatgtgggggaaatcggcgtcggcgcggcggacctgagcctggatctcaagatgttcgccgccaagagcttcggccgcgtcaggggcaaggacaccaccaccaccgccatgggtgactgcatccggaggctcgaggaggagatgggcaagatcgaggtcttccgccgcgagctccccctctgcgtccgcctcctcgccgacgtgattgatgtgatgaaggaggaggtggagaagaagggtggtgatcgtaaggaggatgaggaggacgccgccggcgacaagagcaactggatgagcaccgcgcagctctggactgggaattccggcggcccagacgccgccgccgctgatccagagaagcaggacaaggtgaggatctcgtcggaggcgaagtccaacggcggcgcgtttgtgggctctggcgcgccggctttcgcgcggccgaagcagagcttgatgaggaaggaggacatggcgtacgacgtcaggatgccggatctgtcgctgctctcgccgcctgcttccgccgccgccgccgacgaaagccgccgtcaggtcgtgggcttctcccaggccgcggcgagggctgccgccatggcggcgtctggccccgctctcagcctccagccccagcctcagccggcggcggcgcagcagcagcagcaggcgaggaagacgaggcggtgctggtcgccggacctccaccgcaagttcgtcgccgccttgcagcaactcggtggccctcaagttgccactccaaagcaaatcagggagctgatgaaggtggatggactgacaaatgacgaggtcaaaagccatcttcagaagtaccgcctgcacaaccggccgagagtgccaagctcaacaattgtgaaccaaccgattgtgctcatgcaagggctctgttacattcctcaagagcaaagcagctcccagtctggatcccctgagggtcctctccatttctcaggctcaggcatggccggtggcggctcatcggcggcgacggtcagctgcgaggaggaggatggcaggtctgagagctatggctggaaatgatccaagatgatgttgcatcagaaattttcatcacagctttggtgggttaggttaattgcggcgcggcgatgaaaaataataccagatcttcagggaggagtttgagaggagagactagtgtaggtgtttgtatacagtgagatcgagccttgagtgcttgagatgaaactgatggtgagttggttgttgtcatgtatatcgaaagagatgatactagctacagttttgcggcgagttttgccggttaaaggattcgggcagagctacagttttcgccctgagaattttacccaaaaaaaaaaaaaaaaaaaaaaaaaaaaaaaaaaaaaaaaaaaaaaatccccccgcccggtattactatagttctgat

SEQ ID NO: 21376 - DNA, 1528 bp, Oryza sativa
  Clone ID: TF_OsC331400_1
atggcttcttcgtcttctgacctaaccctagacgaccaccaccatctgacggcggtggctgcggcgtcggggcaggcgacgcagaagcttcaggagttcttgtcacgtctcgaggaagagaggctcaagatcgacgccttcaagcgtgagctccctctctgcatgcagcttctcaatcatgctatggaggcgtacaggcagcagctggaggcgtaccagatggggagccagcatagcgccgcggcggcggcggcggcgagggcgccgctggtgctcgaggagttcataccggtgaagaacatcgggatcgacgtcgtggcggcggacaaggcggcggcggcggggggcaacagcgtgtcgtcggagaaggcgagctggatggtgtcggcgcagctgtggaacgcgccggcgtcggcgtcggcggcggacacggcggcgaaggggccccagacgcccaaggagcactcggagcaccacccgctcgacacgagccccaagctgatcaccgcgctcgacggcggcggcggcggcggcggcgcgttcctgcccttctccaaggacaacgccatgggtgacggatcagccgccgccgccgccgcgctgccggagctcgcgctcgcgcccgcggagaaggcggcggacgcgatcaccatcgccgccggcgaggtcgacaagaagccgtacgcccacgacaacggcgtcgtggcgagatcgagagaagcccagaacggcgggaagccgccgtcgacgccatcggacgggcaggccgtcccgccgccgccacagccccaccggaaggcgcgccgttgctggtcgccggagctgcaccgccgcttcgtcaatgctcttcagatcctcggcggcgcccaagtggcgaccccgaagcagattcgcgagctgatgaaggttgatggattgaccaatgatgaggtgaaaagccatctccagaagtacaggttgcacacaagacggccgatgccgtcgccggcgccgccgacggcagcgacgccgcagctggtggtgctgggaggcatctgggtgccgccggagtacgcgacgcaggcggcggggccggccatctacggcgcgcacccggcgacgcagccgcactacacggcggcggtggcggcgcaggagtactaccaccaccaccaccaccacctgcagcaccaccccgccgccgccgccctggtgcaccaccgcgccgtagccccgcccccgccgctgccgcctcagcagcagctggcccctccctacagcgccaagtcgtcggcgtcggcgaggctcgggtccccggactccgacggccgtggcagcggcggcggcggcggcgccgccgcctccggagccggaagggacatgtccgagagcatcgaggaggaaggcgagggcgaggagcgggaggacgacgacgacgacgacgagatggcggcgaccaacaacgcccacgccgtcgacggcgacgacgacaacgacgagatcaacaccaccaccaccacgagcgcgggagcgattaactactaattaa

SEQ ID NO: 21377 - DNA, 1374 bp, Oryza sativa
  Clone ID: TF_OsC143589_1
ctcatttcatccccttcttccttcccctttcctagctattccacctgcacgcgcgtacgattccgatccagccatggcagtgtagatcgaaagagatcaagtagaagatttggtaagatgcttgagaggtagatagctacctagagaaggctgatcagcatcagcctgagagagatgaaggagaaggaagtgctagttgagattgttgaggatgatgagctgaagagatcgattggtagaaatcagctggacctcaacgaggaagttatggatgtcgagagcgaggagggagaagtcggcgatgatgaagatgacgaagatgaggaggatgacgacgacgacgatgatggtggtagcaccaccgatgttgccggaagcaggagctccagcaacaacagcagcaccaataacgtttcagagagcaaattgaagggcgacaaggatagcggtggcggcaggttggaggggatcaacggcggagagcagagggtgccatcggtgcggcagtacaaccggtcgaagctgcctcggctccggtggacaccggacctccacatggcctttgtccatgccgttgagaggctcggtggccaagagagagcaactcctaagttggtgcttcagatgatgaatgttagggggctcagcattgctcatgtaaaaagccacttgcagatgtatagaagcaagaagttggatcacgagggtcgccagatcagaggagccatcgcctcagtgttctctccaatggatttccatctgatgagaggcgatcgacgcttccacgacatgctcctccagcgagccgccgcgctctcctcctccaggcaggagcacggcggtttcttctcctcgagaagcggcggcggcggcggcggcctaccgccggaggccagccggctgtacggactcctccaacaccggcagtctccggcgatagcgacgatgcaaacattagacttcaagaacagcagtttcaggaaccaagagtggtcgttcagcttcaaccaccagcggaaggagacgatgaatccgtcgtcgtcgtcgtcgaccaccgcggcgatcaggcggtggccttcagccgccggcgcggtcgccgtcgtcgccggcgagcgacaaagactagcggagagattcggctactacaccgggaacggtggcgcgtcgtcgacgtctctgccgctcatcacgagggccgccatggcggcgccgccgccgatgtttgcggcggccgtggcgccgccgggacgtgatcaccatcgtcttccgtttggatggcacgccggcggcggcggcggcggcggcggtaataagaacaggtcgtcgtcggatcccgtggtgatcgatgaagccctagattcccgccgcctcgag

SEQ ID NO: 21378 - DNA, 1781 bp, Oryza sativa
  Clone ID: TF_OsC226770_1
atgggggaggtgaaggagaatgaggtggtagagatttttgagcatgatcatgacaacaagatcagatctcctgaaaactctgtgccaccagccatggtgctggacctcaacgagggcttcggcgagggcagcgaggaagggggagttggcgaagacggagatgaagaagacgatgatgaggacgacgacgacgacgacgatgacgatggcggtagcacaagcgaagttgccggaggagggaggagctccagcaacaacagcagcaccaaccacaattccgggagcgacaaggaccatgacatgaacagcagcagcagcaaggccgacggcggcggcgacagggtgccgacggtgcggcagtacaaccggtctaagctcccccggctccggtggacgcccgacctccacatggcgttcgtccacgccgtcgagaggttgggcggccaagaaagagcaacaccaaagcttgtgcttcagatgatgaatgtgagggggctcagcattgctcatgtcaaaagccatttgcagatgtacagaagcaaaaagctagaccacgagtctggccacgagagaggagccatctcatcagtgttttcgcccatggagttccacatgaggagaggggaccatcgtttccaccaccacgacatgttcttccagcgagccgccgccgctggcgtctcgccgttctcctccaggatgctgcacgagaacggcggcgggttcttcgcttcgaggaatcccggcttgccggagtccagccggctctacggtctcttccaacgccggcagcaagctcccatgcaaaaattcgacttcaagaactgcaatagcttcagtaggaaccaggagtgggcgttcaaccagcagcacgcggcggcgagggccgccggcgccgtcaacggccacggcccggcgaaagggctcatccacgagatgatcttccggaaggaaggaaagccgacgtcgcatctgttcgacgtgagggacgccatcgcctccacccgggtgacctcggcgaccacggccgccgccgccgaccaccggctagacggcgccgggaaggccggcaactttgattggatcgggagcagctcctcccggccgctcacgaggacaatgtcagcggcggcggcggctaccatgggcgaccaccaccatcttcggtggcgaggcggcgccgccggcagcgggaacacgacggcgtcgtcggatccggtggtcgcaagcgaagctgccctaggttccctgctcgagagggcaaagacgaaagcgaccgaggcgatgcgcctcgagacgccggtgaagatgacggcggcggcggtggcggcggaggagatcaacggcaggacgccggacttgcagctgagtttgagcccgaacgcgggagatcacagatcagccggcgagaagaggaagttcttgagtgagcaggaggtggacagtgacaagcagcagctgccactcacgctttccctgtcgctccggggtggtggcgacaatggcggcggcggcggcgcagaagccgccgggaggttagaggaagagatgacaggtagcagcagtagcaagaaggccgctctggggctgagtactttggatctgaccatgtcgatcaaggcattggagtgagatctttcaagtacttgtcccaaggccttccaagacatgcacactgcaccatgagattaattattaataagactgttaattttgtttaaccatgcttccagaccatatataatacatatatatcttatgttcaaaaaaaaaaaaaaaaa

SEQ ID NO: 21379 - DNA, 3918 bp, Oryza sativa
  Clone ID: TF_OsC4702_1
gcacgaggcacctctgagtagtagtcacaccatgacaccaaaggaaggagtagtcactggccagcgatgatttgcagtagtaacagatataggtcttaggcctccctgagaggctgagagagagagagagagagagagagagagagagagagatttggtgttggataggagaagagagtggagacagtgggggtgagaggattggaagcatccagattctgaatctcctgcaagcctacttcctgttatcttctttgggctttcagcaagcatccattgtgatgcactggccagtggatgataaagccatcaatcaactgaaccagcatgagctcccagagtgttgttgcagtgaagcagattactgctccggacaaaatagtggaaacctgtccatccacaaaacattctgcacataagctgttcgatgttaaaccggattttcaagggttgatagatgacaatttgtcatcctccagtcagtcctcaagcatcaagattgagctgatcagatcatcaagcttgccaaatatactgccgtttcagaaaagaagctctgaacctgaacctgaaagtccactgtctcatgtttcacatcccaatgtttcagagccagtttactcaaattcttcaaccttctgcacaagtttgttttcgtcgtcgtcgatggagacggagccgtgccggcaattgggcactctaccattcctgcctcaccctcctaagtgtgagcagcaggtttcagcagggcactcatcaagctcctccctgctagtacctggtggtgatggtgatattggcaatgctcatgatgaacctgaacagtcagatgatctgaaggatttcctcaatctctctggaggagatgcttctgatggcagcttccatggagaaaacaatgccatggcttttgctgagcagatggagttccagttcttgtctgagcagctagggattgccatcactgacaatgaggagagccctcggttagatgacatatacggcacgccgccgcaactttcatcacttccagtatcatcttgctccaaccagagtgtacagaaagcaggatctcctgtgaaagttcagcttagctcgcctcggtcatcttcgggatccgcgacaactaacaaggcgaggttgaggtggacactggagctccatgagcgttttgtagaggctgtgaacaagctagatggacctgaaaaggcaactcctaaaggtgtgctgaaacttatgaaagtagaaggcctgactatctaccatgtaaagagtcatttgcagaagtatcgcctcgcaaaatatctcccagagactaaggaagacaagaaggcatcctcagaggataagaaatctcagtcaggtagcagtggaaatgattcagtcaaaaagaagaacttacaagtggcagaagctctacgaatgcaaatggaggttcagaaacagcttcatgaacagttagaggtgcaaaggcaactgcagctgcgaatcgaagaacacgcaagatacctgcagagaatactggaagagcagcacaaggtcagcatcagcagcaactccctctcactgaaacccccagccgaatcgcaaccggaatcgccaaaaccaacatcagaaaagaaggaggccgaatccgaagcaggcgccgccacttcagctcagccatcatccgaggataaatcaccagacgcagaatgcaagtcgtcgccgccggtttgcactacccaagatactcagagaaggaggcttgaaaaggaaaagcatggcaaaactgtcgataaggaaacacagaaggtgagctgtaattactgtgggaaggtggttaggacatacaaccgtctggagcaccacttagcgggcatcaggggcaatgtttatccttgcagcttagtacctgacagtgtcaggcaaagcataaagagttcactagaggctcgcaagaaagattggatagcccgaaaaataggaaaacataaatcttctgagcttcctccagtaagaaatctatccctcacatctgctcatgcctgccgacctcttttgcagccaattacatccggtacggatcaagaaggctctgttagttggcaccgctgctttgttcacttcacaaataatttggtgcagcccggggaaactacacaagtaaatgcccatgatgtttcttgcaatgcaagttcatctcagaagggaggccagactatagaagtaactaggcctccatatcaaaatccgtgtatgatgaataagccaccggaaatatcttcagggcagagaattgatccattgagtttctctatggagaattcttcatcacagatgcaagattcggaatcctcaaaggagccaactaatgattacttgaattctcaggcaagaaagtcaataggcaagctcatctttgaagctggacttgagcctggtattctccacttgccatctttcaaggacatggttgatgtgcttgcctgggcccaggtggcaatccctacttatgaatcgattatggaggagcaactaagagaaattcaatgccatgcaagggatctcaagaaacactgggaaatgaatggctgcagtgtaattttggatacctgggagagtcgatgtggtaaaagcttcattagtgttttggtgcattgcagtaaaggcatgttgttcatcaaatcaatggatgtctctgatatcattgatgacgtggatgagctagcagtaatgcttttccgtgtggtggaagaggttggtgtcctcaacattgttcaggttatcacaaatgatgagtcaccttatatgcaagcagcagagcatgccgtgctaaagagatatggctactcgttcttcttcacactatgtgctgaccattgcatcaaccttctgcttgagaacatagcagcacttgatcatgtcaatgaggtcctaatcaaggcaagagaaattaccaggttcatttatagccatgcagtgccaatggaactgaaagggaagtatattcagggcggcgagattctgagcagttctaatttaaaatttgtggcaatgttcatcacattagggaagttagtatctgagagaataaatttggtggagatgtttagctcgcctgaatgggcttcctctgatttggcttctagaagttcattcaggcatgtctatgaagtagtaaaaactgataatgcattttggagtgctgctgctgatattttgaagcttacggatccacttatcactgtgttgtacaaactggaagctgataattgcccaataggtatcttgtatgatgctatggattgcgcaaaagaagacataaagtgcaatcttcgagacaaacatggtgattattggcctatggttgatgagatatgggatcattacttgcataccccagtccatgctgccggttatattctgaatccaaggatcttttacacagaaagattcagttatgatactgaaatcaaaagtgggaccaatgcctgtgtaacccgtctggccaaaaaccattatgatcctaagaaagtggccatacaaatggataggtatcgacgcaaatcagctccttttgattcagactcagcaattcagcaaacaatggaaataccacaagttcgttggtggtcggcacatgggactgacacccctgagctgcaaacgtttgcgatcaggatcttgagccaaacatgcttcggtgcttccatatacaacattgaccggagcatatccgagcagctgcatgttgtgaagaggacatatcctgagcaagagaggttcagaacgatggagtatctacactacaatcttcgcctcgcccattgtgagccatgcgtacgcggtgcttctggggctcaacagcatagtaggctcactagtcaactgggtgactggatctcatcagggcagaccacctcctattacaagtga

SEQ ID NO: 21380 - DNA, 6408 bp, Oryza sativa
  Clone ID: TF_OsC206290_1
atggcgccgccgcgggagctggacctctccgacgaggtcgagggcgaggaggacggcaccaccgacttcgtcttccgcctcgccggcgaccccatccccctcctccctaccacctcctcgccgctcccgctcttcgacctccagtcgcctccctcgcgcccgctcgccgtctccaaccgccgggccgcggtcttccttgcccaccccaacgggtttatggctgcgacgaccaaggcgttgatcgaggccagcaaggaggcgcgcgagaagggcaagtcgaccacccgctgcgcacgggactgctgcgtcgcggacatccctctccccggggtctctctcctcgaactctcccgtgatgaatcggtgcttgctgcctgcgcaggcagtgtgatccacttcttctcggcttcttccctgctcacagacaaggatgtggaaccactgtcatcatgtaccttggaaggatccagcactgtgaaagatttcaagtggctaaatcatgcttccaaagcctttattgtactctcgaaagacgggttgctgtctcaaggaagtctgggggaaggtctgaaggacataatggaaaatgttgatgctgttgactgctgcaaggaagggactcacattgttctttcaaaaaagaatacacttaacatattatcatcagattttaaggaaatatgttgcatgcccctcttgttccagctatggtctgatgatagtgattcagatgatgctagcatcaaagtggattcgattgggtgggtgcgcgatgacagtattgttgttggttctgtaagattgaatgaagaaggcaatgaagagggttatcttgtccaagtaataagaagcggcggaaatacattttttgagaattcaagcaagtcagttgttttcacctatgtggattttttccgaggcatcatggatgatgttttaccatctggagttggacctaatctgctgctgggctatttgcatcgctgggatctaatggtgacttccaacaaaaagagcattgatgaacacatttctctcttgaagtggtcatctgcaactgatgacaaaaaaactgtagtatatcttgagatgttggaggataaatatagtcctaggattgacctacaagagaatggtgatgacaatgtcatattggggtttggtgtcgagaatgtgtcattatttcagaagatcacagtaacagttggtcctgaacaaaaggaggttgctcctcaacatattctactttatctgactggtgaagggaaactgaatatatattatcttgccaggatttctgatccttctgaattacctcaaacaaagctatctgctattgaagatagcgatgtgatgaaagaaatttcacctgtaactgtatctggaaaagagtttactccaagtgctaccagctcattggacaagagtattcgcccagatggggctgagctttctagtgtacaaccagatagagacctgcatggatcaacagatatgaaaaacagttctccagtttcaaaagccaaggaaatagtggcttcctcacctgcacctgcctctttcttagcaccagcaagcaacttgaaacctggaatatctttcagcttttctactgctaatagcgtcagtttgagtccagctggaagcaacacatctagtgaattaggttcttcctggcaacaaagcagcagtagcaatttcgtaaataaccaacttggtaaaggaagcataccttccactcagccggtgggagcatttggaggatctcagaactcaaagaaagatggtaaccttagctttaataaatcatcagtgttcacttctgatggatctaccctggttaagcctggagaaaggaatgaacctggttttggaagtcacccgctgcaaagcagctacactaccgataagaaagttcctagttcagttggcttaagttccaagtcatcaccatcaatttctccaataaaaccttcctcagctggaccttcatccactggctttcgcacaggaaatcttgaggcatttcctacctcccgtggatcacctctaccacaggaaagcattgacaaaccacatgacagaacacatgcagtagtggaccattctaaaaatttcaagttaggcgcaatgttcgatactgaacaggacctgtctaaaaaattttacagtattaatgatatgaccaaggagttagatacactcctatcatacatagagaaggatggtggtttcagagatgcttgcataaccttccaggaacggcctctttctatgtttgagggtgatttgcaaaattttctggaactgttgcagatcttcaagaacaagatagcagaacagtgttcaagagttgaagacctgcggaataagatgtttcaaggcacgtctactactcgtgtctctgctaggcaagcttacatgaaaggaatcgtcgaccaatcttcagatacccaatactgggatatatggaaccgtcagaaattgagtccagaattcgaagcgaagaggcagaatattctcaaggctaaccagaatttgacaaaccagctggtagagctggagaggcatttcaataatctggagatgaacaaatttggagaaacaggaagagttgcttctagtcgcagagctatttattctagtaaggcacgatccagtcagacacaaatatccagtgtttacaatgcgcttaattcacaattagcagcagctgaacaactgtcagactgcctctcaaaacaaatatctgcactaaatataagttctccttctacaaagcgagggtcagtggccaaagagttgtttgaatcgattggtctagatcacacgatggatgcagccaaattttcaggtggtactccttccaagtcagttaagagatatccatcaacgagagaacacataactagcatatcagggccttccaagactgctgagcctgagactgcaaggaggaggagagagtcactggataggagcctggctagtttggagcctcagaaaactactgttaaaagaatagcgcaacaacagcgcctcaagatcagcagtgacctgccattcaggtcaaataagaaaatatttgattctcagatggcagctatgtcccaggagaagtccagcagtagccccacttcctccatagtagaatcatatgcaaacaagctgcattatccaagtgaagtgctgcacgagaaaacaaagccgtcaggaccccagcacaacacactgttcaaatgggtaaaggaatcggctggaccatctcaaggccctcagcataagtatcctgaattaccagggcagctgaaaagttctgaccagacaccaaagttgggctcatcttcaccgttgtcattcagttattcacataaggatgtctgggataatatcagctcatccaatgttccatcctctggaacaactcataccatgccaaagtcaagtactttgacatttaaaaccactgtcattccaaaaactaataccagtacactcccagatttgtcgcctttgatgacgggctcaaaattctctctgagtccattgaccgtgaaaactttatctggggattctggaggtgcgtcatccattattacaaagaacaaacaaggtggacaggcaatgccatatttgggaaccacaaaaggactggatgtttctccacagaatatgggtggtgcatttagagatcttaacaaaccgtctttgtctcctgaacctcccaagtctgctctgttacaagggaagactgtgcaacttggtaagattactgaaacagtgcagagcccagtgaaagctaaacctgaggtggcattccaacctcctgcatttccaccaacacctgttgcacaatcttctccatgctctattaagccaactgttccctcttcagctacatcatcctcgtcaactatgcaagaatcagctgcaaaaacatcagatgttttgtctccaacaggtccttccattcttccatcaaaggaatcaatgacaaaaccttcatcaccattacctgatggtaccatatctagttccctactatctattccaatgcctgttaaggagtcatcaactggcttgaataaaattgtatctaagcctgaagtggttacatcagaggtaactggaacaaccgtttctgcaagtactagctcaagcgtaccaatcactgaaggcaaaccttcatcgattccagcaaccagtggaagcttaccttcaattcctgtctctgcacctaaagtggtgccagtgtctgcagaatctgttgttgtcacttccaccggaaaagatgtaggaccgagcaatccctcatcagatgaagatgatatggaagaggaagttccttctgcaagttcggatctcaacttgggagcccttggtgggtttggtcttgggtctgtgccttcttcaagtcccccaaaatccaatccctttgggaactcatttactacctctgacaataagagttcaggttcgtcatttaccctgacaaccagtccaggacagcttttccgtccggcgtcactgagtattccctcatctcagccagcacagtcatctcaatcaactagctcaagtacattttctagtgcattctcaagtgggcttagtggattcggacagtctgcacagattggatcagcgcagcagtcagggtttgggcagccttcacaaattggagctgggcagcaggcaggatttggtcagccagcacaaattcagtcaggatttggccaaccagcacaagttggagttgcgcaacagtcaggatttgggcagcctgcacaaattgggacagcacagcagtcaggatttgggcagcctgcacaatttggtgctcagcaagcacttggatctgtcctgggttcttttggacaatcacgccaattgggaagtttcggtgctgggggatttggtggattcgctagtgcctctgcttccgggggcttttctagcaattctggatttgctggtggtgcaacaggcggtggcttttctgcagctgctgctcctgctggcggaggatttgctgctgctgctactggtggagggtttgctgctcttgcctccaaaggtgggggttttgcggctgcggcttcatctggtggcggctttggaggtgcagcccagggaagtggcttcagcagtgtggcccttatgcatgcaccaaaaattgttcttcgtgcattagctgtagctattgtggaactcccagcacctggtatagataccatatcacaggagcactttgcttatcttagtacaagtgatatccgtacctgggttagccaccaagattcccttaccaacttagatgaaattgtatcgaaccaccctactacaagcagacagacatttcagtgctggcctcgttctgggcagatgatgtatcatcagcaacaggttcagagtgatagccagcacctgtcttcaaggccgggtttgcctccggagaagcaatttctcctgcaaggcggagcagattcatcatcagggcttgtcctctcgaccgacgctaaacctcggttaaaatggacatcagagttgcatgagcgttttgtggaagcagtaaatcagctgggagggccggacaaggcgacgccgaaaacaatcatgaggctcatgggaattcctggattaaccctttaccatcttaagagtcatcttcagaaataccgacttagcaagaatcttcaatctcaagccaatgcttcccgtgcacaaggtgtcttaggttgtagtacgacagagatagataaaccatgtgaaggaaatggatcaccggctagtcacttggacctagagactcagacaaacagcagttctatgcacataaatgaagccctccagatgcaaattgaggtgcagagacggctgcatgaacaactagaggtacaaagacacctgcagcttcggattgaagcccaaggaaagtacctgcagtcagtgctggagaaggcgcaggaggcactcggcaccatcgccgtagcagaaactgctgcaactgcaaacgcctcctcatcgaaacgcctccaaaacgagcacacccagcttcaccatcaccagcagcagcagcaggtcggcgatggatcggtggacagctgcctgaccgcctgcgactgcgagggctcgcatcactcgcgctctcatggccacagaggagagcaggacatcctgtccatcggcttgccgccatttgagccggcagcagcaagatcaggcaaggagcaccactacctgctgttccccaacgagccgagcaggcgacgatcgtgttcggatgaacggcgccgcgagatgagcacgctgcaggcgtcggagctggacctcagcatcaatggcaggtcgtcgtcccactctcacaggcgcgaaaacatcgatctgaatggtgcaggctggagctga

SEQ ID NO: 21381 - DNA, 1254 bp, Oryza sativa; identical to SEQ ID NO: 11811
  Clone ID: TF_OsC359_6631

SEQ ID NO: 21382 - DNA, 1692 bp, Oryza sativa
  Clone ID: TF_OsC14903_1
cggcgggccccgggctgcaggaatcggcacgggtggaagacgaagaggaatatatctgagtagtggagtccaaggaaaggaaccaactgaccttagcttagcttaccttagctcaaccccaagcttgaagcttccactataagaactcacccagccacacggctacttggacgacgaagcagcagcagcagcagtaaacagcatcgctcgctcgtcttcgtcgtcgtcgatcggctccggtgagggtgatcggtcgccggcagaggcttctgatgctggagaggccgccgatcctgaagagataccgcgcaccggggtgggcagtggtggctcgctggaaatgtcgtcgcagcagcagcacgccggtgaggcccccgcctccgccgccgccgctgcccgggcgcggctcaggtggaccgggcagctgcacgagcggttcgtcctcgccgtggcggagctcggcggcgcggacagggcgacgcccaagtccgtgctgagggccatggccgtgccggggctcaccttgtaccacctcaagagccacctccagaagtaccggcaggcggtgagccgcggcggcaatggaggcggcggaggcagcggcagcctgaacgaccggtcatcctcgtcggagcgccaaccagccgaccacgacggcgatagcgccgccgatgagccgcgcaccattgcttacgacggcgacagcgatggcgatgctaaagaaggtctccgtgattcatccaggagcatggtgcagatgcagagggaagtccagaggaagctccaggagcagattgaggtcaagaggcatctgcaactgaggatggaggcacaggggaggtacctgcagtcagtgctacgcagggcgcagcaagtcctggccgaccatagcctggcaagctcgccggaggccgccacggcggagctctcggagctcgcctccgccgtggacatcgagtgcatgtcctcctcctccccgccgcggcaccaccgccaatccgccgcaaccgacagctgcgtgactacgacgtcgtcgtcggaggccgagagcaaggccgccgggtccaagcggctccacaccagcgattgcaccgtcgagcagccggtgcagggcaagagggccttcaacttcctgcaaaggcacaaccaggcagatcaagaagaagaacaagaagaagaatatgcaggagcagaggatggaagctcatcagagattgatctgaacagttagaggcagaggaggaagagaagcagcagaagcatctgtgatgatgtgctgctgtgcattgctgcagtggatgattggtggggtggccttcaaggctggggccaagcaaccaggcttttgagcaatgtctgcctgctactgcaacagctactgctgctgctactcctcattctatgatgatatatgttttgctttaacttatatatatatatatatatatatatatatatagctatgcaagcatctggttcttgtgtttcacgtacctgtaaaaaaaaatggaattcgaattggtggctggcccagctgcagatgcatgtggcatgcttgaggtgcaagaatatatagaactgtagtagtgtggattatgcagctagtgaatgatgctttagggaccaatgggatttccatgaaagatggaattggtttgcagtgtaatttaaagagcaaggttgatttttccc

SEQ ID NO: 21383 - DNA, 2253 bp, Oryza sativa
  Clone ID: TF_OsC147013_1
ctagtggatcccccgggcggccgcccttttttttttttttttttttttttgtcctaaaatgtaaatccagccgcgccacggctgtctgtgccaaaccaggacgaggaagaagaaactgacagtaagctcaggtttatacaagccatcaatgtctctctttctaggtcgagttggcaacccatctcgtcctccagattactactacaatacatatattgacatagatacacaggcctagactagattacatcacaaactaacactgctagctagtacacagcatacaatggggggacatgtacacagatgcagacgagagatctgtcatatgcaagctccaagggagtagaaatcgccgcaccccaggtcgtcgctgaaggtaacatcatccttctccactttgactatggaattgagaaggccgtcgaagctgcagctgctagagctaagttcgctctgaagtttcgggatgctcaaatcggaggcgttcttcggcatcgccatatctcccgaaacgaggaaatctgtcttcatttgtgggataactgttgaaccacttgaggttgcttgcccaatcattctggcaccaatattgctactgttactactgctattgttccatctttggctcatagcatgatgagccccaatgttgcttgccaattgagagctcggtacagaactccatacgaacttgagatcaaacagactgtctgcagtcctatcatcgaacttctgtttcaaaccgtttccacctccaaaattcaagtacttttgctctgtatctggaggtaaaagcatcgcgccaccaaaagagctagctccaccttttgtgtctcttgctaccataaggtcatttgaagagcgagcaggtgcacacgatgaagatgtaccacccaatttgtttgcacaggtattgttaaacgaaccatggattagcaacccgttggcggaaaatcctgataaaggaatagtactctgctgggatacacgagattcaagcagaccagatgaaactccaacggcgccttcaatatgttctgaacttacagaggaagttcgaattgatggctgactgacaattttggcttgtgtgcactcggctagttcttgaggcagcaaaggactgcttgtgacactttggagtgtgccagacataccattagataggccattcccagaaaggatggtggacagatcatcggtttcttcatggatccacttctgttgcatttgggtctgcccaagcgatgttgccaaaccttgtcccaagtttcctttctggtttcctggtaagctaaggtggtacttatttgcatcattaatggaatggctcaatgtatggcttccgctcatagtctgaatcgattttgaagcaggtaccccctgagttccaagagctgctggattgtttctaggacagtacatgctaataaatagaagatagtgaaatgagttccttgcctgtaggtgacttgcaacattttcccttgtgagtttctcaacattcatgagctcaagtatcctttttggcacagccttgtcaattccaagctggttgacagcagcgacaaatttccggtgtagttcaactgaccaaacaactctcggcttctttggagccgagggatcatcaatatcttgagtattgacctcaccctcatcctcctcttcactacagtactccttcctcttcttgctgggcctcccactttgatcaggtgatccacatgtaacatggccatgcacatggtctgaatccgcatttggtggcttgttgcactcttcatagaaatcgagattagcacggtcgcgagtactgaatttcctcctgataacatgctgccagatattcctgagctcttcgattcgaacaggttttaggagatagtcgcaggcaccatgggttatccccttcaatacagttttggtctctccattcacagataacatgatgacagggaggtccatttcaagccccacaagctcaagaagcttaaagccgtccatgtctggcatatggacgtcgctgataactagatcaaacatgtccctgttttcccgcagcattttcagcgcgatagcagcctgatttgttgtcgtcacatgatactggcagcgcagcagcagggtctcgagcaccttgagacacaccgggtcgtcgtcgacggcgaggacacgcataccgacggggaactggtccctcctcctcgccgccggcaccacacccttcctctcctccgccgccctcat

SEQ ID NO: 21384 - DNA, 653 bp, Oryza sativa
  Clone ID: TF_rsicek_6595.y1.abd
cgggctgcaggaattcggcacgagggagagagagagagagagagagagagaggatgttttgagagagcacagctagaagcttggcttctcgcaacaagtgctgcatctctagtgagcgagcgagtgagagagacagccttggccttggcgttggtggtgtagctccagcctccaagcatccatccatgcttacataagtcagacagggagggaggaccggaaggaggaggagagaaagcgaagctttggttctttctttgcaccaccggttgcctccgttgatctccttgtcgatcgccggaagcaaaccgttgttggtgatgggcagcggcggcggtggctgcggcaggaacggcgctgtgaggcagtacatcaggtccaaggtgccgaggctgaggtggaccggggagctccactgcagcttcgtccaagccatcgaattcctcggtggccaagacaaggctacacctaagctcattcttcagctcatgggggtgaaggggctgaccatatctcatgtcaagagccacctccagatgtacagatgctccaggctcgtctcccatggcacgggaaggagatcagagatgcaaccacagctgcaaaggaagcactcatgtggtgctgatgagcaagtccccagagaattcctg

SEQ ID NO: 21385 - DNA, 552 bp, Oryza sativa
  unsure (1)..(552): unsure at all n locations
  Clone ID: TF_LIB3434-018-P1-K1-D7
cgttcttcagctgatgaatgttagagggcttagcataggccatgtcaagagccatctccagatgtataggagcaagaagatcgatgagtccggccaggtgataggtggtgagtcatggagatcagatgatcacctgcttgttggatcaaaaccctattacccaccagcagctgaagctgaagctcctttccgcagatcaagtgctaggtatgtagctagagctaataccagcaaccatccagattttgtccaaggctcttcttcatctccagatgataatatcatgaaccatcaaagaccagttctgaaagagatgatctgcagtgagggtagtaaccatcaagaaggccctcttaatctggatctctcactcgatatctgtccgcggngcgagaagaggaagagagaatgcagctggaggaaacaagaggaagatcatgatcatgctactgttgctattggtgctgatcaagaagcaaagagttgtgctactgggctctctctttcttggtctgatcatgtctnccctgttgaaagatgcaccatcactag

SEQ ID NO: 21386 - DNA, 1931 bp, Oryza sativa
  Clone ID: TF_OsC16131_1
ggattgtcacagttgtatttggtgttactggtgaattttcagcaacagaggactaaacatcagaaagctagcaagttacaacttttcagatagccagattacagtttggcaatccgttgtgaaatatctgcttaatggcaaccacatgcattgcaatgacctaactgcaacagcttgagcttcacctgaacgccgagaggaaaaaagcaacatttttattcacccgtgcatccccgggccgccgctctgtgttctctgttcttctgttcttctcttgtttttttcgtctttttgcgaatcttgtatatatttatgtataatatgtatgtaaatctcagggcgaaaatttggggtctgcccgacactttgcaagcctcatgggtggtagcagctcttcatctacacatccacaacaacccagctcatgatcagttcatcacttgagctctcaacagctcaatcttccctgtatacatggccaacactaccatcctcctcagagtttctgaatccattattggccattttgcatcgatgcgcaagccgaaaatcctccaatctacctctctgtctagcaagattccacgagcacgatctgtcgatcattttcggacatagccttccgacttgtcatcatcctcgcagcagctgtcgccggcggtggccgccgagacggccacccctgagccggagagctgaaggggaccttgaggtgatccggattgagagcagcttacttcctgagaagcccagagatcaccaacaagtacaatcgaatggctcgctgaagctgtgcctggtgatttccggttgtgcagccgatacttctggagatggcttttcacttcgtcgttggtgagcccatcaaccttcatcacctccctgatttgctttggagtagcaacttgggggccaccgagctgctgcaaggcggcgacgaactgccggtgaagctccggcgaccagcaccgcctcgacttcctcgcctgctgctgctgctgctgcgcctgagcctgcaagctaagcgccgccgggacgggtgacggcacggcggtggcaaagcttgacgcgacaacgtgccggtggtcatcgccggcggcggtggcagccgccgccgccgccggaggaggcgacctgtgggaagccggaggcagcaacggcatagcgggtcgtagaaccaccctttcctccctcctaaagtacggcggcggcgcgacggccctcgacgacgactcctccgcgccgccgagcaacctcgacgccggcgaggtgctcccgctccgtcggtcattctcggaatcggcgtcgctgccgcggctgtccacccagagctgcgcggtgctcatccatttcgtcttgtcgccgtcctccgccttcgcctccgcgtcgtcgccgtccttcctcctcttcccggcctcctccttcatcagctcgatcacgtcggcgaggaggcgggcgcagagcgggagctcgcgcctgaacatctcgatcttgcggcgctcctcctcgaggctcctgatgcacgcctccacccccgtcgcctccttggccgccgccgccgccatcctcacggcgctcctcgccgcgaacatcttcaggtccaggctcaaatccagccccatcccgatctcccccacgtccagccccatgtacaacaacaacaacaaacaaaactctctctccctctctctcgaatctttgcaacaagaacaagaacaagaacaagaactggaggaagggtcgcggattggagcggaggaggaggagaaaggcggtggtggtggtgggtgagggggatctggaagctgcgcggcgatatatagacggggaggtgggaatctgcgagctggaccgcaggatttgttcgtctctctctctctcgcgcgcgcgcggaggcgaagcgagaccgcgcctgcagcccggggatccac

SEQ ID NO: 21387 - DNA, 589 bp, Oryza sativa
  Clone ID: TF_OsC53221_1
cccgggctgcaggaattcggcaccacggggagttagagcagctaaaggccatctgactcccaaagaatagaactgcaacgtaccatgaactacccctgattaccagaaacagagggctgataaaacatcaccaggcggttcctcacaggggggttgtgcagtctacaagcaaattgtacataagaggaattgaaagagatgtatcatcatcaacaacagctccaaagccacaaccaactcttgccatctaggcagagtttcccttcagaacggcacttgcttatgcaaggaggaagtgtttcaggggaatcagggcttgttctctcaactgatgcaaagcctaggttaaaatggacccctgagctacatgagcgatttgtggaggcagtaaatcaacttggtggtccagaaaaagctaccccaaaaacaatcatgaggctcatgggcgtccctggattaacactgtatcatctcaagagtcatcttcagaaatacagactaagcaaaaatctccacgctcaagccaatgcgggaaatgtgaaaaatgcgctagtctgcaccacagcaacagagaaaccatctgaagcaa

SEQ ID NO: 21388 - DNA, 903 bp, Oryza sativa; identical to SEQ ID NO: 11765
  Clone ID: TF_OsC98613_1

SEQ ID NO: 21389 - DNA, 3245 bp, Oryza sativa
  Clone ID: TF_OsC8440_1
cacgaggcttgctctagctcagctagctcttgctgctagtagcttcagctttgctactgctactaccactactactactactactttcacctccaagaaagtatagattgcaagaacaatttctgctgctgttgttctttcttgctgttctttctccttgtgtagttgtgtggtgtggttgagctgaggtgtagttaggacagtggctggctttgcttgcttgattggtcacctgggaaggtcgctgtctctgccttttgttttctttgccatctctttctttctgggctgctttcaccttttgctttccaacctcttcttgccatcaataatgatggaggagtaagatgagggcttgttcttgaagtctctccaatctaatctcatttcatcttcatcatctccacccggtccaaatccacctactactgtttttcttttgtcccttctcttttttttcttcctctgatcttttcttttttcaggtgttttgtttttggcagtaggtgcttgctatcttttcattaggctttggattttcctctcgtgttctttagtctcagcctattagaggtttgaggaaagttttccatttcttagctctttttgcttccagcttcttgggattgctctgtttcttgctgagaattggctcgatttgggaggcctcatcttgtgttagctttcaggttttcttgcctgaaattgaaccgattgggtaggtttttaggtgcttcagtttcagttgctagctcgtcaggcttgttcttgggctcctgccttgaattggggtcaaattgggatgcttctgggcccacgcgtgatggaggagaggaggggattgatggggagggagagggatcaattccccgtcggcatgcgggtcctcgccgtcgacgatgacccggtgtgcctcaaggttcttgagaccctcctccggcgctgccaataccatgtaacatcaaccaaccaggctattactgcgttgaagctgctcagggagaacagggacatgtttgatcttgtcatcagtgatgtccacatgcccgacatggacggatttaagctccttgagcttgtggggcttgaaatggatctcccagtcatcatgttatcagtaaatggagagacaaagactgtgatgaaggggataactcatggtgcctgtgactatcttctaaaaccggtccgaatcgaagaactaaggaacatatggcagcatgttgttaggaggaagttcggtaatcgtgagcgaaacaatcttgatttctccaaagaatgcaataagccgcaaagcgcggatactgatcatggaccataccaacctacctgtggttcttctgatcaaaatgggaggtccagcaggaaaaggaaagaactacacggcgaggacgacgatgaaggcgatgataatgattatcaagaaaatgatgagccctcagctgcaaagaagcccagagttgtatggtcagttgagctgcaccgaaaatttgttgccgctgtcaaccagcttggaattgacaaagctgtaccaaaaagaattcttgagcttatgaatgtggagaaactcaccagggaaaatgttgcaagtcatctacagaagtacaggctttacctcaagagactaggtgctgtagcatcacaacaagccagcattgttgctgcctttggaggcagagatccctccttcttgcatattggagcatttgaaggactccagagctatcaaccttttgcaccttctgctgctcttccatctttcaatccacatggcctgctaacccgaactagcgccgccgcggctttcggacttcaggagcttgctgccccctccagcacaattcagacttctacaggaaatgtcacagttggccattgcttggaagaaaaccagcaggcaaatctagcacaaggcttgaccgcggcgatcgggcaacctcagcttcaacagaactggattcatcaagaaggtaatggtctgtctgatgttttttctgggagttctctgaccaacactttgtccagcacactccaaagagttccaagcagttcattgccaccacaagaactcttggagtgcaaacaagccaaagttagcatgccgccatcgatacggataccgccttctagttcagcacttcttgagaggactcttggggtttccaccaatttgggagattctagtatatcccagcagggtgctcttccaatagatggtggattttctgctgacaggttaccattgcacagttcatttgatggcgctgttgcaacaaagctagatactagtttggcagcttcacagagagagattggccagcaggggaaattttcagttagcatgcttgtctccccttctgacaatcttgcattagccaaaaatgccaaaactggagctagttcttctggcagtactataattctccctcttgatactgcaagacattcagactacttgcagttcggaggtgcaagcaattctttgcagaaaatggatggacagaaacaagatcatatacagagctcaaacattatatggagttcaatgccaagcactcaactgccaagtgatacccaaattcataatactcaaaaccaaagattggacagcggaagttttaaccataatattggtgcccatttggctgaccaaacaaatgcaagtgcgtcaatacttccgcaaatgaagtttgacacaagaatatcagaagagaaaatgaagcagaagaatacatatgacttgggtagttcaaagctgcagggtggatttaattctagtggctgcaattttgatggccttctcaattccataatcaaagtggagaaggatgatctcccattcatggacaatgaattgggctgtgacctttttccacttggtgcctgcatatgaatccatcatttcggacaccaaagattttgcataatctaaaagagtcagctgtgctgcctgatctgtgctacttcatccaggctttgtgtatactaggatctagggacagtagtggcttgtaatcttgctttatctcttctctagggttggctatggaagtatggttagatcaagataagaagaaaatataatgctgtaatgtcagcgccttttctagtcaaaatctgtgtttgtttctaaccaagcaaccacatctagtgtttgctgcaccttctcagactgaaaaaatatggaaactcaccatggcatagataaatcaaaagggaagtctttaaccaaaaaaaaaaaaaaa

SEQ ID NO: 21390 - DNA, 701 bp, Oryza sativa
  Clone ID: TF_OsC263764_1
gaactagtggatccccgggctgcaggagagtattggtgctaaccgcaacaagaggcagtcacggaaaagtagagatgagaatggagatgatggtgatgattctggcgggaactcggctcggggtggagactcatcaacacagaagaagccaagggtcgtgtggtctgttgagctgcaccgaaagtttgtggctgctgttaaccagcttggcatcgagaaggctgttccaaagaaaatattggatctcatgaatgtagagaacatcaccagggagaatgttgctagtcatttgcagaagtatcggctgtaccttaaacggttgagcactgatgcaagcaggcaggctaaccttgcagctgcatttggaggaaggaaccctgcttacataaacatgaattcatttggaaactacaacgcatatggtagataccgtacagtcccaactgctggccatacccaggcaaacaacattcttactaggatgaactccccttctgcgtttggtgttcatggtttgctgcattcacagccaattcagttaggacatgcccaaaataatctgagcacttcactgaatgatttaggagggcttaataatggtaacatgatcagaggtgcacagatgtcaacaattctaactggtccttctggtaactcctttccaaacatatcgaatggtgcaccgctggcaactgcgaaca

SEQ ID NO: 21391 - DNA, 538 bp, Oryza sativa
  Clone ID: TF_rsicen_8566.y1.abd
cccgggctgcaggaatcggcacgaggctcgtctcttcctcttcctcttcctcgtcgtcgtcgtcgccgagccgtcgcatggtggacgccgctgcggcctccggggacgcgtgcggccgcgtgacggagtgggagaccggcctgccggctccaggcgagatgacgccggtctcgcaccagctcgtcccgccggcgctcgccgccgccttcgggatcgacctcgcggccgtgggcgtgctcctcccctctccctccgtcgactcccctgtctcccacctcttcttccccgtcgacgaggacgacgacgaggatgaggagggggagggcgaggggggtaacgatgacgcccccgccgccgccgccgcgggcggcggcggcgggaggtgcgggaagaaggcgaggatggtgtggacgcccgagctgcaccaccggttcgtcgaggcggtggcgcacctcggcgagaagggcgccgtgcccaaggccatcgtgcgcctcatgaacgtcgacggcctcacccgcgagaacgtcgccagccacct

SEQ ID NO: 21392 - DNA, 1579 bp, Oryza sativa
  Clone ID: TF_OsC138612_1
caggagtatttagagagacccacgcgtcgggcgagagaggacagtttggataggagaagagaggagagagggtgcttgctgtggaaggagaggactgacaggcttggagcaagcattccatctcagttctcatattaggtgtgaatgaccaagaaatcaacaatctcaaggagccatgagcacacagagtgtcattgctgtaaagcaattcagtggccctgacaaaatcgcacaagcatacactgttccacagccatcagctcatgtgctctccaacgctaactatgactatgatctctgtggttcaacaaatagtacctcattatcatgtgctatccaatcctcaaacattaagaccgaatcaatcagttcatctagcctgccaaagatccttccatttagtactgactcaaatggtgaaagttcactttctcgcatgtcgcaagccgagttttcggacccaattttgtctagttcttctacattttgtacaagtctgtacacctcatcaccgatgaactctggttcatgccgaaaaaccggttatttgcctttcctgccacaacctcctaaatgtgagcagcagcagaattcagctgggcaatcatccagctctctgatgctccttgatgctgatctcagaaatagtggtcatgctgatgatgaacacacagatgacctcaaggactttcttaacctctcttcagattgtagcttccatgggaaatgcagtgccatggcttataatgagcagatggagtttcagttcttgtctgaacagctcggaattgcgatctcaaacaatgaggagagtcctcggttagatgacatatacgacagaccaccgcaacttatgtctcttccagtgtcatcttgctctgatcaggaggatctgcaggatgcaagatctcctgctaaagttcagttgagttcatctcggtcttcatctggaactgcatcatgtaacaaaccaagactgaggtggacaccggagctccacgagcgtttcgtagatgccgtgaacaagcttgaagggccagaaaaggcaactcccaagggtgttctgaagcttatgaaggtagagggcttgaccatctatcatataaagagccacttacagaagtatcggcttgcgaagtatcttccagagacaaaagaagacaagaagcaagaagaaaagaaaacaaaatcagtggctaatggaaatgatcatgcaaaaaagaagagtgctcaaatggcagaagctcttcggatgcaaatggaggtccagaaacaactccatgaacaactagaggtacaaaggcaattacagctgcgcatagaggaacacgcaagatatttgcagaagatattggaagaacaacagaaagcaagagaatccatatcctcaatgactagtacaacagaaggagaatctcctgaattcgcaccgatggagaaaaccgaggacaaagcagaaacctcttcagcacctttgtcaaagtgtagaattacagatactgatgcagaatgccattcaaaagttgataataaaaagacaaagcctcaggctgatcttgaaatggtgcatgacgaataa

SEQ ID NO: 21393 - DNA, 403 bp, Oryza sativa
  Clone ID: TF_LIB3474-012-P1-K1-E2
aagaaacctaagcccatcggaaatctctcctcctcccagcaaagaggaggtggtggagatctcccaatccgcgggaatcactcgctggtcaccgggattcggcctccgctcgagctctgaatctcgggagctcctgatctggaggatgccaaatctcaaacagcaactttgccgccagacagcgcttacggtggactgatgacctccatgatcgttttgtggatgctgtaacacagcttggtggacccgacagggcaactccgaagggaattcttagaataatgggtgttcaagggttgaccatctatcatgtcaaaagccatctgcaaaaatatcggcttgctaaatacattccagatcccacagctgatggtgccaagtctgacaaggaaagatctcggag

SEQ ID NO: 21394 - DNA, 1351 bp, Oryza sativa
  Clone ID: TF_OsC72070_1
atggccgtgtttggagaagctttagcagtaaagcttctttcagagccttacgtgcaaagaagcattgctttgaagtggcaaagaggatgccaaatgtatgaaccaaagcccttctcaagcattgtactagctcacaacgatccagtttcccacaatcaacaaattgaacgtattaacaacaatgtagtatctaatagtggtgggaacagctcaaacagcaactttgccgccagacagcgcttacggtggactgatgacctccatgatcgttttgtggatgctgtaacacagcttggtggacccgacagggcaactccgaagggaattcttagaataatgggtgttcaagggttgaccatctatcatgtcaaaagccatctgcaaaaatatcggcttgctaaatacattccagatcccacagctgatggtgccaagtctgacaagaaagatctcggagatttgcttgctgacattgaaagctcctcgggaatggaaataggggaggctttaaagttgcagatggaggtgcaaaggcagctacagctccggatagaagcccaaggaaggtacctccagaagatcattgaggagcagcagcggctcagtggtgtgctgggtgaatcaggcaagttaggcgccctgggaccagctccaggggagccataccaggattccaacaaaaccgacccctcgaccccggtaccgacttccgaatccccaatccgcgacaaggctggaagcggcttgttcaagaccatttcttcgcacgacgactgccgcgagcctttgacaccggactccagctgccgtgccggctcccctttggagagcccccccagggctagcaagaggatccgggtcagcagcgacattgatcatcgtgggaacaatgagttcccccctcctctcaaagttccggagccaagttcaggttcagatttccgacaggaaagctcagtgttattatcatccagcgcagtgcacttcgattctttggagagcctggatgcagatgaaaatgtcttcaccaatggttcaggcagtgatgattgatttttcatctgtgtaggggcagggcagtgatgtttagaggacttgctagttatctcttcagtagagctgttgatcttagtgaggctgtaatgctgtaaacccagccatgactgttagttgttatctactgttcagtgcatgtttgtagcttatacttattcaatcagagatgtgcagtgtgcacatcactttacagttcatgtaggtctggaaatctcgtaaggtgagaagaacataaagatatgatcttattttcgttgagcatgcaaaaaaaaaactcgagactcctgctctctcc

SEQ ID NO: 21395 - DNA, 607 bp, Oryza sativa
  Clone ID: TF_LIB4309-004-Q1-N1-F10
ggaaagcaaaaaaaagcttcaatctatgcttcaatcggcaggtcccaaggcagggggaaccttttgcccaggggaaaggccccccctcctaaatcattcagggaagggcccaaattatttggggcatgcccaaacggaatggggggggaaggcagcaaaccatgaaccccaaacccaaagggggggtccatcctaaaaaaaaggttgtttgccggggtatggccagcagtggggactggccggaatcaaccataggcgggggagttcccaaaagaattcatgtttatgaaagcagggttccttcctccaaatgcagctgcaagggtaccccgcctgcttgcataagggcccaaccgttaaagggacagccgatccttttgaaaaagacaaaaaacattcccccgggggagggtctctacattcaggaaacccaatattttttttggaacagccttttcgaggccaagcgggtaaacagcagccacaaactttggggggagttaaacaaaccacacaaccctgggtttttttgggggggaggaggccccattctaattacggggctaatgaaaaaaaaaccatcatccccattctcatctctactttt

SEQ ID NO: 21396 - DNA, 1998 bp, Oryza sativa
  Clone ID: TF_OsC25944_1
atggcgaccgccgccgccacgcagtcgcagccggtgcgcgtcgtgctgcgggtgcgcccgcacctcccgtccgaggcgaactccgcggaggcgccgtgcgtcgggcttctcgggagccaccccggcggcgaggtcaccgtccagctcaaggaccagtacaccagccggaacgagtgctataagctggacgctttcttcggccaagagagccgtgtctgcgagatattcgatcaggaggtcagcgccgtgatcccgggaatcttcgaggggaccaacgcgacggtcttcgcctatggcgctaccggcagcggcaagacctacacgatgcagggcactgaggatttgccggggctcatgtttcgaccgtgttggcgctatgtactggcacatggtgctctgttgagatctcatactatgaggtatacatggagcggtgctatgacttgctagagcccaaggcaagagagatcatggtgctggatgacaaagatggcaacttacagctaaagggcttggcctgggtgcctgtgcgatctctggaggaattccacgagatatactctataggagtgcagaggagaaaagttgcccacacaggcctgaacgatgtttcaagtaggagccatgctgtgctatcgatcaggattactactgatgttgttaaagggaagcttaacctcataacctcatcgacttggctggtaatgaggacaaccggagaacttgcaatgaggggatccggctacaagagagcgccaagatcaaccagtcgctgtttgcgttgtctaatgtcatatcggctctcaacaagaaagagccacggataccatacagagagagtaaattgacccgcatactgcaagattctcttggaggcaatagccatgctgtcatgatagcatgccttaatcccgtggaataccaggaggcagtccacacagtaagcttggctgctcgttcgcgccatgttacgaaccacatgagttcagcaagcaagcactaaagataaggttgacatggaagccaaattgcgagcttggttggaatccaaggggaaaacgaagagcatacaaagaatggatggacttctctccccaaatgcaatcaagactcctctatccatgagccaatgagccataagaagcaatcagcatctggcagggtttctggtagagtggtgctcccttcattaactccatgcaaagaggacaaaactggatcatctcttaggaaggcactttcccccatttcttcaaacatggatcctcaaaagcaacggacagctgatgatagcaattgcttgatgttgttggagctgagaactccaatgggatcatgcaacatagtagggaaggtcacaggtgctacaccccttgataaatttattgcacttggctctaacctgaaggaatctcttattcagcaataccttgatttcttaaatgttgcaaacaaggaagaactacagaagttgaaaggcattggtgaaaggagggcagagtacattcttgagcttcgagaagattcgcccagaccatttaaatctctttcagatttgggaaatattggtctatcatcaaaacagatacaagatattttgtgcaagacagcgactggaatcttcaaatgatcaccggaatggaaatgccaccgaactctaccactttgaagatgctggctcatattaacggtcagattgttgtgggctattgacttgtgattatcagccaggtctgccgctgaatcaagttagctccctcctgtattgccgaatttaagcaatctgtagtttgtgtaccatccatgattccttgggtgtaattgtagctgtagtcatctgatgtactactagagtatggagcaatggttgctcctctctgttgtagattttctccgagaaaccgccgtttaatttgagctgacttgcacgagcagcaggaaatgaaatttgtggaatatttcttggtaccttgagcattgaatccgtgaatttctttc

SEQ ID NO: 21397 - DNA, 1389 bp, Oryza sativa
  Clone ID: TF_OsC747_1
ggtggttgccgccttcaattccattcgaacgaaacgaggagaagagagaggagagaggagagagaggggtttgtgtggctgcgagtgggccccatgtcgacgtcggcggcggcggcggcggcggcggagcagcagcaggaggagggggagcacgggccgttccccatcgagcagctgcaggcatctggaattgctgctctggatgtgaaaaagctcaaggattctggtctgtacacagtggagtctgtggcctatactccaaggaaagaccttttgcaaatcaaaggaattagtgaagccaaagttgacaagatagttgaagcagcatcgaagctagtcccattgggatttacaagtgcgagccaacttcatgcacaaaggctggagattattcaagttacaactggatctagagagcttgataagattttggatggggggatagaaactggctctatcacagagatttatggtgaattccgatcagggaagactcagctgtgccacacgctgtgtgtcacatgtcagcttccattggaccaaggtggtggtgaagggaaggctttgtacattgatgcagagggaacattcagaccacaaaggctgctccagatagctgacaggttcgggttgaatggtgctgatgtattagagaacgtggcttatgccagagcttataatactgatcatcaatccagacttctgctggaggcagcttccatgatgatagagactaggtttgctctcatgattgtagacagcgcgacagctttgtacagaactgatttctcaggtcgaggggagctctcagcgaggcaaatgcacatggctaagtttctgaggagccttcagaaattagcagatgagtttggagtggctgtggttatcactaatcaagtagtggcacaagtggatggttctgccatgtttgctgggccgcagatcaaacccatcggtggaaacatcatggctcatgcttccacaacaaggcttgctcttcgcaagggaagaggggaagagcgaatatgtaaagtgataagctctccatgcttggctgaagccgaagcaaggtttcagatagcatctgaaggcgttgcagatgtcaaggattgagacaatctctgctcagtgctaagcgctaactggcaacagcttcccagttcccacatgtgttgctctcctgctgattgcgctaccacccctgaagggttcaactgatgtgatgctcctgttctgaatccgacaaccacttattgtcgagtggaggtgcacatctgtgtcactgttgtagtgttgtagtataaaacgttgtctgccctgcaaggctgcaatgcatgtaatgtgacattggtttacagatattgaatgaattgaagtaagttttctgcc

SEQ ID NO: 21398 - DNA, 1517 bp, Oryza sativa
  Clone ID: TF_OsC748_1
atgtcgtcgtcgggtgcggctgcggcggcggcggcgacggcggaggaggcggcggcgggcggggagcacgggccgttccccatcgagcagctccaggcatctggtatagctgcacttgatgtgaaaaagctcaaagatgctggtctctgcacggtggagtctgtggtctactcaccaaggaaagaccttctgcaaattaaagggattagtgaagccaaagtcgataagataattgaaggagcttcgaagctggttccactgggatttacaagtgccagccaacttcatgcacagagacttgagattatccaagttacaactggatcaagggaacttgataaaatcttggatggtggaatagaaactgggtccattacagagatatatggtgaatttcgctcagggaagactcagttgtgccacactctgtgtgttacatgtcagctcccattggaccaaggtggtggtgagggaaaagctttgtatattgatgcagagggcacattcagaccacaaagactcctccagatagcagacaggtttgggttgaatggtgctgatgtacttgagaatgtagcttatgcaagagcatataatactgatcatcaatcaagacttttactggaagcagcttccatgatggtggagacaaggtttgctattatgattgtagatagtgcaacagccttatacagaacagatttctctggtagaggggagctgtcagcaaggcaaatgcacctggccaagtttcttaggagccttcagaagttagcggatgagtttggcgtggcggtggtaatcacgaatcaagttgtggcgcaagtggatggtgctgcaatgtttgggccacagatcaaacctatcggcgggaacatcatggctcatgcttccacaacaaggctttttcttcgaaagggaagagcggaggagcggatatgtaaggtagtaagctctccctgtcttgctgaagctgaggcgaggtttcagatatcaccggaaggcgtcacagatgttaaggactgaaaatcccaaaaatcgccttcaggatacagcatgagtttgcagtctatctacagcctgctgtttgcaatcccagtgtggtggacgcttggattgatgtaggccatcctgttcaaccaccacctgcgatagcgccctggaatcctggatggaagtacccatggtttcttcattgacattgctcttgtgtttcagcgggggtgtacagcaagtcgccacaattttggcttggcaccagcgatgttgttgttcactgttgatgttagacgagccagaattagtgtagatagttttatttagctggtccttgttttcttaccgtttgtaaatgtagtttaacgcatgctaggatgttctaacgtcacattgtatcggttagcaaaagttgtattcagagtttcaaacagttttcgtttacatatatacgctaacaggtttgaatttgcaaaaaaaaaaaaaaaaaaaactcgagactagttctctccctcgtgccg

SEQ ID NO: 21399 - DNA, 1020 bp, Oryza sativa; identical to SEQ ID NO: 11820
  Clone ID: TF_OsC83381_1

SEQ ID NO: 21400 - DNA, 1164 bp, Oryza sativa
  Clone ID: TF_OsC477_7
ctagggggcgacggcgaggtgggcggtggcggcgacggggatggggatgagaacagcgggggaaggggaggggagcgagtcaagggcggtgagggagaccttgtcggcggcgaggcaatggaggggcgaggtgggagaggaggacgtcggcggccccacacacccgcaaccacccagcacgcgctgcagatgcctggcggtccctcgcgtgccgccgttgcggacgacgacgacgaactctcgcgtcttctctcccgccgcccgccgcatgctctgtgaggtgggccgtgacggcgtcgtcgtcgtcgccggccgcgccgtctccgcccagttcgccacggctggcgcggacccatcctctggcgccgcgaccaccgccatcgccaccatggacgcctccgccggcggcgggggaactccctgccgacgaccggcgccgacggggtgaagcggcgggtgtgctacttctagcgcgcgaccacgacctctgccgcttccacgccgacgacccagcaggaccagatccgggcgctcaagcacttcaacgtcggcgaggactaccccgtcttcgacggcctctacagcttctgccagagctacgccggcggctgcgtcaagctcaaccacagccacgacatcgccatcaacgccctcgagctcgcccgcacggcgacgccgccgcccagctcctcccccggcggctgccgcccgcgccaagctccatcccgccggccgcgcacttctccgcccccgacggccgcgcactgctccgccccccacggtcgctgcccagctcctccccggcagctgccgccggcgccaagttccacccctcgccgccgccggcttcctctgggccctcttcccctcatgcctccctcctgccctccccggcggcggcgcggtatggcggagctcaaggatggcgaggacggcgcggcgtcgtgggcgggcgctgggtggcgcaactcgagaacggcgagggcggcgcggagatggggcgggggtcgttggcggcgaccccgacgcggcggcctgatcacgcgtcgcggctgccatcgctgcctcgtcggccgccgctctcaaccctgtcacgccgctcgtggccgaccccttcaaccagtcaccggcgtcggcatcaccggaggaggagaccgcggccat

SEQ ID NO: 21401 - DNA, 482 bp, Oryza sativa
  unsure (1)..(482): unsure at all n locations
  Clone ID: TF_OsC151927_1
ctccctttttctttcttcccccgctccatttccgaatcgtcgtctcgcctccacttccgacttccgagtcgtctcgcctcgccggcgcaggatggcggcggcgacgaccgccgcggcggcgcgangggtggggctgctgtacgacgagaggatgtgcgcgcacgcgacgcccgacggggaggagcacccggagaaccccgagaggctgcgggccatctggcgcaagtctccgccgacgggttcgcctccaggtgcatgatcatgaaagcgaaggaagctgaggacaagtatatagcttctgtccatagccagaaccatatcaagctgatgaggagtatcagctcaaaagaatatgattcccgtcgaaacaagattgctagaaaatttaattccatttacttcaacaagggctcctcagagtctgcttttcttgcagctggttctgggattgaggtaacttanaagttgctgcaggagaanta

SEQ ID NO: 21402 - DNA, 1582 bp, Oryza sativa
  Clone ID: TF_OsC19780_1
ctgctgcgacccggcgcccggcacgaagcggcaaaggaaacgtcaccgtcgcggcgtcgccgatggagtcgtccgcctcctcctcggccgcggtggcggcggagggggcgccggcgacgggggagcagctggcggtgttctggcacgagggcatggtggcccacgacgccggccgcggcgtgttcgactcgggccgcgacccgggcttcctcgacgtgctcgaccagcacccggagaacgccgaccgcgtccgcaacatggtctccatcctccgccgcggccccatcgcgcgcttcatctcctggcactccggccgccccgcccacgccgccgagctcctctccttccactccgccgaatacatagaggagctcgtgcaagcaaatgccgttggtgccaagaagctgtgtgaaggcactttcttgaaccctggatcctggggtgctgcgcttctggcggctggaacaactttatcagcgatgaagcacatactagatggacatgccaagattgcctatgcgttggtccgcccccctggccatcatgcgcaaccggaccgtgctgatggttactgcttcctgaacaatgctgggcttgcagtgaagctggctctggattcaggacgcagaaagggtgctggtgttgatattgacgtgcactatggaaatggcactgcggagggcttctaccacacagacagcgtgctgacgatctctcttcacatgaagcatggttcatggggtccatcacatccccagagtggctcggtggatgagattggtgaaggcaggggtctgggtacaatctcaatattcctttgcctaatggcagtggggatgcagggtatgagtatgcgatgaatgaattagttgttccagccatagagaagtttcgtcctgagcttttggtttttgttgttggccaagattctagtacgtttgatcccaatggaagacagtgcttaaccatggatggttatcggaaaattgggcaaataatgagaggcatggctgatcaacacagcaatggtcaaatattgatcgtgcaggaagggggttatcacatcagctattcggcatattgtctgcatgcaacactagaaggtgttctgaatctacaagccccgttgcttgatgatccaatcgcctattatccagaggatgagaaatacaccatgaaagttgtggacatcatgaagaaatgctggaaagaatctattccattcttgaaggacatatagaaatccatttcttttagatgcgagtgcccttgaacctcaatttcatatcagtgcaccgtctattcttatggccttttgactgaaagtacatgcattcattggagcaacattcgagtgcttgttcctttcataaacccctgattcacaagttctcaattcacattggtattgtacatacatcatgtcaaactctaccatcttatatttgtggacctcaattgctgcgcctaataagtaacgctgactaacagatgggctgtttgattatgcaatggggcattggggctacagccacctgtattatataagcgcaccagttccaagtctgaaaccaagtgccaa

SEQ ID NO: 21403 - DNA, 1901 bp, Oryza sativa
  Clone ID: TF_OsC79201_1
cacaagaaatcgtcatttcctcgccaggtaacagcatgaaaaaccaggcaacatcgactagtgtttttttttccaccccaaaacaaaccaatccggagagcaccaatgagacaatgaccaacccagggtacaagcgctagctagattcttaacaatcctagggaaacttgatcgggtccagattccccaattggcaggacattcacgaggcctctacataagcccccgtggtcctgaatgatcaacgcactatctttacagtcctgcaaacctactcatcattcctcctacagtcctagtacgctcctactggctgtacaaactaagcgcgtaagtggctaatctgcaaacccacttataagtgaaaataagtggattcgtgggttagccacttacatgcttagtgcaaaactacaaaccataatgcatagggaagcagccttcacaggcctctggtagctgcagtgttgatgtaactagcggccgcatctgcatccaggtgcttcccttccattagtccccttatcagggtggcggagtaggtcttggatggaggacacaatggcagctctccggatctgcatcgctctacgtctgatgacgggcatgtcattgtaagaattggaaggttatcctcctccccaaggtaaagtacattggagtaccagctatccttaataggtgcaaggtggacacccttgtttctggaaacaaactctatttcagacaagccaatcaaaggagagtcaggagactcagtttttccactttcgccgttctccttcactaaacgattctcttgaaacaatacatcattgaactgctcgagcgttattttatacatgcagacataggagttctcagtgtggtttatctcagggttgagaaaagcaacaccaccagttccccagcaaggagtagaggatctaccaaaaaacaatctatgaggcacagtcttccacatggaacctcttggtgggcttgtgtcatgagatccaaaacatggtatattcataccctcagcctttcccccttggatgtagcacagaaaccttggtgtccacatgtttgaaccaaagctggcataccaaacatatacttttgacagttctgatctccaagtagaagatagagatgatattccttcagttgacaccgcagcagatccatcattttgtggttcaactgaatcagttggaccttcaaccattacattacttgaggtggtctttgttgcgattttgtcttcatcaaggttcaactttgagaggctttcacttataataccataagtaatttgaataatattgacagaagcaatagcatcagggagatcttcaactcagcagtcagaaccagaaggatacagcccaatttgtgagggcctactcctcattgatatattgtccggcaatctattactcagaacaggccaggacgtcttcaattcatcacgtaccgcttgtataactctccatgaagattcaaacggttgcatatcaggagtgtcaaatctgaacttgtctcccaacaaaactttagcacaagcactaactgaatttggtatggatctaaggttatagcctcttcaagagccatcagtatcctcccttgggcaaaactaagagctttgtcagtagcagagcatatccattgggagtgatgcagcagccaccaagaggatcacccagtgctgcatcaaacccagcagacaccaagagtatatcagggttaaatgcttcagcaacaggaagtagtacatggtcccatgcagcaatataatgtgcatcaccacattttccatgttcccagggcacgttaactcgtgccgaattcgtgcagcccgggggatccactagttctagagcggccgccaccgcggtggaatggagtggggtaaa

SEQ ID NO: 21404 - DNA, 2296 bp, Oryza sativa
  Clone ID: TF_OsC17811_1
ctcgagccgagcacgaagcgcacgagccgctcttacagtcatcccgtggccgcgccgcgcccctccaaaaatccaatcgcgagaggcgagcgccgccgccgccgggatcgccctccagattgcgttgcatgctctgatggcgtctgatatgaggtcactcaacagccaaaagggacagagttgtggagtttcagaccaagcttgccacagcaaaagcaaaagcggcaatgatggaaaaccatcacatgctaaagcaaatggagtttcctcgttgagcgggagtcataatgatgagaaaattttgaaagagaactctggagcatgcaatttaaattccgaccatgccaatcctttatcagtagatgggaccaaagtttctacagcaaggtcggaacttattgacagttcaggccatgatggttgtctgcatgtcaagaatgaaagctgtatggcttgtgatgatctgcttcaagagtctgacaaagaacagcctgggggtacactggaggatctattttcctttaatgatgaagaggatgatgacagtgactgggaaccctctgctcgccttgctttgagcaggtggttttgcttgaactgtacagtgccaaacatggaggggtttacacattgtcagaattgcgatgagcttaagggatctgtggtagttggatatgatgctttcaaagctcatcttgcacaggcagctttgttatctgctgacgcagcgctgccatcagtatctacagctgtcggttttgatgaaagaatgttgctccatagtgagatagagattaaaccaaatccacatccagaaaggcctgaccgccttcgtgcaatcgctgccagtcttgctgctgcaggtatcttcccttcaaaatgtgtcatggtacctcctcgagaaatcactaaggaagaactcctaagggtccatacttcagatcacattgacagtgttgagcagacaaagaacatgctttacagttacttcacttcagatacctatgcaaatggacactcagcatgtgctgccaaacttgcagcagggatatgtgctgatcttgctaacttgatagtatctgggcgtgttcgcaatggatttgcaatggtgagacctcctggccatcatgcaggggtgaaacaagccatgggtttttgtcttcacaataatgcagcagtggctgcattagctgcacaaagagctggtgccaagaaagtcttaatagttgactgggatgtccaccatggcaatggaacacaggagatatttgatggggacaattctgtcttgtacatatcattacatcggcatgaggatggaagcttctaccctggaactggggcagcaaatgaggtgggagttatggatggccaaggattctcagtcaatataccttggagccgtggtggtgttggagacaatgactacatatttgcttttaagcatgtggtgcttccgatagctgcagaatttgctccagacatcaccatcatatctgcaggatttgatgcagcgaggggtgaccctctgggttgttgtgatgtcacacctgctggatattctaggatggcgtccatgctaactgcttgttcacagggaaaattgttggttatacttgagggaggatacaatcttcggtctatatcctcatcagctactgaagttgttaaggtcctacttggggatagtcctgtttatgatacagatgcaactgaaccatcagaggagggcatacagactgtcttacaagtcctgagtatccagcagcaattttggccagttttagttccatcctttgcatcagttctggcactgcagcggtcggttttttccagatataccactgaagtaaacaagatgaaaaggaagcatgcaggaggggcaggacccttctggtggaaatgggggagtaaaaggctactgtacgaagtgctatttgagggccgctgtctgaggaaaaccaaggatacaggcaaagaaaaattgaatgatgaagcagagccctaaatgtgttgctgctgaagcctgactgctgatctcatcaacatccatagtgtagtgggctgactggggttccctgaatgtagcttgcatataccgagccaaattttgactggagaattaagatggtagttcgtgtttttaggtgaaatttgtgaacaaccttgttgacatgtattggatgttcagttgtattagaaatagagtcaagtttaccatcctgtcgtctgtcgaatgatcaccacgtgcagttcaccgcttcaaaaaaaacctgcagcccggggatccactagt

SEQ ID NO: 21405 - DNA, 300 bp, Oryza sativa
  Clone ID: TF_13447556
caggatagcctacttctacgatggcgatgtgggcaatgtctactttgggccaaatcacccgatgaaaccacatcgactttgtatgacacatcatcttgtgctttcatatgatcttcacaagaagatggagatatataggccccacaaagcatatccaacagagctcgcacagttccattctgctgattatgtggaattcttgcatcggataactcctgacacccaacacctgtatgaaaatgaattacgtagatacaatcttggagaagactgcccagtctttgataatctgtttgagtt

SEQ ID NO: 21406 - DNA, 1190 bp, Oryza sativa
  Clone ID: TF_OsC8271_1
aaaaaaaaagaaaagagaagaagaaatcctccgaaatggcggcgtccggcgagggggcgtcgctggcgtcggcggcgggaggggaggacgggcggcggcggcgggtgagctacttctacgagccgtcgatcggggactactactacgggcaggggcacccgatgaagccccatcgcatccgcatggcgcactcgctggtggtccactacggcctccaccgcctcctcgagctctcccgcccctacccggcctccgacgccgacatccgccgcttccactccgacgactacgtcgccttcctcgcctccgccaccgggaaccccgccctgctcgacgcccgcgccgtcaagcgcttcaacgtcggcgaggactgcccggtcttcgacggcctcttccccttctgccaggcctccgcggggggcagcatcggcgccgccgtcaagctcaaccgcggcgacgccgacatcaccgtcaactgggcggggggcctccaccacgccaagaagggcgaggcctccggcttctgctacgtcaacgacatcgtcctcgccatcctcgagctcctcaagttccacaggcgtgtgctatatgtagacattgatgtccaccatggagatggcgtggaggaagctttcttcactacgaatcgagtcatgacttgttcctttcacaagtatggggactttttccctggtactgggcatatcactgatgttggagcaggcgaaggaaaacattatgctttaaatgtgcccctgagtgatggcattgatgatgatacctttcgtgatctgttccagtgcatcatcaaaaagactgcagttgctgttggagttgaacctgataacaagttaccttataatgactactatgagtactttggtcctgattataatctccatattcaacccagaagtgtggagaacctgaattcgactaaagacctggagaacataaagagcatgatattggatcatctctcaaaaattgagcatgttccgagcactcagttccatgacagaccatcagatcctgaagctccagagcaggaagaggaggacatggacaagagaccacctcagcgcagtaggttatggagtggaggagcttatgaatctgatacagaggatcctgacaacatgaaaactgagaccaatgacttatctgccagctctgtcatgaaggtttga

SEQ ID NO: 21407 - DNA, 1973 bp, Oryza sativa
  Clone ID: TF_OsC477_3
gttggaaaagaaaaaaaaaagagataaaaaaaaatctcctcctcctcctcctcgccgccgccgccatggacgcctccgccggaggcggggggaactcgctgccgacggtgggggccgacggggccaagcggcgggtgtgctacttctacgacgcggaggtggggaactactactacgggcaggggcacccgatgaagccccaccgcatccggatgacccacgcgctgctcgcccactacggcctcctcgaccagatgcaggtgctcaagccccacccggcgcgcgaccgcgacctctgccgcttccacgccgacgactacgtcgccttcctccgctccgtcacgccggagacccagcaggaccagatccgggcgctcaagcgcttcaacgtcggcgaggactgccccgtcttcgacggcctctacagcttctgccagacctacgccgggggatccgtcggcggcgccgtcaagctcaaccacggccacgacatcgccatcaactgggccggcggcctccaccacgccaagaagtgcgaggcctcgggattctgctacgtcaacgacatcgtcctcgccatcctcgagctcctcaaataccaccagcgtgttctctatgtggatatcgatatccaccatggggatggtgtggaggaggcgttctacacgacggacagggtgatgacggtctcgttccacaagtttggggattatttcccggggaccggggacattcgcgatattgggcactcaaaggggaagtattactctctgaatgtcccgttggacgacggtatcgacgacgagagctaccagtcgttgttcaagccgatcatggggaaggtgatggaggtttttcgccctggcgcggtggtgctccagtgcggtgcggactctctgtcgggtgataggttgggttgcttcaacctgtcaatcaggggccacgcggaatgcgtgagattcatgaggtccttcaatgtcccgctgttgctgcttggtggtggtgggtataccataagaaatgttgcgcggtgttggtgctatgagacaggagttgcacttggtcatgagctcactgacaagatgcctccaaatgagtattttgagtactttggtccagattatacacttcatgttgcaccaagtaacatggagaacaaaaacacacgccagcagttggatgatataagatcaagacttcttgataatctttcaaaacttcgacatgctcctagcgtccaatttcaagagcgaccccctgaggctgagctacctgagcaagatgaagaccaagaggatcctgatgaaaggcaccatgctgattctgatgtggaaatggatgatgtcaaacctttggatgactcaggaaggaggagcagtattcagaatgtgagagttaagagagagtctgctgaaacagatgccgcagatcaggatggtaatagggtcgctgcagagaacaccaagggcacagaacctgcggctgatggagttgcacgacggcaacgacggggcaacgacggttcgacggatttgatggtcgtcctcgtccaccaccaagcctactggtccaatctacccaacgaggatgccatggtgttgcaagatggatctacaaacacgaagcatgtcaaaaccgatctaatcggatgcataggagacggctgcagccacgccgatgtcttcctgccgtcctgcgtcgtgctgatggacaccaacgccgcccgcgactgcgacctccgcctcctccgctccgacgactacgtcgcctccctccccgccgtcctcccggagttgtggatctgttccctctgccgcttcaacgtcgacgaggattgcccgattttccatggcttctacatctactgccagacctgcgcaggggactgtgcccgcgccatcatcgatcgctaccatggcgcacaaaacgtcgtcatcaacaaggctttggatggcaacatggccgacaaatga

SEQ ID NO: 21408 - DNA, 2125 bp, Oryza sativa
  Clone ID: TF_OsC477_4
ggggaaaagaaaaaaaaaagagataaaaaaaaaatctcctcctcctcgccgccgccgccgccgccgccatggacgcctccgccggaggcggggggaactcgctgccgacggcgggggccgacggggccaagcggcgggtgtgctacttctacgacgcggaggtggggaactactactacgggcaggggcacccgatgaagccgcaccgcatccggatgacccacgcgctgctcgcccactacggcctcctcgaccagatgcaggtgctcaagccccacccggcgcgcgaccgcgacctctgccgcttccacgccgacgactacgtcgccttcctccgctccgtcacgccggagacccagcaggaccagatccgggcgctcaagcgcttcaacgtcggcgaggactgccccgtcttcgacggcctctacagcttctgccagacctacgccgggggatccgtcggcggcgccgtcaagctcaaccacggccacgacatcgccatcaactgggccggcggcctccaccacgccaagaagtgcgaggcctcgggattctgctacgtcaacgacatcgtcctcgccatcctcgagctcctcaaataccaccagcgtgttctctatgtggatatcgatatccaccatggggatggtgtggaggaggcgttctacacgacggacagggtgatgacggtctcgttccacaagtttggggattatttcccggggaccggggacattcgcgatattgggcactcaaaggggaagtattactctctgaatgtcccgttggacgacggtatcgacgacgagagctaccagtcgttgttcaagccgatcatggggaaggtgatggaggtttttcgccctggcgcggtggtgctccagtgcggtgcggactctctgtcgggtgataggttgggttgcttcaacctgtcaatcaggggccacgcggaatgcgtgagattcatgaggtccttcaatgtcccgctgttgctgcttggtggtggtgggtataccataagaaatgttgcgcggtgttggtgctatgagacaggagttgcacttggtcatgagctcactgacaagatgcctccaaatgagtattttgagtactttggtccagattatacacttcatgttgcaccaagtaacatggagaacaaaaacacacgccagcagttggatgatataagatcaagacttcttgataatctttcaaaacttcgacatgctcctagcgtccaatttcaagagcgaccccctgaggctgagctacctgagcaagatgaagaccaagaggatcctgatgaaaggcaccatgctgattctgatgtggaaatggatgatgtcaaacctttggatgactcaggaaggaggagcagtattcagaatgtgagagttaagagagagtctgctgaaacagatgccgcagatcagttgttatggtcaacgtgtgctgcaaggtgggatggtaatagggtcgctgcagagaacaccaagggcacagaacctgcggctgatggagttggttcctcgaaacaaactgttcctaccgatgcaagtgcgatggccatagacgaaccaggctccctgaaagtcgagccagataactcaaacaaattgcaagatcaaccatcggtgcaccagaagacataatagttctctctaccttaaaacttagtaactgatgccatctatcatccattgattatattggagaaactcccaactttgaagcagagagttcatgccataccaaaagttatataccaaatttcgaatggtatgtacacctttcgaactggtggtgttttgtgcaatacatttatgccaggctgactattatgtggtatctattattagctttagtttaaccctgtctgctgtcgagcaatcggtatagtcgtgcaatatattctggatctatcaagcaatgtgagacggatgtcaaaccattggttgtgacttcagcaatgtatgtatatgtaagtatagggacaggcagcaggcgttactttggtggaagctacaagctttgtctctcttctcatccctaatacctacgtggggtgcgtctcgttgttgtttaggtattactgcattcttaaaagtgctcatttagggtg

SEQ ID NO: 21409 - DNA, 1866 bp, Oryza sativa
  Clone ID: TF_OsC477_2
atggacccctcgtcggcgggcgccggcggcaactcgctggcgtcggcgtcgtgcggcgacgcgcagaagcggcgggtgtgctacttctacgacccggaggtgggcaactactactacgggcagggccacccgatgaagccccaccgcgtgaggatgacccacgcgctgctcgcccactacggcctcctcgccccggccaagatgcaggtgctccgcccgctccccgcccgcggccgcgacctctgccgcttccactccgacgactacgtcgccttcctccgcgccgtcaccccggagacccagctcggccaggtccgcgccctccgccgcttcaacgtcggcccggactgccccgtcttcgacggcctctacgcctactgccagacctacgcgggggcctccgtcggcgccgccgtcaagctcaaccacggcacccacgacatcgccatcaactggtccggcgggttgcaccacgccaagaagtccgaggcctccggcttctgctacgtcaacgacatcgtcctcgccatcctcgagctcctcaagctccatgagcgagttctgtatattgatattgatatccatcatggagatggagttgaggaggcattctacacaacaaacagggttatgacagtctcatttcacaagtttggggattatttcccgggaacaggggacatccgcgatattgggtattcagaagggaagtattactgcctgaatgtcccgctggatgatggaattgatgatgacagctaccagtccatcttcaagccgatcatcagcaaagtcatggagatgtatcgtcctggtgcagtcgtgcttcagtgcggcgctgattcgttgtccggtgataggttgggctgtttcaatctctcaggcaaaggtcatgctgaatgtgttaagttcatgaggtctttcaatgttccgttgcttcttcttggtggtggtggatataccataagaaatgttgcacgctgctggtgttacgagacaggagttgcacttggtgaagagctacgggagaagttgccttataacgagtattatgaatattttggtccagaatacagtctttacgttgcagcaagtaacatggagaacagaaatacaaacaagcaattggaggaaataaaatgcaacattctggacaatctctcaaaacttcaacatgctcctagtgtccaatttgaagagcgaattcctgaaacaaagctacctgagccagatgaagatcaagatgatccagatgaaaggcacgaccctgactctgatatgctgttggatgatcacaaacctatgggacactcagcaagaagccttattcacaacatcggagttaagagagaaattactgaaacagagaccaaagatcagcatggtaagagattaacaactgaacataaagtaccagaaccgatggcagacgatcttggttcctccaagcaagttcctgccaccagctcttatgccacggattcctgcatgctattagttacttactccgaggtgttgtatgactgtttcttctgtaggagtttacaaattacaactgtttcttttgttgaagaattccaaagtgtccaggcaatactggacgtggagacattagtctgatcaatgtactgcagagtacagaacatgtaacatgacccaagttacagtgtatagtcttttagactgttagatggaactttcagtcgaaatgcctgtgcctacttgtgtgtgctctctgttggttgtttttcgttaaaatattttgttccggtttatcatgtacttcctacgtttttatgtatgagttgttttaaagagacaaataaatctattttttaatttataatagttaatacttaattaatt

SEQ ID NO: 21410 - DNA, 1483 bp, Oryza sativa
  Clone ID: TF_OsC56939_1
cgttgccgactcggacagagactcatgtctcccttttgtatatccatgtgagatttctgcaccattgctgcattctgttcgatctcgatcttccaagaaggaacttggagcgatggccaccggcgggaactcgctgccgtcgccgtcgtgcgccgacgacaagaagcggcgggtgtgctactactacgaccccggcatcgcccacatcaaattcagcgacgaccatgtcatggtgcccgcccgcgtcgccatggcgcacagcctcgtcggcgtctacggcatgctcggcgacatgcgccgcctccgcacgagacccgccacggaggcggagatccgccgcttccactcgccggagtacgtcgacctcctccgcgacctcaccccggagagctacttcaacgacgccgcgcttcggcagaaggcggaggatgaccacggcatcggcggcgacgacgattgccccgccttcgaccgcctctggaagtactgccgcggctaccccggcgggtcgttcgccgcggcgcgcgcgcttgtcgacggcgcctccgacatcgccatcaactggtccggcggcatgcaccacgcgtccgcctgcaaggccaccggcttctgctacgtcaacgacatcgtgctcgccatcaacgagctcctcggcaccttcaggcgagtcatctacgtcgacatcgacgcgcaccacggcgacggcgtgcagaacgccttcttggactccaaccgggtcatgacgctgtcgttccaccggtacggcaaaatcacgccccacaaggacttcttcccgggctccggcgccatcaacgaaatcggcgacggcgccggcgagcactacagcgtgaacgtgcccctggacgccggcgtccgcgacgacgtgtaccacacgctgttcaagccgatcgtgggcaaggccatggaggtgttccagccggaggccatcgtgctgcagtgcggcgccgactcgctctccggcgaccgcctcggcggcatggagctgtcggtgcggggccacgcggagtgcgtcagcttcctccgcgggttcaacctgccgctgctcctcgtcggcggcggcggctacaccatcaaccacgtcgcctccgcgtggtgctacgagacggcggtcgccgtcggcaaggagaggaagctccccgacgacatagagatacccagccacggctacgagctcatgtacaagaaccaggggaacaagctccattacaagacgtcgacagcgacggcggcgagaaaaaggtcgagcagcacggaggtcaccaaggggaaggtgctcgagcacctgtcgcaggtcaagcgcgcgccgagcgtgcagttccaggagcgacgcggcggcgacaatgccgccggagttgggctctactacgagcgccctccgagcctggaagacgacgaacccgcgcagaggctgcaccgcctctgcttccctggcctgacgaagcgtatcaggctcaatgactga

SEQ ID NO: 21411 - DNA, 1579 bp, Oryza sativa
  Clone ID: TF_12698879
ggcacgagggccatggacgcctccgccggaggcggggggaactcgctgccgacggcgggggccgacggggccaagcggcgggtgtgccacttctacgacgcggaggtggggaactactactgcgggcaggggcacccgatgaagccccaccgcatccggatgacccacgcgctgctcgcccactacggcctcctcgaccagatgcaggtgctcaagccccacccggcgcgcgaccgcgacctctgccgcttccacgccgacgactacgtcgccttcctccgctccgtcacgccggagacccagcaggaccagatccgggcgctcaagcgcttcaacgtcggcgaggactgccccgtcttcgacggcctctacagcttctgccagacctacgccgggggatccgtcggcggcgccgtcaagctcaaccacggccacgacatcgccatcaactgggccggcggcctccaccacgccaagaagtgcgaggcctccggcttctgctacgtcaacgacatcgtcctcgccatcctcgagctcctcaaataccaccagcgtgttctctatgtggacatcgatatccaccatggggatggtgtggaggaggcgttttacacgacggacagggtgatgacggtctcgttccacaagtttggggattatttcccgggaacaggggatatccgtgacattgggtattcagaggggaagtattactgcctgaatgtcccgctggatgatgggattgatgatgacagctaccagtccatcttcaagccgatcatcagcaaagtcatggagatgtatcgtcctggtgcagtcgtgcttcagtgcggcgctgattcgttgtccggcgataggttgggctgtttcaatctctcagggaaaggtcatgcagaatgtgtaaagttcatgaggtctttcaatgttccgttgcttcttcttggtggtggtggatatgccataagaaatgttgcacgctgttggtgctatgagacaggagttgcacttggtcatgagctcaccgacaagatgcctccaaatgagtattttgagtattttggtccagaatacagtcttttcgttgcagcaagtaacatggagaacagaaataccaacaagcaattggaggaaataaaatgcaacattctggacaatctttcaaaacttcaacatgctcctagtgtccaatttgaagagcgaattcctgaaacaaagttacctgagccagatgaagatcaagaggatccagatgaaaggcacgaccctgactctgatatggtattggatgatcacaaacctatgggacactcagcaagaagccttattcgcaacatcgaagttaagagagaaatcactgaatcagaggccaaagatcagcatggtaagagattgacaactgaacataaaggaccagaaccgatggcagacgatcctggttcctccaagcaagctcctgtaagtcgtcgtcttctctatccatctgcaaatccatagcaaaagctctgcattgcccaatgcctatatggatatcgaattatagaacaccatggttaatctgctctaaaaaaaaaaaaaaaaa

SEQ ID NO: 21412 - DNA, 828 bp, Oryza sativa
  Clone ID: TF_OsC82111_2
atccaaattatagaagtttatttctttttaaggacgttgagagtaggtccaacctgataaccacatacgccgggtttaaacaaaaaaagataggaaaaatgtgtgcagccaaaaactatgaatcattaccaccgactaagaatttgcaatctctgcatgcaactagcatatgtaactgattaaaaagtaggaacgtacacgcactatatgcaggcaaaggtgttagatcctaacaagtcaattgacagtatttcccacctaacgctgttaaaccgcgcaacagcaccagactttctctatccaggttcatcatacaaagaacctttttcaacgggccccgtcctcatgatcattgtcgttgtcaccttcatagtactcgtcatcgcgatgaatctgcttgtcttgggtatgctgatctacacgttcatcaggatccagctcatcttcatcaatatctgggatataaaaatctggtggaacctcttgcatctgaacaccaggcgcatgttgtatggcccgcaaactctccatgacttgcactttgattgaacttagatatgacttgctattcaagttgtccatgttcacattcgatactttcaatgtataatctggagcaaagtatttgatgtattcattgtctggaatttcatttgggagctccgtatctagaagaacaccagtttcaacagcccaacagcgtgctacattctcttttgtgtatccaccacccccagtcaccagtagagggatattgaatttcttgacaaacttcacacattcagcatggccatcgtagaagtaggctatcctgtctttctccagcat

SEQ ID NO: 21413 - DNA, 1584 bp, Oryza sativa
  Clone ID: TF_OsC90813_1
gggaaaaaaatgtcagcttttgtattataaaacaaaatgctgatagctcgacaggttccactggacactaactggagtagaaagatgcaagtaatcgcagtagtactggtattaatctacacaactggtattgaactattgacaagcttgcgatcgaatgtatctgattcacagcaactaagatgtaaatgactatgccgtgcttttccgatgtacaatgctacactggaaagtgcaaaagctaacaagacatgaatatgatcttgagttgttgaccagcatcagcaagcagtttcagcagccaagtatagatactgttgcaatcttctgggcgccgcgcttagagcgagtggaggtgcttggccttgtcgatggcctccctgatcttccgcgtgggctcctcgtagagcatcgccgggtcgtcgaaccgcgcggcgaggctgggctcgccgaggaacgcacggaaggtgtcggccactgagctggacagcgactccaggttgtagccgccctccaggaagaagacgcaccgcccgccgcacagctccgccgccacctcccggatcctcgccgccagcatgtagaacgtccccgtcgtgaactgcagccccgccagcgggtccagcgcgtgcgcgtcgtacccggctgaaacgaggatgatgtcaggtttgaaccgctgggcagctggggcaataacctcatcaaacgcgcacctcatcgcgtaatcgcctgagccaccgggtagtggcaggttgagcgtcgtgccctcgccgttgccctggccaacttggtggatcttaccggtgccaggatagcttccaagctgatgagttgagaggaagaatatgtccggatcctcataaaaggcgtcacatgtgccgttaccgtggtgaacatcaaaatctattatcatgacccgctttaaaccatgttgattctgagcataccgagctgccactgcaatgttcccaaagacacagaagcccatgggaccttcaggaacagcatgatgtcctggtggccttactaaggcaaagccgagcggtggcttcgggcccaactttgatgctgcaaccactgaatcaaccaatgtaattccagcaccagcagaaaggagacattcttggaaagtcttccaacgagaaaagcattgggggaataaaaacaagagggaatgtgcatagatcattacagtctgggtagcatatgtaggtccagttccttcaatgaatatcaaaccttcatctgaagccctactcatagccttttcaagtccagttatgtatgatcttgaatgaactagtgcaatatcatcaagtgaagcaggttggaaatcttgaatttcaagaacctgtgaaccacgatgcttcgaagtaagctccagtttttcgagagcatcaactattgcaggaactcttttgttagtttctggatgcgcttccttgttatgacccatggcaggagatgtacaatagagaatatgagcatcccgcagcaaattgtcaggcaaagctaagtcttttcgaacaccatttgtgtctgaaatagaagttccattatcgcctgcagcccggggatccacta

SEQ ID NO: 21414 - DNA, 787 bp, Oryza sativa
  Clone ID: TF_OsC477_17
cccacgcgtccggttgggctgtttcaatctctcagggaaaggtcatgctgaatgtgttaagttcatgaggtctttcaatgttccgttgcttcttcttggtggtggtggatataccataagaaatgttgcacgctgctggtgttacgagacaggagttgcacttggtgaagagctacaggagaagttgccttacaatgagtattatgaatattttggtccagaatacagtctttacgttgcagcaagtaacatggagaacagaaatacaaacaagcccacccggcgcgcgaccgcgacctctgccgcttccacgccgacgactacgtcgccttcctccgctccgtcacgccggagacccagcaggaccagatccgggcgctcaagcgcttcaacgtcggcgaggactgccccgtcttcgacggcctctacagcttctgccagacctacgccgggggatccgtcggcggcgccgtcaagctcaaccacggccatgacatcgccatcaactgggccggcggcctccaccacgccaagaagtgcgaggcctccggcttctgctacgtcaacgacatcgtcctcgccatcctcgagctcctcaaataccaccagcgtgttctctatgtggatatcgatatccaccatggggatggtgtggaggaggcgttctacacgacggacagggtgatgacggtctcgttccacaagtttggggattattttccggggaccggggacattcgcgatattgggcactcaaaggggaagtattactctctgaatgtcccgt

SEQ ID NO: 21415 - DNA, 617 bp, Oryza sativa
  Clone ID: TF_LIB4309-015-Q1-K1-H3
gcgttcgccgacgacggctcaagcctatcttcgtcgccggcttctccgatggttaccaatcgcgtagacgtcttctggcacgaaggaatgctccgacacgacgccgtagaaggcgtcttcgacactggatacgaccctggattcctcgacgtattggagaagcacccggagaacgccgatcgcgtcaggaacatgctttcgattctccgacgcggtcccatcgctcctcatgtcaattggtttaccggtcttccagcaatcgtttcggagcttctaatgtttcacacttcagagtacattgagaagctagtggaggcagataaatcaggagaaaggtgtgaaattgccgcaggtactttcatgagcccaggctcgtgggaagctgctcttcttgcagctggaacaactctttcagcaatgcaacatattcttgattgccatgggaaaattgcatatgctctggtacgcccaccaggtcaccactcacagcctactcaggctgatgggtattgcttcctcaacaacgctgctcttgctgtcaagctggcattgaattcgggttcttgttcccgagttgcggttattgacatcgatgtacattatggaaatggcacagc

SEQ ID NO: 21416 - DNA, 1238 bp, Oryza sativa
  Clone ID: TF_OsC136700_1
cccacgcgtccgcccacgcgtccgaccgaattctcccgagctccggcgacgtggtcgcgcattcctcttctcgccggcagactcgccgccgtcctccgccgcccctctcgcggcgcagcgattcgtctccctcctccgcaaccgcgcccgagctcccccctcctccccgcatccggtggatggcctcttccgcgccgtccgcggcggcgggggcgaccccgccggaccccctccgccgcgaccgcatcctctccagcaagctctacctcgacgtcccgggctccaaggctccggtggtgtactcgccggcgtacgacatcgccttcctcgggatcgagaagctgcacccgttcgattcctccaaatggggccgcatatgcaagttcctcaccaaggaagggcacctggagaagaaccgagtggtggagccattggaagcgaccaaggacgatttgctggtggtgcactcggagtcgtacttgaacagcctcaagagcagcctgaaggttgcgtccattgtagagcttcctcctgtggcattcattcctaattggcttgtgcagcaaaagctactgtaccctttcaggaaacaggtgggtgggtcgattctatcggccaagcttgcacttgagagaggatgggccattaatgttggcggagggtttcaccattgttcggcagagcaagggggcgggttttgtgcatatgctgatatttctctctgcattcagtttgcttttgtccgtctaaatatttcaagagtgatgatcatagatctggatgcccaccaaggaaatggccatgaaaaggatttcgctaatgatggaagagtttacactttggatatgtacaatgctggaatatatccctatgatcatgttgctaagcggtatattgatcaaaaagtcgagctagttagtgggacaaagacagaagactacttggatcaacttgacaaggctcttaaggttgcagaaagtagatttcagcctcagttgattgtttacaatgctgggacagatatcctggatggcgatccattgggaagattgaagataagccctcagggcgtggtgatcagagatgagaaggtgttcaggtttgcaaaggatcaaagcatcccactactcatgttaacatcaggaggatacatgaagtcgagcgcccgagtgatcgccgactcgataatcaatctctcgaataaaaacttgatagagcttggtagccagcttggctga

SEQ ID NO: 21417 - DNA, 486 bp, Oryza sativa
  unsure (1)..(486): unsure at all n locations
  Clone ID: TF_LIB3432-035-P2-K1-D11
gttcacaggttcttgaaattcaagatttccaacctgcttcacttgatgatattgcactagttcattcaagatcatacataactggacttgaaaaggctatgagtagggcttcagatgaaggtttgatattcattgaaggaactggacctacatatgctacccagactactttccaagaatgtctcctttctgctggtgctggaattacattggttgattcagtggttgcagcatcaaagttgggcccgaagccaccgctcggctttgccttagtaaggccaccaggacatcatgctgttcctgaaggtcccatgggcttctgtgtctttgggaacaatgcagtggcagctcggtatgctcagaatcaacatggtttaaagcgggtcatgataatagattttgatgttcaccacggtaacggcacatgtgacgccttttatgaggatccggacatattcttnctctcaactcatcaacttggaagct

SEQ ID NO: 21418 - DNA, 1413 bp, Oryza sativa
  Clone ID: TF_OsC82111_1
ttttttttttttttttttttttttatccaaattatagaagtttatttctttttaaggacgttgagagtaggtccaacctggtggccccccgcgccgcgggttttctttttttgtttggttttttgtgtgcagccaaaaactatgaatcattaccaccgactaagaatttgcaatctctgcatgcaactagcatatgtaactgattaaaaagtaggaacgtacacgcactatatgcaggcaaaggtgttagatcctaacaagtcaattgacagtatttcccacctaacgctgttaaaccgcgcaacagcaccagactttctctatccagtttcatcatacaaagaacctttttcaacgggccccgtcctcatgatcattgtcgttgtcaccttcatagtactcgtcatcgcgatgaatctgcttgtcttgggtatgctgatctacacgttcatcaggatccagctcatcttcatcaatatctgggatataaaaatctggtggaacctcttgcatctgaacaccaggcgcatgttgtatggcccgcaaactctccatgacttgcactttgattgaacttagatatgacttgctattcaagttgtccatgttcacattcgatactttcaatgtataatctggagcaaagtatttgatgtattcattgtctggaatttcatttgggagctccgtatctagaagaacaccagtttcaacagcccaacagcgtgctacattctcttttgtgtatccaccacccccagtcaccagtagagggatattgaatttcttgacaaacttcacacattcagcatggccttcaatggacagattgaagcaccccagacggtcccgtgccaaggaatcagccccgcattgaagaacaatagcacctggcagatatgtctcaacaactttggcaataactgttttaaaaaggcgagtaaagccggagtcatctatcccatctttaagtggaatgttaatggcataatattttccttctctttctcctatatccttaatatcacctgtgccagggaagaaaaaatcaccatacttgtggaaacttacagtcattaccctgtcagtgaaataaaaggcttcttcaactccatccccgtgatgaacatcgatatcaatatagagaaccctggcatggtacttgagaagctccagaattcccaaaaccagatcattaatgtagcagaaccctgatgcctcgcacttctttgcatgatgcaatccaccagcccaattgatagcaatatcacatgttttatgattcaatctgcgagccgcatctagagttcctccagcatatatttggcaaaactcaaacagattatcaaagactgggcagtcttctccaagattgtcatcgtagaagtaggctatcctgtctttctccagcat

SEQ ID NO: 21419 - DNA, 386 bp, Oryza sativa
  Clone ID: TF_uC-osrocyp027g06b1
ttttctcttgcttcctcatcataaccattccatccgcggttgatgagaagagctccagggagcatctactcaaatggcgggcgttggcaatatatagactcccattgatcacagcctatgcgatcatgcattctagaccaattgttagaaacgcctttcgaactgcaagatgcccgacctcaagattgctaggatgacacaatctgaaattcagagcgatctgtgttaccagagccaggctgtgcttgacctataaaaagtttgagaaacgtaccttgttggtctattagaggacaccaacctgtgcgctattaatgacaatcgtgtgcccattttttttcaagtaatacaattggctaggaggatttgtggagagaggtcttaaa

SEQ ID NO: 21420 - DNA, 2721 bp, Oryza sativa
  Clone ID: TF_OsC1528_2133
atggagatggaaacattgcagctgcgtgctgggacaggctgcttatgggtttgcctcctcctctgtgttgcgccgtcgctcgtggactactccatcccgctcgccagcgtgcaccggcgatcgggagagcaggtctccggaacctctgccttcgacgtcctgcaccgggagaaggcggcaataaggtttttgggaagcgcttcgtgcgactgctccctgttcaaccgcgacggttcgccttcctctccgctcgcgtgctgcacgccttcgtcgacgctcgcaaccgcaagtagttcatgccgagcaaccggtctttccgccacctcgatcagggtcaatctgtggctgacagctatgaaatgcttctgggtaagtactggcaagcctatgggcgttcttaatgctgatcagcagaaagaattcgatgaggccactactctttttgtgggatgcattcttagcgtgcttggcgatcgtctggtcgaggtgtatatgcatatgaccgacgctacggagttgtgggatgcactgaatactaaatttggtgctactgatgctagtaatgatctgtatatcatggagcagtttcatgtctacaagatggctgacaaccgttctgtagtcgaacaggctcataagatacaaaccatggctaaggaactcaaactccttaagtgtgtcttacctgacaaatttgtggccgggtgcattattgcgaaactatctccatcttggagaggtttcggtactgcactcaaacacaagagacaggaatacttcgttgaggggttgatagcgtctcttgatgttgaggagaaagctcgggaaaaagatgtcgcgtctaagggcgatggtgggcagtccagtaccaatgttgtgcacaaggcccaaaacaagagcaaggggaaatacaaagctcagcagaccaccaacttcaataagaagaagaaaaacaacaatcctaatcaggatgagaggacttgctttgtgtgtggtcaacctggccatctggccaggaagtgtccacaacgcaaggggatgaaggcacctgcaggacagacctctaagtctgctaatgtgaccattggcaacactggagatggaagcgggtatggtcgcacggggttccaccgtcctaatggggaatgggtcacatgcttctgttcatggtgttggcacggtagatctgaagtttacttcgggaaagatcgtgcagctgaagaatgtgcagcatactactggaaggaggatgtccgtagtgaaatggattccattatcgctaacgggacttgggaggtgacagagcgaccctatgggtgtaaacctgtggggtgcaagtgggtgttcaagaagaagctcaggcctgacgcctcacatggtcttctcattcatcaaatggacgttaagacaacttttcttaatgaagagctggatgaggagatctatatggatcaacctgatgggtttgtagttgaaggctttgcagtcaatgaggcagataaatatgtgtactatcgccatggtgggggtgagggagttattctgtgcttggtttgcctcctcctctgtgttgcgtcgtcgctcgtggactactccatcccgctcgccagcgtgcaccggcgatcgggagagcaggtctctggaatctctgccttcgacgtcctgcactgggagaaagcggcaataaggtttttgggaagcgcttcgtgcgactgttccctgttcaaccgcgacgagggtgatgctgcagatagggcgagcaacttgacagatgccactgttgacagcttgattgagtctatcatcattaaagatggggtgaaagccaagtttttctttaacattatgtctcttgctaactctgcaggagagaagttgcttgccttcagtcaatatatacttcccatgaaatttttggaaaggttgttggttaagaggctgggctggcatgtagggaaggagattttcatgatatctggtgatactagtgcagacgacagagaagtggcgatggatcagtttaacaactctgccgatgcaaaagttttgtttggttccatcaaggcctgtggagagggaatctcccttgttggtgcatctcgagtcatcattctagatgttcatttgaacccatctgtcacccgtcaagcaatcggacgtgcattcaggcccggacagcagaagaaagtgtttgtgtacaggcttgttgctgctgattctccagaggtgaagttccatgaaactgcattcaagaaagaagttatcccaaagctatggtttgaatggagtgagctctgcactactgaagacttcaaactgaatcaagttgatattgatgactctgaagatgaactattggaggctaatgctattcgccaggatatcaaggctttgtatagaagggttggcaagggcctgtcggcggcagcggcggcgtcgaagcggagatggacgttggcgttggcagcgaagaaggtagtggggcggaagctgggtgggccgaagaagccggtgccacgctccgtcaaggccgggctccagttcctcgtaagccgctacctcgagaacggccggcacgcgcaacgcgtcggcactggcacccccgtctacctcgctgccgtcctcggcgtagctgtggcggccgcggcgaggaggagggaggggagtagcagcagcgcggggacacccatggctgtcgcggcgacggcggcgaggtggtag

SEQ ID NO: 21421 - DNA, 348 bp, Oryza sativa
  Clone ID: TF_uC-osrocyp032h06b1
acgttcaacacacgcagcgaattccacgaagagagaatcagtcttacatggcgcccaaggctgacaaaaagccgacggctgattaatcccgcggaggaggagcccgtgggggagaatgccccgtctgcatgcgaagaagcccaaggcggtgaaacggctcggcggggagaagggcaagaagggcggagccagataggggaagaaggacgggaggaagaaggggaagaagagcgtggatacctacaagagctacataaggaaggagatgaaggaggatccccccatcatatggatctgctccaaggccatgtacataatgaaatccttgattaacgacatgttggagaa

SEQ ID NO: 21422 - DNA, 3772 bp, Oryza sativa
  Clone ID: TF_OsC1517_1666
atgacgatggccgacggtgcggggcgtgatcgctccggcctcgggccggggaagaggaaggagagggtgcgcccggagtccacgtcacgcgtcctcgctcgtgccggctcctccgacacaacaggcctccagtgtccatacgggcagtatgaggccccgaactgtgcagtcgcggtcagctgtcggctgtcgagcgggcaccgcgcggggagaactacaacaaggttttcacccgccagctataacagaaaaaagggatggctcgacaacgtcctcaagaaggaagatgatactcgaagtgccgtcgttgtcgtccgggcggtggccggcccggagctcggcggggcgaggcaagagagactgcgcgagctcaagacgtggttctccggaccactccacgcggagtcggcgccgggctgcgggcggagcgcggcgggcgagagcggcgatgggcgggcggcgggcaagctccaggtcgctccgtgcgagtcacgtcaccgggggcgcggcgactggtgggtgtgggcggccgccctcctccgactttgccccctactcctcgcacatcacctcctgccggaggcaggcaggcgcggactgggcggcgatgacgacgactcgccctcctcatctccccgtctcccgccggcctcctctcccacttctcccgccggtgaagaaggcgacaggcgggaggaaggccggcgggcgaggaagaaggcggtgacgcgctccgtcaaggccgggctccaattccccgtcggccgtatcgggcgctacctcaagaaaagccggccggtcgatctcctctccgccgctccttccccatcggccgcgccgaccctcttccccaccgcgtcggtcacgccgccgaccctctttcccaccgcgtcggtgacgccgccgaccctctttcccacacacgcacctcaagatattcctctctacccatcctcagcagacatggcgagaaaggagggggaagggctggatctggtagcgatggaagaagagctggatctgtattcttgggaacccgtggtgacgcttgccatatctttgctggacagagccatatcctacttgggtgaggacactagctgggcggaggggcggaacaagaacagatttggtggtttcagcagtcaaatgttttattatctccaacctgccagaggaaggtttcaagacttccgtctgcgtctgattaattggccaaagtcgtactgttgtggctatgaggaaatctggaagttcaggattgcggttgagctattggaggatttgatcgaggagatcgaacaccgccggctggaggaagatggtcgcattcctgccttgttcatgaatgctaaggcaaagatcgccttcaagtttgcgacaaatgattatttcagggaggagtgggacaggctgttccaggagttcacaaccttcaggctagaggacttgatcacggatatcgaacaccttagactggaagagagtggaaaaaagatctccaacaagaagtttgcgagatctcctgatcagtataaacaacaggctaggctatttttcctgctagagagaggtgtatcacgtttacgcgaccaattaccagcggtggtcgaacatgtggttagccaagatagggagctggttgaccttgagaaggaggagttgcatgcagagctggttggccgagatagggagaagaagcagatagtgcagtgcctcatcatcagcacagcaggcgcagaaatcaagcgtgtagcgagcgcaggccacatccaggagtatctttcagtccggatctcgaggcactgtcacaatggtaaaacccccgtcatcgccaacgagcctggctccgcgggggcggacaccgccgccggcgccgcggcgagcattgcccgcgcggaacttccgctccccgaacccgagcgcgtctccgatcccgcggttcccctccctccgcctgccctcgtctcggagccgccacctaccaccgctactgtcgccaaagtggaagatgaggagaagcccacggccgtcgcccaccaggaggcggcgcccagggattacgcgttccagcgagcgctcaagaccgcggagaacaagagcgacccgtgcggcggccggtacatctacgtgcacgagctgccgccgcggttcaacgacgacatgctccgggagtgcgagaggctcagcctctggaccaatatgtgcaagttcatgagcaacgaagggcttggtccgccgttgggcaacgaggaaggggtgttctccaacaccggctggtacgcgacgaaccagtttatggtggatgtcatcttcaggaaccggatgaagcagtacgagtgcctgaccaaggactcgtccatcgctgccgcggtgtttgtgccgttctacgccgggtttgatgtggcgaggtatctttgggggcacaacatttcgacgagggatgccgcgtcgctggatttgatagattggctgaggaagaggcctgaatggaatgtgatgggcgggcgtgaccatttcttagttggcggcaggattgcgtgggatttcaggcgcttgacggacgaagagtcggattggggcaacaagctgcttttcatgccggctgcgaagaatatgtcgatgttggtggtggagtcaagcccatggaatgccaatgattttgcgataccatatcctacttacttccaccctgccaaggatgctgatgttttgctttggcaggatagaatgaggagcctggaacgaccatggttgttctcgtttgctggggctcctcgtcctgatgatcccaagtctatcagaagtcagcttattgatcaatgcaggacatcaagtgtctgtaaattgctggagtgtgatcttggggagagcaagtgccattcccctagcgcaatcatgaatatgttccagaactctttgttctgcttgcagccccaagatggcgtccgtaagggaaatgtcagcattgaggacaggcttaaaagtatccatccagatatggtcaagaagatgagggaagaggtcattagtctcatcccaagggtgatatatgctgatccaaggtcaaagctggagaccctgaaggatgcattcgatgtttctgtagaggcaataattaacaaggtgacacagttgagaagagatatcatcgaagatcatgaagataaagattttgttgaagagaatagctggaagtatgatctgttggaagaagggcagaggacaattgggcctcatgaatgggacccgttcttctctaagcccaaggacaagggtggagattctactaatccatctactaatgctgccaagaactcctggaaaaacgaacaaagaggtcagaactaaaatacaggtagttagatatgtgatcgaggaaaggaactagatatcctctctagagaagctccttgcaaataccttgcccatatgtcaaagatcctccaacgcagtagctctgatgatcatgtatgttcttgatgatctagcccctacaggtgtaagtggtggtagaaaagatgcttggggaaaaaaatgcacggccttcgagttgcccttataaataccatttcacactctatttttgttttgctttgctcaataatcctttgtaagtccttacgggatttataggtatatcaattttgctgttgtttctgttttgtttgctttgatctgtatgtgtatggtttagaatttgtgtatactacctttttatactcacaattagtaagcaatcaaagagatttttgtagataaaaaaaaaaaa

SEQ ID NO: 21423 - DNA, 280 bp, Oryza sativa
  Clone ID: TF_uC-osrocyp032a11b1
tcgtggtcgcgtgggctcgctcgctcgctgcgtgggcgcactttatccacagatttttctgctgctgttgcttcgttgcttagcccgaggattccgtactactaccggagggcttggttggttgatttggtttggattagccatggcacgggagagggaaggcgatcggataggacgccggcaagaaggccatgtctcgaagctccaaaggcagcctacaacatcccgtgggcaggatcgcccggttcttgaaggccggcaagtaccccgagagggtagg

SEQ ID NO: 21424 - DNA, 240 bp, Oryza sativa
  unsure (1)..(240): unsure at all n locations
  Clone ID: TF_2310729
cacgccagtttggtcgctctcgatttcgatttcccccaaatccaccgcaagagaaagccaagtcgccgccgagaagcgaagaggagatggcccgtacgaagcagaccgnccgcaagtccaccggcggcaaggccccgaggaagcanctcgccaccaaggcggcgaggaagtctgntccgaccaccggnggcgtgaagaagccccaccnctacaggacggggacggtggcgctccggagat

SEQ ID NO: 21425 - DNA, 304 bp, Oryza sativa
  unsure (1)..(304): unsure at all n locations
  Clone ID: TF_428926
gaagcccaaggcggagaagcggctccccgcggggaagggcgagaagggcggcgccggcgaggggaagaaggccggganggaggangggnaggaggaccttggggacntaaangttttaaattttaangtttttaangaagttccaccccnnantnggantttcttcaangncattttcattnatggactccntcatcaacgacatcttcgagaagctcgccgccgaggccgccaagctcgcccgctacaacaagaagcccaccatcacctcccgcgagatccagacctccgtccgcctcgtcct

SEQ ID NO: 21426 - DNA, 442 bp, Oryza sativa
  Clone ID: TF_LIB3433-030-P1-K1-H8
accgctccttgtcctactccatttcttctggtggatgtctgtgtatctgtgtctgaagctcggagggccacctataacaggcgtgatttgtagacataaatcatcccggcaagggaggcatgagtctccataaggaccgcgccaagacgtaaccggaaggtgcttccagacaacatccaggggatcaccaagccggatatcctgatgctgacgaggaggggctgcgtgaatcgcatctgcaggctcatctacaaggagacccgcggcgtgctcaagatcttgctcgagaacgtcatccgcaacgccggcaactacaccaagcacgcccgtcataagaccgtgaccgacatggacgtcgactacgcgctcaagcgcgcaggacgcaccctgtacagcttcagctgatgatcgatcgtgcctccataccccatctctaccatgt

SEQ ID NO: 21427 - DNA, 582 bp, Oryza sativa
  Clone ID: TF_LIB4834-009-R1-M1-A11
ggccgcttttttttttttttttttatttggctctgaaacatgtttcaattcaaatcccagttgcaaacatcatttgcttcacaatttcatgattcaggtaaacactagaaaaactaaacagcgaactgaacaaggtggattccacggctttccatcaaactttttttcttgaccgcaagacttgtgggcacggccagacgacatgggagagatggcggagggaggcaagatcgatcagccgccgaagccgtagagggtgcggccctggcgcttgagcgcgtagacgacgtccatggcggtgacggtcttgcggcgggtctcctcgtagatcagcccggagatgcgcttcacgccgcccctccttgccagcctccggatcgccggcttggtgatcccctggatgttgtcgcggagcaccctccggtgacgcttggcgccgcccttgccgagccccttgcctcccttgccgcgccccgacatggccgccgacgacgacgattccggtggctcgacgcacgagagagagagaaaagcgagtggaattggagaagaggttggtggtgattggggagtcccggccgg

SEQ ID NO: 21428 - DNA, 748 bp, Oryza sativa
  Clone ID: TF_OsC724_9
tgattcccttttgcaaaatgttctcatgatttaagtttgtgaatgcaatagaaattataaactggttagtcatagtcgttcagactttttgcttaattgcaaacttgataatatgctagtttgttggcaacaagcaaacactttttgtgtaccgtcatctgaaagttgcggctgtgtgatgtcttgagtccttgactatgcgcattgttgatcatgtcccttgtttttgtcctcaggtaaaccaaagttctttttccgatggctcgtactaagcaagctgccgaggcgtacctggtgggtctcttcgaggacaccaacctgtgcgccatccatgccaagcgtgtgaccatcatgcccaaggacattcagctggctaggaggatccgtggtgagagggcttaggctttctcatctctgggaggggctctggtgtttcatctgtgactacttcctgcttttgctgctgaactcttatttggtgtcgtgaatggtgctaatactactcacatgtagtagtagattgttagtgaagtactctgtttctgtgttctagaactggatattttgctagtaagttgtctcgactgttgatttcatccatccatctgatggatgtgtatctagtagtttctcatctgaagtcctaaaatctgaaccatgaatttacctgtggaatggaacttagaaaaactgtgtcaaatgttcaaagatcttggcatgaatgccttgtttcttttttaaacaaaaa

SEQ ID NO: 21429 - DNA, 387 bp, Oryza sativa
  Clone ID: TF_rsicef_6944.y1.abd
gcacgaggattagaaacacactcgcctcgcctcctttcgctcgtttcgtccaacaccagcaccaccacctaccgatctctgatggcgcccataggggccgagcaatgaagcccgcggagaagaagccggcggaggagaaggccggcgagaaggcgcccgcggccgggaagaagcccaaggccgagaagcggctgccggcgtccaagggggagaagggcggcgagggcaagaaggagcgcggcaggaagaaggcccagaagagcgtcgagacctacaagatatacatcttcaaggtgctcaagcaggtgcacccggacatcgggatctcctccaaggccatgtcgatcatgaactcgttcatcaacgacatcttcgagaagctcgccg

SEQ ID NO: 21430 - DNA, 507 bp, Oryza sativa; identical to SEQ ID NO: 11863
  Clone ID: TF_OsC408256_1

SEQ ID NO: 21431 - DNA, 445 bp, Oryza sativa
  Clone ID: TF_LIB4309-013-Q1-K1-B4
gaaccccaccgtttccccttcccgagaagaagagagcagcatccatggcgcccaaggcggagaagaagccggccgcgaagaagcccgcggaggaggagcccgcggcggagaaggccgagaaggccccggccgggaagaagcccaaggcggagaagcggctccccgccggcaagggcgagaagggctccggcgaggggaagaaggaccgcgctgggaggaagaaggcgaagaagagcgtcgagacctaccagatcttcctttttaaggggcttaagccggttcaccccgacattggcattttcttcaagggcctgttcattatggacttctttattaaccacctttttgagaaggttggccgccaaggccgccaggttggccggttccaccagaaggccacccttaccttccgggagattcaaaacttcggtcggcttgttcttcc

SEQ ID NO: 21432 - DNA, 707 bp, Oryza sativa
  Clone ID: TF_OsC106861_1
tttttttttttttttgagaggaacccattattgcaatcatctttttttttcctggttcacatttcacaatcgactgtttgatgaaatcctgaattcgaccaatccaaatggagcaaaaggtaaatactaacatcaactgaattagaatgggaacgaagggtaagttgatccctatgtgaagatacatcggcactactttctaaaatgttaatcaacgacacatgttgctccttgtccatcatgctgcatggctcgcaaacaaattttcaccatggcctccgcccaccgatacgcctggcaagttgcatgtccttttgcatgatggtaacacgcttagcatggatggcgcagagatttgacacttcaaatatgtccactaagtggtattctgctgcctcttgcaatgcaaggagagcttcaagggtccaccgtgacacatcctttgaatagaaatcagtgatctccctgaccagccgagaaaatggtgcaaacgggatcagcagttcggtggttttctgaaatttcctgatctcccgcagtgccactgtgcctggacggaagcggtgtggcttcctctgcttcgtttgctgcctaggcgtcccaccagcgcgctgcgccttcgacggccgaggggagcgttcgaactggagcttcttcttgggctccgccttcgacttcctcaccgccgggtgcttcgtgcgagccat

SEQ ID NO: 21433 - DNA, 787 bp, Oryza sativa
  Clone ID: TF_OsC631_9
acgccgcaatctcgcaaatcccaccgcttccctttcctctcctctccccgagaagaagagggcggcatccatggcgcccaaggcggagaagaagccggcggcgaagaagcccgcggaggaggagcccgcggcggagaaggccgagaaggccccggcggggaagaagcccaaggcggagaagcgcctccccgccggcaagggcgagaagggcagcggcgaggggaagaaggcggggcggaagaaggcgaagaagagcgtcgagacctacaagatctacatcttcaaggtgctcaagcaggtccaccccgacatcggcatctcctccaaggccatgtccatcatgaactccttcatcaatgatatcttcgagaagctcgccggagagtccgccaagctcgcgcgctacaacaagaagcccaccatcacctcccgggagatccagaccgccgtccgcctcgtcctccccggcgagctcgccaagcacgccgtctccgagggcaccaaggccgttaccaagttcacttcctcctaggctgtacgcctgcatctagtcctagtagtaatagtagtttttatatgtttatgtggtatattgtttaagtgatatccaagattggaaatggatgttaaattgttggtttggtagtcattggctgtaagaagaatggctttgggttgcttttgggaaacacttgcttcacggatcgggcataagtaaccatgcttttataacatgcgaatgtgtgctttctcttgtgccatcattgataagaattacccttgtgcc

SEQ ID NO: 21434 - DNA, 1367 bp, Oryza sativa
  Clone ID: TF_OsC3753_2
ggaaataaaaccccaaccttagtttagttttaaatcacaattttacaagctggaattacccatagctgaagtccaaattttggggttcaaatacagtaattgggagaatggaatttacaggggaaaagatgctcccaaatttggggatcaggggttcacacttttgatttttgaacgggattttttcacccagatatcttccgttcagcgtttttcatcattatcacaaattcatcgtagttcacctgcccgtcgccatcggtatccgcctcccttatcatctgctcaacctcctcgtctgtcatcttctccccaagattggtcatcactgtcctcagctcagttggggagataaaaccattctgatccttgtctaggacctcgaaagcttctttcagctcttcgtcgccatccccatccttcatcttcctggcaatgaggctcaggaactcctgaaaatctatgatcccattgccatctgtatcaacttccctcatcatgtcgttgagctcctgatcggtcggctcaaggccaagagaacgagtcaccgcagccagctcttccaaggtgatgcatccatcgccgttcttgtcgaagagcaagaacgcctcctggaacgccaccatctgctcgctcgtcagcccttccatgcaggctccgccaccttcacagtcacaccactagcaaggagagtgcaggaaaacaaaagggtggcggacgcgctggggataaacagcaggggggcaacttgtattggttattgatgcaagaattgacttggaacagaatgataacctttcattagggttagtagctttagctcggatttgagtagtagaccatcctccacgtaccgtatatctatgctggatccagtcagcctggagtgtaaaataatgaaaagtgacaaagaaaacaaagctcttgaccactccaccagcgatggtacccttgatgagagtgtcgagctcctcatctccacggatggcaagctgcagatggcgaggggtgatacgcttgaccttcagatccttgctagcgttcccagccagttccagaacctcagctgttaagtactccagaatagcagcagagtaaactgcggcagtagcaccaacacgtccatttgcctgagtcctttgcttcaactggcgatggatacggccaacagggaacagagtcctatcatggttggcttccatggtagctgaaaccaccacagttggtgccactggcatactaccaccttcctggagaccagcgcgggacgagcgggagacgggggccttcttccccttgtccttctccgccgacttggcggccgtcgtcttcgcggcgagcaagcccttacctccttttcccgccat

SEQ ID NO: 21435 - DNA, 325 bp, Oryza sativa
  Clone ID: TF_uC-osrocyp002h02b1
tggtaccggtgcgggatccggggcggagacccacgcgtgcggtaatcttcaggccagagcgcgagcgagaagaccggaggcctgctgctacgttcttggggagggccctgacgaagcagacgggtcggaagtcgaccggcgggaaggcgccgaggaagcagctggcgacgaaggcggcgcggaagtcggcgccggccaccggcggcgtgaagaagccgcaccggttccggccgggcaccgtcgcgctccgggagatccgcaagtaccagaagagcacggagctgctgatccgcaagctccccttccagcggctcgtccgggagat

SEQ ID NO: 21436 - DNA, 715 bp, Oryza sativa
  Clone ID: TF_OsC41976_1
acccgcaaattcaccttgagtccgctccaaatccaaatctcaccttgaattcttctccttctcctcctccttctcctctctttctccttcggtgagagatggcccgcacaaagcagacggcgaagaagtccaccgccagcaatgtgccgaggaagctgctggtgatgaaggtggcacgcaagtcagcaccgacgatggcagggctgaagaagccacaccgcttcaagccagggaccgtcgcactccgagagatccgcacataccagaagagcacagagctgctaatccgcaagctccccttccagcggctggtgcaggagatcgcgcaggacgttaggtcctatgttcgcttccagagctctgccgtggttgcgctccaggaggctgccgagacctaccttgtggggctcttcaaggacaccaacctctgtgttatccatgccaaacgcgtcaccatcatgcccaaggacatccagctcgcgcgccgcatcaggggcgagaaggcctaggtttgggggcatcgtcttgtccgatcgcgcttcttctgtctgtgttcttggctactagcacatttttaaattcatgtccgtaggttaggaagatgtttttggtcagggtttgatgggtgaactggctttttattttatcctgtgatgctgtaatcgttatggtttgctaatcttatggaaagcctatggtcgtttgggatttctac

SEQ ID NO: 21437 - DNA, 414 bp, Oryza sativa
  unsure (1)..(414): unsure at all n locations
  Clone ID: TF_2442299
ggcggagaagagcagcggcgaggggaagaaggcggggcggaagaaggcgaagaagagcgtcgagacctacaagatctacatcttcaaggtgctcaagcaggtccaccccgacatcggcatctcctccaaggccatgtccatcatgaactccttcatcaacgacatcttcgagaagctcgccggggagtccgccaagctcgcgcgttacaacaagaagcccaccatcacctcacgggagatccagacctccgtccngctcgtcctccccggcgagctcgcaagcacgncgtctccgagggcaccaagnttttgaccaagttcactccgttagattccatctatttgtagtattaagttctgtctatatcttgtagtggtaggaatggatgtcttattagtgtgtagtttgcggtt

SEQ ID NO: 21438 - DNA, 716 bp, Oryza sativa
  unsure (1)..(716): unsure at all n locations
  Clone ID: TF_OsC631_2
ngtcccccctcgaggccggcccgggaaaaaaccggccggaaaacacacggcgaaagcaaatcaaatccaatccacctctcgcctccaaatcccaaatcctctactcgtcgtcgtcgcggttcatctccagcgaattcccgatggcgcccaaggcggagaagaagcccgcggagaagaagccggtggaggagaaggcggagaagaagcccaaggccgagaagcgggtgccgggcgccaaggagggcggcggcgagaagaaggggaagaagaaggccaagaagagcgtcgaaacttataagatctacattttcaaggtcctcaagcaggtgcatcccgatatcgggatatcgtccaaggccatgtcgatcatgaactcgttcatcaacgatatcttcgagaagctcgcccaggaggccgcccgtctcgcccgctacaacaagaagccgaccatcacctcccgcgagatccagacctcggtgcgcctcgtcctccccggcgagctcgccaagcacgccgtctctgagggcaccaaggccgtcaccaagttcacgtcgtcttaagacgcgtgatctgttcatgttcgttggatgtttatctgttctgatgtttatttagagcgctcttagatttcccacatggaacaatgtagtatcggtgaaattcgctataaatgaatcgctgatcttatcacaacttaaaaaaaaaaaaaaaaaaaa

SEQ ID NO: 21439 - DNA, 419 bp, Oryza sativa
  unsure (1)..(419): unsure at all n locations
  Clone ID: TF_LIB4371-057-QB-K6-B3
gacccacgcgnccgcactcctcaccaagncaaagnnnctncctcgcgaccggcggcgagcggcggcggcggcgagggcngggagaggcaagggcggcaaggggctcgggaagggcggcgcgaagaggcacaggaaggngctgcgcgacaacanccaggggancacgaagccggcgatccggaggctggcgaggaggggcggcgngaagcgcancnccgggctgancnacgaggagacccgcggcgngcncaagancnnccncgagaacgncanccgcgacgccgncaccnacacggagcacgcccgccgcaagaccgncaccgccanggacgncgncnacgcgcncaagcgccagggccgcacccncnacgganncggcggcnaggcgaggcgangcgaggccacgcgannnggaaggg

SEQ ID NO: 21440 - DNA, 587 bp, Oryza sativa
  unsure (1)..(587): unsure at all n locations
  Clone ID: TF_LIB4371-021-R1-K1-B4
tcggtccaggctgnaaaatactgcggccgcgatgaagcccgcggcggtagtagcccgcggcacgaaaacgccgacaaggcccccgcgcgctgcaagtcccaggcggctaagcgcctgcccgccgtcaggtctagattggcagggttgatggtaataaggcgggcggatgatgggaagaagacggcgataccttttgatctactcttcaaggtgctcaatcaggttcaccccgacatcgtgatcccctccacggccatgtgcatcgtgaactccttcatgatcgacttctttgatatgctcgccggggagtccgacatgctcgcccgctacatcgagaatcccgccatcaccttccgggagattcatacctccgtccgtctcgtccttcccggtgagctcgccgatcacgccgtctccgagggcacgaatgccgtgaccacgtttacttccgcttacgctgactgccttgctctaactggttaggaggctttggagcacgaggatgctctgtttatgtggcatgttaactgcgaaatgatgattgcaaatgaagaattgtgcggcgtcttcttttgcgataactcact

SEQ ID NO: 21441 - DNA, 637 bp, Oryza sativa
  unsure (1)..(637): unsure at all n locations
  Clone ID: TF_LIB4371-037-R1-K1-F6
cgagatgaagagagcggcatccatggcgcccaaggcggagaagaagccggcggcgaagaagcccgcggaggaggagcccgcggcggagaaggccgagaaggccctggcggggaagaagcccaaggcggagaagcgtctccccgccggcaaggccgagaagagcagcggcgaggggaagaaggcggggcggaagaaggcgaagaagagcgtcgagacctacaagatctacatcttcaaggtgctcaagcaggtccaccccgacatcggcatctcctccaaggccatgtccatcatgaactccttcatcaacgacatcttcgagaagctcgccggggagtccgccaagctcgcgcgctacaacaagaagcccaccatcacctcacgggagatccagacctccgtccgcctcgtcctccccggcgagctcgccaagcacgccgtctccgagggcaccaaggctgtgaccaagttcacctccgcttagattccatctattggtagtatttagttctgtctactatctggtagtggtagaaatggatgtcttattagtgtgtagttggcggttgtggcgctgcttttggtaaactgttgcttatttatctgagatattaacgatgctcttctagaanaaaaa

SEQ ID NO: 21442 - DNA, 2356 bp, Oryza sativa
  Clone ID: TF_OsC631_3
atggcggctctgacggaggacatcctcctccagatcttctcccgcgtgggcagcatcaaggacctcttcaagttcgccgtgacatgccggcggtggctgcgccgcttcaccgacccggccttcctccgcgggctgtgcctggacagcggcgagggccaccgcgcgcgcctcctcggcttcttcttccagcagacgagattctatcgctgcgaaaagatgatcaagatgcgggtgacgcagcagagctcggtctgtccgcccaccttcctgccggcgccgtggtcgccgctcggcctcacggatcgcaccctcacctccttcctcgccgccgacgacgacaccttcaactacgccgagcccctcgcagcgcgctgcggcattgtcctgatgcggcttgtcccccgcaccgcgctgatgatagcgtgcagccacctcctcggcgtctgcaacccgatcaccggggaatgccacgttctcccgcctctgaatctctccggcctccatcgctacttgaccagctacgccatcatcacgtccaccgacagcgacctagatgggaagcagccgccatcatcatcatcgtcagggcgctccacgttctcgcagctgtacctcgtcgtccaacacaagaaagactgtaacgagtacttctactcctactctgctgctacgtgcagctggagcgctcccaccatgtgcgtggacggccgccgcttctccctggtgggtgagagatccgccgtcgttcacaagggcgcggcgcactggctgtttattgatcgtgtatctagcgcaacccaagatgacatactgtacaaactcaccgcggcggtggacacctcagaaatctccttgacaaggctcccctttggtgctggaggctcaccgctcctctgcgtcagtggagacggcaaactttcggtcgcttgcgtgtttcccatccacatgagagtttggactcagcaagatgacacccctgcaacgtggctccgcactgtgatcaggataccattggcggtgccttacccagactattcccatatatgtcagccccgcgagaagtggtttaacttcaacaggggatcaatgctcgtgctgtacaggagcaacggcgtcttcatcctcgacctcgagaagaaggtgatggaaaaggtcatggactgcttactgcccctattcagtgataaactgaacaggacggctgtggcgtatgagatggacttggttgagttctttgtgctccagctcagtggatacatatggaaattgagtttgttggtgatcacagttacaggtctgactccatggcaaaaagcccaaaacctgaacccaaagaaagaacagcccaccaccacagcgctccaaaaacggggcccactgcacatttttctttgcaacgtcagcgatccgcacggaaacgcatcgcagccgtctaaccgaaaaggcaccggacgtcacacattcatccacgtcatcgatccgcgggacaagcctctccaccaatcagcgcccacttttacccactataaactcaccgcacccgtgtcctccttccacaccgcaatctcgcaacacatcagcacacaccgctccaaagcaaaacccacggacccgcttcccctccccgagaagaagagagcagcatccatggcgcccaaggcggagaagaagccggccgcgaagaagcccgcggaggaggagcccgcggcagagaaggccgagaaggcccccgcggggaagaagcccaaggcggagaagcgtctccccgccggcaagggcgagaagggcagcggcgaggggaagaaggcggggcggaagaaggggaagaagagcgtcgagacctacaagatctacatcttcaaggtgctcaagcaggttcaccccgacatcggcatctcctccaaggccatgtccatcatgaactccttcatcaacgacatcttcgagaagctcgccggggagtccgccaagctcgcccgctacaacaagaagcccaccatcacctcccgggagattcagacctccgtccgcctcgtcctccccggcgagctcgccaagcacgccgtctccgagggcacgaaggccgtcaccaagtttacttccgcttaggctgcatgccttcctctagtttgttagtagtagtagtagcagtagattgatctgtttatgtggtagtttaagtggaaatgatgattgcaaatggatgtaagaattgtgcggggcttcttttggggaactcactgatctggaatagtaatgctttttatgtcatgtgaacgtgtgtagttggcggttgtggcgctgcttttggtaaactgttgcttatttatctgagatattaacgatgctcttctag

SEQ ID NO: 21443 - DNA, 503 bp, Oryza sativa
  unsure (1)..(503): unsure at all n locations
  Clone ID: TF_286949
gccgccgccgcgaaatctccaagccaaagcgccggcagagagccccgaggcctcctcctcccttctccgcgatggcccggacgaagcagacggctcggaagtcgaccggcgggaaggcgccgaggaagcagctggcgacgaaggcggcgcggaagtcggcgccggccaccggcggcgtgaagaagccgcaccggttccggccgggcaccgtcgcgctccgggagatccgcaagtaccagaagagcacggagctgctgatccgcaagctccccttccagcggctcgtccgggagatcgcgcaggacttcaagacggacctccggttccagagctccgtcgttggcgcgctccaggaggccgccgaggctacctctgttgtgntcttcgaggacaacaaccttttggcaatcatggcaaggtgcgtaacattatggccaaggacaatccagctcgcctgcgaatccgggtgaancgggttaaattagtcaataatntatngttat

SEQ ID NO: 21444 - DNA, 900 bp, Oryza sativa
  Clone ID: TF_OsC1067_12
actgttcgcctttcccgccagtttggtcgctctcgatttcgatttcccccaaatccaccgcaagagccaagtcgccgccgagaagcgaagaggagatggcccgtacgaagcagaccgcccgcaagtccaccggcggcaaggccccgaggaagcagctcgccaccaaggtgcgtatcggcgtcgtcgtttcatctccttctcccgttccgatctggtgctttgtgatttgggtggttctagggtttgcggttttgctgatttgtgttgttgtgtaggcggcgaggaagtctgctccgaccaccggcggcgtgaagaagccccaccgctacaggccggggacggtggcgctccgcgagatccgcaagtaccagaagagcacggagctcctgatccgcaagctccccttccagcgcctcgtccgcgagatcgcgcaggacttcaagaccgacctccgcttccagagccacgcggtgctcgccctccaggaggccgccgaggcctacctcgtcggtctcttcgaggacaccaacctctgcgccatccacgccaagcgcgtcaccatcatgcccaaggacatccagctcgcccgccgcatccgcggcgagcgcgcgtaagccgccgccttcgacgcggttgcgttgcgtagcgccgaagcgatctggggggatcaacgacgacgacgtgacgtggtcaacttgttgattcccctctcgcttccgcgttttagatctcgttttcattagcagctttgtaatagggtttggtcggttaattagtgtaaaaacagggttcggttaaagactcaaaatcaaatgttattgccgttctttggattttgcggttaagcaaaacagtgttgaagactattaatattcgtttactatatggagatttgttcgt

SEQ ID NO: 21445 - DNA, 459 bp, Oryza sativa
  unsure (1)..(459): unsure at all n locations
  Clone ID: TF_4878685
gagaagaagagagcggcatccatggcgcccaaggcggagaagaagccggcgggaagaagcccgcggaggaggagcccgcggcgnagaaggccgagaaggccctggcggggaagaagcccaaggcggagaagcgtctccccgccggcaaggccgagaagagcagcggcgaggggaagaaggcggggcggaagaaggcgaagaagagcgtcgagacctacaagatctacatcttcaaggtgctcaagcaggtccaccccgacatcggcatctcctccaaggccatgtccatcatgaactccttcatcaacgacatcttcgagangctcgccggggagtccgccaagcttcgcgcgctacaacaagaagcccaccatcacctcacgggagatccagacctccgtccgnctcgtcctccccggcggagcttgccaagcacgncgttcttccnagggcaccaag

SEQ ID NO: 21446 - DNA, 1567 bp, Oryza sativa
  unsure (1)..(1567): unsure at all n locations
  Clone ID: TF_OsC724_1
cggaattcccgggtcgacccacgcgtccgtcataatgtcagctttgaaataggaattgatttggattgtgtgtatatgtggtgagaatggaattctgtattagattgatcgtcaaacttgaatttgcatattgatgctttgtaatggcaaggtcaattttctcatataaatagtaattaattctggattttgattgtgtgtatacgtggtgagaatagaaatctgtattagattgatcgtcaaacttgaatatgcatattgatgctttgaaatggcaaggtcaattttctcatgtaaatagtaattaaccgctctagattttttaactatattgtcatgttacttcaatcatatgtgaatagaacatcccattaattagtggctttattgcattcaaaattggtcaggacctgtcactcctttccatcttgcatgctcaacatcttagtatgttatatgccacctgtcactcctttccatcttgcatgctcaacatcttagtatggttatatgctgtctgtaggtgttacatgttatatgactgcaaatcttttagctactgctcatgttttgngggaactgaagattaggttcgtaattttagaagctggtccgggagagaaaaaaaaacggaagtcagaaagggggggaattttgctgcggtttcttcttcttcttcctcctcctcgcgctcccccgattcgaagcgtgaagagaggaacggcgcttgcgagaggagagagatggcccgtaccaagcagaccgctcgtaagtccacaggaggaaaggctcccaggaagcagcttgccaccaagggctgctcgtaagtctgctcccaccactggaggagttaagaagccccaccgttaccgccctggaactgttgccctccgtgagattcgcaagtaccagaagagtactgagcttttgatcaggaagctgcccttccagaggcttgttagggaaattgcacaggacttcaagaccgatctgcgtttccagagccatgctgtccttgccctccaggaggctgcggaggcataccttgttggtctcttcgaggacaccaacctgtgcgccattcatgccaagcgtgtgaccatcatgcctaaggacattcagctggctaggaggattcgtggtgagagggcttaaattcccctcggcgattcctttgacaaatgaagcatgcgtcgtagtgttagtagtgggttttaatcttttgcttataagaacaatctgagtagggtgtattttgtggaacaatatgtttctcatgatggtgctgtattcgtcttattggtggatctgtcaaaaatactcagcatattgtcagtgtgtctggtgactcttattttgttagtctgattcgtttgcgtcttattctagcggtgctgcctctttggcactgtgcatggctagatacaattacattgtaattcacctgtctctaatccgtgttaatgtaagtgttccgttgctgtccgtgtaaaaaaaaaaaaaaaaaaaaaaaaaaaaaaaaacactgtaaaaaaaacctgcaaaaaaaaaaaaaaaaaaaaaaaaa

SEQ ID NO: 21447 - DNA, 760 bp, Oryza sativa
  Clone ID: TF_OsC11983_1
tttggtgtgtgtgtgttcttttttttttttttttagaaacgagcattcattcatatattccattccattccaacaagatttctcaagcaccaaacccatcacaccatcatccaaccgttcatcaaaacctaacctaacaacctacaaaggatggatattactaagatgggagggggaaaagaatcggatcaaagaacagggagcaacaaggttcttgattccgagtagcggacccaagaggggatcctagaactcctgggaggcggatccgatgtcggccttgtccttgccgcccttcttggggagcagcgtctggtggatgttgggcagcacgccgccggcggcgatggtgacggcgccgagcagcctgctcagctcctcgtcgttgcgcaccgccagctggatgtgcctcggcacgatccggttcttcttgttgtccctcgccgcgttccccgccagctccagcacctcggcggcgaggtactcgaggacggcggagaggtagacgggggcgccggcgccgacgcgctcggcgtacttgccggccttgaggtacctggcgatgcggccgacggggaactggaggccggccttggacgaccgcgacaccgacttggagcccttcgacttccccctcccgccgccgccgcccgcggaactcatctcctctacctgaatcgacggaaacggcgcccttgttcgcctggtcactcgccggagagatcgccggagcagtcgccgcggtggtggtgggaactac

SEQ ID NO: 21448 - DNA, 928 bp, Oryza sativa
  Clone ID: TF_OsC1067_10
ggcctcttggcacgaaatctccaagccccagcgccgccagagagccccgaggcctcctcctccctcctccgcgatggcccgcacgaagcagacggctcggaagtcgaccggcgggaaggcgccgaggaagcagctggcgacgaaggcggcgcggaagtcggcgccggccaccggcggcgtgaagaagccgcaccggttccggccgggcaccgtcgcgctccgggagatccgcaagtaccagaagagcacggagctgctgatccgcaagctccccttccagcggctcgtccgggagatcgcgcaggacttcaagacggacctccggttccagagctccgccgtcgccgcgctccaggaggccgccgaggcctacctcgtcgggctcttcgaggacaccaacctctgcgccatccacgccaagcgcgtcaccatcatgcccaaggacatccagctcgcccgccgcatccgcggtgagcgcgcttaaaattagttcaataatctgatcgcttcatcgttctcagctacctcttcctagtagaaccaggatgtactagtagtagcttgttgcaatgaactgtttatctgattgattatcaatggaaaaatgatgttcaaatcgggctattcatttatgtaaaaaaaaaagtcgggaatgtatctacattaacacggttgcgttgcgtagccccaaaccgatctggggggatcaacgacgacgacgtgacgtggtcaccttgttgattcccctctcgcttccgcgttttagatctcgttttcattagcagctttgtaatagggtttggtcggttaattagtgtaaaaacagggttcggttaaagactcgaaatcaaatgttattcccgttctttggaagcaaaacagtgttgaagactattaatattcgtttactatatggagatttgttcgt

SEQ ID NO: 21449 - DNA, 726 bp, Oryza sativa
  Clone ID: TF_OsC1067_3
ccggccgggatctcatcccaatcccccaaatccacccgagcattcgaagcttgtagaagaagccctagcctctcctcctcatcaccgatggcccgcaccaagcagacggcgaggaagtccaccggcggcaaggcgccgaggaagcagctggcgacgaaggcggcgcgcaagtcggccccggccaccggcggcgtgaagaagccccaccgcttccgccccggcaccgtcgcgctccgggagatccgcaagtaccagaagagcaccgagctgctgatccgcaagctgccgttccagcgcctggtgcgggagatcgcgcaggacttcaagaccgacctccgcttccagagctccgccgtcgccgcgctgcaggaggcggccgaggcctacctcgtcgggctcttcgaggacaccaacctctgcgccatccacgccaagcgcgtcaccatcatgcccaaggacatccagctcgcccgccgcatccgtggcgagagggcctaggcgtgatctgctcgagaggctgtgataccctggtagttctagtggtggttcctgtgtctagtctgcacatgtagagatttgatggggttccttggttggtgtttgatctcagatctgtcatggcctagttggggtgttgcgtatgtaatttatctgtcttactcttatgtgatcccatggtgttggaatgaaatggaagtgaagaattctacttatcccctttttttc

SEQ ID NO: 21450 - DNA, 707 bp, Oryza sativa
  Clone ID: TF_OsC1067_4
ccggccgggacctcactccaatcccccaattcccaaatcctccaagctctcgcgcttccgattccaagcagcagcagccagtccagttcccaaatggcccgcacgaagcagacggcgaggaagtccaccggcggcaaggcgccgaggaagcagctggcgacgaaggcggcgcgcaagtcggccccggcgaccggcggcgtgaagaagccccaccgcttcaggccgggaaccgtcgcgctccgggagatccgcaagtaccagaagagcacggagctgctcatccgcaagctgccgttccagcggctggtgcgggagatcgcgcaggacttcaagaccgacctccgcttccagagctccgccgtcgccgcgctgcaggaggccgccgaggcctacctcgtcgggctcttcgaggacaccaacctctgcgccatccacgccaagcgcgtcaccatcatgcccaaggacatccagctcgcccgccgcatccgtggcgagagggcgtagaatgcctccgttgccagatctggagttgtagagttagatcaggtgttaccagttttattttaacctgtgttccttatcgtagtggtgttcttgtgttatgcaccgtctgatgttaccatctcattatcatcagcaatggaaaatgttgttatccgtgtctccaaaaaaaaaaaaaaaaaagcggccaaaaaaaaaaagcggcc

SEQ ID NO: 21451 - DNA, 622 bp, Oryza sativa
  Clone ID: TF_OsC1067_7
actccgccgccgccgacttcgccgcgaaatttctcaaatccaaagctccgccgcgtcaagctctcctctcctctcctcctcgatggcccgcacgaagcagacggcgcgcaagtccaccggcgggaaggcgccgaggaagcagctggcgaccaaggcggcgcgcaagtcggcgccggccaccggcggcgtgaagaagccgcaccgcttcaggccgggcaccgtcgcgctccgtgagatccgcaagtaccagaagagcacggagctgctcatccgcaagctccccttccagcgcctcgtccgcgagatcgcccaggacttcaagaccgacctccgcttccagagctccgccgtcgccgcgctgcaggaggccgcggaggcgtacctcgtcgggctcttcgaggacactaacctgtgcgccatccacgccaagcgcgtcaccatcatgcccaaggacatccagctcgcccgccgcatccgcggtgagcgcgcctgattaatttattagtcgcttcatctgtgatagctctagtaccagaattgcttagtagtagtgatgtaatggcttgttgctgttgctgtcaattgttgctctgattataaatgggaaatctttctgatgttc

SEQ ID NO: 21452 - DNA, 668 bp, Oryza sativa
  Clone ID: TF_OsC1067_8
tcaaatccaagaaatactcgccgccgccgcctcgccttctccgccgcgccaagctctcctctcctcctcctcgatggcccgcacgaagcagacggcgcgcaagtccaccggcgggaaggcgccgaggaagcagctggcgaccaaggcggcgcgcaagtcggccccggccaccggcggcgtgaagaagccccaccgcttcaggcccggcaccgtcgcgctccgtgagatccgcaagtaccagaagagcacggagctgctcatccgcaagctccccttccagcgcctcgtccgcgagatcgcccaggacttcaagaccgacctccgcttccagagctccgccgtcgccgcgctgcaggaggccgccgaggcgtacctcgtcgggctgttcgaggacaccaacctgtgtgccatccacgccaagcgcgtcaccatcatgcccaaggacatccagctcgcgcgccggatccgcggcgagcgcgcttaggcgatccgccctcctttggttcttgcttggttcgtagggacttgtcatgttctaccagttcttgttaattattagatccttgccttgtcatgtcgtagtctttgattcttagttgcaatgtaaccgctggttattctgaaattgcaaccgaagtaatctgttttatccccaattttctgtcccc

SEQ ID NO: 21453 - DNA, 861 bp, Oryza sativa
  Clone ID: TF_OsC1067_9
ccggccgggcacgcctcaattcaaaaaatccattcgaatttcgcagcaaagagatcgagagagagatccatcaatccatcatccatggcgcgcacgaagcagacggcgaggaagtcgaccggcgggaaggcgcctcggaagcagctggcgacgaaggcggcgcggaagtcggcgccggcgaccggcggcgtgaagaagccgcaccgcttccggccgggcacggtggcactccgggagatccgcaagtaccagaagagcacggagctgctgatccggaagctcccgttccagcggctggtgcgggagatcgcgcaggacttcaagacggacctccggttccagtcgtccgccgtcgccgcgctgcaggaggccgccgaggcctacctcgtcggcctcttcgaggacaccaacctctgcgccatccacgccaagcgcgtcaccatcatgcccaaggacatccagctcgcccgccgcatcaggggcgagagggcttgatgccgttattgttcgagttcatggcttgttagatctagaagtgttaattaacccatggatctgtgttatcctgtaatcactcgcttgaattgggttcgcattgatggaatacaatctgttcttggcaaaaaaaaaaaaaaaaatcatgcccaaggacatccagctcgcgcgccggatccgcggcgagcgcgcttaggcgatccgccctcctttggttcttgcttggttcgtagggacttgtcatgttctaccagttcttgttaattattagatccttgccttgtcatgtcgtagtctttgattcttagttgcaatgtaaccgctggttattctgaaattgcaaccgaagtaatctgttttatcccc

SEQ ID NO: 21454 - DNA, 433 bp, Oryza sativa
  unsure (1)..(433): unsure at all n locations
  Clone ID: TF_LIB3434-033-P1-K1-D2
cccacgcgtncgtacgcagcaaaatccacaccgcttacgctccccgagaagaagagagcagcatccatggcgcccaaggcggagaagaagccggccgcgaagaagcccgcggaggaggagcccgccgcggagaacgccgagaaggccccggcggagaagaagcccaaggcggagaagcgtctgctcgtcggcaagggcgagaagggcagcgacgaggggaagaaggcggggcggaagaaggggaagacgagcgtcgagacctacaagatctacatcttgaaggtgctcaagcaggtccacctctacatcgacgtcttctccaaggtcatgtccatcatgaactccttcatcaacgacatcttcgagaagctcgccgacgaggccggctagctcgcgcgctacaacatgaagtccaccatgacctaccgggaga

SEQ ID NO: 21455 - DNA, 1098 bp, Oryza sativa
  Clone ID: TF_OsC1018_13
atgcctcaggtcctccccggggggtcccttttatatcgcagtcttgtccgagtaagactcttcccatccgtagacttcgtgaaggatttccttagtgtacgcgggaagtatccatatgcgcgtggtgaaaaaaatctctcaaaggccaaacgccaagtccctactcccatagtcccatggccgcgccgcaggccaaatttggcggcgcctgcaggtcaaaattttgagctggccgcctctcagaccacgaaaattcccactatcccgccaaatcaccgatccgcgcctcacgccacgtcaacgatccgctcctccccccgcgatccagatcctcaccgtccattccctcccccatccaacggcagccgcctccccactccatcctctcgtccccttttaaaaccccctcccctttcttccccaaatcccactccaatcaccaccacctcttctccaattccactcgcttttctctctctctcgtgcgtcgagccaccggaatcgtcgtcgtcggcggccatgtcggggcgcggcaagggaggcaaggggctcggcaagggcggcgccaagcgtcaccggaaggtgctccgcgacaacatccaggggatcaccaagccggcgatccggaggctggcaaggaggggcggcgtgaagcgcatctccgggctgatctacgaggagacccgcggcgtgctcaagatcttcctcgagaacgtcatccgcgacgccgtcacctacaccgagcacgcccgccgcaagaccgtcaccgccatggacgtcgtctacgcgctcaagcgccagggccgcaccctctacggcttcggcggctgattccttccttccttccttcctggtggcgtgcgggtggtggtggtggtgtaggagctagggtttcgatgggattcggggggaatttctgctttgtgttggcttctgtgtagcgactcttctgtttaaatgaattcgatgaatctgaactgaagatttggttcccctgtgattccgtcattttatatttctgtttcctgtgatgtgaatttgtgcgaagttcgtgaaactgcctttcggatgaaaaaaaaaaaaaaaaaatatgcggcc

SEQ ID NO: 21456 - DNA, 1015 bp, Oryza sativa
  Clone ID: TF_OsC1018_5
atgaggggactaggaaaccgtgcgcgcctaccggaaccacgaaattttcaatctctccccacaccgcaaaacgcgaaattttccacggcccccgcgcgcgggctccactccaccgaaaacccagccaaacgcgccagatccgcgcctcctccactcacacgcggatcgctccccgatccaacggcaggcgctgcccccccgcaccactcacgcggatcgctccccgatccgacggctgcccactcccctcccaactctatatatatccacccctcccaaaccaaccggcctccacatccaaatctcgccaccaaaaaaatccccaattccgccgtcgtcttcgtcgccgtcgccgcgaggatgtctgggcgcgggaagggagggaagggcctgggcaagggaggcgcgaagcgccaccggaaggtgctccgcgacaacatccaggggatcacgaagccggcgatccggaggctggcgaggaggggcggggtgaagcgcatctcggggctcatctacgaggagacccgcggggtgctcaagatcttcctcgagaacgtcatccgcgacgccgtcacctacaccgagcacgcccgccgcaagaccgtcaccgccatggacgtcgtctacgcgctcaagcgccagggccgcaccctctacggcttcggcggctaggctccccccaaatatttctctctcttcgtgtcgaggcgtcgcgtgttggttgccctgtgtagattgctgatttcaatgtagtacttagattctggcagtgaagaactgcaagtaaacttgtttgaaattcaccttgttgctattaatctaatgcaagtttttgcaattttttttggcggtcaattaaaaaaaaatcaattccaagtttgtcgatcatcttaggatgtcctcctagagaaaaagaagagaagaaaattgggagataaaaaaaaaaaaaaaaaaaaaaaaaaaaaaaaaaaaaaaaaaaaaaaaaaaaaagaaaaaaaaaaaaaaaaaagcggcc

SEQ ID NO: 21457 - DNA, 635 bp, Oryza sativa
  Clone ID: TF_LIB4371-007-R1-K1-B9
ctcgcgaatcccaccgcttccctttcctctcctctcctctccccgggaagaagacagcagcggcatccatggcgcccaaggcagagaagaagccggccgcgaagaatcccgcggaggaggagcccgcggcggagaaggccgagaaggcccccgcggggaagaagcccaaggcggagaagcgtctccccgccggcaaggccgagaagggcagcggcgaggggaggaaggcggggcggaagaaggcgaataagagcgtggagacctacaagatctacatcttcaaggagctcaagcaggtccaccccgatatcggcatctcctccaaggccatgtccatcatgaactccttcatcaacgacatcttcgagaagctcgccggggagtccgccaagctcgcccgctacaacaagaagcccaccatcacctcccgcgagatccagacctccgtccgcctcgtcctccccggcgagctcgccaagcacgccgtctccgagggcaccaaggccgtcaccaaattcacctccgcttatgcttcacccctgcatctatctatgtgctagttgcagagctatcgatgattggaaaatggatgctagatcgctagttaggcagtcagatgccagtgatctggaaca

SEQ ID NO: 21458 - DNA, 327 bp, Oryza sativa
  unsure (1)..(327): unsure at all n locations
  Clone ID: TF_2311071
cccgagcattcgaagcttgtagaagaagccctagnctcgcctcctcatnaccgatggcccgcaccaagcagacggcgaggaagtccaccggcggcaaggcgcntggnaagcagctggcgacgaaggcgcgcgcanagtcggccccngcaccgcggcgtgaagaagccccaccgcttccnccccggcaccntcgcnctccgggagatccgcaagtaccagaagagcaccnagctgctgatccgcaagctgccgttccagcgnctggtgcggtgagatcgcgcaggacttcaagaccgaccttcgcttccagagctccgccgtcgccgc

SEQ ID NO: 21459 - DNA, 513 bp, Oryza sativa
  Clone ID: TF_LIB4309-032-R1-K1-G12
gcttcccctccccgaaaagaagagagaagcgtccatggcgcccaaggcggataagaagccggccgagaagaagcccgcggaggaggagcccgcggcagacaaggccgagaaggcccccgcggcgaagaagcccaaggcggagaagcggctccccgccggctagggcgagaagggcagaggcgaggggaggagggcggtgcggatagatggggaagaagagcgtcgagacctacaagatctacatcttcaaggtgctcaagcaggttcaccccgacatcgggatgtcctccaaggccatgtgcatcatgaactccttcatcaacgacatcttcgagaagctcgccggggagtccgccaagctcgcccgctacaacaagaagcccaccatcacctgccgggagattcagacctgcgtgcgcctcatcctccccggcgagctcgccaagcacgccgtctcccagggcacgaaggccgacgccaagtttactcacgcttaggctgcctgccttcctc

SEQ ID NO: 21460 - DNA, 2209 bp, Oryza sativa
  Clone ID: TF_OsC1067_2
gtagcattcgaagcttgtagaagaagccctagcctctcctcctcatcaccgatggcccgcaccaagcagacggcgaggaagtccaccggcggcaaggcgccgaggaagcagctggcgacgaaggcggcgcgcaagtcggccccggccaccggcggcgtgaagaagccccaccgcttccgccccggcaccgtttttccaccggcggaaagccgcccagccatctggcaatcaggtcggcgagtcgacctcgccgccccctctcgatcgaggcccacttccggcgcggactgttcgcctttccacgccagtttggtcgctctcgatttcgatttcccccaaatccaccgcaagagaaagccaagtcgccgccgagaagcgaagaggagatggcccgtacgaagcagaccgcccgcaagtccaccggcggcaaggccccgaggaagcagctcgccaccaaggcggcgaggaagtctgctccgaccaccggcggcgtgaagaagccccaccgctacaggccggggacggtggcgctccgcgagatccgcaagtaccagaagagcacggagctcctgatccgcaagctccccttccagcgcctcgtccgcgagatcgcgcaggacttcaagaccgacctccgcttccagagccacgcggtgctcgccctccaggaggccgccgaggcctacctcgtcggtctcttcgaggacaccaacctctgcgccatccacgccaagcgcgtcaccatcatgcccaaggacatccagctcgcccgccgcatccgcggcgagcgcgcgtaagccgccgccttcgacgcggttgcgttgcgtagcgccgaagcgatctggggggatcaacgacgacgacgtgacgtggtcaacttgttgattcccctctcgcttccgcgttttagatctcgttttcattagcagctttgtaatagggtttggtcggttaattagtgtaaaaacagggttcggttaaagactcaaaatcaaatgttattgccgttctttggattttgcggttaagcaaaacagtgttgaagactattaaaattcgtttactgactaacaaggttcaacggcctggcgtggctcttcctcggggtgcccaccagcagcacgctgctgtacagggaggagttcgagcggatgaaggagatcgcgccggagaggttccggctggacttcgcggtgagccgggagcagacgaacgcggcgggggagaagatgtacatccagacgcggatggcggagtacaaggacgagctgtgggagctgctcaagaaggacaacacctacgtctacatgtgcggcctcaagggcatggagaaaggcatcgacgacatcatgatcgacctcgctgcaaaagacggcatcgactggcttgactacaagaagcagctgaagaagtcggagcaatggaatgtggaagtctactgatggatatatatatgttaataattaattaatccctttttatctcgattttcatgcatgcatgcgcaacctgcatacgccatcttgttgtactcgatctgatctcatctgatgagatgcatgtagatattatactgacgattcgtcgactataaagtggtttcccattttctgctgtattttgacaaaaaaaaaaaacaaaaaaacacctactcggcggttgtgcagagggggtgtgttagatcaggtagacctgtgttcgttccccctctcattatcatcaaatgttgttatccaaaaaaaaaaaaaaaaaaggcggccggccaaggacacccagctcgccccccgcatccgcggtaaacgcgcctgattaatttatcagttccttcttctcagctcgcttttcctagtaaattgcttagtagtagtgatgtacttgttgttgctgttgcttttttagttgctcttcttataaatgggaaatgttttaatcgggcttttcctttttgtcccgaaagcggttgcgttgagtagcgccgaagcgatctggggggatcaacgacgacgacgtgatgtggtcaacttgttgattcccctctggattccgcgttttagatctcgttttcattagcagctttgtaatagggtttggtcggttaattagtgtaaaaacagggttcggttaaagactcaaaatcaaatgttatcgccgctctttggattttgcgcctacccaaaacagtgttgaagactattaatattcgtttact

SEQ ID NO: 21461 - DNA, 964 bp, Oryza sativa
  Clone ID: TF_OsC631_7
cccacgcgttcgcgaatccccaccgcttccgtttcctctcctctccccgagaagaagagagcagcggcagccatggcgcccaaggcggagaagaagccggccgcgaagaagcccgcggaggaggagcccgcagcggagaaggccgagaaggcccccgcggggaagaagcccaaggcggagaagcgtctccccgccggcaaggccgagaagggcagcggcgaggggaagaaggcggggaggaagaaggcgaagaagagcgtcgagacctacaagatctacatcttcaaggtgctcaagcaggttcaccccgacatcggcatctcctccaaggccatgtccatcatgaactccttcatcaatgacatcttcgagaagctcgccggagagtccgccaagctcgcccgctacaacaagaagcccaccatcacctcccgggagatccagacctccgtccgcctcgtcctccccggcgagctcgccaagcacgccgtctctgagggcaccaaggccgtcactaaattcacctccgcttaggcttcacccctgcatctatctattgctattgctaatagttgtagtttgatctgtttgtgttagttttagtgctatcgatgattggaaaatggatgttagatcgttagcttggtagtcagatgtcagtgatctggaacagtagctctgattttaaaccatgtgaatgtgattcctgggtatgtgatgtttgaccgccctgtgcctgctggtcaacgaatgataactagatctaatttttgtggaactatttacatggttgctacttgcattctgttcaactgttgtaaattcctctgtcactcgttggagttttattctctgaagcatgtgtggaattgcctgggcatgcttttgggaaactatagtctgtagtcttatgttatgtttggttgccctgagcttgttggaattaatctatctaattttgcgc

SEQ ID NO: 21462 - DNA, 842 bp, Oryza sativa
  Clone ID: TF_OsC724_3
ccggcctttaggtcattgtctccggaagtcagaaagggggggaaaaggaactcgaagtcgccgccggatttgggatttggagagcgcgcgaggtaaaccaaagttctttttccgatggctcgtactaagcaaactgctcgcaagtcaactggaggaaaggctcccaggaagcaacttgccaccaaggctgctcgtaagtctgctcccacaactggaggagtgaagaagcctcaccgttaccgccctggaactgttgctcttcgtgaaatccgcaagtaccagaagagcactgagctgctcataaggaagcttccattccagaggcttgttagggagattgcccaggattttaagactgatcttcgtttccagagccatgcggtgcttgcccttcaggaagctgccgaggcgtacctggtgggtctcttcgaggacaccaacctgtgcgccatccatgccaagcgtgtgaccatcatgcccaaggacattcagctggctaggaggatccgtggtgagagggcttaggctttctcatctctgggaggggctctggtgtttcatctgtgactacttcctgcttttgctgctgaactcttatttggtgtcgtgaatggtgctaatactactcacatgtagtagtagattgttagtgaagtactctgtttctgtgttctagaactggatattttgctagtaagttgtctcgactgttgatttcatccatccatctgatggatgtgtatctagtagtttctcatctgaagtcctgaaatctgaaccttgaatttacctgtggaatggaacttagaaaaactgtgttaaataatcaaaaaaaaaaaaag

SEQ ID NO: 21463 - DNA, 554 bp, Oryza sativa
  Clone ID: TF_LIB4371-038-R1-N1-A3
gggacaaaaattgggggaaaaaacaaattacttcgggggcaatttcaaaaaaaccagggggtaccttgcaactaaaaatcaaagactccgacggggcagggcaggggtctaataattaacaaaaacggggaaaacatgacaaggccctaccaaccaagcaagaaccaaagggggggggatcgcctaaaccccccccccggggatccggcccccgagctggatgtccttgggcatgaaggggacccccttggcggggatggcacacagggggggggccccaaacagcccgacgagggacccctcgggggccccctgcagcgcggggacgggggaactctggaagcggagggcggtcttgaagccctgggcgatcccccggaccaggccctggaaggggagcttgcggataaacaactccgggctcttttgggacttggggatcccacggagcgcgacggggccggccctgaaacgggggggcttcttcaccccgccgggggccggggccaacttgcccccccccttggtcgccaactggttcctcggggccttcc

SEQ ID NO: 21464 - DNA, 1014 bp, Oryza sativa
  Clone ID: TF_8334787
gtcgtcgtcgtctccggcctccgcttcctcgccgacggaatcctagcttagccatggctggtaggggcaaggcgatcggctcgagcgccgccaagaaggccacgtcgcggagctccaaggccgggctccagttccccgtcggcaggatcgcccgcttcctcaaggccggcaagtacgccgagcgcgtcggcgccggcgcccccgtctacctcgccgtcgtcctggagtacctgaccaccgaggttcttgagctcgccgggaacgcggcgcgggacaacaagaagacgcggatcgggccgaggtacatccaagtaccgcgtgcgcaacgacgaggagctgaggggcctggtaggtgccccgtccatcgtgaagcgggtgcgtcgggccgagtatggtggcgcggttccgtgcgcatcaaggccttgtctaggtctcctagcgcgtcttgtagcgccctggctttgtatcaaacgcacgatggccgtgcctccccgggagtagggaattggccgctaagcgggcattgggctcccccggtgtgctgctccgcgccactgtgcgacgaagtatgagtagacgttcgtattcggtatcgccatccctacagactgactctggagtctccctttctatgttcgtgtgtggggtgccaggtgtggggtggttcctcccaggcgcgcgcgctgcattatgtcgatccagtgcggtagaccttgaagacatgtccaacgaagtctcttcggcgctctggccagaactgagaaaaccgctttgtctacgacgtaactttcggtcgtttcttatgatcctctatcgctgcggtctctcgtcggtgcttccggatcgcggctgtgcacccactcgacgccgacttcggcggaccactgactgagctccctatacctggtacgtaagcgcgtgtacagcggtgattgcacgtcggttctcactgcagcaatgcagcgtgtcttcgtgggggtagtttcttgaccgcgcgactgatagtgcatcgtt

SEQ ID NO: 21465 - DNA, 419 bp, Oryza sativa
  unsure (1)..(419): unsure at all n locations
  Clone ID: TF_3759981
ggcgcccaaggcgangaagaagccggccgcgaagaagcccgcggaggaggagcccgcgcaggagaaggccgagaagccnccgcgggaangaagcccaaggcgnagaagcgtctccccgccggcaagggcgagaagggcagcggcgaggggaagaaggcggggcggaagaaggggaagaagagcgtcgagacctacaagatctacatcttcaaggtgctcaagcaggttcaccccgacatcggcatctcctccaaggccatgtccatcatgaacttcttcatcaacgacatctttcgagaagctcgccggggagtccgccaagctcgcccgntacaacaagangcccaccatnaacttccggggagattcagacttccgttccgcttggttcttcccngcgagctttcaaagcacgccgt

SEQ ID NO: 21466 - DNA, 381 bp, Oryza sativa
  Clone ID: TF_uC-osroM202014h03b1
tcctaattcccccaaattttcgtctcccctttgggttccccgtgaagaagagagcggcatccatggcgcccaaggcggagaagaagccggcggcgaagaagcccgcagaggaggagcccgcggcggagaatgccgagaaggccccggcggggaagaagcccaaggcggacaagcgtctccccgccggcaaggcctagaagagcagcggcgaggggtagaaggctctgcggaagaaggcgaagaagagcgtcgtgacctacaagatctacatattcaaggcgctcatgcaggtccaccccgacatctggatatactccaaagccatgtccattatgaacttcttcatgaacgacatcttagagaagctcgccggggagttcg

SEQ ID NO: 21467 - DNA, 1045 bp, Oryza sativa
  Clone ID: TF_OsC1018_3
accgtatccttccccaaaatccccaatccccgagctgtttcacctccagcgagcgagcgcggcggccatgtcggggcgcggcaagggcggcaaggggctcggcaagggcggcgcgaagaggcatcgcaaggggctgcgcgacaacatccagggcatcaccaagccggccatccagaggctggcgaggaggggcggcgtgaagcgcatctccgggctgatctacgaggagacccgcggcgtgcttaagatcttggtcgcatcgcacccccgcgaatccccccccacaggccaacagcaaagcagaggcgaagggaagaagaagaagaagaagcggcggcggcggcggccatggcgtggcgtgcgaaccccgcccggcgcgactccaatcaccaccacctcttctccaattccactcgcttttctctctctctcgtgcgtcgagccaccggaatcgtcgtcgtcggcggccatgtcggggcgcggcaagggaggcaaggggctcggcaagggcggcgccaagcgtcaccggaaggtgctccgcgacaacatccaggggatcaccaagccggcgatccggaggctggcaaggaggggcggcgtgaagcgcatctccgggctgatctacgaggagacccgcggcgtgctcaagatcttcctcgagaacgtcatccgcgacgccgtcacctacaccgagcacgcccgccgcaagaccgtcaccgccatggacgtcgtctacgcgctcaagcgccagggccgcaccctctacggcttcggcggctgatcgatcttgcctccctccgccatctctcccatgtcgtctggccgtgcccacaagtcttgcggtcaagaaaaaaagtttgatggaaagccgtggaatccaccttgttcagttcgctgtttagtttttctagtgtttacctgaatcatgaaattgtgaagcaaatgatgtttgcaactgggatttgaattgaaacatgtttcagagccaaaaaaaaaaaaaaaaaagccggccgatgtgtgaaaaaaaaaaaaaaaacccgcggcc

SEQ ID NO: 21468 - DNA, 630 bp, Oryza sativa
  Clone ID: TF_OsC20534_1
tcttctttttttttttttttttttttttttttttttttttttttttttttttttttggaaaaaaaatttaacattttttaaatttatttttttgaacagacccaagcccagatcacagggttcaacgccccccccttagtttaaatcaacgggtttggatttttaacagacccccttcccgtccaatttattccagttaaacaagcaaagggggggccccccccctaggcctttttgggggatttcccgggggcctttttgggcgatttggcctttttgccgggggggggggccttttccgccgtttttttgggcaaaacccccgggttgttgttgggcagcccccctccgtgcgcgagggtcaccccggccagaagtttgccgagctctttgtttttcctgatccccagcaacacggggggggggatgatcctgttttttttggtgcccttggccgggttcccggggagctccagccccttggcggggaggtactcgaggacgggggcgaggtaaacgggggccccggtgccaatgcgttgggcgtagcggccctttttgaggatagcggccgatacggccgaggggaaactggagcccggccttgacggagcgcgaccccgctttttt

SEQ ID NO: 21469 - DNA, 4469 bp, Oryza sativa
  unsure (1)..(4469): unsure at all n locations
  Clone ID: TF_OsC1141_1
ccggccgggtatattaaagttgttgtggttaaaaagctcgtagttgaacaattccacacaaggtcttcttctacatctccacccaaattccaaatctctcggtgatcggagcggttagctgcggcgatgtcggggcgcggcaagggaggcaaggggctgggcaagggcggcgcgaagcgccaccgcaaggtgctccgcgacaacatccaggggatcaccaagccggcgatccggaggctggcgaggaggggcggcgtcaagcgcatctccgggctcatctacgaggagacccgcggcgtgctcaagatcttcctcgagaacgtcatccgcgacgccgtcacctacaccgagcacgcccgccgcaagaccgtcaccgccatggacgctcgtctacgcgctcaagcgccagggccgcaccctctacggcttcggaggctacacgagtacagattcgatggtgttgggcgtaacagcgctagcattattatggcgcgtgctccgggtgaggcgttggggctgccactccttgtgatctactcgcaggccggagaaaaaaaaaaaaaaaagccaaaaaagaaatcccaaaaaaaaaaaaaaaaaaaaaaaaaaaaaaaaaaaaaaaaaaaaaaaaaaaaaaaaaatcctccgccgggtggcgacccgccggcccggccgggatcacagaaaccataaacacacaggcatctgattagagaaatctaatggcttcttcttccttttccttcctgcttgttgctgctctgcttggattggcctcatggaaagccattgcctcagaccctagccctctccaagacttttgtgtcgctgatctgaattcgccagtgcgagtaaatggatttgtttgcaagaacccaatgaacgcgagtgccgacgacttcttcaaggcagccatgctcgataagcctagagacacaaacaataaggttgggtccaatgtcactttggtcaatgtcttgcagcttcctggtctcaatacccttggcatctcgatagcacgtcttgactttgcacccttgggtttgaacccaccacacacgcaccctcgtgcaaccgagatcttcacggtgcttgaaggaacactctacgttggctttgttacgtccaacccagataacaggctattgtccaaggtgctcaacaagggtgatgtgtttgtgttccctgaggggctcatccacttccagttcaatcctaacccacacaagccggcagttgccattgctgcactgagtagccaaaatcccggggttattactattgccaatgcggtgtttggatcgaacccacctatctcagatgatattttgatgaaggcgtttcaggtggataagaagatcatagatttgctccaagctcagttctagaagaacaactactgattgtcctgttggttgcaccattaaggacagtatactacatgcacctgatgctatgtaactatcatatatgatacgtagaataagtggggttttatgtgctgaaattgttatcatgcatgatatgctaaagcagtatgttattggacatggaaaaaaaaaaacagtggcgttcttttccctcgtaattaaaatgaaaagcaaacctcttgaagtccaagaaaaaaaaaaaaaaaaaaacagcaaaaaatttgcggccagnanacatnaaaaaatccttatcctcctgccaaatggagcgtgccgctgctgatcggagtggcgcggaggagggggagagcgaatggagggaggagctgcggcagcagcagtcgcaggtcgacgcactgcgggagaggctcgtggaggtcaaggtcgggatgaagtgctccgaggaggactcgaggaaggagctggatcacctctgccgcagggtgaagaccatcgccacgctgctggcctacctcaaatccaaggccaggatcatggcgataccgcacctcgcgcacacgtcctgcgggattaggcaccaggatggcgtggggtacgtcgacaggaacggggtgccactggctgattggtccaagggcggcgagtccgcttcctgcgagggtttagatgatgaaacgtcggcggatagtagtcgtgttgccgaacatggcgatgccaatgagggggatgtagatgtcgaagacattctgaagtcgatacatgtggtgaccgatgtcatggagacccttgtgaagagagtgattgttgctgaatcggaagccgctaacgagaaagagaaggtgaggatgggtctggaagagattaggaggaagaccatacaggttgagtccatgtcggccaaagttgaggaaatggagaaatttgcagtgggtacgaatggtatgctgaatgagatgaggcagagggttgaagacatggtgttggagaccactcgacaaaggcaacgtgcggctgaaaatgagcaggagcttagtcgtgtgaagcatgacttcgagtctctcagaacctatgtcggcactctcgttaatgtcagagaaactcttctttcatcagagaagcagtttgaaacaatggagaaactcttcgacaggctagttgcaagaaccaaccaacttgagagtgagaaagcacaaaaagaagccgaagtccagaaggtggtggaggagaatgtgaggctgcgtgcgatgattgataagaaggaagcgcagcttcaggcgatgagtgagcagtgcaagttcatggcgctgagccaagaagagctccagatagatgtggcgaaacaacggatggtgccaactgctggcgacctacgcgggcacgcggcgcagcgccccacccaagtcgtggacctcgtggtggtgaagggtagtaggcgacggcttcactactacccggccgggacttgtactgcgagccacacgccgcgcccgggcaaaacccacgcgaccccttcctcctccgcctcgacccgatccgatctgagccagagccaaccatggcggcgactagggtttggctctccgccctcctcctcgccttcctcctcgccgccgcccccgtcgtccaagttgccagagctcagtccgaggaagaagctgctacagctgaagttgttgatggggctgatctaggaatcgtcagtgatgatacacaagtttccagcgatgggcctctaagtccggctcctggtgtggagacagtatgtgtttttcccaaaaacgctggcaaaattgtgctagcaggtgaagaaactgaactactggttggcctgcaaaacgagggtgaatcaactttgaatgttgttgctatccattcaactctccatcttccttttgaccataagatgtatggacaaaaccttactgttcagaacttcttcaatgcatcagttcctgtctctgtacaagcaacctttccgtatacattcgccgtgagcaagttcttgcagcctggagcatatgatctagttggttacatagtgtatgagattgatcagaacccataccagaatgtcttttacaatggcactgtagaggttgttgaggctggaggtttactcagcgttgagtctgtgttccttattacccttggagttgcccttcttggtctcttcggattgtgggcatatggtcaagtacaacagctctcaaagaaaacaaagaaggcccccaaggtggaactgggaactggaactactgatgccaacatggatgagtggctggagggcactgcatttgcacagggaagcaaatccaagaagaagaaatagattggaggcccttgaactctagttaatcattttcaggatctagaatgagacagttgagggtagcccttcacaagtaacttttgcagacgatagatgagaaaatggaggtgttttaaaccgtagtttcgtggctgctgcacatgtttgttgacaccaaatttcgaccttgttgtgtacttttacatgaaagttttttcttgaaaaacacagttttgttcaaggtatatgctatggatgtgatctctgatcttatttgatctgtgacatgccgaataacataagttcgatctgagagatgctgaatcacataaatttttattagttgcaaaaaaaaaaaaaaaaaaacgtcccaactagctggatacttcctccgtcccaaaaaaaaaggcaaaccctgggttttcgtgtccaactttaacgatggacggtcaaacgttggacacggaaaccagggtttgtctttttttggacggagggagtacatatgacaagctgttacgcttgttcaatgatgccacttacgaattaccgtcactgcattgttgcaacaagaagagcagctccagatagatgtggcgaaacaacggatggtgccaactgctggcgagtccgttccaggtactctgtgctctgcaaacaaattgtttaccttaatgtaggtgtgatgtgttgggactgtaaacctgacatctttgtattcttgtaacttggaatttgtgtaaaaaaaaaaaccagggcacatttgtccg

SEQ ID NO: 21470 - DNA, 1367 bp, Oryza sativa
  Clone ID: TF_OsC12950_1
ctaagagctagtgaacttggtgacggccttagcaccctcggagacggcatgcttggcgagctcgccgaggaggacgaggcggacagaggtctggatctccctggaggtgatggtgggcttcttgttgtaccgggcgagcttggcggcctcaccgacaagcttctcaaacatgccgtcgatctcctcgtggtgggtgaccacgtcacgtcgctcgccagtctggcacgtccgcatcttatcaacctttggacctgccgcggatttctcagccatggcgggtgcatcgcctttgccggctgtagattccttgaccgcggccgtcgtgtcggtcttgccgggcgctgtagattcttttgccgcggtttctgtgtcggtcttgccggataccgtggattcctttgctgcggtctccgtgccggtcttgttagcagtggatttctttgttgcggcctccatgctggtcttgtgggatgcgggggattcctttgccgcaaccttcttgccggtcttgccagctgtggatttctttgtcaccgtagccgtgtcggccttggcaacgacagattccttacccgtcttatcggctggagatttcttagccaccgtggctgcgtcagccttggtaacggcgtattccttacccgtggcaggtgtgccagccttaccggctagggatttcttagccaccgtggccgcgtcggcctcagtgttggtcttgccggacatcgtgaattcctttgccgcagccttcttgccggtcttgccggcggtggattccttagccaccgtggccgcgtcgaccttggcaatggattccttacccgtggcaggcatgtcagccttggcagctggtgatttcttagtcaccgtgatcgcgtcggccttggcagcggcgtattccttacctgtggcagtggcagacgtgtctgccttaccagctggagatttcttagccaccgtggccgcgttggccttgccagcggcagattccttactcgtggtaggcgtgtcagccttggcggctggggatttcttagtcaccgtgaccgcgtcggcctttgcagcggcgtattccttatatgtggcagacgtgtctgccttaccagctggagatttcttagccaccgtgaccacgtcggtcttgccagcgacggattctttacccgtggtaggcgtgtcagccttactggctggagatttcttagccaccgccgacgcgtcggccgggtaatccttcactgccagggcgagcggcggccgtgctaccacggcgagggcgaccagcagcagcgacgcaacggcgaggccacgagccatcgttgttgtccgttggtcctgcgcctaaaagatccgtggcgagagagaca

SEQ ID NO: 21471 - DNA, 464 bp, Oryza sativa
  Clone ID: TF_jC-osflLIB3479022d02b1
gccatgttaggtcgctctcgatttcgatttactccaactccaccgaaagagatagccaagtcggctctgataagtgtagaggagatggccggttctaagcagaccgaccgtatgtacaccggcggtaaggcctctaggatgcagctcgctaccatagtagagaggaagtctgttacgaccaccggcggggtgaagaagccccaccgttacatgccggggacggtggcgctgcgagagattcgcaagtaccagatgagcacggagctcctgatccagaagctccgcttacagctcttggtgcgagagatcgcgcatgacttcaagaccgtccttctctttcagagccacgcggtgctcgtcctacaggaggccgtcaaggcctacctctttggtctgtttgaggacaccaacctatgtgtgatgcactccaagcgcgtcaccatcatgccgaatgacatctagct

SEQ ID NO: 21472 - DNA, 705 bp, Oryza sativa
  Clone ID: TF_OsC3999_2
actgaacacaaacaaatttcaattgagaaaccacatattgaagcacatgggatccagaagacaaagcgagacacttcatcttctcattagaactaccctagtgtcttgcaagctaaaatcgaaaacatccagttaaatgcctagtgatacgaactaatctcgaatcgaacaaactaagtactgcatatacagtgaccaatgaatggaaggacatgaagctaggagcgcgcctgcttcttgggggacttggcggctttgtccttggacgccttggccggcttgtcggccttctccgcggtcttcttcgggagcagcaccgggttgatgttcggcagcacgccgccgtgcgcgatggtgaccccggcgagcagcttcccgagctcctcgtcgttgcggatcgccagcagcacgtgcctcgggatgatccggttcttcttgttgtcccgcgccgcgttcccggcgagctccagcacctctgcggcgaggtactcgaggacggcggcgaggtagacgggggcgccggtgccgacgcgctgggcgtagcggcccttcttgaggtagcggccgatgcggccgacggggaactggagcccggccttgacggagcgcgacaccggcttcttcttcggcccgcccagcttccgccccaccgccttcttcgccgccttgccgccgacgccgacgtccatctccgggaaacgtgag

SEQ ID NO: 21473 - DNA, 2205 bp, Oryza sativa
  Clone ID: TF_OsC631_4
atggcggctctgacggaggacatcctcctccagatcttctcccgcgtgggcagcatcaaggacctcttcaagttcgccgtgacatgccggcggtggctgcgccgcttcaccgacccggccttcctccgcgggctgtgcctggacagcggcgagggccaccgcgcgcgcctcctcggcttcttcttccagcagacgagattctatcgctgcgaaaagatgatcaagatgcgggtgacgcagcagagctcggtctgtccgcccaccttcctgccggcgccgtggtcgccgctcggcctcacggatcgcaccctcacctccttcctcgccgccgacgacgacaccttcaactacgccgagcccctcgcagcgcgctgcggcattgtcctgatgcggcttgtcccccgcaccgcgctgatgatagcgtgcagccacctcctcggcgtctgcaacccgatcaccggggaatgccacgttctcccgcctctgaatctctccggcctccatcgctacttgaccagctacgccatcatcacgtccaccgacagcgacctagatgggaagcagccgccatcatcatcatcgtcagggcgctccacgttctcgcagctgtacctcgtcgtccaacacaagaaagactgtaacgagtacttctactcctactctgctgctacgtgcagctggagcgctcccaccatgtgcgtggacggccgccgcttctccctggtgggtgagagatccgccgtcgttcacaagggcgcggcgcactggctgtttattgatcgtgtatctagcgcaacccaagatgacatactgtacaaactcaccgcggcggtggacacctcagaaatctccttgacaaggctcccctttgtgctggaggctcaccgctcctctgcgataccattggcggtgccttacccagactattcccatatatgtcagccccgcgagaagtggtttaacttcaacaggggatcaatgctcgtgctgtacaggagcaacggcgtcttcatcctcgacctcgagaagaaggtgatggaaaagctattgtctagacatggaaaagctactgctgaaaggccttcgagttctgaaggatacatatggaaattgagtttgttggtgatcacagttacaggtctgactccatggcaaaaagcccaaaacctgaacccaaagaaagaacagcccaccaccacagcgctccaaaaacggggcccactgcacatttttctttgcaacgtcagcgatccgcacggaaacgcatcgcagccgtctaaccgaaaaggcaccggacgtcacacattcatccacgtcatcgatccgcgggacaagcctctccaccaatcagcgcccacttttacccactataaactcaccgcacccgtgtcctccttccacaccgcaatctcgcaacacatcagcacacaccgctccaaagcaaaacccacggacccgcttcccctccccgagaagaagagagcagcatccatggcgcccaaggcggagaagaagccggccgcgaagaagcccgcggaggaggagcccgcggcggagaaggccgagaaggccccggcggggaagaagcccaaggcggagaagcgtctccccgccggcaagggcgagaagggcagcggcgaggggaagaaggcggggcggaagaaggggaagaagagcgtcgagacctacaagatctacatcttcaaggtgctcaagcaggtccaccccgacatcggcatctcctccaaggccatgtccatcatgaactccttcatcaacgacatcttcgagaagctcgccgccgaggccgccaagctcgcccgctacaacaagaagcccaccatcacctcccgggagatccagaccgccgtccgcctcgtcctccccggcgagcttgccaagcacgccgtctccgagggcaccaaggccgtcaccaagttcacttcctcttaggctgcacctggtgctattgtgctagtagtaatattagtttgatctatttatctactagctgtagtgcatcaatgatgggaaatggatgttggggatttagtgactgtaagaagaattaggtggggctgcttttgaggaacttctgtttcatggattcgaaatacactagtaatgcttttgtatcatgtgaatatgtgatctctcctatgttgtctttcgttgccttgtgctgaacttgtgtttgttttaatt

SEQ ID NO: 21474 - DNA, 611 bp, Oryza sativa
  Clone ID: TF_OsC1021_2
cccactcgtccgaaggcgccggcggggaagaagcccaaggcggagaagcggctgccggcgtcgaaggcgtcgtccaaggagggcggcgccggcgacaagaaggggaggaagaaggcgaagaagagcgtcgagacctacaagatctacatcttcaaggtcctgaagcaggtgcacccggacatcggaatctcctccaaggccatgtcgatcatgaactccttcatcaacgacatcttcgagaagctcgcgcaggaggccgcccgcctcgcccgctacaacaagaagcccaccatcacctcccgcgagatccagacctccgtccgcctcgtcctccccggcgagctcgccaagcacgccgtctccgagggcaccaaggcggtcaccaagttcaccagcaactaggcctgtctctctagggtttcgatgccatgcttctctccttccctttcccctcgtgtgcagtgtgctaggtggcagtagttgcaaacttgtgcctgctttgtaaattgtgcttgatcataatgggcagcttggatttgaagtaatagacgtgtcgagtgttatttattggtcggtggctggttcgcatcttggggttttcttttctcttt

SEQ ID NO: 21475 - DNA, 341 bp, Oryza sativa
  unsure (1)..(341): unsure at all n locations
  Clone ID: TF_287205
cgcgcttccgattccaagcagcagcagccagtccagttcccaaatggcccgcacgnagcagacggcgaggaagtccaccggcggcaaggngccgaggaagcagctggcgacgaaggcggcgcgcaagtcggccccggcgaccggnggcgtgaagaagccccaccgcttcaggccgggaaccgtcgcgctccgggagatccgcaagtaccagaagagcacggagctgctcattcgcaagctgcgttccagcggctggtgcgggagntcgcgcangacttcaagaccgacctncgnttccagagctccgccgtngnccgngctgcaggaggccgccgaggcta

SEQ ID NO: 21476 - DNA, 497 bp, Oryza sativa
  Clone ID: TF_uC-osrocyp016d02b1
tcttaaagacaagattgctttcctagagcttctgtaactgaggattctgaatacaagcaaagatggcccgtacaaagcagaccgcccgtaagagtactggaggcaaggccccaaggaagcagctggccacgaaggctgctcgtaaatcggctcccacgactggtggagtcaagaagccccacagataccgcccaggaactgttgcccttcgtgagatcaggaagtatcagaagtcgactgagctgctcatccgcaagcttcctttccagaggcttgttagggagatcgctcaagatttcaagaccgatcttcgcttccagagccacgcagtccttgcccttcaagaagccttagaggcatacctcgtcggtctctttgaagacacttacttgtgcgcaatccatgccaagcgggttacgattatgccccaagacatccagctggccaggcgcattcgtggcgagcgtgcttagatagttgagcaagattttttttaa

SEQ ID NO: 21477 - DNA, 806 bp, Oryza sativa
  unsure (1)..(806): unsure at all n locations
  Clone ID: TF_OsC631_5
ccggccgggttcggaaccgcaaatcgttgcgatccacacacagcaaaagaaccaccaccgtttccccttcccgagaagaagagagcagcatccatggcgcccaaggcggagaagaagccggccgcgaagaagcccgcggaggaggagcccgcggcggagaaggccgagaaggccccggccgggaagaagcccaaggcggagaagcggctccccgccggcaagggcgagaagggctccggcgaggggaagaaggaccgcgctgggaggaagaaggcgaagaagagcgtcgagacctacaagatctacatcttcaaggtgctcaagcaggtccaccccgacatcggcatctcctccaaggccatgtccatcatgaactccttcatcaacgacatcttcgagaagctcgccgccgaggccgccaagctcgcccgctacaacaagaagcccaccatcacctcccgcgagatccagacctccgtccgcctcgtcctccccggcgagcttgccaagcacgccgtctccgagggcaccaaggctgtgaccaagttcacctccgcttaggctcataggcccctttctcgtcttgctgctaatggtagttgtggtaggttggaattttggatggtatggtactgtgctgtagttattctggcttttgactatcttgggttcatgtaagaaatatcctggtggatttaggacaatattgttatctggatctggtaaagtagtaattatgatgatgatggctttaaaaaaaaaaaacccgcggcnnnnnnnnnnnnnnnnnnnnnnnnnnnnnnnnn

SEQ ID NO: 21478 - DNA, 574 bp, Oryza sativa
  unsure (1)..(574): unsure at all n locations
  Clone ID: TF_LIB4831-018-R1-N1-F7
acgccgcaatctcgcgaatcccaccgcttccgtttcctctcctctccccgagaagaagagagcagcggcagccatggcgcccaaggcggagaagaagccggccgcgaagaagcccgcggaggaggagcccgcagcggagaaggccgagaaggcccccgcggggaagaggcccaaggcggagaagcgtctccccgccggcaaggccgagaagggcagcggcgaggggaagaaggcggggaggaagaaggcgaagaagagcgtcgagacctacaagatctacatcttcaaggtgctcaagcaggttcaccccgacatcggcatctcctccaaggccatgtccatcatgaactccttcatcaacgacatcttcgagaagctcgccggggagtccgccaagctcgcccgctacaacaagaagcccaccatcacctcccgcgagatccagacctccgtccgcctcgtcctccccggngagctcgccaagcacgccgtctccgagggcaccaaggccgtcacccaattcacctccgtttaggcttcacccctgcatctatctatgtgttaactttagtgc

SEQ ID NO: 21479 - DNA, 701 bp, Oryza sativa
  unsure (1)..(701): unsure at all n locations
  Clone ID: TF_23513677
cgaaaaccgaaaaaaaattatgatcttttagaggtattcccattcgtgaccatgaccatgcccatcatggaattaatgtacaacccgaaaacgcggagaaatataaaaaagcaacccgttgttgaccctagaccgtgaccccaatattcatgaacccaacgtgccgaccgaaaaaaatcagaaaacgcgacaaaatatcaaccgccaatttacaactcttgcgacgcgttcttgccacccttgccgccagtcttcttggggaggagattctgatgaatgttgggaaggacaccaccctgggcgatggtgacgtggccgagaagcttgttcaactcctcatcgttgcggatggcgagctggaggtgacgagggatgatacgggtcttcttgttgtcgcgggcagcgttgccagccaactcgagaatctcggcagcgaggtactcgagaacggcagcgaggtagacgggagcaccagcaccgacacgctgagcatagttgcccttgcggagaagacggtggacacggccgacggggaaagcgagaccggccttagaagagcgagatngggcgttcttgccgctgctggccttgccaccggacttgccgccgccagtcattttgaatgagttctcgggtgggaacacgtggggaaaatggatgtcgttgtgccggaggcgaaagactccctcgtgccgaattct

SEQ ID NO: 21480 - DNA, 513 bp, Oryza sativa
  unsure (1)..(513): unsure at all n locations
  Clone ID: TF_rsiceg_9458.y1.abd
cgggctgcaggaattcggacgaggacacagcaaaagaaccaccaccgtttcccttcccgagaagaagagagcagcatcagtggggcccaaggcggagaagaagccggcggcgaagaagcccgcggaggaggagcccgcggcggagaaggccgagaaggccccggccggtgaagaagcccaaggctggagaagcggctccccgccgtgcaagggcgagaagggctccggncgaggggggagaaggaccgcgccgggaggaagaaggcgaagaagagcgtcgagacctacaagatctacatcttcaaggtgctcaagcaggtccaccccgacatcggcatctcctccaaggccatgtccatcatgaactccttcatcaacgacatcttcgagaagctcgccgccgaggccgccaagctcgcccgctacaacaagaagcccaccatcacctcccgcgagatccagacctccgtccgcctcgtcctccccggcgagctcgccaagcacgccgtctcc

SEQ ID NO: 21481 - DNA, 562 bp, Oryza sativa
  unsure (1)..(562): unsure at all n locations
  Clone ID: TF_8954983
attcggcccgagccgcggggaagaaccaagcggagaacgtctccccgccggcaangccgaaaaaggcacggcgaagggangaagcggggcggaanaaagcgaaaaacactccagacctacaanatctacatcttcaaggtgctcaagcaggtccaccccgatntcggcatctcctccaaggccatgtccatcatgaactccttcatcaacgacatcttcnagaagctcgccggggantccgccaagctcgcccgctacaacaagaagcccaccatcacctcccgcgagatccanacctccgtccgcctcgtcctccccggcgagctcgccaagcacgccgtctccnanggcaccaangccgtccccaaattcacctccgcttaagcttcacccctgcatctatctatgttttanttttaatgctatcnatnattggaaaatggatgtttnatcgttaagtttggtatcanatgtcantgatctggaacagtactctgattttaaaccatgtnaatgtnattcctgggttttttnatttttgacccccttgtntctgctggtc

SEQ ID NO: 21482 - DNA, 725 bp, Oryza sativa
  unsure (1)..(725): unsure at all n locations
  Clone ID: TF_OsC631_6
ggaaccgcaaatctntgcgctccacacacagcaaaagaaccaccaccgtttccccttcccgagaagaagagagcagcatccatggcgcccaaggcggagaaggagccggccgcgaagaagcccgcggaggaggagcccgcggcggagaaggcccagaaggccccggcggggaagaagcccaaggcggagaagcggctccccgcggggaagggcgagaagggcggcgccggcgaggggaagaaggccgggaggaagaaggggaagaagagcgtggagacctacaagatctacatcttcaaggttctcaagcaggtccaccccgacatcggcatctcctccaaggccatgtccatcatgaactccttcatcaacgacatcttcgagaagctcgccgccgaggccgccaagctcgcccgctacaacaagaagcccaccatcacctcccgcgagatccagacctccgtccgcctcgtcctccccggcgagctcgccaagcacgccgtctccgagggcaccaaggccgtcaccaagttcacctccgcttaggcttttcctctgtcctcctgtctcgtcttgtcgctgctaatgctagttgtagttgtggtagtttgcagatttggatagtttggtactgtggtgtatttaccctggctattgactatcttggtggataaggaacactatcattgttattatggagaaatagtagttatgctactttaatc

SEQ ID NO: 21483 - DNA, 683 bp, Oryza sativa
  Clone ID: TF_OsC631_8
cggacacacacccagcgaaatccaagaagagagaagcagccatccatggcgcccaaggcggagaagaagccggcggcgaagaagcccgcggaggaggagcccgcggcggagaaggccccggcggcggggaagaagcccaaggcggagaagcggctccccgcggggaagggcgagaagggcggcgccggcgaggggaagaaggccgggaggaagaaggggaagaagagcgtggagacctacaagatctacatcttcaaggttctcaagcaggtccaccccgacatcggcatctcctccaaggccatgtccatcatgaactccttcatcaacgacatcttcgagaagctcgccgccgaggccgccaagctcgcccgctacaacaagaagcccaccatcacctcccgcgagatccagacctccgtccgcctcgtcctccccggcgagctcgccaagcacgccgtctccgagggcaccaaggccgtcaccaagttcacctccgcttaggcttttcctctgtcctcctgtctcgtcttgtcgctgctaatgctagttgtagttgtggtagtttgcagatttggatagtttggtactgtggtgtatttaccctggctattgactatcttggtggataaggaacactatcattggtattatggagaaaaagtagaaatgctactttaatc

SEQ ID NO: 21484 - DNA, 246 bp, Oryza sativa
  Clone ID: TF_LIB3432-001-P1-K1-F5
acgcccacgcttccggaggaacggcactcgcgagaggagagagatggccgaaaccatgcaaacaggtcgtttgtccacaggactaatggctcccaggaagcaacttgccaccaaggttgctagcaagactgttcccaccattgaaggagttaccaagcccaaccgttaccgccctggaactgtactcctccttgagatacgcaagctccataagagtacttagctttggataaggaacatgacttt

SEQ ID NO: 21485 - DNA, 1569 bp, Oryza sativa
  Clone ID: TF_OsC631_1
gcacgagggactcacgcacagattcttccccggccacggcaccgatcaagcacgacccccgatccccaaaccagaaacacactcgcctcgcctcctttcgctcgtttcgtccaacaccaccacccaccaccaccgatctcgatggcgcccaaggccgagaagaagcccgcggagaagaagccggcggaggagaaggccggcgagaaggcgcccgcgggccgggaagaagcccaaggccgagaagcggcctgccggcgtccaagggggagaagggcggcgagggcaagaaggagcgcggcaggaagaaggccgaagaagagcgtcgagacctatcaagatatacatccttccaaggtgctcaagcaggtgcacccggacatcgggatctcctccaaggccatgtcaatcatgaactcgttcatcaacgacatcttcgagaagctcgccggcgagcgccgccaagctcgccaggtacaacaagaagcccaccatcacctccagggagatcccagacctccgtccgcctcgtcctccccggcgagctcgccaagcacgccgtctccgagggcaccaaggccgtcaccaagttgaccagctcttaggcgctctagtgtagtaggtgtttggtgattttctcttcgtttttcgtctgtagcgagtccatggcaagcggtggttagttgccctggatcgatctctgatttctttctcttgtgtctagtgttcctgtctagtgcttgctgattactgtaagaatctcttggttgtgcccgttgagttctgatcttaaaattaatggtgatggttgcaacctctggttgctaaattgttactatcaaaaaaaaaaaaaaaaaaaaattgggaaaccatagtctgtagtcttatgttagggttggctaatacgttggcttaaggttgggcgaattacactatctggaattgtatcaactaaaccggcacaaaacataatagaaatggagcacaatcccccttttccaggcctcgcctcacagtagagccccccccccctcgccccttccccactttgtggctgcctccctggggcatcgagcccccctgctacgcgcctttgcacggtgatcggcaggcctttggccccgcctcactcatactctccccccctatgtcagccctgcggggaggcgctgtactccgcccgtgcagcagatggcgtgcctcacagtggcgagtgcgtcggcatccgcctcccccggtgctgggtgtcggtaaagggcgtggtctgcgcgcggcccctctgctgggttttgccgagcaggacggccgtcgcctcgctgttggtctccgggcagtgcggtgggcgccagctccgcggtctttgtggtgggtctacaggataattacagatgttatgcagtgggaaaatatatgttctagaataagcaagtttaagttaaacaacagcatattacatggatcatatgcaaactgtgcaaactggcgagtgatatatcttgttctgtagcacggcattgtcattttgatatggtttgacctttactggtttccactgtaacatcccttcactgg

SEQ ID NO: 21486 - DNA, 625 bp, Oryza sativa
  Clone ID: TF_OsC631_11
gcatctcctccaaggccatgtccatcatgaactccttcatcaacgacatcttcgagaagctcgccggggagtccgccaagctcgcccgctacaacaagaagcccaccatcacctcccgcgagatccagacctccgtccgcctcgtcctccccggcgagctcgccaagcacgccgtctccgagggcaccaagtccgtcaccaaattcacctccgcttaggcttcacccctgcatctatctatgtgttagttttagtgctatcgatgattggaaaatggatgttagatcgttagtttggtagtcagatgtcagtgatctggaacagtagctctgattttaaaccatgtgaatgtgattcctgggtatgtgatgtttgaccgccttgtgtctgctggtcaacgagtgataactagatctaatttttgtggaactatttacatggttgctacttgcattctgttcaactgttgtaaattcctctgtctctcgttggagttttattctctggagcatgtgtggaattgcctgggcatgcttttgggaaactatagtctgtagtcctatgttatgtttggttaattggttgccctgagcttgttggaattaatctatgtataattttgtgc

SEQ ID NO: 21487 - DNA, 464 bp, Oryza sativa
  Clone ID: TF_uC-osflM202054d03b1
gcgtctgtttggtcggtctggatttcgatttaccccaaatccaccgcaggagccaagtcgccgtcagtatgcgaagtggagatggcccgtacgaagcagaccgcccgcaagtccacctgcggcaaggtcccgaggaagctgctcgccaccaaggcggcgtggaagtctgctccgaccaccggctggtgtgtagaagtcccaccgctacaggccggggtcggtggttctccgctagatccgcatgtactcagaagagcacggagctgctgatccgcaagctgcctttcgagcgcctggtacgcgagatcgctcaggactgtaagaccgacctacgatttcagagccacgcggtgcttcgcctacatgagggccgcctggcctacctcgtcggtctcttggaggacaccaacctatgtgccatgcacgccaagcgcgtcatcatcatgcccaaggacatgcagctc

SEQ ID NO: 21488 - DNA, 1251 bp, Oryza sativa
  Clone ID: TF_OsC1021_1
atgccgcccgaggccgagaacaagccggcggaggagaaggccccagccggcggggacgagtgcgccgcgagggcggctgccggcagggaacccgccgcggagagaggcgtggcggccggccgtctatggtgtcgggagaggagggcggcggcggcgacaagaaggggaggaagtaggcgaagaatagcgtcgagacctacaagatctgcatatttgaggtcctgaggcaggtgcaccctcacatcggtatctcctgcaaggccatgtcgatcatgaactccttcatcaatgacatcttcgagaagctcgcgcaggaggccgcccgcctccaccgatacaacaagaagcccaacgtcaccccccgtgagaaccagacctccgttcgcctggtcctccgcggtgggctcgccaagcatgctgtctccgagggcaccaaggcagtcaccaagtttaccgagcaagaaggcctgtctctctaggtggaagattacattttgtggcaaacttccctttcccctacgtctgcatgagtgcttaggtcgcagtagctccatacgttgtccctaactggtgcagtttgcttgattttaatgggcactttgtacttgaagtaatctggctcagttccaacatagacctatgagcacttctcctgtcctgaatgcgtaattttgtgacttttgttgagcccagtattggtttgcgaacaacattgtttgttttttttttaagatccaaagaaagctttcaaacaggaaaaatagtgttggaaggaaaggttgaaaggatgaggccgggttggaaggtcatatgtgggtggaatgctgcatgccccatatgccactcaccgaggtactatccctctccccgccaactactctccgtagtcgagcgcagtcgagttccagacggcgaaggttggcggcccagaccttagcgacgacagcagctggcggccagacggcggcggaggtcgcgcggccccctgattccacgccgccggccgaatccggcgaggaaggaggcgtaggagtccacacgggggaagaaggcaaagcggctgccgccggagagggatccgaccccttcttccccatcatcgctgctccctcgttgccgtcgccaacacagcctcccttgctcctgcctcgtcatcgcggagctctcttggtgacggaggaaatcggacggcgacgacggtgcaggtgggaggcggcgacagcgcgggacggcgatggcgcggataggtaa

SEQ ID NO: 21489 - DNA, 318 bp, Oryza sativa
  Clone ID: TF_LIB4833-031-R1-N1-C8
gccgggactgttcgccttgcacgccagtttggtcgctctcgatttcgatttcccccaaatccaccgcaagagccaagtcgccgccgagaagcgaaggggagatggcccgtacgaagcagaccgcccgcaagtccaccggcggcaaggccccgaggaagcagctcgccaccaaggcggcgaggaagtctgctccgaccaccggcggcgtgaagaagccccaccgctacaggccggggacggtggcgctccgcgagatccgcaagtaccagaagagcacggagctcctgatccgcaagctccccttccagcgcctcgtcc

SEQ ID NO: 21490 - DNA, 355 bp, Oryza sativa
  Clone ID: TF_LIB3431-006-P1-K1-G6
ctcctcaccaactcaaagtctcttcctcacgaccggcggagagcggcggggtttcttatgtctgggagaggcaacgtcctctaggttctcgataatggcggctcgaataggcacaggaaggtgctgctcgacaacatccaggggatcacgaagcctgcgatccggaggctggccaggaggggcggcgtgaagcgcatcttcgcgctgatctacgaagagacccgcggcgtgctcaagatctttctcgagaacgtcatacgcgacgccgtcacctacacggagcacgcccgccgtaagatcgtcaccgccatggacgtcgcctactccttcaacgccaggccgtactctttacgga

SEQ ID NO: 21491 - DNA, 381 bp, Oryza sativa
  unsure (1)..(381): unsure at all n locations
  Clone ID: TF_2442431
cgacgtgcnananatntttcgtctcccctttcccttccccgagaagaagagagcggcatccatggcgcccaaggcggagaagaagccggcggcanagaagcccgcggaggaggagcccgcggcgnagaaggccgagaaggccctggcggggaagaagcccaaggcggagaagcgtctncncgccggcaaggccgagaagagcagcggcgaggggaagaaggcggggcggaagaaggcgaagaagagcgttgagacctacaagatctacatcttcaaggtgctcaagcaggtccacnccganatcggcatcttnctccaaggccatgtccatcatgaactccttnatcaaacgaaatctttcgagaagttcnccggggagtt

SEQ ID NO: 21492 - DNA, 899 bp, Oryza sativa
  Clone ID: TF_OsC1067_5
tcaaatccaaagaaatcactcgccgccgccgcctcgccttctccgccgcgccaagctctcctctcctcctcctcgcagacccgcacgaagcagacggcgtgcaagtcagggactcgaggaagcagctggcgaccaaggcaacgtgcaagtcagctccggccaccggcggcgtgaagaagccgcaccgcttcaggccaggcaccgtcgcgctccgtgagatccgcaagtaccagaagagcacggagctgctcatccgcaagctccccttccagcgcctcgtccgcgagatcgcccaggacttcaagaccgacctccgcttccagagctccgccgtcgccgcgctgcaggaggccgccgaggcgtacctcgtcgggctgttcgaggacaccaacctgtgcgccatccacgccaagcgcgtcaccatcatgcccaaggacgcggcgcgcaagtcggccccggccaccggcggcgtgaagaagccccaccgcttcaggcccggcaccgtcgcgctccgtgagatccgcaagtaccagaagagcacggagctgctcatccgcaagctccccttccagcgcctcgtccgcgagatcgcccaggacttcaagaccgacctccgcttccagagctccgccgtcgccgcgctgcaggaggccgccgaggcgtacctcgtcgggctgttcgaggacaccaacctgtgtgccatccacgccaagcgcgtcaccatcatgcccaaggacatccagctcgcccgccggatccgcggcgagcgcgcctgattaatttattagtcgcttcatctgtgatagctctaggaccagaaatgcttagtagtagtgatgtaatggcttgttgctgatgctgtcaaatgttgctctgattataaatgggaaatctttctg

SEQ ID NO: 21493 - DNA, 592 bp, Oryza sativa
  Clone ID: TF_jC-osflLIB3477P002f05a1
attcggctcgaggcaatggcacgtaccaagcaaaccgctcgccttcccacttaggaaaggctccgaggaagcaattggcaaccaaagccgctcgcaagtcagccccggcgaccggcggagtgaagaagccccaccgcttcaggccaggaacggtggctctgagggagattcgaaagtaccagaagagcaccgaacttctgatccgaaaactcccattccagaggctcgtcagagaaatcgctcaggatttcaaaaccgatctccgctttcagagcagcgccgtttcggctcttcaggaagccgcggaggcttatctcgttggactctttgaggacactaacctctgcgctattcacgctaagcgagttaccattatgcccaaggacattcaactcgctcgcagaatcagaggcgagagagcttaagtttagggtttcgtgtcatttgacattaaaattaggttactgcttattgtaattcgtgttttcttcaaatgcctctttattgtaagattcatcttatttcatcaggtatattcccatatggatctgcacaactgagtttatgttgaaaaacgagataattctctaat

SEQ ID NO: 21494 - DNA, 942 bp, Oryza sativa
  Clone ID: TF_OsC200302_1
gcgatggagctccttctccccaccgccgccgcctccgcgccgccgcccccgcccgcgttccccgccgacccgcacctcgtcgaccgcgcagcccggttctccgcgttcgcctccccttcgccgccctccccgccgcctcctcctccccctcccccttcctcctcctccaagcgcaagcccgaccccgcctccaaggggaaggcggctgcgaagaaggggaagacggcggcgagcggcgaggacggtggcgacggcggcgaggacgagaagccggcgtacgtgcacgtgagggcgagaagagggcaagccaccgacagccacagcctcgccgagcgggcgagacgcgagaagatcaatgcgaggatggagcttctcaaggagctggtccccggatgcactgtttctgttcggtccaaaggcacactaggagtccaacaaagagtaatgccaagcgttggtgtgcagcagcagcagcatgtggtagctccattctttatatccaaaactgaggtatcaggaacagcactggtactggatgagatcatcaatcatgtccaatctcttcaaaggcaagttgagtacttgtcaatgaggctcgcagctgtaaatccgagggtcgactttggtgggctagacaacttcttgactacggagtgtggaaggataacaggcttgaactacaagaatggaatggatttggagcaggtcacctggccagacatgggcgtccatggagcaaggaatctcatgcaactacaacagcagttctggcatggtgatttagcacacccgctccagccgccttcacagtgggaaaagcggacggataccaatccccctgtctttagcaattcaagttcctccctcttcggctatgatctagcaagctctgccttgattggaccacaacttttgtctctttcgttgttccagagtgtttag

SEQ ID NO: 21495 - DNA, 606 bp, Oryza sativa
  Clone ID: TF_OsC149298_2
atggctgagggagaagggcagtgcaagggtggaagtgggaaggggaaaagagaggaagctattatttgtatgattgtatctacatggacaaaaaaaaggaaatggggcatcgctgtcaggctggttcctctctacttccttgagagcctcttccactgccttttccacttcacaagccgcaatctgtggtctcgacgttcatctccgtccacagcctgttcccggacatgctcgaccggatcccgcgcgccttgacgctcatgcccttgagccgccggagcgcggcgatcatggagtcgatcgacgacgacggctcgtcgacctcgaactgcaccgtgacgcacggctgctgctcgtcgtggcccatgatctgggccttcagctcctcgttcctcctctgcagctggtccctcgcgaccttcagctcgtggatgtagatcgccgccgactgcacgatcgagttcttgtcccccttggagcgagaggagaccatggcgtagaggtcggcgtagctctggctgagcttctcgcggcgctggcgctcgcgcatcatgtggcggaaaccgcggctgctctccacgtcggcgccctgcccgcgccgccgcc

SEQ ID NO: 21496 - DNA, 942 bp, Oryza sativa
  Clone ID: TF_OsC359_6144
ctaacgactattgtaccagcaatattgaggatcaacgtgcgtgtgcacgaccgccgtcgagtaacgcgactccatcatcagcctctgcctcttgctcctgccgccgccgccgtacaccgtctccggcaacgccaccttggccagcgcctgcctcacggcctccttgagaggcctagcctccgccgcagcatcctcctcctcctcctcctccctgcagagcacgaaggcgtgccgcgtccggccgccgaggcagctcatgtcggcgctcagcggccgcagccggaggcggcggaacgtggcggcgatgtcggcgaggaggcccggccggtcgtcgcagctgacggtggcgcggacgtaggtgcgcgcggccgcggtgtgctcgccgccggcgtagcattggacggtcacctcgttggcctccggtgggatggtcgccgccgtcgacggcgtggtggcctcggtggctctcgtcttgaggtgcttcacttggttcaccacgctggctagcaaggtggccttgtccatctcttggaacatttcctctgagtctatctctctcatctgattcctgcgtttttcctgtggtccaatcaaacggcaattcctgtgttttgtaatcctctgttttacaattgtattcctgtcagaatcctgcttagcatcagggagtatcctcctcagtgtagccaggtgagcattaatcctctcccgccgccgcctctcagcctcgctgtggatcgtcatcgccgtcgcctgagccgccgcgctcctccccgacgacgatgacggccgcggcggcggcggctccggcgccaggccgccctgccgccgtggcagcacaaccgtgcctctgtacactgaagaaagatcatcatagccaccgtggtgcagatgctgctgctgcttcccttcttgccaaatctgctgctggcatgcagccat

SEQ ID NO: 21497 - DNA, 1219 bp, Oryza sativa
  Clone ID: TF_OsC281849_1
gtggatccccgggctgcagggcctaaagcgagacaattaatttaataagcgccccccaccaccagccatggagcaccaccacctcctgctgcaactctcgccgccaccgccgccgccgccgctgccggcggcgcacctcatgatgagcccgagcttcttcgacgccggcgtgttcgccgatgtcggcggcgactggatggaggacctcatgcatctcggcgagctgttcggcgtcggcgtcggcggcgacgatgatgataatggcggtgtcgacggcggcgtgggcggcggtgatgatcggatgcaagagtggcagaataattgcgagggcgccggctcgccggaccaccagcctagctgcggtgatggggatggcgatggcgatggcgacgtgagccctcgtgatggggagctcggcgacggcgacggcgacaactcggcgacgaggaagaggcgggaccggtcgaagacgatcgtgtcggagcggaagcggagggtccggatgaaggagaagctctacgagctccgagctctcgtccccaacatcactaaggtacgtactcagtgcttgattgctcgcgtcggcgtcgccatggcggcgccgccatgcgccattgccaacacaagcttaatgattgcttggcagatggacaaggcgtcgatcatcgccgacgcggtggtgtacgtcaaggacctgcaggcgcacgccaggaagctcaaggaggaggtcgccgcgctcgaggaggcgcgcccgatcaggccgcctccgccgtccgccgccgcgcaacggccgcagagacagccacgccgcgtggcggcggcggctgcccagctggcgagggccgcggacgccgccgccgtgacgacagcggcggcggcgccgcacggcgcgagggtggcgcacgtcggcgcggcgcaggtcggggaggggcggttcttcgtgacggtggagtgcgagccggcggcggccgcggcgagaggaggaggaggaggcgtggcggcgccggtctgcgccgccgtggagtcgctgtcgtgcttcaccgtggagagctccaccgtcgggtgctcgccggaccgcgtcgtggcaactctcaccctcaaggttagtgaagcagaggaggatgtgtcggcgatcagcgagtgcacggtgaagctctgggtgatggcggctcttctcaaggaggggttccggccgcaaccgacggtccagatctcctga

SEQ ID NO: 21498 - DNA, 542 bp, Oryza sativa
  Clone ID: TF_OsC133207_2
gcgggaggagcaagatcaacgagaagatgaaggcattgagagcctgataccgaattccaacaaggtgatccgtcgcaaaaaggcgacgtttaattttaacgttcatgaactgggattctgttgggtttgcgctggaaatttatcagtgtttgtgtgctggttttgtgggttgcagactgacaaggcatccatgcttgacgaagccatcgagtacctgaagcaactgcagctccaagtgcaggtcagcagatagatcatagatgtctggatgatgctaaaaattgctgatgcattgagtttggtctcagattggtagaaatgtggttgtaggattgcagtgagtgcatcctgtcttacagattattcttccaatctatgtcgtgattagggtgcgccgtagatgctctagtgaagaagaatccttatactttcttgttcttgcaggattttagttgcgatgtgatatgttcatgcaagatgttagaagggtccactatgtacatagacaacagtacttgatcaatgccaaactcgttctgtcc

SEQ ID NO: 21499 - DNA, 2271 bp, Oryza sativa
  Clone ID: TF_OsC56584_1
gggtgcggtgccaaactgatcagatcacacacttcgcacgacggtcaaacagagcccttgcttgctttgcttgtgtcttcaacttcagagaccccctcctaccctcaaaaaatttcccctttcttttcctccgtttcttgcagcgacaagagaaatactaatactcctcctcctactactgctactgtgcaaggggaaggacacgacgacgaattggagagcggcgtcctctctgatccttttttttcctttattgcatctctctctctctctctctctcgccatttttcttctaggttggtctctggatcaggccattgagggggaaagaaaaggtgcgggttttggggggaggttgttcttgcgggaggccgttgatttcgccgtgtgatcggagagtttggtattgagggagtgaaaaggagatgaatgagaaggacgccactgatttggaggagaggagtgaggccagtgagcacggccaagctctgagtttccatggtggtgccatgttcttgcaagaggctcagattgcttctcctgcagctgcaaataatgcattgacctccatggcgaatcctttccctatccctcctgggttgtggaattccaccttcacacaacatgggtcggccggcgcgccgccaccgtttgtggctactcccgggtttgtagattccacggcggggtttccttgctacaatggaggcaatcttggagccatgatcaatcaccctttccctggtatccaccagcctttgggtgatttccaaaacggcgtcgagccatgtagggagattgaggatattgagattgaaggatccaagaatgtgtcacaaactggtgagaagcagcaaggggatggtgagacaacgcatgccgtcgattcctcctccaaggagctaagcatgccagggcgcaatggtggcgctggccatgatgaggggactagggtgtcttgttccaagaagaggaaaagatcaggacaggatggtggggtgaagcatgcagaaggtggtgagcaattagcaactgtcggttcagcgcagaagaatgaggatgatgaaaagggtgaaccaaagaggtcttctgtggcgtccgggaaatccagtgggaagcaaataaaggataatgcaggttcaccaaaggaagactatatacatgttaggagggagaagatcagtgaaaggatgaaatatcttcaggatcttgttcctggttgtagtaaagtaactggtaaggctgttatgctggatgagataattaactatgttcaatcattacagaggcaggttgagtttttgtcgatgaagctagcaagtgtcaatccaacactggacttcaacatagaacgcattttatctaaagatatttttcaatgtcgaggcactactgcatcatctgcctttggcttcttcccagacattgttcatccccgattacacccaccaaaatatacacaagttgggatgcccagcattgtgaaccccactgatgcatttggaagagtaatccatgctccattaggaactaacagtgcattcaaagaacctaaacatcagatgcccaacaatttgaatggagagttccaggacgtcattgagatgccttttactcatgaccatcatggatcaaatgatcaaccctgagattgattccacaactgaagcaagagatcaatatgtgccatgggctttcagcaaaactgtgatatatgaggcatgttgatatcatggtactagctcacagctgatcactgaagtataagcatccaaaatgcttagttagtgctatttttctcatgttcatagcagcaattgacctcctgtggaagcctctctttggatgttccatttgctgttatagaaagttgggagataaaaaaaaaaggatgttcacatggagatctcaagcaatttgttctccactgaagtagtctacagtcttgaaatggcgagaagcttcattttgcaagaaggtgatttttctgtggtctcgtcaaccccaggattattacatacactagctagcattgtgaggctacagaaattgttctttgttgtacttgcttagcccatgttccatctgtcaagcaacataggcagaaatgcagtcgctgattttgtatttgttgaaaaaaaaaataaatgggcttggcctgatgtagcaagcatttgaattttgcaacgggtgcatattggcacagatgtttttattccagcaaagctgtgaattctgaaagagaagaaaagagaactgtgatctagtgtt

SEQ ID NO: 21500 - DNA, 933 bp, Oryza sativa
  Clone ID: TF_OsC260146_1
agctcagccagcgcttcatcgccctctccaagatcgtccctggcctcaagaagatggacaaggcgtcggtgctgggcgacgcgatcaagtacgtgaagcagctgcaggaccaggtgaaggggctggaggaggaggcgcggcggcggccggtggaggcggcggtgctggtgaagaagtcccagctgtccgccgacgacgacgacggctcgtcctgcgacgagaacttcgacggcggcgaggccaccgccgggctgccggagatcgaggcccgcgtgtcggagcgcaccgtgctggtcaagatccactgcgagaaccgcaagggcgccctcatcaccgccctctccgaggtcgagaccatcggcctcaccatcatgaacaccaatgtgctccccttcacctcctcctccctcgacatcaccatcatggccaccgctggagagaacttctcattatcagtcaaagatatcgtcaagaagctaaatcaagcattcaagttatccctgtgaaggacttgctttcctgatcaagtctaatctagatcaaatctttggttggtaatcttcctactacctttttatcattagccttgagagaaatctgaggctgatggttctaattaggtcctttccctgcttctgcttctgaagagagtttgcttgcaatccaccacagagcacaccccctcaaggatttagccattaaccacctgtttttgctgcatgggtgcagagaatttgcagattacctaaatatccacctacaagtcttctattttctctcccatcacatttttttgcatggattgagctagtcactccatgttcttgggagagggtagaaatgtaaaaaagagacctgtctttttctagggcctgtttatcaaggggagtttgactttttcaaaaaaaccttattttcatttctccccttctg

SEQ ID NO: 21501 - DNA, 1276 bp, Oryza sativa
  Clone ID: TF_OsC3973_1
agaccaaaataatacatgcaaaccatgacataccaaagacctcccaaaagctaacacgagtctttaccaatccaaattaaacagtctaaaattaaaaggaaattaattaaagagctactcagtactcatgcatccaagaaccctagctagctagcaacactagaaactttcatcactatcgatcggtcggtcggctaattagctagctcgagctagttagtactcatccaccacttcaatcagcctgctggccactgcacttgcaaacactggagatcccgaattagttggttgttgtgaccttggtgttgaacatgtagatgtggcagtcgccgatcttgccgccggagaggtggacgaggtcgaggcggaggtcgtccagcgcgcgcgacgcggcggcgagacagccgtcgcggcggcgcttggtgagcttgatgttcacgtcgtcctccacgatccgcacgtccacgaacgtctccttgctccgccgctggatgtacgtgctccggatcggcgcctgccgcggcggcggtgccaccgcgcccatcgccgccgccgccatcacctcgccctccgagctctccgccgcctgatccatccccgccaccaccgacgacgtcgccgcgtccaccacgtccccctgcatctccctccgccgccgcttcttctccaccagcagcgtcagctcctccaccgtcctccctagctcctggatgtactcgatcgcgtctgagatcaccgtcgctctatcctccttggtgcggttggggatgaggagcatgagggcgttgtacttctcggtgagccgcaggcggcgctgcttctccttcttctcgacgccgttggccggcccgccgccgtggaagccggcggtggcgcggctacgcttcctgccgccgccggaccgcggcgtcggggagctctcgaagggtccgaccatgaaggccgactcgtcgtcggccgggccgaacacgagcgacgacgacccggccgtccttggcccgccgcggaagtacgcctcggtggccgccgccgccgccgccgccggcgggtagtggccgccgtagtagtcgcgcagcatggccaccgtctggtggtggtgcggcgccgccagctggtcgtactgcatcgccgccggcggcggcggctgctggtcggcgccgccgaagaagtagtcgacggtgggctgggaggaggccgaggcggcggtggaggaggcagccgccgcggcggcgtcgagcgagtggaggaggtggaagttgagctcccccggcat

SEQ ID NO: 21502 - DNA, 1078 bp, Oryza sativa
  Clone ID: TF_OsC19797_1
ccccgggctgcaggaattcggcacaacgagcttttgcagatcgagcgaaccttcaacacaaaccggccagcttgttcctctcctctctctctctctctctctctctctcggtcgcagccagctaacttcgagtgtgaagaacactcacgctagctagctttctcaaggccacatacgctagctccgcctccacgcgcggcgtacgtctagtttgattgaggctgaagagagtgcgtgtttggtagaagaggctagctgttgacgatgtcgagcagaaggtcgtcgcgtggctccatctcggaggaggaaatcaacgagctcatctccaagctccagtcgctgctccccaactcacgccgacgcggctccagccaggcgtcgacgacgaagctgctgaaggagacgtgcaactacatcaagagccttcaccgggaggtggatgacctcagcgaccggctgtccgacctcatggccaccatggatcacaacagccccggcgcggagatcatccgcagcatcctccgctcctgatcggcaagcagcagcagcaagcggcaccggccggccggccggcctatgtcgacgacgagataggcccgggccggccgggcaacgcccgcggcgccaattaatcaagcgtacgtcctgccggcgccattctccggccaccagagagcatttagctagggtatatatatctacatatataaaatatttatgtcgtatgtccctccccaaatgtacgagccacgcttacacgcgcgtgtatcgatctctcgatctctctctctaagctccactcgaagtagggcattagcactaggggcctaagcagaggcttatcctcgctttagctcatattttcatcgcttgatgtgtcctctctgaacccccacatcttgtcttgtttggtttttccctctcccttccaatctatgtaaatttagctggtgtggtttggatcgagttgtgtcctctacagacaaccgaccgaccactactacctagaggaaattaatatcatcatgggtgtactgctccagctttaacttcaattcagttggctacgtactacgag

SEQ ID NO: 21503 - DNA, 1094 bp, Oryza sativa
  Clone ID: TF_OsC76770_1
taaaagttggaagaagcctttgagagttctgcactctgcacgcacagacaaacgccacagagcggctgcagcgctgcagctaatactagctcgaaacttctttgacccgaagaaacatccccaactggcagctaggtatcatggtgaaggaggaggagatcatcacagaggcagcaggagcaagaggctacatggagatgcttgggcttggagaggaggccgccgactacctgatgtgcctgtctccttcttcctacctgtcttctcctgctgcttccaccaccacagctgtggcttctcctacctgtgcctcgtacttggctcctcacccttaccaccacctgctaagcttcagtggtcaggatcagtaccacggtgatgacgtctttgggttacagtattacggcggcgatcaagtaattccggcggtggttccgcagaagtccagcccgaccaccgagtgctcctcctccgtctcctccatgtcgtcctcgccgacggccaccgccatttccagctctaagtcaccggccttcaagaagaagggatcgagaggttgtgatcagaggaaggctactgctcctgctgctgccacaaccacaaacaagagacccagggtgaggagggagaggctcggagagaggatcatagcgctgcagcagctggtttctccgttcgggaagtctgatacggcctccgttcttcacgaggcgttgggatacatacgcttcctgcacgaccaggttcaggtcctgagctcgccgtacctgcagcgcctgcctccctctgctcgcgtcccggagcaggagagaggcacgccggcggcggaggagcaaccgccggcgctgcggccgagcgacctgaggagccgtgggctgtgcctggtgccgatctcgtgcaccgagcatgtcgccggcgccggcgccggcaccggccacggcaacggcgccgacctatggtcggtggcggcgggcatggcgaaggcgacggcgaccgtgacggccgccgtggagaggagcaaggaggcagccgccgccgccgccgccactgccgcattgctgcgtgctgatcgtccagggcagcagctggcctaa

SEQ ID NO: 21504 - DNA, 1274 bp, Oryza sativa
  Clone ID: TF_OsC43374_1
gctctccactcatcgtcacacgttttcgtacgttacaccactgatcgatcaataatcgctcatcacccgatcgatcgatcgatatattctggcaaatctgtatatagatcgagcctcttattctgcttcttcaggtaagtcggcgtcgagctgatttgttaacgggtaggacgacgtcaagagcggtagctcgagctccgttcgcagccatggcggatgagcatgagtggtggaatagcccttgctctgcgcgcaccggcgacgacgaagccgcgtgctcgacggcggacgccgatgagtcagcggttgggagtactccgatgagcttcggccatggcggccagcctgctagtttatctgacgccgccgcctcctcgtcgtcgtcatcgttccttcttgccggacaacacatggattattggacgcaggacttcatgggaggtagagcagcggcagcggccaccgcgagcttcgacacgctgctccagctccagctccaaggcggcgacgcggcgagccgccgcttgctgctcggcgaccacgccgcagcgccgccgcgtcacctcgtcgtgccaggggcgccctacggcggcggcggcggtgatgacacggcggcgccgccgcgaggcttgtcaccgacaccgtacgaggcggccgacaacctgcagcagcagcaatcgttccccggcggccaccacgtcgtctccaacacggatcgcctccatgatcatcatcaggacgccggctcgccgtcgccggcgacgagaagctctcctggctcgccggcggcagcgaagaaaccacggatcgaggcgccgtcgccgatgccgactttcaaggtgaggaaagagaagctcggggacagaatcactgcgctccagcaactcgtctcgccttttggaaagacggataccgcatcggttcttcacgaggccatcgaatacatcaagttccttcacgatcaagttgcctctctgagctcaccgtacctgaggtgtgggcgccctgtgcagctacaacaccaacagggttcccataaggtgaatggtaactgtgaggggaagcagctggacttgcgcagccgaggcttgtgccttgttccggttgcgagcacttatactgtggccagtgagacggcgacagagttttggcaccctacctttggaggcacatttaggtagatataggtattagtttagtaatttacacctgctaagcaatgtgtacattgtccccggaatggattacgaaacaaacacccaatgttgaagctt

SEQ ID NO: 21505 - DNA, 1229 bp, Oryza sativa
  Clone ID: TF_OsC43754_1
ccttccaatcaaatcatgttgcttaagttcctatggccgagctctttctcttcctcctcctcgccgtcaccgccaccacccgaggccttctggttcttcctcttcactcttacagcagggctgccgcccagcgggctggtgagggagaaggcgatgtgcttctcagactcaagcctcacaatgaatgatggaatgttgacgagctgccttcccaccctgatgtggtgctgcctgataaggacacgtgcatggtggattgacttggccatgccattcttgaagacgatggtcttcacaaaaccgagtataaagacttgcccatctccgaaaaaacggtgagaacgaatagagtgactttatacccaattttacggttgagagacgattcacgcgcggccaccgtgggagcatcacgggaccgattttgccaagcgtccttacttggctgaggccgtgttacatggtcagaaatcccgtgttcttgtgacggttcgctgtcttcgctggtcgcagactcagggaagagctgaagttctcttggcgtggcggcatagtgctgctcgatgataaccggtagctgctgaggaaatgctgccgtcgtggtgactggtaaatgtggcaggtgctgtactgggaacactccggttgtcggataaggtaccctgagagctggtctggtgtttacatgactccaaacaggattgccttccatccgcgtcctaagctcgttttgaagctccaagatttcagtacgaagcatgctgttatcgtcgtgcagttcatttctctccaatgcaacataatgagattcattcttcagtgaactattctccttccggagagattccacttgtgaaagtaaatcttttagtattcgtgtagtttcacccagtacacatgccttcccattgttctgcctgtcaggttctagcaagtttcccagctcattaaagaggtcattctgcttgtcccgcttaagtttctccctctctgatttatggattctctttggagccttcttatcacacttcttgttcactataccgctctggaccagcctcccctcgccgccgccaccagcggcagcggcattcaccctgtccctgggcaccatctcgacctccccctcccagatcggagccgcggcggcctcccggttcgagggttccttgcgctacttgtcttcgtcgtcttcctcctcggcctcggcttcctcggctcgtggctgg

SEQ ID NO: 21506 - DNA, 1313 bp, Oryza sativa
  Clone ID: TF_OsC149298_1
ttttttttttttttttttttttgagtttatgtgggatgtgaaattgatccctttgtgattggaactggttgtgtctgtgttatgacaaatctgattcccttttcttttttaactgataaacaagctgcttaaatcttttttgtactcttctctttcttttttccttgtagaaaagagaggaagctattatttgtatgattgtatctacatggacaaaaaaaaggtacattgacaaggagatatggagattttttttccacttgctccatcacaagcttttaaaaaaatgaacaaatgggggtcccagcaggatcatgtttcaaaaccgatcaaaacacattttgcacatgagatgtctgtgtccagcctttgcttccaggaaatggggcatcgctgtcaggctggttcctctctacttccttgagagcctcttccactgccttttccacttcacaagccgcaatcgtggtctcgacgttcatctccgtccacagcctgttcccggacatgctcgaccggatcccgcgcgccttgacgctcatgcccttgagccgccggagcgcggcgatcatggagtcgatcgacgacgacggctcgtcgacctcgaactgcaccgtgacgcacggctgctgctcgtcgtggcccatgatctgggccttcagctcctcgttcctcctctgcagctggtccctcgcgaccttcagctcgtggatgtagatcgccgccgactgcacgatcgagttcttgtccccctgcaggggcgagaacggctttgtgtcggcgccagtgtagtaaacactccatttaagaggtattaaagggggatttcgaacattctgaagcttggagcgagaggagaccatggcgtagaggtcggcgtagctctggctgagcttctcgcggcgctggcgctcgcgcatcatgtggcggaaaccgcggctgctctccacgtcggcgccctgcccgcgccgccgccgctgcggcacctcctcctcctcctccatctcctcaccctcccccttctcccccccgccgccgccgccgcccatcctgcccagcacgtccatcaccctccggtggatgttcgtcccaccggtggtgacagcccccgccgccgccggcgctccggcgtgcaccgcgccgccgtactcctggaacgcgctctgcctcgcctccgccgccgcctgctccggctccggctccggctccggcgacgcaatgaggccgaacggcagctccggcgacgccggcacgtggtgggggaagaagaacgcggcctcgtcggcgtggaacgcgccgtagtacgactccat

SEQ ID NO: 21507 - DNA, 1256 bp, Oryza sativa
  Clone ID: TF_OsC51580_1
cggacgagaacaaaccaaaccttagctcctctcgctttggcttctcaccccgcacagccaactcttcccgtccatctcaatctccactgataatcgagacacaggccatgccgtgggtgcgcttcctcgtccggttggtcgtcttcttccgcgtcatcgtgtgagagcaagctaaagctactcgatccgtcgatcggccggcggtgactgactgagaatgtgcattggtttccaagggagcaggaggagtagcagcgagacgagcgccgccgacgcggtgatgagaagtggcgccatcgcgtactaccacacgctgaccaaggtttgccaggccgagtacttccgtcaccttctcaagcccgtgacgtaggttgaccagtacataatcctcctcccttcttcacccgacgagagagctagctgcgcagcttctctcacaagaaaaaaaacagaggagacaaacagagtttggaagttaagagcagaagaagatgcagggagaccacgggtactacggcgggagggactcgccgccgcaggggtacggctacggcggcggctacggctacggaggcgggtatggctacgacgccggtgggtactactccggcggcggcggcggctacccgtcggctggggcggcggcggcggcgtacgaggacccgatggtcgggaggaggacgcacgacttcccggcgccgatgaacgagctggagttccagccgtcggccacgtgccccaagaactacgtcatcttcgaccagacgtgcaccaagagccgggtcatgttccacccctcgctggcgcacaagttcggcggcgggtcgtcggcgtacgacaacaacgtgtacggcggcggcggagcgcacgacgccgccaagggcgcgtacagggacagcgtcggctacgacgacgacgacagctgctcggtgcggcagaaggaggacacggacgagatcgacgcgctgctgagctcggaggacggcgacgaggacgacgtggtgagcacggggcgcaccccggggtaccgggacggcagctccccggactcgacgtgctcgtccagctacggcggcgggcaggcgaggcccgggcgcaagaaggagcgcatgaagaagatggtgcggacgctcaagggcattatccccggcggcaaccagatggacacgccggccgtgctcgacgaggccgtccggtacctcaagtctctcaaggtcgaggtcaagaagcttggcgtgcgcggctccgacaactga

SEQ ID NO: 21508 - DNA, 1937 bp, Oryza sativa
  Clone ID: TF_OsC21243_1
ccacgcgtccgatatggaacataagttctttcattcaaccgttggctgaggcaaagatacagatttggagcgaaggtgcctagcactgttttgccaaaatgattgttggggctggttactttgaggattcccacgatcaaagtctcatggcaggatctttgatccatgactcaaatcaagctcctgcaagcagtgaaaacacaagcattgatttgcagaaattcaaagtgcacccgtactcaacagaagctctctcgaatacggccaatctagctgaagctgcaagagcaattaaccaccttcaacatcaactagaaattgatttggagcaagaggttcccccagtagaaactgcaaactgggatccagctatctgcactataccagatcatatcatcaaccatcagtttagcgaagatccacaaaacatattggtggagcaacagatccagcagtatgattctgcactttatccaaatggtgtttacacacctgcaccagatctccttaatcttatgcagtgcacaatggctccagcattcccggcaacgacatccgtattcggtgacacaacactgaatggtactaactatttggatcttaacggtgaacttacaggagtagcagcggttccagacagtgggagtgggttgatgtttgctagtgattcagctctccagttagggtaccatggtactcaatctcatctaataaaggatatctgccactcgttgccccaaaattatgggttgtttcccagtgaggacgaacgagatgtgattattggtgttggaagtggagatctttttcaggagatagatgacaggcagtttgatagtgtacttgaatgcaggagagggaagggtgagttcggaaagggcaagggaaaagctaattttgcaactgagagagagaggcgggagcagctaaatgtgaagttcaggaccctaagaatgctcttcccaaatcctaccaagttcatcagtatgatgttctttactgataacagtgccatgttattaagggttgttttggttttaagccaaattatgccctaccaaattgttggcattttgaaaagttatttggcaaagtttggcttgccaccaaagttggtcaagttttggcactaccaatatattgacatggtaacaaatcaaaacacccctaattgtgttcatcctaaccaaaatgacagggcctcaatagtaggtgatgccattgagtatatagatgagctcaatcgaacagtgaaggagctgaagatcctggtggaacagaagaggcatggaaataacaggagaaaggtgttaaagttggatcaagaggcagccgctgatggcgagagctcatcgatgaggccagtgagggatgatcaagacaatcagctccatggagccataaggagctcatgggttcagaggaggtcaaaggaatgccacgttgatgtccgcatagtggacgatgaagtaaacatcaagctcactgaaaagaagaaggccaactctctgcttcatgcagcaaaggttctagatgagttccagctcgagcttatccatgtagtgggtgggattataggtgatcaccatatattcatgttcaacactaaggtatcagaaggttcggcggtttatgcatgtgcagtggcaaagaagctccttcaagcagtggacgtgcaacaccaggccctcgacatattcaactaatctttagcaacagtactgattatttgaacaatgtcctagattttcagttaccttgctgagcaaacttatttgaccaggattggagagaattttatctttagcactagctacctagcaaaactttttaacaatttggccatgtaacggcttgctgctgtccggttgtacaccttaactagcctgactaggaaagctttgatgcttgtcttgtgtatttgatcatgttatctc

SEQ ID NO: 21509 - DNA, 303 bp, Oryza sativa; identical to SEQ ID NO: 11903
  Clone ID: TF_OsC341353_1

SEQ ID NO: 21510 - DNA, 1469 bp, Oryza sativa
  Clone ID: TF_OsC99421_1
cggcacgaggactgcccagcggcaagatccaggcgccatctttctgctgcaacggcaggccgctcggcttggcagcagcgtcgacagatctccagtgtcctgtgtcccgggcgccaatgcagcttttccaaggagaggagccggctcatgacttcctctcgctccgcgccggcggcggctcgacgtcgtcgccgccgttccagcaccgggaggagcagcattccagccattcatcgcgaggatacggtatggagatccgcagatcactgaggccactggacctggccaagcagcgcggccgcagcagcggcaatggcacggcggcggggagtgccgtcgacggcgcgtcgccggcaggttcggactcggaggagcacgtgctaccgggcggcgtcgggacgttcagcatcaggcacgcgtccggtactccgtcgagagaagaggccggtagccatggcggcgtcaggaggagtgcgttcgcatttgcacctgcgcttcatggcgccaggatggagaatgcacatgaaacaggaggaagatctgggagtagggctcaccgtgcgccgtcgacgatgtggcaagattctgccattgatcaaagatccataggccagacaccatatgaagcatttaattccaagacaatttcatataagtatatggtgcaagaaatgtgttctaaaatgcaattcttcatgctctccttcaggcttgaaatacttcgtgaactcctgccacacactgatcagaagagagacaaagcttctttcctttcggaggttattgaatacataaggtttttgcaagagaaagtccaaaagtatgaggaagccgatccagaaaggaatcacgaggattccaaatccatgccatgggcaaaagtctactatagatcatgctggagaaacacaaagaacaccagtcaagtccagggggaagatttgtcaccatccacacaggacatgaacaacgaacagtacggtcccaagcacatatcggcagcacaacctgctctcttcaacacacagagtgtaaccagtacaaccaccagttcctcccacatggcaacaggcacaccacaaaatttggaaaagaacagcacacccagcaatcagccaccatggctgagcatgtcaacaatgcgccaagagtctgaaccaggcaacaaaatgccgaacaagcatgagaaacagacccttcacgatgaaaaccatagtatttctagcgcttactctcaaggattattcaacagattgacagaagctcttaaaaagtcaggactagatccatctcaagctaatatagctgtagagatcaacctggccaaacgagcaagagataatactagtgacaactcaaagatcgtctgcttaataattattttgtacctttgtcctgacttcacatcacagatcaatgaagatgaagagcccatccaaataaccaagaggcggtgcaataaaagctag

SEQ ID NO: 21511 - DNA, 1841 bp, Oryza sativa
  Clone ID: TF_OsC194068_1
ctgcctcatggaggttagatcaggctgcttcttccatctatgtttagatcagctgttgcagtgagccagttagctacgacgacgacggtgtggatggatcgtggcttcaacgagatgatcttgagcgagagcgtgtggaatggcggcggcggcggcggagatggagatggtggggcggtggtgctgccgccggaggtgggtggtgtcaatgcggtggacgggagcggcatgacgatgctggagaggctggtgctcgacgaggccctggcggcggcgatactcgagctgcagggcatccaggcgccggggtgcggcgggggcggcggcaaggtggcggtggtgccgccgccgacggccggtgacggcggcgtcgaggcggcggtcgccttcgcggcgatggcgacggggacgcctgcctacgctgacgttgacgcggatgtcctgcagcgacagcggcagcatcaccatcgccaccagggcgcgatggggatggctgccgagtacgacgtcgcaccagcaacaccggctgtcacgttgagcgctgtaccaccaccaccaccaccacctgcgttcgcgaccgcagccgcctccgttgacggcggcggcgccatggacgcgacggtcttctccggcatcggcaacgacgacgtcgtcgacgcggtgagcgccacggtggcgatgactactgccactgcaacgaccagccagtgcgaacgagtcagaggaggcggcggcggcggcggatgtggacgtaagcaacgccggccgggaagaaagcggaaggccgccgagccaaccgccgccgccgccgcggcggacatgtcgtcgcaggacaaccctctctgcagcctcctggcgtcgaacaccgccggcgccgacggcggcatccagatcgcgttcagcacgagcgccccggcgtcgaagcgggcgaagccgtcgctgagcagcagctcgtcgagcatcagcttcgacggcaggggccccggcggcaactgcggcggcggcggcggcgacgacccactgtacgagcccgacacggaggcgctggcgcaggtgaaggagatgatctaccgcgcggcggcgatgcgccccgtgaccctcggcgccgaggacgccggcgagcgcccccgccgccgcaacgtgcgcatctcctccgacccgcagacggtggcggcgcggcagcggcgggagcgcatcagcgagcgcctgcgcgtcctgcagaagctcgtccccggcggcgccaagatggacacggcctccatgctcgacgaggccgccaactacctccgcttcctcaagtcccagatcagggagctgcaaaccctagaccgccggaactacccgaacgccgccatgtccatcaacaccgccgccgccaccaccatggcgacatccagttcaccaacctacaacaacagcaacgccgccatgccagccttcgccttcccggaaaccctaggatgcggaggaggaggagtcgagcagctgatctaatccatttagctagatagattggagacgacgacgacgacgacgacatggaagccatgaaggcgcatggcggcatgcatgccaagcactgttgccaatgtgttgtcccatgtgagaccatcatatgatagattcatcattgttaggcatggtgattaactagctacgatcatatcgatggaatcatcatgcatgtcatggaccctattagctagcttttttttttctcttctcttttttcttcttcttctccttgtcgtcataatttagttctgatcagtttgatgatcatgtatgcttgcatgtccagcctacgtgctttattttcgagctaaaaaaaaaaaaaaaaa

SEQ ID NO: 21512 - DNA, 1525 bp, Oryza sativa
  Clone ID: TF_OsC255497_1
tgtctccgattgcatcacatccttgacagctgctggactgtcatctttaactacagattccttgagaatttcctcgtcgcagctgctggaggcaggttgttgagaagactttgcacggggaagaagacgacgacgaccactgctgctgctgctgctggaattatgccctgtggccaacaagctgacatccctcttctcgttgagaccctgcaggatgccagccacggcatccatggcactgcaccccgacgacgaccccagcactatcttcagatgaagctcttgacacttgttcggtgaactgccctgatctgccgctgatctgctcgtgttgacctcaatcttggcaagtagcagcaagctcgcgatctcccccaccttctagaaccttctagaaccgccgaatgccgctccaccaccaccgccaccaccaccactccgccgccgtcgccgtcgccgtagccgacgacgacgacgaggccaagccgcgccgcccctactccaccttcgcctccccgcgcgcgcccacctccgccttctccgccgccttctcaacccaccgcctcctcgtcctcttctccgtcgcctgcctcctcgtcgccgcggcctccctcgccttcgccttctccgcccgcgccgcgaccctgcagccgccgcccctcgccgccgtggccgaagccaccgccaaggtcgccttccgctgcggccgcgccgaggacaccctccgcgccttcctcgcctcctcctcggggaactactcctccgcggcggaggggagggagagggagaaggtgctcgccgtcgtcggggtgcacacggagatcggatccgccgcctgcagctgctgtgattcagatagcttcctgttcttctcctccagctcagctatcctcgccttgaggacgttcacgtagtcctttgctctcatcagcactgatgctttgtccttcttggtggcgggtgggagcacgtccctgagagccttgaagctatcgttgagcttctcccggcgcttgcgctccgacaagacgtgctgcagctgcagctgctggttctcgccgccgccgccgccggcggtggccgctggcgaagcccgcgcggccatctccatgatctggtagtactgcgcgagcctcgccgcgtggatctttgacagcaccgatatggccttcttgaacgccctctgtccaccgccgccgccggtggcggtggtcgccgcccctggccgccggaggagatgcttcttcgggcccaggtaccgggagtacggccggaacgcggtggcggcggcggcggcgccatggccgccgctgctccgccgtgctgcttgtcccggccgtggtagtagtatctgcgacgacacctccgttgtctggtggtggcaagaggcggcggcggcggcgagcatgagcgacgagttgtcgtcgcggctcgtcgtcgtcgtcgtcgtcccggcggagaaggagcggaaggaggacgacgacggcgacggcggcgtggcgtactgatgatcgtgctcctccat

SEQ ID NO: 21513 - DNA, 716 bp, Oryza sativa
  Clone ID: TF_OsC217180_1
acgacaaccacctcgcttgccattctggactgcgggtgagatcgatggtgacggacggggagtgctcggcggcggcggtgaggaagggtgggtcgccggcggtgcggagccacagcgaggcggagcggaagcggcggcagcgcatcaacgcccacctcgccacgctccgcaccctcgtcccctccgcctcccggatggacaaggcggcgctgctgggggaggtggtgcggcacgtgcgggagctgcggtgcagggcggacgacgccacggagggcgccgacgtcgtcgtccccggggaaggcgacgaggtcggcgtcgaggacgaggacgacgacgagggcgagcgcgacgaggggtgttatgtcgtcggcggcggcgacaggcggtggcggcggcgcgtcagggcgtgggtgtgctgcgccgacaggccggggctcatgtccgacctgggccgcgccgtgcgctccgtcagcgcgcgccccgtgcgcgccgaggtcgccaccgtcggcgggaggacgcgcagcgtcctggagctcgacgtcgtcgtcgcctccgacgccgccgacaacgacagggccgtcgcgctctccgccctccgcgccgccctccgcaccgtgcttctcaaccgcgaggagctcctcgccgccgccgccgccgccgccaccgacggctacaagcggccacgcttctcgccgaggtgtagcagcctaacctaa

SEQ ID NO: 21514 - DNA, 2147 bp, Oryza sativa
  Clone ID: TF_OsC2385_1
gggcggccgccgcgacgcgtcaggcgggggccgccccccgcgccctggtgccagcccgtcgccgccgtacatccccgaggtcaccagtggtcgctccccttcgccgcgcgcgccgtggccgtcgcggccaccggccggcatgggactccacggcaatcagcggaggcacgacttcctctcgccgtacgacgccgccgccaccgccacggactactcgccgctcccgcgccacccggactccaagccctcggcgccggcgccgccgcccgctcaagatttcttcctcaagacacacgacttcctgccgcaggtagagaagagagccgaccagacaccaccgccgccgccgccgccgccgccccacgccgcggtcaccgccgagaagcagctgctccaccagcacgcgttggccgccgccggcgcgttcaccatcaaccacgccgtggccgcggccgccaccgccgtcaagcaggagccgcccttcgcgccgtggtgccagcccgtcgccgccgtagatccccgaggtcaccagtggtcgctccccttcgccgcgcgcgccgtcgccgtcgcctcctccaggccgcagcagcagcagcagcagccaccgccgccggagaggaagggtggcggtggattcatggacgccggctccagatccagtggcggcgcgggcttcgacgacgacgacggccatgccgcgcgccgcgaggtctcctcctcgctgaaagagctcacggtcagggtggaagggaaaggtgggagctgcagcggcagcgctggcacggatcagatgccgaacacgccgcgctcgaagcactccgccaccgagcagcgcaggcgcagcaaaatcaacgacagatttcaacttcttagagacttattgcctcataatgatcaaaagagagacaaagcatcatttctcttagaggttattgaatacatacggtttttacaagagaaagtacaaaagtatgaggtttcatacccggagtggaaccaagaaaatgcaaaggttgtgccatggacaaacatctatttccgttcttcctggaaaaatgcgcagaacaaaggccaagttcctgcagatcattcacctgaccctccatccccttttaaagagctctctgatccggcatctaatagtcaagcaatgggccgtcagcttagggttgggtgatggcgctgaagaacatcggcaagcctcaaagcgacacaaatcagataacagctgatggtttgctcctgaaaagcccagatattcaaccattttgtggtcctaactgtgtacggggagccccaaggttttatgtatattatgtttacctgtgacgtatcgagtaaactgcgacaagttaaataattctgaccttgccatcgatgagggaacaatcagtctatcaagccaatattcccaagagttgcttaacaagttgaatcatgccctggaaaactcgggtatagatttgtcccaagccagcatctccgtgcaaataaatcttggcaagagggctatgaagagatctactcctgctgcaacctccacttctaaggtaggatttatgtctcgtattgacactaagagccactacattatgtttgtggtaattgaaattggagctggcaatggatgttatacatggagctcactgatccggcatctaatagtcaagcaatgggccgtcagcttaggttgggtgatggcgctgaagaacatcgacaagcctcaaagcgacacaaatcagataacagctgatggtttgctcctgaaaaccccagatattcaaccattttttgctcctaactgtgtacggggagccccaaggttttatgtatattaagtttacctgtggcgtctcggcaaaacaaggccttgatgtattctttcatttaatcacttcgccgttctagcccctagggaaaaaaggaagcttccattgcagattgtgaagctgcttttgtccatatgcttccattcatatgagaagtttctccccccctctgacagaatgtcttttgtaacataattcagaaatgagctatccaaagttccatcagttccccttgtgatgtgtaatgtgttatttgtccctgaagattgaagttacccaagaccaacctgtaatctgatgatggggtatttgcagtcc

SEQ ID NO: 21515 - DNA, 1965 bp, Oryza sativa
  Clone ID: TF_OsC252614_1
atgcccggctcccgagaaatgtcaatcattagtggaggtatgtggtccgacggcaacgacttcgccgagctgctgtgggagaacggccaggcggtggtgcacgggaggaagaagcacccgcagccggccttcccgccgttcggcttcttcggtggcaccggcggtggcggcggcgggagcagtattagggcccaggagcggcagccttgcggcatcgatgcgtccgccaaggcggggggcggctgcagcgccgaggtcatcgctccgtcggtgcacggctgcggtgctgggttcggcgccaccatgcgcgacaacggtgatctcgacaccgttcggaggatccattaccccacctttgtcgatgaagacgccgtcgcccctccggctcccgcggtgtcggacgaacacatcatctccatgggaacggggcagtgcgttccggcagtggtggtagcaacagcgatgcagccctagcaagcctcaccgccggcccacttcccccatggcgccatcggtttcgggtacgggatgggtgtcatcgccatgagcaggaatcccgcccttcagatgccacccgtcccgggggctcccaccacccgagccgagccgcagccgcagccacagctcgccgcaggcaagctgggcacaagcaccatgccaatgtttggggttcctgtgcaaacaattccttcgtcagcgtctagtgtaccaccatttgcatctttggctggtcttcctgtgaggccgagcggggtccctcaagtatcaggcgccatggctaacatgagtgcaagaccagcaacaggggttagcgaatcaacagcagcaatgtctgaacaaggaagctatacagggagcaaatccaggtgattcacaaatgcagatcatcatgcaggcgcgtacacagaattcgctcatatggtcccgggcgtaaaccagaaccactagatgttcagtgactggccaggccgagccaagcctgtccacaaaaccgaggcgaggaaggcacctgaggccacggtcgcgacatcgtcggtgtgctccggcaacggagctgggagtgacgagctgtggcgccagcagaagcggaagtgccaggcccaggcagagtgctcagctagccaagacgatgatcttgacgatgaacctggagtattgagaaaatctggaaccaggagcacgaaacgcagccgcacagctgaggttcacaatttatcagaaaggaggagaagggacaggatcaatgaaaagatgcgcgctctgcaagaactcattcccaactgcaacaaggcatgctatgttttgcagattgataaagcctcgatgctggatgaagctatagagtacctcaaaacccttcagcttcaagtacagatgatgtccatgggaactgggctgtgcattcctccaatgctattaccaacagccatgcagcacttgcaaattccaccgatggctcatttccctcatctcggcatgggattggggtacgggatgggcgtcttcgacatgagcaacactggagcacttcagatgccacccatgcctggtgctcactttccctgcccaatgatcccaggtgcgtcaccacaaggtcttgggatccctggcacaagcaccatgccaatgtttggggttcctgggcaaacaattccttcgtcagcgtctagtgtaccaccatttgcatctttggctggtcttcctgttaggccaagcggggtccctcaagtatcaggcgccatggctaacatggtgcaagaccagcaacaaggcatagcgaatcaacagcagcaatgtctgaacaaggaagctatacagggagcaaatccaggtgattcacaaatgcagatcatcatgcagaatgttcctgtcctaaaaagatcaatggctgaggaatttcatatggtagaagatgctaccaggttacaagctgtaattcttgacttccagtgcagtttcctatga

SEQ ID NO: 21516 - DNA, 2097 bp, Oryza sativa
  Clone ID: TF_OsC101165_1
gcacgaggcttagctagtactaatcatcattagtgtatagctaagctagctccattatcttgcgcttcttggttttgtctgggaactattgtataggtctatatcgatctccatggatgaggtgtggtgcagcctggacagcatgccggccgacatcgccgccggcatccaccagccgccgccgcccgacctccacgacccctccttctggccggctttcgccgactgtgctgcgagcttcatcgccggcggcggcggcgacaatgcgtgcttcgacgagctcatggcgggagggtcgtcgggtgacactaggatggtggccatggacgacggcgacgacgggagtggcttcttggtgggggacgccgaggccgagcacctgatgctgtcgtcctcgtcgccgtcgtcgctctcctcgggccgctccctctccatcgacagcgccggctccatgtcctccttctcgctcgacgccgccgcggcgctggcgatgtcgaccctcgccgtcccgcacccgtacccgccgcccgtcgcgcacggcatgttcgcctccggcgacggtggcggcggcggcggcggcgcagtcgacgaccacgaggacgccatcatgcgtgccatgatggccgtcatctcctccgcctcggcctccccctcctcctcgggcggctccgcctcctcgcccaccccgttcagccgggacagcggcgcgcaccaccagcctgcaggtcagccagccatggcggcgccgcagcagccgcgtggagggaacggcggccacgtggtggtgaagagcagcagcagcagcggcggcctcgccgtgccgatggatcagaagcccggcggcggcgggcggggacggcagcaggaggaggcggcggcggcgagcgccaccaacagcagccagctctaccacatgatgtcggagaggaagaggagggagaagctcaacgacagcttccacacgctcagatcactcctcccaccttgctccaagctttacacagtatttgagtggttaccaggaaacaacctgtttcatggaaacggaagtgacaacaaggacaagacgacggtgctgatcaacgcggccaagtacctcaagtcgctggagacggagatcacggagctggaagggacgaacacgaagctggagaagcacatcgccggcggcggcggcgcggcggacgccgccatgagggctcgccgggcgcagcagagggccaaggtgcagatcagcaaggcggcggactcgcagtcgcagcagctggtgagcctgacggtgatggtgatggtggagtgcgacgtggtggagctggtgctccacatcctggaatgcctcaggtggatgaaggagatcagcgtgctgtccgtctacgccgacacctactcgccgcagcttcttctcaaggccatcgccaacatcaagctccagatcgtgggaggagattggaacgaggcgtcgttccacgaggcgatgacgaaggcggcgaacgacgcgaccatttcctgcgccccgctcgcgatcacggcagcacagtgattgctgattagtgagtgattagcagcgagcggcggcggtggcgacctaccggttaattcaatccatcctcatcgtcctcgcgcgcgtgcagtcatggttgaacgttgaacccagtaaaaaaaatatttatgtatggagggcgatgggttcgctacgtcataaccgatctcaatagttggaggaggaaaacgaggacaattcaaatacttcgagagtggggaagaatattgttagatatatattagggtttggttattcattcctttttccgtcttaaaatataataagttttgatgatgtataaacatgtataaatatatagctaaaagttattatattttaggacggtgatagtaattacgtagcgtatttttcaggtgtgccctagttgcagccgcaagctaggttgcagacgatggtgctttagtagcgctagcctagctagtataggtatatgtatatgtatatctctatgtatatacatgcatggtggtggttttgagtgattgttaaaaaaaaaaaaaaaaaaactcgagactagttctctctctctctct

SEQ ID NO: 21517 - DNA, 1310 bp, Oryza sativa
  Clone ID: TF_OsC51267_1
aactagtggatccccgggctgcaggcaatgaacctctccaccccaccccgcgacgcgacgcgacgagccgtacaccgaccgccccgcgccgctgctgccggagccggagagagaagctgaagccgaagcagaggcagccgcagcggcaaaactcaaaagacgtcgtcaaaagctctgccgcgcttgcagctttctcgggctcaaggaaaagccatcacaaaaccagagacacacagagagagagagagagagagagagagagagagactgaagaaaggtggcaactcctgcagcagctgcagcagcaagcgctagtgtttgtggtttgctggtgctgtggcgaggcgatgatggatgggcgaatggggctggatcgctgcgagagcgaggttggcgtgcggtgtccgcgtttgattcgatcggatgctggtggtgatttggcggcgctggggtcgtcggagtcggagcagcccaccaggccggcgcggccgcgcggcaagaggagccgcgccgccgaggtgcacaacctctccgagaagaggaggaggagcagaatcaatgagaagatgaaggccctgcagagcctcattcccaactccagcaagacggacaaagcctccatgcttgacgatgccatcgagtacctgaagcagcttcagctccaggtccagatgttgtccatgaggaatggtctatatctgcccccagtgaacttatctggggcacctgagcatctgccgatcccgcaaatgagtgctgcacttgaccagaatagtgccaaagcatcagatccttcagttgttttgcagccggtgaaccagacttcaggagcacttcttccatttgagctggcaagccaacataaacctctattcttaccaggtgttcctaatgcaaccgctctggagcctcggttccttgtagagtcttcgcgttccaatcttcaatccttacggttcactgaacccgctgagatgatctatcctgatgagatgatgttaaagcaccgcctgacttcagctagtgagagcacaattgtgccaggaaccgatgagaagtcggttaggcagaacacatacatgatgaatgctgatcgttttgatagatatgcactcagcaaagaccagttgcagcacattatgccgaaaaacacagaaagtgtacttgatatgccacacttgcaaagaatttaagctgaggattcagtttcttcagttggacagctgacgatccagcttccactcttggacaggttgcaaaccagtgacaccaaagttagggtcgagggtagaatcaaagtaaacccatga

SEQ ID NO: 21518 - DNA, 1125 bp, Oryza sativa
  Clone ID: TF_OsC21348_1
atgtccggtaccccggcggacggcggcggcggaggcggcggaggcggcggagggagcggggacgactggttcctcgactgcggcatcctcgaggacctcccggcggccgcgtgcggggccttcccgtgggacgcatccccgtcctgctccaacccgagtgtggaagtaagcagctatgtgaacaccacctcttatgtcctcaaggaacctggcagtaataaacgtgtaaggtcagggtcttgtggtaggccaacatcaaaagcttccagggaaaagatcagaagagataagatgaatgataggtttcttgaattggggactactttggagcctgggaagccagtaaaatctgacaaagctgctatcctaagtgatgccactcgcatggtaattcaacttcgtgctgaagcgaagcagctaaaggatactaacgagagtcttgaagataagattaaagaactgaaggcagagaaggacgagcttcgtgatgagaagcagaagctgaaagtagagaaggagacattagagcagcaggtgaagattctgactgcaactccagcctacatgcctcaccccacattgatgccagcaccgtacccacaagcaccacttgcccccttccaccatgcccaggggcaagccgcggggcagaagctgatgatgccttttgttggatacccggggtacccgatgtggcagttcatgccgccttccgaagtcgacacctccaaggacagcgaagcgtgcccgcctgtcgcgtaatgcttcatcggttgcgttatgtgaattaatcgtaacctgaaaccgcttagttgctcaatccattggttgggcatcgtcgtccctgattcacattcactattgttcttgtgttagtagttcgtttttgtatggaagtaagctgacatttgtggcgctctatagaggctactgcccccttttaatgtacaatacaatttttccggagaaaggaagaatgctcattcttgttctctgcagaaaaaaagtgacaaattcagtagcatcatatacaccatttcttatcacccaaaaaaaaaaaaaaatgtatgctgttctggggattgttccctctcgctccaaatcttgttaaaaaaaaaaaaaaaa

SEQ ID NO: 21519 - DNA, 365 bp, Oryza sativa
  Clone ID: TF_1086541
atgtccgagagaaggcgccgggagaagctgaatgagatgttcctcattctcaagtcactggtcccgtccatcgacaaggtggacaaagcatccatccttgcagagccgataccctacctcaaggacctggagaggaggttccaagagctcgagtccgggaagaagatgtctagcccgcccaagaggaacccgtgctcagagacgatcatcggcggtgccgcccgcgccggtcccggagctgttaaagggcaccaccactgggtgctctccgagtcccaggagggcaccccaagcgacgtgcgtgtgatcatcatggacaaggatgagctgcacctggaggtgcactgccggtggaaggagctgat

SEQ ID NO: 21520 - DNA, 1150 bp, Oryza sativa
  Clone ID: TF_OsC308912_1
cccgggctgcaggaattcggcccctcggtttgattggttagggagcaaggcgatggatgctaatggcggcaatgggtttggagtagagagcaacgcttcggctgtccatggtggcatggcgatggcttggcaatggcatggcggccagatgagcggcggcagctcgtgcgctgcggcgccgccgccggtgcaacagccggcgatggattctctcgcgtggtcgtcgacggtctcgccgagcaccggcgctgccacggcggcgagcggcgccggcttcttgctgccaccggcagccgtgcgcggcggcttcggcagtttcccggtcaactccggcggcatcgtcgagccggccggtgactgctcgtcggagtccaagaagaggagatcagacgagattgctggaacggatcacgcgaacgcatcgaacgcgcttgccgattctgggaacgagaccgagtgtagcaaagatgtcaacggcgaagtgatcggcccgccggcgacggcggcggccggcggcaagtcgaaagggaagggagccaaggacgccggcgaggcgcagaaggaagggtacagccatgtcagagctcggaaggggcaggcaaccaacaaccacagcttagcagagaggctgagaagggagaagatcagcgagaggatgaagctcctgcaagaccttgtccctggctgcagcaaagtcaccgggaaggcgttgatgctcgacgagatcatcaactatgttcagtccctgcaaagacaagtcgagtttctgtcgatgaagctctcggcagtcaacccaagaatcgatctcgacattgaatcacttgtcaacaattccaaggatgttcttcgttttcccgggcagccttcctctgctcccatgggattctccttctccacggagatgatgccggggctacaattatcacgaccgggcatccttcagggaggtgtccatggcatgatcaatccagatgtgttcaccagcctcatgcagaagcagcagcaaaatgacaagggagcattcagagagcctcagatgcatcagactttggatggatcattccgtaacaccgcacaaatgccgtatccacaggtcatgagttcagaagagctaagcatcaggcaagatcaagatgggtttcacatgtga

SEQ ID NO: 21521 - DNA, 1205 bp, Oryza sativa
  Clone ID: TF_OsC6539_1
gcacgaggcaaaagtctcatccccaaatccccaattcttccccgacctctcgctcgcggaggaggagcgagaatccccgaaccctaggcccgatctcccgcacccgccgcgggcgatggacggaggcggagaccccgttgacgagttcctcatcggcggcggcggcgaggacggcgacctcggcgtcttctgcgacggtgtgccgacgctgccctgcgatggaggacttgggattgatgatgtcagtggagatacttgttgccttgaccaatctgttttagggaaaagaggtagagatgaatcatcatcatctggtccaaagtccaaagcttgccgtgagaaaattcggagggatagactgaatgacaggttccttgagttatcttccgttatcaatcctgacaagcaagctaagttggataaagcaaatatcttgagtgatgcagctcgtctgttggcagaactcagaggcgaggcagaaaagcttaaagaatctaatgagaagctacgagaaacaatcaaggaccttaaggtggagaagaatgaactccgtgatgagaaagttactctgaaggcagagaaggagaggctggaacagcaagttaaagcattgagtgttgctcctacaggatttgttcctcatctccctcatccagctgcattccatcccgctgcattccctccatttataccaccttatcaagctctgggcaacaaaaatgctcctacgcccgcagcattccaagggatggcaatgtggcagtggttgcctccaactgctgtggacacaactcaagatccaaagctttggccaccaaatgcttaattaggtgcagactagctatgctgctattcatccattggcagatcaaaatgtgttcggtcttcctggagagtaaaatagtccgcgatgctgtccattacgtggtaaactgttcttttattggagttctgtttttaactcgtcctattgaggggcgatgcctgtaattaatctggatcgtaaccctcttgcctggtgaatgctccacaaactctcatgtccctcgcatgagtttgttcaagtgtggaagttgtgactgtgctattattttagcattggcttggcagtacttgttctgtttctagcaagagtttcgcatgtgagcacatgcatagcaatatagtatgttctaaattagttcattacaaaaaaaaaaaaaaaa

SEQ ID NO: 21522 - DNA, 1344 bp, Oryza sativa; identical to SEQ ID NO: 11968
  Clone ID: TF_OsC348863_1

SEQ ID NO: 21523 - DNA, 1422 bp, Oryza sativa; identical to SEQ ID NO: 11972
  Clone ID: TF_OsC359_7148

SEQ ID NO: 21524 - DNA, 1995 bp, Oryza sativa
  Clone ID: TF_OsC2018_9
atggcatctgctcctccagttcaggaagaacccctacagccagggacgaaccacttcaggagcctgcttgctgctgctgtgaggagcatcagttggagttatgcgatcttttggtccatttcaaccagttgcccaggagttttgacttggaatgatgggttctacaacggcgtggtaaagacgaggaagatatccaactcagcagacctcacggctggtcagctcgtcgtgcagagaagcgagcaactgagggagctttactactctctcctgtccggcgagtgcgaccaccgggcgaggaggcccattgccgcgctatcgccggaagatctcgcagacacagaatggtactacgtcgtctgcatgacctactccttccaacccggccaagggctgccaggcaaaagctatgcaagcaatgcatctgtttggctgcgcaatgctcagtctgcagatagcaaaacatttctacgctcgctattagctaagacaatcatctgcatccccttcacgagtggcgtgcttgagctggggaccactgatccgactttcattatagcatatgcctgccacaacatggaacaggttttggaggacccaaagttggtaaaccgaatcgttgcatatttccaggagcttcagtttccgatatgcttagaggtactaatgagcactagcccttctccgaacgaaacggaagatgccgacatcgtgtccgaaggcctcatcactcacaacgccatcgaagaggggcagatggttgtctctgatgagtgcgtgtccaacgccaaccgcgatccaatcaccatggagatcgacgagctctacagcatctacgaggacctggacctggacatggacctggacctggacaccgtgcgctttctcgaggataatggctggcctgtgaaccccagctcttttcaactggtcccggcgtcgtcaacggaggcggtggcggcggcggcggcggctaatgatgtcgacggtgttgcgaattctcaagtgtcgtgcttcatggcttggaagagcgcgaagtcaaacgagatggctgtgccggtcgtcaccggtatagagtcacagaagttgctgaagaaagttgtggactgtggtgcacggatgagcactggtcgtggtagtagagcagcgctaactcaagagagtggcatcaagaaccatgtcatatcagagagaaggcgccgagagaagctcaatgagatgttcctgattctgaagtcaatagtcccctccatccacaaggtggacaaagcatccatccttgaagaaacgattgcctacctcaaagtgttggagaaaagggtgaaagagttggagtccagcagcgagccatcacatcagcgcgcaaccgaaacaggacagcaaaggcgctgtgagatcaccgggaaggagctggtctctgagatcggtgtcagcggcggcggcgatgcagggagagaacaccaccacgtgaatgtcaccgtcacggacaaggtggttctcctggaggtgcagtgccgatggaaggagttggtgatgacacgagtgttcgacgcgatcaagagcctctgtcttgacgttctctccgtgcaggcgtcggcaccggatggtcttcttggactgaagatacaagctaagtttgcttgttctggttcagtggcacctgggatgatcagcgaagctctccagaaagctatcggtggctagacatttttaggttgggttttttttttaaaaaaagtatgcagttaatattttttttctttttactatatacgaaagtggaaggttccaaccctccacgcaatagccaaaaataataaaagcgacatcgtcttctagaaggaggccagagaatgtgtatggatgtaaatggaaaaatcggacagaatcacgaacagaggagatcagaaacacctggaattcagaaaaaatggtgagagttggcgaccaatttgagttgctgtactcctttgtgcccaataaaaaaaaaagaag

SEQ ID NO: 21525 - DNA, 1320 bp, Oryza sativa
  unsure (1)..(1320): unsure at all n locations
  Clone ID: TF_OsC91_2671
ctacaagcatcctcctccatagccggcgttcttgaacagctcctgctttatcatgtccgcgctcatcctctccctctgcatctcggagcaggaggcgtgcatgccgaagtcgttgaagcagctgacgacgcactgctggatgtcgaggcccagcgtctccagcgtgctcaccgtggacaggagcagccctggcttggccgcgcagtagatctccacccgcgtgtcgcccccctccttcctctccacatcgaactgcacctcacaaactccattaatcccatcatcctcctcattatatatccagcaatggatggatgcagctaccttgggtgtgttcctggccagcatctcgttggggttgagctccctgaagacgctgagcaccccgggcgtctcctgctgctgctgctcctcgatctcctcctgcagctgcctgatcctctccagcaactccttcatgtagtcgatcgtgtccccaagaatcgatgtcctgtccatcttgctgatcttgggcaccacggaccggagcatggagaggcggtcgttcagccgcttgcgccgccgccgctccgccatcaggttcttcgacggcatcccttccaccctcttcttcttcgacgccggcgccgccgccgctgcgctgaacccgccctccgcctgcagcccgggctccaccttgcacaccccgagcccgccgccatccaccaccatactcgccttgggctcaaccacatcaagaaaccccatgtcgccgccgccgccgtactcgccgccgccgccgccggcattgggcccgaatgcggcggcggcgttgccgtagacctcgctgaggcagtcgaacccggccgccggcgccggcggcggctgctcgtaggaggccgtgaaggtggggaggacgctgaccgtggtggtggactggtgccgttcttggaagccgtccatggcggcgcacgccggcgagaagaagtcccccatggcattgtactcccacgcgtccctcctcagcgagaagagctcctccaagaacgcctgctcatccagctccatctccttcctctcttcttccctttgctttgcttcagctgcagctatagcttagctaagattgcttgtgtgtgtgagagagagagagagcacagcagcacagcttagctagctgcacaggtggttattggtgtgaaatggaggggatggagaaggtgagaggacaggggggggattaatatatggagnagtttgtaggagacaattattccctgtaataaatgatgaacagtggtattaaggatttgattagggagggggggtgcatatgcattt

SEQ ID NO: 21526 - DNA, 2449 bp, Oryza sativa
  Clone ID: TF_OsC38156_1
gcacgaatgactgagatattgtctcctacaaaaaccatcctacttgcagattgcagcagtaaaaaggcccacgcttttaacccaagaaagggtggtggatgtaaagatgcaaaggggatcagcttaccttgccaaccctgtgattctaaagtgttttcacatcctcttgcaaacagaaacagaaatggtctagtaataaattgtgttctacggcagctgcagcagcagcagcagcaactgcacaaaataaagtcagcagcaaggcagcaattcattgttttttttttttttttggcttgcaaagcttttgctttgttttaggtgcttcttttccactcctttactgttcccccacttttccttgctttgtcacgcacacgaaaagctcctgcctttaccttatctccgctcgccttccctcacccccgtcgtagtgggatttggtggctgctcgcctctcgcgtttcttttgctggattggggcgttcttgggagctcgggaattcgggtggtttggttgggtttcgtggagaattgcggcagatctttgagatgaactgcgggccgcccgaccagttgccgccggcgacggcgccgtcgtgcttcctcaacctcaactgggaccagtccatggacgcggcggcgggagggcacctcgacccggcgctcagctccatggtgtcctcgccggcgtccaactcgacgggcgctctccacgggatctcgccgcagccgcactacggtggcgggacgccgctcagctcgccccccaagctcaacctgtccatgatggggcagttccaccactacgccgcgccgccgcaggtgggcggcggcggaggcggaggcgggggcctgccaatcctcgagaacctgatgcccatgggccacctcgaccagttcctcgccgaccctggcttcgccgagcgcgccgcgaggctctccggcttcgacgcccgcggcggcggcggaggaggaggctacggcggcgccggcccggcgcaattcggcctccctgacgccggcgcggccggcgcatcgaaggagatggagctcgggaacacccgggacgagtcgtcggtgtctgatccggcgcccggcggcgccgagattccgcccaagggggcttccgacggcaatgcacggaagcggaaggcctccgggaagggcaaaggcaaggacagccccatgtccacctccgccgccaaggaggattccagcggcaagcgttgcaaatcgacggaggagagcaatgcggccgccgaggagaattccggcaaggggaaggccgcgcagagcaacagcgagaatggcggcggcaagaagcaagggaaggacagctcgtcgaagccccccgagccgcccaaggactacatccatgtccgcgcccggcgcggcgaggcgacggacagccacagcctcgccgagagggtgagaagagagaagataagccagaggatgaagctgctgcaggatctcgtgccgggttgtaacaaggtggttggaaaggctgtcatgctcgatgaaatcataaactatgtgcagtcgttgcaacggcaagtcgagtttttgtccatgaagttggccactgtgaatccccagctggacttcaacaatttgcctaacctccttgctaaagatatgcaccagtcatgcagcccgttacagagctcacattttccactagagacctcaggtgcgccgctgccctacattaaccagcctcagcaagggaaccctctcggttgtggcctgacgaacggcatggacaaccagggttctatgcacccattggacccggcattttgccggccaatgggctcgcaccatcctttcctcaatggggttagcgatgcggcttctcaggttggtgctttctggcaagatgatctccaaagtgttgttcagatggatatggggcaaagtcaggagatcgccacctcttccaatagctacaatggatcgttgcaaacagtccacatgaaaatggagctttgacatgaccaaataaaggttcgatccaaagctctgacgcccattgtacatacagagaagtcagcttgccgcggcagcactctgagattcaaccctaacaatgttgggccctagcagtgttttagcttctaatttcccatcttggtgtaatgattctttgaacaaaaatgaaacgcaccatgtacggtagtcgggtgtagtatatatatgtatgctacaagatcgtacataagtcgggtgcagtatatgatgcttcattcagacccttttaccctctcaagcagagagggacgacgtgtaatatcattatttgtattctcattatatttgtagctgatatatatctttaagatccttcttcctgtccatggatcgatctccttaagctgaaactatcccctttttttccccaaaaaaaaaaggggggctcgtgccgaattcctcagcccgggga

SEQ ID NO: 21527 - DNA, 1037 bp, Oryza sativa
  Clone ID: TF_OsC156944_1
agcgttcaatcgatcgatcgatccccgcggctcggtttgtgttgcgttcttccagatcgatttgatagatgggtgctcatggagaccaccgccaccaccaccaccatcaagaagccggggtgctcgtcgacgaggaggaggaggaggtgatcgagcaggcttgcggtggcccgacgagcggcgtggtggagcaagaggtggggggagacggtggtggagtgtgccaagatgctgccggcatggtgttcgaggcgaccagtagcgtcgggagcgtgagcgccaccatggggccgccgccgatcatgtgctggccaccgccggcgcagcctgtccacggtgcaatccaccaccaccacaacctaggcggcggcggcggccagcagagcccgttcttcccgctgctgccgcccctgccccctcagcccccgccgccacccccgttcttcgccgacttctacgcgcggcgggcgctccagtacgcgtacgaccactccggcggcgcgtcgtcgtcgtccgacccgctcggcctcggcgggctctacatgggtcaccacggctcccacgtcgccggcatgatgatgccgccgcccttcgctccgtcgccgttcggcgacctcggccggatgaccgcgcaggagatcatggacgccaaggcgctggccgcgtccaagagccacagcgaggccgagcgccgccgccgcgagcggatcaacgcgcacctcgcccgcctccgcagcctcctccccaacacaaccaagacggacaaggcgtcgctgctcgcggaggtgatccagcacgtcaaggagctgaagcggcagacgtcggagatcacggaggaggcgtgcccgctccccaccgagtcggacgagctcaccgtcgacgcgtcgagcgacgaggacgggcgcctcgtcgtgcgcgcgtcgctctgctgcgacgaccgcaccgacctcctgccggacctcatccgcgcgctcaaggcgctccggctgcgcgcgctcaaggccgagatcaccacactcggcggccgcgtcaagaac

SEQ ID NO: 21528 - DNA, 1574 bp, Oryza sativa
  Clone ID: TF_OsC7742_1
acacgctcctcgctgctgctagtctcctccctcccatgcacgccgcccatggtggaggtggaaggcaaccagtaaccatcttgccaatctcgagttctcagcttgtggtcacaggtggagattggccacttcttgcctacctggagagggccctcatagcgccggcagctgtgctgtcccctcagggctacctgccgtccgctgccagaatgtgcacgacgccgcgctcgtggctgggatccggcttggacgtggaggaaatcgagtagtaccgtggtgtgctgctgcgtgcggaggccagagtgtcggttcacggcggcggcggcggtgtcggtggtggtatgaggtggcactgggtcatcgcgtcgacgtgcgcgcgcaccactgctgcttcgggcgccgtggaggggttctgggaccagaggccgtaccccgtgtcgtcaccgccggcggcgccgacgccagcagcgtccggcggtggtggcggccacgccaaggcggccgcgcggaggcggcggcggcggcccaaggtggtgaagaacaaggaggaggccgagagccagcggcgcaaccacatcgccgtggaacgcaaccggcggcggcagatgaacgagtacctcgccgtgctccgctccctcatgccgccatcctacgcgcagcggggtgaccaggcgtcgatcgtcgccggcgccatcaacttcgtcaaggagctggagcagctgctccagtcgctagaggcccagaagcgtcgcgccgagcacgcgccgccggcgccgccgttcgccgggttcttcacgttccctcagtactctaccacagttggtgacaacaatgcggccggctctggcgccgccgacggcgagggcggctgcggcgcgcggcccggcgcggccgacatcgaggtggccatggcggagagccacgcgaacgtgagggtgctcgcgccgcggcggccgaggcagctgctgaggatggtggtggcgctgcaatgcctcggcctcaccgtgctccacctcaacgtcaccaccaccgccgaccatttggcgctctactccttcagcctcaagatggaggatgaatgccggctttcgtcagtcgacgagatcgccggcgccgtcaatcagatgatgtcggagtctgaagatgaaaagagcctctcggatgaaataacagatacatcacacctaccatgggatcccttctggaccaggaaatgcaaatacccgagcggtgggcggagcgacaacgggtggcagagaacggaggggtggcgggcggtgggcggagcgagcgccgggcggagaagaggagcggcgggtggaagcgaagcgtcggcggggcggtgggtggagcagtggggtggcaggtggaagtggagcgtcggtggggcggtgggccgagcgacggcgggcaccaggggcggtggccgcagcgagaggagcggtgcacgacggcgggagataggagagacggccggcggacgagaggagcaccgcgcggtcggcctcccttcctctccctctgtcatccgcggtgaagagatggggtggaaaagagggcgctcagagcagtag

SEQ ID NO: 21529 - DNA, 1349 bp, Oryza sativa
  Clone ID: TF_OsC64413_1
tcaattagtttttttttttgcttttttttttgataaagaagggcaaagattgccactggcacttcatattataaggattattagtacatacactgggaattagcatcttagggaaggggggaaatgctatgtgcatttacagacacttgtagcatttatgtcagacagatactgattgagatacataacagcaatatggatgcaatctgttcatcatgtcaatattttcagctatctccagaaagacgaccctttgtgcaaagcctacattgaattccttatcatgtttctggtcattctaaattccatcagaggttggtggttgttcagccccagaatttggcagaacagtgctagctgacgctttcggtatctggttttgctgtgctacttgaggcccagaagcatatagtcctgagtagtggcgcaggcatgcacgcgagattcctgcgcaggggaattggtggcttgaagaggtgagcacaagggaccatcactggttccattcgagtagtcgtccacatgatctgaatgtacatttggggtgacttcagatactcgattgcttcatctaatatagatgccatgtcggtcttgttgcaatgaggtatgagttcttgcaatgcgcgcatcttctcgttgatccgatcccttcttctcctctctgacaggttatgaacttcagctgcacgagttctcctctttgatccatatcgccgcgacgacgatttggtctcttcggttgcctcgcattcagcatcctcactgcgactgtctgaatcttctctgcctttcctcttgtgggcactggcgctctcgctgggcaagccggaagcgccgaagttgctgccggagccgcccgacgacgacgtgccggcgccgtcgtgggtgctcgaccggcgcggccgctccggcggcaatgccgcgccggcgtcccggcagcgctgcgccgccgtctccgggatgtggttgctgccgcagaaggccgaacagatgtcgccggtccagctcgacccgatgccgctcctcatcggcggcctcgccgccgggggcggcaagtccggcggcggagcgtggtgagagctcggccccgccgccgcggccgccgggaacgcgtcgccggtgacgctgcgccagagctgcgtgtagaggtccttctccagcgcgtcgtcgagggtgtccgggaaccacgcggcggtctccgtgtcgtcgccggtgagcacgctggcgctctggccgcggccggaggaggagacgaccctcgcctgcgccgcctgcggctgcgccacgacgccgccgttgtgccatagcagctccaccagctcgttgtccgtgctgcaaatcgccat

SEQ ID NO: 21530 - DNA, 1197 bp, Oryza sativa
  Clone ID: TF_OsC547_362
atgggctctgctccgttcggtgacgccgtcgccggcggtgggctctatgagtaccaggggtatcacggtggcttcgccggcggccatggtctcggccaaccggccggccgagcgcccgcgttggacgacggtgaaactgaggggatggacgcatccgccgccgccgcagtcgccgccatggagatggcaaagaggaattgtggaggcggccgggaggagaaggcggcgatggcgctcaagagccacagcgaggcggagcggcggcggcgggagaggatcaacgcccacctcgccacgctccgcaccatggtgccctgcaccgacaagatggacaaggccgcgctgctggctgaggtggtgggccacgtcaagaagctgaagagcgccgcggcgcgcgtcggccggcgcgccaccgtcccgtccggcgccgacgaggtcgccgtcgacgaagcgtccgccaccggaggcggaggagaaggccccctcctcctcagggcgacgctgagctgcgacgaccgcgccgacctcttcgtggacgtcaagcgcgcgctgcagccgctcgggctggaggtggtcggctccgaggtcaccacgctgggcggccgcgtccgcctcgccttcctggtctcgtgcgggtctcgcggcggcgccgccgccgccgccatggcctcggtgcgccacgcgctccagtccgtgctcgacaaggccagctccggcttcgacttcgcgcccagggcggcgtcgctgctgggcagcaaacgccggaaggtctccacgttcgagtcatcgagctcctcgtcttgacaagtttcagagaaaattacgccaaagtcaaaaagatctgatcggttgcagtgatttttgcttctgataaattaatcgatcatggttgtaaaagaaagatacaaagctgaagtgagtttcttctttaatttctttctttctttctttttggcaagattaattactgaagtggcttctcaacattggttagcacttagcattttgctgctgcttatcttttcgaagagcgttgtgctccatgcatgattaattaccttgcatttgacatatatatatttgacattttcacatttcactgcaacttcagtttaactagtaactaggagctttgctccttcatgcatgatgcatgacatcaaaaaaaaaaaaaaaaaaaaaaaacccacgcgtccg

SEQ ID NO: 21531 - DNA, 1700 bp, Oryza sativa
  Clone ID: TF_OsC71941_1
ccatccatccagctagctgctaattggccagctcatacataatcagaaagaagaagaagagggtgctttgtaatatctgcaccatatctttatacacaaattaactattttaatttgttacggttatatcaaaatataatcatctcaaatagtaggtaccaaaagaatcacatcgccctacaggcagactatgattaagaaatatcctctcttaagagcctaatgatgactgttagcttcaagagttcagagagcttcactagctttgccaatgggagttttgcacttgggtctcttccctatgtacagattgtcattcttttccttgatcagtgtggcctaagcaggttagaactccattttcatgtggcctgcttgctgccaaccatggaagtttggtgctgaaaccccattctcctggctctgtccattctcaatatggaaaacactttggagatcatcctcccagaagttcctttgctgcaagtttgcgccggctgttccatcttgaaaagcatactgtgcagcatttgtagcctgagatagagccaggtccaactgattcagggtgcactggctttccatgctgttttgagcaaactgttggaaaacatctccttgttcggcaaaccgaaaagcagaattggagctttctaatgagaaaaccgagcttgctgaagggccgcatgcttggaacatatctttctgcagcagagtaggcaggttactgaaatcaagtggattcacagttgctagcttcatggacaggaactcaacttgccgttgaagcgattgcacgtagtttatgatctcatcaagcatgagtgccttgccaattaccttgttgcatcctggaaccaggtcctggagaaccttcatcctctggctgatcctctctcttctgaccctctcagcgaggctgtggctgtcagtggcttggcctcgcctcgcccggacatggacatagtccttgggtggctccaccggcttggcattcttccccttcccttgcttctgcccgccaccgccgccgtcctcgacggagctgtcgctcccggcctgctccgccttcggcttcaccgagctctccttctcgccattgcccgtcttgcacctcttgccatctgattccttctcttccccaaccggaggctccttgcctttgcccttggcggcggcggccgccgccgccgtggacttcctgttcttggcattggcggcggcgtccttcatcgccgacgaggccgggtcggacacggaggacgcctccctggagccacctccggcgaagtcgccgggagccggaggaggcatcccgaagagccccgcccccgcgccgccgtaccgctgcccaacaccgccgccgccgttgttgaagctggacagccgcgcggcgcgctccgcgaaccccgggtcgccgcagagcttgtcgaggccgcagtcgccgccgccgccgccgcctcccggcgccacgatggcgtccagcaccggcacgccgaagtcgagccggggggaggagctgaggaggctggaaatgtagtcgcccccgaccctgccgccgtccatcgccgccgccgtccaagaaacggcacggtgccccttctcttggctcctgtaggggggagagcttggggtggtcggcaatggcggaggaggaggtcaaagaggcggaggcggtgaaggtggaggttcagcccttt

SEQ ID NO: 21532 - DNA, 975 bp, Oryza sativa; identical to SEQ ID NO: 11988
  Clone ID: TF_OsC52485_2

SEQ ID NO: 21533 - DNA, 273 bp, Oryza sativa
  Clone ID: TF_rsicef_8683.y1.abd
ccttacccacggccacggcgacgacgaacgcgagcccgaagcggtccaaggtcgccgccggcgccggagacgacggcgacgccgacgccgacgcggcggaggagaagccggagccagccaaagactacatccatgtgagggcgaggcgggggcaagccaccgatagccatagcctcgccgagagggtgaggagggagaggataagcgagaggatgaagcttctgcagtcgctcgtgccaggctgcaacaagatcaccggcaaggctctcatgc

SEQ ID NO: 21534 - DNA, 1411 bp, Oryza sativa
  Clone ID: TF_OsC50284_1
agctccaacacgctcacccatgcaacccaacgcccgccaaatgcgcggcggcggcggcggcggcggcggcgggcaggacgacttcttcgaccagatgctgtccacgctgccggcggtgtggtccgagctcggctccggcaagcccgcctgggacctcacggccggcgccgtaggaggaggaggaggagcctccgatgaccactccgccgcggcgttcgacgactccgcgctcctcgcctcccgcctccgccagcaccagatcgacggtggaggcgacaagcccatcatgctccaactcagcgacctccaccgtcatcacggcctcgccgccggcgatgacagcggcggcgctgccgggttccttcccctgtcgctgttcgctgaccggtcgcaggacgacatcgacgccgccttcaagtcccccaatggcgctagaggtgaccatgcgctgtacaatgggttcggggccgccggaatgcatggcgccgccgccatgcagccgccgccgttcgggcagggaggatcaatgccggcgcagagcttcggtggcggagcggccgcgagcggcggcggcggcggcgggtcggcgtcggcggcagcggcggctggggcatcgtcgggcggaggggcggcggcgccgccgcggcagcggcagcgggcgaggagagggcaagccactgacccacacagcatcgccgaacgtgtataccactctcccaccacctttcccttctcgcccccattttttattgcctccatgccatgttgtctccggagggagaggatagctgagaggatgaaggcgttgcaggagctggtcccaaatgccaacaagaccgacaaggcatcgatgctcgacgagatcattgattatgtgaagttcctccagctccaagtcaaggttctcagcatgagcagattggggggagcttctgcagtcgcgcctctagtggctaacatgtcatcagagagtaatgggaatggcaatgccaccagcagcagcgggaacggcgaggcggccaatggcagcagcaacggcgacaacaatggtggcggcacactgcgggtgacggagcagcaggtggcgaagctgatggaggaggacatgggctccgccatgcagtacctgcaggggaaggggctatgcctgatgccgatctctctcgcaacggccatctcctccgccacctcctcgtcgctcctcccccgcactgggggaggcgctggagggtccctacatgaaggtggtaatggtacatcaccaccattggtgaatggcaccgccaccggatgtgacgacgccggagtattcttttctgttaaatttgtcgtggagctgtcgtttctcctgctgaatgaagactgtagaggtaaggaggaatcgaaattattggtccagaagggaccctga

SEQ ID NO: 21535 - DNA, 2696 bp, Oryza sativa
  Clone ID: TF_OsC366116_1
atggtttcaaaacggtgcagtgcatcgactgggaaccgtatcggccgatacagaatcaagcgtcgatacatactggttttgagttcatgtcaagctcgggttaagaattcaaaattattgccatacaaggatggagtccaaaatacagcaattgtatctattaattgggccgatttggtcagatcgcatcagctaggtcggtacgatacgtcatcggcctatcgatcgatcggctatcgtgttctaacttcattttattatttatccttgttggttgcagaatcaaaccaactatcacatgaacacacgcgcacacacgaacgtcgcctagtgctgaaatataaaagcgctcgacgacaaggtctcacatgccgcgcacgcgtctactcaagctcaacacaccaaccacttggcgataatactagtataatagttccacgtgacgcgacttacatcagcaaaagcacacgtgacacgttacacccgtgcgcgcgtaacgaccggtcgtcgtgctgcgcggctggcgcgcttcgtgtgtgtcgtactcgatcgtactacgtagtaaagcacggtagcagcgccgtaggttgtatatatataagcgcagagacgcgtgggagctggcgccacggcatgcatgcacagccatggagaacgacgacgacgtggagcatcccttctactacttcgtccacgacgacgcggccgccggcgtcgacgaccacgaggagttgctggcaagcctcggcttcctcctccctcctcctcctccgccgccgccgccaccgcagcctgatcagggaaggagcgccttcgcggcgtaccagagtaccgcggcgatggcgtcgtcgtcgtcgtcgtcggagtctctgagccggcggtaccactcctctgcgtcgaacgtccaccggagaatgcacaggttcctcaggagcatctatgacgacgccggggacgacgcgggggcaaccgcggaaatgcagccggcggagggcgagcagcagcaggcggcgccgagcggcggcagcgcgcggttccggcacatcatgcgggagcggctgcgtcgggagcgcctcagccagggctacgccgacctccaagccatcctcccaaccggcgcatcatcatcaaaagtactcgtaaaatcactcatcaggaactacatgagcggtggcaagaacaccatcgtcgccgcggcggcaaactacatccgggagctggaggggaggaaggggtggctctgcgcgcagaacgagttgctggagcggacgacgccgaagcccggcgccggcatggtggtgaaggtgcgcgccgagagtgagctcggctcgacggtggacgtgttcgaggcggtgctccggcggctcaaggccatggacgagctgcaggtgacggcgatccagtcgtggttcggcgccggcgggatgtggatggacgtcgcggtggagtccaagagacgtgccgcgtgtacgtacgccccacctcgctggaaactgctgagagagaccagacgagtcaaacgaggtcgcagcagtagaattgtcaaattaatcttccttcagctatcggttgcgtctacatcagcaaatgattctccaatcgcgagccgtcacgcgatctgtactacggagtatagtgcctttcagctcgatcgcccccctacttccaggcctcggcacggccacgcgccgtgttcgcaccggccatcacacgcgcgcggtcacggccgcaaaattaaaggaagtcagcgatttggggcgtttttgcggggagtacgtgcgtgctctcgattagcgggaggcgcgcggcatgtcgacgcgcacgtacgtacgtacgtatacgcacgccggtacacggtgggttcgagcaatggaccgaccgacacatgtcatgtacgtgcagacggtgcagcggttgatcgcgtaaggccgattgctgctgtgtcttcttcctgtccgatgcacacggcgcgcggggtcacacccgcaggggagagtggggaggggggaggtcagggacgagatgccgcacgtcgacgtacgcacgcacgcacgccaggagagcaatggaccgctggacgccatgtcatatcacatatgtcacctgacatacgtgcagtggttgatcgggaaacacagttgcttgtgtgttttcgtcgccgtgctgttcgctacgtgttgtacaggaatgaacacgactgctcgatagtagcagggcgccaggatgacgatgggaagcggcagcggcgggacgacaacgtttgtcgcggagtggttggtcgagcggggatgcagagcggcggtggagaatacgttcgatccagcggcggcccttcctctccccaccgtcgcggcgacgccatggacgagctcgattgcggtgagcaccaactcaacggcaccaccagtgtggagatccaccttgaggatggccctcgagtatgtgcttgtactgcgttggcatcagctctgagattgccagcgctccacccactgcccttgcaccctgcccaagtgccaatcgaggttggtggcgtggaaggtggcgatggcggtaaggttgaagctggcgccgttgaggacgtcacaaaggaagttaaaggcgaagaggagcacgaagaggtggcaaacggtgacaaagagagcgtagtggatcccttcctagatgttgaggtaggaggtgactaccgctattga

SEQ ID NO: 21536 - DNA, 1188 bp, Oryza sativa
  Clone ID: TF_OsC43939_1
aagcgaagaaagagcgcgtccgcgtcgtcgtcgtcgtccgcctgcctgcctgcctacccacgtcgcgctcgcgtgcgcgctgccgcttagtcgcgccaaaaaggcggggggaggggaggcgcgtgcctgcccccgatcgcatatcgcattctccactcgcttgcgtttgccgttgcgtttgcgttttgcgtagcaagggaagggagagagctcgtgcttttggattggccgcgatgagctgcgggggcgccgggcagagcgggtggctgctcgagtacgggctggtggaggaggagatccagggctccgacttcatctacatggtcgacgaccccgcggccgtctccagcgtgctactgggcttcgacgttcccaggaaggaggacggcagcggcggccaggacaactctgcctccaagaaaagatctcgtccagaatcgagcgcaccgccgggcaccaaggcttgccgcgaaaagctccggcgagacaggctcaatgaaaggttcaacgagctcagcgcgatcttggagcccggcaagccgccgagggccgacaaggtctccatcctgagcgacgccgcccgtctcctgagccagctgcgcgccgaggcccagaagctcaagagctcgaacgagtcgctccaggactccatcaagagcctcaaggccgagaagtcggagctgcgtgacgagaagacgaggctcaaggccgagagggagaggctggagcaaatgctcaagggcgtcggcgccgccacaccggcggctccagcgccgttcgtcccgcaccacgccgcggcggtggcggccgcaccggcgtaccatccggcggcgttcgcgcaggccggcggcaagtacgtgccgtacgccaccagctacgcgccgccggccgcgttctggcagtggataccgccgacgtccctcgacacgtccaaggaccccgtgatgtggccgccggttgcatgatcagctgctgctgtcaccgaaaatgccgtagaaattgaccaaagagcacctgatgaaagcctcgggtgcagttatgtgattgtgttgtggataaatgatcaaggatcaagggatcaccagaagaaatttcctggtgatcattgctcgccggagcagtctatgtaacaacccaattgctaaagtaattaaggcaattattattacatcaagatggtgtttatgt

SEQ ID NO: 21537 - DNA, 912 bp, Oryza sativa; identical to SEQ ID NO: 11989
  Clone ID: TF_OsC83673_1

SEQ ID NO: 21538 - DNA, 1775 bp, Oryza sativa
  Clone ID: TF_OsC798_1
ccacctccgcccggtagcgccagcgccgctcgtcggcgatgtacggctcgccggtttccaaggatctgaacctcccggtgcagccgccggcgatgagctcgtcgggcttgctgcggtacagatcggcgccgagcacgctgctcgccgagttctgcgacgacttcctcccgcccgccgccgcgccccgcgccgccagccccgacgccgacaacgtcttctcccgcttcctcgccgaccaccagatccgtgacaagtctccccccgccaccgccgccgccgccgccgctgccgcgcacttccccgacgagcccaccatggccacccagcaccaccaccagcagcagattcaattccagcaccacccacggcagatggccccgggcgaagggcacgaccgcacccaaagggcatgcagcagtggcatcggcaccgccggctcttaaacggctggtggccttggtggcgggatgaactcgctgatcaatttggcaaattgattcatggagcacatttgcattttcgaagcatgtggcatgctttcttcagcgttcatcaaagaagctgggtttgggtcgcacatcgtagacgtagcgaacgccaccgccgaagcctgctccaccagcggcactgggggcttgatgaaggggcagctcagattctctccgcggtagggctcgctcatgtcgcagctctcgtagttggactgcgaggagattgcagggaggagccccgagggcgcctgtagggatggaggcgcaggtggccggggttacctctccgggtacccgatgagctccgggtgggaggagtcgtcgctcatgtcggacacgaacatctccggcgtgaagcgccagcgcgactcgtcggagccgtcccagaacggcggcggcggcggcggcctggcgcaccagttcagcctgccgaagacctcgtcggagatggcggccatcgagaagttcctccagttccaggacgcggtgccctgcaagatccgcgccaagcgcggctgcgccacgcacccgcgcagcatcgccgagcgggtgaggaggacaaggatcagcgagcgaatcaggaagctgcaagaactcgtgccaaacatggacaagcaaaccaacactgctgacatgctggatttggctgttgactacatcaaggatcttcagaagcaggtcaagggattaaacgacagccgagctaactgcacctgctcagcgaagcatcagcagtactctggctagaaagctttgtacaagtcatggagacttcagaaaagaacacaagattgttttggagattaggcaggactgagacgatctctgaagatgtgtaatggttaatttcatttgtttgggggggtttaattagagaggcacatggaagaaaaggctcttgtgtgccaaagcacctgtataagcaaagggcaatggagcagtggcatcatcaggattcaagtgataaaaagaaaaaggaaaaacaagggagaaaaagggtgggagatgggtgaaacaattgtatagttttcttgtaacttttgccatatatacccctgcatgccccatgtccagtgcattttcgatagaaatttattactgctagtagtttgtaggttagtagtctcatttaacaccatggctctcgccgacctgctcatctcactaataaatattattgcagtggctttgccccttgcttttttgcggtcaagttgttgccaaggagtatatgatcatcatcaagtggtgaaagccattttttcaaaaaaaaaaaaaaaaaaa

SEQ ID NO: 21539 - DNA, 565 bp, Oryza sativa
  Clone ID: TF_rsicee_12437.y1.abd
gcacgaggagaaataatcgaacctcatatagcattattgagttaatcgtcattaattcatataggtggggattttggatagatggctgcatgccagcagcagatttggcaagaagggaagcagcagcagcatctgcaccacggtggctatgatgatctttcttcagtgtacagaggcacggttgtgctgccacggcggcagggcggcctggcgcgggagccgccgccgccgcggccgtcatcgtcgtcggggaggagcgcggcggctcaggcgacggcgatgaggatccacagcgaggctgagaggcggcggcgggagaggattaatgctcacctggctacactgaggaggatactccctgatgctaagcagatggacaaggccaccttgctagccagcgtggtgaaccaagtgaagcacctcaagacgagagccaccgaggccaccacgccgtcgacggcggcgaccatcccaccggaggccaacgaggtgaccgtccaatgctacgccggcggcgagcacaccgcggccgcgcgcacctacgtccgcgccaccgtcagctgcg

SEQ ID NO: 21540 - DNA, 1790 bp, Oryza sativa
  Clone ID: TF_OsC2018_11
gagccttgtggacagagaaattaaacagttaagttctagatttctatcgtggtgatggcatctgctcctccagttcaggaagaagccctacagccagggacgaaccacttcaggagccggcttgctgctgctgtgaggagcatcagttggagttacaccatcttttggtccacttcaaccagtctcccgggagttctgacttggaacgatggattctacaacggcgaggtaaagacgaggaagatatccaacttagaggacctcaccgctgaccagctcgtcctgcggagaagcgagcaactgagcgagctctactactctctcctgtccggcgagtgcgaccaccgggcaaggaagcccgtcgccgcactgtcgccggaagatatcgcggacacagaatggtactacgttgtctgcatgacatacgcctttcgacccggccaagggttacccggcagaagctatgcaagcaatcgatctgtttggttgtgcaatgctcagtctgcagatagcaaaacctttctacgtgcgctcttagcgaagagcgcgtctattcagacaattgtctgcatccccttcatgagtggcgtgcttgagctgggaaccactgatccggtttcggaggacccaaacttggtaaaccgaatcgttgcatatttgaaggagcttcagtttccgatatgcttagaggtaccgagttctactccttctccagacgaaacagaagatgccgacaccgtgttcgatggcctcattgaagaggaccagatggtcatactccagggagaagacgagctaggcgacgtcgtcgtcgctgagtgcgagaccaacggcgccaaccccgaaacgatcaccatggagaccgacgagttctacagcctctgcgaggagctggacctggacctcggttcttatcagctagtcccgacgtcggcacgggagacggtggctgcggcggcggcggcggctaacgatgtcgacggcgttgcatactctcacgcctcgtgtttcgtgtcatggaaaagagcgaacccggcggagaaggtggtggccgtgccgatgactgcaggcatagagtcacagaagttgctgaagaaagctgtaggcggcggcaccgcatggatgagtaatattgatgatcgtggtagcgtggcaataacgacgactccaggaagtaacatcaagagccatgtcatgtcagagagaaggcgccgagagaagctcaacgagatgttcctcattctgaagtcactactcccctccgtccgcaaggttgacaaggcatccatacttgcagaaacgataacctacctcaaagtgttagagaaaagagtgaaagagctggagtccagcagcagggagccatcgcgttggcgcccaaccgaaattggacaggggaaggcgccgtaagatcaccgggaaggaggtctatgagatcggtgtcagtggtggtacctcgtcggtacctcgtcaacaccgtacgtatatgatatgcatgtataagatcaccgggcaggaggtctctgagatggatgtcatacggtgttgacgaggtaccgtacgtatgatatatagttatcgttttcattatggaaaaaaaattccgaattacctcgtgtactataaaagacgcgaatattagggaagaatctaatatcaaataattagaaggggtgaggtttcgaatccaggtcgtctatcacaccaccttgtgaagctagccggaaaacccctaagcgtttttttacctccatgtactattggtgccatctgaattaccgcttactaat

SEQ ID NO: 21541 - DNA, 780 bp, Oryza sativa
  Clone ID: TF_LIB4370-003-R1-K1-G9
aagaaagctctcagaactctccatctctaggccagcttagggctggaccagctagcagccattggtagcctgtatcagttcataaggggaggaggtgaaggcaaggaggcagctagccaagaagaagagcagacaccaaaactcaggaaggtgaatatattcttgaaaagatccgatggaagcaagaaggcctacccctaccaggagaagcagatctgctgagttccacaatttttcagaaaggaggagaagggataggatcaatgagaagctgaaggcgctgcaagagctacttccaaattgcaccaagaccgacaaagtttcgatgctggatgaagcgatcgactacctgaaatcactccaactacaactccagatgctggtcatggggaagggaatggcaccggttgttcctcctgagctgcaacaatacatgcactatatcacagctgatccttctcaaattcctcccatacgcccctccgagccgcggccatttcagataacccacgccacccaacagagacagtctaacgtcgagtcggatttcttgagccagatgcagaatttgcacccttcagagccacctcaaaatttcctcagaccaccaaaattgcagttgtacacgccggagcagcagagaagaggtctagctagtagcagtggccacaacagcggttggatcacggagaggaattcatcgtacaacttcttggagtgatgaccacctgacgagttactaagagatccagaagcagatgcagtctagactctactact

SEQ ID NO: 21542 - DNA, 2861 bp, Oryza sativa
  Clone ID: TF_OsC173150_1
tctgcatatcttattttcttctcttttcttctccctgctgctgctgctcccgaccctgccccggccgtggtacacgagatccgccgccgccaccggagtcctcgtcgtcgctgccggctggagagcgtgctgttgggggaggtcacgccgggctcctcgtcctcctcgctgcagctgcgccccccccccctcgccgtcgtcgtctccgccactagcgctggccggttcatgtcaatcccccgcaggaacggcatctcgacgtcgtggcacgccatcatcaccgtccttccccgaccggaggagaagaggccagcgccgccgttccatccacacagctgttgcggctgcggggcagcaccacggcgcgatggcggctcgtcggctgaagaacgaggagaggataaaaaggaaaagagacggggaagagagagagatcgcggtgatggccggagaagcggaggatggcgacggcgagaggttgcggctgttcgtcagccaggtgccctgcagcatggcggaggaggagatcctcgccgtggaccgtgccgctctcgtgccaacgacgccaccgtcatccgcgactaagctgccgtgttcacgtttcgaaggtgcctccggaagtccagatgacaacttggatcgccctgccaccgccgcggagcctcgaggcggccacggcgtcgtgcacggcgacggacagcgccgtcccgtcgggaggaaggcggctgggccccgcaggaccggacgctcctcctcctccgcctcttcctcttcctcccccttcgttctccacacccactctcgggctgcggcttctccggcttccgcgcctcttcctctgtcgggttaacaaagttactttcagcgtcagagggtatttcgtacaaaaaggaactgctgttggtacaggattatcagctgtgaacactttctgtttctagaggccattctctgtaacactttggagcatcaattttgtagcgtgctatcatggactactctgctggttcctacatgtggcctggcaattcaggttctgagaactataattttgttgacggttcgtcggaatcatatgcagaagaaggaagcctaccaccttcaggctatttcatgggagctggatcagatcgcagtttaaagatcacggagaatgaaaggaaccccactatgcttgcaaatggatgcttgccatacaacacccaggctcatccattatctggccagattctacctaagggtgagctccctaacaatcttctggatcttcaacagctacagaacagcagcaatctgcgaagcaattcaattcccccaggggttcttcagtgcaattcaacatctggaacatttgatgcgaaattggatacacctggtcttgcagaactgcctcatgctttgtccagttcaattgatagcaatggtagtgacatttctgcttttcttgctgatgtgcatgccgtttcttcagccccgacgttgtgttcagcattccaaaacgtttcctccttcatggaaccagtaaatctagatgctttcggtttccaaggggcacaaaatgttgctatgttgaacaaaacaagtcttccaaatgggaatccctcgctgtttgataatgctgccatagcatcactacatgatagcaaagagtttctcaatggtggttccatcccttcgtttggtactgtcctgcaggcactaggagcgggtggtttgaaggctgctcaacaggagcaaaatatccggaatatacctctccctacattcacatctggtagtcatttggcagttactgatgcacaagggccaccacttccttcaaagataccaccattgatccatgaccataatagtgagtaccctattaaccattcttctgatgtggaaccccaagcaaattcagctcctggaaatagtgccaatgcgaagccacgtacaagggctcgccgtggacaggcaactgatcctcacagtattgctgaacggcttcgccgagagaaaatttcagaaaggatgaaaaatctccaagtccttgtcccaaactccaataaggcagataaggcatcaatgcttgatgaaataattgattatgtgaaatttcttcagcttcaggtcaaggtattgagcatgagcaggctaggagctcctggagcagttcttccccttcttagggaatctcaaaccgagtgccatagtaatccatctctatcagcttcaaccatttcacaagggccaccagacatgccagactcagaagacagctctgcctttgagcaagaggtagtgaagctgatggaaacgagcatcatcagcgcgatgcagtatcttcagaacaagggtctctgcctgatgcccattgctctcgcttcggccatatccaaccagaaaggcatggctgctgctgctgcaatccctcctgaaaaatgaaaaaaaaaatgaaatcggaaaaatatggggggaacaactgcagaagacataataactcaacggctgcagaaatgtgctggacactgcaggttttgtgaatgaagtgaaatccaatccagggggtcataaaacataggaagttatctgactaattcaggcttatgacacaatctactctatagtctatagctattgtgtgcctgttgcacatcagttgatgtgtattcttttgttttttttgtattgcatccggatgctaattaggtagtagtgtttcctttgatgtacatgagtattatctatgcggttttatctaatgtgcatataaagtaaaatctggtatgttgctgctaaaaaaaagtattatctatgcggttttatctaatgtgcataaataatactcatgtacatcaaaggaaacactaccctcgtgc

SEQ ID NO: 21543 - DNA, 2517 bp, Oryza sativa
  Clone ID: TF_OsC377_1
tgctagatctctcctccacatccggactctcgctatcaaatttacgtaagcacagtgagaaaaataattagcagggccaccagcatactgttggcgtacagctgcaaatacctgtcgagctaatcttggttaaaatgttggtttagattctgttgcttaattgctggtgaggaggagcactcactatatagctcaatccatcttcctctgcaaaacgtacgcacgacactctggttgcgatcgattatcactccctgatcgcgagttcttggtctgcgagcgtctgcaattaagggaagagttcctctttgttttgacgaggatcgaggattgtttggacgaaccagcagcagcgtacgtgccaatttcattgatagtcgctgtatctgatttacaggaaaaatacatacaacagtgtgtggtaaagtatactactattactggagtactaattaatggaagagacccctctgccatccgggaagaacttcaggagccagcttgctgctgcagcgaggagcatcaattggacgtatgccatattttggtccatttcaaccagccgcccaggagttctgacttggaaggacggcttctacaacggcgagataaagacgaggaagatcacgaactccatgaacctcacggccgacgagctggtcctgcagagaagcgagcagctgagggagctctacgactctctcctctccggcgagtgcggccaccgagcgaggaggcccgtcgctgcgctgttgccggaagatctcgcggacacggaatggtactacgtcgtctgcatgacctacgccttcggcccccgccaagggttgccaggcaaaagcttcgcaagcaatgaatttgtttggctgacaaacgctcagtctgcagatagaaaactattccatcgcgcgcttatagcaaagagtgcatctattaagacaatcgtctgcgtgccatttatcatgcatggtgtccttgagctcgggaccactgatccgatttcggaggacccggctctcgtcgaccgtatcgcggcgtcgttctgggatacgccgccccgcgcggcgttctcgtcggaggcgggagacgccgacatcgtcgtcttcgaagacctcgaccatggcaacgccgccgtcgaagcgacgacgacgacggtcccgggggagccacacgcggtagccggcggcgaggtcgccgagtgcgagcccaacgccgacaacgacctcgagcagatcaccatggacgacatcggcgagctctacagcctctgcgaggagctggacgtcgtgcgccctctcgacgacgacagtagcagctgggcggtcgcggatccctggtcgtcctttcagctagttccgacgtcttctccggcgccggatcaggcgccggcggcggaagctactgacgtcgacgacgtcgtcgtcgccgctttagacggtagctccattgatggatcttgcaggccgtcgccgtcgagttttgtggcgtggaagaggacggcggactcggacgaggtgcaggccgtgccgctcatcagcggagagccgccacagaagttgctgaagaaagctgtcgccggagccggtgcctggatgaacaatggtgacagcagcgcggcggcgatgacgactcaaggaagcagcatcaagaaccatgtcatgtcagagagaaggcgccgggagaagctcaacgagatgttcctgattctcaaatcagttgtcccgtccattcacagggtggacaaagcatccattctcgcagaaacgatagcctacctcaaagagctggagaaaagagtggaagagctggaatccagcagccaaccatcgccatgtccattggaaacaagaagcaggcgaaagtgccgtgagatcactgggaagaaggtttctgcaggagcgaagagaaaggcgccggcgccggaggtggccagcgacgacgacaccgacggggagcggcgccattgtgtgagcaacgtgaacgtcaccatcatggacaacaaggaggttctcctcgagctgcaatgccagtggaaggaattgctgatgacgagagtgttcgacgcgatcaagggagtctccctggatgtcctctcggtgcaggcatcaacatcggatggtctccttggactgaagatacaagccaagtttgcctcatctgctgccgtcgaacctgggatgattacagaagctctccggaaagctatagcaagctagctagctagaaggttgagatcagtatcgtcttggtcatttgctctcatcttgtttaggaggtaccgggaaataaatcttgtcgctctgatcagtgcctccttactagtctcgtgatctgttgtaagtaatagttagacatgcatatatatcatacaacaacgtttgatcttgcatggtagcatatatatgtacaccacatttcttatatctttactcctttaaaattcagtgaggatggtaagtgatgaatctgccaccccatcaccaactccctaaaattctgaaaaaaaaaaaaaaaaaa

SEQ ID NO: 21544 - DNA, 792 bp, Oryza sativa; identical to SEQ ID NO: 11999
  Clone ID: TF_OsC374879_1

SEQ ID NO: 21545 - DNA, 1458 bp, Oryza sativa
  Clone ID: TF_OsC1427_102
ctagccgagggcgtgggagacggctgcttctggtctgcgcggcatcgtttggtggaagggtcggagaccggcttggcgcagagaagcgcagccgatggcagcggaggccggctcggcgcgagaggcacgggcggcggagatggaggccggcttggcgcgagaggcgcagccgatggagggaggccggattggcgcgagaggcgcgtccggtggaggaggtcggcttggcgcagagaggcgcggccggcggtggaggaggcgacctaggtgtgaggaggagctgccggtgggcgtggcggtcttcggcgcacgaaggggtgtgatgttcctgtacttgtaccagcagaggagcatggcgacgcacctgcggaagatgtagaacctggacctctgctcccgcgccgccgcctgtaggcaggaggcctgcatggcgaagtcatcgaagcagctgatgacgcactgctcgatctccacgcccagcgcctccagcgcggccagcgtcgacggcagcagctcggggatcgccgcgcatgccatctcgatcctcgtgcttccgttctccctcctctccacctcgaacctcgtcgagtttctgataagcggcgtctcttcgccggagctcgacgacggcggaggcttgagcgtgttcagcttcagcatggagagattctccgtggaggaggaggatgagtcaccggtggcggcctcgacctggaggttcttgatccgatccatcagctccttcacgtagccgatggtgtcgccgagaatcgaggtcctgtccatcttgctgatcctaggcacgacggagcggagcatggagaggcggtcgttgagccgcttccgccgccgccgctccgccatcaggttcttggacggcgcgcctggttgcggcggcctgcagcttcttgggcggacgctcgccgccgcgccgccgccgccgccgaacacgaacatgggcgccagctcgccactatcaccaccgcctccagcgccacgtcgcgccttgcatctctcctcctcctccaccgccgccaccgccaccgcagacgacgcagcttcgcgtctcggatccatggcggccaccatcacctgagcggcggcggtggcacggacagcgccgcctgatctcttgtacgggttgcacacttcacccaagcaatcaattgaatcaaactcaaagctgacctcgtgcagaggcggacaaggagtcgtcgtcgtcagaggcacaggcagtgggaacgacggcggcggcggcgaggcaagcgtgttcctcgcgttgccgcccccgacgaggaggtcaccgagcatgacgccgtcgccgcacatcgggctcatcatcatcgggtacgcctgaagccacagatcttccggcgtcgtcgtcggtgtgcctctccggagcggcgccatgagctcctccaggagggacgacgagccgtcgtcgtccattagctccat

SEQ ID NO: 21546 - DNA, 1639 bp, Oryza sativa
  Clone ID: TF_OsC58664_1
acccgatgcctcgcctcgccaagaagcccgtacgtaccttcccggctgctccacagttcgggcaccaaaaccgcctcttcctttctccgggtgcagtcaggatggcgttagaggccgtggtgtttccgcagggccatttcggctacgggtgcggaagggactcgccggcgtacgggatgccgtggtgcgacgtcctggctgctgccggcggcggcggcggcttcggtgagttttacggagtggacgagtgggatgaccagctgcaggtcgcctccgtggatgagtgggaggtggcatccaaggataactcggatgcttccacggagggcaaggcggcggcggcggagcgggcggagccggtggccgccgggaggaggaaacggaggcggacgaaggtcgtcaagaacaaggaggagatcgagtgccagcggatgacccacattgccgtcgagcgcaaccgccgccgccagatgaacgagtacctcgccgtgctccgctccctcatgccggcgtcctactcgcagaggggtgatcaagcatcgatcgtcggaggagcaatcaactacgtgaaggagctggagcagctactgcagtcgctggaagtccaaaagagcctcaagaaccgcagcggcgccatggacgccgccggcgattcccctttcgccggcttcttcagcttcccacagtactccacgtcgcctcgcactggctgcagcgccgccgccagcgccgggagctccggcagtgcgagcagcgtcgtcatggacgacacggcgggctccgcggagagcggccggcagtcggcggccatcgccgacatcgaggtgaccatggtggaagggcacgcgagcctcaaggtgctcgcgcggcggcgaccgaagcagctgctgaagctggtcgtcgggctgcagcagctgcgcatcccgccgctgcatctcaacgtgaccaccgtcgacgccatggtcctctactccttcagcctcaaggtggaggatgattccaagctgggctctgtggaagacattgccaccgctgtgcatcagatcctgggcagcattcagcagcaggaggccgtcctctccatcagctgacggcgcgatcgatagctgctgaggatgatggcagggccatgagaccaccgcctcgcgtccgtccacctcatcgtcgccagcgccggccatcgatatctctactcccttaaatgtgtgaatgtgattgtaccctagccaacagagtgctgcatgcatgcagtatctctacacgccttaatgagaaatctataccaacagcagcagcagcagcagaagcagagctgtagctagatcagctagagtattttcttagaacatttagcaatggcaaaaatggtcaatattaatatgcgccaaccgtgtgtaatgtgtgcactttcgattcttctagaactctgtacgctggatgcacatgtaccgcagttactacacccacgtacatttctgtagttcatcttcacttcaattaatgcatcatggtctaccactctgtacttataaaagaagtcgtttagaataatatttaagtcaaccttgagaatataaaaaaaaaaaaaaaaaaactcgagactagttctccctcgtgccgaattcctgcagcccgggga

SEQ ID NO: 21547 - DNA, 616 bp, Oryza sativa
  Clone ID: TF_OsC264262_1
cggcacgcgcgcgcgccctcgccttcctcctcctcgccgttgatcgatcgatctcctgctcgatctcttgggccctagctacgatcaccaactagcttcaagcttcctctcccagcagctgcagcggcagctagccagcgatcgatcgatcgatcgagctacacgtgagatcgagtgcgtgcagtagtgtgtggtgtgcatgtttccggtggaggtggcggcggcggcggcggcggcggggaggatgcagggggaggcggtggtgccgatgatgctgccgcccttcttcatggactcggggatctggccggcggcggcgggggtcgtggatgtcgccgcgtcggcggaggaagaggcggcggcggcggcggcggcgcaggaccgcgcgctggcggcgtcgcgcaaccaccgcgaggccgagaagcgccgccgcgagcggatcaagtcgcacctcgaccgcctccgcgccgtcctcgcatgcgaccccaagatagacaaggcgtcgctgctggcgaaggcggtggagagggtgcgcgacctgaagcagcggatggccggcatcggcgaggcggcgccggcgcacctgttcccgacggagcacgacgagatcgtggtg

SEQ ID NO: 21548 - DNA, 1622 bp, Oryza sativa
  Clone ID: TF_OsC798_2
atgtacggcgcgccggtgtccaaggacctgagcctgcagccagccggggtgcggacgccgccgcagatgagctcgccgggcttgctgcggtacaggtcagcgccgagcacgctgctcggggaggtctgcggcgacttcgtcctccccggtggtggtggtggtggtgggcagctgcagctgcagctgcagcagcagcggcctgggagcccggaccacgccgcggacaccgtcctcgcgcgcttcctcgccggccatggcggccacgacaacaagcctccccgccccgccgcccacttcgccccaccggaagactccatggcctcgcatcagcagcagctcatgtaccagtcgcatcagcagcagcagcagatggcttccgccatggagggactctaccgcaccgtcagctccggcggcacggagtccaccgccgccgccgccggcaacagcctcctccggcagagcagctcccccgccggcttcctcaaccatcttaccatggacaacggatacgggaatatgctaagagcgggcatgggcggcggcggcggtggcggcgacccgcggctcaaggggcagctcagcttctcgtcgcggcaggggtcggtgatgtcccagatctcggagatgggcagcgaggacgaggagctcgccggcggcggcggcagcccggaggctggcagcaacggcggtggcgccgcacgcggcggctacggcggcgggtacgcgatggggtcctccgcctgggaggagccctcgccgccggcgacgtcgctcctcccggacagcagcctcccgtccaagcgcccccgcgacgacctgccgcggcagctcagcctcccggcggcgtccaagaacagcagcaagcccccctcctccgcctccgccgccgcgtcgccggagatggccgccatcgagaagttcctccagttccaggacgccgtcccctgcaagatccgcgccaagcgcggctgcgccacccacccccgcagcatcgccgagcgggtgaggaggacgcggatcagcgagcggatacggaagctgcaggagctcgtccccaacatggaaaagcaaaccaacactgctgacatgttggatcttgccgtggactacatcaaggagctccagaagcaggtcaaggtgttaaacgacagccgttccagctgcacctgctcggcgagcaagcagaagcacttcgccggctaaatcaatcaagtcaatcaatcgccatgaccggtgcagcagtgcgcaacacacgaacggccgcaaaaggcatgcagcagaagcatctgcaccggcagtttttctaagcttcgtttccttctttgctgatgaattcgctggtctatctggtaaattgaacatgagggcattggattttggagcagtggcatgcattcttcagagttcacaaagatgatgggttggggttccacatggtagtggtagactactgtagctgcaaagcttgattaattaattagcctgttcttttgataatgaaggagaggagagtaactcacaagtgtatagatggttgtctcatctctgtttgtcatagtacacaccaagtgcaagttgcagctgtgtctgcttgcaagaaaaaaaaaaaaaaaaaaaga

SEQ ID NO: 21549 - DNA, 3550 bp, Oryza sativa
  Clone ID: TF_OsC8564_1
atgtcccgtgattttttcgcgaagccaagccaagcgaagccaagcaaagggaagcgaagcggagaaaagcttgtcttgtagagaggaggggtctctcgtcgtctcgcgtcggaattctcgcgttgtggccgcggcatgattggtccggcgagcgatcgcggcgagtcggcagcggcggcggccgggaggcggtgggattgatcagcgagctacaattatgggcatccaagggaacaaggcgacgacgcgcgagcacgacttcctctcgctgtacaccaccgccgctaaggatccgtctctccagctccacgacgccaagccgccgcctccttcccaaggtttcttcctgaggacgcacgacttcctgcagccgctggagaagccgacgccggcgccggcgccgcctccgacgagccagctgcagcagcagcagcagcagcaagcgttccccggcggcatcggaacgttcagcatcagccacgtcgccggcgcacgcccggtcgcggctgccgtccaccgcggcgaggcagcagcaggagtggaaggggcgagtcgggggaggcgggttcatggactctggctccagatccagtggcggcgccgggttcgacaccagcggacgctccccttcgccggcgtagggcaggtcgccgccaccgcggcgaggcagcagcaggagaggaaggggcgaatcgggggaggcgggttcatggactctggctccagatctagtggcggcgccgggttcgacgacgacgatggcgtggccgcgcggcgtgaggtctcgtccgcgctcaaagagttgacagtgagggtggatgggaagggtgggagctgcagtggaagtggtactgatcagcggcccagctcaccacgttcaaagcactctgctaccgagcagcgtcggcgcagcaagatcaatgacaggtttcagatacttagggagctgttacctcatagcgaccaaaagagagacaaagcaacatttctgttagaggttattgaatacatacgctttttgcaagagaaagtgcagaagtttgaagcttcagtccctgaatggaaccaagaaaatgcaaagatacttccatggtcaaacagatcacgcggtacgcgtcagaaaaattcacaaagtaaaggtcatcctggataacacacttgtcgcgatgtactttgcctgtggagatgtccagcgcgcacggcttgtgtttgagggaatgtgtgaccgggatgtcatctcatggacatcgctaatctcaggactagtgcaaaatggcagccccttgcaaggtatacagctagcgtgtcctacagatcagcgagaaactccgacaaacattaccaacaatgttacatcccaagcccaagcccagtgggctagtccggctggtgtggatgactgtgcaatgaacagcgaaatgttaaataaccaacagttggcaattgatgaaggaacaataagcttgtcaagccaatattcccaagcagctacttggtacgttgactcatgcccttgaaagctcaggtgttgatctgtcccaagccagcatatctgtgcagatcaaccttggcaagcgagctgttaagagacctggtgctgatggatcctccagttctaaggagctccccagtacatcagcgaacaatgaaaacatgggtcaccagctgacgatgttagggggtggtactgaagaacttccacacccaacgaagcgccataaatcgggcaacagctgatggcggttctcactctgttgcatcatccagaccgattgatcattctttcctccctaccaaccagccagaacattccagaattggatgtacattatgttagcagtgacggcatcgcgttgaacaagtcagaccttggtgtaattctttcattgccttgtcaatcaggcttgcactttgtttcaggacaaaaagcttgctggagtaagaccaaatgacgtgacattccttggacttctatcagcatgcaaccatgcaggtgctgttgagaaaggatggagctactttcactctatgaaacctgactatggaattgagccccagcaccagcactatgcttgcgtggtagacctgctttctcgtgctggacagcttgatagagcctaccaatttatactgaatatgcccatcaaaccagagatgactgtctggggcgctttactccatggttgcaagatgcacgggcactcaaacatggccatggctgaatgcgcagcacagcacatttttgagttggagcagtccaatgcagggcactatgttcagcttgcaaacatgtatgcatctgcagggatgtggagccaagtcgctggcatgcgagtcaccatgagagagaggggtgtcaccaaggcaacggggtttagcttcatcgaggttgatggagagatgcactcattccatgcttgggatcactcgcacccgagggccaccgagatattcgccatgctgtgccttctttctccaactccaaccggagttggaggagttgacagtgagggtggatgggaagggtgggagctgcagtggaagtggtttcagatacttagggagctgttacctcatagcgaccaaaagagagacaaagcaacatttctgttagaggttattgaatacatacgctttttgcaagagaaagtgcagaagtttgaagcttcagtccctgaatggaaccaagaaaatgcaaagatacttccatggtcaaacatatattttagatcgttctggaaaaattcacaaagtaaaggtcagaaccctggagatgatttgcctgatccttcacagttcatccggaatgggtcctcttctgggtataatttcactggcaaacctgatgataaccacaacatggtgacatcagcagctgcctcaggggcacaagaactggtggaaactgaccatgcagctagcgtgtcctacagatcagcagaaactccgacaaacattaccaacaatgttacatcccaagcccaagcccagtgggctagtccggctggtgtggatgactgtgcaatgaacagcgaaatgttaaataaccaacagttggcaattgatgaaggaacaataagcttgtcaagccaatattcccaacagctacttggtacgttgactcatgcccttgaaagctcaggtgttgatctgtcccaatccagcatatctgtgcagatcaaccttggcaagcgagctgttaagagacctggtgctgatggatcctccagttctaaggagctccccagtacatcagcgaacaacgaaaacatgggtcaccagctgacgatgttagggggtggtactgaagaacttccacacccaacgaagcgccataaatcgggcaacagctgaaaggcgcttctcattgtggattgtgaagctgctcttgtacacaggcttccattcctatgagaagctcccccctgacaagacagtcagtcctacgttgtaacctgtatgataactcagctgcacctgttagctatgtgaagtagtaattcgttgaagtattctagatctctagtgcttcattgcacatcacttctct

SEQ ID NO: 21550 - DNA, 210 bp, Oryza sativa
  Clone ID: TF_rsicee_15174.y1.abd
gcacgagggctttcgagctcgcagaggagaagagaccggatcaacgagaagatgcgggcgctgcaagagctcatcccaaactgcaacaagattgacaaggcgtcgatgctggaggaagccatcgagtacctcaagacgctgcagctgcaggtgcagatgatgtcgatggggacggggatgttcgtgccgccgatgatgctgccggcggcg

SEQ ID NO: 21551 - DNA, 2603 bp, Oryza sativa
  Clone ID: TF_OsC9971_1
atccccgggctgcaggaattggcacgaggcctcttcttctctctctccacatcacaagtcgcctccctcctccgcccccgaaatcccctcgcgaaccagagaaacctgaggcaccaccatcaccaccaccgcctccgcctcctgcgcgcgcggcgaattcgggggaccctcgcgctcgcgtggggtgtgggtggggggagatccgggcgtcgccgtcgccggggggggagggtgctcggattcagccagcggcgggtgggggggcccgcctctttcttcttgggggggcgcggaggagaccccgcccgtcctggattccgtggccgcggcgccgattcgggcgcgggagccccagcacggtattatggtgatgaagatggaggctgatgaggatggtgccaatggcggaactggtgggacatggactgacgaggaccgagcgctcaccgccagtgtgcttggaacggatgcttttgcttacttgacaaaaggaggtggtgccatatccgagggccttgttgctgcatctttgccagtggacttgcaaaatagactccaggagcttgtcgaatcagatcgtcctggtgctggttggaactatgccatattctggcagctgtcgcgcacaaagtccggtgaccttgtccttggatggggggatggctcttgccgtgagcctcatgatggtgagatgggacctgctgcttctgcaggtagtgacgaggccaaacagaggatgcgcaagcgtgtgctgcagcgattgcactcagcattcggaggtgttgacgaggaggattatgccccaggcattgatcaggtgacagacacagagatgttttttctagcatctatgtactttgcatttccacgccgtgctggtggccctggtcaagtatttgcagcaggcgtgcccctgtggattcccaacactgaacgtaacgtatttcctgccaattactgttaccggggataccttgcaaatgctgcaggatttagaactattgtgctagttccatttgagaccggtgtacttgaactgggttcgatgcaacaggtagcggagagttctgacactctccagaccataagatctgtgtttgctggggcaattggcaataaagctggagttcagagacacgaggggagtggccctacagataagtcaccaggtttggcaaagatttttgggaaggaccttaaccttggccggccttcagcaggcccaggaactggcgtgtcagaggcagatgaaaggtcgtgggaacaaaggactggtggtgggagctcattgctccccaatgtccaaagaggtttgcagaatttcacttggagtcaggctcggggcctgaattctcatcagcagaagtttggcaacggtatattgattgtgagcaatgaagccacaccgcgcaacaatggaggagttgacagctctactgcaacacagtttcagcttcagaaagcaccaccacttcagaaactaccacagctccagaaatcacatcagctagtaaagccacagcaactagtgagtcagcaacagttgcagcctcaagctcccaggcaaatagatttcagtgctgggaccagttccaaacctggtgttttgactaaaaaaccagctggtattgatggggatggtgcagaggtggatggcttgtgtaaagacgaaggtccgccacctgcattagaagaccggcggcctagaaagaggggaagaaagcctgcaaacgggagggaagagccactaaatcatgttgaggccgagcgccagaggagggagaagctcaaccagcgattctatgcactgagagccgttgtacccaatatatcaaaaatggacaaggcatccctccttggtgacgccataacatacatcactgacctacagaagaagctcaaagagatggaggtagagcgagaaaggcttatcgagtctggaatgatcgatccgagggatcggacgcctcgacctgaggtggacattcaggtggttcaggatgaggttctagtccgagtgatgagccccatggaaagccaccctgtcagggccatcttccaagctttcgaagaggcagaagtccatgcaggggagtcgaagatcacaagcaacaacggcacggccgtgcattctttcatcatcaagtgccctggcgccgaacagcaaacgagggagaaggtgattgccgccatgtctcgcgtgatgaactcagggtagaatcagttggggagtgggcgccaccggtagaggcagctttacttcgttcgctggttgcagacaagcagcaagcagtcggttggacggacacccatccacccacctttcagcgctgttgatagaagaagtttgtaggcagagaaagaaagctcagattctgacttagcgatccaaggggaagacaaagctctcaagttaaaactgccattgttgtatggtaggcttttgtggtcggtgtagtttttctctttttgttgtttattggggagaataccatgttcttagtttattgcttgtggcagaaccataaacagtacatctcgtcaaatgcatgagttgggaaagaagtcacctgcttttctgctaaaaaaaaaaaaaaaaaaaa

SEQ ID NO: 21552 - DNA, 2674 bp, Oryza sativa
  Clone ID: TF_OsC50455_1
atcgcgaagcgtaagctactcaaggccgcgacggagcatgcggtgaagaaccatgacgggaccactgtcgacgcggaggcgagacgagagaatcacggtcataccgcgtacgccgccgaagaggctgcgggctctgaggagagtgtcgagcgcgagggaggaggcgatggcggcgccgagggggaggagggccgggacgctgcagccgagggaggtgaggagggcaaggaagaggaggaggaggcggacagaggtgaggagcgtggcttggaagaggaactgaagagggcttcgagggagaagggtttcgtgaaaggcacaccgaaccaggcagtgtccatctcgctcatcctggaagggactgatgtggacgcaaaggccaagactggcaccctaaagtgctttgctttccttcttaaggctgtgcctgagctatttaagtagactgccgaagggcgtatccgaaaatctgctccaaatgttttcatccttgtgccaactcgcgagttatgccagcaggttcataatgaggcatcatctctccttgaattctgtacatccaaattgaaggttgtgcaagtgaatgcgagcatgtcagacaaagatattaaagttgcattgtctggcccccctaatatacttgttacaactcctgcttgtgttgcatcatgcatatcaaagggcattatccgtggatcatctatcaaagaatcactatcaatgatgattctagacgagatatcatgtgatgctaaggataagatgctttatatccttgtactcctgaagttggagcttattcagaagaaagttctcatatttgtaaactcaattgactcggcattcaaattaaggctgtttctggagaagtttgggataagatcttcagtgctaaatgctgaattaccacaaaattcacgcctccatatcattcaggcattcaatgctaggctatttgattatctgatagcaacggatgacaataagtctaaagaggagaggcaagccaataagggaaacaaaaaggattctagggtgtcacgcaagcagttgcagcaaactttagatgctgaattcggtgttgtcagaggaattgacttcaaaaatgtattcacgttcccattcgaccttttgtttctgaaacaggtagttaattatgacatgcctccagatcctgctgggtatgttcacagagtaggaaggacagggagagcaaataaaactggtgcatccatatcgcttgtttcaccaaaggagaatggcatttttgaagatattgaaaatatgttgaaagatgttgaaaatagagacaccagttgcatttcacctttcccattacttacaaaaaatgccgttgagtctttacgctatagagctcaggatgttgccaggagtgtgacaacccgtgatataaaagaagcacgtcgccaagacataaagaatgaaatcctcaactctgagaagttgaaggctcattttgatgagaatccgagagaccttgatttgctcaaacatgataagttattgagcaacaaggaaatccctgcacacctacgtgatgtccctgagtaccttattgatcccacaacaaaagaagcaagcaatgtagtcaaactttcaagggctgctatggatatcgataagccacggaggaggaaaagaatgggattcaagggaggatctggcagaagtagtgatccccttaagactttctctgctgagttgcaaatggatgcatttttccagctacatatgaggtcctatggaaacatggcagtgcttaaatgcagtggtttagtgaaatatgcaaatggaagtgctgttcgttgttccttgaaagcgtactatttgtggggaaatcacggaggcgagggaggaaggaaagagacggagaacaggatagaagaaagaggaagaaggtggaaagctaatcttttgtgaagcgttcactgccaagtgcgcacagttttgtaggtttctggtatctcgtcctgtaactttgtagcatctccagatatagggggataacaatgtcaagctttactgaatgctgcgtgtgctatgctatgcacaccattatatagacagacgagtagagagtttgtttagtttcagttcttctagaggacgtgcatattgccattcctctatttattcgaggaatatcagcagaaaactatgtttcaagatttttgttgtataaaaaattgcataaaaaggtgatgttttcaggttaagacggctcaagtaaactctagagagaacactgaagctttgtttcgatagaatctgctcaatatcaaagctaagctcagggttgacagttgcgagtttcatcgacaaaaactcaacttgacgttgtagtgactgtacataattgattatctcatcaagcatgactgccttaccagtgatcttactgcagcctgggacaagatcttgaagcagcttcatcctctcgcttatcttttttctcctcagtctttctgcaaggctgtggctattagtggcttggcctcgctttgcccggacatgaacataatcttctttagtaccatcaccatcagaagaatcttccttgctttgcattttggagcaactcttttggttgtcctcctccattgatatcctctcttgctgagatgaaacctctgttgcttgctctactttagta

SEQ ID NO: 21553 - DNA, 1037 bp, Oryza sativa
  unsure (1)..(1037): unsure at all n locations
  Clone ID: TF_OsC105357_1
atggcagctcaggcaagcagcaagcgcggcatgctgctgccacgggaggcggtgctctacgacgacgagccctccatgccgctggagatcttgggctaccacggcaatggcgtcggcggcggtggctgcgttgacgccgattactactacagctggtcggggtccagctccagctccagctcgtcggtgctcagctttgaccaggcggcggtcggcggcagcggcggcggctgcgcccggcagctggctttccatcccggcggcgacgacgacgactgcgccatgtggatggacgccgccgccggcgccatggtcgagaacacgtctgtcgtcgccggcggcggcaacaactactgtcatcgcctgcagttccacggcggcgccgccggtttcggactcgcgagcccaggctcgtcggtcgttgacaacggcctcgaaatccacgagagcaacgtcagcaagccgccaccgccggcagccaagaagcgcgcatgcccgagcggcgaggcgagagcagcggggaagaagcagtgcaggaaagggagcaagccaaacaaggctgcttctgcttcttctccttctccttctccttctccttctccttctcctaacaaggaacaacctcaaagcgccgctgcaaaggtaagaagagagcggatcagtgagaggctcaaagttcttcaggatctcgtgcctaatggcacaaaggtagacttggtcaccatgctagaaaaggcgatcaactacgtcaaattcctccagctgcaagtgaaggttttggctactgatgagttctggccggcacaaggagggaaagcaccagagctctctcaagtcaaggacgccttggacgccatcctatcttctcagcatccaaacaaatgatgttgtgctgctgacacaaaatgcatcaaatttcacaaagctaatattaagtttgatgcatgtaagatctttagaacagaggcaatgtaacagggcttctgctctgaaaagatgagagaattgttctnaaaaaaaaaaaaaanaanaaaaat

SEQ ID NO: 21554 - DNA, 1206 bp, Oryza sativa; identical to SEQ ID NO: 12013
  Clone ID: TF_OsC340364_1

SEQ ID NO: 21555 - DNA, 860 bp, Oryza sativa
  unsure (1)..(860): unsure at all n locations
  Clone ID: TF_OsC83673_2
ttcacatcttactgaacagctactactcctgggagctagctcaagctcaagctcaatctcaagctctttccactaagctccgtgtgtctagctcatcaatacctggctagctagctagggtgttgatcgatatatatnctaaaataaggatggacttcgacttgttcaattcctacccggaatcgcagcttgacctgatgagcacgatgcttcagctggagcagctcactgcgctcagtgaccagtcgctgttcatggcggcgccgacgtcgccgccggtatcacccatggggaccccttctccccagttctcaccaccgccgcagatgtcggtcaccaccaccaccgccggtggcggttaccaggatcagtataactccatgccggcaacgtacggcgccggtgcgggcgtgcaccagctggacttcgcgatgtcgtcaccgggctccgactccggcgcgccgcagggctcgtcgtcgtcgtcctcgtcggaggcgatgcgggagatgatcttccacatcgcggcgctgcagccggtggagatcgacccggaggccgtgcggccgccgaagcggcgcaacgtgcgcatctccaaggacccgcagagcgtggcggcgcggctgcggcgggagcgcatcagcgagcgcatccgcatcctgcagcggctcgtcccgggccgcaccaagatggacaccgcctccatgctcgacgaggccatccactacgtcaagttcctcaagtcccaggtgcagtccctcgagcgcgccgccgccgccaccggcgccgccgcccaccgcgccgccgcattcggcgccgcctacccagctgccttacccatgcagcaccacgctccgtggtag

SEQ ID NO: 21556 - DNA, 1693 bp, Oryza sativa
  Clone ID: TF_OsC134315_1
gcataaacatttgtatttttagatcatggaaatgacacaacaactaataagtttgttggaaaaacgaaaaggagacatacaaggtgatttacagcaaaaacaacagtaatgagtttttatttcacaaaaatggtgccaaagaggaggatacttttaataagagcaatgataataagaagcaatcccattggcgttgaaatggatgattttacatacaagccactgccttacatcaattaaaatacaacaattaatctactttgtcaccgcctactcttcaagtcattgacgctgtccataacacaaccgataaaggggagggcgaggcatggaggccacttgacatgtgaagtgcttttacaccctaatcttctgaagcaaaactttgggttcaccaatcacatcattacaacattagctcggagatctggttctccagcctcagcaatcgtgcttgcctgagcaagtgcagtttgcttggtcatgttttagcttctcaacttggccctgaagctccttgatgtaggttacagcaatatccaacatgtctgatgtattcgtttgcttgtccatgttcggcacgagatcctgcagcttcttcagcctcttgctaatcctcgttctcctctccctctcagcgatgctccgcgggtgcgtcgcgcagccgcgctttgcccgggccctgcaggcgacggagtctggctggagctgcaagaagtcatccatgccggccatctccagcgacgactgcttcgacaagccaaactgggagtcgatgttgctgaagctggagaccatgtcgtcgccgtggtcgccggcggcggcggcggcgacgcgggccttcttgctgctgctcgggggcgagaacatgatggagttggtgtcgtcccaggagctcatggagaagttcctggaggagaggaaggaggaggactgcgcgccgtggccggcgccatcgctggagctgttgccgccgccgccggtgacgatgctctccccgatgtcggggatgaggccgcccatctccgatatctgcggcaggtcctgccgcgagaagctccactgcgagctcagcctcctgtgcgccatcgcgccggcgtcgccgccgccgccggagtagccgcccatccctctcgtcgcggccatgccattgccgtgcgggtcagccatgaggcgggagaggaggccggcgggggagctgctgtggcggaagagcgggacggcggcggaggaggcgtcgacgtggatctcgccggagccgccgtacgcgcgctcgagcgggtgccgcccgacatcggccgccgccgctgtggacgtcgtcgtcgtcgtccggcagctggactcgcaggaggtgagccccgacgactccgcggagaagtacctccccaccatctgctgctgctgcggcggcggcggcggcggaagctgatgctgatgctgatgatgatgcagctgatcgacaaccccaaccccgcggccccggatcaccgagtcggcgatcgacgccagcagcgaccccggcgccgagccgtacctcgccagcccccccgccgccggcatcggcggcggcggcatccccccgtgcggcgccgtcatcctgttcatctccggcggcgcggcggcggcggtggtggtggtgggtggaggcggaggcggaggcggaggcggaggtggacttggttttgcaggttgc

SEQ ID NO: 21557 - DNA, 1354 bp, Oryza sativa
  unsure (1)..(1354): unsure at all n locations
  Clone ID: TF_OsC159138_1
cggagtcggagagagacacaagccaacctcgnaactcgnaagcagnagcaaacgcgaagcagaagcaagcgccatggacgccgagatggccatgggcgagagcttcgcctactactgggagacgcagcgctaccttgagtccgaggagctcgacagcatgtacctgccgacgcaggatgactccaactacgagtcgagctcgccggacgggtcgcactcgtcgtcggcgccggcgccggcggccgtgggcggggacgcagccgccgcggtggcgggtagcggtggcgggatgacgacgatgatgatgggcggcggcggcggcggtggcgacgacgccggtggcgcgaacaagaacatcctcatggagcgcgaccgccgccgcaagctcaacgagaagctctacgcgctccgcagtgtcgtgcccaacatcaccaagatggacaaggcgtcgatcatcaaggacgcgatcgagtacatccagcgcctgcaggcggaggagcagcagatgctccgggaggtcgccgcgctcgagtccgccgccgcggcgagcgccgccccggccgcggcgaacccgttcgccggcctcggcgccgacgaggaacacgagtacggccaccaccacccctcgtcgtcgtcggagcggacgaagaaggtgaagcgggcgctgtccgtgtcgtccatcagcgacgccctgctcgccgcggcggcgccggcgccgccggtggagatccaggagctgcgcgtgtcggaggtgggcgacagggtgctggtggtgagcgtgacgtgcagcaagcgccgcgacgccatggcccgggtgtgccgcgccctcgaggagctccgcctccgcgtcatcaccgccaacatcacctccgtcgccggctgcctcatgcacaccctcttcgtcgaggtagatcacatggatagtgtccaaatgaagcagatggtggaggctgctctctcccagcttgtggcgaccggcagtccgttgagctccatgagctattagttatgagctggatagatatatggagtcatgcgttttggccacctactttacctagtctcattcgcaataaagcgcatttttatgtatgcttggtgatgttgtttgtggcctttttgggaccccccaccaagggatgggggtggttgttttcttgcgggggcaacatttagtgggttgatgataaatttaaagtttttggaaatcctgaggacgctggcttggttttggtgcttttaataatggtgcaatataagggggtgcacggtaatggaaacaaaaacgggggagtcgaacctcacgtgcagccagcaacaagtccacctccgtctcaagctttcttgcgcttaa

SEQ ID NO: 21558 - DNA, 840 bp, Oryza sativa; identical to SEQ ID NO: 12008
  Clone ID: TF_OsC335639_1

SEQ ID NO: 21559 - DNA, 1104 bp, Oryza sativa; identical to SEQ ID NO: 12019
  Clone ID: TF_OsC371684_1

SEQ ID NO: 21560 - DNA, 2067 bp, Oryza sativa; identical to SEQ ID NO: 12017
  Clone ID: TF_OsC113490_9

SEQ ID NO: 21561 - DNA, 1056 bp, Oryza sativa; identical to SEQ ID NO: 12021
  Clone ID: TF_OsC58664_2

SEQ ID NO: 21562 - DNA, 1267 bp, Oryza sativa
  unsure (1)..(1267): unsure at all n locations
  Clone ID: TF_OsC81947_1
ttctctccccncattataaatagggaagtcatctccttgaagctagctggcctaagccaactcaatcaaacctccctagcttggcagaatagttaatgttaatcacctgattaaaattagattagtcccctcctacccagctaactactgcttctatttcacggagaaaaatgtcttcctaggctttctctttcagctcgatcgatccacagctcagctagctctctctctctctagcgacaagcaagcatggagcagctgttcgtcgacgacccagccttcgcgagcagcatgtcgtcgcttgaggcggacatcttctccggcgccggccagctgccgtcctcgccgtggctggacctagacctcgacgacgatgtccaagacctctccatggcgccgacgacggcgaacgcggtgtcctccggctacggctccggcggatccggctcccacaggaagctcagccacaacgcctacgagcgcgaccgccggaagcagctcaacgagctctactcctccctccgcgctctcctccccgacgccgatcacactaagaagctgagcatcccgacgacggtgtctcgcgtgctcaagtacatacccgagctgcagaagcaggtggagaatctggagaggaagaagaaggagctgacgacgacgagcaccaccaactgcaaaccaggagtgttggggagccagctgatgagcgagggcatggctcccatcgtttcggctacctgcatcaatgacatggagatcatggttcaggtcagcttgttgagcaatgtggcgggttcagttcttcctctctccaagtgtatcaaagtactggagaacgaaggtcttcacttcatcagttcatcgacttcctccggatttgggaacaggacattctacagtatccatcttcagagaagtgaaggaacgatcaacgaggagtgcccagcattttgtgaaaggttggagaaagtcgtcaggaacaaagcaaagctttaagcactagtaccgcgcgcgcgtgcctatgataatcctgaattaatcaagggccaaaatctaggtaaaaatgaccatgcgcagttgttaaatatagcatttggttagctgataataatgatatataagtagtgtgctcgatttatattaactaatttctatgacatatatactatgttgctcgatgtagcttttgtacatatttcatgcatgactctcagtgtattaattaattatattatgagatttgcaaaaaaaaaaaaaaaaaaaaaaa

SEQ ID NO: 21563 - DNA, 1498 bp, Oryza sativa
  Clone ID: TF_OsC47357_1
gctgcaggaattcggcacgagggccactgccactgctcccccctgcaacttggacatgtggcttagctactcgccgtcgcggtctcggatgatagtataagcgtgagggttgggcaatctaggcaggagaggtgactgctagcgaggaaagggagcatatatactactatagcttagcttgctgcaggtgctagctagctgaggcatggagcttgacgaggagtccttcttggatgagctcatgtcgctgcggcgtgatggatcggcgccgtggcaggcgccgccgtacccgggtggcggcggcggcggcggcggtggcggcatgatgatgagtgacctcctcttctacggcggcgacggcggcagcgcggaggcgaggggcgggatggacgcgtcgccgttccaggagctggcgtccatggcggcgccgccgcctcagcatccgcacgaggagttcaacttcgactgcttgagcgaggtctgcaacccgtaccgcagctgcggcgcccagctcgtcccctcggaggcggctagccagacgcagacgcagctcactcctctccgcgacgcaatggtggcggaggaggagacgagcggcgacaaggcgctgctccatggcggcggcggctcgtcgtcgccgacgttcatgtttggaggtggcgccggagagagctcggagatgatggccggcatcagaggcgtcggcggcggcgtccacccgcggagcaagctccacggcacgccgtcgaagaacctcatggccgagaggcggcgtcgcaagcggctcaacgaccggctgtccatgctccggtccatcgtgcccaagattagcaagatggacaggacctcgatccttggtgacaccatcgactacgtgaaggagctgacggagaggatcaaaaccctcgaggaggagatcggcgtcacgccggaggagctcgacctgttgaacacgatgaaggattcctccagcggcaacaacaacgagatgctcgtgaggaattccaccaagttcgatgtcgagaaccggggcagcgggaacacgaggatcgagatatgctgcccggcgaaccccggcgtgctgctgtcgacggtgagcgcgctggaggtgctggggctagagatcgagcagtgcgtcgtgagctgcttcagtgactttggcatgcaggcctcctgcttacaagaggacgggaagaggcaagttgtcagcaccgacgagatcaagcagacattgttcaggagcgcaggctatggcggaaggaattatagtagatcgagtaccatttatgagttcatattcatcagcagtggtagtacctcgtttctgaacacaccagagagcaaattaaagatttgctcaagtattgtaagctttgcatttgtgaatcggtatgggaaccggccgtgtgatttgtcgaacattggatttgaattaaacgccaagaaatggttcatctggttttgtcccgagctatatatcatatgcgcgcgcatatga

SEQ ID NO: 21564 - DNA, 1021 bp, Oryza sativa
  Clone ID: TF_OsC3016_1
ctagctggaaattacacatggtaatttgatgcatatatataagcaaagcaatgcaggatggttagagagcgagcttgccttagcggtgatggtgatgatgacggtggaggccgggaatggcatgacgctggtgtgggtgatgcccagccggagctcctccacctccgacagcaacctcaccagcaaaccccgcgagttcccgcactgcacccgcaccagcacgctcctctcccacacccgcacctcgatctccggcacccgcccttcgccgtcgccgtcgccggcggcggactgccggccggagcacgacgacttcctcaccaccatggccgccggccgcccgccgccgtcctcctcctccagcgtcttcaccttctcctgcaactccttcacatacttcaccgcgtccccgaggatggtcgccttgtccatctttttgaggccggggatgacggtggagagctcgatgaaccgctggttgatcttctcccgccgccgccgctccgcgattatgtggtcctgcacgtatcccggcgccgccgccgacgacgacgacccgccgcctcctcctttcttcaccgccgctctcgctgtcgcggtagtctccatcgcctgcagcggcgccggaactactccgccgccgcctccaccgccgctatcctcggtggtcggctgcgccgacgccgcgctgaagttccagctcatcggcctgtgccccctgccgccgccgccggtgacatgcggggaccacccggcggcggccgtggcagcgccgccgcctgggctgtcgctggagctccagctgttggcgcggtggacctggtccacctgcactgtcaggtcccggaatccgccgccgccgccggccgccgaggcgttgcggagagcttgcagcgacgggaaggcgccgctgtcgccggcgacgtcagtggcgtaggctgcggcggcggtggagtcggaggggagctggtgcagcgtgtccatcgcccactgcatgaagaagctcgagtcatccatgtcg

SEQ ID NO: 21565 - DNA, 1757 bp, Oryza sativa
  Clone ID: TF_OsC5214_1
gagaaagggacacgcaaacttcaggcacaagaaccctccccttaagcttacacattagctaccatcctgttgcttaccttgaaagggtcacatactacctatttgcatcaaaggataggaagaaccaaccaaatcttagctttgttcctagaattgatcgtcttctcttcttgctaagtggttagtaatatggcgcaatgcggcggcggcgacgtttcacgacaccggaagggtcaccttgacaccgtcgagagcctctgccaggggctactcgacgacgtcatgctcgacgacgacaagtgccgcgccatgttcggctacctccaggagtggcaggacctggcaagcatgtgttacgggagcttaggcggcgagccgccgctggcgccggaggccagcaacggcagcggcagcagcggcggcggaggcagcttccggaagaggagaccggacgacgcaaagggtgagagcaacagcatctgcaagaggcagagagggaagcagcaacagcagcagcagccgtgtcatcccgatcagatggcggcggcggtggggaaaggaaggccggagagggcacggccaggagccaagaagaaggcggaggtggcgtcacccaaggattccccggcgacctcggcgtcgacggtgaccgccggccagaagaccgactacatccacgtcagagcccgccgtgggcaggccacggacagccacagcctcgccgaacgggtgaggagggagaggatcagcgagaggatgaggtacctgcaggagctggtgcccggttgcaacaaggtcaccggcaaggccggcatgctcgacgagatcatcaactacgtgcagtccctgcagaagcaagtcgagttcttgtccatgaagatcgcggcatcaaacccggtggtgaacttcaacatcgtcgaggacctcttcggccggcagctcagccaggcggcgtgcaaccctgcggctctgccggccatggcgctgccgatggcgcaggtcgagccttcctgcctccagatgagccccttgcagcagatgcaaacttctgcaggatcctctggctatgggctggagatggtcgtcagtaaccagtactcaccaccgggcgggccgatgtcggtgccggccggtgcatcggtggagccatgcctcaacgtgaatggagctgcaggttgggacattggctctcacggtttgttcagtggatttgatgcaccgtttcagtcagtacagagtgattgtttgctagacaatctcaaaatggaaatgtaagaaggaatgaaggaaggagaagtccgcattccaagagttttaaccacatcaatatttgtggctgaagattctttattcatagaaactgtactaatgtcatcaatggcaatacaagtacatttgtgtgtttatatttaccttgacaactccaccaacttctaaacaatccatcatcccgcgtctcgcctcctgccgataccaatccagtacaaatatgctaacaattcacaacactacgtataaaattacaataatgaaagcacaaaccataccgacgcaccatcatctgaacctatcttcattcttccgcctttaaagcacagacgtgttcaccagcttcttgtgctggaacaatgataacgggggctgctttacagttgtggaagcaatattcactgacacttccctgaacacactctgaattagacctcttccacgagtggccagaatgactgtgaggctttagccgctctgctctcgga

SEQ ID NO: 21566 - DNA, 2511 bp, Oryza sativa; identical to SEQ ID NO: 11912
  Clone ID: TF_OsC340653_1

SEQ ID NO: 21567 - DNA, 763 bp, Oryza sativa
  Clone ID: TF_OsC359492_1
atggagatgacaagctacaacgacgtcgacgccggcgacatgttcgctgctgctgattactactcggctggcgccggcggtgatctcttcgatatggtgtggcctggacgacgacgacgggaagaagacaacaccagcggctgcctccccttgtcgccgccgccgccgcctgagctcgccgtggatgatcagctactggctggaggcgatggcggcggcggcaaaccggtggcggtggcggtggcggaggacgacgactccggtgagcggtggacggaggaccaggttccgacagacgaagggatatgcgtcatggagaaacgaaggtgcaagataaacgagaacctgaagaccctgcaacagctcgttccagtttgcgacaagtccaataaccaggcctcaacgctggacaaaaccatccgctacatgaagtcactgcagcagcatgcccaggccatgtcagttggatgcagcatgaagacggcagaagcagcaggagtgacgtgccccttccttccaccgccgccaagcagcgccttgctggttatcgtggaggagggtcccaccagaccctgggatgcaactgctagatctacctctgccgctgctacctcttttgaccaccaccaccatggcgcactcattgaaaagctcctccaggtggtgcagtgttcttttgcagccttacatgctgtcgcttaagacgtccgtccgcgaaaataatgctatggtgatgcagaaaccgaatttctaccattcttaa

SEQ ID NO: 21568 - DNA, 966 bp, Oryza sativa
  unsure (1)..(966): unsure at all n locations
  Clone ID: TF_OsC115381_1
ntttttttnntagatgatgaattgacccccacttggtccatcagaccaaagtgcaattgcttgcctctacaaaaacacagctgtacatgaccatctgccggtttatacaggtcaagacaatataaatatactgtgcacctctaaagaaaagagggtagaaaaatatacaccatgccacggtttttgtgacgccgtactatttcatatctaaccacaagattaggaatttactccctccgtctcaaaatataagcatttttagccggtggccagattcatagccaaaagttgttatattttgggacggaggtagtaggcaaaataatattcagtgcaaatacaacaactagcattttacatgtactacttgtagtaagtaccatgtcacgatcattgtctggagttgcttggctggtcctgctgctgctgctgctggtggtttagcttctggtacattgccatcatccggttgtacgcctccatgccgttcggttgctgtgcgttttgctgcgccgcttgggaggcgaggaaggcggagaaggcgtcggaggtggcggcgccggtgggctgcggcggtcggtcggcggcggcggcggaggaggaggatgcggcggcgtcccaggagacggggaggaaagggggcgtgtgcatatgcatgggcgcgtatccgccggcctggcccatgttcatcatgctgaggccgatctgagccatctgggccatctgggccatgacggacatctgcagctgtggcatggccatgcccatgggcatcatcatgctgcccatccggctcatcacctgcacctgcgcctgcagctgcttcaggtagtcgatcacctcgtcaagcatcgacgccttgtcagtcttgcttgaattgggaacgagcttctgcaatgttttcatcttttggttgatcctgtcccgtcgtttgtgattattctttcgcacaaaccttaacttcat

SEQ ID NO: 21569 - DNA, 1046 bp, Oryza sativa
  Clone ID: TF_OsC217101_1
cggcggctggatcgtccatggctacaccaatggcgccaccgccaccggcgccggcaaccacggcttcacctgtggctatgctgccagcagttacgtatatggttatagctgcggttcttgggagttcgagcaaagggagcagcagttcatcagctcgcagattcagcaccatcagcatgcacctgagcatggatgatgacgatgatcagtccgcggggtacggcgtcgccatggtggacgacctcctgacgccttcgccgtcgacgcaccacgccgtcgccgccgccgccggcagcttcccttcctcgtcatcctcctcggcctccttccgctccgcctccgtgtcgtacagcccggacacctcgtcgtcggcggcagcggcggcggcgacgggattctacccggagttgtcctcgcaggtggcgccattattaccaccaccacccttggtgcgcaacgagccccagcccggccgttacaccgccggcctgccgccgccaccgccgccgccggtgaccggtggcgcgttcaggcggtacgcgcggcacctcggcccgaggagggcgcccaagccgggggcgtgcgggcagaggatgttcaagacggccatgtcagcgctggccaagatgcacatggagacgacgtacaggcgccgccagtactactaccagcaagcggcggcggcggccgaggcggcgccgccgccgccgtccggcaacaaccagctgcagcacacgatgtcggagcggaagcggcgggagaagctcaacgacagcttcgtcgccctcaaggccgtcctccctcccggctccaagaaagacaagacgtcgatactgatcagagcaagggagtacgtgaagtctctcgagtcaaagctgtcggagctggaggagaagaaccgggagctcgaggcgcggctgtccacccgccccgacgacaccaagaacgacgaagaggaggtggcggcgccaccggaggccggcggcgaggtgaagagagaggatccggtagagatcgaggctttagataatttttttataagatga

SEQ ID NO: 21570 - DNA, 1506 bp, Oryza sativa
  Clone ID: TF_OsC80863_1
ccaaagaaacaaaggggcgcttgtttttgcctaaggagagcccaagggcaatgccaaaaaagagccccctccttctaataaaatggaccctagctttagaccaactttttttttttttttttttaggaacagtagcaatagctctctttttatattaacaaaataatttcatgaagtagagtacaatggtggtggcagtgcagccgttgaggaaatcttcatgggcagaacctaaccaaataaggagctacaaaatattacaaagtctctgaaaaatgtgtagaaaactctacttgcttgctgttcttccctccaaaatcctcttacaatgttgtagactgcctccagacaaggggatggactagatccaacatctcaaacttatctggtgcattgcatgctcctaccaatcttgcagcattattatttcctcctattgtcaatgtggggtccttttttcttgctttctctgtcactcttcccctactggaaagagcacatgttgttgaacaccaattgattgagcatctcctgctgccttggctcccccactgcttgcatcaggtaactgccattgtcctgagagaaagagatggctccatgctggctttgcagtgagtaggatgtggttgaggttgtgtccatgatagcttgagatggagctgggcttgattggttcagtactggattaggcattgcaagggcttcttggaacatgcctccaatcttttggtcatggaggccatcgctgtccattccaaagccatacaacactgggctcattgaagcaatcctcatggataggaactcaacttggttctgcaacgactgtacatagttgatgatctcatccaaaatgagagcctttccagtaaccttgtcacaaccagggaccagtgcttgcagcatcctcatcctctcactgatcctctccctcctcaccctctctgcaaggctgtggctatcagttgcctgtcctctccttgccctcacatggatgtacccttttggaggctcatcttcagtggtgctcttctcctccacttctttgctggccttcttccctctcctgctcttgccatccttgcagctatccttggagtgtgcactgtcttctgctgccttcctcttcctgtccacagatggagaggtgtcaagaactgcagacactgagctctccaatgaggcatcctccacaatggctgctgctgctgcattggcaggttgtggagcttgggagccatggctgtggttgtagaggaagaagcttgagatgttggggtcattggtggtggcgatggctgctccagcagcagtagccttgaggaggagagagtggtgtggtgagaagtctgccatggctccccgcctgcggttctctctgtggctggggcgtcggggggttgttgagtccaagtctggtttcttcagtgaattgagggctacgtcggctccgcgcgccgcttccggcggccccggtgtccccctcgtgccgaattcctgcag

SEQ ID NO: 21571 - DNA, 849 bp, Oryza sativa
  Clone ID: TF_OsC80863_2
ctactggaaagagcacatgtaattattgagcaccacttgattgaacagttcttgccttggctcccctactgtttgcatgatgtagctgccattgtcctgggagagagagttgttgttgctgcctccctggacttgaagtgtgtagggtgtaggagaggtgtttgatgtgtccatgatggcatgagattgagctgggctactacctctgttcaggacagaagctggtattgcaactgcctcatggaacattccttccatcttctgagagtggtcactgaaagcatcactgtctatgccaaacccatacagcacagggctcagagatgcaatcctcatggaaaggaactcaacttggttctgtaaggactgcacatagttgatgatctcatccaaaatgagagcctttccagtgaccttgtcacaaccagggaccagagcctgcagcatcctcatcctctcactgatcctttctctcctcaccctctctgcaaggctgtggctatctgttgcttgccctctccttgccctgacatggatgaacccctgaggtgcctcctcctccatctgatccctgctgtgtttcttccctcccctcttcctgccattctcctttgcctccttggagtgagcagagttgaggctggcagtgtcttcttccctgggcttcctcttcttgtcctgtggagaggtgtcaagaaccacagatgaggtctccattgaggcatcttcagggatggctggagctgtggtggttgctgctcctccatggctgccatggcagaagaggaagccattgttggtgatgaggccatgctccatctgctgtgggaggtgtgagaagcctgccat

SEQ ID NO: 21572 - DNA, 1045 bp, Oryza sativa
  Clone ID: TF_OsC123144_1
accaattatcatgtacatgaagtgatcaaatctcacccacaagcatatctctcgcaccattccaccctatagaaacgagataacaagacgctgtttgcactagctatttgacagccgacaagaaccagttaggtaaaactcagtaggatgcaggtttgaatggctgaatgccaacctctgcaactgcaagaaggcaagaaactgcaagagctgcagccatacgatggctgcaatccttcagtgtacagaggcccaattctgctgccccggcaggccaactcggcgccgccggccgtgccgccggagatgtcgtcctcgtcggggtcagggagaagcgcgacggaggcgagagcgttgaagatccacagcgaggctgaacggcggcggcgagagaggatcaatgctcatctgacaacactgaggagaatgatccctgatactaagcagatggacaaggccaccttgttagccagagtggtggaccaagtgaaggatctgaagaggaaagcaagtgagatcacacaaagaacacctctccctccagagaccaacgaagtctccatcgaatgcttcaccggagacgctgccaccgccgccaccactgtcgccggcaaccacaagaccttgtacatcaaggcttccatcagctgcgacgaccggccggacctcatcgccgggatcacccacgcattccatggcctgaggctgaggacggtcagagcagagatgacatcactgggaggaagggtgcagcatgtgttcatattgtgcagggaggaaggcattgcaggtggtgtgagcctcaagtctctgaaggaggctgtcaggcaggcactagccaaggttgcctctcctgaattggtatatggcagcagtcactttcagagcaagaggcagaggatcctggagtcacattgctcaattatgtccatatagatttgttcctcttctggggattttgattttatttttctactagctgagaatatgtatgaaataagagagagaatcttcttcttctgagagctaaaaaaaaaaaaaaaaa

SEQ ID NO: 21573 - DNA, 1165 bp, Oryza sativa
  Clone ID: TF_OsC14042_1
atggcggagaccaaccacctcctcctcctcctcctctctcctccgcgcctccgcctcctctcctggactcccacgactcctcttgcgtgtgctgcgttgagtcgagcagccaagctgtctcgtgatctcgtctcggagaagggagaacgaggcatccggtcgttcaaaaaaaatattgctgaacaacatatgcatgccagcttagggctggaccagctagcagccattggtagcctgtatcagttcataaggggaggaggtgaaggcaaggaggcagctagccaagaagaagagcagacaccaaaactcagatctgttattgcacatcttgtttccaggaagaggagaagggataggatcaatgagaagctgaaggcgctgcaagagctacttccaaattgcaccaagaccgacaaagtttcgatgctggatgaagcgatcgactacctgaaatcactccaactacaactccagatgctggtcatggggaagggaatggcaccggttgttcctcctgagctgcaacaatacatgcactatatcacagctgatccttctcaaattcctcccatacgcccctccgagccgcggccatttcagataacccacgccacccaacagagacagtctaacgtcgagtcggatttcttgagccagatgcagaatttgcacccttcagagccacctcaaaatttcctcagaccaccaaaattgcagttgtacacgccggagcagcagagaagaggtctagctagtagcagtggccacaacagcggttggatcacggagaggaattcatcgtacaacttcttggagtgatgaccacctgacgagttactaagagatccagaagcagatgcagtctagactctactactctagactgcataaccttcattcagttcatggtgttcctggagatgaaacaagttgctcaatggagtgatgaatctactgcatgcagttaactagttaattttgtacgtcaaataaatagtggtgatcctgatcttgcttcctcgtcatgttctgtgcatacaagacctaaagcgttttttgtgatctctgtactgtatattagcagacagtctacttcctgctgctgatgcttatgtgctctgacaagcaaatcacatggctaatttaatcaaaaaaaaaaaaaaaa

SEQ ID NO: 21574 - DNA, 2492 bp, Oryza sativa
  Clone ID: TF_OsC10538_1
cagttaccaatagctatcagctgatgcctctctcttccatctgttgatcactgccacagttcgtcagttagtttgaagcgatctcaggaagacagaagggcaagggtgatcaccacatgggaagaggagaccacctgctgatgaagaacagcaatgctgctgcagctgcagctgctgcagagaggccacacacacacaagcacaacacaaaagtggccatggctctcctcctctcctaccccaggcgccacccatccatccacctcctcatcctctccgcctacgccctcttcctcctcccaatcttggatggattggagctgggaggagatgggctctacagggagatcctcagggatgagacggtgctcaggctcaaagaacttggcaagatatctgatggggaaggttaccttgagaggacatttttgagtcctgcctcaatcagagcctctgctgtcattatcagctggatgaaagatgccggacttaccacgtggattgatcaaatggggaatattcatggtcgatttgaaccgaccaactcaatcaaggaggcaccagttgcggatgttgcattgagacctttagttggtgatggctgggattagacgagtgataatcaattttctgcatctactggaggctctctcctgatggttcttggagatgacaggattctgctgcagcagtgagcttgaagcacaggtctcagcactgctggacctgccttcttcaatcccactggactcctcctccatagggatgcatgcgcaggcattgctgtcgaaccagccgatctggcagagcagcagtgaggaggaggaggctgatggcggcggtggcgccaagacgcggctgctggtccccgtcgccggcggcctcgtcgagctcttcgcgtcgagatatatggcggagcagcagcagcggtcataccaggccaggtgaacttcacggtggacatacgcgccatggacgacaaggtgagggagacgatcgtcaccagcttctcgaggcttgttcttcagagatgcgacgacagattggtcgactgcgccgtcgagcagaagcacgcggcggcggcgacgccgtgcgacgcggagctgacgtcgcggctggagcgcgcgacgcggtcgacgatctcgtcgatggcggcgggcgtgcgccgggccggcggcgagacgccggtgctgatgagcggagcggggcacgacgcgatggcgatggcgaggctgacgaaggtggggatgctgttcgtgcggtgccgcggcggcgtgagccactcgccggaggagtccgtgatggacgacgacgtctgggccgccggcctcgcgctggtcaacttcattgaccagaacgcggtggatgcggcggcggcgacggcggcggaatcgtgacgacgacggcggcgattcttttggtaggtgtgtgcctagtagcctacaaattgtaaatatggatttgcttgttacatttgtcaagaaataaaattgaattcaattcgttgagacgttcaaaaaaaaaaaaaaaaaaaaaaaaaaaaggggcgctccggcggcgccaagaggcagcagtgcaagaacctcgaggcggagaggaagcggaggaagaagctcaatggccacctctacaagctccgctcgctcgtcccaaacatcaccaagatggatcgcgcgtcgattcttggagacgcgatcgactacatcgtggggttgcagaagcaggtgaaggagctgcaggacgagctggaagacaaccatgtccaccataagccgcccgacgtgctcatcgaccacccgccgccggcgagcctcgtcgggctcgacaacgacgacgcctcgccgcccaacagccaccaacagcagccgccgctcgccgtttccggcagcagcagcaggaggagtaacaaggacccagcaatgaccgacgacaaggtcggcggcggcggcggcggtgggcaccggatggagccgcagctggaggtgcgtcaggtgcaggggaacgagctgttcgtccaggtgctctgggagcacaagcccggcgggttcgtccgcctcatggacgccatgaacgcgctcggcctcgaggtcatcaacgtcaacgtcaccacctacaagaccctcgtcctcaacgtcttccgcgtcatggtagtgagggacagcgaggtggcggtgcaggcggacagggtgagggactcgctgctggaggtgacgcgggagacgtaccccggcgtgtggccgtcgccgcaggaggaggacgacgccaagttcgacggcggcgacggcgggcaggctgcggcggcggcggcggcggccggtggagagcactaccacgacgaagtcggcggcggataccatcagcacctgcattacctcgcgtttgattgatgatgatgattgattttaccatctacgtctcactactagtgtatacacactcgaattattcgagaaagaaacataatgctacgtactagtaataatggatttgat

SEQ ID NO: 21575 - DNA, 625 bp, Oryza sativa
  Clone ID: TF_LIB4830-002-R1-N1-A10
ccggccgggactcctcccccactctctctctctctcctctctctctctctcgcccctcgcgccaccgcgccaggagctcgcgccgcgcctcgcctcgccgacgaagacgacgaggaggtcggtggtcgtggtggtctggtttggtgtccatccatggcggggcagcagccgccgacgggaggagccgaggacgacttcttcgaccacttcttcagcatcccctccgccgccgcggccggcgccggcggcgtcggcggattcggctcgggtgaccaccaccccttcccgctcgcgctcagccccggccaaaggtgcgggcgcggcgcgggcaggccaccgatccccacagtatcgctgagaggctaaggagagagagaatagccgaaaggatgagggccctgcaggacttggtccccaacacaaacaagacagacagggcagctatgctagacgaaatccttgattatgtgaagtttcttcggcttcaagtaaaggttctgagtatgagcaggctgggtggtgctggtgcagttgcgcagctggttgctgatattccaatctcagttaagctgttcttgcactgtacattgccggtgatcacacggaatgtccagggtttctcttt

SEQ ID NO: 21576 - DNA, 1196 bp, Oryza sativa
  Clone ID: TF_OsC33145_1
ctctctctctctccgcgagctgctccccgcccctcgcgccacgcgtcgccgacgtcgaggcggcggtcgccgtcgccatcgagacgacgaggaggtcggcagccgtggtggtctggcccaccggccatccatggcggggcagcagccgccgacgggaggagccgaggacgacttcttcgaccacttcttcagcatcccctccgccgccgcggccggcgccggcggcgtcggcggattcggctcgggtgaccaccaccccttcccgctcgcgctcagcctcgacgccgagggcgccggtgccgccaggcgcctcctcgacggcggccacgacggcggcaggacggaccgggaccccgtgcagctcgccggcctcttcgccccggtgttcggcgccgccgccggagtccagccgccgcacctccgcgccccgccgcctccccaggtgttccacgcgcagccgaagcccggggagggggccatggcggcgccgcagcctcagcagccaccggcgccccggccaaaggtgcgggcgcggcgcgggcaggccaccgatccccacagtatcgctgagaggctaaggagagagagaatagccgaaaggatgagggccctgcaggacttggtccccaacacaaacaagacagacagggcagctatgctagacgaaatccttgattatgtgaagtttcttcggcttcaagtaaaggttctgagtatgagcaggctgggtggtgctggtgcagttgcgcagctggttgctgatattccaatctcagttaagggggaggcaagtgacagtgggagcaaacaacagatttgggaaaagtggtcaaccgatggcacagaaaagcaggtagcgaagctgatggaagaagacatcggagcagcaatgcaattcctccaatccaaagcactatgcatgatgccaatctctcttgcgatggcgatctatgacacacagcattcgcaggacggacactcagtgaagcctgaacccaacactccttcatagtatagtaacaataacactagcatgcacacctactactactaggcgtcgacctatccaaagtgtaggatatactggacattttgatttgctaactggaaaaggcctaaggatcctctcctcaaagtagtacccatggtatatgatgtcgtctcctcttttcttcttttcttcaaaaggtgctttg

SEQ ID NO: 21577 - DNA, 1590 bp, Oryza sativa
  Clone ID: TF_OsC16721_2
tcttgccccaacttgcatccatatcttgagttgagcccaatgaacaagggcaacttccttgaatgccaggcacccatttgttgtcgccggcagcggcagcggcattgtcaaagacaaaggaaagagggcactcctgtggctgcagcactattggtgctaatgaaagaagcagtggctgctcatctcgacctggtgaagagagccctgctgctggccttgctctccaacttgcatcaccaccatgttaatgtggctgctgccatcctgagcaaagcctgtgggtcctcctcctagtccttggagtgaaatgcctgtactccccatttggcccatgcactgcaccatctcatgtggcatctttgcaagctgtcgaagaacatctgggtgcatatcaatgcccggtccaaactcatacatcaaagggctaagggaggcaagcttcatggacagaaactcaacttggttctgcagagattgcacatagctgatgatctcatctagcatgagggctttccctgtgaccttgtcacaaccaggaaccaggctttgcagcatcttcatcctctcactgatcttctcccttctcaccctctcagcaaggctgtggctgtctgttgcttggcctctccttgccctcacatgaatgtacccagctggtggctccccacctgctgcctccttggccttcttcttcacatcatcatcatgttgatgtagtaccacccttcttgcctttttctcctcaagtcccttcaagcccacattgctcctcttgtgctttctactcttgccccaacttgcatccatatcttgagttgagcccaatgaacaagggcaacttccttgaatgccaggcacccatttgttgtcgccggcagcggcagcggcattgtcaaagacaaaggaaagagggcactcctgtggctgcagcactattggtgagtacaccattggcattgaggtggggtcaagggagctgcagctgctgctctcatactcataggccgccatggctgctgctgccttctcttcaaggttgctgcagccggcagggaagcctgggacaggaagaggctcgacaaaggaaacaacggagaccagcgacccatatttccccacaagtctcttagccaattcaaacttctgttggggaggtctctcagcaagaatatcaagtggaaacatgggcgttgagtaagcctcctgaagtgcggcctttgtgggaacacggtatgtgataatggcaggagagccctgaaacttgccctgcactttggtctccaagatgaagttgtgggaagcagtagcaccaggatcaagtttttccacaatctttgatgtggttccagagataagttgaaaagcctcctgtggccaagagtcgtcgttcaagctaacatcataggcggtcgcggaaccctggttgtagaggttgagggtgacggcgaggcgctccacgcctggacccgggcgggacagcgcaaccttcttctgtgctaccacgaacggcgcatcctgcccggcggcggcggcgaagggcacgaggaggaggaggaggaggaagaggagagatcgccactgctgcgccat

SEQ ID NO: 21578 - DNA, 2372 bp, Oryza sativa
  Clone ID: TF_OsC8567_1
gcacgaggcctcctggtatcttttatctcaaccctcctgtatgaagcttcggttgcgatccatggaccagcgcggcggcgccggcggcgccgccgagacccaccgcgtgcagctgccggacacggccacgctctccgacgtcaaggccttcctcgccaccatgctgtccgcggcgcagcccgtgcccgccgagtcggtgcgcctcaccctcaagggcattgaggagctcctcacccccgacccctccgctcgcctcccggccctcgggctcgcgtccggtgttctcctctacttcacgctctcccccctcccgtcgccctcgcctccgccgccgccgcagccacaggcccaacccctgccccgtaaccctaaccctgatgtcccctcgatcgcgggagctagctgacccgaccaaatctcctgtggagtctggtagctcctcgtcgatgccgcaagctttgtgcacgaatcctggcttacctgtcgcatccgatccgcatcatcctccaccggatgtggtgatggcggaggccttcgccgtgatcaagagcaagtcgagtctcgtcgtcggggctacgaagagagagatggagaatgtcggtggtgcggatggaaccgtcatctgtcgccttgtcgtggcgctgcatgcggccttgctcgatgccggcttcctctatgcaaacccggtggggtcttgccttcagctgccacagaattgggcgtcaggttcttttgtccccgtatcgatgaagtacaccctgccagagcttgtagaagcgttacctgcggttgaggaggggatggtggcagtgctgaactactccttgatggggaattttatgatggtgtatgggcatgtgcctggggcaacatcgggggtgcgaaggttgtgcttggagctgccggagcttgcgcctttgttgtacttggatagtgatgaggtgagcacagcagaggagagggaaattcatgagctgtggagggtcctgaaggatgagatgtgcttgcctctgatgatatcgttgtgtcaactgaacaatttgagcttgccaccgtgcttgatggcgctgccaggtgatgtcaaggcaaaggtcctggagtttgttcctggggtggatcttgcaagggttcaatgcacgtgcaaggaattgagggatcttgctgcagatgataatctttggaagaagaagtgtgagatggagttcaatactcaaggtgaatgtggttgtgtggtgtggaaatgcatttactctgaccaaaggaaggatatcgtactagctgataagtatacctgtggtaattatatgcagaagcccgtcacacaacctggtaggtggcttattatattagtctaccattccctactttgccagtacatcactattgggttgagtttgctgtggtatcatttggttgatttggttcaggatgctcctgcagcaggcattcactttgactgtattattccactgccaatcaatccttaccagcttcccccatctgctggtgcctgctgctcaacaactcaagcttcagcatcagcaaaagatggtggcaatatgtattcccctccctgcagtgctgctgcaagcagccaagggcattgtttcgcggtcggagctaaccagcttgcttcgcttgaccttgccatggacttcgacgagcctatcctttttcctgtgcataatgcaagtttgcaagaggggattcagttttacaatcctaccggcgatactcagctaagtagaaacatgagcattgacaagtgtttgaagggcagtaaaaggaagggctcaggcgagggcagttcatcgctacattcccaagaggaaaccggtgaaatgcctcagagagaactcagcatggagcatgccggagagaaggcgggtgatgctgacgctagcagggaggagtacgtgcatgtccgggcaaaacgcggccaggcgaccaacagccacagccttgcagaaagatttcgaagggagaagataaacgaaaggatgaagcttctgcaggacctcgtcccaggatgcaacaagattacagggaaggccatgatgctcgacgagatcataaactacgtccagtctctgcagcgacaggtggagttcctctcgatgaagctctcgacaatcagtcctgagttgaactctgacctcgacctgcaagatatcctttgttcacaagatgctcgctccgcatttctgggatgcagcccgcaattgagcaatgcccatcctaacctttacagggcggctcagcaatgcctctcacctcctggcttgtacgggagtgtgtgtgtcccaaatcccgcagatgttcatttggcaagggccggtcacttggcttcgtttcctcaggtctacatctaa

SEQ ID NO: 21579 - DNA, 1086 bp, Oryza sativa; identical to SEQ ID NO: 11934
  Clone ID: TF_OsC349240_1

SEQ ID NO: 21580 - DNA, 1554 bp, Oryza sativa
  Clone ID: TF_OsC14034_1
atggcgtctctactcggactcctcttctcttctcttctcttctcagagcgctgcgaggcaaggaggcgagcaagaagcggcggcgaggttgccatggacgaggcggaggcggcggcggcggcggcgaagatggacgagctggcgggaggaggaggaggaggcggcggcgactggtcgtacctcgcggcggacgcgctggcggcggcgtcgttcacggcgttcccgttccaccaccaccaccaccaccaccaccgcgacgtgctctcggcgtcgaccccgtcgtcgctgctcctcaacatggacgcggccaccgccgcggccatgttcgacttccaggcggccttcccgtcgtcctccgtcccgccgccgccgcccacgacgacggcggcgctcccgccgttccacgacttcgcctcctccaacccgttcgacgacgcgccgcccccgttcctcgcgccgccggggcagaagctcgggttcctggggccccccggcggcgcgttcggcggcgggatggggtgggacgacgacgacgagatcgagcagagcgtggacgcctcgtccatgggtgtctcggcctcgctggagaatgccgcgcccgtggcggccggaggaggcggcggcggtggcggcggcggtgggaggggcaagaagaaggggatgccggccaagaacctcatggcggagcggcggcgcaggaagaagctcaacgaccgcctctacatgctgcgctccgtggtgcccaagatcagcaagatggacagagcttctatccttggtgatgcaattgagtacttgaaggagctcctgcagaggattaacgatcttcacaatgaacttgagtctgctcctagctcttcgcttactggaccatcatcggctagcttccacccatcaacacccacattgcagacgtttcctggccgcgttaaggaggaactttgcccaacctcatttccaagccctagtggtcaacaagccacggtcgaagttaggatgagggaaggtcatgcagtcaatatccacatgttctgcgcacgcaggcccggcattctgatgtccacattgagggctctcgacagccttggcctcgggatcgagcaggcggtcatcagctgtttcaatgggtttgcaatggatgttttccgcgccgagcaatgcagggatggtcctggactcgggcctgaagaaattaagaccgtgctcctgcactctgctggccttcagaacgcaatgtaatcagcaagtcagaaagcagtcaagaccaatgcactgggatttgatcagtgatcatttgcatcagatgatctggtttatcaaaaagttatagtaagtatggcatatatgctgtttatctaggagaactgatgagatgaggctcgccatctagagacatgtgtgatgatgatgatgtaactgggtttctttctttctgttgtcgtttttttttctgaatgttgtttgtgatgtaataggatctttgtccattgaaaccatgtccattatcatgatgagaatatgaacccagtgtttttgaatgaaaaaaaaaagaaa

SEQ ID NO: 21581 - DNA, 1479 bp, Oryza sativa; identical to SEQ ID NO: 11936
  Clone ID: TF_OsC352120_1

SEQ ID NO: 21582 - DNA, 1485 bp, Oryza sativa; identical to SEQ ID NO: 11944
  Clone ID: TF_OsC189424_1

SEQ ID NO: 21583 - DNA, 1275 bp, Oryza sativa; identical to SEQ ID NO: 11943
  Clone ID: TF_OsC731_1

SEQ ID NO: 21584 - DNA, 1092 bp, Oryza sativa; identical to SEQ ID NO: 11940
  Clone ID: TF_OsC150404_1

SEQ ID NO: 21585 - DNA, 550 bp, Oryza sativa
  unsure (1)..(550): unsure at all n locations
  Clone ID: TF_LIB4309-014-Q1-K1-A3
ctcttctcttctctggtggtgtgggtgtgtccctgtctcccctctccttcctcctctcctttcccctcctctcttcccccctctcacaagagagagagcgccagactctccccaggtgaggattcagccatgaagggggccaaatccaagggcgccgccaagcccgacgccaagttggctgtgaagagtaagggcgcggagaaacccgccgccaagggcaggaaggggaagggcggcaaggaccccaacaagcccaagagggctccctccgctttcttcgtttttatggaggaggtccgtaagggggtcaaggggaagaaccccaagaataaatctggcgctggtgtgggaaaagcaccccgtgataggtgggaaaccctggcccgagcggacaagggttcctatgttgcccagggccaccagctcaagggcgggttccacaagggccttggtggctccctccagggcgggagcgctgcccataaaggaccccccccagggggagaggggggccncctcggggggatttgtcccggttccctttcccggg

SEQ ID NO: 21586 - DNA, 345 bp, Oryza sativa
  Clone ID: TF_uC-osflcyp019f08b1
cttctcttctctggtggtgtgggtgggtgcctgtttaccctctcctgcctactatccttcaccctcctctgttcccccttctcacaagagagagagcgccagactctccccaggattcagccatgaagggggccaaatgcaagggcgccgacaagcccgacgccaagttggctgcgaagagtaaggacgcggagacgcccgccgccaagggcaggaaggggaaggcctccaaggaccccaacaagcccaagaggaatccctccgctttcttcggttttatggaggagttccgaaaggagtccaaggagaggaaccccaagaataaatcagtcgctgctgcaagaa

SEQ ID NO: 21587 - DNA, 348 bp, Oryza sativa
  unsure (1)..(348): unsure at all n locations
  Clone ID: TF_2280684
acaaggctccctatgtagccaaggccaacaagctcaaggccgagtacaacaaggccattgctgcctacaacaagggcgagacactgccaagaaggacccgcaaggaggagaggaggcgcgaggaggatctacaagtccaagtccgggtaatatgaggttacgcgaggcangagagatgagcgtncgagtnaccttcagtgncaagatgggagcagaagcgtaagggcgcgggcgtctaaggagctatccatcatcatcatcgctactagattattcagttacttacatcgnatgtttctttttctctcgtctataacgntagcgtcttgttgngcactggtgggtgtt

SEQ ID NO: 21588 - DNA, 550 bp, Oryza sativa
  unsure (1)..(550): unsure at all n locations
  Clone ID: TF_2800810
tttcgacaagactggaactccacgcggtggcggccgctctataactagtggatcccccgggctgcacgaattcggcacgacgtgttcatggaccacttcacgaatgactacaacgacaaccaccccaacgtcacgcacgtctcggtgattggcaacgctggtggtgacaactggaactccatgactgatgctgacaaggctcctttcgtgaccaatgctgacaagctcaacgctgactacaccaacaatattgacgcctacaacaacaagcatgcatgaggcccggctacctcaggcgactctgacaagtccaactccgacgtgaacaccacgactacggcatctgtgacaagggggggcccggtacccaattcgccctatagttgagtcttattacaattcacttggccctcgtttttacaactctttgactgggaaaaaccttggcgtttaccccaactttaatcccccttgcaaccacatcccccctttcccccagctttggcctttattaaccaaaaaaggccccccacccnattccccttnccca

SEQ ID NO: 21589 - DNA, 695 bp, Oryza sativa
  Clone ID: TF_LIB4833-020-R1-N2-D9
caccatgatcctcccctcccttgcctgcctcatcgctttctcacctcgctctctgtcccgcccgtctcacaaagagatgagacgagctgctactactcctccccagggtgagtgattcatgccatgtacaggggcgcaacaccgagggcgccgccaagaccggacgccaagatgagctgtcgaatagcacctgcatgcggcataagcccgctcgccaaggcgacgaaggggacaggccgctaagtgaccccaataagtccaagaggactccctccgctttcttctcttttatggaggagatccggaaggagttcaaggagaacaacccacaagaataaatctgtcgctgatgcatgaaaagcagacggtgatatgtgtgaatccctgaccgaagcggacaaggatccctatgtagcctaggacaacaagctcaaggacgagtacaacaagggcattgctgtctactacaagggcgagagtgctgccaagaacgcacccgacaaggaggaagaggaggacgacgatgagagatctgacgagtccaagtccgaggtcatagatgaggatgacgacgagtgcatcgaagaggatgtacacgatgacgagtgagcctttcagtgtacaagatgggagcagcaagacgctaagggcggcgggcgtcctaaggagcctatccatcatcatcatcatcgtct

SEQ ID NO: 21590 - DNA, 291 bp, Oryza sativa
  unsure (1)..(291): unsure at all n locations
  Clone ID: TF_473985
angnacggttcgccnntttataaaccaaattccccancggcggttcgttcttgncgatcccgagggctngagatnaaggcgaggtcgaggtccancaattgcgnctncanggtntnggtgaggaagnccnaggcggagaaggacccgaacaagccgaagaggccaccgagcgcgttcttcgtgttcatngagcagttcangaaggncttcaaggagnagnaccccaacgtcaagcangtcttggtgatttgcaaggcttgtggtgacaagtggaagtccatgacttatgct

SEQ ID NO: 21591 - DNA, 601 bp, Oryza sativa
  Clone ID: TF_LIB4831-025-R1-N1-E10
cttctctgtcggtgtgggtgagtacctgtctcccctccttcctcctctcctttcccctcctctattcttccctctcaaagacagatagatagtcatactctccccagctgaggattcattcatgaagggagtcaaatccaagggcgccatcaagtccgacgccatgttgtgtgtgaagagtaaaggcgtggacaatgccgccgccaagggaaggaaggggaaggccggcaaggaccccaactagttcaagagggctccctccgctttcttcgattttatggaggagttccgtaaggagttccaggagaataaccccatgaataaatctgttgctggtgtaggaaaaacaaccggtgataggagtaaatccctgatcgaagtgcacaaggctccctatgtatactatggccaacaagtctcaaggccgagtacaactaggccattgctgcctacgacaagggtgtagagcactgtaccagaaggtacccgactaagtacgtaataggattgaccacgaggaggaatctgacaagctcaagtccgaggtcattgatgagtatgacgacgaggtcagcgcataggttgtcgactatgacgagtg

SEQ ID NO: 21592 - DNA, 893 bp, Oryza sativa
  Clone ID: TF_8334942
ccacccctcgccgccgccgccgccgccgccttcgtcgtcttctgccgtcgagcagcagcagcagtgcctttcaccatgccgaagcagatccacgagatcaaggacttcctcctgacggcgaggaggaaggacgcgcggtcggtgcggatcaagaggaccaaggacgccgacaagttcaaggtcgcgggctccaagggcctgtacaccactgtgcgtatcaagcgccaacaggctcaccaagcttaagtcgttgttctggaggagttcctctgggaattcaatgataacatccccactgattaagctgtcggtgctgtaggaaaagcagcctccgataggtagaaatacctgaccgaagcggacaatgatccctatgtagcctaggccaacaagctcaaggccgagtacaacaaggccattgctgcctacaaacaagggcgagagcactgtctagaaagcaccccccaaggaggaagaggatgaccaccaggggggaatttgacaagtccaagtccgaagtctattgattatggtgactacgacgggcagctaaaatgatgattactattacgattgaaccctttccatggtcaagatgggagcagcaaaaccctaagggctgcgtgcgtttctaaggagcctttccaacattataattaattgacttctaggaggtatttcactttccctctacatacctgatggtttaactttttattctcccctataaacggatagcgctcctatttggccccaactgggtggtgttgttgtgccacccaattgatttggtcctcctcgacaatgaatcttttgtacctagataaactttctaaatggtcatgggctgacctttgtttacataatagttagccgctttctatattaaaaat

SEQ ID NO: 21593 - DNA, 570 bp, Oryza sativa
  Clone ID: TF_8955664
aattcggcacgagcttctcttctctggtggtgtgggtgtgtcctgtctcccctctccttcctcctctcctttcccctcctctcttcccccctctcacaagagagagagcgccagactctccccaggrttcagccatgaagggggccaaatccaagggcgccgccaagcccgacggcaagttggctgtgaagagtaagggcgcggagaagcccgccgccaaggrcaggaaggggaaggccgacaaggaccccaacaagcccaagagggctccctcctkctttcttcgtttttatagaggagttccgtaagagttcacggagaagaaccccaagaatawatctgtcgctgctrtaggaaaagcagccggtgataggtggaaatcctsaccgcagcagacacggctcctatgtagccaaggccaacaagctcaaggccgagtacaccaaggccattgctgcctacaacaagggcgagagcactgccargaaggcacccgccaaggaggaagaggaggacgacgaggaggatctacagtccaagtccgaggtaattattaggatgacgacgagg

SEQ ID NO: 21594 - DNA, 2474 bp, Oryza sativa
  Clone ID: TF_OsC922_1
gcacgagcgccgcgccgcctccgcagcagcagagcctctcgaaattttgggcctcgccgcggagcgcgaagagagatcgagggcggcggagctgcgcgtgggtagcaagcggcggcggaggcggaggcggcggagatgacggacggccatctcttcaacaacatcctcctcggcggccgcgccggctcgaatcctggccagtttaaagtgtattctggaggtcttgcatggaagagacagggtggaggaaagaccattgagattgagaaatctgatttaacgtcggtgacatggatgaaagtccccagggcctatcagcttggagtcaggaccaaagatggcctgttttacaagtttattggcttccgtgaacaggatgtaagcagtctgaccaatttcatgcaaaagaatatgggcctctcaccagatgaaaaacagctttctgttagtggtcaaaactggggagggattgatataaatggaaatatgcttaccttcatggttggttcaaagcaagcatttgaagtgtcgctggcagatgtctcacaaacccaaatgcaaggcaaaacagatgttctcttagagtttcatgttgatgatactactgggggcaatgagaaagattcgcttatggatttaagctttcatgtacctacttcaaatactcagtttcttggagatgagaatcgcactgcagcccaggtcctatgggaaacaataatgggtgttgctgatgttgattcttctgaagaggcagttgtcacctttgaaggaattgctattcttacaccaagaggacgttatagtgttgagcttcatctgtcatttttgcgtctccaaggacaagctaatgattttaaaatccaatatagcagcattgttcgcctttttcttttgccaaagtcaaacaaccctcatacatttgtggttgtcactcttgatccaccaatccgtaaaggacaaacactgtatcctcacattgtcattcagtttgagacagaggcagtagttgaaagaaatctggcattaactaaagaggttctggctgaaaaatacaaggacaggctggaggaatcttacaagggtctgatacatgaggtattcaccaaagttcttcgtggtctatctggtgctaaagttacaaggccaggttctttcagaagttgccaagatgggtatgcagttaaatcgtctctcaaagctgaagatggactgttgtatccacttgaaaagggcttcttctttctgccaaagcctcccaccctcattctacatgaagagattgagtttgttgaatttgaacgtcatggtgctgggggtgccagtatttcatcacactatttcgacctcctagtcaagctgaaaaatgatcaagaacatctcttcagaaatattcaaaggagtgaataccataacctcttcaactttatcaatggaaaacacttgaaaataatgaaccttggagatggtcaaggcgcaactggtggggttacagctgttctacgagacactgatgatgatgctgttgatccacatctagaacgaattaaaaatcaggctggggatgaggaaagtgatgaagaggatgaagattttgttgcggataaggatgatagtggatcacctactgatgattctggtggggaggattcagatgctagtgaaagtgggggtgaaaaagagaaattatccaaaaaggaagctagtagttcaaagccacctgtgaagaggaagcctaagggaagggatgaagaaggttcagagaaaagaaagccgaagaagaaaaaggatcctaatgcccccaaaagagcaatgacaccattcatgtacttctcaatggctgagcgaggaaatatgaagaataacaatcctgatttgcctacaaccgagattgcaaagaagctcggggagatgtggcaaaagatgacaggcgaagagaagcaaccttacatccaacagtctcaagtcgacaagaaacgatacgagaaggaatctgctgtctaccgtggcgcagccgccatggacgtggactctggctccggcggcaacgagtctgactagagccacacactgacactttggcggttggcgtaatgaagaaatttgttaatccctggaaccactgatgcagtttgggcactgaaatcttctcagctattaaccttgcattgcgctggatgatccgatccatgtgtttgcgtacgatggtatcggctgttctcgccgtggggtgactcgatcacaaaccgttactgtctgtgtacgccgacacgagcgatatccctcggaagcatcgtgctgttaagaagtgcttaatttggcgtagcatctatctcgaatgcaagactctgttagcctatgagcttttgtaaaacaggaagaatgatttgtataacaaaaatttaccatggattggttatgttataacatagtgatttaagaactaaaaaaaaaaaaaaaaaaaaaaatattct

SEQ ID NO: 21595 - DNA, 444 bp, Oryza sativa
  unsure (1)..(444): unsure at all n locations
  Clone ID: TF_8955997
ggtggtgtgggtgtgtcctgtctcccctctccttcctcctctcctttcccctcctctcttcccccctctcacaagagagagagcgccagactctccccaggattcagccatgaagggggccaaatccaagggcgccgccaagcccgacgccaagttggctgtgaagantnagggcgcgganaaacccgccgccaagggcaggaaggggaaggccggcaaggaccccaacnagcccaaganggctccctccgctttcttcgtttttatggangagttccgtaaggagttcaaggagaaaaaccccnagaataaatctgtcgctgctgtnggaaaagcaccggtgataggtggaaatccctgaccgaancggactnngctccctatgtaccaagccnacaagctcaaggncganttcaacaagccattgctgcctacaacaagggc

SEQ ID NO: 21596 - DNA, 441 bp, Oryza sativa; identical to SEQ ID NO: 12032
  Clone ID: TF_OsC1457_5

SEQ ID NO: 21597 - DNA, 2041 bp, Oryza sativa
  Clone ID: TF_OsC1301_1
cacatgtccaactacggccgggaaaaaaaaaaaaaaaaaaaaaaaaaaaaaaaaaaaaaaaaaaaaaaggcccgggctgcaggaattcggcacgaggaatcctcccgcccggcctcttctcttctctggtggtgtgggtgtgtccctgtctcccctccttcctcctctcctttcccctcctctcttcccccctctcacaagagagagagagcgccagactctccccaggtgaggattcagccatgaagggggccaaatccaagggcgccgccaagcccgacgccaagttggctgtgaagagtaagggcgcggagaagcccgccgccaagggcaggaaggggaaggccggcaaggaccccaacaagcccaagagggctccctccgctttcttcgtttttatggaggagttccgtaaggagttcaaggagaagaaccccaagaataaatctgtcgctgctgtaggaaaagcagccggtgataggtggaaatccctgaccgaagcggacaaggctccctatgtagccaaggccaacaagctcaaggccgagtacaacaaggccattgctgcctacaacaagggcgagagcactgccaagaaggcacccgccaaggaggaagaggaggacgacgaggaggaatctgacaagtccaagtccgaggtcaatgatgaggatgacgacgagggcagcgaagaggatgaagacgatgacgagtgagccttccagtggacaagatgggagcagcaagacgctaagggcggcgggcgtcctaaggagcctatccatcatcatcatcgtctactagaattattcagtttcacttcacatcgtgatgttttactttttctctcgtcctataacggatagcgctccttgttggcgccactggtgggtgttgtggtgcagccaatgtcttgtctccaccgtcaatgatccgcttgtacctagattactctttccattgtcatcggctaacattgtgataatatcagtttgcgtatgttagattaaattgtttctaaaaaaaaaaaaaaaaaaaaaaaaaaaaaaaaacaaaaaaaaaaaaaaaaagtcacaattcatcacactacaacaacgctaaaagcggatgcagcgtagcaaagatgagattcaggcaagggttgcacagctaaagaaggaactctccgaaactgattcgatatatgatacagagaaattggctgagaggattgcaaagctttctggtggtgtggctgtcatcaaggttggggctgcaactgagactgagcttgaggaccgccaactacgtatcgaggatgcgaagaatgcaactttcgcagctattgaggagggcattgttcctggaggtggtacagcgtatgtgcatctttcaactaccgtccctgcgatcaaagaaacaatcgaagaccatgatgagcgccttggtgcagacattattcaaaaggcgttggtagctcccgcttcactgattgcccacaatgctggagtggaaggggaagtggtagttgagaagatcaaggacggcgagtgggaagtcgggtacaatgcgatgaacgacaagtatgagaacttgattgaggcgggtgttattgacccagctaaggtgacgagatgcgcgctccagaatgccgcctcggtggctggaatggtccttaccacacaggccattgttgtcgagaagccgaagcccaaggctcctgttgctgagccggcagagggaacccttaccgtctaaacagtggtgaatttcttcagggtggctttgtttagatggttcataccaactgaaatggtagaatttttgtctgggagtttttggttcagatcaaccgaaaggtctagtgtaggattggtttccatttttgagattgaaggtgcaacctgcctgatctgaactcatatgtccatcaaagaaataatttgcatcattatcgtcatcttcggtttaaactttataaagtaaatcatatggtgtttcttcaaaaaaaaaaaaaaaaaaaaaaaaaaaaacggcctgcagcccggggatccactagttc

SEQ ID NO: 21598 - DNA, 261 bp, Oryza sativa
  unsure (1)..(261): unsure at all n locations
  Clone ID: TF_3763394
agaaggtnggcggcgccgcntngaccgccgacccgaaccggcccaagaagccggcgtcgtcgttcctgctgttcagcaaggaggcgaggcggcactggcggaggagcgccccggcgtngcgagctccacnctgaccgcgctcgtntcggtgaagtggaaggagctcggggaggcggagaagcaggcgtngaacngcaatgccgcggaggccatngcggcgtacaagagggacatngaggagtacaccaaggcggcggccac

SEQ ID NO: 21599 - DNA, 940 bp, Oryza sativa
  Clone ID: TF_OsC90143_1
cggcacgaggtttttttttttttttttttttttttttttttttttaaaaaagataaaccaaagatgcaccaataacggcacgaactgagtacacaacagaatatgaatacagcagacgcgattaacagaaagccaatcgcggactagtcatcagatcagtgaataagcaaaatagtttacacatgctgcggaggttcgcaaaagaaaagcagtcaacagtattcagcattttcttcgctactagttaaacagagacacctccagcatgccacggcccaggagtaccttcattcgcacgttttccttacaacaggacataacaaggataacagtaacatagcaaagctaaagccctaagcagtgaacaccgatttgcatagctgcagctctctaagctatttactactactcgtcctcgccactgccatcattctcatcatcctcaacatcagacttcgacttgtcagaaccttctccctcctgttccgcaccatcagttttagccttcttagagctagtgctctccttcttcttgctagcggccgcgggcttgctctcgccatctggcttcttgcccccatattgcgctttctcctcgtccgacatagcgcgccacttctccccggcagccttggtcaccgctgcgacgcccttggtgtttgggtgcttctccatgtactgcggcctgaactcagccaggaaggcgaagaacggggtgaggccgcgcttgggcttgccggcgcctccggccttcttgcgcttgccggcggccttgaactcggcgtcggcgtcggccttgcccatggtggcggaaggggggtagggctttgcggagggttagggttgcagtggctggctggaagcggagatgagagcgaagaggagaggggaattgggtggtgtgcccctggtgctttgcgaaagccggggggggagacct

SEQ ID NO: 21600 - DNA, 468 bp, Oryza sativa
  unsure (1)..(468): unsure at all n locations
  Clone ID: TF_LIB4506-025-R1-K1-B4
ccacgcgtccggtgggtgtgtccctgtctcccctctccttcctcctctcctttcccctcctctcttcccccctctcacaagagagagagcgccagactctccccaggtgaggattcagccatgaagggggccaaatccaagggcgccgccaagcccgacgccaagttggctgtgaagagtaagggcgcggagaagcccgccgccaagggcaggaaggggaaggccggcaaggaccccaacaagcccaagagggctccctccgctttcttcgtttttatggaggagttccgtaaggagttcaaggagaagaaccccaagaataaatctgtcgctgctgtnggaaaagcagccggtgataggtggaaatccctggccgaagcggncaaggctccctatgtngccntggccctcttgctcaaggccgagttcctcttggcccttgctgcctccnncncgggcgggagcact

SEQ ID NO: 21601 - DNA, 521 bp, Oryza sativa
  Clone ID: TF_uC-osrocyp031b01b1
cttctctggtggtgtgtttgttttcctgtctcccctctccttcctgctgtcctttcccctgctctgttcccccctcttacaagagagagagcgccagactctccgcaggtgaggagtcaaccatgaagggggcctaatacaagggcgcggccaaggccaacaccaagttggctgagaagagtaagggcgcggagaagcccggcggcaaaggcaggaaggggaaggccggcaaggaccccaacaagcccaagagggctgcctccgctttcttcgctgttatggaggagttccgtaaggagttcaaggagaagaaccccaagaataaatctgtcgctgctgtaggaaaagcagccggtgataggcggaaatccctgaccgaagcggacaaggcttcctaatgagcccagggccacaagctcaaggccgagtacaacaaggccattgctgcctacaacaagggcgagagcactgccaaaaaggcacccgccaggaggaagaggaggacgaccaggaggaatctg

SEQ ID NO: 21602 - DNA, 2063 bp, Oryza sativa
  Clone ID: TF_OsC85710_1
tttttttttttttttaaccaactttcgatgccatataaccaattctaccaactattaaaaatattactccagtctttacagttgtaatgggttctaatgtgagcaacaaactggtgtactcagtactcctatgacgacagtgaataataaaataatatcatttctctaatttatcggacatcaaggatgcccggaagtgacccgtgatcacttcacctaagaaagagcaattcaaattgctaacagtataaaaaaagaagatattcaatgcgctagcatagcgcatcagtctctagagacgatgcaaaggtaaagtgaaacaaaacagcaatctgatcctacaacaaaaatccttcagaaattttcccttcaactcggcacaagcgttaattaggtggcatgtcacgtttctcatcaatcttagggttctccctgcggcgcagttcaaagcgctccccatcagcagaaggatcaggctgtccatgagaatctgttgtttccatgctcggctcaggagatgtctctgtgttaaactcttcatcatcttccacatttttttctcccgaatcagcggtttcatcactgctactggtactgctgctgtatccttggttggacagcaggatatcaccttcactgactttagagtccacctcatcaatcgtcacttctttctgaggaagtctctgctggataggcaccgcgttgctgattggctggcctgttctctgttctctgtaaagagctaactgtctctggtaccttgccttgtcctctacacctttttcttgatatactgctttatcttcagggcctaaattgttccatcgttcaccaatcatcttgctgataagcctgtcttgtccaggatattctggcttgagcttcctgtgctgatcttggaagaagaaattgtagccgctcctgtttggtttaggatggttggggtctgttgtacttaacttcttcctacggcggcggcggcgaggacgtatgccctcagcgctgtcaattgcaacatgaggcaccgcagttggcactgcaggttcttcggtgcaattatagagtaccgctttcgttgattttgagcccatgataacggtaactatgtagccatgttcaaacttaccatcaattatcacttgtacatcattatccaaagaagcagctaggtctgacaaagtcaaaggaactaactcttggcgctgaccatataggaagcttaaaaggcttgtggggtacaataggtaacaagctgataagtggtctagtggtttgatggcctcatgatttcctcgacatcctgggttcgagtgttcaagctgtgagtttttcccttttatttctcttattttaatggtcagcttttggccaattagcgccaacaccttctgcgcggaccatgtggacttcatgccagcttggcctttctcagaaccgaagtgtatggttggcgccaagatgttgtacctcggcaccttcatcaatggtgttgaacaaagggtccactctaagttaattggagggtctgaagaacaagaattgcttcctcttttccttttccgggaagcttgaccttcagctttcatttctatacaggaaatgcttctggaatctgcagtttcttgataccagccttgtgcctcaaacaagtatagcctctcaaaatggtataatagtgacatgtagtatttcttatcaatgccacctcgtgaagtgacctccttaaacagctgatgaagatcaaggtcttttccaccaataattggcaccttgagctttgtccccatctgggcgtgcaacccctcgagcgccctcctgaagaccgccgcgtccgccaccacgtccttgtaccccgcaacccgcgccgggtacgccaccaacgtcctcctcccgcctccgcttcccccggagcccgccgccaccgcagaatcctcctccgccaccaccaccttctccttccccttccccttcgcatccgccacgcccttcttccccgcctccaccccctccacctcctccgccgccgccgccgcagccgcctcctccgccgccgcgctcat

SEQ ID NO: 21603 - DNA, 769 bp, Oryza sativa
  Clone ID: TF_LIB4832-017-R1-N1-H2
tttcacacgaggccggacggactcttctcttccaagatcatgtgagagcgaccatgtcaatactacctactcctctcctttctcctcctcacatcccccctctcacaatagagagagagccccagatcctccccaggtgaggactcatacatgaagggaggcaaatctacgggggccgccaagcccagagcaaagtagtctgtgaatacaaccgactaggaaaagcccgccgaaaagggcaagaatattaaggccgccaaggaccccaacaagcccaagagggctccctaaggtttcttccattttatgcaagagttccgtaaggagctcaaggagaataaccccaagaacacaactgtcgctgctgcaggaaaagaagccgttcgataggagcaaatccctgaccgaagcggacaacgctccctatgtagccaaggccaataagctcaaggccgagtacaacaaggacattgctgcctacaacaaggtctatagcaccgccaagaacgcacccgacaaggaggaagaggaggacgacgaggaggaatctgataagtccaagtcccacgttcaatgatgaggaagacgaccagggcagcgaagaggatgaagactatgattactgagccttccaccggaccagatgggacccgcaagacgctaagggcggcgcgccgtcccaaggaagctatccatcatcatcatcatcgcctactagaattatcccgcttcccttcaaatcgcgatgtttaacctttctccacccgcc

SEQ ID NO: 21604 - DNA, 2268 bp, Oryza sativa
  unsure (1)..(2268): unsure at all n locations
  Clone ID: TF_OsC206808_1
atgacggacggccaccacttcaacaacatatccctcggcggccgcggcggcaacaaccctggccagtttaaactttattcgggaggacttgcatggaagaggcaaggtggaggaaagaccattgaggttgaaaagtctgatatcacttctgtgacatggatggcaatccccagatcctatcagcttggtgtttcaacaaaggagggcctcttctacaggttctttggcttccgtgaacaggatatcagttcattgactaacttcatggaaaagaacatgagaatcacaccagaggagaagcagctttctgttggtggacataattggggcggaattgaaatcaatggcaatatgcttagctttaatgttggttcaaaggaagcatttgaagtctctctagcagacgtagcacaaactcagatgcaaggaaaaacagatgttgttctggagtttcatgtggatgatactactggtggtaatgagaaagattcattgatggatttaagctttcatgtaccaacttcaaatactcaattccctggagatgagaatcgtccttcagctcaggttttatggcaggctatcttgaataaggctgatgttggctcatcagaggaagctgttgttacatttgatggaattgctattcttactccaagaggtcgatacagtgttgaacttcatctgtcattcttacgactccaaggacaagctaatgatttcaaaattcaatatagcagtattcttcgcctctttgttttaccaaagtcaaataatcctcatacctttgtggttatcactcttgatccaccaattcgcaaaggacagacattatatcctcacattgttattcagtttgaaactgaagcagtcgttcaaagggatctgacattaagtgatgaggttttggctgaaaagtacaaggatagactggagaactcttaccagggtctgatacatgaagtgttctccaaggtccttcgtggcctatctggtgctaaagttacgaggccaagcacgttccgcagttgtcaagatggatatgcagtgaaatcatcactcaaagctgaagatggttgctctatccgctggagaagggcttcttctttctaccaaagcccccaacactcattctgcatgaggagctgtagctctttatggcagattgagtatgttgaatttgagcgacatggtgctgggggtgctagtatctcatctcactattttgatctcctggtcaagctgaaaaatgatcaagaacatctattcagaaatatccaaagaaatgaataccataatctcttcaatttcatcagtggcaagcatttgaaaatcttgaatcttggagaagctcaaggtagagctggtggcgttacagctgttcttcagagcactgatgatgatgctgttgatcctcatctggagcggatcagaaatcagactggcgatgatgagagtgatgaagaggatgaagattttgtggcggacaaggacgacagtggatctcctactgatgattctggagaggagggttctgacgctagtttaagtggaggagaaaaggagaaatcttccaaaaaggaagctagtagctcaaaggcgcctttgaagaagaggaagccaaagggtggggatgcggcggaaggctcggagaaaagaaagccaaagaaaaagaaggatcctaatgcccctaaaagagcaattgcaccattcatgtacttctcaaaagctgagcgagctaatctgaagaacagcaatccggagctggctaccacagagattgcgaagaagcttggggagaggtggcaaaagatgacagccgaggagaagcagccatacgtcgagcagtctcaagttgacaagaagcgctacgcggaggagtcagccgcctaccgcggggcggctgccatggatgtggactccggccctgcttcggactgaagagaagagacctgaattgcattccagattacccttagtctaggagggcgacagacaggatacggctagtggcatctctatttccatgtaaataaaacttatgagttatctggatgtaaataaaactatcgtaggtatctttcgagtcccgttctatgagtgtcttatcgctttatcttagctatatatatagatagcagctatagtatagtagagttcttcccgccatttatgctggccggataacttaccttcacctatgtagcagcaataagcatgcttatctgcttagttaaattataaatgcgtgttctagcntggagaatc

SEQ ID NO: 21605 - DNA, 478 bp, Oryza sativa
  Clone ID: TF_uC-osflcyp054d10b1
ctcttctcttctctggtggtgtgggtgagagggggtattccaaatccttcctgcgctccttaaccctcctctcttaccccctctcacaagagagagagcgccagactctccccaggtgaggattcagccatgaagggggccaaatccaagggcgccgccaagcccgacgccaagatggctgtgaagagtaagggcgcggagaagcccgccgccaagggcaggaaggggaaggccggcaaggaccccaacaagcccaagagggctccctccgctttattcggttttatggaggagttgcgctaggagttcaaggagaagaaccccaagaataaatctgtcgctgcatgcggaaaagcacccggtgatcggtggaaatccctgaccgaagcggacaaggctgcctctgtagcccaggccaacacgctcaaggccgtgtacaacatggccattgctgccctacaaccagggcgagagcact

SEQ ID NO: 21606 - DNA, 1785 bp, Oryza sativa
  Clone ID: TF_OsC5000_2
tcgccggagcgtgggctcctccgattcgaaaccctagctcgtctctctctgtgctagattccatggcgacggcgggtagtaggaagggcgggaggggccggaaggcgctgacggcggtgctggacaacgacgctaacatctccgccgggaaggccgacgtggccgctgccgccgggatcctgtcgccgccgcagaaggcgaagagggcgacgtcgaagagcagcaaggggaaggccgcggctgcggcggcggcggaggaacaggcgtcggtggtggacgcggtgtcggagctgcaggggatgctggaggagctgcggctggagaaggagaaggcggaggagatggtgcgggagcgggacgaggtcatccgcaggaaggaggaggagcagggtcgcctccaggccgagctcaagaaggtccagcgcgccaaggagttcaagcccaccgtgagcattcctctcgtgaaggcattgatcgagaaagaccaggaaggagagaagaagaagggcaagggcaaggccggccatgagaggaagaagccctgcccggcgtacgtcctctggtgcaaggaccagtggaacgagatcaagaaggagagcccggacgccgacttcaaggaggtctccaacgctctgggagccaagtggaaggcgctgggcgcggaggagaagcagccgtacgaggagaggtacaggcaggagaaggaggcgtacctgcaggtggtcgggcaggagaagcgcgaggccgaggcgatgaagctgctcgaggaggagcagatgcagaggaccgccaaggagctgctcgagcagtatctcaagttccggcaggaggccgacgacgacggcgacggtggtgacaacaagaaggcgagcaagaaagggaagaagaagaagaaggagaaggacccctcaaagccgaagcagcccatgtccgcctacttcgtctacacccagcagcgccgcgcggcgctcgtcgccgagaagaagaacgtccccgagatcggcaggatcaccggcgaggagtggaaggcgatgtccgaggcggagaaggcgccgttcgaggcggcggcgcggaagcagagggaggagtaccaggtggagatggcggcgtaccggcagaggaagcaggaggaggcggcgtgccaggagaaagaggaggaggagcagaagaagatcatgaagcaggaggcgctccagctgctcaagaagaaggagaagacggacaacatcatcaagaagaccaaggaggagcagaggaagaagaaggtgggcggcgccgccgctgccgccgacccgaaccggcccaagaagccggcgtcgtcgttcctgctgttcagcaaggaggcgaggcggcagctggcggaggagcgccccggcgtggcgagctccacgctgaccgcgctcgtgtcggtgaagtggaaggagctcggggaggcggagaagcaggcgtggaacggcaaggccgcggaggccatggcggcgtacaagagggacatggaggagtacaccaaggcggcggccagcggcggcggcggcggcgacgcctccccctgtacgtcctcctcggcctcgtcctagtcgccatggatggcgatggtggtggtggtcctaacgctgacgagaaatatcttctctgaatccaatggagaaaacagtagctttggtgattggtgcgaagttatctgttgcgtttggtctggtttaggcgtaacatttcgtatggattggggtattctgcttcaattttataactcagcaagcttgagaaatttcagcttattttcat

SEQ ID NO: 21607 - DNA, 423 bp, Oryza sativa
  unsure (1)..(423): unsure at all n locations
  Clone ID: TF_2311851
gtgtccctgtctcccctctccttcctcctctcctttcccctcctctcttcccccctctcacaagagagagagcgccagactctccccaggattcagccatgaagggggccaaatccaagggcgccgccaagcccgacgccaagttggctgtnaagagtaagggcgcggagaagcccgncgccaagggcaggaaggggaaggccggcaaggaccccaacaagcccaagagggctccctccgctttcttcgtttttatggaggagttccgtaaggagttcaaggagaagaaccccaagaataaatctgtcgctgctgtaggaaaagcagnnggtgataggtggaaatcccttgaccgaangcggacaaggctncctatgtaggcaaagggcnacaagcttcaaggncgtgtacaacaagggcatt

SEQ ID NO: 21608 - DNA, 480 bp, Oryza sativa
  Clone ID: TF_LIB4833-008-R1-N1-G8
ccggccggctcttctcttctctggtggtgtgggtgtgtccctgtctcccctccttcctcctctcctttcccctcctctcttcccccctctacaagagagagagagcgccagactctccccaggtgaggattcagccatgaagggggccaaatccaagggcgccgccaagcccgacgccaagttggctgtgaagagtaagggcgcggagaagcccgccgccaagggcaggaaggggaaggccggcaaggaccccaacaagcccaagagggctccctccgctttcttcgtttttatggaggagctccgtaaggagttcagggagaagaaccccaacaataaatctgccgctgctgtaggaaaagcacccgcagatagcaggaaatccctgaccgaagcgcacaaggctccctatgtagccaaggccaacacgctcagggccgagcacaccagggccattgctgcctacaacaagggccagag

SEQ ID NO: 21609 - DNA, 2991 bp, Oryza sativa
  Clone ID: TF_OsC1457_1
ctggccggcccggctagcagcctcgctctcgcctccctcgtctcctcgacgcgatgccgccttcgccctctctcaaaccctagcctccgcctccgcctttccctcccctccccgtcgcgggcgcctccgccgccgcgtcccccgtccccgtccccatccccatcctccgtccgctagcgccgccgctccgtccttcccatccagatcgcgccaccccgtccgcccgcgcgtcgtacgcctccaccagctgccggtcctccgcctcccggtcaagatccggcaccgcgccgctttcctccgtcgccgccatcctccgtcgcctccgcctcccgttcgagatctgcagccccttctctgcacgtcggtttctgcgctgccgccaagaaggtttcaattttggtaggaacaccatctcaagtgcttatttagcagatatttgcttgtggcgagacagaaattggccctgtttgtgccggccgccctcgaaatccaatccacccgcatcgcatcccacccacgaacgcttcgccgcttgataaaccaaattccccaccgccgcttcgttctcgccgatccggagggctcgagatgaaggcgaggtcgaggtccagcaatggcgactccaggctctcggtgaggaagaccaaggcggagaaggacccgaacaagccgaagaggccaccgagcgcgttcttcgtgttcatggagcagttcaggaaggactacaaggagaagcaccccaacgtcaagcaggtctcggtgattggcaaggctggtggtgacaagtggaagtccatgactgatgctgacaaggctcctttcgtgaccaaggctgagaagctcaaggctgagtacaccaagaagattgacgcctacaacaacaagcaggcaggaggcccggctacctcaggcgactctgacaagtccaagtccgaggtgaacgacgaggacgagggcagcggtgacgagtgatcgatggagggctgcaggtagtagggaaagttctcgagtcggcctaaccaaagtggacgttgctggttgctgctccttgctagtgttcggatgttgctgcctttagcttttagtcttagaggtctcctcctgtagcttagctctcatgtggtgtcctcgctctcttcggcacttgaccaccatcttgtcgtctgttttgtctcactgtctgtaatctaagtgagtactcgtatctgttgctgttttaaatctcagatctcagtagatggtgccatctgtgttagttgctgaagaggaaaaggaaaaaaatataacaagtctcttgcatcctgtttaatgatgcatccggatctgtcagttcgtttaaaaaaaaaatacctttcttctgtaaccaagacagttcgcatttggcaagagagcgagggtggaaaatataattgcatccacacattgaaagatcatactgctgaggatattccgccattcggcaccatggctaacatcagaaccgtctctagcctcggggaggtcaacggtgtcctgcaagagatgggtatcaatacgattgatcaagctcatcaagttcaatttcgtttacacaagcaaacatcccttaaagaagcaacagatataaagatgatgatccgaactggaaggcatggattcaggttggttaaccctgagcttttagattgtaagtttgatgccagcgttaagctagaggagtggtacaataccatgctctttgtcatcagattcaagcatcagttcaaagtatagttcagactcaccctcactgtcaccttcaactagctcgccaacatcacttggtctttcgcccgcttcatctaatttttcccacactttggtgccatcatctaggtccccccttcaccaatcatctaacgaggaaccttcaaaatctggcctggggtcaatacgctctccctccaagacctcttctatagcagaaagaagaggagggttttcatctctgaagttaccatcattccaaaaggatctagtattaccaccaagggtaccgaccagccttcgcagagaagaggaagtcacagataagagtaataataatagtgtaaaacagcttactggtgtgtgttgcccagagaaatgcactggcaatacttcaacagtgcacactaaaactggaataactgagcgtactgacagtatctcagaggcttgcggtaatttacaactattagtctaccgttggcccagcaaggaaaagctaactactttcactcgcaaggatcttgacccaaaatcagttttgatttttgttactcctgaagacagcagaagtgaagcagttaaaacggtacacatttgggtaggaggtgaatatgagagcagcaaatgtgttgacactgttgattggcagcaagttgttggtgatttttttcatctaaaggagctcggcaatactcttcctgttaaggttttcaaagagcatgaaacggagaatcttttggaagtgctgaatgctcgttaatggtaggctcagtctgtaggtatcagcatattgtagtagcttaacaaagtcagccgtgaagtatgattgaatgaaggcatctcctccagaatcgctccatgcggtggtgattttcagcgaggtataagccgttacaactattccccttgaacatatagaccacagattccatttagtagaactgatgatggattggcaattggtgcctacctcatatgatttgcttatggtcagaaaatgggcaggaggctgccagaacgttgtatctgtgagttaaaacacacatggatcaggttttggcacaatttgggtgtatattctccgctcccctgtaatgtaagctcagaaactgggaggcaaccgtgtcgttttcaccctaaaaatttcttgtacatctcgaaaaagaaacagatcagatgtgtaatcctcttgtcttataagtccctccattggtcttaacttttaagctaacaaaaaaaaaaaaaaaaaaaaacctcagcccg

SEQ ID NO: 21610 - DNA, 723 bp, Oryza sativa
  unsure (1)..(723): unsure at all n locations
  Clone ID: TF_LIB4833-024-R1-N1-F8
ccggccgggatacaattctcccacccaaattcgtctctacactcaacacgcctcaatacgtctttgtgactacatcaacaccacaaatccctttcttctaaattcatccctcagaacacaatcaaaatgcctaaggctgctgctcccgccaagcgtgcgaccagaactaagcgggccaagaaggaccccaacgctcccaagcgcggcctgtctgcctatatgttctttgccaacgaacagcgtgagaacgtccgtgaggagaaccctggtatctctttcggtcaagtcggcaagctcctcggtgagcgatggaaggccctcaacgagaagcaacgtgctccctacgaggctaaggctgccgctgataagaagcggtatgaggacgagaagcaggcctacaatgccgatcaggaagaagaggagtcttcttagaatggagcctccgatgtcaaacccaagcgtcgctccgcagaagaagtctgaatcggattagtcccagcaccangcgccgtggttgtagattctgggccaggaagtccttcctcttttgcattttgggtctgggggcggtggttgtatgatgngcacaggaaagaagtgccttgtttttttactaggaatttntctcgnggttaaggccccgtcccccgatgttattgatcctttgaggggcgaatcgattgagctactgccttttctattttcagtggtccttgggccatg

SEQ ID NO: 21611 - DNA, 790 bp, Oryza sativa
  unsure (1)..(790): unsure at all n locations
  Clone ID: TF_3548937
ctcctttcccctcctctcttcccccctctcacaagagagagagagcgccagactctccccaggtgaggattcagccatgaagggggccaaatccaagggcgccgccaagcccgacgccaagttggctgtgaagagtaagggcgcgganaancccgccgccaagggcaggaaggggaaggccggcaaggaccccaacaagcccaaganggctccctccgctttcttcgtttttatggagganttccgtaaggagttcaagganaanaaccccaagaaataaatctgtcgctgctgtaggaaaagcagccggtgataggtggaaatccctgaccgaagcggacaaggctccctatgtnnccaaggccaacaagctcaaggccgantncaacaaggccattgctgcctacaacaagggcganagcactgccaagaangcacccgccnaggaggaagaagaagacgacnaagangaatctgacaagtccaantccgaagtccatgatgaagatgacgacnaaggccncgaanaagatgaanacnatgacnantgaccttccagtggacaagatgggaacacaagacctaagggcggggggctcctaaggacctatccatcatcatcatcatcgtctactaaaattattcagtttccttcacatcntgattttttacttttctctcctcccataacggataacctccttgtttgcccctgttggtttttttgttcaaccaatttttntctccccntcaatgatcccttgttctaaattatctttcattgtctcgg

SEQ ID NO: 21612 - DNA, 1092 bp, Oryza sativa
  unsure (1)..(1092): unsure at all n locations
  Clone ID: TF_OsC4387_1
nnnnnnnnnnnnnnttttttttttagtatatcagcatttgttgtttcaattaagttgatgaaatcagatacaagtcatgagtcaattcaccaaggaagcaacatatagagacagagagcagcaaaggaaggaagcccttgagaatggaatggggaagaagttgcactccaatcgaatccaaaaaaagagggataattaagtcgtctaatcattcattcattcattcacttgatgtgcaggtcacactgcaagcactagtagttctagtactagaagatcaccaccaccagaatcaatcgatactgctgctcccactagcatactagcaatgtgatggatccgccatttacaaaaagagaaggaattatccatccatccatccattggaccggtggcctagatgtcgtcgtctagctcgttcttctcttcctctgcaccatcttcatcttcttggtcgtcttcatcagtgcctttcttgggtggctgatctacctcctgctcgcctgcgttgccaccaacattgttctcgtcgctgcgctcgccattgtggtactcggccttgagctctgcagccttgtccaagtaaggcttcttgtcctcgtcagacatggatttccacctctcccctccttccttggcgacagcggagacgctcttgttgtcagggtgctccgccttgtactccttcctgaagtcactcatgaagaggaaaaaggcagtgggtgggcgcttgccctttttggccccctcgccattgttgttgttgttcttgccgctcttcttcttgctcgctgccacctccacggcctgctccaccacctgagcctctaggctgatgcggatcttgtcgtcgaggctgcagttgtgcatgtcgatgaggaccacggagacgctcttgccgcaagcctcgcagcgggtgaaggcgctgccgtcgcgcgcgcgcttcaggacggcggaatccgtcgcctccacgcgcttcctcgtgcgtgcgccggatttccccgccattacagaggagaggaggagggctatggatttggaggagatggaggtttgccccggccggcgcagtaccaatcgcccctataggag

SEQ ID NO: 21613 - DNA, 863 bp, Oryza sativa
  Clone ID: TF_OsC742_1
gcacgccggacgctccgccccaaaaggccagacaacgcccgttgcgccgcctcccaaactccgcctcctcctcctccgctgcacccccgcaaaaaccctagcgcaccgacttcgcgatctccgcgccgcagccatgaagggcaaggccgacgcctccaagaagggcgagggcaggctcaaggccgccggcggcgccgggaagcggaagaaggccgccgctagcggcaagccgaagcgcccgccgtctgctttcttcgtcttcatgtctgagttcaggcaggagtaccaggcagcgcatcctgacaacaagagtgtcgccgccgtgagcaaggctgcaggggagaagtggcgagctatgtctgagcaagagaaggcaccttatgtggacaaggctggccaaaagaagcaggactacgagaagaccaaggccaacttcgataagaaggagagcacaagctcaaagaaagctaagacccatgatgatggagaaggctctgacaagtccaagtctgaggtcgacgatgaccaggatggtggtagcgatgaggaaaatgaggacgatgaagagtaaatagtgtatccgggggcatgaggtagcaaactgtgtcttaggtcccctattagctttactagtttgctatcttcgaccctaagatgttgggaataggcgtgcgtgggtgtgaagggggaccgtttagaattatggtactcagaatgttttcctacagtggattagcaaagaaaaagcctgaatgccgcctgctgttctgttgcttttcttttgctaaccacttgtcacagaactttgtttcatttgctaatctagtagcaattcagttagctttcttttcgttaatttcgtt

SEQ ID NO: 21614 - DNA, 2597 bp, Oryza sativa
  Clone ID: TF_OsC1450_1
gcatgctcgcgaaaaacgaggaggggagttaggaaccttgacatacaaccaatgataccattttttttcaagcagctagaggtacagaggttcatattttttagatggctcattagtgatattttagtcaaaaatttcagaagtacggccacgggtgatggcctgaactaatattttattcgaggtgccgctacatcatcgtctaaagtacacgcaagattcaacggaaaaaagaaaccgatcgatcgagatcagttagttaatgaaataactagatcaactcatgtcgtcaaaaacaaaagatgctcatctatggacaacacacgctgatgattcgatcatcaaacaaaggtggtagtagtagtaaagcgtatcgtgtttctcatcagaaagaagaattaaagaaaaaactaatcccgtctcgcgagccagagaaaattccctacaaaagccactcctttgatttgacatgcaaaagcaaggctccactcctctactaccctacaactacacaacactgtctctctatctccaaaggcagtagctgtattggcttccagcttttcctctctacctctaatgatagcttggagcaagttcaatagtatagctaactactagctctaattcatctataatcaatctaatagcttattcatacaatagttatatactacattattaatatctggtcccatctatcatacacactgagtctgtgctatagctgactacaaatctgtagcccgctgctcttctctcttcatttatcttcttaaaatatatttgcagctggcttatggcttatagcttgatattgagagggagaggagtgagagctagctcagctcagctcaaggtaaacaacaaggcacactcttcctacctcttctccggttcttcctttttcctctttctcttcgtccaagaacttcacctcaatagctcgagctacggcctaacttttgcgttgcgcaggagagctcgatcgctgcaccaatacttcactggagatcgcctagctgcagctagctagcttatcctgcgtgtcttgagcttctctcatggaggagatctcccaccacttcggggtcgtcggagccagcggcgtccatggcggccaccagcatcagcatcaccaccacccgtggggttcttccctgagcgccatcgtcgcgccgccgccgccgccgcagctgcagcagcagcagacgcaggccggcggcatggcgcacacgccgctcacgctgaacacggcggcggcggcggtcggcaacccggtgctgcagctggcgaacggcagcctgctcgacgcgtgcggcaaggcgaaggaggcgtcggcgtcggcgtcgtacgccgccgacgtggaggccatcaaggccaagatcatctcccacccccactactcctccctcctcgccgcctacctcgactgccagaaggttggggcgccgccggaggtggcggcgaggctgacggcggtggcgcaggacctggagcttcgccagcgcacggcgctcggcgtcctcggcgccgccacggagccggagctggaccagttcatggaggcgtaccacgagatgctggtgaagtacagggaggagctgacgaggccgctgcaggaggccatggagttcttgaggagggtggagacgcagctcaacacgctctccatctccggcagatcgcttcgcaatatcctttcctccggctcttctgaggaggaccaagaaggtagcggaggagagacagagctacctgagattgatgcacatggtgtggatcaggagctcaagcaccatttgctgaagaagtacagtggatacctgagctccctgaagcaagaactgtcaaagaagaagaaaaaagggaagctccccaaggatgctcgtcaacagctcctcaactggtgggagctgcactacaaatggccttacccctcggagagtcagaaggtggcactggcggagtcgacggggctggacctgaagcagatcaacaactggttcatcaaccagaggaagcggcactggaagccctccgacgagatgcagttcgtgatgatggacggctaccacccgaccaacgccgccgccttctacatggacggccacttcatcaacgacggcggcctctacaggctcggctagctagctagcctactccttatccccagctaccatgacctagatcgatctcgaccccaaatcaatggtcgctaagctactgaaaagtttgtgatgagaattgaagaacctaggttagtcttcctggtaatttgatgctcgcgcgtacgcacgccatggatggctgcgtgcttattttgtttcttgccgcaatatgtaatgcaattgccttagctaatgcatcaactcgggtcggttttagctgctgctgctgcgccacaatgaggtggttgtggttatgcttttgtgtggtttaatacgccaagacgtacacattgcttcgaaatgtcgctactcttgctgctgctaattaagtgcgtgtttgaataattcggatctatatactacctggttaattcctatcttctgattatataatttgctgatcgttcgagtttgtgagattttttt

SEQ ID NO: 21615 - DNA, 282 bp, Oryza sativa
  Clone ID: TF_uC-osflM202042d03b1
ccgtcattagcgcgccttccaccacatggggatcatggggcaggaggcgtggcgcccccagcgcgtcctccccgagcgctccgtcaacatcctccgctcctggctcttggaacacttactccacccgtacccgagcgatgcagataagcacctgttggcgaggcagaccgggctgtccaggaaccaggtctcgaattggttcatcaacgcccgtgttcggctatggaagcccatgatcgaggagatgtaccagcaagaatgcaaggagctcgagggttcctc

SEQ ID NO: 21616 - DNA, 2144 bp, Oryza sativa
  Clone ID: TF_OsC147537_1
gctggcgacaaattaactgagcaccctttatttgccagagtgggagcaaccacatttgcaagtcagatgaatagtacagggttaacacggcttaaccgcggatcagaacaaatagggaacaacactacaaacaggtcttcaaaggtatagtcatatgctctctatagccccacaatgtcaaatatcgacaagcattcgtggatctacgacaggcgtgccaatgcccctcttttcttcacctcctacttccaactacaatataggtagatcatacatctgcatcctacaataatcaccaccgatctccttggtgaaacaatcatatctgctcttcaaccaacaaagtcatggagcaaatggccaccgatctccttggtgaaatgccggtcctgaccaccaaatgagctcatcacgtaggcatcactaacgtcctccagtccgaaacgatgggcaagattgagcggaagcgcggccggaaggggctcagcaatgtaagctcggttattgttctggtgaaggccaagggtgagtgagacaccgccagcattcgcggcaccaccggtgccaatgaggtcaggttggtggtggtgcgccatcgcgatgctgtgatgcgcggcgagcccgttgtatgcgaagctcacctgaccggagatgtcatggggcatctgggagaggccgtcctcgatgtgccgggaggcggagatgctgtgattcctggtcatgctgctactttgcccttgcagcgagtttgatggatcacagggcttcccgctgctgtccgacgaatgttgggtgtgctgcatggagagctgattcttgtcaagagacggattcttctgcagctgcctcatctcgaggttgtgaatttcttcaaccattggcttccagagcctaacccttgcattgataaaccagttcgatacctggttcctagttaatcctgtctgtttagcaagcatctgcttatcgctgtcagttggatacgggtgcaggaagtgttcgaatagccatgcacgaagaaccgaaacagcacgctctggtagccctctttgcgggcgccatatgttgtgaggttggctaaacgaattcacattgtttccccttagtaggccagcgccgccgcccataagcccaaagtttgttgtgtcttccttgccgagaccatcttttgtagcacccttgcccgtattgcgcagctggttcagtataatgcccttcaaatacttgaaatgcttcgacattgtcctaagagccatggaagcaaaaggagcagcattgctcagacccgcaacagtctcaaaggacgatactacagcttggagttgctggtagtattgcctgtatcgcttgcaaaccttttgattatagataaactgcggatcacctcctgctagttttagaagggagcttaaaagagccttgaagtcttccataagcgagatgagcctagtcttcctccactgctgctcggcgccggagaccgtgaccgcgtccgcgacggcgcgatcgctgccgtccatctcgtggtcgacgcttcccgcggcgtccatggcgtctacgtcgagcaaaccctcgtcggagcccctgtcaagctgcgcggggcggccgccgacgtcgcagatctcctcgagcagcttctgcgcggggcccaagaacctggaccgcccgagcacggcggcgtagcccgtgaagggcccgtacggcccggcggccccgccgccgccgccgccgccgccaaactgcctcctcggcgtgggcggagggttcgaggacgccgacgacagcgacagcgcgaagttctggctcgggatctgggcccctccgctcgtcgcggcccccggcggcatcccatgcgccaccaactgcgcgtgcgccagcgtcgggctgtgcggcgagtacgatgacgaggacgacgcgtaggagtagaacgccgggggcagcggccacgacccgggcggcggcggcggcggcgactccgccgggtggtcgggcgggaaccgcagcttctcccgccggctgtgctgcggcacgtggtacagctgccccgccgcctgcccaagcagcaggtggtgctgctgctgctgatgctgatgctcgccgcctccgcccccgtaccctcctcctccccccgcggcggacgacat

SEQ ID NO: 21617 - DNA, 1310 bp, Oryza sativa
  Clone ID: TF_OsC1713_5465
atattttttgtaataaccaagttactattaaactaatggttcttaacattttctcttagtaactaaattacaccaatgattctcaacataacatattggtcttgtcacagagtttctcgtagtaaccaagttagaattacaccgatggttgtcggaggcgatggcggcgtggtggataggtatggagtgaaagagggcaacgggtcggccatggagggctggccggtggtcctcttgtatctggccatccgcggacagccgccgggagcacgcgcgccttgtgctgacccggcgtgcttgaggggatgcgggtgcgaacgacctcctcgctatcggtggtgtcccaccttagccgaatcatctctccagggcttgacttagtccctgtgcacagatggaaataatcaccgctgaggacgcagaaatcaagtggatgagtacctctcgtcaagtgcatcaagctgtacaatctgccatgctttcccttgatgaggaatacaatcaatcagcttcaatgtcgctggccacaagtaaaattaagaatattaggcctgaaaaagtatgttctgtcaaaacattccgataaaccgtagcatgttgactgggaccatatgtagtccggtagttcagaaatacaatccaatccatcttggttatcaaatctattatgtgctcaatatgctttgttaaccgtggctcgtgagtagggggaggcactgaagatcagacatatcaagaatggctgatgcccggccagttcctctacgggaagaggagggcagcaactgctcgccatacatcccaccaggagccattgttagctctctgtgtggcagcggtggtgacagcacaggaggcggcgccataactggcacatgaacctcctcctccagctgctgccgcttcggcggtggtttacggtccttcaaccgccggtggcagaaccacatctgcagctgcttgtctgtgagccctaactgtgtaagtcctcttgagaacctccaactgatagggcgtcttcatgatgcgcttcaccttcccgctggatccagaggcgctacaccaccaacagcggcggcgggagtgggagagggagcagaagcctgagccgacgccggggcagggctctcctcctccatcctagcgtcgcccgttcttgtccgctcgcctctgcccggctccgatctccggcgactgcagcggcgacccacgagcgctacctctccagccgattccacctgtcgctggccgatttcgcccgtcgcccgccgcccgccgctggagacaccgccctgcagcccggggatcca

SEQ ID NO: 21618 - DNA, 2517 bp, Oryza sativa
  Clone ID: TF_OsC796_1
cggcctttctgctttcgctttcacagtttcacggcttaccatttccttcccatctctccctcccgccacccccctctttctccccctccgtgtctcgcctttgcagaaagaaaggcgccacgaacccagcaacaacacccagcacaaaggcgaaacggggaaaaagaggaggaaaacaacaagaggacgcgaggggtcggggtgggagagggaggctacactacagcagcagcagaagcagagcgggagagtgatgagggagtgagaccaggccagccaagccaggcccgggcgctcggaaagtgcggagccgtttcccctctatctccactctctccagggccaggtgctcactgcgctgcgcctcttcgcacgcaccacccgtactacgtgcccacccgcgcgcgcgccgaggagaagagacccacgaccgtacgtgcgtgcgcgccatgtcgtccgccgctgggggcggcgggtacggcggcggccagggtggaggcgcggagcaccaccaccaccaccacgggcacgccggtcacctcctgctccaccaccatccgcagcacgtggccggcgcggccgttgcggcagcggccgcggcggcgggcgggcagatgtaccacgtgccccagcacagccggcgcgagaagctccggttcccgccggacgccggggactcgccaccgcctcatggtcatggtcatggtcatgccccgcagcagcagcagcagcacgggtcgtggcctccgcccccggcgttctactcgtacgcgtcctcgtcgtcgtcgtactccccgcacagccctactctagcgcaggcgcagctggtggcgcacgggctggcgccgccgctcccgcagatcccgacgcagaacttctcgctgtcgctctcctccgcgtcgtcgaatcctccaccaccgcaggcgcagccgaggaggcagctcggcggcctcgcgcaggccacggggccgttcggtcccttcaccggctacgccgccgtgctcggccggtcccgtttcctcggcccggcagagaagctgttcgaggagatctgcgacgtcggcggcgctgcttcgcacgtcgaccgcaccatctccgacgagggcctgctcgacgcggatccgatggacggcgtcgatcatgacgtcgttgatcacgacctcggcggcgctgaccgcgcagcggccgacgctggccccatctcgggggccgagcagcagtggaagaagacgaagctcatctccatgatggaagaggtttgcaagaggtaccggcagtactaccagcaggttcaggctgtgatggcctcgttcgagaccgtcgccgggttcagcaacgccgcgccgttcgcggcattggcgctgagggcgatggcgaagcacttcaagtgcttgaagagcatgattctgaaccagctgcgcaacacgagcaacaaggtcgctgtgaaggacgggctaaacaaggagatcgccgtgttcgggctcgccgggggtagcagcggcggcgccggcctccagcgagcgaacagcgcgagcgcgttcggccagccgcacaatatttggcgcccacagagggggctccccgagcgcgctgtgtccgttctacgcgcgtggctgttcgaacacttcctgcacccgtatcctaccgatggtgataagcaaatgctagcaaaacaaacaggcttgacacgcaaccaggtatcgaactggtttatcaacgcaagggttaggttgtggaagccaatggtggaagaaattcacaacctagagatgaggcaaatgcacaagcactcggtggttgacaagggccagcatagcgtgcatcatcaggcccagcattcttcgcagtgcagcgggaatccctccgttccttcggactcccatcctggacagagcagcagcataacccggaaccacaacaccgctgcctcccagggcttcccggatgagctctcccagatgtcccagtccatccagggacaggtgagcttcgcatacaacgggctgacctcgcagcacaacattgcatcaccacatcatcagcaccagcaggtcggcggtgttggtatcggaggcggcaatggcggtgtctccctcacccttggtcttcaccagaacaacagggtctgcatcgccgagcctctcccggctgctctcccggccaacctagctcaccgtttcggactggaggaagtcagtgacgcctatgtgatgagctcatttggaggtcaggaccggcatttcgggaaggagattggtggtcacttgctgcatgattttgtcgggtgattgtggctgctgcctcaggttgctggtgatgcacttgtaatgtactgctagtatgatgttaggatggtatataagtcaatcacttggcgacatggcttgatgatcagtctgaatcaatttgttcggagggtgaaaaaacattgatcttcccttcatgtagatccaggtatgctgtcaaatatttgacaccttgcgggctatagagagattgacaataccttcccaaggc

SEQ ID NO: 21619 - DNA, 572 bp, Oryza sativa
  Clone ID: TF_OsC244_6
tttctttctcatctcacatcgactctatagctacctacgcggcatctttgtatagagctagagctagcacacaagagagagggagagaggtgtggtggatgaaggaggagggcgagccggaggagcacgctctccagcctcagcggcaagcgcggcgcgccatctgctccggcggcggtggcagcgaggactccggcggcggatcccgcaagaagctccgcctctcgaaggaccaagccgccgtcctcgaggacaccttcaaagagcacaacaccgtcaaccctataagcaagcaaacaaacaatcaaaaagcagaaggcggcgctggcgaggcagttgaatctgaagccgtagcaggtggaggtgtggttccagaacaggagggcgagaacgaagctgaggcagacggaggtggacagcgagctgctctaaggcagacggaggtggagggagtcaaagtggacttattaaatcaacgtggacaggttggagagggaggccgggctctggggcgtactgtagattttgggccgttctctatggcccaggatgcggtgtccgactccaactaa

SEQ ID NO: 21620 - DNA, 1568 bp, Oryza sativa
  Clone ID: TF_OsC1648_1
cactgttgctgctgctgctgctgcttgcaaacactgaataccctaacctctttcattaatttctcgctctgattttgaccgttagaacaaagctaagatgggccatacgtatactaggaggagtaccatcatattcatcttctttctagcttcctctcctcttcacattccctgcatccatccatctcaaccaccaccacctcatttcaggagatcatctcctccttttctttgctagggtttgtttgccataactactatctatcgcctcttcttcacctcacctgtcctgtcggccatggagagcttcgccagtctcgcaggaggtggcagcagcagcaccacagctcggttgccggagctgatctcgccggagaacccggaccacatctcgccgcccccgttgctgtaccagctgctcgccggcccggcgtcgtcggcgcggcagcatgggcatgatgggcatcaccacggcggcggtggcggcgaagcagcagcagcagctgtgcagggacaggtctcgccggcaggcgcggaggcggcggtcaaggccgagatcatgtcgcatccgcagtactcggctctcctcgccgcctacttaggctgcaaaaaggtcggggcgccgccggatgtactgaccaagctcacggccgtgccggcggcgcagcagctggacgaagccgacggccaccctcgtcgccggcacgagccacggcgtgatgacgacccggatcagctcgatcagttcatggtctcgacctgcagcatgctgacgaggtacagggaggagctggagcggccgatcctggaagccgcggagttcttcagcagggtggagacgcagctcgattcgctcgctgagagtaattgtgaaggcacgggatcatcagaggaagagcaagaccctagtgacaagcagctgaagcaccagcttctgaggaagtacggtggctcgttgggcgatctccggcaggtgttctccaagaggaccaagaaagggaagcttcccaaggaggccaggcagaagcttctgcactggtgggagctgcactacaagtggccctatccctccgagatggagaagatgacgctggcgcagacgacggggctggaccagaagcagatcaacaactggttcatcaaccagaggaagcggcactggaagccgacgccggtggcaggcacggccttcccgacgatggaagctgccggaggcggcttccgacactccggccacggcggcggccttgcggcggcggcggcgctgccgctgtacatgggcaggccgttcgttgtggacggcatgtaccggctcgggtcttgaagcctctggggatcgcatggtgtttgcatggtgttttttgcttggtaaatatttgctagcagcttcccatgatcagcctgtgggatggtgaaatggaagaactgatgaatcttcatcacgatctttcctctcatttttttttctttggtgtgtgataaaagctcagatgtaccacgtactactgtctgcttctttgcaaatggatatgtaattgaaagctttaattctaaaaaaaaaaaaaaaa

SEQ ID NO: 21621 - DNA, 3029 bp, Oryza sativa
  Clone ID: TF_OsC49147_1
ttttttttttttttttttaacacacatacggataagtattattattattataattctgacctagagagctttcagaggaaaagagagagagagagagagagaaaaaaaaacagtagtgacctagacttggacgtggacatttcctagttcttctgacacaggcacaattgtgtcagtcagttcaggagctggagtgtgcagtagtctctgcagcctgaatctatctacacaaacacattgctatccatctctctgatatctacctcaattcatgtgccctgtggctgttgtgtgacctactcctacacccttgtgagccgaatagtacaccggatatccctatccaaacaccacaccttttctttccaatctctgaacatggatggactatctctcttcttctctcaggacagggagatcttggaaggggatgcagtatctgtagtacactgctgctctgcaacaccaatgtcctcatccccaacactcctgcaacctcccttgcatgataccttggtatatttttgttgtcttacatcactctcttcctcctcctcctccttcttctgcttcttctggttcttcttcttcttctttgccttcttgttcttcttcttcttcggcttcttcttcaccttcgccttcgccttcttctttcttaattctaggatcttcttcaattctgctcttctggttctttgagagagtgtgcatgtgtgagagagaaattgctgattaattagcttcagcaattcttgtggtacatagtatacatagatagaaagagagagagagagagagagaaagcaagcaagctgaattgatgcttgtgtgtgcttgtgttgacatctgtatacacatgtgcacggttctttgttaaatcacttgatgaagatgggtaattaaattaagaagagagaagcatatatatacatttccagtagaattgtagctagagtgatctatagctgccggccggcgaggcgatctcgatggcggcgtactaccacggcggcgccggcacggacatccagtccggcaccgacggcctgcagacgctgtacctcatgaacccgagctacgccggctacggcgacgccgccgccgccgccgccgcgcccggggcggcggccaacatgatgctcctgaactcggcggtgacctccatgacgccggtgtcgttcggccaccagccgtcgccgtcgtcgtcgtcggcggcgcagcacttcgtcggcatccctctccaggcgccgccggcttccgggtacaacctgtggaccccggcggcggccaccggcgcgggcgacatgtcgccgccgacgccgcagcaccagcatcagcaagctcacggcggtggcgcggcgggtgtcagtgctgtcctcagcctgtcgtcccgcgaggcggcgccgccggtgacggtggcggccgtggtggccgccggcgacgaggggaagtacctgcaggcggtggcgcagggcgcggcgtcgcacgggcagatggtgatgagctccaagtacctcaaggcggcgcaggagctgctcgacgaggtggtgagcgtcagcaagggcgtggacgacgtcaaggccgccgcggcggcgaagagcccggcctcggtgaagaagaaggaggactcggagggcgtgtccggcggcggcacggaggatggcggcggcgccaagagcggcggcgcgccgccgccgccggagatgtcgacggcggagcggcaggagctgcagatgaagaaaggaaagctgattaacatgcttgatgaggtggagcagcggtacaggcagtaccaccagcagatgcaggtggtggtggcgtcgttcgaggcggtggcggggggcgggtcggcgaggacgtacacggcgctggcgctgcggaccatctcgcggcagttccggtgcctgcgggacgcgatcgcggggcaggtgagggcggcgagccgggcgctgggggaggccgtcgacgccgacggcggatgcggccgcacggtggggtccaggctccggtacatcgaccaccagctccggcagcagcgcgcgctgcagcagctgggcatgatgcagagcagcgcgtggcgcccccagcgcggcctccccgagcgctccgtctccatcctccgggcttggctcttcgaacacttcctccacccatatcccaaggattcggacaagatcatgctcgccaagcaaaccggcctcaccaggagccaggtttcgaactggttcatcaatgccagggtgaggctgtggaagccgatggtggaggagatgtacctggaggagaccaaggaccaggacggcggcggcggcgccggcgccggcgacgaggggagcaagcccggtgggagcaagggcggcggcgccggcgtcaatggcggtgtggttgacagtgccgcgaagatggacagcaaggcggcgcacatggagagcggcggcggcgtacatccgtcgctgctcgagctcgccggtgaccaccaggcgcaggcggggttctacgacgacgacgacgaggatggcggcgccgccgccgcgctgcagcagaagctgaagaaggcgaggacggaggagcagcagcaggcggcgttccacgtgtccgacgtggccacgctgcacgcgcatgccgcggcggcggcggcggcgaggcacgacgaggtgagccaccgggagctcctcatgaagttcatggagagcggcagcgccggcgccggcgccggcgccgccgcgagggaccaccaccacgaacaccatggcggcgtcggctactcgctgttcgcgccggcgccgtacgggcagttcgccacggagcagttcgcgttcgccggccacggcggcggtggcggcggcggcggcgtgtcgctcacgctcggcctcccgcacggcgccgagcagacggcgtcgttcctcatgaccagcagcaacggcagcgacggcgccggccacgtcgccggcggcggcggctacgacatgaacatgcagagcacaaagtccttcgcggctcagctcatgagagacttcgtggcctag

SEQ ID NO: 21622 - DNA, 1201 bp, Oryza sativa
  Clone ID: TF_10504981
ggcacgaggctcctcgaagaggagtactaccgagcagctcccggagaagaagcggcgcctcacgccggagcaggtagatactccagctagctagctaagctgtaaagatcggcggcgcgcggtgctctgttcccgagttgtgacgtgacgactggatcgatcggcgtcggcgtgtgtgtatgtatgtgcatctgctggagaggagcttcgaggaggagaaacaagctggagccggagcggaagacggagctggcgcggaagctatggctgcagccgcggcaggtcgccgtgtggttccagaaccgccgcgcgcgctggaagaccaagcagctcgagcgcgacttcgaccgcctcaaggcgtcgttcgacgccctccgcgccgaacacgaagccctcctccaggaaaaccaccgcctccactctcaggtgagctagctacgcccgccgcccgcgccaccgcccaaccgcgcgttatcctcgatccgatttggccgggctccttgattctgactgaattcgtggtgatcttgtgccgtcaggtcatgttctttgaacgaaaaactgccagaaaaagaaacaacaaccgaaggcacccccggcgccggccgtaaacgtccccgggctgccctgcgggcgccgaattgaagttccccgtcccggaacgccggaggacaccgggcgttggaggaggcggcggcggctttcgaggagcagcaggagcagcaggtgaaggccgaggacaggctgagcacggggcagcggcgggagcgcggtggtggacacggacgcgcaactggtggtcgggtgcggccggcagcatctcgccgccgtggacagcagcggggagtcgtacttcccgggcggggacgagtaccacgactgcgtgatgggccccatggaccacgccgcggggggcatccagtcggaggaggacgacggcgccggcagcgacgagggctgcagataatacgccgaagacgccggcgtctttttcgcggaccacggccaccaccaccaccaccaacacgcggacgacgacgaggaggacgggccagcagatcagctgctggtggatgtggaactagatttctcgcgcgcgcgcgtcgtcgtgcattcaattctcgtgttaaaaaaaatcgttctctttttcatttttcaaaaaaaaggggggcccggcacccaatccctcccctcccccccc

SEQ ID NO: 21623 - DNA, 3028 bp, Oryza sativa
  Clone ID: TF_OsC48414_1
ctgctggttttcggctcgtggccccccctttttttttttttttttcttttctctagcttttttttttttgacatgaacagtgaactcaagtttattttcacccagctgagctgtagtgctccacaacaaaatcatcagatcttaacgcaaatctgcataactgtgctggacacagcaagttttcagctccacttacacgtgtaaaagaatgacagaaaagctctaatagtagtgtgagagtgtataattggacagccctaagtaaccattactttacaatatggtgctcaaatcacaagcttttacacgtatatatatatatatatatagtaatgatggattttatctttacatatgattctttaccctatcacccccaccatctaaccttatattacatttcctgctatacctcctcttctgtattaaatggcaactacaaagctacaaatcccatgccctttcaggcatgttattctcccactaggtgttacaaatgctgccccccaattctctctcttaatgtccatggtcctgattatttctctgctgtcttcaggccacaaaatcatgcagaagaggtgaatgctcaaaccgttgccgttgatccatctgattcatcgaatcatagtccgaagatgcgacggtgacaccaagaggagcagtagcattgtagatgtcatcctcattaacaccagggaaacctggctgagcattaggaacgaggttgctgctggagtgctgcaagcccagtgtcagcgacacattgccattgccgtatctcccaagctctgccaagtgataggccatgaaccgggcgttctcgtctgagtgctgcgcgacagtgttgtggagaaggaggccgccatccacttcgttcgatcgctggtccttcagcatcaggttcatgaaactgtcatcaggattgggctcattctggaagccaacaggcgctccgccaacattcattgctccaatgctggttctcgactcgctcaattggcttgtttcgcaaatccgtgccctggagtttttgagatcctccttgtcttctgaagatgccattttatccttacttcttggtgcattgtcagaggaagagttggagtcttgctctaaatcaccaatctcttctttgtacatgtcttcaatcattggtttccaaaggcggacacgggcatttatgaaccaattcgaaatctgactcctagtcaggccagtctgcctagcaagcattaacttctcggaatcttttgggtacggatggaggaagtgttcaaacagccaagcgcgaagaattgtaacagagttttcaggcagtcccctctgtggtctccaggcgttttgtggaatcataccgtactgttggaaagcacgttgttgccttagctgctgatcaatgtaccggaggcgggttaattttccctccttgccagatgagttctcttcctcgccaagctttttcctgataacattgatctgatcattgatagcatccttcaggcaccgaaagtgccgtgagattgtctgaagagcaactgctgtgtaaggcttcgcagatcctggtccagctaccacatcaaacgatgaaaccacggtttgcatttggtggtaataatgcttgtatttccggtccacctcatccaacattgccatcagttttgccattttgttctgaagctcttgcttctcagcagtggaaagctcaggtgctgcattagcgccagattcttgtggattagaagatacaccctcactttttggccctccatcagtctctttgccatctgcttttcctgattcaaccttctctttctgagccttttgttttatgctcttccaaacactcacgacctcatcaagcagttcttgtgctgccttgagataccttgagttccggattgcgcgtgaagcttcggactgcaaattcttcatccgcatgtcttcccctctaaggttgtcatggtaagactgcggcgttaacatgtctggctttatagaccagtacggtaaggaaggcgccatgatttgtgtgttcaagctcagagatagcccttggctttgcattgatggaacacttgatgagttgtgattattcagaacaccaaactcaagctgtgaaccagtgtgggcatcatcatggatgagctcagagccactaccttgtgctccatccatcatatgcatcaacatctcatttttcatatctttgacatggctgaaagagcgttgaccctggtgcgaagaaagcatgtcggactcccttgaagaggggtcttgtgacattgctgacgcatgcccagggccaggcatctccatgcaattctgctgaggctgcagaatgccgctgaactccgtataaggtccagaagatggattgttcagatagagcaagttccctagagctgatgacataggataggatgcactgcctgggtctcttgagtacatggtctgcgagtctctttcgctaccagggcttgaatagtaagtagccatctcgcaattataactacttattgctcgagattactgcaaaagcatatatgtatatgaagaaccagctttgacgttgacttgattgatgattccagcaggacatcaatattttgttatccagactaaacttgatcccgttcaacttcccttgttgaactaatagactgcaacttctcaaagattctctgccaggctgttattgctacgaacacagctaccaatcaaaatctgagggtgtgctcctgatggggcgcagggcaaaggcaacaggaactgcagcagcgattgacaccaaagcagccagctgatcttcttcaagacagatagataggggagaggggatgagaggagaggagaggaggggagaaagataatcgatcctcccaatatggggacaaaatcagatcccaggattaaaataagtaacaatcccaaaaggaaaagtgagcagcagccagcagcagcagcaagagagagcacagagctcagagctcctctctctcctcttcttctcctccttcttctctcc

SEQ ID NO: 21624 - DNA, 2799 bp, Oryza sativa
  Clone ID: TF_OsC17293_1
cacgagggaagtagaagagaggagagaagctcctctctctctctcttgccttttttttttcttctctttttcatattgttatcttgggatctgatttttgtccccatactgggagggaaagaggagaggagggattgattttctttctcctcctcttcttgttcttcttcttgttgttccactcttattgttcatcatcctcctcctcatagctgaccaaatctctgctgtgacagcaatctctgctgcttggttctgcctcccatgaggagcacaccatcagtgtgattacaaagcaaggaaccctcctaccgcgtcgctgagctgatgaaggagctctgacgactcggatgcatgcttctgccatcaatcaattgatccaacaaggcaactcgatcggaatttgagtttggtgaactctgtaattgattccctgcaagtatccatgcctttgcagcaatcttgctaattgagttgtcaaagctgcatacatggctacttactactcgagccctggcaatgaaagggactcgcaagctatgtacccagcggattcaggcaattcatcatatcctgtgccatcagcaataggaaacatgttatatcctggcaatgggtcttctgggccatacacggaattcagtggcattatccagcatcagcagaatttcatggagctgcctggccatccaactgcgatctctcaagattcatcgtcacgggaacctaacatggtcgcgtcgtacatggatcagcgctcttttggacctgccaaagatatgagaaatgagatgttgatgcatctgatggatggagcacataatgctggtgctgatctcatccacaatgacactcatagcagcgcgcagattgagtttggcctattgaacaaccacaattcgatgagcgttgcaccagcaccaggccaaggattgtctctgagcctcaacacgcatatcctggcgccttcgtatccatactggtctgcgaaaacagagttgctaacaccacactcttaccatggtgatgacaacagaatgaagaatatgcaatctgaggcctcacaggcaatcagaaactcaaagtatctgaaagcagcacaagaattgcttgatgaggtcgtcagtgtttggaagagtataaagcagaaggctcagaaagaccaggctgaagcaggaaaatcagataacaaagaagccgaggggggttcgaaaggtgagggggtatcttccaacccacaggagtctactgccaatgctgcaccagagatttctgctgctgagaaacaagagctccagaataagatggcaaaacttatggccatgttggatgaggtggaccgaaagtacaaacactattatcatcaaatgcaaattgtagtctcatcttttgatatggttgctgggtctggagctgccaagccttatactgcagtggcccttcagacaatctcaaaacatttcagatgtctgaaagatgctatcaacgatcagatcaatgttatccggaagaaacttggagaggaggagagttcatctggcaaagagggaaaattaacgcgcctccgttatattgaccagcaattaagacaacagcgcgctttccagcagtatggtttgttacagcaaaatgcttggaggccacagaggggactgcccgaaaactcagtttcaattcttcgtgcttggctttttgaacacttccttcacccgtatccaaaagattcagaaaagctgatgctagcgagacaaactggcttaacaagaagtcagatttcaaattggttcataaatgcccgtgtccgcctgtggaaaccgatgatcgaagacatgtataaagaagagattggggaggcggatctcgactcgaactcctcctccgacaacgtaccaaggagcaaggacaaaatagcaacatctgaagataaggaagatctgaaaagctctatgagccagacttatcaaccaagccaattaggtgaatccaaagccaacatcgggatgatgagccttggtggggcaccagccggcttccacaacgaaggcaaccaggatgacagcttcatgaacctaatgctgaaggaccaaaggccgggcgaagccgaaggcagcctcctccatgatgccgtcgcccatcattccgatgagaacgctcggttcatggcttaccatttgtcggggctcggaagatacgggaacagcaatgtgtcattgacacttggcttacagcatcctgacaacaggctttcggtacagaacactcatcagccaggtttcgccggtgctggagaagaaatttacaactccaccgcttctctcggtgtcgctgcagcttcctcttcggactacgaatccacgaaccaaatagatcaaaggcaacggttcgaaccatcgcctctaatgcatgattttgtggcctaagatgctcaaaataccaaaaatacatggaggcaagatttgcctggggggagcatttgtaatttgtagtgccagaataacatgcctcagaaagcatggaaattgttagctgtagttgcatttggtacagaagaggggggtatagcatgaaatgtaatataattaagtttagcaggtgggggtttatagggggtaaagaatcctgtaaaaatggaatacatcatacatgtaaaagattatgattttcagaaccattctgtaaaaaaaaacacacctgtaatgactacttatcatccaggtatatgttgttcagcctattgacaaaataaaaaaaaaaaaaaaaaaaaaaaaaaaaaaaaaaaaaacgcgcccccgcgcgccg

SEQ ID NO: 21625 - DNA, 3135 bp, Oryza sativa
  Clone ID: TF_OsC61454_1
ttttgttgtgctttgtcgtggcatgcccccgtcacacccctggatccccccgcgggttgcatgtttttgttcttttcttgttatatttttagctgcaattcacagtaatccattgaaaatctggtccaatctgacccaacacatcaccacatatatatattgaatgatccatgcatcaatcagtagagaaatctgcaagctagcaaaaataccaatctatctttacagcaagctacacccccttctcatatacagttttacaattacacccctgatcacccctacttcgttcactttacttacccccccaacacaacacacgagtgtacgtgtatattgcttgtatacctgtataccctcgccgacggcgccggccggccggcccaggcttctgacgccgtcttgcgttattccccgccgccgcgccgccgccaccgccgccgccgcagacgatgcatcctgcgcgcgccgcgcttacgatcacgcgacgaaatcgtgcagcagctgcgacgccgggccgaaccgctgccggtcgtcggagccgttgatgtagtcgaagtcgccggcgctgccgtagagcaggccctgctgctcggccgggacggggccggcgttgttgcagtgctgcaggcccagcgtcagcgacacgctgccgccgtcgtagccgccgccgccgccgaagtcggccatgtcgccgtaggagacgaacctggcgtcgccgccgccgccgtggtggtggtggtgcagcgcgtcgtgcagtaggctggtgccgccggcgccggggtggtgcacgtggtggttcaggttgaggccggtggcgtacgtgcccatggcgccgccgaggcagctggacaggccgacgacgccgacgccgacgtccagggcggcgccgcccatcgcctccgacttgaacgggttgttgagctggcccgcgacgccggcgtgcctcgccgcggcggcgctcgacgggctctggaactcgtcgcggtcctccgacgagatcgcctcgtccttgcccttgccgccgccgccgccgccgttctccgacgacgagttggagtccatctccgcgccgaactcctccttgtacatctcctcgatcattggcttccacagccgcacgcgcgcgttgatgaaccagttcgatacctgccccctggacaatcccgtctgcctcgcaagcatcagcttctcggaatctttcggatacgggtggaggaagtgctcgaagagccaggcgcggaggacggagacggcggactccgggaggccgcgctgggggcgccacgcgtgctgcggctgctgcatcatgccgaactgctgcatggcgcgctgctgccgcagctgctggtcgatgtagcgcagccgggagaggccgccgccgccctgcgccgacgcgtcctgctcgccgaggccccgccgcgccgcctgcgcctgcgcgccgatcgcgtcccgcagcgaccggaagtggcgggagatcgtctgcagcgccagcgccgtgtacggcctcgccgcgccgccgccggccaccgcgtcgaacgacgacatcacgatctgcatctggtggtggtagtgcctgtacctccgatcaacctgatcgagcatggccatgagcgcggtgaccttgttctggagatcctgcctctccgacggcgagagctcgggggctgaattgctctcctgctcctgcgggttcgagccggccttgtcgtcgccggcggcgtcaccgcccttgcactcgccggaatccttgccctggttcttgtcacccttccgcttgatcgcgtcgcggacattgacaacctcgtcgagcagctcgcgcgccgccctgagaaacctcgagttctgcacgtagatgctgttctgcgcgctcctccccgccatcggcgacgactggctcgggctgagcagcgaggcggccgccatgcccgccggcctgtactggtagagagacaccggcacctgcgtgccgaggctaagcgatagcccgccctggtgtccccgcgccgccgcgccgtgcgccatgagcagctgcgtctgcaggcccatctcgccgccgtccgccgtcgccgcttccctgaacgccgccggctcgtcgccgccgccgtgcgcaatgtggctatgcgacacgatgctcgccgggagcgggatcaggccgccggccgacgagtccgagtaagggttagacggcggtgggtagtgctggaacgacatgtcgcctccgtcgccgccgccgccggtgaggtctctctgattggtggaagaggagaagaatgtggccatcgtcttcagaagcagaagaagagacagacttggacagtaagcttcagattgctgcgctttctgcaatactattcccaaagctttcgcagtacctgtgcagaaatcgactttcagaccaagcaaagagctagaacaagacagttcctggagtatgacagaaaccacccagaacggggacagagatgatcccaaggattcttgcagttgggttgtttctcttgtcgtctttttctgacttcttcttttctttttcgccgaagcagccttgtggaagttgctactagtggagatagccaaccgggttccagcagctgttcgattcgccacggcgctctcctccgcagtaatggtcgcgcggcgtccacatccctcttcggcgaggcccgcatcaccatccgtaagtccgccgcgaagcccaagccgtccgcctttggcagcccgtggtacggacccaaccgcgtaatccgctccaccgatcggggcaggtgcgtgcggagcccggcgaggagggaggaagatgggggcggccttcgccactagctctctccccgctagccaccaccggccgccaggctctccgccgacccgccgtcgctccggccctcgaccgcctgccatctcctctgtcgccgcctccgcctccatccacgccaactctagcccgaagcgccgccgccactccggtccccgtccgtcgccgccaccgctccagtgcctccagcgcctaccctcgcgccaccgccgccgtcgctgccgctgccgccatcgcctcttgcagaaggccgaagtggagagagagaagggaaagagagggaggaagaagagagagaggatgacatgtagggtccacat

SEQ ID NO: 21626 - DNA, 3372 bp, Oryza sativa
  Clone ID: TF_OsC47330_1
ctacctggctacctcaattctggcgaactcgccgcccctgcagacgccaacatcgatggtcatcttccggtccttcccttgcctgggtgacgacaacaccctgcagcaattcctcctcggagaccttttccagaggttggggtcgggcttcttgaggacgatgacgcggtcgagcagcgcggcagggtcagggatgcgccagccgcacttgacgggcgcgacgcggcggcgctcgtactcggtgacggtggtgttgcggcggcggtcgaggcgggactgccgcatgtagtacacctgcggcgtctggcacggctggcgcgccacgggccgcgtgttgaaggcgtacgccgtgtagtcggcgcggcggtaccagttgaggaacgtgcgcatgggcatctccatctcccgcggcgacagcaccccgcgcgtcaccaccaccgcgaacccccacgacaccgacaccgtccactgcttgtcgccgtcgtagcacaccgactgctgcgccacgccagccgagtccagccgcgcgggcccctcgaacagccgcctcagcgccgccgtccgcgacctcgtcgtcgggaacaccggctgcaggaagtccaggtggtgcagcgtcaccaggggcaccaccgggtgcgcgcccaggaggcccagcacgtcgccccacaggtcgcactggtggaaacccaggtggcgcgtcagcggcacgcccagctccgccacgcacgcgtggatgcggtcgtcgctgccgtagagcgccgggtaccggtcgatgcacccgtcctgcatgtgcgccagctgcgcggccagggcgcggctgatggcgaacccgccgccgccgaacgccatgccgtacgagaagatgaggttctggatgtggctctccgacggattcccgatgtagtacggctgcgtgtggtcgtaccgggacagaacgtccacgaggttgtccgggaagaacaccgtgtcgtcgtcgcccatcacgaaccaccgcgcgccggggaggcccagccggaagctctccgacacgatgcgggtgatccgcagcgccgaccggctgccgcggccgtgcgtgtacgggaacttggtcgtgttcccgctgatcttgattccgggaagccccgtggaagcgttcctcgagtagaactcgtacaccggcttgtccagccacacgaacccgctcatctgctccggccgccaccatgttctgatgtactccctccggctcttccagagctccgaagaggcggcaatgccgaacacaatgtgacccagcccggtcggcgcggcgtcatcagacggcggcgacgagtcgttacgcctgttgccagcatcgccggcggccgcgagatgtgcaacgtcgccactggcaaggctctcctccgggcacgagctacccgagtagaacggcgacacggcgagggcaacgacgtacagggcgagcaccgggaggagaaagtagaggaggaggctgcagaggaagaaggaagccttgcacttgggcgccttgccggcggcgtgcatgacaatggcgtccttgtgatgatgccgatcgccgcctcctcctttcatgccaaataaggccttgccgctctccacttgtgcggcaggatatatttttgtaaacatttttgccagtataatatttcgctcttgcgcgtgcgaggcggcgtcgccgtccatggccacgccgaactgtccgccgacgacgtggtggccgtgccccggatgcatggcgtcaggcgccatctgctcgcccgggtacaagaacccggcgccgccgtgcgcggaccccggcgccccgaacgcgatgttcacgccgccaccgccgtgggagccgtgctgctgcagcccgagcgtcagcgacacgccgccgaacccgccgtgctgctgctggtggtggctgtcgtcgtacgcgtcgaagtcgaggtggtccatgatgccgaagttctccgcctggtgcagccgggccacgccgcccgcgccggccgcgacgtcgacgttgacgacggaggccagcgacccggcgtcgtggcgaagctgcgccctcgtcggcttctgttcgccgccgtcgccatcgccgacgaccagctgctggccgccgcgcgcctcggaggcgtggctgcaggtaggcttagggtttaggctcccctgtccaccgctgccgtcgccgccgtcctggcccttcatctcctcgacgtacatctcctccaccattggcttccacagccgaaccctcgcattgatgaaccagttggacacctggctacgtgagaggcccgtctgtcgagccaggatgtgcttatccacgtcgcttggatacgggtgcaggaagtgctcgaagagccaggcacggaggatggtgacggcgcggtcgggaaggccgcgctgggggcgccacgggtggctgtccatggcggcgacgccctgcagcgacttgtggtgcctgatgcactggtcgatcaccctgagccgcggcgtctgcccccgcgtcgtcccggccgcgctcacgtccttctccccgagcgccttcctcgccgcctgcagctgcgccacgatcccatccctcaggctccggaagtgcctcgatatcgtcctcgccgccaccgccgtgtacgcccccgccgccctctccccggccaccgcctcgaaccccccggccaccgccctcatctgctcgcagtacctcctgtacctcctgtccacctcttcgagcatgatgtagagcttgtccttgagcctctgcagctccagggcttccatggcctggatctgcggcgacggggtccacgaggccgacgacgacgacgacccgtcgccgcggccgtcttcttgctgcgtcgctgccttggcgccgttgccgcgcttggtgctgtccacggggaggctgcagaattcttggaggagctgctgcgtcgggaggaggaacctcgagctgcgcaggtgccacgcgccgtgcacttgcggcgccgacgacgacgcgtcgtggtgcgtcatccatggcgccgcgggcgccagttggtgctgcggccgcgccgcgccgccgaggtgcagcacgccgtccgggcggcacagcgacagcgacagcggcgcctggctcggctgttggtgctgctcgctgaggaagcgcatggtggagccgccgccgccgtcgtccccagcgtcggccaccagcgcggcgaccttgcctgccgcgccgggcatcatactcatacccagaccgcgcacgccgagaagctccatcccggcctgcaacccgaacagctccggcgccgcttcgtccatcgccggcatcagcgtcgtgaccgacgacgccgatgcatctgccgccgagaagtaatccgcgaaccccaggttcggatcatgcgccat

SEQ ID NO: 21627 - DNA, 1479 bp, Oryza sativa
  Clone ID: TF_OsC85922_1
tttttttttttttttttatataagtgattaactgattaagcacacagagtgcagcagaacacaatagataagctaaataaacccacagcaatacatacatatatacgtgtgaaaaaaatcgtctgaagcggacggttcaaccgcttgtctacgacgcatggagaacaaaaacatcaacaccagtgctatgagcagtattacccagtggtatctagaaactgaaatataaatttcgccattttatacaacccctttggaaaaatttccccttttcttcaaatcaagcgcttacagaactatatatgtttacttgcaattagttttgtctataaaatataactggttctctaatatacggctcctgatcctgatcttgcagaacatttcctgatctaagcaattgtcctcctattgctttggatgaattcctcctgccctgtaacccagcatagtgttcagccctcggcgatcatctgctacgaattgttatcacctcttgcgtttggttttgacgctggtggaggaagatgggttactgtgccagtttcttttcctttggttgatgaaccagttgttgatctgctttagctgtagccctgtttcttggactagccgtgccttgtcttcctctgttggatatggccactttgcatgagactgccaccaagcttttaacgtagaagtcgtgtctcccggtagctttcccgctcttcgcttgcgaagaatttcttctcttatgtcaatcagcttctctttgtaaccctgctttagttcatgctttagctcttgacggacacgctccattagggatcgctcgctttctgtgggaaggccgaaacccatgttatccgctccatccaagcttggatcatacatgtttgcctcgctatctgcctgatcatcttcaccatctgacatggttgctcccgtgccttcaccgggcgaggcacctgtcaaactctgaaggttttgttcaagttcccagcatgccattactgcttccatggcatgaacacggacatgctgctgtagctgctctttaaacgaacataatagcaagacgtagtgcgtcatgaactggtcgagctcgcggccgtcgtccccggcggcggcggcggcgagggcggagtacttggcgacgacgccctgcgactgcgcgagctgcgcgtcgatgcgggggagctggtcgaccggggtggcgatgcggaggcacgccacgtgcgccgacagcagctgctcgtacagcgggtgcgccagtatctccgccttgcaccgcgccgcgtccgcctcgccgccgccgcccatcgcggccgccaccgcgtccccaccgtacgtacgcgcgccgccgcagccgcagcgccagacggcgacgccgacgagtccgacgtggtccgccgccgccgccgccgccaccgccgcgtcgtccgcgccgagcgcctgcatggtcatctcgtgcgggaggtgaccgtggaacgccat

SEQ ID NO: 21628 - DNA, 1651 bp, Oryza sativa
  Clone ID: TF_OsC1970_2
atggccttggactcgccaccccaccatcaccacccaacccaacccaacctcctctcctatcgtcatccgctcttcttcccctcttccccactcgcaccaaccccaacccccccaaccgccgccgccgccgccgacgacccaccggtcgccgcgtcgccggagtcgcgtactggagaggggggcggagaggcaccagccgccccctcgcgcgctgcagcagcaagcggtgcgcgtgatggcgttccactaccaggaccacgcgctggcgatggacgccgcggctgcggcggcgtagacgggcggccaccaccaccctgggttcgtcggggcgggaggagttgtggggggaggaggaggaggagggtgggagcgggagaaggccgccatcgcggcgcacccgctgtacgagcggctgctggaggcgcacgtcgcgtgcctccgcgtcgccacccccgtcgaccagctgccccgcatcgacgcgcagatcgccgcgcgcccgcctcccctcgcagccgcctccgccgccgccgccccccccggcccctccgctcgcgaggagctcgacctcttcatgacacattatgtgttgcttctttgctcattcaaggaacaacttcagcagcatgtgcgtgttcatgcaatggaagcagtgatggggtgctgggaacttgaacagtctttacaaagtctaacaggggcatctcctggtgaagggactggagcgactatgtctgatgatgaagataaccaagtggacagtgaagccaacatgtttgatggaaatgatgggtcagacggcatgggctttggtcccttaatgctgaccgagggtgaaagatccttggttgagcgtgtacggcatgagctgaagaacgagcttaagcaggggtacaaagaaaagcttgtggatattagggaagagatccttcgcaagcggagagctggtaaacttcctggtgatactgcatctatactaaaagcttggtggcaagctcattctaagtggccatacccaactgaagacgacaaggcccgcctggtgcaggaaacggggttacaactgaagcaaatcaacaattggttcattaaccaacgcaaacgaaactggcatagcaacccagcatcctctggtgaaaagaccaagaagaaaagaaacgttacaggtgatggtggtgctgagcaatcgtggtagattggttcaacatgaaactagatgtaaacagtaccttttattgtgaagagtgtagtacattctctcgtgctctggtgtgacaaaatctggagaccggcccattcacaagggaattgcgatcataggcgtaatcactgggcaaagaagtcatctgaaattgtagcataagcgcacaaaactgaggtgggtggtatttgactttcgcagtatagcatcgactgtctgctaatgtgattttgtgaaggaatgttctgtataaccgatgaacggaaggaagaattgtattgtgtatgtaattgtgtatcttatttatcatgtaatatatatatgatattaggagctttaagattcggattggatatgttctctgttttgatgcacgatgcagtgttgaggtgtaacatgttttggtaattcactgtgtataaaaaaaaaaaaaaaaaatgcgtaagcttttct

SEQ ID NO: 21629 - DNA, 1237 bp, Oryza sativa
  Clone ID: TF_OsC175523_1
atggatacatatggatggatgatggaatggaaggtggacagacgttaccggcgataccgtgagcagatgagggcggtggaggtgtcgttcgaggcggtggccggcggcggcgcggcgcaggtgtacacgaagctggcgatgcgagccatgtcgcggcacttccggtgcctgagggacgcgctggtggggcaggtgcgcgcgctgaggaacgccatgggggagagccagagggacgccgccggcggcgtggcggcggcggcgcccggtgccaccaagggcgacacgcctcggctgcgggtgctggaccagtgcctgaggcagcagagggcgttccagcagtccggcgccgtcgacagcttcccgtggcgcccgcagcgcggtctgccggagcgcgccgtcgccgtcctccgcgcctggctcttcgagcacttcctccacccgtatccaaatgatgtggacaagcacattttggcgcgccaaacaggcttgtcaagaagccaggtttcgaattggttcatcaatgcaagggtgaggctatggaagcctatgatagaagacatgtacaaggaagaaacgaagccggaatcatctgatggcaacaacaaattaaaccctagcgcagccggcaacaaacagcagcatcgagatgatcccaagaagaattacacggcaacgacagcagaagccagcttagtacaacaaagcagctaccatctccaccttcgcagcagcggaaaccgtaactcctcctcgttgatgatccctgcagcagcatcaacatccatcgatcatcaccatgacagcagccaccagctgttgggcggccatagctattcttcagcagcaggattgcatcatggtcatggcggcgccgtgtcgcttactctagggctccagcagcagcagcagccatttgcggcgtcgatgatgcatcagcatcagcagcaccagcaccagcaccagcagcagcagtcattcatggtggaggcggcggaggaagaagaagatgacgtgctcccttacaggaacctcatggagtctcagttgctgcatgattttgcaggagctagctaaggcaggctccagcttagcatgcagctaatttatttgattgttaaaggagattattgcgctcaaaagtttaatttaattaaggagatgtaggtaattaaatattacattattgttcttttatgaccccacctttcgttacattaaaaaaaaaaaaaaaaaaaaa

SEQ ID NO: 21630 - DNA, 3981 bp, Oryza sativa
  Clone ID: TF_OsC2791_1
tttttttttttttttttttttttttttttttgatttttttttttttatccatcaatggattcagcaattcagctgatgcatcctctcttttttttttttagttttctcgttttttggttcccccactcctactacatttggtacatgatgtatagctttctcaatggcctctgtgccaatcacaaggcccaaagtaaacgaatcacaaagcttcccatcaaaaagaaaaaaaaaaaagggaaaaaaaagcccggagaaccacctcaagaatcagctaatatacaatggtgaccctcatcatctcctccaatgttgatcataagaatttctaccatctgtcggattataacgttcttgctttccatgatgatgactccattgcctcgatgcctcagggttttgactctgatgacctgaattccagggtcttgaaggctcagggttgtagcttggttgtgcatgtgctgatgaactccactgccttgaaggctcagctgggttgctgtagctctgctgcccggagctccactgcctggaaggctcagcagtgacagtgttgtagctttgttgcccagaactccactgcctagaataaggctcaggattgtagctctgctgcccgtagttccactgccttgagggctcgggaacatagccttgtgagctactaccatacacagcaccagcaccaagctcaggagaccgcgagttccgccatagggcgtctcgcgccattgtcgtctggtactccgctgcgtgagtgtagccatttcggtccagtccctgccctgggtggagggagtgggacgagactggagctgaaccataagaattgtatgtagtagcttgtgtgctgtggttactgtaagcattctggttaggatacgtcacatggtttgaatttgatggggcagcgttaaaggaattagtagtgcgtgcaggtgcagcccatcgatcaggtgtagcatttcgcccagtggcggcaatggtagcaacactagattgccaggtgtatgatgtgtaagaggcatgtgattcagccaccgaagaatgtgatacagcagggtgtgagatgctctgaacctcatgggctagtttgttcaccgctggctgatgatggaccgccactgcaacaggatcagacgttaaagcatatgattgggtgtgctggtgtaccgtggctctgctcagaagattattcataggagcaacatgttgagttgacggatttacggagatcatcgactgggggagagatgtcatattagttcgagtctgtgccggcaaagcagaagctgaagcataaggttgtgaaggcaacgaactgacaacatttgagaaactttgctgcacgctgcttgcaacaggaggtgcatttgctctgtttggcaaatgggcgtgctgcaagttttgggtcctcacttgtgatgggaactctgaactccagccatccctggctatcaggtcttttggaggagttggcgatggaagcgaagcagggatagcttcaggaccagattcgggctctttttggaccccagaattgttggccaggctatttaccagctctgatagtccaaggccagtctgcttcaacatgtccagaagtgcaacggtctgctcacttggcagggtcccaccctgattagaagttagagcaaagacaagttgtggattcttgagcagcaccgcaagcagctcaagatctggttcagaagttgcaccgttcgcaccagcagcaactgctggagatactgatgaggttgatcctatttgcttgtccacaacaggaaccacaatgtttggaggggctgtgctcacgctatccgtttccatagcgtcagcatctggtggctgctcaattggaatttccggtgtaaggctgtcatcaaagtccatttccacatcccatgggccctttggattcaacggtatgtcctttagactagcataaaaggtttccttctcacgcctgtttctctgggtttggacctcaaattctttgctgttctctccagcacctaaactccaagcagggtctatccaaacctttgcaagccttcctacaaaaagaggaactgttgcaatgaactgcctgaaattatggtaatagctgccccatgtttgtttatggggaatgactggtaacttctcaattctcatatcactacagaaaattgccatcccctgctcttccaacaatttgatagcaggatgcttgttccaagctggtggtatctgccaaataactctcttggaatccaatttctctataaagttttctttggctgttacgttcagcttcaagctaactgcaatttctggcttatcaggtggagatagtgtactttgtttagaggttgatgggctagggtcaacaggttgtttaatgattgaagtaagaggggttctgggcacaagcggtacatttgaatcaactaagccagacggtttttgaatttccatcatatgaggtttttcaatcactttgcttgtgtcaaccttgccatatttctcctgcatgaacatggcacgcatctttgctttttggatatcatctgcagataacggtctactattgttcgtagatgtgcttctgacagggttaacattcttgccagcagctttccgatttggatgttctacaagtagaactttccttttctctttggattttgtctgcagagaactctttttatttgattcgtccgcagaagcagtgagcagcaatggcgtttttctgggctcaggcattctgctctcacttgcatcatcagtcaaggcaaggatgtcctcagtaatatcaacttcagatttccaagactcatcacggagaatttcacttatcctttgtttacagattaagtccttctgagatttcttcaatgcctgacttcttacaagcactttgctcaacctggagaggaggttcctcgccttgcttgatatgtcttgtgtcctataaaaccgcaacctgttaatagtttgcaatacagttgacatatgagctggcagagctttatgtaatgggagatgaagaagcaccttgaaaacaacaagaataactgttgtttgctcctcagtaactgcttggcccaaccacgtcgatacaatggccaaaccacccattgttaagaaccaactaagaacagttacattgtttatttgtagaattgattccatcaatttgacctgtccagagaatgtattctccttccgcattagaacaaagatactttccaaaaacttcttatcttctgactcaactccagcaacttcctcttgcttagtttccttttgaatgggatcgggattagtcttagcctcggtgggttgcattacacctattggggcaacagggattgcacagctctgcaggaccaccggcaattgtaaagagatttgaggaaccaccagatgcggcaaagaaatttgttgcgcctccaatggttctaatgttctcagaggctcaataacttgagcatgtgcctcaatgtcaacaggtgtctgctcagtgcttatggagcatacattgtcaggagccttggatgactctattctcagggctttctcacgtgataagcgaacaaattttcttactcgcgtacgttgacttgcaaagaactccctcacctgtgtaacagtaaccccaaaagatgcgctaatttcccgagtttctttttttccaatagtatccttcatagcaaaaagtgactgcatggacttgacagcctttggatttaacaaatcccttggctttttacctatcttgatagacaatgccccagcagccatctcctgggcgagggggttgacgccggtgaggcggcactgcgcgacgacgaggagctggagctggtccacctgcgcgtgcagcagttcctgctgcgccgccaccatggccgggatcgagtccccgtgggccccgccgcccgactcgaccagggccccggcctcgggcttgaaggggacgagctccat

SEQ ID NO: 21631 - DNA, 1391 bp, Oryza sativa
  Clone ID: TF_OsC1970_1
gaaatgacaatcttcctaaggcaattttttttacttaataaaaaaatgttttttttttcaaggacaacacagcaactcttgcggacccattatgtattgctcctttgttcgttcaaggaactactacagcaatatgagcgtgttcatgcaatggaagcagtaatggcttgatctcctcgtgaaggttctggagcaactatgtctgatgacgaagacaatcaggttgatagtgagagcaacatgtttgatggaaatgatggatcagatggtatgggctttggccccttaatgctgacggagggcgagagatcattagttgagcgtgtacggcaagagctgaaacatgagcttaaacaggggtacagagaaaagcttgtggacattagggaagagatactccgaaagcgaagagctggaaaactcccaggagatacagcgtctactttgaaagcatggtggcaggctcactctaaatggccatacccaactgaggaggacaaggctcgcttggtgcaggaaacagggttgcaactaaaacagatcaataattggtttatcaaccaacgtaaacggaactggcacagcaatcctgcttcatcctcatcagacaaaagcaagagaaaaagtgcaggtgatggcaaggccgagcaatcttggtagaacgtggttggagaagaagtatatatatgtaaataatgcatccattgtgaagaatgccagtatatttattgctcccaagatggcgattcggacagaagcttcctgggggcagaatgtcatgttataattttagtcatgtgaagctatagctatatatagtaatttatacgaaagaaattatgtcatgttataattttagtcatgtgaagctatagtgcgtatatatagtgacttaccagagagtagtttttatgtttgctgttggctagtgtgcatttgtagttgggacgtgctggctgtctctctacagctcggtacaaccatgtatttataacgtgttgtgaagcatatgttgtaaaatcgtggaatgggagtgttctgcgatccccatatgttgttgtaatgttgtatattgatgaccatgctgcaacggcagcatgtttgtaactcgttatatcctcaggctcttgtgttgttacaaattacagaactatattgtctttaacgagcatctcctgttggattaataatatatactaggggctttaaaggatccctccccccacaactcctcccgccccgacgaacccagggtggtggtggccgcccgtctccgccgccgcaaccgcggcgtccatcgccagcgcgtggtcctggtagtggaacgccatcacgcgcacccctgctgcttctgcagcgccccaagcccacgcgtccccggacgccgtggg

SEQ ID NO: 21632 - DNA, 1722 bp, Oryza sativa
  Clone ID: TF_OsC1621_1
ttttggacacaccttctctctcatcgaggtgggttaatatattcttctgggtgctttagcatccaagctccagtttcaccgagctaaggtagggggaagggaattgaattgaaggttcttgggtgctttcttttccagttacctcccaccttaggaaccctctgaaagacccctcaccatctcctttgtgtccttgctaaccaactccccattaaatccctctccgcgcgccttctcgctggccattagagctagctagcgagagctctagctacagctatacatacgtgtacccaacggccacggtcacccgcgcgagcgagcacgcgcaccaaccgatcgagcccaacaagctcgctcgctcttggtgcgcgcgcgcgcggcgagttcgatcgatcggtgtatacgcgtatcgtgttgtgtatgcaaggcggtgatcacggaggcatggagatgggcgtggggtcgttcaccggcggcggaggaggcggggagtgctcgtcgtcgtcggcgacggcggcggctgctgcggcggctgcggcggcggcggcggcggcggaggcggaggagcggcagctgctcaagggggagatcgcggtgcacccgctgtgcgagcagctggtggcggcgcacgtgggctgcctgcgcgtggcgacgcccatcgaccacctcccgctgatcgacgcgcagctcgcgcagtccagcggcctcctccactcctacgccgcgcaccaccgccccttcctctccccccacgacaagcaggagctcgactccttcctcgcgcagtacatgatgctgctgtgctcgttcagggagcagctgcagcagcacgtccgggtgcacgccgtggaggccgtcatggctaactggcacaacaactcacagacatcaacccttaaatcaaagcgtaaaaggtaaagggcagaaaaaaatgtatacctgacgtactcgctaatcaaatcaaaagaagacatggtgactcataagtaataagatcatcttaaattgtatatctagttattaattagtcagaggtgacaaattcatgacatacatactagtctgaccactggcatatgcgttgtaatttttgagcagatatgctcaagcaaattcttcttgttggtatagtttttaaggaagaggagggcaggaaagttgcctggggacaccaccaccatactcaagcaatggtggcagcaacactccaagtggccataccccacggaggatgataaggcaaagcttgttgaagagactggcctgcagctcaagcaaatcaacaactggttcatcaatcagagaaagcgtaactggcacaacaactcacagacatcaacccttaaatcaaagcgtaaaaggtaaacaaaccgttatccaagtattttatccacagtaatacaatgttgatgtttcagtaattaacaactgaattataacacaaacttcttttttctatatgtaatacaggtaaagggcagaaaaaaatgtatacctgacgtactcgctaatcaaatcaaaagaagacatggtgactcataagtaataagatcatcttaaattgtatatctagttattaattagtcagaggtgacaaattcatgacatacatactagtctgaccactggcatatgcgttgtaatttttgagcagatatgctcaagcaaattcttcttgttggtatagtttttaaaaaaaaaaaaaaaaaaaaaaaaaaa

SEQ ID NO: 21633 - DNA, 1253 bp, Oryza sativa
  Clone ID: TF_OsC1621_2
gcggcgcacgtgggctgcctgcgcgtggcgacgcccatcgaccacctcccgctgatcgacgcgcagctcgcgcagtccagcggcctcctccactcctacgccgcgcaccaccgccccttcctctccccccacgacaagcaggagctcgactccttcctcgtacgcatctatttaatttcttcctgagttcgatgcgccatgcttgattaatttcactaggttgaatttaatctttgcatttgtgcatgcatgcatacattacatgcaagtatcataccgtacgcactagctacatgattaactagaagctatccagccaagctaactgtatatatgcatactgaaatgatcgatgcaggcgcagtacatgatgctgctgtgctcgttcagggagcagctgcagcagcacgtccgggtgcacgccgtggaggccgtcatggcgtgccgcgagatcgagcaatccttgcaggacctaaccggtgcaactttggaggaagggacaggggcgaccatgtcggaggacgaggatgagacggcgccgatgctggagggcccgatggatatgggctcggacgggcacgacctcatgggcttcggcccgctcatgcccaccgactccgagcgatccctcatggagcgggtcaggcaagagctcaagattgagctcaagcagggcttcaagtcaaggattgaggatgtgagagaagaaatattgaggaagaggagggcaggaaagttgcctggggacaccaccaccatactcaagcaatggtggcagcaacactccaagtggccataccccacggaggatgataaggcaaagcttgttgaagagactggcctgcagctcaagcaaatcaacaactggttcatcaatcagagaaagcgtaactggcacaacaactcacagacatcaacccttaaatcaaagcgtaaaaggtaaagggcagaaaaaaatgtatacctgacgtactcgctaatcaaatcaaaagaagacatggtgactcataagtaataagatcatcttaaattgtatatctagttattaattagtcagaggtgacaaattcatgacatacatactagtctgaccactggcatatgcgttgtaatttttgagcagatatgctcaagcaaattcttcttgttggtatagtttttaattttgttgtcgtgggtgtacctgcatgcatacataaccccaagactaattcatttgctgtgcatatacattgaccattctataacaaaaa

SEQ ID NO: 21634 - DNA, 1785 bp, Oryza sativa
  Clone ID: TF_OsC72309_2
tcaggtagctggattcagtgctgcaaatgcagataaaccagcaccacatttttgtaccacatcttggctgttcatatgctccattgctagagcttgatttccagcaccaccacccgagctcctcttcagctcctcgcacatctcctcgatcattggcttccatagccgaactcgagcgtttatgaaccaattcgacacctggttcctgctgaggccgctccttgctgcgagcatctccttctcgctgtctttcggatacgggcggaggaagttctcgaacatccaggccttgaggacggcgacggacttctccgggaggccgcgctgcggccgccagcactgctgctcgccgcgccgcagctgctgcaccgcccagtgcttctggatgaacgccgactcccagctccgctccctctcgccgccggtcaccgccgacgacgactcgccgccgcggcaaggcctgccggccgcggcggcggcggacatgatctcgccggcaatgcggcgcctcaggccgtggtacattgccgacacggcgcggtgcgcgaacggcgcgcagatgctgctgctgctcatcccggcggcgcgcgccgtggcgtgcgtcagggtgttgaacctcgccgtcgtgctctggatctcgtcgaggcattggttgtacttctgatccatctgcgcatttgaattcgtatcgtcgtcaaaagatggtttcaaatttgattcgaaatggtagtacgaaatttgcttgaactgatgcctcgggagtcgtgtggagaagggcgagctcaccagctggagcatggtgaggagctcgctcctgagccgctgagccgaagcgtcgccgccgccgtgcgtgtgctcgccggaggaggcgatgagctggttgttggagctcacggcggacgacggcgcgccgccggccaccgagcagctcgacggcctcgagctgccgctgtcgacgccgctggccgagtcggcggcggcgtccgcgacgccgcccagcacgcagccgacggcgtcgttgagcacctgctgcgccaccgcggcgtatcgggaccgcgccaccaccacggcgaagttcgccgccgggtagtacggtacgagcggcggctcgggctccaccaccaccaccctgctcatctgcgtcagcccggaacggctcgccgccgacgagcactggtcgccgccggcgttgagcatgctgtccgaggacgacttggagcacaggctcagcgacagctcgctcgccgccgccgccgcggacacgaagccggcagcctccggcaccccggcgaggtaatacgaaccaccgtgcacaccggcgttgctgctgctccagttgcagctcggcttcctcgccgacgtcgagcaccaccccgccgccatgtcgcccggctggccgtggccgaggcacgcgaggctcaccgcgccgccggagctgtcgccgacggcgacgtcgtacccgccccccatctcctcctccggcggcgtcgtcgcgccgaggtagtcgccatgcccgtgcgccgccgccgccggcgcggcgccgaacagctgggtcgccagggacgcgagcacgaggttgttcgccgccgcgaagtgcgcgccgacgtccatcgccgccgccgccgcgtcgccgtagccgaagctcccgccgtgatcatgcggcggcgccatggccggatggaacagcggcacgtcggcgccattgccgctcgccgccatgaagtagccgccgttcatggcggcgtccaccgcaccgagctgcgagaacgatggattgccgctcat

SEQ ID NO: 21635 - DNA, 1995 bp, Oryza sativa
  Clone ID: TF_OsC72309_1
ctacaatattacaaccctcgttttgcgtatcttcccaatctcctcaatccccttctcttcaaacactccctccatctgagtgactgcgaatctgtcatggtgttttccatcacactgaacagccaaatgtgatggcttttttgacctttctaaactgagcacatctttgctgctaagatgctcaatctctgctgcgccatcgcttcctccggaggtcttcttgagctcctcgtacatgtcctcgatcatcggcttccacagtcggacgcgggcgtttatgaaccagtttgagacctggctcctgctcaggccgcttctcgccgccagcatgtccttctcgctgtcctttggatacgggcggaggaagttctcgaacatccaggccttgagcacggcgacggacttctccggcaagccgcgctgcggccgccacgactgctggtcacctcgccggagctgctgcatcgcccagtgcttctggatgaacgacgactcccagctccgctccttctcctccagcgccgccgccgccgccgacgacgacgacctcgccgtcgccgccgccaccagctgtcccatcacccgcctcctcaccctcctgtacgccgccgccaccgcccgccccgcgaacgccgccgtcagcccgccgccgccgccgccggtggagcgcaccatgctgttgaacctcgccgccgtgctctgcatctcctcgacgcattggttgcacttctcgtccacctgcatctcatcgccattggttcgcaccaagaaacggtttcttaggtgttcgacgaggaactgagccaagaactcaccagttggagtagcttcctcagacgctgcgcctccgccgcccacctcgcaccgccgctcccgggtgaggcatcctccgtcggcgccgtcgtgatcctcgccgaaaagcccgacgaggagcgcctggctcgcctcgccgccgtcgacgccgctggccgcgtccgcggcgacgtcttgcagcaggcaggcgacgaagccgttgagcagctcctgcgcgacgtgcgcgagcaccgctgaccgcgacaccacctgcgagaaatgcggaggcgccctcgagtggtacgcttgccttagctcgccggcggcggcggctgcggcgtcgtcgccgtgagtggggtggaacagggcggcgccggcgccggcggctgctgcctggtggtagccgaggccgcctccgctgctcacgtgggttaagccggagcagctcacttccgacgacgcgttcgccatgctgctcggggacgaacacttggtggcgccgagccgcagcgacagctcgctcgccgcgggcgccgccgccgccacggagctcgcggcgaaagggctcaagaacccggcgccggcgccggaggagaacccggacaggtagtacgcaccatgtaacggcgcaatgccggaccctccatagatccagccgccgccgccggcgtcgccgcacggcgcctctccggcgagccttcccatcctcgacgcctgagcaatggtgacacccgacgacgttccacacccaaactccaccgaacccagcaccgagtgcacggtgctgcagctctccgcgccaccggccgcggcggcggcgaccgcggcggcattcacctcctcctccgacacgctcccctgcggccgccgcagaggcacggcgcacgccagctcgtcgccaacagcagccaccggcgaggcgaccaagaactcgccgtccacatccccgaacccaaaaccaaagaacggcgccgccgcctctgcaccgccgccgccggcgacgaagcagcagctgatggcgtcgaggcccagctggtgataggatggattgctgctagtggacataaccggggtcagggactcaggggagagcaggggacgccatgattaccatcaggccacaccgagaaagagaagatgaagctgcattttttcagttttgcatggcatgcaatcatgcaggctccaaacctgcagcccggg

SEQ ID NO: 21636 - DNA, 870 bp, Oryza sativa
  Clone ID: TF_OsC354772_1
atggatcacatgcagcagcagcagcggcagcaggtgggtggagggggaggagaggaggtggcggggaggggtggtgtgccggtgtgccggccgagcgggacgaggtggacgccgacgacggagcagatcaagatcctgcgggagctgtactacagctgcggcatcaggtcgcccaactcggagcagatccagcggatcgccgccatgctgcgccagtacggccgcatcgagggcaagaacgtcttctactggttccagaaccacaaggcccgcgagcgccagaagaagcgcctcaccacgctcgacgtcaccaccaccaccgccgccgccgccgacgccgacgccagccacctcgccgtcctctccctctcgcctacagcagctggcgcgacggctccctctttcccgggcttctacgtcggcaatggcggcgccgtgcagacggatcaggccaacgtcgtcaactgggactgcaccgccatggcagccgagaaaaccttcctgcaggactacatgggcgtgaccggcggcggcggcgccgccgcggcggccccgacgccgtgggcgaggacgacgacgactcgcgagcccgagacgcttccactcttcccagtcggcggcggcgccggcgacggcgcgcatcgtcacgccggccacgccggtttcccgtccaacttccagcgctggggttctgctgctgctaccaccaacaccattacggtccagcagcatttgcagcagcacaacttttacagcagcagcagcagccagctgcacagccaggatgggccggcagcaggcacatccctggagctcactctcagctcctactactgctcatgctcaccttaccctgcagggtccatgtga

SEQ ID NO: 21637 - DNA, 919 bp, Oryza sativa
  Clone ID: TF_OsC91731_1
agaagtatcagcagtgaccatgttagtatccatgtggcagaaaagaagaaaagtagaagtacatctcatgatggaaagaccaaggaaaagggcaatggggaaatctcgtttgcgtgctctttcctgatcctcccagatactgcatgcaacaacggactttcccacaacacatgccgtatctcatgacatctcgtacgtactccttttgatgtggggcagctagaactaggactaggcacagcgacaagaggccaggtacagtcgcggcaagctgcatctcatgccatatgtgcggcacatcaatgcacgggtcgatctagaggccgaagctgcaaagcctgagctccagcggcggatcccggccggcagcgacgtcgaagaacgagatctccctgcactgctcgccaccgccgcccctcacataccggaccttgtccacctcgaggtcatacgacttgagtgggaacagctccagcgtttccacctccctcgtcggccgctcccacatcgcttccgtctccaccacatccctcacgtagcatgtcatgagccggtgatgatggccgtagcttctggcctcccgcttgctctcaggaggctgcaggacgaggtcggcgtcgccctcgtgggctgcggcgcggccatcgtcatcgttgctgccgctgtcgggggaggaggcgccgcggcggcgcttcttgtggtggtggcgctcgcgggccttgtggttctggaaccagtagaagacgttcttgctctccaccttgccgaatgcgctgaggtgagtggagatgcgctggatctgctccgtgctcggcgtccgcaaccccgctcggaacagctccgtcaggaccttcacctgctccgccgtcgggttccaccgcccacacttcacccccactcgcccgctaagagcctccat

SEQ ID NO: 21638 - DNA, 514 bp, Oryza sativa
  Clone ID: TF_LIB3475-008-P1-K1-B6
cccacgcgtccggcaaactgaagtactttgctccaatagcaatggtagcacagccaaaaacagacattttggtcctgcaattaatcagaaactgaaggcacatttcaaggaagatccataccctagtcgtgcaacaaaagaaaatctggcacaagagttaggcctcacatttaatcaggttttaaaacagtgatctttgttcttcctcccatgagcacttcgcagggctgtcactgtatctctcctccttaatagagtttctgttgacaggtcactaaatggttttccagtactcgtcattacgcaagagtggcagccacaaaaaaggagaacaacattgaaaatcatacggctgagaataataacaataccaacactgttgatagcatacaactgagaggatccaatgatattgttagtgtagatagaaatgatatggtctccgaggaaaggacaggacaaagtaatctcaatgaaggtactccattaagatcagataccagctgtgggcaga

SEQ ID NO: 21639 - DNA, 1731 bp, Oryza sativa
  Clone ID: TF_OsC520_1
ataaaaacaagccattcaaaattattacaccagccattacaccagctgcggccggctgcttttatctgatttgacaatggacgtgacggccacccgacctctcttttcctactagctctcccctaccctacccctctttccttctagcagtagcctctactacagtctacacaccctctctatgcaaaacgcaatctcatctctgtgcagccactcatccgatatttccccccatttcttttcctctccactgtttccctcctcctttaattattcccccccacttcgcctagctttacaaacccccacaaatcgtcattctaaccaaaagaaatcagcaggattagccctagctaagtactcccaatagctgtgataaactgataattagccttctcttcttccttgctgagctggtcggtgtcgtgtaccaagaaaccctcatcaagcacatacgctaatggaggagcttgaaggccaccggggtgaaggccggctgcctcctcctcctccgttgctgccgtttcccaaggtctccgtgcaagtctacaccgttcctagctcgtccaccgccgcctccgccgccgctgcaggcggagctcgtcaggctgttgcaccggcgacgcgggacggcggcgacggcggcggccgcgccgccggagttcttgacgaccctgtcaaggccaggatcgtctcccaccctcgctaccaccgcctcctcgccgccttcctcgactgccacaaggttggctgcccggcggaggcggccgaggagatcgcggcggcggcgcgggtgcgggaggcgcggcagcgggcggccgcggcggcgagccgcatgccgccggcgccggaggacccggagctcgaccagttcatggaggattactgcaagctgctcgtggagtgtaaggaggagctcagccggccgctccaggaggccgaggagttcctcaggacggtggagtcagagctcaactccatcaattctgggccaccccttacagctctaatctcagaatccaaagccggcctcgattcgtcggacgacgacgaacacgaagacggcagcggcatggagatgatggaggccgcggaagacgaggacctcggcatcatcgaccctcgctccgacgacaaagcgctgaagaggcacctgctgaggaagtacagcggttacctgggaggcctgaggaaggagctgtcgaagaagaggaagaaagggaagctccccaaggaggcgaggcagaagctgctcacctggtgggagctccattaccggtggccgaacccgtcggagatggagaagatcgccctcgccgagtcgacggggctggagcagaagcagatcaacaactgtttcatcaaccagcggaagcgccactggaagcccacggaggagatggagttcgccgtcatggaggcctaccaccaccagagcaccgatgccgcggcggcgttctacgtcgacgtcgacgcccgcctcgtcggagcgacggcggcggctccggcatcggccgtgtacaccgccaggccggatcatggcgtgtggcgcgcatagccgttgctcgattcgcccgttgccgccatctggaattaatctgaactgcccttgcctgttacatatagtagggttgttgatgatggtttcatatgtttttccccaaagggaaagtcagcttggacattggaccaatcaagaaatgaaatctcagcaaaaaaaaaaaaaaaaaa

SEQ ID NO: 21640 - DNA, 1806 bp, Oryza sativa
  Clone ID: TF_OsC95162_1
atggcgcacgatccgagcctagggtacgcggattacttcgcggcggaggtggatggcaccggctcctcggagttgtatgggttgcagcagcatcagcaggtggttggggtggcggagatgttcggggtgagggggctcatgccggcagcgcacgcgcacgagcagagcaagggtgtgggcgcgctcgtcgtcggcggcggcggcgtcgatgatggaggcgcgacgacgctgccgacggtccacttcggcgggctcggcgagctgcaccagcaccaacaccggcagagccaggcgccgctgtccctctcgctccacaggccggaggcggccgcgacgtcgctgctgatgcagcagcagcagcagcacctccaccaccagccgtcgccgccggcgggcgcggcgtcgacgtggcagctgcagcagggtgcgtggcatctccgcggctcaaggttcctcctcccgacgcagcagctcctgcaggagttctgcagcctccccgtgaagagcaccaccagcccatcatcggcaagcaaggcaaccaaaccgccgcaagaagaggccgccagcggcggaggctcgtcgtcgtggaccgcgccgacgcagatccagtccatggacgcggccgagctgcagcggctcaagggcaagctctacaccatgctcgaagaggtggataggaggtacaggaggtactgcgagcagatgagggcgctcgcggcgtcgttcgaggcggtggccggggagagggcggcggcgtcgtacacgcggctggcgtcgaggacgatctcgaggcacttccggagcctgagggacggggtggtggcgcagctgcaggcggtgcggaagcagctcggggagaaggacacggcggtgcccgggatgaccaagggcgagacgccccgcctccgggtgctcgaccagtgcctccgccagcacaaggcctaccaggccggcatgctcgagagccacccatggcgcccccagcgcggcctccccgagcgcgccgtctccatcctccgtgcctggctcttcgagcacttccttcacccaagaatgtttgccggtttcgtgacgatgctcaagctctcaccgcggtacccaagcgacgtggataagcacatcctcgcgaggcagaccgggctatcacgtagtcaagtggcgaattggttcatcaacgcgagggtgaggctgtggaagccaatggtggaggagatgtacgcggaggagatgaaggacgaggagggcagtggacagtccacgcaggcgagcaacccgcagaaccctaaccctagcagctacacgtcggaggtgcgcggcggcggcggcggcggcgaggaccgcggcgagcagaagccgtcgcgggcgcagctgctgcacgacgccggctcgctggcctccgtcgtgagcatcgggcacggcggcgcgggacggacgatggtcgatcaccaccatcaccagagccttaattttggcacgatggaccagctcgacttcgacgcgtacgaggcggccggcggcgggcaggggttcggcgccggcggcggggtgtctctgacgctggggctgcagcagcagcacgcggacccgcacgacggcgtgaacgtcgcgttcgccgccgccgcggcgccgcccaattcgtccggtgtcgccgcggagtacctattcatgggcggcggcgagcatcagcagcagctgcctcaaaccgcccagttcggcgccgtcatggaaggcgacgccgcgtcgcactaccgtggcctcagcgccaccgccgccgggttccacctcctccacgacctcgccgggtga

SEQ ID NO: 21641 - DNA, 231 bp, Oryza sativa
  Clone ID: TF_5103730
gagctgaagagccacctcctgaacaagtacagcggctacctgagcagcctatggagggagctctccaagaagaagaagaaaggcaagctgccccgggacgctcgccagaagctcctccactggtggcagcttcactaccgatggccctacccatcggagctggagaaggcggcgctggcggagtcgacggggctggacgcgaagcagatcaacaactggttcatcaaccag

SEQ ID NO: 21642 - DNA, 1332 bp, Oryza sativa
  Clone ID: TF_OsC244_4
ctccatttccatcaagcccaagaacgaactcaccacgctagtgttgagaagtggagagagttgagaggaatcaatggagatgatggttcatgggaggagagacgagcagtatggcgggctcaggctcgggcttgggcttgggctcagcctcggcgtcgccggtggtgcagccgacgacgagcagccgccgccgcgccgtggtgccgccccgccgccgcagcagcagctgtgcggctggaacggcggcggtctcttctcctcgtcttcctccgatcatcgggggaggtcggcgatgatggcgtgccacgacgtcatcgagatgccgttcctgcgggggatcgacgtgaaccgtgcgccggcggcagagacgaccacgacgacggcgagggggcccagctgcagcgaggaagacgaggagcccggcgcgtcctcccccaacagcacgctctccagcctcagcggcaagcgcggcgcaccatctgccgccaccgccgccgccgccgccgccagcgacgacgaggactccggcggcggatcccgcaagaagctccgcctctccaaggaccaagccgccgtcctcgaggacaccttcaaagagcacaacaccctcaatcccaagcagaaggcggcgctggcgaggcagctgaatctgaagccgcggcaggtggaggtgtggttccagaacaggagggcgaggacgaagctgaagcagacggaggtggactgcgagctgctcaagcgctgctgcgagacgctcaccgacgagaaccgccgcctccaccgcgagctccaggagctccgcgccctcaagctcgccaccgccgccgccgcgccgcaccacctctacggcgcccgcgtcccgccgcccaccaccctcaccatgtgcccctcctgcgagcgcgtcgcctccgcagccaccaccacccgcaacaactccggcgccgcccccgcgcggccggtgcccacccgcccgtggccgccggcggcggcgcagaggtcgtcggcgtagagaccccactactgattaattagttaattagagatgagtagtggctttttcttaattagcagggtattaattaattacttaattagggttggacccctgtagttttcttgtttatactacgtgtataatttagctctggttttgaactttttaattagtttcataatctttttttttcctatctctcacttcaccctgtttgttgtttactcagcaaagaatatggtgtctttgtataaagtgatgcatgaaatggatcataaaagttttcaaaaaaaaaaaaaaaaaaaaaaaaaaaaaaaaaaaaaaaaaaaaaaaaaaaa

SEQ ID NO: 21643 - DNA, 1600 bp, Oryza sativa
  Clone ID: TF_OsC1190_1
tgctgctccagcagcagaggctgcagtgcaatccgctgccaaattcctcttcttctccttcctactagcttttctcttcttcttcttcttcttcttggaaagctggaacttggagctgcttaagcttacacctgctgattcatctccagctgctgctgctgctgattcagtattattatgtgtggagatgtacagtagatgaggaggaaggaagtagctactggatagctagctgagctgagctaagctgagctaagcttcttggctaggtaggtagctagaggtgaggtgaggtgggggaagaggggattggacatggaggatctgtacagcatccacccgggaatctcccgcggcggcggtgggggaggaggaggtgcggccagcgaggcgtccggggtcgccggaggggggagctcgccgccgcatcccccaccgccggcgacgacggcggcggcggcggatctgacggagctgatgaaggcgcagatcgccggccacccgagctacccttccctcctctccgcctacatcgaatgccgcaaggttggtgcgccgccggaggtgaccacgctgctggaggagatcggccgggaggggcgcggcggcggcggcggcgcgacagccggcggggaaattggcctcgatccggagctcgacgagttcatggagacgtactgccgggtgctggagcggtacaaggaagaactcacacggccgttcgacgaggcggcctccttcctcaccggcatccacacccagctcgcctccctctgtggcggcgcgccgccgcccaccgacaactccgatgaaatggtggggtcttcagaggatgagccgtgctcaggagacgccgatgcagcagattttgggcaagaacacagctcccgcttggctgaccatgagctcaaagagatgttgctcaagaagtacagtggctgcctcagccgcctccggtccgagttcttgaagaagaggaagaaagggaaactaccgaaagacgcgcgatcggcacttatggactggtggaacacacattaccgttggccttaccccacggaagaggataaggtgaggctggccgcgatgactggcctcgacccgaagcagatcaacaactggttcatcaaccagaggaagaggcactggaagccatcggaggacatgcggttcgcgctcatggagggggtcaccggaggatcctcctccgggacgacactgtacttcgacaccggcacaattggtccatgatcagattgcactccaaattaaatgtagcaccttgcaacagacattggcaggtattacctgctgctacaccctctgtgaggagcaagggatgatcatatattaaaaggaaaaaaagatgaaatcaatcaataacctcatcattttgtcgaaattattgtgtatatggtgttgtaagagggagttgggatgacctgtaaaaacttgcctgcattcagctaccataacattaattaattgtttgtatccctgacaactgcatccccagttaaaaccattttagacaggaaagagtgaactatgagtaatagtaacatgtagcaataataaagatacttattttttcccttgc

SEQ ID NO: 21644 - DNA, 913 bp, Oryza sativa
  Clone ID: TF_OsC244_2
catcgtctctatagctacctaccttcatctctctctagagctagagctagcacacaagagagagggagagagagagagagagagcgcttggttgttggcgtggtggatggcgcaagatgatgaggacgtgggtctagctctgggcctctccctgggctccggcggccacaggcggcagagagaaagtagagacgaagcgccgtcgtcggcggcggcgtccctgctgacgctgaggctcccggcagagagcggggggcagccgcaggtggtggtgaagagggaggtggtgcgggcggaagaggaggagtacgaatacgagtacgagagggcgctctactcgtcgtcggctgcggcggcggacgacgacgagggctgcaacagccggaagaagctgaggctgagcaaggagcagtcggctctgctggaggatcgcttcaaggagcatagcactctcaaccctaagcaaaaggttgctttggcgaagcagctaaacctgaggccaaggcaagttgaggtgtggttccaaaacagaagagccaggacgaagctgaagcagacggaggtggattgcgagcttctgaagcgctgctgcgagacgctgacggaggagaaccgacgcctccatcgtgagctccagcagctcagggctctgacccactccaccgccgccggcttcttcatggccaccaccctccccgtccccgccgccacgctctccatctgcccctcctgcgagcgcctcgccaccgccgccgccgccggagcttcccccaccgccgccgccgaccgcaccaacaagcccaccgccccgcacttgttcagccctttcgccaacgcgcacggcaaggacgggcagtgggcgtgggcggtcggcaaggacggcgacgtggacggcggcgctcaccggcgctga

SEQ ID NO: 21645 - DNA, 1200 bp, Oryza sativa
  Clone ID: TF_OsC2119_1
atgggcgatgaagaagacctggagcttgtgcttggagtaagagcaactagaagagatgaacaggatgaccagacaacatgcacacaatcatcagaagaagctatggagggagaagaagatgaaactcgccctcatggcgaggctcctgtcgagagcttgagcttccctctgtttgtatcctctgcagagaccggcagtgcgaattcagagatgtgcacacgtggttttgatgtgaacactcggccagcagacggaggcgcagaggcagggaggccttcgtcaccatcttctatgcaggaggcatccacgagacagcaggtagctgatcaggaagctgcagacgatgaggataacggcggtggtggcgcgaggaagaagttgaggctatccaaggaacagtcctcgtttctggaggatagtttcaaagaacacagcaccctgactccgaaacaaaagagtgatttagctaatcggctcaaccttcgaccgcgccaagtggaggtctggttccaaaacagaagagctaggacgaagctgaagcagacggaggtggactgcgagcatctgaagcgctgctgcgagaggctgacgcgggagaaccggcggctgcagagggaggtggccgagctgcgtggcactctccgaaccaccacgtcgtcgtacccgccgctgtacggcctccaccacctaccagctgctgccggcacggtgttccgggtgtgcccttcatgtgagcatagcaaggtcgttgctgcggcagcttctgagagcttctctccgcgcgtcttcgccggcggcggcgcccctgccgccatcaccgctgccgccgccgtgccgtctccgggcgctggctcaccgccgtcgtcgtccgccgctttgttcggcgccagacggcctcattttggccccttcgccgccgccgtcatcccgccggtgctccgccgccagccatcggcgacgtcgtgaggtcttagcttgcagttttttttttcttgcactgcatctgcatgcacatgctaattaaatatgggatatatatatacgcgtgcattgatcatgtaaatgttttcccttttatgtttgttgttcatcaaaatcatgcttatatagggaaatatgtacatatagttctgttcatagaaaagattaaagtcatacatatactttgtaaaaatgtaaaaaaaaaaaaaaaaaaaaaaa

SEQ ID NO: 21646 - DNA, 3540 bp, Oryza sativa
  Clone ID: TF_OsC23897_1
atggggatggtacgaaagataggccgagctggtcgtgaggcagacgcctcctcctcccccgagctcctccccggtccagcccagccagccagcctcacgagcgaggacgctttcgttgcacgtactggaaccgcattgaagcacctgaatatcggtgtcgaggacgccgtcgacgccgcccccgcagtcggatccgcggacgggtccgacatccgccgtgcagtgaaccgccggaccctccgcccgcgccgcggcctgtgggtccgctctggtgtagcggccggctccatatcctcccccgacctcagcccagatgtacgagtgcctggggagatagacaatgaccgtgaggccttcgcccaccatggggcgcatcgtcctggactgcctagggtagtgggctctgaatcgggttgtgaggcgtgtgggaggggcggggtagatccaaggaagaggactttctcgagtttacgccgtggtgttttgcttcggcgaggaggcggcggcatgagctttgggggcctctttgacggcggcggcgggggaggcatgcagttccctttcgccagtggcttcgcgtcctcgccggcgctctccctcgcgctggacaacgccggcggtggcatcggcgggcggatgctcggcggcggcgctggcgctggttctagcgcgggcggcgcgatgacgagggacactgaggcggagaacgacagccggtcgggaagcgaccatctcgacgccatctcggccgccggcgaggacgacgtcgaggacgccgagcccagcaactcccgcaagaggaagaagcgataccaccgccacacgccgcagcagatccaagagctcgaagcgctgttcaaggagtgcccccatccggacgagaagcagcgcgccgagctcagcaggaggctctccctcgatgcgcggcaggtcaagttctggttccagaatcgccgcacgcagatgaagacgcaactggagcggcacgagaacgcgcttctcaagcaggagaacgacaagctgcgcgccgagaacatgacgatccgggaggcgatgcgcagcccaatgtgcggcagctgcgggagccccgccatgctcggggaggtgtccctagaggagcagcacctgcgcatcgagaatgcgcgcctcaaggacgagctcaaccgcgtgtgcgccctcgccaccaagttcctaggcaagcccatctccctcctgtcgccgccgcccttgctgcagccgcacctctcgctgcctatgcctaactcgtcgctggagctagcgatcggaggcatcggtggcttagggtctctcggtacactacccggctgtatgaatgagttcgccggaggcgtgtcgagcccgatgggcacggtgatcacgcctgcgcgcgcaaccggggctgctataccatcgctggtgggtaacatcgacaggtccgtgttcttagagcttgcaatcagcgcgatggacgaacttgtcaagatggcacagatggacgatccattgtgggttccggcactgcctggttctcccagcaaggaggtgctcaactttgacccatgcgtccgctccttcctaccgtgcattggcatgaagcctgccggctacgtctctgaggcctcgagggaatccggtctagtcatcatcgacaacagccttgcccttgtagagaccctcatggatgagagacggtggtctgacatgttctcgtgcatgattgctaaggcaacagtgcttgaggaggtgtctaccggcattgcaggaagcagaaatggcgcgttgctgctgatgaaggctgagctacaggtgctctcacctctagtaccaattagggaggttacatttctccggttttgtaagcagctggctgagggtgcatgggcagtagttgatgtgtccattgatggtttagtgagagatcataattctggaacggcacccacaggtggaaatgtgaagtgtaggagggtaccttccggctgtgtgatgcaagacactcccaatgggtattgcaaggtcacatgggttgagcatacggaatacgatgaggcatcagtgcaccagctctaccgtccactccttcggtctggtctcgcctttggcgccaggcgttggcttgcgacgctgcagcgccaatgcgaatgccttgccatcctcatgtcctctgctacagtgacagcaaatgactcgactgctatatcgcaagagggcaaacgaagcatgctgaagctggcacgccggatgacggagaacttctgtgctggggtgagcgcatcgtctgcacgtgaatggagcaagctggatggtgcgaccggtagcatcggggaggacgtgcgcgtgatggcacggaagagcgtgagcgagcctggagagccaccgggcgtggtgctgagcgcggccacctcggtgtgggtgcccgtggctccggagaagctcttcaacttcctgcgcgatgagcagctgcgtgcggagtgggacatcctcagcaatggaggccccatgcaggagatgacccagatcgccaaggggcagcgggatgggaactcggtttcactcctcagggccagtgctgtgagtgccaaccagagcagcatgctgatacttcaggagacgtgcaccgacgcttctggctccattgttgtgtacgctccggtagacatcccggcaatgcagcttgtcatgaatggtggcgactccacctatgttgctctgcttccatccggattcgccatcctgcccgatgggcctcgcatcggcgccaccgggtacgagacgggcggctctctgctcaccgtggcgttccagattcttgtcaacaaccagcccaccgccaagctcaccgtggaatcggtcgagaccgtgaacaatctcatctcctgcaccatcaagaagatcaagacggcgctgcagtgcgacgcctgagtgtttacagtggatttatgtccgcggggatacgccggcggcgacgagcctgagtcaagaacgaaccgcgcgttgaaaaaagaaaataacctttgctaggtgataaggatcttgcttggccggtccttagcacagagcaatggtggtggttcgggtattgactctggcctctaccgtacgccgatctctccccggcagccggtgatcattggatgatacagtaccatgcattttggacatttcttcgaggggttaaacttatgctttagtttcgtcgtcttagggagtcaaacctgtatacttttggcagttggctcatcgttgctctagtgttgtttgttttttgttgtgctatggctgtatgaggtagcctgtactagtagtttctcggaaatgctgggttcatactgtgctagtgtcgtccatacttcatataggttatggtacaagtgtaggatcaaattgaaggtttcagaaagtgtatcagccaataatgtctgtttgacagtggcattgctatggatcagctgaaaattgttttttgcaatacacatgggatcaaagctaaaaaaaaaaaaaaaaaaaaactcgagactagttctctctctctccctcgtg

SEQ ID NO: 21647 - DNA, 3033 bp, Oryza sativa
  Clone ID: TF_OsC434_1
ggagtctcgcaaccttccccttcccacctcccgctcctcctcaaccagcgccagccgcgtcagctcgcaataagcacttcggaccgccacggcgcgcgggtcttgcggcggtagtctctccctggcggcatgacgcggcggcgcacctggccgtgacgcgtcttgctaatggcagcggcggcggtggggggaaggggggagaggctgtcgtcctcctccccgacggcggcggcgccgcaggtggacgccgggaagtacgtccggtacacgcccgagcaggtggaggcgctggagcgggtgtacaccgagtgccccaagcccagctcactccgccgccagcagctcatccgggagtgccccatcctcagcaacatcgagcccaagcagatcaaggtctggtttcagaatcgcagatgccgggagaagcagcgcaaggaggcctcccggctgcaaactgtgaaccggaagctgaatgcgatgaacaagctgttgatggaggaaaatgaccggctgcagaagcaggtgtcccgtctcgtctacgagaacggctacatgcggactcaactgcacaatccttctgcagccaccacagatacaagctgtgagtctgtggtgacaagtggtcagcaccatcaacagcaaaacccagcagttctgcatccgcaaagggatgcgaacaacccagcaggtcttctcgctattgctgaggagaccttggcagagttcatgtcgaaggcgacaggaactgctgtcgaatgggtgcaaatggttgggatgaagcctggtccggattccattggaatcatcgctgtttcgcacaattgcagtggcgtagcagcacgagcttgcggccttgtgagccttgagcccacaaaggttgctgagatcctcaaggatcgcccctcttggtaccgtgattgccgatgcgtggatatcatccatgttatccctacgggtaacggcggaaccattgagctaatctacatgcagacttatgcaccgacaactttggcggcaccacgcgacttttggactctccgctacacaagtggacttgaagatgggagtcttgtgatctgtgaaaggtcattgactcagtccactggtggcccatctgggcctaacactccgaattttatcagagccgaggtacttcccagtggttatctgattcgaccatgtgagggaggtggctccatgatttacattgttgatcatgttgatttggatgcttggagtgtgcctgaggttcttcgaccgctctatgaatctccaaagatccttgcacagaagatgaccattgcagcattgcgacacattaggcaaattgcacatgagtcaagcggtgaaatcccctacggtgctggtcgccagcctgctgttttcaggaccttcagtcaaaggctcagcagaggtttcaatgatgctgttagtggatttccagatgatgggtggtctttgttgagcagtgatggtagtgaggacattacaatttcagtaaactcgtctccaaacaagcttgttggatcccatgtcagcccgaaccctctgttttctactgttggaggtggcatcttgtgtgcaaaggcatcaatgctacttcagaatgtacctcctgctctacttgtgcgatttctgagggagcatcgttctgaatgggctgatcctggtgttgatgcttattctgctgcttctttgcgagccagcccatatgcagttccaggcttaaggaccagcgggtttatgggcagtcaggttatactacccctcgctcataccttagagcatgaagagttcttggaggttattaggctcgaaggacatggtttcagccatgatgaggtgcttctatcacgggatatgtaccttctacagctttgcagcggggttgatgagaatgctactagtgcatctgcacagcttgtctttgctcctattgacgaatcttttgctgatgatgcaccacttttaccctcaggattccgtgtgataccactagatacaaaaatggatgggccatctgcaacacgcacgctcgaccttgcatccgcccttgaggttggaccaggtggagcttcgcgtgcttcagttgaagcatctggcacatgtaacagatcagtcctgaccattgctttccaattctcatacgagaaccaccttcgtgagagcgtggcggcaatggctaggagttatgtcagagctgtgatggcatccgtgcagagggtggctgtggcaatagctccttctcgacttggaccccagatcggaatgaagcaccctccagcctctcctgaggcgcttacacttgctagctggattggtaggagctatagggctcacaccggagcagatatccgttggtctgataccgaagatgccgattctcccctggcgctcctgtggaagcacagcgacgcaatactgtgctgttctctgaagcctgctcctatgttcaccttcgccaacaatgccggcctcgacatccttgagacgacgctggtcaacctccaggacatctcgctcgagatgatcctggatgacgagggccggaaggcgctgtgctcggagttccccaagatcatgcagcagggtttcacctatctccctggaggcgtctgcaagtcgagcatggggcggcaggcatcgtatgagcaggcggtggcgtggaaggttcttagcgacgacgacgcgccgcactgcctcgccttcatgctcgtcaactggaccttcatgtgatccaccatccatggtttccagcttccagctagtgcttttgcttttgtgccattgtggcaaactgaacaaagacctgaataccaccaccgtattgtattaaacatatgcgtccatacatgcatggtgcttgctttatcctagctagtgctagcacctgtgtgtatggtctctccatgtttgaagcttaaaattttagaaccctggttttttttttctgctgctgtgtggatgaacaagtttcaggacctatgtatctctttctatctatgctaatgctatgaattgtgtgatgtgcgc

SEQ ID NO: 21648 - DNA, 2765 bp, Oryza sativa
  Clone ID: TF_OsC775_3
ctcctccccctcttccttcttcctcctcccgccgccgccaccgccgcactcttcttcctcctcacatcactccactctgatctctctctttcagacagtagcaagagcagcagcagagagagagagatttttatgtgtgttcttgacgactgcgtgatcggctgtgccgccagatatagatagaccgtacaactgcagcgctagctatatatatgtttcgagtggggtgtgtgtttgtatatcgattgttgatttgttggtagatctgagctctgcgagtgttgcttcgtccatggtggatctctagctatttagggttgttggtctagctagatagctatatctttctctctctctagtactggtgtgtgcatatatttgtatatgctctgagggagagggagaggatgatgatccctggccggaacatgtcgccggcgatgatcggccggcccaacggcggcggcggcggcggcggcgtcgcctacgcttcttcttcctcggcgctctccctcatgcagagcttgttggatggacaccaccatcagctgccatcactgctgcagcagcaccacaatggacaccatctgcttgatcagcaccagcagcatcagcatcagcttcccccacaggcgacgacgacgagcgagagcgacggccgtgcccctcgcgacgagctggagatgagcaagtccggtggcagcgacaacctggagagcggcggtggcggtggcggaggtggctccggtggtgatcaggaccccaaccagcgcccccgcaagaagcgctaccaccgccacacccagcaccagatccaggagctcgaggccttcttcaaggagtgcccccaccctgatgacaagcagcgcaaggagctcagccgcgagctcggcctcgagcccctccaggtcaagttctggttccagaacaagcgcacccagatgaagacgcagcatgagagacacgagaacaatgcgctgcgcgcagagaacgagaagctgcgggcagagaacatgaggtacaaggaggcgcttgccaacgcgtcctgccccaactgcggcggtccggccgccatcggcgagatgtccttcgacgagcaccacctccgcctcgagaacgcgcgcctccgcgacgagattgacaggatctccgccatcgccgccaagtacgtcggcaagcccgccgcggccgtctcggccgcgtacccgccgctgccgccgtcgaacaggtcgccgctcgatcatatgggcattcccggcgctggcgccgacgtgttcggcgccgacttcgacaagccgctcgtcatcgagctcgccgtggccgccatggaggagctcgtcaggatggcgcagctcggcgagccgctctgggcgccggcgctcggcggcgaggcgctcggcgaggaggagtacgcgcgcacgttcccgcgcgggctagggcccaagtcgccggagctccggtcggaggcgtcgagggagacggcggtggtgatcatgaaccacgtcagcctcgtggagatgctcatggacgtcgggcagtggacggcgctcttctcgagcatcgtgtcgcgcgcggcgacgctggaggtgctctcgacgggcgtcgccggcaaccacaacggcgcgctgcagctcatgtccgccgagttccagatgccgtcgccgctggtgccgacgagggagacccagttcctgcgctactgcaagcagcaccccgacggcacgtgggccgtcgtcgacgtctccctcgacgggctccgcgccggcgccgggggcggatgccagccggcggcggcgcgcggccaccggcgccgcccctccggctgcctcatccaggagatgccgaacggctactccaaggtgacgtgggtggagcacgtggaggccgacgaccagatggtgcacaacctgtacaagccggtggtgaactccggcatggcgttcggcgctcgccggtgggtggcgacgctggagcggcagtgcgagcgcctggctagcgccatggcgagcaacgtggcgtcctcgggcgacgccggcgtgatcacgacgtcggaggggaggcggagcatgctgaagctggcggagcggatggtggcgagcttctgcggcggcgtgacggcgtcgacgacgcaccagtggacgacgctctccggcagcggcgccgaggacgtccgcgtcatgacgcgcaagagcgtcgacgaccccggccgccctcccggcatcatcctcaacgccgccacctccttctggctccccgtcccgccttcccgcgtcttcgacttcctccgcgacgactccacccgcagcgagtgggacatcctctccaatggcggcgtcgtccaagaaatggctcacatcgccaatggccgcgaccacggcaacgccgtctccctcctccgcgtcaacaacgcgaactcgaaccagagcaacatgctgatactgcaggagtgctgcacggacgcgacggggtcgtacgtgatatacgcgccggtggacgtggtggcgatgaacgtggtgctcaacggcggcgacccggactacgtggcgctgctgccgtcggggttcgccatcctccccgacgggccggacggcggcggcgggtcgctgctgacggtggcgttccagatactggtcgactccgtgcccaccgccaagctgtcgctcggctccgtcgccaccgtcaacagcctcatcgcctgcaccgtcgagcgcatcaaggccgccatcaccggcgacaacggcgtcgcgccgccatgcccacggtga

SEQ ID NO: 21649 - DNA, 942 bp, Oryza sativa
  unsure (1)..(942): unsure at all n locations
  Clone ID: TF_OsC155919_1
cggacgtgtcagnnacgcgtggtgccaccgctcgcgggaattgtcaagctagctagccttctcatcagcctggctctcagtctcaaagaaagcacaaaggtagctagcttagcatcgattgaagctgaccagagagatagttaagaatttgccatagcttagtgtttggtgcatacacacaactgctctcgttgtttttgctcttttgggttcgctcggaagatgagccgtgaggaggatgagaagctgctgttcccttcgttcgccttcccggcggagtgcttcccggaagccgccacctccggtggcgagcagaagaaggctcggcagcggcggaggaggaaggtgaagccggaagcggcggcagcgttggctggagagagcggaggggatgagcaggcgaagaagcggcggctgagcgacgagcaggcgcggtttctggagatgagcttcaagaaggagcggaagctggagacgccgcgcaaggtgcagctcgccgcggagctgggcctcgacgccaagcaggtcgccgtctggttccagaaccgccgcgcccgccacaagagcaagctcatggaggaggagttcgccaagctccgctccgcccacgacgccgtcgtcctccagaactgccacctcgagaccgagttgctgaagctgaaggagaggctggcggatgtagaggaggagaaggcgaagctagcagctgtcgccgcggcgacgaccggcggcggtggtggcggcggcggcggcagcagcagcccgacctcgtcgtcgttctccacggtgacgtaccacccggcgctggcggggcagttcggcgtggaggcggcggccgaggaggccgacctcacctacatgagtgagtacgcgtacaacagctacatgctggagttggcggcggccggctactgcggcggggtctacgaccaattcagctga

SEQ ID NO: 21650 - DNA, 2973 bp, Oryza sativa
  Clone ID: TF_OsC8602_1
ttagcgatctcggtccaagtgtccaagtgacacccatttgccggtggcgcgcctttgggcccatggccatggcgcacatgcttggatgggccggcccgtcgctccacgcctcggatcaccactgtcttcgcccgcggcggcgcacgccgccgccggagcccctgccccctctcgggcggcgcggcggggaccggggctcaccgcggccatgcgctgttcttgctatccctctcgtcagtttgtgccctcaccctgatgatttccgtttcactagccttgcacttcttgtcttcttccactcaacaggttggcgctaggttttgccgattggggatgaactcgtgacgaaattgcaatgtggggctctctctcggtaatggattggagaagtgatgaacggcgagcttaaacttatggcttcctatgtgagcaagcttaagttcatcttgcaaaaagatcagcagcaggagccccatactgcgaaccttctagtcctacttgggagtagcaatcaggacaaaagaaatggcctctcacagggagaaaacagaatggacacttgtaccagaaagaagccaagaagataccaactcctcaccatgcaacaaaaagaaacgcttaatcgtgcatttcaatcatgtccgaaccctgatagaaatgacttgaagaagttggccaaggaactaaacatgactgagacccaaatcaaatattggttccagaactgcaggacaaagatgaagaaattcaagaacaatgaggagcgcaaactactgcagaaggagaatgaggagctgaagaaggagaatgcagagttgagaaataggatgaagaactcaacatgccgcgcttgtgacctccctttgttccatatagattgccgtcattgggagaatccaatgctcaacaagggtaatcatggcgttacaagtaatctcattcctcaggcagtgtcatccttgctccccagctcaagtggttttgtagcttcaggctccaatcttagtagcaatgctgtgctcatgcccgtatctgccatgccatcatcagttttgcagcctgctccagccgtctctggtgccaattttcccatcttgcacaatctatctgccaatgcaaatgatggctatacggaaaaaaacgtacttgatctggcgaaccgtgcaatggaagagttctttagtctaatgaaggagaatgagtctcttcttgtcaaaaaaaaggagaatgggcctctctggctcccacacatggatattctgggagtcgaatcacttaactaccaggaataccttgcaaaatccaggacgattggacaaaaacctgttgacttcaaagtggtcgtcaccagggacactgccattgtcaatggtagctgtgttgacctcgtcaaaagccttttggatgctaaccgctggagagagttgtttccaggcatcgtggcaagtgcaaacaccaccaagatcatctctactgggccctctaacttgcacgacgggttgcttcaattgaaaaatttgcagatgcgtgcagagctccaggtaatgtcacctgaagtcccagtttgcgatgtgacattcttgaggcagagtgtgcagtttggaagtggactgtggtgtgtggttgatgtgtctattgataccatccttcctggagagagtaaaacagctcagtccagtgtgcagaccagcagtacagctgccagacgcatggaagtcaggctgttgccatcaggctgtgttattgaagaaatggagaatggctattccaaggtgacctggatggtgcatgcagcttatgatgagagagcagtgccagtgctttatcattcacttctccgctctgcaaaagcccttggtgcgtgccgctgggtagcatcactccagagacacagccagttcctttccggcctgcacaaatacatcttttgtcctgacagcacaatgacagaagtggtgatgcgaagaaaagtcctgtacctggtgaagcagatgacgagcagcttcacaggcctatttgcgtcgatgtctaaggccacgctgcaagatggtgatgatactcacttcgcgcatcagatagttggtggtgcaacaggtgaacctgccggactgctgctgagcgccaccacaaccatatggctccccggcgtgaacccgaggcacgtgtatgaccacctgcgtgatgagcagtgccatggtgaatggcgctgcctcctcggtgagcagctgcatcagggcaatgccttgccgtatggtgcccccctgaatggtgagaccgtgccagagttctatcgcatggtgaacgggctgcatgaagggcatgctatctccctgatcagccccagagaaatgggtggtaacataagcaacactctgctcctgcaagaggcaagaactgatctttctggctccctcatagtttacgccaggacagatgtgaacaccgtgcattccatcatgaacagtggcctcaaccctgccaccgtcttcctcgtatcctctggatgtgccattcttcctgattgcctggaatcattccctctacacccagctgcaactgcagatcaggccggcacctccagtgccgctatcgctagcaggagcgaaaccggtgggtcattcgtcaccgtcacttaccagatgtttttcagcagccaaggtggcgcagcacctgccagctcatcaattcatcaaggccgtgatgcgctcaagaaagccaccgacattttcaaggtggtcctcgacactctcaccgtggcatagcgcaataccccaggggtagcatttgcatgcgaaagtgaaatccagatcgagttaaatttcagtgtttaagactatgttgtttctgttgttcaggggatggctttatctctgatagacccgtggatcatgctgtttaccttgtttaccattttcagactatcgatttgaaatgttgatcagacatttataataattggaactttgagacatc

SEQ ID NO: 21651 - DNA, 1286 bp, Oryza sativa
  Clone ID: TF_OsC230307_1
gggctgcaggaatcggcacgagggctgctcttgtagatccaagctttcttcttcttcctcttgcagctagctagtgttcttcttcttcttcttctcactgttccctagtttcttcctctcagatccattttgtatatcttctctcttcattgttgattctctcaagaattgggctcatgaagaggcccagctgcagaggctcctccatggccatcatccatgacacctctgatcaacaagaggacaacatgaggtcgtacatggacggcggcggcgcggcggcgtacgaggaggaggaggaggaggttgaggacgacgacggcggcggcggcggcggcggcggcggcggcggtggggggctcggggagaagaagcggcggctggcggcggagcaggtgcgggcgctggagcggagcttcgaggcggacaacaagctggacccggagcggaaggcccggatcgcccgcgaccttcgcctccaccctcgccaggtcgccgtctggttccagaaccgccgcgcgaggtggaagaccaagcagatcgagcgcgacttcgccgccctccgctcccgccacgacgccctccgcctcgagtgcgacgccctccgccgcgacaaggacgccctcgccgccgagatcgccgacctccgggacagggtggacggccagatgtccgtcaagctggaggccgtggccgcggacgaacaccagccgcctccgccgccgccgccgccgccactggcgtataacagcaaggtggtggacggctcgacggacagcgactcgagcgcggtgttcaacgaggaggcgtcgccgtactccggcgcggccatcgaccaccaccaccaccaaactccggcgagctacgacacggcggggttcacctccttcttcgcgccatccaccacgctcacctcgtccctctccttcccttccatgttccacgcgtcatcgcatttcgatggccaccaagaactcctcgtcggcggcggcggcgccggcgcagtggccgacgccgacctcggaggcgccggattcttcgccggcgacgagcacgccggcggcctctcctggtacggcgccgagggttggtagaagctagagcttagctagctagcgagagagtgagctcagctaagcttaattagctggcttgattgcttgctttgtggctggttggtgacgccattgttgtaaattacggcattgttaagttgtacatgcatgcatgggggtaattataactaaagtcaatttctatagtttttactaaaaaaaaaaaaaaaa

SEQ ID NO: 21652 - DNA, 3007 bp, Oryza sativa
  Clone ID: TF_OsC25864_1
ctagctagctagctagctactcctattgatgatatcgccggccggacatatgcgcaggatgctcggggactgccaggtcctgtcgtccatggccgccatggccggggccgcctcctccgccgacgcgctcttcgcctcgccgctcatccccaaccccgctctcgccggcttcatgtcctcctccgccgccatgcccttccaccacttctccaacgccgccgccaccttaatacctaaggaggaggggttgatgggcggcctccatgtggccaaggacgaggggatggacctcgagatggacatggagctcagtggcggctccggcagcgcccacctcgacggcctcctcagcttcgccgacgtcgacgacgaccacaagccgcagcacagcggccatgaccagccgcccgacgccgcccagcccagcggcgccgcggggggcaacgccaagaagaagcgctaccaccgccacacggcgcaccagatccagcagatggaggcgctgttcaaggagtgcccgcatccggacgacaagcagcggctgaagctgagccaggaactgggcctcaaacctcgccaggtcaagttctggttccagaatcgccggacccagatgaaggcgcagcaggacagggcggacaacgtgattctgcgcgcggagaacgagaacctcaagagcgacaacttccgcctccaggccgccatccgcaacgtcgtctgccccaactgcggccacgccgccgtcctcgccgacatgtcctacgaggagcagcagctccgcatcgagaacgccaggctcaaagacgagcttgaccgcttggcctgcatcgccacccgctacggcggcggcggcggacggcagccggtgctgtcgacgtcggccctgagctgcatctcggcgccgccgccggtcctcatgccaccgctcgacctcgacatgaacgtctactcgcggcacttcgccgagcaggcgccggtcatgggctgcggcgacctcatcccgccacccgtcgtgccgcagcacgatggcgcggcggcgtacatgggcgccatgatggcgcccgtgcaggagcaggacaagcagctggtggtcgacctcgccgccacggcggcggaccagctcgccaggatgtgccgcgccggcgagccgctgtgggtgcggcagcgtggcgcggaggtgatggccgtggaggagcacgcgcggatgttcagctggccggtggacggcgcgaagcagggagacggcggcgcggtggcgagggcggaggggacgcgtgacaacgcggtggtcatcatgaacagcatcaacttggtggacgccttcctcgatgcgaacaaatggatggagctgttcccgtcgattgtttgcaaggcaagaacaatccagatcataaaccacggagctgcgtctggtcacctcggcagtggaactctcctcttgatgcaagcagaggtgcagttcttgtcgcctctggtggcggcgcgcgaggtggtgttcttccgttactgcgtgcacaacgccgacgaggggagctgggcgatcgtggatttcccggcggaagggtttgaggaggggctcctccaagcctcggtggtcaggtgccggcggcggccgtccggctgcatcatccaggacatgcccaatggatactccagggtggtgtgggtggagcacatggagatggtcggggaggagaagccgctgcagccggtgttcagggactacgtcgccagcggcgccgccttcggggccacgcgctggctctccatcctccagcgccagtgcgagcgcctcgccagtgagctcgcccgtaacatcgccgacctcggagtgatccgcacccctgaggcaagaacaaatatgatgaagctgtcgcagcggatgatcaccactttctgtgctaacatcagtgcttctggaacccaatcttggacggccctctcggattcaacccaggacactatcagggttacaactcggaagaacactgagcccggacagcccagcggtgtcatcctcaccgctgtctccacaagctggcttccttttacccatcagcaggtgtttgagcttcttgcagatgaacaacagcgctgccagcttgagattttgtcaaacggcggctcccttcatgaggtggcacatattgcaaatggatcacatccaaggaattgcatctctcttcttcgcattaacgctgcaagcaactcgtcacagaatgtggagctcctgctgcaggagagcagcacccaccctgatggtgggagcctggtggtgttcgcgacggtggacgtggacgcaattcaggtgacgatgagcggcgaggatccttcctacatccctctcctccccctgggcttcgccatcttccctgccaccagcccatcacctgctgctgcacccaccatcagctcaagcaccaccaccaccactggcaatggcaatggcgaaaccagtagcactcctccaagaaacagcagcagcaacaacaacaatgcagatgagctgctgcctcccaatggctgcctcctcaccgtcggcatgcaggtgctggccagcgccgtaccttctgccaagctcaacctctcgagtgtcactgcgatcaacagccatgtctgcaacgccattcaccagatcacagctgcactcaaaagttcagcaggtggtgctgggggtgagccggcgtccgatcagtagcaaaggagacctggaggagaggggatcggagcaacatgggatcagacaccaaaatgcctcccaatttatttcgctaacatcgcagtttgtttttctgttagctctcggtctggctggttcatcaggtgcaagggagggtttgacaagaagccaacactaacagctactcaaatctctcctctcttcccgccatatttctgcctctcaaaatgacgaaaatacccccaaccagccaacaagcaaagccatggggggcattttgatcattttgggaagctacttctgctgagaaagaaaaaaaaaaaaaaa

SEQ ID NO: 21653 - DNA, 415 bp, Oryza sativa
  Clone ID: TF_LIB3432-004-P1-K1-G7
gatcggcgtcggcgtgtgtgtatgtaggtgcatctgctggagaggagcttcgaggaggagaacaagctggagccggagcggaagacggagctggcgcggaagctagggctgcagccgcggcaggtcgccgtgtggttccagaaccgccgcgcgcgctggaagaccaagcagctcgagcgcgacttcgaccgcctcaaggcgtcgttcgacgccctccgcgccgaccacgacgccctcctccaggacaaccaccgcctccactctcaggtcatgtcgttgaccgagaagctgcaagagaaggagacgacgaccgagggcagcgccggcgcggccgttgacgtcccgggcttgcctgcggcggccgacgtgaaggtcgccgtcccggacgccgaggaaccggcgctggaggaggcgg

SEQ ID NO: 21654 - DNA, 378 bp, Oryza sativa; identical to SEQ ID NO: 12101
  Clone ID: TF_OsC330010_1

SEQ ID NO: 21655 - DNA, 3018 bp, Oryza sativa
  Clone ID: TF_OsC23897_2
atgcagttcccgttctccggcgctggcccgggcgtcttcacgtcatcgccggcgctctccctcgcgctggcggacgcggtggcaggccggaacagcggcggcggtgggaagatggttaccgcggcccatggcggcgtcggcggaggaggaggaggaggacgcgcgaaggcgagggacgcgttggaggtggagaacgagatgagccggtccgggagcgaccacctcgacgtcgtctcttgcggcgacgcgggcggcggcggcggcgacgacgacgatgacgaggacgccgagcacggcaacccgcccaagcgcaagaagcggtaccaccgccacacgccgcagcagatccaagagctggaagcgatgttcaaggaatgcccccacccagacgagaagcagcgcgccgagctgagcaagcggctcggcctcgaaccccggcaggtcaagttctggttccagaatcggcgaacgcagatgaagatgcaactggagcgacacgagaactcgctgctgaagcaggagaacgataagctgcggtccgagaacctgtcaatccgggaggccacgagcaacgcggtgtgcgttggctgcggcggcccggcgatgctcggggaggtgtccctggaggagcaccaccttcgcgtcgagaacgcgaggctcaaggacgagctcagccgagtgtgcgcgctcgccgccaagttccttggcaagtccatctctgtcatggcgccaccgcagatgcatcagcctcatcctgtgccaggctcgtcgctggagcttgcggttgggggtatcggttcgatgccatcagccacgatgcccatctcgacgatcactgattttgctggcgccatgtccagttcaatgggcacggtgatcacgcccatgaagtctgaggctgaaccatcggcaatggctggcattgacaagtccttgttcttggagctagcaatgagtgcaatggatgagctagtcaagatggctcagatgggggatccgctatggattccaggtgcctccgtaccttcctcgccggcaaaggagagtctaaacttcgaggagtacctaaacaccttcccaccttgcatcggggtgaagcctgaagggtatgtatcagaggcatctagagaatctggcattgtcatcattgacgatggcgccgcgcttgtggagaccctcatggatgagtttgaattcttgcgacagcgacggtggtccgatatgttctcatgcatgattgccaaggcatcaaccactgaggagatttctactggtgttgctgggagtagaaatggtgcattgcttcttatgcaggcagagctacaggtgctttctcctcttgtgcctattagagaggtgaagtttctcaggttctccaaacagctggctgatggtgtatgggctgtagtggacgtttcggctgatgaattgatgagggatcagggcattacttctgcatcctcgactgcaaacatgaactgccgaaggctgccttctggttgtgtgctgcaggacactccaaatgggtttgttaagtatttagttcaaatatcagtattttctgaagtctataatctctctattgatcagtttctggatctgcctcctgctttcatggtcacatgggttgaacatacagaatatgatgaggcatctgtgcacccgctctaccggcctcttctccggtctggtcttgcccttggtgcagggcgatggatcgcgacattacagcggcagtgcgaatgcttggcccttctcatgtcttctattgcattgccagagaacgactcatcagctatccatcctgaaggtaaacggagcatgttgaagttggcaaggaggatgacggacaacttctgtgcaggggtgagcacatcatctacccgtgaatggagcaaactggttggattgacaggcaacattggggaggatgtgcatgtaatggcgcggaagagtgtggatgaacctggaacgccgccaggtgtggtgcttagtgctgctacatctgtgtggatgcctgtgatgcctgaacggctcttcaacttcttgcacaacaaggggctgcgtgctgaatgggatatcctcagcaatggtggccctatgcaggaggtgacaagcattgccaaggggcaacagaatggcaataccgtatgtctactgaaggctagttcttctgttccccttaccaaaaatttcactgtgcagcccaccaaagacaagcagaacagcatgctgatcctacaggagacgtgtgcagacgcatccggttcaatggttgtgtatgctcctgtagacatcccagcaatgcaccttgtcatgagtggtggggattcgtcatgcgtcgcccttcttccatcaggttttgccatcctgcctgctgggcctagcatcggcgcagatcacaagatgggcggttcattgctcaccgttgcattccagatacttgccaacagccagcccagtgctaagctcacggtggagtcagtcgagaccgtgagcaaccttatctcctgcaccatcaagaagatcaagacggcgctgcattgcgacgtgtgaacccaacaaggggggacttttggcctagtgggagcggctgtggcgatgagcctgagtcaagaacgaaccgcgacataggaagggacctttgctaggtggcaaggaccggacggggcaggtccttagcacagagcaatggtggtggttcgggtattgactcagcctctcccgcctccgttctctcctgtgactggtgcatgttgaagtgaacctgcattttggacgccatgtagcaggccatctttctttctttttcctttttctttttctttttctttttttagggagaagggagtcatctgtgttttttgttggctggctcagggtgttggtgtttctggtttctagcttttgttacagggagatgtgatacattttgtagaagctccgaattgtcgtgctggtatgtgaggttctgatcataggtctgtgtttgatagtctcgagctatcaacgcctggc

SEQ ID NO: 21656 - DNA, 1852 bp, Oryza sativa
  Clone ID: TF_OsC2116_1
ccacgcgtcccggaaaccgagaaagagagagagagagagagaggtagggagggaagaagagtcactccacactccacactctcatcccctggtccctttcttggatcatgagaaaccgcgcaacaaaattgcaattctaggcagcatttggaccggggacttggctacgtggtgtttggccatggatcgcagcgtggaattaagaccggcgaggactcagcgacggaggcacccgcgtcattcctacgcttctgtgcccgtcgtcttctcgcagtgagagagagagagagatcgaccaggcgttcactgaattttactagaactcggcatgaagcgacccggcggtgccggcggcggcggaggcagcccatcgctcgtcacgatggctaattctagtgatgatggatatggaggggttgggatggaggcggagggggacgtggaggaggagatgatggcgtgcggcggcggcggggagaagaagcggcggctgagcgtggagcaggttcgcgcgctggagcggagcttcgaggtggagaacaagcttgagcctgagcggaaggcgcggctggcgcgcgacctcggcctgcagccgcgccaggtcgccgtctggttccagaaccgccgcgcgcggtggaagaccaagcagctcgagcgcgactacgccgcgctccgccattcctacgactccctgcgcctcgatcacgacgcgctccgccgcgacaaggacgccctcctcgccgagatcaaggagctgaaggcgaagctcggggacgaggaggcggcggcgagcttcacgtcggtgaaggaggagccggcggcctccgacgggccaccggcggcgggatttgggtcgtccgacagcgactcaagcgcggtgctgaacgacgtggacgcggccggcgccgcgcccgcggcgacggacgcgctggctccggaggcgtgcacgtttctcggcgcgccgcccgccgcgggcgcgggcgcgggcgcagcggcggcggcgagccacgaggaggtgttcttccacggcaatttcctcaaggtggaggaggacgagacggggttcctcgacgacgacgagccgtgcggcgggttcttcgccgacgatcagcccccgccgctgtcgtcgtggtgggccgagcccacggagcactggaactgaagcaaatccggcgtaaccgcagccgagagagagagttggaaaacactatgcctgggggaataaagaattctgcaggaaagcagggtcttatctgcaattttgtaaaaaaaatggacctctacgtacttctctagtctcttttgccaattctcgcgcacattagctgtagcactgcagtgtagtaaaatcctactactccattacctctccaatttctagctctcacttccctacttaaactcatctgagctctaatgtaagcatatgccatccaaaatggaccataaatatgtcactagcagtaggatggtaattaggacttaaaaaaaaaaaaaaaaaaaaaaaaaaagctgcggaagcagcccatacatcgccacgatggctgattagagcgatgactgatatgggaggctcgtgctcaaggtcaccgacaaccacgagtgcttgaagtttaagacagatcaagctcaggatgcatagaagatggaaaaactgaacaccattttttttactctcatgacccatggacctgatgctgatataagtgatgtttcggggaaggaacaggctgaacaacagcattcatagaaaggccggggcaggaggcagcagtgtattgggtctgtcttgattttgttcaaagtaatcataactggaatgggggttgggactatttggctctttgattgc

SEQ ID NO: 21657 - DNA, 765 bp, Oryza sativa
  Clone ID: TF_OsC2116_6
atgaccaacgcaggaagcacccccaccattgatgatggatatggaggggttgggatggaggcggagggggacgtggaggaggagatgatggcgtgcggcggcggcggggagaagaagcggcggctgagcgtggagcaggttcgcgcgctggagcggagcttcgaggtggagaacaagcttgagcctgagcggaaggcgcggctggcgcgcgacctcggcctgcagccgcgccaggtcgccgtctggttccagaaccgccgcgcgcggtggaagaccaagcaaacacttgcaagcgactcaagcgcggtgctgaacgacgtggacgcggccggcgccgcgcccgcggcgacggacgcgctggctccggaggcgtgcacgtttctcggcgcgccgcccgccgcgggcgcgggcgcgggcgcagcggcggcggcgagccacgaggaggtgttcttccacggcaatttcctcaaggtggaggaggacgagacggggttcctcgacgacgacgagccgtgcggcgggttcttcgccgacgatcagcccccgccgctgtcgtcgtggtgggccgagcccacggagcactggaattgaagcaaatccggggtaaccgcagccgagagaaagagttggaaaacattatgcctgggggaataaagaattttgcaggaaagcagggttttatctgcaattttgtaaaaaaaatggccctgctgacttatgtagtagttcactcgattgcttcgatatttatgtttcaattccaag

SEQ ID NO: 21658 - DNA, 1101 bp, Oryza sativa
  Clone ID: TF_OsC224908_1
caattcattcccccgagctgagctgagctctcattccttccttctcctttccgccggcctcgcctctcgtctcctcctctcccctaccgatacgcacgctcgcttgcttgcacctcgcgcgcgagagacgagagagagacggcgagccctggcacgcacgagaagcgaatcgaagtggcggcgacaggagcagctgctgctggtggattatccgtcgtcaacatggctcaggaggacgtcggtcacctgagcgacgccggcctggcgctgggcctgtccctcggcgggggaggaggagggacgaccgacgcggcggcggcgcaccgtggcggctgccggcggccgtcgccgtcgtcgcagtgcccgccgctggagccgtcgctgaccctgagcttgcccgacgacgcggcggccggcgcggccgcgaccgcgaccgcgaccgcgtccggcgggggcggccctgcgcacagcgtgtcgtcgctgtccgtcggcgcggcggcggcggcggccgtgaagagggagcgcgcggaggaggccgacggcgagagggtgtcgtcgacggcggccgggcgtgacgacgacgacgacgggagcacccgcaagaagctccggctgaccaaggagcagtccgcgctcctggaggaccgcttccgggagcacagcacgctcaacccgaagcagaaagtcgctttagcgaagcaactgaacctcaggccaaggcaggtggaggtctggttccaaaacagaagagcaaggacaaagctgaagcagacggaggtggactgcgagttcctgaagcgctgctgcgagacgctcaccgaggagaaccgtcggctgcagcgcgagctgcaggagctccgcgcgctcaagttcgccccgccgccgccgtcctcggcggcccaccagccgtcgccggcgccaccggcgccgttctacatgcaactcccggccgccacgctcaccatctgcccgtcctgcgagcgcgtcggcgggcccgcgtccgccgccaaggtcgtcgccgccgacgggaccaaggccggccccggccggaccaccacccaccacttcttcaaccccttcacccactccgccgcctgctga

SEQ ID NO: 21659 - DNA, 2142 bp, Oryza sativa; identical to SEQ ID NO: 12114
  Clone ID: TF_OsC64951_1

SEQ ID NO: 21660 - DNA, 2870 bp, Oryza sativa
  Clone ID: TF_OsC42451_2
atggctgcggcagtggcaatgcgagggagtagcagtgatggaggtggctatgataaggtttccgggatggactccggtaaatatgtgcgctacacgcctgagcaggtggaggcgcttgagcgggtgtacgccgattgccccaagccaacctcctcccgcaggcagcaactgctgcgtgagtgccccatacttgctaacattgagcccaagcagatcaaggtctggttccagaacagaaggtgccgggataagcagcggaaggagtcttcacggcttcaggctgtcaacaggaaattgacggcaatgaacaagctacttatggaagagaatgagcgactccagaagcaggtctcccaattggttcatgagaatgcccacatgcgacagcagctgcagaatactccgctggcaaatgatacaagctgtgaatcaaatgtgactacccctcaaaaccctttaagggatgcaagtaacccctctgggctcctttcaattgcagaggagaccttgacagagttcctctcaaaggctactggtacagctattgattgggtccagatgcctgggatgaagcctggtccggattcggttggtattgtggccatttcacatggttgccgtggtgttgctgcccgtgcctgtggtttggtgaacctagaaccaacaaaagtggtagagatattgaaagatcgtccatcttggttccgtgattgtcgaaacctggaagtctttacaatgattccagcaggaaatggaggaacggttgaacttgtctacacacagttgtatgctccaacaactttagttcctgcacgagatttttggacgttacggtacacaaccacaatggaagatggcagtcttgtggtctgtgagagatctttaagtggttcagggggcggtccaagtgctgcctctgctcagcaatatgtgagagcggaaatgcttccaagtggatacctggttcgcccatgtgaaggtgggggatcaattgtgcacatagtggaccatctggatcttgaggcatggagtgttcctgaggtgcttcggccactctatgaatcttcaagggtagtcgctcagaaaatgactactgcggcactccggcacatcagacaaattgctcaagaaacaagtggggaagtggtgtatgccttggggaggcaaccagcagtgctacggacttttagtcaaaggctgagcagaggctttaacgatgccattagtggtttcaatgatgatgggtggtctataatgggcggagacggtgttgaagatgtagttattgcttgcaactcaactaagaaaattaggagtaacagcaatgctggcatcgcctttggagcccccggaggtattatatgtgctaaggcatcaatgttactgcagagtgttcctccagcagtactggttcgatttctgagggagcatagatctgaatgggccgattacaatattgatgcatatttggcttcaactctgaaaacaagtgcatgttcacttactgggttgcgacccatgagattttctgggagccaaatcatcattccacttgctcacacagttgagaatgaggagattcttgaagttgttcgccttgagggtcaacctcttactcatgatgaagctcttctttcaagggatatccacctgcttcagctctgcactggaatagacgagaagtctgtgggatcctcctttcagcttgtgtttgcaccgattgatgatttcccagatgaaactccattgatttcttctggcttccgtgttataccacttgatatgaaaacattagaactaatagaggcatttggtttcaaatattcccttggaaaaataaagcaagatggtgcatcctctggtaggacattagatttggcatctagtcttgaagtaggttcagcaacagctcaagcctccggagatgcatctgcagatgattgtaacttgcgatctgttctgacgatcgcttttcaattcccttacgagttgcatctccaagacagtgttgcagctatggctcgccaatatgtccgtagcattgtttctgctgtgcaaagagtgtcaatggctatctctccctctcaaactggtctaaatgccggacagaggataatctctggtttccctgaagcagcaacccttgctcgatgggtttgccagagctaccattaccatctaggggtagagttacttagtcaatcagatggagatgcagaacaattgttgaagatgctatggcattaccaagatgctattttgtgctgctcattcaaggaaaaaccggtgtttacatttgccaacaaagcaggactggacatgctagaaacttcccttgtcgccttacaggacctcacattggacaggatctttgatgagcctggaaaagaagcattgttctcaaacattcccaaattgatggagcagggccatgtctacctgccatcaggcgtgtgcatgtcaggaatgggtcggcatgtttctttcgatcaggccgtggcttggaaagtgcttgccgaggatagcaatgttcactgcctggccttctgtttcgtcaactggtcctttgtgtgaccatcccacatccactgcgaagtgaagattcatttttgcttgttcaagactgttttgcactagatctagacctgagaatctagtagtatttgcgaaatttctcgcttatgtaaatgtaatctcgctcccattccatcaagtacccaagtacaaggcagtggccaagtggttttagttgtagggggattggaacaatcctgacggttggggacttggggtccttcccagcaaaggaaaaacggaacctgtaaggggtcaaaactccatgccagattttgaaatcagcccaattagct

SEQ ID NO: 21661 - DNA, 2854 bp, Oryza sativa
  unsure (1)..(2854): unsure at all n locations
  Clone ID: TF_OsC1713_3804
atggacgcgagcaagtacgtgaggtacacgccggagcaggtggaggcgctggagaggctgtactacgagtgtcccaagccgagctcgctgcggcggcagcagctggtgcgggagtgcccggcgctggcgaacgtggacccgaagcagatcaaggtgtggttccagaaccgccggtgccgggagaagcagcgcaaggagtcgtcgcggctgcaggcgctcaaccgcaagctcaccgccatgaacaagctcctcatggaggagaacgaccgcctccagaagcaggtctcccagctcgtctacgaccacggccgccacggcgtcgccgccgccgggatgatgcggcgagttcctgccttccctcctcaggccgccgccgccgccggccaccagctcgccaccgccaccgacaccagctgcgagtcggtcgtcaccagcggccatcatcatcagcagcagcagcacaacgtcgtccagccgccgccgcgcgacgcaagcccagctgggctgatgtcgatcgcggaggagacattgacggagtttctgtccaaggccaccggaaccgccgtcgagtggctccaaatgcctgggatgaagcctggtccggattccattggaatcatcgccatctcgcatggctgcgccggcgtcgccgcgcgagcttgcggcctcgtcggcatggagcccgctaaggttgccgaaatactcaaggatcggccgctgtggctgcgcgattgccggtccatggatgtggtgaacgtgctccctgctggcgccaacggcaccatcgagctgctctacatgcaggcaagaacacacaagcctgaaaattctgaacctgaacctgaaattctgaagctgaaatttgtattcgatcttcagctctatgctccgacgacgctggcgccggctcgcgacttctggctgctgcggtacacctccattctcgacgatggaagcttagtggtgtgtgagagatcactcagtagcaagcaaggaggcccaagcatgccacttgtccagccttttatcagaggtgagatgcttcccagtgggttcttgatccggcctagcgatgttggaggcagcgtgatacacatcgttgatcatatggacctcgagccttggagcgtgcctgaagttgtacgacctttgtatgaatcttctgccatggttgcgcagaagatctcgatggcggctttgcgctacctgaggcaggttgcacacgaagatacacgttctgtgatcacaggatggggaaggcagcctgcggctttgcgtgctctgagccaaaagctcaccagaggattcaatgaagctctcaatgggcttgccgatgatggatggtccgtgatcgagagcgatggcgtcgacgatgtttgcatctctgtcaattcatccaaagtgatcggttgcaatgcaacattcagcagtggactccctattgtcagtaccggtgttctttgtgccaaggcatccatgctgttgcaggatgtctctcctccatcactactgcaatttttgcgcgaacaccggtcacagtgggccgacagcaatttagacgcattcttcgcctccacgatgaaaccaaacttctgcaatttacccatgtcccgtcttggaggattcagtggtcaggtcatacttcctttagcacacacgtttgaacctgaagagttcctggaagttatcaagctaggaaacgccagcaactaccaagatacactggtgcaccgtgatctgttcctcttgcagatgtacaatggagtagaggagagcagtgcaggaacatgttcagagctcatctttgcgcccatcgacgcatcgttcagtgatgattccccactgctgccttccggtttccgcatcatcccaatcgattctcctctcgacacgtcgagcccgaactgcacgttggatctcgcgtccacgctcgaagccgcgacgccacggagcaggatcagcggcgtcaatggcggcggcggcggctgtgctgctgctgcggcgagctctagctccaaggcggtgatgacgatcgcgttccagttcgcgttcgacggccacctgcaggacagcgtggccgccatggcgcggcagtacatgcgcaacatcatctcgtcggtgcagaggatcgccgtggcgctctcgtcctcccgcctcgtccctcccggcgccggcgccgccgccgcgcagctctcaccggtgactccggaggcggcgacgctgcccagatggatttgccagagctacagatttcattttggagatgaactcatcaaatctgtagatgcaaacagcagcaatgaatcgattctgaaagcagtttggcatcatccgagtgccatactctgctgctctctcaaggcgatgccagtgttcacatttgcaaaccagtctggcctcgacatgctcgaaacaactctggtggcgctccaagacatgacgctggagaaagttttcgacgatcaagggaggaagaacctgtgcacagagctccccaacatcatggagcaggggatggcgtgcatggagggaggggtgtgcgtgtcgagcgttgggagggcggcgtcgtacgagaaggcggtggcgtggaaggtggtcgacggcgacggcggcggcgcccactgcatctgcttcatgttcatcaactggaccttcctttgatttcatttcattatacaccccaatgcaaaacggatatataatattacaactagtgcaatttacgtacgtaatctcatgaaacagcgtgtacaaatgttttggattttgagaaccncggtgctagtttttgtacggatcgatagtggatacattctctgttcggagtagggataaaaaaaaaaaaaaaaaaaaa

SEQ ID NO: 21662 - DNA, 3783 bp, Oryza sativa
  Clone ID: TF_OsC81847_1
atggcggcggttcggaagatggcggccaatggcctcgcagcaaaaagggagaatacagggacaaagaaatctcccctgcaaatccagatgctggagagattctactctgaggtacaataccctcagtcggaggacattgcagagtatgcaacatctgttggtttgacttacaatcaggtcagaatatggtttaaggagcggaggaggaaagagaggagagaaacggaatctttaggggcgcatatggaaaagcaacttagtgcaagatcaaatgggttcagatgcagcagcagcaggtcttcctcttttagccggtctaccatgtaccgtactgtgaatttacagccagaggacgaccgttatgttgacaagggtatgagcttcacaggagagaaacacacactccgatcacaagttctgtttcccaaggattatatcctgaggaaagtcttccgcaaggatggtccacctcttggaagcgaatttgatccccttccccatagtgcacctggccatctcagagatactacagacgaccatttctaccagaaccaaagagtaataaagaagagaaagattgtggagcctaccactcagagatcttccctgccatgtggggacaatggtcctgtgaggaaacatggagccgggaaaggtctaatgacagtgtggcatgcaatgtattcccatagtagcaaaattcaagatggatctaattttattgatgaaactggttgcttgaggtccttgagaccattagatgattgtggcagaatagaggattgcgatgatggaaagctaattcaggtgccaagtagcagagttactgatccgaagaagcatcctccaatggaatgccatctttcagttgatgaatcacaatccccagtgctacaggctaaccaagtgactttagttgatgatgaggagcttgaactccgtgaattgcaagcaggtcctaacccattgagatgttcagctcacctttcttcaagtgggagacatggctgccctctttgtaaagatttactttccaggtttcctccatcaagtgtcaagatgaaacagccattctccacaagaccttgggggtcatcaccagaaatggtgaaaaagcttttccaggttgtccggtttatctacaatcgttttggttatatggatgtccatcccttcacacttgatgagttggcacaggcatttcatgacaaggttagggaacaggagtttgatatgaatttttggatcaagtctctgaattctcttacctgggttgaaatactacgtcaagttttggttgcttctggttttggttcgaaacatcatatgctgaatcgggatttttttaataaggagaaaaatcaaatggttaaatatggtttacgtcctcgtacactgaagggtgaattgtttgcactattgtctaagaaaggtagtggtggcttaaaggtatcagaacttgccaaatcacctgagattgttgatcttagcatctccagcacagaaatagagcagctgatctattcaactctttctagtgatatcacattatttgagaagattgcgccttctgcatatcgtctccgtgtagatcctcgaattaaaggaaaggaagactctggatcagataccgaggactctggaagtgttgatgatcacagtgatgctagcagtggtgctgatgaatctgatggttcacatgagatgagtttttctgagcatgaacatagaatccttagaagaaagtggaaaaatggtcatgaaaatgtgaatagatgtagtgaaattgatgaaagttattctggagaacgatggcttctggggttgatggaaggcgagtactcagacttaagcattgatgagaagttggattgcttggttgctttaatggatgttgtttctggtgctgattctgctccaagacttgaggaaccatcaagagtcgtgcctagcataccgagagcacagccgcatgtgtcaggtgggaaaataaagaaatcgacaagaaacatttgtcaatctagtgatgagtgctttaatgcatcaggaagcatgtatggtttggattcttctatgcatgagcagtcaagaagcctgagaagtcgtgattatgttgcttactctggaaggaatgatacgtctacaggagttgctcatcaaccacaagttgttctcttaggatccgaccgtaggtataataattattggctcttccttggaccttgtagagcagatgatccaggacatcgtagggtgtacttcgagtcatcagaagatggtcactgggaggttattgattcaccacaggagttactttccctactagcttcgctagacagcagaggtactagggaagcttatcttcttgcgtcaatgaaaaagagacagacatgcctttttgaagccatgaaaaagcattacgaaaatagagatgcagttcaacctgcaatgccatctgatacatctcactctgagacaagtagtggagatggagcttcacccaagctaagtagtggagatggagcttcgccaacatcagacattgacaatgcttctgtccccacaaatccagctgagaatatgataaatgcatcatctgcaatagcaattgaagttgggaggagaggtgatgagaaaatattgaagtgggaaagatctcaaacatttgataaatggatctggacttctttctattcttgcctaactgctgttaagtgtggcaagaaatcattcaaggaatcactagttcgctgtgaaagttgtcatgatttgtattggagagatgaaaagcattgcagaatatgccactctacttttgaagttagctttgatcttgaagaacgatatgctatacatgtggctacatgcagggatcctgaagatgtgtatgatgtgccaaatcataaagttctgccttcacagctacaagcacttaaggcagccattcatgctattgaggcacacatgcctgaagcagcgtttgctggtttgtggatgaagtcttcgcacaagctgtgggttaagcggctgcgacgaacgtcatctttggcagagcttttacaggttcttgttgattttgtgggggcaatggatgaggattggctgtacaaaagttcatcatctgtaagcttttgttcgtatttggatgacattgtcatatacttccaaacaatgccacaaacaacatcagcagttgcactgtgggttgttaaattggatgccctcatcacgccttatttggaaagagctgattctgacagagcattgggcgaagagtctgtgcagacaagaacgcgagcatgcggtgagatagctaggaatcgatgatggaattctttcttttgtggtactccaagcaaagcacccagctgacacgttctttctcatcaactgcaagtttttttgtttgattgtcgagcttttttctcaagactgagacaaccataatgtctcttccttgagcatcaggccttagcagaagccatggcttcctagttctgctggatacctggagaacatccttgttcccacccaacagaaagtcgtcccttatgtacaatagtagacaggaaaaaaaaggcttttttttgttaataatcattgcttcccccatgtgaatttttttgctcccaacattagtgatcacgaggaatactaaaaacttctatataggtcattgccggatagatgatgtatgttgttcatgaactaaggcgaccccttttgatgcaataagagggtcagatatctcctttttgatcggttaaaaaaaaaaaaaaaaaa

SEQ ID NO: 21663 - DNA, 599 bp, Oryza sativa
  unsure (1)..(599): unsure at all n locations
  Clone ID: TF_LIB3598-004-P1-K1-B9
gcgttcgcagctagctagctgggctaggatgggggtgggtcggggtgaccaccaccacctccagcagcagcaccagttcttgatgccaccgcctgcgccggtggtgccgccgcagctgtgcatgccggcgatgatggcggacgagcagtacatggacctgggcggtggcggggcggcngcggcgcggggggggggcggggccggggagaggaagcggcggttcacggaggagcagatacggtcgctggagtccatgttccacgcgcaccacgccaagctggagccccgcgagaaggcggagctggcgcgcgagctgggcctgcagccgcggcaggtggccatctggttccagaacaagcgcgcgcggtggcgctccaagcatttcgagcacgactacgccgcactccgctccaagtacgacgccctccactcccgcgtcgagtccctcaagcaagagaagctcgctctcaccgtccagttgcacgagctaagatagaggctgagggaacgggaggagaggagcggcaacggtggtgccgccacgacggcagcaagcagcagcagctgcaacggatcaggcagcgaggaggtcgacgacg

SEQ ID NO: 21664 - DNA, 708 bp, Oryza sativa
  Clone ID: TF_OsC52478_2
ttggtacggacgcgcacagctagctagctgggctaggatcgccatggatcggggtgaccaccaccacctccagcagcagcaccagttcttgatgccaccgcctgcgccggtggtgccgccgcagctgtgcatgccggcgatgatggcggacgagcagtacatggacctgggcggtggcggggcggcggcggcgccggggaggggcggggccggggagaggaagcggcggttcacggaggagcagatacggtcgctggagtccatgttccacgcgcaccacgccaagctggagccccgcgagaaggcggagctggcgcgcgagctgggcctgcagccgcggcaggtggccatctggttccagaacaagcgcgcgcggtggcgctccaagcagctcgagcacgactacgccgcactccgctccaagtacgacgccctccactcccgcgtcgagtccctcaagcaagagaagctcgctctcacccagcggcgcgagctgattatgcttccgggaggcgaggacggcggcaagcaccgcggcgccaccgccgacgaggaggccgccgcgaccgcggcctcgctgaacgacctatgcgccaccgccggggatgcgggggggctccccgcgctggcgccgttcccgagggcggcggctcgtcctcgccgtcgtgcacagcgccgcactgctcgtggtggccgtgctcctctccg

SEQ ID NO: 21665 - DNA, 3819 bp, Oryza sativa
  Clone ID: TF_OsC42451_1
atggcggcggcggtggcgatgcggagcggcagcggcagcgacggcggcggcggcgggtacgacaaggccgggatggactccggcaagtacgtgcggtacacgccggagcaggtggaggcgctggagagggtgtacgccgagtgccccaagcccagctcctcccgccgccagcagctgctccgcgactgtcccatcctcgccaacatcgagcccaagcagatcaaggtctggttccagaacagaaggtgccgagataagcagcggaaggaggcatcaaggcttcaggccgtgaaccgaaaattgacggcgatgaataagcttctcatggaggagaatgagcgtcttcagaagcaggtctcccagctggtccatgagaacgcgtacatgaagcagcaacttcagaatccgtcattgggcaatgatacaagctgtgaatcaaatgtgaccactcctcagaaccctctgagagatgcaagtaacccgtctggactccttacaattgcggaggagaccctgacagagttcctctccaaggctacagggactgctgttgattgggtgccaatgcctgggatgaaggttgattgccaacttctcagattcactctgcctgcatcaaatgaccctggtccggattcgtttggtattgtggccgtttcacatggttgccgtggtgttgctgcccgtgcctgtggtttggtgaatctagaaccaacaaagatcgtggagatcttaaaagaccgcccatcttggttccgtgattgtcgaagtcttgaagtcttcacaatgtttccagctggaaatggtggcacgatcgaacttgtttacatgcagatgtatgctcctactactttggttcctgcacgagatttttggacacttagatacacaactacaatggaggatgggaggcttgtggttcccgtcctcgctgatgatgacgcagcggttgctcgccacgcacctctggtaatgaggagtaacagaaaggctggcatcgactttgtagacccccgagctactttctgtcctgaggcggcaatgttagtgctgagtgtgcctactccagcaggggttcgagttctgagggagcatggctctgaatgggccgattacaagactgatgcagatctggcttcagctctgaaaacaagtgcatgttcacctccagggttgcgacccaggagattttctgggagcagatcattaagtggttctgggggcggtcttagtactgcctcggttcaggaagttgtgagagttgagatgcttcccagcttatacatggtgcgcccatgcgatcgtgggggatccatcgtgcacattgtggaccagcagcagccggggaggtggtgggatcctcctttccgcttggctctgcaccgattgatgatttcccagatgaaactccattgatttcttctggcttccgtgttataccacttgatatgaaaacagatggtgcatcctctggtaggacattagatttggcatctagtcttgaagtaggttcagcaacagctcaagcctccggagatgcatctgcagatgattgtaacttgcgatctgttctgacgatcgcttttcaattcccttacgagttgcatctccaagacagtgttgcagctatggctcgccaatatgtccgtagcattgtttctgctgtgcaaagagtgtcaatggctatctctccctctcaaactggtctaaatgccggacagaggataatctctggtttccctgaagcagcaacccttgctcgatgggtttgccagagctaccattaccatctaggggtagagttacttagtcaatcagatggagatgcagaacaattgttgaagatgctatggcattaccaagatgctattttgtgctgctcattcaaggaaaaaccggtgtttacatttgccaacaaagcaggactggacatgctagaaacttcccttgtcgccttacaggatctggatcttgaggctttgtttgttccagatgtgcttcggccactcttcgagtcatttagggtagttgctcagaaaatgactactgcagcactacggcacatcagacaaattgctcaagagacaagcggggaggttgtttacgctttggggaggcaacctgctgttttgcggacatttagtcagaggttgagtagaggcttcaatgatgctataagtgggttcaatgatgatggttggtctgtcatgggtatggatggcattgaagttgtgatcattgcttgcaatgcaaagaaggttaggaatactagcacttcggccaatgcttttgtaactccaggaggtgttatatgtgctaaggcatccatgctactgcagagtgtcccacctgcagttttggttcgatttttgagggaacatcgttctgaatgggcggattataacttcgatgcatattcagcttcatctctgaagacaagctcatgttcacttcctgggttgcggcctatgagattttctgggagccagatcattatgccacttgctcacacggtggagaatgaggagattttagaagttgtccgtcttgaaggacaagcacttacacatgatgatggtcttatgtctagagatattcacctgcttcagctttgcactggaatagatgagaaatcaatgggatcctgcttccagcttgtctctgcaccaatcgatgagcttttccctgatgatgctccgttaatatcttcaggctttcgtgttataccgctggacatgaaaacagatggtacacctgctggtagaacattagatttggcatctagccttgaagttggttcaactgcacagcccacaggggatgcatctatggatgactgtaatctacgatcagtgctgacaattgcctttcagttcccttatgaaatgcatctccaagacagcgttgcaactatggcccggcaatatgtccgcagtattgtttcctctgttcagagagtatcaatggctatttctccttctcggtctggcttgaatgctgggcagaagataatttcaggcttccctgaagccccaacgctagctcgttggatttgccaaagctaccagttccatttgggggtggagttacttaggcaggcagatgatgctggggaagcactattgaaaatgctatgggattacgaagacgctattttgtgctgttctttcaaggaaaagcctgtgtttacttttgccaacgagatgggactaaacatgctagaaacatctctcgtcgctctccaagatctctcactggacaagatatttgatgaagccggtaggaaggccctatacaacgagatcccgaaattgatggaacagggttacgtgtacctgcctggtggagtgtgcttgtccgggatggggcgccatgtttctttcgagcaagctgtagcatggaaggtgctcggagaagacaacaatgtgcactgcctcgccttctgcttcgtcaactggtccttcgtgtgacccaaaatccaatccaccatgctcgcagtcatcgtcgttgtcgtcagatctccattttttgcaatctctgtagaagagaggacaccaaaccaaccacaaacctgtcagctgttagctaatgattctactagcttttctagatctttgaaggcaaaatgctgccggtgcctgtaaaaagtgtgtgcgtgcgtgtgtaaatttgggcgcgttttgcactaatttgatctggggtaaggaggcgctggctgctgctgtgctgtagtttggtaaaagttgagtacactaaccttggatggtctcgaactgtatgatgaaattcctagcagtaaaatttcaacttggatccgtg

SEQ ID NO: 21666 - DNA, 1185 bp, Oryza sativa
  Clone ID: TF_OsC2118_1
ggctctgagcgagagggccagccacgcacgcacgcacgccaccgcgctccattggccaccccctcgccatcgccacgattaaactactctcttgctactccccctccatccatccacacactccaccatttcctcttcttcttcctccatatcacacggttttcgtccatcgatcatcagagctcgatcgggcgccatggatggggaggaggacagcgagtggatgatgatggacgttggagggaagggcgggaagggcggcggcggcggcggcgcggcggacaggaagaagcggttcagcgaggagcagatcaagtcgctggagtccatgttcgcgacgcagaccaagctggagccgaggcagaagctgcagctcgccagggagctcgggctgcggcctcgccaggtcgccatctgcttccgcagcaagcgagcgcggtggaagtccagggagctcgaacgcgcgtacttccccctccgcgacgcctacgacgccctcctctggacatacgagtcccttaacaaggagaagctcgccctcatcaagcaggtggggaagctggtggagaagctggaggaggcgcggggaaagcacggagatagagccggggacgacgcgcggtcgggaggcctcgccggcattcagaagcaggagctcgtccctccggacggagccgccagcctccactaatcggccgagggtggcgggacgtcgtccacggagcagacctgcagcagcacgccatggtgggaattcgagagcgagtgagcatccacactgttactactaggctactcatggatgatccatcgatcgccacagatcatgcatgccacgatcagaatttcaattcgccgcgaggacggatcaaacctgtactagatcggatcagagcaaacatagcagagaagatgatcaaaccaacagtgatgtgtacatagatttctgtagatcaaaaccccaggcagtctcctctccatccagccatcagcatgcgaaaattctctctcttttttttcccctccaagtcttactcgacttcgatgttgttatcacaacaccacatcatgtaatccagcaacacgccgagatgaaaaaaaggttaaaaagcttatagagttcgttcatttgatggatccaaaaaaaaaaaaaaaaaaaaaaaaaaaaaaaaaaaaaaaaaaaaa

SEQ ID NO: 21667 - DNA, 1459 bp, Oryza sativa
  Clone ID: TF_OsC1620_1
tagtggatccccgggctgaggctttcccctgcagatatcacaagctgaagctgctgcacctgcacacgccttctctagttctctccagcttacagctagctgcagtgcaagcagctgctgaattcccccatgagcctctgcctccctgcctgcccccgtatgtagcaagaacaagaacaccagcgagtaacacaggctcgctacagtggtactagattaccgcttgtgcgggcatagtgatcgtctatagttgtgaattgtgatgcagcagcataggtggtgagctgctgctgctggtacgtagatggaggatctgtacagcatccacccggggatctcgcgggtcggcggcgcggcgagcgaggcgtccggcgtgggcgtcgtcgtcggcggcggcggcgggtcgtcgtcgtcggatctgacggagctcatgaaggctcagatcgccggtcacccgcgctacccgaccctcctctccgcctacatcgagtgtcgcaaggtgggagcgcctccggaggtggcgtcgctgctgaaggagatcggccgggagaggcgcgccggcggcggcggcggcggcgccgggcagatcggcgtcgaccccgagctcgacgagttcatggaggcgtactgccgggtgctggtgcgctacaaggaggagctgtcccggccgttcgacgaggcggcgtctttcctcagcagcatccagacgcagctcagcaacctctgcagcggcgccacctcgccgccggccaccaccgccacgcactccgatgaaatggtggggtcctccgacgaagaccagtgctcgggggagactgatatgctagatatagggcaagagcaaagctcccgcttagctgaccacgaactcaaggaaatgcttctgaagaagtacagtggctgcctcagccggctccggtccgagttcctgaagaagcggaagaaagggaagctaccaaaggacgcacggtcggcactgcttgaatggtggaacacacactaccgctggccatatcccacggaagaagataagctgaggcttgcagcgaggacaggtcttgacccaaagcagatcaacaattggttcatcaaccagaggaagaggcactggaagccatcggacgggatgcggttcgcgctcatggagggcgtggcgggtggatcgtccgggacgacgctctacttcgacactggcacaattggaccatgaattcatttttgagcaatgccgcctcttgagaaaattggccatttaggcagtaatagtaggacatggtatttggtggtgattgtgtctagctatgatcaatctttcagcaggtcagtgttattcagttcagggtaaagtaattgcctcattgttttggcagatcatgtgtatatggcatcgtaccaaatcaaaatgtataatcgttaggtaatatatatcttggggagacctgaaaaggctgttattagt

SEQ ID NO: 21668 - DNA, 2546 bp, Oryza sativa
  Clone ID: TF_OsC1034_1
ccggccgggacggggaaatacaacagaatcgaaatacagaatactgggataacgacacactgggagtcacttgcaacctttagggttgaatctccggagatggaaatgaatcaacagcataatgagggcaacgaatctttcgtggccttgatgaacggttttgctggtgacgggacggcaacactaccgaatgatggggagcagagaatgagtattccagcaagagaattatttgcagcaattgaggccgactcaggcttgttgcctgtgaacagtagcaacactaatgaaaaaaggaagaggcgtctacagaggctcactggcaaacagtcggaggtacttgaggggtttttcagcatctgtgggcatcccgatgatggacaaaagaggcatctgagtgagacaacaggtcttggtttagatcaagtgaagttttggtttcagaataaaagaacacaagtaaagactatgtgctggaaggaagagaactataagttgtcggtggagaatgaaattctgagggatgagaacaggagagttaagatagctcactgcactgctgtatgcctcacttgctgtaattcatcagtacagaaccagcttgccgttgagatggaaaggttaatggggcagagtgagtggctgcaacaagagattgcacggtcgaatggaacacccccggctgcaaaccttgcctttcaacttaattcatcagcagactatgtattttcagggcaacatgaccaacaaatgattgctgaactagccaaaaacgcaatgcacgcattgattattttggccgaatcccatgtcgctctatggtttcccgtccctggctgttcttatgaagtattgaacaagatggcttatgaccaagcatatcctggggataacagtgcaaacgccattggattcaagacagaggctactcgtgcagtttctatggtgatgatggactacaaaagcgttgtggatttcctcatggatccttacaactaccgaactttctttcctgaagttatttccggggcagtaaccaacaggatctacacgtggcctaccagtgatggttataatggggttatacaactgatgactgtcgagatgatgttcccatcgcccctggtaccggctaggaaatgcacattcctgcgctattgtaatgtgctgaacgaaggattagtggtcgtcattgatgtgtcattggacgatggcagtatcttctccaaatgccgtaaaatgccatcagggtttctgatccaatccataaggccaaacagctgcaaggtcactgccatagagcacgtccttgcggatgacaccggtgttcatgagctctaccagcctcgtgtgaatggactcgtcttcggagctcggcgctgggtggcgaccatggcgcggcagtctgcacgcatgagagatgttcatcacaacaagacagctccgcaagtcagcacgaaggggaggaagaatctaatgaagctagcggacgacctgctcgcgagcttcgccggcggcatcgccgccactggcggaggaacgtggaccgtcgtgatcggcgccggcacggagaaggacatcagggtcgcgtacaggaggaccaccgagggcagcagcagctacaacgcgatcctgtccgtcaccgcgtccctgcgtctgccgctgcccatgaggaaaaccttcgatctgctcaggaaccttactcaccgctgcaagtgggacgtcctggtgcacggcagcgtggtgaaggaggaggtcaccatcgccagaggcgtcgggaacgacgacactgtcaccgtcctccactgcaagcgcgccggcagggaggacaggggaaggaccatgatcctgcagaacaacgggtacgacgcgtcgggctcgttcatggtctactcccagatcgacagcgagctgatgaacaccatggtcctgagccccagcgacctgccgcccgggcggggcgggccgtccctctaccccaccggcttctcccttctccctgacgtcgaggctgcccaggacagcagcggcatcgccctcggcgaggttgggggaactctcatgaccatgggcttccagattccggtgaagctcgccagtggggatcgcatgtattcccggtctgcggcatcggcaatcaggctcatgactgacaccattgccctcgtcaagaagacgctgatgaacgagcattctggtatctacggggttagcccgttccacccctagattcagaaaaacaccagagggagaaaagggaggtccgtgtgcagataaaaatcaagaacatgcgaaggggattcatcggctccgatcaccctgcatctcccagaatttgctgaattaattagaactttaaggttgtgttaacaacctgtaataatgtttttaaggccaaacttatatcgtgtctttgctgtaataatgtagtatgcgcctgatggatgtcgactgccgtgtaccgatgcagtttgcttcgcagagacgcggatacatttgctatcgtatggatgctcctttagaagcaaaaaaaaaaaaaaaaaaaa

SEQ ID NO: 21669 - DNA, 2181 bp, Oryza sativa; identical to SEQ ID NO: 12117
  Clone ID: TF_OsC1034_2

SEQ ID NO: 21670 - DNA, 1347 bp, Oryza sativa
  Clone ID: TF_OsC244_3
atggatctcggcctcagcctcggcctcggcctcgcctcgcagggcagcctcacctcctccaccaccaccacctcctcccccggcgccggatcatcctccccgtgggccgccgcgctcaactccatcgtcggcgacgtgaggcgggatcaggccgcggcgcatgctgccgcggcggtgggggttggggttgggggcgaggagatgtaccaggggagggcgtccacgtcgccggacagcgcggcggcgctgtcgagcgcgagcgggaagagggagagggagctggagcggtcgggatccggggttgacgacgacgacggcgcggacggcgccggcgggcggaagaagctcaggctgtccaaggaccaggccgccgtgctcgaggagtgcttcaagacgcactccactctcaaccccaagcagaaggtggcgctggcgaacaggctggggctgcggccgcggcaggtggaggtgtggttccagaaccggagggcgaggacgaagctgaagcagacggaggtggactgcgagtacctgaagcggtggtgcgagcgcctcgccgacgagaacaagcgcctcgagaaggagctcgccgacctcagggcgctcaaggccgcgccctcgccggcgtccgcgtccgcgatgcagccctcctcctccgccgccgccacgctcaccatgtgcccctcctgccgccgcgtcgccaccgccggcgcgccgcaccagcctaaccaccaacaatgccatcccaaatctaacaccaccatctcctcctcctccaccgccgccgccgccgtcgccgtcgccggcggcaacgtgctgcccagccactgccagttcttcccggccgccgccgccgccgccgaccggacaagccagagcacgtggaacgccgccgcgccgctcgtcaccagagagctcttctagaaacaatccatccatcgccatgacaaacttgggaaaggatcaagctttgattggtcaagacagtgtttttaccaggtggtgatttggttaattaattaattataattaatcactcaaaaggaggggattaattgccttgatttggtacctaattactagtatgattagcagtagtagtagtagcacaaatttggtttggattaattcagtttgattccatgatatgaacaaaggaacaaagcaacaaaaaaatggccgtctgctttttcttggacggcattcttatatgtaccaattcaccaaatctgctggttggtggattaacagcttgataattggtatattgattgtactactaccactaattgattgaattatgagaaaagttaatgaaatcaaaaaaaataaaacagcaaaacaaaa

SEQ ID NO: 21671 - DNA, 1029 bp, Oryza sativa; identical to SEQ ID NO: 12116
  Clone ID: TF_OsC157633_1

SEQ ID NO: 21672 - DNA, 2346 bp, Oryza sativa; identical to SEQ ID NO: 12126
  Clone ID: TF_OsC775_2

SEQ ID NO: 21673 - DNA, 1858 bp, Oryza sativa
  Clone ID: TF_OsC1920_2
ttgacgcctgggcggacgcgcgtaaaaatcccaaaaacaaaaaataataaaaaaaaagaaagagagagacatttcgcatctgctgccctgcctcctctcccatcacctgcccattttttcacattgaggcccctctgaaaatattatatttacaactaggtccctggccgggccggccggccaccggaaggagcacctcgccggagaaggctttgtctcttctttttcttctcctcctcctcctccatcggcggcggcatggggttctcgctgtaccccatgaagacgtcgacgcgcatgctgtggagcaccagcttcttccgccataaggtcgcctcctccttctaagcccacgccctctcgggcggcggcggcgagccggcggcggagcgcgcggttggtaggtgcgcgtgcgtgcgtgaacgggagagcagcttcgagatcgggttttcttgggttcttggagaagggaggagaagagggggaggagagcatggatcccggccgcgtcgtgttcgactccggcgtggcgcggcgggcgtgccccggcggcgcgcagatgcttctcttcggcggcggcggcagcgccaacagcggcggcttcttccgaggcgtgccggcggcggtgctggggatggatgaatcgcggtcgtcgtcgtcggcggcgggggcgggggcgaagcggccgttcttcacgacgcacgaggagctcctggaggaggagtactacgacgagcaggcgccggagaagaagcggcggctgacggcggagcaggtgcagatgctggagcggagcttcgaggaggagaacaagctggagccggagcggaagacggagctcgcccgccgcctcggcatggccccccggcaggtcgccgtctggttccagaaccgccgcgcccgctggaagaccaagcagctcgagcacgacttcgaccgcctcaaggccgcctacgacgccctcgccgccgaccaccatgccctcctctccgacaacgaccgcctccgcgcgcaggtaatctcattaaccgagaagctgcaagacaaggagacgtcgccgtcgtcggcgaccatcaccaccgcggcgcaggaggtcgaccagccggacgaacacacggaggccgcgtcaaccaccggcttcgccaccgtcgacggcgcattggcggcgccaccgcccggccaccagcagccgccgcataaagatgatcttgtgagcagcggcggcaccaacgacgacggcgatggcggcggcgcggccgtggtggtcttcgacgtcaccgagggcgccaacgaccgcctcagctgcgagtcggcgtacttcgccgacgccgcggaggcgtacgagcgcgactgcgccgggcactacgccctctcgtcggaggaggaggacggcggcgcggtcagcgacgagggctgcagcttcgacctccccgacgccgccgccgccgccgccgccatgttcggcgccgccggagttgtgcaccacgacgccgcggacgacgaggaggcgcagctcggcagctggaccgcctggttctggagctgatcgatggaagcatggagcattggagccatgctatcaatgaatgaatgaatcaaatgaccttgagaccctcctctccgtcctttcttttgccctatttttaatcgctgttatatgttaattatgtgcaattaaagtgtacgtgttttgtcgtaagttgtgtttgttcaaattgtatgttttgaaggtgtcatgtattcatacacgatatgatatatagacgggatcatgaatgatactcggaaagattggaataattccatgtagtgttgagcaataataaacattttcctccgataagatgtttttatgatt

SEQ ID NO: 21674 - DNA, 597 bp, Oryza sativa
  Clone ID: TF_OsC434_3
tcgttctcgctacctttcccttcccacctcctcctcctcctcctcaccaccaccacgcgcctccgctcgcaagaagcacctccgaccgccatggcgcgcgcgggagctggcggcagtctctccctggaggcatgacgcggcggcgcccgtggccgtggctcctgttgctactactgcgaccaactactgcgctcggtcggcggtggtggtggccctggtcgtcgtcgtagcgcgtcggcggaggcgggagaagaaggagaagggtcgacggggatggcggcggcgatggtggcggcggtgcatggagtggggaggcaggacaggtcgtcgcctggcggcggaggggcgccgcaagtggacacgggcaagtacgtgcgctacaccccggagcaggtggaggcgctggagcgggtctacggcgagtgccccaagcccagctcgctccgccgccagcagctcatccgcgagtgccccatactcagcaacatcgagcccaagcagatcaaggtctggttccagaaccgcaggtgccgcgagaagcagcgcaaggaggcatctcgcctgcaaactgtgaaccggaaattgactgcgatgaac

SEQ ID NO: 21675 - DNA, 1269 bp, Oryza sativa
  Clone ID: TF_OsC52478_1
gcacgagtggctcgcccggccttacattcgacgaactgatcgaatggagatgagcgaccgccaccgccgccggcagccgcacaagttctagacgacacggccggcgccggtggagcagccgcagttctgcatgcggccgatgatggcggcggagcagcacgcggccctgggcggtggcggggcgacggcggcgccggcggcggcggtggcggggagaggaagcggcggttcacggaggagcaggtgcggtcgctggagacgacgttccacgcgcggcgggccaagctggagccgcgggagaaggcggagctggcgcgggagctcgggctgcagccgcgccaggtggccatctggttccagaacaagcgcgcccggtggcgctccaagcagatcgagcacgactacgccgcactccgctccaagtacgacgccctccacgcccgcgtcgagtcgctcaggcaggagaagctcgccctcgcagaccaggttcgtgcgccattgccgaccaatcatcagctaagagagaggctgagggaacgggaggagaggagcggcaacggtggtgccgccacgacggcagcaagcagcagcagctgcaacggatcaggcagcgaggaggtcgacgacgacaagaggaatagcgtgatgaacgcgagcagcagcggcctcgtggaggaggactacgtgagctgcctcgcggtgccggtggtggacgtctcggaggacggctcggcggcgtgcggcgggtcgtcgtacgagtacgaccatcacctagactacttgggcggcggccagctgcccgatccgttctgcggcatgccggatctgtgggagatatggccaatggtggaatggaacgcagtagcatgaaagacagagagtagtatattaccctaggttaatttgtgtgtacatgtagcttaaagtacgtggatcacgtctcctcgactgatctgccgtctcccttggacagagagggaaaagagggccgtggcaatgacgtgtggggccggtttgtagattggggttgcaagaggaatctcgttggagtagtggtggtggaaaccttggaagcaattaagccaatggactttgtgttttggatggtgctaaaatggagaaaactagatcgagctcattggaagagttgcataggaattcaagcatcttttgtggtcacttcgaattcggatttagtagtaatctattcgaaagatgttcaattgacgatattattaaactagttttatatctaaaaaaaaaaaaaaa

SEQ ID NO: 21676 - DNA, 1373 bp, Oryza sativa
  unsure (1)..(1373): unsure at all n locations
  Clone ID: TF_OsC1920_3
tcgcttagagaagcatctgcgcgccgccggggcacgcccgccgcgccacgccggagtcgaacacgacgcggccgggatccatgctctcctctccgacaacgaccgcctncgcgcgcaggtaatctcattaaccgagaagctgcaagacaaggagacgtcgccgtcgtcggcgaccatcaccaccgcggcgcaggaggtcgaccagccggacgaacacacggaggccgcgtcaaccaccggcttcgccaccgtcgacggcgcattggcggcgccaccgcccggccaccagcagccgccgcataaagatgatcttgtgaatggccagcaatggcgccgccgccggcgccatggccccgttcttcccgcccaacttcctcctccagatgcagcagcctctccccctccaccaccagcacctccaggaccacgcccatggcggccacggcggccaccacctcctccctcctcctcctccctccctctcccccttcctccccgacctcgccatggacgcgccgccgccgccaatgtacgaggcgagcggcggcgatggcggcggcggaggggcggcgtcggaggatgaggaggatgggtgtggagggggagggggtgggggtggtggggagaagaagaggaggttgagcgtggagcaggtgaggacgctggagcggagcttcgagtccgggaacaagctggagccggagcggaaggcgcagctggcgcgcgcgctggggctgcagccgcggcaggtggccatctggttccagaaccgccgcgcgaggtggaagacgaagcagctcgagaaggacttcgacgccctccgccgccagctcgacgccgcccgcgccgagaacgacgccctcctctccctcaactccaagctccacgccgagatcgtggcgctgaaggggggagcggcggcggcggggggaggagggagcagctgcaggcaggaggcggcgtcggagctgatcaacctcaacgtcaaggagacggaggcgtcgtgcagcaaccgcagcgagaacagctccgagatcaacctcgacatctccaggccggcgccgccgccgccgccgccgccggccaacgagagccccgtcaaccgaggcatcccgttctacgcctccatcggccgcggcggcgcaggcggcgtggacatcgaccagctgctcctccgcggcggccactcgccgtccccggctgccgtgacgacgccgccgccgcccaagatggagctcgggattacaggcaatggcggcggcgcggacgccgccgccgccggcgcgggcagcttcggcggcctgctctgcggcgccgtcgacgagcagccgccgttctggccgtgggccgacggccaccaccacttccattaa

SEQ ID NO: 21677 - DNA, 3516 bp, Oryza sativa
  Clone ID: TF_OsC1920_1
ctcgccttcctcgcttgatgagctaaggagatcgagttgaggacaatggccagcaatggcatggcgtcctccccttcctccttcttccctccgaacttcctcctccacatggcgcagcagcaagcggcgccgcctcacgacccgcaagaacaccaccaccaccaccaccatggccaccatggccaccaccatgagcagcagcagcagcagcagcatcaccaccacctgggtcctcctccgccgccgccaccgcacccgcacaacccgttcttgccgtcctccgctcaatgcccgtccctccaagaattccgaggcatggcgccaatgctggggaagcggccgatgtcgtacggcgacggcggcggcggcggcgacgaggtgaacggcggcggcgaggacgagctgtcggacgacgggtcgcaggccggggagaagaagcggcggctgaacgtggagcaggtgcggacgcccgaccccgcgcgtccgcccacacgaccaaaatattataggaaataaaaaataatttcctggttagaataaacacatttttaaaaaaaccaagaaaagattttcctcttctgttacattccttcttccttctccggccaccggagccgtagccgaattgtgcctcttctccggcgaggggagagggagagagggggtgtgagttttgctccttccggcgagtggtctcctccccgcgcggctgaggagatctctcgggacatcggggttggggcggcgtgcatgatggggttctcgctcacgccgatgaagatctccacgaggcttctgtggagcaccagcttccttccgccacaagatcgccgccaccatcgcgtcctcctcctccttcttataagatcatcttctccgccacagcaatctgtaaatatatacacatcgaacgcgacaagcgcgtttgattgattgggatttttctcccctgtcctcacgacaagtaattaaggggcgcgatctcgatcgctagcgttgggaggttgatacgcgatggggtccggccggctcatattgagcacggcgggcgccggggccgcgcagaggctcttcctcggctgcggcgctggcggcggctggagcggagggatggacggcggcaggactatgagccatcgaaggacgaaatgagtgaatcgaatgactggaggccctcctgtcgttcctttcttttgccctatttttaatcgctgttatatgttaattatgtgcaattaaagtgtacgtgttttgtcgtaagttgtgtttgttcaaattgtatgtgctggagatgaccttcgagcacgggaacaagctggagcaggagcggaagatgaagctcgcccgaaagctagggctgcagccgcggcaggtcgccgtgtggttccagaaccgccgcgcgaggtggaagacgaagcagctcgagcgcgacttcgaccgcctcaagcggccgctcgacgccgtccgcgccgacaacgacgccctcctcgaggacaacgagaacctccacgccgaggtcatgtcgttgaccgagaagctgcaagagaaggagacgacgaccgagggcagcgccggcgcggccgttgacgtcccgggcttgcctgcggcggccgacgtgaaggtcgccgtcccggacgccgaggaaccggcgctggaggaggcggcggcggcgttcgaggagcagcaggagcagcaggtgaaggccgaggacaggctgagcacgggcagcggcgggagcgcggtggtggacacggacgcgcaactggtggtcgggtgcggccggcagcatctcgccgccgtggacagcagcgtggagtcgtacttcccgggcggcgacgagtaccacgactgcgtgatgggccccatggaccacgccgcggggggcatccagtcggaggaggacgacggcgccggcagcgacgagggctgcagctactacgccgacgacgccggcgtcctcttcgccgaccacggccaccaccaccaccaccaacacgcggacgacgacgaggaggacggccagcagatcagctgctggtggatgtggaactagatttctcgcgcgcgcgcgcgcgcgcgtcgtcgtgcattcaattctcgtgttaaaaaaatcgttctctttttcatttttccgcttctttgtctgtaatgttgagtttcgatcggctatgagaaggaaggaggtgtatgcatgtgcatggtatggtagggtaacacatcggtgaatcaaatctgtcatggtgatgtacgagaattgaagaacatgggggtagcaataagtgcatggaggcaagtactcttttcaatggcacataccaaatcatgtcgtcgaattgagatttttattagtcttgaattcttcttgaaaaaaaaaaaaaaaaagaacggagatccatgtgggtttcagtgttggcagaaaggttgttggaatcggtgacatgctcaccaatgcaaatagtggcgctgaaggggagggaggcggcgtcggagctgataaacctgaacaaggagacggaggcgtcgtgcagcaaccgcagcgagaatagctccgagatcaacctcgacatctcgcgcacgccgccgcccgacgccgccgcgctcgacaccgccccgaccgcgcaccaccaccaccatggcggcggcggcggcggcggcggcggtggcggcatgatcccgttctacacctccatcgcccgccccgccagcggcggcggcgtcgacatcgaccagctcctccacagctcgtcgggcggcgccggcggacccaagatggagcaccacggcggcggcggcaatgtgcaggcggcgtccgtcgacacggccagcttcggcaacctgctctgcggcgtcgacgagccgccgccgttctggccatggcccgatcaccagcacttccactgatcgatcgatccatggatccaaccaaccaaccaaacaaccattggcaacaacaaactatcttgcagtgatgaagcgatcgacagtatgtacggggtgatgaattaacgatgatcacacaccaacgcaagcgcatgcacgtgtgtggaagattcagacgcatgcatttggattaattcttggagagatcgagcaagcttaattgggaagaacaatgagaaggttgtgtatgatgatgatgctagctacgagtattgaggtgatgaatgcattgaatttttctcttgggtttgaagaggatatcgaatcgaaggaacttgtagatgaataagcgagtgagatggaacgacgtacgtagggttagattttggagttcagtagtagtatattctgtcactttttatctattttttttatttattggggtcttattttttcccctttttctttacatacataaatttgtgaactttgtcagccagtgtttgttgtgtataggtgcatggtgattcttctttcttcccctaatctgtgtggatcatgtccctgtgttgaaaaaaatgttcattaaatttcgctcaagcaatctcacaattccgttgtaccctaaaaaaacaa

SEQ ID NO: 21678 - DNA, 3058 bp, Oryza sativa
  Clone ID: TF_OsC2076_2
tgtagccccttggtcaaagcatttatcaactactgacctgcgattatcaacaccaatttatcatgttattgagttaggatttattaggaccccaccatttcccagagacaaaaacttcttttgatctattggggtatttccaacagataacgatttatgctgcatctgcgcagtaggctctttctaccaatgttaagagtagtgcggtcaggaatagctacaaacaaattgttaaaaggggtaggaaaggctccgaaatatcaccaagtaaaacatatcccctgagatcgactcatagtaatgtaatgatgcttcgcggtgcctcaaaaaggaatacttagtaacctaatgtgcccacaaatgagaatactggtatccaacgagttgcgaactaaaggtgtacaagctaacacttgacgccttcaccttgcagagcgcttagatgaacctggaaaagtaagaattagacacataataagcttcgaaatgatggtgctggtgttcaaccagccgaaaagaaaagaaaggtaggcagacccccaaaaggaggaactcccaaggacgattacctcatgatccgaaagcgagttagatatgttttgaatcgaatgaactatgaacaaagtttaattcaagcctatgccagtgaaggttggaaaggtcaaagcttggaaaaaataagacctgagaaggagcttgaacgagccaaggtggaaattctgcgatgcaagtcaagaatacgggaagcttttcggaatttggattccctcctatctgagggaaagctggatgaatctatgtttgattctgctggagaaatatctagtgaagatattttctgtgctgcatgtggttcaaaggatgttacattaaaaaatgacataattctttgtgatggaatctgcgacagagggttccaccagtattgtttaaaccctcctttgcttgctgaagatattccacagggggatgaaggatggctttgccctgcatgtgattgcaaaattgactgcatagatgtattaaatgaactccaaggggtcaaactctctatccatgactcttgggagaaagtttttcctgaggcagcatcctttttgaatggttctaagcaaattgatgcgtccgatcttccatcagatgattcagcagacaatgattatgaccctactttggctcaagggcacaaggtggatgaagaaaaatcttctggagaagatggtggtgaaggattagattctgatgactcatcttctgaggattctgaatcttctgagaaggaaaagtctaaaacttcacagaatggaaggacagttgatgatcttggtttgccttctgaggattcagaggatggtgactttgatccagcaggtccagattccgacaaagaacaaaatgatgaatcaaactcagatcagtcagatgaatcagattttacatctgactctgatgatttttgtgctgagattgctaaatcctgtggtcaggatgaaatctcaggcccttcatcatcacaaatcagaacagtcgatcgcaccgatggaagtggttttgatggtgagcctaatgcagaaaattcgaatcttgcatttatggagacagagctagagcaagacatggtgctaccaatttctagtaaacgacaagttgaacgtttggattacaaaaaactgtataatgaggcttatggtaaagcatcatctgattcaagtgacgatgaagagtggtatggaaatagtacacccgaaaaaggtaatttagaagacagtgaaacagattcgcttgctgaatcacctcagggtggaaaaggattctctagaagagcaccagttaggtaccataataatgaacatactccacagaatgtaaggcccggtggttcagtaagcgaccagcaaactgaagtactttgctccaatagcaatggtagcacagccaaaaacagacattttggtcctgcaattaatcagaaactgaaggcacatttcaaggaagatccataccctagtcgtgcaacaaaagaaaatctggcacaagagttaggcctcacatttaatcaggtcactaaatggttttccagtactcgtcattacgcaagagtggcagccacaaaaaaggagaacaacattgaaaatcatacggctgagaataataacaataccaacactgttgatagcatacaactgagaggatccaatgatattgttagtgtagatagaaatgatatggtctccgaggaaaggacaggacaaagtaatctcaatgaaggtactccattaagatcagataccagctgtgggcagagtgtggctgtgactcctatggtacacccagaaaaccagggcaatgattcctcaagtaatgttagaacaccaaatgctaagtctgcggagaaattgatccctggactggaaaattcagatgaggctaggcgaaaggcggtacaacgggaactgagaaagatgaagactggcaggtgaaactccctagtgttcgagttatttgaccagatgtgcagagaagcaagtttttgtatgctgcctagattgcttttaatcagatgtgcagagaagcaaagattttttttccttcttgtttgtggtcgcaaaaaagcctgattgttgtagctgctatgtttgttccctttggctgtccatccagaatttctgataagatgacacttggaagcacatcctgcagcactccagttacaggaatgggttcagttgactgtaacagtttagcatagtccgtagtggacagtagctgtgttgtttgtcgtgccctgtagtcctgtactaccttgaattaggactgctaagtgaaccgatacaagtacttgtgactgaaatctatacctctttttttctttccaccttgggaatttgtagaacaaaaccgatgtctgatgatatgctatctaggaatagcaactgttgtatttttgttcctgtttagggagatttagattctgatgagcaaaaaaaaagtaaaaaacttttaagaatttgaaaaggctgggtttcccagtttttagcttctactaaaaaaaaaaaaa

SEQ ID NO: 21679 - DNA, 1663 bp, Oryza sativa
  Clone ID: TF_OsC1191_1
gttcttctgaggatgacatggacccaagtggccgcgaaaacgagccgcctgagatcgacactcccctccctctcgccattggagctagacagctcgagctccaggaggaagaagagagagagcctagctgctagggtttccatcggatttggttttttattttctttttgtttcttgtgtgtgttttgatggatcagagctttgggaatcttggaggaggaggaggagcaggggggagcggcaaggcggcggcgtcgtcgttcctgcagctgccgctgtccacggcggcggcggccaccgcgtactacggcacgccgctcgccttgcaccaggcggcggccgcggctggcccgtcgcagtaccacggtcacggtcacccccaccacggcggcggccaccaccacagcaagcacggcggcgccggtggtggggagatctcggcggcggaggccgagtccatcaaggccaagatcatggcgcacccccagtactccgccctcctcgcagcctacctcgactgccagaaagtcggagcgccgccggaggtgctggagaggctgaccgccacggcggcaaagctggacgcccgccctcccggccgccacgacgcgcgcgacccggagctcgaccagttcatggaggcgtactgcaacatgctggccaagtacagggaggagctgacgcggccgatcgacgaggccatggagttcctcaagagggtggagtcgcagctcgacaccatcgccggcggcgcccatggcggcggcgccggctcggcgcgcctcctcctcgccgatggtaaatctgaatgtgttggttcttctgaggatgacatggacccaagtggccgcgaaaacgagccgcctgagatcgacccgcgcgctgaggataaggagctcaagtttcagcttctgaagaagtacagtggctacttgagcagcctaaggcaagaattttccaagaaaaagaagaaaggaaagctgcctaaggaggccaggcagaagctgcttcactggtgggagctgcactacaagtggccttacccctcagagacggagaagattgcgcttgcggaatcgacaggactagatcagaagcagatcaacaactggttcatcaaccagaggaaacggcactggaagccatcggaggacatgccgttcgtcatgatggaaggttttcacccacagaatgctgctgcattgtacatggatggcccgttcatggcagatggaatgtaccgcctcggttcgtgaacctcgatctcgatcatcggcgtgtttgatgagagatccaatgccaagataaattgatcatggaatgtattcagcatgcgttgcaatgcatggacattgttatggaatttttggtttatttacctttcaccgtggattgacaaggtctcgatcatgttagtgttgatggcttatagttctccagtaatgttgttgtttttcctttcgatggcttgtaaaagtttaggtgtatcggaatttcgatcaacttgctcgtacgctggtaattaatttggtgatggtctatatgttgtatggttgtgcgtttcagattggtgttcaaagttgcctatctgaaacaattatatatatttatattgcttctcattttaaaaaaaaaaaaaaaaaaaaaaaaaaggggggcctcg

SEQ ID NO: 21680 - DNA, 1240 bp, Oryza sativa
  Clone ID: TF_OsC1920_5
cagctttttccgcccaagatcgccgccaccatcgcgtcctcctcctccttcttataagatcatcttctccgccacagcaatctgtaaatatatacacatcgaacgcgacaagcgcgtttgattgattggatttttctcccctctcctcacgacaagtaattaaggcgcgcgatctcgatctctagcgttgagaacttgatccgcgatggagtccggccggctcatcttcagcacggcgggctccggcgccgggcagatgctcttcttggactgcggcgctggcggcggcggcgtcggcggcggggccatgttccatcgaggggcgagaccggtgctcggcatggaggaaggagggcgcggcgtcaagcggcccttcttcaccacccccgacgagctcctcgaagaggagtactacgacgagcagctcccggagaagaagcggcgcctcacgccggagcaggtgcatctgctggagaggagcttcgaggaggagaacaagctggagccggagcggaagacggagctggcgcggaagctagggctgcagccgcggcaggtcgccgtgtggttccagaaccgccgcgcgcgctggaagaccaagcagctcgagcgcgacttcgaccgcctcaaggcgtcgttcgacgccctccgcgccgaccacgacgccctcctccaggacaaccaccgcctccactctcaggtcatgtcgttgaccgagaagctgcaagagaaggagacgacgaccgagggcagcgccggcgcggccgttgacgtcccgggcttgcctgcggcggccgacgtgaaggtcgccgtcccggacgccgaggaaccggcgctggaggaggcggcggcggcgttcgaggagcagcaggagcagcaggtgaaggccgaggacaggctgagcacgggcagcggcgggagcgcggtgtgtggacacggacgcgccaactgggtggtcgggtgcggccggcagcatctcgccgccgtggacagcagcgtggagtcgtacttcccgggcggcgacgagtaccacgactgcgtgatgggccccatggaccacgccgcggggggcatccagtcggaggaggacgacggcgccggcagcgacgagggctgcagctactacgccgacgacgccggcgtcctcttcgccgaccacggccaccaccaccaccaccaacacgcggacgacgacgaggaggacggccagcagatcagctgctggtggatgtggaactag

SEQ ID NO: 21681 - DNA, 1174 bp, Oryza sativa
  Clone ID: TF_OsC2115_1
tctccctccgcctttgccccgccttccctgcccttttctcttgctgagccgcttctgcattggcttgtgatgatgggggccacttctccgtcaggcctggagctcaccatggctgtccccggcctcagctcctctggttcagaaggggccggttgcaacaacaacaacgccggtggcggctgcaacatgagggacctggacatcaaccagccggcgagcggcggcgaggaggaggagttcccgatgggcagcgtggaggaggacgaggaggagaggggcgtcggtgggccccaccgccccaagaagctccgcctctccaaggagcagtcccgcctcctcgaggagagcttccgcctcaaccataccctcacgccgaagcaaaaggaggccttggcgatcaaactgaagctgcggccgaggcaggtggaggtctggtttcagaaccgtagggcaaggacgaagctgaagcagacggagatggagtgcgagtacctgaagcgctgcttcgggtcgctgacggaggagaaccgccggctgcagcgggaggtggaggagctgcgggcgatgcgggtggccccgcccacggtgctctcgccgcacaccaggcagccgctcccggcgtccgcgctcaccatgtgcccccgctgcgagcgcatcaccgccgccaccggcccgcctgccgtgcgcccgccgccgtcgtcagccgccgccgccgccccctcgcccttccaccctcgccgcccctctgcggccttctaggcccaaggtctcgcatcctaaaggccacaaaaagatgggcctcgccgtcccgtgtaaattgaaggagacgacgcagcggtagagggccccgtgtcggcgttgttgcgtcgggtccagtcgtctcagaggagtcagaggcgtggacaaaatgtttgttgcggtgtttgtgttccattggtcgttgatcttagcttgatgatctgtgattcgcgccttgctcgtctaggtttctcttgggccgacgcatgatcttttttcccccgtgtcggaccttattgggccttttgagatcgacgggccccctccttgtttcgcatgtggacatgttatttcgtccttttgggccaacaattcagcacggtggccaacggtgcgtagttcgtcgccgttttctttcaaaaaaaaaaaaaaaaaa

SEQ ID NO: 21682 - DNA, 2616 bp, Oryza sativa; identical to SEQ ID NO: 12079
  Clone ID: TF_OsC310466_1

SEQ ID NO: 21683 - DNA, 843 bp, Oryza sativa
  Clone ID: TF_OsC244_8
ctaccaatgcgagcagagcacgccctctgcaatcatgccgtccatccccaggtccggcagcagccttgccttgccccggcgttggtttttgagggagcgatgatggagagggccgaggacctgcgcctgagcctcagtctcagctcgccgcttattgctcctcgtactcaccatgtcgccatgctgttccacgctcctccagagaaaagattcctggagatgccgctgctccctgctgcgaagcggagcgaggtcgtcgcggcagaagaggagcgcgcgggcctgcgcggcggcggcggcagcgacgaggaggacggtggctgcggcatcgacggctcacgcaagaagctccggctttccaaggaccagtccgccgtgctcgaggacagcttccgggagcaccccaccctcaaccccaggcagaaggcaactttggcgcagcagctcgggcttcggcctcggcaggtcgaggtgtggtttcagaacagacgcgcaaggacgaagctgaagcagacggaggtggactgcgagttcctgaagcgctgctgcgagacgctcacggaggagaaccggaggctgcagaaggaggtgcaggagctgcgagcgctcaagctcgtctcgccgcacctctacatgaacatgtccccgcccaccacgctcaccatgtgcccctcctgcgagcgcgtctccaacaccaataacaactccagcgccgccgccgccgccgaccgccgcggcatcaggactactactgccgcaggcggcggcagcgtcgtcgacaccgccgccgacgggggcatcctctgccaccgcccgatcgccgtccggccgcagcagtcatga

SEQ ID NO: 21684 - DNA, 4000 bp, Oryza sativa
  Clone ID: TF_OsC36_9
atggcggggaacgagtggatcaatggctacctggaggcgatactggacagcggcggcgcggcggggggaggtggaggcggcggaggaggtggtggtggaggtggaggtggcggtggaggtggagggggagggggagtcgacccgaggtcgccggcggcgggggcggcgagcccgcgtggcccgcacatgaacttcaatccgacgcactacttcgtggaggaggtggtgaagggcgtcgacgagagcgacctccaccggacgtggatcaagctggagcttgagggaatcctgaggatttctgcacggaggaaggagcaggagcaggtgcgccgcgagacttcggaggaccttgcagaggatctgtttgaaggcgagaaggcggacaccgtcggtgaattggcacagcaagacactcccatgaagaagaagttccagaggaacttctcagagctcaccgtcagctggtccgacgagaacaaggagaaaaagctgtacattgtgctcatcaggtcttataccgcttactttactcattggtgccattctgtatatgccactaaattgcaaaattttactgagttcctttattctttgttctactttagtcttcatggtctagttcgtggcgataacatggaacttggtcgggattcagatactggaggacaggtgaaatatgttgttgaactcgcaagagcacttgcaatgatgcctggcgtgtacagagtggatctgtttactcgtcaagtgtcatctcctgaagtggactggagctatggggagcctactgaaatgttaacctccggttccactgacggagagggaagcggtgagagtgctggtgcgtacattgtgcgcattccgtgcggtccaagggacaagtacctccgtaaagaggccctgtggccttacctccaagagtttgtcgacggagctctcgcgcatatcctgaacatgtccaaggctctgggggaacaggttagcaatgggaagctggtcttgccatatgtaatccatggccactatgccgatgctggagatgtcgctgctcttctttctggtgcgctgaatgtgccgatggttctcaccggtcattcacttgggaggaacaagctggagcagatcatgaagcaagggcgcatgtcgaaggaggagattgactcaacttacaagatcatgaggcgcattgagggtgaggagctggccttggatgcagcggagcttgtcataacgagtacaaggcaggagattgatgagcaatggggactgtatgatggctttgatgtcaagctagagaaagttttgagggctcgtgcgaggcgcggagttagctgccacggccgttttatgcctagaatggtggtaattcctcctgggatggatttcagcagtgttgtggttcctgaagataccagcgatggagatgatggcaaagactttgagattgcctcgccgaggtcactgcccccaatctgggctgaggtgatgcggtttttgaccaatccccacaagccaatgattctggctctgtcaagacctgatccaaagaagaacatcaccacccttgtcaaagcatttggagaatgtcgcccactgagggaacttgcaaacctaattctgatcatggggaacagggatgacatcgatgagatgtccgctggcaatgcaagcgtcctcaccactgtcctgaagctgatcgacaagtatgatctgtacggaagtgttgcattccccaagcatcacaagcagtcagacgtaccggagatttatcgcctcacagggaagatgaagggcgtcttcatcaatcctgctcttgttgagcctttcggtctcaccctgatcgaggctgcggctcacggtctcccgatcgtcgccaccaagaacggcggtccggttgacattaaaaatgctctgaacaatggactgctggtagacccgcatgaccagcacgccattgccgacgcgctgctgaagctggtggcggacaagaacctgtggcaggagtgccggaagaacggcctgcgcaacatccagctctactcgtggccggagcattgccggacatacctcaccaggatagccggatgccggatcaggaacccgcgctggctgatggacacgccggcggacgcggccgccgaggaggaggaagccctggaggactcgctcatggacgtccaggacctctcgctgcgcctgtccatcgacggcgagcgggggtcatccatgaacgacgcgccatcgtcggacccgcaggactcggtgcagaggatcatgaacaagatcaagcggtcgtctcccgcggacacggacggcgccaagattccggccgaagcggccgccaccgccacctccggtgccatgaacaagtacccgctcctccgccgacgccgcaggctgttcgtcatagccgtggactgctacggcgacgatggcagcgccagcaagaggatgctgcaggtgatccaggaggtgttcagggctgtccggtcggactcccagatgtccaggatctccgggttcgcgctgtcgacggcgatgccgctgccggagacgctcaagcttctgcagctgggcaagatcccaccgaccgacttcgacgcgctcatctgcggcagcggcagcgaggtgtactaccccagcacggcgcagtgtgtggacgccggggggaggctgcgccccgaccaggactacctgctgcacatcaaccaccggtggtctcacgacggcgccaagcagaccattgccaagctcgcgcacgacggatccggcaccaatgtcgaaccggacgtggagtcctgcaacccccactgtgtctccttcttcatcaaagaccccaataaggtgaggacgatcgatgagatgcgggagagggtgaggatgcgtggcctccgatgccatctcatgtactgcaggaatgcaacaaggcttcaagttgttcctcttctagcatcgaggtcacaagcactcaggtatcttttcgtacgctggggcctgtctgtgggaaacatgtatctgatcgtcggggagcacggcgacaccgatcacgaggagatgctgtcagggttacacaagacggtgatcatccgcggcgtcaccgagaagggctcggagcagctggtgaggagctcagggagttaccagagggaagatgttgtcccatccgagagccccttgattgctttcacaaagggtgatctgaaggccgatgagatcatgcgtgctctcaaggaggtcaccaaggctgccagtggcatggattggcagaggccattgtgcaagactgcttattggttccaatcaagagtgtatactaacatggaagaaaaggaggaaatgaccatgctttcccttggagttggagctgctagcaagcactcaatatccaacagaaaattcagactgaaagaagtgacagatcacaaattcaaccttggagatcaagatcataacagtggccatgtgaggaagaagctaaggcttagcgaagaacaattgactgtgctggaaaatatgtatgaagctggcagcaatctcgaccaagcactaaaacaagggcttgcggagaagctgaacataaaaccactccaagttgaagtctggtttcagaacagaagagcccggaccaaacataagcagatcgaagaagaatgcaagaaccgaggtggttggagggcctaaaggttaacttttagttgcactggatttgagtctttctgttttttttttttttttttttttttttttttttttttttttttttttttttttttttttttttttttttttttttttttttttttttttcagaaaaatggacatctgcgctcactaggacacaaaagttcagtcccagttgtgagtagtgacaacaacatgacgatgtcagttacacctaaaagttcactaaacatatatcctcaaagtttgagcaaatgagcagttacctaatccatcactagcaaagtaaaatagaagagtgaaacattgccggaagggt

SEQ ID NO: 21685 - DNA, 1714 bp, Oryza sativa
  Clone ID: TF_OsC139567_1
aaaagatacataatccagaaaatctaattaaagagaaaccaacaagtttgtgaaaataagacaggatgacatgcaaaatatctaagctcaatacataacagaaggctaatgaacctaaataaatacaatggttcaaaggctaatgaatacagtaccggtttcatgattccatttgcccatctaaacgatacgatgcattccgagaatttgtatagctagtagatcatagtcctttcaaactatagtgtaaggcaaatcctatgaggacaacatagggaaaactgctcattgaagctatagaggattgtacatagtcaagaagcaacatttggtttagtcaaaatctggcaaaccatgccacttgccaacatgcccatagtatcatcaacaagcattgtctaatctccaactcaatgatcttcacaatcgaagaaactccaattttctggcagatggcaacgcgatcatgagactttatcagaccaaaagctttaccatggacaagagcaacctttaaaactactaactcatttgtagcgctgatcgattcagccttcaggacaaagtgaaagaagatcgttacaaactcaccatcaagaaatatccacacaatcacctaacacctaagtgtgcagagtgctatttatcggcttcttgcagctaattcagcaacagaacaggtttacactagaactagctattctccgtagaatgtcgacaagaccatgataaccaacgtgtggacgtaaggcaaacttcgcaatttcagtaagcaaaatgaacggcaagttaccagcttcactttttacaggggaaaacagtatggtgtctaatgcaacgaacctagtaaccgcgtgccagaattgccgcgtcatcaatacatatcaaagctttcaccggatcgcatgtgggggaagctcccgggtcaaatgaagcaagggtgtttgtaggaggtacttggatttgacataacattgtcgtagaaggacatctggcccaaactgcctgacgatcgcgagctactgtcattggatgcatacatcatacgacggatttgctcatgctccgtgtcaaagtggtgcatctccgagatcctttcgctattgtgatctctcatggctatgttctggtgaagcggcctatctgatttgggttttttgtcagttggggactcctcatccgcttcagcttcagattctgcattattatttggtaaagcagcttgcttccgtttcgatcgtgcccgcctgttctggaaccagttatagacatttgtctctgagatctggccatgctgtgagagctctgctgttatgtcctttatcttttgcttgcttggtgttccattgccttggtcaaagatgttctcaagaatctgcaactgcattggggttggtgtccatcgctgccttgctgtgatcttgtgacctccgggaaccattagaggatcacagtacagattaccaagcctcattcctgcaatggagtcctgctgcgcggtgagggcgcggtgcatctcgacgagctgctcgcagatggtggcgtagatggagatctgcttccggagcacctccatctgctcgtccgtcatcaccttcacgtacccgagccctccttcccctccgcccctgtcgtccaccgcctcgccggaggacgccttggccttgtcccactccatgcctctacagggaggcgaaaaggaattgcctcgtgc

SEQ ID NO: 21686 - DNA, 1164 bp, Oryza sativa
  Clone ID: TF_OsC267403_1
ccataaacattgtgatcttccttccatattgcattcgattacaccctgaagatcgtaaaaaaagtccgtccttataatttttaatctgcttaatttatacattagcatcatattgctagtaaccaagcataaaaaaggaatataaatatatgtgtgtgttttcaattaacatagaaaatcccagccagagatatcacgcgatcaattccagaaccactcccagctgtttagcggcgcctcctcatccgccgccaccgtcgccgccacggcgtgctcgaaggcgtcgccgacgagcgtagcgtcgaccgggagtaagacggaggaagaggggtagtcgtcgtcgctgccggcgccgccgcagtcgtcctccgacgacgagggcggcgagcgagcgccggcgaagtaggactcggggctgtcgttgctggccgctcttgccgccgccacgcgcgccgccggcatcgcgacgccgccgccgccgccgttggtggtggtggtgctcccggcggcgtcgtagaggcggcgaccttcttcgagctgaaacgacttggcgctttcaggtgcggctggcacggcggtttgctccgccggcgccggcgacggtgacggtgacttcccattagcttgcagcttctcggttaataggatcacctgagatcggaggctctcgttgtcggcggcgagcgcggtgcggccggcgaggagctcgtcgtgggcggcccggaggcggtcgaagtcgagctcgagctgcttcgtcttccacctcgcgcggcggttctggaaccacacggccacctgccgcggcgcgatcccgagacgccgcgccagctcgctcttccgctccggctccagcttccgcttctcctcctcgaagctccgctccagcgctcgcacctgctccgctgtcagccgccgcttcctcgccgccgctgacgacgacccctgctcgtcgacgccgtacagctcgtcgacgaggtcctccatctggagctccagctcgtcgtgcgtcgtcgtcaggaacggcctcttccgccgccgccgccgcagctcggcctcctccatcaccggtgagcctacacgttcacacacgtaagcaacgcgttccaagctatatatatagaaccactgatctgggtcgatcgacacctccgacgaagccgccat

SEQ ID NO: 21687 - DNA, 1764 bp, Oryza sativa
  Clone ID: TF_OsC10707_1
ttttggccaacccgccgctggctcgctttatatcccgcgtgagctccacaccggccgggaagcggaggtccggaggaggaagcggcgagagaagctcagctaggcagggcgacgggcagaaacgcgaccacggcaacaaaccccgccgcgcgcgcccaccgtgccggttacatgggagtagaggcgggcggcggctgcggtgggagggcggtagtcaccggattctacgtctggggctgggagttcctcaccgccctcctgctcttctcggccaccacctcctactagctatacacacccatctcaccataacacacatacatagatagatagatagatagatacatacacacaaacataagtagctaggtagagaaagagatcatagcgttaggtgatcgatcgatggctgctgctgaggcggcggcggcggtggggaagcagcagcagaagggcggcgggggaaggggaggaggcggcggtgggccggcgccgttcctgacgaagacgaaccagatgatggaggagagcgcgcacgttcttggtgtcttttggggaaaaacatgtccttattgtcttgtgttgattaggacagaaacatgttacgattgcccctcaatacgttcacacgatctgaccggggctaacgagagatggcgactattcatgcagggtttccggaaggtggtgcccgatcggtgggagttcgccaacggcaacttccggcgaggagagcaaggcctcctctccggcatccgccgccgcaaggcgacgacgcctcagtcctccaaatcctgcggcagcggcgtcaacgtcgcgttccctccgccgctgccccctctgcccccggagccgtcggcgaccacgtccagcggcaacgaccgcagctcctcctccgcgtcctcgccgccgcgggcggacatcaccagcgagaacgagcagctcaggaaggacaaccaaacgctgacgatggagctggcgcgggctcggcggcactgcgaggagcttctgggcttcctgtcgcgcttcctcgacgtccggcagctcgatctccggctgctcatgcaggaagacatgcgagcggcggccggcggcgtcggcggcgagcagcgcgtgcaagagcacgcccgggaggagaagtgcgtgaagctgttcggcgtgctcctcgacgacacccatggcgccgccacgaggaagagggcgcggtgcgaggaggcggctgccagcgagcggccgatcaagatgatcaggatcggcgagccgtgggtcagcgttccatcgtcggggccggcgcggtgtggcggcgacaactgaagtccaaacttgtgcatgccacggccatgacctgatcgaccaggcgaacggcaagcagaaggcatgcatggtgaggttggtggcaagaatggtccgatcaaccaagtcattaggtaaaacgagacgaattaagcacgccaaatacgtgcggccctgtgttaatcacgggttgctaccatgctagtagtaaggtaggaacagtacgaggagtcaaggctgaccgaagcgaagcagccggctcttgtgtctggacgttgtttcagttaacactgaaagcttcaccttactatggattatacattttttagataatggaatataatatcccggtctttacttcgtccggcagctcaacacctacgtacgtacacattacacacactcgatctcttgctccatctcgatactcgactcctaactttgttggtttgatcatcatatcatcatcct

SEQ ID NO: 21688 - DNA, 1871 bp, Oryza sativa
  Clone ID: TF_OsC165344_1
ggaaccccccactcaacggaataagcttgggccgctgggggcgctgctgcacgggccgcagctgccgccgttcctgtccaagacgtacgacctggtgtgcgagcccggagctggacggggtcatctcctggggccacccgcggcaacagctttcctcgcctgggacccccccgccttctcgcgcgacgtgctcccccaccactgcaagcacaacaacttctccagcttcgcccggaagctccccacctatggttttcgcaagcatcatcctgctcgttgggagttatggaccacaacaccgaccctcctccgaccaccatggtggacgccgcggcggcgctgctgctggagcccaagctggaggggtacgacgacgacggcggcggcgagccgctgcagccggccccgttcgtctctccgctggaccagctgatgcagccgccgcggccgctggaggcgctgctgcaggggccgcatctgccgccgttcctgtccaagacgtacgacctggtgtgcgagccggagctggacgggggtcatctcctggggcccacgccggctacagcgtcgtcgtccgggacacctccgccttcgcgcggaacctcacgtctcacccgacctagtactacagcgtctccaccagcgtaacaacgtttaccgcctagtctgtccgctaagcacatactgagaaaaagaagattggtcatgatgaaatcccaggacatagcaaacattggttgatgaagattgtacgtcgcaggtactcaccaacacaacaaagtggccttcagcatggatcttcagttgaatccggtttagaccctgaactcaacacactgagaagggagaagagtgcattgcttcaggaggtgaccaggctgaagcaagagcaccttcagacaattgaacaaatgagcacgctgaatcagaggctagaatcagcggaagatcggcagaaacagatggtctctttcttggccaagctcctccagaacccaactttcctgaggcaacttaagatgcacagacagcaaaaggaaatcgactccaccagagtgaaaaggaaattcctcaagcatgtaccacatggcaacattgactcaggtgagtccagctcacaacacactggagagagcaatttagatttctcccctacgtccctggaccttccagccacgcacagtgacatcttagaccttcagaattttcttttggaagatggggacctcaatcttgccatgctgccagagaacataggacttgatggaatcgaagcaccagacgacatcggggcgttggttcagggatttgacacacaggaggaacttgagcttggtagcggagttgagctactggaaatacctccagcttctggtcctcgtggccaagatcccacgattggcagatccaagggaaagaatgtattgtctccaggattggatgctacctcttctgaagctgattgcctcggatcattttctgacaatatggggatgctttctgactccatgttacaaacagcgggtaaattgatggatgcagatgatgacgagcgaatttggggcgtcgatgcttcgtcggctttacaaagttcttgcagtggcactagtcagcaagcatatggtagtcttgttagtgatccctatctgatggagatggctaataagcctgaaaaattctgggagctcgattttcaggcactggatgatggagatctgcagctggacaatcctgagaaggtgctggacacaggcgtggttgctcaggctcaggcgcttgaattgggtggcctgactcaggcaaccgaattaaagaaggcatgcttttttctcaggctcatcactcagggcaccaaccaaacaggcccttag

SEQ ID NO: 21689 - DNA, 297 bp, Oryza sativa
  Clone ID: TF_LIB3433-009-Q6-K1-C9
gtttgtctcattaaaatctacagggcttcagaaaggtcgatcctgataggtgggagtttgcgaaatgagggttttctcaggggccaaaggcatctcctgaaaacgataaagagaaggaagcccccgtccaatgcacctccgtcacaacaacagtccctcacatcttgtctggaagttggtgagtttggattcgaggaagaaattgacaggctgaagcgtgataagaacatcttgatcacagaggtagtaaagctaaggcaggagcagcaggccactaaagatcatgtgaaagccatg

SEQ ID NO: 21690 - DNA, 561 bp, Oryza sativa
  Clone ID: TF_LIB3599-044-Q1-K1-G1
cccacgcgtccggtgggggaaagggaacaacagcttcgtcgtcgccgaccccttcgtcttctcccagaccctgctccccgcccacttcaagcacaacaacttctccagcttcgtccgccagctcaacacctatgtcagtctcgtcactcccagttctatttcatcgtctcatcatactccccccctctctgcacttcacatcatgctgccatggattctcagtggtacccaactcaaagtgagttctgaggggcttcggccatggcccatggatctgagctacatggttcttgagttcgtgtgtgcgtgtgttttgggagattctttggaagatgagataaaaaattgttgtggtggttggcatgttgattttgtagacttggagagacaggaggtgagaggtgaggacaacagagtttgggacccatcatttattggtgtagccttaaattgtacatatgcgctgttgtaaattcagctagctgtacatcttggtgtactaaaatctggtggacaaagccaagaatagaaatcattccatgtctgatgttcttttttccc

SEQ ID NO: 21691 - DNA, 1685 bp, Oryza sativa
  Clone ID: TF_OsC98500_1
atggaagttgccgccggcgcccgcggcggcggggccggcggaggagggggaggccccgcgccgttcctgctcaagacgtacgagatggtggacgacccgtcgacggacgcggtggtgtcgtggagcgacgcctccgacgcgagcttcgtcgtctggaaccacccggagttcgccgcccgcctgctgcccgcctacttcaagcacagcaacttctccagtttcatccgccagctcaacacctacatatctttattggaaaatgattcttcaacaatgttttgtctaactactaagaagttggtattgcaaggattccgtaaaatagatccagagcgatgggaatttgccaatgagtacttcatcaagggacaaaagcacctgctgaagaatatccacaggcgtaagcctatccacagccacagccatccaccaggtgctctgcccgataatgagcgtgcaatatttgaggatgagatcgaacggctttcacgagagaaatccaacctccaggctgacctctggaaatccaagcagcagcagtcgggaacgatgaaccagattgaagatcttgagcgacgagtgcttggcatggagcagcgacagaccaagatgattgccttcttgcagcaagctagtaagaaccctcagtttgtcaacaagcttgttaagatggcagaagcatcttcgattttcacggatgctttcaataagaagagaaggttacctggtttggattacagtatcgagaacacagaaaccacaagcttttatgatgaccatagcagcacttctaagcaagaaacaggcaatcttttaaatcagcacttctctgataagcttaggttgggactttgtcctgccatgacagagagcaatatcatcacgctaagcacgcaaagctcaaacgaagataacagaagccctcatggtaaacatccagagtgtgacatgatggggagggaatgtctcccgttggtgccgcagatgatggaactctccgataccggcacatctatctgcccctccaagagctcttgctttgcaccacctataagtgatgaaggcctcttaacatgccatctgagtctaactcttgcatcatgctcgatggatgttgacaaaagccaaggcctcaatgcaaatgggaccactatagacaacccaactgaggcagcaacagctaccatggaaaaggatgacaccattgacagaagcttcgatgacaaccaaaagaaatcagctgattctcgtacagcagatgccacaacaccacgagcggatgcacgagtagccagtgaggctcctgcagccccggctgcagtggtgaatgacaagttctgggagcagttcctaacagagcgacctggctgctctgaaactgaagaagcaagctctggcctaagaacagatacttccagggagcaaatggagaacaggcaggcatatgatcactcacggaatgacagagaagacgtggaacaactgaaactctgaatttactatagaattatacaatttacaagaagggatacaggcgtacagtgtaagatgtttagaatcaggaacctgctgttaaacatgacagatcaatgggtgtacaacatcacacaggtgtacatattttttttccctgaatgtttcggagggttaagattaatagttcgattaaccacaccagttgttgt

SEQ ID NO: 21692 - DNA, 698 bp, Oryza sativa
  Clone ID: TF_OsC255623_1
cgggcggctccccggcgggccggggcccttccctccactgcactagcaccactgcaactactagtatagcaagaagggtgatgccgacgacgacgacggcgcggggcggtggcggggtggcgccgttcgtggcgaagacgtaccggatggtggacgacccggccaccgacggcgtcatcgcctggggcagggacagcaacagcttcgtcgtcgccgaccccttcgccttctcccagaccctcctccccgcccacttcaagcactccaacttctccagcttcgtccgccagctcaacacctacgggtttcgcaaggttgatccggacaggtgggagttcgcgcacgtgtcgttcctgcgcggccagacgcacctgctgcgccggatcgtgcgacggagcagcggcggagggggagcgaagaggaaggaggaggccggcggttgcggcggcggaggggaggcggccgccggggacgtcgacgaggagagcgccgtggtggccatggaggtggcgcggctgaggcgggagcagcgggagatcgagggccgcgtcgccgcgatgtggcgccgcgtgcaggagacggagcgccgccccaagcagatgctcgccttcctcgtcaaggtcgtcggcgacccgcagttagtcactatatttcgtgtactagcatatatttcacctagcagtggttttctaagtatc

SEQ ID NO: 21693 - DNA, 868 bp, Oryza sativa
  Clone ID: TF_OsC278100_1
aacaatcttagcgaggaaaaagcgagcgcttttttcttatcctgttccgcgggcgcgctggcgcgaccgaacctgggagtgatacttgcgaattacacgatcggttgtggcactatgaatgggcggcgagtgcaaggtccaccagctccaggccgccggcgacgggggcccaggcgccgtcgcgccgttcgtggcgaagacgttccacatggtgagcgacccgtcgacgaacgccgtcgtgcgctggggaggcgccggcaacacgttcctcgtgctcgaccccgccgccttctccgacttcctcctcccctcctacttcaagcaccgcaacttcgccagcttcgtccggcagctcaacacctacggattccgcaaggtggatccggacaggtgggagttcgcgcacgagtcgttcctgcgggggcaggcgcagctgctgccgcggatcgtgcgcaagaagaagaagggcggggcggcgccggggtgcagggagctgtgcgaggaaggggaggaggtgcggggcaccatcgaggcggtgcagcggctgcgggaggagcagaggggcatggaggaggagctccaggccatggaccagaggctgcgcgccgccgagagccgcccgggccagatgatggcgttcctcgccaagctcgccgacgaaccgggcgtcgtgctgcgcgccatgctcgccaagaaggaggagctggccgcggccggcaacaacgggtccgatccctgcaagaggcggcggatcggggccgacacggggcgcggcggcgtggcgaccggcggcgacgcggccgagatggcgcagagcagaggcaccgtgccgttcccgttctctgttcttggccaagtgttctactag

SEQ ID NO: 21694 - DNA, 1338 bp, Oryza sativa
  unsure (1)..(1338): unsure at all n locations
  Clone ID: TF_OsC108229_1
atgggctctaagaagcggtcgcctcagcatccggccgccgcggcgccccctcccgccgtcggcggcggcggcggcggcgaggtctccggcgatggtggcgcctcgacggcgaacgggccggtggtgccgaagccgtcggaggtggcgccgttcctgacgaaggtgtacgacatggtctcggaccccgcgaccgacaacgttatctcgtgggccgagggcggcggcagcttcgtgatctgggactcgcacgccttcgagcgcgacctccacaggcacttcaagcacagcaatttcaccagcttcatacgccagctcaacacctatggatttcgtaaagttcaccctgatagatgggagtgggccaatgaaggttttattatgggccaaaaacatcttctgaagaccattaagaggaggaagaagtcttctcaggaatcacctagcgagatacagaaggcgcctgtcaaaactgcacctggtactgaaaatattgagataggaaaatatggtggccttgaaaaggaggttgaaacccttaagagggataaagctcttctcatgcagcagcttgtagatctcaggcactaccagcaaacatctaaccttgaagtgcagaatttaattgaacggcttcaagtaatggaacagaaccagcagcagatgatggcacttctagcaatcgttgtccagaatcctagttttctcaaccagcttgtgcagcaacagcagcagcagcgcagatccaactggtggagtcctgatggaagcaagaaaaggagatttcatgctcttgagcagggccctgtaactgatcaggagacctctggccgtggggcacatattgttgaatatctcccacctgtcccagaaacatcaggtcaagtaaatccagtggaaggagccatttgttcggccaactcacaaccagttccaagtcctgcagttgccacacccatggacatgcaaacgtctaacgttgctgatactctcggttcatctgaggagcctttcgctgataactctactctacatgaatgggatgataacgacatgcagcttctgtttgatgataacctagacccaatacttccaccatttgagaatgatggtcaaatgggccctcctttgagtgttcaagattatgattttccgcagttagagcaggattgtctgatggaagcacaatataactccaacaatcctcaatatggtaatgactaattactgtataccctatgtttttgttcatcattttgtggaaaacaagcgtgatgtcattttagttaactgtggagtttctangtgcatgtttcatgccaaaaaaaaaaaaaaaaaaaa

SEQ ID NO: 21695 - DNA, 1952 bp, Oryza sativa
  unsure (1)..(1952): unsure at all n locations
  Clone ID: TF_OsC8038_3
atggcggagcagggggcgggcgaggcggatgcgggcggcggggagccgccgccggcggcggtgatgacggcggcggcggaggcgttggcggggcagaggtcgctgccgacgccgttcctgacgaagacgtaccagctggtggaggacccggcggtggacgacgtgatctcgtggaacgaggacgggtcgacgttcgtggtgtggcggccggcggagttcgcgcgggacctcctccccaagtacttcaagcacaacaacttctccagcttcgtgcgccagctcaacacctatggatttaggaagatcgtgccggaccggtgggagttcgccaacgactgcttccggcgaggggagaagcgtttgttgtgtgatatacaccgccggaaggtggtggcggcggctgccgcggcgccgccgccgccgtcgccggggatggcgacggcagctgccgcggtggcttcgggagctgtgacggtggccgcggcgccgatacctatggcgctgccggtgacgcgggcgggctcgccggcgcactcctcggaggagcaggtgctgtcgtcaaactctgggtcgggggaggagcaccggcaagcgtctgggtccggctctgcgcccggcggcggcggcggcggctccgcgtccggcggcgacatgggcgaggagaacgagcggctccggcgggagaacgcgcggctgacgcgggagctcggccacatgaagaagctctgtaacaacatcctcctcctcatgtccaagtacgccgccacccagcacgtggagggctccgcggggatatcctccatagcgaactgctccggcgagtcgtcggaggccgttcccccgccgccgcctctccccccggcgatactcgatctaatgccctcgtgccccgccctggccaccgccgccgccgctgcggggctcgccatagacggcgagcccgacccgagcgcgcggctgttcggcgtctccatcggcctgaagcggacgcgagacgacgccgccgccgccgccgacgaagacggcggcggcgaggatcaggccgagcacggcggcgcggacgtgaagccggaggcggcggatccgcatcccgccggcggcggcggcggaagcagcacggaggcgtcgccggagtcgcacccgtggcccatataccggccaacccccatgtaccacgcggtcaggcccacttgcaacgggccggacagggccgggtccgaccaagacgggtccagctccagcgtaagatccatcaggatgccggtgcacagtttggtcagttttacaagtgttttaggtgttagtgccaaaaatggtggtgacatagggcggaagcactagtaccagctgtgcagaaagtcctcctattcctcaaatgcattctcgtgtagatacacgagcgaaggtttctgaaatagatgttaattcagaacctgctgttacagaaactggtccatcaagagatcaancctgctgaagagcctcctgctgtcacacctggtgcaaacgatggcttctggcagcagtttcttaccgagcagcctggatcatcagatgcacatcaggaggctcaatcagaacggcgagatggaggaaacaaggtggatgagatgaaatcaggagatcgacaacatctttggtggggcaaaaggaacgttgagcagataacagaaaaacttggacttctcacctcaacggagaaaacctgacataattttgtttttctttttgtagatgaaaaactattaattcaggaacgctgacattggtgccttcctcagtgagatatgttgactaacatctatttcgcagtgtaccgtattttttccatcatgtaccgtaatgtatcatagtgccatacattcatctttggtccattgacactttctgatatcattgtgcgtgatttctaaaatattctcaagtttggttaaatgttacagattctattt

SEQ ID NO: 21696 - DNA, 1405 bp, Oryza sativa
  Clone ID: TF_OsC68408_1
ttttttttttttttttttttgaagcaaatttttacatcattacaacgcacaactgcatttagttagactgttatatgtacatacagcaccctcaagtccactgtcaaagtaccatacattcagatccaaaactaattccacaaagctgaacagaatacgatggtaattattgcggcaatagtatgtacagctgatgctaccataagatcatcaccatgggggaggagacctactcaaattgatcatcctcaaagcggataagtataatgacaagcttgattaacaagtactcaagggtcgttggagctgcagcaagatcagaccagagctactactgtggcgatttggtgctgcttgagttgaggtagcccatcttttgagacagcaagttcatatcatctatagcggggttcctggtatcctcatcgagcccaccctcgtgcagcaggtcctcccagaaatcctcatttaactctccgttagatggcttgattttcccgtgttcagagctactggaagcaacatcttgttgcgccttgcctccattggcctcaacagatgaactttcaagatctgatggaacaccattgaaaagtgaatccactggatcatgtggttcaaacattacctgtgacacttgctcggggctagaaccggtacccatgctatcaagttcaggtccctggtcaatgcggcgccttcttttctttgagacgaactcttcaagctccttcctcatctcactctgggagaacagctggcgtatgaactcaggattatgcataactcgtgacaagaatgccatcatgtgctgttgcttttgctcagtaccttgtagcttctgttccatagcttgcaggtctgactttgtgttttgctgctcctgcctcagcttcaccacttcagccatcaacagatgtttgtccctcttcaactgatcaatctctccctcatatccgaagtgccctacctcaaggaatgagccaagagattgctgacttggagatgaattcggaggtttccgacgctttatgcttttaaggagatgcttctgtcctctcagaaaaccctcatttgcaaattcccacttgtcaggatccaccttcctgaagccataggtattgagctgccggacgaagctggagaagttgttgtgcttgaagtacctcggcagcagcacgttcccaaagaggtgaggatcccacaccacgaagctgttgttggtggcgctccacgacacgacggcgtccgtggtcgggtcatccaccatgtcgtacgtcttggtgaggaacggcggtgggccgccgtcggcgagcccgtccatcggcctcggcggctggccattcgccacgcccgtcgacggcccgctctccaccttcaccgggttcaccactcggtagttcat

SEQ ID NO: 21697 - DNA, 1983 bp, Oryza sativa
  Clone ID: TF_OsC561_1
cgccctgcacccgttgccaccaccaccgccttctccgccgcgccgcctcctctcgcgtctcccgctcgtgcagggcgcgcgtcgtcgggcgagctgctgccgtctccgtggccgtggctgatcagaactagttggcgttcgatcggaaagtcgctgtcttttggcgactcggtgagaatttgcgccgcggttcaatgtgaaaaattttggcccgtggcgagttggatttggcgccgagtccattcaggtggttaagacttgttcgtgggagagcgaagctgcgcgcgttaagaccgggctccgttcttgcatcgtgcagagcagctgctggtttgagaattgagaggcgcggttgacatggagagttccaacctgggcggcggcggcggcggaggcggcggcggtgggccgccgccgttcttgatcaagacgtacgagatggtggaggacgcggcgaccaaccacgtcgtgtcgtggggccccggcggcgccagcttcgtcgtgtggaacccgctcgacttctcccgtgacctgttgcccaagtacttcaagcacaacaacttctccagcttcatcaggcagctcaacacctacggtttccgaaaaatcgatcctgagagatgggagttcgcaaacgaggatttcataagagggcacacgcaccttctgaagaacatccatcgacgcaagcccgtgcacagccactccctccagaaccagataaacggaccactcgccgaatcggagaggcgcgagctcgaagaagagatcaaccggctcaagtacgagaagagcatcctcgtcgcggacctccagaggcagaaccagcagcagtacgtgatcaactggcagatgcaggcgatggaaggcaggctagtggcgatggagcaacggcagaagaacatcgtggcctccctgtgcgagatgctgcagagacgcggtggcgccgtgtcgagctcgctgctggagtccgaccatttcagcaagaagaggagggtcccgaagatggatctcttcgtcgacgattgcgcggcgggcgaagaacagaaggtgttccagttccagggaattgggacggatgcaccggccatgcctcccgtgcttcctgtgaccaatggtgaggcttttgacagggttgagctgagcctggtctccctggagaaactcttccagagagcaaatgatgcttgcacagctgctgaagaaatgtactcccatggtcatggtggtactgaacccagcactgctatatgtcctgaagagatgaacactgctccaatggagacaggcatcgatcttcagttaccagctagcctccatcccagctcacccaacacagggaatgcccatctccatttatccactgaactcacagagtctccaggttttgtgcagagtccagagctgccaatggcagagattcgtgaagatatccatgtgacaagatacccaacacaagctgatgtaaattctgagattgcctcctccactgatacttcacaagatggcacgtcagaaactgaagcttcgcatggaccgaccaacgatgtgttttgggagcggttcctcacagagactccacggtcatgtttggatgagtcagaaagacaagagtctcccaaggacgatgtaaaagcagaattaggctgcaatggcttccatcaccgggagaaggttgatcagatcaccgagcaaatggggcaccttgcttcagccgagcagactctgcatacctgatgcagtaataccatttgcgcggattcatagttcgtgtgtaaattagcgaagatgtaaattatagcttagatcggattagaggcttgcgtgttactttacagatttcaaccttttattagattacaataggtctttcacaatttatgattctgttctatccgctgactactgtgcataaattttttttagtagaccatatccatttttgtactccattgcccttctaagattcctcgttaaaatctc

SEQ ID NO: 21698 - DNA, 1345 bp, Oryza sativa
  Clone ID: TF_OsC84754_1
gcaaaaaattgtcaatatataccattaagaatgatggctcaactttacatcaccagacatatactacacagcacgccggatccgcaatataaattggacctatcgctataaaactatcactataatacaattacaccgatatacaataagagctatcacaaaaatggttggacaaatcggagccacttgatctacttttggctactattgcttagataacccagcttctgcgctaatgcatcgacatatctaggtcttcttcgctccatccctggaatcccagcatcatctcttgctccttcattcagaagctcctcccagaagtcgtcggttaactcggtttcgttgctagcctgatttcgtggctgatttcgagtcctgttgacatcctgcttgcccttcccaagaccctggatgttcagtgctaaattctccagttcagactttgcaggctcatcattcagttcagcaaatggccttggatcaaacagcaatgtcgactcgagttgatcgccctggctgacctccccggggttgagaaatggcactatgtctatcgacctcgtcctcttcttcgagaatgtgtcctcgagccccttcattttatcctgctggtgaatcaactggtgaaagaagtcagggttctgcattgctcttgccaagaaacccatcatctggacctgcttctgctccgcatgttgcagcctctcttccatggctcgcatattggctttcgtgctttgctgcttgtgccttagtttcacaacctccgcgagtaagatgttcttgtcacgctttagcctgtcgatctcttcatctaatccgaactgaccaacctcaaggcaggtgccaagtgcctgctgagatccagggagataagacaatggtctcctcctcttaatcatctttagaagatgcctctggcctctcaggaaaccatcattcgcgaattcccatctgtcaggatcaatctttctgaaaccctgaaatctcaaactgtagaaatgtgatcgcttgttcaggtaattcgtccggaccaagaagtaggtgttgagctggcggacgaagctggagaaattgttgtgcttgaagaagcgtgggaggaagacggcggcgaagacgtgggggtcccagacgacgaagctgctgcccgcgcggccccacgagacgacgccgtcggtggccgggtcggccaccaggtcgaacgtcttggtcaggaacggcggcggcccgacctcgtgcagcccctccatgggcctcggcgcctccccctcctccggcgagctcggcggccactcctccttcaccatccccggcatcatcttctccattcctgcagcccggg

SEQ ID NO: 21699 - DNA, 1484 bp, Oryza sativa
  Clone ID: TF_OsC8038_8
atggagtgggaggaggagagcgaggcggcgcgtcagaaggcggcggcggcgtcggcgtcggtggtgcccgcgccgttcctgaccaagacgtaccagctcgtcgacgaccccgcgaccgaccacgtcgtgtcgtgggaggacgacgacggcggcgagtccgcctccagcttcgtcgtgtggcggccaccggagttcgccagggacatcctccccaactacttcaagcacagcaacttctcctccttcgtccgccagctcaacacatatgggtttaggaaggtcgtgccggagaggtgggagttcgccaacgagttcttcaggaagggcgagaagcagctgctgtgcgagatccaccggcgtaagtccgcggcggcaacgtggccaccgttcccgccgccgccgccgcctttctttgccccgcgccatttcgcggccggtgccttcttccgccacggggatggcatgctccatggccgcttgggcgcgttggtgacgacgacggagcggcgccattggtttgagagcgcggcgttgccggtggcgccgtcgtcgcggctgctctcgcagctggggccggtgatcgcaccggcgcgccgcgcggcggcgacgccggaggaggaggcgctgatgcaggagaaccaccggctgctacgcggcaacgcggcgctggtgcaggagctggcgcacatgcgcaagctctacagcgacatcatctacttcgtgcagaaccacgtgcgtcccgtggcgcccagcccggccgcggcggccgcgctgcacggcctcggcgttctacggccgccgccggcgggcgggaaggcgcccgcgtccgaggtgcgcggcgcctccggccggagcgccacgtccagtagctcgctcacggtggccgaagaccagcccacgctgctggctctgcggctgccgcggacgacggagaagatcatcaacgaggtgtccggcggcaacggcggcggcagcaccaagctgttcggcgtgcacctgagcagcgccgacgagcagacgtcatcaggcgcgagccgcaagagatcaccgccgcaagagcagcctcctacgtcgccggcgccgaagcggacgctggtggtggagcacagcgagctgagattgagcatcgtgtcgccaccgtaggaggatcaggccgagcacggcggcgcggacgtgaagccggaggcggcggatccgcatcccgccggcggcggcggcggaagcagcacggaggcgtcgccggagtcgcacccgtggcccatataccggccaacccccatgtaccacgcggacaggcccacttgcaacgggccggacagggccgggtccgaccaagacgggtccagctccaggtgagttggcccccccaaccctgtagaagcttttagacccctatattacttaattgcccctaccctacactattatacgcaactaattatgattagtacgtaattagcggcgaaataatattactaccacta

SEQ ID NO: 21700 - DNA, 1957 bp, Oryza sativa
  Clone ID: TF_OsC8038_2
atggcggcggatggcgtgctggccggaggcggtgggtgccgcgaccacgtcggcgcgacgacggcaagaggcgatgggcggcgcgacaatagccggcggcggcacgcgtgcgtcgacggctgggggcaggaccgcgcccgcacgaggggagacgacggccagcggcgctatgcgcagtgccgcggtggctggggagatatttggagatggggagggttgattaggaagcaaccagacaccacggtgtatccaggccagatctgcgcggccgccggcggcggcggtggcatggctgaccagaccgctgctgccgttgtcgtcggaggaggagcggcggcgacgatgggggagccatctccacctccgccggcgccggcagcggaggcggcgggggtgggggtggggcagcagcagaggacggtgccgacgccgttcctgaccaagacgtaccagctggtggatgacccggcggtcgacgacgtcatctcctggaacgacgacggctccaccttcgtcgtgtggcgccccgccgagttcgcccgcgacctcctccccaagtacttcaagcacaacaacttctccagcttcgtccgccagctcaacacctacggatttaggaagattgtcccggacaggtgggagttcgccaacgactgcttccgccgaggggaacggcggctgctctgcgagatacaccgccggaaggtgacgccgccggcgccagcggcgacgacggcggcggtcgcggccgcgatcccgatggcgctgccggtgacgacgacgcgggatggctccccggtgctgtccggcgaggagcaggtcatatcctccagctcgtcccccgagcccccgctcgtgctgccgcaggcgccgtccggctccggctccggcggcgtcgcgtccggcgacgtgggggacgagaacgagcggctgcggcgggagaacgcgcagctcgcgcgggagctcagccagatgaggaagctctgcaacaacatcctcctcctcatgtccaagtacgcctccacccagcagctcgacgccgccaacgcctcctccgccgccgggaacaacaacaacaacaactgctccggcgaatccgccgaggcggccacgccgctcccgctccccgccgtcctcgacctcatgccttcctgccccggcgccgcctccgccgccgcgcccgtatcagacaacgaggagggaatgatgagcgcgaagctcttcggcgtctccatcggccggaagcgaatgcggcacgacggcggcggcgacgacgaccacgcggcgacggtgaaggcggagccgatggacgggcggccgcacggcaaggacgaacaatcggcggagacgcaggcctggcccatttaccggcccaggcccgtttaccagcccatccgggcctgcaacggatacgagtacgaccgagccggcagtgaccaagacggtcacgttcagttgcgtacttgcgtcaacaacctcctggtcaccggcgccggcaccctcgacgctggacgagagtacgagaccaactccctacccaggccacgacgcgcaaagaacagcaacgacgtgccagggatgcccaactcgttgggccaagcacccagcccggtcgcctgacatcacctacccttatgtctatgttatgttctatcattttgctgaaacaatactgaaacgtcaccctatatgtgggaggatactaatcttccacctatgaaacacggtttacccgaggggtttacctgcttgtatctaggtttggcaggcgtaagaattgatcaatggtaacttgtcaaatctgtatgatagctactttgtgttgtagctactgatagctttttttttttgttcttgcctgctctatctgattgcaactaacttctggtagtactggcagtctgccacactgtattgattccaaaattaagtaactttgactgtttcagattctggc

SEQ ID NO: 21701 - DNA, 1339 bp, Oryza sativa
  Clone ID: TF_OsC106512_1
atggcgtcctcctcctcctcctcctccctctgccgactactcatccccaggccgaccacccgccgcttctccggaggaggaggggaggggggaatggcggcggcggcgccggtgaagcgggaggtgaagcccgaggcgggggaggggtggggcgggggtgatctgggggtggtgccgccgccgccgcggccgatggaggggctcggggaggcggggccggcgccgttcgtggcgaagacgtacgagatggtggcggacgcggccaccgacgcggtggtgtcgtgggggcccggcggctcgggggcctccttcgtggtgtgggacccgcacgcgctcgccgccggcgtgctcccgcgcttcttcaagcacgccaacttctcctccttcgttcgccagctcaacacctacgggttccgaaaggtcactccagatcggtgggagtttgcaaatgaagccttcttagctggtcagaagcatttgctgaaaaacatcaagaggaggcgtgtttccaagcctctcgtggattcacaactaagaaataaagcaagtgttgtttttggacagcctgaggctcctggtgaggttgtgagcttgaagagagaccgtgcagccctcagagctgaggtcatcatgcttaagcagcagtacaacgcctgtaaatctcagctcattgccatggaggagatggtccgcaacatcgagagaaggcaacagcagaccatcggcttctttgccaaggtactcaccaacccggctttcgtgcagcaggttctactcaactatgtgaataagaatggcctaagaggcgccgcgaaaagacaacggctgatggaaaacgaagaacagcatgctgattcgccattgaacaaaggtatggaagctgcatctgtgatggaagctgatgtttctccagggagcactggctgtggcacagttgggaaagtggagaccactccaatgtgcaatttccagaatattgagaatatgtgtgatgatgtctgggaagagctggacgccttacctgaaactggaatggagcaggaagaaaaggctgggattggctccttcgatgtcgaggagttcgtcggaaggccttgtggttgggttgatgactgcccataccttgtggagccgatgcagttcgtggaacactagaggcatgagaagaatacaatctgtccttagaatagtggaacgtgtttataacgtctgaatatctgtatatcaattacccacttcgatagaagtctgtactatgaatagcataagctcctggaacagagcttaaatataggaaacgaacactctcaggtaatgcaagccaggagtttgtaggatt

SEQ ID NO: 21702 - DNA, 745 bp, Oryza sativa
  unsure (1)..(745): unsure at all n locations
  Clone ID: TF_LIB4506-021-R1-K1-D9
ccacgcgtccggggggcgggtcgctgccgccgttcctgagcaagacgtacgagatggtggacgacccgtcgacggacgcggtggtggggtggacgcccgccggcaccagcttcgtcgtcgccaaccagcccgagttctgccgggatctgctccccaagtacttcaagcacaacaacttctccagcttcgtgcgacagctcaacacctatggctttaggaaagtagatccagaacaatgggaatttgcaaatgaggatttcataaaaggacagcggcaccggttgaaaaatatacatagacgcaaacctatattcagccattcatcacacagtcagggtgctggaccattaacagataatgaaaggaaagactatgaggaagaaatcgagaggctcaaatccgataatgcagcactgtcctcagagcttcaaaataatacgttgaagaaacttaatatggagaaacgaatgcaggctttggaagagaagctatttgttgtggaagatcagcagaggagtctgatatcatacgtcagagagattgtaaaggcaccaggatttctttctagctttgtacagcaacaagatcatcacagnaagaagaggagactgccaataccaatctccttccatgaggatgcaaatactcaggagaaccagatcatgccttgtgacttgaccaactcaccagctcagacattttacagagaatcatttgacaagatggaatcatcctttgaactcat

SEQ ID NO: 21703 - DNA, 1104 bp, Oryza sativa
  unsure (1)..(1104): unsure at all n locations
  Clone ID: TF_OsC211574_1
gggcacgagggcgcagttcgcttcaccgttcccggagttccacatcggcaacctgcagccgaatctgatgctctacgccggcatccgcctcccgcccgccgatcgcgccgcccccgctcctcgcccgccgagaatcatcatcagcaccgacctgacgattggcagcccgggtaaacccgacgacgccgcgtgctctccctcatccggcggcgagaagatcgacgacaccaagccgcgggggtttctcctctttggacaggcaattctaaccgaggagcagatcaagaacggcaactccgatggtcgtccggcctcgccgaactgggacgccgagaaggcgcctaacacctcggaaggctccgactccggcgtcacccagggcagccccaccaagaacaccacgccgtcgtggagcctaccgtattttggaggcaacaacatcagccgcgcatccgagtacgagctgaatcccgggcagtgcaaggtgttcgtcgagtcggaaaccgtcggccggagcctcgatctctcggcgctgagctcgttcgaggagctgtacgcctgcctgtctgatatgttcagcattggcagcgatgaactgaggagccatctggtgtaccgcagccccgccggcgaagtcaagcacgccggcgacgagccattctgcgcgttcgtgaaatcggcgcgtaagcttaggatactgacagatgctggcagtgacaacctgggagattagaagtaagtaataaatcagcccgaataacttagggcgctactcctagtcttttagaagncaaaaataagccgagagctgcatgcacgtacagctgcatgagctgcggtttctccttgctccagtccagtctagagatttttattcagggtaaagctgatgcagtcttcagttaattaggtgttttttagtcctttttacagctttctcgctaggggtttcaggtaacaactactagcgcaaagtgcagacagaatgtagtctttgcaccttggtcatcaaatcaaatgtactggtacttcttttattctcattcggcggatattgagccttaatttgtttcacgaaaaaaaaaaaaaaaaaaaaaaaaaaaa

SEQ ID NO: 21704 - DNA, 552 bp, Oryza sativa; identical to SEQ ID NO: 12161
  Clone ID: TF_OsC109_3

SEQ ID NO: 21705 - DNA, 443 bp, Oryza sativa
  Clone ID: TF_uC-osflcyp128d03a1
accataaagttgctgcaggcatacacacataatacattagttaacacagagttggtcgccagcaagaatattgtaacatgcatgatctagctggatggaacttccagtcacgaaagtaaatcatctcagttttttcacagcgccaataagttagaacaagatgtgaaaaaaactgagcaaaagaaaaaaaatcgatgtagtagctaatttccaatgttacacatcagggcgcaggcagtgggttggccaccagttcggtcgttccgcaggaacatcatgaccgtccagtcagtgaagagcaagaaggaagaggaagctgacaagcagcagcagcagcccgctgccaatgccagcggcagcaacagctctgcctttgtgaaggtcagcatggacggggcaccctacctgcgcagggggacctgaagatgtcaacagctacagga

SEQ ID NO: 21706 - DNA, 726 bp, Oryza sativa
  Clone ID: TF_OsC6551_1
tagtggatcccccgggctgcatacaaacactacagtttgggagaagagaatccatgaagagctcttcagttgcaccaaggctgaaacaggagagacaagatgactgtaagtttcaggaaggtgatgtgaacagccttgagcttcggcttggcatatcttccgacaatgaccagatcagtggtggtggtgctgctagtccatggcttggtgtgttagtgcacccttggagcctggctgcaaggcaagggaaggcagccttggagcaagctcaccagaggcctaatgaatgtgctgtccaaagagaaaaccgcgcggcttcatcagctcagctggtgggatggccaccggtgcgcgcattccgcaagaacctgtccaccccaaaacctgcagatgcagatgacctgatgaacaaggtgaagctctgctctgatgagggccatggctccagatgtgcagcccaagagaggaggtcatcatcaaccatgtttgtgaaggtgaacctggagggctatgctgtcggaaggaagatcgacctgaaggcgcaccgcagctatgactctctgtcccaggctctgcagagcatgttccatggcttcttgtcagatggcattgcaactaagagacaatgagctgcagcagatggaggagggcagcaagaagaggtatgtgctcgtgtatgaggataatgagggagaccgcatgctcgtcggcgacgtcccatgggag

SEQ ID NO: 21707 - DNA, 507 bp, Oryza sativa
  Clone ID: TF_LIB4370-026-R1-N1-D11
caacaagtacacgcagctgatcgttgttgatgatgatgaagaaggatacaggagaacagtaggatacctgtgcagattgagctttcttgttgaaatctctactgcagagttggggacattactagttgaacggaaattactagggctgctactactgctactagttgatacaaaatcataagctcattcaagctgtacatactacggcgatgctcccggttgtcctctttgctctctagctccctaagttgtcgctcccggcgtcggttagtatggtaagcctcctcgccaacttaatgaactcgctgaatggctcgtcgccggcgtgcctcacttcgccggtggcgccacggtagagcacacggctcctcagctccgcgctgtcgatgcagaacatctcggacagccggccgtagagctgctcgaacgaggccagcgacgagaggtcgaggttgcggccgaccgtgtcggactcgatgaaacacctgtgcacgtgcccagggctcc

SEQ ID NO: 21708 - DNA, 480 bp, Oryza sativa
  Clone ID: TF_jC-osroLIB3475019d07a1
aaaaaaatgtgataagattcactttggtaggccataacacccatatctgaactccccgtacaggatatgctcagtattcagtaccatcctgtgcatatgtggcggtgtattatacagatgcatgcacgtgctgatcacagcgaggtgactctacggtgtacactatactaacactactgtgcgctggccacagatgtagtttgacacgaaatgcaaggtgattgatgacaacagctacgagatttcattcgtcatgcttatgaaattgctgaaacactacacatttatgatgagagaaacgtgaacaaaataatcccgttcacgtacaattttattcgaagtagtaaagactagtactagtagcttaatttgcagtcagttacaccagtatcttgagccgtttcaccgacttggcaaaggcctcccatggcacgtctccgacctgcatccagtctccttccccatcctcgtaggtgacag

SEQ ID NO: 21709 - DNA, 290 bp, Oryza sativa
  Clone ID: TF_LIB3479-005-Q6-K1-H6
cttccggcatgaacacagatggctacgcactccatctgaaggctatcacggaggcatacctgaggccacagcaggaccagggattgctgtacctcaaggtcagcatggatggcagcgccgtacctgaggaacattgacctcaagacttacacgaactacaaggacctgtctactgggcttgacaagatgttcagaggcttaagtactggcacggatggcttatctgactaccgtaaggatggcgaatatgtatctgacttatgacgacatcgatgcagattgcatgctcg

SEQ ID NO: 21710 - DNA, 1100 bp, Oryza sativa
  unsure (1)..(1100): unsure at all n locations
  Clone ID: TF_OsC185566_1
atgcctcggcgaactgccgacgacgacgacgacggcgccggcgcaatccacggcgtcttccggctgccgaccgccggcgacggcggcgaagcggcggagtctgatcagcacagatcttcgcctcgggctcaccctctcctccgtcgtccacatcgacggcaacaacccttctaccccaaggcaagatttcgatctctgatcattctgcacacctactgctttaatttcagagaaattttaagatacttgagaaggagttccctcacgacggcgacagtgacagctgatcgaggcggcggcggcggcggccatggacggcgacggtcactgttcgtgaaggtgtacatggagggcgtccccatcggcaggaagctggacctgctgccgctggacggctacaaaggtctcgtcgcacggctcgcctccatgttcagagcatccatcacctatcatcattgccatcgacagttcgccgtcgtcgggatgaagacgaacaaggttcatcatgttctgacatacgaagaccaggagggagactggatgatggctggagacgtgccatgggagtatggcaagctagctcagctctgaccaccctaatttgtatatttatttagactgattatagtgattaaattggcatgagttttccnaaaccacgaaaccctgatatatttgtcttttttcttctgttgattgaattctcaaattatatcttttgaactaattatgggattcncccttaatgctngtgtgntgttttttggatgaggcaggctggttccctgaccaagcgtgaagagattgaggattcgcaagagcggatgacaagtactgctatagctgttgaataattgggttaaccacggatggtcaattaattcttccacgagttcttggatttcattcattcttactttgctcattttggtggaccaatttagatttgagatgattgttttcgggagcgaaaatttacctagtaaaagcatagtgatattgagccagaggatattgtcacaaatatattgtacacactagtaaaagaaaagaaacatatactatcgaaatacccttttacttctcaaaaaaaaaaaaaa

SEQ ID NO: 21711 - DNA, 1295 bp, Oryza sativa
  Clone ID: TF_OsC20595_1
ggtgttcgtccgtgtcctcttctccactccacacacgcacacgcacaagccaagcagcaagcagcggcgccgatgagaggaggagtagctgggcccaccgccggcgagccgccggggacggaggcggaggcggaggaggtggaggagagctcagctggggacgacgaggagctggagctcgggctcagccttggctccaagaaacagcagcagcagcagcatgcgccgtgccgaatcctgacggccagggacctgcagccggcggcggcgctgtcaccggactcctccgtgtcgtcgtcatcccccgcggcggcggcggcggcgggggggaagagggctgagggccccaccgccaccacctcgcctgggacggttgcttccggccatccacacagctttggagtggtgggatggccaccgatccgacagttcaggatgaacagcctgttcaatcaggctaaagaaaacacatctgaaaccgacaccaagaagaccgccaccaatgaatctgatgtgcagaaggacaaggaggagggcgaaaagaaaggacgggttgctggatgggtgaaggtgaacatggatggagaggtcattggaaggaaggtggatctcaatgcgcaccgctcatacaagacccttgcattagcccttgaactcatgttcacgaagccgtccattggcctttgcgcttctcataatacaaactcgctgaaactactagacaactctgccgaataccagctcacctacgaggacagggatggtgactggatgctcgttggagatgttccttgggaaatgtttgtcagctctgtgaagaggttgaggatcatgaggacatcagatgcgaatggtcttggtcagcgataccagggaattcacagaaccattgcttcaacaagaggcagatcctgagagcgtgtgacaaggaaaagagctataccgctggtgaagcttggagcgtgcttgatggttaattacttgtccagttaaaatagcagaaggctagtaagaaagagccacagggctcacccggttctgttatatttttgcctttgtggtgcctgtttttgtttgcactgtcgatctgcaagagcatatggtcgccttgctctgcttgcatgtacaagtatgtctttctagtagtttttatggtgtttgatgatgatccttgtgcctacctgattactactgactcttgcacagcctcacaaatctctatgaattagccctggagtttcattgattaaaaaaaaaaaaaaattcctaatatgtgtgatggactagttctctcc

SEQ ID NO: 21712 - DNA, 932 bp, Oryza sativa
  Clone ID: TF_OsC16890_1
tgatgctgagtgatcccgtccactagctggtgaattggagagacggatggagctcgagctcggcctcaggctcgcgctgccgtcgccgtcgccgtcgccggcgacggcgacggcggctgggagtgagcttgaccttctcaacagcgcgccggggtcctgccgcaagaggggcttcgaggaggcgctcggtgggttcaaaaccgacgacgacaacgacgacggcaatggccgcggcggtgacggcgattccgacggcgaaatgggcaacaagaggaggaagctggtggggtggccaccggtgaagtgcttgcaccggcggcgcgacggtggctgcggtggcggatatgtgaaggtgaagatggaggggttggccatcgggaggaagctggacttgtccatcctcggctcatacgctgagctgctcgacacgctccaccttatgttcccctccactaaccaagaggatgggcacgatcgtcgtcgacgtcacccatacgctgtcacctacgaggatggggaaggagactggatgcaggtcggagacgtgccatgggaggcctttgccaagtcggtgaaacggctcaagatactggtgtaactgactgcaaattaagctactagtactagtctttactacttcgaataaaattgtacgtgaacgggattattttgttcacgtttctctcatcaaaaaaaaaaaaaaaaaaaaaaaaaaaaaaaaaaaaaaaaaaaaaaaaaaaaaaaaaaaaaaaaaaaaaaaaaaaaaaaaaaaaaaaaaaaaaaaaaaaaaaaaaaaaaaaaaaaaaaaaagggggggggccgttttaaaggacccaattttacttccccgggtttgcaaggtaaaaatttttttatggggcccccaaaattaatttccggggccgcggtttaacaccggggggaggggaaaa

SEQ ID NO: 21713 - DNA, 1153 bp, Oryza sativa
  Clone ID: TF_OsC165755_1
atggcgtggaggagagggttcggccgggaggaggaggacgcggcggcggcgggggagagcggcctcgagctctgccttggcctccccgcctacttctcctcctcctcctcctccaagccatcggagggatcaaccgctgctcctgcttttgctctccgatccaatggaaccaatgcctccaagccaagcggggcagcggcggcggcgccggttgtggggtggccgccggtgcggtcgttccggcggaacctcgcctcgtcgtcgtcatcgtcgtccaagcaggcgccgccgccgccgtcgtcgtcgccgcagaacggcgacaaggcgagcaaagacggcggcgcggagaagggcatgttcgtgaagatcaacatggacggcgtcccgatcgggaggaaggtcgacctcgcggcgtacggcggctacgcccagctctccgccgccgtcgacaagctcttccgcggcctcctagccgctcagagcgctgccgctgacggcgaggccgacgcggccgccgccggagagatggtcggcggcggcgagtacacgctcgtctacgaggacgacgagggcgaccggatgctcgtcggcgacgttccctggcagatgttcatcgccaccgcgaagaggctgcgcgtgctcaagagctccgacctgccgccgccgtcgctgatgagggcggcagggagcaggaagagggcagcagctgacagctgaactaatcactgtcaatttcagctgctgctgccgatgatgatgaattgatcatggtgtggtgcttggattgagatcctctgcagtcaaatacacggtcctttgtcattgataggtgggcctagggattatcgggcctatatgttaatgataacgtcacgtgattttaactgcagaggattttgatctgtggtgcttggctttatggccattttgatgtctttgggctgcataattatatgtatacttacgagagatcatgacggtattagtggtcatgattagtagtacgatcgagtagcatggaacagtgttgttaattactagtagctgggtgattaagctaatctatggcacctttggtggtgtaattttggacgcaggcaggcctcgggcaaattagttatgtgttttgttaattaaaaaaaaaaaaaaaaaa

SEQ ID NO: 21714 - DNA, 1148 bp, Oryza sativa
  Clone ID: TF_OsC72583_1
cccacgcgtccggtcagaggtcacacagctcatcgtctcgagctacctagctggaagaagaagaggaagaagaggaggaggagctcgtcggagtttagttggtgagttcgccggagagatcgatcatggagaatctgaaggcgacggagctgaggctcgggctgccggggacggaggaggaggcggcgccgccgccgtcgacgcccagggccggaagcaagcgcgccctcgccggcgagcctgatcaggccaagatcaagcccgccgccgccgccaaggcgcaggtggtgggatggccgccggtgaggtcgtacaggaagagctgcctccagccgacgacgacgacgacgaagagcaagccgccgccggctgccgcggcggcggagacgcagcagaaggaggatgtcgccggcgccggtgggctgttcgtgaaggtgagcatggacggagctccatacctgaggaagatagacctcaaggtgtacaagggctaccgggagcttcgcgaggcactggaggccatgttcctctgcttctccggcggcgccgccgccgacgccgccgtcaacccgtccgacttcgccgtcacctacgaggacaaggacggcgacctcatgctcgtcggcgacgtcccattcgagatgttcattagtacgtgcaagaggttgaggatcatgaaggggtctgaagcaagaggcctaggagcaacaaggggttaaaaactgaacaacaacaagaagaaatcatcatcatgtgtgcatgagcaattcttttgttctttttgggttctccaagacatgcaatcatctcatctcctcattgcaaccttcaagaaagagagagagagaaagaaaaggaaagcaaaaaaaaaaaaagatgcagtgaaaaaaatatgtgaagcttaattggagtcatcagattgcaaagcatgcatgcatgtgtggatgtgtggctttaatttgtttttttcctcttaattaggtgttagaaaacacagaaggaatggaggttcgagttgagcctccatgtgtgtttgtacaaagcaaacatcttttttcttttacatgaatggttgattacttttgtaactggagggaagaagaatgcatgtatgcatgggctgtgtgtaaaaaaaaaaaaaaaaaaaa

SEQ ID NO: 21715 - DNA, 3513 bp, Oryza sativa
  Clone ID: TF_OsC109_1
ttccatccgttcctccgatcagttccaacttccaacctccgatcccaacgagaaaaccaatactgacacctctgcctcgcaacgcggcgcgcggccgtgcagcgatcgatcgaccggccggagtccggcatgcaaatgggagctgcctggcgcgggcggcggcggcggtgatgggcgcggcgagctctaggctggagaaggcgctgggcgagcagttccccgagggcgagcgctacttcggcctcgagaacttcggcaacacctgctactgcaacagcgtcctgcaggcactttacttttgtgttcctttccgtgagcaattactggaatactatgcaaattacaaaagcaccggagattccgaggacaatttgttgacttgtctagctgatcttttttcacagataactctagcgaagaaaaaaactggtgttcttgcaccaaaacgttttgttcaaagagtgaggaaacagaatgaattgttcagaagttatatgcaccaggatgcccatgagttctggaatttcttagtgaatgatattattgatattcttgaagaagattgtagaactgcaaatagttctcctgagactactcctgaagaggtctcaaatggggcagccaatgctttagcaaatggagccagagaaaggccattagttacattggtgcacaggacttttcagggtattttgaccaatgaaaccaaatgcctaatgtgtgatactatcacagcaaaagatgagacgttttttgatttgagcattgacgtggaacagaatagttcgctcacaagctgcctgaagagcttcttttccactgagattttaaatggcgaggataagttcttttgtgacaaatgcagcagtttgcaagaagcacacaagagaatgaagataaagaaggcgccacacgtattggtgatccacctgaagcgcttcaagtacgttgagcagcttagccggcataagcctctcccaccaccaccaccaccaccaccactacacactttgctcatctcatctccctccttccctcctataggaatccaaacccgccgcatcccggttcatgtcctgccgctccccatgtcgccgcccctcgagctcgactacataggcctctcgcctccgccgccgccgccctcctcctcctccgccgccgccgcccgcgcggacgacgtcgacctgaagggcaccgagctccgcctcggcctccctggctccgagtcgccggaccgccgccctgcggctattgccgctgccgctgccactgccaccacccttgagctgctgcccgccaagggtgccaagcgcgtgttccccgacgaggccgcgctgacgccgcccactgccgccgccgggaagggcaaggcggcgagggagggggaggaggtgggggctgaggaggaggacaagaaggtcgccgcgccgccgcagccggctgcgaaggctcaggtggtgggatggccaccaatccgcagctaccgcaagaacacgatggcaaccaaccagataaagagcaacaaggaggatgttgatgctaagcagggtcagggtttcctgtacgtcaaggttagcatggatggtgcaccatatctgaggaaggtggacctcaaaacttacaagaactacaaggacatgtctttgggtctcgagaaaatgttcattggcttcagcaccggtaaggaaggtgctgagaaccagaaagatggtgaatatgtgttaacctacgaagacaaggatggtgactggatgctggttggtgatgttccatgggagatgttcaccgactcttgccggaggctcagaatcatgaaaggctcagatgcaattggacttgccccaagagcaggggaaaagtccaagaacaggaactagaatggttattgcccacagttgaaagcaaaacggagatattaattaactgcagggcagttcctcaaaaccataatttaatagttttacaggatcaccatatgatctgtattacatggtttgctattctgcaagtaaaaaaaaaaactcttttaagactctgttatgttaggtttgcaacatctcctagagatgtacgctctattcggttgcacgtgtctttgtatgtgtagtatttccatccatgtaaatggttggtatgcagtgcgctaccgctattattgagcactcctacctatcctgcaagtgttgtcctgaaacgtatgttcccgtcacgtaagtgtttaaatgtttttaagaggttcctgaagatgtattatttatatgacttcatttggagcacacttatgctagtttgtttttgcaccacacctcaataaaaaaacaaaatttcgttgaaatttttaattcgccacagcttcaaagctccacccgatcagggaacctcccccccggcgcgctgcctccggcgtccgccgcagaaccgttgctcaacttcctccttgactctggcatcaggctctccggcagattcccgccggcgctctccgggctacgaatcctctactatctcagtctgcccctcaacgcgctccacggggagattccacctgctatcgccggaatgcagagccttacagccgtcgacttctccgacaacagtccctccggcgaggtcccggcgaccggccacttcgcctacttctacgccacgtcgttccccggtaaccccggcctctgcggcgccttccgctccccgtgccgctcccacgccgtcgccacgacgtccaccttcggctcccgctcgtcggcctcgaagctgctcctcgtgctcggcttcagcgctccgtctatcttgaacaccggggtggcggtaaaaagctgtcgtatcgagttgttttccctctggagcttaaacttatcaatactgttgacaactcagacttggaatattccctttttgctgtgctagttcatgttggaagtggaccaaatcatggccactatatcagcttagtgaagagccacaaccactggttgttcttcgacgacgagaatgttgagatgactgatgagtccatggtacagacattctttggctcagcacaagagttcagtggtaacactgataacggctacatactcttctatgaaagccttgctgaaaaaagttgatgtctctctcacatttttcgatagttatacagttatcattttattaccacactgcctgcacctgataatatagaagattcagtaattagaataagttgaatgaaagaccattcaactttagatattatatggtggaatctgcggtaggcaataaaagaaaatgacgagttttgtggaaggtgctatagcggcataaatccacaggtttcttgttttctgtttatttttctgttctttggtttatgcgtacaggttgtaccaatcctgggataatgtttatttaaagtttaccatgtataaaaatatgcttgtactggaagccgtatggcaatgagtaattttttttttgtttagtcggggtagtgctactggagctcatcgctgggcggaagccggtggg

SEQ ID NO: 21716 - DNA, 648 bp, Oryza sativa
  unsure (1)..(648): unsure at all n locations
  Clone ID: TF_OsC28546_1
gggcgcccttggttttggggtgggggcacaagaaatcactattatgatctgaggattgccctgcagttcagtacaatcatggcatcgtactgtacacacttttggcacctttgtcaagaaatctataacttatagaattacaccaatctgttatatctgaaaaagagtaggtcatttacaaaatatgcagtttgtccactgcacctgcaagatgctattttcccattatcataatcatctgtacaagccaaaaacaggtcatcccccagaaaggtgatggactatggtttgcacaattgatatgtctggaccctaatatcaacgatttgctacttcacagggtcagctccaatcatgtcatggggaagttctgacctcctcataaccctcaacctcttaacagtcgaaacaaataccttccatggtatgtccccagctaacattctgtctccatcattgtcttcatatactaaagtgtatacaccagttccatccaacaaccctgaaaatattttgtcttctgccccttgctctccactttcagcaaagaatagatctttttgagcttcaagaaaaccacggaacaactcttcaacagcagatgacagcttctgnnnagctgtcgtatattttgaaaggtctactttc

SEQ ID NO: 21717 - DNA, 801 bp, Oryza sativa; identical to SEQ ID NO: 12174
  Clone ID: TF_OsC109_10

SEQ ID NO: 21718 - DNA, 1119 bp, Oryza sativa
  Clone ID: TF_OsC157662_1
cagccaacgcatcgtcttccttcttcgtcgtcgatagatcggctctcgagctcacaaccacatcgatcgtctccggcaagccgacgtacgtacgactagctagctagagaggaagcgagaaatggaagccgccgtggggtacgccgccgacagcctcatcaaggccaccgagctcaggctgggcctgcctgggacagccgacgacctgccctccacgcccaggggcaagaagcgcgccgccgcggcggaggacaacaacgccaacgccgccgccgccgacgacgacgagcacgacgccgtcgaggccgcgccgccggtagccaaggctcaagtggtcgggtggccgccggtgaggtcgtacaggaagagctgcttccagcaacagtcagcggcggcgagcaagagcaaggccgccgtgagcagctgcaacaacaaagacgagcccatcaccaagaacgcggcgccggcgccggcagcctcctcggcggcggcggccaacggcgggtcgctggtgaaggtgagcatggacggggcgccgtacctgaggaagatcgacctgaggatgtacaagggctacagggagctccgcgaggccctggaggccatgttcgtctgcttctccggcgccgccgacggtgccaacccgtcggagttcgccatcacctaccaggacaaggacggcgacctcatgctcgtcggcgacgtccctttcgacatgttcaccagcacatgcaagaagttgaggatcatgaagagatctgaagccacagggctaggatcaccaaggcaaatgaagatctaatctaagagcgacaagagatcgatcgatgcattccatcaacttttcatttctttttattttttttcctcccaagccaaaaaggagatgagcttgggggcatcaaagcaaacacatggatgtgcttctgctttgtttccatctttaaaaactagtaggttttaattttatgattttagcagcacaaaggagatgtggagatttgggttcaactctccatgtgtatgtacaaacgaaacagttattatatattgattgttggttactactaaaaaaaaaaaaaaaaaaaaaaaaaaaaaaaaggggggggagcctcgtgc

SEQ ID NO: 21719 - DNA, 1289 bp, Oryza sativa
  Clone ID: TF_OsC125_1
cccacgcttccgtccacgcgtccgcacaactcttcccaatgtcgcctcccctcgagccgcacgactacatcggcctctccgctgcggcggcgtccccgacgccgagctcgtcgtcctgctcgtcctcgccgaacccaggcggcgaggcccgcggcccacgcctcacgctccgcctcggcctcccggggtcggagtcccccgagcgggaggtcgtcgccgcggggctcaccctcgggcctctgcccccgaccaccaccaaggcggcctccaagcgcgccttccccgactcctccccgcggcacggcgccagctccggctccgtcgccgccgccgcagcttgccaggacaaggcggcccccgccgccgctccgccggctgcaaaggcgcaggtggtgggatggccgcccgtgcggaactaccgaaagaacacgctggcggcgagcgcctccaagggcaaaggggaggacaagggcacggctgaagggggccctctctatgtcaaggtgagcatggatggagccccctacctcaggaaggtcgacctcaagatgtattctagctatgaggacctctccatggctctcgagaagatgttcagctgcttcatcactggtcaaagcggtttgcgtaaatcatcaaacagagataggcttactaatggttcaaaggctgatgccctccaagaccaagagtatgtccttacatatgaagataaggatgctgactggatgcttgttggtgatcttccttgggatttgtttaccactatctgccggaaattgaaaatcatgagaggatctgatgctgctggaatagctccaagatcaatagagcagtcagggcagagcagataagattaaccttcgtccggacgagaaaggcaactgatctagcagctttggaattgttcatcgcaagtatcccaaatatctcaatgtctgtgtagtttaatgtgttcatcagacctgtgcattgtatgtctgtaatttgttcctttcagatcgtgcaattgtgcgttgccccctcttttctttgcattgaaggtcaagtcgggctcttgtccgcttatttctctaaatcctagtcagttcaaaaattatccatcatgacacatgaactgatggtggataatatggcaagaagcttttctaatcattcaagcttgaacctcttgtgtgttctactactatattacatgaaagaaaatgtctaatgtctatatgttaatctccaaaaaaaaaaaaaaaaaaaaaaaaaaaaagggggggcctcgtgccgaattcctgcag

SEQ ID NO: 21720 - DNA, 1604 bp, Oryza sativa
  Clone ID: TF_OsC20552_1
tggatccccgggctgcaggaatcggcgcgcggcacgagggcagcaccttatattcttcctacatattcattctccccacaacaacaactaacactactcactcttcattgctttttttttctctctctagctagctagcttgcttctacttcttcttcatcttgatcttgaaactagtcttatcaatctgaggaattaatccatcattatgatgaatcttatatcatttgaaacgcctcctcttgggaggaggagtcaagatggaggcagcagcagcagcagcatcactgctgctacaaccactatcaacaaggcaaaggaagcagcaagccatctagacctcagcctcggcatctccttgtcacccggcggcggcggcggcgacgctggcaccaaggccagcagctgctgctacggcggcggcggcgacggcggcggctgcatgggcagtggcatgctcactgcaggagttcttggcgttgggcatggggggagtagccatgacaatactacgacgagcagtggcggggtcgctgcaggagttcttggcgttgggcatggggggagtagccatgacaatactacggcgagcagcggcggcggcggcagctggacggcggcgttcatgccgagcccgacgggattcatgcacccgtggagcctcgccgcccggcagcagaaggccgccgccgagcaggagcggagcggcgtcgcgaggctgccgccggcgacgacgacgtacatgccaagagctgccgcgaccgtgatttcactgccggcggcagttggctggccaccggtgcacacatcccggcgtaacctcgttgccaccataaataatgtcctgaaacccgacactactgccgccgtcaagccggacagaccgacacaagcaacggcgatgttcgccgccgacgaaaccacggcgcccccgccaaggagcgcggcggcggcgaccgaggccagcaggacattgaacatgtttgccaaggtgcacatggatgggtacaaggtgggcaggaagatcaacctcagggcacaccgcaactacgactccctccgtcgggtcctcaccaagatgactcataatttcttctgccccgcagattattcaagcacaaataagggagaagaagattgtgctaaaagtgacgagttcatatttctatatgaagattttgagggcgaccgaatgcttgttggcgatgtcccatgggagttgttccttgcatcagcaaaaaggttgtacattgccaaaaacccagcacccagaaacaaagaacatgctgaaatcgccaaaaggaaagaaactgaagatgcaatagataactgaaggcacctgaaaagcaagttgatctctgcatatactacaatatgcacttctcatgatctgacatatatagctctcgacttgtgctgttcatcttgtattataataagctatcttcgaagagtaggtttataatgtacggatgcatgttaaaatgcttcttgatcactgtgcatacaattttgcgggcattaggtaagtactctgaaaaatgtactagacacggattcagtatgtctacacaaagtggataagactcgtctaataattaact

SEQ ID NO: 21721 - DNA, 1122 bp, Oryza sativa
  Clone ID: TF_OsC17802_1
ccgacgagctagctctctctctcgatcgatggccatggcggcggagagcatcgacgcggagctgcgcctcgggctgcccggcagcggcggcggtgacggcgtggcggcgaagaagcggcggtcggcgtcgtcgacggtgaagagcgaggcctccggcacggcctgctgcggcggcgccggcgcccgggacgtcgaagacggcgcctcgccggcgtccaaagtgcaggtggtggggtggccgccggtggggtcgtacaggaggagcacgttccagtcttcgtcgtcgtcgacggcggcggcggcgaaggggaagggcggcggcgagacggatcaagggaggaagaataagggaggagggctgtacgtgaaggtgagcatggacggggcgccatacctccgcaaggtcgacctccggatgtacggcggctacagggagctcagggacgctctcgacgcgctcttcggctgcttctccgccgacgcctccgcctccgccgcccacttcgccgtcgcctatgaggacaaggacggcgacctcatgctcgccggcgacgtgccctgggacatgttcatctcttcttgcaagaagctgcggataatgcgaggatctgaggcgagatgatatatatcgaaatcgaaaggcgtcgagctgaagaaaaaattttcgccgatgcatgcatggagtagacatctcacagaaaaaaggcttcatgcatgagagagatgagatctatccgtggacatcgtcatgcatggcgatcggacggctggccaagaaggacacttacacgtggatgcatcttgtttttgttctacgtagatgtgtagatgagatatccaaggatctgaattctaaaaaagttcaggattcagttggatcggagttggtgaggaggaggatatgatcgatcgagcagagctgcagtactcctatgtacagaataatctagctgagattttggttgttggaaatggcaactgctagttctgcagatttgtgtacacatgccttttttttaaagcttttttttttctagcttctgttgtgtcactgaagaaatctgagagctgaagaaagagaaacttggaagtttggtcattttaatttaaaaaaaaaaaaaa

SEQ ID NO: 21722 - DNA, 1195 bp, Oryza sativa
  Clone ID: TF_OsC13832_1
ccggccgggacttcgtcctcatcccatcttctcctccaaattcctcttccacatttcctcctcctcctcttctttctctcaagaaaatcagtagctagccatggcgtcttcttcttctctcaggagcaccagctgcctcgcctccgccgcggagaccgacgccgacaacctctgcctccgcctcggcccgccgggaagcagcatcaccaccaccaccaccaccggcggcgccgacccggcggcgaagaggtccctcggggcgaagcggtcgctggagagcacggacagcatggcctccggcaccggaacttccgccgccggcgacgagcacgacgacgacaccgccgcaccggccaaggcacaggtggtaggatggccaccagtgagggcataccggaggaacaccttccatcaggccgccgccgccgccgccgcaaccaagaagggtggtgatgagaaacagaagcagcagcagcagggaggagggctgtatgtgaaggtgagcatggatggggcaccatacctgaggaaggttgatctcaagatgtgcaagggctacagggagctgagggaggcactggatctcctcttcaccaagtgcttctctgcaaccgcctctgacggatgcagcgatggccagttcgccattgcctacgaggacaaggacggtgacctcatgcttgttggagatgtgccctgggaaatgttcatctcttcctgcaagaagttgaggatcatgaagggctctgaagccaggtgatggtctgatggatgatcaaaggagacaaatcacaggctaggacacaccacatgagaagatggatgatgaatcagagatcatgaatcacatggcatgagatgaatgggatcaagaagggagcagaggactagaagagccctgatggcttgtgctcttcgttgctgtacagagagagtttaggcactgccttgtttcagtgtttctgaatccaagagggacaagatgtatgaactgtgtatatagtcttttaattaggctcatttcttttttcagtttgagttttgtactgtatgagcgaaggctggaaaatatgaaaaaagggagaaatttgacttaagcttggtcatttctccacaccaaagaaaaaaagaaactctgtgttcatatcataaatacagtaccaagccagtattttctcaaaaaaaaaaaaaaaaa

SEQ ID NO: 21723 - DNA, 806 bp, Oryza sativa
  Clone ID: TF_OsC34707_2
atggaggagtgcaagggcggtggcatgtcgccgtcctcctccatggatagcagcacccacccggcgctgtccacgacgtcgtcggcggcgacggcgaggcgggacctcagcaccgatctccggctagggcttagcctctcgacgtcgtcgtcgtcctccctcctgcaggccgccgccgccgccgccgctgctgatgatagcatcccttctactccaaggaacagccaagtgcacgccgattggccgccgatcaagccgttcctcaggagcgccttgcagaaggcgtcggccgctggcggcggcggcgctcgccgacggcgaacgctgttcgtgaaggtgtacatggagggcgtcccgatcggccggaagctcgacctgctcttgctggatgggtatgacagcctcctcatcaagctctgccacatgttcaagacgcccatcacctatgctgatgttatggagtgccatcaacaagttcctggccagaaggctgcccatgtcctcacctatgaagaccaggacggggactggatgatggttggggacgtcccatgggaactcttcctgagcagcgtaaagaagctcaggattgcaaggatggataaatgctaaaacagttgcatttgaatttctctttgtttcttcttttttttttcccattggagggagggcccttattatatgtaggttagttgaaaaagatttttgctgaagctgagattatacttactagcagtgtacattatagtaaagaagtgtagcattatcagctacctaccgtatagcagaactgattattatttttc

SEQ ID NO: 21724 - DNA, 1439 bp, Oryza sativa
  unsure (1)..(1439): unsure at all n locations
  Clone ID: TF_OsC123_1
ccgcccggggctcacacacacacacactctcttctcttgtctcgctgtggctcgctggacacaacacacacccacacccactcccccactctctctccggttcatgtcctgctgctccccatgtcgcccccactcgagctcgactacataggcctctcgccgccggtgcccgccgccgccgatgccgccgccgacaacgacctgaagggcaccgagctccgcctcggcctgcccggctcccactcgccggaccgctccccgcccgccgccacgctcgaccttctccccgctgccaagggcgccaagcgcgggttctccgacgaggcgcgtccgctgccggcgtccgccgccgccgccgccgccgccgggaagggcaagaaggcggcggccggcgaggaggatgaggatgcggaggaggaggacaagaaggtcgccgccgcgccgcaggcgcctgctgccaaggctcaggtggttggatggccaccaattcgcagctaccgcaagaacacgatggctactaaccagctgaagagcagcaaggaggatgctgaagcgaagcagggccaggggttcctgtacgtcaaggtcagcatggatggtgccccctacctcaggaaggtggacctcaagacctacaagaactacaaggacctgtcaactgcgcttgagaagatgttcattggcttcacaactggcaaggatggcttatctgagagccgcaaggatggtgaatatgtgctgacttatgaagacaaggatggagactggatgcttgttggcgatgttccatgggagatgtttgccaactcttgtcgcagactcaggatcatgaaaggttcagatgcaattggacttgctccaagggcagttgataagtccaaaaaccgcaactagaatggtttctgccccacagtcaaaagcaagatggagatcaaatgactgtagggaattttctgaaaaccaagaagtctaacagttttaagatggagtctgccttatggtctgtactacatggtttgctattgtgaaagttaaaaaaaaaggtgtcttgttatgttagcttcgccaaatctcctagggacataaactctatttgattgtgcccaagtctttgtacgtgtgttaatgctattcgtgtaaatggtttggacaccatgtgctactgctatgattgagcacccctacctactttgcaaaatgttgtcaatgaactgtttgttcgctacataaatgttcaatgaagcttgcaaatgtattgtccaccaaaaaaaaaaaaaaaaaaaaaaaaaagactagcctgcagcccgggggttccactgcttgcatttctctttgtaattgcatttccttttgatgtggatgctcttacaattacatcgtctaagatgcctgtgactaggaaccaatatatgnctgatctgtacaagtaacttttgccg

SEQ ID NO: 21725 - DNA, 1678 bp, Oryza sativa
  Clone ID: TF_OsC436_2
gttgaacacaatcaatgttcattatcccgaccaaaatgccaatcataatatgtaccctggcacatggtctcttatgcctccaaacactggttttggtgtgaatcagcagaactacctaatgacgcctgacatcacactccctcaaaggtctcttaatgccaagtttggtgggaatggagcattcacttcgcttcgggcccatggcattgatcagcgctcctctggttggcttgggcatattgagccaagttctcacattgatgatgcctcatcgagtcttatcaagccacagcctttggttattgatcacaatgttcagaacgctaaagggggttcatgcatgctatttgggatttctcttgacagccctgcaaaacctgaactattgatatccccaccaagtgttgcatttgatgggaagctccaacaggatgcacttgaagaggatgaatgctctgatccttccaagactgtgaagccacttgatggagctcagcacgattctgctagagagaaacatcagtcatgtccagatggtaccaaaaacattcagagtaaacagcaaaatggttcctcccgaagttgcaagaaggtccacaagcaaggaatcgcactcgggaggtcaatagatcttacaaagttcacttgctatgatgagttgattgctgaactggaccagatgtttgacttcaatggtgagctgaacagttcaagcaagaactggatggtcgtttacactgataatgagggtgacatgatgttggttggtgatgatccttggaatgaattctgcaacatggttcataaaatcttcatctacacgagggaggaggtccagaagatgaatccgggtgccctaaactcaaggtcagaggatagccggtctacttccgtggaacgagggctagttggcgaagggctccaaggtggtctatccaccccatcactgaattctgagaactgctaattcgttcggtcactgaggtcttttgtggtttgcaagaacagaagacgacatatccatggtaggaaggaatcttttcgtggtgtagtagtagtagctggtgctttatatgtatcgggtaagccccgcagtaccccatttgtagatggtgcttgtcctggtatcagttgcccgctcttcgttttcgacaagttttgggtgtgctttgttgaggttttaagttattgtatgatatgccccgtagtagtgaaaggtgctgaggccaagctgccgcgcccggtgcgcttgcttgcttgcgctcttcctccctcctaagccttgtaaatagctttgcttccccccctttcttcagtcagttctaatatgttgcgaactgcggtaatcggtgtacccctcaagaaggcaaggcaatttgaccctaaaatgttgccattttaacatccaaaaaaaaaaaaaaaaaaaaaaaaaaaaaaaaaaaaaaaaaaaaaaaaaaaaaaaaaaaaaaaaaaaaaaaaaaaaaaaaaaaaaaaaaaaaaaaaaaaaaaaaaaaaaaaaaaaaaaaaaaaaaaaaaaaaaaaaaaaaaaggggggggccctttttagggacccaagtttctccccccgggggggggaggtaaaaatttttttaagggggacccaaaaaaaaaaacacggggcccggttttaacaccggggggcgggaaaaaccccggg

SEQ ID NO: 21726 - DNA, 1069 bp, Oryza sativa
  Clone ID: TF_17154532
cggcacgagccaccacctcctaatcaccacaaaggcttaaaaatctccagtctccatagagagaaagagagagaagagaaggcagcttgatttggggcgaggagacgcgatagccgcgataggctaagcagctggcagcggcggctgctgcgatggccggcgccgacgtggacgtcgggacggagctccggctggggctgcccggaggtggcggcggcgccgccgaggcggcggccaaggccgcgaagaggggcttcgaggagaccattgacctgaagctgaagctgcccaccgccggcatggaggaggccgccgccggcaaggcggaggcgccggccgccgagaaggccaagaggccggcggaggccgccgccgccgacgccgagaagccacctgctcccaaggcgcaggcagtgggttggccaccagttcggtcgttccgcaggaacatcatgaccgtccagtcagtgaagagcaagaaggaagaggaagctgacaagcagcagcagcagcccgctgccaatgccagcggcagcaacagctctgccttcgtgaaggtcagcatggacggggcaccctacctgcgcaaggtggacctgaagatgtacaacagctacaaggacctctcccttgctctgcagaagatgttcggcaccttcaccgcaactgggaacaatatgaatgaggtgaatggctctgatgctggtacaacttatgaagacaaggatggtgactggatgcttgttggagatgtcccgtggcagatgtttgtcgagtcatgcaaacgcttgaggatcatgaagggttccgaagccattggtcttgcaccaagagcaaaggacaagtacaagaacaagagctgaaaatgttgcagtattaagatgctgagcatggtgccataaaaatggtgttcttgcagtgtgttatggtttccttagaaatataaggttttacttgtttagctggattaaaggaaggaagagttgtcatgtttaatttgtttatggaccagaagcaataatccatttgtgtgtagctggattggtgttaaaaaaaaaaaaaaaaaaag

SEQ ID NO: 21727 - DNA, 387 bp, Oryza sativa
  Clone ID: TF_uC-osflcyp010g02b1
gtcgttcgcgccgcaggcgcctgctgccaaggctcaggtggttggatggccaccaattcgcagctaccgcaagaacacgatggctactaaccagctgaagagcagcaaggaggatgctgaagcgaagcagggccaggggttcctgtacgtcaaggtcagcatggatggtgccccctacctcaggaaggtggacctcaagacctacaagaactacaaggacctgtcaactgcgcttgagaagatgttcattggcttcacaactggtgagatgtctcgggttaccctgcttgcatttctctttgtaattgcatttccttttgatgtggatgctcttacaattacatcgtctaggatgcctgtgactaggaaccaatatatgcttgatct

SEQ ID NO: 21728 - DNA, 320 bp, Oryza sativa
  Clone ID: TF_uC-osflcyp159g02b1
ggtttgtttatttcagattacgtaggaaatatactttcattatactaatagttataccgccttttctcgataattaatagacacattgcttagtaatattttttttgtaaaaatctagaaagtgagaacaagcgcgaatttttgcaatagaaattttagtacaaggagagattctcttctgcttgttttatttggccttacaggttagtgtggatgtattggcatatcaggcaaggatggcttatctgagagccgcaaggatgggggaatttgtgctgacttatgaagacaagggtggagactggatgcttgttggcgat

SEQ ID NO: 21729 - DNA, 943 bp, Oryza sativa
  unsure (1)..(943): unsure at all n locations
  Clone ID: TF_OsC217831_1
ccaaagctccccacctncccttttcggtctctgcctgccctgcttcttgcccaccaccacctgtgtcctcttcctctcctctccttgcattgcagccttctccttgcttcactgcctccctcacctcctatatatccttcccccttgcctcctncanccacccacacttcacacttcttgtttgatcaatcacagagacagagagagagagatggcttggaatggcaggtttggagaggatggagaggaagagaggagccttgagctcagccttgccctccctggatacttctccagctcaggtttgcaggggaacacgagcactgctgctgatggagccaagggaaacgatgggttcaaggcaagcaaaaagatgctaaaatttgcccctaaattctctgcgattcgcagcaggccggcggctccggtggtcgggtggccgccggtgcggtcgttccggcggaacctcgcctcgtcgtcgtcgtcgtcgaagccgccgcgtggaggccgagacgccgccgccgccgccacgggaggcaaggtggcccggttcgtcaaggtgaacatggacggcgtcccgatcggccggaaggtcgacctggcggcgcacggcggctacggcgagctctccgccgccgtcgaccgtctcttccgcggcctcctcgccgctcaaagggacccaaccatggccaccgccgccgccgccgccgctgccggcgagagctgcacaggagaggaggaggcgatcgccgggctcctcgacggcggcagcggcgagtacacgctcgtctacgaggacgacgagggcgaccagatgctcgtcggcgacgtgccatggaacatgttcatcgccgcggcgaggaggctgcgcgtgctcaggagctccgacctgaacgcctccacgatacgagcagggagcaggaagagggcagctgccgagtga

SEQ ID NO: 21730 - DNA, 1721 bp, Oryza sativa
  Clone ID: TF_OsC45780_1
atcccccggcgcctggggtgcccgcgcctggtgggggccagccccgggtttacaattcttttaattaacacataacaccttgcagtaataattatttgtttgatggatacaccatgaagataattaaacaaccttttcatggacaaaatacattgaggtccctttgagcagggtgcctttacattttgtgccattaaggtaaaaaaaaaacagagagaaagggaagaacagggagagcaaaaaagacataattatgggacaggtactactggtacatgttcttggcttctttcttatgtataagacaagatgacacacttaggaacttaatgactgcaacagaacagaaactgaccacaacaccaaaatgactttcactgatcaggaaaggtacagacttggagatgaggacagcaagcgagtatgatacagggatgaggcaaagctgcaattaagaaaagctatagatagattgttgcatctgatgatgatccatccgtttttgatggcgacatgttcttctttctcagcttctgttcttgcatttctccattgccctcggtgcaaggccaatagcttctgatcctttcattatcctaaggcgcttgcatgattcaacaaacatctcccatgggacgtcgccgacgagcatccagtcgccgtccttgtcctcgtaggttggcacatattcagagccgttgagcagatcagcaatcttgctctcgttcatgccgttcaccccatgagacccacagtttccaatggtgaaggagctgaacatcttctcgagtgccttggagagctcaaggtagctcttgtacatcttgaggtccaccttgcgcaggtatggcgcgccgtccatgctcaccttcacgaaggcggcggcggcggcgccggcgccggacttgtcgccgccgccgtcggcggcgtccttgcccttgtcggcctgcacggccaggatgttcttccggtatgaccggaccggcggccacccaaccacctgtgccttgggagcccttggcttctcggggtcggcggcggcggtgacgacgctgctctggctcggcgaccgcttcatcccgccggcggcggcggcggccggcggcgaggcgtcgtcgttgtcagctccgacgatgtcgaccttcttctcccggtcgtcagccgccgcctcctccttgtcgtcgtcgtcgtccaccgccgcggccgccggctccagcttcagcttgaggtcgatggtctcggcgaagcccctcttcccggaggagctcctcgccgccgccgccgcggcgtctccatcaccgccgccgccgggcaggccgagccggagctcggtcgcctcgaaggccaggtccgccgccattgccgccgccacctcacctcaatatagctagctaactaaatgtcttcttcttcttcttcttcaaagctaagtggatcaatggagatgatgatgaatcaatggacctagctaattagatagctcaaagaatttcttggtttcttcttggctatctactagtggctaatagtaccaaaagctagctctcttcttgttggtttgagcttgatggtgatgatgagagggtggctagaaatgtgatgtaaaggagtgaaatggaaatgccaatggcaatagataaagaggagaagggagaggtgatgttggggggcccaagaaatgataatatcccccggccgattcctcagcccggggatccact

SEQ ID NO: 21731 - DNA, 2436 bp, Oryza sativa
  Clone ID: TF_OsC81650_1
atggcgcggcatggcatgcatgctgcgttcgcgcgtgagacggcgtgcgcgatcagatcagggggagcgccagagcccgcgcacagtgcaggcgggtcgtcgcagccgcgcagcgcgaggaggccgatgcgcgcgggggccggatcgagggcgacgggggccggcgccatgaatccctacgacatgccaggacggcaggtccattttgaggaagcagcgaagcacagtgtatatggcactactgggcactgcaagggtgatatggtgatctcgtcgagaagctcttacaataggtcgccggccatacctctttctctagcgattggcggagccgcggaggtggagctccactccaatccaatccaagggttcagcgaagatcaggagttcagacggggtaatgtcctcatcaacagtggtcccctgtggtcggggcgtggaaggaggtggaaccattccttacgccacaaccaacagcagcgccaatggccacacggatggaaacctgatcttaactccgtgtttttccgcgttctctttcgttctcgcttagacctcagcttacgcttcgggctcacccagtcagtcatcaaagtgtgcgtgcttctccagaacagtgagagagagaggggcaaagggaggcaggataaaaagccgagctgtaggggactaaagaagaaagaaaagcatagaaaagaacggcaagcaagcagctcgaggcacccgcgctagtacataaagccaccgaggtgcgatttcgcgagctctagcccctaccactcggccatttcccatctgcctcctggagctttagctctaactctagttctagctctagctccggctacgtttgcaactgttgtttatctcctggtggatagcatttagactcttgaagactttgagctagttaaccttatggaagaagggtccaacaaaagagaaggacttcctcctcaactcctagatctcatcccagatgagaaggaatggaagctgagagaagcattaggtctagggagatcaagaaacgcaggcttcgacggtgaagaagacaagaagctagacctaaagcttggtcttcctggttttatagaagatgatgaggcagaaaccttaagagattacaggctacagcaagagagcccatctctctcccttagtttctttccaaagcactccaagaccaccagcagcactactacgacaactggagcaaagaggggattcatagacacagttgaggacaaaacagaaggttataacgaccagaagcagcaggcaagggcaggatgtgggaaggaacttgcagtggaggaaatgatagcagccgtgagtgagaggaagaaaggatgctgccccccaccaccaccaccacatggtgctcctgctacacctgcgcgcaacagaccacagacccagggaagaggagctgcagcaccagtggttggttggcctccaattcgatccttcaggagaaaccttgctagtagtagttcatccaaacattcccctgaaccacaaaatgataatgccaatgcaaaggtgacgctcacctgcaagaaaaaccctcttgtaaaaatcaacatggatgggatccctattggaaggaaaatagaccttgcagcctataacagctatgatgggctatcgtcagctgtcaaacaactcttccatgggtttcttcaagctcaaaaggaccaaactaatgcgcaaattgcacagcaaggtgcagatgacaaaatattttatcaattgttggatgggtctggtgaatatactctagtttatgaagacagtgaaggagacaggatgctggttggggacgtgccatggaaagtatttgtctcaactgctaaaaggctgagggttctaaggagttcagagctttcccataccctgattggagctactgctagggtctagccgtctaggagagtcaccaattgctgaaatgctgggatcttattaaccattcggaatgaatgtgtgcactcaagccagtccattctccattttaggactacccctattttgcctatatagatgatctactgagatgagttggcatacagcaaatgcaaggaaatggcaatctgttttgtaaattaggttaccttgctatgacatgttgcttaattcaattcgaagcgattttggttttatcggggaaaaaagcatatgtagacttgcaggtcacccatgtaaagtgccttgttctgcgtgataaatttgtattaatcgctgctgcaacccgacacgcagatctaatgtcaccagcgtgtctcagaggacagcaactaggctaacctgatagcatcaagtcatcactccacgtggaatatgctactagtaggaatttttttttttgacaaaaaaaacagaattatccacaaaaaaaaaaaaaaaaaaaactcgagactagttccctcgtgc

SEQ ID NO: 21732 - DNA, 1544 bp, Oryza sativa
  Clone ID: TF_OsC86592_1
ttttttttttttttttttttttcaacaaaaaaaaaaagtgttctttttaagacgaagccacaatttacatacttagtacgggatattacagagataggcagagatgccagccaaaaggatagggatagtcatcagagattcagagctacgagtttcaggcaaagatgcatagggaagatccacccaactacactgcagaaaggctatctttcccaggttgggatagtcatcagagttttgagcttcaggctgaaaaacaagattggctgccacacagatcggcgcgtttttttttttttttttttttttttttttttttttgttgtggatacattatcaagtgcaactccagataatatatatatgagagaattgatgaaagtatcacacaggaagcattaagcagcctgacttgatctttcaaagacaaaatcgaccatctacagattgacacaagacaacctcgtaggcaaaatggctgttttacaatacgccacagatttcactacacacgtaaataaactaatagcggagatacttcaggtaaaacactgcacccctcagcggaaacttgctacagcaaacttggtccacacatttgctgtccagatgatgaaagctcgggcaactatttgttctgacctgtctgttccagtgatctcggagccattccagcagcatctgaacctctcatgatccgcagtttccgacaactagtagtaaacaagtcccaaggaagatcaccaacaagcatccagtcagcatccttgtcttcataggtaagaacatactcttggtccttaagggcatcagccctagaaccatcagtcagcctgtctctttttgatgttttatgtgaactgctcctaccagtgataaagcagctgaacatcttctcaagagcaagtgaaagatcttcatagcttgaataggtcttgaggtcaaccttcctaaggtatggggctccatccatgctaaccttaacatagcaacatcctacctcacttttgccttggtcttccccctttgtctttgtggcactggcggccaatgtattcttccggtagcttcgcacaggtggccatccaacaacttgtgccttggcagctcgcggagctccagcagcagcttcccccaaccccttctcctcctcctcctcctccctcacgcccctctcatcatcaccggcggtggcagcagcacgacggccctcggatcggtcgagggagtcgacgaacccgcgcttggcgccgcccctgggaggaggagcagggccgagcgtgagcgcggcgtcgacgacgacagcctccgcctcagcgcgggcgggcgactccgaccccgggaggccgaggcggagcgcgaggtgcgccccgacgacctcggcgacgggggtcgacgcgcagcaggaggaggaggacgaggccggggacgccgcgagcccgatgtagtctcgcgcttcgagcggcggcggcatcggaatcgagagatgcacacgcagagaggagaggacaggagaggagagggggagaagaggcgaaagcgaa

SEQ ID NO: 21733 - DNA, 300 bp, Oryza sativa
  unsure (1)..(300): unsure at all n locations
  Clone ID: TF_LIB3431-001-P1-K1-G12
ggtggccgtcgaccgcgcgccgtactctgcgcaaggtggacctcgaggcgtacccgggctactaccagatgttagcctccctacaggacaagatcttgtgccacttcaccatccccaagctcgggaacgaggagacgaagctccttnacacggcgagcggcgacgagtacatgccgacgtacgaggacaatgacagcaacttgatgctacccggagacgtcccctggaaaatgaaaggggagacccgcccacgtcttcgcctcaagaaaagctctgaagcagacaatttagcaccaagat

SEQ ID NO: 21734 - DNA, 305 bp, Oryza sativa
  unsure (1)..(305): unsure at all n locations
  Clone ID: TF_LIB4370-006-R1-N1-H5
gttgtattgcagaatgttcacagacagctgtaggaggctgaggattatgaaggggtcagatgcagtgggccttggtaagtacagatcccatgtggtacaatattgaagtattgcatgtgtccatgcctttttatctggaagcatagaagagaatttactgtatgttgctctgcataagtgcataattacaccttatatatgctttacacataaaaatcanaagtgccagtttgcatggactaggtttggtccgagcccttaactatgggactaanatatctggntatcctattctttctatgtat

SEQ ID NO: 21735 - DNA, 1307 bp, Oryza sativa
  Clone ID: TF_OsC4615_1
ctctgtccactgccctctcgccgcccacctcgccgtcgccgccgccgcgagggccaacgccggcgaagtccgcgagccgaagcatcacacagctgcgccagcgatgtcggtggagacggagcggagctccacggagtcgtccgccgcgtcggggctcgacttcgaggacaccgccctcaccctccgcctcccgggctccctcgccgccgccgccgcacctgaccccgaccgcaagcgctcctccccctcctcctccgacgccgccgacgccgcagacaactcctcccccctcgccgccgccgccgatgctccccctgctcccaaggcgagggtggtggtggggtggccgccggtgcgctcgttcagggaagacccggctggcgggcaagtgtcgggatggttcccgtgggacggcgtgccgtaacctgcgcaaggtggacctcgatggcctacttccggctacgaccagctcctccgcgcgctccaggacaagttcttctcccacttcaccatactcctacccctcgtctccttacgcaggaagttcgccggacgacgagaggaagctggtggacgcggtgaacgggacggagtacgtgccgacgtacgaggacaaggacggcgactggatgctcgtcggcgacgtcccctggaagatgtttgtggaaacttgccagcgccttcgtctcatgaaaagctcagaggctgtcaacttagcaccaagagccgctcaatgaggcattcccggtgcccatgaccgtgtggttggattgaaagaaagtggaagctttgccccgccgatgttcgcccatgtgtgatatgaacatgtacagttgtctcctactacttttggttccttgatgttgctgagttgagaaaaaggttgtagtttcgttactcgtctgtagtctctccatgctgaggtttttccatgttctgtgagagaaatgtgtacagtcatcgacttcgacttttggttccatcgtgctattgagtttcagaaaagaaatggtttttagcttgtagctttgttaccagtcagtagtctctccatatagatgagcgaagcggtgatgctttaaaatacacccatagattgttttctcgataaataaaattggtctcactcactgagcccctgttcttcgacatgctttctaccactagtttgttcgataatgtgatgtgcatgtgaggcctgtgatggtgccagaatcatataacttgtcatgttaataactattttgttgtaagattatgtttactgcatggtgttataagctatttaaagtctcaaaaaaaaaaaa

SEQ ID NO: 21736 - DNA, 1104 bp, Oryza sativa
  Clone ID: TF_OsC2423_2
gtccctccctgcagagatggcaagttgtttacaccgatgatgaggatgacatgatgcttgtcggggatgatccttgggatgaattttgtagcatggtgaaacggatttatatttactcctacgaggaggccaagctgctggcttcaaagtctaagctgtcagtcataggtgacaccatcaaattgagcagtatgaactcatcacatgaatccgtcgacctggacaatcatgcctcagttactaacagggactgctaaccattgactttgccctaattctgatatgatcatttgaggaaattccaatgtttcttcattactgcttactgtgctgaagacgcaacgcccttttgtcttgaattgtggcggtatttgaactgcaagtgccaggaagttcccaagactttttggttgccaccatgacatgaggggaaatttcgcttttgtgtacctttcatcctgtagtttactcaccttttttcatccaaagagctgttctcttcaacggtctgtgcttccaaatccactggatcaatgctggcggttttgggggatggaaggagggatactcgacaaagagggcaagtggtgtttgtcgagagccagtggtcgatgcaatcgatgtggaaggtatggccacaaggaggtattctctggagccgctcatccggttgatagtctgctaagcagacagagcattgtgtttccctgatcaagaagctctccttgaagaccacaacaggcaacatttcccgcatctccttctttatgccgcactccaatctggggttatctccccgtatcaagttattagtcctcatgcgcaaggactgccagtttgctctgcgccgtcgcaagtagaacaagtagaagaagagaagcaagacgaacgtgaagaaaaccggcacggagaagatgaaggcttggtatagcttaagctcaggcgatgcggccgagcagtaatcgggcgggtctggggaggtacaagacatcaccaaacaagaacctccctcccttccaccaagaaccaacgaatggtcgaccgaattatcgaaaaccctaaacactcacaagatatcttatctataacactgatgagctatag

SEQ ID NO: 21737 - DNA, 1428 bp, Oryza sativa
  Clone ID: TF_OsC2849_2
ttttttttttttttttttgccagagaataaactgcataaatgtagagcatttagctgaacatttacatgatggtcatgtcaaattgcactcacttcacacaagtgtcttaaacagaaggaagcaagttggttaagtaggaacaggaaaaccccaaaagatcagcacagcaagacattgagagaaagagacgatgatacaagctcagaagatcatattcttcttcacagcaggtcactgaatgtgtcaaagcagctccaaaaaagaaggtcaacactcagcagctgttcttttccgtccagaggttattagagatgaagagaggtcagatgtcttcagtactctcagtctcttaactgaagaaacaaacatcccccatggcacatctccaacaagcaccttgtcgccttcataatcctcataaaccaaagtgtactccccagttccatctagcaagccagatattgccacatcttcctgctggcagtcctttgctccagcagtgagggggtctctttgggctgcaagaaggcctcggaatagcttgtcaaccgctaaagaaagcttctcatagctatcaaaagcattcagatcgatctttctaccaatagggacaccatccatgtttatctttatgaatggagctctcttgatctcttctgcttttgcagccttctttccattctgcagttcaagagatgctttgctggatgtagccagatttcttctgaatgttcgaaccggaggccaaccaacaacaggagtactaggagatcttgtctggaagcagccattattgttggatgcaagtgcattattccctgtagctggtggtggatgtgcctcttcttcctctggggaccccttgtttttgtttgccttgccttgcgagtgggagacgagtgtggagtagcccagggagagcatggagctcttgtcaccatcatcatcatcagcagcagcagctgctgcaatggagtgcttcgtcgtcgtccccttgtccctgcacgccgctcgccatcctcctccggggagcccaaggctgagctccagcgtcttctcctcctcctcctgttcatcgccatggcgatggtgatcgcttggctcccccatccagcttccgccgagacggcctctgctgatcttcttcatgctctccgacgcctcccccatcacccgctctctagatgtacagctcgcccaaatccaagaacaaatcaagaaagcagaaactagctagctgagctgctgctgctgctggttgctgtcttggctgcaatgcaagagggagaggtgtggaacagagagctagaaaaggtgtgggaatggtagtagtagctgcagctgcaatgcgagcaacggcacacggcaatgtgatgctccgatgcgagtagcgtctagctgagcctgagctgagctgagatgccgcc

SEQ ID NO: 21738 - DNA, 618 bp, Oryza sativa; identical to SEQ ID NO: 12192
  Clone ID: TF_OsC334733_1

SEQ ID NO: 21739 - DNA, 801 bp, Oryza sativa; identical to SEQ ID NO: 12193
  Clone ID: TF_OsC59803_1

SEQ ID NO: 21740 - DNA, 704 bp, Oryza sativa
  Clone ID: TF_LIB3431-025-P1-K1-F7
cggacgcgtgggcggacgcgtgggcggacgcgtgggcggacgcgtgggcggacgcgtgggctcaatttggtatatctttatcagatctccaccttaacaaactgcagtcgagtctatcgccccacggccttcaccagcttgatcacggcatgcagccgaggatcgccgctggtctaattatcggtcatccggctgctcgggatgatatctcatgcttgttgaccattggtagcccccagaacaacaagaaatcagatggcaagaaggcgccagcccagctgatgcttttcggaaaacccatactcacagagcagcagatatccttgggtgatgctgcttcggtggatgttaagaagagctcttctgatggtaatgctgaaaatacggtgaataagagtaactccgatgtttcaagcccgagaagtaatcagaatggcaccacagataatttgtcatgtggaggagttccattgtgccaagacaacaaggtacttgatgttgggctggaaacagggcactgcaaggtattcatgcagtcggaggatgtcgggcgcacacttgatctctctgttgttggttcatatgaggaattataccggcggcttgctgacatgttcggcatcgagaaagctgagctgatgagtcatgttttctaccgtgatgcggctggggcactcaagccactggagatgaaccttcagcga

SEQ ID NO: 21741 - DNA, 932 bp, Oryza sativa
  Clone ID: TF_OsC28546_2
ctggggttggttttttcctatgctgctgctgctgtgttattgatgagccaccagcattctgtagctgttttcttgctctcttaatttgcaacagaaatcactattatgatctgaggattgccctgcagttcagtacaatcatggcatcgtactggacacgcttggggcacctttttctttaaatctataacttatagaattacaccaatctgttatatctgaaaaagagtaggtcatttacaaaatatgcagtttgtccactgcacctgcaagatgctattttcccattatcataatcatctgtacaagccaaaaacaggtcatcccccagaaaggtgatggactatggtttgcacaattgatatgtctggaccctaatatcaacgatttgctacttcacagggtcagctccaatctgtggaaggacataagaggaaaacaaattgagggcagaccttaacttgaggaagtgaatccatttgacccaagtctatagaattattttatataactaatataagtgcaatactatagcatggtgttatataacacaaaagtgcatccatttgatccaagtttaaccagagatacagcactgctatttatgaggaaaatggcgcctgttgaagttgccctatgcttaccatagtcatggggaagttctgacctcctcataaccctcaacctcttaacagtcgaaacaaataccttccatggtatgtccccagctaacattctgtctccatcattgtcttcatatactaaagtgtatacaccagttccatccaacaaccctgaaaatattttgtcttctgccccttgctctccactttcagcacaagatagatctttttgagcttcaagaaaaccacggaacaactcttcaacagcagatgacagcttctggtagctgtcgtatttttgaaggtcta

SEQ ID NO: 21742 - DNA, 6439 bp, Oryza sativa
  Clone ID: TF_OsC608_1
ctctcctctttttttctcttccctctctctatatatatactcatctccaagctgttcttggctcctctctcttcttccaacacctcctaatcaccacaaaggcttaaaaatctccagtctccatagagagaaagagagagaagagaaggcagcttgatttggggcgaggagacgcgatagccgcgataggctaagcagctggcagcggcggctgctgcgatggccggcgccgacgtggacgtcgggacggagctccggctggggctgcccggaggtggcggcggcgccgccgaggcggcggccaaggccgcgaagaggggcttcgaggagaccattgacctgaagctgaagctgcccaccgccggcatggaggaggccgccgccggcaaggcggaggcgccggccgccgagaaggccaagaggccggcggaggccgccgccgccgacgccgagaagccacctgctcccaaggcgcaggcagtgggttggccaccagttcggtcgttccgcaggaacatcatgaccgtccagtcagtgaagagcaagaaggaagaggaagctgacaagcagcagcagcagcccgctgccaatgccagcggcagcaacagctctgccttcgtgaaggtcagcatggacggggcaccctacctgcgcaaggtggacctgaagatgtacaacagctacaaggacctctcccttgctctgcagaagatgttcggcaccttcaccgcaactgggaacaatatgaatgaggtgaatggctctgatgctgttacaacttatgaagacaaggatggtgactggatgcttgttggagatgtcccgtggcagatgtttgtcgagtcatgcaaacgcttgaggatcatgaagggttccgaagccattggtcttgcaccaagagcaaaggacaagtacaagaacaagagctgaaaatgttgcagtattaagatgctgagcatggtgccataagaatggtgttcttgcagtgtgttatggtttccttagaaatataaggttttacttgtttagctggattaaaagaaggaagagttgtcatgtttaatttgtttatggaccagaagcaataatctatttgtgtgtagctggattggtgttatgtgatgtcccctaccgtgtgtcccaagatctacttgatgattttattccaatgttgttaatttaagtttgtgtgattgtgaagtaaagggtatcaatgagactattattattatggtaaaaaaaaaaataaaaagttaaataaacaaaaacaaaaatatatgcatagcaaaaaaaactcagcaagggcttcctgagtaaaatatttttgggtagatccatgcccttctgggcttgtacccacatttagcgacttcctattactggattttctagaatcaatcaagccatcaacttctctttcctcaattgaagtaacttctaacttccttttggagcttttattagcattagcatatccgactaattttgaccatccccatggcttccaaaactgtgtcttcattggaaatcctttgcgctgagtcaagttaacaagctgttgtcttacagagttgtttcccaaaagaacatcttgcccttgtaagaaccatttgatacccatcacgaatgactcttgtagctttccaagaaggtgaataagttctgagtatagaggagcagcatcaggtctgacaagtagcctagacaaaataacttcagtaagccccttttccctttcagagagggtaaaattctcagcattaggggatagggatcgaagtgcttttacatatggcacattctttggtttctcaataagagattgctcatccaaaagcagcctcaactcaacccattgccaatggaactttgcaggctgtaggacattcagaatttctataagcctctctggaaactttacatcattcttggtactagcttctgcacaaccaggctctaaagcatatgtaccatcgtctctcattgttactggtatttcacaatcaagaagagcattcaggaaaacccgggcacgaagaggtgaaagagctttcaaacattcatcagggcttcgaagttcaacgattgcagcaaactctgaatcaccaacatccgcagccagaagatcatagaaaagatgcatgttacggaagcagacatctcgaaaaggctgatgtcttgtgatatcactaattgcacccagtagagactgataaagctgaatgtcttcatgattcgatgtactggtgtcatataaatatggtcgccaaaggaccatagcaaatattgaataagctggaggaagaactatacccaatggaagcgtccgttgcaaccttgaaaaggcaaggacataagaatcacctagaatctctgcgatcactccattataaactgtcttacagttccctattagaatcttaaaccaatgtaccaaaacttcagtggaactgtcaattttgaaatttccaatggagtgggtcacaccatttgtgctagctttggaaattcttaagaactgcagaatgtccaaaccttcttttaatcttaggaccaccatcatccgctctagactgacaaccccataaataatagctccaacaactagtgcagaaacagcagcagaaacttttacagccttaacattaaaacattttgacggattacttggaacttcatttgcatgatttccactttcatcatgggtctcagaagactgttgactgcggtgagccttaggaggagcaaaagatgctgcaacagctgaagaagcttcaacagcaagagatatttcaaatattctactaaatcgatcacctaaagtttctcttagcaaggccagagagtttatgtggatatccaaaatgtgttgaatcaagtttaatgaattaattgaggtaacacctggattgttaccacctgaaatatccaagtgtttagctattgcatgcccagcattgtcaacaattgcagaaacagcagaagcaactaaagaatgatctccatctggatttgctcctccattttgtctgatacagtctgatgaaattccagaaataattgaatcaccagtgattgactttccactatccagttcagcaagcagccttttatcagatgtggacctaaaatttctttcccacctagcaacactagtcacatctctgtatttccttaagaaatatcgagcataagcaaaagctactgaagtagactgcctttcacctgacttatgaacagttctattcattgaaacactcaaaacctcgggcaaaagatccattgcaataaggatgttctcatacctgagcaaggatgagaacagaaaagcttcggctacttggaaaacttggttttctttatgttttgggtgcataacacctcttccaacttgaccagatgtggtccttccaatataaatctttgatagaagccatataagcaaccttacagaggagagtaaatcacaacatgtatccattatgtacagcactgacagaagttcatcttctccaaacctccatccagatgcaattttaccactatgctgcacagtggaggcacttatggagttattagccttagaatgtttcacttcatctccttcaattagttgttttatggacttcagcagccagattgaaatggatcttctttcaagcaatctaagtctcttaagtgatttgccaacttcagccagagtcaacatactcatatgatcagcgtctttaagaatgtcagagttagtgccaggtttatggtggggacaactcagattgttatcacacacgtgactagtagatgccccctggctaccatcgattctagcagctgcaagttgtgctatattttgtgtcttttgcactactgttgccttacctccacttgtttgttcaattgactgatgtattgtttcaacagtaaacaattcctgcttctgctctttccttacccaccaaaaatcttcctcatctgattgaaccaatggggacccttggaaaggaaacacgttcttatccaacttctgtctcttggtcctactactatccttacagccagtttttgcatgcccaacatcttcttctgagtctaccaaatctgtttgtcctttcttggttttttttgtttcttctcttcctgatatcataagttttacctcttctacttgaactgccactctgccatgattatcatctgttgaatccattagaagatcaggctgtttctgaaggcaggaactcaaagggaccctgccttcaacatttgcatcagtagccagaccacttgaaagctcagaaagcacaagtcgacgctcactagaatatgttgacacaatttcataaaggacttgatcttcagcaatcttagcttcctcaaggatattaaataagcaaaaccctggcaggtgcttcagaattttgtaatgcctcgttttcttttccagatcaaacaagctatcattccaaatggtgattccactaacaattagttgtctcacatatgtctgaggataaaatataccactgcgaataagttcagtcatgaaaacatccacacttttaaatcccgaagcatcactaatctcatgttgatccaaccagcatacaataatgtcatgcagtggacctgggctgctgaagatatcctttttgttattctcatcaatgctacctgtactgtctctaaatccagaagcagtctccattgctgtcaccttgatagaagaatgattcagagtagcacttttaaggtgatccttcattgcaagctgactgctgctcttggaagaagataaattatttatctcattcattttatccttcaacagggaaactgccatatagacctgagagaaatctttgcttcctgaaaattttacattttggcattgtgatgtacggcaatcacggaaagtacatgttgcccactcacaaatgaaaaacacagagcagacaagggataactcaacagctcccatccacatcagagaagatcgcaagcaagggctgacttctttaatccatgtttcttccatcagggtatctgatagataattgaatactgatgtatatgctgctgtcaagtttccagttacaagtgctttgtccaaagcttgcactacgttggctgccccacgaacttgaagattaggattagcaactaaagaaagatcagatgcacgtctttgaactgaacaaatggcataaccacaagagaggtgtcgagatgcattctgtctcctagagctagcaattttaccaccacctgctattttcagaagagcacctttaccgtatacatcaggagccacaactgatggaagtggaaagcaatccaaagaaacaaatgtatcgggaacagcaagtatcaagtactgcagtaactcaactaaagcagaggtaatggatgacctttttgggttattcttaacacttaagctgccaggagaagcatcactgagacgttgaatcagtatttccaccagcatgtggatatatgtctgtgagagggttatggtatcaaccaaagaaagtacaataggcaagagtaattctaaaacctcagttgagtctctctcctggagctgattaaatacccattcgataagtaacgacggaacaagtaattgttccatgagatgacattgaacaatacgaatcatatacgaccatttaaagtgtagcgaaggctcctcaacatctgcactagcaggtgatgccccggtttttaacttaattgggctgtctccagcaacaaggcatggcaatgactgttcttgagaagatggaagtccaaaaaagccatttttagaacacaattcgtccaaaagcagctgcaagtattcaataacatcctttgtccagtgctgagatcgcaaactatcaggagcagcagatgaaacattattggatgatgtttgaacctgattaaggtaagtaaccttcacaagccatgatgctcttaacagtgggacattatatcggataagataattaaagagtaacttcctccgaaaaccacgaggaacttgctctgctaatgaccatagacgcctgtttggttgcacaagggcctcgatccattttctgcgtgtgtcttcattgctatgcatttgctctggatacatcccaggttttgtcagcaacgagccagaaagagggaccccataaacttggccagccttcctcttctgagcacgagattcattgatcgctctgaaccgcttctttagtgcctccttgcattttgtagcaatatctggtttgctcaagtatggaatctgactgagtacaatctctctggcttcctcaattccttcaacggtatccttgtacccagattgcacatattctttggttaaggtctcttctgcacaactcaatgtctggggatagaagtcaggtgcaccaagcccgccactaacaaataatcttcccat

SEQ ID NO: 21743 - DNA, 569 bp, Oryza sativa
  Clone ID: TF_LIB3599-052-Q6-K1-E12
cggacgcgtgggctgataaataaaaagggcttgctgtttagctaagcagctatgagatggccaccaatccgcagctacaggaagaacaccatggcgatgagccagcctgctctgaaaggcaaagacgacggcgaggcgaagcaggctccggcatccggttgcctctatgtcaaggtgagcatggatggtgctccttacctcaggaaggtggacctcaagatgtacaagaactacaaggagctctctttggctctggagaagatgttcagctgctttaccgtcggtcatggtgaatcaaatgggaagtcagggagagatggattatctgattgccgcctgatggatcttaaaaatggaacagaacttgtgctcacttatgaggacaaggatgaagattggatgcttgttggtgatgttccgtggcgaatgttcacagacagctgtaggaggctgaggattatgaaggggtcagatgcagtgggccttgctccaagagccactgacaagagcaaaaatcggaactgagcaaaagatgaacccaatatgaatatccgacccctacaatcaca

SEQ ID NO: 21744 - DNA, 1065 bp, Oryza sativa
  Clone ID: TF_OsC6383_1
tcagaagtgccagtttgcatggactaggtttggtccgagcccttaactatgggactaagatatctggttatcctattctttttatgtatctgacagagaatctctgtgtatcaggaaaaaatgtgtcctctgttaaccatgggcaatatggcatcttattctttgtgcttatttcatactgagaatgttataatttatttaccatcagccccagtgtcaaggtgagcatggatggtgctccttacctcaggaaggtggacctcaagatgtacaagaactacaaggagctctctttggctctggagaagatgttcagctgctttaccgtcggtcatggtgaatcaaatgggaagtcagggagagatggattatctgattgccgcctgatggatcttaaaaatggaacagaacttgtgctcacttatgaggacaaggatgaagattggatgcttgttggtgatgttccgtggcgaatgttcacagacagctgtaggaggctgaggattatgaaggggtcagatgcagtgggccttgctccaagagccactgacaagagcaaaaatcggaactgagcaaaagatgaacccaatatgaatatccgacccctacaatcacatcacttttacttgtaaggtcccattctctaaaccacaagggtaatggtctaagttgcgagaaggggattacttatacctatgtgtcaccctctttttttttgtttttatttgtaccaattatgttagattttaagcgtaagttgtgtaagttcctgtaagttgtctacttaaccttgcttgtagtttcttctgtaaattgttgtgctgtatgatgcaaactatttttggtattttacttggtgcttgcaagttgcaattgtccgtgcaaaaaaaacttccaataaaaaaaaaaaaaccttctgatgatctatgaactttgcccctctctggtgctcgaagggccagattactgttccttcagggcagttaggagctgatcattctcatcactgattgagtcatcagctttctgttatgcatacaattccatcatattgtggtgataatt

SEQ ID NO: 21745 - DNA, 1151 bp, Oryza sativa
  Clone ID: TF_OsC6383_2
cccatccccctgatcccccgggctcgtcgcctgcgtgctcccgtggtcgcacttctcgcatcgcaaagctcggcagcaaaagcaaagcaaagccaagccaagcttgaagctccccgcactgagccaagaagcctccacctcaatccgaaagagatctcgtgcgcgcacggcgatgcggtgaatcgggcatggcgccgccacaggagcgggactacatcgggctgtcgccggcggcggcggcggcgctggcaacggagctgcgccttgggctgccggggactgcggaggaggctgagtcggagggcggcggaggaggagggacggatgcggctccgctgacgctcgagctgctgcccaagggcggggccaagcgcgggttcgcggacgccatcgttgggggtcccgccggccagcggcgggaggcggccgggggcaaggcggcggcggcggcggcggaggccgaggaggaggaggagaagaagaaggcgcaggcgccggcggcgaaggcacaggtggtaggatggccaccaatccgcagctacaggaagaacaccatggcgatgagccagcctgctctgaaaggcaaagacgacggcgaggcgaagcaggctccggcatccggttgcctctatgtcaaggtgagcatggatggtgctccttacctcaggaaggtggacctcaagatgtacaagaactacaaggagctctctttggctctggagaagatgttcagctgctttaccgtcggtcatggtgaatcaaatgggaagtcagggagagatggattatctgattgccgcctgatggatcttaaaaatggaacagaacttgtgctcacttatgaggacaaggatgaagattggatgcttgttggtgatgttccgtggcgaatgttcacagacagctgtaggaggctgaggattatgaaggggtcagatgcagtgggccttgctccaagagccactgacaagagcaaaaatcggaactgagcaaaagatgaacccaatatgaatatccgacccctacaatcacatcacttttacttgggaggtcccattctctaaaccacaagggtaatggtctaagttgcgagaaaggggattacttataccctatgtggaccctcttttttttttggttttatttgggcc

SEQ ID NO: 21746 - DNA, 1150 bp, Oryza sativa
  Clone ID: TF_OsC4615_2
ccggccgggataatctcctccgccgccgcacctcgcagagagagagacgccgccgccgtcgccgccgccggcgaccggagagaaagagagagaagagcaacgcccacggcttcgccgccgctgccggcgaccatgtcggtggatacggagcggagctcgacggagtcatcggcggcgtccgggctcgacttcgaggacaccgccctcaccctccgcctcccgggctcctcctcctcctcctcctcctcctcctcgtcatcctcctcctcctcgtcgccgtcggagcccgaccgcaagcgcgcctccgccaccgacgacgaccccgacaaccgcctcggctccaccgccaccgagtcccccccttcccccaagtacgcgctctctctctctctctctctctgacttgattttggcccatttgaggttgcagcctgacatggcgcgtcgcggcgggcgcagggcgcgggtggtcgggtggccgccggtgcgcgcgttccggaagaacgcgctcgcggcgttggcggcggcgtcctccagcaaggccaagttcgtgaaggtggccgtcgacggcgcgccgtacctgcgcaaggtggacctcgaggcgtaccggggctacgaccagctgctcgccgccctccaggacaagttcttctcccacttcaccatccgcaagctcgggaacgaggagatgaagctcgtcgacgcggtgagcggcaacgagtacgtgccgacgtacgaggacaaggacggcgactggatgctcgtcggagacgtcccctggaaaatgtttgtggagacctgccaacgtcttcgtctcatgaaaagctctgaagcagtcaatttagcaccaagatctgcttgatgagtcgcaaatctctgctcctgtctttgagaagcatgagaggaagccatctttgcttgctgaggtttttccatgtctgtgagagaaatgtgtacagtcatcgacttcgacttttggttccatcgtgctattgagtttcagaaaagaaatggtttttagcttgtagctttgttaccagtcagtagtctctccatatagatgagcgaagcggtgatgctttaaaatacacccatagattgttttctcgataaataaaattggtctcactcactgagcccctgttcttcg

SEQ ID NO: 21747 - DNA, 1876 bp, Oryza sativa
  Clone ID: TF_OsC141148_1
ccaccaatatcgactgtagtaaagtgctatgaagaaattcctactgcaaatccaaagttgtactgctataggaaagctctaattttgggtactgttacaggtaagtacaattttaaaatcagtgtatgagtatatgacgctggaataggcaaaacaaagttctgcatagcgattgacaaatgatctctctacctagcatcttcagtgtgttgctggcaacctctaggtccaaagtgttgggaacacttcaagacccttttccgacacaatgcacaataatggcctcggcatcccgggcaagatatatgattgttggtgcccagctctacagcaacagtctgtacatgtatgacttttcattccgacggccacagtttggacagggataagttaacagcacccattcaggttctaagagttcagcatcttcgtcagggtcgccaccaaaattttcatcatcctgctgctgtgggttttcatcttgttccctctcaaacatatcacagtttccattccagaaatgatcatatcctccaattgctttgttacaacgatagcagaagaatctcccacagttcccacatgtcatcttgttgcaaccttcaatttttgagatagccatcttacaacgagggcattgcttagaatcacgaagtgcttcctggatatttatcaactcgtctatttccctcttttctttcaacaattgttcctctggtatggaatacaatttctgtcgttccggggaaacaacttggggtctggggcctactcgcatagatgacatccttgtcaggcccttcaaaatgcgtattttttcttcaggagtaatacatgtatcccccacatggcggcggcgtttgcacaaagtgcagaaggtaaaaaaacaacccgggcattgagcatcattgtcaacttccaagcaagcagcagaacacctggggcagtaaactagatcaggcattgcatctaacagtttctgtagagcaaatgattcccattgtgcatatccatcatctcgtagaaggcttttcaatacggatggcggaagtggattgcggcaatttgtatcaggacatgccagctgcattaaattcccttctttcacatggattttgcagtgagactccatacagagaaggctttccaaaaatatcttatgagatctcttctcactgtaactctgcataagaggaatagtagactcaactaaaattcttctcgcgatagctcgttcatctccaatttttaatgttttatctggatctaacactatttcatcattcaaagcaatggaagaccacgaagagctattcagccaatccacccatctgtatatgacttcttgccctggaagctctgtccaaacctcatcaagcgcagcacacaggtatgagacctttggttcatccaaccatttagctgcaagatgatagagttctccgccattgtggttttcactatcatcagttccaaccatagctccacttcgacgaagattcaagaacacacggatactatcaggaagtgtataatgcacaaaaatctgaataaatcgaagattgtccttattctccaagatcaccatatcatcaccaaaaatagcttgcagtgctattacctcgtcttcctgtagttggttattggcttgcagctgctcctccggtaggtcgtcctccccacgagccctcgcggccatcgactcaagcagcgcagccgcctcttcctgcgccgcccagtaggtgatgtcaacctccgccgacggcaagggcttgtcatccccaacatccctcacagccacccccgccgccgcggcggccgccgaggacgaggcttctctcgacatagggtttgaggatgagccaccagccgccat

SEQ ID NO: 21748 - DNA, 1810 bp, Oryza sativa
  unsure (1)..(1810): unsure at all n locations
  Clone ID: TF_OsC53097_1
ttgggatttcagcaatggaggagaggttagccgacgtggagggcagtttcgcctgcaattcgagaggggaggatgacttcaggagctgctgtggggatgaggatgagtgggaggacaccgaggagtcattcacggccggcgtcgccaagggagagcttgatgagagctcggtgaggctgttcttcaagggcgtgtcgagccccgaggcggaggggaagaagctgtccgggattggggtggtgatggagaggtcacctggggtgcctatgcttcaggtgcagaagaaactggacttctatgtggatgagctagtggccgatcacttggcgctgatggatggcctgttggtggcgttgcagaatgggatacggaagatctttgctttcaccaattcggagaagctgtactttcagagaatcgcagaagctgaaattctagaagaccagctcttggtagctttaggacacagaattcttgaactggtggaaaagctggaagactttgatataatattgcttcctagctttgagcttgagaggccactgcagttggccaaagaagccataggcatcatgtatctatctccatacgaggttggcacctgttcaatttgctgtgaggaaaaacgaggcgctcagatgatcaaagtgggttgtgctcatacattttgctatagctgcttgacttcatatactcaagagaagctgcaaaccaacaaggttcctataagatgcccacagttaaggtgtaaatatcatatttctgctagtgagtgtaagtcattccttccagttagctgctacgattctctggagagagcttttgcagaagctggcacctcagacatggaaagattttattgtccctttccaaactgttcagttctactagatcttagtcagcacttctctagggcaagtacatcaagtcagtcagacctcaattgtgttgagtgcccagaatgccatagagatatctgtatcaactgtggagtgccatggcatgtcatgatgggctgtgatgagtaccagagcttgcctgttgatgaaagagatgcaggagacctgtctttgcatcggctagcacaaaacaataggtggaggcgttgtcagagatgccgacgaatgattgaactcacacaaggctgcttccatatgaattgctggtgcgggcacgagttctgctactcctgtggcgccgagtacaccaatggtatacagacatgccaatgtgttttctgggacgaagagagcatcgaggctgcctcggcagcgcattccacccaagcatccgagatatgggcatgggacacgttcgactgcatgccaaccgccatcgaagggtactcggagcaggagagagctcagctggctctcattcagaggttcctctcagggggtttcaacctgggtgagcctccaagccagtcgccgccccgctgcgccgattcatatatcattgacaccatgaaggaccttcaccagctgccatggctcgagcggttcgtttcggtgatcagtgacagctacaatgaagattacatccagtgaaaacaacatagatagcattaagaaaaaaaagaatggcacatactgatgaatttcatttggaataatatgtttccatgcccctcttgaaaatcaatacaggaaaagtgagatggttctataccttcatgagcttttcctcttgtactcccttttttcctggtttggtgcataagcaaaaggagttgccatcactgattttatttattttttgttaattccctaagcgtgtaaaaaaaaaaaaaaaaaaaaanngannnnaa

SEQ ID NO: 21749 - DNA, 943 bp, Oryza sativa
  Clone ID: TF_OsC58839_1
cgcttccgccgccgagcaccactcgtcgccggccatggagacctccgccgccgcgggtggcgcacacttgatctacgtatcctccgacgacgaggaggacgaaacacgcgtcctccttgccgaatcctacagcgccgaggagatccagatccagcaggccatcctcctctcgctcgacccctccagcgacgcggacgccgcccattcctccgcctcctcctcccgcccctccggcgccgcctccacctccgacgaaccctcctcccttcccgaccgcaagggcaagcgcaagctatcatcggaagaagatggccctatcgaatccacgaggaagaagcggcggaagcgcggccgattcaagtgcagcgtctgcatggagaagctacaggtctcggagcagttcaccgtgagcttctgtgcccacgcgttctgcaacagctgcattggccgctacgtcgccgccaagatctccgagaacgtagccgtgatcgggtgccctgaccccgggtgcgaggagggtttcgtcgagatggacacttgcagggatatcatcccgccggagttgtttgatcggtggagcgtctcgctgtgcgagttggcactgggtgagaagaagtactactgtccgttcaaggattgctcggcgttgctgatcaatgacaacgacggcgcggagaagaagatcagggagacggagtgcccccactgccaccggatgttttgtgcaaggtgtcgtgtgccttggcatgatgggatcaaatgtaaggagttcaggaagctaggcgatgatgagaagggggaggaggatctgatgttcaagaagctggctgggaagaagaaatggcagaggtgcccaaattataaaatgcagttttctgaatggaagattccagaatcaccaaattttggtagagttaggcaatgtaaggttgtgatggtgtaa

SEQ ID NO: 21750 - DNA, 2664 bp, Oryza sativa
  Clone ID: TF_OsC1517_1480
ttactcaattactgaggaatgactcgggcagtgacccatgccacggtgccactccactttcctccctcccacctcctcgccaccatcagagccatccgtcggaaatcttgcggtgacaaggatgttagtggtgtggggccttttctcccatgagctcccagaggttgcgagcacaaggtgatagatttggaggatggatctggccatgatagtgactgtgatggcggcaacgcggttgaagcgacgacaactatgaccaatggtgttgaagacagttccagtagtggatctagcgctggtgatgctagatccagtagcttcgaggctagatctacgtgaccaacgcgtggtagaggaatgctcgcaaggcatagcaatggcgacactgggcaatggtgagaccgcctgcgtggaggtacggggatgggtgtgagcagttgctgtggcaaccccctcgtgccgacaggatgcggtattggtagcagacacggcgataggaggaaggtgggggttgaccacctttgtgtagaggtgttggcgacaactctcctcttctcgtgcttggtagtcggcgacgggatggcgtctgtgtcgttggctactgcgcagatgagagaccaccaccccttttatttgaatggcttttattggaggataagatgcagttctccttttagaaaatctgcacagtgctttaatcagaacgacgccgagattgtcgaggcactggcatttctccttcccctccagcaccgctcctatctggagcccacaaaggtagcagaagaccatgcggcacctgcaactcatgaccctgcagccggctgtcctctcaaccagcatcctgcatttggggcacgccttccaccgccgctcgtcggcgagcttcttcaccatggcggcctcgggccccttggagcagtcccggtggtcggcgtcgtccgccgtgctccactccccgccgcacgtcgcgcacagcaggtgctggcacgccgggcacgccgccatggccggctccgcctcgccgctggtctccagcaggatcccgcaccggcggttggggcagtacgcccgccggtcgtgcggcacggcgccctcggcgagccggagcccccagtcggtgaacgcggcgaagtcgatggccttcttgcacccctccgggtggagcacgccggcgccgccgtcgccgccgtcggcgcactccgggtccgggcacgccaccggcacggccccctccctcaccttgccgtcgatgtaggtggtcatgcactcgaggcagtacttgtggtcgcaggggaggccgcggaagaggtcgagcatcggcaaggtgtcgaagcagatgccgcagtcgaacgtcgggaggtcgccgtcggcgagggggagcaccctcggccgcctcgtcgacgggccggcctcgtcggggtcgaggtcggatgggcggaggccccacttcttgtagaagtttggcatggagaattcaccttcttcttcttcttcttctccggcgatggcggcggcggtggcgcggggtggtggttgcgccacgacgggcgattttgtgaggtattgcaccgggagaggcccatggagctctgggtcctcttgcagctcggcgatcacggcgtcgcggatgacggagtcgtaccagtcgttgtcgtggccgtcttccatgccggcgaagacggccggcgtgtccctgtcggcgagtagggcctgcctcttcgaggaaaccgagtcgttctcgttcgcgacgttgcggtgaacctcttcttcttcttccatgccgccggcggcgcctcctttgccggcggagatggccggggttctgtgttgcccacacttgccggcagagacggcaggggcggcgtggctcccttctcccgtggtggcggtgacggccgccggggtgtcggcggcggcggcggcggcggtgagctggcggtcggcggcggcaatgcgagtccatatccggccgaactgcgcgacgtttgggcgagggtttgcttgcaatgctgccatgaggttttctgccctagcccaacggccattgccggcgccacgggcatggccggtgccgggagcggcacgagccgccatacgggcggcaggacgtctcccgccgtggcggggagcggcggcgccgccagcgatgaggccgccggggcggagtgagagttcagtagacggcgccatggcagcaggtaggccctgtggtaaggtggcggtagagctcgtgccgatgtcggcggtggcggcgccgcccggcggccgcgggaggaaggccgtcgctgatcttgccggtgccggctgctgtctcgtcgccacggtgcggcgcccaccggatcgtaacggaggcggcacgtacagttggacggtccgcgccgccgccgccgccgccggcgcgtcatcatcatcatcgatgacgatgggttgggccctgctcccggcggcgccggcggcgagggaagacgtcgatcctacgcgatccatcggcggcgcgaagctgctccagtcgtcgtcgcccagctccatcagctgcgacacgtacaggtcacgcgcgaacgcctcgtcgacggcgacatcggcggcggcggcggcggcggcgtggtggctgctcgatgctcctcctccagtcgcagcagggtggggttttcctccttccat

SEQ ID NO: 21751 - DNA, 984 bp, Oryza sativa
  Clone ID: TF_OsC42004_2
gccgcgaaacgaggcaatggcgtcggggtcttccagttccaacgacgccgccgccgacctcaccgtcctcgtcgacgacttctacttctccgtcctctcccacggccgcaacgacgacgacgactccgccgatggagacgacggcgagctcttcccgatatccgacgagaagtacgcctccgagctgcagctccaggaggtgatcatgtcgtcctccgtggcggccaccacggcgcgctcctcgtcggcgccggttatcttcataggtgagtgctcctcctcccacgccgcgtcgtcgtcgtctcggttgacctcgatccccgccgccgccgcgacgacgctcgtcttctgcaagatctgcatggacgccgtgccgccgtccgccgcgcaccgcgcgagccgcgggtgcgaccacgccttctgcgcggcgtgcctcgcgggctacgtcggcgccaagatccaggagaggatcgccgacgtccggtgccccgaggagcggtgccgcggcgcgctcgacccggagctctgccaggggatcctcccgcgggaggtgttcgaccggtggggcgcggcgctgtgcgaggccatggtgctcgccgccccgagggcgtactgcccgttcaaggactgctcggcgatgatgctggacgacgccggcgaggccgtcaccgagtcggagtgcccgagctgccggcgcctcttctgcgcgcagtgcgccgtgccgtggcacgccggcgtcgactgcgcggcgtacaagaagctcggcaagggggacaggggcaaggaggacctgctggtggtggagatggccaaggggaagaagtggaagaggtgccccaagtgcaagtacttcgtggagaagtcccaaggttgcctgcacatcacctgcaggtgcggctttgaattctgctatggatgtgggagacagtggcagctgatacatgacggctgctgctccctaatgacacaacaagctggagaagt

SEQ ID NO: 21752 - DNA, 892 bp, Oryza sativa
  unsure (1)..(892): unsure at all n locations
  Clone ID: TF_OsC1713_3842
cttgtgtgtagatagtaccatagcatatgtccattcagcactcgcctgtgccaagcttcaggtatgaactttagttgggtctctggtataccaacaacatcacttaactttgtaagatcttcattttcaactttttgcagatctgcttgtgctttctgccttgatgtttgattggacgcccagcgctcataataatgcatgtatctctcaagcgaatttttagctctctctctccttgcttcagcctcatcatacatgcctcccatctttgctgattgataacgattgcaagcataaaagccaccagtcccatctccatgatctgaccatgcacctaggcataaccagcaaaactcaaatttacaaggaggagtgcatgtcatatgcatgcatccctgattcttctctataggtcgtttgcatttcggacagggcttagaataagctaatatccaattcatgttttcagattctgcgctgttctttagtatccactttgagactgtgtcacagctaactggccgatgagcttcctctgcacaattccagcaaaaactgaatttgcatttgcatgagacatcatagttaccatcaccaagaaactcaactgcacaggtacaatcaggagctggacaccattttatcttgttgttaactccaatatatgaccataatacaaatcgtgcatactttactttatcctcatctttcgtcagactattaatcatatcttcaagaacgattgcatcacaagatggttcagggcactgcaacaccaaacancctggaccatcatttactgcagcactaatatacccttcccaacattcatgacaatagaaatgggaacaaccagcacagctcattgcatttgcagcacatcctcaaaaca

SEQ ID NO: 21753 - DNA, 520 bp, Oryza sativa
  Clone ID: TF_uC-osflm202106d08b1
gctaatgatgatgataaagtgagatatgcacgatttatcttacgtgcatatgttgaagatagcaagaagactaaatggtgtccagctcctgactgtacatgtgcagtggaatttgtcagcgatgggaactatgatgtctcatgcaattgcaaattcagtttttgttggaactgcacggaggaagctcatcgaccagtgaactgtgagactgtttctaggtggatattaaagaatagcgcagaatctgaaaatatgaactggatactggctaattctaagccgtgcccaaaatgcaaacgaccaatagagaaaaaccagggatgcatgcatatgacttgcactccaccttgcaaatttgagttctgctggttatgtctgggttcatgggctgaacatggggagagaactggtggattttacgcttgtaatcgctatgaatcagcaaagaggagggagtttatgatgagactgaagcaggagggaaagagccaaaaattcacttgagagatacatgcattac

SEQ ID NO: 21754 - DNA, 2248 bp, Oryza sativa
  Clone ID: TF_OsC2708_1
ttttttttttttttgtggatgtaaatttccttgagaattggccaattcattattacaaggttacaacatcattacaacaactcagttcattggtggcgcacatctgctagtacgcgctacttccatagaacaacacaagagttacagatatcgatatagagttatatacaggatgaactagatgatgatgagcgaggcttcaaggataccgtcagttgattaaaaaaattgggaatgacctgaggttttttagccatagcacatgatgagttgagaaaatctaatttgcataggcaacagttctctgctaatacctcctcacgccagctccactgttcattgaaaacttcaactttgcatatgttctttaccaccaggtttgaaccagaggtttctcaaccaatggagtcgagatctaaaaccatagctatgtaatgctatcgatgctggttgttacaagcctggcagtttctggcagatttttactgccaagactcttcgaagttgcgctcttgctgcatgtaccatggctagtggaaggacctacatcatttaatccagtctccaaagcccggacaaggttctcgaaataattgcgagtcacactagttaatccagccaactttgtacggaagtcattgaaatcttttgagggagattctgcttcaaggtatacttgaagttctttctctgcacattgatgcagccgctccaaacctgattccgcctcaccttgcagatattcaaagaactgtcttttggcatgttcatgctctgggaggtaaaaaccataagcataagtccacttcaataccctcctacattcgacaatctgtaaccaagcctctatgatgaacttgagctgtgactctggttggctttgtatatcacttaacttttcaagcttgtcgttttgcaaactcagcagatctcctaatgccttttgcctcgacgactgattggctgcccaccgttcataatagtgtgtatatctctcaagcgagttctttgccatttctcttctcctttcagattcatcatacgctccttcctgccttgctgcctcataacggttacaggcataaaatccaccagtccgttctccatgctccgaccatggaccaagacacagccagcaaaactcaaatttgcatggaggtgtgcatgtaatgtgcatgcatccctggtttttttcaatgggccgcttgcacttaggacaaggctttgaattagctagaatccagttcatattttcagactccgcactgttcttgaggatccactttgaaacagtggcacagtctaccggacgatgagcttcctcagtgcagttccaacaaaagccgtatgaacagttgcagttcacatcatagctaccactgcccatgacaaattctacagcatattcacatccaggagcaggacaccattttgtcttcctattatcttcaatgtaagatctgcgaagatatcgcccatacttttccctatcctcgtcatcagccagtgaattgatcatatcttgaccaacagcagctgtgcaggacggatcaggacatctgtcaatgtgcactatgtaagtggtgatcccacacaaaacagaatccggggttgataaagagaaatatctcaaggttagattgtcaaacctctccaacatgcattctctgtcatttggcatttcgatgagcttttccggaaaaccaacaaccttacgaacatgttcttcatcagcaaaccattcatcatgcaccttactgacactccagttataattacgaagaagaacacatgcttctgactttgaaattgaaagaacagttgaaaccctatttatatcatcctcttggcgctgttgtatatcggcttcacttaatatactgtaattttgctcatcctcatgagatcgcgaccctttgcgaataatggcggttgtttcagtatggtaaggatatggatatatccacaattcatttacagttatgccatagcctatttcctgtagactatctttatcccatgaatttatatccccgctccccaccctcccaaacaatacacccatagaattcccattgtttttctgctgccggtgcgagaggagctccgcggaatcgtcggagtcgtggtcggcgaagtcgtagtcggcgtccccgtcgtcgctcccgccgagcccggcctccccgccgctgtagaagtcgtcgtcggcggagtcgttcgcgtcgagcatgtcgtcctcggagtccat

SEQ ID NO: 21755 - DNA, 5272 bp, Oryza sativa
  Clone ID: TF_OsC54778_1
atgcgccgatccaacgatggccgccccttccgcccgccggactggggcccgccgccgcaccgctaccaccaccaccaccagaaccagtaccagtaccagcagcggtatcgccccgcgcagccggggccgcggcagttcgccgtgatcctcctccgcggggggagcaacctctcggcgccgccggccacggaggtcgaggcactcgtcgccggcctgccctcccctcccccggacagcctgagcgtctcctcgtcgggccgccaggccgcgcgcctcgcgttccgctccccgcaggccgccgccgccgccgcgcgcgagctctggtcgctccgcctcgagggcctccacctcctcaccccggacgtctccgatcccgccctcgccgcgcacgccgcccccctcatcgcctccctcttcgccgcccacgccgcccgcctcgtcgactccgacctcgtctccctcacggccgcccgctcctccgagctcgcggcctccatccaggcggtgaagcgccgcctggcggggcacaatcgcatccgcgacttcgagcagctccaggcccagaagagaactctcaaggctgagaaggagttggtagatgctaaaatcgatgagtacaaagccgcgatgagatcgatacggcgtgcattgttgcgtgggacggaggatgacgaggaggcagaggaggaagggttggaggtgtttgggattgggggaggtggtgagatgaatttcgctaggctgcacatgataatgctgcgggaatgtagaaggcttaaggaggggctacccatctatgcttaccgcaggaacattctagatcacattttcgctaaccaggtgatgattttgattggggaaactggttctgggaagagcacacaattggttcagtatcttgctgactcaggtcttgctgctaatggttcaattgtctgtactcaaccccgaaaaattgctgctatatcattggcacatagagtagttgaagaaagcaatggttgctacggggacaactttgtgttgaattcaacctttttagatcatcaagatttcagttcaaagattatatataccacagacaactgccttttgcatcactgtatgaatgatatgggactagatggcatttcatatattattgttgatgaagcgcatgaacgaagcttgaacaccgatcttctcttagctttgattaagaagaaactgcttgataggctggatttgagacttatcataatgtctgctactgccgatgctaatagactcgctgaatatttttatggatgccaaacattttatgttaaagggcgaagttttcctgttgaaattaaatatgtccctgatatatcagaagaggcttccttcaataccgtgccaaaccatctgcgcggttcttgtgctactgcttcatatgtttacgatgttgtgaaaatggtaagcatcattcacaagaatgaagaagagggtgctatccttgctttcttgacttctcaactcgaagttgaatgggcatgtgaaaacttcagcgatgcagatgctgtggtacttccgatgcatggaaagctttcccatgtagagcaaagtctagttttcaagagctatcctgggaagagaaaaataatcttctgcacaaatattgctgaaacatcattgaccataaaagaagtgaagtatgttgttgattctggactggctaaggagagcagatttgtgcctagcagtggtctcaatgtactgaaagttaattggatctcccaaagttctgctaatcagcgtgctggccgagcaggtcgaactggagcggggaggtgttacaggctttactctgaatctgacttcagtatgatggaagtgcatcaagaacctgaaatccgcaaagttcatcttggcactgctgttctgagaatacttgcgctgggtattagggatgcacagaattttgaatttgttgatgccccaaacccagaagctattaatatggctgtaaagaatcttgaacaactgggtgctgtaaaatataaatgtgatggttttgagctgactgatactggtcgctacctagttaaattgggaatcgagccgaggcttgggaaaatcatgcttgattgctttggttttggtttgaggaaggaaggtgtagttctagctgctgttatggcaaattctagcagcatattttgtagagtgggcacagatgaggagaaatacaaagctgaccgtctaaaggtcccattctgtcatcaggatggagatctgttcactttactagctgtatataaagagtgggaggatgagcatgaaaacaggaatacgtggtgctggcagaatagcatcaatgccaagaccatgaggaggtgccaggaaacaatatcagaccttgagaattgtttaagacacgagctgaacatcattgtcccaagttactggtgttggaaccctgaggagtccaccgtgcatgataagttgctaaaaagaattattctcacatctctttctggtaatattgctatgttttctggacatgaaaggtttggttaccaggtgatttcaacggatcaggctgtgaaactacatccctcttgctcattgctcatttatgatagcaagcctgagtgggtggtgttcacagaaatcttgtcagtaccaaatcaatatttggtatgtgtaactgctattgatcctgatgctttgtgttcgattcaccccatgcctttgattcagcaactggagaagcttaaattgcaggtgaaggtaataagtggacttggatataacttgctgagaaaattttgtggaaaatctggccaaaatcagcagaagataatctcacttctccaagaagaattcagggatgaccgtgtgactgttgaagttgacttcagaaataaagaggttgtgctatttgccaaagaacaagacatagaaaaggtgtttggcatcgttaatgatgcattggagtgtgaagctcggatgttgaggaatgaatgccttgagaaaagtttgttttctggaaaacctggtgattgttctcttgccctatttggttctggtgctgaaataaagcatttggaacttgagaagaggtatctgaccgtagaggttttgcatcaaaatgctcatgagttgaatgacaaggagcttatttgcttggtggatactcttatctctggtgttgctaatttttataaactttatggaaatcttcaggtggcctcagatgaaacgaagtgggggaagtttacattcctcaatcctgaatatgctgaagatgctgtttcaaaattgaatgggatggaatttcatggttctccattgaaagtggttccagtatgctcttccagtaatcgaggattaccatttccagcagtgagagctaaagtatcttggccacttaagcaaagtcggggactcgcgctggtaacatgtgccagtggggaagctgaatttgttgtaaaggactgctttgctctgggagttggtggaaggtatatcaactgtgaggttagtacaagacatgagaattgcatttttgtcagaggaattccaatgcatgtaacagagccagaattgtatgatgcctttcgtagcacgacaacaaggaaaatcgttgatgtgcatttgctcaggggaacacccatagctgccccttctgcttccttgtgtgcagaagcactaaatagagaaatttcttccttcatgccaaagaaaatttttcctgcccaaaatttccgtgttgaggtgttaactccagaggagaatgattcggtgatgagagccactattacttttgatggaagtcttcatcgagaggctgcaagagcattggaacatcttcaaggaagtgttcttccatgctgtcttccttggcagacaatacaatgccagcatgtgtttcatagtactgtgtcctgtcaagtacgcgtgtataatgttatcagccaagcagttgcttctcttcttgagagcttccgaagccaaaaaggcgtgtcttacaatttggaaaagaatgaatatggtatattccgtgtcaagcttactgcaaacgccacaaaaacaatagcagacttgagaaggcctcttgagattttaatgaaaggcaaaacaataaaccatcctgatctgacactaagtacagttcagttgctcatgtcccgtgatggtgtagcagatttgaaatctgttgagcaagagactggcacttacattctgtatgacagacaaagtctaaatattaaagtctttggactccaagatcaggttgctgcagcagaggagaaattgatccatgcccttctacaactccgtgataagaaacctttggatattcgtcttcgtggccgtaacctacctccaaacttgatgaaggaaatgttaaaaaagttcggggctgatctggaaggattgaagagagaggtgcctgcagtagagcttcgattaaatttacgacaacatacactttacgttcgaggcagtaaagaagacaagcaaagggtggaagaaatgatctctgagctggtaaattctacaaagtacaatggcctgcttcaacttccattagagaatgcatgccctatttgcctgtgtgaggtagaagatccctttaagcttgaatcttgtgggcatgtgttttgtctgacttgcttggtggatcagtgtgaatctgctttgaaatcacatgatggtttccctctgtgttgcctcaaaaatgggtgcaagaagcagctccttgttgttgatttgagatctctcctatcgagcgagaaactggaagagctatttagagcctccttgagagcatttgttgcttctaatgcaggaaaatatcgtttctgtcctactcctgattgcccatccatttaccaagtggctgctgcagatgctgaaagcaaaccttttgtctgtggggcttgctttgtggagatctgcaacaagtgtcatcttgaatatcatcctttcatatcctgtgaggcatacaaagaatacaaggaagaccctgatgcaactctgcttgaatggcgcaaggggaaggagaatgtgaaggtatgcccttctttccactttacaatcgagaaagctgatggttgcaaccatgtcgagtgtaaatgtggcagtcacatttgttgggcatgcttggagaacttcaggagcagtgatgattgttatagccatctcaggtctgtgcacctatcctattaacatatcatgtaaatttgtataaattggtacaaataattatgtgtataatataggcagctgatccattaccact

SEQ ID NO: 21756 - DNA, 1875 bp, Oryza sativa; identical to SEQ ID NO: 12208
  Clone ID: TF_OsC59837_1

SEQ ID NO: 21757 - DNA, 627 bp, Oryza sativa; identical to SEQ ID NO: 12215
  Clone ID: TF_OsC930_2

SEQ ID NO: 21758 - DNA, 776 bp, Oryza sativa
  unsure (1)..(776): unsure at all n locations
  Clone ID: TF_OsC142633_1
cagcnagagggntaaaatatcgatcagtagatcactttttttttttttttttttatcagaagctgatttcctacaaaaaaaatataaggcagccgttcactccatcggaaacccttcaaaatgggcagtatacaaaccacggaacaccctcaaggataatccgtaagctaaagttaccggctccacagcttgaatgaaaataatcgaaaaacaggtataagcaggcaatataggcacaaatagcaaatcgaaaagggcgcgtgaatacgaaatttttttcaattgagctttcttcatggcatttgaaggggcaagatctttctgaaattggaatccaggaaacgcaaactctacaaaatcagctcgaattgagaatacgctgtatacgctcagaaaagtaccatttaatgattgaggacagcaacgtactgaatcgataggaaattctcatccagcaagaaatcatggatctgtacagaaagatgactaattgcataggatatacccttaattatctgatgacagcttatctctctcctcagctctatgagacaggggcagaaaatgaagcgaatcgagattcaacaactccatacaactttgcggttatcgaggaagccaacactcctgctcgtcttgaactcaatcccccaagccaacaaaatgatgctgagcaaaccacacctcctaaactagggctccaattgcatccatgattacctgacttgtgcactctgcagatactttgtagtcctcgtgccgattcctgcagcccg

SEQ ID NO: 21759 - DNA, 613 bp, Oryza sativa
  Clone ID: TF_jC-osflLIB3477P008a12b1
ctcctcctcctcttcttcttcttccactagctagttggtcttcctccttcagctagcttgtagcaactaaggttaggtcggatcgagatcgggatcggccgccggcgagcggggagcggcaaggatggcgcgggggaaggtgcagctgaagcggatagagaacaagatcaacaggcaggtgacgttctccaagaggaggaatggattgctgaagaaggcgcacgagatctccgtcctctgcgacgccgaggacgccgccatcggcttctcccccaagggcaagctctacgagtacgccagtgactccagagatggacaaaatccttgaacgttatgagcgctattcatatgctgaaaaggctcttatttcatctgaatccgagagtgagataactcttccccaggtgacaacatgcactgcatccagaagtactcatggtatttgatgtcagtactgtttgatgagtaaaactttgggaaattggtgccatgaatacaggaaacttaaggcagagattgagaccatacaaatatgtcacaaacacctcatgggagaggatctagaatccctgaatctcacaagactgcaacagctagagcagcagctggagag

SEQ ID NO: 21760 - DNA, 483 bp, Oryza sativa
  Clone ID: TF_OsC15113_3
tcatggcgaacggtgtggaggtgcaacgccggtgaccacaagccggctagggctccaagtttggacaacccgagctcggggggctgtggatctagctgtcccgagtttgggtactccagatccagtggcctccggcgccaacagcgccagatccaggctcatggtgagtggatggcgtctcctctctcctccaatcggctgtgtgcgctgccgtccgccgtcaaggcctatcggctgtacggcgagcatgtgcttctcctcatcctttctggatctgatatgtttcgatgtatttttcagctgcttctccagttgctgcagctctttgagattcagagattcaagatcctctcccatgagatggcagtgacggtcctccgtcaaaggtgactggtcctcactagtgaccactaatctgttaccaagcccaaaccttgtgcaggagcacgccgtcgccgccgccgttgcgaggatccgctccat

SEQ ID NO: 21761 - DNA, 1023 bp, Oryza sativa
  Clone ID: TF_OsC15113_1
ccccaacccccgcgccaccgcttctgccggcggtgcccactcccggaggagataaggccgacttctctctctctctccatttctttcgatttctccacttctctctctctccctttctctctgtgtgcagcggcggcctggcagggacagaggggagcgtgcggcggcccagcggcggcggcgccctcccctccaccagatctaacaggagcaggaggagaggcacggtcatggcgaacggtgtggaggtgcaacgccggtgaccacaagccggctagggctccaagtttggacaacccgagctcggggggctgtggatctagctgtcccgagtttgggtactccagatccagtggcctccggcgccaacagcgccagatccaggctcatggtgagtggatggcgtctcctctctcctccaatcggctgtgtgcgctgccgtccgccgtcaaggcctatcggctgtacggcgagcatgtgcttctcctcatcctgtgcagtcaccacctaccggctacattagctagacatctttggagctgcttctccagttgctgcagctctttgagattcagagattcaagatcctctcccatgagatggctgcaggaattacagaaaatcaattttgctgcaagatcctcttctcccataaggtaaataggtgctccatagactatggagttgctgacatagcagataattgaatgactctgcttttctaagtgcaagccattgtgttctttgagttttatattaattctcgaacttgatgatgttggcctggtagcatgtctctatatttgaaaactcaaaagagctcttttctgatatggcatcattactttctaatttttgaatttgtaatttctttttctatgagcaattttggcagtacgaatgtaagagacatggtcctaattcttgtttgtctggagaatgggaattggttgaaaaaaagaagctacaaatgtttaacaaaaaaaaaaaaaaaaaaaaaaaaaaaaaaaaaaaaaaaaaaaa

SEQ ID NO: 21762 - DNA, 1294 bp, Oryza sativa
  unsure (1)..(1294): unsure at all n locations
  Clone ID: TF_OsC482_1
cgcctccttcgcttcgcttccattggtggtggtctccattgctcccttcctccctgcctttttcttccataagtagtagtagtagcgggagtggcgcgccgccgcagccatagatctgcggcgccgcgtatctcgcggctggtttggctggtgcggttagcggctagggttttggttgtttcgtctgatcgatcctccccgattttgcggcggcggtggtgaattggtgtgtgatctgatatgngctggcggcggcggtggcggggaaggggggagggggaggggagggcggcgacggggaagagggagaggatagcaatacggaggatcgacaacctggcggcgaggcaggtgaccttctcgaagcggaggagggggctgttcaagaaggccgaggagctctccatcctctgcgacgccgaggtcgggctcgtcgtcttctccgccaccggcaagctcttccaattcgccagcaccagcatggaacagattattgaccggtacaactcgcattccaagacacttcagagagcagaaccttctcaactcgacttacaaggggaggacaccagtacttgtgccagactaaaggaggagcttgcagaaactagccttaggctgaggcagatgagaggagaggagctgcacaggctgaatgtggaacagctgcaggagctagagaagagcctcgagtccggtctaggctctgttctcaagaccaagagcaagaaaattctggatgagatcgatggactggaacgaaagaggatgcaattgatagaggagaatttaaggctgaaggagcaagtgtccaggatgtcaagaatggaggagatgcagcctgggcctgattcagaaatcgtgtacgaggaagggcagtcgtctgaatctgtcaccaatgcttcttacccgcgacctccacccgacaacgactacagctctgatacatctctcaggctcgggttgtcactcttcagctccaagtgatggctggaaactaaaactgagaggaaacagctggatggcatgcctgcatcgccaaatgatcagtgcatgcactgcaagactgcaacaaataacacagttttagattgccagatgatgatgtgtgtgtgctgagagtcactggctattatcgtacacataataacaatagaacgaaaaagttcttctgttccttggatgtgaccggaaactactcccatacatgttgtcaatggctctgtaatcgagtgtctgcaattccagctgaaagcaaccgattccagggaaaaaaaaaaaaaaaaaaaaaaaa

SEQ ID NO: 21763 - DNA, 783 bp, Oryza sativa; identical to SEQ ID NO: 12232
  Clone ID: TF_OsC386220_1

SEQ ID NO: 21764 - DNA, 928 bp, Oryza sativa
  Clone ID: TF_OsC1443_2
atggggaggggcaagatcgagatcaagcggatcgagaacgcgaccaacaggcaggtgacctactcgaagcgccgcacggggatcatgaagaaggccagggagctcaccgtgctctgcgacgcccaggtcgccatcatcatgttctcctccaccggcaacatcaaggggatctttgaccgctaccagcaagccatcggcaccagcctttggatcgagcagcaaaggatgggagaagatctggacgggctggagttcgacgagctgcgcggtcttgagcaaaatgtcgatgccgccctcaaggagtatcatgtgatcaccacacagactgaaacctacaagaaaaaggtgaagcactcctacgaggcgtacgagactctgcagcaggagctggggttgcgcgaggagccggcgttcgggttcgtggacaacaccggcggcgggtgggacggcggcgccggcgccggcgcggcggcggacatgttcgccttccgcgtggtgcccagccagcccaacctgcacggcatggcctacggcggcaaccacgacctgcgcctcggttgatatataattgcgaccgccgcccccgccgccggcggcctgcttgtttccggccggccggcccccggacaccggatcatcgctcgatttagataacaagccggcgaataaattccagtgctcgtgttacttaccggcatgggcatgcattactatcgatcaacccaagaacttcatttcatttaccaaaccccttgatgtgtgcaatgatccagcggttaaaccgtgtgttgtctcttgacattttggaccagttactaataatgttgtattatgtatgcgtggtgtccaactgtgcttggaaaatttcccccttatttgccaaaaaaaaaaaaaaaaaaaaaaaaaaacaaaaaaaaaaaaaaaacca

SEQ ID NO: 21765 - DNA, 1254 bp, Oryza sativa
  Clone ID: TF_OsC892_1
ccagctttcccctctcttccgcttcgcgagattggttgattcatctcgcgattgatcgagctcgagcggcggtgaggtgaggtggaggaggaggaggaggaggagatcgggatggggagagggagggtgcacccgcgcaggatcgagaacaagatcaacaggcaggtgacgttcgcgaagcggaggaatgggctgctcaagaaggcgtacgagctctccgtgctctgcgacgccgaggtcgccctcatcatcttctccaaccgcggcaagctctacgagttctgcagcggccaaagcatgaccagaactttggaaagataccaaaaattcagttatggtgggccagatactgcaatacagaacaaggaaaatgagttagtgcaaagcagccgcaatgagtacctcaaactgaaggcacgggtggaaaatttacagaggacccaaaggaatcttcttggtgaagatcttgggacacttggcataaaagagctagagcagcttgagaaacaacttgattcatccttgaggcacattagatccacaaggacacagcatatgcttgatcagctcactgatctccagaggagggaacaaatgttgtgtgaagcaaataagtgcctcagaagaaaactggaggagagcaaccagttgcatggacaagtgtgggagcacggcgccaccctactcggctacgagcggcagtcgcctcatgccgtccagcaggtgccaccgcacggtggcaacggattcttccattccctggaagctgccgccgagcccaccttgcagatcgggtttactccagagcagatgaacaactcatgcgtgactgccttcatgccgacatggctaccctgaactcctgaaggccgatgcgacaaccaataaaaacggatgtgacgacacagatcaagtcgcaccattagattgatcttctcctacaagagtgagactagtaattccgtgtttgtgtgctagcgtgttgaaacttttctgatgtgatgcacgcacttttaattattattaagcgttcaaggactagtatgtggtataaaaggccgtacgtgacagcctatggttatatgctgcacaaaaactacgtatggtacagtgcagtgcctgtacatttcataatttgcggtaaagtttattgactatatatccagtgtgtcaaatataataaaatgtcgaggtttaattaccccataaaaccaaaaaatgcaccccacctaatgccgaattcctgcagcccgg

SEQ ID NO: 21766 - DNA, 1226 bp, Oryza sativa
  Clone ID: TF_OsC1057_1
tacccgcgggaatcgttcgatcgatcgggcgagatggggaggggaagagttgagctgaagcgcatcgagaacaagatcaacaggcaggtcaccttctccaagcgccgcaacggcctcctcaagaaggcctacgagctgtccgttctctgcgacgccgaggtcgcgctcatcatcttctccagccgcggcaagctctacgagttcggcagcgccggcataacaaagactttagaaaggtaccaacattgttgctacaatgctcaagattccaacaatgcactttctgaaactcagagttggtaccatgaaatgtcaaagttgaaagcaaaatttgaagctttgcagcgcactcaaaggcacttgcttggggaggatcttggaccactcagcgtcaaagaattgcagcagctggagaaacagcttgaatgtgcactatcacaggcgagacagagaaagacgcaactgatgatggaacaggtggaggaacttcgcagaaaggagcgtcagctgggtgaaattaataggcaactcaagcacaagctcgaggttgaaggttccaccagcaactacagagccatgcagcaagcctcctgggctcagggcgccgtggtggagaatggcgccgcatacgtgcagccgccgccacactccgcggccatggactctgaacccaccttgcaaattgggtatcctcatcaatttgtgcctgctgaagcaaacactattcagaggagcactgcccctgcaggtgcagagaacaacttcatgctgggatgggttctttgagctaagcagccatcgatcagctgtcagaagttggagctaataataaaagggatgtggagtgggctacatgtatctcggatctctctgcgagccacctaatggtcttgcgtggccctttaatctgtatgtttttgtgtgtaagctactgctagctgtttgcaccttctgcgtccgtggttgtgtttccgtgctacctttttatgttttgatttggatcttgtttgaaaataatcttaccagctttgggtaaactgtttattacgtactctatatagcatatgtgaccaacgacaacggtttcattttagatgatgtgtatggatgatttctttccaaaatcacatctttagtataagagcaattttaccatccaaaaaaaaaaaaaaaaaaaaaaaacctgcagcccggggatccactagtttagagcgccgccaccgcgg

SEQ ID NO: 21767 - DNA, 773 bp, Oryza sativa
  Clone ID: TF_OsC44879_2
gcaatctctagagaatcagctggaaataagtctacgtagtgtccgtacaaagaaggaccacgtcttgattgatgaaattcatgaactgaatcggaaggtctctatagcattttagtttttgtaatcctccatgaaggatgtttattattattattattactttagtatactgactctacttggttgcagggaagtctagttcaccaagaaaacatggaattatacaagaagatcagtttaattcgtcaagaaaatgctgagttatataagaagatctacgagactgaaggaccaagtgaagtcaatcgggattcaccaactccttacaattttgcagtaattgaaaaaacaaatgttcctgtgcaacttggactcagcacactaccacaacatagtgacgccgaacaatcaactgctcctaagctagggttacagttgaatccatgaccagaaaaacattgttttgctacacccttgtatagctgaaaggatactatttgctgtcaagagttgatactcagatcaagaaaaaaaaaactattcatgccatagtgattgagaaatggacttgtatactggaaataaatgccacagtggaattgagttgtggaatccaggcaatgagtgttttatagattcaatttttccatgtatttttcatatattaaccagagcgggcttgtgtaaaaaatataaccaggcaaggaaaattagctgtattgtgcatatggagcaaatttcaggcgttactaccattaaaatcatgacatgct

SEQ ID NO: 21768 - DNA, 1168 bp, Oryza sativa
  Clone ID: TF_OsC494_1
ctttagctcatcccatcatcggtcatattggtggcagcttcatgttgctgagctataggcgaatggttgacaagagtactagttagcttaataatatagctttgcaaaagttgaggtaaggggttgtgagaagaagcagcttgatttgctactggctttgtgctgctgtgtggttgttctggtgtggatcgatcagagatggggaggggaagggttgagctgaagcgcatcgagaacaagatcaaccggcaggtcaccttctccaagcgccgcaacggcctcctcaagaaggcgtacgagctctccgtgctctgcgacgcggaggtggcgctcatcatcttctccagccgcggcaagctgtacgaattcggtagcgccggaataaacaagacattggaaaagtacaatagttgctgttacaacgctcaaggttcaaatagtgctcttgctggtggtgaacatcagagctggtaccaagagatgtcaaggctcaagactaagcttgaatgtctccaacgctctcagaggcacatgcttggtgaagatcttggaccattgagcataaaggaactgcagcagctggagaagcaacttgagtactcactgtcacaggctcgacaacgaaagacacaaatcatgatggagcaggtcgacgatcttcgccggaaggaacgccagcttggagagctcaataagcaactgaaaaacaagctagaagctgaagccgatagcagcaactgcagatcagccatccaggattcctgggtccatggcaccgtcgtcagtggcggcagagtgctgaatgctcaaccaccaccagatattgactgtgagcctactctgcaaattgggtactatcaatttgtccgtcctgaggcggccaatccaagaagcaatggaggaggaggggatcagaacaacaactttgtgatgggatggcccctctgaagtccaagcttgctaataaaaacgctggcgtgctataatatatagttcggcaaatgttgaaacacatgtgttctcagtatgtatatttctcccctatccggtggtactcttagcacgtacctatgagtgtatgtttgtacgttatctatactctatgctaggcaaccctatactattatggtaagacgtctatcttttcaatcaaaaaaaaaaaaaaaaa

SEQ ID NO: 21769 - DNA, 704 bp, Oryza sativa
  Clone ID: TF_LIB4371-038-R1-K1-B8
gtactatttagcttaataatatagctttgcaaaagttgaggtaatggatcgatcagagatggggaggggaagggttgagctgaagcgcatcgagaacaagatcaaccggcaggtcaccttctccaagcgccgcaacggcctcctcaagaaggcgtacgagctctccgtgctctgcgacgcggaggtggcgctcatcatcttctttcttcgtggcaagctgtacgaattcggtagcgccggaataaacaagacattggaaaagtacaatagttgctgttacaacgctcaaggttcaaatagtgctcttgctggtggtgaacatcagagctggtaccaagagatgtcaaggctcaagactaagcttgaatgtctccaacgctctcagaggcacatgcttggtgaagatcttggaccattgagcataaaggaactgcagcagctggagaagcaacttgagtactcactgtcacaggctcgacaacgaaagacacaaatcatgatggagcaggtcgacgatcttcgccggaaggaacgccagcttggagagctcaataagcaactgaaaaacaagctagaagctgaagccgatagcagcaactgcagatcagccatccaggattcctgggtccatggcaccgtcgtcagtggcggcagagtgctgaatgctcaaccaccaccagatattgactgtgagcctactctgc

SEQ ID NO: 21770 - DNA, 948 bp, Oryza sativa
  Clone ID: TF_OsC44879_1
atggggagggggaagattgtgatccgccggatcgacaactcgacgagccggcaggtgacgttctcgaagcggaggaacgggatcttcaagaaggccaaggagctggccatcctctgcgacgccgaggtcggcctcatgatcttctccagcaccggccgcctctacgagtactccagcaccagcatgaagtcagttatagatcggtatggcaagtccaaggatgagcagcaagccgtcgcaaatcccaactcggagcttaagttttggcaaagggaggcagcaagcttgagacaacaactgcacaacttgcaagaaaatcatcggcagttgatgggcgaagatctatctgggctgaatgttaaggaattgcaatctctagagaatcagctggaaataagtctacgtagtgtccgtacaaagaaggaccacgtcttgattgatgaaattcatgaactgaatcggaagggaagtctagttcaccaagaaaacatggaattatacaagaagatcagtttaattcgtcaagaaaatgctgagttatataagaagatctacgagactgaaggaccaagtgaagtcaatcgggattcaccaactccttacaattttgcagtaattgaaaaaacaaatgttcctgtgcaacttggactcagcacactaccacaacatagtgacgccgaacaatcaactgctcctaagctagggtaacacttagctctatacagctgaatccatgaccagaacaacattgctttgctacacccttgtatgctgaagggatactatctgctgtcaagagttgatactcagatcaagaaaaaaagaacttttcatgccatagcgattgagaaatggacttgtatactggaaataaatgccacagtgaattgagctgcggaatccacgccatgagtgccttatgattcaatttttgcatgtatttttcat

SEQ ID NO: 21771 - DNA, 807 bp, Oryza sativa; identical to SEQ ID NO: 12233
  Clone ID: TF_OsC1730_2

SEQ ID NO: 21772 - DNA, 3265 bp, Oryza sativa
  Clone ID: TF_OsC1204_1
tccccaccttaaagaccggaagaacggcaactccccaaccctcttgtttcttcgagagcgaggtgaagatttgtttcttggtttgtgttcttggagtggaggaggaggaggagttggatatggggcgcggcaagatcgagatcaagaggatcgagaactcgacgaaccggcaggtgacgttctcgaagcgccgctccgggatactcaagaaggcccgcgagatcggcgtgctctgcgaccgcgaggtcggggtcgtcatcttctccagcgccggcaagctctccgactactgcacgcccaagaccacgctgtcaaggatcttggagaagtaccagaccaactccgggaagatactctgggatgagaagcacaagagcctcagcgcagagatcgatcgtgtcaagaaggagaacgacaacatgcagatcgagctcaggcatatgaaaggggaggatctgaactccctgcagcccaaggagctgatcgcgatcgaggaggcgctcaacaacggccaggccaatctgcgggacaagatgatggaccactggaggatgcataaaaggaatgagaagatgctggaggacgagcacaagatgttggcttttagggtgcaccagcaggaggtcgagctgagcggcggcataagggagctggagctcggctaccaccacgacgacagggacttcgcggcctcgatgccgttcaccttcagggtgcagcccagccaccccaacctccagcaggagaagtaggctgctgagcactgccaatttggctgaacctcctgcttgctagctttgcatttcctcatgcgctgctagatgtatctgtggtttctctcatgcctgtctgaatgaactcacactgatgagagggtgtcagttgttttgtgctcctcccagcattagcactcagaattcagaaatgactcaatgtcagttgcttttgtgcttctcccagcattagcactcagaattcagaaatgactcaatgtcagttgcttttgtgcttctccctgcttgtttaattagccactgttcttgtttcctcgtggggaacagtcagtttgtattatctagttatcttggcaaggatcagtaaaattcacaagtagcagccaactctgataataattccatctgtttcatcgcttggaatgaattgtatgggaaaaaaaaatcaatgcaaatcaagagataacgaaacatatgattctggagttcaattgaccagaatttgcaagagcactacatccatatcggctattgttcttatctagtaggctgtatgattcttgaattcgccaagaaaaagatcacctcctcctacatcacctgagcatgtcgccattgtcaatgaacgggccactgaacgccggcgaggcgctgaagttgctcccggcctcgctgaacatggcgctgtgcccgtacggcagcggccggtccggcagctccgggatgtccatgtccccctccagcatcttcaccgcctcggtgatggtcggccggagcgccaccatgacgtgcgcgcacaggatcccgacgagcacgaacctctccatggcgccgccccgggggctgtccgcagtcgacagcgcgccgtcgagcacctccctcgcctgcccggccttgacgtgcgcccacgcccagtcggtgatcagcacggggcccgacggcgccgacatgtccaggacgcgccgcgcgctcagcacctcgagcaccagcacgccgaagctgtacacgtcgctcttctccgtcagctgcccgtacagcgcgtactccggcgccaggtagccgtgcgtgccggcgacgcgcgtcgtgaggtgggactgcccctcccggctccgcctcgccagcccgaagtccgccacccgcgcgcgcatgtcgccgtcgagcaggatgttggtcgccttgatgtccctgtggtagatcgccggcttcacgccgtagtgcaggtactccagccccttcgccacgtccatgattatgctccgccgctgcgcccatgtcagcgccggccgcttgccgtcccggaagatgaagtcctcgagcgcgccgttgggcatgaagtcgtagacgaggaacttctgcttcccttcctcggcgtcgtcgtcgacgatgcagcagccgcggagcggcaccaggttgcggtggcggaggtggctgatgatctccacctcgttggtgaactcctcgtcgccgccctccacgtccgggtcgagcatcttcttcaccgcgaccacggacccgtccgcgagcacgccgcagtagacggcgccgaacccgccgcggccgacgaggttgcggtcggcgaaggcgtccgtcgccttggagagctcggcaatgtcgtacaggatggagcccgtgttcggccgcggatgcgaccgccgcttcgccgatccctccttggagatctcgtggatcttcttcttcttcttcttcttgtcatgcctcctccagaccaagaacgcgaggagcgaggcgagcaggaggaatgcgacggggatggcggtggcgtagatgaccgtgtcgtgggatttgggcggcgcggcgggagggttggagagggcgaggccgagggtgcaggcggcggtaggtgggttggtggggccggcgacgttggagatgccggcggcgtacgtgacggtgaggtagaagcagttgcgcgtcgtcgcggcgccgtcggtggtggcgttggcggagatgttggcggcggctttgaggcgggaggtggcggcgatgcccgcgtcgaggcagcggaggcagtgcggcgtcgaggagaggtcgccgcacgcggagtccagcgcggccacggagtcgttcccgacgaccgccctgtactccgcggcggtggtgacgccggcgcagaaggacggcgaggagacgaactgctccggcgaagggaagcaggtctgcacgagggacgctcccgggagggagagcggcgccgccgacagcttcgccccgtagtccttgaggcaggccgcggactcccccaccgacgggatgcggaagtggcccgtggcgcggacctgctccgcgaggccgatggcgagcacggacagcagcgtattgcagcacctcgtcatgttccccgccccgccggcgcacaggtcggcgtcccacgggaacgtcgtcacgtagctcagatcgagcgggcacgtcgcgttcccacccccgcccgccccatccaccccctccatcgagcgggcgagcagcagcagcagcgccatggcgaccgccctgagcagcgccaggctcggcat

SEQ ID NO: 21773 - DNA, 1754 bp, Oryza sativa
  Clone ID: TF_OsC99_1
cccgggctgcaggaacgggctgcaggaatgcggcaccaggctctcctcctcctcttcttcttcttccactagctagttcgtcttcctccttcagctagcttgtagcagctaaggttaggtcggatcgagatcgggatcggccgccggcgagcggcgagcggcgaggatggggcgggggaaggtgcagctgaagcggatagagaacaagatcaacaggcaggtgacgttctccaagaggaggaatggattgctgaagaaggcgcacgagatctccgtcctctgcgacgccgaggtcgccgccatcgtcttctcccccaagggcaagctctacgagtacgccactgactccaggatggacaaaatccttgaacgttatgagcgctattcatatgctgaaaaggctcttatttcagctgaatccgagagtgagggaaattggtgccatgaatacaggaaacttaaggcaaagattgagaccatacaaaaatgtcacaaacacctcatgggagaggatctagaatccctgaatctcaaagaactccaacagctagagcagcagctggagagttcattgaagcacataatatcaagaaagagccaccttatgcttgagtccatttccgagctgcagaaaaaggagaggtcactgcaggaggagaacaaggctctgcagaaggaactggtggagaggcagaagaatgtgaggggccagcagcaagtagggcagtgggaccaaacccaggtccaggcccaggcccaagcccaaccccaagcccagacaagctcctcctcctcctccatgctgagggatcagcaggcacttcttccaccacaaaatatctgctacccgccggtgatgatgggcgagagaaatgatgcggcggcggcggcggcggtggcggcgcagggccaggtgcaactccgcatcggaggtcttccgccatggatgctgagccacctcaatgcttaagatgatcatcgtcgtcgtcgtcggccaaacagctgccgtatgcaccgtgaatcatgggagcaaccttgaatgaattgaagtcattggtatcgatcctagcgataatatatatgattctcctaaaatgaaattgatctcaaaaaaacaaacctagcgattaagctattcttatatatgtgtttgcctgctgccccctaccctacaggctacatatgatttgcaagaaattaattatgagcaaggatcaggatgtgtctttgtgtaatcatcagcacgtacctagtgcttcctactgatatatatgcatgcaattgtgtgcatataaatatatttgcatgccatgctcccgtgatggttaattaaaaaaaaaaaaaaaaaaaaaaagtttatgattgtgtttatacgctaattaactgcagatgcaaactaatcaatcgaattataacctgacccggtccggtcgcctgctgctctggtttactactagtactattgtcatcttgcggttgcgagacgaggaaagcattttagccctaaattcagcattagtagcaagctgcaatgtgtatattttggcttcgtccagcaccgtcttcctcccaccagtaatttacccatgtaatatatgcgagtagcatgaacaaattttcccgtttccaaccatctccattggtgtcatgtgtgacttaaatagcgaaatttcagcattgtgcatagtgtgattactgtaagataaataaactttgtagacaataagtctccgttatcttgctgattggagctg

SEQ ID NO: 21774 - DNA, 1569 bp, Oryza sativa
  unsure (1)..(1569): unsure at all n locations
  Clone ID: TF_OsC1755_2
cacaagcttttgtgaaaacttgccccaaattacaagctaatggtgcaatgccatgaggtaggccagccaagaggggaaaggaggaaagttcaggaggaagaaaaacaccaggggcaatatatagatggactctctccacaccggccgggactccatctcatctcatccttccccaaccattctcttctccttgaacacacccctctcttcctcattataatctcttctttgattagagaggaattagcaaacatgcacatatacaaagagcaggaggctgaaccatccactggcctgatgatgccagagccagcacctgttgcttcccccggctccggtggctcaggtggctcaggctcggtgggagctgagaagattgggagcaggggaaagattgagatcaagcgcatcgagaacacgacgaaccgtcaagtgaccttctgcaagcgccgcagcgggctactcaagaaggcgtatgagctctccgtgctctgcgatgccgaggtcgccctcgtcgtcttctccagccgtggccgcctctacgagtactccaacaacagcgtgaaggaaactattgagaggtacaagaaagccaacagtgacacctccaacgccagtacagttgcagagatcaatgcccagcactaccagcaggaagctgctaagctgaagcaacagatcaccaacctgcagaactccaacaggaccctagtaggtgataatatcaccaccatgaaccacagagaacttaagcagctggaaggcagactggacaaaggcctaggaaagattagagcacggaagaacgaattgctgtgtgctgaaattgagtatatgcagagaagggaaacggagctgcagaatgacaacatgtacttaaagagcaaagttgctgagagtgaaagaggactgcaaacagtgaacatgatgggttcagcatctacgagcgagtacgtgcaaaatatgatccattatgatccaagaaacttcctgcaattcaacatcatgcatcagcctcagtattatcctgaacaggaggaccgaaaggcctttatgtcagatgaaagataaatatggatccgtatcatgcaactatctcaatcatgcatgtgccttcttcaaggagactgatcagttagatattacactgtgtcagtagaacttttatgtgtgaactcttgtatgcatgaataattaactttatcccataattcaggcttggcactatcaaggtgatgtacctaagtattggttcaacctgtgaaattaaaatacttcatacccttcctatgtttataanaaaaaaaaaaaaaaaaaaaaaaaaaaaaaaaaaaaacaagaacaacaaaaacaaaaaaaaaaaaaaaaaaaaaaaaaaaaattttggggccccccaggccccattttttgtccctttaaggggggtaaattgggcccttgggaaaattctgggaataagctgttcccgggggaaaatggttaccccccaacattccaccaaaaaatccaacccgaaaaaaaaaggggtaaacccgggggcccctagggaagggccaaccccccttaatt

SEQ ID NO: 21775 - DNA, 1152 bp, Oryza sativa
  Clone ID: TF_OsC753_1
ccactcaccatctccatccttttaatccccttcctccaggtcgcttgctttcttgcagtggtggtggtggtggtggtgagatctagcttggttggttggttgcagctggagatcgatcgggatggggaggggtcgggtggagctgaagaggatcgagaacaagatcaaccggcaggtgacgttcgccaagcgcaggaatggcctgctcaagaaggcgtacgagctctccgtcctctgcgacgccgaggtcgccctcatcatcttctccaaccgcggcaagctctacgagttctgcagcacccagagcatgactaaaacgcttgagaagtatcagaaatgcagttacgcaggacccgaaacagctgtccaaaatagagaaagtgagcaattgaaagctagccgcaatgaatacctcaaactgaaggcaagggttgaaaatttacaacggactcaaagaaatttgctgggtgaagatcttgattcattaggcataaaagagctcgagagcctagagaagcagcttgattcatccctgaagcacgtcagaactacaaggacaaaacatctggttgaccaactgacggagcttcagagaaaggaacaaatggtttctgaagcaaatagatgccttaggagaaaactggaggaaagcaaccatgttcgcgggcagcaagtgtgggagcagggctgcaacttaattggctatgaacgtcagcctgaagtgcagcagcctcttcacggcggcaatgggttcttccatccacttgatgctgctggtgaacccacccttcagattgggtaccctgcagagcatcatgaggcgatgaacagtgcgtgcatgaacacctacatgcccccatggctaccatgatgatgacggggacaatgaattacgaaataacaaggatatgtggcatatatgtggtgccgcatacatgcatgtatcatggctagctacttaattggagtgatggatttgaactagtttcgtatgtagcctgtttgtgtgtaacttgtgtgagatactaccttaaaaactatcggtgtctgttgaacatattctgcgatcaactttaagcgtattattatcattttcattccaaaaaaaaaaaaaaaaaaaaaaaaatcgagactagttctctctctctctcc

SEQ ID NO: 21776 - DNA, 1192 bp, Oryza sativa
  Clone ID: TF_OsC930_1
caagagatagggagaaggggaagaggaagaaggaggaggtgtagggagaaaccggagcaacctcgaagctagtccaaactagtgggaggttgtctttccggcaagccggagcccggagctatcgatcatcaagctttctaccccgaccgacgaggaagaagacgactgatcaattgatcaaaccgatctctccatagctaggtagacaggaggagaggaggaagaagagggggagaggagacttatcttgatcgatggcgcgaggcaaggtgcagctccgtcgcatcgagaacccggttcaccgtcaggtcaccttctgcaagcgccgtgccggcctgctgaagaaggccagggagctctccatcctctgcgaggccgacatcggcatcatcatcttctccgcccacggcaagctctacgacctcgccaccaccggaaccatggaggagctgatcgagaggtacaagagtgctagtggcgaacaggccaacgcctgcggcgaccagagaatggacccaaaacaggaggcaatggtgctcaaacaagaaatcaatctactgcagaagggcctgaggtacatctatgggaacagggcaaatgaacacatgactgttgaagagctgaatgccctagagaggtacttagagatatggatgtacaacattcgctccgcaaagatgcagataatgatccaagagatccaagcactaaagagcaaggaaggcatgttgaaagctgctaacgaaattctccaagaaaagatagtagaacagaatggtctgatcgacgtaggcatgatggtagcagatcaacagaatgggcattttagtacagtcccactgttagaagagatcactaacccactgactatactgagtggctattctacttgtaggggctcggagaatgggctattccttctaacctaataatggcctgggggatacttgtgttcattactaagggggaatatgggtaataatgcttggggtgctggttgctttgcttttctgatgtaccttatttagacaagttcccgcaggaagtgtcttttagtattgtatttgtcttgggctgtggtgctttgtttttccctaaagaactcttgaggagctctgttgttgaaccatttcaagtaattgagactattgtttcctggaacgtttaaaaaaaaaaaaaaaaaaaaaaaaaa

SEQ ID NO: 21777 - DNA, 1237 bp, Oryza sativa
  Clone ID: TF_OsC1644_1
ttcccccgggctgcaggaattcggcacgaggccacaccaccataaaactagcttgcaaaggggatagagtagtagagagagagagagaggagaggaggaggaagaagatggggagggggaaggtggagctgaagcggatcgagaacaagatcagccggcaggtgacgttcgccaagcgcaggaacggcctgctcaagaaggcctacgagctctccctcctctgcgacgccgaggtcgccctcatcatcttctccggccgcggccgcctcttcgagttctccagctcatcatgcatgtacaaaaccttggagaggtaccgcagctgcaactacaactcacaggatgcagcagctccagaaaacgaaattaattaccaagaatacctgaagctgaaaacaagagttgaatttcttcaaaccacacagagaaatattcttggtgaggatttgggcccactaagcatgaaggagctggagcagcttgagaaccagatagaagtatccctcaaacaaatcaggtcaagaaagaaccaagcactgcttgatcagctgtttgatctgaagagcaaggagcaacagctgcaagatctcaacaaagacttgaggaaaaagttacaggaaaccagtgcagagaatgtgctccatatgtcctggcaagatggtggtgggcacagcggttctagcactgttcttgctgatcagcctcatcaccatcagggtcttctccaccctcacccagatcagggtgaccattccctgcagattgggtatcatcaccctcatgctcaccatcaccaggcctacatggaccatctgagcaatgaagcagcagacatggttgctcatcaccccaatgaacacatcccatccggctggatatgatgtgtgtgttcagttcaggcttcaggcttcagagaagccaatgcaaacagtgtcctgtaatccagtaattacagggcatatgtaatgtaatgtaatgtaatccctgatctatattttgctaagtacgtgcgtgctctcttacgaccttctcccccaaacagttaatcaggggaataataatttcgtttgatgcacgtactgtatgtctgtatctgtcactgtatcgtaggaccgtccatgtataacaatttccgttttggatgtggtaacaagttaattggcacttaaaaaaaaaaaaaaaaaaaaaaaaaaaaaaaaaaaataaaaactcgagactagttctctcaaaaaaaaaa

SEQ ID NO: 21778 - DNA, 1270 bp, Oryza sativa
  Clone ID: TF_OsC207784_1
cagctgcaggccggccggtgtgcgtgtgtgacagtaggagagagagctagcgagagagagcaaggaatcggaattgatttcatgcactgatcgatccatccatcatgcagatgctgcatggatgagaagagctagcagctaagctttgctgaagaaaattcttcagaggtttgtgttgatttgctggtctgctagagatcgatctagagagagagagaggaagggaagactgaagagagatctcgagcgggagatcgagatggggcgaggcaaggtggtgcttcagcggatcgagaacaagatcagccggcaggtgacgttcgccaagcggcggaacggcctgctcaagaaggcctacgagctctccatcctctgcgacgccgaggtcgccctcgtcctcttctcccacgccggccgcctctaccagttctcctcctcatccaacatgcttaagacgcttgagagataccagaggtacatttatgcttcgcaagatgctgccgcaccaactagcgatgagatgcagaaaattaaccatcagaacaactatcaggaatatgtgaacttgaaggcacatgttgagattctgcaacaatcacaaaggaaccttctaggtgaggatttagctccactggctacaaatgaacttgagcagcttgagagtcaagtagtcagaaccttgaagcaaatcagatcaagaaagactcaggtactacttgatgaactctgcgacctaaagagaaaggaacaaatgctacaagatgcaaacagggtcctgaaaaggaagcttgacgagatcgacgtagaggcagctcccccacagcctccatggaacggaaactgcagcaatggccatggcggcggcggcggcgtgttttccagtgagcctccccaaccagagcacttcttccaggccctcgggcttcatgccgtggacgtgaaccagccgccggcgccgccaccgggcggttatcctcctgagtggatggcctagctagctagctagctaccgtttcagcttcagttaatcagggtcaagtatcagctgagtttggccatatgtatggattctatatgttgcttcagaagttcctctctccttcctcttcaatttgttgctaattaagtgcttgccaaacttttctcagtgtaatgtactactactatgtatagttttgtcttgtatgaacagtttgtgagtactgtcaaaaaaaaaaaaaaaaaaaaaaaaaaaaaaaaaaaactcgagactagttctctctctctctcc

SEQ ID NO: 21779 - DNA, 662 bp, Oryza sativa
  unsure (1)..(662): unsure at all n locations
  Clone ID: TF_OsC1644_2
aaccaagcactgcttgatcagctgtttgatctgaagagcaaggagcaacagctgcaagatctcaacaaagacttgaggaaaaagttacaggaaaccagtgcagagaatgtgctccatatgtcctggcaagatggtggtgggcacagcggttctagcactgttcttgctgatcagcctcatcaccatcagggtcttctccaccctcacccagatcagggtgaccattccctgcagattgggtattcttcttttcttccagttacagttaatttcttgcctgaaaaaattcccaaaatgcagaggtcatgttctttttaaactattcactaaattattaaacagagtatttgctcaagttcgaacaatacactttcttaaaagatggtttgctatgtattacttagaccacttatctcgatttacttgtatattttattttttttcaaatatttaatttataactatataatcgagtatatcgataatcctgacaataattcgcccaataatctagatcaaattgggcctaattntgtctttgttattcagtaatntaaaatttatgtatatatactccatcgttttcatagctntaatttaatttttccttggtgaaggtatcatcaccctcatgctcaccatcaccaggcctacatggacca

SEQ ID NO: 21780 - DNA, 1148 bp, Oryza sativa
  Clone ID: TF_OsC1664_2
cgaggaggagagggaggggagagaagggagagggggtcggggagaaagaagagcgagcgagcagctttggctacggccaaaccctacagcgcctccaccaccactccttgccttttttggccgcagccgctcgtgtggttggttggttcatcggcgatcgaagatggtgcgggggaagacgcagatgaagcggatagagaaccccacgagccgccaggtcaccttctccaagcgccgcaacggcctgctcaagaaggccttcgagctctccgtcctctgcgacgccgaggtcgcgctcatcgtcttctccccgcgcggcaagctctacgaattcgccagcgccagtacgcagaaaacaattgaacgctataggacgtatacaaaggaaaatatcggcaacaagacagtacagcaagatatagagcaagtaaaagctgacgctgatggtttggcaaagaaacttgaagctcttgaaacttacaaaagaaaactgctgggtgaaaagttggatgaatgttctattgaagaactgcatagcctggaggtcaagctggagagaagcctcattagcatcaggggaaggaagacaaagctgcttgaggagcaggttgccaaactgagagagaaggagatgaagctgcgcaaggacaatgaagagttacgcgaaaagtgtaagaatcagcctcccttgtctgctcctttgactgtccgggccgaagatgagaacccggaccgtaacatcaacaccaccaacgacaacatggatgtcgaaactgagctattcatagggctgcctggcagaagtcgctccagcggcggtgctgcagaagatagccaagcgatgccccattcttaagtaacaggccaggaataagctggatctctgcgttgagaaaggagatgatgctaggcatgcaatgacaccaaaccatcctaaaaacagaccacgctgtatattttacttacccgtattgtcgtccatggatgcgaaatgctagacgcatatgcacccacccattcagcaccaccaggcagaaacccttcgatcggcagactccactacccatctaaatctaaatcgagagatctcaagtgcatacttgtactcctgcttgattgtggcttggtatttgatgtgatgttggagc

SEQ ID NO: 21781 - DNA, 1128 bp, Oryza sativa
  Clone ID: TF_OsC1730_1
cccacgcgtccgcggtaaagtgggtttccatcttccccgagctctccaccctccacccgccaccgccaccgttcgccttcgccgccgccgccgccgccgacgacgatggggagagggccggtgcagctgcggcggatcgagaacaagataaacaggcaggtgaccttctccaagcggaggaacgggctgctgaagaaggcgcacgagatctccgtgctctgtgacgccgacgtcgcgctcatcgtcttctccaccaagggcaagctctacgagttctccagccactccagtatggaagggatccttgaacgctaccagcgttactcgtttgatgaaagagccgtactggagccaaatactgaggaccaggaaaactggggtgatgaatatggaattttgaagtccaaactggatgcacttcagaagagccaaaggcaactcttaggtgaacaattggacacactaacaacaaaagaactccagcaattggaacatcaactggaatattctctgaagcatataagatcaaaaaagaatcagcttctgtttgaatcaatttctgagcttcagaagaaggaaaagtcacttaaaaaccagaataatgttctgcaaaagctcatggagacagaaaaggagaaaaacaatgctataataaacactaaccgggaggagcaaaatggagcaacaccaagcacatcatcaccaacaccagtgacggctccagatcccatcccgacaacaaataacagtcaaagccaaccaagaggatcaggggagtcagaagctcaaccgtctccggcacaagcaggcaacagcaagcttccgccatggatgctccggacaagtcacacatgaaggcatctgttgatctcaaacgtcactccactcaatggccaacatcaacatgtttcttccaactaaggcagccactgttgtgcaatccatcttccagcgatattgatatatcggcattcggcatagccaatatatattaatgtaatgtatcttgtcaaagcttcatagggttaatgacgccttgagcttctctgttctatatctgtcttgtaacgatctttgcatatctgctgcatttttttttctctctaaaaaaagagtagtcaatggtcc

SEQ ID NO: 21782 - DNA, 837 bp, Oryza sativa
  Clone ID: TF_OsC336457_1
atggggcaagggaagatcgagatgaagaggatcgaggacgcgacgaggcggcaggtgacgttcagcaagcgcagggctgggtttctcaagaaggcgaacgagctcgccgtgctgtgcgatgcgcaggtcggcgtcgtcgtcttctccgacaagggcaagctcttcgacttctgcagcccgccggtcatcttgatggagctgtttcaccgttatgagatcaccaccagaaacactcggcttcaggagacaaaccgtgatgatgagcaaatggtcatggagatcacaaggctaaggaatgagatcgaccagctcgaagccagtttaaggaggcaaactggagaagacctgtcatctgtgtccacagtggatgagctcagccagctgcagctgcagcttgaatcatctctcagcaaagttcatgcgaggaaggatgagctcatgagccagcagctggaggatatgcgtcgcatggtacactactcccttattgtagtcgcagttgtggtttttgctgatgagtgctgcagaccgtgcatgagcagaacaatttcttgtgccgcatggggtgagctgcagctatggagttccttgccggtgggggagcagcagatgagtgagaactggcacagcgagaactggcagagccctggttccggggaggcgtcggcaatggaggcgctgacgatgctgccgccggcggcggcggcgacgacggcggcggaggcgttcaattgcttcttcccggaggaggagaagggggtggcggcgtcgagcacgttgctgcagctgtggccgcagccgcacgacggcgaccagcctgacctgcggctctggtag

SEQ ID NO: 21783 - DNA, 462 bp, Oryza sativa
  Clone ID: TF_OsC15113_4
atggcgaacggtgtggaggtgcaacgccgtggcctccggcgccaacagcgccagatccaggctcatggtgagtggatggcgtctcctctctcctccaatcggctgtgtgcgctgccgtccgccgtcaaggcctatcggctgtacggcgagcatctgcttctccagttgctgcagctctttgagattcagagattcaagatcctctcccatgagatggctgcaggaattacagaaaatcaattttgctgcaagatcctcttctcccataaggagcacgccgtcgccgccgccgttgcgaggatccgctccatcgaggccaggattaccgcccaccgcgacaccatcacggtgaaggggcaccgccttcgtgccgtccgcgccaacatggtgccaccggttcgggcccggctcgccgtcccgatgggcgccacaggaggaggtggatgctactcgagcggctga

SEQ ID NO: 21784 - DNA, 501 bp, Oryza sativa
  Clone ID: TF_OsC1755_6
atgtcctcggtaaagcgcatccactgttgcagcgtgaaggaaactattgagaggtacaagaaagccaacagtgacacctccaacgccagtacagttgcagagatcaatgcccagcactaccagcaggaagctgctaagctgaagcaacagatcaccaacctgcagaactccaacaggaccctagtaggtgataatatcaccaccatgaaccacagagaacttaagcagctggaaggcagactggacaaaggcctaggaaagattagagcacggaaggaaacggagctgcagaatgacaacatgtacttaaagagcaaagttgctgagagtgaaagaggactgcaaacagtgaacatgatgggttcagcatctacgagcgagtacgtgcaaaatatgatccattatgatccaagaaacttcctgcaattcaacatcatgcatcagcctcagtattatcctgaacaggaggaccgaaaggcctttatgtcagatgaaagataa

SEQ ID NO: 21785 - DNA, 1244 bp, Oryza sativa
  Clone ID: TF_OsC1755_1
gaagaagctagtttcctgcggccgacctcttgcttctcactttttgagagcaagaagacatggggaggggcaggattgagatcaagaggatcgagaacacgacaagccgccaggtgaccttctgcaagcgccgcaacgggcttctcaagaaggcgtatgagctctccgtcctctgcgatgccgaggtggctctcatcgtcttctccagccgtggccgcctctacgagtactccaacaacaacaatgtgaaggctacaattgacaggtacaagaaggcgcatgcttgtggctcaacttctggtgcacctctcatagaggtcaatgctcagcaatactaccagcaggagtctgccaaactgcgccaccagattcagatgctgcaaaacaccaacaagcacctggttggcgataatgtgagcaacctgtcactgaaggagctgaagcaacttgaaagccgcctggagaaaggcatttcaaagatcagagccaggaagaatgaactgctggcttcagagatcaattacatggccaaaagggagattgagcttcagaacgacaacatggacctcagaaccaagattgctgaggaggagcagcagctgcagcaggtgacggtggcccggtcggccgccatggagctgcaggctgcggcggcggcgcagcagcagcagcagaatccgttcgcggtggcggcggcgcagttggacatgaagtgcttcttcccgttgaacctgttcgaggcggcggcgcaggtgcaggccgtggcggcgcagcgccagcagatcatccccaccgagctcaacctcggctaccaccaccacctcgccattcccggcgccaccgccgccgacgcgccgcctcctcacttctgaacctcatgaacttcattttgcaccggcctgctgccatggatatgatgatcagctcatcttctatatcttatgctgttatgcagacagacactgatgtggctatatatatagtatttgtgtgctgctgcattttgttaatcccttataaattgctacttaattatctcatggagaattggagagaccaaatgggcagagctagctagttagctgtgcccaattaagaagctaaatctatcagaagtgtgtactgatgagtgatgagtatttttcttcatttgggatcaaattaaactaagtaaaacatatatatttaccttattaaacctaagtaaaacaatatatattttgacttaaaaaaaaaaaaaaaaa

SEQ ID NO: 21786 - DNA, 636 bp, Oryza sativa; identical to SEQ ID NO: 12222
  Clone ID: TF_OsC392059_1

SEQ ID NO: 21787 - DNA, 1797 bp, Oryza sativa
  Clone ID: TF_OsC1639_2
catttcggggggggtagtttataagggcttgcgcgaggagggggaggagtagcgggtagcggcgggctcgagtcgagtcgagtcgccgtcgtcgtcgggcggcggcggccgagagagatcgggatcgatggtgcgggggaggacggagctgaagcggattgagaacccgacgagccggcaggtgaccttctccaagcgccggaatggcctcctcaagaaggcgttcgagctctccgtcctctgcgacgccgaggtcgccctcatcgtcttctccccccgcggccgcctctacgagttcgccagcgcccccagcctacagaaaaccatcgaccgctataaagcatacacaaaggatcatgtcaacaataagacaattcaacaagatatccagcaagtcaaagatgatactttaggtttggccaagaaacttgaagctcttgatgagtccagacggaaaatattgggagaaaatttagaaggatgctctattgaagaactgcgtggtctagaaatgaaacttgagaagagcctccacaacataagactaaagaagaccgagcttctggagcggcagatagccaagctgaaagagaaggagcggactttgcttaaagacaacgaaaatttacgcggaaagcatcgcaaccttgaggctgcggcgctggtggctaaccacatgacgacgacgacggcgccggcggcgtggccgcgggacgtgcctatgacgagcagcacagccggcgccgccgacgccatggacgtggagactgatctgtacattggattgcccggcactgagcgctcctccaaccggtcggagacaggttgaagaaggccagccacagcaacagctgctatatagcatgcagtagcagcaacgacgccagtgacatcctgttcatctcacaagaataaccagagctctacgcatgcgcacatgaaacccaggcatgcagttctcggtgggtaaattattatctcgcattattagctatatgcgtgtccttgtctttttctttaggcaatggaataaaatttccggtaagtacaaacacaaacggaaacaaagaattaacaaagctgtagcagaccagatcggcaaattgaaatgccaggtaatccagtatatatttcagccgaggtggatgctctggatatctccgatgtgccggcttacatgaatggcgaacaagacgtactcttcactgaggacatgctgcttggagacttcgctgaagaagatgacctcgacctcgacgacatcggtgatgacttctgcgaggatttcccagagatacccagcggctacgacttcggccgtggtgatatgttccggcaggtggatttctgcgtgtgaattaagagcttgctaaagttattcatgttggtgtgatgggcctgtgagtgtgggtgcttgggaggagatttcttgggttttttccccgagcaaaatcaatctgctcgtgcccttgagatttcagttccgcccataagaactccaacgcacatttagcattcggagagtaattttgttaggttaaaagtatggtaagttataggtggtatgttatgtttttctttttcttttctcaatgttatctggtacctaagtttgtcaagaaaatcatagtggacaagtcaagtatttggggctgtcgtctctgttatggaaagaaaaataagttttgattacattacatatcttttgctctcgagatctggtcatgtcgtcgcattgcaactcgtctcgtctgtatgcattttactctgctggtttaatgttgagattgtgtagtt

SEQ ID NO: 21788 - DNA, 1229 bp, Oryza sativa
  unsure (1)..(1229): unsure at all n locations
  Clone ID: TF_OsC1641_1
cacgacctttgtaaaacgacggccattgangcgcgcgtaataccgactcactattagggcgaattggttaccggcccccccctcgaggtcgacccacgcgtccgccggcccagcacagccgatggtacgagagcatggctagctagccgagctacttagctactacatccatgatccatccatccccaacaaacggagcaagactgcaagggagagggagagagagggaagcttgcaggctgcagctaactagctaggcaaggagagagaggagatagatcaagaagagattttgagaccgagagagagctagagagagatcgatggggcgagggaaagtagagctgaagcggatcgagaacaagataagccggcaggtgacgttcgcgaagaggaggaacgggctgctgaagaaggcgtacgagctgtccgtgctctgcgacgccgaggtcgccctcatcatcttctccacccgcggccgcctcttcgagttctccacctcctcctgtatgtacaagacactggagcgataccgcagttgcaactacaaccttaactcatgtgaagcatctgctgcactggaaactgaactaagcaattaccaagagtacttaaagttaaagacaagagttgagttcctacaaacaactcagagaaatcttcttggcgaggacttggttccacttagcttgaaggagctcgagcaacttgagaaccagatcgagatatccctcatgaatatcaggtcatcaaagaatcaacagttgcttgatcaagtatttgagctcaaacgtaaggaacaacaacttcaagatgctaataaagacttaaaaaggaagatacaagaaactagtggagaaaatatgcttcatatatcttgccaagatgtagggcccagtggccatgctagtgaagctaaccaagagtttctccatcatgcaatttgtgacccttccctgcatatagggtatcaagcttacatggatcacctcaaccaatgaatgaattgcttatcacattaatggacatctcctatgttggatgtggtgtttgacgtaatgctctcttttacatgcgggttttaccttaagtgtgtgtgctaaatttagtgcgtttgtttatgctcttttgaactgaacaaaggaatgatcccggtttgattgatgaatgctgcaagaacataatctatatgttagtctgaattcagtatgtaatgaagatgttttgtt

SEQ ID NO: 21789 - DNA, 481 bp, Oryza sativa
  Clone ID: TF_LIB4371-039-R1-N1-B3
gaaagggacatgattttcatggttcaccaaggggaccgagtttaccccagcaaaggacccaaatttgatgggccccggtttcctcaaaactggaacatggcatacaagcaggttgaaaaacaaagggcttccaaattttccccctcaaccctcactggaaatatggcccattcaggaggaatctgcaccgcccggggggggggccggttgtccttcggcccccttgactgatgcccatttgaccaaagggtggaagctccctttctccttgaaaagtgggaaaaaagggggcttgcagtataggatcccttccaaagctgcataattggatggcaaaagggcccacccaccgggaaaacatttaaagcaggacttggggaaggcctgtccttaaactgtcaccttttttaaaggataccctgttttactgcaaggggcacacttctcctgggcccctgaaaacatgcgtgcggttttgcta

SEQ ID NO: 21790 - DNA, 2278 bp, Oryza sativa
  Clone ID: TF_OsC12552_1
ttttttttttttttttttttgggaatcttatcctttcgtcttttttttatacatttccttgggtttctttccttcaaaaataaaaatgaaattattggagtgaatgaaataaatacattcagatacaaaaggtgttacataagtacataactcagcaaaattatcttctgattgcctgttcttttccaaggatgtgttcactgtgaaaaactataaaacctctctataggaagacttacatgtattatttcaaagacaacaagaaagcattggtgcaatttatgtcctattcaatcctcttctttcttttctcaatttactgtaaattaatgctaccatgatgagggtatatgtaactccaataatctccaaatatgcatcaatcctcacaattgaggaatgatcaatatgggaaagaccctgtcattttcatatgattaagggtacttctcaggccatagctttcgacagcccgattggcagctcgaaaaccatctccgtatgcctcagatgaatccgtttcgatctgatgtttgatgaatgctccgagcttcttctcgaattcggtctttgcgcccttctttgatgtggttggagttgaagatgacgacgacgaagatgccactgaggtggctgatatgtcgatactagaaccaaagatgatctctgactcgagccacatgtgggaaagaacttggcatatgccttcttcaacctgaggactaagagaccgaaatcctttcagacgtagataagcatgcatcatttcatgggcgagaattgagccagtttgtaatctcggcaacccatataatatcaggattgcagtcacttcacatcgtctttccagcttatatggtgctgtgatcatatctataattctgtttcccggtccaattattggtcttcttaagatcgttctgacaatttgctcttcagaaagacatagtccccttgtttcaggaagatgatgcccatttttctcagtttctaaagcctcatttagagcctgtctctcaaccaagagtattggaacttgttgctccactttcatgttcagaccttcaaaaaattcctgaatgtccatatacagctgttgacactctggtgtatccattattgaagaattgagacattccaagcagagtttcctcccatcatctaatgtgatgtatttgatgtccatcggctccattctttcacaactgcaacacctaggagtgccatcatcttcatgggaaggacagtacttttgcatccagaatggatgtgctcggtattcgatcagcccattcctgttcgttggaataaagttcttgcagacatcacattttggatggaaaaaatctttgtagcatgatttgtggtatggctgatcttcatgcatagcaaactcatactcagagatgggcttgttacaagcaaaacacctgaagcactgaggatgccatactgaatccatacagctaagaaaacgtccatgaccaattgggtttttgcatccagcacaagttctggatccacttgaggcaaatagaatcggaggcagctctcttgggggctctgatggaacattctcaacaggaatattctgacgtggaggagagtcagcattaaggctctcctggagagctcgtgcaagttgttcatcttcctccaaattataatcgatatcaacagcttttcccttattttgttcttctgataaagacagtgcaatagcacgatctatatcttcattatcactttcatcatacgctcccaacccatgactcgaggttatctgagggtcgaattttctgtagccagaagacaaaaatctcacaaacttttcgccaatcgagaacgtttccagtacttcagaaaaccaaagcttgagcctgcaacaaactaggaattcagttcgccgtcgatcgcctcgcctcccgctcagtccgctttcacctcgaagtgaccctgaaactcccacaagaaactccaattctctgtagtcccgattgaccacgcaccaagaaccgagacaaagggtaactaatcgagctcgggacaggcgaaccaccggccacggacagctccggttcttgatctctccccacccaagaacgcccctatgaacccctacccctatgagcaaatcgttgccaacatgcttgatgttggcggagcaatggtacgagtggcaagttgccaagtaggcggcaagcgaaagccttcccttgcgcttgttgggtcgacaacgacgacacttccaaggaccatgaccactccttaacggcat

SEQ ID NO: 21791 - DNA, 742 bp, Oryza sativa
  unsure (1)..(742): unsure at all n locations
  Clone ID: TF_OsC54167_3
cggacgcgtgggcgatgacccgggtctggattntgtggaatttgctgttgtcagaggtacaaggattttcgtctgccaatacttgaaacatgggttggctgagcaaaatttttaaaggttcagtaaatagagtatcaagagggcactacaatggaaacacccatgaaggccactcagcatggcacactaaagcctatgagcatgacagtgaccatgaagacatagatcgtgctattgcattatctttatcagaagaagatcagcggaaggggaaggctgttgatgaggtagatattgatcatcgtttacatgaagatgaacaacttgcacgggctctacaagagagtctgaatgatgaacctcctcgtcagaatgttccagtaaaagatgttcactcggagagtactccagcaactttcatgcccccatatatattcccttcaactggattaagggtttgtgctggatgtaaaactccaatcggtcaaggacggtttcttagttgcatggattctgtttggcacccccagtgcttcaggtgttttgcttgtgataggccaatatcagaatatgagtttgcagttcatgaaggtaacccataccatcgatcctgctataaggagcttttccatccaaaatgtgatgtctgcaagaactttattccaacaaacaaagatggccacattgaatatcgggcccatcctttctggatgcagaagtattgtcctgccccatgaactga

SEQ ID NO: 21792 - DNA, 1924 bp, Oryza sativa
  Clone ID: TF_OsC54167_1
atgacttttgtttctgttaaaaagtacaggagttcaggcttgaaagtggtggccagatcgtttcctctacaaacctatagtgtaagaatccagaagggaactagtggctctaggcttggaaagtgcaggtacaaggattttcgtctgccaatacttgaaaacatgggttggctgagcaaaatttttaaaggttcagtaaatagagtatcaagagggcactacaatggaaacacccatgaaggccactcagcatggcacactaaagcctatgagcatgacagtgaccatgaagacatagatcgtgctattgcattatctttatcagaagaagatcagcggaaggggaaggctgttgatgaggtagatattgatcatcgtttacatgaagatgaacaacttgcacgggctctacaagagagtctgaatgatgaacctcctcgtcagaatgttccagtaaaagatgttcactcagagagtactccagcaactttcatgcccccatatatattcccttcaactggattaagggtttgtgctggatgtaaaactccaatcggtcaaggacggtttcttagttgcatggattctgtttggcacccccagtgcttcaggtgttttgcttgtgataggccaatatcagaatatgagattccaacaaacaaagatggccacattgaatatcgcgtccatcctttctggatgcagaagtattgtcctgcccatgaaactgatcgtactcctaggtgctgcagttgtgaacgaatggagccaaaggatagtaagtacataacattagatgatggccggaaactctgtttggaatgcctgaatacttcaataatggacacagacgaatgccaaccactatatattgatattcaagaattctatgagggtttgaacatgaaagtggaacaacaaattcccttgctgttggttgagcgacaagctttaaatgaagccatggaggccgagaaaactggacatcaccttgctgaaaccagaggtctctgcctatctgaagagcaaattgtccgaactatactaagaagaccagtaattggaccaggaaacaagattgtagacatgattacaggaccatacaaactggttagacgctgtgaagtgactgcaattcttatcctatatggccttccaagactgttaactggctccattctggctcatgagatgatgcatgcttacctccgacttaagggataccaaactcttgatccaaaggtcgaagaaggcatctgtcaggttctagctcatatttgtagcgcatatgtggcaccgagtcagaaatgtcatctaggatctagtagcatcattgcatccatcgcagcatcatcatcgtcatcgtcgtcatcttcagcaccttcatccaaaaagggctatacgaagcacgggacgttcgagaagaaacttggagagttcttcaagcaccagattgataacagacccttctgatgtatatggagatggttttcgagatggcattaaggccgttgaacgctatggcttgagaaaaactcttgatcatatgaagcttacaggggttttcccgtgttgaagtcacaaatttagagtatgaagaatacattgaggaattttggttcaagttagacatgccaaaagggtatatatgctgttaacattaactgagcaatagaatagacgagaaacaatgattttgttttagtaaatttcagaaagttacaactatcttgtctaaattatcggtttgctgcaatattagttggctatttcagaaaactacagcagtagttgattttatcagaaaactgttacactttgggcctagatgtcaaacacttagtttctgataaaatcattcgctatagctgttgttctctaacaaactgtttgcataaagttctaggcttctagccatagtgat

SEQ ID NO: 21793 - DNA, 1335 bp, Oryza sativa
  Clone ID: TF_OsC1528_2384
ccacgcgtccgctctggcttagaggtggagttagacccaatcctcttatatttcttccctagcttcagcctctcccaaatcaggtttccagaattgcatattaaagcctcccatcaacttcttgcacacaccctccctttggctttcatctgcatctattcagttgcagattgagagccaaagacattatcttgattctatcaggagggttgtgctagcgaattcttgttagcaacaaattgacatattgctcggcacatccccaccgagaataccaagatgacgttctctggtacacaggacaagtgcaatgcttgtgacaagaccgtgcatttcattgatctccttaccgcggacagtattccctaccacaagtcttgcttcagatgcagccactgcaaaggcacactttcgatgtgcagctattcgtccatggatggggttctttactgcaagacccattttgagcagctattcaaggaaacaggcaccttcaagaagaacttcccctcaggtacaaaggcaaacagtgaacaggctaagattcccagcaagctgtcctctgtgttctgtggaacccaggacaagtgtactgcctgcaagaagactgtgtatccattggagaagatgaccatggagggtgagtgttaccacaggacctgcttcaagtgcgcccatggcggctgccttctgacgaacgcctcctacgcctcgcacaacgggatcctctactgccagaaccacttctggcagctgttcaagaagtccggcagctacgacaacctgctgaagcccgcctccgccgccgccgagaacaccgtcgaatccgaggtcgccgtcgcggagcccgcgaaggaagacccggagacggaggaggcagccaaggaagaagaagaagaagcgtcaccggagcaggtcgcggaagctgttgtagaggaccaggagcactcatgagaagaacctgccacagtgccacttgcacgcgcacacaggaatatatatacatgttcccatattactgctaattttttttggtgtcgttgagaaacttgtcgctggttcttctcatcttctcgtctggattcctgcaatcctggagtctgtacctgtgctaagatatcatgaatgagagcagattttgcaaagaaagggagaaatatgctcattctgatattttgacatgtatcatccgtctcagaaaaatcaacttctcactgcgaacattgacataatctatgtccaggttcatagttagaagttgatttttaaggatgatttggcagcaccattttaagaagaaatattttatctggatcatgtgagaattgagatgat

SEQ ID NO: 21794 - DNA, 1024 bp, Oryza sativa
  Clone ID: TF_OsC44261_1
tttttttttttttgttaaaggttcaaaccaggtagacattctgactccaatataacaaggttttacaagcggatacaagccaaataatattattgttctctgaatgcacatgaccttcattgggaaaaaactgtaaagaccgcgcaaagaaagacatggtgctctggagcaaaagcaagaagatcattatttatctctggaaatttctcaaaggactaatattctgaatcttcatcctctacagatccagattgtgatgccttctcatggtcattctcaagttggctgaagttccccttctctttgatcaactgaatatggtggtgcttgcaatagagcttcccttcgtgtgcgatgtaatttgaggggctaatggtgcatcctccatgacagcacttgaagcagcttttgtgatacatggtgttattgacagtaaccctttcaattggatagactgtcttgttgcatcccacgcatttctctctcgtgccagcaaatgcgctcgagactttaatagcattctcattctcaactgttttttctggcttgacaacctttggagttccttcaaagctcttgtctaaacttccagtcctcttgaacagctgatcaaagtgaggcctgcagtagagcactccttcaaacgagttgtagttcgcgagcttgagggtgcccttgcaatggtggcaccggaagcaggccttgtggtagaccctgttgtcggcggtgagcttgtcgaccaggtacaccgtcttgtcgcacgccatgcacttggtcgtcgtcccctgaaaggaagtcgccattgcccagctccctcaccttcttcttccctctctctccctctccctctctgcttgtgctttcagtgtccaagaaaaacgacccctcagcccttgagctccttatggttatatgtgaatggtgtcgtggttggtggtgtcctggcctgcagtcattgatcctgcagggaggaggaggagcaggaggaggccagcgaacgcaagcaggcacaggcaagaacaaa

SEQ ID NO: 21795 - DNA, 1074 bp, Oryza sativa
  Clone ID: TF_OsC11613_1
taacagataaacacacgctcaaaaagcaatcaacaaaatagagtacggtatatcagtacttgcacaacgatttctttgaaagggacatgatattcatggttcaccaatgtgatcgagtctagcacagcagaggacacgaaattgataggtcccggtatcctcagaactggaacatggcatacaagcaggttgtaaaacagagggcttccgaattttcgccctcaagcctcactggagatatggtacattcaggaggaatctgcagcggccggtggtggtgccggctgtgcttcggcgcgcttgactgatgcgcatttgatcagatggttgtagctccctttctccttgaaaagttgggagaaatggtgcttgcagtataggataccttccaaagctgcataattggatggcgaaatggcacagccaccgtgagaacatttgaagcaggacttgtggtaggcctgtccttcaactgtcaccttctctagaggatacgctgttttactgcaagtggcacacttctcctgtgtccctgaaaacatgcgtgcggctttgctaggtgatcttgtcagctcaggagtcaacttctccgatgcgggtttcgcgggtgattggaagctcttgttgtagctcccggtctccttgaacagttgctcgaaatggggcttgcagtatggcactccttcaatcgaggagtagttgccaagggagagggtggacttgcagtgttggcacttgaagcaggagcggtggaagacgacgccgtcggtggagagctggtccatcgggtacaccgtcttggtgcacaccttgcacttctgctgcgtcccgctaaacatcgtagcctcctcctctcctcaccctctctcttcctgctgcggcggcggaggcggcgcggcgagctggaagatctgagcccgatctgatctcctcccgcgctgaaacgagcacccctcgcggcgtccctcccaatggccggccgcggttatataacgcgggtgagcaatgggattttgaggattttttgggcgtctcaagtctccggacgcgtgggtcgacccgggaatccggccc

SEQ ID NO: 21796 - DNA, 5941 bp, Oryza sativa
  Clone ID: TF_OsC2152_1
gcaaaccattgtgatgtctgagagttttttagaaatggatttacaacagagttatatatatactgttgtctgcagttagtacatgccagcaaaagagagtttgaccattgcggcaagtgtcaaagacaaaaacaacattgcttttctgcagtacgagaaaacaaaactataaaaatctagcaaactacatctacatttttcctaatttctacaatcaggtttggaaacagcgttcctactctcaatagaaagtaggggaaatacaaaaggtatatagctctagcaaactgcattttctacagaagggtttcgacaaaggctagagattacgttcgtgaggttccaaccaggggaatccaagtgtatcgaacacatccttctcggtgtcacaattaattatagcatctgatcttcccccacgctttccaccactgcccggtgtagcaagatacaaaccagtgtcgtcaagaatgtagcctttggaatctgctagtattcttaatcgtcgattcagaacatcattgccagtccaagcaagcagcccaaatgcatgtctgttccttgggtataccttcttgaggtcgatgcgatggcgcagctcacgcccaggatatgtgcaaagaccaaaatatgtgtcaactccacaatcagttccctcaatgctgtgtatgctgaaaataagatcctccctcaaaaaattgatgcccttcaagcgctgaacaaattttggtaaaaagcctacatgactttcaccatcaggatgagtgataataatatccatgtcaccacaagaagattttccacgtctgtatgatcccccacatacaattatcaccccaggcaagatatcagtcccaacttcttgcaaaagcttctccatctcactaacctcatgtcggggtattctttgtttgatatcgtcaaagaacttcaggccaatcctctgagcacttgtaagtgaatcgtctttttgaaggtcatccagtgtacgatgtcctttatcatataacttgagagcagttgcaggaccaacaccccaaacttcgccaaataggctgacagttcgaaccttctcatcattctcaaagtgctctagcttggaaagctttcctgtatttactatctcattaatatggtctttcaatgatttcccaatagcagggaggtctttaacttgatcagcgctttctattttgaatggcaatttctcaatcactggaatagccttgtaatagctaaatgatcttcggtcatctcccagggctctatatatattgatcagctttccaaaaatctcagttatgttcctgttcaagtctggaggagcatacgttgaggattctccagaagaggcttcctcagctttgaatgcattttgagaagctatggtttccttagaatctccagaggcactttggctacttgtacacgtgctaggcccctttacaacatccgaatcttcatttggatgtgcaattgcatctcgagattctcgattacccccagcagtttccttccgattctcaggaccgtctgatgatattttgctcctctttgcagactgcaacacacctgaacctgcagcaccaccttccttcttcggcttaaattcctcttcgtagttgatagcaaacttgtgctccggtagcctctccccggatttgaggcactcctccagccactcgaatgacaccacgctcccgcgaaagcggtggagccaggcggcgtcgagctcccggagcagcgccttggcgtcggcggccaggacgtgggtgaccgcgccgccgccgcccttggcggcgagcttctcctggacgcgtccccccatctgcgccagcctctgcttccacacctgcaccgacgacgaaagccaggaaaccctaagcacaggagagagagttggtgggggttgggatggattgctcggtggagccgcgacctcgaggcggcgagactggacggcgtgggggacgacgaaggcggagacgccgcggaacatgccgtcggggtccaacttcgccgccgccgccctcgccggcggcttccgcttcggagccatggagaactcccgccttctcccttcctcgctgacttgcaatggcgcctcctcaacggcagcatcctccggtgatgacttggtcgcgccatcttcttcctctgatggtttgtgagcctctggcttttcaaggtccatgctatcctctgatggcttggcgctgtcatcatcttccactgatggcttatcaagaaccacactgtcctctgatggcttcgcactcgcctcgtcttcctccaacggtttctcaagaccagcattgtcctgtgttggctccacacttcccttgtcttcctctggttccttctcaagagttacagggtcctctgtctgcttggtgccagcatcatctttctccgatggcttctcaaaggtcgtactgtcttctggtagcttggcactcgcctcatcctcctccaatgttttctcaagagcatcattgccttctgatggctttacacttccctcatcttcctctgatgccttctcaagagttatagtgttctctgatggctccacgctggcgctatcgtcctgcggcggctcctcaagagcactgctgtcttcggatggctttatgctggcctcgtcgtcgtgttttggttcctcgacagctatggcactttctgatggcgtttctatggatgcactgctctgaggtggtgcctcctcagaaacgttgccgtctgcagcttcgctaatgcttatgctactctttggagtgttatgaggcagggtttcagtatctggggtgctttctgatggtttatcatgcacatcatcactttcgatttccggtggcttctcatcctcgacagatgcatcattttcaggctccaatggctgctcagttgacttgtcagaagcttcatcagtttgaggttctgatggaacctcgttagttctatcactttgatgcagcactggtgtctcaactccagtttgagattctgataacacctcagctgacctttcagcagctgcatcaatttgaggttctgctggatcctcggtaaccacatcactttcacgcagtgttgccttctcacctgcagttcgagattctgatggctgctcagccaactgatcagaagcagtatctctttcaggttctgatgactccttggcagttgcatcactattatgctcttgtggattctcttcatatgcttcgtgttgaggttccaatggctgctctgaagctgcagccttttgattttctaatggttgctccgttgcaactttagcaggtgcaacatcttgggactctgatgactggtcagcagctggatcggtgttagcttctaatatctggtcagatgtcttctcggcagatacaatgccttgaggtcctactaactgctcagcagttggcctgatttgagcatctgatgagttcacaccagaagtggcatcactttcaggctcggtaggattcccaacattggcatcaacctgaggtggcttctcaagactgagatcactttgttttgttgtgctttcagcattagcttcattttgaagtggcttctcagcagtctcttcactctcgtgtggctgctcagaaggttcattggtttgcggtagcttctctgcagcatcttctttagatggcttttcggttagagtagcagtttgagatagcttctcaacagccatggtactttctggtaatttatctgtcagtatctccctctcggagatttcctgatgagctgcatcacttggagatggttctgacatggcttctacactttgggtcaggggtagctcgtcagtagcaatatcagtctgtgatggcttctcattttcagcagtgttttctgatggcttcttagatggttcagtgatctgagatgatgctacagcaagtatgtcactttctgacaatttttctgtggaagtatcagcttgcgatttatttgcagtaagtggtagttttttggcactttcacttatttgtgatgaattctctgtggtagcaccattgttctttttatcttgaatgatctgtgatttgttatcagcagtcacattggttttctctgcttcttcagcaagtacacggttttgtaacggtttgttgctagatatatccttctctggctctttttctctagacacgcttctttgccatggctttttcacaaccacgctgctttggagcgggttggtgctagccacactaacttgtgatggtgtcacaaccgacgcaccgctttgcgattgcttttcagttggaacattgcgctgccacaatcttttgcccattcccctgctttcaggtgtctttgcatcagttacactgctctggggctgtttctggaatccgatgttacgttgccattgctttttaaccactgctgcagtgctctctgatggctttacatcatctgcactggtctgtgaaggtttctccgtgattccactgtgttcctgtggcacagtgggtgttgtactggtttctgccagcttcacatcgatagcactgctagatgacttctcagtgtctgtattgttctgcagtggcttctccgtgtctatattgttctgcagtggcttctcattgaccactttgtgctcccatggccttttaattgatgtggtgctttctgatggctttgtatcatttgtcaatgatgacttctcagttggtccactgttctgtatctgcgcctcagcagccacagcacgttgccatggttttctgatcaatttgctgttttctgatggcttcacatcatctgcactggttgatgatggcttatctgatggcgaaatgctctgcggtagattctccgtagctaccctccgttgccatggcctttttaccactgtgctggcagtgctgctttctggctgttttgcatcaaccccattacttggcaatgattcctcaatggcagcactgcttggagttgacttttcagtggttgtgttactcagcaatggcttatctgtgggaagattgcgctgccatggttttcttacggctgcactacttcctgatggctgtaagttaactgcactgctctggaatggcttttctacactgctttccaatggcttcttgctgactacatgactatttgactcacccttggtaaccctttccccttcttctgacctctgaactgttgtgctgctttctgattgttttgggacatcaacgctactttgtgattgcttttcagccacaatatcgtcttgtgacggtttctcaggagtgagttcactttctaaaggtttctcagtgagcccatcaccttgacctgggcctcctggattcttggtagcatcttcatgttctggttgcttctcgatatccacttttgcatttggagtactatcctcaaaattgctgaagtttcccttaaccataaataattgagagtgatgggtcttgcaataaagtttgccttcatgtgtgacattgttggatgggctaagagtacagcctccatgggtgcaacggaagcatgatttatgatatgagctcccgttaagattaaccttttcaagagggtacacagtcttgttacaaactacgcacttgtcttgtgtgccaacaaacatgctagagaatctgttcggttgccccttgtttccattcgatttttctgctttagctgattttgatgtcccttcaaaacttttctccaaactgccggttgatttcaatatctggtcatagtgaggtttgcaatataggacaccttcgacagaagaatagttactaaactggagggtggccttgcagtgggtgcagcggaagcacgggcggtggtagacgcggccgtcggcggcgagctcctcgacggggtagaccgtcctcccgcacgagtcgcacttctgcgtcgtgccgccccacgccgccgccgccat

SEQ ID NO: 21797 - DNA, 1079 bp, Oryza sativa
  Clone ID: TF_OsC28685_1
cccgcgtccgggtcccgccacgcccacgttcctctcgtctcgccctgaatcgatctcctccgtcgatcgatcggaagagttgggagttgggaagctatagctacggtgattcctcgagctggaccagaccgaggcctgaaggttttccatcgaccgatcggtgaatcacccggtgctagtatacgtaccccggccgccatgtcgttcaccggcacgcaggacaagtgcaaggcgtgcgacaagaccgtccatttcatcgacctcctcaccgccgacggcgtctcctaccacaagacatgcttcaagtgcagccactgcaaggggaccctctcgatgtgtaactactcttcgatggatggtgtcctgtactgcaagacgcactttgagcagctcttcaaagagacggggagcttctcaaagaaattctcgcaaggtggtaaatcttcagagaagagcgaccagggaagagctcctagcaagctatcttcagcattctctggaactcaagataaatgtgcagcctgccaaaaaactgtgtacccattggagaagctaactctggagggtgagtcttaccacaagagttgcttcaagtgctcgcatgggggctgcatcctgacgacgtcttcctacgcggcgctcaacgggatcctctactgcaagatccatttctcgcagctgttcaaggagaagggcagctacaaccacttgatccagaccgcacaatcgaagcagaaagagtccgaggaggctgcaccggtggcggccacagaggccagcgagaaagaacaggaagtgcccccacaagacgcgacatagagcaaagattagggggaaaacagaaccgatatatatatatatatatatatatatatatagacataagaaaaatcctcaattatcagctagtaatttgatgtattatcctcccttgcttcctctttctttctttttgttccacctcttaaagaccgaaaacttgcttatcatttctttgacaaactgcaactgttgtacttatttctgtatgaggctatggagccatgacattggcacattggcaagaatctgttcattgc

SEQ ID NO: 21798 - DNA, 1790 bp, Oryza sativa
  Clone ID: TF_OsC91189_1
ttttttttttttttttttttatataaatacttcactgcattatcatgggccatactgtgcattacattagtgtttcttagtcaccttattagattgcaacctcagctcctgttaattcgagcaaatgcagttccttaactgatttactctgataggacctctctgaaaactcaaggtcacccaaatccgaaatcttactccattaccataacccatatgatctccatatgtatgtgtgtatgatatctgtatacccgcatccagtatggacatagactgatagacagtgctttcttgtgttacacaggaaagcctccggttagccgtatatggttcagtgattggcgaaggccatacttgttcacagctgcataggcagctctgaaaccatcgccgtatgctgatgatgtgtcattggcgatctgatgcaggaagaattctccaagcttcttctcggtgtgagagatcccacccttcttggacggtggtggtcgacaggaggacgacgaagatgaagcgtaagatgttgaagcctgtccatatcttgaagtggatggaaggatctctgactccagccacaggtaagacatgacctggcatataccttcctcaatctccgcctttaggttccggtaacctttgaggcgcaaccacccatgcatcaattcatgggcaagaatggagcccgttagcagcctggggaggccaaacaatacaagaattgcagtgacttcgcatctcctagttagcttttgcggttgggttttcatatctagtaaccgatttgcaccaattctgggcctcctaagtatactggtcacagtctgctcctctgacagacaaaggcctcgtgtttcaggcatatgatgcggtcctttgctttctccttccatagcttcattaagggcttgacgttcaaccaagagcatgggtatctgctggtctagtttcatgttcatcccttcgtagtagtctctgatggaatggtatagcggttgacattcaccggtgtccatgattgcagaatccaggcattccatgcacaagctgcgtccatcccctaatgacatatactttgtgttccttggctccattttctcacagctacagcaacgaggtgttctatcatgctcatgcaaaggacaatacttctgtccccagaatggatgggctctgtactctatcaaaccagtcctgttcgttgggataaattgaaggcagacgtcacactttgggtgatgaagctccttgtagcacagcttgtggtatggatctgtacctagcaaggtgaactgggaaacagaataaagtaaactgtcacttcctgagaacacctccatctcacggatagggtggcgacaggaagaacagcggaagcactgagggtgccagtacattcccaagcagctcaagtaatggccatgccctatctcatgcttgcaacccccacagaccctgtatcctctcgacctggcctgggtctgagagggtgcacaaggattgtaaggctggtaaggattcatgttcagactgtcctgtattgctctagcgagttcttcatcgttttctcccttgtcatggtttctctcttttgtatttttggcatcgtctgcaagagcaagggcaagtgcatggtccatttcttcattgttatgtctaggtggttcttccttctttggtctaactggttcttcccagagcgtggtctcttctcctgccgtcacccgagggcgccgtcggttggcctcgccgtccttcgtccccttcaggaaagcgcagagccacttcat

SEQ ID NO: 21799 - DNA, 998 bp, Oryza sativa
  Clone ID: TF_OsC12484_1
agcagggtagctaaagaacatgatgttagaaggataaggttgctaggaagtatgatcaattcgtagtagttacagaaattacagatttttcacaggaggctggcagtcagtcgcatgccattgttgtcaacctgccattttcatgagcctcctatgaaacgaaggcgtacacttacagcttgacagactactcgcacacagggaggatcacgagcaaaaaaagaggagggaataaacaaccgttgcaaaattagtaaacagaaactccagagatccgtgtatcaccgtatgtgtttggctcgtttcgtagtcctagttgtcctctctattttcgtctggcggcggcggcgccggttgctcttcgggcaccacttccggcaacacctcctgggactcgctcttcttcttcatgtgattgtagctccctttctccatgaacagctgcccgaagtgtatcttgcagtacaacaccccgttgagcgccgcgtaggaggaggtggtcaggatgcagcctccatgagagcacttgaagcagctcttgtggtatgactcaccttccaaagttagcttttctagtgggtacactgttttctggcaggctgcacacttatcctgagttccagaaaacgctgaacatatcttgcttggggcccttgccagttccttgtctgtagatctgcaacctggcgcgaacttcttggagaagctccccgtctccttgaagagctgctcaaagtgggtcttgcagtagaggacgccgtccatggacgagtagctgcacatcgagagaatccctttgcagtggctgcacttgaagcaggtcttgtggtacgggacgccgtcggcggtgaggaggtcgatgaagtggacggtcttgtcgcacgccgtgcacttgtcctgcgtgccggtgaaagacatggtggcaagagacgactgtcgacgatcgacgacgcacgcacgcccgccccccggacgcgtgggtcgacccgggaattccg

SEQ ID NO: 21800 - DNA, 2931 bp, Oryza sativa
  Clone ID: TF_OsC13226_1
gtagaatctcacttgtacatggtagtataaatttcttattaatttttgtcacataaaaaataccgctgtttccattagaatttctgaatgccatacatgtgtgattggttgggctaaccatatcacaatttaatcaatgtcgtcagttagcccttccaaaagtaactgaaaagattgtttgtacaattgcacatctcaaaattgctttcttttcctgtaaatggacgcttaatgacaaatcgatcgtgtataacttccatcaaaagacgaatctatgaaatttcaaaatgggaaagtccctgttaaccggatatgctcaagggtgcgctttagaccatactgaagaacagctcggttgccagctctaaaaccatcgccataggccattgaggtatctgactcaatttggtgcttgaaaaaatcaccaagctttcgctcaaactgagatcttcccccctttttcgatgatgtggatgctgatgaggatgaagacgttgaagcaccattactgcctgatcctgcaatgatctctgactcaatccacatgtgagcaagaacttggcatatgccctcttctacgtctggactaagtgtgcgatatcctttaagtcgcaaccacgcatgcatcatctcatgagctaaaattgaacctgtcaacaatcttgggagaccataaagaatgagaattgcagtcacttcacatcgacgagtcaacctatatggctccgttatcatttccataactttatttccagccattcttggtctcctcaatatcgtgctgacagtttgctcttctgataagcataaacctcttgtttctggaagatggtggtgaccagtcttctctccttccatggcttcatttaaagcctgtctttctacaagaagcaagggaacttgttgttccactttcatatttaggccttcataaaattcctgtatttcaagataaagaggttggcactcgctcgtatccataactgcagaatcaaggcactccaggcagagtttgcgaccatcgtccagcaatacatatcttgattcccttggctccattctttcacaactacagcatcttggagtaccgtccacctcatgtgatggacagtatttttgtaaccagaaaggatgtgctctatattcaatcaggccattcatatttgtaggaataaattgcttgcagacatcacattttgggtgaaagcgctccttgtagcatgttttatggtatggatggtttcccgacatggagaactcatagtcatatattggttgattacaagcatgacagcgaaaacattctggatgccaaacagctcccatgcaactaaggaaacgcccatgaccaatctcactgtgacatccggcacaagtcctgaatccagaagaaaacataaatggcagtggttgatacatattgccaccattggcgttgccattttcacgagcacgaggaggcgattcaacattcaaactttcctggatagctcttgcaagttgttcatcctcctccaaatgcatgtccttttctattgcctttgcctttctttgttcctcctctaatagagagagtgatatagcacgagcggtctcttcattgtcaaattctgacgggacatccaaatcacaacaatctacatcgtcaatgacaagttgacggagatcagtagccaacaatagcaagtcgagttgaccaaatgtggactctagtgggtacaccatcgtcacaactgcggaattagagggtccattccatatcgtctcctccgcgggtttgctgtggtattgcccttccgagattttgtgggttgaacctctaaaaaatttggtcaaccaacccatagagctccaaatggcaatgttggaagggacacttttatgtggttgcttgtacaagactaattcctgctcaagctccgtcctggcatcacccaccgtcacccagacctcggagattttctcaacggcgccttcaaagagatcaacaatggtgaacgcccgcgatgtcggaaccatcagtcctgttaatccttcgagcccagtcttttcgcttgtggagattgcaggctgcctgcttgattgcgcatgattcactctaggcacaacggcgccgttcagatatatagtccggttagctccaaaggcaatcatcttccgaaggcctctcccgtaggcgaggctcttgtgcatgtgaccgaacacgaccagcggtatcgaaactccggtttctctttgcagatcagatatggcttgctccagatctggatcaccatgatcaccaccaccagcaacccaatcccgcccacaaatatcctccattcttgagcctagacctgttggcccattgtgtgccagtaatatgacagcatgctcctttggtgcatttgtagcagcatcatatatcctctttgcactttcagccatatcattgacaccataccactgtagctcgatttcactgcatgttactacacagcagaagtagtatgcaataagaaaccaacccggtgaagcaactaagaatgacagcaaccattttgacagaagctttggtctaaatatcctattacccccgcaggaaaatggtcgtccaccaacaacactcagctttattgttggaaaatccaaacatttgtacccaacatgctgctcaccaaggctctctagctgaagctggacacgatctaccttcttctctgaaaactgatacgtgtgccaacagtcatgattcccaagaatagctgctttggggagctgaagatctgaaatgcttttaacaagttgaacattctcgttgccataatcacctgtaaaaagtaccaaatctggctggagaaaatgtagggcttttgagtcttcctcaagggtccaatcattatgcgagaatcgcaaggccacaccagcacccatgtctggcctatcccccat

SEQ ID NO: 21801 - DNA, 416 bp, Oryza sativa
  Clone ID: TF_LIB3431-002-P1-K1-C5
tcccgtgcacgtacccacgtacgtacgaagcacgtatctctattttccacatacgcgactagtgagcagcagctgtggtattctcccattgctactgccaccaaggaggttgccgctgcggctgctgccgccgacaaggcgccaacgacgccttcgacacccctgatacaggaggcgaacgaagctctgaaggcaccgaagccaaaagaggcgccgaaggctaaggaaggggaagagaaaaaagcgaaaggtgacaaagagaaagaaaacgccaataaggagaggcaccccagggcgactacatcccagatcggcgaggccacaccacccgccctactcggagacgatcaaggaggatatcatggcgctgcaagggaacagtacagggggatccagcacatacgcgatctccaagt

SEQ ID NO: 21802 - DNA, 1217 bp, Oryza sativa
  Clone ID: TF_OsC135984_1
ccccgtgttttttttatatttttttacttgcaatcgcaagatgagatgcacatttatataattataattaaggatgagcggaacacctgacgtttttgaggtaaacgtcttagccggctcgacccaagtacataacaagttaacaacatgttttaagttacacatcggaggaacaacatgccaaagatgacagggcaaaccaacctatgcaagtacagtagaaccagtgccgctgccgttgccgctaacagattggaattcaaaattgctttgcgccacttgcattattgttaatatctctcctcttgaacatcgttcatagatctctgttgcgagtgtaacgagagactcggtctcctcagcaagcttgaagatcctttcagcctccgtcatgtgctcattcgcaaggtgtgatttggcctccgcatcagccactttcatagctgcagctgcagctgcttctagggcaggactcgtaccagcaaatgaacctaaattctgcgatgccttcagtggcttggctggatccttctttggacttggagacttatttgcttgcgaaactttggctgcataagattctgtgatcctataggacctgtcaatcttttcaatctttttcgctgctataagcctccttaattttgcagtaagcaatcttctaaaattcgcttgcacctcgtgcctttgctctatgtagtggcaaattgcatcaacatccgaaccatttggatccccaatttcacaaagagcttctattaccatggaatttggaatcttcacatcctgagagcttttctcaggatctgcggatggtgaagcctcagcaactttatttgggggtaggacgagaagcggagtctgagagcttggagatgtggaagatgaaggcccttttatccttggaacctttaatttatcccttgaacccagtccacttgcactaaaactcaaattcctccatttgtccttgaggtcgatgttcgagcgggaggagaggacggggctgaactccggatccttctggatggtgcgccacttgccggggccatgcttgagcacgccgcgccgcagcgcctcctcctcctccgaggtccacttctgcttcggggcgcccatctccgcgcgcctcctccccacaagcctcccccgcctcctgcactctccggcgtctgaactgtccgaccagaaaccctagtttgggtttctcctcgtgc

SEQ ID NO: 21803 - DNA, 1457 bp, Oryza sativa
  Clone ID: TF_OsC20360_1
cgcggcaaggacgcaggcgagcagctgctccgacaagcgctctctctctctctcaactccggcgaggctcacgcgcgctccgaagcttcggatagcggcagtagtcagtgcattgatggcgaccgacgtggcagcgactgagcccgaggtggcggcggaggaggctgcggccgccgcgcctgagaccacggccaccgccggggattccaagccggcgaaggaggccaaggccaagaaggccgccgcgccgaggaaggcacgctccaccgccacccacccgccgtacgccgagatgatctcggaggcgatcgcgacgctgaaggagaggaccgggtcgagccagtacgcgatcggcaagttcctcgaggacaagcacaaggaccacctgccatccaacttccgcaagcagctgctcgtccagatcaagaagctcgtcgccgccggcaagctgaccaaggtcaagaactcctacaagttgccgccgacgcgcgcgccggccgcggccaagcccaaggcgaagcccgccgccgccgcaaagccgaagccgaagccgaaggccgcagctaagcccaaggcggctgccaagccgaaggccaaggctccagccaagtccaaggccgccgcgaagcctaaggcggctgccaagccagccgcgaagccgaaggcggcggctaagcccaagtctccggctaagccagccgccaagcccaaggctgcccccaaggctaaagccaagccggccgcgaagccgaaagccaaggcggctcccaagccgaaggcggcagtcgtgacgaagacgaaggcgacctcggctcccgcccggaggccggcgaaggcggcgaagacgtcagccaaggacacgcccagcaagaaggcggcgccggcggccaagaagcccgccgccgcggcgaagaaggcgcccgccaagaaggccgcgccggcgaagaaggcggccgctccggcgaggaaggtgcccgcccggaaggcgaagaagtagagctctctctccggcgagcgagcaatctagggcttcatggttgttttcttagctgtttttttttctcttctctttgttgttagttgcgaggaggggtcaggggtacaagcttgtaaatttgatatcgcggcgggggtacactggtcatttcgtacccaggtggtggtgggcgacgatgatgacgacgacgacgagacagtgtttttagggcaatgtatttctgagtagattggtggagtttttattgtggtaacaatcttgtgatatttgtcgaaatcactttagctaagtaattaattatggagtaattttacttactgtattggcttgaccacaccctgtattcctctgaattttcagatctggaaattgaaatgaaatataggatttgtgacttggcgtaaaaaaaaaactcgagacctcgtctcccgcgcgccctctccctcccccccgtgccgat

SEQ ID NO: 21804 - DNA, 2137 bp, Oryza sativa
  Clone ID: TF_OsC1869_1
atccaaagaaaaaaaaagagtccgagcagcgagcaaaagaggaaaagcagggagcgagagaccgggggacggaaatggtcgtcgccgtcgcctcaccttcgtcggcgccggggccgggcgccgccggccgcccccacccgacctacaaggagatgatcctgcgggcgctcaaggagcttccagatccgatcatctccagccgccgtgccatcgccaagtacatctccgacaacttctccggcctcccttctcaccacgacgcgctcctcaccgttcacctccgccgcctcaggtcacagggccttctcctcatgtctggacactcgtaccttctctccacctccgccaccgccgctcgaggacggggacgaggacgaccgcccaagaaagcttcctcctccgcgccgcctcaaaagcgcggacccggccgaccccgcaagaatacagccctgtttccggttcctgtgcttgaggcgaagcctgggcgcgggcgaccccggaagaaccctctccctgtggcttcctccacctcctctgctgctgctgctgctacggcgttgagcctgagagtgaagcggggacctgggaggccgcgcaagaatgctgctgctaccccgttgagactgggagtgaagcggggacctgggaggccgcgcaagaatgctgctgctaccccgttgagactgggagcgaagcggggacctgggagaccgcgcaagaatgccactgctaccccgttgagcctgggagttaagcggggacctgggaggccgcgcaagaatgctgctgctgctgcctctcccgttgctccgccgcctgcatctccactgaagcggggtgttggacgcccaaggaagaacgccactcctctagtcaagcctggacctgggaggccgtctggattcaaacgtggaccaggccgccctcgcaagaatgccactcctcctgtgctgtcagtgccacccactgctgctgctgtgttgggagtgaagcgtggccgtgggcgccctagaaaggataaaccattgcaatcttggtctgtgctctctggcggtgctgcaatgactaagagagggcctgggaggccaagaaagaagaggccactggaagctggaggtgttgtggcagcacaggtagacactgcagatggaggtgaggctggagccgttcaaaatggaggtgaagttaggtgtctgctctctgatggtgcttcttcaatggggaacagagggcctgggagtcctaggaaggaggtgctattggaaaatgaacctacagtttctacattggtgggaaagagaggccgtggccgtccaaaaaaggagaaaccatcagcagcaaggcctgctgaaactggagatgctaaatcaatggggatcaagagaggtcgcggaagaccaagaaaggacagttcctttcaagctgtgtttgcagaagctgcaggtcaggtgtcaagagatgtcacagcagctcagcccgaaggagatgcagatttactggcaaggaaggaaccagagactgcagctgtagtttcggtggagaacaaagaaactaggcctgcagatgctgggggtgttgtggtttctgaagagaagacatcgattgatccggtggaggctggaagtgtaatgccatgtgttaatgcagaagttgatcgcatgaactctgacctgcgcactgctaatccatagtgtggctggcgtcagcactcagcacagaagggaggacctggatggctggcactacctgcaggtgtgaatgtgtattcactgatttagctggagacatactgtgaaaactgttaaatgttgcaaccaaaattattactgtcatgctgttaagtagtttctcaagatcaacattggagtatgcttttaatgatatccacttctcggataaatttttataataatccatagaaaaaaaaaataaaacctttaggaatgactggatatatcatatatgttgcttttagtgcacccagtggtgatgagatgcatcaatgtttacttccaatttgaacaaaaaaaaaaaaaaaattcaatcaatatctctgttttttccatgcctatatcttaagtaattttggtgaaaaaaaaaaaaaaaaaaaaaaaaaaaaaaaaaaaaaaaaaaaaaa

SEQ ID NO: 21805 - DNA, 380 bp, Oryza sativa
  Clone ID: TF_uC-osflcyp033a05b1
cactatgtgaaagctggtccccctgcaggatagccgcgccggaagtatactgccggcgaccacacgcgtcctctcggacccatatataccacccatcagagaggggcggtatgtccagacaggactgtttgcaaaggagccacatctggcatggacaagcccggctccccgctggcaagcaccgcgtcagcctccaagaagcacaaggcagacgccctccgacgacgccgggggctcctcccacccgccttatttccagatgatcaaggacgcgatcacggtgcttaacgagaggaccgggatccagcgctcactccatcaccaagtacatggtaggacaagcacggcaccggcgttggcggccaactacaagaagatgc

SEQ ID NO: 21806 - DNA, 1208 bp, Oryza sativa
  Clone ID: TF_OsC62134_1
atagtggatccccgggcggtcctctcatgcctcactcgcctagaacccctcctcctcctcccgatctccgaggcaatcctcctcgaattccccgcgccccgatctccccctgacgccaccctcctcctccgccccggatcgccccgcccgatctcgccgcggggtcgaatttccccttctcttgtctccgatcagggccgcctcgatcgaaggcggcgccgcgccgaccatcccaccttgtttggttgtaatttcttcttgtcgcgtgaggaggggggcgtggcggcgggggagagcgcgtgagcgggcgggagatgggggcgccgaagcagaggtggacggcggaggaggaggccgcgctcaaggccggcgtggcgaagcacgggacggggaagtggaggaccatcctccgcgacccggaattcaccgcgctcctgcggctgagatccaatgttgacctcaaggataagtggcgcaacttgagtgtcactgctggaggatatgggtcaagagagagggcaagggtagctttgaagggaggcaagcgagggcctaaggcccttgctgaaccgatggatgccgacgaaaagaaccctgacattgatgataatgcaatcattgatgcacaaccgttggcagtggttgttgagcccatgcaacttgagagtactccagagaaagagaaatcagttgctaggcttgatgaccttattttagaagctataaagaagcttaaggaaccgtctgggtctaatagaacaacgatttcttcatacattgaggagcaatactggccacctgaagattttcaacgattactttctacaaaattgaaagcattggttgctactggaaaattaatcaaggtgaatcaaaagtacaggattgcaccaagttcgaactcttcaggtggaaagagcatcaaggtgtattccactggagaaatgaacatagaaaataataatgttagacagctgagtaagccgcaagtggatgctgaacttgataagatgaaaagcatgagtaaggaagaggcagcatcatttgctgctagggcagttgccgaggcagaagcagccattgctgaagctgaagaagcagcaagggctgcagaggccgcagaagccgaggctgacgctgcaaaggcttttcttgatgctgttgtgaccacgatgcaaaacagaaatcatgcttctgcggtatactga

SEQ ID NO: 21807 - DNA, 1800 bp, Oryza sativa
  Clone ID: TF_OsC4154_1
ttttttttttttttttttttttttttttttttttttttttaagacgaaatagatatttgtattatggtttttgaggatgatgggatcctatcattacaggcgagaagatgatgataccgcctagagggaggtgaaacgaactaagacgaacaagcatttacagaacacaatttctgctactacttgctgatgatgatgctaatggcgctgtcgcctgtggagatcaaaaggtgggcaatccaatccaggtggcatcatcgccggcgacctctacttcatgctcttcctcgccgcacccttgcgagcagccggcgccgcagccaccgacgccttcttcttggtcgccgccgccttcttcttggcagccaccggcgccgccttcttggcaggcgagtccttggcagaggtcttggcggacttggcagggcggccgcggggcttcaccggcgaggtggcggtcttggccttcgccttgggagacgccttgggcttcgccgccggcgcggcggcgaccttgatcttggtcttggtcgccggcttcgcggccttggtggtagcaggagccttcgccttggcagccggcttcgcggccttggtggtcttgaccttgggcttcgtggcgggggcggccttgggcttggcgtcggcggcggccggagcggcagggcgggtggaggagagcttgaaggagttcttgaccttggccagcttgccggcggcggtgagcttcttgaggttgccggagaggagcttgcggaagttgggcggcaggttggcgccatggttggcatggatgtgcttgccgatggcctgggagctcgatccagtcctctccttcagcgccacgatcgcctccatgatcatctcggcgtacggcgggtgggcggcggcgacgcggggcttcttggccttggcctccttcaccttcttctccttcgccggcttggcctccttcttctccttcggcggcctgccggccttcttcttctccttcgccggcttggcggccttctcctccgccgccgtcgtctcctcgacggcctcctccgccgcggcagcctccacctcggtcaccggaacctcagggacaacctcctcagtcgccattgcagcacgcccctcactcactctcccctctactactactcgcaagaaatggtcgcgactcgcggcggattgcttccgattctgcggcggcggcggccggccggtgccgcgcccgtgcttgcggaagttgggcggcaggttggcgccatggttggcatggatgtgcttgccgatggcctgggagctcgatccagtcctctccttcagcgccacgatcgcctccatgatcatctcggcgtacggcgggtgggcggcggcgacgcggggcttcttggccttggcctccttcaccttcttctccttcgccggcttggcctccttcttctccttcggcggcctgccggccttcttcttctccttcgcccgcctggcggcccccgcctccgccgcccccgcagttgcgcggccaggccgccgccaggcgcggcctggtcgtgcgtccggtggccggggggctcggtccgggcctcgccgtccgcccctcgcgcccctccaggttctccccggcggtccccgggggcccggcggccccgcggcccgcctgccccgtgggcttcgtggcgggggcggccttgggcttggcgtcggcggcggccggagcggcagggcgggtggaggagagcttgaaggagttcttgaccttggccagcttgccggcggcggtgagcttcttgaggttgccggagaggagct

SEQ ID NO: 21808 - DNA, 855 bp, Oryza sativa
  Clone ID: TF_OsC566_21
gtgtttttgaacatatactagattccttgacagcttggtatttatcatgggtgggctactcgatgctatcctactgcttctggtctcctgcgcgggagacagccatgccgcgttgccagcggagatgtactggaagatcgtgcttccgaccgctgccgactccgtaccgttggccaccgaaaagctcccggagatcctctcccagctctccgtccccgccggctccccggccgccgacgccatgagtgcgaggccgtgccgctcgccggcgaggcgaagcaatgcgcgacggcgctcgagtccatggtggagttcgccgcgtccagccttggcacccgcgacgtgcacgcagtgttcacggaggtcgacagggcagcgccgatcatgtattgggttgattcgagtttgtgccaatgttgcgtgcctgtccgccggatgatcaaggaggcgatcatggcgctggacgggaacggcaaggcgggatcgagcccgtacgcgatcgccaagtacatgggggagcagcacatgggggttctcccggcgaactaccggaaggtgctcgccgtgcagctgcggaacttcgccgccaagggccggctcgtgaaggtgaaggcctcgttcaagctgtcggctgccgaggagaagaaggcgacggcggcgaaggcggccaggtccaaggcggccaagggcgtcgtcggcggcgccaagaggaagaggaccccgcgcccctccggcgccgccgccaagaagcccgcgtcgtcggcggaggcgaagaagcgggttccccccgcccgcccagcccgcgccaagagggcgaggaaggccgccctcgcgaagccgatgcagccgcccaaa

SEQ ID NO: 21809 - DNA, 445 bp, Oryza sativa
  Clone ID: TF_uC-osflcyp061f05b1
tcgtttttccactacgcactagtagtagcactctggtattctcccatggcgactgcaaccgaggaggttgccgctgcggctgctgccgccggcgaggcgccgccgccgccgccgccagcggtggtagaggaggtgaaggaggcggtggaggcacccaatccggaggaggcgcctaatgctgatgagggggaggagaagaaggcggagggtgagaaggagaaggagaaggcgaagaaggagaggaaaccgagggcgaggaagccccgatcggcggggccacaccacccgccctacttcgagatgatcaaggaggcgatcatggcgctggacgggaacggcaaggcgggatcgagcccgtacgcgatcgccaagtacatgggggagcagcacatggtggttttcccggcgaactaccggaaggtgcttgccgtgcaactgcggaact

SEQ ID NO: 21810 - DNA, 980 bp, Oryza sativa
  Clone ID: TF_OsC5305_1
tccccacgccgccgccggccggtatccagctctcgtctcgaaatcaaaagcacacccaagagagagtagtggtagttccagagcggtctgcttgcgaagttgcgatgcctgccatggccaagcccgcctcccgcgctgccaagcccgcgtcggcgccgaagaagcagaaggcaaagccctccgccgccgccggtggctcctcccacccgccttatttcgagatgatcaaggaggcgatcacggtgcttaaggagaggaccggctcgagcgcgcacgccatcgccaagtacatggaggagaagcacggggcgtcgctgccggccaactacaagaagatgctctccatccagctgcgcgggttcgcttccaagggcaagctcgtcaaggttaaggcctcctacaagctctccgacgccgccaaggactcgcccaaggccaagcctgccgcccccgcccccaaggcagcagcgccgaagccagcgaaggacgccgccaaacccaagaaggacgccgccgctgccaaacccaagaaggcccccgccgctggcaccaagcgcaaggcgccggagaagaaggtggtcgccaagcccaagaagtctccggcggcgaaggcgaaggccaagcccaagaccgtccggtcgccggccgcgaagaagacccgcaaggcacctgcagcttgagttgggagtttggttgatagctatgtaggtcccctcttggttgaaatggttggtgtttaggatctgtacaaaggctgcctcggctatgtctccctatttagatagttctcttgagtaggcgaagttctatgtatcccttgatggtgtagtataagaaatggttaggtctctggagatgtgaggcgcttccatctaactcatgaaatgaactttgccgttttctttgttgtaaaaaaaaaaaaaaaaaaaaactcgtgccctctcccccccccccggcccaaaaaaaaaaaaaccaccaaa

SEQ ID NO: 21811 - DNA, 1827 bp, Oryza sativa
  Clone ID: TF_OsC11113_1
atgcagcacgggagaaggggagggtggcggaagggcgaggcggcggcggcgggtgaacgcggtggcgggctcgtcctccccgatcacactctccggcatggggaaaggatggcgcaggcggcggaccgcgcgggagaccagcggcaggcggtcgtggatgcggcgctcacgaagccctcgcgtggccgcggcatcgtgaatggcggcggggaaacggaggcccgggcgacgacgagatggttgcgccaggggagcgcgggcgggggagtgacggccccatccggggtcgccttcaacatcaccgccgggcccatgaccgagatcgtggacgacatcgacgtcgccatggtggaggaggtggtggcggcgccggcggagaaggacgagcacgtgcaggccatcctcctggccattgtcgcctccactcgcgaggaccgacacggcgtggagaggttggagaggtcggaggtcgaggcccgggacccgcgcgtccgtgacgtcgcgaatgtgcaggcactctcccttcgccgccaccgctctcgcctgccgacgtcgcatcgttccagcccgccgatgccgcaccgctctcgcccgccgacgccgcctctccgcaaccgtgctcgcccgccaccgtcgccgcttcgcctgctctggccgccattctggtgcggcgacggcgcccggttgaagaggtgccccttgggccgccctgcgccgtcgcctccggccggcttgcccagtcgccagaagataagagaagaaccacaaccacaaccccccttctcctctcagatccgcgtcgcggcggccccaaatcccacacgcgcacagcgcagcaccaacgccggaaggagacagcgcccctcgcccccgccaccccaaccctacgagagggagggagccagccagccagccagccaggcatggccacctccacttccactggccaccgcgccgccgacctcgtcctcccctcctaccccgaggcacgctctctttctaaaccctagctgttcctggccagatgcccagatctgtggcggaattgaccgggtttcttgggttgtcttctccttctctttgctgcagatgatcgtggaggcgatcgcgtcgctggcggaggagaacgggtctagccaggccgccatcgcgcgccgcatcgaggcggcccgcggcggcggcggcctcctcccgccgtcgcaccccgcgctcgtcgcggcgcacctctcccggatgtcagccgccggggagctcgtcgccgtcgcgggtgggaagtacgcgctccgcccgactcctccgccgccgccgccggcggatccggcggcggcggcggcggtggcggaggaggaggaggaggaggaggagttcctcgccgatgatgactcggccgacgacttaccgccgcctcctccgcccaagcgaggccgcggccgtcccccgaaggtgcgccccccgggctacccggccgtacccgccgccgccgcacccgtccccgtccccgtcggtgcgccggtcgacggctccgtcgccgccgccgcccccgccgtgccgcgccggcgtggccgcccgcccaagccgcgggacccgcacgcgccgcccaagatcccacgcccgcgagggcgcccgcgcaagaaccctctcccggaagggatggtgccgccgccgccgacgcgccccggcgcgacggccaagccgcgcccgcagttcgccgagtggttgatttcaagcaagaactgcaaaggactcactgcttccctgttgtttgctgttgttcctgctgcaaaattgatgatggtcaatgctcattgtcttcagcttgatccataa

SEQ ID NO: 21812 - DNA, 1537 bp, Oryza sativa
  Clone ID: TF_OsC166550_1
ccttcgtccgaaccacggacaccgacgaccccgtgctggccttcgtagagagctgcggtgctgccgtgacgactaacagagccacgatgtcttaaaaccgcgacgactgctaccttgggcctcagttgaagtgcacaccacttgacaaaccgttaatccccttcggttgcctccacggaaacggcacaagatcgaggttcgttgctgagccgtagatttttggtgtgagcatcaccgcactcagcgaaacatccccacgggattcgtcattgaatctgaggaactctaacaaccctgacaatcgaaattgcgcagggggtccgagctcaacccgaatgacaaaccatgcgcggcttctgcttctaggaaacaaaagagagggccaaaacgtagaccagccaaccatcaacaatgaggcttttgagaggctgccaattgacttctgtcttgctttgagggcggggatggctaaggaaagggcgacctgcaacatggaaccacaagactttgggcagaacaaacacccaatcacaaggatcctaaaggcgtcggcttgaaggaggatgtagatgacgacgagccaaccgctgccgccaacagaggaagaagcgccgatcatagcacacatgccgacgcctgccggcgccacagctagcataggtgcgacagagggaaacaacgccaccgctagctcgggcacggcgaagggggacgacagacgtcgtaacgccgaggacagcgcagagaccgtcgccacctcaacgacgaccaccgaagtgccaggcgcgacgcagactccgtctccaccaccaacacaaacccgcacacgagcagggtgtcggcaaccactgccagaagctcctcctccaccaccaccaaggccatccagatccggaaactctatcttactttggggctcttgctcggggatgatttgaccgccatgtcttcgattcgccgtccacgaggcgcagaggtaccaactcccaccaccgccgctaacgagaacaccggtcgccaccattagaggccagactaacttgggtggccggccgcggccgcgcttgacgggagcggagccgtcgccggcggcgggaggaggggcgggagccgtcttggccttcttgggcgggcggccgcgggacttggggatggcgtcggagatggggtccttggacttgggcgggcggccgcgggggcgcggcgaggagggcttgggcggcggcggcggcgcgttggggtcccgcggcttgggggggcggccccggccgcgcttgggcggcgcgtcgggcgcgtcggcgcggaagtagttgttcttgaggaagatgagctcaccggactccttcatcctggccaggtgcgccgtgagcagcgacgcgtgcgccggcggcaggtccccgtacttcccctcgatgaacttggagatcgccgacttgttcgacccgctcttctcgttcagcccctcgatcgccgccagtatcatctccgggtagggcgggagaggcggcggcttggaggcttcgtcggcggcggccat

SEQ ID NO: 21813 - DNA, 426 bp, Oryza sativa
  Clone ID: TF_LIB4371-022-R1-K1-F8
ggcggccccaaatcccacacgcgcacagcgcagcaccaacgccggaaggagacagcgcccctcgcccccgccaccccaaccctacgagagggagggagccagccagccagccagccaggcatggccacctccacttccactggccaccgcgccgccgacctcgtcctcccctcctaccccgagatgatcgtggaggcgatcgcgtcgctggcggaggagaacgggtctagccaggccgccatcgcgcgccgcatcgaggcggcccgcggcggcggcggcctcctcccgccgtcgcaccccgcgctcgtcgcggcgcacctctcccggatgtcagccgccggggagctcgtcgccgtcgcgggtgggaagtacgcgctccgcccgactcctccgccgccgccgccggcggatccggcggtggcggcg

SEQ ID NO: 21814 - DNA, 893 bp, Oryza sativa
  unsure (1)..(893): unsure at all n locations
  Clone ID: TF_OsC566_18
cgaatttccgggttgagaccaagccgtcgcgatttagctcgtgccgaattcggcacgagcgaggaagccccgatcggcggggccacaccacccgccctacttcgagatgatcaaggaggcgatcatggcgctggacgggaacggcaaggcgggatcgagcccgtacgcgatcgccaagtacatgggggagcagcacatgggggttctcccggcgaactaccggaaggtgctcgccgtgcagctgcggaacttcgccgccaagggccggctcgtgaaggtgaaggcctcgttcaagctgtcggctgcctatgataaaaaggcgacggcggcgaaggcggccaggtccaaggcggccaagggcgtcttcggcggcgccaagaggaagaagaccccgcgcccctccgccgccgccgccaagaaacccgcgtcgtcggcggaggcgaaaaaagcggttccccccgcccgcccagcccgcgccaagagggcgaggaagccgcccccgcgaagcgatgcaggcgcccaaatccatccgctccgccatctccaagaaggccaacaaggcagcgcctgatcatctccgccgtctcgccgcccgtccccgccgcgcgctgtatcccctgtataacctaagtgttgtcgctaacctagtagtagttcgccatcgtcgtttcgtttgcttcgatcgatcgagcgctctgtgtccggtgtgtgtgttgcgttgtaganaaggtttgggtttttttttgcaagggngggagaagctactgtagcatatccccaagaagctgtagtaataagatgatttggcgttcgcagctttgccttatgatcaaaaaaaaaaaaaaaaaaaaaaaaaaaaaaaaaaaaaaaaaaaaaaaaaaaaaaaaaaaaaa

SEQ ID NO: 21815 - DNA, 825 bp, Oryza sativa
  Clone ID: TF_OsC31153_3
ggccgcaaattttttttttttttttttgttagcacatcatgctctgtgtatattaatgtaatacactttacatttggtacagcaatcttatagttatgcaactgtgcaattcccattattgtgagccagcttgtgatgcaattctaatagatcaaagaacaataaatagtcatggaataaacacattaattttgcattcagtttttcctccccttttgcatcaggcataagactgaggcaacacaaattatctaaattatagcctacttttagggcctaaatccttttctaaaaaagtttgcttctgaattgtacgctacttttagggcatacaccctttttccccccttatgtattctggtgctttactgcccagaacatttctacctcttttgctgttcttccagggattcttccagctataagttcccacctgttcccaacaagcctgtgcattctgaaaacgagatcttcctcttcttccgtgaaatgaacaaaattctgtgcagtgttattaacttcttttgtttcacaaccatcactggttttggaattctttccctggctaccactgctgctatccattaggcgtgaaaaactccaatgaaatgccgagttgagatcttgtgctagctaagatcctcagacccttgttatgaccttatgttttctagggcccttctctgggtaaagatgagcaaaactctggtttttaaagagatgggagttggtagtcaccttctgatctagctgtcctgagtactgactaatgctgctggctgttggatttcccctagtcttccattggctcccttatctgtaaga

SEQ ID NO: 21816 - DNA, 1946 bp, Oryza sativa
  unsure (1)..(1946): unsure at all n locations
  Clone ID: TF_OsC393664_1
ggattcgtgcgtgatgacggcggcgccgctaatgccggtcgaggtcgtcgtggaatcgtcgccgacggcgaggatggcgtaccacttgccgccgccgtttgcgcgggaggtggtggcggcggcgtgcacctcgtaggcggcgatggcgttggcgaggccagggagtgccgggaagacgcgctgcgccgcccgggcggcgcggagggcaggagatgcgacgcggccctggcggcggcggcggcggcggtggcggacagcttaccgaaggagacgcggcggaggaggtcgtcgcggatgaatcgtcgccgacggcgaggatggcgtaccacttgtcgccggcgtctgcncgggaggcggcggcgtggtggacctcgtaggcggcgacggcgctggcgacgccagggagtggcgggaacagccgccgcgcctccgaactgcggctgcggcggcggcgacggcgacggtgtctccctctgatgaggcggcggcggcggcggcggcggtggctgaggcggaggcggaggtgcgggcccgctcgccggtggtggtggtggcggcggtagtgcgcccgccggctgcggcggcgaagccggaggtgtatccctctccctctgatgaggcggcggcggcgatggctgaggcggtggcggaggcgcatccctctccgtctgacgaggcggcggcggtgatgactgaggcggtggcggaggcggaggcggaggcggtggagctcggcctgcggtggccggcggttcgggtacctgatggccttgcctgcccgggcgccgcggcggcgccggcggcgcgcggcgggtggcgaagggagagctcgtcccacgccttctggagcagcctgaacgcgccggcggcggcggcggagcggttcttgtccgggtgcacgacgaggcagaggcggtggtactgccgcttgagggactcgtgcgtgacgccgccgccgccgctcgaggtcttcgccgatcggtcgccgacggcgaggacggcgtaccagttcctgccgcctgcgcgggtggtggcggcgggggcgtggatggtgagtgagttaattgcttcttggttttgatgcaaaaagaaataggtatcagatttttgaaaggagggctcggtggtggtggcggtgcgcgcgtgccgctcgtgcgccggagcactcgagtggtaggtggagactcacactggagaggtaggaggtgcgaggggccaacattcgcctaccgttggatgcgcgacacgtggcacccgttttgatgggccaagacttcctcgtaaatgggccgaagttaaattgggctttcggggaccgcctcggcgccggggccgcgccggcggcggcggagccagcaccggcagcggcagcttgtagatggacgaggcagaaggacaagttactggagacgctggtggcgcgatgcgccatgaaccggcagtgcgtgggcggctgggacgccatcgccgccgccttcggggacgacaggacggcggcgcaggtggagcagcggtacggggagatagccgcggaggtgagacgcgtcatggaggagccctgggatgcggaagaccctgcaattgcagcagcagccgccgccgtgccggcggcgccggtgaagcatgcagcggcggggccggggagcgatggcggcggcgaggaggggaaggtggtcgtggagaagaagtcagggatatggagtgaggaagagcaccggcagtgcctacgagggattgaagagatcgggcacggtcgttggacacagatatcgatagagtatgttccatcaaggacaccgatacaaattgccagccatacccagaagtattttctccggatggccaagcccaaggaggatcgcaagaggaagagcatacacgacaccccctatcatcttcatctgcctaatgctgctgatgctcacgctcaccaacaacaacaataa

SEQ ID NO: 21817 - DNA, 1190 bp, Oryza sativa
  Clone ID: TF_1044913
ctcgagtagtggtagcagcacgactgcacgacgctagtacccgggcgtcaccgtcgccgttgcgcgcgcgcgctgtacttgcaagcaaaagcccccctcgtcaattgaatgcgtgcgtcgcgcaacgcaacgcaagcacgcgccgggttttattttcttttcttcgtcgtctcccacactctccgcttccgttccgtctcgttgttgttgctgccgcagcagcgcaggtgaaaatctccggcatttaaggttgcgccgcgggggatcctcctcggccacaaacaaaaccaccctcgtcctccgcgcctctgctagcgagtactcctacatagactagccacgtctccccccaaatcttttcgcacttcctttcccctccctttcacccactgaatcactcgaagtcgtcgttctcgtccacggccctgctgtctcgtgcgctccggcagctttggcgggggtgggtgggggagcgcgcgccatggggagggcgccgtgttgcgacaagaaggggctcaagaagggggcgtggacgccggaggaggacaagctcctcgtcgactacatccaggtcaacggtcacggcagctggcgcctcctccccaagctcgcaggtaccggctggcttctctgttcttgcgaggcaatgctttgcttctgtcacgttttcgtgttcgcgtgccgcactagtgctgaactgctgatcagcacattctgagaatctgtcttgatgatttcggccttagatgctgcttatactcgattgcatctgcataccttcaagctgcaataatcacccacaagctcgattggggctaaaatacacaaattatttcatcgtatacaaagtaggagtactgattaagtcgtacactcggcgagtactaggctcactcgtactactccctgctgggttttccttgatcttcactccaggcatcagcattgcctccagctacgaacactcggtcactcactccagggctccaggctcctaccattaccatgcccatgttgtgctactctcttttcgtgcatgagaagtactcggtattattcacaggagctgagagactctagtccgttccatctggataacacttcgttttgcgttgcatgcagggctgaaccggtgcggcaagagctgccggctgcggtggacgaactacctccggcctcgtgccgaattc

SEQ ID NO: 21818 - DNA, 660 bp, Oryza sativa; identical to SEQ ID NO: 12465
  Clone ID: TF_OsC100249_4

SEQ ID NO: 21819 - DNA, 755 bp, Oryza sativa
  Clone ID: TF_OsC263120_1
tcggcgtcgactcccgtctcgtctctcgcgagctcgcccacccgccgccctgcgccgatctccagcgattccgcgacttcgcgagcagtggcgccgtcgtccgtcctgctgcttccgccgcatcctggtttgggggttcaactgaaccccctatgtccctcgttagatccgcccctgcccgcccccgggctgcagggacacgccaagaggaacaaaattttttcaatgcgctgcgccaagtagggaagaattttgagaagattacgctgcgtgtccagagcaaaagcaaagatcaggtcagacattattactatcgtcttgttcgacgcatgaagaaacttctcggtcctgagttctcgctcgatgcaaaaaattccaaggacaccattgctgctatgctctgctggtggtctctgcttgaaaaatttagctgcagtgcatcaaaactgcatctgaagcctcggagattcaaaactttcgtagaagcattgggaaatcaactactaaaggatagaaataaaaccagaaaaaagtgtccacgtggggatgtgtgcctgtcctcttcatcttcggctgtcaacaggactcctggaaatgaatctttctcagtaaaactcctgcctgtggatgtctccaatggtagcaaagtagcatcttctaaaggggcagttttcaagaggggcgcagaaccaaattccagtaacaagtcaggtgcaactaaaggggacctctccgccacaagtactgtgaaacag

SEQ ID NO: 21820 - DNA, 387 bp, Oryza sativa; identical to SEQ ID NO: 12280
  Clone ID: TF_OsC134_46

SEQ ID NO: 21821 - DNA, 330 bp, Oryza sativa; identical to SEQ ID NO: 12282
  Clone ID: TF_OsC341175_1

SEQ ID NO: 21822 - DNA, 379 bp, Oryza sativa
  Clone ID: TF_OsC96526_1
gtccaatccaaggatgtcttctaggtcaagcagctcctcccgcaacagcaacagtgtcaacatggactcagagtggagcaaaaaggagaacaagctgttcgaggaggctcttgcctactacggcgagggcgcgcctgacctctttcacaaggtgtctcgcgccatgggaggcaccaagacagccgatgaggtgcgccgccactatgagatcctcgaggacgacctcaagctgatagaggcaagaagagtcccgttccccaagggtggaagcatctgagcatggaactgatacgggtggaagcatatcaggttccagacaacacgaaaaaaattccaatataaattatattccttgctagctgaggctaaactactgaag

SEQ ID NO: 21823 - DNA, 4015 bp, Oryza sativa
  Clone ID: TF_OsC4193_1
ggcaaaagatgcaatagagagcgagccagagatagacagcatgaatattttttacagttcactaatatggctaactaggatacaacaatataaaaataacgactaataagttacatcttgtatagactgcaaaattaaaattagaattaaaaaagttgcacgcgacatacatacatatgatgtgcaggccaaggagctagccacttggggtgggtatcaacgccagcatttggtttttgatgatgcccatgcacatctcgatctccctgaagatggttacattttgtgagctgcaaggctgtaggcgcgaaagcgctgaatccaggatgtgcgcgacttcggcaggatggtactgcttttccgtgcagttctggatcataaggatcgtagcaacacacgatgaaatcaactctgagggaaattgcggttcagaatcgcaaccattgggcaatcttggactagaaatgttatttgttgcaggatcaaagtggccagatgtggtgttatcttgatgagatgaattggcctgtccagaatcaggaggtatccgtcttatgcctagtatactggaacccgagccagtgctgcgattgttcagattatcgagtgcctcccctactttggcataagcatcctctccttcactcacactgcacattgcctgaatagcaacatcaaccatcaattttgctcgggacctcgaagtctcaataacttccatcacttgggacccagattcctgattaatatagccaaaaaggttatacaggtctggtgtgccagttaaggctccattttccatgggtttaggatatgattgtgctggatgcccatgatacgtgttgcgttgccgcagagaaagcaaggctgaagccacatgatcattagaatctcttagctgtacaagcaccatagcatattgttttctgaagtgctcaaaatctctaaaagcttctccatccttttgccttccatacacctcttcgttcatgtgcctcaattctaccaacaaagcttcaacagagaacatgaggactaagcctttcaaacttgcctttttatcaagagcacgtgatagttcagcaagagcccttatatcagcctctctttcctgtatctgtgacagtgtgcacggctgactgtacattgactgctgagcagcaacagcaacctcatttactgcaactttggcctgtgcaattgaatcaaccgtgtcaccctttgcttgcttcattaaagtatttattgggtaattagaaggtatgttggaggttgcatcaccaccatcaaaacacacatttgatgtgaatcttgttggacctccagtacctaactctttggaccgatcctcgaattttgcttctgagaaactattgtaatatttgttaacaatgttctgccgtctgagagactctgggaaattttctagtggatgtagtggcatacaatcaatatccattacaaactcaacacccagttcaggtcgatcaaattgaacccggcaacgattatggtcaacattcagaacattcccatcatgaagctcccttgttctgggatgacaggctatgacacgctgtccaactcctaaaggccgagcaagatcggttggtagaccttctcgaacaccagaccgaagttcagcatagtgttgcctgacagactcacgatactgagcaagcttctctctctcttcttgcaaaaactgtttcgacaatcgacgtggttttccaagggagctccttatgacaccccactcgacacgagtcagccttggcacatgacccaacttcacatgattcaaatactcaacaaattcactcttttcaaaccatggaaaatcaattgcactatagaaccattcaaacgtgcaccatctacggagcaaacgtgaagataagcaatgagagagtgagtccttaagatcaatgacattattcacagcgtaagagaatttatcacttcggagatcatcagcaccatcagtaggtctacattctggagcaagtgctttcagaatgcctattttgcggcgacttctaccctttgatgctaagtcagcttgctgagttgtggcaccttgtgttgtatccacagtatccatggctttattagaagataccttcccttcttcagcagaaacgttgtccaagtcactaatttccatccactcagtcttctcaacatctttaagtgcacttttttcatctttagaaatctttgccgcggaaggttttcttttctttttctctgtttgaacaccaaatttagaatctagctgctttgtttcagaaatagcgattccatcacgattaggaactttggcaattctagcttttttgcgagcagccatgtcagcgcttgcgagttctgactgccttttaacctttttcactgtacttttggatttatctttcttctcaagtactgacactgctgcaggcatactaggcttttcatcagaatcattatctttgttttcatccttaatctgtgctgatgattcagattcaacgatagaagaaggttgaagaatattcacggatagatcagctaatgtatgtaatgcatcaagggctgagctttcatcaccaaagaacagctggcgatttcttttgtttgatttcttagatggccatcttcctttacggcccaatccattcacctctgattcatctttagtctttttggcgctatggccttcttcagtgccactacaggcctctctgtcatcctcaagttgatcatctgttttccgtgcagctttctttctcctcctctgagttcttttcaccttttgctgagacttgccagacgcagaaccttcgttattcatcaaataggatgcatatttgggataatcgccagtctctgcttccctacttcctaaactaccttcagggaaatcagcatctacttggaatccatgtagctttgagcttcccatctccgaatcagcattctttctgtctgtactttttacaggagacaggaacatacggtcaccagatcttccaggcgtttgagaatcctgaggtgaacctcctctttgaaacacctctgccaaagctagtgcagctacatgtgcaccttcatcatcaccattaccatctggtttggcttgtctatttgtcggccctatcttctcatctcgctggtacatactagcaacaggcactcgtggagtccgttttccaacagcacgtggcttgttccctccagatcgtttcttcttcaacagggaaaggcatccatagcttgacgaagcaggttgagattgcaattgatcaggatgttgtgtatcagaagccttcgacacagattgaaatttcgcacgaccacgctttcgtggctttctggaagtttttggtgaaccattactctcatgatcgctgttacttccatccagaatattatagtgatcagtcatcattgcaattaaccctgcagcagtagctgttccctcaggaagagataaatatgccttattcatgttgtaaagagcctccaccatttcagatgttctatcacggatagaactggccacctttctccaatcttttccatattttctataggatccataaaaacgctctagctcatctttgctccattgagaacctagcatgtcagacagttttttctttcgcactttacttttatgcacatttgttgcatctttgtcctgccaatcttcatttattttggcatatcgtttattcacatttctcactttccatggtaacacacactccgtggcacacaaattgccaccgcagacgcaattcacaaataatccaatgcgcacagccctgagtgccaggtgagtcctcgatctccaacagacgacgagggcacgaaattggggattccggggaacgtagaccctcgcgggatgagctgggcggttaacgcgggagcggctacaaaaggactcctccggcggcgcgaggtagatcattctgctttgtgcaaaaccacatacatccaagcaatatgatgcgacagcctccat

SEQ ID NO: 21824 - DNA, 1549 bp, Oryza sativa
  Clone ID: TF_OsC51198_1
atggacgcgaaggacatcctcggcctccccaagaccgccttcccgtccgtccaggagaagaagccccgcgcgcccaaggagccgcagcggaagcccgatggcgtctcgcgcgaggtgtacgcgctcactggaggggtggggatggctccactcatgccgaccatcgaggcttcgcacctgaagcggcgaccagctgttgagaaggagaagatagcatggcagtggctacctttcacgtcctctgcacggactgacaaccttcaactttaccattgggttagagttgtaaatggtgctccacccactggtgactatcactttgcaaaatacaacaagaaggcggatgttctcaaatacaccgatgaggagtatgagaagtatttaaccgatcctgcatggagcagggaggaaacagataaactatttgaactatgtgaacgctttgaccttcgcttcatagtaatagttgataggttcccaactgatcgcagcatggaggatttgaagagccgttattattctgttactcgtgctcttctgattgctagagctcggtcatttgatgaagttgctggtaatccccttgtgaaggaaacattcaatgctgctcatgagaccgagagaaagcgtgctttatctgcacttctctcccagacaaaacagcaagaacgaaaggatgctgagattttagcagaagcaaaacgcattatggaaactcgtgctgctagcaaacatactgaggaagcgggagcactggcacactttgataatgttgatggtgtatctcccttgagcaacacacacccattgtcaactgctacacttccagctgcagcagtgaataactccatacctgcttcactgcgaatggtgaatttgaagcccaaggtcccgacgaaagcagtttgcgtcgagcatcttgaactacggaatgagatacttacactgcttaacttacagaagcagctgcaaaataaagaagctgaagtttcagctaacagagaaaattcctttacagaggcaccaagcacacctaagcgtgctaatagagatgttgatagaccctttgttcctgatactgttgggtttgcaggtgagagagcaggcaagcgggaccacaagcggaagatagtgctatggatcaactccattcttgcttggaagcttcccggcgtgcactttcaccaagagtttgctcccgtcggtagaagccgttcttggcttttgtctgtacagtgcatctgccctgagaaggttttcttcgtactcctcgttggaagatgagacgaatcaggtggaagcagctgctggcgtcactgagaagtgatcgccttgagcccttgacgtctccccctactcaacgaagagtgtaactgtttcttttgtttgtttgagctgtagctaccgtttgtaaaatgagttatctgacaataccgtgtttgttcaagtagaactgtaacacaactgtttacacccaatcaatcctgtaatcttggacaatttaacgaggaaccgcgatcccaatgcaaacctgagcctggtttccatg

SEQ ID NO: 21825 - DNA, 674 bp, Oryza sativa
  Clone ID: TF_LIB4506-009-R1-N1-D10
aaggggactatgtcaatctcaaggtacgttagtcaaatctctcggagaacataggaagtgttcgtgtgtagaaaaaggagcaaacaatacatacgtcgactctttcttttgcacgagaacgcgagtcgcgatcacaactttgctatacaaggggggtattcacagacgtccaaaagcgtacatcaatctcaggggtttccccctctatttgcatgcaacacgtggatcacaagaaacccgaaactttcccctgtacaaccgtagtgctctgccctgaaaacttgatcggcactctcacgtcgccagcttgagactgcatctcagccagtttttttactcgtagcagaatcgacactggtatcggtatggcagaaggattgctcttccgtggacaaacaccatcgttttcagtggaaagttgtgtctggctggccctgatcagattccgccatttgtccttaagatccaccgaggtgcggtacgaatatgatgagaaggctagtcttctaatctcggaccatttgccagccccatatcgggccacaccatcgaccagcttcacaacctcacacaatgtccatgctcgatgatgcttccgcttcccaccccgctttgttttgggattgtcatcagagtcgcaaaaatccttgtcctgcagaccctgaacatccttt

SEQ ID NO: 21826 - DNA, 1676 bp, Oryza sativa
  Clone ID: TF_OsC25904_1
cccaaaatatgggcccctgggggggctcaaaagtgccggcaccgcacaacattgctaacagaacaacattgctagctcttttcgagataggttcttgatctaatgcaaagataattagacaggaactatgtaagttcatcaaaagatgcacagcagcatagcggttttcttgtttttttttacaatggattgctagtgcaataccagcgcggtctacttgtctgtgcccctttcatgtctcatatgaaatcaccatcgtatgggcaacctgaaggaggaatgatcatcaagccatcgatgtatgacatgtctagaagatctgagacattcgccagatgttgctccagtgtgcatgggtctgaggaggtctccaaagaacaaacattcttagcttggttgaaatcagccagtggtggttcgacaatcttttcacatactgatggaacttctggtgaaaaaccttggagtacagctggtggagaaacgatgttaacttctggactcatttctttactttcctgtaagtgcctttcagattctgccacagcagacaccttgagctccaccgggcttgacaggaaaaccagcttcttccttgctcttttacgccaattcaatctatcccttatcctctgagaagcttcacctgaatcaggatctggtctttctgtacatatcaactcagaactttctccttctgatgtatcagtattttcacataggtctatgaacccttgtttagactttgagcttgtcccttgtttagatttggagcttgccccttgtttatatttggagcttgccccttgtttatattttgagcttgttctttgtttagacattaaacttgcttgtaaatctgataacaactgattctcaccagatgaaccatcacattttgagcttgccccttgtttagattttaagcatgctcgtaaatctgataatagtttattctcatcagatgaaccatcacattttgagcttgcccctttagattttaagcttgctcgtaaatctgataacagttgattatcaccagatgaaccatcacactttgagcttgcccctttagattttaggcttgctcgtaaatctgataacagttgattatcaccagatgaaccatcacactttgagcttgcccctttagattttaggcttgctcgtaaatctgataacagttgattatcagaagatgaaccatcacattttgagctcaccccttctttagattttaggcttggtcgtaaatctgataacagtttattctcatcagatgaaacatcacactgctgaagaatatttgagtcactactctgcgaaactgatagattttcaggcagaccaggagattttttgagcaatcctgaagctaaatacgaatttaattttcttttcataggacctctccagtgttctttgattgcagcacttgtcctccctgtgaaatgttctaacaattttagttcagaaagccttttgaagtggttagatgcatgctcccttactctgcattgttgtgcatttcgaccaggtatagcgcgtgcaacagtttcccagttgttatgcccatatatgttaatcatttgaataagtgactcatcctccaggttacccttcccctccccctcctcctccccctccccttccccctccactgctctgctcgccat

SEQ ID NO: 21827 - DNA, 264 bp, Oryza sativa; identical to SEQ ID NO: 12290
  Clone ID: TF_OsC389431_1

SEQ ID NO: 21828 - DNA, 1365 bp, Oryza sativa
  Clone ID: TF_OsC28425_1
ttttttttttttttttgcttcagaaattatatccggctgcttcgttttccttgtctgtaatgctcccattcagatcacttaccctattcactgcgttacaactcaaatgccttaggtcagaattgatacaactatatgagtacgacattttctgcagtaaaaagaagggttaactagaagctctccaactccaactacacaatgcaataggttgtacacatacgagcaaaagatgacaagagtacacaatgaatgaatataagacgacgtcgcacaaaagctcagtttggtccccaaatgctactttacaaaatggctttgaaaaatactgagctacttgaccactatacagatcgctcccgtcgagtcttctggcgaccatatcatcaccaagacagacgacaggttggaggattttgaggaacagacttcccaaggcaaggcagctgttctcaatgcagaactcttgacttggtctttaacttttttggctgtgcagtcccctcaaatttcaaaacttcagcaaagatcaaaaccatctcggcgttcgaaatttggcaaacgccaaggccatccactttatttgtattgctgtcatactgttcatcacaacattctcaacaaagcattgacaattgacaaccccaatatacaaatcatctttatctccctcatcagccatatcttcagaggctcgtcatgatgtcaacatctaataacctatgtttatatgctcatgagtcctggcatccgctacatgcacgcacctcggtcactgtagtggtctagagcagcatttggcagcatcatgtgaaactcagcacattgaacaccattagatccatgcgctccattatggtcctcaaatgatgtgcatgactcgtcttggacgtcggcatcacctccaggattatctgtgttggatcccagaggcttctggcttggtccatctctgagcccagataaactatcagctaccttctcatggaaggagtcttcagactctggggacatgggattgttcacgtaataatcatgtgctggggactcaactgcagaatcctcatcctctgttacagaaggctcatcaggaacctcatcatcatcactgtccacgtgcaatggctccgatctgttttgctgagccctcttacgaagcatgaagacattgaaatagtagctgacaagctccatgctagttttaccaggcaaagctcgtgggagaaaatgccaaaagttctttcccaaggaaggaggattagagtaaacaactctataaaagagactttcctcctcatctgtccatctctgagcaatatcttctcccatatcacaaagacctaactcacgaaatttgtcctctcc

SEQ ID NO: 21829 - DNA, 2090 bp, Oryza sativa
  Clone ID: TF_OsC31153_2
atggaccatgccgacatggatggcctcgccacggccatgctcccgctctcattgtggtcgcgggagatcgctggccttcttttcatgatggaccgtctcactggtaccaccgtcacctctttgagaaaccaaggaccaaaattctcctacgcaactcatggcgctcgctgcctcatgctgctacccacgctgactgcctcggcgtccttccctctcgacatcgccatcaatggcgagatggcaaatcgaatgatgcaccaagtccccaaaaagcgtgctcctcaaacgcataatgccttctacctagatgcgctcatgctcctcccacatgctgcgctctgtcaccgcaaccaccgcagcatggagcacgctacggtctcggagaaccggtcgcgccgccacttccgcaaccctgtcctcgcctatgtgaccccctggaactctaaaggttatgacatggcaaagttgtacagcacaaagtttactcacatatcacctgtgtggtatgacttgaagagcgatgggaataagctagttttggaaggacaacataattttgatgccaaatgggtctccgaacttcaaagtaatggatctttggtattgcctagagttgtcttagaagcattccctggggttgtactaatgaaaaagaagctaagggacaaagctattgatctaatttttgtcatctggctgtcagtgaatagggataaggggtatgatggtgttgtgctggaatcctggtcaagatgggctgtttatggagtgttagatgattcagagttacgcaacagggcacttcaatttgtaaagcatctggggaaaactttgcctttgaccagttcaaatttaagtacgcatcaccatttgaagttaatttatgttgtccctgctccacgaatgaaagagctcaacaatcaagagttcagaccagaagatcttctgcagttggctgactcagtagatggtttttctcttatgacatatgacttctcagggccacaaaaccctggccccagtgcacctttgagttggatacagtattctttaaaaacacttctcgcagcgaaggggtctgcttctcatgggcattctcacatgatattccttggcatcaatttttatgggaatgactttctcctttctaaaggtgatggtggtaatgctatcactggaagggatttcatttatttacttgataagtacaagccatctttgcagtgggatgagaaaagttcagagcattttttcgtctattcagataaaggtttgagacatgctgtattctacccaacgctgatgtccctttctttacgtttggatgaagctcaagattggggaacagggctttcaatttgggaaattgggcaaggtttggactattttttcgatgttctttaggaatatctcacgtgtgttctttttattttgggagcaatgtcagttagaccacaactattgcaaagtattacaaggtcacccgtggacattatttgtttagcatcaaaactgtcacttcataactgattacatccttctgggaaatgtttccaaacaccaaatttccccttcagtgtactgctgcaaaatttagattaagtgatatgagatttttcatcttctttacagaataaacatggttgcttgtttactttagttacttcacttggtagtactatactgcctcattccttaagcaagtatgatgatgttggtctggttttgttattagcacatcatgctctgtgtatattaatgtaatacactttacatttggtacagcaatcttatagttatgccttttgctgttcttccagggattcttccagctataagttcccacctgttcccaacaagcctgtgcattctgaaaacgagatcttcctcttcttccgtgaaatgaacaaaattctgtgcagtgttattaacttcttttgtttcacaaccatcactggttttggaattctttccctggctaccactgctgctatccattaggcgtgaaaaactccaatgaaatgccgagttgagatcttgtgctagctaagatcctcagacccttgttatgacgttatgttatctagggc

SEQ ID NO: 21830 - DNA, 2608 bp, Oryza sativa
  Clone ID: TF_OsC52736_1
gaaaaaaagaaggggagaaaaaataatataataacagaacaaggagatgaaaaaggagttccccggccaagcgccgacgagtcggttacactccgagatggacgcggcggcggccggcgggggcggggcggcaaagcggaagcgcagcttctccgaggacgacgcctacctcatcctgcacaggtaccagccggcgacgatcctgacgatgctgcaggagatggggaagcaggtgggcgcggggaaggggatcgactggagggcgctggtgcggaggacgagcaccgggatcacctccgcgcgcgagtaccagatgctgtggcgccacctcgcctacggccacgagttcgtcgagagcgtcgagcccgcctccctgccgctggacgatgggagtgatctagaatgtgagattgagattgtccctgctccgggtaatgaagcattagctgaggccacatcgtttgccaagactattatcaccggatcttcacgtgaacaaacctctggtcaacgtgtcaactcagaagctgctgcgctaaacactccaaatgaaaagatagtgcgtgttccatctgataaacagcttgtgcctggtcaccgtctaacaaacggtacaggtccggtttccagctcaaagcagccctcccacacaggctcatctcctgatcctttggaccctaatggacatcccaaaaagaaaaagaagcctaaaccatggtccagagaggaggacatggaactaggagcaggtgtacagaagcatggtgaaggaaattggatggaaattctgcataaatataaatttgatagttcaaggacgcatcttcaacttcaacagagatgggcgcttatttgcaagcgtcaggggtcaaccaagcctgctacccctaaaatacccaatgttatgtcggaggaactaaaggcagcacaaaaagcattttcattggccattgggacgaccagatcgtctacattaagaccaggaggtgtgccacatcacaatccaatggttactactacgaatcctgaggtgaaatctgttacagcaccttcaccattgccggtaccggtgcatgttgttccggtgcctgttccagtgcaaccagtacaagtgcagttaccaccacctcagttgcatcaagcacctgcgcaatctgcacctccacctccaaaagtatcaaatgcttcaaataagtcacgaaataattctaagaaacaagttgcccaatcaattcctgtgaatggccctttgtcgatacaagaggcagctcttgctgctggtgggcgaattgccgaaccaagtgttgccaccaattttttaaaagctgcacagtccacaaaagctgtgcacataagatctcgaggaacaggatcttcaaaatcttctacgggatctaaaacacctactgtggctggtgaacctgggacacagcttggcagtgatcaacacctagaattacaaagtactggtggtccatctcaagttttgactgcacatgcaactgaacaagttcataatgtttcagaagtcgctggggttaatcctctgggacaatccgctggagtgcatttatcagaaactaagaaagcactgaacaccacaccagtgtctggatcttctgacaaaatggaaatagatgacaactctaattattttgcagtcacaatggaggacttgttccctgaggatgtgaagcaggaagatgttcaagatcccaagattgaggaggccatagaccccaaggatgcagacatgttagaatttgatcgctttgtggcccaaggatgcttaaataaggataatgtggataagagcaaggctgccaagattgctccagaagctcaaagcgttattggcagccagaaaaaacagctgaagacgctgcccacagttggcaaaagcaaccctgtatttgctggacctccagcaactgcgaaaaagaccaaagctccagttccacagggtgggatgtctagcggcatagttggcgtgctgaatagatcattaggagggaaggcacctgctcctgctaccacaggcacccaaagtactgtccagaagcagcaaagcatgagctcaaagggcaacttgttagtgcccaagaatgtggcgcctggcaccgtaacaccagccaacaaccgggccaacacagcggtgaacggggctagcaaggtgaatccaccagccagccagaagccagcctaacatggtaaattccttgctataataacgccctaggacttttgtgcgcttagtttacttttgaaatgtaaatagggccacgtagataccatctattctttgcccccctttgcatttgtagctcaattcctttctgaaccaaagcactggtgaaaacattaggttagactggatacaccgtttaatcgctttgccttaactgtgatgtcttagactgatatgttccatttgttaagctggcctgagattatcatgccgccttcctgtacagcctcgcctctttctccgttggatagtttggttgattggccaaatattcagaaactatgtcattgtggcctgatcaaactgtgaagatggcacgccatgcaagttgtctctatcggctttaatttatggctttga

SEQ ID NO: 21831 - DNA, 478 bp, Oryza sativa
  Clone ID: TF_OsC31153_4
cgatgttctttaggaatatctcacgtgtgttctttttattttgggagcaatgtcagttagaccacaactattgcaaagtattacaaggtcacccgtggacattatttgtttagcatcaaaactgtcacttcataactgattacatccttctgggaaatgtttccaaacaccaaatttccccttcagtgtactgctcttttgctgttcttccagggattcttccagctataagttcccacctgttcccaacaagcctgtgcattctgaaaacgagatcttcctcttcttccgtgaaatgaacaaaattctgtgcagtgttattaacttcttttgtttcacaaccatcactggttttggaattctttccctggctaccactgctgctatccattaggcgtgaaaaactccaatgaaatgccgagttgagatcttgtgctagctaagatcctcagacccttgttatgaccttatgttttct

SEQ ID NO: 21832 - DNA, 309 bp, Oryza sativa
  Clone ID: TF_rsicee_6205.y1.abd
cacgaggagaagggttatagaggctgatcgaccatcgatcgacgtcgcggcgagcggctagtgggcgttgtcgtcgtcggcggcggcgaggtggtggtggtggtagctacgtaggttgtggacatcgatctagaggtagaggcagggagggggaggaatgggacggctgtcgtcgtgcggcggcgtgcaggcgaagctgaggaaggggctttggtctcccgaggaagacgataagctgtacaatcacatcatccgacatggcgtcggctgctggagctccgtccccaagctcgcagggttgcagcgatg

SEQ ID NO: 21833 - DNA, 729 bp, Oryza sativa
  unsure (1)..(729): unsure at all n locations
  Clone ID: TF_LIB4309-043-R1-K1-B2
ccctatttccctgttctgcatagatttgtggttgttttataattatttgtttctaccatggattccttaacaagattgaatcatgtattcttctctacttggaattgtcatgcaggctcaaaaagttcttgggaacaaatggactgaaatagcaaaggttgtctcaggcagaactgataatgcagtgaagaatcggttttctactctatgcaaaaggcgggccaaggatgacgagctattcaaggaaaatggatcattatgttccagtacaagttcaaagagggcattggtacaaactgggtgtctcacatctggtgcaagtggctctgcaccacctattaagcagatgaggccatgtaattctgatttcaaagagaatatgacaccaaatatgagattagttggacaagacaagagcacacaagattctcgacagcctcttgcaattgtttatcaaaacaatcaagataatatgaatacaatggatacccaaaatcttgttgctaaaactgcagcaaaacaattatttgcggnggaacagaattgcgttaagcatgagggtaattttttgaacaaggatgatccaaaaattgctactttattgcagcgagccgacttgctttgctccctagcaacgaanataaatactgaaaatacaagccaaagcatggacgaagcctgncagcaactacagcatcatttggattagaaagatgataatgacatgtc

SEQ ID NO: 21834 - DNA, 858 bp, Oryza sativa
  Clone ID: TF_OsC44378_4
agtatatcctctcttcttcttcttcctcctcacaactcacaatatttcagagtagtatacctttcttgctagctagctagcttgttcatcgatcttgttttgaggtgttgagatagctaggatggtggtgaagaaggcggcgacgatggcggaggcggaagcggaggaggagatgatgatgaggatgatgtgtggttcaggaggcaacgagatgatgaagacgaagatgaagaagaagaatagagaaggggaagaagaagaagaagtaagtggaggaggtaggatgaggaaggggccatggacggagcaagaggacgtccaactggtatggttcgtgcgcttgttcggggaacgtcattgggatttcttagcaaaggtctcaagtttgcgcggtggcgggtgacctagctacatgcactgcatgcctccctctctctctatatatatctccttcccatcaaacatccatccatccatcgactgcttctttttctttctttttttttctcttcttgattgttcttgttcttgctcttctttctctctctcttatcatgcaacacccacacatgcatatatccatccatccatctatccccttatcacatttaatttcttcttcatatataccaatttggcaacagctaatgattctttttttatttgaaactctgaatgaattgatttagatgcatgcatcaatacaaataattgatttctttttatctggagctctgaaattgatttagatatgcatattgataaaacaaaatttgatatctcatctgaaactctgaattggttaagatgcctacacataaatgttccattttcagttgtggggatcgatgtgatggc

SEQ ID NO: 21835 - DNA, 1751 bp, Oryza sativa
  Clone ID: TF_OsC205949_1
atggtctccgccaaccagccgccgcccgacgcggccgcggcagcggcgggctcggctggggaggacgccagcaagaaggtgcggaagccgtacaccatcaccaagtcgcccgagagccggcaggaggagaagcctgcagagccagagactctgagccgccgtgccgacgccgacgcctacgccgagccgcccgcacgctccgctcccatggtctccgccaaccagccgccgcccgacgcggccgcggcagcggcgggctcggctggggaggacgccagcaagaaggtgcggaagccgtacaccatcaccaagtcgcgcgagagctggacggagcaggagcacgacaagttccttgaggccctccagctctttgatcgtgattggaaaaagatagaagcttttgttggatcgaagactgttattcagattaggagccatgcacagaagtattttttgaaggttcaaaagaatggaacaagtgagcatgtaccggcagattcatcttccatgcttagagaactcaggcatgaatgccactgtttcgtcatggacacacaattctatcccaccaattgtagcctcatccatggtgaaaggtttgttgtccgtgttatgccagattttgcacaagtatacagcttcttgggcagcgttttcgatccaagcacaagtggccatttacagaaactaaaggagatgaatccaattgatgttgagacggcattgttgttaatgagaaatctctccatcaatttgactagtcctgattttgaagatcagaagaagttgctatcttcatacagtaccccgtctgatgggcttgagctaggaagcaccagaagctcagttctagctgatagaccattaagtgctccattcataatgtgtaagggtgcaaccgtgtacagtaggcttgcacagctggtgatggcattctcgtttctgtcatctggcagagaaggcactactgccccaagtgacccatggcatagccagaaacagaatgctccatcagtccatctgatgagatatgtgtgaccccattcatgattaagggcgaatagtgctgagaaagtgtgaggtctcttccctggccaaactggctaaaaggtgctgagaagtctctccaccgataatttcagctcgtcagtcattcggagcttggtgaagcactaggaaggcactttgcaacattgtatctctagctaagcttcaagccttcaactgcagtatcccttagggcgcagccgtgggcaccgggcttgcgctcgtgggagctgtctttagcggtataatagcctaattgtgtatatatgttagccctgaagcgtgtagttttcctcacccaatacctcggtcccctgggcgcgcaaatctttctctagtttaaaaggctgttcttagtaatgggaaatggaaaggaaattttgagtgatgctggattgctggttgctccctttttcctccattgagttcagctggtgatggcattctcgtttctgtcatctggcagagaaggcactactgccccaagtgacccatggcatagccagaaacagaatgctccatcagtccatctgatgagatatgtgtgaagaggtttcagctgagctgattatagtgctgtaaagcggcttagcactatgtaaatcatgtgttatgcaccatgtatcatgtatgatccttggaagttctggatgcaaaagtgagttgtgcacttgccatgtaaaaaaaaaaaaaaaaaaaaaaaa

SEQ ID NO: 21836 - DNA, 1458 bp, Oryza sativa
  Clone ID: TF_OsC84775_1
ggctcgtgggtgtgtgtgtgttcttgttttttgttttttttttttttttttttttgactaactaatatttttttttcttataaaagagtttacaacagtacaaccacgaagatcagcactaccattactgattttgttaacatagagtgatttatcatgtgtgccagacaaacaacagatacattcatacatagcataacttacagcacatgatacagactacggagaacggttaatcttaaaataaaaacaaaaaaacaaggaggcaaagcttattttgcctgggattcatctaaatgcagttgtgtgcagaaggagatcatgcctgtgcccttgttggtggatttgcatggaaagctgattgtctattttgacctcctaccagatttaatgaaagagaagtagacactgtctcttgattggactctcctatgctgagcttcgacatgccaacaagctcatcaacgttgattgggctctttgaatgaactggaacaggcttgacaatctcatgtgtttcttgcacaggaccatcttcatctttctgattttgccagaaaggaaccgagaattgcaaaaagggcgagaaataagctggaacaatcactggataggtcgactgcaaattatctggcatgatagcagaagcggaagagctctctgcaacggcagaagtatctgactccatagaatctacctcctcctcctccctcggtggaggtagtgctggttgatttaatacttgggtctctggttcttgacctccaggaagtggtggaaggtccatagactcatctggcaccatgtcaaaaaggctagaccttcttttccttctggtcatattggattggcgtataaaatatttctgagcatgactggctacttgagtaggtgttcttgagaccacgaaattacgagagattcctcgccaatcacctttgccaagcttttgcaatccaagcaaaaacctccggtgttcttcttcagtccaaggaacacccttcttgcggtcgcgggtggcggaggaggagccctggacgaagtcgtcggaggcgtagccgtcggcggcggtgggggcggcgtcggggccgtcggcgggggaggcgccgccgctggtggatccggcggcggaggagaggagggagaggttccccatgctggcgctcttgcggatggagccatcggtgaggcgcaccccgaagatcttgaccccgcggttggggcacgtccgcgagttgtgcccgttgtggctgcagtgcgagcaccgcctcgtcatccccccctccgtccctccaccttccaaagcttcccttcccccacctatggagatcgatcgatcgatcgagtggagacggagatggtggtggtggagacgacgaggagagggaggggggagaggacgcgtgggcggacgcgtgggcggacgcgtgggcggacgcgtggaggcacgcgtggggg

SEQ ID NO: 21837 - DNA, 1033 bp, Oryza sativa
  Clone ID: TF_OsC215503_1
gcccctcgctcaatctcccatttcccctctaattctacttacttaagctagctaataattagcccaagaaaaatcccctctctcctcctctcctctcacttatcaagagaaaatcattttgggatctgaaaaacaaagatagatatgcaagatagctagctagcaagttatagtcaagttttgcttgatttctactcgatcgattcgatctctagctaggtgaaggatcatggcgtcgtcgtcgacgacgaacacgtcggacggcgccgggaagccggcgtcgtcgtcgtcgtcggcgtgcccgagaggccactggcggcccggggaagacgagaagctccggcagctggtggagaagtacggccctcagaactggaactccatcgccgagaagctggagggcagatcagggaagagctgtcgtctccggtggttcaaccagctggacccgcggatcaacaagcggcccttcacggaggaggaggaggagcggctgctggcggcgcaccgccaccacggcaacaagtgggccctcatcgcccgccacttccccggccgcaccgacaacgccgtcaagaaccactggcacgtcgtccgcgcccgccgctcccgcgagcgctcccgcctcctcgcccgcgccgccgccgccgccgcccacccgccgccgttctcctcctacgccagccagctcgacttcagcggcggcggtgcgtcatcaggcgcgcgcaatagctcgctatgcttcggcttcggcatgatcaacaggtcgtcgtcgtcttcttcttctccggcggcggcgccgttcttgatcaagtcgtttaacggtacgagctatggtacgctgctgccggcgacgacgtccatggcggcggcggcgcagcctgtgtccaccatcaccttctcctccactcccatgagagagacgctggaactgatggatgccggcggccatgagaaccacggcgacgtcgacggcggcggcgacaagcggaagggcgtgccgtacttcgacttcctcggcgtcggcgtgtag

SEQ ID NO: 21838 - DNA, 1098 bp, Oryza sativa
  Clone ID: TF_OsC92629_1
atggggtgcaaggcgtgccagaagcccaaggtgcactaccggaagggcctgtggtcgccggaggaggaccagaagctccgcgacttcatcctccgctacggccacggctgctggagcgccgtccccgtgaaggccgggctgcagcgtaacggcaagagttgcaggctgagatggatcaattacctgaggccggggctgaagcacggcatgttttcccgagaggaagaagaaaccgtcatgaacctgcacgctacaatgggcaacaagtggtcacagatagcgcggcatctgcctggccggacggacaacgaggtgaagaactactggaactcgtacctcaagaagcgagtcgaaggcgcggaggctgcggccagaaaatccgccgagccggccgacgtcgtcaccggcagcccgaaccgcagcgagaccggccaagaacgcgtcgccgctgaccggccggcgagctccgagtcttccgggccggtcgagtcgtcgtcggccgacgactcgagcagcctcaccgagcccgcggcggggctcgccgccgtccggccgcacgcgcccgtgatccccaaggtcatgttcgccgactggttcgacatggactacgggactagcctcgccgggacggcgccgggcctgagctaccagggctcgtcgtcggtgcaggtcgacgtcccgtgcggcggcgccgtggactccctgcacgggctgggcgacggcggcttctgctgggacttcgacgacgcggccgatcacatgcagggaggaggagggctctgcgacctgctctccatgagcgagttcctcggcatcaactaggcgggagcgtacgctctttcttccgtacagttcgtcgccgaagtgtaaattcgtcagtttcttttttttccccctctttttcagaggtgtaaatcgtgccgtgcatgtgtagtagttaaacttactggcttgtagtgttgagtttggacttcgaagccatgagttgtgcgtcgaagtacagtcttagctttctcttcataaggttcgtgacttcgtgtatacagctctggttttccggaaaacggttcagaaagaataacagaaacagagcgtcac

SEQ ID NO: 21839 - DNA, 1488 bp, Oryza sativa
  Clone ID: TF_OsC37603_1
tagtggatccccgggctgcaggaatcggcacgagggagggagaaatcgcctaaccctagcggtggtgcgccatgacgcgtgacggcgcgctgccggcgagcggcggcggcggggcggcggaggggccgaggcggtgctcgcagtgcgggcaccacgggcacaacgcgcggacgtgcacggcgaggggccccgtgaagctgttcggcgtgcggatcggcgacaagccgccgaccgcggccgcgggcggaggaggagggatgaggaagagcgccagtatggggagcctcgcgcagctggcggaggggggcggcggcggcggcgggagggaggaggggtacggctccgatgggaacgacgacaaacggcggaagcgaggtgaggcatggtcagaagaggagcacaaaaagtttctacttgggcttagtaagttaggaaaaggtgattggcgcggcatatcacgcaattatgttggttcaaggacgcctactcaagttgctagccatgctcaaaagtacttcattcgccaaacaaatgtgcacaggagaaaaagaagatcaagccttttcgatatggttatagatgattctgatgaccaaccactgtcccgtacatcttcacaagaagtagaagtagaagagaatctagaagatggacatcctgttactgcaccagtgatcccacctgctcctgtgcctatgctatcatcctctttggttccgccaccagtaccagcaatggcaccagttgctccaggtcctgtgttaacatctgcttcggccacactaccagtgtcagcagtggcaccccaaaccgatgaaaaggaacaagttgcctcaggttcaaatacaacagagacaggggctgcaattccagaagtcatgcccccatatggttatccaatgatgcttcctccatactacccaccggcatttgttccaatgccctactatggttatgtgcctgttttctatgcaccaccaggagcagtgcaagcacaacatgaggttgtcaagcctgtggccgtgcactcaaaacctccagtgcacatcgatgaactctacagcatgtccgaactcagcctgaagggcgaggctggtgtgaaaaacggcactcctaattctctgttgcctccaagaccaattggtagaccagacaggcaatctgcttttcatggaaaaggaccttctgatggctcttcaaatggactgattcctgcaaagtgattctgcagtaaaacatccattcatgtgtatctaatgcttagaagatagtaaatcataaaccccatgctgctgaaatggtgctgttgtacatgcaaaatgcttttactggtcattttagtttcatgtttggaggaagccatgtatgtcctgcgagtaaattgacttttagtttgacaaaaatgtaccatttctttgtcgttgtttctcaggcttcctcaaattgatttgaaaatctgaaggtttttctaaaaaaaaaaaaaaaaaa

SEQ ID NO: 21840 - DNA, 1512 bp, Oryza sativa
  Clone ID: TF_14588603
ctcgctgctccttgtcccccacctcctttacttgagcttgctcaccactgcctccatatacagagagtcttctctgtatttctctctctcagtgggaggctcacaagaatctttcagctcacatctcactgtccttgcctttctctagctagggaggtccaagaacagagcagcaggatggtgcagtggcgtttctagagagcagcatgagtactcgcaccaccgagctgggatggtcggcgatggcgaacaccgatgcagccgccgccgatgagggagaggcagcggtggcggcctgaggaagacgccatcctcctcgcctacgtccgccagtatgggccccgggagtggagcctcgtgtcccagcggatgaaccgccccctccaccgcgacgccaagtcctgcctcgagcgctggaagaactacctccgcccggggatcaagaaaggttcgctcaccgacgacgagcagcgcctcgtcatccgcctccaggccaagcacggcaacaagtggaagaagatcgccgccgaggtccccggccggacggcgaagcggctgggcaagtggtgggaggtgttcaaggagaagcagcagcgggagctccgggatcgggatcgccggcgactcccgccgccgctggacggcgacgagcgcggctgcgccggcgggcgatacgactggctcctcgaggacttcgccgacaagctcgtcaacgaccaccaccgccgaatgatggctgccccgatcctcccgccgtggatgtcgtcgtcgccgtcgtcttcttcctcgccgtcggtgacgcttagcctcgcgtcggcggcggtggcgccggcgcctgcggcgccgccgccgacgtggggtggtggtggaggaggggaggtggtggtggcggagttgatggagtgttgcagggagatggaggaagggcagagggcgtgggcggcgcacaggaaggaggcggcgtggaggatgaagagggtggagatgcagctggagacggagagggcgtgccggcggcgggaggcgacggaggagttcgaggcgaagatgagggcgctgagggaggagcaggcagctgcggtggagcgggtggaggcggagtaccgggagaagatggccggcctccgccgcgacgcggaggccaaggagcagaagatggcggagcagtgggcggccaagcacgcccgcctcgccaagttcctcgaccaggtcgccgcctgccgccgctggccgcccgtagagatcaacggcggcggcggcggcggccccggcggcggccggtgagccgccggacggtggcgctgcatgcatgcgtagttggacacctcgctttcttgcttcttcttctcgtgtcctttttacaactgttggaattcacttctctctagaaatatgtaatcttttgagtctcttttgatcattccaagtttcctactagtagctctattgaataataaatggaccaccaaattgcaaaccaaaatggttacaaaaaaaaaaaaaaaaaaaaaa

SEQ ID NO: 21841 - DNA, 1659 bp, Oryza sativa
  Clone ID: TF_OsC150_1
ctcctcctcccgtcttttccaccaccaccaccctcgcgtgccctaatttctcgctgctccttgtcccccacctcctttacttgagcttgctcaccactgcctccatatacagagagtcttctctgtatttctctctctcagtgggaggctcacaagaatctttcagctcacatctcactgtccttgcctttctctagctaggtactactactgctagtactaaccactgctcgtgttcttgggacttcttcttcttcttgttcttgttcttaaaatcatttggggttttgagctccagggaggtccaagaacagagcagcaggatggtgcagtggcgtttctgagagcagcatgagtactcgcaccaccgagctgggatggtcggcgatggcgaacaccgatgcagccgccgccgatgagggagaggcagcggtggcggcctgaggaagacgccatcctcctcgcctacgtccgccagtatgggccccgggagtggagcctcgtgtcccagcggatgaaccgccccctccaccgcgacgccaagtcctgcctcgagcgctggaagaactacctccgcccggggatcaagaaaggttcgctcaccgacgacgagcagcgcctcgtcatccgcctccaggccaagcacggcaacaagtggaagaagatcgccgccgaggtccccggccggacggcgaagcggctgggcaagtggtgggaggtgttcaaggagaagcagcagcgggagctccgggatcgggatcgccggcgactcccgccgccgctggacggcgacgagcgcggctgcgccggcgggcgatacgactggctcctcgaggacttcgccgacaagctcgtcaacgaccaccaccgccgaatgatggctgccccgatcctcccgccgtggatgtcgtcgtcgccgtcgtcttcttcctcgccgtcggtgacgcttagcctcgcgtcggcggcggtggcgccggcgcctgcggcgccgccgccgacgtggggtggtggtggaggaggggaggtggtggtggcggagttgatggagtgttgcagggagatggaggaagggcagagggcgtgggcggcgcacaggaaggaggcggcgtggaggatgaagagggtggagatgcagctggagacggagagggcgtgccggcggcgggaggcgacggaggagttcgaggcgaagatgagggcgctgagggaggagcaggcagctgcggtggagcgggtggaggcggagtaccgggagaagatggccggcctccgccgcgacgcggaggccaaggagcagaagatggcggagcagtgggcggccaagcacgcccgcctcgccaagttcctcgaccaggtcgccgcctgccgccgctggccgcccgtagagatcaacggcggcggcggcggcggccccggcggcggccggtgagccgccggacggtggcgctgcatgcatgcgtagttggacacctcgctttcttgcttcttcttctcgtgtcctttttacaactgttggaattcacttctctctagaaatatgtaatcttttgagtctcttttgatcattccaagtttcctactagtagctctattgaataataaatggaccaccaaattgcaaaccaaaatggttacaaaagaaaaaaaaaaaaaaaaaaa

SEQ ID NO: 21842 - DNA, 2228 bp, Oryza sativa
  Clone ID: TF_OsC155790_1
ccaggggggtgccccctaacctttccctgctttccactgaaatctcctatccgcaaccatacagttgctcaattctggtctcagcctaagccccaatcattcatcgttatataggtcactataccctcccttgcatttcccaccaccaccccttgaagccatgaatcgctgaagaagtcgtctgcgctactgctaccaccggggaaggattagctgcgcagaattgtgcgagcgaagcctgccagccgtgcgaatttcaagctccgaggtcctgcattgcactgaaatggggaggcattcttgctgctacaagcagaaattgaggaaggggctctggtcccctgaggaggatgagaagctcatgaatcacataaccaagcatggccatggctgctggagttctgttcctaaacttgcagggctccaaagatgcggcaagagctgcaggctgaggtggataaactatctgaggcctgacctccagagaggtgcattctctccatggggagaaattcctactgctacaatcagaggctgacgtaggggctgtggtcacctgaggaggatgaggatctcatgaacgacataacacagcatgaccattgcttctggtgcaccgttccagaacttgctcggctagagagatgttgcaaaagctgcaggctgagatggataaactacttgaggcctgacctaaagagaggtgcattctctcaggaggaagaggacctcatcgttgagctccatgctgttctgggaaacaggtggtctcaaattgcaacacggctgcctggaagaactgacaatgagatcaagaatctctggaattcatgcatcaagaagaagctgcggcagaaaggcattgacccaaacacccacaagccccttgccgaggttgatcgaagcaaagcaactcccaccatcagcaatgacaggacctctgaatccagcgatgttgacccatctagtggcgttgctcttcacaacttgagccatcttctgagcgagacggcgcaatcatcagagctgctgccagtgaaggtaactaaacctcgcacacaagctccgggcttggcacgtctgaaggtgccaccgaaggaactatttctagaccagcttacttctggccatgagaacctccctagctgccgttcatctggcccaattcccaatttcccgttccagcagctgttgtgctacaataatgattttaacagcatggacgttggaaacaggaattcactctggtataaccagaatgagtccagtagcagcacaatttccactgtgatgcccccagtttcaccatcaactctctcgacatcaacaggccttaatccatcaccagacaatgcaaactctcgaggcactggcatccacaattcccaattctattgggacaccaacaatcctagcagcagtagcagtacagggagtagtggtaacaacgggttgggattcgagctgcaaagcacaagctcccttttggagaccaacatattcccatggtcagatttagcaccagaaaaggatagccaagcacaactagaggaagaactcaagtggcctgacttgctccatggaacgttctcagagatgccagcgcccatgcagaaccttagccagtcactgtatgaagacgttgtcaaagcagagagccaattcaacatggaggggctctgtgcagcttggtctcaaaacctgctgccacagcaacatcttccagtagtatcagatatgtatgacaaggatttgcaaaggatgtccttgtcttttgagaatatctaggaaccatgttccagcatgcagggaacagagcaccacatgaaaattgagagttgaaagcttaggaagcacaatgtttcttcagagatacgtttacagtgtactcagttgtttgtggataaattattgtgagtgttcacatagatgcattcttttggtaagacatgaatgaacatcaaagagcaattcttcagttgaaagaaaatgtagtgcagtgggaaaaaagagacgagttgggtttaagttgcagaaaaatgtatagaaatgttccggagtttaccttgtttcctttgaaaaaattattgtcttcatttatacaagcaagtagatcgacttttttgtattcttgagtttccgcatgctcctttcttatcaataaatactaagaggcatgggaaaaccacatgtgtcggcagtacttagaaaccataaacctcgtgccg

SEQ ID NO: 21843 - DNA, 1290 bp, Oryza sativa
  Clone ID: TF_OsC52992_1
cttcgtttcgaacaaatgatcacacatatcaaggcataaatcatcataggtagagaccaggagttcttcacaagagttggtctggatgtagctgttctcatccatggtgagtattccctgggtgaccatttggttggatgggttggaatctggcctgatcttaccattcacctctgctaacttttgtgtggatgctggtgaagacgatgacactgcagtagattctggtggagcttgacgaacacttgacttgattggaccaattccaaggctcttgatgtagttttgcagaagggttccagatttggggttcttggagctagcgcggctcctcctccgtgcgaattgccttctctttgttgcattccagtgattcttgatggagttttctgttctaccaggcaggtgcttagctatctctgcccatttgttgcccacttctttgtgtgtttggattagaactatgtcttcctcttcactccatgtatctttcttgatgttaggcctcaaatggttgtgccatctttctctgcactgtttgccaactcttccaggaagaatttgagcaatgtgagaccacttccttagtccaaactgttcgactaatttcacaagcttcctgtcttcttccaatgtccactggcctttgacaacattagccttcttcagagacttacccgaagccgaaacctcagatttaggtgtgaagagaggcaggtgaggcgaagctttacgaatagtcggcgaagcccgatcgacgacgacagcatccttttctcctccttgagggtagtactcatggccaagatcatagtaggttgcaaagggaagaaaagatccaccagcagatggagaatagtattcatggccgtcagtgacattgttgaatggatgatcaacaagatggagctcctgatggccattttgctgcctgttgaagtaggccttcttgttgacactgttgtcatgaatcctccctttgggacaagcagaaaaggagctgacatggaattcatttctatgggcatgaaggtgagggcactgggcagcagttgccatcatacacatgactgagattagtttatgtgggcttttggtccacttgtggtggtgggctttggtcgcgtggcatctttagcccacatggtgaagcaacggcccgactaagatttggaagttggaacccatcgtccattgcgcatggtccacatttgactgctgttcttgtgaacttgtatatacgtgcatgtatgtacgaacaaaaccaaactcttactgtatttgcgaatg

SEQ ID NO: 21844 - DNA, 966 bp, Oryza sativa; identical to SEQ ID NO: 12380
  Clone ID: TF_OsC134_57

SEQ ID NO: 21845 - DNA, 1178 bp, Oryza sativa
  Clone ID: TF_OsC351_4
ccgccgcggctcacctggaaactgggcagattggacaatcgctcgagcgagctagcgagagagagcgcgagagagcgaggcggcgcgcgcggtggttgcggatttgtagcttagagcgcggggccatggggaggtcgccgtgctgcgagaaggcgcacacgaacaagggggcgtggacgaaggaggaggaccagcggctcatcgcgtacatcagggcgcatggcgaaggctgctggcgctcgctgcccaaggcggcgggcctccttcgctgcggcaagagctgccgcctccggtggatgaactacctccgccccgacctcaagcgcggcaacttcaccgacgacgaggacgagctcatcatccgcctccacagcctcctcggcaacaagtggtctctgatcgccgggcagctgccggggaggacggacaacgagatcaagaactactggaacacgcacatcaagcgcaagctcctcgcccgcggcatcgacccgcagacgcaccgcccgctgctcagcggcggtgacggcatcgcggcgagcaacaaggcggcaccaccgccgccgcatcccatatccgtcccggcgaaggcggcggccgcggcgatcttcgccgtggcgaagccgccgccgccgccgcgcccggtcgactcctcggacgacggctgccgcagcagcagcggcacaacgagcacgggggagccacgcgtccgcgacctcaacctcgagctctcggtcgggccgacgccgagctcgccgccggcggagacgcccaccagcgcgcggccggtctgcctctgctaccacctcggcttccgcggcggggaggcgtgcagctgtcaggctgacagcaagggcccacacgagtttagatatttcaggccgttggaacaaggccagtacatatgagatatgaccatgagatgtgagatggcttaatcagcttcaattcccaacatgtgtaacacagggagtttttctagtggacgacaatactgtttaatttcagaaaaaaaagggaaagaaaaaggttctaatctgttcatatttcttactattatccaatcttcatgatctcaatctctctctctctttattatttttctttgtagtaattaacttcatgttggttcctctaaaaaagattggtcgatgttattcagtgataaatattcctag

SEQ ID NO: 21846 - DNA, 1966 bp, Oryza sativa
  Clone ID: TF_OsC159752_1
ccatcaggttgtctcgaaaaagattggagtttttggtggtttgggttgtgcggttcttgcttttgttggcgcaagcgcatggctggttctgggacatagtgagctgagatagagttcttgtgttcggtggagtttggctttggtgaatcttcgattcaagtctggagatggcgcgttttcaggaaaccaaggcgaggaatgatcaaggacctgttgctgatcatgttgggcaccaaaacctcatggaaaacctcacagatcctctggattccagtggcatggacatgatggacgaagcgcgaattcctaaggcgcggaagccatacacgataacgaagcaaagggagaaatggaccgaggacgaacataagctgttcttggaagccctgcagctccatggccgagcctggcgacgcatccaagagcacataggcaccaagactgccgtgcagatcaggagccacgcacagaagttcttctccaaggtcatcaaagaatcatctggggacaattgcaacagcttgggtgctgcatcatcaattcagattcccccgccgcggccgaagcgtaagcctgttcatccgtacccacgcaatctagggagcacagccagcaagaacgtccctgcactgaaacagctagagaagcctcagctgcaggtgcagtctctctacgaccaggacaatgggtcgccgacgtcagtgttaacagtaccacagatacgggctgatacactgggaagtgagagtggtgggtcgccaacctcgacgattgatattgaagagagatgtcctacaccaagcatagcaactgctgagttagctatggagttgcctcctacaaatgacgaggaggtcaagggcaatggcgatcatgaagaagttacatgtgacagatcaggagttccagtccttaggctatttggcaagagggttatggtgaatgatttacatcagatgtcagcccctgatgccgggaacctgcaaactgtggcagacatggaagtggacgcttcagctgagacaccaactagtggaactgggaaattctcttcccatggtgcagcagaagcaaatacatggaacccatggctgactaacacacagcagtttctgtattatcttcctaacggacaaattttctccgtgcattctgctctcccatgcttcacctaccataatgagggtgttacttgcacccagttttcaaacccacaggtggtagcctcagatcaacagcatcaacaccaaacttctgaagctgtagattacaagggtatacagagggaaggatcttggacggagtcaaatacatcctcaagcagtgtgcctgaaacagcaactcataattcagagactacagaatcatatagaaacggaaacagaaacgaagatgaaatggtaccttctccagattcaagaaaatgtgtgagcccaggttccaactgcaggcgaggctttgtgccgtacaagagatgtgttgctgatagtgaggcgctgctgaagtcacaggcgcctcaggaggaggcagacggagagatgacgaggctgtgcttataaatttttggagcctcgtagatcactgcaactatagatgcttgctactaatattttgttcacagatgagtaggaactgatgtactgcaggaggggctgctttcctgttacaagaggcagattgaaaccgcgttagtactccacaaaacagggagtggccgtggttcttgtctggccatgtacagttcaaatattctatgtttccattttcctcgtcgtgtgtttgtaatttcgctcccattgcgggagcgttcagaggtcaatggctgtcatgcaatgacaagtattttgatagagttgtagaagggttgtactgatgtaaattatacagtaacttattatctgtaagacaataacaggcgagctaaagaaaacaacgttggaaagctttgttcaaaaaaaaaaaaaaa

SEQ ID NO: 21847 - DNA, 1926 bp, Oryza sativa; identical to SEQ ID NO: 12358
  Clone ID: TF_OsC150867_1

SEQ ID NO: 21848 - DNA, 1141 bp, Oryza sativa
  Clone ID: TF_OsC833_1
gcacgaggctctcactctccaccaccaaactctcctcctctcttgcaacatcaaactcatccatccatccatcgatctgagaaatccagctttccagttcttggatctccatcgaccatggtgaggccgccgtgctgcgacaaggacggcgtcaagaagggcccgtggacgccggaggaggacctcgtcctcgtctcctacgtccaggagcacggccccggcaactggcgcgccgtcccgaccagaacagggctgatgcggtgcagcaagagctgtaggctccggtggaccaactacctgaggcccgggatcaagcggggaaacttcaccgaccaggaggagaagctcatcgtccacctccaggcgctcctcggcaaccgctgggcggccatcgcgtcgtacctccccgagcgcacggacaacgacatcaagaactactggaacacccacctcaagcgcaagctcaagaagatgagcgccaccggcggcggcggcgacgacggcgagggaggtggcgccggcgaggtgaagaccagggcggctgcgccgaaggggcagtgggagcggcgcctgcagacggacatccacaccgcgcgccaggcgctccgcgacgcgctctcgctggacccctcgccgccggccaagccgctggactcgtcgtcgggcgccacggcgccgccgtcgtcgcaggcggcgacgtcgtacgcatccagcgccgagaacatcgcgcggctcctggagggctggatgcgccccggcggcggcggcggcaagacgacgacgacgccgtcctccgggtcgaggtcgtcggcggcgtcggtgctgtccggggaggccagccacagcggcggcgccacggcgccgacgcccgacggctcgacggtcaccagcaagacgaaggacgaggagaccgccggcgcgccgccgccgccgccgccgccggcgttctccatgctggagagctggctgctcgacgacggcatgggccacggcgaggtggggctcatggacgtggtggtgccattgggggacccgagtgagttcttttagagtggcagcttgctcgacgcggccatggattacaccttctaatccacaccaccaccaaaccatgcaagaatcgtagcgtaagcgagagtga

SEQ ID NO: 21849 - DNA, 492 bp, Oryza sativa
  Clone ID: TF_jC-osflLIB3479001e05b1
cccacgcgtccggaagacgtctggactgaggagggacgacaggatgctgatcgaagcacacaggacttatgggaaccgttggtcagtaatcgcaagatgcctccctggccggtcggagaatgctgtcaagaaccattggaacgcgactaagcggagcctgaagtcaaagcgtcggatgaagaagaaaagcgtgcaagtggtgaattcaccgccggggcagctctccccccttgaagagtacatccgcagccagtacccgtcggccgttgagaccacaccgccgccaccggccgtgcctgcaccgccttccgacgtcattgtgcacggtgccggatcggtcagcgcaggtccaaccgttgccacacaggagcccaccggcaccaacccatcggaaatggggatctaccttggcctgggtaacccggctggaccgaccacccagcagctagcggcgatgaacctgaacatgtcactggcgccggacctcaacgc

SEQ ID NO: 21850 - DNA, 1077 bp, Oryza sativa
  Clone ID: TF_OsC1123_3
atgcagcgagagtgcatcgtgtcgggaccgatcgacgggtcgatctctgcgacgggcgacggcgcgcgtcgaggcgttggcggcatgcgcggtcatcgctcacgcgtccgcggggaccgtggcctgcggatgcacaggagcggcagcgatcctgattctgacaaggcgcactggtatatgagcaatagcgatgacgagtcatttgttgataaagataaagattgcagaaggggcaccgtagccccgctgctgaagaaaggcccatggacatcatgggagaactccatcttagagaagtacattaagaagcatggtgaaaggaattggaagcttgtgcagaagaacactggcctcttgagtttttgcatcacaaggcgtactgataatgaaataaagaactactggaacactcgaataaagaaatgcaagaacaatcgttggcttttatatcctgctaatgtatgcaacgatgctttgaatgaagatcaatatgggtctgttgaccccagtgttagggagaagctaaccaataatcaactagaagatactactagtatgtattctgcaccccagttttcatatgcttccatcagtaatatacttgataggagacttgcatcaaaagattatgactccatagaagatcaaagaaaccgaatagaagttgcagcagaatatgagatttcacttcctgtgttgaaaacaaccaacaatgacatatttccatcagcctctatctttgccaaccatggcatttcaaatggcaatctctctgctttgtccacaactgatgctttgcagatggagctccctttaatccaatttgatccaaacaaccagttcatttactcaagggattatgcgacgcacctaacaaacttagctttattaaatgatcaagcagaagaattactaaatcatattgatgtattgaactatgtggtgatgaaaaaagagctttctggagggagtttgagtcccactattaatatgccatgtaaagcaacggcatattcttcagaactccctttatgcaagggatatcgggaacaagatcttgatttttacacacaatag

SEQ ID NO: 21851 - DNA, 603 bp, Oryza sativa; identical to SEQ ID NO: 12361
  Clone ID: TF_OsC352864_1

SEQ ID NO: 21852 - DNA, 1640 bp, Oryza sativa
  Clone ID: TF_OsC1123_1
gttgccgcacatatactcgtgctcgcgctcacgccgccgcccccgaaactccccgctccgccattgccgggggaggcgatctcccatctccatctcccatctcgcctcagcgaactccccttcacatcgcgtctcttccgtcgcagagagtggcggccggtgaccatttccggtgggagggcggaggttttgtcccggctccggcgacactccacactccgacagcccaccgctccgtcaccctgcatttttggtcaggatgcacgagagcgacagcggtcctgattctgacaggacacactggtatatgagcaatagcgatgacgagtcatttgttgataaagataaagattgcagaaggagcaccgtagccctgctgttgaagaaaggtccatggacatcttgggaggactccatcttagagaagtacatcaagaagcatggtgaaaggaactggaagcttgtgcagaagaacactggcctcttgaggtgtggcaagagttgccgtcttcggtggatgaaccatctgaggcctaacctaaagaagggggctttcagcaaggaagaagagaataaaattattaatcttcatcgcaaaatggggaataagtggtctcggatggctgctgatttgccagggcgtactgataatgaaataaagaactactggaacactcgaataaagaaatgcaagaacaatcgttcgcctttgtatcctgctaatgtatgcaacgatgctttgaatgaagatcaacatgagtctgctgaccccaacgttagggagaagctgaccaataatcatctagaagatactactagtatgtattctgcacccccaggttttcaggatgcttccatcagtaatatacttgataggagacttgcatcaaaagattatgactccatagaagatcaaagaaaccaaatagaagttgtagcaaaatatgagattccacttcctgtgttgaaaacaacgaacaatgacatatttccatcagcctctatctttgccaaccatggtatttcaaatggcaatctctctgctttgtccacaactgatgctttgcagatggagctccctttaatccaatttgatccaaacaaccagttcgtttactcaagggcttatgcgatgcacctaacaaactttgctttattaaatgatcaatcagaagaattactaaatgatactgatgtattgaactatgtggtgatgaaagaagagctttctggagggagtttgagtcctactattaatatgccatgtgaagcacataactccatggctgcctctaatgagctggtagtgccacaatatgaaggagatgctccacctcttcaagatgatttcacatcatatttctatttgaatgatactaatctatccatattcgaagacacaaatgaattgtttttggaaaacaagttggatactaaaggtaactgacgccagattgtcatgagttgctgctctcttggataaactcatcatgaaaccaagaattttattccatgaagctcgtgaacgagccagtcgttgctatctctcttattaggatttccagtttggatattgccgtactcctttacttttcttcatgtcgaaattaccatgcgtgctatgttgaatttcatctgct

SEQ ID NO: 21853 - DNA, 1708 bp, Oryza sativa
  unsure (1)..(1708): unsure at all n locations
  Clone ID: TF_OsC26573_1
ctacatgtgaatattttgatgtgacgtgaagagaaaaattaatcttggtttttggttgttgtcatgcaccccgggctgcaggaatccggcacgaggcagcacacatccatccatccatccatctatccagagagcacagcaacggctcatatatagtacccctctaccaaagcacaacaaccagaatctcctgagctcgatctagctactagcttgatctatccgatcaatcgactggcccgcgaggatcgatcgagactcgaaagggagggattttgatccggatcggtcgacgatggacatggcgcacgagagggacgcgagcagcgaggaggaggtgatgggcggcgacctgcgtcgcgggccgtggacggtggaggaggacctcctgctcgtcaactacatcgccgcgcacggcgagggccgctggaactcgctcgcccgatcagcagggctgaaacgcacaggcaagagctgccggctccggtggctgaactacctccgccccgacctccggcgaggcaacatcacgccgcaggagcagctgctcatcctggagctgcactcgcggtggggaaaccgctggtccaagatcgcgcagcacctcccgggacgcaccgacaacgagatcaagaactactggcgcacgcgggtgcagaagcacgccaagcagctcaagtgcgacgtcaacagccagcagttcaaggacgtcatgcgctacctctggatgccccgcctcgtcgagcgcatccaggccgccgccgccgggcagcagcagcagcaggaaggcggcaccgacacgccgcccctgtcgtggcagcacggcggctccgacgggctctacgagtcgccggagctcccggcgcccgatgccagctgctggccagccgagtactgcgcggcggccggcggcgcgcagtcgggcggcacgcctgcaccggagctgtcgagcaccacggccgggtcgtcgtcgctgtccacggactccggcgccggggcgcagcccagctggcccacgcaggccgacggcgccgagtggttcaccaccgcctgcgacgcctccagcgccaccggcggcgtggccatgcgcgacacggagctggagctggcccagccgccgtgccagggcgggcagacgtggacgacgtccgagtcgtcgctgcctggcctcaccttccccgacctcgccgtcgcggacttcgagatcggcggcttcgacgtcgatagcttctggacgagcatggaggacgaccagctgtggtgccccacccaggccgccgtgtgaaaagtcagcacggccgccatgggaatccgccgcggcgagcgagcgcgcgcgcgcgcgacacccgcgggtgcacaaccgccggggacgcgtagcggagcggagaagcggattagaagaaggagagaagctatctgggggattagaacaagattaatcgcctccccgatgccatttttggactcctagctcccagactattctagctccagttcttttccgtttcctttctccttnttttacttcctagggtaaaaaaacagaagttaaagtgtagccgttatactagtgttgacgctgctgttactaaagtttgtccgttcaattttactcattctttttgagtaaatacagtactggcactactgtatgtacgagctgaactctgtaggattgacaggattactgtacacttctagaaaccgg

SEQ ID NO: 21854 - DNA, 179 bp, Oryza sativa
  Clone ID: TF_2943794
gggaagtcgtgcaggctgcggtggctgaactacctccggcccaacatcaggcgcggcaacatctcctacgacgaggaggatctcatcatccgcctccacaggctcctcggcaacaggtggtcgctgattgcaggcaggctgcccggccgcaccgacaactcaatcaaaaactattggaa

SEQ ID NO: 21855 - DNA, 1077 bp, Oryza sativa; identical to SEQ ID NO: 12371
  Clone ID: TF_OsC344488_1

SEQ ID NO: 21856 - DNA, 1481 bp, Oryza sativa
  Clone ID: TF_OsC351_3
ggcacttgtcacgcccccaccccctttgctttgatgcacgcctagctaatcaattaacttaacctgcctcgcctctgcctattcgaaacagcagcggctccagctcgccgtggtcgactttcccggcggcgatcaccggcagcggaggaggagcagtacgtgtgtatatataaaggatggggaggcagccgtgctcggacaagctgggggtgaagagggggccgtggacggcggaggaggacaagaagctgatgagcttcatcctgaccaacggccattgctgctggcgcgccgtgccgaagctcgccgggctgctccgctgcggcaagagctgccgcctccggtggacaaactacctccgccccgacctcaagcgcggcctcctcaccgacgccgaggagcagctcgtcatcgacctccacgccaagctcggcaacagatggtccaagattgctgccaagctaccgggcaggacggacaacgagatcaagaaccactggaacacgcacatcaagaagaagctcatcaagatgggcatcgacccggtgacgcacgagcccctcgaccggaagcaggagagcccggccaccacctcgcagtccaccgtcacggcggagtcgtccaagtccggcgaggcgaccaggcagcaaagccggcagcttgacgacgccgtcgtcagggacatgtccgtgtctgccggtggcgacagcccgccggagtcgagcactaacaccgccagcaccgccggtggcagtagcagcagcagcagtagccatcaccaggaccctctggtgaagtggctgctggaagaggacctgctgcccaccggtgacgagccatggctcaatttcacggccagcaacgacgtcgacgagttcagtagcatcgccgccaccggcgccacgccggcgctgccgtgggacgtcggcatgacgacggactggctgctcgactaccaagattttgggatgggagactcgagcttggtggtcgatgcctccatggtcaacagctcaaatgggtccaacttctagctagaagatgtcagcagcttacttaattgtgttgctatcagtgtagataatcaagtgaagtgtataattaataaaagcatcaagattgtgaaagcagctaggcatggccggccaagatcggagggtgatcacaagtcgaggcctttgctcttcggaaaaccaatcaacggttgggattgatgcatttgagagagggtatgcgtagatggtgcatgttgttgtgtattttccccttgagattgattcgggggtttgtgccattaactagaagtgttattacttctcaaatggagatacttagatctttgttttttttttggagagatagaactatttgttggtgtagtacctatacatgttttcaataaaagatgtgggtgggtaatgtccaataatattagctcactagtttgtgtatatatacaatggtgtatgtgctgctaaaaa

SEQ ID NO: 21857 - DNA, 1301 bp, Oryza sativa
  Clone ID: TF_OsC490_2
cttctctctctctctctctctctacaacttctcagctaagctaagccaagctagagccatctagctacttttgctgctttctctctcctcctgcaacacacgacctagctgagagctgagctgagttgcgccggccatggcagcatcgcagaggagcaggagcacggcggcgcagctcgacgtcgacgaccaggcggcggccgatcagctgatgacgatgatgcggcggccagcggcggtactacaggatgaggccgccgccgaggaggaggcctccgcggcggcagcggacctgcagctggagctccggcgagggccgtggaccgtcgacgaggacctcaccctcgtcaactacatcgccgaccacggcgagggacgctggaactccctcgcccgcgccgccgggttgaagaggacggggaagagctgcaggctgcggtggctgaactacctccggcccgacgtgaagcgcggcaacttcaccgccgacgagcagctgctcatcctcgacctccactcccgatggggcaaccggtggtcaaagatagcgcagcatttgccagggaggaccgacaacgagatcaagaactactggaggacccgagtgcaaaagcatgccaagcagctgaactgcgatgccaacagtgctaggttcaaggatgctatgagatatctatggatgcctcgcctcgccgatgcaagccagctcggtgatcaccatgggtataatagtaccactgccatgggcgatgctcatgggatgccagtgatgacatcgtcgtcgtcggactcgttcgcgacatcagagtcatacgatgggggcctttatgcaaatgtgcaggacaatgagatggtgaatggtggggactactggatgcagggagcaaataaagggttttgtagtaattatgagtcagagcaacttcatcctcatgagcatagccagtttcaggatccagatcttgttggttgggttcagggcttttctgagggcatttccgagaatttttggagcttggaggacatttggaagatgtagtgaattttgcattaatttgtattgtggctatatatacacatacgtacaggagtatacattttataatattgattgataactcgtggaacaaagattagagtcagcttattctaacttcaaaagttactacgagagaaaaaaagtaaatttcttctttgattttcctttttttttgtatggatgtcgattgacacatatgtatatgttgtcccaacaatgtaaaacatataagaagacgtgattgttactacaacttttgggc

SEQ ID NO: 21858 - DNA, 1314 bp, Oryza sativa
  Clone ID: TF_OsC42685_1
atggagaacaaagatacaacagaaaaggccagattactcagtggtgctctgagcaaagaaggctcgtctggtacttcaaatgaaggaaagaaaattcaagcaaacggcgtggatggttccaaagcaaaatccacctcttcaggtgagaaggtcacgcaaggcaatacactaagcaactatgagaagaaagaagagaaaccatggggaagggaagagatcgagttgcttaggaaagcaatacaaaagtatccaaagggaacctcccggaggtgggaggttgtctctgagtttattggaactggaagatctgttgaagaaattctgaaggctacaaagactgttcttttgcagaaaccggactctaccaaagcttttgactctttccttgagaaacgcaagccagcaccgtccattgcatcacctctttctgtaagaactgaaacagttggtttgcctactgagaaagcagctggaaatgcatcatccaaagcgcctgcacaacatgcaagcagtaaaacatccgacgagaaagctgctgctcctgctcctgctcctgtatcaaatggaacaccttctggaacagcagatccagaggcttggtcagaggcgcaagtgctggctcttgtacaagctttgaaggcatttcctaaggatgcaagccaaagatgggagcgtgtggctgccgctgtcccaggtaaaaccatggtgcagtgcaagaaaaaggttgcagagatgcaaaagaatttccggagcaagaaaagcgctgagtagaacaacatagtaccggcacaagtactttttgtggctagtggctgacaaaagcttctgtttgaacatcagtatcccttatatgttagagaatcatagctgcgtactcctgatgaattttgccagcatatcacggcctccagtggtagcaataattttggtttggagctctgtgagaactcgcattgggccttaaccggtgtcggcattctgcttacacaagttttttggtctaccaagaaagaagctgatctgctgttgttgatagctaatgttttggccttccccaacattaggtggactttctgctgacccttgggttgtttatgttcgagagccccttgaagagtattatttccttgcattggtggagtgatatgatctggtctggcacgacacagggagtgtagagaacagcatcggcatttatttatcaacttataagatagaaatatttgttacaacttgagaacttgctatatcaagaaaccatatttttgcctaatcagattcattattcatgtccaaaaaaaaaaaaaaaaaaaa

SEQ ID NO: 21859 - DNA, 1523 bp, Oryza sativa
  Clone ID: TF_OsC57946_1
atgtccgcgtctgcatccgctgcctgtctccttcctccccgaggaggaagcctggcccgacccgacaccgcactccccccagccagccagccagccactgtcgcggtgaaccaaaatatcccccgcctcgcctcgcctcgcctcgcggtaacatccatcacactcctcccccgccgcggccgccgctgcgcggtagatctcctcctcctccacctccaccgtctcctgctcttcctctctctcttctcggaggaaacccccaatttattccttccccgcaaacccgcagccttcctaaaacgaattaaatctccctcccttatccgccgctgcaatccctccccacaaaatctcgctgcgccgcgcgctgttttagggtttgagctcatggcggtggaggaggcgagcagcagcagtggcggcggtcgtggtgggggtggcggtgggggtggggaggaggggttgtccggttgcggcggtgggtggacgcgcgagcaggagaaggcgttcgagaacgcgctggcgacggtgggggatgacgaggaggaaggggacgggttgtgggagaagctagcggaggccgtggaggggaagacggccgacgaggtgaggcggcactacgagctgctggtggaggacgtcgacggcatcgaggccgggcgggtgccgctcctggtgtacgccggcgacgggggcgtcgaggagggctctgcgggaggtgggaagaaggggggtggtgggggaggaggtggaggtggaggggggcatggggagaaggggtcggctaagtccgctgagcaggagcgccggaaggggatcgcctggacggaggacgagcacaggctgttccttcttggacttgagaagtacggcaaaggcgactggaggagtatctcaagaaactttgtgatctcaaggacacccacccaagtagctagtcatgcacagaagtattttattcgcctgaactcaatgaacagagagaggcggcgatcaagtatacatgacataaccagcgtgaacaatggagatacatctgctgctcaggggccaatcacaggtcagccaaatggcccatcagcaaatcctggaaaatcctctaagcagtctctacagccagcaaatgcgcctccaggcgtcgatgcttatggtacgacaattggacagccagttggtggtcctcttgtgtccgcagttggcactcctgttacacttcctgttcctgctgcacctcatatagcctatggcatgcatgcccctgtccctggagctgtagtccctggtgccccagtaaacatgcctccaatgccctaccccatgccgccaccaacatctcatggatgagggctttgaatactacagttcttctagacaaactcataatatctgtcttgtttagagtttcaatgcatgctgttatgtctcaataaagcaatatcaataaactcttgtacattacaaatggttattgaatgtagcattttgaggccatcctggactgtaaaaaaaaaaaaaaaaaaaaa

SEQ ID NO: 21860 - DNA, 619 bp, Oryza sativa
  Clone ID: TF_LIB4506-019-R1-K1-H12
cccgcgtccgcttctctgtctctactctctctacaactcctgagctaagctaagccaagctagagccatttacctacttttgctgctttctgtctcctcctgcgacacacgacctagctgagagctgagctgagctgcgccgggcatggcagcatcgcagaggagcaggagcacggaggcgcagctcgacgtcgacgaccaggcgggggacgatcagctgaagacgatgatgcggcagggccgcggcgggactacaggatgaggccgccgccgaggaggaggcctacgcggcggtagcggacctgcagctggagctccggcgagggccggggaccgtagacgaggacctcaccctcgtgaactacatcgcacgaccacggcgagggacgctggaactccctcgcccgcgccgccggcaatataatcaaatcaagttgtagtcaatcagattcgatgtcgatgtgaggcgaattatatatggaatcgatgaaaatagagatgatgatcgtgatcgatcgatcgatgaaggcgtgaagaggacggggaagagctgcaggctgcggtggctgaactacctacggtccgacgtgaaacgcggtaacttcaccgccgacgagca

SEQ ID NO: 21861 - DNA, 795 bp, Oryza sativa; identical to SEQ ID NO: 12409
  Clone ID: TF_OsC199642_1

SEQ ID NO: 21862 - DNA, 999 bp, Oryza sativa
  Clone ID: TF_OsC134_84
ccacgcgtccgccgcctgctcgctccgcgcctctctctccccgctcgcgtcctcgctctgcgcctcctctcctcgcgacggtccaccgccggaccagcgacctcgcctcctcgctccgcctcaatgccggaccagcgccgaggcactaccgcactgctgcccacggccaggcacggtccagccgcctctgaccggcaccacagcgcctccgctgctcgcagggacgccgccgctacccgcccggctacctccgttgccgccgccaacacgctagtctcctcctccctgatcgagatcgagtcgacacatacaccaccaaccaccggccggccgccgcgcaccggcgagcaggatggggaggccgccgtgctgcgacaaggttgggtgaagaaggggccatggacgccggaggaggacctgatgctggcctcctacatccaggagcacggctccggcaactggcgcgccgtgccgaccaacaccggggtgatgcgttgcagcaagagctgccggctccggtggacgaactacctccggccggggatcaagcgggggaacttcactgagcaggaggagaagctcatcgtccacctccaggctctcctcggcaaccggagggatcatatggaggtgatttcaccaatgaaagatggaacatttattgattgggatattgttgacaatatatggaatcatgctttcagcttttatcctgaggagcatcctatgttgatagttgaaccatctacaaacacagggcagcaaagagagaagtatctattgactttaaagatcatgaaggcattatgcatatatcaaggctttgacatggtcttcgtgcaagaataaaatgccattttgtgttcgccaacaagagttatttatttttaatcaacaattgtgtgtcttacttcaaggtcactgatctaatggtttagtcttgcacctgtcacttgcttataatgttgtaaccccgctcctgtcacttgatagtatttc

SEQ ID NO: 21863 - DNA, 1134 bp, Oryza sativa; identical to SEQ ID NO: 12385
  Clone ID: TF_OsC419061_1

SEQ ID NO: 21864 - DNA, 1040 bp, Oryza sativa
  Clone ID: TF_OsC149302_1
actattaaatcttagcttgtactattgtcgtagctttctgaagtatcagaattcagaacctcacagagtgcagaagagcatctttttaacctcgccaaaaaagttctctcacgaacaaaaagcgagatcaagtatctgaaacatccgcctctacaagcaagtatagagacatcgttgacgatttctgtatcttgtatcttctctctataggctatagtgctattatattcgctagctagttgctgccgcgcgcgcggttaattggtttgcgtggcgcgcgtcacaccacgtctgaaaccggcatcgtctcccagaagttgtccacgaagttccagaagccgtcattgaaaccgaactcagtcgggacgaactgcgcggcggcggcggcggcgacctcgcccacgccggccatttcgaggtggtggtcggcggcgaaggagacaagctccgggtgagggaagctgctcgcctgcatgtactcatcccagacgccggggctggcctggctctggccgctcgacgccgacgtcgacgccgcctcgctggtggtggtggacatgcccatgcccatggcgtcctcgcacggctcctgcagcagctggctcctgccgcgcggcttcctgtgtatcttggtcctccagtagttcttgatctcgttgtcggtccggccggggaggtgcttggcgatcttggaccacctgttcccccaccgggagtggagctcccggatgaccatgtcctcctccggcgtgatgctgccccgccgcacaccgggcctcaggtagttgagccaccgcagcctgcagctcttcccgttccggttcagcccggcagagcgcgcgaggttgtcccaggatccttcgccgttttgcgagatgtagctgacgaggatgaggtcctcctccagcgtccacgggcccttgcgcaccgccggctcgccggcgcggccgcacatcctggtggccatcgaatagctagcgtgccgcgaggaacagagagcagagcagagcagagacgggtgagggggcggtggatttgct

SEQ ID NO: 21865 - DNA, 5911 bp, Oryza sativa
  Clone ID: TF_OsC351_1
ctgccccggcgggacgcccacgaggcaccagaagaaaggaaaaactcaagaacgctcactcgccctcatgggcaggtgaccgaggtgccaaaagccccacaccaagaagggaacatggccgcagggggaagaggagcggtacagtgcgtacatcaaggcgcacagcgaagcgtgctggggatcgcggggcccaggccgccggccccccgccgcgctgccaggagccagcagctgccgctggctcaagatgcaccaggcctgtcctcaggtgcggcaactcacgccgagcggcgagaagagctggccctccagcctcacagccgttcaggtagcaaaccagctgttgatggtccgggaggatccccctccacgacctgctcagcgacctaaggaccgcgattgcagcgcggctcaccgggggagggacgggacagcgagatcaagtatgtgctggcacacgcacctcaagaagcggctggacccgaagccgtcgtccgaccgggaaaccgtcgccgcccaagcgaaacgcgaccaagaagaccccagcggtgtcggccaagatcgacgttccgaccaccgagccgttgacgctgaagaatgagccctcgaggcactccgacctcagccggcaccgtccgcatcagccccggccgtcgtgccaggaaagtaaggcacgatgactatgaggcgaagccggcgatgatcgtgagggcgcctggagctgcaggcggccagcccgctggcagagcctcctgctttccggcttgcagccctcggcctccagaaggagtgcaagtggcagctggccggcggcgccggcagccggcgccggcaacaacttcctcggcctcagggctggcatgctcgacttcagaagcctccccatgaaatgaaatgatcctgcaaaccaatccatgatcgttacactttctcttctcttttgggttcttgatttcttagctagctttggttactgcttagtgttagtccttcttaattaggatcagatagaggaatacttcctttggggagatgatcagtgatcttgttgatcacttcctccattttgtgtaaatactgttccactcatacttagttcagttgatgatatggttatttaggttgttggatgtaaaaataaacacaatgtgggagatctatggtatttgtcactccttgtcaagaacaaaaaaaaaaacaatcatcaacgccaggagctgttttctcacctgatatgatcggtgaggcagttgctgacaggacaattgaactactgaggctcacgaactcagagactcagtgctggcaagattggcttttatttgctgacatttttttctttctgatgaaaagtggctgtattgattttcttgatttcgtggacaagcttgcatctcgagtaacaaatagtgatcaacagattcttcgcagtaatcatgtcacttggttactcgcacagattatccgcattgagattgtgatgaacacccttagttcggacccaagaagagagcatttgaacagtgatcagcttcagaaaggcaaacagatagatgagtggtggagacaaatgacaaaagcttctggggagaggatgatagattttacgagcttggatgagcgggcgatgggcatgttttgggttctctccttcaccatggcacaaccagcatgtgaagcagtcatgaactggtttacatcagtaggagtagcagatttaattcagggacccaatttgcagccaaatgaaagaatgacaatgatgcgtgaaacttatccactgtctatgtcattgctttctgggttgtctatcaatctatgtttgaaacttgctttccagcttgaagagaccatatttcttggccagaatgttcctagcattgctatagtggaaacctatgttagactgctgcttataacccctcattcattgttccgcccgcattttacgacattaacacaaagatctccatctatcctgagcaaatctggtgtgtctctgctcctacttgagatactgaattacaggctacttcctctatacaggtatcatgggaaaagcaaggcattgatgtatgatgttacaaagataatatcaatgattaaagtcaaacgtggagagcatcgtctttttagattagcagaaaatttgtgcatgaatttgattctctcactaagagacttctttttggtgaaaaaagaattgaagggtccaactgagtttactgaaacacttaaccgcataacgataataagccttgctatcaccatgaagacacgtggaattgctgaggtcgaacatataattcatcttcaaccattattagagcaaattatggcaacgagccagcatacatggtcagagaagactctaagatattttcctccccttattcgagattttttaatggggaggatggataagagaggccaagctatccaagcatggcagcaggctgagacaactgttattaatcaatgtaatcagctactctcaccatctgctgagccaacctatgttatgacatatttaagtcacagtttccctcagcatcgtcaatatctttgtgctggtgcttggatgctgatgaacggacatctagagatcaacagtgcaaatcttgcccgtgttttgagagagttatcacccgaagaagttacagcaaatatttatacaatggttgatgttcttctgcatcatatccaacttgagctgcaaagagggcatcaaattcaggacttactctctaaagcaattacgaatcttgctttctttatctggacacatgagttacttccattggacattcttctgttagctcttattgatagagatgatgatccttatgctttacgccttgtgataaatctccttgaaagaccggaacttcagcaaagaattaaagcattctgcacttcgcgttctccagagcattggctaaaaaatcagcctccaaaaagaatagaacttcagaaagccctcggtaaccatctctcagggaaagaacgttacccccccttttttgatgacattgctgctcgtctgcttctagtcatcccgttgataatttataggcttattgagaacgatgccacagatatcgcagatagagtccttgcagtttattctacctttctggccttccatcctctaaggtttacatttgtgcgtgatattcttgcatatttctatggtcatcttccatccaagttaattgttaggatcctcaacgtgctgggtgttagcactaagacacctttctcagaatcatttgcccagtatctagcgtcatcaaattcatctatttgtccaccaccggaatacttcgccaaccttttgtttggccttgttaataatgtcatacctcctttgagttgcaagtccaaatcaaacccatcggatgctgctggcagtacagcacgcacaacttataacaagccttatacatcttccgctggaggaatcagtaactctgatggtcagagggcattttatcaaaatcaggatcctggatcatatacacagcttgttttggaaacagcagccattgaaattctctcactttgtgtgccagcttctcaaatagtatcctctctagttcaaataatagcacatgtacaagcaatgctcatacagtcaaatagtggtcatggaatgtcaggtggtttgggccaaaactctggggtgccgacttcttcaggtgggggagttgaacctgttggtgccaaccgaccaaacaccacagcaagtggaatcaatgcatctaactttgtttctagaagtggctattcctgccaacaattgtctgttctgatgattcaagcttgtggtctgttgctggcacaactcccaccagaattccacacacttctatatgcagaagcagcccggatcataaaagattgttggtggcttgctgatagttcaaggcctgttaaagagcttgattctgctgttgggtatgcactgttggatcctacttgggcttctcaagacaatacatctacagccataggtaacatcgttgcccttcttcactcgtttttcagcaatcttccacatgaatggcttgaatctacccataccgtcatcaagcatcttcggccagtcaactcagttgccatgttaagaattgctttccgcatattgggtcccttgttgcctcgtctagcctttgctcgacctctgttcatgaagaccttggctttgctgttcaatgtgttgggggatgtatttgggaagaattctcaggcttcacctcctgtggaggcatcggaaattgctgacataattgacttcttgcaccatgcagtcatgtatgagggtcaaggaggtcccgttcagagcactagcaagcccaaactagagatattgacgttatgtgggaaagaatgcgcggcaatcagtggagtgatgctattagacaagcagttggttgatggtcagagtcaggcctcgccatccatgttactacctccgcattcttgcactgcagactactgtagacagtactacatcgagggtgagcgagctgtgacacaactgctcaaggacgtggatcctctgcagactgcagtggtactgacactacgcagacaacgcccccgtcgagagctcagtccagattacacgtgtacgcgtaacagcattttggaggcctggagggccaggaggctcgcagccgatgtcagtgacggcctgacgccgtcacgcctacgactcgcctcggcctttccacttctggccgcatctattaatccccgagcagcgccggaacctctccaaattaagactcgggtgagctcatcaggctcagttcatccctctcgtgagatacagatagcctcgcaaatcagggatcagcgtgtgatgggcaggcagccgtgctgcgagaaggttggcctgaagaaggggccatggacggccgacgaggaccagaagctggtcaccttcctcctctccaatggccactgctgctggaggctcgtccccaagctcgcagggctgctcaggtgtgggaagagctgccggctgaggtggacgaactacctgcggcccgacctcaagaggggcctcctttccgaagaggaggagaagctggtcattgacctccacgagcagctcggcaacagatggtccaagattgcggcacggctccccgggaggacggacaacgagatcaagaaccactggaacacccacatcaagaagaagctcaagaagatgggccttgatcccgtcactcaccggccggtgatgtcactcgctcagcctgatcccctgaagcagcagcagcagcagcatgaaccgtccgtctccggcggcaccggtgccgacgacaaggaggaggaggaggaggagacgccgacgagcgcccagccacagggcgtcgcttgcgctgcttcatccgcctccgccgtgtcgtcgtcatgctcctcgtccgcctcggcctccgccgcgacacccggcgcggacgtggactggcccggcctcttcgaggtggatgccattcttgacattgactgggctggcttattgtctgcctgcggcgacgatggcggctgcagcgccattggcgtcgatatgttgttcgaccaatgctctgacgttggctttgatcaagatgtgtggatgtgatcctgatcctgacaggagagtttacgtccgtgagtagaattagattggccgtgaagttgagattcatatcttcttctttcactcttctttgttttcctatattgaattcgtccatgacaagcatgcatatttgttgacaatgaagaagagaagaaatggtttggtgtgttttgtgataaaaaatgtagaaagtgttcaagcagttgcagttcacttcatttcggggaatccatcccttatgagcaaacatcaaaaaaaaaaaaaaaaaaaaaa

SEQ ID NO: 21866 - DNA, 943 bp, Oryza sativa
  Clone ID: TF_OsC351_12
cggacttttgggcgctcatctccatcttcctcctccctgcctcgctcctgtgcttcttctcttcatcaacaagagagctatccctggatctgtgtgtgtatatatatagagagagagggactgatctgggtgtagcgagctaggtagcctagctagcatggggaggtccccatgctgcgagaaggcgcacacgaacaagggagcctggacgaaggaggaggaccagcggctcatcgcctacatcaaggccaacggcgagggatgctggaggtcgctccccaaggccgcagggttgctgcggtgcgggaaaagctgccggctgcgatggatcaactacctgagaccggacctcaagcgaggtaatttcaccgaggaggaggacgagttcatcatcaagctccatgagcttctaggcaacaagtggtcactgatcgccgggaggctgccggggaggacggacaacgagatcaagaactactggaacacgcacatcaagcgcaagctcctcgcccgcggcgtcgacccgcagacgcaccgcccgctcaatgccgccgccgaccaccaccagcagcagcagctccaggcgccacggcggttcgccgccgcgccagccggccaccaccaccaccaccctgaccatttcgccgtcctctccaactcgccggaggcctgcagccacagcagcgacgacgagcccagctccgccacgccgccgccgccgccgcgtcacctcggcatcgacctcaacctttccatcagcctagctccttaccagccgcaggatcagaccagcgagccgatgaagcaggaggaggacgacgaagcgtcagcgacggcgaacggcgccggcaatgcagcgatgacgacgacggcgacgacggcggcggtgtgcctgtgcttgaaccgcctcgggctccacggcggcgagcctcggccagagtga

SEQ ID NO: 21867 - DNA, 600 bp, Oryza sativa
  Clone ID: TF_18698673
gccaacgcgaagctctcgtcgcgcacaaccaactcgacaccgcggcgaggccaaccaacgcgcggcgtgggcatggggaggtcgccatgctgcgagaaggcgcacacgaacaagggggcgtggacgaaggaggaggaccagcggctgatcgcctacatcaaggcgcacggcgagggttgctggcggtcgctgcccaaggcggcggggctcctccgctgcggcaagagctgccgcctccgctggatgaactacctccgccccgacctcaagcgcggcaacttcaccgacgacgacgacgagctcatcatcaagctccacgcccttctcggcaacaagtggtcgttgattgcggggcagctgccgggaggacggacacgagatcaagaactactggaacacgcacatcaagcgcaagctctgagccggggcattgacccgcagacgcaccggccggtcacgccggaacacgcccccccgggaaaacgggcttacacgacggcaacaccgcgcttttcgtccttggcccggggccgccgccgaagaagacaggctaaaacccgggcacgcccgggggccaacattgcagctttccaggtccgg

SEQ ID NO: 21868 - DNA, 1334 bp, Oryza sativa
  Clone ID: TF_OsC76_1
tggctttctgtgtcccaatatatctcctgaaaggcagtgtttctctgtctctctctatgtcctctagctagatagatagcacagaggagagagctctagcttagctgctgctgccccggcagctagctacaaattaagaaaaggattaggagcagtgggatttggtagtttggtgcgtgtgtcttgttgcctttagcagcttggagttgaggcaaaaatccaattctgctcaattggactcatggggagggctccatgctgtgacaagaacaacgtcaagaagggaccttggtcgcctgaggaggatgccaagctcaaggagttcatagagaagcatggcaccggcggcaattggattgctctccctcagaaagcaggattgaggagatgtggcaaaagttgtaggcttagatggctaaattacctgaggcccaatattaagcatggagagttcacagagcatgaagacaggatcatctgcaacatgtttgccagtattgggagcaggtggtctataatcgcgtcgcagctccccggcagaacggacaacgacatcaaaaactactggaacaccaagctcaagaagaagctcctcggctcgagcgccgtcgccgccgccgcgccgccacggatacagcgtcatcagcagagccaccaccggtcgtctctcctcctgccgaactcgccgtcgctcaatcccggcggcggctacccaggcttcttctccggcgccggcggcttccatcctcaggaaccagctatgccgttaaccctaccgaccaccacccaggaattcatgctgggcactcactctggccttccaatggtgagcgcctctgcgctgctcaaccatctgcacggcgcatcacatcatcatcagctgcttgtgaaggaggagatcagcagcaacatgatcgtgttcggctccgaccagcagagctgcagctcgtcagatgggctggcggcgccacacagccacaaccaccatggcaacagggagttcatccttgatggctacagctatggcgtcggctacggcagcagctgcatcgatcaggtcgacaacgacaagctgttccagcatcatcatcagcaggatcaggcacaagaacagcagcagcagctggtgtacaactacgacgagatcaagcagctgctgatgaacacatcaaccacaagtaatagtattaatgctggtcaggatcatggcggcagcatggaagcagggttgatcggctcacaagggaaggtaaccatgatgtaaattaaactgatcgattaaagaggaggggaaggcagcagctgggcacggcaagattaaggatggattaatt

SEQ ID NO: 21869 - DNA, 1395 bp, Oryza sativa
  Clone ID: TF_OsC16767_1
caaagctccatccgttctgaaggctttgtggccgagttctcctcccccacctcctcctcctcctcctcctctgtagccgagctgaggccaacgcgagtagtgacattctcctgcaatggggtgcaagtcgtgcgagaagcccaggccgaactaccggaagggcctgtggtcaccggaggaggaccagaagctccgcgactacattctccgccatggccacggctgctggagcgcgctccctgcgaatgccgggctccagaggaacgggaagagctgccggctgcggtggatcaactacctgcggccggggctgaagcacggcgtgttctcgccggaggaggaggagacggtgatgagcctccacgccgcgctcggcaacaagtggtctaggatagcacggcatctacctgggagaacagacaacgaggtgaagaactactggaattcttacctgaagaagcgagtggagagcggcggcggcaagacgagccaagggccaccaaccacgcctgcgtcagccgcgagctctcccgccgattcagacgactcgcacagcctgcagcagaagccgcacgagccggccaactccgactcgtcggagccggcgcacgagtcgtcgtcggcgtcggccgactcgagctgcctgacggtgaccacggaccacccgcccgtctcgaggccccacgcggcagtgacacccaaggtcatgttcgcggactggctcgacatggagtacatctgtgggcaggtcgcggcagcacctggtctggacgctgccggattcgcggtggttggtggtgctgcaggcgatcagcagcagcagcagcagcaggtgatgagccaggacggatcggttcatcaggccgatgggccatcgtgcggcgtggacgattcttccctgcagcagcagcagcaggaggggttcggtggcaacggcggctgctgggattttcaggagcagttcgacagcatcgaccagatgcaggcgagcggcggcggcggcggcttctgcgacctgctctccatgagcgacttcgacctctgggccgagctggaacgtaccgcgtgatgggggaacgacgtgctcaaggatcgatttttaattagagcttgttaattcatagatgtcccgtggaaatcaaattaaggggtgtttgtaatactactgcattgtaaattatcgcggtgtatttatagagctgtttaaattagcaacatatataaggaagatcagaggcatgataagtcacttctgtacgaatttatgtttgccactttgctttggagagcatgggcaccgacagaaagatggaaaggaagaaggaaagctgtagagaattgcgcctatggatgcaattattttggtttgtttaatgttgaaaaaaaaaaaaaaaa

SEQ ID NO: 21870 - DNA, 1597 bp, Oryza sativa
  Clone ID: TF_OsC1737_4
cggacgcgtgggcggacgcgtgggcggacgcgtgggcggacgcgtgggcggacgcgagcgcgccgtgcaccgcctctcacaatgtcgaccgccgccgccgccgccgctgcccagagctggtgcttcgccactgtcaccccgcgctcccgcgccacagtcgtcgccagcctcgcctccccatcaccgtcctcctcctcctcctcctccaacagcagcaacctcccggcccccttccgcccccgcctcatccgcaacacccccgtcttcgccgcccccgtcgcccccgccgcgtgatccgggaggccgcgacgaccgccagcgaacggaagggaaaaaaaaaagtcaaaaactagagccgatcgtttgatccattcgatatagggaagatgagtggatgcctctgcctcccccgctataaaaaggccccaaacgggacgccatcgccaccaccaccagcagcagcggccgaagcggaagcagcagcagcagcagcggcgacgaagccgtccatagattcttcttcctccccgtcactcctcaccaacaaccatcccccaccctccaagatggacgccgccgtcgaccgcctcaaggatgggttcgccaagttcaagaccgagttctatgacaagaagccggagctcttcgagccgctcaaggccggtcaagtaaccctgattcaccccaaaaaaggcgccctcggcgacgaactgggctgatcgttctgacggacagtcgagatcttgagctccagatcaggtggctggagttgcagttgcacctgaggctttgccaccatcagagaaggatggattgttcttggttgttcgctgctgctgctgctcactgctggtgatgaacagcttggcgtcagggttaaggatggaggaggcagcagcatggcttctggctgtgccatgctgctgatacccagtgacagtgcagggaatcccatttcagcaggcacagaggctgtctcgtgtctcagtttcagacgttcattcacactcggagccttttctgcatcctcaatcacgtcaaagaggctggatcttctcttcttctgcgtgaggctgctctgcctgaggaaatacttctgggcatggctggccacctgcgtcggtgttcttgtcgtgacgaagtgccgggaaatgccgcgccagtcgcctttcccgagcttctcgagccctaccaggaatttcctgtgctcctcttcagtccatggaacacccttcttcctctcctgagctctcgccatgaggccatcggagaggtacccgttggccatcttctcgccggcctcctccaccgacaccagcgacgacgacgacgacacggtcggcgacgagttggaggcggcggcggcgaccgcggcgtagtacgccggcgacggcgacggcgacggcgacgataggcactccatgctgaagcacttcttcagaggcgcaccgccgacgtgcaactgcaccccgaacaacctcacgccaccggcgccaccgccgccataaccgccgccactctcctgcaggctcctttggccggtgcaagtcctggagttgtggccattgttcccgcagctggagcatttcctggccat

SEQ ID NO: 21871 - DNA, 5437 bp, Oryza sativa
  Clone ID: TF_OsC6483_1
atgtcgtcgtctgctgcccgcccctatcagggcgcctctgcctccgcccacgccgccgcagacgcctcgccgacgtggggggctctcggcgccgccgcctgcacctctgactgcctgcctgactcgacgcctcgcatctcctccgccgcctgttcgacgggtggcggtgaagggaaggcttggacgagtacgtctctgagcgacctgcgacgaccgacgagcgccgccgccgccgccaccgactctgccggggacggtagccccgggataggaggagggaggaggcgctgccgagttggcttcttcgccgcgcacggctattaccgacagggcggcggctcctacgaccgctcctaccccgatgaatcgctcggctacacgccgtcgcgctcagaccggtactggctggacgacgacggtggcggcggcggctataagggtttcagccggtacggtggtggtggtggtggtggcagccggagggacggccgtgacatgcggggttcctaccggaggtcgccctttaggggatacgggagcgacttctccagaaaccaccaagaacacccgcctccgccactgaggaggtcgcccctgagatcagttgctgtaccgatgtcttatgaccctcctggtgatagggctgataggggggatagagaccatcatcaccgtgtgactccttggcggccgctgcgccggagggagagcagatctgatgctgcagacgctgctggggctggacctgtgcctgttggacaggccgctgcagcagcggcctcagagaaggacgtttcagctcggtcctcagccgtcgcggctcctcaggtctctgaggaggaggcaccaaggaagaagcctcggcttggatgggggcaaggtttggccaagtatgagaagcagaaggtgcaaggacctgcagagtctgctgaagctgttgccgaaggcagcccaactgccaccgaacaaaagggaatcacccatacaccagcacctgcgccttgtgtgtccccagtggcggcaccatcacccacgccttgtgcgtccccagtggcggcaccatcacccgcgccttgtgtgtccccagtggcggcaccatcacctgcaccgccatgtaaatcaccagtccctgaagataaatcctgtgaactgacagcaaatacagtcactgaatccaataaaaatatcccaggacctgacgttcaggcttgcaataacgaagtccccactaagttagatcagcttgagggtgatcccattgattcgcttgcaaaggtcctttctgaactggtgcaacatgaagattcctgttctggggattcgaaaagactgtccaatgtcagtaagttattgttactgaaggaaagcattagcaaagagctcgaaaagacagaacttgagattgactccttggaaggtgaacttaaatctgttaatgtggaagccagaaatagaacactcaaagatccacctacagctgtaacttatgcacaaaatccttcaccttcacctgtgaaagaacaaggagagctgaccccttctcccaagatttctatggagcaggatgctgatgtaaaaggctcagagctcatggaaatagagacagctcaagctcataatgcaaaagcagtttcttcagaagagagtgttgcttgtcctggagttgctctgggtcaggtccctgccgctgctgatgttatcccatctgatccatgtgggaaaactggttctggaattgatgtcgatattgagcagcgcgaagagaatccatgccaagaaacttttaatgccatgaaagcagatggaagcagtgacttggccacaaggccttgctcttatcgtgaagttaaatataacttaatggatcaaattattgctgcgaacaggagtgaagccaaaaaaaattctcaattactatttaagcctgtgccagctgatcggtccaatcttgatttattggcatcaagctatctttctagccaaatgaagaatgatgtaattatcaagaagaagcatgccatacttaaaaatcgacaaagattcaaagagcagattcttaccttcaagttcagggtgctgcgtcacctctggaaggaggatgtgcgacttctttctgtaagaaagcagcgctctaagtctcataagcgcacagaccagagcaaccgatcatcacagagcggatctcagaggcaacggtcctctaatcgctccagattggctgtaccagctggtaatttaagcacatttcctatcacagaaatgtcaggtgtagcaaggaagctgttttcagaatttcagctcaagcgttgcagaaattacttgaaaatgcctgcactgattgttgacgaaaaagagaaggcaggtgctaagtttgtgagcaagaacggtttagttgaggatcctgtttcagttgagaaggagcgagctttgataaatccatggattcaggaggaaaaggaaatttttatggagaaacttgcaacatttggtaaggatttctccaaaatatccagtttccttcagcacaagacaactgctgattgtattgagttctactacaagcaccataaatctgatagtttccgagaagttaagaaacttcttgatcttcggcagcaacagcaacctgccaacaattacctaggagcagtatctggaaagaaatggaatcctgaggcaaatgcggcatcacttgatatgcttggggtggccacagaggtggcagcccaaggccttgaatatgtgaatgaagtgaagaaaaattctgcgaaatctatcctgaggactgtttgtggtgttgataattctaccaaaggatccgagaaggattgtgttggggatgtttctttgcacgagagagaatctgtagctgctgatgtcttggcaggcatatgtggaactctctccccagaaggcatgggctcatgcattaccagttctgctgatcctggccagaagatagggatcatctcaagaatggagcatcttttaactcctgaagcagataaaaactttgatgatgacggcactctctcagatcaggagtgtgaagttgacatagttgattggaatgatgatgagaagtcaagttttattgaggctatgaatagatatgggaaggatttcgctcgaatttcgtcatacgtgaagagcaagtcatttgaacaatgcaaggtttttttcagcaaggctcggaaatcacttggtttggatctgatccatcaaggtgctgctgatgctggtttccctacaggtgatgccaatggaggaaggagtggtacagatggagcctgtattgctgagatggattcagctatctgtagtgcacagtcatgtcctaaagtggagatagatgcatgtcctgtttctgatggagaaattcaaggacataatcctctttctgatattgcctctaggcagccagaagctgacaaatcaaacatgcctgatgttgtggacataaatgtcgaggaaggtgaaagcaaagcagaaaaagactgcagcattcttgttgatcataaacagttacgtgaagacattaatcaaacatcatgtgctcgtatcgacatcaactgtcctgagagcacagataagctgcaagacatagaggatgtaacaccagtgaacatgcatggagatgatctcatggccacttcagttgaacaggttgcggcagcgcatgtggaaagtagatccagtttacattctgaagggattggcattgatgtttccaggatcgaaggatgttcacatgagagtacaattggtaaaggtggaaaatcaacaccgtctgtttgcttgcctgcagaaaatggggttagtaaggaaaatatcatccacttctcgaacatggatggtgcttcctccattagtcctgcatttacttcaaattatcagcaaagtaagctggcagatccaatccaatcaaaaccgaagccccttaccccaaaggatttaatgcctgtccaatttagttcgtcgctgcctgatcctacctcaatctgttttgagggtatagctgccataactacacccaattttgaggatcatggcaacagagccagcattgcttcaggggcaaaagatgtgaacatgttcccaacatttaaagaccagtccagtaatcgtcatgatgcactgttttctaatgtcgatgggtacatgcaacagagacgaaataatcactttggaactgaagtatgtggcttatctgaaagcacaggcatttcccagtcggaccagttcacagtatcgaaattccagaatggcaggcccagcagcttgggcctttcgaatggaaatcttggggttctatcgactgggagaagagaggaagcacgtgaaggcttgtttaggccttgttctgtcaagacaagtgctgggaatgaggagcagcaaaagcggcctggtgatgtcaagttgtttgggcaaattcttagccatcaatcatccttgcaaagctctggttcatcagttcatggaagcaaaagcaagcccccctcaccaaaggttgataagccagcttcttctaggttgttgagtaatccaagggaacgcctggtttattcttccaggcctccaatcattgctaacttggggctagaggagagagcgatgaggagttttgaccatatggatgggcgaacaatacagcctgagcctatggttatggtggcaaagtgtcagagaccgtcagctggtgtaccagtttactcaaccaaaaatggcgcgctcagcgtgtttgcggaatttcagcaaccttcaatgccgccacatacatcagatcacaaactactagaaaactttgccgatcttcataagaggaatggaatcgaactcctttcggggttccagcagcctgggaggcttgggggtgctggggtcctggttagcggtgtatctgaccctgtggctgctctcaaggcacagtacggctctggttcgaagatgttgagcagcagcaacgacgtggatacatggaaagacataggaagcaggtagcgtctgtagtgttggtagcggcaatagtgcaatgctttcttgctctctgtatcatacttagtttttgtaacttgggatgaaactaaacatgggaaagtgaatggctttcctgtccatattgttgtaggatttgcagtagaagttcgtttaaatttatcgctggtattaactttttgtacctttcttttttgctgcagccgctccatacttgatagtttttacctgttaacagtgatgtaggttttgctagaggtgttggtcatgctgtccgctggctgacaaggatgtttgttggtatgtctatcagtatttatgcagaaacctcacacagatcattgtaatgtggtaatgattcctaactgagtttactcctttgcctgctggagttttggtgaaaaaaaaaaaaaaaaaaaaaaaaaaaaaaaaaaaaaaaaaa

SEQ ID NO: 21872 - DNA, 1167 bp, Oryza sativa
  Clone ID: TF_OsC26138_1
ttttttttttttttttttcatctctgtttcacctcgttgggaagccaattcatcacagattcaatcacaaggggaaaatcaactaaaaagagaaaaaaatgaaaaacaaatctcttaaaaattcatcacaaagagaggagccctagcgtgcccgccaccgccaccagctcgtcgctgtcgtgtccgccaccgcaacacctgctccaaccgccgcctactcctgcgcccaactaggaggaggtcgtagccgctgccggggaagggggctgcctcaatgaggagaggaggacggggtggagccggtggtcgactggaccgacgcgggaagccgacgtcgccgccggatccgcccgtgggaagccgcaggagggcacctccaccgccgctgctcacggtgggggagggcaccgccacagccgcttggagagggcgtcgtcgccgccgctgctcgaccaccgcaagagggggatggaggaggaggtcatcaccgatgaacgcgaaatctagcgcgaggatgccgtcccggggatccgtcgcgtcggatgctagggtgcaagaatccaagctcgaggcaagaacgtcggcgagagggtgctgctgctgcggcggcggcggcggcgacttcaactctgcctcgctccccatgtactccgagtcatcggcggccggcggcgggcaaccggcgttttccgccgtcttggcggcgtcggggaccaagccgctgcggcggagctggatccagcggtccctcatgatggccgaggtgcggccgtagaccgagcggctgatcttcctccagctgccgccggtgtggcggtggaggcgcacgagctcctcgtcgtcgcgggcggtgaaggggcggtggtagacgtcgcgggcgaggtggtggcgccacctggcgcggcacgagtcaccggagcgcccaggcatttccctggcgaccttccaccattgccggaagaggttctccttggcgagccgccgcagccgctcgtcctcctccgccgtccactcccgctcgggcagccgccgccggcgggagcacctgcacttcgccgccgccgccgccgccgccgccgcgagccatggacgtctctcctcctcgggatcgtggttggttgcagcgagagcaagggtatcgtcccagacgtccgtctccgtccccat

SEQ ID NO: 21873 - DNA, 1280 bp, Oryza sativa
  Clone ID: TF_OsC174168_1
gccgcaggcgccccgcccccgcggcgggccgctgggaagagagtccccgccgccgcgcgccccggagcccgggctggggtgggcgctctcggcccccgtcggcggcgagtgcctcttcgaccacggcggccgcggtggcctccgctgccggagcgcccgcccggcgcgcgccggatgcgggggggggggcaagggttgccggctgaggtggatcaactacctgaggcctgatctcaagagaggcagcttctcccagcaggaggaggagctcatgcatcagcctccataaaatccttggcaacccgtgggccctgtgggcggcgctgctgcccggcggggctgacctccctctcgccagcccccgggaggggagcattctcacaggaagaagaagacctcatcatccatctccattccatgctaggaaacaagtggtctcagattgcggctcagctgccgggtcggacggacaacgaggtcaagaacttctggaactcttacatcaagaagaagcttcgccagcgcggcatcgatccggccacccacaagccgctcaagtggtccgattacgtgttcgacggctacaaccaccagctccctccgtacaaccatggcggcatctatggcggcggcgacagcaaggacacggcggtgcacttcgacgcccacgccctcggcaactggtgctagcagctacccctccgtaaaaaaaaaaaacaattctagctacaaacctggacatatgcgtgtctagattcatagctaaagtttgtttttttatgggacagagtagtaccatctagctaagctcgaatccaccccaaattaggcgcaacgagaccgacggcgagcgatgagccatagcaatgatcagccgatcaattagtaggcgccataattgcatgcaagcatgctgctacgtataaatgtacgtatacctacgggtcaagttttcaacgtgtatacgcgcgtgtgaattaattaagtcggcgcgtacgtaattaagatcatagctgatgtttggtgagaggtttttgggttgtcaaaagattttttttttttttggtttagtttctttcatttctcttctctcctttgatcgatcgatcgagagatatcgatggatcgggcattagtttgctgcttttgagtgacatgattgtgatgataattaaagtctttaatctcgatcgccggtacacgtacaacatgtaaagttcttcatatgatgatatatataaatatatatatagacattgatgctaaaaaaaaaaaaaaaa

SEQ ID NO: 21874 - DNA, 1480 bp, Oryza sativa
  Clone ID: TF_OsC3325_1
gagaaccttgattgttccttcttcaggagaggaatacacgttacacagtcctcccagtggcagcaacttacagagtacaagtgtaagaacttaattattcttacaaaatcttatagtagtaatgtctcttattctaaccaaccagaaaaacagtatacattttctcaaaaaaaaaaagaaaaaagaaacagtgtgagtagagtccgggctagagaaaattaacatgtagtagtagtaataataataataacaatcctaatcttccaatggttctttatcctgtacgtgtagaatatactgtagtgtggtaaaaaaaaggagtggtaaaaattaattgatcagaagtattccaagttgaagtcgaattgagccaagctctgctcatggcatggtagcgagaacttgtgctccagcgtggcgtcgtcttccacctgatactcgccgccatagccactgtgctgctgctccatgtcggcgaagggctctgccttggcggcggcgtcggcgccggccgaggcggcccagttgagcacctcgctgtcgagcacattgctcacctcggcgcaggtccagttgctgctgttgctggagctctcgccgtagcccaggttctccgacacgtcgagcacgctgctgtagtcggcgacgaacccggcgccgtcgtcggggtgggagccgtacagcgccgccgccatgttcgccgcgccgaggtcgaagccggcgccgaagtcggtcaccgggaacgggtcgaacaccgactgcttggcgttcgcggcgaggccgtcggcggcggcggcggcggcggcggcgccgtggggcttgtgatcctcatccacctgggtgaccgccgactccgaggacgtcgccgccgcggcggcggcggcgatgggcttgtgcgtggccgggtcgaggccgcgttgccggagcttcttcttgaggcagctgttccagaagttcttgatctcgttgtccgtcctccccggcaagtgcgacgcgatctgcgaccacctgttcccgaggatctcgtgcagcgcgacgatgaggtcctcctcctgctgcgagaagctcccgcgcttcaggtcggggcgcaggtagttgatccaccgcagcctgcagctcttgccgcacctctggagcctgtgcgagcttgggaacggagctccagcaaccgacgccgtagcggtagatgtgattgtagagcttctcgtcttcctcgggagaccagagccccttgcgcagcttctgctggacaccggcggcagagcacgcgtgccgtcccattcccgcccgacacgcgagcagctacctgccgctgggttcgttgcccttgccggcgtgtatctgtctatcgatctctctgtcgatcgaggcggccggctgggcgcccgatccagggggtatatatggggaagcgtgccgagaactactgcacacacacacgtacggtgcgcgcgcgcccacgcgtccgcccacgcgtccg

SEQ ID NO: 21875 - DNA, 1349 bp, Oryza sativa
  Clone ID: TF_OsC46522_1
atgagggatgtgtgcatggaggtgctgcctccgatggaccactacgcgtcgagggggaactggttcatggcgcgcaagtggtcgccggaggagaacaagcagttcgagcgggcgctcgccgggctggacctgcggtgcccggactgggaccgggtggcgcgcgccatcccgggcaggtcggcgctcgaggtcatgaaccacttcagggacctcgagctcgacgtccagcagatcgagaatggcatggtgcccttcccggtctacggcgccgccgccgccggcggcgcgttcacactgcagtgggatggcgcccatggcgtcggggacttcaggaacgcgtaccggttcggcggcggcggcggcgggaagcggcacttcggccgtacgccggagcaggagaggaagaaaggcgtgccatggacggaggaggagcacaagttgttcctcttaggactgaagaaatatgggaaaggggattggaggaacatatcccgcaatttcgtgcagacgaggacgccgacgcaggttgccagccatgcgcagaagtatttcatcaggctcaactccggtggcaaggacaagaggagatccagcatccatgacattaccacggttaacctgacggatgaccggcctccctcgccatcacagtcctccttgatcagcaatcagtccaacacatcaactctgaccgcagcggttgcccccttctcatcgacggccgatgtcaagccacagaatgccgcgaatgcgtccttcaattcgccaagccggacacttgggatggcgggttacgggatgggattgcaagatcaaggattgcagtgtggtggtcctctacatgatcagttggccgcgagccgaagcatattgttttagatgaaaccaatccaggcagcaccatggatcagatgtctagtgtaatattgccctgcttgtagcttcatcactacctgtattgaagtaattaattatggggaatttttcggaacataacagagggggtgtggagggatctttgtgccatgttggtgactgataacctgtgatccataattgttggcaatactgagaatgtaacgaaacgaacgtcaagaacttgatgccggtggtattttcagacagtgattgctgctagtgctgaacactgatcatgcatgaagtggactttgtattcaatcatggatccagcttttgtgaggtggatgaggagaattctattcactatgttcttctggtcagtgatgcactgagaaacaccggttgccatctgattgaggggtttcagatcatgctgtacttcacacatacttatccacagtttatcaatttgctcattggtgttcccc

SEQ ID NO: 21876 - DNA, 966 bp, Oryza sativa; identical to SEQ ID NO: 12397
  Clone ID: TF_OsC215051_1

SEQ ID NO: 21877 - DNA, 3549 bp, Oryza sativa
  Clone ID: TF_OsC139519_1
ggggtcagcctggcagcttggctcgtgggtgtgtttgtgcgtgttgcggcgctgtgtcgcgcccagcgtctcggggtctgctgccccgcccccctccagctcccggggcggcccggggctgtcctcctcccccccccgggcgaccggctctcccgtgatcgtgctccgttctgcttctccattgcggtttcccctagcgcctggacccctcggtccctgtttggttgcgcccggctgtccacccgcgcgggggcccctcgctcgcctgtggtcgtccccctctcgacccgagagtgagagccccgctgtcccggggcccccccgtccccctcttcctctcgttcacctccccctcacccccgcagctaaaagcccacgccaacaccgcccggctgtgcctttaacgcgagccctttgtaggaccatcctgggactactgagatcccctgttcatttgtaattagacatcgcataacactgtccttggactataccatgatatgtgccagcttcagctgattgggaatcttcctttgaatatgatttttttcccatgtatatcttcctcccacttcaagaagttgcacctatcaacaataccacatccgcagaagtaaagctccgagtatcgctgatagtcaatagagcctcaagcggtgttgctattctcaacagaagtgggatctgtttcagcagaagtgggatccttagctgacacatcagaaggtccatttgattggatcatgttgcttaacggcttgacactcacacataagtgtcttgcaaccctgctggatccattgattcggccgaatgacatgcaatcagcaagccgcgtggatgtggaaaatttgtctgcagatccctcagtcatgtttatctgcttgggtctcggcattgacttgagtctcccatttttcacatttccattattagcatctctatcttcagaagccacagttggaaggtccgacccaaaggctgcattagccatgctatcagcttttgagttctcttcggctgatttccttgatggtgctctcttgcttttcattacagcaccatgattatcagtagagactgaacccctcattctttgtttggttgctcccttctgaacaccagagatagagcccctcattctcttgttgacttctcctttaccagagagagagcccctcgttgtcttcttggttgtgccttcttcaccaacagatgtagagccagtcttccgtttcgtggctacctcattatcagcactgatagtgcccactgtctctacgacagcctcattatcaccagagatagaccccttcattttcttttgcacaacttgatttttgtcagtaatagatctctttctcttcctggctccactagaacaattagaagagttgttgacatcacagacagcaagattttcatcagtttgctttttcgatctacttctagatggtttcttctttgaatttgctgtggttgtgtttacagcagcctcagcatcaatagattcagaaagaggtagattcatagaaggtgaagaatttgatgtgtcaccagggagtacattgtcctcacatggtattctagaacgttttcggggcttcctgactttagcactcacagtgttctcatcacttccatcaactttggagcgaacaagtggcattaagtcactgggtccaatggcaggtcgctctgtttctctgtcaacaaagttgcattgaagaatggatttctttatttgttgagctgccttaactgaaggcaatttatcttgacacaactttctccatcttctcaagcacatattgtcagtacggtgaggaatcttcgccccagcaatcttggaccagcaaggcccaaactcatcgactgatgccaatagtatggagtcttcttcaggtcgccattccccaagatctatatcaggatcaagaacattgcgccacctttcattgcactgactctgtgtgcgaccaggaatgaactgagcaatcttattccagctgccagacccaaacaacttcacagctaccatgaggcgtttatcctcatcaagagaccatctccccactcttgacctttcagggtttaaggtttttctccacctgttagagcactgattgccagtgcgaccatccatactagctgatacaagttgccaattagttccaaaggtgttgacagcagcttgaagttgaagatcttcttcttcagcccagtccttattcaatatgcagtgattaagacttcgctgataacgaacaaggcactggaaaggtgtcctgtgagtacccaatgtaactgcaatgttaatccagttattcattccttgctgttgaacagttagtataagtcttttttcctcccgagcagtccaggcattatgactaatcaatggatcatcaaagtttagccacctcgattcacattcagcaccagatcgaccaggcaggtacatagcagctattttgtcccagtttattaatggcaggaccgatctaagactttcgggagtaacctcaaaattgccagcagtattcgtcagtgcatatgccatatctacagcactgaagtcaccggtggaacttcctttattgatcgagttcaaaatcaatgcctcttggtattgctgctttattcctttagcaagtttctctttctcaacatctgaccacggttgcttctgaagagacatagggagttgcttcagtaccattttgtactttgaaacatgagggttatctgcagggccaagaaataatgcaggtgtcttcttatctttattcttcgttgattgtgcacatggctttcgagaggagatcaatctaacacgaggatcctccttttggcacaaaattttgccaaatgcttttctgcagcttaattgataatccaaaagacattttacacgatccctgagatccttattttcttcaatttttgcttcaatggtaatcatcttccttctaatgaacttctggcatgctctgttcttcttaagagcatccactaacaacaaggcagctttaggaaacccagttctggtagttgcctctttattgtgcttctccgcatcaaattcttcatcaagttcatttccaaaaatattgccactcccttcctttgatgcctcagtttttgtgttcatctctgacccactggaggtaccggagtggtagtgcgagaaccggcgctgtatcgcgcggagcgtctcgaggtcgtcctcgtcgtcctccgagtcggagggcggccaggcgcagatcgggcgcggcaggggcgaggacggcgaggccttgttgaggaggagattctcacgtatgctgcggacgagggccaaatcctcgtcctcctcctcgtcgtcgtcatcagacaagccattcacctccgctcccgccgccgccgccggcggggcggcgaggcaggcggagacctgcgcgaccgccgcgtcggggtcgttcccggagaggatgcaggattggcgcagcgcgtccaggtccctctgcaggtcctcgtcgatgtccgggtcggagtcgtcggagtaga

SEQ ID NO: 21878 - DNA, 2812 bp, Oryza sativa
  Clone ID: TF_OsC1713_5582
ttttttttttttttttttccgtaacaacacttttgaggctataaaatgaaaacccaagtgatcataaatacataaaatgagaacctaagtgatcataaattatacgaccaatggaacatattgtacaaatgaataacaatgagatgtttatgaatcatataaagctacaactgaggaagctacactggttggaatcttatgaatctcccttttttctttctcctatcctacacttgaattgtttccagaagacgacctcaacagttgatgatgattaggggttacagaattgggcatgcctgggttgaacatgatgtttgacgtctgtggggatggctgggtttggatggccgacagcggcagacgaggtccaaatgacagcatctgctgccgctgctgctgctgctgctgttgtaagaatgccatctgggggtgaccatgcccctgcatgttattggcaaatggtgctggcatactggattgaggcatcgagcctggcacgcccatcggtctggggctcatactcattggattggatgacatggtgctagtactacccccaggtaggctatttccaggcgaggccaagcgggtggacacgattcggacacggtcagatgcaatcctctgccttattctctccacttgctcgcattctttcaaaagcaaggtctcgacttcggcaaactgcttcagcttcagttccaacctttttaactgatggtttattacagtagcagttagtctttggatttcacgttcctcttgatctgcaaaaagtttagccttcgtagctgctgccgacaaaccacacatggcagcatgcttcaccttttctggagagatggatgaagatacaccaccattatgatcacgaaaattcggatgcggaccttggcccctagaatcagagcaaatgccttctgaattcaccctggaatcatcatctactgtcaaaactgataaagcagcacttgcacatgatgctgcaactcttggtcccatagcagaagccaaaaacccaaccagtgacatcaccggattagaagaattaatgaacggaagctggttatcaggtggaattttttgaggtagatttcctgaagtactgccattgcaatctaaatgtgggtatccattggtttctgctctaaatggcacagatgcatctggcacctcaatattctctaacaaaccatcttcaacaggaagacgaataaaatggtaaatacattgtgcttttgactttgttccaacatgctctgcaatgttattccagttgtcattgtacttctctatgccctccaacagcaataacgtttcttgatcagtccaactatccccatcattttctgatctatcgttatccccatcaatcctctgaaaatctaagcttgaatgcccagtaatatatctcgcatcatggaagcaatcagagcatagagcgatatctgcctcctttagtgactgatagtgcaagctggtcaaaggctgtaagcaataactgcaagaactctctgacaatcgctccctaatctttccatccaattctgcaagtccagcatcaaaatccacaacctccgaatttgatgccaatgaagaaatgtcctctgcttggaggttacatttcggtcgatcaaacaaaattaggccatcaattgatttcagtggcgcagtcaatagttgcaactccccggttggctcctcccttagaagggaggttgccatccttagaccccggtgcaccgacccagacgcaaggtaattgatgattccccaagtgtctaagaacctaacaatcctactgagatcatataattcagctgtgttcgcaacaagcccctggcactctgcaaaagcaagcctcttgcttgggttctctaaatattttgcaataaccttattcctcaatagcatgtacttctctggagtgttgcccggcgacttccctgaaaagaactgtggcaccacctgcctttccagcctgtgcacgatccctggggagaaccaatctacaaatcgcaaacaagttagtgccgcattatagctcagacattcaggtttttggttgcaaagagcaggcggacctgagtgcttgggcacgacatgtaggcgaccctggaactgcttggtcacgccatgcccctccataagattcggcggcgtgcacacataggtagacggcttgtcagtgtccgtcgcgagcgaagcgtggtcagggagcaccccggagagcacctgctgctgcccgtacgagatgttctccagcaccggcgccgccgccaccgcggcggaaccctcacccgcgcacgcggatcgctcggccgcgatgacggcgaggacggacgggtgcggccggttgacgacgcgtcgggtggcgacggggaacgccgagacgggctccgccgaagggagcacctccgcctcgcggaggtcgagcacggggtcctccgccccggctagggtttcgtcgtcggcgtcctcggggaccgcggagtcgtcgtcctcgttaacggcggcggagtcggagtcgtcggagtggtccgccgcggcggcggcggccgacgagcggttggacggcgacggggacgcggtggggttccgcttccacttccgccatttcaggcgcgaatctgaggtcgacgaggccttccgcggcatcgtcgtcgtcgtcctcggcgtcggcgtcggcggcggcggcggcggcggcgagtgagggggacgggtcgggacggggtcgacgcagggaagcacgtgcgagggaggtcgggactcgggagtgagtgaatcagtgtactgaatgaactcattc

SEQ ID NO: 21879 - DNA, 3270 bp, Oryza sativa
  Clone ID: TF_OsC158_1
gggagggctgcctgtttccatcggtgccgggaggggtgcataacgtatcgagcatcggtctcctctgctctcttgggtttcctctgcccagcccttctgcccctgagcattctctggggtgactgcatttggggcttggcctgctgctgacgcgacgcgctttgagaactgcgagttttaatctgattctagagttgaagataacgaaaggagcaagggtgaactctgctgacttggtttttgtgtgcacagaccaactgcagctgaggatttagtagattgactgcaattggatcaattcaagtagaggtctaggaggaggtatgaggtactacttgtgtcaggtccagcgtttggttggagatatggaaggaggagtgcttttgtttgtggaagacctcaactctaactgacaaagcgaccaattgccaacacttctgttatatttcttctttttcttgaattgggaatggagattaattcctctggtgaggaagcggtggtaaaggtgaggaagccatacacaatcacaaagcagagggagcgttggactgaggcagagcacaacaggttccttgaagccttgaaactgtatgggagagcctggcagcgcatagaagagcatgttgggacaaagacagctgtgcagatcagaagtcatgctcaaaagttcttcaccaagttggaaaaggaagctatcaacaatggcacttctccaggacaagctcatgacatcgacatacctccaccacgaccaaaaagaaaacctaacagtccatatcctcgaaaaagttgtctcagctctgagacatccaccagggaagttcaaaatgataaggcaacaatatcaaatatgacgaacaatagcactgcacaaatggcaggtgatgcagctcttgagaaacttcaaagaaaggagatatctgaaaaaggaagttgctccgaagttcttaatctctttcgagaagtcccatcggcatcattttcttcagttaacaaaagctcttcaaatcatggtgcatccagggggctggaaccgactaaaacagaagtcaaagatgtggtcatcttggaaagggattctatttccaatggtgcagggaaggatgcaaaagatatcaatgatcaagaaatggaaaggctcaatgggatacacatcagctcgaagcctgatcattctcatgaaaactgtttggatacctcaagccaacaatttaagccaaaatcaaactctgtggagacaacatatgtggattggtctgctgcaaaagcttcacactaccaaatggacagaaatggggttactggctttcaagccactggaactgaaggaagccatcctgatcaaacaagtgatcaaatgggaggagccagcggaactatgaatcaatgcatccatccaacacttcctgtggatccaaaattcgacggcaatgccgcagcacagccctttcctcacaactatgcagcctttgcaccaatgatgcaatgccactgcaaccaagatgcctacagatcttttgccaatatgtcatccaccttctccagcatgcttgtctccacattgttgtcaaaccctgcaatccatgcagctgccaggcttgcagcatcgtactggcctacagtagacggcaatactcctgatccaaatcaagaaaatctttctgagagtgctcaaggaagccacgctggctctcctcccaacatggcatctattgtcgcagctacagttgctgcagcatcagcatggtgggcaacacaaggtcttctccctctttttcctccacctatagcttttccatttgttccagctcctagtgctcccttttccacagcagatgttcagcgagctcaagagaaagatatagactgcccaatggataatgcacagaaggaattgcaagaaactcggaaacaagataattctgaagctatgaaggtcatagtgtcttcagagactgatgagagtggaaaaggagaagtgtcgctccacactgagttaaagatatctccagcagataaggccgacaccaaacctgccgcaggagctgaaacaagtgacgtttttggaaataagaaaaagcaggatcgctcttcatgtggttccaacacaccgtcaagtagtgatatagaagcagataatgctcctgagaatcaagaaaaggctaacgacaaggcaaagcaagcatcttgcagtaactcttcagccggtgacaataaccaccgtagatttaggagcagtgcaagcacaagtgattcatggaaggaagtttctgaagagggtcgtctggcttttgatgcactgttcagtagagaaaggcttccccaaagcttttctcctccgcaagtagaaggatcaaaggagattagcaaggaggaagaagatgaagtaaccacggtgacggttgacctcaacaagaatgccgctattattgatcaagaactcgacacagcggatgagccaagagcttcctttcctaatgaattgtcaaacctgaagctgaaatctcgcaggaccggtttcaaaccatacaagaggtgctcagtggaagcgaaggagaacagggtaccggctagcgatgaggttggtaccaagaggattcgtcttgagagcgaagcatcgacatgatttgctttccacctggttgctggcctctaccaagtcagaagttaaatttacatccgagctaccataggacttcagaccttccaatgcattacctcacaaactcaatttattgtgtgttgtatcttaatgcttgccaagcagctcctatagactgcttttaaaccgtatctcatagacttttgattagcatttaagcgactgctaaactttcttcataaaagggtattatccttattatgcattatagtctggggaaggtaataagtggaattttggttccaaaaacaaagaaaaaaaaaattaaaaatctttgtgacttgggaaaacccctgggtttacccaatttaaattcctttggagaaaataccccttttcccacggttgggtataatcaaaaagggcccacacgatcgcctttctcaacaatttgccaaccttaaagggtaaatggaaacccccttttatccggcgatataaacgccgttcggggtggtggggtatttctaaatatgatctcattcatttttcatacgccatatactcccagtctgtatcgtttattatcctctctttcgtcacaacatctttcggttttcttccttatatactaaaacttggggtccgcctgttggtcttgatct

SEQ ID NO: 21880 - DNA, 1799 bp, Oryza sativa
  Clone ID: TF_OsC144018_1
acatatgcatattatctcatataccaactagctatcaattaacaattggatccatatcactgaatgtaatatatatatgtgtagctagcacccaacaccaaaatctattattgatcataccctagaacgtaatcgccggcgccgcccgaaccgtagtcgcaagacgacgacgtccacgtcgagaacttctcgtcggcgccgatgatggcgctgccgtccgggcactgcagctccggcaacgacgaagggatgatcccgccttgcgctccgccgatcgactcgcacttgaagaggaagtcgtatagctcgtcgtggagaccgtagccggcgacgaacccaccaccacccgccattgacgacgacgaggtcatctctacaccggcgactcccggcatgtagttcgaaccggtcgccgccgcagggtcgaggtgctcggcggcttggaacgcctccgacgtggtggcggcggcggcggcggcggtggcgagggtatggccgccgacgaccaaatgatgggggtgttgcacggtggcgacgacggcgtccgtcggctgcacggccgggagcggtctgctcggcagcagcgcctcgagcttcggccactgcggcggcgcgacgccgacgccgccgccgttgctgctggtggtggtgcagccgaacgcgctgttgtagaggccttggaggcgcatgtggagctggatccgctcgagggccgacgagcttagggcttgatgcggcggcgccgccgccgccgcggtgccgacgccaccgcacatggcggcggcggcgctgcctgctagaccgcagtggtcttggtttgcgcgggcgcggcgcgacggcgcgcgcttgccgaggagcttcttcttcagcttggtgttccagtagttcttgatgtcgttgtccgttctccccggcagctgcgccgcgatgatcgaccacctgctaccgatgctaatgtagaggctacaaatgatgtgctcctcttcttctgtgaaatcaccatgcttaatgtttggccgcaggtagttgagccatctgagcctgcaactcttgccacatctcttcagcccgatcttctgcggcagcgcgatccagttgccgccggtgccgttctcctcgatgtaggccttgagcttggcgtcctcctccggcgaccacggccctttcttcacgctcgccttgtcgcagcacggcgccctccccatcactaactccttcgaattcttgatttcttgctgctcagctcgatcgtcgtcgccgtcgccgtcgtcgtctatctcagcagaagagagatctagaaccgatggatcgctagtgcctgacgacggcgacgatgtgtagctagctgctgcggctggtggtggtggtggtggtatggtgatggcgtgtttggcagcagcggtgagcgggtgcatctggggttgtggccgggctggctttatagtaggtttagtagatggatagaggtgtgtgtcctctgaaactgatcttttatcagtatacatccctgctgagctcccccgtatcccctcggttgccttgtcatcgtcaccaccatcccctaagctgaggagcaccgccgcgaccgccgccgttgacagccaccgccgccagccatggccgccgtcatttgcgtcgtcaccagccatggctgccgtcatttggaggcctatgtcaccatgcaacccctgccggattgggccggccgtgcgacctccagactggcggcgtggatttgaccggtcatcgtcgaggtcgtcgttgccgaggtcgtcatcgcgagccgccgccgccgccat

SEQ ID NO: 21881 - DNA, 640 bp, Oryza sativa
  Clone ID: TF_sicee_6517.z1.abd
cggcacgaggggctatctaagcaccggcattgcatacagccgcctaagcaaagagcacagcaagtatacgcgaatctgagtgtgtgagagagactagtagcacagacgaaggtatggcgttctacctcggcagcatgggtggctcgccatcgtcatggggggtggcggaggtgccggtgccgagcagcaggccgtggagcaaggcggaggacaaggtgttcgagagcgcgctcgtggcgttcccggagcacacgcacaatcggtgggcgctcgtcgcgtcgcggctcccggggcgctcggcgcacgaggtttgggaacactaccaggtgctcgtggacgatgtcgacctcatcgagcgtggcatggttgcgtccccgggctgctgggacgacgacaacaacagcgccggccacggccgtggcagtggtggggatgagcgtcgtcgcggcgtgccctggactgaggaggagcacaggctatttctggaagggctagagaaatatgggcgtggcgactggcgcaacatctcgcgctggtcggtgaagacgcggactccgacgcaagtggcgagccatgcgcagaagttcttcatccgacaggccaacgccagcagccgtggcgactccaagcgtaagagcat

SEQ ID NO: 21882 - DNA, 1014 bp, Oryza sativa
  Clone ID: TF_OsC1122_1
tctgcgaggaggccaagctagtcgcgcgcaaattaatcgccgatcgatcctacgatgaagcggaagcggccggcggcgctgcgcggcggggaggaggcggcggcggcggcgctgaagcgtgggccgtggacgcccgaggaggacgaggtgctggcgcggttcgtggcgcgggaggggtgcgaccggtggcgcacgctgccgcggcgcgcgggcctgctgcgctgcggcaagagctgccgcctccggtggatgaactacctccgccccgacatcaagcgctgccccatcgccgacgacgaggaggacctcatcctccgcctccaccgcctcctcggcaaccggtggtcgctgatcgccgggaggttgccggggcgcacggacaacgagatcaagaactactggaactcgcatctcagcaagaagctcatcgcgcagggcatcgacccgcggacgcacaagccgctgacggccgccgccgatcactccaacgccgccgctgccgtcgccgccacttcttacaagaaggcggtgccggccaagccgccgaggacggcatcctcgccggccgctggcattgagtgcagcgacgatcgtgcccgaccggccgacggtggcggtgacttcgcagcgatggtgagcgccgccgatgccgagggattcgaaggaggatttggcgatcagttctgtgccgaggatgcagttcatggtggcttcgacatgggttccgcttccgccatggtgggtgacgacgacttctcctcgtttcttgattctctgatcaacgacgagcagttaggcgatctcttcgtcgtcgagggcaacgatcacgagcatggcaatggtgagattggtcatggagacgtcatggaatccaaacagtaatctttcgggagattgatcagggaataagttgaccatgagaaaacatgtaagaacagcttgtctgctgagtcatgaccggtgatgtgtatgtgatggaagaaaacgtatgtacgacttaatgcttgcacctat

SEQ ID NO: 21883 - DNA, 735 bp, Oryza sativa
  unsure (1)..(735): unsure at all n locations
  Clone ID: TF_OsC6000_6
ctcgcgatctatacagaaaccgcagaaaccaacaccttttggctcctccactagtagcaactactcgttgtcgtcgtcgtcgtcgactcgtcgtggtagtagtagtcttcttcgcgtgacgccatgggaggaggaggaggagttgaggcggattgcgacaggatcagggggccgtggagccccgaggaggacgaggcgctgcggcggctggtggagcggcacggcgcgaggaactggacggcgatcgggcgggagatccccgggaggtcggggaagtcgtgccggctgcggtggtgcaaccagctctcgccgcaggtggagcggcggccgttcaccgccgaggaggacgccaccatcctccgcgcacacgcgcggctcgggaacaggtgggccgccatcgcgcgcctcctccagggccgcaccgacaacgccgtgaagaaccactggaacctgctccctcaagcgcaagctcgccgtcgccaccaccaccaccaccaccaccaccggcgccgccgccgcgccgggagtggtcgccgatgccgccgagctcgtcgagcggccgtgcaagcggttcatccccacgccggacagcccgtcggggtctggttccgggtcggaccgcagcgacctcatccacggcggggggttcgggcagattttccggccgntggcgatgaccggngcgttcgagcccgtngactgcgcgctcagccggcggnagggaggaggatccct

SEQ ID NO: 21884 - DNA, 1179 bp, Oryza sativa
  Clone ID: TF_OsC342590_1
atggggagatcaccgtgttgtgagcaggacgccgacgtgaagaaagggccatggacgccggaggaagacaagcttctggtggagtacatcggcaagaacggccatggcagctggcggcgcctcccgaagctcgccggactcaaccgctgcggcaagagctgccgcctccggtggaccaactacctccgccctgacatcaagcgcggcggcttctccgacgacgaggagcgcctcatcatccacctccacgccaccctcggcaacaaatggtcgtccatcgcgacgaagctcaaggggaggacggacaacgagatcaagaactactggaacacgcacctccgcaagaagcttctcagccaggggatagaccccgtcacgcaccgcccgcgcaccgacctcctcgccggcctccccaacctcctggccgccgccaatctcggcggcgccgcccaccagctgcccttggacttgaacgccatcaagctccaggccgacgccgccaagttccagattctgcagggcctcctccgcgtgctcgcctccaccaccgccccgccgcccaccgccgctgtgctacctggcacagacctcatgacgtccatcctcggcgccaccctcgccgccaactccgccggcatactcggacagcagcagcagctcgccggcgttgacctcagccgcctcggccagtacaacggcaactacgacaacctgccgccgttgaccaacgacagctgcacgcagcagacgcagccggccatgtcgagcatgtcccccgacagcctactcaacagaatttccagcggtatttccggggacatgctgggctcgccggagctttgccacggcggggacgggcttagctcgccggagctcggccagggcggcccgagcgcaagcaacatgacgacctcaccgatggcgccgccgccgccaatggtagctgcagatgatcatcagtgcaatactaacacccccagcggcggcggcgacggcatgtcgtgtgagcagacgccggcgtcgagcacgttcgacgggctgaacctggacgacatcgacatggaaggttgttgcccgatgacgcacattttgcgtgccgactgatatatacttatctcacatgatactaatttgatgcaggcaatgcccatcatggttgatcagcagcaacaacgcaag

SEQ ID NO: 21885 - DNA, 3415 bp, Oryza sativa
  Clone ID: TF_OsC251248_1
atggccattggaggtaagcaactggctgtgttcggcggcctgtgttctcaactcctatccttcgtgttccacgcgcatacgaggcgagacgaagacgaagaggaagagcaagagctagggttaggaggaggcgatttgctccgcccgcagatcgggggcgccacctcgtctcgcccccgatctcgcaccgcccgccgcctccacctctgccgcgccgaatctctcagttggagccgccgccgccgccgccgtgggccggtggtcggtgcgccgcaaatcgcgccgctgccgtggccgtcgggctcccacccgcagatccagcatccaggaatcgtgcggctggggacggcgctccgcgggaccagggcggccagggtcgccgtcgccagggcgattgtcatgatgacaagcgacaacggaaaggctccagagaaggatggagagccttctggacctccgtcggctcctcaagaaggagaaatcagcaatgaaccaaaaaggcgacgacctctcaatgggtaaaaggctaaaagctcttttgactatcgtaatgaggaccaccggtccgacacggcgttccaccaaaggaaattggacccctgaagaggatgccatattgtccagagctgttcagacatacaacgggaagaactggaaaaaaatagcggaatgctttccggatagaaccgatgtacaatgcttgcacaggtggcaaaaggttctaaaccctgaattagtcaaagggccatggtccaaagaagaagatgaaatcattgttcagatggtaaacaaacttggaccaaagaaatggtcaaccattgctcaagctttgcctggacgtataggaaagcaatgtcgagaacggtggtacaaccatcttaaccctggcataaacaaggaggcatggacacaagaagaggaaattaccctcatacatgctcatcgaatgtatggaaataaatgggccgagctgacaaaatttttaccaggaaggacggacaattcaattaaaaatcactggaacagttcagtaaagaagaaagtcaattcatacatgtcatcaggtttacttacccaagtttcgtgtctccctctaaatgaatattctgcaaattgtaattcctcaccagcgatgacccaacaaaacagtgaagatagtggttgttttgctgtccgagaggttgaaaattcatcagggtgtagtcaatcatcacttgccaaggtttcttgctcccaagtgcatgatactactgtgccattgggctgtgatttgcaagtaaacgcgaattttgacaagaatgaagcacatgattctcaatcttccatgggtccccaagcatgctatacttctgcggaggctgttgcatctgctttgcctgctgtgcattgccatgtttcttcctctaacttggatccagatcaacacttgcaagaggactttgctcaaggactgaatttggacatgactatagatgaaatgccaactgttcctagttttgcagacaaccagactgtttgtagtatagaaaatcatgaaagatctctggagccatatgatgtagcaatggaggtgcctctctctatgttatcaagtgattctggagctgagcaaaaactacatttcatgtctgaggctgacttcaacagtcctaactgtctgaaatctgaactctggcaggatatttccttacagggccttctttctggacctgatgcagttgaagctgattcaatttcaagatcaaatcaccaatcggatgtatattcctctgaagcagatacccattttttagcaccaccctacatgccacagacatcaaattcttcaagtgtgatggggcttgctgatgaccagagtccacagatgtcagtacctccatctcttatttgttcaaatgctatgactgatgatgcacctttcgataatagaccagggcggaaggaaatgccactttctcaggcagaagtggttacccaatcttccagttcttctggtgatgctgaaatgtttgctaaccctggttgtagcaatgacagacatgttccttcttcaacgatggaaagcatacctgaatgtggggaccaacaggttactaatgcggaagaacctgaagccagtctagagaaagaaccatcgcttacacagagtgtgactgcaccagatgaacaggacaagggagccctcttctacgaacctcctcgttttccaagcctggatgttccatttgtcagttgcgatcttgtaacctctggtgatctccaagagtttagtccccttggcattcggcagttaatgcattcaaccatgaatgtctgcacgccaatgagattgtggggctcccctactcatgatgaaagcacgggcgttttgctgaagagtgctgccaaaagcttcatatgcacgccatcaatactgaagaaacgtcacagagatctcttgtctcctattccagataaaagaatcgagaagaaatatgggactgaaaaggatcgtggggtatcagacacatcctccaccggcattcaaacaagttgtatcaatgccactaaagatgatgcacttataactacagttttgcgtattgagcgatctgcttcttctaaatctctggaaaagaaacttgttttctctgatgaaaacaaggaaaatttgggctacacaactgaacagacaaaagatggacagagtgctggaaatgacgaacacatggacgagcagacaacaggggaacgcagttctgcaacaaatgtagctactaatgatgacctgtcaggcaatttacaacctgcaggtattcttattgaacacagcggcgatgatcccatttccccagattatggcaaaaataccatgaatcagaagctgaacacaaatgtgaaatctttatcagtctgtaaggagggagtgtgtgctaaatcaaagcccactgaactcatcgtggagaaatcttcaccatgtataaatgtggattatgaatatgtgaacatattggctgataccccaggtatcaaaagaggactagaatctccttcagcatggaagtccccttggttcgtcgatatgcattttcagggttcatacttcaccagcccagctgatagttacgacgcactaggattgatgaagcagataaatgtgcagactgctgctgctttggtggaagcccgtgaggtactggcaagcggcggccaatgtgacaacataagctctgataaggaaaacacggggaatccagatgccaagaaggaaccagggacaaccaaattgcaaacaaaaatcatggcagagggtagagtcctggatttcgagtgtaccacacctgaaagatcatcagacaaaaatgctggcagcaatctgggaagatatctgagctcacctattccttcgtcccatcttctgaaaagttttagatag

SEQ ID NO: 21886 - DNA, 892 bp, Oryza sativa
  Clone ID: TF_OsC134_42
ctaaatagccggggcccacatgtcggtgacttggcggctagggaagcagaggcaataggagggcaacggcgactgatggcgttcgcggctgcgtattggcttgatcatatttgggcgtctttttcctgggacgtaggcgacgtcgttggcgcaatggctcggccggagatggttcgagtcgacgggaatgacgaagtggggcgatggcggcgctatggacaccgggaacgccgacgagcatatcaccaactgttcgatcagcgccgaggcactaccgcactgctgcccatggccaggcacgggtccagtcgcctctgaccggcaccacagcgcctccgctgctcgcagggacgccgccgctacccgcccggctacctccgttgccaccgccaacacgcgagtctcctcctccctgatcgagatcgagtcgacacacatacaccaccaaccaccggccggccgccgcgcaccggcgagcaggatggggaggccgccgtgctgcgacaaggttgggtaaagaaggggccatggacgccggaggaggacctgatgctggcctcctacatccaggagcacggcgccggcaactggcgtgccgtgccgaccaacaccggggtgatgcgttgcagcaagagctgcccgctccggtggacgaactacctccagccggggatcaagcgggggaacttcactgagcaggaggagaagctcatcgtccacctccaggctctcctcggcaaccgttctctaccataatagtggtccacaacatagccgtgctttctgaatactttcaatggataatcaacgaagctctacactacaaatttctgcaataacatgagggatcatatggaggtgatttcaccaatgaaagatggaacatttattg

SEQ ID NO: 21887 - DNA, 1402 bp, Oryza sativa
  Clone ID: TF_OsC806_1
ttgcggcccaattaaagcctaaagcctttccatagtattaacccaaatcgagcaaattttttctcatcttggtagctttgattcttcgtcttctttgcggcgatcgattgatcttgaggagcttaatatatcgattgagatagcaaatggggaggcagccgtgctgcgacaaggttgggctgaagaagggtccatggacggcggaggaggaccagaagctcgtcagcttcctcctcggcaacggccaatgctgctggcgtgccgtccccaagctcgccgggttgctccggtgtgggaagagctgccggctccggtggacgaactacctccggccggacctgaagcgtggtctcctgtcggagacggaggagaagacggtgatcgacctgcacgagcagctcggcaacaggtggtccaagatcgcgtcgcacctgccgggcaggacggacaacgagatcaagaaccactggaacacgcacatcaagaagaagctccggaagatggggatcgaccccgtcacacacaagcccctctaccctgctccgccgctggccgacggcggctcgccggagcagaaggtgccggaggaggaggaggaggtggaggagaagtcgtctgctgccgtggaaagctcgacgagcacctgcgccggccacgacgtgttctgcaccgacgaggtgcccatgctgcacctggacgacatcgtcctcccgccgccgtgcgacgtcgtcggcgacaccgccggctcgccggcagagtcgtcgtccacgtcgacgtcgtcgagcggcggcggcggcatcgacgaggagtggctgctgccgatcatggagtggccggagtcgatgtacctgatggggctcgacgacgtcgacatggtcaccacggcggcgccggcgatggcgacgtcgtgggagttcgaggatccgttcaacgcgtaccagaggatcgcgttgtttgatcaccaccacgagctgacgtgggcttgacgtaaccacttctgaattttctcttgtttcatactccctcggtctcataatataagagatttattgtaccgggatctattatattatgagatggagggagtacaaatttcatctcggcgctagctgcacttagtgatttattaccattggattattagtgccctaattaaacaattagagataggattaagaacatatataagatgataaaaaaaaaggtgaagtggttgtgtgagagagagagagacaaatgcatgagctagccctctttaatttcgtctttctgtcatttttttttctgctcatcattttttttcaggcttcttttagatacatgtgtttggcatacatacatgtaaatgaaaggaatttgaataatgaaaatgagagtgaatggtgtcaaaaaaaaaaaaaaa

SEQ ID NO: 21888 - DNA, 1429 bp, Oryza sativa
  Clone ID: TF_OsC146515_1
caagaagacagatagagaaggagaaaacccaccgcgcgcggcggcggcggcggcgagggtcgacgaggcgacgcattttggtgatctcgtggtgtcacggtgcgtgtgcgatgacgaggcggtgctcgcactgcagcaacaacggccacaacgcgcggacctgccccgcccgcggcggcggtggaggcggaggcggggtgaggctgttcggcgtgcggctcacgtcgccgccggaggtggcgatgaagaagagcgcgagcatgagctgcatcgcgtcgtcgctcgggagtggcggtgggtcagggggttcgtcgccggcgggaacgggaaggggaggaggaggagggggagagggcgcggccgggtacgcgtccgacgaccccacgcacgcctcctgctcgacgaatggccgcggcgagcggaagaaaggtacaccttggactgaagaagagcatagaatgtttctaatgggtctgcagaagcttggtaaaggagactggcgtgggatctctcgtaattttgttgtttccaggacaccaactcaggtggctagccatgctcaaaagtacttcattagacagacaaactcatcaagaaggaagaggaggtcaagcttgtttgacatggtcccagaaatgcccatggacgaatccccagtggtcgtagaacagcttatgctccatagtactcaagacgaagccacaagctcaaatcaattgccaatatcacatcttgtgaaacagaaggaacctgagtttgctagacacctgtcggatttgcagctaaggaagcatgaggaatctgagttcacagaaccttcactagcagcactagacttggagatgaaccatgctgcacctttcaagactaaatttgttctgacaatgccaacattctacccggcattaatacctgttccactaactctttggcctccaaatgttgctaatgtgggtgaatcaggcacaaatcatgaaatcctaaagcccactccagtgaatggaaaggaggtgatcaataaggctgatgaggttgttggcatgtccaagcttaccataggtgacggcagctctaactccatagaaccctctgctctttcccttcagcttactggaccgacaaatacaagacaatcagcttttcatgtgaacccaccaatggctggacctgacctaaataagagaaacaacagcccaattcatgcagtttgagaaagcatggaaaaggcctgctgggtcaaatcttatagattatatattacttccccaataccatagaatgttgcataaggtcctgagcatgtacttttgtagcagcttctgagttgtatcaccatattatgttctttgatatcgataatgaaaaatgttgtatgcatatacctttgataatacatcctccatcctttggagaaaatggttttcagttt

SEQ ID NO: 21889 - DNA, 824 bp, Oryza sativa
  Clone ID: TF_OsC43020_3
ggaccagataggttattggatgcactatcctttgcttcatcaaaacaatggccctgggagcacatttggtgcctcaatttccatccatatctgatccatgggataaccatccatgtcaacaggggtgcttttcatgatgcttgtgatgcagccactgccgccatgaagttcctgctcctcaattccaatgatcattgacggggtctctgggtggcaagattggtatgtcagtgaagacgaggatgatgagggtgacatgttactcttcctctcctgtgctttcttcctcatatgtgtcctccagtagttcttgatctcattgtcagtacgtcctggcagacgccttgctatcctggaccacctgtttccccgccgagcatggagctcaaggataagatgttcctcatgcggagacatgcgcccatgcttgaggccagggtggaggtagttgacccaccggaggcggcagctcttgcctgtcctattgagccctaatttgcaggtccccacccctcaaacctgatactttggcaacgaaatcccaacggcggtcaccgaacaggcggacagtgcataccagttgcaggtcctcctgctctgtccatggtcccttgcgcatctcctctctcactgtcaccatattggggcttgggatgttgcaatgctaacgttgttcacttctaccttggataggatgggagccactctccgtgttcttcttcctctttgagtttgttggctccagcttcacgtttagagccttgatcaactccagaccaactggaaggttgctattagggagagaggaagcccggacgagtggg

SEQ ID NO: 21890 - DNA, 765 bp, Oryza sativa
  unsure (1)..(765): unsure at all n locations
  Clone ID: TF_LIB4309-001-Q1-K1-A10
ctctctccaaattccccaatccaaatccgccctcgcctcgccccgatcgatcccctcgattcgattcgatcccgcccgatgcgagtggaggcggcggcggcggcggcggaggccgtggcggcgtgcgcgcgagcttagggtttctagggtttgcgctagggtttgggggcgcgcccgcgatgggccggtctcgcggggtgcccaattccggcgacgatgaaacgaaccacaggtcgaagcggaggagggtcgcgtcgagcggcgatgcgccggactcgctctcggcggcctgcgggggagccggagagggtggtgggaagaaggcgctgtaccactgcaactactgcaataaggatatttccgggaagatccggatcaagtgctccaagtgccccgacttcgacctctgcgtcgagtgcttctcggtcggcgccgaggtcaccccgcaccgcagcaaccatccttacagggtcatggacaacctgtctttccctcttatttgtccagattggaatgcagacgaggaaatccttcttctagagggaattgaaatgtatggtctgggaaattgggctgaagttgcggagcatgttggcaccaagaccaaggcacaatgcattgatcattatacaactgcatacatgaactcaccttgttatccncttccggatatgtctcatgttaacggtaagaacaggaaagaattgcttgctatggctaaagtacaaggcgagaagtaaaaaggaacttcagtgttaccagggg

SEQ ID NO: 21891 - DNA, 2439 bp, Oryza sativa
  Clone ID: TF_OsC2142_1
ttttttttttttggatcgcaacaaactatgttaacatacagtgtgtaacatcgaataaacacaaaggaaacctcttaggcagtgaaatacaacaattaaatagcgtctggtatcggaacgatgtcacatatgaaaaaggtggcaatgtttacatacatcatttcaggcactatactgtcaaggcccttttagtggctctgcaacacgttacacgttacacttcgaacgagggcaaaccatcctcttaaaatggagagtaatggtatggtaaactcatgctacacattccaatcggggcgataattttacaatttggctgaaatgccttattgtgcttcttcagacacctcacacaaatttcaactacagccaatttaattcaagtatagcctccattttagctgtctcagtagtcatgctgcaaatcagaaaccacgcgctgattgaggaactcaaaaacatggctaaacagtcggggcctcctcattggtacccaactttttcgtcaccatatcataaacgttatctactttggcagggtcaaccttaaataatacatgggcatcttccttcttggcgacactacccttgaatatttcctgcatcaaaacctcctgcattttcaggtaatggttgggtagcaatctgttctgacagcatagatttttttcactggtgcttaatagctctgccccaggaaaaccaacaatatcccagtcatcccaatgtttagtgcctgcatgccctgtggtttttggagaatccctgccagtagaatccaagctggcaccacctttcttctgatccaaattaccatctgactcgattttcataggtcgattcgtcttatgcaccactttagtgttggataagagctgaccactttccttagctttttgggcattcacctcatgttcctttttcctcttttgctctatgtgaatctttgcttcagccaatgtacggcatccagcagaacgacattcctgaagctcttgaatcctccttcgaattttccgttcctcaagaacactcctaacaagtgcttcatgttcctccttagaaaggaaacgcatgaacaccttatagcgatggtaaacttccttgtcttcatttgtgagatccttctccaaaggattaggaaatagtaagtttctttccagtatgaactcttttctcctttttctttcatcaagccttgacaagtaaatacgcaatacccttagcttcagttcacgatcagtttccgaatcagtttctttaaactccatctcagcgagtgcctgttcagcatcgttatcatactctgggtcaaattcatgtctctttgaattgtatccactcagttcagtcaaagaaggcccttcatctgcagaatatcggggttttttcacacctatacttctatccacatgaccatcttcaacttttgctacattagcaccatctttgaattgtccaacatttgatgctttcttatttgcacccccagctatgtgtgaaggtgatcgaccagctaaaccttctccaagtgcatcttccaccttgacccttgggggagaaaatggagactcgtccttaggggtcaaatcccctggtaacactgaagttccggctcttgaaagggtgaaagggagctcgacctcgccggttctcgcaagggtgacggggagggggagatcgagctcaccgctgatgccgatcttatgagttcatgtatgcagttgtataatgatcgatgcattgtgccttggtcttggtgccaacatgctccgcaacttcagcccaatttcccagaccatacatttcaattccctctagaagaaggatttcctcgtctgcattccaatctggacaaataagagggaaagacaggttgtccatgaccctgtaaggatggttgctgcggtgcggggtgacctcggcgccgaccgagaagcactcgacgcagaggtcgaagtcggggcacttggagcacttgatccggatcttcccggaaatatccttattgcagtagttgcagtggtacagcgccttcttcccaccaccctctccggctcccccgcaggccgccgagagcgagtccggcgcatcgccgctcgacgcgaccctcctccgcttcgacctgtggttcgtatcatcgtcgccggaattgggcaccccgcgagaccggcccatcgcgggcgcgcccccaaaccctagcgcaaaccctagaaaccctaagctcgcgcgcacgccgccacggcctccgccgccgccgccgccgcctccactcgcatcgggcgggatcgaatcgaatcgaggggatcgatcggggcgaggcgagggcggatttggattggggaatttggagagagatctgcggctgctgggcacgcgtgttggaattggggccggggtgtcgcggacgagacgaccatcgcagatcgcgacacggag

SEQ ID NO: 21892 - DNA, 1433 bp, Oryza sativa
  Clone ID: TF_OsC90588_1
tttttttttttttttgggaaaaaccaatccattcatcaacactgatatatatatgggagagagagagagagagagagagagagagagagagagagagagagagagagagagagagagagagagatcaatatatgttttggtccaatgagacagtaggcaaatttacatcagcaaaatggaaatcaatccctaattgcaacccctgcaagatcatcgatcggcgccaccacgtacggaaggccgctgctaattacatccacatttggagctaagctttcaccgggtgtacgtgatgatcacttgcaaacagtcagcaaaatactttacttattcgcctttaatccccaatccctgcactcttggcatctgatctatgtatgtttacattagtgagattgtgagaagaacaagatgatcagggacgatgagccggcgactacacaaagaacaaatcaagattcacatcaagaaaggaggaggaagaaatgctgctcatgtccgtccatggcgcgtcattggtgcatcttggccggtggcgccgggtagccgacgggcacgacgtacggcgcgtggcccggcgggaacaccaccggcgtgccgacggcggcgggcaccatgtggccggcgacggggtggcccatgggcgcggcgctgtacatgggcatgggcggcggcgcgccgcccgggtggtggtggtggtggtgcttcatgcccggcgggcccagcgccgccgccgcggggttgcccgtggcctggtggccggtgatcggggcgccctgctgcgcggcgacctgatcgccggcggtgacgctggtgatgtcgtggatgctggagcggcggcggtcgcggttcatggagttgaggcggatgaagtacttctgcgcgtggctcgccacctgcgttggcgtccgcgagatgacgaagttgcgcgagatgctccgccagtcccccttgccgaacttgtccagccccagcaagaacagcctgtgctcttcctccgtccatgggatgcccttgcgcctctcctgctccgccttggagcagctcttgccgccgtcgtacccgccgccgccgcccttgcgctcgtcgcgccggtgtccgccgtccttggacgcggcggcggcggctccggctccgtcgggcggcgccgcggactcctccccggcgtagcgcgggagcgggacgcggcccgcgtcgatggccgcgacgtcctccaccagcgcctcgtagtgcctccgcacctcctccgccgacctcgccccgggcacgctcgcggcgagcgcggcgaaccagtcgtcgtcgggcgcgcctccgtccgcgggcggcggcgccgcgcacgccgcgagcgcgttctcgaacgccttgtcgtcctccctggtccacgccgccgccgccgccgccgtggtcgtcgtcgtcgccgcctgggaggtcat

SEQ ID NO: 21893 - DNA, 894 bp, Oryza sativa; identical to SEQ ID NO: 12419
  Clone ID: TF_OsC387490_1

SEQ ID NO: 21894 - DNA, 1216 bp, Oryza sativa
  Clone ID: TF_OsC804_1
ccccaagaaccccccgtgcgccaccaccaccaccaccaccaccaccaccaccaccgaggaattctcgctgtcgccgccgccgacgacgacgaggagaaggagtatcgctcacaatcttccgggccgatggggagggcgccgtgctgcgagaaggaggggctgaggagaggggcgtggagccccgaggaggacgaccgcctcgtcgcctacatccgccgccacggccaccccaactggcgcgcgctccccaagcaagccgggcttctccgctgcgggaagagctgcaggctgcggtggatcaactacctccggccggacatcaagcgggggaacttcaccgccgacgaggaggacctcatcgtccgcctccacaactccctcggcaacaggtggtcagccatcgccgcccagatgccgggtcgcactgacaacgagatcaagaacgtgtggcacactcacctcaagaagaggctggacgacgaacggaagctcgccgccgccggcggtggcggtggccgccggccgcatacgcgcaagcagcccaaggcggcaaagagcgccgccgccgtcaagcgcgaggcgacgccgtccgtcagcgtcgacaccagtagcggcgtgacgtgctccacggtgaccgagtcgtcgccgtcgtcggccgacggcgaccaccggcggcagcagcagcaaacgcagcatgccgctgtcaaggaggagagcttcagctcgggcggcgagctgccggcggcggcggcggcgcccacggcagcggccgacatggacgagagcttctggtcgtcgacggaggtgaccgggatgatggccggcctcggcgacatggacgaggagctggccatcgccggcacgtcgtcggcggcggcggcgaggagcgacgacatggagttctggctcaagatgctcctcgagtccggcgacatgagggatttggccgtcttgtaatctatttaatttaatcatggcagaattaagcttgattaaattaattaactaccgggaagaattgatagtatctcttctctgttgtttttttttaccttcttttttcatctttaaaaaaaaaaaaaaacagtgagaaaacgatgggaaattcaggtgatattttcacctttgttagaaaaaggaatactgtggtagtagcaaaaatttctttggttcgttaaaaaaaaaaaaaaaaaactcgagactagttctctctctc

SEQ ID NO: 21895 - DNA, 451 bp, Oryza sativa
  Clone ID: TF_LIB3433-019-P1-K1-H3
cccacgcgtccgaaaaattcagtactagtagtacatatatatagtcatataacaaatcaaaataatctgtatatgaacatgacaggagttccgtggagcgaggaggagcaccggctgttcctcgtcgggctcgagaagctgggcaagggcgactggcgaggcatctcccggagctacgtcacgacgaggaccccgacccaggtcgccagccacgcccagaagttcttcctcaggcagagcagcatcggcaagaagaagcgccgctccagcctcttcgacatggtacaatcccaattccttggcctccttaaattaatccgagttcttgaattttttggctaacagccagttcgattctaatatatatttacatgcaacaggtgccgatttgcgagaacggtgcgcgcgtctcggagcatctgagcggcgaatgcgcggcggcggcggctgc

SEQ ID NO: 21896 - DNA, 1564 bp, Oryza sativa
  Clone ID: TF_OsC96816_1
gcacgagggagcagtagtagtagtacaacgccacccaccacacagtgtccgtgtgctgcgggtgtggacgcactggcctccacccatctctctcaccgcctctgcagcagcaaaaggcgagcgcgtggccccgtgccgcagccggcacccgccaccaccccgatttatagccagccacgccatccatggcgaggaagtgctcctactgtggcaactacggccacaactcaagaacctgcagcagcagcgccagcgctggacacagggataccaccatgctctgcgacggcggcgacggaggtggcggcagtgggctgaggctgttcggagtgcaggtccatgtcgctgccggcggcggcggtggaggtggaggtggaggtttgccgatgaagaagagctacagcatggactgcctgcagctggcggcggcgggggcggctccgggctcgctcgtgtcgccgtcgtcgtcgtcctcgtcgtcgatgctcctgtcgatcgacgaggggggcttggagagggcgtccaatgggtacctgtctgatggcccccatggcagaattgtccaggagaggaagaaaggagttccgtggagcgaggaggagcaccggctgttcctcgtcgggctcgagaagctgggcaagggcgactggcgaggcatctcccggagctacgtcacgacgaggaccccgacccaggtcgccagccacgcccagaagttcttcctcaggcagagcagcatcggcaagaagaagcgccgctccagcctcttcgacatggtgccgatttgcgagaacggtgcgcgcgtctcggagcagctgagcggcgaaggcgcggcggcggcggcggcggcgtcgacctcactgtcgctgatgaacacgcacgagacctcctcggacagagtggcggcaattgatctgaattccaccgaggaagatgacacggtgggcgcgtcagggaggccgtttttcccggtggttctgatggagcagcagcagcaggcttcccatggacatggtcaccaccaccactgcacgccgctcgacctggagctcggcatgtccgtctcgtcgacgccgtccatcggcacatgacccggccatgccatgcacaccgtcgtcgttaggagatgctccagtttcgtcggtgcaaggtctgcaggatatagtacacgctgtaaaactgtggctgatatatctgcagtctgatctgtctgccaagtggagtaaagggctggagtattttggcaaatgtttgtagtaattgtaaagctggtgcaagtggagagatcaacgagtagtaccaactgtggatacagtaatgtccgtactactttttaattaattaggttgtgtaatcagagacaccgattctctactgctcatgtcatgtgcgccttgtgttcaaaaaatattgcttaagttttgggaagattgcaactctgccattgctgatgtgtggaattggcaacctgacagtccaaatgcaagaaaggttttttttttctgaaaccagaatgaactaaatatgaaaatgatgcacttaatgcgatttccccattaattct

SEQ ID NO: 21897 - DNA, 1184 bp, Oryza sativa
  unsure (1)..(1184): unsure at all n locations
  Clone ID: TF_OsC165761_1
atggagttcatcgacgacgactgggactaccagccacgcgcgcgagtcatccactcccgcagcaacgctaactccaacggtgccaccaccgcctcgtcgtcccaaccgacccgctccctcccccacaccgccgcctgcgccgccgcggccgtggcgctcctcgccgcggcgtactacctcctcccggactaccagagctcgagctcgaacccgacgcctccgcccccgaagccctcagatccgatcgcgcctccgccgccgcgacacgcggcggctgcggctgcggctgcggcgacggccgtgtcggatggcggcgaggcggtggaggacgccggcgagtggaccgaccaagagatggacatcctccgccgccagatggtgaagcacccggcgggtgagccgcagcggtgggagaagattgccgcggcgttcggcggccgccgcacgccggagagcgtaatccgcgcggcgaagtccggcggcggcgctgctgccgcgggggcctcgttcgaccagttcctccgcaagcgcaagccgctcgacccgaggtccgaggcgaccgacgcaggaagtggcaatgccggaggaggaggaggggagagtggtgatgggtcttggagcgccggcgatgaccgggcattgctcaacgcgctcaaggagttccccaaggacacggcgatgaggtgggagaaggtggcggtggcggtgcccgggaagacgaaggcagcttgcatgaagagggtcaccgagctcaagcgcgatttccggagcagcaaggcagcatcggaggcagctccatagctgcaaatgctacctagttgcctgcaattcttctttgagagtaaggttttagacagagatttaccatgatgaaacgagaaacgaaaagccatttgctccggggtgatgccaaatgaaggagacaactgaattatagaacagatggtgtacttttattgttttgagaaaggtcaggaaaaaaatccttgattcttgaagatactgggacacacgaaaacaaacagattgccagattgtaaaagaaattgtagccccttgtttggttgtagtgtcactcaagcctccatccaacatgtgttaacattacgtgactgtttctgctcatcttttgatanggctaatacgatacacactgttctcttccaaaaaaaaaaaaaaaaaaa

SEQ ID NO: 21898 - DNA, 2216 bp, Oryza sativa
  unsure (1)..(2216): unsure at all n locations
  Clone ID: TF_OsC44378_1
cggacgcgtgggcaagtatatcctctcttcttcttcttcctcctcacaactcacaatatttcagagtagtatacctttcttgctagctagctagcttgttcatcgatcttgttttgaggtgttgagatagctaggatggtggtgaagaaggcggcgacgatggcggaggcggaagcggaggaggagatgatgatgaggatgatgtgtggttcaggaggcaacgagatgatgaagacgaagatgaagaagaagaatagagaaggggaagaagaagaagaagtaagtggaggaggtaggatgaggaaggggccatggacggagcaggaggacgtccaactggtatggttcgtgcgcttgttcggggaacgtcggtgggatttcttagcaaaggtctcaggtttgcgcggtggcgggtgacctatctacgggaattctgcaccgactactcgctgtggaggatcgacgacgaggagtactacaagaagatgctcgatgcctcgcaatagtactactcaaattgcaaacaagcaacgccttaattcaattgctgctcttagcttaattagctgacgatcgatcgacgacgactctcatcatctgatgaacgaactgcgaaatctatatttgcactgcatatccttgcatctgtctactgtaattacacctgatgatgcacgtattatgcattgcttgtcagacaactctgctttatatatatctagctatagcttgatcaatcagcatgcctagcttgtgtacatgtaggggagagagtattagtagttaagactgatgggatcaagtgctatatgtatattgctttaatttcatggtatatgtactatgattgtactatgtgtcatatattcagtgtaagcagtggtttgcaattatttttttctttttttgaatgatctttttctttttcttttttctctctctcttatcatgcaacacccacacatgcatatatccatccatccatctatccccttatcacatttaatttcttcttcatatataccaatttggcaacagctaatgattctttttttatttgaaactctgaatgaattgatttagatgcatgcatcaatacaaataattgatttctttttatctggagctctgaaattgatttagatatgcatattgataaaacaaaatttgatattcatctgaaactctgaattggttaagatgcctacacataaatgttccattttcagttgtggggatcgatgtgatggcttttacatatatgcatgcgtaaattaacatgcggtgttgcatgatcgaagttaattaatctagaggcggtcgatgatcgatggatgatacagtacttaactaggagatggaggcatgcatgcatgagcttagaacgcacgggaaactgaggtgttaaccatctgcttcttcttcttcttcttcttcctcctcctctggatggctgtctccctggcacatgttggccttggtggtttcacctttcaggtttgaagcgcacaggcaagagctgccgtctccggtgggtgaactacctccaccccggcctccagcgcggccgcatcaccgccgacgaggagcgcctcatcctccacctccactcccagtggggcagccgctggtcccgcatcgcccgcagcctccccggccgcaccgacaacgagatcaagaacttctggcgaacccacatgcgcaagatcgcccaccacgccaagaagaagaccaattcaccatcgccggcgccgacgacctccttcggttccttgtccttctcgctcaccacggcgacgacgacgatggcgacggctgcggcgctgcaagaagcagcagctgcggcggcgacgacgaggccgtcgaccagctggtgggggggggcaccacgccggcgagccagctgctgacgatggactacaccatggaacacactctggaacgacatccgcgggggcggaagccgatacaagctgctacgacgcgggggggaagggctngccgccttcgcggtcttggaattctgcaccactactccctggggggatccccgcngagagtctccagaagatgctcgatgctcccaaagtccttcccaatggaacaagcacgcttaattaatggcggttttgctaattgcggagacgtcgacgaacctttaatttgttaaaaacgggaattttttgcctcggtctctgatgctctgattcaccgaa

SEQ ID NO: 21899 - DNA, 3461 bp, Oryza sativa
  Clone ID: TF_OsC11497_1
tttgtttcgtcttcttccccggcctttcttcctctctggctctccgctcgtgttcctctcgcgcggcggagatcgagggggcacaaccgcacaaattccattcgtttcgatccgtacgtttcggccttcccaaaatccccacttccatcatcacagcggtgctgcgggggggggggatgaggatcatgataaagggcggggtgtggaagaacacggaggacgagatcctcaaggccgccgtgatgaagtacggcaagaaccagtgggcgcgcatctcgtccctcctcgtccgcaagtccgccaagcagtgcaaggcccgctggtacgagtggctcgacccctccatcaagaagttatgttctcctcatgccatattgctgcaagcatacactgcttttgaagggctgatgactgaatggacaagggaagaggatgagaagttactgcatcttgctaaactcatgcctacgcagtggaggacaattgcccctggtgttggccggacaccgtctaggtaccttgagcgttatgaggaactccttcatggtgcctgtgaaaaggatgggaattatgagcctaatcatgaacgaaggaaagggcggcctggtgagattcacccgaaacccgagccaaaacctgaacatcatgatgctgttgacatgtctaatgctgatgatgatgaacttcgtagggcagattctcccagagccaagtccacaaggtaacgaccaagtggtgatgctcgaaaggaactctatttcgcaggacggtgacactgctaactgcaaaaatggatctaattaaatgatggtggtattgatacacggaagtgagagagacatagaaagggtatcgattacaatgctgatgttcgttttgataaaagtccgccaccaggtttttattatactgttggtgaggactcaacacatgagcatgcacagttcccaaccattatagaggagttttaagattagagaagagaagacatcgaagcacaattaagaaagcaagactttctcaggagcaaaattatacagaggcaggtggctctcgctgcatttgcacaggcaattaaactcaaggttccttaatcggtcacgaaaaggtccaagttaaagcttcttccaccctgaaactcttatcatttgctagtagggactgcaaacatgggtaatggcggcgatacatctttagttgaggaacttggcgaaggtagtactgccacaagagcattgctttctagttattcccaaactccaagacttgcaatgacgtgggtgcggacgccacaacgaactccagctgggaagggtgatgctattatgatggaggcagaaaatctagcgcgtctaagggagtctcagacccctcttttaggaggggataacccggagcttcacccatcagatttctctggtgttacaccacgtaagaaggaaatgcagactccaaatccaatggcaacacctttggcaagccctggccctggtgctactccaagaattggaatgacaccctccagagatggaagttcttttggtttaactccaaaaagtactcctttccgagatgagcttcgcataaatgaagaggtggatatgcaagatactgctaaacttgagcttcgtaggcaagctgaattgagaaaaagcctacgatctgggtttgcttctattccacagcctaagaatgagtaccagatagttatgccacctatcacggaggaggagaaggaagaagctgaagagaaaattgaggatatgtcagacaggcttgcacgagagagggctgaggaacaagcaaggcaggaagccttgctcagaaagagatccaaagttttgcagaggagcttgccaaggccaccggcagcttctatagaaattctccgacaaactctaattaagggtggtgaaagcagaagcaggagcaccttcgtgcctcctacatcacttgaacaagctgacgaactaataaatgaggagcttcttcggctccttgagcatgataatgctaaatatcctctagatgagaaaactcaaaaggataaaaagaaaggaagcaagcgccaggcgaatgggactccttctgtacctgagattgaagattttgatgaagacgaattaaaagaggccaattctatgcttgaggaggaggttcaataccttcgtgtcgccatgggacatgaaagtgaatctttggaagattttgtgaaagcacatgatgcatgccaagaggaccttatgttttttccaaataacaacagctatggtcttgccagcgttgctggaaattctgataagatagctgctttgcaatatgagtttgaaattgtgaagaagagaatggatgatgaagctaagaaggcttcgcggcttgagcagaaaatcaagcttctgacaccaaggataccaggtaggcttgggatgatgcaccataagcattgcaacatgtaccgagctggtaaactctggtcacaggttcaagatacattcaagcagatggacacttcagcaacagagcttgaatgctttcaagagctgcagaagcaggaacagatggctgcatcttatcgtataagaaatttgactgaagaagtaaacaaacagaaagcattagaacggactctccaaagccgctatggtgatctgttaactagttacaagaggatccaagagcagcttgaggagcataagaggcaactgatgatacaggaggaaatggaagcacagaagcgtgctcaggaggaggaggaaatggaagcacagaagcgtacgcaggcagaggaagaaaaagaagcggcgaaagctgaagaggaagcaagaaagatggatagggctgctgatgaagaagcggcaggaagcaaacaagtcaatgaggatcagatggatgttgacaactctaatgctgatggtgatgaattcgtaggtccgattcccccaggaccaggtactcaaggtgacgacaatgtggtggcggtcgaagagaactctagctcgcagagcggtgatactgctaccacggaagatggatcttgtggcatgatcgacgcatcaaaatcaggaggtcaggatcacatcgacagcaaggatgaacttcccactgttggtgccagtctagatgatggaagtgctgctgcatcttctgatcaagatgtctcaactgaggtgaatgccactgtccctgaatagaatgtcatttcttgtacttcatcttcgagggcggcacagagaaagctaagagggacggataccttgagagaaaaaaaagaagaggcaaattgaatgtccaaagctgtgcactgaatttttattcgctgcttgattgttagtgaacgacaaaatgcgggactaagcttgttgtacaatgttaattttgtcaattcccattgaggactctcagctcttagaattgctacgaaagaatgttagttcgatgtactatctgagaaattgaacttg

SEQ ID NO: 21900 - DNA, 909 bp, Oryza sativa
  unsure (1)..(909): unsure at all n locations
  Clone ID: TF_OsC44378_2
atggcggaggcggaagcggaggaggagatgatgatgaggatgatgtgtggttcaggaggcaacgagatgatgaagacgaagatgaagaagaagaatagagaaggggaagaagaagaagaagtaagtggaggaggtaggatgaggaaggggccatggacggagcaggaggacgtccaactggtatggttcgtgcgcttgttcggggaacgtcgttgggatttcttagcaaaggtctcaggtttgaagcgcacaggcaagagctgccgtctccggtgggtgaactacctccaccccggcctcaagcgcggccgcatcaccgccgacgaggagcgcctcatcctccacctccactcccagtggggcagccgctggtcccgcatcgcccgcagcctccccggccgcaccgacaacgagatcaagaacttctggcgaacccacatgcgcaagatcgcccaccacgccaagaagaagaccaattcaccatcgccggcgccgacgacctcctccggttccttgtcctcctcgctcaccacggcgacgacgacgatggcgacggctgcggcgctgcaagaaagcagcagctgcggcggcgacgacgaggccgtcgaccagctggtggcggcggccaccacgccggcgagccagctgctgacgatggactacaccatggaccagctctggaacgacatcgcggcggcggaagccgatacgagctgctacgacgcggcggcgatggcctcgccgccgtcgccggtctgggaattctgcaccgactactcgctgtggaggatcgacgacgaggagtactacaagaagatgctcgatgcctcgcaatagtactactcanattgcaaacaagcaacgccttgattcagttgctgctcttagcttaaataggtgacgatcgat

SEQ ID NO: 21901 - DNA, 1187 bp, Oryza sativa
  Clone ID: TF_OsC2083_1
agaattcagaactgccatttgctaccttacataccatacctagctgaattgctgtcagttaatctcttgatcagatcgatcaccctgcagcttcttgttgtttctagcatttctggtgaagaaaccaaatcttcagcagcttaaggtaggagatcatcaatggggaggcagccgtgctgcgacaaggtggggctgaagaaggggccatggacggcggaggaggaccagaagctcatcaccttcctcctcaccaacggccagtgctgctggcgcgccgtccccaagctcgccgggcttctccggtgcgggaagagctgcaggctacggtggacgaactacctccggccggatctcaagagggggctgctctccgacgccgaggagaagatcgtcgtcgacctacatgcccaattgggcaataggtggtctaagattgcgtctcatttgcctgggaggacggacaacgagatcaagaaccactggaacactcacatcaagaagaagctcaagaaaatggggatcgatcccctcacccacaggcccctccagccgccgccgtcgccgtcgccagagaagaagcacgcagagagaaagaacacggcggcggcggcggcggtggccgagcagcatcagcacgacgaactctgggaggaggagtccccgggattctgcaccgacgaggtgccgatgatccacccggacgagatcatggtgccattgcgcgaccacccgccgccggtttgcacggccgccggtgcctcgacgccgacgacatcgtcgtcgtcgtcgtcctcgtcggtggcctcctcgacgacgagctgcgacgaggtcgacgccgcggcgctgctcccggtcctggagtggcccgacgacgccatgtgcctgatggagctcgacgagctgatcgccgcggcggcgccgccgtccctgctgtgggacgacgactaccgcctcccgctgccgccgccgccgctatcgccgccggcgatgtacgaggagctagacgcctttcagtgctacgaccagcagaggagcgcgtttgagcaggaggcagcagcttcagcgtggaacaagcttgagctcttctaatcaatcaaaattaaactctgtaaattatgtttacagtgtttattataatcaataattaccgaactaaaacagaacagtgttgtttcattgttctaaaa

SEQ ID NO: 21902 - DNA, 1686 bp, Oryza sativa; identical to SEQ ID NO: 12433
  Clone ID: TF_OsC951_5

SEQ ID NO: 21903 - DNA, 940 bp, Oryza sativa
  Clone ID: TF_OsC351_7
caaaaccaacgcgaagctctcgtcgcgcacaaccaactcgacaccgcggcgaggcgaaccaacgcgcggcgtgggcatggggaggtcgccatgctgcgagaaggcgcacacgaacaagggggcgtggacgaaggaggaggaccagcggctgatcgcctacatcaaggcgcacggcgagggttgctggcggtcgctgcccaaggcggcggggctcctccgctgcggcaagagctgccgcctccgctggatgaactacctccgccccgacctcaagcgcggcaacttcaccgacgacgacgacgagctcatcatcaagctccacgcccttctcggcaacaagtggtcgttgattgcggggcagctgccggggaggacggacaacgagatcaagaactactggaacacgcacatcaagcgcaagctcctgagccggggcatcgacccgcagacgcaccggccggtcagcgccgggagcagcgccgccgcggcgagcgggctgaccacgacggccagcaccgccgcctttccgtcccttgcgccggcgccgccgccgcagcagcacaggctacacaacccggtgcacgccgcggcgccgagcaatgcgagcttcgccaggtccgcggcgtccccgccgtcggaggacggccacagcagcagcggcggcagctcggacgcgccgcggtgccccgacctcaacctcgacctcgacctcgacctgtccatgagcctgccgagctcgccgcccaagacgccggccgccgcgtcgtccacgaccgcgtcgcgccaccatcaccaccagcagcagaagaccatctgcctctgctaccacctcggcgtccgcaacggcgacgtctgcagctgcaaggcggccgcgccatcgccggccggcccacgcgcgttccggtttctcaggccactggaggagggccagtacatatag

SEQ ID NO: 21904 - DNA, 1951 bp, Oryza sativa
  Clone ID: TF_OsC8573_1
tttcctctcgaatccacgggtcaaaaattgcctccactcgcgcccattttcccaaaccctagccggacccggctcgccgccgcccgccgcccgccggctgcctacctcggcctgtcgggatccgtgcgcggaacatgcgggatcccggaccatggcgaccggacccgatctgaccccacccgccgccgccgcctccgccgaagcgccgtcggcgtcggcggccaagaaggaccgccacatcgtgagttggagcaccgaggaggatgatgtgcttcgtactcaaattgcgcttcatggaactgataagtatgaattcttcccacttcccatctcaattgactttttttttctagatttaatcaccatattttacactgtttttccttttcctttcggtagctggacaattatagcggcacaattcaaggacaagacggccagacagtgcaggagaagatggtacaattatttgaactcggagtgcaagaaaggagggtggtccagagaagaggacttgctattgtgtgagatttctgaattggcaaatatgcggtcggttacttcctcagtgagacaacaggccaggcatattgctatgcccatggaattgagcatgtacgctcaaaaagttcttgggaacaaatggactgaaatagcaaaggttgtctcaggcagaactgataatgcagtgaagaatcggttttctactctatgcaaaaggcgggccaaggatgacgagctattcaaggaaaatggatcattatgttccagtacaagttcaaagagggcattggtacaaactgggtgtctcacatctggtgcaagtggctctgcaccacctattaagcagatgaggccatgtaattctgatttcaaagagaatatgacaccaaatatgagattagttggacaagacaagagcacacaagattctcgacagcctcttgcaattgtttatcaaaacaatcaagataatatgaatacaatggatacccaaaatcttgttgctaaaactgcagcaaaacaattatttgcgggggaacagaattgcgttaagcatgagggtaattttttgaacaaggatgatccaaaaattgctactttattgcagcgagccgacttgctttgctccctagcaacgaaaataaatactgaaaatacaagccaaagcatggacgaagcctggcagcaactacagcatcatttggataagaaagatgataatgacatgtcagagagcagtatgtcgggaatggcttcactcctagaggatcttgacgatttaattgtagacccctatgagaatgaagaggaagaagaccaggatttaagggagcagaccgaacagattgatgtggagaacaagcaaaattcttcacaaactagcatggaagttacatcacaaatggttcctgacaataaaatggaggactgcccaaatgataagagcacagaagacaataatatggaaccgtgccctggtgaagacataccaacatctgaaaacttgactgaggctgctatcgaagatagcttgcttcaatgtgtggaatacagctctcctgtacacacagttattcaagctaaaacagatgcagaaatagcagcatcggagaatcttagcgaggttctcgaacataacaggcttcagtgtattcaattagcctcccctgctcagacaactaccccagttgaagcaaatgcagaaacaccagcttctgagaagttacgcgaggttgtcaaatgtaacaatccttcatgtatcgaattcacttcgcctgctcatacagtcccaacattcctgccgtacgcagatgacatgccgactccaaaatttactgctagtgagaggaattttttgctgtctgtgcttgagttgacctcgccagggtcgaggccagacacttctcagcagccttcttgcaaaagggctctccttaatagcctatga

SEQ ID NO: 21905 - DNA, 924 bp, Oryza sativa; identical to SEQ ID NO: 12441
  Clone ID: TF_OsC207688_1

SEQ ID NO: 21906 - DNA, 1355 bp, Oryza sativa
  Clone ID: TF_OsC808_1
tccgtctcctgctcccgccgctcttcacacggctaacgcctgcttggctgcgagacaaaccgaaccttttgctcttgcaccgcctgctagcgaactacgtgtgctcccgtgatcgatggggcgggcgccgtgctgcgagaagagcgggctgaagaaggggccgtggacgcccgaggaggacgagaagctcatcgcctacatcaaggagcacggccagggcaactggcgcacgctccccaagaatgccgggctctcgaggtgcgggaagagctgccggctgcggtggacgaactaccttaggccggacatcaagcgtggtcgcttctccttcgaggaggaggaggccatcatccagctccacagcatcctcggcaacaagtggtcagcgatcgcggcgcggctgccgggccggacggacaacgagatcaagaactactggaacacgcacatccgcaagcgcctcctccgcatgggcatagaccccgtgacccacgcgccgcgtctcgacctcctcgatctcacctccctcctcaagcccgccgccgccgccgcgtactaccccacgcaggccgacctcgacacgctccgcgcgctcgagccgctcgccggctacccggacctgctccgcctcgcctccgccatcctccccgccgccacgacgaccggcgcagccgccgccgccgccgccgagcaggcgcagcttctcctgccgtggctgcttcaggcgcagatggcgcagcagcaacagcaggtgacgccgccgccgccgccgccgccgcaggccgcggcgaccgaacagttcttgcaggccaccagcaccgcctgccaccaaatgccaggcctggttcacgccagcccgacgcagcagctggcgcagcaaccgcaggatcacatggcggcggcgacctgccaccgccgcggcgccgtgcagcacccgagctacgacaaccagctcgactacgtgccggcgctgatgcagatggcgtccgacgcgtccaacctgcagcagtggagcagcacggtctcgagtagcaacaaccacaacgtcaactccggcgtgtccacgccgtcgtcgagcccagcagccgccggacagatcaactcatcctctacgacgacgacgacgacgtatggcttgaacgcgagcggtgacgtcgacgacgctgggctgctcatcaacatgcacctatccgagctcctcgacgtgagcgactacatgtaataagatttttccttgcgtggaaacagagccgaatcgaacactccacgccatgtaccaaaggggcaaaacatgatcatcacaagaggcaatttttgtacaggattgtaccaaaaaaaaaaaaaaaaaaaaaaaa

SEQ ID NO: 21907 - DNA, 2918 bp, Oryza sativa
  Clone ID: TF_OsC9889_1
gatcgctccccccctaattcccgccttgccccctcctgggcatgtcgccgccggtggccggcgccgcctcctccggcgacgggccgccggggcgcccgccgcgcgagctctacaccatccctgcctcctcgggttggttccagtgggatgagatccacgagacggagcggcgggcgctgccggagttcttcggcggcgccggggggagcgggttcgggacggcgtcgcggaacccgcggatctacagggagtaccgcgactacatcatcagcaggtaccgcgaggacacctcccgccgcctcaccttcaccgaggtccgcaaggcgctcgtcggcgacgtcacgctcctccggaagctcttcgccttcctcgactcctcgggcctcatcaacttctccgcctccccctcccgccccgaggcgcagcagcagcagcggcagacggaggcggaggcccggagggaggcgcccggggggctgcaggtgaggccaaggccgctcctggagtcctccgcggaggagaagggggggcggggcaaggagaactggttctgtttgccgccgctgacctcgtatagtgatgtatttggagagtgggcgcctgggatggcgcctatatgtgggctctgtggcatggagtgcagagacgggaatgcccaaatattgaaggatggttttaaagtatgctcaaaatgttatgccaataatgataataagggtgaagcaaatatacatccaggtgacaaaaaggagcggatcgacaatcattcttctagtgcatggacagatgcagaaactctccttctcttggaaggtgtactaaaacatggagatgactgggatctcatcgcccagcatgtccgcacaaagaataaatcagaatgcattgcaaggctaattcagttgccttttggtgaacatatgctgggcacagtaaatggtaaattggataacagactccataaaatccaaacaaccgatggaaaagtgaacaagtccactgtgaaggagtcttcaagtcaaccaactgaaacagttgatgacatgcagattgatggaaatgaagatggcgctgataaatctgttgaagaacatcctacaaaacatagacggttgttttcttcaatagatatcactgtctcattaatggagcagttagcgcatcttaccacatcgacaagcccagatgttgttgctgcagctgctgatgccgcaattaaagcactgggtaatgaaaacccccaagcaaggagagcttttcaactcagtgagaaagagtaccaaaccagggcattctcttctaaccatgcccggcagagggattattgcagtgatgatgttggtggtggtgatcgggatgtagaaatgcacgggcacccagaccaggaagaacgggaaatggagctcctaatggcgtccataatagaaactcagctaaaaaagatccaatacaagatcaaacactttgaggagctagagttgatcatggatcaggaatacgctactctacagcaaatgaagtcttcccttgtcgatgaatggcaaaagcaaagccagcaattcggtgtttggagaattggagccatcctgaaccgtttagggtttgatcggacggctggtatggaatctcacagaagggcaccaccatttttccccaacgcggagcggcggaggcggcagccaaaaacccctccctcctcccctcctggactctcggtttcccctaacctcgcgcgccacctctcctctcctcgtcctccgcctccggacgcgcagttcacgggcgccctaatggcgaaaaagggcaaggcggcggcggcggaggccgcggcgcccgacgcgggggtatccggcccgcagggcggcggcggggagaaggagggcagcttcctgctgggctcgccgacctgggaggacgccgggggcgggcggtggcggtgcaaggagacggggcacgagctgccggagcgggagaaggaggcgtacgggcggtcccgcgcgtgcaggctcgcgctcatcgaccaagccgtcgcgcgcaagaagccgccgctcaacgccttcaagcctcaccccgagcacaagtcgaagcttatatgcaatattactggggacattataaacaagtcggaggaacacatctggaagcacatcaatgggaagaggttcctcaacaaactagaaaaactagaagaaaagatggcatcaggtgaaatggccgaaggtgaagctgaacagtcaaatgaaggggaaaataaaaccaagtcaaggaagaagaaggacaagaagaaagctgctgttgttaacccttctttgccacgagaacctaaaccagagattgatgattcagataattctgatgatccagatttctgggtgcctcctgttggaagtcgttgggatgatgatgatggaaaagaccgatggacctcctctccagtgaaggataaggatgatgcagcagaggatgaagatggtgatgacgatggtgatgacatggctgacaaggatgacaaggagacaagagaaattgcttcaaggacaaagcgactgtcagtagaagcagttggcccaagtagcttcgcttcaaggaagaaaaaaaccaaaaaggagcagtaaaggttggtccacagcttatcatcgagttcaatgaagaacttatttgatctttctgtgtggacgaacaaagtccatctttgattcctcttggctggctagtcaggtgcgggttttgtattaattggtttgcttttagttagtgcttctctgtgtagccctatcgctgcacctttcagtggtatactattgcatgacaattctctatacttgcattagttaattcctgtgattttgatgtgagaatgaactgtgctacttgtcctatatttattcttgctatataacttcatatgtttcttttgt

SEQ ID NO: 21908 - DNA, 1217 bp, Oryza sativa
  Clone ID: TF_4138298
ccagatcgctcagtctcacaccgcacagagacagagaagagctctagagagaacgagagagagagacagagagagagagagagagggagaatggggaggagagcttgctgcgcaaaggaagggatgaagagaggggcatggacgagcaaggaggacgacgtgcttgcctcctacatcaagtcccatggcgaaggcaagtggcgcgaggtcccccaacgagctggtttgaggcggtgcggcaagagctgcaggctccggtggctcaactatctccggcctaacatcaagcgcggcaacatcgacgacgacgaggaggagctcatcgtcaggctccacaccctcctcggcaacaggtggtctctcattgcaggcaggctgccgggccgaacagacaatgaaatcaagaactactggaacagcacgctcagccgcaagatcggcaccgccgccaccgccgccgccggcagccgcggtggcagcacgccggacaccgccagagcgacggacgcggcgtcgtccagctccgtcgtgccgccgggccagcagcagcagccagcctcccgcgccgacaccgacacagcaacggcagcggcggcggcggcggcgacgacgaccaccgtgtgggcgcccaaggccgtgcggtgcacgcgcgggttcttcttccacgaccgtgaaacggcgccgctcgccgcggcggcgccggcgccggcaggggaattaggagacggcgatgacgtcgactgcgactactactgcagcggcagcagctcggcggcgacgacgacgtcgtcgagctcattaccggcggtcgtcgagccgtgcttctccgccggcgacgactggatggacgacgtgagagccttggcgtcgtttcttgacaccgacgacgcctggaacttgtgtgcgtgacattagttcgtcgtccgtacgtacctacgtatatgcatgtgtgcgtctcatagaatgaatataaaataatattttctccatctattttaagtgcagttgcgggtttccgtatataaaattaacgattttgctatatatttgtcgataaattttctcctaaaaatttgacagatgtaattacagtacaatcgtagtataattacactgtaactttcatgtaattacactgtaactatagtgtaacttgtatgtaactttcaaaaatctctttgtaatatgttatttcggtaaaaaaaaaaaaaaaaaaa

SEQ ID NO: 21909 - DNA, 1212 bp, Oryza sativa; identical to SEQ ID NO: 12437
  Clone ID: TF_OsC373_1

SEQ ID NO: 21910 - DNA, 1461 bp, Oryza sativa
  Clone ID: TF_OsC490_1
taacgcaaaagcctagtcgtctcatactcttcttgttcagttcttctcctcccaaatctttctgctataaaaggcattcgggtctctctctccgaatcccagctgcacacttgcatcttctctctctctctcttcttcttcttcttcttctccatatctcctactcctcgtgaagatcgatcgaccatcggcaatttcattcggtaatagttaagctaagatcaaatcaagatcggcgaaacgatggagatggtgctgcagaggacgagccaccacccggtgcccggggagcagcaggaggcggcggcggagctgtcgtcggctgagctccggcgagggccgtggaccgtcgacgaggacctcaccctcatcaattacatctctgatcacggcgagggccgctggaacgcactcgcacgcgccgccggtctgaagaggactgggaagagctgccggctccggtggctgaactatctccggccggatgtgaagcgcggcaacttcaccgcagaggagcagctgctcatcctcgacctccactcccgatggggcaaccggtggtccaagatagcacagcatttgcctgggaggaccgacaacgagatcaagaactactggaggaccagagtgcaaaagcatgccaagcaactcaattgtgatgtcaacagcaagaggttcaaggatgccatgaagtacctatggatgcctcgccttgccgagcgcatccatgccagggctggcgctgttgatgatagcggagactacagcaacaacgacttatcatgtgtatctggtgtaacaatggccactgttgctaattgttttgatggctctccgagcatggtgactagctcatcttccgattcgttcacgtcggagtcacaagatttgaagaagattaacttacatgtgcatggtgatgatgagaagatgaactctgaagactggatgcaggaggtggaccatgagttttggtctacagagattcagcctaataatgaacagtttcaggaccaacagcttaacggttgggtgcaaggtttttctgagggtttgtccgaaactctatggagtctagaggacatatggaagatgcaataaattttacatttacaaaggacatatttgtaaaatagaatagagagacatcaaggaaggcaaagagaaaaagttctttagttcatatactgtacgttgagacacttaagttctttgccaacttcaatgttttttttcttttatttttgctgcctctttcgatccctgaaggggtttttgccttctagatgtctaggggttcaaagaggaccagaggagatatatatgtgtttggatatgttgatatatgagctgatatatgccttactatatatatactccagaattgcactgaggattacatatccaattcagacatgcaaaccttaccagttgcaatattgtaaaaaaaaaaaaaaaaaa

SEQ ID NO: 21911 - DNA, 228 bp, Oryza sativa; identical to SEQ ID NO: 12449
  Clone ID: TF_OsC411024_1

SEQ ID NO: 21912 - DNA, 1276 bp, Oryza sativa
  Clone ID: TF_OsC6000_3
atggggatgggcaggggaggtgcagttcagtgcaccgcgcgcgcgggagccgccacgacgacgacgacgatgggggagtggatcgtgccgggcccacatgtcaatgacgaggaagaaaacgacaacggccccgggatcagggggccgtggagccccgaggaggacgaggcgctgcggcggctggtggagcggcacggcgcgaggaactggacggcgatcgggcgggagatccccgggaggtcggggaagtcgtgccggctgcggtggtgcaaccagctctcgccgcaggtggagcggcggccgttcaccgccgaggaggacgccaccatcctccgcgcacacgcgcggctcgggaacaggtgggccgccatcgcgcgcctcctccagggccgcaccgacaacgccgtgaagaaccactggaactgctccctcaagcgcaagctcgccgtcgccaccaccaccaccaccaccaccaccggcgccgccgccgcgccgggagtggtcgccgatgccgccgagctcgtcgagcggccgtgcaagcggttcagccccacgccggacagcccgtcggggtctggttccgggtcggaccgcagcgacctcagccacggcggcgggttcgggcagattttccggccggtggcgaggaccggcgcgttcgagcccgtcgactgcgccatcagccggcggcaggaggaggatcccttcacctcgctctccctctcgctccctgggacggatcagcggttcaaccacgacagcgcccacagccacttccaagaactcccgtcctccccctcgccgccaccaccacctccccccgccgccgccgcctcgacgacacagtacccgttcaccccggagttcgccgccgcgatgcaggagatgatccgcgccgaggtgcacaagtacatggcgagcgtcggcgtccgcgccgggtgcggcgacgccggcggtgccgacctccacatgccgcagctggtggagggcgtcatgcgcgccgccgcggagcgcgtcgggaggatgcactgatcaaaaacctagcgtccattagaatctctactatcgtttcaactttttttttccttaaaaatttgtttccaaaactgctgtgaaaaccgaaacagcagtccgaaacggaagaaccaaaaaaaaatgcgaggagagatgggaaagaaatgtttcgagctacgaaaaaaaaccgaaaagctcggctacctatgtacaggaaatggaaatggaaatgcaaatgggggaagtgagtggtgaatcatgc

SEQ ID NO: 21913 - DNA, 2407 bp, Oryza sativa
  Clone ID: TF_OsC9332_1
atggcgagagcacctggtggcgttcgccgaaggagcgggaggaggggcgcgggcggcggcggcgccggaggcggaggcgaggcgctgcggaagggcccgtggatggcggaggaggacgaggttctgctggagcacgtccgcacccacggccccatggactggagctccattcgatccaaaggcctcttgccgcgcaccggcaagtcctgccgcctccgctgggtgaacaagctcaggccaaacctcaagagcggttgcaagtttactgccgaggaagagagggtggtgatcgagttgcaggcgcagttcgggaacaagtgggcgaggatcgcgacctacttgcagggcaggacggacaacgacgtgaagaatttctggagcactcggcagaagcggctcgccaggctcctccgcgggcctctccctgctgcacggcccaacaagcacaacagcggcaagggcaaagcgccctcgtcatcttctctcgactcccaaacagccacgttccaccagagctcggcctccctggatcaagcttcattggagggcaactccctcggctggcaatgccgcgaggctgcaccgttcatgggatatgatcaggcatgctccgggttcttcgctttcgaggggccactgccgctgcagctactaccacccgccgacggcgaggcgagctcgtccaatgcagctcagtcggcgccaccaccgctgctgttcgaccagcctccgtaccctctgatcaacttccccgtggcttgagcggtggtgacaccgctcgcctccgtccgcctcgcctccaccgagaggttctctctgccgccgattcagatttacagggagattatcttgtgatctgtaaacatgtttgggcgtgtaccgaggagtaacaacaccaagtactatgaggttcttggagttcctaaaactgcaagcaaggatgagctaaagaaggcataccggaaggctgccataaaaaaccatcctgacaagggaggggatccagaaaagtttaaagaattatcacaagcgtatgaggttctcactgatcctgagaagagagacatatatgaccaatatggggaggatgctcttaaggatggaatgggaggaggcagtgacttccataatccatttgacatatttgagcagtttttcgggggtggtgcctttggggggagtagctcaagagtacgcagacagagacgtggtgaagatgtggcgcatactttgaaggtgtctttagaagatgtgtataatggatctatgaagaaactatcattatcacgaaatattctgtgcccaaagtgcaaaggaaaagggaccaaatctgaggctccagcaacatgctatggttgtcatggtgtaggaatgaggaatataatgcgacagataggactaggcatgattcaacatatgcagactgtctgtcctgaatgcagaggatcaggtgagatcataagtgacagggataaatgcacaaactgcagagctagcaaagttattcaggagaaaaaggtgcttgaggttcatattgagaagggaatgcaacatggccaaaaaattgtattccaaggtgaagctgatgaagctcctgatacagtgacaggagatatagtatttatcttgcaagttaaggtacatccaagatttaagaggaaatatgatgacctgttcattgagcgcacaatctctttaactgaggcattgtgtgggttccaattcatcctcactcatctggacagtaggcagctcctaatcaaggcaaatcctggcgaaattattaaacctggtcaacacaaggccataaatgatgagggaatgccacaccatggccggcctttcatgaagggccgtctctttgtggaattcaatgttgagttccctgaatctggtgtactctcccgtgaccaatgccgggcacttgagatgatcctaccacctaaacctgggcaccaattatcagatatggacctggatcaatgtgaggaaactaccatgcatgatgtgaacatagaagaggagatgaggcgcaagcagtatcaaaggaagcaggaagcgtacgacgaagatgaggaggaggatgctccaagagtacagtgtgctcaacagtaagaagtgtcactttctggcgcaagtgatgatactccatgtaaactaagtagtttttggtgagactgttcattttagtgtattttgtactagttaaattaaatagtgaatgtctaagttgtgtcgtttgatatataagcttgtgctaacaacataaggctttcttggccttcataagatatactcctacctaggagaaagtggtggatgagcattcgtttctgtttttattggtaatgaacatatttacatgttgtattgaaaaaaaaaaaaaaaaattcctgcgcccggggga

SEQ ID NO: 21914 - DNA, 556 bp, Oryza sativa
  Clone ID: TF_OsC358016_1
tcaccagtaaggcatgccaaatacaagttgctgctgctgcacaccagtttgtaatttgccttgcaaatattgtagctggttttggtggttgtgccaattcatcatcatcatcagcgcgtcgtccgtgctccggtccggcggcgaagacgtcgtcgtagccgcgtccttcttctccgactccgacgtgcatgccgccgctactggtgctagcaacgtgcagctggtgggcggcgaggaggaggaccggcctggtgccgacggcggcgtggagggcgaggatgaggcggtcgtcgtggtcggagaaggcgccgtggcggatgccggggcggaggtagttgagccagcggaggcggcagctcttgccgcagcggcggaggccatccagttgccgccggtgccgtgctgctggatgtacgaccgcagccgctcgtcgtcctccgccgtccatgccccgcgcttcggcttcaccgccgccttgtcgcagcacgccgacgacctccccatcgctcgctcgctcgatcgaaagggagatgcgagagtggccaggataatataa

SEQ ID NO: 21915 - DNA, 767 bp, Oryza sativa
  unsure (1)..(767): unsure at all n locations
  Clone ID: TF_OsC351_17
gggggggcgggggggcgtccgcccacgcgtccgtgaccggctcattgcctacatcaaggcgcacggcgaangttgctgggtatcggtgcccaagggcggcgggcgtcctccgctgtggcaagagctgccgcctccggtggatcaactacctccggcctggcctcaagcgcggcaacttcaccgaggaggaggatgagctgatcatcaagcttcacaggcttttaggcaacaaggacgtggggtcatctcaatgatactaggatttggatgcatgaatatgagcgttctctatatatagttttataacaataatttttttttctttgactggaaaataggcaccatgcagtcatgtatgatggtcaaggaggtactgttcagtgcactagcaagcccaaactaggagatattagacgttaaagtgggaaagtaatggaaattctgtggccagatgtgcaacatcttctatcccacctgaagactgatccaaactcttcagtttacgcagctactcaccccaagttagttcaaaacccatcttagtattacaaggccatggaggagaactgacatatttcagtcggaaagatgggaggttgttcgaatgtgtttctagaaagcgagattctaattgccgctgcttgttaaatagaaaatttgcttgctccttatggccatcacaaattcatgaatgaaaattagcctgttaaatgaaaattacaagttcatgaatgttgtaaaatagaccagacctcatcccctagatc

SEQ ID NO: 21916 - DNA, 1170 bp, Oryza sativa
  Clone ID: TF_OsC2658_1
ccgcgcttcctcccttccgcgctcccccctctcccggcgcgctcccgtactcgtgcggccatgggcaacctcgccgccgccgccgccgcctcctccgccgcagccggcggcggcggcgccggggacgccgggcaatgcccgtcaccgggcgtcccatcgccggtgggggtgcgccttcttctcaacccccgtgttaccgcccccctgcctcacaccttcggcttcaccccatatcctccccaggcctcacgctggatcgggcgacgggtacccctccgacggtgggctgctgctgtcctccggcaagcggcggcgcgcgcaggagaggaagaaagctgtcccttggactgaagaagagcaccgaacatttcttgctggtcttgaaaagctaggaaagggggactggaggggtatatctaagaactcggttacccacgcgtccccaactcaagtggctagtcatgctcagaaatattttcttagacaaactaatccaaacaagaagaagcgcagatcaagcctttttgatatgatggcaactgatatgtcaccagcaccaaactgccctgtcttgccaccatcaatgggaaaattacatgatatggtagctatgactaaacaactccagaacagcagtttggaaggagtctcatcttcaagcacagttaatctagcaccacaagttgcaagagatcttcctcccccaattccatcttttaaagcaacaaatgtagattcaagtctcagcaaaatgaaccacatggacggtttcttgagggcgcccatgctgttcagaccaattccaagaatcgctgaaggggcatcttcatcgactcctgcaactgcaagcatagctgatctggaatttcaagctaacctgactgcatgttctaatgcattattcgcgagtccgagaagaaagccaaagaaggcagatcctccagcagagaaggatctggatctgacagttgccccaccctcccaacaaaccagggccagtatttcttcccagaacgcagtaggcgtaattcaagtcgtatagactgataattttttttggggagttttaactatgttgttgaatgtttacaaaaataaacattaacattatattagcgatacaccaataaaagaaggaattaaagataaaaaaaaaaaacacaccccccc

SEQ ID NO: 21917 - DNA, 1411 bp, Oryza sativa
  Clone ID: TF_OsC351_5
atgaggaagccggattgcggcggcgggggaggggcggcgaagggcggcggcgttctgggtgtggcgggagggaacaatgcggcggtggtgggggggaaggttcggaaggggctgtggtcgccggaggaggacgagaagctggtggcgtacatgctgcggagcgggcaggggtcgtggagcgacgtggcgaggaacgccgggctgcagcgctgcggcaagagctgccgcctccggtggatcaactacctccgccccgacctcaagcgcggcgccttctcgccgcaggaggaggacctcatcgtcaacctccacgccatcctcggcaacaggtggtctcagatcgctgcccggctaccggggcgcaccgacaacgagatcaagaacttctggaactccaccatcaagaagcgcctcaagatctcctcctcctcggcgtctccggccaccaccaccgactgcgcctccccgccggagcacaagctcggcgccgtcgtcgacctcgccggcggcggcggcgccacggacgacgtcgttgtcgggacagctaatgctgccatgaagagcatgtgggtggattcctcgtcgtcgtcgtcgtcgtcttcctcgtcgatgcagagccggccgtcgataatggcggcggcggcggcggggaggagctacggcggcctcctcccactccccgaccaggtctgcggcgtcgacacctcgccgccaccgccgttcttccacgaccactccatctccatcaagcaagcatactacggatcaaccggcgcccaccaccaccaccacgcgatcgccaccatggacggatcaagcttaataggagatcatcaccatcacagcagcagcatcctctttggcggcgcatcagtgccacctctcctagaccaccaaaccattctcgacgacgacgacgaccaccctaacaaaaccggcagcaacacgaccgcggccacactgagcagcaacatcacagacaacagcaacagcaacaagaacaacagtgataataacaacaacatcagcagcagctgctgcattagcctaatgaacagcagcagcaacatgatctattgggagggtcaccaccaacaacagcagcagcagcatcagatgctgcagcagcagcagcagcacatgagcaggaatgtcatgggagagtgggacttggaggagctgatgaaagatgtgtcatccttgcctttccttgatttccaagttgaatgattgagagggaggggccccatctatagctgccaaaggagtacattgcatatatatccaattatacatatatatacatacatacacattgaaggtagtatttttttccattgacacatatattctctcttccaaatgtacaagatttctcacaccaactccacccccgatcttgcatatatat

SEQ ID NO: 21918 - DNA, 1578 bp, Oryza sativa
  Clone ID: TF_OsC2381_1
ttttttttttttttttttttgaaaataactcttgggtcaatgttccaatttttttcctttacaaatatacaactgcactttgtcggcaacttctcaaaagaaataaaaatacaacatgcaataattaatttgcatgtacgtgcatggtagcagttgaaaagcttgggactacttgtatggtttgtgagagctaccgacacatgttttgcccatgcgtgtctatatttatttgataaacagagtgaaccaaaactcaagtatccaaaagttgagttgtcgtgtacaaaaaacagcaaatttcaagagaaaagagggagactctagaacgtacttttctatcccttcttctgctactcgtaaggccagagctgtcttttccatgacactgtaggatctttaagtgaggagaaagtgttgaggtcgattctgtgtcaaaacatcaaacacttcagtgttttgcctgccaatcaatatgcgagagttacaagtttctgcttcttctgatctctgctctgttccatgcatggcgtagcattgcacctagatatgttcaaaagacaagggcaatctttgcaagtctttatcatacatgtctgatgctgcttgcagctgttgttgtggttgctgattctggaaccaagaggcacatatcccttccatgttgaattggctctctgccttgatcacatcatcgtataatgattggctctggttctgcatggctgtcgtcgcctcagcaaaggttccatggagcaaatcaggccacttgagttcctccactaagtgaactctggtatctttctcttgtccgatatctgtccatgggaatacactgttctccaaaattgaggttgtgctctgtggctcgaatcccatactgttgcttccgctgctcccagtactgccgctgctgctaggattggaaccatcccagtagaacggggtgttgccaatgccagtgcctccgtgacgaggattttctgggggaagattcagccccattgatgttgagagggctgatggtgaaactggtggcatcacggtggagattgtgctgcagttgaaatcattctggttgaaccagagtgaattcatactcgcaccatccccagtgccacattcattactgtagcctaatggttgctggaaaggaaaatacagggttggacctgatgagcggcaacttgatgggctctcgtgaccggcagtaagctggtcaagaaacaactcctttggtggcaccttagggcgtggcaagcttgcagtttcagggtgattcttatcatacaccggcagcagcattgatgattgtgctgtctcgctgaggaggtggctcaagttccctagagcacccgcacttgacgggttgacgtcgctggaccctgaggtcctctcggtgctgactgtgggtgctgctcccctgcgatcagcctcggtgaggggcttgtgggtgttgggatcaatgcctttctgccggagcttcttcttgatgcaagaattccagcgattcttgatctcgttgtcagtcctcccaggcagctgagctgcaatctgagaccaccttctcatggaaaaatc

SEQ ID NO: 21919 - DNA, 813 bp, Oryza sativa
  Clone ID: TF_OsC257872_1
gcacgagggtagccatcttgtgtatcgaatagctatagctctccagcagattgatcagtgacgacgacgacgatggcggcaatggcggcggcggcggcggggacgaagaagaaggcgaggaagccgtacacgatcacgaggccgcgggagaggtggtccgccgaggagcacgagcgcttccttgacgccctgattctgttcggccgtgactggaagaggatcgaagcgttcgtcgccaccaagacggccatccagattcgcagccatgcccagaagcattttctgaaggcccgcaagttcggcctcgccggtgggctcccgccgccgcttcaccctcgccgtgccacgctgctccgggccaacgccgcggcggcggacatgatgccgcccccgtggctgccatcggccggcggcggctccatcggttgctcggcgccaccgtccggcgtgcagcagagcatggccggcaggtcgccggcgtgctactcaactgatgaagcttctttccggccattgattcatagcaatgacaatgactgttcattcatcgagacaccaagctgcatcggatcaggtggcgaatcatggatcggtgatgatgccttcttcatgcaggatgaaacaattcggctcccaatttctccagatgacctgggattcgctcaggtgtacaagttcgtcggcgacatgttcggctccggcgagcggcggccggtggaggctcacctgcggaggctgcagggcatggaccctgccatctcggagacgatcttgctggtgcttaagaatctcgaagctaatctatctgcttaa

SEQ ID NO: 21920 - DNA, 797 bp, Oryza sativa
  unsure (1)..(797): unsure at all n locations
  Clone ID: TF_LIB4371-008-R1-K1-H5
gatatattactgggcattcaagcttagattttcagaggattgatggggataacgatagatcagaaaatgatggggatagttggactgatcaagaaacgttattgctgttggagggcatagagaagtacaatgacaactggaataacattgcagagcatgttggaacaaagtcaaaagcacaatgtatgtaccattttattcgtcttcctgttgaagatggtttgttagagaatattgaggtgccagatgcatctgtgccatttagagcagaaaccaatggatacccacatttagattgcaatggcagtacttcaggttgggtttttggcttctgctatgggaccaagagttgcagcatcatgtgcaagtgctgctttatcagttttgacagtagatgatgattccagggtgaattcagaaggcatttgctctgattctaggggccaaggtccgcatccgaattttcgtgatcataatggtggtgtatcttcatccatctctccagaaaaggtgaagcatgctgccatgtgtggtttgtcggcagcagctacgaaggctaaactttttgcagatcaagaggaacgtgaaatccaaagactaactgctactgtaataaaccatcagttaaaaaggttggaactgaagctgaagcagtttgccgaagtcgagaccttgcttttgaaagatgcgagcaagtggagagaataaggcagaggattgcatctgaccgtgtccgaatcgtgtncacccgcttggcctcgcctggaaatagcctacctggggggtagtactagcac

SEQ ID NO: 21921 - DNA, 2091 bp, Oryza sativa
  Clone ID: TF_OsC13695_1
tttttttttttttttttttttgcatccaacatttcctcgtctttccattgcattttgtggagagatacaagcctagattacatgtagttagcctatggcaacccctgtccgagattcaggttgataaaaggcaacattgacagccactcaactctgaacgtattcgagttggggataaaattacaggcaaagtaaaaaaaaaagtacaaaagttgttatcttacagattatacaatactatatcgacgagtaaaaaccagaattgctcttccattttctggaaaactaaagtggtctcgagcaacatcctaacagcaggacatgcctcttcttcccgccttaatctcatgtcagatttgttatttgtcacctacgaatagtagtactgtggcgtgacgtgtccgtgcgacgagtcagttgtcacaagcacagccttgtcagctcaccgtcggcgacggcctcctctcctccggcggcctccgatcgcagcagctcgctctccgccgcgcacctcttgtacggcatgaagcccctctgcagcagggtgacggacgccgagctctcgcacttggtcagccgtggcgaggccgccgcctccctgctgttcccttggccacgggactccgcgacgtccgaattctgagccgccgccgccgccgccggtaccgccgccgacgatccaagcacgacgctggaggccgtgttcgagcccgtcagcgatccttccctctgcgagactctgaactctacgccctctgaatcacggtggcactgctggttcgcagccgccgccgccgccgggtagaacagcgcgcatggaaggctcccgttgtagctcaaccatggcatgacaggttgcgcggcgaaaccatccgatcgaggaaggaagtagagaaactgttgcatgctgctcggccatggattcgacgagctcccttctggggcagcagcaaaagaaggtactagtatgtttctggttgctctctcaactgaaccactcgttgcaatgttactgccattaagcaggtgcagctggtctgaatccttaaccactacgctctttccgaatagcctgaagactgatgcttctgaggatgcttctttggcatccgtggttgcaattgacatcttagtatttggcgcctgcatagccaactcagcagtcgggatgctcggtgagaggcacccgtcctctctgtccaccgacgacgccggcgagccgccaccgtcgacatgctcatccgtaccggcggctgacggagccagcgacccgctgccgctcgagttattcgagaacccaccgcccagggcctcggtgcctatctgcgccgccgtcagcaccgacgtcggcgagccctcctcctgctcggacagggactgcatccacaacggcggcttctccagctgcctgagcgccgggacgtgcttcttggccgcgccgtccaccttgcgcgggtacgggtgcgccggcttcctcttcggccgcggcggagggatctggatggccgccgccgccgccgcggcggacgcgccgcccgagccggtgttactccccgaagattctctgacgaccttagagaagaacttctgcgcgtggctacggatttgcacggcagtcttggtacctatgtgctcttgtatacggcgccatgcgcggccgtgcagctgcagggcttccaagaacagcctgtgctcctcgtccgtccacttctcgcgctgcttcgtgatcgtgtacggctttcgcgcctttggcacgtgctcttcccctgacaaatccatgtcgccgtagttcatatggctcctgagatgatccacggtgctctcgccgccggcgcgatcgtcggcaccgttttcgtcggttgccatggcgtttcccggcaaacaggccatctccattctgaaaaaaccgaactcctcccaaaccaaaccacactccacaggatcgccacaccaaagccaaaaaatcagcgcctcccaaaccccgcaatctttgcgagttttctcctcgatgttgttgatgaggacgacgagatggggggagatgaggaggagaagggaacgaggaggcaaagaagcgagcgttacgtaggc

SEQ ID NO: 21922 - DNA, 1363 bp, Oryza sativa
  Clone ID: TF_OsC351_6
cgccatggcgccaccatgcatataaactcgagctccctctcctcctcttcttcctcctctccactctccaccatcgtcttcgtcgtcgtcttcctcagctcggagcgatggggaggtcgccgtgctgcgagaaggcgcacacgaacaagggcgcgtggaccaaggaggaggaccagcgcctcatcgcccacatcaaccagcacggcgagggctgctggaggtcgctccccaaggccgccgggttgctgcgttgcgggaagagctgccgcctccggtggatcaactacctccgccccgacctcaagcgcggcaacttcaccgacgaggaagacgagctcatcatcaagctccacgagctcctcggcaacaagtggtcgctgatcgccgggaggctgccggggaggacggacaacgagatcaagaactactggaacacccacatcaagcgcaagctcctcgcccgcggcctcgacccgctcacgcaccgcccgctcaatgccgccgccgccgtcgccggccaccaccacctcgccgccggcggctccagctgctcgcccgacgcaacaagcggccacagcagctgcagcgacggcgacgagtaccgcggcggcatcgacctcaacctgtccataagcccgccgtcgtcgtcgtcccagccgtcttccccgccgccgccgccgcacgaagcagaggcgagacgcgccggagcgacggcgagctacacctaccaccaccactactcggagacgagggagaagatatgcctgtgcttgaaccacctcgggctgcacggcggcgacgagtgcagctgcggcggctcgtcggcctcttcctcctcctcgccgccgccggcgacggcgagctcgcgagcgttcacattcgccaatgcatcgtcgtcaacagtgtaaaacacagagaaattcagcgattttcagactaagagaattaatgagaggtagagcacatgcatgctgaattaattgaattaactcaatccaagcttgagctaggcatctagctaactttgtgatttgatcatgatcagctagcaaaatcatcataatcatcatcctaggcatggccggccaagatcggagggtgatcccaagtcgaggcctttgctcttcggaaaaccaatcaacggttgggattgatgcatttgaaagagggtatgcgtaaatggtgcatgttgttgtgaattttccccttaagattaattcgggggtttgtgccattaactagaagtgttattacttctccaaatggaaatacttagatctttgttttttttttggagaaatagaactatttgttggtgtagtacctatacatgttttcaataaaagatgtgggtgggtaatgt

SEQ ID NO: 21923 - DNA, 1262 bp, Oryza sativa
  Clone ID: TF_OsC2008_2
ttagagcccaacaataataatccccccttttcatcgcggcgacgatacccgccattttcatctcattctcaccaccaaaagcgaccacgcagcgaccggccaccgatcgagatggagcagcatgaggaggcagcggagaggaagccttcgccgccggtgatattccggctgttcggcgtcgaggtccgcggcggcggcggcggagttgacgaggaggagtacgaggaggaggaggtggagggtggattgttcatcaagaagagctccagtatgcccaacctcacctccatcgacccgctgccggtgccggccgacggcggcaaacggcgcgcctccgacgactccgagctcgcctccggccagcagaagcgccgccgccgcaaggtgcaggagaggaagaaaggggtaccatggactgaggaggagcacaagaaattcctggaagggctgaggcagctggggaaaggggactggagaggcatctccaagaactttgtgaccagcaggacggcgactcaggtggccagccacgcccagaagtacttcctccggcagaccaaccctggcaaaaagaagcgccgggccagcctctttgatgttgttgctgagtgcagtgatgatcagcttccaagtcctcagagtgttggaactaagcctcctacccaggatataattcatacagatcgcggcgatgtcccgatactaagctatccagttgctagaggctttagaggcgatagcgtgcaggttgatgaactaactgaatatgtgaagagattaaaggccgccgaggacatgtcgctctccatgatctctggactggaaatggcatcatcatccatcagcagtctagagctcagtatcgcgcctcctcattgcgcgatcgaggcggccatcaaggtgctgtgatccagacgcaattctccaccgaaggaatctggatcggcttcagctactgttcttcgtcgccgctgttgttgtttgttgttgttgttttttttttttttttgcgggggttgtttgttgttgttgttgttgtagttgtcatgctaactttgtatttgggtcatgtggcgtttctttcagcagtcttatataatacagtgagaatgtcagtaccttccgagacatgtttaattaagccttggttggttggtataagttggtgaaaagaaaaccagatagtagcctgtctgtattgtacggttgcaaaattggagtatattgatgcagagatcatgaagggtctccatcttgttcat

SEQ ID NO: 21924 - DNA, 804 bp, Oryza sativa; identical to SEQ ID NO: 12467
  Clone ID: TF_OsC806_2

SEQ ID NO: 21925 - DNA, 1720 bp, Oryza sativa
  Clone ID: TF_OsC17430_1
atggcttccatgccgcagctggaggaaaaggattcatccgatttggcaatcaacaaaggcccgtcgctggatcttgtcaaatctcccttgatgatgaatgatgcatctgcaactgtaactgcaatgcagcccaacgaggggatggaggagttccctgtcaaggttcggaagccttacacgatcaccaagcagcgggagaagtggacggaagaagagcacgacaagttccttgaggcattgaagctgtatggtcgctcttggcgtcagatacaagagcacattggcacaaagactgctgtccaaattcggagccatgcccagaagtttttctcaaaggtggtgcgtgagcccggttccaataatgcgattgagatccctccacctaggccaaagagaaaaccacttcatccgtaccctcgaaagtgtgcgaattctggatcggacgcaaatccagcaacagcgcaattgaagcttgctcctggctcatcttcatctggctctgatcaagagaatggttctcctatatcggtgctatctgcgatgcagtcagatgcttttggatcgtcagtatccaatccatcaaccagatgtacctccccagcgtcatctgacgatggaaataacattcccacattcacgagtggggaagataataatgtgccttgtgaaccaacagtgatagatccgtcccagtcccacaaggaaatagaccaagatagaaaagacgtgaataatatgtctgaagaggattcttcagaagaagaggtgcaagaaacaagcttgaagctatttgggaggacagttgtcatcccagatccaaggaagagaagctcctcagatccgaagcatgaaagtgaggagcagatatcacagccttccaatgaagaaatgttgcaggcttcttcatcggttggggagattccagcggcatattgtgcaccaaatggttggtttatgtcatacaattctttcccattccaattcggtgaatcagcggcagatgctagaattccccctttacacgtgtggtggccttactacggttttgctcccattagccatcctagaggactaagcacagtgatgcagcagactgaaggtagtgacgagagtgacggtgtgaagagccactcatccgaatcaagttcggactccggggaaaatgtgcagatgaccgctccccagagctcgagaatagtggaatcacttggagcgatttacgtccgagactcaggttcaagttttgagctaaaaccgagcgcaaattcagcgtttgtaagagtgaagccaagcaacagcggagatgaagaggtaataaggggatttgtgccttataaaagatgcaaatttcaataacgcaggcaagcgggtattttcttgaaagctgctaatttaacagagaagagtaggagcacgaacgttgcttgcatcactgtatttttttttgtttgtttgcggggattggtggtgcattaatgaattgtttgctgcttgcaccttaaaaaggatagagatggtgtaagcagtttgttgctgtaagaatgttacatgtagactagtacttaaaattataggggatgccaatctctgccctgatgatgttgtaaaagcagtacgcaccatgttttacctctggttgaaagctaagctgttaatggaaattgatctctatggactgtttggttaaaaaaaaaaaaaaaaaaactcgagactagttctc

SEQ ID NO: 21926 - DNA, 1202 bp, Oryza sativa
  Clone ID: TF_OsC161464_2
atggggcgcgcgccgtgctgcgacaaggcgagcgtgaagcgggggccgtggtcgccggaggaggacgagcagctgcggagctacgtccagagccacggcatcggcggcaactggatcgcgctcccgcagaaagcagggctcaaccgctgcggcaagagctgcaggctccggtggctcaactacctgaggccggacatcaagcacggcggctacaccgagcaggaggaccacatcatctgctcgctctacaactcgattggaagcaggtggtccatcatcgcgtcgaagctccccggccggactgacaacgacgtcaagaactactggaacaccaagctcaagaagaaagccatgggcgccgtgcagccgcgcgccgccgcctcggcgccgagccaatgcacgtcgtcagcgatggcgccggcgctctcgccggcctcctcgtccgtcaccagctcgagcggcgacgcctgcttcgccgccgccgccaccaccaccaccaccatgtacccgccaccgacgacgccgccgcagcagcagttcatccgcttcgacgcaccacccgcggcggcggcggcggcatccccgaccgacctcgcgcccgtgccaccaccggccaccgtcacggcggacggcgacggcggctgggcgtccgacgccttgtccctcgacgacgtgttcctcggcgagctcacggccggcgagccgctgttcccttacgccgagctgttcagcggcttcgccggcgcggcgccggacagcaaggccaccttggagctctcggcgtgctacttcccgaacatggcggagatgtgggcggcctccgaccacgcctacgccaagccacagggtctctgcaacaccctgacatagtacttccccaacgccgcggcggcggagatgtggccggcggccacggacatcgtcaagccggccgggctgtgccacagcctgacatgacaagtcagacactaatgatccatccatccaacgagagtgctcgagtgatccatgacgactagtctcaagttgttgcgtggctagcttcttcttgattgattacctgatcatctttttctcccccttcttcccgacgagattattacatgtacattatcctatctgtactacggctgttccacagacaggttaattagatgttgattgccaattagcaactgttcaaaaaaaaaaaaaaaaaaaaa

SEQ ID NO: 21927 - DNA, 963 bp, Oryza sativa
  Clone ID: TF_OsC24389_2
ggaaagaaaggtttgtttgcttcgcggccatagatagctatagctgctatcttaatctagctcgcctttaatttggcccccggcctctctctctctgcctgtgtcctaccagctgcacaaaaatctcccagaaaacaggcagaggggagagagacagatacgcatcaattaagctcattttcttcgatctgctggtgaaagaagaactgaagaagagaggtagctggactgaagaggccggcaatggcggcggcggaagtgcagtcggctgccgggtgggggaggcagctgcagcaggacggcggcgggtggaggaaagggccgtggacgagccaggaggacgcgctgctcgtcgagcatgtcaggcagcacggcgaaggccggtggaattctgtctccaagcttacaggtctgaagagaagcggcaagagctgcaggctacgatgggttaactacctgaggcctgatctgaagagaggcaagatcactccccaggaggagagcatcatcgtccagctccatgccttgtggggcaacaggtggtcgacgatcgcgcgtagcctcccgggcaggacggacaacgagatcaagaactactggaggacgcacttcaagaagggcaagccgtccaagaacatcgagcgcgccagggccaggttcctgaagcagcgccgcgagatgcagcagagccagcagctgcagcagccgacgctaatgccgacgccgacgccgcagagcaaggacatcatcgttgccgagaccggtgacgcgcgcaccgacgacgacgcgggcggcgccgcagcggctgtggcgccgtcgtcgtcgtcggcgtctttgtcgatggcgggccgagaggcggaggacttgatcatgcaccaggacgcgatggacgacctcatgatgtgccccgccatgtctaccacctcatcctccacggcgccgccgtcgccggccatcagctga

SEQ ID NO: 21928 - DNA, 2718 bp, Oryza sativa
  Clone ID: TF_OsC50674_1
gaggtcttttgaaagcatcatcctctctctctcctcccccatcgacttccccccacacccaacggaagccgtaggagagagaggggaaaagcttgctcttttataccctcatctagggttccgagcccaccggctctctccccccttgcgggcccggcgccatctctcccgccaccgcctccccccctccccccctccgcctccgatagattcgcgctcgccctcctgacccacggattcggttcccacgaaaccgctcgatctgggggatctgctagattcgtaaggcggcgtttcgatcgatctgttcgggggtttctgccgtggggaattttgatctataaagttagttttttgattttgtttcttttttgctttttggtggcggtttcgctgtgttaggtttgtggtggtggtggtggtggtgaggatgtgcttgtgccgttagatgggggccatggcgatggtggagcaggaggggtgcgtcgagaaccggcagcccctggcggcgccgagccgtccggtttccgacggaagcagctatggcggcggcggcggcgggctcgcgcagatgtcgccgccggtgtctagctcggcgaattccatctccggtcttaggcggacaagcgggccaataaggagagcaaagggtggctggacaccagaggaggacgagacattgaggaaggcagttgaggcttataagggtagaaactggaagaaaatagccgaatgttttccatacagaacagaggtacaatgcttgcatcgatggcaaaaggttcttaatcctgaacttatcaaaggtccttggactcaagaggaagatgatcaaattattgatcttgtaaagaagtatggaccaacaaaatggtctgtcatagctaaggcattacctggccgtatagggaagcaatgtcgagagaggtggcacaatcatctaaatccagaaataaggaaagatgcttggactactgaggaggaacaggcactcataaatgctcatcggatttatgggaataaatgggcagagatagcaaaagttcttcctggaaggactgataattctataaagaatcattggaatagttctctcagaaagaagcaagatatgtacaataccagcaataatatggtagttccgaaactgcttgtgcatgataagttcaaggataaaccaaagctgatggctatggagggtcatcttgatttgaacaaggcacccattatcaattcaaaagaccaacctggaacagctcatcggtctaattgctcagggtttctatctcgttcctcattaccaactgctcagccacttacttcccgtgaggcatctgtagttgatggttccgctgtcactttagtggcgcaagctctggaaagtgattctgtccgtggtaagggcttggaaattgattctgttcatgagaaaggtcttgaggttaactcggcacctgatcataccgggaactcttggaccattcaactagaagctgcaccatccaaaggtgaagcagaattatctttgaagaatgaggcacgctctcttggtccactttgttaccagatccctaacatggaagatgtagtccctgtgagttcctcactcttttctgaccatcttactgggaaccatacatctgaacattgtggggatgatatattgtcacctgctggctgcactactccccctccaacaaagggaaaattaacaagccagcttagtgttgattcaattttgaagagtgctgctaacagttttccaggtactccttcaatattaaaaagaagaaaacgggataaatcaacacctgtttcagctagtgagatgaagatcagtggatcaaatactgatagattttacactcccatggggatggaacctgctacagctacaccagagtcattcaaaactacatcttttttgtcattgggttctcttgatggttctgtaaagagctttgatgtttcaccacaataccgggcaaggtcaaaaagaatggctctcacgaagacagttgagaaacaactggatttttcatcagatggattagatacttgtggttctgagattctgaactcttcctgcaataattcccaaagcacactttctattaccgaagccccaaaactgaaagaaaaggaacatgctgttcaattggaaaatggaaccaagaactttgcgcatacaaccaatttggatgtaacctaatcttggaaaatgcaggaactgacatcaatctgatgaagtaggacagatgagctgaagtgtctttctgagctgatgagctttttctcaaagtatcacgattaaaccacaacaagatcaaacaaaaccggtggagaagaattccagaattgaagctttgtactgagtacagaaggtccaccaatcattctcccatctcttctaaccaaggtgtacaaaagatgagcgacactctgtagaagaatacattgctcgctgcactttgtgaatttacagttagaaaattcagattgtagaagccacaggtgtgtacaaaacaacaacgaaaaaaaattatagtgttagaacgtcattatagctgaataagagtattcctcattggattgtcagatttattttgtcttgtgctttccctttgtcgcgaaacagccagggtctgctctgtgtaacaataataaaacccgtttttgcaaaatcattgccagagatagtcaagaaaccattttgac

SEQ ID NO: 21929 - DNA, 1702 bp, Oryza sativa
  Clone ID: TF_OsC3094_1
ggctggactgcaaagagtttaatcaaacaccattcatacaatcatactacagctaatcacagtttttgaatattctactacctaaagctggcaaaaaggcgggctacatcacaggattgcattggatcatactaatgccatggcaattgacgaagctcggctaaaatcaacttatgctgataacgggcttcggtttctcatcgtccttgctctctgtggtgacagccgggggcctgcgttggtgctgcacaacagctagctgatcagaaaagagcaattccttcaagcagtggagttgcttcctctctttctccatcagcagctccttctgctcgaaacgacgtattttatcctggatttccttcatctgaacacccactatgtcagataaagactgctctatagccttccgttccttttcaagttgtacttgtgcgttggcagacgcctctttgagcaaatcattggctgaaagaccatttgtgcaagaagattcttcttccttgctgatgttgatagaagaatcagtctcgctggcacttatatcaacctgggactgtgcagaaatagctgcttgccctgcagctacagcaacatctgaaccaacaatggctgacaagaacgcaacctgggccatgattggattgctagcatcagccagtggcgtgaggcgtagtcgttttgagatatgtgatccagattcttcattgagatcacaatcattcccaaactgaattttgtcctccttgggtcccatgaactgttccccaaaaggtaatcgggtgaatctagcaatgcagtccttttctgatcgactaccaacatgatgagaaacctttttccagtcttccccataatgcaggacggcctcaagaaggtgaagagtttctttatctgtccaatctgattttgcgtcctcagtaatttcaattcgcttgaagtctgccgaagtaagacctggccggtaattggcacggacatagcatctagcacagaggcttatatctgccttctcacaagagaaataagcaagcccgcacacggtgcggcacccggtgcaaagcttactgggcattgttgccccaatcggcaaagaggactgcgataacgctgcctcctctttcttatctctcccctgcttcgctcccgacggcgaagctccatagtttatcagcccccattcctcaaggaagtcgaacacgcgacgcacggagccgacatctccgacgagcccacgcctggcctcggtgagcgtcagccgccgccccggccgcgcccggaacctcctcacgagggtgtcacggtagtacttgtaagcctccgggcccctggacccggacgccgccgccgcctccccttcgaagaactccggcatgaggcggcgctcggtctcgtggatggagtcgtaggagaaccacgctgaatagctcgggatggtgatggtgcagggcgactcctcggccgcggcggcggcggcggcggcggcaggggcgggggcggcggcggaggcggctgaggaagccgaggtggatggcggcggaggggcctccgtcttgacggtgcctgccgtcgaggggggctgggagaacggcgcccccgaggacggcggctgcggcggagcgagaggcatggagttcgccgtcgccgtagtcgccgccgccgccgcctcggccgccggcgctggcatcgacggcgtggccat

SEQ ID NO: 21930 - DNA, 1317 bp, Oryza sativa
  Clone ID: TF_OsC1713_4582
aattgcgataccgaagtacgtactaggacaaaacctggcgatggcggtaattagtttcttattaaaggaattgtctagagttcgaaaattttgatttgaaggatgaaaacctatggtctggcttttgcttctatcgatagaaaatccatcttcaaatcttacagattttggaccactgaatgagctttgtgattcatgctccaggccttctcctccaactccggcgacctcctcttcttctccggcattggcgacaccctcgctaccggagacggggaagacggcggcacagggatagctcatcgccattggcgtggactcctttcggctagccagcgaggcaggtggtgtcacagcggggccgtggcggcggaatgcacgaggtgacgagggcgagggaaacaggaggaggagaggagttagggttatgggatccgcacgaatcttaaagtatatccaatggtcttggcattgtcgagctcccaaggtgtcgactgacaagtattgatttcttatagcacgcaaccagccaaaaagccattgttgttcgtcaacatctacttcaccttcaccaatatgtcgaacactggagacaacggcaacactggatacaagaagaaggaggctcccgtcaacaccaacggaggcaatactacctcaaactccagcggaggaccattcttggggctgaggtggatgaactacctgaggcctgacctgaagaaggagcccatctccgatcgagaggcggagaccatcctctccctgcagaaactcctcggcaacaggtggtcggtgatcgcggcgaagatgccgggcaggacggacaacgagatcaagaactactggaattcccgcatcaggaagcgtcagtccgccgccgccggagctaaaggcgagccggcgccggccacggtcatggagaaagaaccgacggccaatgcggccaccgtggcggcggcgccggaggcggcatctcctcctcctcctcctatcccggcgcggctcccgatgttctcctgccaactgctcgacggaggcggcagcggcggcgccaccgccaccacacagtcgccgccgaacgccggttcatcggatatcagcgaggtgagcgcctgcggcggcaacggcggcggcgaggactcctcccgtgactactgcttctccggcggcgacgtcgacggcgacggcgacatggtccacctcctcgcgctcgatgacctcgacttgctcgtcgatgtccccggattgctcgacgttgatgcgtgggattgcgagctgtaccgtgcagattattcgacgagtagagctcgatga

SEQ ID NO: 21931 - DNA, 1523 bp, Oryza sativa
  Clone ID: TF_OsC75714_2
ttcctcaattatatcgtccatttgcagaatctgaatatttgcacgaaggcgagggcggacatgacgccccaacagcgcaatggcggcgatggcgctctttcgttcacaaccattgaataggatagggtcactgctgtaaaaaacaggaccactactagaacacgaattcctttcaacatcatcagaacataagaagcccgatctaaatataaagggaccgggtgttcctgatcaattcatttcccgtttagggtctcgtaattaacccagaggccggttcagatgcgggttccacgactctggccctattcatatatacgtacacccgagttgcgcgccgatgtggtcttttcggtacccacagacacgtcagcaagtagatcatggaagtatgcagtaggctgtgtcaagcactgactatggatttctatctctcggaatgccctggtgttcctgatcaaaacagtaaccggttagtggcccttccgtccagtacttcgcgatcctgagacggatgaagcaactctacaaccaactggcgtgccaatcagacgcggacacgggcgggcggcttggccggggcctggtggttgctgtttctatcagctgggccgtggctatgtcgtcgtcgctggacggtcccccgccgttgccacccgccgtcacgagggtcagcattgcctcggcgccggccgacaccgtggcgtcggcgtccgggctcgtcacgaagtagcgcgagatgttcctccagtctcccctcccgtacgtcttcagccccatcaagaaccgactagtgctcgtcgtggggccacgggacgcctgtccacgaggcaggcgagggggtctgaggcggtggtgagcacggacggcggcgatggggaggggttgctggtgtcttcttctggcaggttgaccgtggtgatgtcgtggatgctagaccggcgcttgtccttgccgccggagttgaggcggatgaagtacttctgcgcgtggctggccacctgcgtcggcgtccggctcgtcacgaagtagcgcgagatgttcctccagtctcccctcccgtacttcttcagccccatcaagaacgacttgtgctcctcctccgtccacgggacgcctttcttcctctcctggtccggggcgcggccgcgtttgaggtagcagccgcgcctgaacccgccgtcgctgccgtcccagtcctgcagggtgaacccggaggacgccggggacaagctgctgctgtagtgagggaacggcaccagccctgcctcgatggagccgacgtcgttctcgaggtccctgtagtggttcatcacgtctatgaccgtcttcctgggcagcatcgcggcgaccatctcccacctgttcggcgagtccaggtcgacctgtgcgagggccctctcgaacaccttgttctcctctgccgaccacgcctccgcacctcgccgctcctgcaagtaccagcacggctgcccggggaagtagggcagcggtagcacctcccgaagcgcctctgccatcat

SEQ ID NO: 21932 - DNA, 1308 bp, Oryza sativa
  Clone ID: TF_OsC805_1
gagagagacgaccgatcgatcgatcagctagctgcagcttccagaaagagtagttagctcgatcgatcgatccgggaaggatcagagttaattagtgagtgaggaattgtagccatgggccggccgccgtgctgcgacaaggaggggatcaagaaggggccatggacgcccgaggaggacatcatcctcgtctcctacatccaagaacacggccccggcaactggagatcggttcccatcaacacagggctgatgaggtgcagcaagagctgcaggctgcggtggacgaactacctgcggccggggataaagcgcggcaacttcacggcgcacgaggaggggatcatcgtccacctccagtcgcttctcggcaaccgctgggccgccatcgcctcctacctcccccagcgcaccgacaacgacatcaagaactactggaacacccacctcaagaagaagctcgccgccgccgccaactccacttcatcctccaaccgccaccccatcttcgccgacgccaccttcccctccgccgccggcggtagctacacggtgagcagcaactccgatgtcacccagatggcagccattgctaggcgctcccccttcgccgactgcccatcctcctcatacgcctccagcatggacaacatctccaagctgctcgacggcttcatgaagaccaactccccgtcgccgccgccgccgccgctgcagcactatgacggcggctattacgacgacgtcaagcccgccgtcgatgtcggcggcaaccccttgctgtcgtccttcgactgcatgtccggcgccgacctggactgctgcttcgacgttcatcagcagcaccagcagcagccgccggcgtcgttcatggagtacggcggctatggcggcggctacggcgacgagagcaagcagcagctgatgaaccaggcggcgccgccgctgtcttcgatcgagaagtggctgttcgacgaggcggcggcggagcaggtcgccgacctcatggacctctccgacggttgctgctccgtcccaatgatgttttaattagctcaagtaatgaaagaaaacactgtcacattcgatacgtatactgtgcacatcaataattaattttacattaattagctagatgcatgtttaggttaaactattgttgttactatacttgaagctagaagatttgttttatttgtagttttggatgtgtgaccggttgtacgtgtgtcactggcatcaaacgtcagcacaagaataagagatatcaacaggaattaaaaaaaaaaaaaaaaaaaaaaaaaaaaa

SEQ ID NO: 21933 - DNA, 1113 bp, Oryza sativa
  Clone ID: TF_OsC75714_1
tatgcggtgtgaaataccgcacagatgcctaaggagaaaatacccgatcaaggcgcctttcgccattcaggctgcgcaactgttgggaagggcgatcggtgcgggcctcttcgctattacgccagctggcgaaaggggtgtatttgctggctgcactagtggtgcaccggtgctgagcgctgacacggtttttctgttctctttgctttgaggctggccgcattgcatctgcaccagaacggagtcgtcgaggcggccgccgccggcgacgtgcgaattgccggcctcgatcttcacctgggcgtagggatggggcatgaagtggtggtgcccggcgccacggccgagcggcggcggcggaggcttgccgtcgacgagcacgccgaactgctccgacgcggtgagcacggacggcggcggcgacggcgaggggttgccgtggtcgtcgtcggggaggttgacggtggtgatgtcgtggatgctggagcggcgcttgtccttgccgccggagttgagccggatgaagtacttctgcgcgtggctggccacctgcgtcggcgtccggctcgtcacgaagttgcgggagatgttcctccagtcacctctgccgtacttcttcagccccatcaagaacaacttgtgctcctcctctgtccacggcacgcccttcttgcgctcctggtcagggccgcgcgcgcgcttgccgccgaccatgtagcaggagcgcttgaacccaaggccggcggggtcatcgccgccgtcccagtcaagagtgaacccggagccgccgccgccgccggcggcgccgtagtgggggaaggggacgaggccggcctcgatgaagcagacgtcgttctcgaggtcgtcgtagtgcgtcatgacgtcggccaccgtcttgccgggcagcagcagcgccacccgctcccacctctccgggtcgttccggtcgagcgccgccagcgcctgctcgaacaccttgttctcctcctgcgaccacgctccgccgccgccgcgccggtccggcaagaaccacccgcccgccgccgcagcctggccgacgaagtagtgcgccggcgccggcgggagcacctccatgtacgactccttcatcat

SEQ ID NO: 21934 - DNA, 948 bp, Oryza sativa
  Clone ID: TF_OsC75714_3
tcaaccgagaggctgcatcagctggccgcattgcatctgcaccagaacggagtcgtcgaggcggccgccgccggcgacgtgcgaattgccggcctcgatcttcacctgggcgtagggatggggcatgaagtggtggtgcccggcgccacggccgagcggcggcggcggaggcttgccgtcgacgagcacgccgaactgctccgagacggcggcggcggaggaggaggagtgcgcggtgagcacggacggcggcggcgacggcgaggggttgccgtggtcgtcgtcggggaggttgacggtggtgatgtcgtggatgctggagcggcgcttgtccttgccgccggagttgagccggatgaagtacttctgcgcgtggctggccacctgcgtcggcgtccggctcgtcacgaagttgcgggagatgttcctccagtcacctctgccgtacttcttcagccccatcaagaacaacttgtgctcctcctctgtccacggcacgcccttcttgcgctcctggtcagggccgcgcgcgcgcttgccgccgaccatgtagcaggagcgcttgaacccaaggccggcggggtcatcgccgccgtcccagtcaagagtgaacccggagccgccgccgccgccggcggcgccgtagtgggggaaggggacgaggccggcctcgatgaagcagacgtcgttctcgaggtcgtcgtagtgcgtcatgacgtcggccaccgtcttgccgggcagcagcagcgccacccgctcccacctctccgggtcgttccggtcgagcgccgccagcgcctgctcgaacaccttgttctcctcctgcgaccacgctccgccgccgccgcgccggtccggcaagaaccacccgcccgccgccgcagcctggccgacgaagtagtgcgccggcgccggcgggagcacctccatgtacgactccttcatcat

SEQ ID NO: 21935 - DNA, 1313 bp, Oryza sativa
  Clone ID: TF_OsC6000_2
caccttttggctcctccactagtagcaactactcgttgtcgtcgtcgtcgtcgactcgtcgtggtagtacgagtcttcttcgcgtccgcgccatgagcagctcgaggaaggaggaggaggaggttgattcgatggggatggaggcggagtgcgataggataaaggggccatggagccctgaggaggacgaggcgctgcggcggctggtggagcggcacggggcgaggaactggacggcgatcgggagggggatcccggggaggtcggggaagtcgtgcaggctgcggtggtgcaaccagctgtcgccgcaggtggagcgccgcccgttcacggcggaggaggacgccgcgatactccgggcgcacgcccgcctcggcaaccgctgggccgccatcgcgcgcctcctccccggccgcaccgacaacgccgtcaagaaccactggaactcctccctcaagcgcaagctcgccaccgccacggacggcggcgagatcgaccggccgtgtaagcgcgtgagccccgggccggggagcccgacgggatcggagcgcagcgagctcagccacggcggctgcggaagcggaagcggcggcgggcaggtgttccgccccgtgccgcgccccggcggcttcgacgccatcagcgcggcggacgtcgtgcggccgccgcggcggcgggacgacaacgacgacgacggcgacgacgacccgctcacctcgctgtccctctccctctccctcccggggttccaccacgacagcgcgcggagccacttccaggagctcccctccccctcccgctccccttcgccgccgccgtcggccgccgcagcatcgccatccgcgtacccgttcaccgccgagttcgtctccgcgatgcaggagatgatccgcgccgaggtccgcaagtacatggcgagcgtcggcgtccgcgccgggtgcggccacgccgccggtgccgacctccacatgccgcagctggtggagggcgtcatgcgcgccgccgcggagcgcgtcgggaggatgcactgatcaaaaacctagcgtccattagaatctctactatcgtttcaactttttttttccttaaaaatttgtttccaaaactgctgtgaaaaccgaaacagcagtccgaaacggaagaaccaaaaaaaaatgcgaggagagatgggaaagaaatgtttcgagctacgaaaaaaaaccgaaaagctcggctacctatgtacaggaaatggaaatggaaatgcaaatgggggaagtgagtggtgaatcatgcaaaaaaaaaaaaaatcagaattcaccatttttgctaac

SEQ ID NO: 21936 - DNA, 1270 bp, Oryza sativa
  Clone ID: TF_OsC43020_1
agaaagggtatcctatttttttttgaatttttaagcttataatctggtacttgatcaataaactataccattcatacaaagtggtattgtgttccatactgtcaaaggtaagtcacacaagctatgttgcacattagattctacatacatacatacataatacatacatcatgagcacaccaataatgttatagtagatctgtaaatattgagacccatagtaacacaaatataaccacataagtactgcaaatctggaaagcacatatgtagcttagaaacctggcctatatcttgatgtatggctttatccttcaatagcatggccctcattttccataaccagattgtgtagccaacatccttgtttcttcattgtcaatcttccagaatacctcagggcagctgtagtctgacatggtagatgtcagaagtggacatgggagattgctgcatgctttgtctttcccttcatctatacccagcaaggaaggtgcccctggcgcctcaatttctttccatatctgatccatggtatatccatccatgacactctgagtgcttttgaggactcttgccatgcagctgcgatcatcatgaatgtctcctccatccatactgatgattggcacagtatctaggaggcaggattggtataccagtgacgacgaggaggacgagggtgacatgtcaccccttctctcctgggctttcttcctcatgtgtgtcctccagtagttcttgatctcattgtctgtgcgccctggcagcctccgtgctatcctagaccacctgttaccccaacgagcatggagctcaataataagatgttcctcttttggtgacatgcgcccatgcttgaggccagggtggaggtagttcacccaacggaggcggcagctcttgcctgtcctattgagccctaatttgcgggtccccacccctcaaacctgatactttggcaacgaaatcccaacggcggtcaccgaacaggcggacagtgcataccagttgcaggtcctcctgctctgtccatggtcccttgcgcatctcctctctcactgtcaccatattggtgaccctagtatatgatgacagtgttgcaccaacgctgctcgcgcctaccttggatcggctcggagccggtcttcttgctcttcttccactcgtgtcgagctttgcgcgccgcctcttgagcatgtccccccctgatggacggccgcctctgcagcagcggaggactaccagctatctagagagagcactgcag

SEQ ID NO: 21937 - DNA, 1452 bp, Oryza sativa
  Clone ID: TF_OsC52907_1
gcgacgcccaatccgatcgatgcctccgtcgtctccgccgccgccgccgtcgcgggcggcgggggaggtggggatgggggagggggaggaggagggaaggagaaggagaagcaggtggtggctgcgccgctgcagccgccgatggccgtgcctgcaccggcggcggcggtgggggaggaggcgaggaaggtgaggaagccgtacaccatcaccaagtcgagggagagctggacggagcccgagcacgacaagttcctcgaggcgctgcagctgttcgatcgtgattggaaaaagattgaagcatacgttggctcaaaaactgtgatacagataaggagccatgcacaaaaatactttttgaaggttcagaaaaatggtacaggtgaacatctgcctccacccaggccaaagcggaaggcagctcatccatatccacagaaggcctctaaaaatgtttcgccagctgctatatcacaaccccctcctctgggggagcaaggttgtgttatgtccatggatacatctcctgtcatcagaaatacaaatgccagtgctgtagtaccctcctgggacaattctattgctcaacctttaagtgcaagtcgcacgcaaggtacaggtgctgttgctacaaataactgctctagtagcatagagagtccttctactacttggccaacttctgaagcagttgaacaagaaaatatgcttcgaccactacgtgctatgccagattttgcacaagtatacagctttctgggaagcatatttgatccagatactagtgggcatttgcagactttaaaggcgatggatccaattgatgttgaaacggtactactgctgatgagaaatctgtccatgaacttaactagccccaactttgcggcacatctgagcttgctgtcatcatgtaattctggtggggacccaattaagtctgaaggcatggaaaatcttggatctccacagagttgccatctcccgttcatggaaacaagtgagtgagggagaactgcttgtatgcggacgaagcttcagttgtttccacaagacgttcttgtgttctctttgtactggagttgtggacggctgatccggcagtttaccaacgctagcacgtgttgtggccgtggcatctgtatagcttccaataatgctctaaccctaggctagttttgctcatcaatcatgttcatgtagatagccagttttgtgtgctcagcaattctttttccctcggggtggggcatggctcgaaatgtttttgtatgtgtacatctttgtatacatgtatgtaaatatgtgtgatcatgtaatgcttaaagatactgttgactgatttgaggtaataatacaataaaccagtggggcactcgggtgtagtctctagggcgccccactgttgtgaaatgtgagctctgaagttgtggactatcttcgccgaattcc

SEQ ID NO: 21938 - DNA, 734 bp, Oryza sativa
  unsure (1)..(734): unsure at all n locations
  Clone ID: TF_LIB4830-029-R1-N1-B12
ccggccgggaaaccaaaggaaaggccttcttgtcatccttccttcctttatatagaggccccttcttctccccctcctctcccctgacttaatttagctccgcctccattcacgcattcacactagcatagcatataagatagcacttgtagagaggagatactagtacacatagagaagaggagaggagattgatcggtgagggaggatgatggcgtcttgtcggagaggagggggaggggatgtggataggataaaggggccgtggagtccggaggaggacgaggcgctgcagcggctggtggggcggcacggggcgcgcaactggtcgctgataagcaagtccatcccggggaggtcggggaagtcgtgccggctgcggtggtgcaaccagctgtcgccgcaggtggagcaccggcccttcactcccgaggaggacgacaccatcctccgcgcccacgcccgcttcggcaacaagtgggccaccatcgccaggctcctcgccggccgcaccgacaacgccatcaagaaccactggaactccaccctcaagcgcaagcaccactcttctctcctcgccgacgacctccgccctctcaagcggacaaccagcgacggncacccgacgctctcctccgccgccgcccccgggagcccctccggctccgacctcagcgactcagnccaccatagcctccccctcccagatggccctctcacccccacacctcctc

SEQ ID NO: 21939 - DNA, 1569 bp, Oryza sativa; identical to SEQ ID NO: 12344
  Clone ID: TF_OsC351_2

SEQ ID NO: 21940 - DNA, 1455 bp, Oryza sativa
  Clone ID: TF_OsC344203_2
atgccgtgcacgtcggcggcgtggatgttgcacgtgggtggtgcggcggcggagcaggcgtcgtcgtcgtcgtcgtccaagggaggggggagggtggtgacggcggggacgacgacgatggacacgggcgggtacaataatggaggtggtggtgggggtgggggtggcaatggcggcggcggcggcgaccaccaggagagcagcagcagcggcggcggcggcgggcagtcatccaggctcgcggcgcgcggccactggcgccccgccgaggacgccaagctccgcgagctcgtcgcgctctacggcccccagaactggaacctcatcgccgacaagctcgacggcagatccgggaagagctgcaggctgaggtggttcaaccagctggacccgaggatcagcaagaggccgttcagcgacgaggaggaggagaggctgatggcggcgcacaggttctacggcaacaagtgggcgatgatcgcgcgcctcttccccggccggaccgacaacgccgtcaagaaccactggcacgtcatcatggcgcgcaagtacagggagcagtccaccgcctaccgacgccgcaagctcaaccaggccgtccagcgcaagctcgacgccaccaccgcctccgacgtcgtcgtcgcccaccaccacccctacgccgccgcccacgacccctacgccttcaccttccgccactactgcttcccttttccggccgcctcccccgccgccgccgacgagccgcccttcacctgcttgttccccgggacggcggcgacggccgggcgcggcggcggcggtggcatgacatggccggacgccatggccgctggcgaggtcatcgacgacggcgccggcggcggccggtacgtcgtggccgagccgccgccgccgttcctggtgccggcggcgccgcacgggtggctcggaggccacgagatgatggtgatggtgaacgacggcggcgacgtcgccgccggcgtggcgtcgtcgtacgacgggatgataggcagggatcagggcggcggcggctcacacttcgaggcggctgcggcggcagcggcggcgccggcattcatagacttcctcggggttggcgcctccccccattttcctaacccacctatctcgtttttcgcgcgcacgcttttcaaactgataaacgggcgcctccggccaccagatctggccatcgtgaggccaccgatgatggaggatgactcgaggtgtgcggcgccgatcccgttgccgtcgctctcgccgccactactagcaattcatggttgtcatcctggggcctcctctgttagatctggccatcgcgaggctgcagacgttggaggagctgaggcacgtggcagctgctcccgtcgccgtatgttgccacattcaagaagtgaaggagaagtgaagagggagaaggagaggatgcagagaaaagatgtgaagtga

SEQ ID NO: 21941 - DNA, 2727 bp, Oryza sativa; identical to SEQ ID NO: 12314
  Clone ID: TF_OsC359_7176

SEQ ID NO: 21942 - DNA, 1380 bp, Oryza sativa
  Clone ID: TF_OsC351_8
atggggaggcagccgtgctgcgacaagctgggggtgaagagggggccgtggacggcggaggaggacaagaagctgatgagcttcatcctgaccaacggccattgctgctggcgcgccgtgccgaagctcgccgggctgctccgctgcggcaagagctgccgcctccggtggacaaactacctccgccccgacctcaagcgcggcctcctcaccgacgccgaggagcagctcgtcatcgacctccacgccaagctcggcaacagagcgctggctcccactagcttgatttctgtggctaagagaaccctacacgttgattcagaaatagaaagcatcctcttaggtccagttgcctcattggaaaatggaagaaagctttttaaaaaatggtccaagattgctgccaagctaccgggcaggacggacaacgagatcaagaaccactggaacacgcacatcaagaagaagctcatcaagatgggcatcgacccggtgacgcacgagcccctcgaccggaagcaggagagcccggccaccacctcgcagtccaccgtcacggcggagtcgtccaagtccggcgaggcgaccaggcagcaaagccggcagcttgacgacgccgtcgtcagggacatgtccgtgtctgccggtggcgacagcccgccggagtcgagcactaacaccgccagcaccgccggtggcagtagcagcagcagcagtagccatcaccaggaccctctggtgaagtggctgctggaagaggacctgctgcccaccggtgacgagccatggctcaatttcacggccagcaacgacgtcgacgagttcagtagcatcgccgccaccggcgccacgccggcgctgccgtgggacgtcggcatgacgacggactggctgctcgactaccaagattttgggatgggagactcgagcttggtggtcgatgcctccatggtcaacagctcaaatgggtccaacttctagctagaagatgtcagcagcttacttaattgtgttgctatcagtgtagataatcaagtgaagtgtataattaataaaagcatcaagattgtgaaagcagctaggcatggccggccaagatcggagggtgatcacaagtcgaggcctttgctcttcggaaaaccaatcaacggttgggattgatgcatttgagagagggtatgcgtagatggtgcatgttgttgtgtattttccccttgagattgattcgggggtttgtgccattaactagaagtgttattacttctcaaatggagatacttagatctttgttttttttttggagagatagaactatttgttggtgtagtacctatacatgttttcaataccccatgtgggtgggtaatgtactataatatt

SEQ ID NO: 21943 - DNA, 1017 bp, Oryza sativa; identical to SEQ ID NO: 12319
  Clone ID: TF_OsC344203_1

SEQ ID NO: 21944 - DNA, 463 bp, Oryza sativa
  Clone ID: TF_rsicek_6331.y1.abd
tcatggattcttctgaagtttctggtgctagtggtactagttggactgacgaagagacattgcttcttttagaagctttggaaatttttggtggaaaatggactgagatagctgaacatgttgctacaaaaacaaaagctcagtgcatgctgcacttccttcaaatgcaaattgaggaccgctttcatggcgatgaagatattaatcaaaatatccaggaaaacacagagcaagcttcagcagaaaaaggcgctgctgaaatacctgataaaatggaagttgaagagaaagcagaaggaaaagatactgcaggtgagaaaactccagagaaagcagagggcaatagtgtagaagcacaaacggaagatggaaatgctattgaaaataaagatgccaataattcaggtggcacagattcagttaaatctctaaacactgatgagccaaaaaaatcttctgatgc

SEQ ID NO: 21945 - DNA, 1659 bp, Oryza sativa; identical to SEQ ID NO: 12324
  Clone ID: TF_OsC331108_1

SEQ ID NO: 21946 - DNA, 1305 bp, Oryza sativa
  Clone ID: TF_OsC351_9
cccacgcgtccgctctgatcgcggtgaggctgccggggaggacggacaacgagatcaagaactactggaacacgcacatccgccggaagcttctcggcagggggatcgaccccgtcacgcaccgtcccgtcaacgccgccgtcgccaccatctccttccatccccagccgtcgccaacgacgaaggaggagcagctcatactcagcaagccgtccaagtgccccgacctcaacctggacctctgcatcagcccgccgtcgtgccatgatggggcgatcgccgtgctgcgagaaggaggggctcaagaaggggccatggacgccggaggaggaccagaagctgctggcctacatcgagcagcacggccacggctgctggcgctcgctaccctccaaggccgggctgcagcggtgcggcaagagctgccgactccggtggacgaactacctccggccggacatcaagaggggcaagttcagcctgcaggaggagcagaccatcatccagctccacgcccttctcggcaacaggtggtcggcgatcgcgacgcacctgccgaagcgcacggacaacgagatcaagaactactggaacacgcacctaaagaagcggctggccaagatggggatcgacccggtcacgcacaagccgcgctccgacgtggccggcgcgggcggcggcggcggaggtgcggccggcggcgcggcgggcgcgcagcacgccaaggccgcggcgcacctcagccacacggcgcagtgggagagcgcgcggctcgaggcggaggcgcgcttggctcgggaggccaagctgcgcgcgctcgcggcctccgcgaccccgggcgcgccgcacctcccggcaccccccgcgtcggcggcggcggcggcggcggctcacggcctcgactcgccgacgtccacgctgagcttctcggagagcgcggtgctcgccaccgtgctggaggcgcacggcgccgccgccgcggcggccgcgcgcgccgccatgcagcccatgcaggcgtacgacgaggcgtgcaaggaccagcactggggcgacgtcgacgccgccgacgtgggcttccccggcgccggagcggggttcacgggcctactcctcgaaggctccttgaaccagatcccgaggccggcggggagagacgcggaagccgacggcgagttccaggagaccgaggaggagaagaactactggaacagcatactgaacctggtgaactcctcgtcggcacctatgtcgacggccgtggttgtgcccgcctcccacgcgtactcgccggcgccggacttctga

SEQ ID NO: 21947 - DNA, 1615 bp, Oryza sativa
  Clone ID: TF_OsC424_1
cccacgtgtccgtcaatgggtcctttcatccgtcacatactagcttgcttgttcaattcaatcgagcagtagctaattgcatagtgatcgatcgatctgtatagatggtggtggccggcaagaagcagggacggcattctttttctgcatcatcatcgtcgtcttcgtcttcttcttgttcagtagtgcagctgggtcatcatcagcgcccacagggtgaggaccctctcatcggcatcaaagcagcagcagcaggaggaggaggaataatgagaaagggcccgtggacggagcaggaggacgtgcagttggtttggttcgtgcggctgctgggcgaacggcggtgggatttcttagcaaaggtgtcaggtttgcgcggcggcgggtgatgagcatatgcgtgcgtgcatctaatctatcgattaattgttgatgatgtcgatcagatggatggatgcatgcatatgccgtacatagtagatttgatgatagtaactgacataaatataatgtatgcgtgcgatcaacgctggttgttggatcgtccgtcgtgtgtatgggtggtgtgtggctgatgcaggtttgcagcgcagcgggaagagctgccgtctccggtgggtgaactacctgcatccagggctgaagcgagggaggatgagccccgaggaggagaggatggtggtgcagctccacgccaagctcggcaacaggtggtctcgcatcgccaagagcattcctggccgcaccgacaacgagatcaagaactactggcgcacccacctgcgcaagctcaagctcaaacagcaaaagcagcagcagtccgacgaccaccacaacgacaacgacgacgacgacgaccgcaactcctcctcctcttcgtcctcctccaacagcaacagcaacctgcagcagcagccgcagccagaggatgagtcgtcggccagtggcagcctgcaggcccaacatcatgaggaccagcaccaactgttccttcatcctctctggaacgacgacatcatcgtcgacgtcgactgctggagcagcagcaccaacgtcgtcgctccgccgccgatgcccgcctcgccgctctgggatatcgatgacgccttcttctgctcggattattcgctacctctctggggatagtatatatcatccatcagccgccaagacgatgacgactacatcaactcgatcgatcgatgcctcctaatcatgtgggagtactcagctcatctcaattgttacatccttgctacagctgctaattactgtaattactagcttgcatatagggatcgacggaggaattaatatatacatgttagtaactcgttctatagcgcaacttgcagttgcatctcaatctctgatcagtactatataaatatatatatatgtaacagctgctagctatagctagctgcgtacacatccatatgaatgtgtgtgtgttcatgcttgtactgcctcttgtagtatatgcacatatacgtgcaagtgcaacagacggctgctggctgatatattttgatcagcgcgccacgtgcacgtgcatacgtttcttcatttctggcaaattcatatgtatcatgttatacactgaactgacccc

SEQ ID NO: 21948 - DNA, 936 bp, Oryza sativa
  Clone ID: TF_OsC76813_1
tttattagaagaagaagactatcatcttgagcttattcttccatttgctccatcttgaaatcatcagtaaccatggctaggaagtgctctagctgtgggaacaatggccacaactccaggacttgcagtggccaaagagttcttgatcacagcatcagcagcagcaacagtggtagtactactgctgctgctgctactgcctgtggtggcttgaggttgtttggggtgcagctgcaggtaggaggaggctcatctcctctgaagaagtgcctcagcatggagtgcttggcatcaccagcatactatggagcttctgcctcgccgtcggtttcgtcgtcgtcatcttcgcttgtttcgattgaggagaacactgagagggtctccaatgggtacctctctgatgggctcatgggaagggttcaggagaggaagaaaggagttccatggactgaggaagaacaccagatgttcctcgccggccttgacaagctcggaaaaggcgactggcggggcatttctcggcacttcgtcactacccggactccaacgcaggtcgccagccatgcccagaagtacttcctgaggcagaacagtatgacacagaagaagaggaggtccagcctctttgatgtggttgaaggtatcaagagggcagcagcaatgcccatttcaggatctgcatctgaactgcagatccccggcatgtcgatcggtgtcggcgtggtgaaggaggaggttgtcctgcctccatgtctgaacctgatgagtaacagttcatcagcatcacagcactcaccttccctgacattgctggcaaatcctcaggtgcagctccagatgcctgacctggagctaaagatgtccacatcccggttatctgaccaatccggtccgtcgccgagcacgcctttcttcgggaccatcagagttacctga

SEQ ID NO: 21949 - DNA, 921 bp, Oryza sativa; identical to SEQ ID NO: 12481
  Clone ID: TF_OsC100249_2

SEQ ID NO: 21950 - DNA, 1228 bp, Oryza sativa
  Clone ID: TF_OsC729_1
gctgcaggagtgcacgagcggagcagccgcctcccttccaagaacacacaacgcaagaggagcagagcagttcagatcagagcagggaaggagcaagcacaatggggagggctccgtgctgcgagaagatggggctcaagaagggtccatggacgccggaggaggacaaggtcctcgtcgcccacatccagcgccacggccacggcaactggcgcgccctgcccaagcaagccgggctgctgcgttgcggcaagagctgccggctccggtggatcaactacctgcggccggacatcaagcggggcaacttctccaaggaggaggaggacaccatcatccatctccacgagctgcttggcaacaggtggtccgcaattgccgccaggttgcccgggaggacggacaacgagatcaagaacgtgtggcacacccacctcaagaagcgcctcgatgcgccggctcagggcggtcatgtcgcggcgagcggcggcaagaagcacaagaagccgaagagcgcgaagaagccagccgccgccgccgccgcgccgccggcgtcgcccgagcggtccgcctcgtcgtcggtgacggagtcctcgatggcctcgtcggtggcggaggagcacggcaacgccgggatcagctcggcgtccgcgtccgtgtgcgccaaggaggagagctccttcacctcggcttccgaggagttccagatcgacgacagcttctggtcggagacgctgtcgatgccgctggacgggtacgacgtgtccatggagcccggcgacgcgttcgtcgcgccgccatccgccgacgacatggactactggctcggagtgttcatggagtccggcgaagcgcaagacttgccgcagatctagagaaagagagagaattttaccgtttcttcggttaattgatttgttttttctctctctgccgccatcttgcaccggagggacatagctaacagacaagagtgtccatgagcgaatcatcaagcaggaagaacgcgaatcatgcgatgcgatgcgatgagatgcacccagtagctttgatagttaattttctttttttacctccttcctgtatgtatagaaacagaagagatcagtgatcgaaacctgagatcctttctcacaatgtgcaaactggatcatcagaaaacgggctctgcgtttctcatttgattaattaaattcaacttgcacgctaaaaaaaaaaaaaaaaaaaa

SEQ ID NO: 21951 - DNA, 1363 bp, Oryza sativa
  Clone ID: TF_OsC1121_1
gacgctgccgccattggcattgtttgtaggcgatcgatcgagcaatcgtggatggggaggaagccgtgctgctccaaggaggggctgaacaggggggcatggacggcaatggaggacgacatcctggtgtcctacatcgccaagcacggggagggcaaatggggagccctccccaagagagccgggctgaagcggtgcgggaagagctgccggctgcggtggctcaactacctgcggccggggatcaagaggggcaacatctccggcgacgaggaggagctcatcctcaggctccacactctcctcggcaacagatggtcgctgatagccgggaggctgccggggcgaacagacaatgaaatcaagaactactggaacagcaccctcagcaagcgggtcgccatgcaacggaccgccgccgccaccagcatgccggcggcggccaccaccagcagcaatgccgacgccgccggcgctgctgcacgacgccggcgatcgccggagccccgcacggtcgtcgtcagcccaatccggaccaaggcgctgcggtgcaacaacaacagcagcagcgggatagtggtggtgcagcaggcaggcgcctgcagccacggcggccgtccgccggagagcggcgcgccgggagacgcggcggctgataaggtggccacgccgcaggcggtgcagcagcagcagcagcaagagctggccggagcggaggatgacgacgacctgccggtgccggccgtctgtatcgaccttgacttggacgacatcgagctgggaggactcgacggcttcctgatcagcccgtggcgcggcggcggccacgacgacggtaacgccgccgccggagcggtgccgaatctgccgatgccgattggctatgagctcggcggcgccggtggcggtggcgaggctggagctgttgacctggaggcgttgctggggcagctggaagcagaggaagacgacgacggtgaccaccaccaccaccaccaccaccaccaccaccagtaggaggaggaggtgccttcttcgcttggggacgaagacgacgactacttggagttcgcgccatggctcctctgatagcggcatccatccatggatcattgtggaatcgaatcagtcgagctgagagttgagagttgagaaagatcgatgattgctttgctggtcgtgtgttcctgcgagtcggatcatcggcacgaagagagatctcatcgattaagtaggcgcagaaggcgtacgttgaagcttagctgctgaagaattactgacgtagtcagatgaccatttccttatatattgtacagattataatggagcagattaaataaatctaaacacaccgcatttgatc

SEQ ID NO: 21952 - DNA, 1232 bp, Oryza sativa
  Clone ID: TF_OsC43020_2
aataacaatattatattaaacttgattgatagaaaagtcgctaaggagatagctggttgtattgtgaatacagagtgccttgcccacttgcattgcatacatcaaggaccaagtggcaaaagctatcttgcacactagctagatacatgaaacatgagcacacttgcaatgttacatagctgtaaatatttagatccatgctaatgattcttctacaaaagcacttcacttctgctaggtggataattaacttgggtaacctagttcaatatattgcttcaataacatgggcccacccctttaccataaccaaattgtggtgctaccttgatctcatcatccatcctcaagcatgtttctgggcaatagtaatcccacataggatatggcaatagaggaccagataggctattggatgcactatcctttgcttcatcaaaacatggccctgggagcacatttggtgcctcaatttccatccatatctgatccatgggataaccatccatgtcaacaggggtgcttttcatgatgcttgtgatgcagccactgccgccatgaagttcctgctcctcaattccaatgatcattgacggggtctctgtttccccaccgagcatggagctcaaggatgaggcgctcttcatgcggagacatgcgcccacgcttgaggccagggtggaggtagttgacccaccggaggcggcagctcttgcctgtgcgattaaggccagttgcaggtcctcctgctctgtccatggccctttgcgtatctcttctctcactgtcaccatattgattacccttgtatcggctcggagccggtcttcttgctcttcttccacctctgtgtgcttgttggctccagcttcaggatgtgatccttgatgaactccagccattggaaatggtatcttcgaaaagtctctatctggtttcttccaaatatttttccctgtccgtctgatatgaaaagcactagcctttttgtcagccattatcattggcacagaggactccatccctccttttctgggaggagatgttgagcccctgcctctgcttcttcttcctctggcagtggcagcatgcactagcttcaggatttgtcggtcatcatcggcgccacgacgagatgtatgaagctctcgttccagtgcccaatcgagtgccctgttgaaaatctccatgcaggtgaggtgtgcagctgcaatccttcttgacttcgccat

SEQ ID NO: 21953 - DNA, 237 bp, Oryza sativa
  Clone ID: TF_LIB3431-001-P1-K1-G9
cccacgcgttcggcaagcaggccaccggcggcggcggttgtggtaggcccagccgtaccaccgagcgctgcttttggaaggccaccggatgcgaccgatccatccgatgaagaggctaccctaatcgcatgatcgggctcaataagacgctcggatactacgagggccgagcccctaccggcaccaagaccgactgggtcatgaacgaagtctgcctttgcgaatgcgacaccatta

SEQ ID NO: 21954 - DNA, 516 bp, Oryza sativa
  Clone ID: TF_jC-osleLIB3474001h09a1
ggtggcgtcgtccatcgattctgatattgggcaccatcatcgcctgcgccggcggcggcgcaagctggaacgccgggaacgagtgcagctccgggaaggggtcgctgtccacgatctccgactccagagtgcgcgtctcgccccaccgagttggtgtgcctagtgcacactgcatacgtacccatgtcggacgcctgctccttcacctccttcccttgctgcatcttatcccactcgttcttgttgatgtacatgcgacacagcaacccaatcatgcaacctgagagatcctttcttggcgcccgtggaggcgcggccatcattggcgagccgggactcatgcatgatccactcagtgttgacccctcctggcgccttgccggcgtataacacgagcgctttcttgatcccaagcgtgcgcccacgaggtgcgacgggcttgttggtgcctggggcctttcagtaccagatgccggcagcgcgtgtggggcgtgacccattaggatacttgcgatc

SEQ ID NO: 21955 - DNA, 464 bp, Oryza sativa
  unsure (1)..(464): unsure at all n locations
  Clone ID: TF_OsC1517_1194
gctttctggctcgctctctctgcacgatctctcgtcttgttggattatacagccatgacatggtgcaacagcttcaacgacgtgcgcgccgtggagaacaacctggccaccgccgccgccgtggccgcggccaagaagcagcagcagcagcagcaggtctcccagcacgtcaacctcatcaagacctgcccctcctgcggccaccgcgcgcagtatgagcaggcagcggcggcggcgacgatccaggacctgccggggctgccggccggggtgaagttcgacccgacggaccaggagctgctggagcacctggaagggaaggcgaggcctgacgcgcggaantccaacccctcatcgacgagttcatccccaacatcganggcgagaacggcatctgctanaaccattccgagagctttcaggagtnggcaaagacggctgattcggaattttttaacgccgtt

SEQ ID NO: 21956 - DNA, 1053 bp, Oryza sativa; identical to SEQ ID NO: 12599
  Clone ID: TF_OsC359885_1

SEQ ID NO: 21957 - DNA, 1677 bp, Oryza sativa
  Clone ID: TF_OsC342748_1
atggcgacggcggcggagtcgcaggggctctccccggggttcaagttcaatccgtccgtcgagcagcttctctgcttcttcctcctgccctacttgcagcaccgacgcctcctcgtcgacggcgtcgtcttcctcgacgacccggcgagcgcgccgccgtgggcgctgctccaccgccacggccggggcggcgaggacgaggcctacttcatcgggccggtgcccgcaggtgacggccatggtggccggcggcagcagcaggtgagccgcaccgtcaccggcggcggcggcggcaagtggataaagcagaggacggagcggccgagaggggaggaggagccggtggtggtgttcggcggcgagacgttccggtgggaggagttcagcctcaacttccacgccgacgagcggtgccggagcggcagcaccgggtgggtgatgcacgagttcgccgtcgtgccccccgccggctcccgcgtcgccgccacccacaccgcctgccgcatcgccttcaccggccacggccagaagcgcaagcgcgtgcccgacggctacgtcttcgtcgacgtccatgtccagaccgccgccgccgccgccgccgtcgctcctccgttgccgatgttgtcctcgtacggcgaaccaccgcacgaacacttctctgacgatcatccgccgccgcattcttacacttattacacccaaggataccagcagttcttgccgccggcggagcagagcgatcaagaacaggaatactgtgcaccggaccagcagaatttccaagattatcacctcgcggcggcggagcagaccgaccaagattacttctatacggaaatgatcaaccaagaacaggattacgcataccagcagcagcaacagcatctcttccatggagatttcctcgcgacttcgcagcagtttcttggtcaggatcacgaggtgatgttcactggcctcggtggtggtctcgtcgtctccgacaacggcgagcacgcctccgccgccgcgccggctacagagccgccggtgcacgacgtgttcttggaaactttggtgcctgagccacctgaaaatgcatatgttgacggagcaggggagtccgccatggcatcggctagctccgctggtggcgcgccattattggaacaaccctttgcgacgccgccgcagcagtttcttgatcaggagccggcgccggctggcctcaacgacggcggcgcgatgatctataacaacaacggtgacggcgagcacgacgccgcgccggctgcgcagccgccggcccggtactacagcgggccagttccggcagtggacagcgtgttcttggacaagatgcgggaatatttgatggctgatgcgaagggattatgccgaattgatgcgcccatcaacaatggcgaacacgccgccgccccagcgccggctgcggatgatccgttggctgctcagcacggccacggcgacgcgccgccgctgccggtgccgcccgacgcggcggagctagagcgggtggtcggacatttgttgagagaagtggaggatataatcaaggttgcggcggccggtggctatggaggctcgtcggacaagccgctctccgaatttgacaaagcacaaaaccaaattctggccaagttgatggcagtatttaatcaagtagccgaaagttaa

SEQ ID NO: 21958 - DNA, 849 bp, Oryza sativa; identical to SEQ ID NO: 12488
  Clone ID: TF_OsC330475_1

SEQ ID NO: 21959 - DNA, 305 bp, Oryza sativa
  Clone ID: TF_uC-osflcyp108a02b1
gcttccagtggtagttagtctactgaacttttaggagctgaagatactcggagctaggtaagatgtcatccagaacgggcaggctgggacgtgtgagcctagcgagtctgagcgtgctagtgatccatggttactgaaaggggcagcctgtgaactacaactgctccgacagctagctaactgagcagaagagctttagcaatggcgacgccggggcagcagctgccgccggggttcaggttccacccgacggacgaggtggtggtgtgaccattctttactgatgaccgttcttcttttattca

SEQ ID NO: 21960 - DNA, 2303 bp, Oryza sativa
  Clone ID: TF_OsC49175_1
atgagccaatcgccgccggactacgccagttattaaaaactgaaattgtactgtcaatactcaacacctataatgaaaactagaggatgccaggaatccatggaattacctttaactgaaaacattctatgtgactatatcagtgaatacaggataacgatagctgaaacaactaagtagactatgcatttgccatcatggttgaagagttcttttctttaatataaggttttgcatgtttctattccctgttactgttctgacaaaattttaaaatagaataattcttgctggattttatctcttcatatttttttcctcgataatatatttattgctccctcctatcaagtgctctgtgacaagctcgtcgggatgaagaagacgctcgtcttccactccggtagggcgcccaagggccagaggaccaactgggtcatgcacgagtaccgcctcctcgacgccgacggcacccaggatctgcatgtggtgtgtagaatcttccagaaaaatggatctgggccacaaaatggtgcacagtacggtgcgccatacttggaggaagattgggaagaggaggatgatgcaattgagaacatgcctgccagtggcgctttcgctgaaatggctgcagtcacagatactgcagatgagtcgactgaggaagatgggaatttctcccttaaaactaatgatgagcctttacaaacccaagaataccagccagagataactcctgtgaaagctcaaggttcaaatgaggagaccaatggcggtggttacagttgtgatgttttttctctggatgagattttgcaggaacctgaaaatgtctgcaaaaatgaagagcagaatgccattgatgacaagttcactatcgcagagttatctggatacccaaggcaagatgatggctatgtaggcgagaatggtcctgtgaattggattgacccttcaaatggtgataatacaaactggcctttgagagcatatagtactcagaaccatgtcaatggaacacttagcgctgatggtttctttgacacggtgaatggtaccaactcatattcaggtccttcagataaccagaacctgtatttgcaagatgatggcttgacttcttctcatcaagtgggcgataacatgccattttatgacgcatcatctaatcacaaatgggtagatggaaaggatgattatttgaatttgaatgacctcctctacccgccagcagaaaatcaacccctgtttgatgctggggatgacctgatggcttacttcgatgccacggaggatgatttcaaatttgatattatgggcacagaagattctaattctcaacttccagacatgtcgaactttgtccaaaaggatgataacaacaataagtttacattagatgggatctctaataccgctttgtatggtgcttcttcatctggatcccatggcaatatgtatccagacactgcagtaccagatatgccgatggatgacactgttgacaaaagtttcggaaagcgccttgccagcatgctgggttcaattccagctccacccgcaatggcttcagagttcccgccgagcacaggaaaatctgttgtcccacttagtgctgtcaacccgagtagctctatccgtgtcactgcaggcattatccaactcggtggtatcacttttactggtagcaccgagcacctgcagaagaatggagatttcaatttgctcctctctttcactgtcgagggcgacgtctcaaccaaatccattggttttgaaccggatacgcagatgagcaccacgccaatggtgttgcgcagcggcatgtatcttttcttcgtatcggcgatgattctcatgttgagctacaaagttgggctgtgtatctacagcaggtaagttatagtagtttttgttgccccaggctgtttattaaattgaaggagtcatacagagtccactcgacgtagagggaactgcctgcgatttggacagtttggttctttacattgttatagttggtataccgttctgacagttgaaagatacatagcaataaactctggaattggagaaactagagttacacgaatttggtgctgaaacttttgttggtggcatgtactgtataatttactctatttatttatttcacccaattctgggaggctgtaagcgttccccgatcgatgtaagctgatctgaaacctgaatacgcgctcttcatttttcatacccaaagggccgagaggcacagtttgcagttaaaaaaaaaaaaaaaaaaaaaaaaaagggcggaccga

SEQ ID NO: 21961 - DNA, 1596 bp, Oryza sativa; identical to SEQ ID NO: 12489
  Clone ID: TF_OsC277393_1

SEQ ID NO: 21962 - DNA, 171 bp, Oryza sativa
  unsure (1)..(171): unsure at all n locations
  Clone ID: TF_LIB4370-024-R1-K1-D2
cttcctagctgacacntcctatattttcattcatggcgatgacaccgcagctagcattttctcgcatgcctcagggtttcggttccagccgacggacgagcagcttgtcgtcgactacttgcagaggcgtaccgcttgcgcagccatggcgttactcccgacatcacccga

SEQ ID NO: 21963 - DNA, 2933 bp, Oryza sativa
  Clone ID: TF_OsC13359_1
ctttttttttttttatagataaccaaatcaagaaatattattcaataacatttcagtttacaatttcactgttttacacgcaaagtttagacctgagctaaaaaaagcttcctgacactatcaaggtatattctaccgaatccgtcatgtccccaggaagtcccatatgaatttagatagatcagataacattcaccgtcccgaatcccaaaaccaacaacaacgacacaatgagaacagggattaccttttttattcaattcatattggggatcttcttctggaattttgtagatttgatgaggtagcaacctgaagtaaccagttgttacccggaaactagcaatgagcacctttccatccattatatggctctcaataactttctttatcttcgtcagaaatatgtgctccttcattctcatcttttttctgaacctcctttttttcttctttcctatacacttcttgtcaacaatgcttacttcttccttatcacgttccctcatcgcaatctcaagattgagctcttcgtattgtttgattttgtatctttctgtggactgagcctgagggttcatatatgattcttccgaaataacgccttcatttttcatcttatctaaacaaacattcaaccttttcgaacccttgactttatgcctggtataaaaatcttctactatatcttccaactgagctcttgacagattaaccagaaattcatcaggctgtccaatcttatcttttaagatagtagggtatgatgcatattctcttttatacaaggactcaactgatgatagtgtcgcgtaatatgatctcgtcccagaagtttgttgcctcactggagggagaattaatctgttatgaaacttccttgttctccaactaaaacagagatcagtgctgtgctctttcaaactctcaaaagcatatgcatcggcattgaagctcccctctataaactggtttgagacaatgggcacaacttcagatagaccatacatttgagtcattttgtcaactttagcacggatgtcaccaaggaaattgattatctggaacaaatttatctgtgtagacttctccataatagtttgttgatatctagcaaagcgaacaaggcatctcactttgccattaaagatacttccaaactctctcatttcagaattaattccatcgataagtttcaaatgtctggtggaattattcatgaacagttcaacaatttgaagtgtcttgatcatttcatatactgcacaactggttacttcacctggagcaaactcagctatatcgaccttcagctgcaaaacttcatcttctaattttcctatttctgaggaggtatccatgatttttctgaatgaagcctgcaaatttgagcctaactgtgacacccagacttcttcatcttgtactcttaaatttaacttctgaagcatctggtgcaaactggatgataaatccatcgcagacgtgttctccttatcgagtttcttgacttgtgaatccagacgaacataggcaattgaactaaaccgtggttcctcaatcatcaactccaaataattattaagacacctcaaagcacagttattatgttcagcagtttcaactgattgtcgaatagatggtccatatttgttgttgaagtctgtcagatgttgaatctgagccttttccaatttgccttccatcttccaaattcgttttttacctttgtttattttttgtctcacagtggccaaatcaagtaatactgactcaagcaattttgccaacttatcaataactctgaacattgattcacgaaaccatttcctagacacactgtgacgtagacaccaaatatgaggaatcttttgtcggtagagccttgtgcttgacctggttatcttggtggaacatttcttgctttttcgttcatccaattctctgatgaagatactttttttgtctgaagacacagcctgggaattcattaccatattttgcctttgtatttctgcaagatattgagagtaggatcccagaaaattatgatgaacacctaaattcaaggagatatgttcatcttcaacaatctttctgtctttctgaaggaacattctacatagagacttgtaggcctgtggtaaattcagttcatcattctgttctatcaaatattcgtacatcatcaacccacttcttgtaccgcatggtgtttggccttcatgaaactctaaacagagtttcacgcccaagatagatgtgcctgtctgtattctgcaagcatcaacgcacttccaatatccattctttgcctttctgaaaacattgttctcgtcatcatagcatagctggttatcaggccaattcaagaaccaaagggttccaggggagtcccgtggatcaatcatagtaaggtcaacccccaccagtatgttctgtggaagaggatcccatgtttttctctcagccaagaacatgatgatttcagtatcagaccaagagtcccccatagcaatgccaagtggtggtagtaccctagaaaataactccattttcagcaatgcactgcgataagatgcaatggtgtttctcacgtcctccctgccgcgcttgtacacctcctgcgccttctccgctagcgcgcctgccgccgccgccgccgccactgcctttgtcttggcgagctcgagctcggccttcacgctccacagctcctcccgcaacgcgtccgcctccgcgccagcatcgcgctctcgcgccctcatgtagtaggttgaggcgatcacgtccacctccaccccgctgtcatgcttgcccgtcgctgctctgccgctgccctctacctgcttcgccttccgctcgctttgaagaggaagagaagagagaaaagagaagagaaggagaagaaaagaggagagggtggctgacat

SEQ ID NO: 21964 - DNA, 732 bp, Oryza sativa
  Clone ID: TF_OsC13359_2
gcctgtggtaaattcagttcatcatctggttctatcaaatattcgtacatcatcaacccacttcttgtaccgcatggtgtttggccttcatgaaactctaaacagagtttcacgcccaagatagatgtgcctgtctgtattctgcaagcatcaacgcacttccaatatccattctttgcctttctgaaaacattgttctcgtcatcatagcatagctggttatcaggccaattcaagaaccaaagggttccaggggagtcccgtggatcaatcatagtaaggtcaacccccaccagtatgttctgtggaagaggatcccatgtttttctctcagccaagaacatgatgatttcagtatcagaccaagagtcccccatagcaatgccaagtggtggtagtacccggagaggcataatctgcgaagaagccgaggctcgatgtcgacgacgaaactgacgaacaccctggggtcgccgtcggagcagaggaaggaggtgcagtagggtaaccaagcacagaaatccacgtactctacggcggcggtgatccttcgccctagggaggccagaaatggaggagcggcgcggtgccggcggcggtgcccggatgcagaggatcgagtggattgggaaggtcgcgggtcgccggtggcctccggcgatgacttcccgcggcctcctcgccgcgccttggcggagaagggagaggaggggacacaaaccggacgcgtgg

SEQ ID NO: 21965 - DNA, 481 bp, Oryza sativa
  Clone ID: TF_uC-osflM202051g08a1
ggtggcgtcgtccatcgattctttcttgggcaccatcatcgccgtcgccggcggcggcgcaggctggaacgccgggaacgagtccagctccgggaaggggtcgttgtccacgatctccgactccggcgtgcgcgtctcgccccacgagtgggtgtgcgagtgcgactgcgacgtaaccatgtcggacgcctcctccttcacctccttcccctgctgcatcttctcccactcgttcttcttgttgtacagccgacacagcacccaatcatccaactgcacaaacaattcacaccagatcagatcagaccacgatccaattatcgatcatcactcccaccgaataatcttcgatcgaagcaaggatcattgctagtaattcggatgaatctgagctaagcttaccctgagagatcccttcttggcgcccgcggcggcgcggcccgcatcggcgagccggtactcatgcatgatccaatcagtc

SEQ ID NO: 21966 - DNA, 406 bp, Oryza sativa
  Clone ID: TF_uC-osflcyp108a03b1
gctgtctgtctctctctctctctctgactatctggggctgtgaaaactctgagcatgtgaagaactcatacgttacctgtgatctgagaagcttgagctgaagctgtgacagcgtctcactgatcgatgatcactcaacttggctgctactgcgcattcactgcgtggttagctagctaactgagcacaagagctttagcaatggcgacgcctgggcagcagctgccgccggggttcaggttccacccgacggacgaggagctggtggtgcagtacctccggcggagggcgctgtgccggccgctccccgccgacgtgatcgaggacgtccactacgccggcgtgcttgacccctgggacctccccggcgcccgcgatggcgaggcctacttgttcagtttccggc

SEQ ID NO: 21967 - DNA, 1395 bp, Oryza sativa
  Clone ID: TF_OsC114295_1
ctattgcacatgactgtaggagttgggagttaaggggtattctcagtgcatataaatattactagtgcagttgactgaagaatcaccaaataactcacatgaaaactttattgtctgccggattcaacattaactgcctgtactgtataaaatacaagttaatctatatgtattctcatcaatattttaaaaacctcctattgtacctgcaacccaatgaacgtcatacacattacacggtccagacggtccaaaacgttcgtttggagagtcttcttgtatgctattaattattcacagggatatgccgagaaggtgccaaatggcatctgatataggctgcaggtatagggttttgagttgtaaggagacgaaaaacttaaggttgtctttgtcgtatagacaagtgtaggaaattgtccacgtgtaagatgagactaggcaagaagagcagcactgactagtgtgcagcctgggctaccacccctgctagtaatgcagactattcaacagagttaacggaatttctacttcttatgtgcaagaggaactccctgaagcaaattgcgagcttgttgttgcagttgattgaggaccccaggggtgagataacgctctttgtgccatagagttaggctttttaaatatcttacaaatagcccagatatctttggctggttttttatctattggtattttagaaagtgaaggctccgtgagtgaaggaagtctgaactcatgcatcatccaatcagtcttgaacccttttgctgctctccctttgtaaaagacaagagacttcttcaggcttatgcatttggttccctcggaagagtagatgggcctctgaagaaaggttaacagtaatattactcccgagttccaaaatgcatgtattgtgataggagttagaagattatgggtttgagcatatgaaaaacccaacgcaacaccaagtataaacaactgtgggaattgtccaggtgtcagatgagcaaaggcaaatagagcagcactgacaagtatgcaaactggagtaggaaaccacttagtcaaggacaccattaaaaatcctcgaaacacagtctcctccagaattggtgctagaactccagtaatgcccaccagaaaagcagtgctggcacttgatgagccgattaatggcaataaaagaactaacgagtcagtctctctttctggaggttcaccattcagataagtcatagcaaccccaactaaagcaatagaaattatagcgccaaagagaccaactccagcccacagaagccagccattttgaagcttgaatggttctttaatattccacagcccaccatggtgagcaccaccgtctgccactcccacggcacatcccatcggcgaaggattggccat

SEQ ID NO: 21968 - DNA, 346 bp, Oryza sativa
  Clone ID: TF_jC-osleLIB3474001h09b1
tggactcatgggcggacgcgtggttatttttatacaacgcatagtattagctgcaactagacgcaagcatgaagcgatggggatggtgatgaggagggagaggtatctggaggcggagcttaacctgcctcctgggttcaggctccaccccacggacgactagctggtggagcactatctgtgcaggatggctgcggtgcatcgcctgccgcagccgatcatgggctaggtggatctctactagttcgactcatggaatctgaccaatcgctctctgtacggccccagagagtggctcttcttcatctcgcgcgatcgcaagtatactactgggtaacgctccaac

SEQ ID NO: 21969 - DNA, 376 bp, Oryza sativa
  Clone ID: TF_LIB3434-009-P1-K1-B11
cccacgcgtccggagatcgatatcagcagctagctaagcttcttccatagttagctagctagctcgcttctgcgtgtgagatcgatcgatttgtcgatcgcctagctaggacgacgagatggcactgagggagatcgagtcgacgctgccgccggggtttaggttcttcccgagcgacgaggagttggtctgccactacctccacaagaaggtggccaacgagcggatcgcgcagggctcgacgctggtggaggtcgacctccatgcccgcgaaccgtgggagctcccagaggtggcgaaactgacggcgagcgagtggtacttcttcagcttccgcgaccgcaagtacgcgacggggtcgcgcaccaaccgggcc

SEQ ID NO: 21970 - DNA, 2037 bp, Oryza sativa; identical to SEQ ID NO: 12535
  Clone ID: TF_OsC33185_2

SEQ ID NO: 21971 - DNA, 2121 bp, Oryza sativa; identical to SEQ ID NO: 12536
  Clone ID: TF_OsC33185_3

SEQ ID NO: 21972 - DNA, 1076 bp, Oryza sativa
  Clone ID: TF_OsC2923_1
ttttttttttttttttttttgaagagattgaaaacaaggataattgattatcttcggagttcggagtgagctcaaacaaagatgagaattttcttttctttttttttctcttctttgtttgagctcgattctgattctctcttgctaggaattacaactagttaattaattaaaagacattagtagagcaaaagaagggcgctgattaggacatgaaagcatggtaattaacggcctagtcaaacactaacacggtaaaacctctccctctctcatctgatcatctcatggacaattagaagcgacgacgctgcagctgctgctctcttctccctcctcccccgcgtcgccgccgtccgtcacgcaggacgacggcgaggacggcatgtcgtcgtcgtcggcggcggcggctcgccggcgtggcgcgccacggatggacggcggcgaacggcggtgagccagcgtggtggtcttcttgaatacgcggcagaccacccagacgtcgttggcctccggcggatggtcgtcggcggggaggaggcggtactcgtgcatggcccagtcggtgcgggcgccgccgcggcggaagaagacgagcgtccgcttggcgccgacgggccgcttgccgcagcgcggcgcgacgacgagcttctccttcccggacgccctccacgcgccgccgccgccgcccgccctgctcccgccgccgcccctccgccagcagctcgtcgccggcaggtggaagaagtacctctcgccgtctccctcgcctggaaggtcccatggatggaggcgggcgaggtcggcgacggggatgacgtcggcggggagggggcgcgacatgaccttgcggcggaggtagtggagcaggagctcctcgtcggtgggtcggaaccggaaaccgatcggcaaccccgcctgcggcagcatccggtacccaccaccgccaccggaggccgcctccgccgccatgaatgagagcttagacgccggcgacgacctcgctggcgggcggcggcgcgggtcggggttgggtttgttggtcagctcgcttattacatgtcaggtaagagctc

SEQ ID NO: 21973 - DNA, 1718 bp, Oryza sativa
  Clone ID: TF_OsC5734_7
atggagcgacggtgtggcacgtcggcgccggcgatcgaagacatgtcgccgcacagccggagcacggccggaaaatacatagctggctacatagtgaaaaaaaaaatgcatcctaatggcgcgccgctggccgtgccaccgggtttccggttccatccgacggacgaggaattgctctactactacctgaggaagaaggttgcttatgaggccatagatctcgacgtcatcagggagattgacctcaacaagcttgagccttgggatctcaaagatcgatgcaggattgggacgggggcgcaggaggagtggtacttcttcagccacaaggacaagaagtacccgacggggacgaggaccaaccgcgccacggtggccggcttctggaaggccaccggccgtgacaaggccatcttcctcggcagcggcggcggcacgaggattggcctgaggaagacgctggtgttctacaccggaagggccccgcacggcaagaagaccgactggatcatgcacgagtaccgcctcgacgacgacaatgtcgacgtcccggaggaaggatgggtggtgtgtagggtattcaagaagaagagcatccatcagaggggcttcgaccagccggacatggcggcggcggccgacgaggacgagctccggtaccagctgctccacggcgcgggcatgtcgtcgtcgccggtcgaccagaagcacgtgctcctccaagagcagctcgtcgcgcacggcgcccatggcggcggcttcgtcgtcccggcgttcgaagcctccatgcacctcccgcagctcgccagcgccgacgcggcgccgtgcggcggcggcggcggcggccatgtcgcgttcgcctccatgaacccgctcgacgccgccggctgcggctcgcagaacatgatgacgatgaagatggcagcgacatccggtggcgagatgctgctgatgagcggcggcggcgtcgacggcggccgcttcggcgccgccgccgactggtcgatccttgacaagctcctggcgtcgcaccagaacctcgaccagctcttccatggcaaggtcgccggagcgcatcagcagcagcagcagatggccatggacgccgcctcgtcgttgcagaggttgccgttccaccattacctcgggttggaagctgcagatcttctcaaatccagtccactcccagtctcccaccgtccagtcccagacagagtcccacaggcgcacgattcctcacctcctcatcggccggcgccgccgtggggccaagccgtcgtcgcctcctcgctgcggggccaagccgccgccgccgccgggaccaatcgcctcctcgcccagtcgccacatcgccgccatcggagcaacccacgccggctctgccgcgccccattgcctcctcgcgccgtcacgcgccacatcgccgccgccgggccaagccaaccaacgccgccgccgcggcgccccatcgcctcctcgcctgccgcaccgtcaagccccaagatttggtatgacttgtagtggcttgccacatcgccgccgcaggggcaaggcgacgccgccgccgggccaagccaacgtcgccgccgtttgtgttaatgattgtgtattcatgtgtgattatatcataaataggcttgtgccttgcggtagtttgttctgcaggctgcagctgtggctttaccatgctctatgaattttacatgtgttttcagttg

SEQ ID NO: 21974 - DNA, 1067 bp, Oryza sativa
  Clone ID: TF_OsC225972_1
agcccagctatttcattcacacctcgatcaatctcgatcgtctctctcgtctactactagtactagcttcttctcctccatttctgacctgagctagctcagaacagagagctgagaatcatcagctagctagctaggcgtctggggagagagcaggagccatgtcggagtcggaggtgtcggtgatcaaccagctggaggaggaggagactcggctggagctgccgccggggttccggttccaccccaccgacgaggaggtggtgacccactacctcacccgcaaggcccaggaccggagcttctcctgcgtcgtcatcgccgacgtgaacctcaacaactgcgagccatgggacctcccaagcaaggcgaagatgggggagaaggagtggttcttcttctgccacaaggaccgcaagtacccgacggggatgaggacgaaccgggcgacggccagcgggtactggaaggccaccgggaaggacaaggagatcttccgcggccgcggcctcctcgtcggcatgaagaagacgctcgtcttctacatgggccgcgccccccgcggcgagaagaccccctgggtcatgcacgaataccgcctcgacggcaagcttccccccaacctcccccgctccgcaaaggaggaatgggcggtttgccgggtgttcaacaaagacttggcggcaaagattgcccaaatgccgccgcctcccttcccgcgcaacgactccttcgacctcgacctcgacgacttcctccacctcgacgccgacctgccgccgctcatcgacgaccccttcgcctccacctccacgctcaagacggagccacctccgccggccaacctgatgcacaaccactacggctacttctccctcccggcgtcagcgaccaattataaccacagctccggcgccatggcggaccaggcgattcggaggttctgcaaggcggaggcgtcgacggcgtgcttctccggcgccgacgctgacgtggatccggtggtggacgagctgctctccttcccggactccatcacggactactcctacatatggaaggcctga

SEQ ID NO: 21975 - DNA, 1131 bp, Oryza sativa; identical to SEQ ID NO: 12567
  Clone ID: TF_OsC256659_1

SEQ ID NO: 21976 - DNA, 354 bp, Oryza sativa
  Clone ID: TF_uC-osroM202005c08b1
tcgttcctcttcccaacactagtaggataaagccgcagagagagcagtagtagtagcgagctcgccggagaacggacgatcaccggagaagggggagagagatgagcggcggtcaggacctgcagctgccgccggggttccggttccacccgacggacgaggagctggtgatgcactacctctgccgccgctgcgccggcctccccatcgccgtccccatcatcgccgagatcgacctctacaagttcgatccatggcagcttccccgtacgataatcctcctcctccatcctcccaatcatcaccaccatcaacgccgtcgtgaattgattgattgatttggtttgatttgtt

SEQ ID NO: 21977 - DNA, 1343 bp, Oryza sativa
  Clone ID: TF_OsC1780_1
cccgcggcgtcgccacggaagcgcagcatagacagaggcagcagcagcagcagcagcagcgttggtggtggtggtgtgtcatcaccaacattttcacgagaggagaaggatggaaatggcggcggcggttgggggcagcgggaggagggacgcggaggcggagctgaacctgccgccgggcttccgtttccacccgaccgacgaggagctcgtggtgcactacctctgccgcaaggttgcccggcagccgctccccgtcccaatcatcgccgaggtcgacctctacaagctcgacccctgggatctccctgagaaggcgttgttcgggaggaaagagtggtacttcttcacgccgagggaccggaagtacccgaacgggtcgaggccgaaccgcgcagcggggagagggtactggaaggcgacgggagccgacaagccggtggcgcccaaggggagcgcgaggacggtggggatcaagaaggcgctcgtgttctactccgggaaggcgccgaggggggtcaagacggactggatcatgcacgagtaccgcctcgccgacgccgaccgcgccccgggcggcaagaagggctcacagaagctggacgagtgggtgctgtgccggctgtacaacaagaagaacaactgggagaaggtgaagctggagcagcaggacgtggcctccgtggcggcggcggcgccgcgcaaccaccaccatcagaacggcgaggtcatggacgcggcggcggctgacaccatgtccgacagcttccagacgcacgactccgacatcgacaacgcctccgccggcctgcggcacggtggctgcggcggcggcggcttcggcgacgtggcgccgccgaggaatgggttcgtgacggtgaaggaggacaacgactggttcaccggcctcaacttcgacgagctgcagccgccgtacatgatgaacctgcagcacatgcagatgcagatggtgaatccggcggcgccagggcacgacggcggctacttgcagtccatcagctcgccgcagatgaagatgtggcagacaatcctgccaccattctgagatggatggagcaagaaaaaggttgctgtagataaagggcggaaataggagtgatggctagaaaattattagatttactagaacgaaaatgattagaaatctggcaagcatgattctgcaaatgtggtggtagatgcttgcagtatgtaattcatttgttcagtatatgcatttggtaatctgcaaaacaaaaaaaaaaaaaaaaaaaaaaaaaacaaaacatatatgattttatccttcattagtctgaattctgaaatatatgcttgatggtttt

SEQ ID NO: 21978 - DNA, 1829 bp, Oryza sativa
  Clone ID: TF_OsC311999_1
gggctgcaggaattcggcacgagggttcttcctctctcatgtgccattagccaatagcatcaaggttttggtacattgtagctgattataattcattcatatagctattcaaacaagttcggtggctgtccacattttagctttggatagccggcttgccagctgcctgcctagctctaagcatctcttgctgttggagtttggagaggaaggctagaggaagcatatggcgcccgtgagtttgcctccaggtttcaggttccaccccaccgatgaagaactaatcatctactaccttaagcggaagatcaacggaagacagatagaactcgaaatcattccagaggttgatctttacaagtgtgagccttgggatctgcctgaaaaatcctttcttccgagtaaagatctcgaatggtacttcttcagccctagagaccgcaagtacccaaatggatcaaggacgaaccgtgcaacaaaagccggatactggaaggcaactgggaaagatcgaaaagtgaactcacagaggcgtgcagttggtatgaagaagactcttgtgtactaccgtggtcgagctccacatggttctcgcaccgattgggtcatgcacgagtaccgcctcgatgagagggaatgcgagactgacactggcttacaggatgcatatgctttatgccgggtgttcaagaagacagcgcccgggccaaagatcatagagcattatggtgtggtgcaccaccatgtcgagcaacctcaatggatgacgagcagtatcgatcgctccccaacgttggacgtgtcgtgtgatggaagaggtgatgactttgagagcagcagcttctctttcccaacagagacgccaatggactccatgcacggtgggtttggaatgcagatgagtgcacctcacgaggatggcaaatggatgcagtttctgagtgaagatgccttcaacgccaccaatccattcttgacgaacccagtttctgccaacttctcatgccttccatccaaggtggatgttgcactggaatgtgcgaggctgcagcacaggctcaccttgcctcccttggaggtggaggatttcccacaggacgtcagccttgacacgaagattggcatacttcgcagtaaccccaacgaagttgacattctccaagaattcctgtcagttgcgactgcctctcaggagctaattaatggctccaccagtagctaccctgaaatgtggttaggagctagcacaagcagtgctagctacgtcaatgaactgtcctctctagttgagatgggcggcgttggcacttctaaccaccacgaatccgcaaggctacaggtcgagatcgctgacatggaggtgttcaaggacgagaagaagcgggtggagaaccttagaggagtcaagttggtgaacacagtattccatattcgatacagactgtatacagatacagttcttgcatgcactaactcagagctagattgcaggagaagccggtcatcgcatgaccgatcccactgacgtaggcggcatcgacactgccccgatcttctcgcaatctcaacctgacgactttgctgctggtttcgacgacgtcaaccctaatgcatctttcgatctgtacgagaaggttgacgtcaaccacaggctattcgtttcaagggtcgctgcggcgaagacattcttccaccgcattgagccatcgaagaaggtcagcttccactcgaacccggcagcaaccgccgtcagtaaggcgaccgagaagttccatttccccgttacgaccaaagttagtggtaggataatgggcattgccctctctgcc

SEQ ID NO: 21979 - DNA, 1770 bp, Oryza sativa
  Clone ID: TF_OsC652_3
agtgctaatattacggagtatttttgcaaagggagtaatcaaagttccaatacgaaatcgcggtcgtagtagtacaatacaaagacgagttcacggagcgcgtaaactaataaggaaaaattaaacgtcgcggagaaataatagccgaactggatgaagatgagcagcactgcctcttgcctagcctagcccatcatggcgaggccgacggccccgaccagcaggcccatcaccgaacgggcctcgctgccgctggccccgccggtgctgcccgtcgacttcgtcgtcgtcggccggccgccgggatcacaaaacacataaaactatatcatcatcttccatagctgtacacatcctatattttcattcatggcgatgacaccgcagctagcattttctcgcatgcctccagggtttcggttccagccgacggacgagcagcttgtcgtcgactacttgcagaggcgtaccgctgcgcagccatgcgttactcccgacatcaccgatatcgacgtttacaacgtcgacccgtggcagcttccagccatggcgatgtatggatcggatcatgaccggtacttcttcacgatggcggcccgagaggcgcaggccagacgaacgacaccgtcgggtttctggaagcccaccggcacaaagaagacgatcttcgtcgtcgccggtgggcatgaggtgcccaccgccgtcaagaggaggttcgtcttctacctcggccaccaccaaccatcgggcagcaacaacaacaacaaaacatcatggatcatgcatgagtaccgtctcatgaactctccaagagcggcagtgccgtcgtcttcttcggtgaatcgtcttcccactgatgatctcacggaagagatggtgctgtgtaggatctccaacaaggacctgcctaaaccacccttcatccacaacagcttgttgcagttctcttcagtggggttgaatggtgatgggtataattacttgatccttgatcaccttgagcctccagcaatggagtatcctaatgttggcattggtaatgttgatgatgctgctgctggtactgatgatccgggtgaccttgatgaggagattgatgatagcatgcaaagaaaccatggtggctagaattaaccagtagcatcatgagtgaatggttttgcgggaaatttgagttaaatatcagataataaaataataatcggaaaaaaaaaaaaaaaaaacccgcggcccggaagagatggtgctgtgtaggatctccaacaaggacctgcctaaaccacccttcatccacaacagcttgttgcagttctcttcagtggggttgaatggtgatgggtataattacttgatccttgatcaccttgagcctccagcaatggagtatcctaatgttggcattggtaatgttgatgatgctgctgctggtactgatgatccgggtgaccttgatgaggagattgatgatagcatgcaaagaaaccatggtggctagaattaaccagtagcatcatgagtgaatggttttgcgggagatttgagttaaatatcagataataaaataataatacaaagaataaaaagaaaaacaaacctgtatagttagcaggttttgattcatttcgttgaactttgtgtgcttgttagctagcctatataccaaacatgccttggcgaggctttctatttgtatatagctttttttcttttttctattgtaaggttcgaactctattgagttgattgaataaacattatgcaatttatgta

SEQ ID NO: 21980 - DNA, 1422 bp, Oryza sativa
  Clone ID: TF_OsC1517_1609
tctctccctcctcccgcgcgcggggtctcgccttaacgtttgccgcatatgggggcgacgagcaaagcgtaggccggagggagggacagggagagagagagagagaggctttctggctcgctctctctgcacgatctctcgtcttgttggattatacagccatgacatggtgcaacagcttcaacgacgtgcgcgccgtggagaacaacctggccaccgccgccgccgtggccgcggccaagaagcagcagcagcagcagcaggtctcccagcacgtcaacctcatcaagacctgcccctcctgcggccaccgcgcgcagtatgagcagagtcagttgcaggcagcggcggcggcgacgatccaggacctgccggggctgccggccggggtgaagttcgacccgacggaccaggagctgctggagcacctggaagggaaggcgaggcctgacgcgcggaagctccaccccctcatcgacgagttcatccccaccatcgagggcgagaacggcatctgctacacccatcccgagaggcttccaggcacccgtcagccgtcaggacattggaactggtcaactggatactacgattacgaagccactcttgttgtgttgctgacctgctgttgcatgcatgcacgagtcggcaaggacggcctgatccggcacttcttccaccgcccgtcgaaggcgtacacgacggggacgcggaagcggcggaaggtgcacaccgacgagcagggcggcgagacgcggtggcacaagaccggcaagacgcggccggtgttcaccggcggcaagctgaaggggtacaagaagatcctggtgctctacaccaactacggcaagcagcgcaagccggagaagaccaactgggtgatgcaccagtaccacctgggctccgacgaggaggagaaggacggcgagctcgtcgtgtccaaggtgttctaccagacgcagccgaggcagtgcggcggcggctcggcagcgacggccaaggacctctccgtcgacctcgtcgccggtaacaacatcaaggctagcaatgctgctgctgaacaccaccataacgacggcgtcggcggcggcggccacggtggcaacaacagcagcatgctgaaggaagctgcaggcattgtagatttctacaacccagcggcggcgctaatcggctacagccaggcggctcctaacaacagggcggctgcttctgctcatttgacgatgcctaactttgaggtgcacacaggaggtgcaggctttggcccctgatggatggaagaaaacaaagcaaattaaacatatttgactgatgatatatataggttagatggagagggcagggcaggtatatgatggcaaatgtgcatcatgcatgctagcatggtgtaatttgcatcgagtgaaaaaaaaaaaaaaa

SEQ ID NO: 21981 - DNA, 1518 bp, Oryza sativa
  Clone ID: TF_OsC1517_1495
atgtacacctctcccacactccttgctctctcgtttgctcttctactgctcatcctcctcttctactactcgtcctctttgctctattcacagctagcaacaagaaggaggcttacacatgcatgtgcacggtctctgccggacgcatatgaatcaggcatgaatagggggcacatcagcagctcggagctcatcgacgccaagctcgaggaacgccggatctccacggccaagcactgccccagctgcggcaacaagctcgactgcaaaccggattgggtggggctaccggcaggagtcaagttcgatccgacggaccaggagttgatcgagcacctcgaggccaaagtgagggaagaaggctcaagatctcatcctctcatcgatgagttcatacccacgatagaaggggaggacggcatatgctacacccaccctgagaaacttccaggtgtgacaagggacggcctgagcaagcacttcttccaccggccgtcgaaggcgtacacgacggggacgaggaagcggcggaagatccagacggagtgcgacgtgcagaagggggagacgaggtggcacaagaccggcaagacccggccggtgatggtgagcggccggcagaaggggtgcaagaagatactggtcctctacaccaacttcggcaagcaccgcaagccggagaagaccaactgggtgatgcaccagtaccacctcggcgacctcgaggaggagaaggaaggggagctcgtcgtctgcaagatcttctaccagacgcagcctcggcagtgcagctggtcctccgaccgcggcggcggcgccgccgccaccgcatccgccgtgacgacggcggcggtgcagcaggatcagcagcgcaggagggacagcggcagcggcagctgctcgtcgacgagggaccacgaggtgtcggcgacgtcctactcgacggccgggtacgccgtcgccgccgccgtcgagatgcagcatttgaagcatgccgccgaccatttcagcttcgcgcctttcaggaagagtttcgaggaggttggtataagtggtgatcaggtacactccaatcagcttgggaggtcggagcagcagcatgctggccaggaacaacagccgcaccggccgttgcttgcaaccacgacggcggtgcctgccacggccttcctgatcagccggccgacgaaccctgtatcaaatatagtgccaccagcaatgcagcatgcatctgtcgttcttgatcatgatcagttccacgtgccagcaatccttctccaccacgacaaatttcagcagcagcagcaacaaaagcttgacaggaggtctgccggcttggaggaactgataatgggctgcacgtcttcgagcacaaaaggagtagtatatacatgcacgttcaggaagcttcaattcctcactcccaagagacagaatggccttaccagccatactggactcctgacaaccaggatcatcatggatagtagcaacaaggctgcttttgatatgcattag

SEQ ID NO: 21982 - DNA, 1002 bp, Oryza sativa; identical to SEQ ID NO: 12547
  Clone ID: TF_OsC267092_1

SEQ ID NO: 21983 - DNA, 1447 bp, Oryza sativa
  Clone ID: TF_OsC153799_2
atggagatgacgatgtcgtcggcggcgacgtcgctgccgccggggttccggttccacccgacggacgaggagctgatcctgcactacctccgcagccgcgccaccgccgggcagtgccccgtccccatcatcgccgacgtcgacatctacaagttcgatccatgggacctgccatcgaaggcggtgtacggggagagtgagtggtatttcttcagcccgcgagaccgcaagtaccccaacggaatccggccgaaccgcgccgccgggtcggggtactggaaggcgacgggaaccgacaagcccatccacgacagcgccaccggcgagagcgtcggcgtcaagaaggccctcgtcttctaccgcggccgccctcccaagggcaccaagaccagctggatcatgcacgagtaccgcctcgccgccgaccctctcgccgccgccgcaaacacctacaagccctcctcctcctcccgattccgcaacgtctccatgaggctggacgactgggtgctctgccggatctacaagaagtccggccaggcgtcgccgatgatgccgccgctcgccgccgactacgaccacgacgagccgtccggagtccttgacgacgcctacagcttctacgcgccgccgatgatcagcaccacgctcatccccaagctccccaagatcccctccatctccgagctcttcgacgagcacgcgctcgcccagatcttcgacgccgccgccgacccgccggccgaccaccatcagcatgccctcgccgtccacccctccctgaaccagctcctcggcgtcggcgacaacttcctcgcggagtgctacccgtcgacggcgtccacggccaccgttgccggcggcaagcgcaaggcgagcccggccggagactacgccggcggcggccacacgccggcgaagaggctcaacggctcatgcttcgacgtggcgccgcagtccgtggtgggcggcttgcaagcgacgccgtcgtcagtcctcgccggactcaaccaccagatgcttcctcctcagctattctgaatatattcttaactagcttaattaatggccatggaaatcgatcaaacgcagtcgatcgaatttacggatgctacgtactggcatgaacaatcttgccgacgatattaagatcggatggaagcatggacgacgatgatgattggggtacggtatagaattattgtagtattgaacaattaggcatttgtatgcgattttttctcctacgtattcatttcaggcacagtgcaaaagcaagctggagccttgatagtactttacaccgtagagagggaatgttgtacaattaaagattactagatatacagaacaataatactttactgtagccaaaaaaaaaaaaactagtatacaggattgtagaagatatcaaatgcaatagattctggctctgatctgggaaaaa

SEQ ID NO: 21984 - DNA, 1823 bp, Oryza sativa
  Clone ID: TF_OsC148618_1
ttttttttttttttttttttgaaaaaaatgagtggctgccattaaagaatcacttattgattgatttacatgaatatgagctataaatccggctttatgatcttgacatcattctccttgatctcatgttccagacttctagtgggtctatctcaaagtcttatcaacccctatctagcttaattaatctttagtactgagctagcttgagtacacagtagtatagtaccatgagaaaaaatgtatacacaccacaaactatatagctatgcatgatcggacgacctagctagtccacacaagtacaaattaagtacaatttctttcccaatatatttactatttaaatctatcgttttggacctatttgctttcgaaatagacctcactgttcaaatcatcaattcgccatgtgcaattatgttcagtgtttaatcaggctgtggtattatgtacgaagaacgagctatcagttcatccccatgttagagtggagcagcatctggtggctcagtcccagtgacgatccctgcaaggcgctgcctatttggaaagttgcaccaacgcatgaaccgttcggcttcttgcccgccgcggcagcaggaggcagcgcctggatcgtcggctcgcctccgtccgatgatctcttgcgcttcccggtgacggccggcggctcgacgacggcgcctgccgacgtcgaggcggccgcagaggaggacgggtccaggtgcgcgagctgaaccatgctgttgttcgcgatgaaatggttcatgacggggtggccaaagagggcgtgttgttgttgttggtggtggtggtggtcgggctgcctcgccatctcctgcaggggggcggcggcggcggcgccgccgtcgtcgaagagctgcgacagcgagtactcgttgagcaggtcggaaatggaagggatcttctgcatcgccgtcctctgcgtagcggcggcggcggcggcgtgcagcgacgggaaggcgccggcggcagcgccctgcaagatcatggatgcggcgctcgacgacgacggcgcgtacagcggcgcgttctcctccagggcgcacggctcgtcctgctcgtggtcggagagcggcggcacggccagcggcgacgcgtggctgctcttcttgtagatccggcacagcacccagtcatccagcctcacgcgggccgtgccctgcttcatggggcggtaggtgttggcggcgtgggcgtctgcggcggcgaggcggtactcgtgcatgatccagttggtcttggtgcccttgggcgggcggcccttgtagaagacgagcgccttcttgacgccgacgctctcgttggtcgccgcgccgccgctgctgtggatgggcttgtcggtgccggtggccttccagtagccggagcccgcggcgcggttcggccggatcccgttcgggtacttgcggtccctcgggctgaagaagtaccactccctgtccccgtaattcgccttggctgggaggtcccacggatcgaacttgtagatgtcgacgtcggcgatgatggagacggggcacggcgaggaggcggcccggttgcggaggtagtgcacgatcagctcctcgtccgtcgggtggaaccggaaccccggcggcagcatcgccgggttcgacagaaccatcgtctccggcagtcacccacacacaacacacacctccctgcacaagcaaaacctatctagctatagctgctcacttccaagatcaagccactcgatcccctctcagctatgatctatgagatctatcagggtcgagcttgtatcaagaggaggcgagagatggacctcgtgc

SEQ ID NO: 21985 - DNA, 1433 bp, Oryza sativa
  Clone ID: TF_OsC272662_1
atgaacaggtacgacaacaacgggcatgcggcagcggcggcggcggctgcggtggcgggaggaggaggaggaggaggagggaataaggcggcgggggaggtagatgggcatgaggatgacctggtgatgcccgggttcaggttccacccgacggaggaggagctgatcgagttctacctccggcggaaggtggagggcaagcgcttcaacgtcgagctcatcaccttcctcgacctctaccgctacgacccctgggagctccccggaattgagcatctaattaacaagctcgatgggggtgcagcaatggcggcgataggggagaaggagtggttcttctacgtgcctcgggacaggaagtacaggaacggggaccggccgaaccgggtgacggcgtcggggtactggaaggcgacgggggccgaccggatgatccgagccgagaacaaccgccccatcgggctcaagaagacgcttgtcttctactccggcaaggcccccaagggcgtccgcagcagctggatcatgaacgagtatcgccttccccccgccgacaccgaccgctaccacaagactgaaatctcactatgccgcgtgtacaagcgcaccggcatcgacgacggccatggccaggtatccacggcgcggtcgtcggcgcactcccgcggcggcggcgcggcaccggtacaggacaacaagcaaggctcctcgtcgacgtccacgccgacgccgcctccaactccgtccaagctccacctcctcagcagcgagtgcacgtcgccgcccgccatcgtcacggaccacgccgccatggtggcgcacaaggcaccgtcgccgcggcaccatcagcagcagcagcagctccacgctgccaagccttgcggcggctacctgcagaattcctcgatggcttccgctgccggcggcgatcagcagcagcaatttcagcaagacttcgcggcggcattgtaccagcagtactccaagaacacgagcggtgccttcgcctccacgtactcgctgctcaacctcgtcaacgcggcatccatgggcagctccgccgctgccattgatgagctgagctcgctggtgggccacggcacgccgtcctacattaaccccgcggccggcagccacaactatagtcaattccttcacctgcctacgacgccgtcgtcgcatcaaccaacgccggcgccgctcgggacgacgacggcggcagcggcggcgacgctgccgatgtcgctcgccgccttctccgacaggatctgggactggaataatccgatccccgaggccggaggtagggattacagcaccagtactggattcaagtgaatcagcaatagctacagttcatgcacgcgtgcatggcattctgatcagatggtaccaccatgtactacctctgtctctctctctctctctctctg

SEQ ID NO: 21986 - DNA, 968 bp, Oryza sativa
  Clone ID: TF_OsC272918_1
gcacgagggcgttcctcccctctcctctccccttccctccatcgcatcttctcccgctccttcgatcccaaatcggccgccgccgccgctccgccatgtccccctcccgccccgacgaggcggaccccgccgccgacttcggctcccaccccaccgaccaagagctcgtcaccaaatacctacgccgccacgtcgactccggcgggaacccgtggcggtacgtccacgaggccgacgtgtacgccgccgatcccgacgacctcaccggcaagtactccccggccgtcgccagcgacgggtccagggcgtggtacttcttcaccaccgtgcggtccaagagcaccggcgggcagaggagggcgcgggccgtgggcgacggcgggtgctggcactccgaggccggcgccaaggacgtcgtcggaggcatccgcagcccccgcccgatagggcggcgccagttcttctcgttcgtcaacaaggagggcccccggcgggtgcggtcggggtggatcatggtcgagatcggcctcaaatacgcccagcagaacgcctcctccgacgagcttgttctgtgtaaggtgtaccggagcccgcgggcgccaccggctgccgccgccgccaacaaatccatggccgccccacctcccaccgccacgaaatccaagacggaggaggctacaccacctcccgatgacgtgaaaccggtggtggcggctgcgcagactcccgacaccaaaatactcagggcggcgaaggaggcggccgcgactggatgcaagaggaaggccgacgtgaagagctctggtgcaagaaggggcaagcggctctgctcccgctgccgggcggagacatcggaatcggacagcgagacggcggtacttgacaggtcgccgtccatcgaagacgaaacggcggactcttcagaaatccatggaagcagtgatggcaaattcatcaggttcttgtga

SEQ ID NO: 21987 - DNA, 1144 bp, Oryza sativa
  Clone ID: TF_OsC24651_1
atgcacctccccgctgtgggcatgtcacaccccaccgagggtgagcttgtcttccactacctctatcgtcgtgccgttaacatgccgctgccctctgaattcatttgtgatgtcaacgttcttcctcataacccatgggacatcgtcccaggctcagaaaagccagtctactacaaccagggaggtggcagcgactgcatgctggtgggaatgaggcgcaccctaacattttactttgggaattcacggaccgcagagcgcacaaaatggggtatgcaagaatttcgccttgctggcaatggtctttcgccttaccctgcgatgaagcatgccaccggggatggctcaaaaccaccctgcaactgtgccgaaacaaccatcgccaagagaaatgatggtctctctgcagttcttcgtaatgtgctcgccgtcaccccccttgtggaaaccgttgtcgaacctgatggatcatggctgatctgccgcatctacaggacaaggcagcgtgcattgcctgttatcactcctcctgccatagaaaatgcaagggaaatcattatccctcctgccaatggcaatgcaagggaggctcaagtccgctttattgacttcctgcagcagggatcgcacattgagtcatcctccccctgtagttgtatagttggcccctctttggcagagggaagtgatgaatctgctggtagtgttgaccaaaaggattgagcgcaatggagggagcaactaatcgataaaagcatgtcaactagtaaggaataaaaattgtgagtgaggtgacctagtgcaagtatgacctgcaagttatataagtactgttggagactgtgttctgtttaagttggggaactgtatgttctgtttaagttggattgtaagctttgttcaatagtttcaaggaattaaagcgtgtttgggttctaggaggaaaacaaatggtcattccagatgaagaagtctgagtaagcaacttttctaaaaaccgtttggtctgtccttcttcaatatattgtgttctgtattatctcatgcctttgtgtgagactactagctatctattaatatctatatgctttatcttccaccgtatatatagcttcttcagtattcctgtcaaaaaaaaaaaaaa

SEQ ID NO: 21988 - DNA, 651 bp, Oryza sativa
  unsure (1)..(651): unsure at all n locations
  Clone ID: TF_LIB4506-013-R1-K1-B12
ccacgcgtccggtggaatctgaaactgcgggatgcgatactccttcatcctccagtgcgtcgccttccctctcggctgatggccgagcgcgagcgtgaggctgttcaccctgccgatcacctcgccgtcgtcgtcgacgacgtcggcctccgcgctgttagacttccagtaccccaccgccgtcgtcttgatccccctcgccggccggacgccgcgctccttgtaccggctcctcggcgagaacacgtaccacgccccgtccaagctcttcccgaggccaagatctcctgaaaagaaaacaagaactaagaagttataatcgtgttcgtcatcaagaacattacgatggagtgatcataggatcgatcgatccatctgaccatggagttcgtctaggttcaacttgcagacgtccaattgcttgatgacgatgatgttggtcggcatggcgtcgcggaggttgtattttggtttgaggaagtggatgatgagttcttggtcggtcggcgtgaaccgcactccggngatatcggagtacggggacaccggccgatccgcatcgccgacatcgccgtgtcggggaacaatggcgagagcggatgtagctgcaggtggctcaccaccgtcgaccaccaccgcttcctccgcgct

SEQ ID NO: 21989 - DNA, 490 bp, Oryza sativa
  unsure (1)..(490): unsure at all n locations
  Clone ID: TF_OsC58633_1
cggacgcgtggggtgccagtcaccaacccattccggcggcggcgggggaggagaccgagatggggatggagaacccgccgctccggtggccgccggggttccgcttcagcccgaccgacgaggagctcgtcctctacttcctcaagcgccggatcgccaccggccgccccaccccctacatcgccgacgtcgacgtctacaagtcccacccctcccacctccctgagaggtcggcgctgcggacgggggacaagcagtggttcttcttcagccggatggaccgcaagtaccccaacggctcgcgggcgagccgcaccaccggcgagggctactggaaggccaccgggaaggaccgctccatctgcaacggcggnggcggcggcaccgcctcggggcgcgcggtggggagcaagaagaccctcgtgtaccaccacggccgcgccccgcgcggggagcgctcggactgtgtcatgcacgagtacaccctcct

SEQ ID NO: 21990 - DNA, 1515 bp, Oryza sativa
  Clone ID: TF_OsC83405_3
atggaggaggagaagaggttggaaaggattattaaggagattgacagtccaattagcccaggaggaggagcagctttattagcagaagatgatgatctggtgtttccagggtttcgatttcatccgacggatcaagagctcgtggggttttatctgacaaggaaggtggagaagaagcctttcagtattgacatcatcaaggagatcgatatctacaagcatgatccctgggatcttccaaaggtgagccatggcgcggtggcgctgcagggctcgtcgtcgtcgtcgtcgttgtcgacggcggcggcggcggagaaggagtgcggctatttcttctgccttcgagggaggaagtacaggaacagcatccgccccaaccgcgtcaccggctccggcttctggaaggccaccggcatcgacaagccaatctactcttcctcactcgccgccgccgccgccgccgccggtgccggcgactgcattggcctcaagaagtctctcgtctactaccgcggcagcgccggtaaaggcaccaagacagattggatgatgcacgagttccgactcccctcctccatctccgactccgatcacctccaagacgcatcagagacatggacgatttgccggatcttcaagaggagcatgacctacaccaagggcagggcggcggcggcagcagcatccatgaacaagcgaattagccatgagcttcagcacattcatcatcatcagcagcagcaattctactaccacgaggtagtccatgacggccatggccaccaccatcgtcgccacctgcagcactacgccggcagcgcttccatggcagcggcggcggccaacatcgtcgacgtcatcgatcactcgtcggacgccgagacgacgacgaggtctcactctcactctcagtctcacctcgtcgctgacattcgtcatcgtcagtcgccgttcatgctcgacttccatgctgggacggcgtcgtcgtcgtcgtcgacggcggcggggtggagcgaggtgatgagcttcagtagggatggcgggagcagcagcggcagtagctgggacgagctggggaggatcatggatatctctaccaattctgctaataataattactacttcgcgccgccgccttctcccgccggagccgctcgactcctcctagagcgcgccagcccgctgccgccgcctcccgccggagctgctcgcctcctcctcgcgcgcacccgccggagccgcctcaccctacccgccgctgcctgcttccctgctcgcgccgcgccgcgccgcaggtgacggggagtcgtgccaggaggagagggggccattggaggagggctggaggtcgctgcgcatggcccgtcagcatcggcgaggttggctgggcaagaggcgagcgccaacagaggtgccggggaggagcaggccgccggcgcggtcgtaggagagggggcccgctggagcgagggcacaggactagggccgttggacatcattcatgctagcagataa

SEQ ID NO: 21991 - DNA, 2621 bp, Oryza sativa
  unsure (1)..(2621): unsure at all n locations
  Clone ID: TF_OsC18626_3
tcacaacccaaaccagcccttaaaatcattttctaaaagatcaaaatcagctttggcccataatccactaggcagcaggtgaccatcctcacgtttgcatgaagcttttttcaactttcgctcaactctctctttcaaagtatcaactgctgaacaactagggtatgtggctactaacatatgtgaagcaagaacaccctcctcttcctcctgcttgttctccttgtcgcttccctctgctgtcttccgcagcctcagaacagatttagcatttgctgctgaagcatcatgctccttctggtcatcctcatggcaagtcccaccttcagccaaggtacttcctgcattctcttcaatctcaggtttctccatggtgcgttcactttcaccttcatttatgatgcaacttgatgaaccatcaacgctagaacacggtgctgcatcaaggtttgattgtagccgcaccctttgcactgcagcaccctgttgagtaaatgaactagctgagctagcagttggagcttggcgtcgtcttaggatagtgatacccgttgactcagcatcatctccatcagaaagcaagcttgcatttggagcttggtgctgtcttaggatggtaatacccgttgactcagcatcatctccatcagaaaacgaacttgcagttggagcatggcgtcgcctcaggatagtaatacccgttggctcagcatcatctccatcagaaggcatatccttttctgcagttgactcctcaggagcttcattcacatacttcgaagttacaacaatacctggttcctcatcttcacactcatctctagtcatgctcacatcaaaatcaggagataatgattctgatagctgtagcatgagcctcctatttgcagtgccctggtttggaaatgcggagttcggctgtaacggccaagacatgggaaatccagtcccctggaggaatggttcgttgccccatacattattcctcgcgtttgaatcgtccatgctgttgaatagatcttgcaaggattcagcaccagagtccatggagagcacatcctggtcggtgctatcataaggcagcaatggtgtgtcctcatacagtgcactcaactggggatttcggtcatctggccagaaatctaaattttccaacccactcagatcatccatgaattcaccctgcatcaccccatggttctcaaactcagttggtatgattccagtgtccgaatcatactgagcctttgatgttgttgatgaatgctcatctggatcagcaatggttcttcgaagttacaacaatacctggttcctcatcttcacactcatctctagtcatgctcgcatcaaaatcaggagataatgattctgatagttgtagcatgagcctcctacttgcagtgctaattcattattatcatggatattctgttgtgaaccaatcagctgagggaaagcaccagctgaagggctagccttagccccacacattattcctcgcgtttgaatcgtcgagacgtttacttcaatcgttgtcgcgttatcagttctgtctgcaagccaccttgtaattggcgcagcttgagcctcagttagagcaggcaaatcaattgggctttcatgcagagcagattctggagattccctgtttaatggtgtatttccgtcttcaattggttccatgttatcaggagttgaacgagaaggagtgggtgagtatccacttctatccacttcatccggactgggtcgctcaattttctcctcttgctttcggaacagccggtagagaacgtaacctccctgctcaccggactcaaactccggctcggtggtgcggtactcatgcatgatccacccagtccgctcacccttcggcgcacgcccccggtggaacacgagcgtcttcttcatgccaattacttgctgcttcttcttgtcacccttggacctgatcaccctgtccttcccggtggccttccagtacccggcctccgtcgccctgttcgacctgctcccattgggatacttcctatccttcggcgcgaagaagaaccactccggatcatcggagcggatcagagacttatcagggagatcccacggctcgcacttgcagacatcgatctcggggatgacatcggcctcgctcctgatctgccccgtgatcttccccttgaggtagtgcctgacgagctcctcgtcggtggggtggaacctgaacccgagcggcagcttcttgagctccatcaccgtcatgctgttgaatagatcttgcaaggattcagcaccagagtccatggagagcacatcctggtcggtgctatcataaggcagcaatggtgtgtcctcatacagtgcactcaactggggatttcggtcatctggccagaaatctaaattttccaacccactcagatcatccatgaattcaccctgcatcaccccatggttctcaaactcagttggtatgattccagtgtccgaatcatactgagcctttgatgttgttgatgaatgctcatctggatcagcaatggtttgattcaagaactcctccactggatctcgaggattcatattgccatcanaattaccaatggctcttagagggaaat

SEQ ID NO: 21992 - DNA, 505 bp, Oryza sativa
  Clone ID: TF_15856347
cccccgaacgccgaggacctgtttcaggagggttggacgcgagggcatgctgatgtggtcgcccgcgggtcgcgcggtccgtcgaagattctgggcgagcgcgtgctcgtcgaagagtctcggagatggaggggatcttggggacttggggatgagctggtcctgatcatcgcggcgcgtagaactgtaggcgtctcaaggactccggacggctcgtcgtggtcgtatcgcggcgacggcggcatcatcggcgacgcctggccggacttcttgtagatccggcagagcacccagtcgtccagcctcatggagacgttgcggaatcgggaggaggaggagggcttgtaggtgtttgcggcggcggcgagagggtcggcggcgaggcggtactcgtgcatgatccagctggtcttggtgcccttgggagggcgccgctctagaggatccaagcttacgtacgcgtgcatgcgacgtcatagctcttctatagtgtcacctaatcatc

SEQ ID NO: 21993 - DNA, 743 bp, Oryza sativa
  unsure (1)..(743): unsure at all n locations
  Clone ID: TF_OsC53655_2
ngctctctctgctataatttgccgtggagatcagggggttgggtactggaaggtgatgagagtactcaagttgatcgccggagcagcatcagcatcagcatcagcttcaccatgcggggatcagatcatcatcaggatgtcgtcgcggcaccgcggggcggtggcggtggaggagacgacgggcaggcgcacgacatggtgatgccggggttccggttccacccgacggaggaggagctcatcgagttctacctccggcgaaaggtggaggggaagcggttcaacatcgagctcatcgccttcgtcgacctctaccgctatgacccgtgggatcttcccgctctggcctcaattggggacaaggagtggttcttctatgtgccaagggaccgcaagtaccgaaacggcgatcggcccaaccgagtgacgccatcggggtactggaaggccacaggggcggataggatggtgaaggtggagggtgaccgtcctatcggcctcaagaagacgctcgtcttctacgtcggcaaggcgcccaaggggcttcgcagcagctggatcatgaacgagtatcgtctccctcatggcgacgctgaccgctaccaaaaggtagaaatttcgctgtgtcgagtctacaaacgcccaggaatcgaagacaactgtagtgcgatcgaatctcgatctacccgtcacttggccatttgcagattaattactagttctgcactactttaattgccctg

SEQ ID NO: 21994 - DNA, 1485 bp, Oryza sativa; identical to SEQ ID NO: 12527
  Clone ID: TF_OsC422472_1

SEQ ID NO: 21995 - DNA, 703 bp, Oryza sativa
  unsure (1)..(703): unsure at all n locations
  Clone ID: TF_jC-osflLIB3477P002f12a1
attcggctcgaggtttaagtgttcaccaaaaaacttttggatgtttatanagnaagactcggntnncgnccagcagaacatgagctagtcaactattacctcaaacacaagttgctcggcgatgatccccgtgtccacgtcatccctgtcattgatctttgcgatgaggaaccttggaatgtaccagtgatattagcatcgtcatcagctatacgatttggagacccagattggtttttcttcagccctggtgatttcaagtacttgaaaagcaaaaggtttaacaggacaaccaagtgtggattctggaaagccactgggaaagaccgtgacattaggacaggggacactgataacactgtcattgggactaagaagactcttgtttactatcaaggccgagtttcctgaggagtcaagtccaactgggttattcacgaatatcatgctgttacctttcatgaaaaccagaggacttttgttntatgttgcttgatgaagaaacctgngaaaacaactgaaggcggaactgatcccctgatctgtgatgaaggggagcccagcagaagcatgatttctgactatgaaaatcagccaacagcagaaggaattgcatctgaaggtacttttacaggaatagaggcaatctttcaagcaaccccttgggcagagaattgcttctccccaaaacaacagtctctga

SEQ ID NO: 21996 - DNA, 1050 bp, Oryza sativa
  Clone ID: TF_OsC1781_14
atttgctcctcgcctagctagcttgtctctcttccccggaggagaaaaaggaggagacgaagagagaattaattatctcggagatgagcggcggcggcgaaggggcggcggcggcggagaggcaggagctgcagctgccgccggggttcaggttccacccgacggacgaggagctggtgatgcactacctctgccggcggtgcgccggcctccccatcgccgtccccatcatcgccgaggtcgacctctacaagttcgatccatggcatctcccaagaatggcgctgtacggcgagaaggagtggtacttcttctcccctcgggaccgcaagtacccgaacgggtcgcggccgaaccgcgccgccgggtccgggtactggaaggccaccggcgccgacaagccggtgggcacgccgaggccggtggccatcaagaaggcgctcgtcttctacgccggcaaggcgcccaagggcgacaagaccaactggatcatgcacgagtaccgcctcgccgacgtcgaccgctccgcccgcaagaagaacaccctccggctagatgattgggtcctgtgccgaatctacaacaagaaaggcggcgtggagaagccgagcggcggcggcggcggcgaacgttcgaatatgatgagccacggggagaccgcgtcggcgggctcgccgccggagcagaagccggccgtgctgccgccgccgccaccgccgtacgcggcggcggcgccgttctcggagctggcggcgttctacgacgtgcggccgtcggactcggtgccgcgggcgcacggcgcggactcgagctgctcggagcacgtgctgacgacgtcggcgtcgtccggcggcgtcgtcgagcggccggaggtgcagagccagcccaagatcgccgagtgggagcgcacgttcgccggcgccgccgccccggctggcgccgtcagcacggccggaccgattctgggccagctcgaccccgccgccgccgtcgccggcggcggcgacccgctcctccaggacatcctcatgtactggggcaagccgttct

SEQ ID NO: 21997 - DNA, 1440 bp, Oryza sativa
  unsure (1)..(1440): unsure at all n locations
  Clone ID: TF_OsC1783_2
catngtgtcatggctccatcaccacctagcagctctacacctctctcttatattagctctctctctctctctacccccattcatgctcatctccttctagcttccagcttaatcccttccttgtcaatgttaatggacaaactctgagcattgcactacccatcatctcctagctagactcaccttagcttgtctcttngcgtcnctagtgtgtgattctttctcccatttcctgtttggtttgcactgagtgaacaagcaattaagcttggtagtagtagtagttgttgtattgatcgatcgatcgatctagagacgacgatgagcatatcggtgaacatggaatcatgcgtccctcctgggttccggttccaccccaccgacgaggagctcgtcggctactacctccgcaagaaggtcgcctcccagaagatcgacctcgacgtcatccgcgacatcgatctctaccgcatcgaaccctgggatctccaagaacattgtgggatcgggtacgatgagcaaagcgagtggtacttcttcagctacaaggacaggaagtacccgacggggacgaggacgaacagggcgacaatggcggggttctggaaggcgacggggagggacaaggcggtgcacgacaagagcaggctcatcggcatgaggaagacactcgtcttctataagggcagggcgcctaatggccagaagaccgactggatcatgcacgagtaccgcctcgagaccgacgagaacgcgccgccacaggaagaaggatgggtggtgtgccgagcattcaagaagaggacggcgtatccggcgaggagcatggtggagacgtgggactactccttgcacgagcgcaacatcatgagcgccgcggcggcggcggcgttcgccgatccgagcgcggcgtacgcgcagatgaggcggcagcacaggagcgggcggttcaagcaggaggcggagctggacggcgccgccacagccctcctccactactccagccacctcgccgagctgccgcagctcgagagcccctccgcggctgcggcgccgctccagcccaacccgagccagctggccaccgccggcgaggacgacgactgcaagggcgataatggcggtaggagggccaagaaagcccgcgccgccggcgacaaggtggcgacgaccacggactggagagcgctcgacaagttcgtcgcgtcgcagcttagccccggggagtgtggcagcatggaggcaacggcggaagccgcggcggcggcagtcgccggtgtgagctcgccgctggaccacggcgatgacgacatggcagcattgctgtttctcaacagcgacgagagagacgaggtcgacaggtggacggggttgctcggctccggcgccggcgcgagcggcgtcgacggcgacctcggaatctgtgtgtttgacaaatga

SEQ ID NO: 21998 - DNA, 1414 bp, Oryza sativa
  Clone ID: TF_OsC1517_1611
atggccatgggaggcagtagcccggcggcgggcggcggattgggcgggcggcgaggcggcggcggcgccgtcgaagccgcggggttgggagcgggcggtggcccgctggcgaggccgggtggcggcacggtggggcggcagcggcgacggtggcgatgcaggaggcgcgcggtgctgagaggagcgctcgagcgttgtgcggcggcaggaaggaaaaaggaaaagtgcgacgtccgcaccgccgtggacagcagcttgtcgccggccgccgccgtggccgccgccgcggggaagaaggcggcggcgtcgctcgccgtcctcgtcaagatgtgcccctcctgcggccaccgcgcgcggtatgaacaggagacgacgacgatccaggacctgccggggctgccggccggagtgaagttcgatccgacggaccaggagcttcttgagcatttggaagggaaggcgaggccggactcgaggaagctccaccctctcgtcgacgagttcatccccaccatcgagggcgagaatggcatctgctacacccatcccgagaggcttcccggtgtgagcaaggacgggctggtgaggcacttcttccaccggccgtcgaaggcgtacacgacggggacgaggaagcggcggaaggtgcacagcgacgaggtcgacggcggcgagacgcggtggcacaagaccggcaagacgagaccggtgatggccaacggccggcccaggggctacaagaagatcctcgtcctctacaccaactacggcaagcagcgcaagccggagaagaccaactgggtgatgcaccagtaccacctcggctccgacgaggaggagcgggacggcgagctcgtcgtctccaaggtcttcttccagacgcagcccaggcagtgcggctccaccgccgccgccgccgccgccaaggaggcctccgccgccgtcgccgccgccgtggtgaacagcaactactccatcgtccatggccatcaaggtggtggtggtggtagctttctcaaggaggcaaacgttgtgcacgagttctacgacccggcagcaacgatgggttaccggccacctgctcctgctgcgcacttcgcgccaaacttcgcggtgcacgcggcaaggaacagctttggtggcccttgaaggaaaaaccaaaattacacaaaatctaaacattaccgtttataccgatatgattcacataggtgccattatattacattcttaaccttacattcatccatcagttatttgcagttttgttcaaagttgttatatcgtttccgatgctatactgtgcaaagattattactacacgccgttctaactcgaaaatgtcaattaatgtatcagtttgtacatgtatacatgcacacggaagaggtcctgatgatgcatcacttcatat

SEQ ID NO: 21999 - DNA, 4886 bp, Oryza sativa
  Clone ID: TF_OsC1781_2
gacacgggacggcgcacgcggcccctcttcccaacactagtaggataaagccacagagagagcagtagtagtagcgagctcgccggagaacggacgatcaccggagaagggggagagagatgagcggcggtcaggacctgcagctgccgccggggttccggttccacccgacggacgaggagctggtgatgcactacctctgccgccgctgcgccggcctccccatcgccgtccccatcatcgccgagatcgacctctacaagttcgatccatggcagcttccccggatggcgctgtacggagagaaggagtggtacttcttctccccgcgagaccgcaagtacccgaacgggtcgcggccgaaccgcgccgccgggtcggggtactggaaggcgaccggcgccgacaagccggtgggctcgccgaagccggtggcgatcaagaaggccctcgtcttctacgccggcaaggcgcccaagggcgagaagaccaactggatcatgcacgagtaccgcctcgccgacgtcgaccgctccgcccgcaagaagaacagcctcaggttggatgattgggtgctgtgccggatttacaacaagaagggcgggctggagaagccgccggccgcggcggtggcggcggcggggatggtgagcagcggcggcggcgtccagaggaagccgatggtgggggtgaacgcggcggtgagctccccgccggagcagaagccggtggtggcggggccggcgttcccggacctggcggcgtactacgaccggccgtcggactcgatgccgcggctgcacgccgactcgagctgctcggagcaggtgctgtcgccggagttcgcgtgcgaggtgcagagccagcccaagatcagcgagtgggagcgcaccttcgccaccgtcgggcccatcaaccccgccgcctccatcctcgaccccgccggctccggcggcctcggcggcctcggcggcggcggcagcgaccccctcctccaggacatcctcatgtactggggcaagccattctagacgaccaaaaaaaaaaaaaaaccaaccgcattggcagcaatggggtcactgaacacacccgtgcaggctagctagcttcatggccggtgaactttgactcaggcgagccgccggagttgactcaaagataattaaaagaagtgtcttaagtggattggattggattagacagaggagatgaggactcgagaaaggcggcgatgagaccgtggttggggggaccctggcctggactgaacgacgacgaggcagcagcagaaagatggtgcaattgcatcgggtggcatgtcagtgtgtgtgtatagtggcatgtacatagtacatggtgattgattcggtatacagggggctagctttcctgtttctgtttcttcattggttaattattactcccattataaggtcttcttcagggttgctagcttaattaattaattaattagcccagtggttgaagtgtaagtcaaaattcatcaagtcagagactggaataatacaatacagtactgtagatatcgtagaagaaaatgtattttagttcacgtcagattaatagaaaataaaaataatatgatggaaccatgcgaggaaaaagcgtggaattaaaattaaaaaatttttagtcgattgggtatgtattttgagggtggctagggcatggtaacgtgtgtcataaaaagtcgctttctggaggtgtctctcgcttgacctgtaaagccaaattttgtaatgctattatcggctctaataataataacacccctgatagtaatggagctcagccaaacagtttcggctcaactaaaattaggagtggagctgggtggagctctctcacaaaataaactagagttgtggagctgggtttaggcagctccacaactccactccagccccaactcctggagctaaatttaagagttggagctgtaccaaacaagccattcacaagtaataccttttttaagcctataccaaaggaacaccagtatgcatgaagcctctatcgaccagagtggctaaagaaaccagacctggtcaaagttgtatgcaaatggagactagacctcctatgcaaagtgatccccatcacctcactcatgtcgagtgatttggggctcaccccatcaggaagtgcccagtcaaagtggtaaaggaggttcgctaatgtgagctcaagtgtggtggtcgcgagcaacgctccagggcattgcctgcatccagctccgaatgggatgaaccctaagtgtgcgatagatgtcctgatatctgcgccgctattctcgaatctctctggcttgaactcctccgcattgtcccagtactttgggtcccttgctacggcgaatgtgtttattagaacaggtgtcgcttgtggtatgtcatagcccataacacgacagttctccctgctctgtcgtagaattagtgcagaagcgggatgcagccgtaaggtctccttgatgaccatacataagtagtgtagctcactaatgtcgatgccaatcaatttgcctttttcatggccaagcgtgtttcgaacttcctgttgtgccttatccattgctcttggattcctcataagctccaccataatccattcaagtgtggaagctgtggtatcagtagcagctccaaaaatatcggtaacaagggcggcgatgacctccgccgtgagaggggaggtgaggccgtcttcctcctgcagtctcagcagcacgccgagcagatcatcgtcttcgtctttcgcgccgacgccggcgtcactccccttcttctccttgcgctcctcgatgatcgagccgacgatcctcgccatctccgcgtggctcctcctcaggcggcgctcggtgcggcggctcagccaccgcaccacgcgcgacgacgggaacaggtccaccatgctgtacccggccaccagcgtcgtcagcacgccgagctcccggcggtactcctcctgccgcgcgcacttgccgccgaacaccgccctcgcgatcacgtcgttcgtcagcgccgccagcgcccgggtcatgtcgacggcggcggcgttgctgctgccggcgatgatggagtcgacgaggcgcgacacctcctcctgacggatggactcgaggcggcgcacctggcgcgcgctgaggagctccgcgaggcagaccctgcgcgcatggcgccagtgctcgccgtagggcgcgaagatgacgcccttcccgccgaagctgacggcgtcgaccgtcgtgctccgggcgcggtcggcgaacgccgggtcgcgcgccttgagcacctccatggcggcgtccgacccagagacgatcacggtgggcacctcgccgagcctcaccagcatcagcgggccgtgccgccgcgacaggcggagcagcgcgcggtgtggcggcgacgcgccgaggaggtggtggaggctgccgatgacggggaggttccatggccccggaggaaggttcttggctccggtggttgctcccttctcgccgccgcggcgatgagctcccatgaccatgagcgccaacgcgagggcgagagtggccatagcgaccatgcacaagcttccgaaggagagctcatccatggagattggagaatggttttcgatcgacagctcatccatcggctcgcggcttgagccgggagggatgaatgatctgatattctatcggggtggctcgggcgagccgctggaatcgatcggtggccgttggatggcggccgagttattggtagccgtcagatgggagatggaatggcattagttagttactagtatccgtatggacggcggcgatgaaacaggggagccccgaaatgcgtgtaggaaggagatgcatggtactgtactcgagaattataagccgtgtgtatatgcgaaattggttggctagatcgatctgggcgtatttctctctcgaggctcttgctatgtttttcatcttttttaaagaagactggacactttgtcgcatgcaacaaagcatgctgcatttttacaaggtgtcggcaatcatataattatgcacttgtatcagcattcaacatttaagcaaagtaattcttttaagtctagggtacagccaaaaaaccaaaaattaaccgtgctcgatcgatcgatcgatccatggatcgatgatcgcctccaccggcagatcaaaatcgaagcaaaaaatcagggagaattcttggtacttccagtacctctcgtcgacaccacgtgtcgggttttctgcaccgcggatcctcgctggccgcatcgtaacggcgagcgaggttaaaaatagtggagaattcaagaacacatccctgatttttgtttctgccggatggggagtaccgtgagcatggtagaaatgactggtaaaattttcgttgatgataggtagccagagtcgatgtaaccagtcgattttttttttttttttggttttagttgacatgccttcctgatagattcagaacaaacaatagagaagagaggagaaaaaaacacagaggagaaattcagagaccaaagttcaaagttttggaattttcaggggcgccagcagctgatggtattgtcagtcgtgtctaggttcgtagaggaaattaaaatgtagaagaacgggtacttcagttcacttcaggttcgttcgtgccaaacaggtctctgacactttagttaggttttgatttttttttctctttttttctggttttttgtcgtttggtaatgtaatgtaagggtgattgcgacatggtatttatgtgattagagtcgctttcagttgggtctctcgcgtgacctggaaagccaaattttgtaatgcaattatcggtaataataataataataataataataataat

SEQ ID NO: 22000 - DNA, 306 bp, Oryza sativa
  Clone ID: TF_uC-osrocyp010a11b1
ctgacatgcacttttgtttgctgaccaacaaacccaaccccgacccgcgcctgcgcccgccagcgaggtcgtcgccggcgcctaagctctcattcatggcggcggaggcggcctacggtggcggtggtgggtaccggatgctgccgcaggcggagatgccgatcggtttccggttccgacccaccgacgaggagctgctgctctactacctccgtcacatggctatgttgggcgccctagccgcagtagtcaggcttgtggtccaactcttccaccaacattcgtggtgacggaaccagtcacctt

SEQ ID NO: 22001 - DNA, 1632 bp, Oryza sativa; identical to SEQ ID NO: 12585
  Clone ID: TF_OsC359887_1

SEQ ID NO: 22002 - DNA, 1032 bp, Oryza sativa
  Clone ID: TF_OsC83405_2
atgaagaggggttgtgaagatgaacttggagctggtgatgtgattctacgaggggtggaggaggtagaagaggaagatgatgatgacctggttctccccggattccggttccatcctaccgacgaggagctagtgacgttctaccttcgccggaagatcgccgagaagcggctgagcatcgagatcatcaaggagatggacatctacaagcatgatccctccgacttcctcaagacgagcacggtgggcagcgagaaggaatggtacttcttctgccttcgagggaggaagtacaggaacagcatccgacccaaccgggtcaccggctccggcttctggaaggccaccggaatcgaccgcccaatctgctctgccgccggcggcggcggcggcgactgcatcggcctcaagaagtcgctcgtctactaccgcggcagcgccggcaagggcaccaagaccgactggatgatgcacgagttccgcctccctccgccgcccgccgacgacctcgccgccggccgctcctcccctcctccgagcctccaagaagcggaagtttggaccatctgccgaatcttccagaggaacatcacccacaagaagcagccgcagccgcagctcgccgtcgccgccgccgcggtgccggcgccggtgccggacgcgacgagctcgatcaccggcagcctcgagtccgacagcgccggcgacgacgtcgtcgagtacatgaacaccctccagccgccgccggcgagcaacgtgaacggtggctacagcaaccagcgctacttccaggagcaatggaacagtagcagcaatgataataccacagtgtttcatcagcatgcggcggcggcgccaccgccggagccttcgccggcgacggcgatggccggattcggccatgatcagagcgttctcagctcgccggcgccgagcgatttctactacaaggatggatgcaacgatgacatttacaggatggtgatggagctcgccgatccgagcttgttctatgatcatatatatgcttaa

SEQ ID NO: 22003 - DNA, 2555 bp, Oryza sativa
  Clone ID: TF_OsC50016_1
ctcccttcctgagccgcgtttcttccccaaaaaccaagggggaaggcaaactttccccaaatcgcaaccccaatcccaatctagggcacatgagccacccctcgtcgtcgtcctcctccgctcccccggcggcggccgaggccacctccctcgcaccgggattccggttccacccgacggatgaggagctggtgtcctactacctgaagcggaaggtccatgggcggccgctcaaggtggacgccatcgcggaggtggacctgtacaaggtggagccatgggacctccccgcccgctcccgcctccgcagccgcgactcccagtggtacttcttcagccgcctcgaccgcaagcacgccaaccgcgcccgcaccaaccgcgccaccgccggcggctactggaagaccaccggcaaggacagggaggtccgcaacggccccaccaccgtcggcatgaagaagaccctcgtcttccacgccggccgcgcccccaagggcgagcgcaccaactgggtcatgcacgagtaccgcctcgacggccaaaccaccatcccaccacaggattcattcgtcgtgtgccgtatcttccagaaagccggcccaggtccacagaacggggctcagtacggagctccttttgttgaggaggagtgggaggaggatgacgaggatgttggtttgctaccggtggaggagaaggacaactctgatgaccaggaaaaggaaatttctggtgctatggagaagggctatctccagatgagtgacctcgttcagaacttggttgatcaaaatgagaatggtaccattgccttgccagtttctgacaattcaaacaacagcaaccattctgaagacgtggatggaaattcaggggacattttaagtgaccaaaaccttgggtctaactttcttcaccatgttgagcctgtggagcaaaatggcctagtgcttaatgaaaatatgttttctagtgccaatgctggagacctttttaatatatctagccccaatgatggattcctagaactgaaggattttgcagatattgcagatttggagaatcctttagccaatgaatccaccatctggccttctgatggttggccctggaaatcaactgattccatggaggctgtgaatggggctagcaatgaattttctcccttagctggtgaacagatattccagccagaagaattggaacagttgttacagtcactgcaagaagactctcatatgggttcaactatctctgatcccccacattcatctataacaaatttagctaagccagaggaagattgtctaatgttctatgatgcaccctttgattcttcaatgtgtgatgatggttttagacagctcaatggatttcttggctccccatcgaccaatctatctggtattgacatggtggacgatggtatgccgtactatgatgcgatggatgataacttgtttaatgatcttctgagctcagtacagccatcagctggtagcagttcccatgcttttagtgggccagtccttactcaagaggtcaacaattcaacctatacatatagtccaactcaaaaggttttagaacctaattttgtagttggtgccccatcatctgctaggttacctgaagcgggtagtcagttaaattatgttgttttaccagattcccagaccaagagtagtctgatcgggaagcgttttgtaaagatactggattcaatctctgctccccctgcttttgcagcagcagagttcccagctagccttcgcaaatccttggctcctatttctggagctcatcacaacactatccgtgtctctgctgaagtaatcagcataggaagtttaactcctgattctcaagataagtggtcccttgagaaggatgaaggcatggagctgctcttctcggcaggttttgagcctgatacccgtgtacactttggctgcaacacaataaccgcagtactgcgtggtggcttctgcctcttcttcttttcagcaataatgctcttggtgagctacgaggtgggcatgtgcatctatggcaagtaggcctgctggtattggagacgttaagaacatgacgttaggtaatcctatctgtatttgaggcaaactagggacctcctgctgctggcttaatgtattgcactgcatgacattacatgacctccatgtgttgaacaagggctgaggctgtttaactatagcactagcagtaccgttttgcagctcgagagagctagtagtgtatgtatgaattcctcaggtgctattcgtagtagtaagcgcgaattgattattatcagttcatgatggtgctactattcatattcatgtttctggttggcatgggcggtgctagtgcaaactgcagagtgctgtaaatattccccaaatctgcaatgaattgaacgagggtgcatttgcccttatgactgttgcggtgttgcaggtttttgaatgagaaggaaagattactatgtagaaaacgctgtgttgtatttgtcggtcgcaggcatctggtggtaaattctgttactgaag

SEQ ID NO: 22004 - DNA, 2661 bp, Oryza sativa; identical to SEQ ID NO: 12590
  Clone ID: TF_OsC359_8224

SEQ ID NO: 22005 - DNA, 960 bp, Oryza sativa
  Clone ID: TF_OsC18236_1
ctaattttttatacaaacttaatcaaaccgaaataattttaactaaaaaatcaaaagaactacaatgaagtaaaacggaatgattactagctagctaggcccatatcgctccgtaataaatgcagcatctcactctcgtcgtcctctcattctctggtcctcgtcaaccatggatacaagctagctgtgcttcttcttcttcgtcttcttgtaccaaatcattcaaagttttctttcttcaagccttcaatcttctatatatatctccctccatgatcaaccagctatagctacctcactccaacaatcgccgaccacgatggccaccacgaggagcggcgtcggcggcgccatcagcgacccatttgcgacgccggggttccgcttctacccgacggaggaggagcttctcggcttctacctccgccaccgcctcgccggcacgaggcccgacgtcgagcgcgtcatccccgtcgtcgacgtctacggctaccacccgtcccagctcgccgccctggccggggaggcgagcgcgcgcgacacggagcagtggttcttcttctgcccgcgcgccgagcgggagctccacggcggccggccggcgcgcaccacgccgtcggggtactggaaggccacgggatccccgtcctgcgtcatctcctccgccacaaacagggtcatcggcgtcaagcgcaccatggtgttctaccagggccgcgcccccaccggcaccaagacccgctggaagatgaacgagtacaaggccgtcgccgacgacgccgacgccgccgccgccgccatgctccaccagctgaggaacgagctgggagtgtgccgggtgtacatcagcacgggcacgctgagatcgttcgaccgccggccgctcgataatcaacgctgggacacgaacaaggccaagaaccagatcatcagcagcggccgcctcacgccggcgtcgtc

SEQ ID NO: 22006 - DNA, 1467 bp, Oryza sativa
  Clone ID: TF_OsC153799_1
atggcagttgagggttttgaggaagcaattaaatgccttgagaatttgaagctggaatctggagaggccagtcttgagcagcggcttccggcggcggcgtgcggtgatcatcacacagcagcaggggcagggctgccgccgggattccggttccacccgacggacgaggagctcctcctccactacctcggcagccgcgccgcggcggcgccctgcccggcaccgatcatcgccgaggtcgacatctacaagtacaacccgtgggagctgccggcgatggcggtgttcggggagtgcgagtggtacttcttcagcccacgagaccgcaagtaccccaacggcgtccgtcccaaccgcgccgccggctccggctactggaaggcgaccggaaccgacaagcccatcctcggcaacgcagcagacgagactgtgggcgtgaagaaggccctcgtcttctaccgcggtcgcccgcccaagggcaccaagaccagctggatcatgcacgagtaccgcctcgccaacgccgccgcctcctcctcctcctcctatactagtaacatgaagcagctggcctcatcatcatcgtccagctccagcagcgccagcatgaggctggacgagtgggtgctgtgcagaatctacaagaagaaggaggccaaccagcagctgcagcactacatcgacatgatgatggacgacgacaacgatgacgaacacaacctgcaggtgcagcagcagcagcagcagcaggctcaaagccaccggatgccaaggcctccatccatctcagactaccttctcgactactccgacgacctcccgccgtccaccgatcagacgccatctctgcaccttggattcacggcggtgaacgagggcaacaacaagaggcacaaaactatggaggaatattattctatttccatttccactgcagatatgctgcatgcgtcgtcgtccacgtccaacaacaagtcgacgcaaatcaacttctcctccatatttgagccgcagacgcctgcagctgcgggccatcagctgatcgatgaagggcggtggccgggtggggcttggagaagtggccctcaagtgcaaacgagcgacggcaggaagagcagcggttgggctctcagcgtggaggcggtggaactttggatttggggatttggggcggcggtggtggccagatttggggaaaacaatggtggtggtcattgggcgccggcgaggagtgaaatggggtcatggagagacaaggagcttggtgatttcgtcatagaaatgcttctatccatgataaaggtgctcgtcacagaattgctttccagctggctagtgacaagcatcgtccaagccacgtggctgccatacgtggaatccacattggatgtgacatggcagatgacggcggttgatgtagagcatggtggcagcgacatggagtgcgcgcgcgtgctggctttatag

SEQ ID NO: 22007 - DNA, 2631 bp, Oryza sativa
  Clone ID: TF_OsC2635_2
tttttggtttttttttttttttttttttttttttttttttttttttttttttttttgccaaacaacgaacttaggagaagattaatagcaagtaaatagtaggccaaaccatgcaaacttacataaggtttaagtgcagtcataacacaatatacactagtttgataaacaaactttattcagcagcaagtaaataaggtaacacaaagcgaatatctgatcctcagtagcgcgccaggctagacaagttcggatcatagagcatcgccatcgagaactaggccaaaccttcaaaacaatgtacattgttggcctcacaatgcttgcagtgaccaccagttcgagcactggtaaatccagcaacagtccacgagaaagattcagcgaggtttggcttagctcggagcggcagcaggtggccatgaagacacatctgttgcgcagtactgccagcatatggaatcccactaggtcatcagtatcagagtcctctagaacggttctggacttagttatgacagtgggaactgcatgctgggttttgaagcaaagccaccgttattagcagcagcaggtaaatcatcaacaatgcgcatagttggacgcgagtcaccagatggaaaggcagcagatagagtagtactgtatgtgaactgatccatgggataatgccaaaattggttgtttggcaaaggatatgcataggataatcttgtgtctggagcaaagatatcatccatatttacataattttcactgttaggaactccaaagtatgtgggctgttgttcagtaacaccagcattggacggagaaaatccatcaccatttggcacacccaattcagcaagccctgcaatttcattgtacagatcatttgtgctaacctcaaaagcatgagcttcagcttcagacattggtgggagaccagagtgctccccaacagggttgccatgatgaggagaatcagttaaaaacctagaaagttcctccaatacaagcccctcaattacaggactgtctgcattattgaccacattagaacagttgtccacagaaactacctcatcaccaatagattcaacagagtgctgggaaggcagttccatgagagcactttcaccagtaacagtaatattttgatatgttgatccattcccagcacatacatgaggtaaatgctgcacaggtagttcctcaatagctctggcagcaacagaaggctgaacacgtgtatcatcagtagaatttactacctctgaagagggcagcaatggaaacacagaagtttcaacatttggcagcaagggaaacatttcagcatctgcatgctcccattcttcttcattaaatgggagccccatattgctccccaatccctggaccaaggccacttttcttggaaaattttgcgagaggacaaaatcatcctttgagaaaccagcagagaccaattgattgtcttccattttgtattcgtacatcacccaatcagtcctgttgcctttaggtgctttgccttcatgaaaaatcagtgttttctttgacccaacaatgcgagagttaagctcaatcgttctatctttcccacttgttttccagtaaccatttggtgtggaacgatttgtcctagacccattaggatatttcttgtctcgtgggcaaaagaagaaccattcaagatctctgctctggagacaggattgagcaggaagatcccagggagcaaatttatacagttcaacatctgatatagcttgaataagaggcttctttcccataatcttccttttcaaatagtatgaaacaagttcaacatctgttggatgaaaacgaaagccaggtggcaagcaagtttgagccatcactgcagtgtatatcttgccttcagcaccaataagacaacagagacctttgtttaaggtacaagcagaaatgcttcaccaaataatgccaataccaataatcaacaagtgatctaagattgaccagtaagggaaatgtttgagtgctcaaacaacagaatttaggagcacaaacaatcaagagaacttaggagagagctgcttttgatgtttgagcacagaaggaacaagagaggacttcagaagattgtattgcgtgaacacagcaggacggttcacttaagggagatcaggaggttgatcagaccaaaagggagattggtccaacctcagagagaacagaagacgtgattgttgagaaacaatcttcggcaagactcaagcagagtttagatcgagcactcaaccgacaaatgtttctgaacccagatgagagaaaacttgagtcttgccaattatgctaactacaactgattcacatgataggaagtattagcacaaaactccaggtgatccacttgtatcaagtgaaatctcggaattttatgcaatatatgaaccagaagtagcaggagaggaaataaggatattcctcgctgacttcagcagacatgggtgattaggatcaaaatcgcggaggaggcaggggagccagctggtcgattggggatgccgcggaggaggagggaggtgagcgcctgcgcctgcgccgccgtctggtcaatggagaggatgaggattttcggaggaagcaacccccggccgg

SEQ ID NO: 22008 - DNA, 938 bp, Oryza sativa
  Clone ID: TF_OsC168819_1
atggcgccggttggtctccctccaggctttagatttcatccaactgatgaggagcttgtgaactacttccccccgaggaaggtccatggcctcagcatcgacctcgacataatcccagaagtagacctctacaaatgtgagccctgggaattggaagagaaatccttcctgcctagtaaagactccgagtggtacttctttgggccaagggatagaaagtatcccaatggatgccgcacaaaccgtgcaaccagagcaggatactggaaatcgacggggaaagatcggcggatcaactaccagaacaggtcaattggtatgaagaagacactagtctactacaaaggtcgagctcctcaggggattagaaccagttgggtgatgcatgagtaccgcatcgaggaaagcgaatgcgagaacgccatggggattcagttacaggactcctatgcgctatgtcggattttcaagaagaatgtggtgttgggtgaatttgacaagaaaggggagtgcagttcatcacaggctaaaggaaatgaagaagttacagatttcggggatgctggacaatcctcgggagcaaatgagaatgataaagacaattcatggatgcaattcatagcagaggatctatggtgcaccaacaaactaaagtgaactagaaaactgagagaaaacagcttgttaacttcatctaaccagatatttcggtattagttatactgcgcgtatcttctgtatatgtttgataaggacacttctcactttgcataggaggaccactttaagtttggatgctggttcttaaattaggtttatacttttgttcctttagtactgtataatatatctaaaattgtgctactttgtacttcaatcttcaattaacatgtacctatcatctaatgaaatgataccaaaaaaaaaaaaaaaaaaaa

SEQ ID NO: 22009 - DNA, 1716 bp, Oryza sativa; identical to SEQ ID NO: 12570
  Clone ID: TF_OsC371956_1

SEQ ID NO: 22010 - DNA, 1278 bp, Oryza sativa; identical to SEQ ID NO: 12573
  Clone ID: TF_OsC29141_2

SEQ ID NO: 22011 - DNA, 804 bp, Oryza sativa; identical to SEQ ID NO: 12594
  Clone ID: TF_OsC397849_1

SEQ ID NO: 22012 - DNA, 1321 bp, Oryza sativa
  Clone ID: TF_OsC43596_1
aaagttcttgaatcatagtcttataagagattctagcattgtcaagtcagaaagcatcatattatcttgagagaagaccaaaagattgattgatatctcggtgctactactatatgtacaatcgaatccacagctagccattctacgctacttgttcttcgtcgacgggtgatttgatctcttgctcttgcacatgcatctggagatcgtgatcgactcctcttgcttcgatgcacaatgtaattctctgccccttgcttagtagtagagcagatgggcgtagggagacaggcagtgctggtcctgccacgggctgcgcagctgcgtcaggaacgggtcctgcagccagtccatcgccggaagctgcaggctcggcagctggctcaccgccgggagctgtaggctcgtcgccgacgccaccgtgaccgtgacgtctgcttcttccttcttggcttcccttggtgcgccagcgccgccgttcttgctgctgctgccggacggcgccgccgacgaggatgaggactggatcaggaagccgctgtcgtggacgtcgtccgacgagaagtagtcgtcgccggtggaggcggaggcgtcgtggacgagggatgctctcgtcgccgtgtagtctccgtgacttgatcctctctgcatctcttccattgccgaggctctctgctccagctccttcagtggcgtcgccttccggtatatcttgcagagcaccatgtcctccttgggaggcggcgcggcggcgcgggcggcgccgtagtcggggaggcggtactcgttcatgacccagtccgtcttggtgccgcgcggggcgcgaccctggtagaagacgagcgtcttcttgagcccgatcacccgcttcgggtcgccggagctccggatcgccctgtccgaccccgtcgccttccagaacccgcgctccgtcgtccggttcggccgcccgccgttcccggccttcctgtcccgcggcacgaagaagtaccactccctctccccgatcttcgccatgcctgggaggtcccagggatcatggcggtagatgttgagggtgccgatgatgttgaagtggagcttcttgcctaggacgacgcgggagaggtagaagtcgaggagctcctcctccgtggggtggaaacggaagcccgggaggtcctgctccacctccatggacggcccagccacagccactgccgccgccattgatgacagtgtgctctgctcgctcgctcgctcgctctgctccaggtggtggtggtggttgcctctgcacttggcttgccgatcttgatttttactggagacgatggacgag

SEQ ID NO: 22013 - DNA, 1557 bp, Oryza sativa
  Clone ID: TF_OsC394395_1
atggcggcggcgaagatggcggggctgacgccggggttcaagttcgagccgagcgacgagcagctcgtgcagttcttcctcctgccctacctgcgcgagctgccggtgcccctgggcggcctcgtcatccgggacgacccgaggagcgtgccgccatggaagctcttcgcgcgcaacggccggggcgacgaggaggacgcctacttcctcgcgccagccgacggcgagggccggcaggcgcgcacctgcgacggcggccgcggcaggtggatcacccagcggctggagcgcacgggcaacctgcggctcgccggcggcggcggcagcggcgaggccgtcgtgttcgagaagcacaggctcaactaccacgccggcgaggggcggtgcggcagcacggggtgggtgatgcacgagtacgccgtcgtcaagcccgcggcgctcggcgcccgccacagggcgtgccacatcgccttcaccggccacggccagaagcggaagcgcgtgcccgacggctacgtcgacgtcgaggacgacggcagcaaggccagcaccaacgcggccgccgccgtccctccttcctcgacggcggcgatgtcggcgtgcccatcgaatgtcacctataaccaagggtgccatatctcgccggagcagagcatcgaacagcacttccccgcggagcataataatatccaaatccaacagcaagcttactaccaatcacaagaccacgagcagtgccagtacagcgacgaagaaaaatacctgttgcagcagatcaagcaagaacaatactactacaaccagcaaaactgcttcttgccaggccaaggcaaccaagaactgtactacaacgacgagcagcagcaaatattctcgttgccggagcatcagtgcagccaagaacagtactgccatcacgacgaccagcaagactgcgtcttgccggagcaacacagccaagaactacacgggtacaacaacgaagaccaaggatccctcttgccgccggagccgatcgaccaggaggaacaagccctcttcgtcggcggcgagccgcagcatgaacaacaacccttgacgtcaaccccgcggcaggctcttcttgattatgatgatgggaagctcctgccgccggtcggcgtcaacggcgccatcgcgatcccgccgcaggacgccgccgtggcgtccaacgacgacgacggtgggcaggctacggaagcgccggctgcgaagatgacggcggaggagaagaagtggttcatggaagagttattgaccgagggctgttggtctggacctcttctcttcgaccaaccgtactacgccgccgcgccgaccggccgctaccgcgccaccctccgcgtcgcgctggctgcctccgccacccccgcgccgcgccaggccgctgctgcgcgggctgccgctgccgcccccgcgccgcttcgctactgcctcttcgctaccactgccgtctctgcgaggaaagagtggataagagcaagaaaagaggagaggataagagcgaggagggagataaggagaaagactttgcgatag

SEQ ID NO: 22014 - DNA, 486 bp, Oryza sativa
  Clone ID: TF_jC-osleLIB3474012e11b1
cttattcatccaaatagtattggtagcttgttgatcgaagaattaatccatggatggattgatcagtgatgatagtatgatgatgggtggtgaggtgagggcgatcgagtcgaggctgcctccgggtttcaggttccatcccagcgacgaggagctagtcggctactaccttcggaacaagcagcagcagcagcagcagcagacggcggccacctccatgctcgtcgaggttgacctccatgcctgcgagccatgggacctaccagaggtggcgaaggttggttcggatgagtggtatttcttcagctggagggagaggaagtacgcgacggggtggcgcatgaacagagcgagcaagcaagggtactggaaggccaccgggaaagacaagcccatccttcatccgacggtggccggcgccaggaagacgttggttttctactccggtcgcgcccccaacggccgcaagaccgcctgggtcatgca

SEQ ID NO: 22015 - DNA, 750 bp, Oryza sativa; identical to SEQ ID NO: 12601
  Clone ID: TF_OsC393139_1

SEQ ID NO: 22016 - DNA, 1842 bp, Oryza sativa
  Clone ID: TF_OsC257626_1
atggacgcggtccagccaagcaatgccagcataaaccgcgtgcacctggtttatgtgctggtgcgccgcctcgccctcgtcggatccctagtagggaggggaggtctccgtctgccggcgggaggcgcgggcgccgccatgaccggatgcattgtcttgtttatgaggcccggtgttcggaccgcgtcatacattcgtggaacagtgtgctcatgccttcggacatcctggataattgacagccatagaattgcttcaaaaataaaaaatgcatctggatcggtggatgccagtaagcacaaatgggttagcaacccaactaaggcttgtccaaggtgcaaccacatcattgataacagtgatgttgttcatcaatggcctggtttgccaagaggtgtaaagtttgatccaactgaccaagaattgctttggcatttgcttgcaaagcatggcaaagttggtgcaaaagctcatccgttcattgatgaatttattccaacagtcgaggaagatgatggtatctgctatacccatccacagaaacttccaggtgtcaagcaagatggaagcgtatcacactttttccatagaacatttaaggcctataatactggaataagaaagcgccggaagataaacactggtgatcttgctgatgtccgctggcacaagactggtaagacaaggccagtagtagttgatggaaaacaccttggttgtaagaaattcatggtgctatatatgagcaccatgaaaggtggtaaacctgaaaagaccaattgggtgatgcatcagtaccacctaggaactggggaagatgaggtagaagggcagtatgttgtctctaaattattgtttcagcaacagtttaaacctggggagaagaacgcacaggacttaacctctgcagatgctttagaatctatagttgctgaagatcttccaaatattcctccacttcccctggaagaacatgtttttaccaaccaagaactagaagttcttgagaaatctgaaactatcactgaccagggaaaagagactagcgaaataaacaacgaagataacgctgtagaagatgttgcgcatatggctactgagaaacctgaggatggagataacccctcatcgcaagatccgaaatggtgggaaggtgaatcccagttcctgttagactctcagcaactggcagagaaccttgcgatttgcgatgagttccttcagagtcagagccagacctcatgcggcggtggagatgatgaaaccgataagataaagccccgtcttgctgtttatgcccagttgccagtagaggacttgaagaaggatctggaagaatgccagaggttggacccctcagatggcacaaatcttgagcttgaaaatgcgtctgaatttcgactgagccaaattgagttttcgcaggatagctttacgacggcatgggctggtggcaaggtgatcgattgagtaagaaatctaccccgcgcattggctgagcgtcactgggttggtcccacagcccggccacgtgagactgagggcagcaacaagtaccgcgccgtgggtcggtcccatagcaccgggtctacaggccccatcgtttggccaagtaagtgtggtgtgtggataaaggtgggcccaagcccatggcgacgggcccaccacccagcggaggctgagagggacaccgtgggtctcggaaaaaaccgtaacggcgtctctctccgttacaacggagaatccttcgcaaacacgataaacacccctgggaatatttttcctttggcaaatcttatctgcaaggaattgagtgcaaggaaagccttagaaatgacatag

SEQ ID NO: 22017 - DNA, 1698 bp, Oryza sativa
  Clone ID: TF_OsC18626_1
gtccccgggctgcaggtaccggcgctctttttttttttttttagtactagaagtattaacatttcacacatcaaaacttacacaggaactacagtttgcagcacagagatttactgaaaggaaaacgaaattgcatccgataaagcaaggttcagataatgctacagaacattacatagacaaaagtaaccatatccctaacctgacttacaactgctgaacaactagggtatgtggctactaacatctgcaataacagcaggaaggaatactaccatgcacctaagtcacagaacatctacaacaactttcctcattcactacctcttcttttttcttcgttttcgcccctcttttttttttgtttttggatttttcttctgccgcagcacgctggaaggggaacaaacactccagggtgtctagcaaccgccgtctaaacacaagggcgtaagacgcaatatgtacaacaggtcactcagcacagcaggtcaatgttgggagcctgtgccagtaagcatggtcatcttgtaagaccatcaggggagcagctgtttacacccatcacgagcgtcttcttcatgccaattacttgctgcttcttcttgtcacccttggacctgatcaccctgtccttcccggtggccttccagtacccggcctccgtcgccctgttcgacctgctcccattgggatacttcctatccttcggcgcgaagaagaaccactccggatcatcggagcggatcagagacttatcagggagatcccacggctcgcacttgcagacatcgatctcggggatgacatcggcctcgctcctgatctgccccgtgatcttccccttgaggtagtgcctgacgagctcctcgtcggtggggtggaacctgaacccgagcggcagcttcttgagctccatcaccgtcatctccgccctctcatccacctcccccaacctctctctcactctcaagatccgattcgcggtcgccgggagggatatacttagcggcaaaggaagcgtggggtggtggagtgaggcgatttggggggggctagggtttggtcggaattggggattttaggggaggagaagaggagagccataaatcccaagggagataagcaggaccagagccacagagagaaccagccaaatgatgtacgatgggaatcccctcttattccctggtgctctcacatgtgaagcaagaacaccctcctcttcctcctgcttgttctccttgtcgcttccctctgctgtcttccgcagcctcagaacagatttagcatttgctgctgaagcatcatgctccttctggtcatcctcatggcaagtcccaccttcagccaaggtacttcctgcattctcttcaatctcaggtttctccatggtgcgttcactttcaccttcatttatgatgcaacttgatgaaccatcaacgctagaacacggtgctgcatcaaggtttgattgtagccgcaccctttgcactgcagcaccctgttgagtaaatgaactagctgagctagcagttggagcttggcgtcgtcttaggatagtgatacccgttgactcagcatcatctccatcagaaagcaagcttgcatttggagcttggtgctgtcttaggatggtaatacccgttgactcagcatcatctccatcagaaaacgaacttgcagttggagcatggc

SEQ ID NO: 22018 - DNA, 1761 bp, Oryza sativa
  Clone ID: TF_OsC29141_3
cacgcgtccgccttagcttattagcttccttccttcactagtgacagttttcctcctacctaatctaagctagcccggtcgtcatcttcttccttcagctcacgctgaccaaacaccatctgttattctgtttgtttgtttttttaaaaaaaagaaaaaaaatctagctaggcgagccgattgaaggagctgagcatgccgagcagcggcggcgccatgcctgcccttccaccaggcttccgcttccaccccaccgacgaggagctcatcgttcactacctcatgaaccaggccgcctccgtcaagtgccccgtgccaatcatcgccgaggtcaacatctacaagtgcaacccatgggaccttcctggtaaggctttgttcggcgagaacgaatggtacttcttcagcccgagggaccgcaagtaccccaacggcgctcgccccaaccgcgccgccggctcggggtactggaaggccaccggcaccgacaagtccatcctctccactccgaccagcgacaacatcggcgtcaagaaggccctcgtcttctacaagggcaagcctcccaagggcgtcaagaccgactggatcatgcacgagtaccgtctcaccggcacatcagctaacagcaccaccaccacaaagcagcgtagagcgtcatccatgaccatgaggctggacgactgggtgctgtgcagaatccacaagaagagcaacgacttcaattcctctgaccaacacgaccaagaacccgaggaatcaaccgtcgaacagcttgaagacatccatgacaacaactcctctgaacaacctccagctccagctgacatgaacaaccaacagtcagatttccagcccatgacggcgatgagcatgagcaagtcatgctccctcaccgatctcctcaacaccatcgactgcgccgcgctctcgcagtttctcctcgacggctcatccgacgccatcgctgagcctcctgctcctcccagccccctaatatacacaacacctcatccaaattaccaaacactaaactataacattaacagcaacagcagcatgccacacgccttcgagtcacgcctagatcatcacgatggttacgttaacaattataatgttaatggcctgaggaggaagagaatgatggcgtgtagtgcaacttcctttgatgatggcagcagcagcaatgactttgtgcatgccgttgtcaagaaaccgcagctgctgccaagtgattcgaggggtagtggttttggaggaggttactgcaaccagcagctttcagagactgcgactggctttcagtttcagaacggcaatctgctgagccatccatttcctctgaacaatcatctgcagatgcagtagtaggcgtctagatcccgtttaccgatcgatctgaagagaggtgaattaatttcaacgaatgaaactccagattcagagaggaagatactgattgttccatttgtgatttattttgaggagttgcatgggcagatagacaaacagacggaattcttgatgtaaccgatgcaaggaaagattcagatttcttcctatggcattaatttgtgagtttttttttgttttcattttcatggccaagaatgtaaattataaatggtaatatcgtgcaagctagtactcaagccaatttatatgataatctttaggcatgttttttaataaaaaaaaaaaaaaaaaacaaaaaaaaaaaaaaaaatttgaaattgattccggggcccttcccatttt

SEQ ID NO: 22019 - DNA, 2331 bp, Oryza sativa; identical to SEQ ID NO: 12611
  Clone ID: TF_OsC33185_7

SEQ ID NO: 22020 - DNA, 5141 bp, Oryza sativa
  Clone ID: TF_OsC12565_1
gggacgcagcaaaagatagttttttttttttttttcaaggaattaacaatacagagtaaaaaacgctatcatggcaaatgcttaacagtctctacaacactatgtacatctgaagataggacaggtggacaaccagggtccacggttgtttaattttcaccgagcaacaattgttgctttgaaacgacatcctaccatttctgttacaaccttttcacccccggataaacttaagactacaagcctaacaaccatacaacagttcaaaagatgaaaccccactaaaaactgggaataaaaataaacgaatcttcaaggcaaccccaaccatactattagacaggctgtggatcatgatgcttgactaggagctgtactgatggatagtgatgaagcgattctggaaattctacatctgcataatctatagcagggatggccattgacaaatcctctgtagagaacggtatacttaaatcatcatctaataaaaaggaatttgatacgagattctgagtatatttgtttacttcctccctcattgcagaaacaacctcattcgatattccttgggtattgtatttgtcgtcccagtacattgagcatatcctgtatatttggcgtacactcaagttcgggcaaagatcttgcctaatctcctcaagcgtcttcttccttttttgatgtatgaccaaaaaaccaacagcttgtctgatataatttagctcatgcctagatgttcctgcaaactcatccgtggcatcagtaatccatttctccagcaatgacagaccggctttgacatattccccattggagaaagtacagcattcgcgccgaagaagaaggctgttaaaaagctgtatattgataaaagagaatagctgagtgataagtttacgtataaagaatgatggcacataattttcatgcaaagtgtccataagcaggtcaagaaatttgacaatattgtcccaatgggagtttgatggtggttgagcaccaatcccaggtgatttggttgcttttccaggctgtgcacgtgatgattttggagcctgaatgcagacactaagaagtggtgatatttcctttttcagattatccctaagttgcccaaaaatcttttcaacacatgcagttagttgctgtttgaataatatggctggataccgagcatccacttgtccaagagtatcactgcgtcccataagctttgaaggagatctgagtgtttgcactatcttgtcaccaatccctagaggtccaccagacctgcgggatggtgtagcaaataatccatttgaccgtaaattcttctgcagaaggcatagcaatgaagaggtattggacaaccaataaggtaatctaccgtcagcctcttcccccttgagaacattatttatggcttcaatgacatgatcaaaaatagcagtcctctcagattcaaaagcacgccagtgtaaaaggcaactgtagataatgcatgcggtgactggtttaccatccttgaatcctagattttcctttatgcatcgtaataagatttcatgattttcctcctgcctttcaacaggcatcctggttctccttgatctagttaaactctgtggaagtgaagcgagatattttgctggtggtggtgtttcatatccgtgcttctgctcgccatttggaagcccaatcggtgtagcgaatttctgaggaaaagcctttgtagtcatgggcatattgttcaacggagacatgtttaatgccttttgcctaagaacatgattttcattttccatgtttgtaagtttttcctgcaatttgtccaaattttgctggagatggttgcattttccctctacgtctttcaatttcttcatcgtagcatcactacctttacgagctgaggtgagttcatattccagtgacgaattcctctttgataatgactcaactaagttcttcagattggagttctccttttctgcttctgctgtcataatcttgctaccccgcaacatagttatctctctcaacgaatcatccaattgcctctggagtagccgatttttgtcatgttcactttgagcatctgacttggctgcagcacattcggcacttaatgattctatcattttgtcgcgctttaatatttctactgactttgcttcctcaccagcagcacgcagtcgcctttctagagttagtctcagagtaaggtcatccaactttttctcaagtttattcttcgcctcacgcagtgcacctgcttcgtttgcagccattttgagtctccttagttctcttcttgcaagtttctgtctccaagcacactgaattttcacagtggcttgcctgtattgttggaaaagaattataaccttccgttttctccacaatgactgtatcaccaaagcagctttctgctctctgataactgagaaataacggcgagcgataaatcctcgaatacaggactgaataagaagagctgctgaatgagcttgctggtaagtccgatgaagccgccatctccggacatacttctgaacaattatagcagccgccgtttctcttttcaccatatacttcttccttgccaaacagcctctgcaatatgcttgtatagaaattgaagcctcccttgttttcacaaactctttgcgtgtaatgaatgttctgaaacgaccttgaatgtggcgtgcagcgttctccaaaacttcagcacgacgcatatctaatattgcgatttgaccagctctaaggaaaaccttagtgctaccaagttgaaaattatcaagcttcatcttttcaagaattccctttgtcaatgccctctcatcataacttccaagcatcaactcgggaaccagaacaccaaaccggtcaacaaattcagcataagtccttctggtaggatagccagcaagactgatgcgaacagcctctaaaacacctccgcagcgtagttgatgcaggacactctgattttcaaaaatctgaggctgattaacagagttaggcttcacgcagcgtacgtagtgaggctctgtcgagttgagggtttccatgagggcttgaagttgttgcttaaatcttgaagcaactgatgagaacttgtacgacgatctcaaagattcttctggtaatgtaccaaaaagtccagaaactaaagggcatcttgacgaagataaaagattgcagtgctctgcaacaatataatctctattcttctccaaaaatgattctgtttgatacgtcaccttcccagcataatgggagatagtaaaatctgtctccgagaattttgtcttctcaagcctatgatgcgaagagaaattcctgaacatctttgttgcaaaggtctcatgagtagattttgggaacatgcaagcttcatccagcagtgcaataattccaatcggtttctcattgaaatgttgctgaagcttttcattggcgaagttgatgcagaattgctcaaaactgttatttttgaagctctcaaaaccataaatatccaagataccaatttgtactttggaatcaacatcttgaccaatagatttgttaatattctcaacaagccagtcaaatagtcttgcatatacagtctttgctagagcatcacgattagctgctgctgcagaacagtctaatgcttttataattgctccttcgagagtgttaatggcgcgtgtacatagagttgagaccaacagatctggatcacacatgaatagtttggctgccatttgaaggtgaaaatttgatgttggatccttaatttttgaagaatcaatttcctttccaggagaaaactcaatgttgccaagatgaagaatggctgccagtatccgaaatatagcatcctgatcatttctgctaattccgacaatatccattgccctttttgtcttccagtactcgtcttcattatttgttccttccaattcatatgtcttacttttattcaagtaatggaaactccctgggtgaccaagcttgtacagttctgcatcctttccagacgcacataactgataaaagcaatgaaaatttctttcaggatcattaatctgcacaacacgggacctttccaaaagataggtcctaatagcagccccagatattctaccatttgcatcaaattgcatctccacaaatttgccaaaccggcttgagttgtcatttctaactgtttttgcattgccaaatgcctccagaagagggttagattcaagaacctgctgttcaacagttcgatcgtcaatagcagctctaccaccaacatacgtaagatattgcatgataaactttgttgtctcagtcttgccagcgccactttcaccactaaccaggattgactggctccgggaatcattcaccatagccctgtatgatgcatcagctactgcaaaaacatgtggactcaactcccctagtcggacacccttgtattgctccatcatgtactcattgtacaggtgaggaagcctcgtgaatggattaacagcaatcaagatgcttccagtgtatgtatatatctcattcaatgcatatcttctcttcaaattgtatagaacacctggttcattaagataagtcagtttggtcatgtcatcgacatgccccccacctagatcttcatctgtgtccctgggcagacacttctctgccaaaactgtaatctgcctttttgcaatagggaatacccacctgtaagacctcatcttccatcttcccccctctctctctctctcatcatcttccacgcggtctttgttcccaacggcgcgcggccacggctccgcggagtagacgacccccgtcgtgcccgccgccttccagtaccccgacggcgtggtctggctcggtcgcccgccccgcacctcccgctcctgccgcgggcagaagtagaaccatccgctccccctcctcgccgcgggcaaaagtaggtacacgcgtgtgctggtacctgagagctgcaacgggtcgacggagtagatgtcgaagacggggatgacgcgctcgatgtcgtcgcggaaaccgtcgagcttgttgcggaggtataagcatatcagctcctcctccgtcgggtagaagcggaacacgggagccagccgccgcctccacctccgtctccgcat

SEQ ID NO: 22021 - DNA, 690 bp, Oryza sativa
  unsure (1)..(690): unsure at all n locations
  Clone ID: TF_OsC135094_1
cccccggccggacgcgtgggctcgttcccaaaccctgcatccttctctttcacacaagcctctctctcgccggcttcggcgtccgtctcctcctcctcctcttcgtctagccttgtggcggcgtgcggtgcggtgcggtgaggaaaggagggagctttgaaggtcgggggagggcggaggagatgtctgaggtgtccgttatggccgaggtggaggagacggcggcggcggcgccgctggacctgccgccggggttcaggttccaccccaccgacgaggagatcgtctcgcactacctcacccccaaggccctcaaccaccgcttctcctccggcgtcatcggcgacgtcgacctcaacaagtgcgagccatggcacctcccagccatggcgaagatgggggagaaggagtggtacttcttctgccacaaggaccgcaagtacccgaccgggacgaggacgaaccgggcgacggagagcggctactggaagggccaccggcaaggacaaggagatcttccgcgggaggggcatcctcgtcggcatgaagaagacgctcgtcttctacctcggccgcgcgccccgtggcgagaagaccggctgggtgatgtacgagttccgcctcgagggcaagctccccagccaagctncccgcgctccggccaaggaccagtgggcggtgtgcaaggtg

SEQ ID NO: 22022 - DNA, 1091 bp, Oryza sativa
  Clone ID: TF_OsC60046_1
tttccttctctatctagaattctagatctccaggtgaatttgaaatctctatcggggtcaaaggagaatgaaccatcaaatcaatatatacaatgagcttgatcagcatgatggaggcgaacctgccgccggggttccggttccaccccagggacgaggagctcgtcgtggactacctctaccacaagctctccggcggcggcgagttctacggcggcgtggccatggtcgacgtcgacctcaacaagtgcgagccgtgggagcttccagcatatttcttgcacaatctgatcatcttccctgcacgcgcacgcgcacgcgccgccggtcgccggcgacgagaagacgccgcgcgggtgggcgccacggagtggtacttcttcagcctgcacgaccgcaagtacgccacggggcagcgcaccaaccgcgccacccgctccggctactggaaggccaccggcaaggaccgcgccatcgtcacccgccgccgcgccgccgccggagaggccgtcgccggcggcgaggtggtcgggatgaggaagacgctggtgttctaccaagggagagccccccggggcagcaagacggagtgggtcatgcacgagttccgcgtggacggacatgccgttgccgaccacccctcctcgtccacctcctcctcctcatctaatcttctcaaggaggactgggtgctgtgcagggtgttctacaagagcagaacggctacaccaagggcagtagtctccggtgaggctgccgtgtcactgtccggtgagctcagcttgccgccgccgctgccgccgcccgttgcccccgccgtcgtcgacggctacaccggcggcggctattacgagcaagacagctcagctgggtaccaccaccaccaccaccaccggccgccgccgtcggcagcattgccgttcaaggacctgacggacttcagggacctgctgagcaacatggcacaaggcggcggcggcggcgctgccgccgccaagacggaggggttccatcttggctggagcgaggaggagtcctccggctacgtgcagcagagcgccatggcgtcgcaggcgtggaacccgttctag

SEQ ID NO: 22023 - DNA, 302 bp, Oryza sativa
  unsure (1)..(302): unsure at all n locations
  Clone ID: TF_2311034
atttgctcctcgcctagctagcttgtntctcttccccggaggagaaaaaggaggagacgagagagaattaattatctcggagatgagcggcggcggcgaaggggnggcggcggcggagaggcaggagctgcagctgccgccggggttcaggttccacccnacggacgaggagctggtgatgcactacctctcccggcggtgcgcngcctccccatcnccgtccccatcatcgccgaggtcgacctctacaagttcgatccatggcatctnccaagantggcgcttgtacggcgagaaggagt

SEQ ID NO: 22024 - DNA, 1101 bp, Oryza sativa
  Clone ID: TF_OsC334673_1
atggcggaagaagatgacaagaagcagaagggccccgacgtgacggtgccctcgggatacttcttcgtgccgaagccggagcagctcatccgcgactacctcaaccactggatcaccggccggccgatcgaggagctccgggacatcgtccgggaagccgacgtctacggctccgacccggcgacgctgacggaggcgcatagggcgtacggccacgacggcaagtcgtggtacttcctcaccgtcgccaagtggaagggcggcaggggcggcgccggcaccgccggccggctcaaccgcggcggcttcgagggcggcggcacgtggcacaactcgcagcgccgccgcgtcatcgagggctacggcgaccgccaggcgttcgagtaccgcgcccccgggaacaagaagacggactggctcatggaggagatcgccagcaacctgccggcggcgatcaccgacgagggcatcatggtcatctgcaaggtctacctctcgccgagggccaaggaggcgacggccgacgaggaggaacgccaagaaaccaacgtggttcccgggcccaagaggctccgagaggcggaagccaccggctacgacgcgccggcgccggagacgccacagcccgacgtcggatgctcgtactccggcggcggcgagacgtctcaagcgaccgcctcgatggactactgctgctcgacgacgacacacacggcggacgacacggccaatgccgccgcctactaccacggcgacgctgatgccatcaagccagatgcttacgacggcggcgactacggcatcggcttcaacgcagacggggagctggttctctgcggcaacggccacggtggcatcgggacgcagggacagacgccattggcaatgcagaacaccaacggggagatgaccttgttctcaccgatgaacggctatggtgttggcttcaatgaggaggtgagacaagaaccacaagtaggaggtgaggtggagatggatgatttcttcaacgatttgttcgtcgacttcgacggcgccggtgatcccaatcccaatcccaacgggggtggagacagccacggccacatactatgtgaatga

SEQ ID NO: 22025 - DNA, 1632 bp, Oryza sativa
  Clone ID: TF_OsC158769_1
atggcaacattgctcctctgggccgctgctgcgatgccaacagtggcggatatcggccgcgaccaaggagggtcacgaggcggctaacccgcccacggcgtccgggacgccggtggcgtccgcgaccaacgcgttgggcgtctagtccgaccgctgcgtcgggcgcctcggcccgccggaagccaccgcgttcacggtgctcgcccccccgtacgcggccccgcgggagggggtgaccgtcgacgacgtcggcagggaccatggcggccacggccgcgtgtacctgtcgacgaacgacgccgcggcggcgtctgcttgtcccacgccgcgtggtcgctctaccaccgcttctacgcccgcctcgccgtggagctcgacgtcgcgggcatcgtctccgtcgtcctcccgctcgcgccggagcaccgcctccccgccgccatcgacgccggacacgccgcgctgctctggctccgtgacgtcgcgtgcggcaccagcgacaccatcgcgcaccatgcggtcgaacgccttcgcgacgccgccgacttctcccgcgtgttcctcatcggcgacagcgcgggcggcgtcctcgtgcacaacgtggcggcacgcgccggcgaggctggggccgaggctctcgacccgatacgcctcgccggcggtgtcctcctccacccgggcttcatcttgccggagaagagcccgtcggagctggagaaccctcccacgccgttcatgacgcaggagacggtggacaagttcgtcatgctcgcgttgccggtgggaaccaccagcagggaccacccgtacacgtctccggcggcggcggtgacggcggcggagggagcccagctgccgccgatgctggtgatggtcgcggaggaggacatgctccgcgacgcgcaggtggagtacggcgaggccatggcgcgcgcgggcaaggcagtggaaacggtgttaaacaagtttcccgcgcaatgcatacgtgttttcgtttctccgatccgcttacgaaatttcgatttgatggagaaacacgtcgagaagatgctcagtttaggctttcgtttcaacccgtctgcagaggatctcatcaccttctacctgccacggctgatcgccggcaagccaatgaaagacaccgagaaattcatctgccgcgctgatgtttacggcagcgagcccagtgacctcgccggaaagttcgcgccggtgcccaggtgcgagaaaggcggcaggttcttcttcactagctgcaagcggcacaaggggagtagcaccaagaaagagcgaacggcgggggctggcacctgggtgaggcagaacagcaaggaggtgaagaacaaggcgggggtcaaggtcggcgagacgcagaacttccgtttcaagaaggacgggagctacaccgactggctgatggaggagcaccactgctgccggcagcaagccgtcgccggcgacgaggagcccgtcatctgccggatgtacgtgtccccgcgggcgcctccggattccgcggcgcgccaggaatccgctgctttcgtgcagcagcagccggcgccgcaggtttccgagccgccgtgcgacaagaagaagagagatgatgtggcagaagaagcccctgccgcggcttag

SEQ ID NO: 22026 - DNA, 782 bp, Oryza sativa
  Clone ID: TF_OsC16309_1
ccggccgggatcactgcagtgcctttgagctttcgttctctagagtgtctagggtgaatcttgagcgagtgagcgagcgatctctgtgttgtgtagtttgtgagctagggtgatggctaacaccggacttagcatccccatggtgaatggtgccacaatccacctcctccctggtttccggttccgtccaactgacgatgagctagtcatcaaatacctctacccccgtgcttttcatgtgccactgccctgtgcgatcatcaccgatgttgacatccatcatcacaacccctgggacatcgtcccagtggcggagagggagaaagggaagcacttcttcacaagaaaggaggtcaagtaccctggtagccgccgtagcaaccgtgttgctggtaatggcttctggagagcagcaggctcggaggtgcccatctattacaaaccagaaggtgctgctaacgacatgctagttgggatgaggcggactctagtgttccactacggaaagtcacgatctgcagagcgcactgaatgggccatgcatgagtttcagcttgctggtgctggtctccttcctcaccctatgatgaggcatgcaaccagcaatggttcagagccaccctgtggctgccttgaagcgacaatcgctaagaaaagtgatggtctctctgcaactcttcgtgccaagcgtgattctgcccctcttatgagaatcatggtagaacccgatagctcatgggtgatctgctgcatctacaagaagaggcagcgtgccccgcctg

SEQ ID NO: 22027 - DNA, 1721 bp, Oryza sativa
  Clone ID: TF_OsC46776_1
cgcgcacgcgtcctctcccgcgtcctccgcctcctcccgcgcgctgcgtacgtgagagcgccatctcctgcttgcagcagctagcaagcagcaggcgcaacagtattactgcagatagagctctcgaccgattgatcgattgctcactgccatatacatgatacttacataccgacgtactacacacagagatagagatcggagggatagctattgctattgctagccatagtatagtagttccctttgctcctgctgctgctttgttgcttgcttccctacacttctctctctcagctgctagctgcgcatataattattccctcgccaagctatatatatttgcctcctgccttcttcccgagctcacacaatcgccaacctatacagatatatgtgctagctacttccaagttcctacctatcaatttctctcctcctcttcttctctgcatcaatctgcagcttaattcttagctatgtacatatagctagctaccacttccaaaatactccacaggcaccaggcacatatagatatagctagattgctatagacagagagatcatcaaagaaatttagcaggtgatagccacatggggttgagggacatcgagctgacgctgcctccggggttccggttctacccgagcgacgaggagcttgtctgccactaccttcataacaaggtggtgaaccagcatcgcttcgccggagttggaggagccgccgccgccggcggcggcaccatggtcgaggtggacctccacacccacgagccgtgggagctaccagatgtggcgaagctgagcacgaacgagtggtacttcttcagcttccgcgaccgcaagtacgcgacggggctccgcacgaaccgcgccaccaagtccggctactggaaggccaccggcaaggaccgcgtcatccacaaccccaagctgcacgccgccgcccaccgccgcgcctccatcgtcggcatgcgcaagacccttgtcttctaccgcggccgcgcccccaacggcgtcaaaaccaactgggtcatgcacgaatttcgcatggaaaaccctcacacccctcccaaggaggattgggtgttgtgcagagtgttctacaagaagaaggcggagacggagacggagtcgtcgtacagcatggagaacgagcaggaggcggtgatcgccatggcacggagcgccgcggccatcaaggcgggtggatgctactccaactcctcctcgtctcacgacccggccgccgccggccatcactcgcccccgccgttcccggcgtcgctcgccgcctgcagcagcagccaccactacagcagccacccaccgccgcctcccgatcaccaccaccaccaccacatgcccgtcaccggcggcggcggcggctccctcaacgagttcatccccaccaccagcatggcgctgtacagcagcatcttcgacttcagccagcatctcgacggcggcgccgtggcggcgtcggcgtcggcggcgggatcgagggtcgacggcggcgagcagtgcggtctgatggagctagggctcgaggagcactacaattacaacggcctgatgccgatgtgacgatccaccataggtgtcggtgctgctagtgctagcttagctagcttacacacactcccagctgctagctagctgcagttctgcagcgcagctagctagcgtttattattaataacctcttttcacct

SEQ ID NO: 22028 - DNA, 1179 bp, Oryza sativa
  Clone ID: TF_OsC1783_3
agctgatgagctgagctaatcagggcagaacaaaggcaggaggatatagttttccaagatcctagggccggcctgcatcaaaaagaaggatgcatccgagcggcggcgcgctgtcggtgccaccggggtttcggttccacccgacggacgaggagctcctctactactacctgaggaagaaggtggcctacgaggccatagatctcgacgtcataagggagatcgacctcaacaagctcgagccctgggatctcaaagatcggtgcaggatagggacggggcctcagaacgagtggtacttcttcagccacaaggacaagaagtacccgacggggacgaggacgaaccgggcgacgacggcggggttctggaaggcgacggggagggacaaggccatcttcctcgccaacgcctgccgcatcggcatgaggaagaccctcgtcttctacgtcggcagggcgccccacggcaagaagaccgactggatcatgcacgagtaccgcctcgaccaagacaacgtcgatgtccaggtaggcgggtgggtggtgtgtagggtattcatgaagaagagctaccagcgaggcctcaacccggcggacatggcggcggtcgacgacgacgacctcctccaccaccaccaccaccccttcccaccggcccagctccacggcggcgccgccgaccacaagcacgacggcgccggcggccaccaccaccaccacctcatgcagccgcaccaccactacgacgacttcccttccttcgacccctccatgcagctcccccagctcatgagcgccgaccagccgccgccgccaccgccgtccctcctccccggcggcaccgcctcgtcgttgcagaggcttccactgcagtatctggggtgcgaggcagccgacctgctcaggttctccaagtagagagattatccctccatgcatgcatggatcacttgaactaagctagcttaattagctgccaccgataaatgagcagttgatgatggtgatgatgatctgaatgatcagctcatgtttttttggttagactggttaatttgatcttccttttggtatggagcttaatgcttccaagtgtatatacactctatgctatgctatgctatgttttcccatgtgcatgcatgcaaatgtggctttgaaaaaaaaaaaaaaaaaa

SEQ ID NO: 22029 - DNA, 1129 bp, Oryza sativa
  Clone ID: TF_OsC1783_4
gcatccgagcggcggcgcgctgtcggtgccaccggggtttcggttccacccgacggacgaggagctcctctactactacctgaggaagaaggtggcctacgaggccatagatctcgacgtcataagggagatcgacctcaacaagctcgagccctgggatctcaaagatcggtgcaggatagggacggggcctcagaacgagtggtacttcttcagccacaaggacaagaagtacccgacggggacgaggacgaaccgggcgacgacggcggggttctggaaggcgacggggagggacaaggccatcttcctcgccaacgcctgccgcatcggcatgaggaagaccctcgtcttctacgtcggcagggcgccccacggcaagaagaccgactggatcatgcacgagtaccgcctcgaccaagacaacgtcgatgtccaggaagatggttgggtggtgtgtagggtattcatgaagaagagctaccagcgaggcctcaacccggcggacatggcggcggtcgacgacgacgacctcctccaccaccaccaccaccccttcccaccggcccagctccacggcggcgccgccgaccacaagcacgacggcgccggcggccaccaccaccaccacctcatgcagccgcaccaccactacgacgacttcccttccttcgacccctccatgcagctcccccagctcatgagcgccgaccagccgccgccgccaccgccgtccctcctccccggcgtcccaccctccgccgccgctgccttgagctccctcgacgtcgagtgcccccagaacctcatgaagctaacgtcggccgccgccggaggcggtgccaccgggctgctccacgccggcggcgaccaccgcttcgccaccgccgccacggactggtccatcctggacaagctcctcgcctcgcaccagaacctggaccagctcttccagggcagggtcatcgccggagcgtcgtcgccggctgccatggctgctcctagccaccaccagcatctcatggatcagctcgccggcggcggcggcggcaccgcctcgtcgttgcagaggcttccactgcagtatctggggtgcgaggcagccgacctgctcaggttctccaagtag

SEQ ID NO: 22030 - DNA, 249 bp, Oryza sativa
  Clone ID: TF_OsC346533_1
atggcactgccaggtcaacgcatggagcgggttagaacccgtttggatttatatgacacacctgggccacggatgaagggagaagggcagcacgtggccactggacaggagctggacactgcggctgcggaagatttccttgtccttgtcagtggccttccagtagccgctcgccgtggcacggttggtcctcatgtgatgcggactaggatcccgatcttccgttagatactgactaaaccgaaacat

SEQ ID NO: 22031 - DNA, 961 bp, Oryza sativa
  Clone ID: TF_OsC41958_1
cccacgcgtccgaaactctctctctctctctctctctctctgaatctctggatctctgaaaactctgaacattccaagaactcataagttacctgtgatctgtgaagcttgagctgaagctgtgacagtgtctcactgatcgttgatcactcagcttggctgctactgtgcattcactgcgtggttagctagctaactgagcagaagagctttagcaatggcgacgccggggcagcagctgccgccggggttcaggttccacccgacggacgaggagctggtggtgcagtacctccggcggagggcgctgtgccggccgctccccgccgccgtcatcccggacgtccacgacgccaccgtgctcgacccctgggacctccccggcgccggcgatggtgaggcctacttcttcagcttccggcagctcgcggcggcgagcggcggcggcgggtggcggaggaggagggcggggagtgggtactggaaggcgacgggggcggagaagccggtgttcctgcgtggcttcgggtgcggcggcggcggcggcggcggcggccagcacctcgtcggcgtcaagacgacgctgctcttcctccgcgcgaagccgccgtcgcgcacccactgggtcatgcacgagtaccgcctcgccgccgccggcgctgtcgccgtcgccgccgccggacagacaaagcgcgggaaccatagttgcatggctcagccaggagaatgggtggtgtgccggatttttctgaagaacaacaggtcatcaagaaggcgagccggcgacgccgacggcgaaacgccggtcaccggtgtccacggtcaccgtcggcggcagccgtcgccgtcgccgtcgtcgtcgagctgtgtcacggctgaggtttcagacggagaaggagaagaagaagtcagcagtggcagcatcaatggtgctccatctgcctctcaaagagaggcctag

SEQ ID NO: 22032 - DNA, 1089 bp, Oryza sativa; identical to SEQ ID NO: 12620
  Clone ID: TF_OsC83405_1

SEQ ID NO: 22033 - DNA, 762 bp, Oryza sativa
  unsure (1)..(762): unsure at all n locations
  Clone ID: TF_LIB4833-025-R1-N1-F6
ccggccgggcacataaaactatatcatcatcttccatagctgtacacatcctatattttcattcatggcgatgacaccgcagctagcattttctcgcatgcctccagggtttcggttccagccgacggacgagcagcttgtcgtcgactacttgcagaggcgtaccgctgcgcagccatgcgttactcccgacatcaccgatatcgacgtttacaacgtcgacccgtggcagcttccagccatggcgatgtatggatcggatcatgaccggtacttcttcacgatggcggcccgagaggcgcaggccagacgaacgacaccgtcgggtttctggaagcccaccggacaaagaaagatctcgtcgntccgccgggggcatgagtgcccaccgcgtcagaaggagttcgtcttctacctcggccaccaccaaccatcgggcagcaacaacaacaacaaaacatcatggatcatgcatgagtaccgtctcatgaactctcccaagagcggcagtgccgtcgtcttcttcggtgaatcgtcttcccactgatgatctcacggaagagatggtgcctgtgtaggatctccaacaaggacctgcctaaaccacccttcatccacaacggncttgttgcagttctctttcagtgggngttgaaatgggtgatggggtattaattactttgatcccttgatcacccttgagccctccagcaatggagtatcctaatggtggcattggnaatgggtgatgatgctgctgct

SEQ ID NO: 22034 - DNA, 1101 bp, Oryza sativa; identical to SEQ ID NO: 12622
  Clone ID: TF_OsC351524_1

SEQ ID NO: 22035 - DNA, 1276 bp, Oryza sativa
  Clone ID: TF_OsC146425_1
caaacaaacagtcctttagtttctacaatctgacaagttacaaccaaaacaaaatctagaggtacaagagaactgagaaactaaaaagcaagggtacaacattagctaagtaatcatacaatatccatagactaaattaaggtagctcaaataattatgtcttcctacataatagaccaacaattgcttggcagtaccccaagcatttccttcaggactacatttggtaactaccaggccagtacctctccaccagctgctctacatccaaattctggtatctgatgccagtgcctccaacaacaacatccgtggtaaaacctccatctgttccctgtgggatgacaccattggctagtcctggaatcatttgctctgttaccataacctggtttgtagtacttcttggttggttcatcggcatcgacatcgcttggaggatggattgtggtggcggtggtggtggtggaggcatggctggcgaggatccaaggttgaggttaaggcctgatagtgtaaaaggcgcagccgggttgatgtaaccggggtgtggttggatgtgtgggtgcaaccccggcgtacctctagcaaaccgggagagttccgccatgtcaacggggttcatgtaagggtggtgtccacgaccaaatgggtcttgttgcaatagagctgggaggagaggtgggaccatgtctagtgtgtatgggtggtgggatcgggaatgagcattgttggaggggtatttcttgacgccggcagtcttggcaaatatgcgacagacgacccactcatccttgtttgatttggggattgatttggagtggagtcggtactcatgcatgacccaattggttttctcacctcttggagcccttcctttgtagaacactagggttttcttcattccaactaactccggtgttgctggtggttgtccagtgaagatttccttatcctttcccgttgttttccaataaccagcattagttgctcggtttgtgcgcacgccagttgggtactttcgatcccttaggctaaagaagtaccattccttctctcccatttttgccttctctgggagatcccatggctcgcacttgttgagatcgacctcggcgatggccctcgccgtgaagccgccgtcggcgatcttctgccgcaggtagtaggtgatgagctcctcgtccgtcgggtggaacctgaaccccggcggcaagctctcctctttctttttcgccgaccctcctcctcccgatccttccattcccatagccat

SEQ ID NO: 22036 - DNA, 1266 bp, Oryza sativa; identical to SEQ ID NO: 12614
  Clone ID: TF_OsC359883_1

SEQ ID NO: 22037 - DNA, 1303 bp, Oryza sativa
  Clone ID: TF_OsC283445_1
tccccgggctgcaggctccccgcacacccgcgacaagctcgccccggctggccccggccggcggcgagcggcggcgacctggtgctctgcttgggttgagttcttgattttgccgaggtgtatcgatggagacgacggcggcgaagaagctgccgccggggttcaggttcaggcccaccgacgaggagcttgtggtgcactacctccgccgccgcgcgctcggctcccctctcccgcccgccgtcgacatccccgatgtccgcctcctcgcgcatgacccctccgacctgcttcctccagggtggagtgagcaggagaggtacttcttcacgtgcaaggaggccaagtatgtcaaggggcgccgcgccaaccgcgccacgggcgccgggtactggaaggcgacggggaaggagaagccggtggcggtgtccgtggcggcggcgccgaggagccaggccgccgccgtcgtcgtcggcatgaagcgctccctcgtgttctaccgcgggaagccgccgaccggcaagaagacggactgggtcatgcacgagtaccgcctcgccggcgccggcctcgccccgtgccgccgcgccgccaccgccgaccacccggcgcgccccgccgagggctgggtgctctgccgcgtgttccggaagaaaggctccgcggccgcgtcgacagccagccccaccgccgacgccgacgacgacgacgccaccacggagcgcgccgacgacgccgcggcgggcgtccggttcatcgacttcttcgcccgcgccgacgcgcggcggcgccgcgcggcgtcgccggtgtcgtcgagctgcgtgacggatgcgtcggcggagcattgcagggagcaggagacgacgagccggaacggcggcgccgccgccggcgacgcctccgactaagctaggcaaggcaaggcaagccttgcaagtttgtagcaagaaagaggcagggttaagctttgtttgtaagtttgcttaacgaaatcgcccccccaaaaaaaaaaatgcaggaggacaagacagagagtagctcaagagtgttcagtgtagctcaagatctgttaaaactaatgtatctgatttttaatctgctgttttttgttttcggttttatgtcacagtgccacacgcacccggtgctcgtcccaaattcggtgagctcaatcgcaaattcgcattaaattggattagttttttttttttttttacaaaattcagtttgacttaagttggtcccaagcaaatgtgtaaattgtgatttgtgggagattcagtttgacacgtcctaggttctt

SEQ ID NO: 22038 - DNA, 1509 bp, Oryza sativa
  Clone ID: TF_OsC16321_1
ccttttctcgttcttctttgttcttgctagctagctcgctattgctaactcgtttgtgttaatattctgggtcctttgcttaatggttggtgttggttttttctgatgaattgccgtcgatcttatgtgtcaggtttagtagatgcgattagccaggcagcagcagcaggtggtggtggctgcgacgatggagcatgacgtgcaccaccaccggcagatgatgcagcagcagcagcagcaggagatggacctgccgccgggcttccggttccaccccaccgacgaggagctcatcacgcactacctcctccgcaaggccgccgaccccgccgggttcgccgcgcgcgccgtcggagaggccgacctcaacaagtgcgagccatgggacctgccatcgagggcgacgatgggggagaaggagtggtacttcttctgcgtgaaggaccggaagtacccgacggggctgaggacgaacagggcgacggagtccgggtactggaaggcgacggggaaggaccgggagatcttcagggggaaggccctcgtcggcatgaagaagacgctcgtcttctacaccgggagggcccccccgcggcggcaagaccggatgggtcatgcacgagtaccgcatccacggcaagcacgccgccgccaattccaagcaggatcaggagtgggtgctgtgcagggtgttcaagaagagcctcgagctggcgccggcggcggcggcggcggtcggcaggagaggcgcgggcgcggggacggacgttgggccgtcgtcgatgcccatggcggacgacgtcgtcggcctcgccccgtgcgcgctcccgccgctgatggacgtgtctggcggcggcggtggcgccggcacaacctcgctgtcagcgaccgcgggcgcggcggcggcgccgccgccagcgcacgtgacctgcttctccaacgcgctggagggccagttcctggacacaccgtacctcctccccgccgccgatcccgcggatcacctcgccatgtcctccgcctcgccgttcttggaggccctgcagatgcagtacgtccaggacgccgccgccgccggaggagcgggcatggtgcacgagctgctcatgggcggcggctggtattgcaacaagggcgagagggagaggctgagcggcgcctcgcaggacaccggcctcacgtcgtcggaggtgaaccccggcgagatctcgtcgtcgtcgcggcagcaacgcatggatcatcacgacgcgtccctctgggcctattgaaatattcattcatcatcattgaaaattgcattagccattattattagtactgttggccaccgattattgattgtgttgtaatattggtattgttgattataattaattagtacgccaaagagacaaatcacaagagaacgaagtgtgtatgctgtagattaattccgtatgtttgtgaaaatattcttgaacccaagtgaatgttactagtgcttttcagatgctcatgtttggagcgccg

SEQ ID NO: 22039 - DNA, 1681 bp, Oryza sativa
  Clone ID: TF_OsC10665_1
ccggccggggcattcatcagaacaccatccgtccatcttaattcgcttctacattggggcgcttgttaatttacatgcgagcttgttgaggttgaagcgatcgagatcatcgttgagagctgtagtacgtggtgagcatgggagagcagcagcagcaggtggagcggcagcctgacctgcctccgggctttaggtttcacccaacggacgaggagatcatcaccttttaccttgcacccaaggttgtggacagcaggggcttttgcgtggctgccattggagaggtggatctcaacaagtgcgagccatgggacttgccagggaaggcgaagatgaacggggagaaggagtggtatttctactgccagaaggatcggaagtatccgacggggatgaggacgaacagggcgacggaggcgggatactggaaggcgacggggaaggacaaggagatcttccgcaaccaccacatgctcatcggcatgaagaagacgctcgtcttctacaagggcagggctcccaagggcgacaagaccaactgggtcatgcacgagtacaggctcgccgacgcctctccgccacagccgccgccgccgccatcctccgcagagcccccgaggcaggacgactgggccgtgtgcaggatcttccacaagagctccggcatcaagaagccggtgcaggtgcccatgcagatgccgatgcagatgcagatgccggttgctcatcaggtgcccgccgccaactaccagcagcagatggccatggcctccgccagcatcatccaagtccccatgcagatgcagatgccctccatgtctgaccagctgcagatgttggacgacttctccaccggttcactcatggcgccgcctccgcctccgccttcctactccactctacctggcttcccgcttcagatcaacggcggcgccccagcagtttgttgggaacccgtcgatgtactaccagcagcagcagcagcagcagcagcagcagatggacatggccgccgggaggcttcgtggtgaggcgagccgtcctctctggtggtgtcgccacacagatgctgcccgatacatatatacataggcatgcgcgagcttaattagtgtgatgacaagaggatgctggcttaattagctagtatactccatcatatggcttttgcattgcctttaattttggcttcttgtgtgagtgagatttgctgagagattattattattattagttattatagattgcatggctagctatatttgtacatacataataatatgtgtgtcccatcaatacgtatgtgtgtgagcgcgtcgccgtcttgcgtggtctaaggttactgggtattgccgtacaagttatatataggtttacatgcatgcgtgatagatatatgtgtgtatttgtgcgtgagcccagcttagatttgtgttgtacatagctagcggtgcatgcctgctattcctctgtatggattgaattatgggaaataattacaagatataaataggtatacatgcatgcgtgatagataaatgtgtgtactgcatgtatttgtgcgtgagcccagcttgattgtgttgtacatagctagcagtgcatgcctgccatccctccgtacggattgaattatgtgaattaattattttgtttaattaaaaaaaaaaaaaaaaaaaaa

SEQ ID NO: 22040 - DNA, 638 bp, Oryza sativa
  unsure (1)..(638): unsure at all n locations
  Clone ID: TF_LIB4833-006-R1-N1-G8
ccggccgggatcacaaaacacataaaactatatcatcatcttccatagctgtacacatcctatattttcattcatggcgatgacaccgcagctagcattttctcgcatgcctccagggtgttcggttccagccgacggacgagcagcttgtcgtcgactacttgcagaggcgtaccgctgcgcagccatgcgttactcccgacatcaccgatatcgacgtttacaacgtcgacccgtggcagcttccagccatggcgatgtatggatcggatcatgaccggcacttcttcacgatggcggtccgagaggcgcaggccacacgaacgagaccgtgggtttgctgcgagcccaccagcccagagaccactatgttcctcgacgccgccggcgccatggtccccgtccgcgtccacaccgtcctcatctccacccagcacgacgagaccgtcaccaacgacgagatcgccgccgacctcaaggagcacgtcatcaagccggtcatccccgacaagtacctcgacgagaagaccatcttccacctcaacccctcgggccgcttcgtcatcggcgggccccacggggacgccggcctcaccggncgcaagatcatcatcgacacctacggcggatggggcgcg

SEQ ID NO: 22041 - DNA, 1415 bp, Oryza sativa
  Clone ID: TF_OsC1783_1
agctgatgagctgagctaatcagggcagaacaaaggcaggaggatatagttttccaagatcctagggccggcctgcatcaaaaagaaggatgcatccgagcggcggcgcgctgtcggtgccaccggggtttcggttccacccgacggacgaggagctcctctactactacctgaggaagaaggtggcctacgaggccatagatctcgacgtcataagggagatcgacctcaacaagctcgagccctgggatctcaaagatcggtgcaggatagggacggggcctcagaacgagtggtacttcttcagccacaaggacaagatggatggatctagtatgagcagcagcagcacgcagcagcaggcgcaggttcctcctggatttcgtttccacccgacggacgaagagctggtggattactaccttcggaagaaggtggccgcaagaaggattgatctcaatgtcatcaaggacgtcgatctctacaagattgagccatgggatctgcaagagcgttgccggatcaatggcgggtcggcggcggaggagcagaacgaatggtacttcttcagccacaaggacaagaagtacccgacggggacgaggaccaaccgtgcgacggcggccgggttctggaaggcgacggggcgagacaagcccatctacgccaccaagcagcacagcctcctcgtgggcatgaggaagacgctcgtctactaccgcggccgcgcccccaacggccacaagtccgactggatcatgcacgagtaccgcctcgagaccaccgagacggccccgccgcaggaagaagggtgggtggtatgccgggtgttcaagaagagattacccacaacaagaagagattcagaccatgacgcaccttgcggcagctggtacgttgatgaagatgcaccgggcgccttcatgtctccgatgatgatcaccagatcatcaatattgcgcccacaccaacaccacgccggcatcacgctgcaagagcaacacctccacaccacttacaagcacagagacctcactactaagattcagcagctccaagtccctgcggcaggccatcatctcctcaacaccatgccccatgacctggagagttctacttcctccttccattctcttttggtctcacctgatcaccaccaaatcaacatgcaccatgctcaggctgatcccttctttgacgacatgcatgcagtcgatcaagccactaccactgactggagagttcttgacaagtttgttgcctctcagcttagcaatgatgctacaaacaagcctgcggatcattatactgatgaaggagacattcttcaggtcagtgacaagcagcaagaggtggcagccgccgattatgcgtccacatcaacgtcaagcagccaaattgatccatggaagtga

SEQ ID NO: 22042 - DNA, 867 bp, Oryza sativa; identical to SEQ ID NO: 12638
  Clone ID: TF_OsC408353_1

SEQ ID NO: 22043 - DNA, 286 bp, Oryza sativa
  unsure (1)..(286): unsure at all n locations
  Clone ID: TF_LIB3432-002-P1-K1-B11
cctagtctaaagtaaaaatcaaaaacggcgagctcaggtcagaggcaaccaccacgaccaccttgagcaaaacgagcgagcgaagttatcanagcacactgttattaatggcggtggaagtggctgtggcttggccctccattgaggtggggcaggaccttccgggctttcgttttcaccccacggaggaggagcttcttgacttctaccttttccgcggtgtgctagggaagaaggttcacttttacattattgggacccttaacattttacggcattattcctt

SEQ ID NO: 22044 - DNA, 1361 bp, Oryza sativa
  Clone ID: TF_OsC315862_1
gggataatgatcttgaactccggaggcagcttcatcaacacctgtccgctggattccgagcagctcaagaccttctacttctggatcttcccaatcttcaatagatactgcctctgccgcctctaattgacaagcattcaaccatatatatgtgataaattgtgccaatctgcctcaagtattagcatttaggcaaattgacactacatctagctagctagctagctttgctccgattagtagtattgtttgcctcttctttccattgttaaccttcgattgaacaattaggtttgcgcttgcttgcccaagatattagaataggttttgcaagtgtacatttgtctgaaattcagtcggttgatttgatcatgggtaccatgactctgcccccgggtttccggttccacccgaccgacgatgaattggtcggctactacctcaagaggaaagtcgacagcctcaagatcgagcttgaggtcatccctgtcattgatctctacaagttcgagccatgggagctaccagagaagtcgttcttgccgaagcgtgacctggagtggttcttcttctgcccacgagaccggaagtatccgaacgggtcgcggacgaacagggcgacgagcaccgggtactggaaggccaccggcaaggatcgcaagatcgcctgcgccggcgaggtcttcggcctccgcaagacgctcgtcttctacaagggtcgcgctcccggcggcgagcgcaccgactgggtcatgcacgagtaccgcctctgccaggacctcgcccatggcgtctccaacttcatcggggcgtacgcgctgtgccgcgtgatcaagaggcacgaggcgggcctccatggcgagccgccggcggcgaaggcgaaaggaatgatcagcaaggtgtcgagcagctcgtcccttgtcaccgtcgaacaccagctcagcagccggggcaacgcctcgccgtcgttcacgcccaccaacaatggcagcccgctcgtcgacgagatgttcgtcggcggcggcggcggcgacccgttccagctgcttccgagctgcgtcccgtaccatggcggcgacgcgtgcgggttcgacttgccgccgctgtgcatgcctcagactcaggacccgttcttctccgacgccggcttcacgcaggcagcgcctcctctctacggcgacgtcatgggaagcgtgtcggagcacgagctcaagtgggacaccctgggcggctactccggcggcggcggtggggagctctggaacgcggcggcggcgccgctgctgtgcaggcaggccagcgacggcgacgacctcacggcgtggttcacggccgccgacgacaacatgtccgtcttctga

SEQ ID NO: 22045 - DNA, 1548 bp, Oryza sativa
  Clone ID: TF_OsC46432_1
gcactcttcgtcgtccggcgttcgctgcccttcatcgaaactgtttttctttttttttttttttaattgctataatggatttcagattaatttctcaaccatcggagaaaaatattacaatattacaccaacacaacttgcaagttacaaatggatcgacaacgacgagatgcatatgcagctagctagcaactacagatatgtgcccataattaattaattaagtagataatatctggctcctgacccacgggggcgtccctgccgctccgggccaccaccccctgcttatttcaacctgattaattcagtgcttccttcccgttacattacactgcattacattaaattacagttacattacatggctgggcaaaaatagatctagttcccgtcgcggctcgcaccaggaatgtcccagggatcgcagcttgaagaggttggtggaggtcggggatgaactggcggcggggagcggcaggccgaacgccttgcggcggaggtactgcaccacgagctcctcgtccgtcgggtggaacctgaaccccggcggcaacaccactcctccatgcctcaccaccaccggcgccgccgaagccgccctctccatcgtatcaattctatcaattcacaccaccaccgacgccgacgacgacgacgacgacgagctagagctactcagtcacacagccaagaagctagctagctcaaagctcagtgaagcacaagttaatggcagagagctaagctaagctaagctagctcgatacagttaaagatcgatactgaagagaagctgcagctgctgcttcttcttcttttttttactttgcaggagccatgcatttgcttggaacgttcatcccggccattcgctagagctacgaggctagacccagagagccgggccaccaccaccggcttgtcccgcccgcccgccggcttccagcacccaccgctcgccgtcacatgctgcctcctccccctcgccgcaggtggccgcacggcgaagaagtacttgtccccgtcgctgctcgcaccaggaatgtcccagggatcgagcttgaagaggttgtggaggtcggggatgacggcggcggggagcggcaggccgaacgccttgcggcggaggtactgcaccacgagctcctcgtccgtcgggtggaacctgaaccccggcggcaacaccactcctccatgcctcaccaccaccggcgccgccgcagccgccctctccatcgtatcaattctatcaattcacaccaccaccgacgccgacgacgacgacgacgacgacgacgacgaggagctagagctactcagtcacacagccaagaagctagctagctcaagctcagtgaagcacaagttaatggcagagagctaagctaagctagctagctcgatacagttaaagatcgatactgaagagaagctgcagctgctgcttcttcttctttttttactttgcaggagccatgcatttgcttggaacgttcatggcgcggacgcgtgggagcacgcgctagagagagagagaggagagag

SEQ ID NO: 22046 - DNA, 725 bp, Oryza sativa
  unsure (1)..(725): unsure at all n locations
  Clone ID: TF_LIB4371-016-R1-K1-B5
cgctttcttccccaccacgtctcctcctcttctcctcccctaaaatccccaattccgaccaaaccctagccccccccaaatcgcctcactccaccaccccacgcttccttcgccgctaagtatatccctcccggcgaccgcgaatcggatcttgagagtgagagagaggttgggggaggtggatgagagggcggagatgacggtgatggagctcaagaagctgccgctcgggttcaggttccaccccaccgacgaggagctcgtcaggcactacctcaaggggaagatcacggggcagatcaggagcgaggccgatgtcatccccgagatcgatgtctgcaagtgcgagccgtgggatctccctgataagtctctgatccgctccgatgatccggagtggttcttcttcgcgccgaaggataggaagtatcccaatgggagcaggtcgaacagggcgacggaggccgggtactggaaggccaccgggaagggacagggtgatcaggtccaagggtgacaagaagaagcagcaagtaattggcatgaagaagacgctcgtgttccaccggngggcgtgcgccgaagggtgagcggactgggtggatcatgcatgagtaccgcnaccaccgagccggagtttgagtccggtgacaggggagggttacgttctctacccggctgttccgaaagcagaggagaaaaatgagcgacccagtccgggatga

SEQ ID NO: 22047 - DNA, 1138 bp, Oryza sativa
  Clone ID: TF_OsC189913_1
atggtgatgagcggcggcggcggcggcgcgaggattgtcagtgatccggcggcgacgccggggttccgattctacccgacggaggaggagctgatcggcttctacctccgccaccgcctcgccggcacgagggccgacgacgtcgcccgcgtcatccccgtcgtcgacgtctacggctaccatccttcccagctcgccgccatggccggggtggcgaccgcgggggacagggagcagtggttcttcttctgcccgagggcggagcgggagctccacggcggcaggccggcgcggaccacgccgtcgggctactggaaggccacgggctcgccgtccttcgtcttctcctcctccgccgccgccgccgccagggtcatcggcgtcaagcgcaccatggtcttctaccagggccgcgccccctccggcaccaagaccaggtggaagatgaacgagtacaaggccgtcgccgccgccgccgccgacgacgaccacaacgccgctggcgtggccgtgcagctgccaccaatggcgccgccgccgtcgtcctccgcgtgcgtgcggctgaggaacgagctgagcgtgtgccgggtgtacgtcagcaccggcacgctccgatccttcgaccgccgccccctcgacgcgcccccggtgatcagccaccatcaacctcagctccagcaacaacaacgtcagctgccatcgtcggcagcggcggcggcgacgaacggcaacctcatcgccctcgccggcgggtacgagtgctcacacgacagctccggtggctcgtcggaagatgccgccatcgactggagctcgctgattaccgccgccaccgattccgctaccgccgccgttgatttcagcttcaacgacgacatcgatttcagccctgccgctgttggcccatgggcgccacagctttgattgattgataatttgtgcacactgcataataactgaattactagtaatttagtagtagtaagtttgatcagtgcttgctaattcccatagtttctatttcagtcaactcgattgatttattacctcccaaactctcaattctgcttgtctttaatttttcttgaataaattctgaactatggcctgttcttttcttaaaaaaaaaaaaaaaaaa

SEQ ID NO: 22048 - DNA, 1159 bp, Oryza sativa
  Clone ID: TF_OsC1779_1
tcgacccacgcgtccgcccaccaccctcattccctcaagtcccaagatcgaacacctcgtgtccatggcggcggcgaagcggcgagtgcgcgacgcggaggcggacctgaacctcccgccgggcttccgcttccaccccaccgacgaggagctggtggcgcactacctctgcccgcgcgccgcgggccgcgccgccccggtccccatcatcgccgagctcgacctctaccgccacgacccatgggacctcccccaccgcgccctcttcggccgccgcgagtggtacttcttcaccccgcgcgaccgcaagtaccccaacggctcccgccccaaccgcgccgccgcctcgggctactggaaggccaccggcgccgacaagcccgtgctgcacaacggcaggacggccgggatcaagaaggcgctcgtgttctaccacggcaagcccccccgcggcgtcaagacggagtggatcatgcacgagtaccgcctcgccaagaagggcggcgccgccgccgccgcgggcgcgggcgcgctcaggctggatgactgggtgctgtgccggctgtacaacaagaagaacgagtgggagaagatgcagagcaggaaggaggaggaggaggccatggcggcggcgcagtcgtggggggagacgcggacgccggagtcggaggtcgtcgacagcgacgcgttcccggagatggactactcgctgccggcggcgtcgttcgacgacgccctgctgcccaaggaggaggcgcgcgacgacgactggctcatggggatgagcctcgacgacctccagggcctcggctcgctgctgcaggccgacgacctctccatgctcgcgccgccgccggcggcgaagacggagccgctcggcgcgccattcttctgagctctctctctctctctctctctctctctctctgtgactgcaccactgtatataaattcagagttttcagacatgttcagtattcagagttctcaggcaagttcagaattcagagatggttaaggattagtggcttatgagcagtatgatatgcaggttagtttctagtttagcagtgttactccagattggagatttgattaatgatttgattctaattaatgtagtatactgagtgttactcaaaaaaaaaaaaaaaacaga

SEQ ID NO: 22049 - DNA, 330 bp, Oryza sativa
  unsure (1)..(330): unsure at all n locations
  Clone ID: TF_LIB4370-037-R1-K1-E1
gttttgtttatcatttttttcgtttgttcgttggcaacgatctgatgatgaagtggcggagagggagaaagggaagcacttcttcacaagaaaggaggtcaagtaccctggtagccgccgtagcaaccgtgttgctggtaatggcttctggagagcagcaggctcggaggtgcccatctattacaaaccagaaggtgctgctaacgacatgctagttgggatgaggcggactctagtgttccactacggaaagtcacgatctgcagagcgcactgaatgggccatgcatgagtttcagnncttgctggtgcctggtctcncttcctcacc

SEQ ID NO: 22050 - DNA, 2067 bp, Oryza sativa
  Clone ID: TF_OsC1784_1
ctggcacgaggctagcttcctcgctgcttcgcccgccacgtcaccctcctcctcctccccttttttttctctcgctcgcctcgccatccatggcgtcgatggcgaaccagcagtagtagtagtccaccccaacgacgcgcgcgagccagctccggggtacccgccgctcgtgcccgggggggaagggggtgcaccggggagccgtcgcgccgcgcggctctgattcttcccgttcccggagatttgaaccatggagtctttacgtgacatggtcctcccaccaggatttggattccacccaaaagatactgagctcatttctcactatctgaaaaagaaaatacatggccaaaagattgaatatgagatcattccagaggtggatatatacaagcatgaaccatgggatttacctgcaaagtgcgatgttccaactcaggataataagtggcatttcttcgctgctcgtgacagaaagtatcctaacggttctcggtcaaatagggcaacagttgctgggtattggaaatccactggaaaggatcgagccataaaaatgggcaagcaaactataggaacgaagaaaactttagtttttcatgaaggccgcccacccactgggagacgtactgagtggatcatgcatgagtactatatagatgagcgtgaatgtcaagcctgccctgatatgaaggatgcatatgtactttgtcgtattaccaaaagaaatgactggatcccagggaatggcaatgagttggacaacagtgatcctcatccagaaccatatgatgctcctccatcagttatcagtactgaacagctaaatcctgctgctgaaccagttgtcggtgttgaagctgcaccagttaccgttgctgaacctgacggtgttactacgtcagctatcactgctaatataccatctcctagtgatgacattaatctggatgattggttgaatgaactatttgatcctttctttgaccctgaacagagtctggcttctgctgatctgtctccagatgaacaaaatgttgaatcatcgaacgtaggtgctttggctccaaaggtggaacaagactattctagtcctaacgagaacgtagtagatgatacggagtacttgttgcctgaagatgtttacaacatactgcaccctggtacagatgacttcaatatgctccagaatcctttggatcagtaccccattcaatatgcaaccgatgtttggagtggaattcagaaggaagaactgtggtcgccccaggccaatgctgagcctagtcagtcgaatgaagctgctgataatggaattataagacgttatcgtagtatgaaaacacctgaaactagtgtgccgcagttcaagggtaaaactcaggctaaaatgcgggttgggatcaacaagatggctacgagtagttctgaatctatcaaccagactatcaagtttgagaacagtggtcgtcttgttgagcaccagaagaaccaagcgcatgatgtagcttctaccaagcggtcagacgcagggaagccaagtacagagctcagcagcaatcgaggatttctcaggggtatccgaaatgcatttgcaggctgttcggatgctcgatggaacatgatacttgttgcgggtttcgctattggagtcgctgtggtagcgcttcatataggccaacgccttggattaagccagagagatcagcagcatacctagcctttaggtttgcaggttactgggtttctatgctttttgcaatctggagaaacgtaaacaaactccgatctttggttggtgcagaacatttgatgtatgcgccgttttttttgtgttggttttgtacatattattatcttcggttttggtcgacttttgttctcgccagctagtagtactatgttgacgaatgtagaagaaaacctcaaaaaaaaaagaacaaatgaaaaaaaattgacgatgaaaatttatataattaaccgcttgcattgtactaaaaaaaaaaaaaaaaaaaggcatgattctaaatacacgcacttgtggatgactacggcatttttcctctg

SEQ ID NO: 22051 - DNA, 1122 bp, Oryza sativa
  Clone ID: TF_OsC152847_1
atggagcggtgcagcgtgctggggctgggcggtggcgggggcgggggcgggcggctggacggcgagctgccgccggggttccggttccacccgacggacgaggagctgatcacctactacctgctgcggaaggtggtggacgggagcttcaacgggcgcgccatcgcggagatcgacctgaacaagtgcgagccgtgggagctgccggagaaggccaagatgggggagaaggagtggtacttctacagcctccgcgaccgcaagtaccccacgggactccgcaccaaccgcgccacgggcgccggctactggaaggccaccggcaaggaccgcgagatccgcagcgcccgcaccggcgccctcgtcggcatgaagaagaccctcgtcttctaccgcggccgcgcccccaagggccagaagacccagtgggtcatgcacgagtaccgcctcgacggcacctacgcctaccacttcctctcctcctccacccgggatgagtgggtgatagccaggatcttcaccaagcccggcgtgttccccgtcgtccgcaagggccgcctcggcataagtggcggcggcggcgacacctcgtgcttctcggactccacctccgcctccgtcggcggcgggggcggcacctccgcctcgtcggcgctgcgcgcgccgctggctgaggcctcgctgttcgccgccgccgcggcgccagccgttgacggcgccgacagcagcaactacggcgggggcggcggcgccggcagcgccaccgccaccgccaacttggtcaccggccttgagctcgtgccctgcttctccaccacagcccacatggatgcctcgttcggcaccgggcagtacaacccggccccgctggccgtcgagccgccgccgccgccgccggccttcttcccgagcctccgctcgctgcaggagaacctgcagctgccgctgttcctctccggcggcatgcaggcgggcgtgtcgtcgcagccgctcagcggcggcggggccttccactggcagtccggcatggacgtcaaggtcgagggcgccgtcggccgcgcgccgccgcagatggccgttggccccggccagctcgacggcgcctttgcatggggcttctag

SEQ ID NO: 22052 - DNA, 654 bp, Oryza sativa
  Clone ID: TF_LIB4833-008-R1-N1-D7
cctcgaggccggcccgggaaaaaaaaaaaaaaaaaaaaaaaaaatcacaatagcatcattcaatctttaattcatttgagagttgagagtgagcggaatatatttgtattctacgattgaggagaatggccagccctggagtttgcatcaacttggtgaatggtacatcgacgcgcctccccaccaatgctgatctagtagtccactacctgcaccgtcgcgccattcaggaaccggtgccctgtgacttcatcaccaacgtcgacattctccagcacaacccctgggacatcgtccctgcggaggagaagacaaatgggaagtacttcttcatccatgaggagaacgaacgccttggcaaccaccacagcaaccgtgctgctggtgatgggttctggaggccagtaggctcagaggtgccgatatatcacaaacgtagtggtggcgctgatgaagcactggtggggatgaagcgcaccttggtattccactacgggaattcttcgtccgcaaagcgcaccgaatgggtgatgcaggagttccgacttgctggtgctacccttataccttgccctgtgacgaggccagccaccggggatggctccatgcttccctgccaccggacaggaacgaccatcgccacggaaaacaatg

SEQ ID NO: 22053 - DNA, 2686 bp, Oryza sativa
  Clone ID: TF_OsC1252_4
aacttagcttcgttttggatggatggatggatatatcaaaggaaaaagtacacccaaggtcccttaacttgtcatcgagatacaaaatcatcccccaatcgcaaaaccagataccgggcatcccttaactatcaaaaccattcgctttaggtcctttggtggttttgaacctagttttgtccgacgtggtggctgagtcagcatgggacccacgtgggccccacatgctagagtgccacatcatctatcccttcctcttctctcggttttctcctaggcaggctgaccggcgtgttggggaggaagtcgacggggcgagacgggagaggaggaggatcggcggcggtggccggcgaccggcgatgcggcggcggccacgcaggagcaggtgggtcggtggagcggacaggtgacgaccatcatctccgagcagttcccgccggacgtcgacgcaagcatcgccacgttccgggtcgactccgacgtcgtctcgctcaacgggagggaggcgctgcaggcggacgccgaggcggggcgcgacggtcgagtccacgccgtcatccgctgctccgcgtcaacctccaccacgggcggcggcgcggcgcgctccggcgtgtcccgagcgtacggcgcgtccaacgccatgacgccgcgcgcctccaacctcaccggcgtggagatctactcgccggtggagatgaagtggaaggagaggagcggcacggcgaagacggcgaagatggcgaagcggcgcggcggttgggaaaacgacgcgacgaggatggcggcgggcgagcaggagcggcaggcctcgcaggtgcttggtgagggtgctcgtcggcatcccggtcttgatccagatctccgtctgcgaggcagcgaggacgttgtccaggaggactgtcgtcggcggcggcggcaccgccgcgacgctaggtctagcgggctgcctcgcctcgccgccaccgccaagccgacgagctcgccgcctccccgcgcctccgccggctgcgcgtgtggctccagctccgccgccgcggtcgcccgccgctcctcctcatcggcgagcacggagaggaggctgacgccgccgccttgctcctcgttggcgagcacggagaggaggctgacgccgccaccttgctccccccgccgcccgccgccgccgccttgctcctcctcgtcggcgagcacgaagaggaggctgacgccgccgccgccttcctccccacccgtcagccggcgccgccgtcctgcccgttgccccagagagaagaagagagagagagagaagaggaaaggagagaagaggggaaagaaagaggaggctgacctggacaggctgacatggtcgatccaagcaagaatgagcagcgacggcgcctctggaagcattggaatgaagcacgacgacggcgatcaccggccgagcaccggagcgtcgtcgcggcggtgccccagctgcggccacgaccctgactgcaacaagccgttcgacatggttgggatgcctgccggcgtcaggttcgatccgacggaccaggagctgattgagcacctggaggccaaggtgaaggatggcggctcaacatcgcaccctctcatcgatgagttcatacacaccattcaaggagaagatggcatctgctacacacatcctgagaacctgcccggtgtgacaagggatggcctgagcaagcacttcttccaccggtcagccaaggcctaccccactggcacaaggaagcggaggaaggtcctggctgatcagcagcctgacgaccatccacaggccagcaagggcagaaatgtcgcggcggcggagacacggtggcacaagaccggcaagacgcgggagatcacggtgcgcggccagcccaagggctgcaagaagatcctggtgctctacaccagcttcggcaagaagcgcaaggcggagaagaccagctgggtgatgcaccagtaccacctcggcgagctggacgacgagaaggaaggggagctcatcctctccaaggtcttctaccagacgcagacgcggagcgccgccgcagcagaggcaccggtaagctcgggtgctgccatggaggtgcagggacagcagcagcaagtgctgaagctgcaggctgatgatggtcacttcagctcagctcctaccaagaagagactgcatcaggatgttgtagcacaagtaaaagttgatcggggtcaccactgcatgccagcacaacgccaagtcaacttcaatttgaaagtaactcctgtgcccaccaccagttcattccctgtcgttgtcgacaaacagttggaagaacttcaattcatcagccccaaaaagcagattggcctcaccagcgctggcctcctgacaaccaagatcaacatggataacttcctggattcacagtagatgaacttaactggtaaatggttctagtgttgattttgaaacgtacaacagaaactggctgtaatatcttcggctactgctagagtgctagtgctagtaacctatctacttctgttcttagcccgtagggcagtattgtttcttattgagaatgactgtctatatacatgtacaaaatctcttatattatgaaatagaggtaatatgtagtttttctgtttatgtttgtaggatactaacatcaataaaatcagaccatgatagatttcttcatcc

SEQ ID NO: 22054 - DNA, 502 bp, Oryza sativa
  unsure (1)..(502): unsure at all n locations
  Clone ID: TF_LIB3477-009-P1-K1-E12
ccattacaagattgcatcagagaagatatcttcatagataattgttggagcaagaacacaagaaaacacgtaggttcaattataatcgatcgtggagatggtgaccagcaaggagtttgcaagggatcaggcggccatggatcagaagatcaagagcgacgtcggcgaggtggtgctcgccggagacgaggaagaagacggggacgtggtgctcccggggttcaggttccacccgaccgacgaggagctcgtcacgttctacctccggcggaaggtggcgaggaagtctctcagtatagagatcatcaaggagatggacatctacaagcacgatccatgggatctccccagtaagtgcatccccaattaatttgacaaataacctcaaacacaaatcattttcaaaataattgagctaaattctgtgtntgtgtttgaatggaatggaatgatttgtgcagatgcgagcacggtaggtggagagaaaggagtggacttcttc

SEQ ID NO: 22055 - DNA, 996 bp, Oryza sativa; identical to SEQ ID NO: 12513
  Clone ID: TF_OsC136542_1

SEQ ID NO: 22056 - DNA, 1085 bp, Oryza sativa
  Clone ID: TF_OsC84764_1
gaacaaaaaagatgatttgtcgatctatatacatgtgcaattaagctgcaaaaccatgcaccgggggtcataattaattaataaactgatgatcgatcgagctctctgatcatgatcatttcatagaaagagtagtagtgtaattctttgtgaatgaattaactactaagtacatagcagtgatttaatgaggtaagagtacgtaatcagaagttgaggacgctggcgtagtagggcgaccaggtctccatccatgggctccgcagctgcgtcaggaatggctcctgcatccactccagcccgctctgcggcctcgccacctccagctgcggcaggctcagcgtcgccgggcggaccagctcatgcgccgccgccgacgcctcatccacccccaccacctctttcttcatggcgtccgaggaggaggagatggagatggaggaggagtcctgctgcaggggcgagccggtgttgtgggtgccggaggacgtggtggagcgtgcaagctcctccatggcgaccctctgctccagctccttgagggagaccgccttccggtagaccttgcagagcaccatgtcgtcgtgttgcatttgcaattgcatggtgtcgggaatggcggcggcgtcggggaggcggtactcgttcatgacccagtcggtcttggtgccgcgaggggcgcggccctcgtagtagacgagcgtcttcttgaggccgatgaggcgcttggggtcggcggcgcagcggatggcgcggtcggagccggtggccttccagaagccgcgctccgtggtgcggctgggcctaccgccgccgccgccgccggtggcctgcttgcggtcgcgggggacgaagaagtaccactcgcgctcgccgatgcgggcgagtccggggagctcgcgcgggtcgtggcggtagaggtggacggtggggatgatgtcgaacttgagcttcttcccctgcaccacctgcttcaggtagaactccagcagctcctcctccgtcggatggaacctgaatcccggcagctgctccacctccacctctcctcctgccgccgtcgacctgctccccggctgctccat

SEQ ID NO: 22057 - DNA, 495 bp, Oryza sativa
  unsure (1)..(495): unsure at all n locations
  Clone ID: TF_uC-osrocyp010e10b1
tgttcgtgtccgtgtcctagaaaaacttctgcacacgcagccgacgcccttctctatctagctaaatctccattttaattcctctctctctctctttgtgtctttctcaagggaaaattaaccatcaaatcaatagatacaatgagcttgatcagcatgatggaggcgaacctgccgccggggttccggttccaccccagggacgaggagctcgtcgtggactacctctaccacaagctctccggcggcggcgagttctacggcggcgtggccatggtcgacgtcgacctcaacaagtgcgagccgtgggagcttccagacgccgcgcgggtgggcgccacggagtggtacttcttcagcctgcacgaccgcaagtacgccacggggcagcgcaccaaccgcgcacccgctccggctactggaaggccaccggcaaggaccgcgccatcgtcacccgnctgcgagccgtcggcggtgaggtggtcgggatgagga

SEQ ID NO: 22058 - DNA, 780 bp, Oryza sativa
  Clone ID: TF_OsC12565_4
ctaatctctaggccagtacagaagtgcggtcaaggtggccaagtcgtcccactggtcccaatccggatcaacggcgccaccttgatccatcagctccagttgctgcatggaacttcctgatccgtcgttttcctcgggtgacgccgccgcggcagccatggatggccccgggttctcatcaccaccacccgctagcggccgccgatcgaattgccggatgcctcccgatctggtgtacagtcgacacaggctgaactcgctcctcagctgcggaggaagatggtttggtggcgcggcggcgccggcgctggaggcggaggcggaggaggcgtcggggtagtggaatgctctgtactcgttcatcttccacgcggtcttggttcccgacggcgcgcggccgcggtagaacaccatggtcttcttcatcccgatgggccggcggtcggcggagtagacgacccccggcgtgcccgccgccttccaggaccccgacggcgtggtccggctcggccgccgccgccccgcgcctcccgctcctgccgcgggcagaagtagaaccacggctccccctcctcgccgccgcctgcccagcatctcgtggtgaatctctgagagctgcaacgggtcgacggagtagacgtcgaagacggggatgacgcgctcgatgtcgtcgcggaggccgtcgagcttgttgcggaggtagaagcatatcagctcctcctccgcctccatcgggtagaagcggaacccgggagcccggcggccgccgccgtcggccat

SEQ ID NO: 22059 - DNA, 1382 bp, Oryza sativa
  Clone ID: TF_OsC24159_1
ccggcattttcaaacaatcccaagctatagcaccccctccgcccaagcaataaccgatgtggaacgaggcctcacaacccacaacattttcaaacaacgcaaagcagtagcagcagcgagaagcaagcaagaagcgatggggatggggatgaggagggagagggacgcggaggcggagctgaacctgccgccggggttcaggttccaccccacggacgacgagctggtggagcactacctgtgcaggaaggcggcggggcagcgcctgccggtgccgatcatcgccgaggtggatctctacaagttcgacccgtgggatctgcccgagcgcgcgctgttcggcgccagggagtggtacttcttcaccccgcgggatcgcaagtatcctaatgggtcacgccccaaccgcgccgccggcaacgggtactggaaggccaccggcgccgacaagcccgtcgcgccgcgggggcgcacgcttgggatcaagaaggcgctcgtgttctacgccggcaaggcgccgcgaggggtcaagactgattggatcatgcatgagtaccggctcgccgatgctggccgcgccgccgcgggcgccaagaagggatctctcaggttggatgattgggtgctgtgtcggctgtacaacaagaagaacgagtgggagaagatgcagcaggggaaggaggtgaaggaggaggcgtccgacatggttacgtcgcagtcgcactcgcacacccactcgtggggcgagacgcgcacgccggagtcggagatcgtggacaacgaccccttcccggagctggactcgttcccggcgttccagcctgcgccgccgccggcgacggcgatgatggtgcccaagaaagaatcgatggacgacgccaccgcggccgccgccgccgccgccaccatccccaggaacaacagcagcctgttcgtggacctgagctacgacgatatccagggcatgtacagcggcctcgacatgctgccgccgggcgacgacttctactcgtcgctcttcgcgtcgccgcgggtgaaggggacgacgccacgcgccggcgccggcatgggcatggtcccgttctgaggtgacggcgacgcgatcgaacaggtggtgatcgatgctgcaacgtgtgtaaatatacagcgccggctgggtcaagagatggctcgggtgacgcgcgcgcggcgtgtcctggcgttggcgccggggcattctttagtttttcatcttttcatcatctcagatggtagatacaaaacagtgtatgtatgtagctctgtttctctctatagaaccccaacaaattttgttgttgatgttgtttaaaatatcgaacggctcctcaacccaaagcttttaactaatgatttaatttttt

SEQ ID NO: 22060 - DNA, 951 bp, Oryza sativa; identical to SEQ ID NO: 12516
  Clone ID: TF_OsC397708_1

SEQ ID NO: 22061 - DNA, 1613 bp, Oryza sativa
  Clone ID: TF_OsC344389_1
atggcagaactaccaccggaaggccgcggcggcggtggcaacaacaatgggaagtggaaggggaaggagaaggtggtgcccgagcacggcaagaaccggcacggcatgcccgtcggctgctacttcgtccccaaggaccctggagctcttcgccatcctcaggtgcaagctcgtccgcggccagctccccggcgccctcaacaacgtcttcgagcatatcaggatcctcgaattccaccccgccctcctccatgagacgtacatcgagaacgaggaggatgggtacatctacttcttcagcaggaggcagttcgcgacgaaggcagggaacaagaggcggccgacgcgggtggcaaagggcgggacgtggaaggcgtctggtgggagcaagacggtgaggagcaagaaggtcggcggcatcgacgttggccagaagctcaccatggtgttctacgagcgcaggttcgagggtgaccggaaccccatcaagaccaattggggcatgcacgagttcaccaagatcattgatggctccaaaaaccagttaccaggtagtccttgtggaccttgccgtgtaccgcctgtacaagatcaaaaggaaggaggacgaagaaccgtcgaacactgccgccgcggcgtcgagcaccgacgagccctccacgtcgtcggcattgccacctcctacgccaccgcggccattgccggacatggccggaccgtcgtcagcaacgccgctactgccactgcaattgccgggcctggccgggtcgtcgtctgcgatgtcgctgcctgcactgcagctgccgggcatggccgggtcgtcgtcggcgatgccgctaccgccactatcgttgccgggcctggctggagggatgatgtccatggcggaccaggcgaacatggcctcgacgtcgcaggcgtccacaccgtcgtcggagctcctgcaagactggtacgacgagttcgagatcacgtacggcgccgtggctccgccgtctcctagcacgatcagctgggtggcgccgcagagctcgccgacggggtggtggccgtcgccgaacggcgggccggtgcagcacgacggctacctcgggatggcagcggatccaacgtcgtacatgctggaaaacctgttgcccaccgcggcgatcccgccggagccgatgatgccgccgacgagctcgccggcgccaccaccagccgtcgaccaccaccaccggctctcgcctccgcatgacgccgccggcagcaactacaaccacccggagctcgccgactacaacggcggcgtccaggcgcagcacgagcatcagtatcacccacaggagccgcaggcatcgctggtggatgccgaggacggctacagcgccatggccggtggcgacgacgcgcagctgggcggcgcggagcttgacaccgaacgaatcgccgaaatggtaaaccatataatggatggcgaattcgagttcaaattcgaggacaacaccgtccttaagtacaacgaagtctttcctgacaatgatgaggtggtggcggcgccgatgatgatcgacggtggtagggatggcgatggcgcagatggaggtgatggagacgacccattcgacaattag

SEQ ID NO: 22062 - DNA, 921 bp, Oryza sativa
  Clone ID: TF_OsC604_13
aatgcggcttggcagaaagaggccatgaattcaatcacgctatcagtacaacaacaacatcttaaacgtcccatttgattcgcagtgttcatcacacggaatgtatgggcagatgctagaggaggaataaagcaaaggaacacaattccaaagcaaaagtataaccgaagtcgaatcccaacgcgaggcaaacctcgtgatctccgccgtcggccggatcacgcagcccggacatccgcggcggcggcggcggcgggcttgcgccgccgtgctggcttggctggagagatcttggcggcttggggcctcgagctcttcctgacatggcagagaacccagaagtcgtcctcctcgccgtcgtcggcgcggcggtagcaccgcgggtcggtgatctcgtactcggccatcatccacccggtgctccgctgctgccccatctcgccgcgcacgtagaagcagtagttgatcctgcaccaccgcaccaccacgccgaggtcggtcacggactgcccgttcttggtggagctgtgcatccacgcgccaccgccgccaccgccgccgccgcagcccgccacggtccgccgcaccgagggcttcctccgcgcgcgcgccgagaagaagaacccctcctcccgcctcccgtgccgcgccaggagctcccacggcgccgcgccgcaggggtcggcctccaccacggcgcccgccacgcgcggcgcgaacccgcgcagctgcggacggaggaagtggagcatcagctcgtcctccgtcggctcgaacccgacgccgccgccgccgtactcgtcttctcggatcagattcatctccttccccattccgagtagtagctagtctagtctccgctcgaagtcaacagcgagaagacaagatgtggagatgaacagagacgggtaggggtgtgtg

SEQ ID NO: 22063 - DNA, 1705 bp, Oryza sativa
  Clone ID: TF_OsC345355_1
atggcggcggcggatgggctcctcccgggcctcaagttcgatcccagcgaccacgacctcgtcggaaggtacctgctccggcgcctccagggccagcccctcccgctcgacggcgtcatcctcgaggcggatcccctgagcgcgccgccgtggaagcttctcgcggatcacggccgcggcgacgaggccttcttcttcgcggaggcgcatgccaagaatgggaaggggaagcggcagaagcgcaccgttgagggcggcggattctggcaggggcagcccacgtgcgtcgacggcgagaggctttgcgtccccgacgacggcgtcggcagcggcggcggcggcggcggcttgcagatcgcgtggcgcaagtacgtgctcagcttcttcgcgaacggagagaggggcaagttcgggatgggtgatgcacgagtacccggtgacggcgccggatggcctcgcctcgtcccaattgcggctgtatcgcgtccgattcagcggctacggcaagaagcgcaagagggagccccaatgtccgggagcccacggcgacgacgacggcgagctacaatgcgcgccgcccccgcgccccatggcggagacggctctgctcgaggagcgtgggccactgccccatcccgttcttggccctgcatcggtggtggatcagtgcaccgatcagggctcatccggcgtgatcgacgattcttcgctggtgtttcgtgatcttcccgacctgattgacctgccagttgcggaggaagcagatgccagccatggtgcagagactgctctgctcaacgagcacctgccgctgccgccgccacagttgttcgttccccctactgcagtgccgctggacctcgccgatgactctaatggcgccgatcagaactcctatggcatgatgggcgacgatcagctgctgcttcctgaccttcccgggacaatcaatgacgacatgccagacctgttcgtctcccaagcagaggaagccagtgcagtgcccgcgatcagctaccactcgtcgggcttcatgggcaacgaggttgcggcattgtctgattttgagttgccggagagctattcctcatctgatgccatggacggcgaggcgctggcattgtcgaattacgagtttccagagagcttcgaggaggatctgagctgcatcgacttcgccactgccaacgcgagcagcctcggcttcccaatggacggataccccatggacgagctgttcgatgatatgcctgaccagggctcttccggcgcgatggacgattcatcggtggtgttccgtgatcttcccggcctgatcaacctgccagccgcagaggaagcagatgccatcggcgatgcagagactgctctgctcagggatctcgccgatgactctaatggcaccgatcgaaactcctatggcgtgatgggcgacgatcaggatcggctgctgcttcctgaaattcctcggagaatcgacatgcccgacttgttcgtctctcaagcagaggaagccggtctcggtggcggtgcagcgctggactcctcatcgggcgccatggacggcgaggcgctggcattgtccgactttgagtttcccgagagcgtcgaggaggtgctgagctgcatggacttcagcacggtcgacatgagcttcttggacgtccccattgacgagctgctagatgatctgcccgcagactga

SEQ ID NO: 22064 - DNA, 1751 bp, Oryza sativa
  Clone ID: TF_OsC1781_9
cccctcgaggtcgacccacgcgtccgcttccattagcgactaatccagccttcgttaagggtgattagaatttgattaatttcaaggcctcagatcggagattgaatggagtgcggtggtgcgctgcagctgccgccggggttcaggttccacccgacggacgacgagctggtgatgtactacctgtgccgcaagtgcggcggcctccccctcgccgccccggtgatcgccgaggtggacctctacaagttcaacccatgggatctccccgagagggcgatgggaggggagaaggagtggtacttcttctcgccgcgggaccggaagtacccgaacgggcagcggccgaacagggcggcggggacggggtactggaaggcgacgggggcggacaagccggtggggtcgccgcgggcggtggcgatcaagaaggcgctcgtcttctacgccgggaagccgcccaagggcgtcaagaccaactggatcatgcacgagtaccgcctcgccgacgtcgaccgctccgccgccgcccgcaagctctccaagtcctcccacaacgccctcaggttggatgattgggtgttgtgccgaatctacaacaagaagggagtgatcgagaggtacgacacggtggacgccggcgaggacgtgaagccggcggcggcggcggcggcggcgaagggtggtcgcatcggcggcggcggcggcgcggcggcgatgaaggtggagctctccgactatgggttctacgaccaggagccggagtcggagatgctgtgcttcgaccggtcggggtcggcggaccgcgactcgatgccgcggctgcacaccgactccagcgggtcggagcacgtgctgtcgccgtcgccgtcgccggacgacttccccggcggcggcgaccacgactacgccgagagccagcccagcggcggatgcggcgggtggcccggcgtcgactgggccgccgtcggcgacgatggcttcgtcatcgacagctccctcttcgagctgccctcgccggcggcgttctcccgcgccgccggcgacggcgccgccttcggcgacatgttcacgtacctgcagaagccgttctaattaacggaacgtgacgcctctgcaaacgctaattagctcactaaccactgtcaggtcgatcgtgtaattcttttaccagtctagggtacagccaaaaaaccaaaaattaaccgtgctcgatcgatcgatcgatccatggatcgatgatcgcctccaccggcagatcaaaatcgaagcaaaaaatcagggagaattcttggtacttccagtacctctcgtcgacaccacgtgtcgggttttctgcaccgcggatcctcgctggccgcatcgtaacggcgagcgaggttaaaaatagtggagaattcaagaacacatccctgatttttgtttctgccggatggggagtaccgtgagcatggtagaaatgactggtaaaattttcgttgatgataggtagccagagtcgatgtaaccagtcgattttttttttttttggttttagttgacatgccttcctgatagattcagaacaaacaatagagaagagaggagaaaaaaacacagaggagaaattcagagaccaaagttcaaagttttggaattttcaggggcgccagcagctgatggtattgtcagtcgtgtctaggttcgtagaggaaattaaaatgtagaagaacgggtacttcagttcacttcaaaaaaaaaaaaaaaaaaaa

SEQ ID NO: 22065 - DNA, 515 bp, Oryza sativa
  Clone ID: TF_uC-osflcyp044b03b1
ctctttttttaatcaaggtttagattcggagaaattttatttgtttttgaatggagtgcggtggtgcgctgcagctgccgccggggttcaggttccacccgacggacgacgagctggtgatgtactacctgtgccgcaaatgcggcggcctccccctcgccgccccggtgatcgccgaggtggacctctacaagttcaacccatgggatctccccgagagggcgatgggaggggagaaggagtggtacttcttctcgccgcgggaccggaagtacccgaacgggcagcggccgaacagggcggcggggacggggtactggaaggcgacgggggcggacaagcctgtggggtcgccgcgggcggtggcgatcaagaaggcgctcgtcttctacgccgggaagccgcccaagggcgtcaagaccaactggatcatgcacgagtaccgcctcgccgacgtcgaccgctccgtcgccgcccgcaagctctccaagtcctcccacaacgccctcaggttg

SEQ ID NO: 22066 - DNA, 928 bp, Oryza sativa
  Clone ID: TF_OsC1783_5
gagcatctcggtgaacgggcagtcgtgcgtgccgccggggttccggttccacccgacggaggaggagctgctcaactactacctccgcaagaaggtcgcctccgagcagatcgacctcgacgtcatccgcgacgtcgacctcaacaagctcgagccatgggacatccaagagaggtgtaagattgggtcagggccgcagaacgactggtacttcttcagccacaaggacaagaagtacccgacggggacgaggacgaacagggcgacggcggccgggttctggaaggccaccggccgcgacaaggccatctacaacgccgtccaccgcattggcatgcgcaagacgctcgtcttctacaagggccgcgccccccacggccagaagtccgactggatcatgcacgagtaccgcctcgacgaccccgccaccgacaccgccgccgccacacccacggttacttctgctgctgctgcggcggcggcgatggcggcggcggcggacggcgggcaggaggatggctgggtggtgtgcagggtgttcaagaagaagcaccaccacaaggaggccggcggcggcggcggcaagcacggcggcgacggcagcgccggcgccaaggcggcgcacgcttactcctccagcgacgacgcgctcgaccagatcctgcagtacatgggcaggtcgtgcaagcaggagcacgagctcccctcgccgcaggccagcggcggcgccggggccggcgcagggagcaggccggcgtcaaggtacctcccgccaatgtaccccagcctgcgggcgtctggttttggaaatcggtccctctttcgccgcccgcgtgggggctccgcggcgattggctactcgtcagttctgcctgataataatattgtttacatcctgtacgtcgtctcaggctcatcagcagattaa

SEQ ID NO: 22067 - DNA, 1005 bp, Oryza sativa
  Clone ID: TF_OsC228106_1
tcagaagttccagcagtagtatggctcgtcgagaaagttgcaaatggaatttgagtttgatgatgaggcctgctggtccgtcgggccaccggcggcgatcccgccgtagatgtcgccgaactccatcaactccggcaggtcatctgacgacgaagcaccaaggtgctcatggttgagaagccgagacgacggtgaggaggtgcagcgtgatggtgagctgatgaccaccggagacgacgactcctctcgagccaggccatgttcatcctcctcctcctcacggttgccaccatcgatggcagcacggccatcgccggaccggcgactcgtgtgttgccacggctgaccggacggcggcggcggcgccgccgcagcctccgccggagggagacggcgccggtttggcgtgtgctcctgcactgtcgtcgtcgtcgtcgtcgtctccacctcctccatttccagccagtgttcaattggaggctgcttcttgaacaccctgcagatcacccactcgctgtagataatatcgagaagattatgtgtacgtgcctgagctcctctgatgaagttggtgctcggtgctctagagtactcgtgcatcacccagctcgtcttctcccctcgcggcgccctcccttcgtagaacaccagcgtcttcttcgtccccacgagcccgccgccgccgccggcagcgtacacgcccttgtccttccccgtcgacttccagtagccgccggccgtcgcgcggcggacgcgcgcgccggacgggtacttgctgctccgtctgcagaagaagtagcactcgccgccgccgccgcctccggtgctcgccgccgacgagtcgcatgggaggtgccatggatcggaggtgtagaggtcgacgtcgcggatggcggcggaggtgaaggtggcgtccatggccttcctggcgaggtagtaggtgacgagctcctcgtcggtggggaagaaccggaaccccgccggcaaccgctgctcctcttccat

SEQ ID NO: 22068 - DNA, 2070 bp, Oryza sativa
  Clone ID: TF_OsC1713_5122
tcaggtagtgtgattcagagatttccacacaccaaccaacaaaagcagagagccggccatcacaaagagagccggccactgccacccccaccctagtcgcacaacagagctagtccatttctgaatatgaggtgcatgctgctgttctcgtgtctccaacgaaggtacattattctcattgctatttctagactccactctcaacagcctctgctttagattagttccacggggctgattagcatgtaccaacatctcttcatgaaaggagaagccttggagcttgtccataacttccactgaatgatccacttgaataggggtatcctctttgcactgaatatgcattggttctccatcaataaactgtagtagtaccataatctgggaggctgcatcgtcattttcctcgctgtggttattagatgaacttccagtgttacaacatgatccagcttcatcttcactcctgacactttccttcttgttattagatgaattgcgagtgttacagcatgatccagcttcatattcactctgcaaatgtgaggatacaggttgagagactgatgccctctcaacagagcatacaaggcggatccttcttgcagcagttccttgttgtggatcaacgagatcttgagctgtcaagtgcttcattgaaggtgcctgttcctgaccttgttctttcaaggcatctgaaaatgtcatgccactcctgcccggttctacgatagtatcgaaccaatgctggggataaggggtccacaatccagcccaacagaaggctccactcttttgtgactccatgtgaggattgaatgcggagtgtagttgatcttggttgcacaagggggagccctcggctactccactgtagaccatgctgctactctgggctcttgcttcaagattagcatcacttgtttctgtttgtggtgcattgattgaagaagaacagcaagtagcatctgtgttgtctgcacgctgaattagaagcatctgatatgaatcattcttcctccaactatccatgagtaatgtgttattgtttggattgttggacgacgcggtaggattagactctacgtttccagtggggtgcttatccattttggtgtaatttggactaaacaacaaactttgcaggtcctgctcagacaaggtactgccaaaatgcgctgaaagatcttgctcacccagattgccgacaaaagggtgatcgctgtaagggcgaattggagaggtgatattagggaatccattgtatctttgctcaggctctaggtctggaagttgagataacacgtccagaaaagcatcgtcatgggctacagtttgctctttgtcatggacagatgtactagcatcttgtatttcagtcagttggctgaaaccagatgatggtaaggtctgatgatccttcattattgaggcgagggccggttggacagcaggtgtgccattttggggattgccttgagaagacgtggacaattgttggtccaaattggaggccggggtatgggtatcatcttgttcgtgcttgttaaacaggcgatacagaacgaagctaccgtttttgcctgattggaagtgaggctcagtggtgcggtactcgtgcatgatccaggcggtgcggaggccccgcggagctctgccgcggtggaagacgagggtcttcttgatgccgatgagggggccggcggggcgggagcggatgaggcggtccttgccggtggccttccagtagccggcggcggtggagcggttggagcggtggccgccgggatacttgcggtcgcggggggcgaagaagaaccactcggggtcgtcggacttgataacggacatggccgggagatcccagggctcgcaggtggagaggtccacgtccgggatgaggaggaggtcagggtggctccgcccagcgatctttcccttcagatagtgcctcaccagctcctcgtccgtcggccggaaacggaaccccaccggcagaaccgccgcggcggcgaccgccggcgtcatctccactttcccttgtttcatcgccacttttcccttctc

SEQ ID NO: 22069 - DNA, 1369 bp, Oryza sativa
  Clone ID: TF_OsC8585_1
gcgatttataactaggctccgcctccgacgcgcgcacgcctctccctcccctcctcctccgcctcgcctcgcagtgtggaagaaaggaaggaaggctaaaaccctagcgagcgcgcgagcgagcgagggctctctgcttccttgcgatgacggcgccggcggacaaggggaagaaggccaagaccgacgccgacggcggcgccgccgaggagaacgagcagatcgacggcgccctcgtcctctccatcgagaagctccaggagatccaggacgagctcgagaaggtcaatgaggaagctagtgacaaggttttggaggtcgagcagaaatacagtgagattcgcagacctgtctatctccgaaggagtgacgttatccaaacaatccccgacttctggctgacagcgtttctgagtcatcctctacttagtgagcttttgaccgaagaggatcaaaagatgttcaagtacctggagtctgtcgacgtggatgattctaaagatgtcaagtcaggctactccataactcttaccttctccgagaacccgtactttgaagacaaagagctcacgaagacatatgccttcgctgatgacggaacaaccacaataaatgctactagcattaagtggaaagaaggaatggaaattgcaaatgggaatgccaagaagaaagggagcaagcgaccattggttgaggaaagtttcttcacctggtttactgatacagagcacaagagtcttgctgatggtgtgcaagatgaggtggctgagatcatcaaggaagacctgtggcccaatccattgaagtatttcaataatgaggctgaagagttaggagaggatgacgacgaagaggggtctgatgctgatgagggtgaagaggatgaggaggaggagaactgagtctaggatgtcagattgcgatggtgccgatcgtctgcattttgtggatgctgtcactctgaagggcgaagttgcgtgaccctcggttgcttctttcttttttctttttgatgacttagctggaacccttaggaactgtttaatgccttatggagtccgtcgtattttcgactcaaaggagacacctctatatcataatctgcgtataaccatggaagacattttaacctgctgatgtgtggttcattgcgctgcctctggtgctgtagggtgttcgttcctttgtgctctctgtcttttttttttttttttgtgtgtgtgtggtcgcgctggcattgttgccagtctgatgggctgttatttctccccctagaaagagtgaaaaacctggcttgtgatcattgtttacgaaaccgtgcgggtatctcatggttatctcggttattacatgctgtaattttctc

SEQ ID NO: 22070 - DNA, 1242 bp, Oryza sativa
  Clone ID: TF_OsC8302_1
ctacgaaacctcctctctctctctcccttcgctttctctcttccttcctagggcttcccctcctcggcggcgcatcgcataggcggcggacgaagagctcccggcgatgggcggcgacaaggagaacctcgacctctccgacctcaacgcctcgctgcccgccgccgccgccgctctcagcgccgaggaccgcgccggcctcgtcaatgccctgaaggataagctgcagagcttggcgggtcagcacacggacgtgcttgaggcgctctcccccaatgtcaggaagcgtgtcgaatatttgagggagatccagggccagcatgatgaaatcgagttaaaattctttgaagagagagctgcgcttgaagcgaagtaccagaagctttatgaacccttgtacacaaagaggtataacatagtaaataggaagttgttgaggtgttatggttggcaatgcaacaagagctgtttgttatattttgttgatgcagtattttgcgttgaactgcccaggaaattattggttggttgtgcacgggtgagttttcgttgcttggtatatgttacccgtggttttattggcggaagttgtgaggcctgtctgggaacatctatattagagtattattatgttttagttatatgtaatcggtttattaagtttgtgtaattatttggaatctgccggtggaacttttactagtattcatttgagccttatgaaaaaaaaactaaaataggagaaagcaattgggactgaaaatagagtggtatcctggtaaaaacctgacacagaagattctaaaaaagaaacccaagaaaggttcaaagaatgcaaagcctattaccaaaactgaagtctgtgagagcttcttcaactttttcagtcccccgcaagtacccgatgatgatgaggacattgatgaagacactgctgatgagcttcagggtcaaatggaacatgattatgacattgggaccaccataagggataagatcatcccacatgctgtttcctggtttactggtgaggctgtgcaagccgaggattttgacgatatggaggatgatgaagaagatgatgaagacgatgatgaagatgaggaggaggaagaagaggatgaggatgaagacgaagacgatgaggaagaaaaaagcaagccaaagaagaagtcggcaggcaaaccgaagtattttgcgttgaactgcccaggaaattattggttggttgtgcacgggtga

SEQ ID NO: 22071 - DNA, 1261 bp, Oryza sativa
  Clone ID: TF_OsC18074_1
ccggccggcaccatcccctaacccctgaccacccccccgcctccgcacccgcctccggttgcctcctcccctctcggcgggcggcggcagcagcggcggcagagtcagcagacctcgccgggaagctaaagccctaaagctcgcggaagggtttatcgcaacgggcgatggcggcggcggagcagaaggggaagaagccgaggaccgacggcgcggaggccgagcccgtcgacgccgccctgctgcagtccatcgagaagctccaggagatccaggacgagatcgagagggttaatgaggaagcatgtgataaagttctggagttggaacagaaatacaacgaggttcgcagaccagtttatgttcgacggaataaaattatcaagcaaattcctgacttctggctgacagcgtttcttagccatcctatgcttggtgaactattaactgaagatgatcaaaagattttcaaacacttggagtctatcgacgtggatgactcagaagatatcaaatcaggctactccattactctcacattctcccccaatccatattttgaagatacaaagcttacaaaaacatattcctttagtgacgatgaagcagtcaaagtaaaggctacctccatcaggtggaagaaaggaatggatattgccaatgatcgtgcgtacacgaagaaaggggacaagcgaatcttaattgatgaaagtttctttacttggttcaatagtgaaaagaacagaagttttgctcatggagctatggatgaggtggcagatgtcatcaaggaagatctgtggcctaatcctttgaagtacttcaacaatgaatttgaagaagaattagagctactggatgacgatgacgaggtatctgatgatgacgatgaggaggaggatgatgaagaccaaggtgaaggagaggaggatggagaggagaactgagctctctgtcatgtcagattcttttggcctggacaacttatgtctgcagaaagcggagaccgggcctcctggagggctgaaacagcagggcgtccccttttgcggcgttgtggtgctcgacttagctggcagtgtagggacttgctccgaaaaactttgttctatggagaaataactcgagttcaatagatgattttgttgcatgcgcgatcgaaatgttgcgtgttgtttggaagtgttatttaccttgccgttggattagtgtttataacgctattatatatagagcatgatcaattaaaaaaaaaaaaaaa

SEQ ID NO: 22072 - DNA, 1695 bp, Oryza sativa
  Clone ID: TF_OsC26576_1
gaatcccctccgcctccactcccctctcccctcctctcaacccccacagctcgcgccgccgccgcagctagggtttctctccgccctagcctacctcgcggagacctaccacccgaagcttcgggaaccctcgcatagccgccatgagcgacggcaaggactccctcgacctctccggcctcggcgccgccgtccccaacgccaaagagctcagcgcggaggacaaggccaacctcgtggagtcgattaagaacacgctgcagggattggcggcgcggcacacggacgtgctcgagagcctcgagcccaaggtcaggaagcgcgtggaggtgcttagggagatccagagccaacacgatgatctagaggcgaagttctttgaggagagagctgcacttgaagctaaatatcagaagatgtatgaaccactttactccaagcgttatgaaatcgtgaatggtgtggttgaggtagatggtgtcaccaaagaagctgcagatgaaacccctgcagagcagaaagaggagaagggtgtaccagagttctggcttaatgccatgaagaaccatgaaattctgtctgaggagatccaggagagggatgaggaagctcttaagtacctcaaggacatcaaatggtacagaattagtgagccaaagggtttcaagcttgaattttacttcgatactaatccattcttcaagaactcggtgcttaccaaaacataccacatgattgatgaagatgaaccaattctggagaaagccattggtactgaaattgaatggttccctgggaagtgtttgacacaaaaggttctcaagaagaaaccaaagaagggctcaaagaacactaaacctatcacaaaaactgaaaactgtgagagcttctttaacttcttcagcccacctcaagttcctgatgatgatgaggaaattgatgaggatacagctgaacagttgcagaaccaaatggagcaagattatgacattggatctaccatcagagacaagatcattccacatgctgtttcatggtttactggagaggctgctcaagatgaggacttcgaaggcattatggatgatgaagatgatgacgatgaagatgacgacgatgatgaagatgaggatgacgagggtgatgatgaagacgacgaggatgaaaagaagggcggacgagttcctgcaggggaagggcagcagggagagcgacctgcagaatgcaagcaacagtaagatgcttcctacctgagcgtttccaaagtccggtcctggagtgaagaagaatgtttggttcggcttgatgcaatgtctcgtccatttggtttggagagccagttggggaagtgttgggattgagttggtttagtggaactggcgggggatatttttttcgggacatggtattatatgtttggtagctttttccattgttgtattgggtcgacatatcttgtgcgaagcttatggttgagtgatgaatatcgccggtttggtattatcatattgccaataccactggcatagtgctgagaaattttgatctaggagaggcaatgtttttgttccacgagaggcaatgtttttgtgcgaccaagttgcatctttgatggcaaggaaattgttctttttttttttttaaaaaaaaaaaaaaaaaaaaaaaaaaaaaaagggggggggcctgcagcccggg

SEQ ID NO: 22073 - DNA, 5515 bp, Oryza sativa
  Clone ID: TF_OsC1542_1
atggacggggggacggggccgggggcggagctgctctcgccgggggaagccgagtggccgcccgagctccgcctcccgcctccgccgccgccgcatcctcctcctcctcccccgctcgagccggctccgccatccactccccagctccgcggcgaggcgtccccgcccccgcctccgcctccgcccgtgggaccacccggcgcggcggtggtggccgccgccgcgaggaaggaggcgtccgcgtccgccgaggggtttgatgactcgcacttcctcggatcgatcatgggggcgcccgcgcaccagcaccagcaccagcaccagcagccgcctgccgtggggccgccggtggtggtgaagaggaagagagggaggccgccgaagaacagggatggagcggcgccgcctccgccgcccaagccggtgaagaagagggaggacgacgaggacgtggtgtgcttcatctgcttcgacgggggcaatctcgtggtctgcgataaaaagggttgcacaaaagtctatcatcctgcttgcatcaagcgcgacgaatcattctttcgatctcgggcgaaatggacatgtggttggcacctatgcagcacctgtgaaaaggcagtacagtacatgtgctatacttgtacatactccctctgcaaaggttgcatcaaacaaaagccagtcaaattctttggtgtcagagggaataagggcttctgtgatacctgctatagcactatactgttgatagaatccaaagatgatcgtgccaaggctaaggtggacttcgatgataaaaataattgggaatatctcttcaagttgtattggttggatcttaaagggaaacactctctaacattggaagaacttgtcaatgccaaaagctgttggactgttcgtagcacttccgctaggagagaaaaggaagattcatccaatgacctctatgatgcaaattttgaccttgatgccagttctgatggcgcctcaagaaaacgaagacggaatagtttttcagggaaaaggggacggaaacgccaaaacaatggtgctgaaagcttacctaagagagtgcaaaatgaaggaatgacttttataggtgacacacaatgggcatcatcagagctcttggaattcattgggcacatgagaaatggtgatatttcttatatttcccaatttgatgttcagattcttctgcttgagtatgtaaagcaaaaaaatcttcgtgatcctcgcagaaaaagtcaaattatttgtgatgcgaggcttgccaatttgtttaggaaaccacatgttggccactttgagatgttaaagcttttggaaatgcattttcatgcgaaggagacggtaaatggtgatggccaaaaaggcattgactcagattcagctcaaatagacagtggaggatatagtgatatgccaagtaaattatgctctgataagaggaggaagattcataagaagattgagagagaatcaccagctaatctagaggattatgcagcgattgacatgcacaatatcaatttgatttacttgcgccgcagcttgctagaggatcttattgatgataatggcacgttctctgacaaaattactggtgctttcgtgaggataaggactccttgtgttggccaaaagcaagatatttaccgcctggtgaaagttcttggtacacataaagtagcagaacggtacagcgtcggtaagaagacaactgatcatgcgcttgagatattaaatttagataaaaaggaggttatcacgatggatacaatctcaaatcaagatttcacagaggaggaatgcaaacgcttacgccagagcatgaagtgtggtttgattacccgactaaaagtggtactgttgatcaagattcattatacgggagacatccatgagaaagccaaaatattccaactgctgcgagttaatgattggttagaaaatgaaaagcagagactgagccatctacgtgatcgtgctagtgaaactgggcgcagaaaacaatatccttttaacttaatcaaagatttgcatgcctatggtcatcatagattaatctatgaagcgttcaattcataccatcattgcgaaattattatttgcatgaggatacatttcttcatgcatactttactaatggagtatgtggagtgtgtagagaagttgcaacttctgggcactcctgaagaaagagcacgcatcattaatgaagatccagaagtacatgttgacccatgtatgtctcctgattatgaatctgctgaagaattggatgttaagaaagctgttgattcgacaagtaggaatggatcagacctgttatttcttggaagaaaaggaatcgaaacaaactctctgcagaatcatagacaaaattgttctgccactagtcatcacacgactacaagtccacctactgagggtatgactcatggacaaggagaagaagcatcgtttgcatcgtcagaaattgtatcaggtgacatggaaccagaaaaagtatggcactacaaggatccttcaggaagtgttcagggcccattcacacttttacagctgtccaagtgggcagcttatttcccacgtgacctgagaatatggctaacatttgagagtgaacaaaactcactgcttttgactgaagttctctcgaaacaacaaaaagatttcattcagccttctcccaaagttgacaataataggtcaacatgggaaggcgttgggcaagatagagttgactcaagtttgactggaaataactcttcctctcctattggttataatgtgatctactcttctcggttgcctagcccatctgctgactattgtgcatcagctagagaaggcccaaaccttccgagtggaaccttgccattcatgacaagccagaaaacacaaaaggatcctcagatgttgcatggccaggcacagcatcagggtgattattcatgtaccatcccgtcatctgtggtttcatatagaccagctggttctcatgatgagtggccccctcgaggcaacattggtgaatggaacaatagtcaggatagtggtggtatgtggagcccaaccacacctcacatgagtcggagcaatttggagcatcagcctgacaggtgtattacgaagaagcaattgcagaatgattccaaacgtaatacgctagcaggatctgcagaaaatctaaattcccaaatggattttggttcacagaaagtacacattcctactccacaacaacctgagagagatcttgccacttctgttggtacttcaaggcaatttgagtttaaaacttgtcatcaggaaggctctcactggagttcaacagcagactccattactcatgatgggcttcaattatctcttgcttcagcaaagcctgagagctgctctgcagtaaatcctattagagatggagattccagttcagcttctcgtgtgcctaatcaatcaggagctcatgtctatagcccaccacacccagctacaactaatttaagcaagagtgaggagactatgaatcagtgtaaatcgtgtgagcctgaagcatcaaataaatcacgcaagcctgatgcatcacatgctccagttaatcaacatcctaagcctgaaagtgatccattgttacctgatactcaagattttgagcgcacgcatcctagcccaagtactgaacatgacacaaaggagccattgaaggatcaatcgaggtcaacatcagtagcacctgaagggtcgggtacaatggcacatggacagtcttccatagcttttatatcagaagcatctggcccactttctagtaaaattgttggcttgcaaccacccaaggatacatcatttcttgtcgaaaaagatataaaagatggaggttccattacacaaacagagcaacaaaaagaagagagtacagcatttaagaaagagaacgtagctgttgatcctatctctgacagtgaagcaatagtatctggtgtgttggaatctttgacagagacatataatctgcatgaagaaaccgctttggaaaatttcacgccaacatctgccgaggaagaacaaccgcaatgctctacccctattgcattatctccttgggatgaaacaagtgactatcaaggtgaagctgttgattctgctctatggggtgtccaagatgaccaaaacaatgaaatgtggtcattgtcttcaccaacacctactctccaaccttcaggtattggagctgataccaaaggtgcttcctgtgctatagaagaggtgatagtagcccaaggaaatagtggtgttgttgaaccgtcaccagcactggagaagaaaaggattgaaaaagtaccaagtgcttccatagatcgtggagtaccagagcaggtaaaaccaaaatcagatgctgcattatctccagaagagagcagaaaaccttcaggtttgcaactatcaagcacatatctacaagggagcacaaaatcttcaggtttgccaccgtcaggcacatctctagatgggggcatagaaccttcaggtttgctaccttcaggaacttctttggagtggggtacaaaaatttcaggtgtgcaatcctcggcctcatctctagaggggagcaaaaaggcttttgttaggcaaccatcaggctcttcactagagggaaacacaaaagcgtcagaaaagcttcagcatggcaatcatcaggttcttcgcctgttgcagggagctcaaaagcatcaggttggcagccatcacctcgcgagagctcgaaatctaagcctaattccacatggggtgccggccaaagccgcaactcgtcttcgcaccaatcaacaacaccaacagctaaatactcatcagaaaccccaaggagacaaggaaacaacaacacaaattctgctggctggggagactctctcggaaacaagagctggcattcaccctcaggcaatgcgagcagccgaggcagccattctagccaccaccatgaccggcacaatcagagcagcgaaccatggcgtggtggctcaaatcattccaggagatcagatcatcgtcaagaacatggcaacggtggctcgtcgagatcatcgtcgtcgagggggcaatctcaaagggggatctgtagatactacgagaatggctactgcaggaagggcacttcctgccagttcctccaccgttgaaaacgccctcacatttttgtacagccctaaatgatttctcactcactccgtagtcagcacagaagtgacctttatttaaccttctcggcaccactcagctgttagtaagtatatacatatccatcagcacaggagtatgattaagttagcattttatgcttggaaaaacagccactgatgtacggccacgactgtagatccttctctttaggtgaatgatgcattttgattgatcctgttaggtttagtggaattatgagttcacccgctttaaaaaagaaaaatctttaataataatattttaaatttattctactaaaccaatg

SEQ ID NO: 22074 - DNA, 690 bp, Oryza sativa
  Clone ID: TF_OsC10655_1
gaaaaaaaaaacaaaccacaacgaactaccccctcctcgtcgagccgacgcgagagaggaaagtgggttgcggcttgctgcgcgtgtggagtcgccattccccaattcgctgcgccgcccgccggatctcgtcttgccccctgcggcggcggtttgggcccccccttccgatcggtttccccccgcacatggtcgtggcggcggcggaggtggtggtggtgcgggagtagggaggcgggcgaaccgaggcggcggcgccgatggcggacctggtttccagctgcaaggataaactggcatactttagaataaaggaactcaaagatatattaaatcagctcggcttaccaaagcaaggaaagaagcaggatcttattgatagggtgttggcactcttaacagatgagcaaggtcaaaggcatcatggatggggaaggaaaaattctctcaccaaggaggcagtggcaaaaattgttgatgatacatacaggaaaatgcaaatccaatgtgctcctgatctagccaccaggagccacagcggatcagatttcagtttcaggcctatagaggaagcctatgactcttttccgccagaggccaaagttcgctgcatttgcagtagcacaatggttaatgacagcatgatccagtgtgaagatcagcgatgccaagtgtggcaacatttgaaat

SEQ ID NO: 22075 - DNA, 6021 bp, Oryza sativa
  Clone ID: TF_OsC31430_1
atggagggagcagccgccgccgccggcggcggggagatgctatccccaggtgaggcggactggcctcccgagctgcggctcccaccgccgcccccgccctccgccgcatcggagggggagccgccgcccgcgcgggccgcggtggggatggatgactcgcagttcctcggatcgatcatcggcttgcccgcccagccgccgcaggccacggccgaggcgctcgcggtggtcggggtcaagaggaggagagggaggccgccgaagaagagggacggggcggcggcggcgacggcggttgttcccgcggcgaggcctgcgaggaggagggaggacgaggaggaggtcgtctgcttcatctgcttcgacgggggcaacctcgtcgtgtgcgatcggaggggatgccctaaggtctaccatccggcctgcatcaagcgcgatgaggcattcttccaatctcgcagcaagtggaattgcggttggcacatatgcagcagctgtgaaaaggcagtgcactacatgtgctatacgtgtacatactccctttgcaaagtatgcatcaagcaaggtaaatttttcagtgtcagggggaccaagggcttctgcgatacctgttattcaactatactgttgatagaatccaaagatgaaggtgatacaaagattgttgttgattttgatgatcaaaatagttgggaatacctgttcaagctatattgggtggatctgaaagggaagctttcattaacattggaagaactaactagcgccaaggctcgatggaatgcacctactacttacactaggaaagaaaaggatgagtcatctgatgacctttatgatgctaataatgacgatgatgctggttctgactgctcctcaggaaagcgaaagagaaattcttcgagaaaaaagggtcgaaaacgtcggaaaccaaattctgattgtagcattgccacaaaaaaggttgagactgttactagagatgatggaaccctgcccaacaaggtaccaactgaagaggcgtccttgccggtagacaccaaatgggcttcgccagagctactggagtttgtagggcacatgagagatggcgatcaatcttttatttcccagtttgatgttcaggctcttttgcttgactatataaaacagaacaacctccgtgaccctcaaagaaagagtcaaattatctgtgactcaaggcttcaccgtttattcaggaaaacacgcgtcgctcattttgagatgttgaagcttttggagatgcactttattgtaagtgagccttctgcagtaaatgatggtagccaagggattatcaatcctgattcagctcaaatagatcatgccagtggatataatgacatggcagcaaagttctctcctgataggagacgaaggatgcatagaaagatggaaagagaaccacaggctaatcctgaagattacgcagcaattgatatgcataatattaacctaatttacctgcgccgtagcttgatggaggatcttattgatgatcccacattgtcagacaaaatttctggtgcttttgtcaggataagaatttcgggacttggtcagaagcaagatatgtatcgtctggtgaaagttgtcgggacacataaggtttcagaaaaatacagcatcgggaagaagatgacaaattttgcacttgagataatgaacttaaacaaaaaggagattatcacgatggacacagtatcaaatcaggattttacagaggaggaatgcaagcgcctaaggcagagcatgaagtatgatctaattagccgactgaaagtgggtgatatccaagagaaagccaagatcttccaatttgtaagagtgaatgatcttctcaacactcctgaggaaagagcacgcagaattaatgaagttcttgacgtgcatgttgactcgcatatggatcctgattatgaatctgatgatgaatttggcaacaagaaagctgttgaacgtagtgtaaattgggcaagatcagatccgttcgtttcacccgttaaagttaaatattcgaacagttcacaaaagaatggtgatgctacccgccatctcaaaaacctgtctaaacaaaatacagagcgtaaatcaggagcagcaagaaactttgagaattcccattcaccagttggtatggatattccaaaatctggcactaatgtaaagagtaccaggtgtgaaactacgtcaccttcatctcatggggttgtatcaagtgacatggaaccagaaaaagtctggcactacaaggatccttctggaaatgttcagggcccatttactcttgtgcagctatccaaatggacaagttacttcccacgtgatatgagagtatggcttacatttgagagtgaagagagatcattgctgttgactgaagtgctctcaaagcaaccaaaagattttggtcaacctgcatctgttactacaagtagtaagtcgacagtagcagacactggacaaaacagaaacactgaaattgttgatctcaacaaagctccttctcctgttggttatagtatgcttaattcttttgaaaccactgttcagtctactaagcattctgctccagaaagggaaagcgtgaactctttagatgacaggttatcacactcgactgactcagttccaccaaaggacgctaacgcttcaaatagtcaagcaatgtgtcagatcaagcattcaggctctcttccatctcctggaagtccacatcaacgatcagacttgcaccatgatgaagtacagggaggacgctctggtgaatggaacaatcaacacaacagtgaactgtggagtccatccatgccgcagacaagttctagtgcacacagtaacgtggaatctcatcacgatcattatccttcgtggtcacaggttcaacatgatcctaaaaatagtttacaagcaggttctgggaaggatctgaattcgaggtatgatattgcgcagaaacttcctagtcaacggatcacgagagatgttcccagccctgtatttgcctggagtccatctgagtccaggactgcttccagtcaacatgaaggttcttgcttgagttcaacaaccaatctatgcactcatgatgaacttcattcttcaattgcttctgcaaaggctaaaagctttgctccagcaactcctgttgaagacagaggttcaagctcaccctctggtatgctgagtctctcggaaagagcaccaatctgcagtccacagtcagctccttctgcgtctgcttctgatacatgcaagatggaggagaacatgaatcaacaaaaaacacttgaagctgatatatcaaacacgtcagttaatcagtctccacagtctaagattctccctgaatcttctcctgataaccaagatgctgaacatgaatatcgtagtccacctccaatatctgagagtaaagagttatccccacagtcaaggactacccctggatcttctcctgataaccaagatactgaacgtgaatatcctagcccgcctccaatatctgggagtaaagagatatccccacagtcaaggactatccttgaatcttctcctgataaccaagataatggacatgaatatcctagtccacctccgataccggagagtatagagctatctccgcattctaaggctctccctgaatcttctcctgataaccaagatattgaacctgaatgccctagtccacctcaaatacccgagagtaaagagctatctcggcagtctaagattctccctgaatcatctcctggtaaccaagatattgaacctgaatgccctagtccaccgcaaatacctgagagtaaagagctatctcagcagtctaagattctccctgaatcctctcctgataaccacgatattaaatgtgaatattccagtccaactccgatacccgagagtaaagagctatctctgcagtctaagattctccctgaatcttcttctgataaccaagatattaagtgtgaagatcctagcccaactccgatatctaagagtaaagaggtgtctccgcaatctaagattctctctgaatcttatcttgataaccaagatgttgaacgtgagtgtcctagttccattctgataactgagagtaaagagcttgctgtggacctccctggatcaatatcattagcacctgaaaaaacagcttctactgatgtaggtgaaaactcttcacttgcttttatttttccaaaatctactctggctggggatgatgctttgaaatcagtatttgatatggcaaaggcgcatttagaatgtgaagattcaaaggttaaagaagaactgtatgttgaatcaactgttgttataagagatgacatggttgttaatcctgcctctggagttgagtccatagacatgtctgaaaatctcttggaatctttgatggagcaaagttgtggaactttttacatggatggtacaacagccttagaaggttttctgtctggttcaacgaaggaagaaccgcaatgttctagccccattgctttatccacatgctctagccccattgcattatccccttggggtgaacatggctactatcaaggagattctgttggttcttctttatggggtgtccaggacgatgatccaatcggtaatatttggccattatcctcacaagcaccggctctccagtattcatctggtagcactgctcattttattgatgaagcaactgtcacccatggaaataatggagttgttctaagtagcacgccaggggaggaggtgggtttaccaaactcaggtgtttgcacagattggggattggttgagcaggtgaatccagaaacaaatgatgcatcggtatcaatgatagacaagaactcaggattagtagattctcaaccatcagcaaatgatggctcagatgtgggtactgcacggaacactaaccataatactaacttgtccctcaaccatgaaacagcggtacccttgagtagaagttctggagaagcatcaagaaaacacggatttattactgacttgaatgttgctacttcagaggaggcgttagggaacaccaagaactggaatccatatgctggtaatgctaatcggggcagccagcggaatcatcaccgtgacaggtactctcaaataagcgaatcttggcttcttagctcaaactactctaggagtaggtctgatggatttggcactggtggatcgtcgagatcaaccccaaggggacaaactcagagggggatatgtaaatttcatgagaatggctactgcaggaagggtgcatcttgtaactacctgcacccctgatctctgcaatagataacgagggtttgcattctttgcccatatcttttgacttttttgtatagcctaattacagtggtagtcaacatagagcctacacaaccttttcttggtttcattcaaccgtagcaaggacggagtatatgtctagctctagcataggaggatgactgaatgtactgcccaagcagattccactcttttggggacacggcctattttcgttttgcttggttcaattgaactgcatctgtgtatccctataactaaagttccccgcttttgtttcttcgaggcctgaggcctgacccgcatccgccagatgtatcggaaaatagcgatatgtaacccatcggtttagtttctgatttgccttatgttgacagaatgtattcggtattagtacactgggttaggatagttatttagcattttgactagttataaatgatactactacttaacagtatacatgatgtgattgtgatattaacatgctgatactgtgcaccgaaatttggtagaggatggcttgtcgaaggtcagatatacaacagtacaagttaggcagctgattactgaatttgtattaagggacttgtggaatagtttatcggttgtcgtcattactcctgtatccagtgtccatttcgtggctctcttgtagccagatacaaaaaaaaaaaaaaaaaagcggcc

SEQ ID NO: 22076 - DNA, 5620 bp, Oryza sativa
  Clone ID: TF_OsC13528_1
gttgggtttcttttcggggccgaccatctcccccggggctgttttttagtacccatttcctacctgacaccaggatttattcagaatgtattactgcttgttccgaagcaagaaacagaagggtaggatgcacatgatttataactacaactgttctacatgacaattctgaggagatgcaactcgctacaatgcaccaagttcagaaacatgcatatgtgatatggatgtctactgaggaactacaacaaaagggaggatacaacagatgaaactgagaacggatctactgcctctctcttgattgtgacctagtatcagtcagcctgtcatcatgcctgtcactatccctgccgttgtgcctgtcatcacgcctctcgttgcctgacgattgccgatcaaactgccgatcagtcctctcgttttgcctgtcgtaccgtctctcgttacctgaattttgcctatcgaagtgccgactgtttcttgatggatatccatcattcggtattgaatgggaaaagttgcagtgctcaccattcttgcagtatcccttgtcgagtatagaatagcagactccccttttaggcctccacgaccctccatcaccacctgactgcgacctccaagacctcccaccagagtcaccgccattaaaatcaccaccatgcccagaatgcctgcctccattgtctcgctgctggttattccaatttgggttcccgcttggtgaattccagttcatattgttattatcttggcctgtcccatttccagtactgggacctggattaacctgcatgggagcaccccatccaacattttggttcatgtttccaacttggcccccccaaccaggataagaatttgtatttccttgtgcaatggccccccatggagccattgcaactccttgcatctgagttcccaccattgctgctgcatttggagtgccttggccttgagttgcccacatcatattcatattggtgtttccaggatttggtgtaacccagcccatgtttggaactgcatttggctgtgcttgcatagccaaacccatgttgtagcctgtggcactttgtgctgttcctccccaagacatgttcatgttgttctgtccaaccattccccagcccatgtttgcattaccctggagagtagctccccaggtcatatttccagccgcctgaggctgagattggccagatgtgcttgccaattgtgcccaagcagtgttttgattatcaccaccagccatggctgtggacgagggctgcactgcttcagcagatggtgttgatatcagctgagatggctttaccgagttggaagcatcagtttgtaactggttccttgcatcttcaagttgttgagtatttgattgcacccctccaggttgtgcaccagatagtccaagatcttcacccgatgacctcatcctttcacgcgaagcatcttcccccaactttgaatcgtttccatcagctaatctgccatcactttgtgataaaaaagatgctatctggttctgggactgcaactgtgaattaactacttctgcactcactgtcgcaggacctggtacaggagttagctgacctgcacttcctaaagctgcattttgtccaactacaaagctacccatggcaggctgagaaagtgtcacaggatttattgcagttccaaactgacttgaggcgttccaacttccactaagagattgttggactgcatacgctgcttgagagttttgcattccataataaccttgtgtactagattggatagtggctggtccaagatttgccgcatcgtttccctgaccagcccttcctgagaaagactgtgtgctacttagaactgctgattttgaaggttgttctccagctcttgttccttcctcaagaagggaatcattacggggcctaccatcaacatctgaactgcttccaactggcggttcccacggcggtaggtctttctcaaacctcccgagcaaagcatctgtcaataatattgaatcatcttgcttctcagtagacttccatatttttaaattcggagggaagtacccactgccattccatttccgcaactgcactattgagaaaggaccctggattttaccggtaggatccatgtactgccagattttttcagactcattaataactgactgtgatgcatgtgttccccctgaccctatattggctcctgcagtagctcccactttaactgcgtgtgtaccgatgtttgggctatctgatttacttgtgtaaccagcactttcaccgtgagacgaaaatgcaggtctgcgtccaaggggtgactcgatatgtgtactggattcgccccatgtgtttcgattagactcccagttggtttttaaatctctttgtgcaggactcctaccctctcctttacctggagatacaggattattatctttcttagagaaagatcctcttgacttattgaagctgcttcttccagtatcctgctcttgttcctctggagattcataatctggatccatggtatggtcagcatgaacttcaggttcttcattcagcctacgaacacgctcttcaggggtacttagaagcttcagcttctctacacattctctaagcgtaaataatgaagaaggatattcttttctacggcccatatcgcttgcacggtcacgaagatgcccaagccgcattttttcactttcaatccaatcgttgactttgagagattgtagaacctttgctttctcataaacctctccctgaatggtaagatagtttagaaacagcgaaactgtgcacatatgccaaaaaaacactgtcagccttggaatgaatccacactttatgctttgccgtaagcgtttgcattcctcctcagtgaactcttggtttgaggttatatcaatagtaataacctctctcttgtctaagtttagaatctccagtgttatatcagtcgactttttcccacatttatattgttctggcgctattcctgtgccaacaatttgcacgagccggtagatgtcttgcctttgacctgttccagatattcttattctcacaaatgacccaagaactttctcatcaaatgtgtcaacttcactgatcaattcttctaacaggttgcgacgcaggtacattaaactgatgttatggttatctattgctgcgtagtcgtcaaggtttgtttgcagagctttctggtcatacttgcgagattttttccttttttctgagctcatcaccattgatgcttcactgttgccatcagcatccagactaggatcagggtctacaacaccaccatggttgtcatcaatttcaactggcgagacctcgctcatgaggaaatgggattcaagaagcttcagcatctcaaaatgaccaacacgtgctttcccaaaaaggcttttgagcatagaatcacaaattatctgacttttcctgcgaggatcccggaggttttcacgtttaatataatcaagtaaaagggattggacttcaaattgggacagcacagatttgtcaccatttttcatatttgctacaaaatccaagagctccttcgaagcccaactggtctcttcagctgacgatgtagatgtccctacgctttcagattctcttggtcgatggtcactgctcaaagcacgcttggacaattttctaacctttctccctgtagaacttttagtatcacggccacctgtcaggcctcgctttgtagatttcctagtgctatctttaactacagaactgtcatcgttagcagcttgctttgatcgcttccttcctttcctctttgaattgccttctagatggcgcacagatgagctgtctgaattaccctcttcttcatcatttgtatcatgtggttcactgagatcattgtcacgaataaccaaagaagaaccattcttttgagacttggctgctgatatttcttcaaacgtcaatggtaattttgttttcaaattcaaccaataatccttgaacaaataccaccagcttgttttgtcgtcaaaatctacatccggcatcccactatcacaattccaacgacccttcgatttgaagaactcgtcatcccgattaacacaagaagggtggtaagccttaggacaacccctacgatcacacacaacaaggtcaccaccatcaaagcaaatgaagcaaacttcctcatcatccttcttcctaacaggtggtttcaccacaacctgagccttggaagatgcacgacctcgcttccggcgccccccgcctttccttgtcaatggtggaggcacgtcatcatcatcctcgtcctcatctatctgcactgcatcttcttcagggatatcctcaccaactgtgtcagccacagcttcttctgaaacaccatcatcatcttcaacaacattttcatcagccttgccatcttcatcttcagctccagttgtggtaaccgcatccatctgcatgccctcctcatctgcactattgttaccagctggggcagcttctttttccgccttatcatctccagtcaggcctatagtttccagttcttctgtaccatcaacagcatattcaacaacattttgagcagcctcatcatcttcttcaccctcacctctagttgtgtttagcacattcatctgaatgccctcttcatctgcgccatcatcaccagctgcagcagcctcattttccgcactattatctctactaatggcaactacattcacttccggaacaccatcagcattgtcagccttgccattttccacatccttatctccggcggtaatgaccccatccatcttcaagtcctcatcatctgcaccaccagcagctgcggcagcagcctcatttgccacattgtcatcaccagacaggccaactgtacccaatcgcatgtcttcatctgtctcatcaagaccagctgcaccaaccacttcctcgttgcgatcactggagctggaaactgcatccaccttcctgccctcgtcatctgtggccgcatcacaggctattgtaaccatttccttaatgtcctctcccggttggacaagtatatccatccctgtgccttcctccgagacactatcactagctttgacaagatctatgctcgcatcattcagcacagttgaggaaactacatctataagcgccccctcatcctgcgcattcttgtccgtctgaggaccatcatcaaagctagccacacctccaacggggagcgtattcataacatcatcaatcaaggaagcacccccctcatccacagcggcactagtatcatccaaacgcacctgaacacgagcatcttcctcaggctcattaccttcattgcaagcaccgccgccgctagtatcctgaccatcttgctcaacaaagctatcgccatcgccacctaatacggacaccatagccgtaccatcgtcaatctgcgaagcacgcacctccgtgggatcatccactgcaaccctagtttcatccaagtgcactccagcaccaccaccttcttccttggtctcatcagccttgccaacatcagccaaaccagggtcttccgcaactcccacagtctcttcttcagctatatggtccat

SEQ ID NO: 22077 - DNA, 1600 bp, Oryza sativa
  Clone ID: TF_OsC15358_2
atgggggagccgccccctgccggagaggggagcggcatgatgatgccggccaagcgccgccgcgagcgggtgttaccgtcgcggttcaaggactcggtgctggtgctcccgacggccgccgcgaagaagggcaagcccgcggaggccgcggcggaggggggagttgtggacggggagctctacgacgtggagctggaagaaggggatcccggcatgctgtggaccggcgacgagcggccggtgcagacggaggaggagctgtactgggcgtgcaggaacatcaggagaagcagcacctccacctccggtagcttcagcagcagcatcttcagcggtagcagcgcggtgacgtccttgagcaatgccggcggcggcggggggaatgggcggccggaggggaagcccacggtggtggtggagtgcaagccgaagagcgatggcggcgagaggaaagaggatttctactggccggaggaattcgtgctcggggatgttgtgtgggcgaggtcggggaagaagtgcccggcatggcctgcgctggtgattgatccactgcttcatgcgccaagggtcgtcttgaactcctgcatcccgggtgcactctgcgtcatgttcttcggatactctaatagcggcctcagggactatggatgggttaagcaagggttgatctttccctttgtggagtacctagataggtttaagggccaaactttatataagatcaaggcaagcagattccgtgaagcaattgaggaggctttccttgctgagcgtggcctttttgagctcgaaacggatgaggggtgctcactagagaagtctgtcaatgaccagtccatccctgacgggttactggaagggtctggttctaataatgagcaggaatgccaatcggaggctcaggttgttggcaaatcacctggatgtgatatttgcggtaatcgtcttccatgcaagatagcaagcaaaaagaagcaagcgggagaacgattactctgtaggcactgtgataagctattacagtcaaagcagtactgtggcatatgcaagaaaatttggcaccatacagatggtggaaattgggtttgttgtgatgagtgtcaaatttgggttcatgtagaatgtgaccagacatgcatcaagatggaggacttggaaaatgctgattatttctgtccggattgcaaatcaaaacgcaagaatatctccagttgaacaaatgaacacccctaacagttcagagtgagttaatttccttgaaagtctgttgaaactgtgatagttggaactaatatttgtcatttgtgcagacatgtagtatgtagggactagtgagggtggtacactggtactgaaactgtattgtgatatggtcaaacgggttctggtgccgtcatgttgttttgttagacgtgctttagaaaatagcattgtccataaactgtaatcactattttctctgtgacaatgtgacctaccaactagaaagcctgtactaggatccctatccgcaatgtagtatccacaaaggcacaaaccagcgtgtatgttgtacataaaccatgcatgcatatatgttgtaaatattaattatttg

SEQ ID NO: 22078 - DNA, 423 bp, Oryza sativa
  unsure (1)..(423): unsure at all n locations
  Clone ID: TF_uC-osflM202123g09a1
gcatgcacgcttacttatttttggaaccttccgtgcgcccgcccttaatttttntttgtttttttaaaaaactaccctcataaacgccgagacagcatctctgccactgataaaaactttacaacggacgaaaataaacacaccgtttattctgttcaataaaacagggtgaaagcagaaaaaaaaggcagaaaaatcacctttttcgcttggatactctcgatttgctagctacgcgtgacgcagatttcttcgtcgctttgggcatttcgcactgggggcacagccagtcatgttctgggacagcttccaggggagggtcgcagcagtcgatgtgcatacctacaccgcagccggtcgagccatcctcgttgccgcagatgagcatcacctcgccccggtccgtactcccgcacgccgagc

SEQ ID NO: 22079 - DNA, 2213 bp, Oryza sativa
  Clone ID: TF_OsC10999_1
tgatttaactactaaggactgcagaaccgcgggagggttactatacaattagggtggcgagaacaagactaactccaaccatattaatggataacaggccctctaccaattacggaaaaccaagcgtcctggcaacactcagaagaaacacactgatcctgatgctattatgaatacagctgcacctgggattttacctacctcacgaaatgcaccagttagaaaagtggcagaatgtgatgtactatctgccaaacaagagtctgttcctgttgcagtgcctgccaagcaagaggttcatagtcccaaacaagagagtatcccaaaattcaatactggatcttcaagagttagccagttgatttctgtgcaacaagcaaatgattcgtcaccaaacagtaaagtctctgcagatgctaatattggcagttttgatctggcaaagttttccaagaaaaatgctcttccctgtgatatctgcatgcgatctgagactgtactgaaccggatatttgtctgctccagctgcaaggctgctgtgcatttggattgctaccggagtgtgacgaatcccacaggtccctggaagtgtgaactttgccaagagatgccatcagatgttgtcgctggcagtcaatcagattgcgacggttcaaaaccatgcttgttgcagtgcgatttgtgccatggaacatctggtgcttttagaaaaacaataaaggggcgatgtattcatgccttttgtgctgagtggttgttggagagcacgttcacaaggggacaatataatgcagtagatgggatggagagccttcccaaggataaggatacatgcgctatctgccaccgcaatgttggctcatgcttgaagtgcagtactgtggactgtcaaattacttttcatcctacgtgcgctagagatgctggtttttacatggatacaaaaacaattggtagtacgttggaacataaagcatattgtggcaagcatggcattgagcaaagaaaggctgacttactacaattacatggacctggggaggtcaagaatatgaaacagatgagggttgacttggaagtattacgccttatttgtgagagagttgtgaaaagagaaaagttgaagaaagacttggttgtatgtggacatgatacacttgctgcaagaaggaattctattgcctattcaacccggacttcatattgtggatctggacctggagcaagttcagaatctgcaacaacttctgtcaataactcatatagtgggttaatgcaaagaacagatgatgtcgcggttgacagtattatttccaggaaacctactgttaggttttctctcaataacagcgatgctgataggaacacagctgacagttcaacatcgtcaatatcgtacaagcagaagctggatgaccgggaatcacttgctgataagaatcttccgaagaaaccagctactgccatgcagatatcagaagagggtgagacaaaatcatcggataaaaagaaccaacgccctccaaagagtatcgtctatactcgacgtagcgccttgtccaaaaagaggcaattgagtcagaatgtagaaggacctggtggatagaagccaaccaaggtggctccttcgtggatagccagagtgtttgaagcattctccatgtggaaagcacatgcagccagcggagctggccagtgtaaccatgatattgccataggggcacggtcggccaaggttgtaaatttacaaacggcgcagatgggagttcttcaaagtgtgacttgagcttccgaccagaatattcgagtatttgacccctcaaggctcaagctcacatcactcagacgaggggtgacatggcagaattcatccactgatttagctactagatgctaatctgtgagatatgctttgtacaattgttagtttagttctgtaaaagaaaacaagcaattgccattagtggatgattaaagagaagcgaggaaagtcttgttaggctgacatctgtagctgacagtttcccagtagctaaccagaacatgagtgaattaagcacatgtaggttcaaatgtgctatgacgattacctgttgcgttgatgtatggctacatttgttgtgacttgtaatgaatccatgccagagtttttgaaagaaaaaaaaaaaaaaaatgctgcttcaaaaaaaaaaaaaaaaaaaaaaaaaaaaaaa

SEQ ID NO: 22080 - DNA, 2064 bp, Oryza sativa; identical to SEQ ID NO: 12650
  Clone ID: TF_OsC305349_1

SEQ ID NO: 22081 - DNA, 771 bp, Oryza sativa; identical to SEQ ID NO: 12653
  Clone ID: TF_OsC349609_1

SEQ ID NO: 22082 - DNA, 2756 bp, Oryza sativa
  Clone ID: TF_OsC17337_1
gttgggttttgagatcgaaaatttttgagatttcaaacctcctccattccctcccttcctcgcccccaaaaaccctagccgccgccgccgccatgcctgatctcccctgcgacggcgatggcgtctgcatggtctgccgcgtcgcctcccctcccgaggtcgatctcctccgttgctccacctgcgccaccccgtggcactccccctgcctctccaagccccccgcccttgccgacgccgcccaatggagttgccccgactgctccggggactccaccgacgccccgcccccggccccggcaccgctcgcccctgggagtgccggccaactcgtcgccgccatccgcgccatcgagtgcgacgccaccctctccgaccaggaaaaggcacgccgccgccaggagcttctcggcggcgccgcgcccgccggtgccgacgccgatgatgacgagggggacgacgtcctcgaggtcatcggcaagaacttcagctgcgccttctgcatgaagctgcccgaacgccccgtcaccgtcagtactcttgcggggcctttcccccattgcttccagaaatggatccacagcggaaaaaggacatgtggtaaatgccgggcacaaataccagcaaaaatggcagagcagccaagaatcaactcagcattagtttctgttatccgtatggctaaggtttcaaagaatgccaactcagctgtctctgcagctgcgtatcattacatacgaaatgatgatagacctgacaaggcttttacaactgaaagggctaagagggctggaaaagctaatgcttcaagtggccagatctttgttactatcccacccgaccattttggccccattcttgcagagaatgaccccaagagaagcattggtgttctagttggggatacatgggaagacagacttgagtgcaggcaatggggtgcccattttcctcacgtggctggtattgctggccaatccacacatggtgctcagtcggtagccctctcgggtgggtatgtcgatgatgaggaccatggggaatggtttctatatactggaagtggtggaagagatctaagtgggaacaagcgtacaaacaaggagcagtcctcagaccagaaatttgagaagctgaatgctgctcttcgtattagttgcctcaagggttaccctgtcagggttgtgcggtcccacaaagagaagcgttcttcatatgctcctgaagctggtgtgaggtatgatggagtttacaggattgaaaaatgttggaggaagattagtgttcagggtaaattcaaggtttgcagtgatatttatggtgaccgtccgaggccactccccaaagttgatgagctgaaaggtgcaacagacatatcagagaggaaaggaactccttcatgggactttgatgagaaagaaggctggaagtgggtgaagcctccaccaatcagcagaaagcctaacctatcaggggatcctgcaactgacaaggaaatccggagggttgcaaggcgtgcccagatgtctgtgactgaaaggctgctgaaagagtttggatgttccatttgcaagcaagtgatgaaggaaccactcactactccatgtgctcataacttctgcaagttgtgtttggttgggacatatggtagtcaatcgtctatgagggagagaagccggggtgggcggactctaagggcacagaagattgtgaagaagtgcccttcatgtccaactgatatttgtgacttcctagagaatccacagatcaatcgagagatgatggatttgattgagtccttgcaaagaaaggctgttgaagaaggagataccaagacaagctcagatgttagcaatggtgctgagtcatctggagatgatggaaacaacgaagctttagagaagggagaggatgatagcagcttgaaggatgatggcagcttgaaggatgatggcaaagtggtcaaggctgtggttgtaatcaaggaagaggacctgcagcctaagaagagcaaaggagaagatgagaaagaacaaggtgacaagaagatggacagtgctgatgtggtggacattgcagttgaaaagaaacaggcgacgaagcgggcttctgagaaggctgagaagaagcaggcaaggaagcgcaagggggatgctgttgccacaaatgatggtaaaaggatgaaaacaggtggtgatgctatggagacagcagcggaagaggatgctcccctgagcggcggaactcctgtgaagcgcaacagcaggaagagtagtgaggttgatgccaaaggcggtggcggtagtcctgttgtgagcagccctcgcagggtgacgaggagcaatgccaaggctagcggtgaagctgatggtagccctgcgacaaggaccaggagggctacccgcgctgaagcctgaatgaagatggatgaatggctggttggctggctgtagaggggaagaagacggagactggagccattttggggtcgtattcgtatattctatctatttagtaatttaggccgtttgccttgtgctgttgctctagctcttttgatccacaaggggtgaactggaactgccgcggtgtgcttttgggatggcttgggttgggttgttagttgaaggaatatatacttatatacagtggttgctttacctttacctgtatggatgtatgatggatgttcctcatacaactttccaattccaattactggcatggtttgccttggattctcatgctaaaaacaa

SEQ ID NO: 22083 - DNA, 2466 bp, Oryza sativa; identical to SEQ ID NO: 12654
  Clone ID: TF_OsC297803_1

SEQ ID NO: 22084 - DNA, 4957 bp, Oryza sativa
  Clone ID: TF_OsC18633_1
aagcagggaaaaaacttgcatttatcaaacttcacattctgatctatcctttatgtcataccagttcgtttgggaactaaaacaccataatcacacaaaatgcagaagcctaataccatcaccagaccagcatctttagcaacaaccagatgcatagaacagtgaaataaaccaaaggtttccataatttaacagctataccatactactaccctgtctaaaccccataaagtaaaacacagcacaaaactgtacactcaaatatctagagaagcaatgaagtgttcatgccaggtttctctggcagaaactgcttcatctcaagagcctggttgctagtcactacaccagggagcccaagagacagagacagcggtccatcatctcctgtatcagaaccggtaagattatgcttctttgaggccatagaaagggacagtgacagtagaggagaagggccctcttcttccttcagtgatgtcttattcagattattacgaggttctggggagtcttcatcatctgaagataggacatggatcacatgatccaagattggtttagttggagaacagggatctgctggaaccctaccaatatattgcacatcatctaatgaagtatgctgatcagctggcaagggtatcttggacaagcatttgctagtcagttgaccatctccaaaactgcaagtagagtattttccctcagaggtcttttgccgtttgtagatggaactagaatcaggcaaaacaaagtcctttaaaactgaatcacttggatcatcagaaagctttggcctgacagaatgctgtggggatacttcttgaaaggatacgcgtgcctgtgtatttgccaatatctcatcagatactgatctggtggttgcacctgtatgctgcttagtaaagcatggaactccattcttggtaaagctctcttcctcctccatgttgtccctgcccgctgttccttcgctacctattatatcacttggatattctggtttaatgttgaggcattcacgttttgaacttgtgtgaacatgaactccatagggaactgcagtaggagttcctaacaaaattttcccagtccctgcagtttctgggaaatgtatttcacataaattcagcctttcagcctcatggttggacctcaacaaagtctcatggtttacagatgcaccacgattctccatctccgtttgaactgatacagctggatcatacaattcatcaacagggcactcattcaaatctatgcccaaagactgaggcatcttaggggaacagacaagttgattaacaggtccattaatttgttctaatggactatgattcatccctttgacaagcagctcagttgaactacttgcctttctggcataaaggacaccccaaaagaaaagtaagccattccaccgttgagtcctctcaggcagcttatcagacgtaaaaatgagaagttcaatgccacaaatatttgctgtgagggacaaatctccagcaagcatgttttccaacagtttcccatatgctctttcataactttcaacatctttagcaaagaaataaagagcaatgttatcttcattcggctttacttccttaaattgcagtggccatgaggaatgccgtggaacttctaccaactgaattctctgaggtaattgtttcactatttcaagtactttcagcgatgcacaggtagataagtgagcctgaaacccatcgtacatttcaggagagcttccaggtcttgaaacctcaaaggtaccttgccagatgtaagactgctctggaataactaaagcccccaaagaacttccaacagtagaagattgatcaaccaaagcttgctgctttaagttcaggtcattcgatttagtgtcagggctgtacggattttgtgccactagacagccttgtgggctctccggcaaaaggtcttcggaagcctgaatcgccgctgcacttttacaggagatgttcccatcactttccacaactttctgttcatactgtacctcttctggaggcaaatcttctgaggaacttgttggcgcaatatcttggaaatcagatccacaagtctttgaagcacgtggaatggaaagcacctcaggtttagttgacatttcattatcgttattcaccaaaattagtggactttcacatgcaccatctgtgctatcattttttattttatccattgggattagtggatctgatgccttcaccacacaggtgtctttagaacaaacaactcctgttgaagtaatcccttgctcatcacttttagataaaatggagctatgcttattttcaacaattcctggttttttgctacttttaagtatgcttggtccaggcctcgggctgtcttggtcatttcttggatcccctgattttattgaactatcaggccttggagatgaagaaatgtttggtttttgaagattaaatgaagcccccctttctaacaaaattgttggtttcacgggcttcaatattctcggttgttcattttgagatgaatgaactgattgcttttgctttgatgaacttgagcctttgcaaattgaagcctcatgcttaagaggcccagatttcataactttccggatggactctctaggatctcttggtgaatgttttgaaggcttcaacttgctcaacacaggttcagctaattgcttgacctttggttcattactggagttgttgaaagatggttgctttgataaaaggcctcgtggtgaaggacctggtgttttaacatttgccaagttccccaaggaatatgaccgaggtaaggtcacggaactattaactgcttgagacctcattggagcattatcaggcgactttatacttcctttgttagagcttttaaatgagttctccctggagaacacatcatgattcctagggctgtccgccttcaggagcctgggagtagaggataaagtattttctgcatatctcttgcatgatttaggtggactccgtacaccatcatttgatagaggtgattccatatcagtggcaactcgcaacttcttacgttttaacaacacttctgaactttgactcctcttgtctaagctttgattcttcttatccaagcttccagacgttggtgtcctacaagaggattgtcgtgcttccaagctagatgtaacaacttgcaacttcttgcgatttcccataattcctgaatttttgttcttcacatccagtctttcagcagttggggtggcacacttcacttgccgtgcttccagatcagatgacgcaagatgcaacttttgattgctaccagccaagggatcatttactggagtgccacaagtgatttgttgactgtccaaatcagtcacaacaaccttcaatgtcttagagttgtttgtactttctgaattttggttcttcccgtccaaaaccttattccttgatgtgccaccgttgcttcttgtttggttttcatcttctttaagacagcattcttcgcataaccattcaccatctggaactttctctaacttcactcgcatgcaataagtatgctctgccccttcaaggcacctagtgcatgtagccagaagatattcccttccaacatctccacatatatcacaaacattaacatctattaagccctctgaattcccagagtccgtcatcacatcattctgtgtattcaactttctaccactacctgtatccattgaacaaccttgattacgttcttgtttatcattgtcattcctattgacagcatcattagattggatgtcagcatgttctagacttccatttcttgagcatgaggtgccattttccagattctttgttaaagatccagccttgattttatccctattactggtaccacaactagtcatcatgctgtgcctctcaccaccaagcacagaaggatctgattttcctcccagtgaacgctctacggtcttgtttgaagaagctttctcacaaggttggtgagctaaattattttgtgcattcccaaattcatgtgttggtctcttaggagataatccatgtgatgcactgagagaggattgggtacgcagcaacctcttggttgcaaaaggagactcggcaggcaatgatctatcagatgaacttcggtgcatggcatgaacatcagatctcttctttcctgtagattcttcggcgcagtagtttcttagtctgttaatgccattgtccttatagttaacagtaaggtcacgacttgatgctgatgtagatagtttatcctttttcttgtctaacagaagcttgcttgctgctgatactccagtaacacatgagttgctatcatcatggcattctactataggtgatctagaaccgtgatttactagccttctacgttttgctggcttgtcaacctcggaatctgctgcaacagatgatcttgcgatgactttattttcaccattttcagaataggaagcagggcttgaagtagcactgaattcatcgtcattttctccccccttagccttggtacggagccctttatcaacacgaacaaacgaactgttttttgtttctgaccttgcaaagcatgtttgagatgatccacagtccatatttgaatccgtgagtgcaatatttcggtgtaggcacgaggagcaaggagcacaacagacattacaagtgccagattctgtcttcacattaggactgtcgagtggtactggtctttttcttgctgtaagcttgtcccttattgtagacagcattgtgggatcagaatcacctccaagcatctccatcttggcgaccacttcccgatgccccggcccctccacccgtcgtccactgccacgcccctccactgattcctcggggagcgcgagatccttgtgtcgcgtgcgatcgtagagatccctgacggtgcgctcctgcggcgccctcat

SEQ ID NO: 22085 - DNA, 772 bp, Oryza sativa
  unsure (1)..(772): unsure at all n locations
  Clone ID: TF_LIB4371-013-R1-K1-G11
atttggtgctgggcggggacgacggcaaggagtgcacctacggcggcggctacctcaagcgccaggccgtcttctcctgcctcacctgcgtgccagcgggtgtcgctggagtctgcaccgcctgcagcctcgcctgccacgacggccatgaggtcgttgaactatggacaaagcgaaagtttcgttgtgattgtggcaactcaaagtttggaagtcatgtttgcaaactttgccctgagaaagatccagagaatccagtgaattcttataaccataacttcaaagggtcctattgcacatgtggcaggccttatcctgatccagaagctgaaaagcaagttgaaatgatacaatgctgtatttgtgaggattggttccacgaggatcatattggtcttaactccattgaagagataccacgagatgaggaaggggagccactctacgaggatttcatatgccccaaatgctcacctaagtgctatttcttgaaattatatccggatactatttgggcatctaataagcagagttctgcaccacaagctgagactaccaattcaactgttatgaatggaaattcaagccttggtgacatagagaaaagtgaaaatggtgctcttataaatcatttgaattgtgaaaagacctctgacaatgagaattgcccaaaagacagtgtagctccagattaggccagtctggatgacagttctgatggcanatgtaagctaggaatgaacatttggtcaaatacaccatcagctgattc

SEQ ID NO: 22086 - DNA, 1813 bp, Oryza sativa
  Clone ID: TF_OsC3201_1
ctgcaggaattcggcacgagggtgtgtgtgtgtgtgaaccactctcggctctttggcttctgttgtttaaaggagcggcacaaagggttttttttttttgggtaatgtaaattaccacgtcacaaagttcttttgatttgatacaaaggagcaaacattttgttctgctgccctggagcatctaccagaagctcagttcggagcatttagcattactacctctgctaactacattagaagtcgagtacaagctaggtaacaggacacaatagccatgacatagcgaacgataaattcacgggggagtggccagaaaaactgctcgatcgaccggcagtgggatatattagtctcaaacagaaccccaagcagctgagtttcatgacaacctctgttttttcttcttagcaagattctcaaaaacagctcgtatatcttcagatgtgaccggttttgatgaatcaaaagtttccagaaaagactgaagctcattcttcatgtcattgatgccactcaaaatctcaatcttctgtacatggtcgagtgaattaagaaagtttgcttcaactccttcctgctgctccaacttcttttccctcttctgcttagcaaccttctcatactcctcaatagagtcttccttgtctataaggtacgcaacaccttgttgtgcatagaagtcggtgcaagtttcacatctacagataacctctctccagctttttgacataaaaaacggcatctttttctctgaatcagctgatggtgtatttgaacaaatgttcattcctagcttacatttgccatcagaactgtcatccagactggccttttctggagctacactgtcttttgggcaattctcattgtcagaggtcttttcacaattcaaatgatttataagagcaccattttcacttttctctatgtcaccaaggcttgaatttccattcataacagttgaattggtagtctcagcttgtggtgcagaactctgcttattagatgcccaaatagtatccggatataatttcaagaaatagcacttaggtgagcatttggggcatatgaaatcctcgtagagtggctccccttcctcatctcgtggtatctcttcaatggagttaagaccaatatgatcctcgtggaaccaatcctcacaaatacagcattgtatcatttcaacttgcttttcagcttctggatcaggataaggcctgccacatgtgcaataggaccctttgaagttatggttataagaattcactggattctctggatctttctcagggcaaagtttgcaaacatgacttccaaactttgagttgccacaatcacaacgaaactttcgctttgtccatagttcaacgacctttagcaaaaagaaccatccaagcatcagttgtgtgcgcatcacccagtcatatagatacttaatacagaagatggcaatagataatttggcaactgctaatgcaacgcctaaaataactcttgtagcgctcatccttctcacccatataaacattgacactaatcccagctcatggccgtcgtggcaggcgaggctgcaggcggtgcagactccagcgacacccgctggcacgcaggtgaggcaggagaagacggcctggcgcttgaggtagccgccgccgtaggtgcactccttgccgtcgtccccgcccagcaccaaatccgcctccagctcctcggcctcgatcccctcgatgtactccccgatggtgaccgtcggctccgcctcgtcctcgaaggcgcccgcaccgccctcgccgccgctcccctcgccggccat

SEQ ID NO: 22087 - DNA, 2695 bp, Oryza sativa
  Clone ID: TF_OsC340224_1
atgtcgtcgtcggcggcgccggcgaggaaagagaatggcaccgtcgccgcccccgccgcctcatccgccgccgccagcaacacgttccacgtgctcaactccggcagcgccgccgccgccgtcgcagccggacgtgcgtatgttcagtcgccgcgagcgacggcgctgcggtcgccgcaggtgcgagccatcaccaactacggcatgttcccgaccaccggcgcttcggcggcgaggacggccatggcggggcgaacgatcaatggtggcgcgtcgatgctgacgacgacgacgacgacgacgacgccaccgcacctgatccagcagctcatggtgttggctggctggaccacccggagtccgtggctccagaaccacgcgtccatgtcgccgcggggctcgccgtcgtcgttctcctccgggagattctccgacccccgtgggatgccgtcgacgttcgcttaccgaacacccggagctagtagcggccgcgttatcgacaacggcgccgtcgccggccgtggcaagcagatggccggaactagccgctcacttgagattatcgccgttgataccggcgccggaagcagcaagaacgcgtcgccggccggcggccatgcaaatgccggcgtggtggtgaaacgtttggcccctgtgctcgcgatgccgagtgccggagccgccggcaaagggaaggaggaggcggcggcggcggcggcggctccgtcgccaaatggccgcggccgtaagcgcgcgccgcccaaggtgagcaatgtgcccgcggccgggatccgacaagaagccgaggaagagggccaagaaggcggcggccgctggcagcaaggtgaccgtcccggctgacgtgatcatcgtcgacgacgacgtcaaccagccgagctcgaacaccgacgcgcaaagcaacgccgacgacgatctgaagaaggcggccgtcgcttcccctgcggcgacgcggagcaagaccagatcaaagtgcaagaccagcagcaacagcgccgccgcctcgccgagcgccaggtccagcgccatcgccgccaggaagaagaacaacgccacagcgaccggcacgacggcgacaccaccaccaccggaggcgaagaagcacaccgtgctgacctggctgatagacaccggcttcctcaaggacaaagcgaaggtgttctacgtgccgggcgacgccggcgccgccgagaaggtcatctccggcatggtcaccaagacgggaatccgctgccgctgctgcaacaccgtcgtccccgtggctgtgttcgaaacccacgccaggtgcgagcggccagggcagccatgggagaagctgctgctcatgtccgggaagccgctgtcgaagtgcatgcaggaggcgtgggcgcaggagcgggtgaccgccatgcgcgcccgggagaaggccatggcgtcgctggagcaggagaaggagaagagctcgcaggccaagaggaagctcgcgaagacgaagaagatgcagctcctcgacggcgtcgtcgtcgtctccacctcttctcctcgtcatcaggtgaagaagaacggcggcggcaaggattgcagcgacgacgcctgcggcgtctgcgccgacggcggccagctgctctgctgcgacacctgcccctccaccttccatccagattgcctcgccatccagttcatgatcaaatcttggttactgtttgacagacagcaactgacaacaatttacggccagcaaccgtggctccagacggctcctggagctgccatttctgccgatcatcagtactgccgtcctttgcaaagccctgggttcgagatcggcgcatactgcagcgaaacctgcaaaaagatgtcctctcatctatcagatatgataggagtcatgaaccatactgaagatggcttttcttgggccctcctgaagattcagaaggatgagctagtcacttctgaggacatgcctgtcattcttgagagcaatgtgaagcttgcagtagctctgggtgtactcaatgaatgctttaatcctgtgcaagatcgaaggactaagatcgatatgctccaccaagctgtctacagtctaggatcagagttcaaacgagtaaactatgagggattctacaccatggttcttgagaaggatggagaaatcatttcagtagccttgctgaggttccatggcaggaaactggctgagatgcctttcgcaggcacgctgccagcttaccagaaacaaggaatgatgcgtcgccttgtcaaggctgttgaaaaggtgttggcgtcgttgcaagtggaaaatctagtgatcccggccgtcgctgatctagtggaaacctggaagagatccttctccttcaggccaatgcaggcagaggtcagggacgaagccaagaagctgagcttggtcgccatcaccgggacgacgctgctgcagaaacccatctctgctcatcagcagcaaccagttccatcccggaaaggtagcagcagcagcagaagcaagcgcgcgtctgctccggcgacggtcaccggcagcagcaaggaagaggaggagcagatgacgacgacggcggctcgcctgaccgacgacgagctggcattcctggagatggcacccttgtgcagcttcaccgacctgttggccggaggcgtctacccgacgggtctccagcttctccgcggcatgaagtga

SEQ ID NO: 22088 - DNA, 595 bp, Oryza sativa
  Clone ID: TF_OsC3802_4
ggcagcaacagcatcatcatgcggcattcacttatcaataaacaggtcacagaactcagggacacccaaattatgaaactacagttaagctatcatcaacatcatccacgctgggaacgttttcctgtaccaggcaaaaagctaaaacacgctgacactcatccagtccacactggctacaactgaacgagccaacagcatcaatgaagttcgttcttttgcctagactgatggaaacgttcccaaattcgggcaaatgataagttaacgcgatcttggacctagcctagctcttcatctgcactgtacaccctccacgttttgactttgcaccagcaatgaagagctgacgccataaacagtgcatctcctcaccacggatggctcgtgtcacagcaattacctcttccgcttttttggctcaaccttagaatcagaatttgatgatgctggatatgaatttgaaggtctcttcgtgccattttctttgacacaatctgcgcacaggaaatgatctaattttttggcctgctcaatggtcattcccatacaagatggatggaaccagtccttgcatccctcgcactgcaccatt

SEQ ID NO: 22089 - DNA, 4225 bp, Oryza sativa
  Clone ID: TF_OsC359_8462
atggatgtggattttcatcttgcaaaaaaaaaaaaaaagggcggccgccctttttttttttttttcacaaaaagaaacgagtatattatatctgatcacgatcatccttacaacctttctttgaaaatgtcaagacaacagaagtatatattgattacaattaccaaccaaaaatagggcgcctttacaacactggatgcactacattactaacactaaatgatccatttggttctagataagtaaaaaagagaaacaaggaatgaacaagcccttcaatgggcacccacacacgtttcactacataaatactgtgcatcacctttctactccatagcagatccattcctgcctgccttattgagacacaagtttgtacatgaacagcaatgccaacaccttctgttcagctcacccaattaaatttaccaccaaagcagtaataaagaatgctggacaatcaaacgcagtttggctgtacttggtggccgaagttcacaaggttgccgcagcctccggtttgcccaaatattgcagatatgaggctgagctaccaccatgggacaaaagcaaaacatcacctttcgtgtttctatctacacagaaccaagtgtgtattccttcagcacacaccgatggggggagttcccaactccctagttgcaatccaaaccacactcttccagaagtggaccatcattctttgctaagaaaggatcaatccggacccagaggagtgagaagattgaagccagaagaatggaccagacaataacaattgttggcgtcctgttttgccttccaaccaaacctttgaggaatgggtaaagatggacgatcacccaaaatgcaaagaagagcttcccgaagaggggtccccatgattcatacccgttattgattgcattcgaaacaccagcaacaaccccaatgaagttcaataagagtagagtggttggaggtatcagcaaggtagtccatttgaatgtatatagctctgagaactcttcatcgtccccaccttttgatgtcacagtgaaactcgtatctataccagctatgaccttcaaaagtccctggaacaaagcaaagaggtgcgaagagacccctccaatgacccaaaattgttcatttctccaccaatcatcaatgccaacaccactccatctcatttccaggatgccagtagcaaaaatgcagataaaaagtgacatgaaccagagactggcaacattcgtaagctctggagtgataaacttcccagttagcaaacagatggctggcaatgtacagtaagccaagagtggaatggatgtaaaaggatacacgatggaattaatgtaggaaaatctttccaaacattttagtccaccaccatatccataccaaagagggcaatggttgctgaagaatatttcaacagacccaagagcccaccgaagaacttggtgaagacgatcagaaagattgagtggtgcagaacctttgaatgcaggtagtttaggtatgcagtaaattgaccgccaaccatggcagtgcatcttaaaaccagttagaatatcttctgtaactgatccgtagatccagccaatctctttcccccagtctgtcttatcttcgtacccacagcttatgacatgaattgcttcctttagaagagatgctggactcgcacttttcaaggttccaccattctcaagaagtgtggatgcgacaaaaacagaagattggccaaatttcttttccagcttctgttgatttacaataccagccttttcattttcagctcctggagcaccctcctcaatttcaccaagtgcatatgcaggggattgattttctgctctcttgaagaaagatcttttcttcttctctgttttaggtttcgtagttttcttcttagtatgcctgttaccacaacagcagcagcagcaccatttaggccagcagttgcaggtcctcgacggaggcttcttcgttttgggggcatcataaccatagagagcttgccgtctgaagacacatccagtaccaacatagatggggccttgaattccatccagacctttcatgttgatatcgaaaaagacaacgttccggttagcatatcgatcatgtcggtcaataccatcaaacctctgagggaactgcacatagcacactttcttccccaccaaaggatccatcatgaaacacatcgcttcccttatggccttgctattgttgatgtagtgatcacaatccaagttcaataggtatggagcattcgaaagaacagcagatactcggaccaatgcgttcatggcaccagccttcttgtgatggttatagcctggccttttttctcttgaaacatacaccaatcgaggtagctcattaccttcgatgtcatggccgccactttggccaaggaagacctgaatcattccagggtgatcgcgaacattgtttccaggccagggagttccatcttgcattgtccaaccttcctcgggaactttctgagctttagcaaccaatgcattgattctcaccttgaattcctcatactctctcttcattgctctcctctccctaacaaagtatggtgccaccttatccttcaggtagtctatcttctgttggaagtaccactctggagcacgtggttcaatactgtactttttgcagaaaggaacccatttctttgcaaattcagatgtttcggataatgcttcaaatgtcagcattgcagcaccatcatcagagacatagcatgaaaccttatcaactggataatctaccgcgaggatagatagaacagtgtttgctgtgaccaaaggaggttccttcaagggatcaacagtactgacaaagaaatcgattggtgcaagttgagatgtttggccttccttgtcaaacctcaatgtcaatcgatcaaggtaagtctctctctcgataggaaaccacttggggaattgatcaagaatccaagacatggcaaaccagatttcacaaattacagatatcagccataaggcaaaagcatcaggcactggatgcatcactcgatagtggaagaaaaaccccaaaaccaccagccgaattatgataaccattctataggggttaatctgacttgaaggaattgggacttttctggacaatggctgcctagcttcatccatttttgtccagccaaagtgataaagcaattctacaggggagaaaatcagtggtagatctccatcatcaccatcgccatcccagtctttaccaccaccatcatttctcatctggtgcagcctctcctgcttctgcttccagctctccatcctctccttccacgcaacactaccataaccgtatgcagcaagatccttggatgggtccatagatcttggttgaactgtagcacaactacctttagctgattcaggtagattgggatccgcataaggaagcgggtggatcctctttcccccgccgcccataaaagatggcacaagcgcatgctgctccggcgggatgtcatcaaccatctgcccatcggtaaggaggggaacattggggttgggctggaatggctgcggaacaccgttgacgtcgaccccaccacggccatagctcatatgggcgtggagcatcgactccgcgacgtactgcgagtcattcctgtccctccagttgaactcgttctccaggtcatccacaccgtcctcctcctcgtccccgggcacacgagcgcaaccaattcggcattgcgggtgtgacttgcccctgaggcgcttgaagcgggtcttgcactgggggcagttctgcgtgccctcgcggcgctcgtactcgtagcagtcgcggcacaccgggaaggcgcactcgttgcacgccacgaacggctcgccgtcggggttgagccccacgtcgtcgccgcaaatctggcacacctgcccgttctgctgccggagcggcttcggcccgggatcgccgtcgcggcggatgacgacgagctcgttgcggttgtgggagccggcgaccagaccggcgctcgcctccatcgcccctcctcctcctcccccccgctaatcaaccacgcacaccctcaccctcgccctcttcctcctacgccgcccgccgaccgctcctcgccctacaaccagatctccatctctctctctccctccgaatctcccggggattccgcgccctggcaaatgcgcctcccccgcgacggagcagagaagagcgg

SEQ ID NO: 22090 - DNA, 5202 bp, Oryza sativa
  Clone ID: TF_OsC187381_1
atggggaggaggaaatcgcggccggcccgggcggtaggcctaggccccggcgctgccgctgccgcggagcccgacgcgccgagccctagcggcagcggcggcgcctccaaatcgaggcgcgcggcgaagggcgaggctaggaggagagaggatgtgtgcttcgaggtggatgatagcacgtggtgtttgagcgacggcgaccgccgggacctcgcggagttggtcatgcgcgacgtgaggatctccggcgagggagagggggcgttggacgtagcggctctgcacgaggcagagagggagaagaggtgctcgttgcgcctgcgggtgcgcgacgcgccggaggagggtttccggcttggccagtggcctgtggtaccttcagattgtgtgatcctggagtatgccatcgccggtatggttttctctggatgttttgatggtcccgatgaaggtgtatcaggcctcgcccatttggttagattgagattcgtgacattgcgtgttcatgcctttgctgtatctcggtctgctgattccgtgtcggttgcatcatttagagttagattggggttgatggagcaggcttttgctacatgcgaatcattgttggaggtgacaaggcatccgtggaggaagagtttcatgaatatgatggcttgggttcgtcctgaggtcatgacctcggctgcaatatatgggatggatggtcttgcccggcctataaatggaggtgctaatggtgattttaccccaaagaaggattctcagtttgatcttgctgctttctacgaagccgttaagccctcaatggaggctggactgttggaagaggagcttcccgatttgcttcctcatctcagaacctatcaacttcgtgcagcgaattggatggttcaacgtgaaaagggaaacacaatgatttcatcaccaaatcaacattatgttcattctgcaccttattgtgttcccatagattttatgcacaagaaatctaggatgttctacaatccattcaatggaaatgtctcgatgcatccagaaccttctccaccttatgtctctgggggcattttggctgatgaaatgggcttagggaaaactgttgagcttttggcttgcatttttgcacatcgcaggccatattcagcagactgttctgtctcttcgaatataaaaggagcagatcagataaagaggcataaaagagaaagagttgagtgcatttgtggagctgcaagtgtaacctctgcataccaggggatatggatccagtgtgacatatgtgacgcttggcaacacgctagttgtgttggttactcaccaaaggaggaaatgcatgttgatgatgatgatggtgatgaagcatcaaacaatgaaaaaggaaccctaaagtcaaaaaatagaaggaagaagaaagacagacacacaagaccaggatctctgaaagtttgcatttatgaaggtgcaaagaacacggacttaacatctacccaaaaaagtgatatggctgagataagcacagctgacattgttttgacaacttatgatgtcctgaaagaagatctatcacatgattctgatcggcatgatggtgatcgccgttttttgagatatcaaaagaggtaccctgtcactccaactgtcctaacaagggtccactggtggcggctatgtttggatgaagctcagatggtagagtccagcaaaacttctgtgactgagatggcaatgaggctaaatgctcaacaccgctggtgtatcacgggaactccaatacaacgccggcttgatgatctttttgggcttcttcgctttctcaaaactcatccttttgacacatatagatggtgggtggatattattagggacccatatgagaagggggacatggtagctatgaattatgcacacaagttcttcaaggaaatcatgtggcgctcctctaaaattcatgtttcacgggagttacagctgcctccacaagaagagtgcttttcgtggctcatcttttcatcaattgaagaatatttctatcagaagcagcatgccacttgcatggaccatgcacatgaaattataagacgtatcagagatgatgccaacaaaagcgagccaatatcagactcgaatgttgtatcaaatttgtacctctccaatgatgacattgccaaactcctagtcccactgctcaaacttcgacaagcttgttgccacccgcaagtggggagtttcggtctctgctccctgcagcgtactcctttatcaatgggtgaaattttacaggttcttattgggaaagcaaaagtcgaaggggaggaagagctcaggaaaattgttgtcgccctgaatggtcttgctggacttgctgtcattgaacaaaataatcaagaggccatctctctgtataaagaagcactagctttggcctgtgaaaattttgatgatttccgtgttgaccctttgttgaatcttcatatcaaccacaatcttgcggagctgctcagagctagttctgagtatttgcaagaatgcccactaaaagaacaaacctctgaagtccatggtgcgcgaaaaagaaaggaaactagtcccgctgactcagaaacatccaaggaagacaaaaacatcaatacacaagtatgtggaagtgaagagatggatgtagagaatgattctggatgccacacgtcatctgtctcaactctcagtatggagttacagaatcaaaatatgaattggtggctgtatgctttggattgcattgaacagaacaaggattctgctgatgagctcattaggaagattgatatttcttccaataaaagcaccactggcttgggttcaacagggatgtcttccagggttcaaaccattgctgggttgaagtataccattcaaactggtattgattctctgcaaagttcaaggcaacaagtgatggacagacttttagaacttgacaaaacaatggatagcccaaaggatgaagacattgagtgtcagcgatattgtccaaattgctatgatggtaatggttctttatgcatccaatgtgaattggatgatctgtttcaggggtatgaagcacgtctgtttcttgttaagaaatcaaataatgattctgttattgcctcagtagaggaagcaagggacttgcaaaggcgaaaatatgagttgaatcagttttttcgtaatactaaaactaacgagggatctgaacctggtgacgacaataagaatccaagatctgctcgagaaggttttctggtctacaggcatccttctcgaattgagacttccttaagggttattctaacccactcaaagacaataatgggagagcaatctgctaaaattgctaaaaagaatttgctgctttttgaggctatgcgcaaggagttctctcaagcaaggaatctatcaatagcacagacccagttactgcgtgcccatgatgagatcaagatgtctctctcacgcctgcagctcaaggagaaagatgatgaacccagtgcagtcaatattgttactagagaagagcttataccatacaatgtgcagtttacaagtgaaaaattcttgtctttgtcatctttagctcgtataagaggccaactcagatacttaaagggattggtgctatccaacaagaaaccactgggcaagcatggtgaatcactgcccgagtcaggcaacagtgttgctatagcaacttccatccctgccacagggcaaactgcttctgatattatcaatgaaccatgcccaatttgtcaggagaagatctttgaccagaaaatggttttccaatgtggccatttcgtttgctgcaagtgctgtctttacatgacagaacaagctgcagcccactttgggaggagcaaaaaatggattatgtgccctacttgccgtcaacgtacagatcttgaaaatgttgcttttgtagttgaaaaccagagaggaaatgctgatagagaaattgaggatttggcagaaagcgctatttctgtccaaggttcatatggaacaaagattgaagctgtgacaagaaggattttgaggatcacttcaactgacggagcagccaaaatacttgttttttcaagctggaatgatgttcttgatgtgctagagcactcccttgccgctaacaatatctcttatgttcggatgaaaggaggaagaaaatcgcaaacagcgcttgcccagttcaaaggtctggcaagtagtataagtggagagaaagcaaagaagtcattttccaagatgcaacctgctcaagtattgctaatgcttatccagcatggtgcaaatggtcttaatcttttggaagcacaacatgtaatattagtggagccgttgttaaaccctgcagctgaggcgcaagctatcagcaggatccatagagttgggcaagacaaaagcacgtttatccaccgttttattgtgaagaatactattgaagagagcatctacaaattaaacaggggcagagctgtttgctccacgatacaccgtaaatcaaaaaatttcaaagatgagcttgttttgacactgaaggatattgagtctttatttcctgtggcaacacttgatcagccttcagaacaggagaataagaattacggtggggccggtgggcatatgagaagtttacctccatctgttgcagctggcttagctgctgaaaggaggttattggagcaacatgacaaccagcattaagttatcagctgacttattctttcaactggaactcggagaggcaatgaaagaggttgaaataattgatgctgtagatattttagttaattggatttatcgattgccttcttagttctaaattatgttaaaattacagaaggtagggatatactatggtctggagcttctcggatcattatattagaatctggcatcagtgatagaatgtttaggacacccccgagcatcgggtatgtacttaaggagatgttgtgaaatttagttagttagcctgacagaagcatgtgtatcattgtataaaacccgccgtcttattttccttttgatttttgataggtaataaatatccttaacatgtgtacatgtttatgaacattgctttagtaaatgaaagatcagttcagatcatttttggtcaaaaaaaaaaaaaaaaaaactcgagactagttctccctcgtgccgattcctgcagcccgg

SEQ ID NO: 22091 - DNA, 3788 bp, Oryza sativa
  Clone ID: TF_OsC1163_1
cgcgatctaggcttgccgcgcgcgcgcggatctgcgagctgcgtagccgtttctcgctgtgagtggaggaggaggaggaagggaggaggatggcggcgaacgcggggatggtggcgggatcccgcaaccggaacgagttcgtcatgatccgccccgacggcgacgcgccaccgccggctaagccagggaagagtgtgaatggtcaggtctgccagatttgtggcgacactgttggcgtctcggccaccggcgacgtctttgttgcctgcaatgagtgcgccttcccggtctgccgcccttgctacgagtacgagcgcaaggaagggaaccagtgctgcccccagtgcaagactagatacaagaggcacaaaggtagccctagagttcagggcgatgaggaggaggaagatgttgatgacctggacaatgaattcaattataagcatggcaatggcaaaggtccagagtggcagatacagagacagggggaagatgttgacctgtcttcatcttctcgccacgaacaacatcggattccccgtctgacaagtgggcaacagatctcaggagagatccctgatgcttcccccgatcgccattctatccgcagcggaacatcaagctatgttgatccaagtgttccagttcctgtgaggattgtggacccctccaaggacttgaattcctatgggattaacagtgttgactggcaagaaagagttgccagctggaggaacaagcaggacaaaaatatgatgcaggtagctaataaatatccagaggcaagagggggagacatggaagggactggttcaaatggtgaagatatccaaatggttgatgatgcacgtctacctctgagccgcatagtgcctatcccttcaaaccagctcaacctttaccggattgttatcattctccgtcttatcatcctgatgttcttcttccaatatcgtgtcactcatccagtgcgggatgcttatggattgtggctagtatctgttatctgtgaaatttggtttgccttatcctggctcctagatcaattcccaaagtggtacccgataaaccgtgaaacataccttgacaggcttgcattgagatatgatagggagggagagccatcacagcttgctcccattgatgtctttgtcagtacggtggatccactaaaggaacctcctctgatcacagcaaacactgttttgtccattctggctgtggattaccctgttgacaaagtgtcatgctatgtttctgacgatggttcagctatgttaacttttgaggctctgtcagaaactgcagaatttgctaggaagtgggttccgttttgcaagaagcacaatattgaaccacgagctccagagttttactttgctcaaaaaatagattacctgaaggacaaaatccaaccttcctttgttaaagaaaggcgggcaatgaagagagagtatgaagaattcaaggtacggatcaatgctcttgttgcgaaggcacaaaaagtacctgaagaggggtggaccatggctgatggcactgcttggcctgggaataacccaagggatcaccctggcatgattcaggtgttcttggggcacagtggtgggcttgacactgatggtaacgagttgccacggcttgtctacgtctctcgtgaaaagaggccaggattccagcatcacaagaaggctggtgcaatgaatgcattgattcgtgtatctgctgtgctgacaaatggtgcctatcttctcaatgtggattgtgatcactacttcaacagtagcaaagctcttagagaagcaatgtgcttcatgatggatcccgcactaggaaggaaaacttgttatgttcagttcccacaaagatttgatggcattgacttgcacgatcgatacgctaatcgcaacatagtcttctttgatattaacatgaaaggtttagatggcattcagggtccagtttatgtgggaacaggttgctgcttcaataggcaggccttgtatggctatgatcctgtactaactgaggctgatttggaacctaacattgttgttaagagctgctgtggtggcagaaagaaaaagagcaagagctacatggatagcaaaaaccgtatgatgaagagaacagagtcttcagctcctatctttaacatggaagatatagaagagggcattgaaggttatgaagatgaaaggtcagtgctgatgtcccagaagagattagagaaacgttttggtcaatcgccaatttttattgcgtccaccttcatgactcaaggaggcataccaccctcaacgaacccagcatctctactgaaggaagccatccatgttatcagttgtggatatgaggacaaaactgaatggggaaaagagattggctggatctatggttcagttactgaggatattctgactggatttaaaatgcacgcaagaggttggatatcaatctattgcatgccaccacggccatgcttcaagggttctgcgccaatcaatctgtctgatcgtcttaaccaagtgctacgttgggctcttgggtctgttgagattctgcttagcagacattgtcctatctggtatggttacaatgggcgtttgaaacttctggagaggctggcttacattaacaccattgtttatccaattacatccattccacttatcgcctattgtgtgcttcctgctatctgtctcctcaccaacaaatttatcattcctgagattagcaattatgctgggatgttctttattctgcttttcgcctccattttcgcaactggtattctggagctccgatggagtggtgttggtatcgaggactggtggagaaatgaacagttctgggtcattggtggcacatctgcccatctcttcgctgtgttccagggtcttctgaaagtgttagcaggaattgataccaacttcactgttacctcaaaggcgtccgatgaggatggtgactttgctgagctatacgtgttcaagtggaccagtctcctcattcccccgaccaccgtgcttgtcatcaacctggtgggcatggtggcgggtatatcatatgccattaacagcggttaccaatcatggggtcctctctttggaaagctcttcttctccatctgggtgatcctccatctctaccccttcctcaagggtctcatgggcaggcagaaccgcactccgaccatcgtcatcgtctggtcgatcctcctcgcgtcgatcttctcccttctgtgggtcaagatcgatcctttcatttcgcctactcagaaagccgtcgccttggggcaatgcggtgtgaactgctgatcggcaccgttacgaagatgaacttcaatcaatcaaggtctacccccccttgtgtaaatacctgaggggggctagaatgggatcttctttttgtgtagatgaagaccttttttatctaagttatgccactgtttattagctacttcagtgctggcgctagctgctgatacgatggaactgtgaagccttattttgcctgcgaagaagccagcccagcagcgtaaattgtgaatttttttcttcttttgtgacacccgttattttagtcatttgtttgaggggtcgttgttacacatactatgggatgttatttatacggatatattccaattacattcttttgcggtgaacattttaattatattcgtagcatataatgtaaggcaactcagtatttcagctgttcacttgacaagttgcaacacatataaaaaaagagttgtttgttcaaaaaaaaaaaaaaaaaaa

SEQ ID NO: 22092 - DNA, 4021 bp, Oryza sativa
  Clone ID: TF_OsC71795_1
ttttgttttttttactagacagcgatattatattattatatatcactgggattgggggtacatatggtccatatggatgaagctacatatcacgaaactaattacagtcacacgcacgtaactgattcccaaaggctacaagaataaaacactggaacactagtcaaataagccgaacccgtaatattaagggcttgggatatcgcaactataagatcctccccagacggcccaagggaatggatccccgggccgccgctctcggctcgtgggtccccgggctccaggctctttttttttttttttttttttttggagtaaatatacacattcattgaatttggacttttgccacggcacagaaacactgaacaaaatgtgcctttgttcaatacaatcaagaaaaggaataataaaaaggaatgaaaatcctctatcctattaatctagctataataaggaactatacaggtatttacgggaacatgtcagattgcctacgtaaggtttttgctatgcctccatcgaaagtcgaaataggcgattcaagaaaatacgaggataaagttgatccccaaaccaccaccatctgcatgccttcatgcaaatactggggaaaccagcgaaactatgctgctattgccactactgtgccacttactatggtcaacaccagcttattgcatctctagcaacaaattgtattgtctaacaaaacttctacaagttcacatgaagctcatccagatatactaaggtctgtcatgcttctgtcagcaatatatgcctttatatccctgcatctgggagctgaacagtctgcattgtcacaaagcagtgagtgcgtgaacagcagtttccacatgaatacacacatatggcaacctcctccaccacgggcacgggtatgacatcgtacaccatggaagaacagtttctttaacgtcaaacaaagtttggaagtgcaacttcgatcaaaacatcttgatgcatgcaccaagccttcaaggtagtctctttcaaatgcatgcttttgttttgttgtagctgggtgcctgtccttcagaggggtattcagctcctcagcataacaacgttcacaaagaaagaagtttttgcagctggtgcaaacccaactactaccagatacaataggatggtggcaatgcttgcaaaattgcttatgcacaagtaaaatatcctcgaggtttcctttccggtcatcacgtttggcaacccgtagaagccttcctagttgagtttctttcttctgtgaggtgtcatcatctttcttttcaaggagcctctctgcttccccaggccagaaatcattatcacagtatggcaaccatgcagctgagatattggtcttgcattcattggtgggctgaaggaagaagtcatagagtgtattccgttccacaactaccccctccttaacagccttctttaccaaattctggtaccagctccgaagcttgtcagactttggcatcttctgtattgtaggatgacaatataaaacataatcgtcacgctttgtagatgggcaagtccatatggaacagcttacaaaccctcgtttcttgcagaaatccaagtagccaatcaaaatttcatgatacacaaaggtacggagagcttctccactggccgacttgatttccggtctgaagtacttgacagaatcaatatatgcaagataaacgtgcctttgatttggtgatgggcaggctgaaccatactcttgcacatacatggcgaacaggcatacatctacaccttcattcttttgaaacaagagaatggcctttgatttgtacggaaattccccaggatattgttcttttttaaaaaaatccttgaaacgtggttggacttgcagtgttctatcagctgaagataccactctaacagtaagaccttcaactcctggtacctcatcaacactttttccagaagcaattgccctctgttgccgctcctgcacaagccgctcagaaagcctttgctcaatatgatcacttagtctagttcttggtaactcgcgtgctcccagaatagtagatggctcaagtgaatcaacatcttcattatccttttccttcaagaaacattttgcacaagtatattcagcctctggatccacgattttggggttaaaaagtgcgcagatttgatgctgccaagctttgcacttatcgcactggacccaccattctgcctcagcatctgtctctgcatagctgaatctcttctgatatttggctttggcactactaagatggtggcatctgccacatattgaagatttgtcatttccattttccacttcaacataataggatcctgtagaattaattattttaaaacagagcgcgcaaaatcgtggagggggctcaaagaggagtctttccatcccacataaattgcatgtgttctgatcaggcaagccttcaactgatagcagctcttcagtcggcactttgctctgagaagtatcatggttcagagtacacaagtgatctttaagctcctcagaagttaatgcataaagtactgaggcccctcttctcttccttgccctcaggctgtcccctgacaatgtttggtccaataaatcaacctttgcatccttcatctcaatgtcactattttcacgacgaaattcttcttcagtttgtacagcactccccgacaatctgaccatatccattccatgtacattatcggtgcaagcaatgttgtcccccaaggaagtacaacatggtgattttgttggtgaattagtgacttcagattgtactgtttcagcagatgcataagtctcattggcagcaggttgttgttcctttgaagcctccatttcattgacatggacaagatggggaacatcaactttcaagcgttttgctggataatgcttgccagaagatccatctgaagcaggtgaagtcggctttgatacagtactatttgatgtctgttcagctctatccactgtcttgcttacagggctacaagcaccataattagtcatgaagccctgctgatgatgcataaagtggttgcttaaatttgagcttttctccctggagaaaccttcatgatcagaagtatgcccaagtttttctttcatttgaatgcatcgatcccgtttgtgctctccattgatgtacggatgaatttgagcatgatacaagtcacggtttccagtggtaatgtttgactgatctgattgctctagtgaccgactccacgtctcttgcttcatctcacattctatgtattgttgcaacaaaggtccctgaccggttgtgggatacaaacttttattgtttgtggaaaggttttgtccgttcactgttgagaaagaatccatcggaagtgttctcattgcactagaacatgttgtttgatcccacactgctgacaaagaactagaactcccagaggttgatggttgtgaactatcattttgatacgcatcacctgagaaatgttcttttatatggccaatatgcagtacatcaatactagggctacatttcggtagagttgatgcacatgaggtaaaaatggtgtttgctaatctttcaggcatctgcttgggtttatcagccaacgaatgagcaaagttagcagcacccatacagttttcatattggttatatctaccccgaaatgatgcagaattgacgatagcattcaacctggttcttaaagtttcaagatccatatacttaatctttgaatcagctttctcaaaaagatgtcggtcaatacattttccaatttccataagaaaggataggtcaaagttgcagaattccttccgctcatttaggtactctacaattttacggtgaataatattgcgaactacggatgtatcttgatccatattatccaactgaagaatttcagctgcagattgtgtccagccacttgtggggtattgctgggtaggaaatccacttgctgcatattgctgttgagtcccttgcagggtctttgccat

SEQ ID NO: 22093 - DNA, 3077 bp, Oryza sativa
  Clone ID: TF_OsC48275_1
gaacgtcaagtttaaagggacagagagataaacaataccatgcccaggcacgttggttactatttttgttccatgcaaaatcatgtacatctcctccaggaagttgtaaatcttcatattgtgatcgtgtacgggagttagtggttcatttgacggactgtcaaataaaggactgttcatatcgacactgtagggagtcaaagatggtatctgatcactataagaattgtattaacgagcattgtcatgtttgctgcaaagcaaaagaaatgttgcgtcgctcttctgaactggcacataaacagaatcctgctgaacctatacttattactcagcacaatatgaatcaaagaagtgccgatagggtacatggtgatagaatggacattgaccaggcagttgaaacctttgatgaccaaccaccagcagcaaagcgtccaaagttgcagcttgtgtctcccgatgcatctgagaatgtccctgtctgtcaaaaaaacccagggtttatgttgcaggaagcccatcctagacagcttgatcagaacaaaaagatggtccctgatcaagaggtagacgtggggcttgatatccgacatccacaagttactttagtcagctgtcatggtagtgatgagaaaattggtgctgcgcaaaatactgttattcctggtgctttaaacaagatacattgtcatgtccagcaagaaactgttgtggctgataaagagagtgtgactgttgttgatgttaagaaaaaaacaggctctgtggatgtcacgatctccaaaactgggaaaccaaaggtaaaaggtgtttcactcatggaattgtttactccagaacaaatacatgaacacatcaacagtctaaggcagtggattggtcagagtaaggctaaaagctgaaaagaatcaagtgataggatattctgaaagtgagagcttatgccagctttgcaaagttgaaaaccttacgtttgaacctcgaccaatatattgttctccttgtggtgctcggataaaacaaaatgcatcatattatactgggtctactgctatgggtcgcctttttttctgtatctcgtgttacaatgcatctctgggcaacacaattgaggtggagcttattaaactctcaaaagcagatcttgagaaaaagagaaacagtgacgaaccagaggaagggtgggttcagtgtgacaaatgtgaatgctggcaacatcagatctgtgcacttttcaatgccagaagaaatgatgttgaagaagcagaatacacttgcttcaaatgttatattgaggagtttaaacgtggtttgcgcatgcctttaccagagagtgttgttcgtggtgccaaagatctgccaaggaccctgcttagcgatcatatagaagaacgactttttaaacgactcagggaggagagacaggaacgggcaaataagttaaagacaagtttggatgaggttcctggagcagatggacttgtggtcagagttgtttcatcagtggacaagaaactggaagttaaaccacattttttcaagattttgcaagaggacaattatccagctgagttcccttacaagtctaaggctattcttttatttcagaaaatagaaggtgtggaagtatgcttatttggcatgtatgtccaagaatatggtgcagaatgcaaattcccaaaccaacgtcgggtttatctgtcatatcttgattctgttaaatactttagaccagatatagaaacagtgtccgggcaggccttaaggacatatgtgtaccatgaaattctgataggttatcttgagtactataagcagcgtggattcaccagttgttatatatgggcttgccctcctgttaaaggtgaagattacattttgtattgccatccagagattcagaagacaccaaagtctgataaactgcgtcagtggtacttatctatgcttcaaaaggctattaaggagaacattgttgtcgagttgacaaatctctatgatcaattttttgtcactgcaaaagaatgcaagataaaagtatctgcagctcgcttgccatattttgatggagattattggccaggagctgcagaagatattatcaaccaacttcaactagagggtgatggtaagctgctgaagaaggggagagtaaataaaattatcacaaaacgagctttaaaagctgccggccacactgatctaagtgggaatgcttcaaaagaggctatgctgatgcaaaaacttggagaaatcatttgcccaattaaggatgatctcatcatggtccatttgcagtattcgtgcagtcactgttgtacctttatggtgtctggaagacgctgggtctgcaatgaatgcaaaagtttttatatttgtgacaggtgttataatgcagagcagcggcttgaggagaaggagaggcacccaagtaatagtaaatgtttgcatatactccacccagttgaaattgttggggtctctgaagataccaaggacagagatattatcttagaaaatgagatctttgacaccagacaggcattcctgagtttttgtcaagggtatcattatcaatatgacaccctccgccgtgcaaagcattccaccatgatgatgctataccaccttcataatccaactggaccagcttttgttgccacatgtaatgtctgcaattgcgatattgaaaatggtcaagggtggtattgtaaagattgcccagactttgatatgtgtgcttcatgttaccaaaaacatgaggtgccaatcatcatcacaagttaacaaaccatccatcatctgcagaatgtaatgttcaaaacaagggagcttggcagaagcacgtcctgcaggtgcgtgtatggcttgaacttgcactgcatgcatcatcatgtcatgttcgtaattgccaataccctaactgccgaaaacttaagggactctttcatcatggggcgcagtgcaagatacgactaactaaaggttgtaaacaatgtgcgagaatgtggtatataattcgactccactcccaatcttgcagacaatcagattgtgctgtgccaagatgccgg

SEQ ID NO: 22094 - DNA, 702 bp, Oryza sativa
  unsure (1)..(702): unsure at all n locations
  Clone ID: TF_LIB4309-026-R1-K1-A8
cgtttacaatttgttcttgcaatgtgataagtgccgtatgatggtacatgctagatgctatggtgaactcgaaccattgaatggagtcctttggctttgcaacctgtgtcgacctgaggcgcctcgtgtttctccacgatgctgtctttgtccagtaacagggggcgcaatgaaaccaacaacagatggtcgttgggctcatcttgcatgtgctatatggattcctgaaacttgcttaaaagatgtgaagagaatggaaccgattgatggattgagcagaatcaacaaggaccgctggaaacttctatgcagcatttgcggagttgcttatggagcttgcatacagtgttctcatcctacctgtcgtgttgcatatcaccctctttgtgcacgtgctgctgatctttgtgttgagcttgaagatgatgacaaaatccacctcatgttacttgatgaggatgaggacccatgtattcgtctactttcatactgcaagaagcacagacaaccatcgactgaacgtccatctcttgaaagtaaccttgctaagcctgctgtggtagttcagacagatgcagttccaccatccggttgtgcaaggactgaaccttantatatccatgggagaaggggccaaaagcaacctcaagttatggctaccgcttctgtaaacgtttatatgtagagaatatgccttatatt

SEQ ID NO: 22095 - DNA, 2467 bp, Oryza sativa
  Clone ID: TF_OsC29983_1
gggagaccaaactatccacattttcatcctctttatccccaaatcttattagttcttcacaccaccaaatgagcacgtacacccatcagaatgtattcagtactcgttgccaaccctcggtataacttaacccactgcggctcaaagcctcaaatcaaataattaagcaagaagaatcggcaggtactatgtaccaacaatcaagctaacaactacgagagctaattaacacgatgaatgcttcagagtgcttcaccgtggtctcctcgccggagcttttggaaattgccaagatcagccggcggtgagctacctcgccgtcaccggggggcttgcccgatcaccggggccgtggcctttgccggccctgaggcgaagggagatggttctgggagtgctgtagcatctcaaccatggatggcgtctggtaggagtagatgacggtgctgctgtccgtcgagtcacctcgtgctgttgccctctgccacgagtgtgagctcagcccggacagcatgtaagccctccctgaagactcgtagagctggcgatttgccatcctctcctgcatctctcgcagctccgcgtcgagggacagcgacagacggtcaccgctccggcttgcgaatgactgtgacagtgtcctccggcaatcctcaagaatggccacggcctcagagagagcacccttctcggcagcagcccttgcacactctatggattcagcagcttgtatgcggttcctctcgcggtcaacctcaatggacacatgctcagatatgttggatgttgtcggccggttgatcttcacctcgtcaccttgaatcttgattgtctcacctgtcaccggatctctgtaggcacaagaaaccttcagtgctgaggtctgatgacgagattgtgggatgttcacggacagtaagatgtctctctcctcatcagcatacaggtgaccaatgtcgacggaaccgtttcgtccatctcttgccaccttacttgggtagctaccagatttgatggaagaaagttgaacaccaggatgaacacattccatgctaactcgcatctcttggatgacaatgctaagaagcccaccaatgcattgagcaaatgcatcttgcattacaccttcatcctcgataaaggaaaaggtgccaccagaagcttgagcaattgagtgcaaggaatccgagtcatggtctgctccaaatccgaaggcatgaagaggcaccgtatggcgagcatcatttataatggaagatgggacaagtgacttgtaatctggtgaagccccctgaacacttgaggaaatgttgtatgtatcttggccgtccgacagaagaatgatgctgcacactgaattcttgtaactgcggtcttcaatcaccttcatagctttcttcagtgcatcagcaatgtttgtaccgccgctagcaccaagtgagttaattgcctgcaatgcctgctgcctgccatgatgtgatattcgctgaaggtggaacagtcttctggcactagatgagaaagcaataacagaaagacgatcgcttggtccaaggtgctgaacaacaaaacccattgctcgctttaggagcgctagtttggtgcctgccatgctgccactaacatcaagcacagtaacgagatcaaccggagcacggtttcttgaagatccagctgagctttcattcgccaatttacctgtgccctggtctgggttagcactaggagccttcagatggatcagaatagcaaaatcatctttagatgaggactgcggtatggttgagaattctggatatgtgtttatctctgcagtcttagtagatcgaacattaagattgtcaaaaacttctggctgctgcaaaggttcatcatcattgaagtctgctggctcagaagtatgtgggcgacgaactcgctgatgatggtttggaacttggtggagaagagccatattggcatcttgttgggtcaatcgagctcggctaactccaattcttccatgcggaatgttagaagatagcgatcgattgaagggtatctctttccactttgcccgacaaattgggcagaaataattcccatgtttcacattagatgagatgcagtgaaaatggaacatatgagaacattcagctgtgaatagggcttgaccattcccatgccgcatggagtcaaagcatattgcacatttcctcttagaggaggatcggctgctccccgacttggacctccgcaccacgccggggagcggcagcggcaccggaacgtccgacggcgccggcaccgactccggccccaccgtcaccgcggcctcgccccggcaccgcgcgccgctcgccgccgccggcagccgcctccgccgctcgctcgagcagtcctccctctccccctcctccgcctcgggcacgtgcacgcacaggccgagccccagcgccctcttcgccttcctccacgcgtcctccat

SEQ ID NO: 22096 - DNA, 4872 bp, Oryza sativa; identical to SEQ ID NO: 12674
  Clone ID: TF_OsC94386_1

SEQ ID NO: 22097 - DNA, 2392 bp, Oryza sativa
  Clone ID: TF_OsC48959_1
gttttaccaatattaaatacttggtgcagatacaactatcagccacctcctgggaagccgaatcatacttgtggtggtgctgatagatgggcagatgttgttagcaccgatgatactagcaactcctcctcctcttcaccttctgcctccacctccacctccaagatggagctcaagatgtccaagaagatttccttcagtaggatccccaggaacctcaaggacctgctcgccactggcttgctcgagggccaccccgtcaagtacatcatgaggaaaggcaaggttgtttccccttattatttcgaggtgcatgctgggagtactaaaaagcacccctccgactacattttcctagaaaatggaaacaatctgcatgatatattgagggcgtgttctgatgctaccttagacatgctgcaatctgcaatacagaatgcgattggcccagctcctaagaagaggacattcagatgccaaacttgcaaaagtgagctgtcctcttgttgcactgggaaatttgctttgttatgtgattcatgtcttgagtccaagggatctcaaaacagtaccaggtaagctttgtcacagttccacattttgccagcgacagaaaatttggaggacatcaaagattggccggaatcctacttcctctgctaggagatccaagaatgaatccccaggttcaaagtattgcaattcatctgctaggggatccaagaatgcattcccaggagtgaagactactagcacgggaaggattacaagaaaggataagggattgcataagttggctttcatgagtggtgttctgccagagggtaccgatgttggctactatgttggtggaaaggttagcccttcgcagtttgaagcccatgctggccgtgctgctcgacgcaaaccgtaccacaacatatatatgtcaaatggtgtttcattacatgaactgtcagtttcactttcaaaaggtcgaaatatgtcaaacagacaaagtgatgacttgtgcagcatttgttcagatggtgagtgtgttggctttactactatcccaaggggaacttggtgttgtcggtattgtgagaatagacaacagagagaaagttctttggcatataaccacaatgcaatagctgctgggaggattgacggaattgatccaatggaacaaatatttacaaggtccatacgcattgccacaacaccagtgactggatttggtggctgtgcacttttgtgcaggctccatgatttcagcaaaaagaaattcagtgcgagaactgtgctgctctgtgaccaatgtgggagggaattccatattggttgcctgaaggaacacaatatggctgatttgacggccttgcctgagggagcatggtattgtactgcggactgcgttaggatcagcgagacactgaaggacttacttagccgtggagcagagcctatttcttctgtagatgtagaaattataaagaggaaatatgaacagaaagctctaaataaagatggagatcttgatgttagatggagggttttgaaggacaaaagttcagcagacagtaaattggttctctccaaagcagttgcaattttccatgaatcatttgatcccattatccaaattgctactgggcgagaccttattccagccatggtttacgggaggagtgtaagggatcaagattacacaggaatgcattgtgctgtattaactgttggcaacactgtagtatctgcgggtcttttccgtgttatgggtagtgaaattgcggagctacccttggttgctacaagtagagatagtcaaggcttggggtatttccaagcgctgtttggctgcatagaacgattgttggcatctctgaaggtgaaacattttgtgctgccagctgcagatgaagcggagtctatctggacacagcggtttggattcgtgaagataacccaagacgagctgcgtgagtacctcaagggtgggcgaacaaccgtgttccagggaacatcaaccctgcacaagctggtcccaaaattggatggctagctctgtgaatatatgcattggaatgtgcagggagcgttgaggcaggtccttgccaccctgatatgaagcgtggtgaagatagggacgggacgggacgggaaccctaagataaaaaatcccttctgtgaaaattaatgggtgcgtccctttttgatattttttatttgtcagtggtggaaaagaatatcgggaggatgtgttttcttgtttgtttgtttttttacatttgcggcaggagttgtctgatgtcgtgtgagtgtgtggttagtctagctagctattcatcatacttcatgcagttggtacttgttttgtggataaatcccctgttttgcataaaaccaa

SEQ ID NO: 22098 - DNA, 489 bp, Oryza sativa
  Clone ID: TF_jC-osflLIB3477P005f01b1
ctagctctagatcgcgagcggcgcccttctttttttttttgggcaagaaccggaggcattaccatacaggcatagactaaaaagacacatcattaatcagagagttgtagacacttaaccaatccatccaaccaaggaggcagaagatggcctatcgatactactattactgtggcactaccaactatgtccagtatgatacacgaagtaacgtacctgccactaatacagcggggcaaccagggctgagcgaacgactgtcacccactaagaattgaggttccccaagtccaccggtaaactactatgtattctttgccaatactatcacgatcacattataaagaaaaaatggacgctcattctctggtactcttgttgctgcagccaggacacttgaaatgcttgatgcgctccatcctggcaggggagattcggacacatttgacgtggaaccaggtctcacaaatgtcacagcaaatgcagaac

SEQ ID NO: 22099 - DNA, 4425 bp, Oryza sativa
  Clone ID: TF_OsC4410_1
ggaaccgctatgtcaaaagatccgaatatatgaacgttttgatataacagggtcaaataaaaaaagatataacaagtggggcaaaaggtactatttaccccttacttaagggtgttaactcgccttatcggaataggaccagacaattttgaaaagcaagttcaaataagtaaagtatgaaaagtagggctaaattggtagttaaaaatgtacaaaatgggactgcagttcagtcactgaaatgctcttgatcgctatgcattaacatacatcagttaactacccggactagggttcaattttggttccttcaggctttccgttggctgactacaagagattaaaggggtcaagagggccaacaaccttctactagtagggcacatgcatattcacaaaagacctgcttctacgcatgaagtagccatcttgtaggctagcctgacctggtatctgatggttagtctgttcaaggtcagggacatacctatctgtaactgtccctctagctgaactcctgtgttcccagtcgaaactgtctcgacggcggtaatctggtccccatccatgatcattcctacgcctaccataagccgccgcctgttcctcctcaccaaaatttgtctgaggtcgatatgcaccattgtggtgctcctgaggataatatctatcaacaggaagagtgtccattccatggtagccgcaccctgactgggatccatatccatcatactcggtattgtatctagtaccatcgtactcggtatcgggtgaattaccacgaggaggaactgtgctccagtctctttcagagctgaaatgccttgatcttctacgtcttcttggataagaaggggacccacgccttgcagtagcactataatcaggccttcttgaatatggagcatgaccatttcttctttccactggtacctggcgtctagctgaattttcgctcacggtatcccttgactctagtattctatttgatgtccccctctttctggacttgcatactgaagcccctcgtgctctttgatcatcattatgcgaaggacttttgacgtcaacacattgaggatgagcagttctatcatcttcatgatgaccatctcgcgcgtttttcatgcgaacggcttctcttttcctatccaagtccaatctcttaccatcagtcacctccttttgttccctggtttttcttgaattgtcacctgaagtatccatttcagttcctctgagattatcattgccgtgaggactctttggctcatgttgaagagcataattgtcatcaacatctacagccacattgtatccacattcttgctgagtatctactctgttggtagttgtcttgtgcacaaatgcaacatctacatgcttatctggaggtagtccatcaacaagatctggcttcactgtccccttgttgctgccatccctgggaatcttctcttttcctgatctcatgttctcttcatgtgtactatccgtcattctgttttctctcttcgagatctctgtcttttgacgtgctgcagagttatgcccacatgcattctctccccgatgcacatcactctcttttcctgatgtcaagttatttccgcctccacttccattagcatgtttctccttatacaagctttgtagctcatcattctgctcttgatttgcatgaaaagtaactacattgggaattatcaatcgttctcctgaacagtgctcagatgtttgttctctctcgctagtgtcttcttttccaactgtgaagatctcgttatcccccttagcacctttgtccacagaagaatccttcaacatgacactatgtgccttgtgcccaacatttaaatggccatgttttccagctatcctcatattctcctctgtcttgtcagggaaactccacaaggaaacacagagaggaattacatgcaaaccattctttgcgtcgtcattcacatccacatcaccaggttgatacaatggcttcccaaagatgtgctgattatattcccatatcaaatgatagggctcctccttgcaatccaatctttcaatatctgtgggggaaactattataataagccttggcttaaaggttaatactttgtcaacaaatttgttcgctgaaacggcttggatatcaagaggaaggtccaggaccataactagatttaatccatgaggtaaatcctttggttgcatggtcacccagttgctctcatcaaaacacagattgttcttatgttggaagagatcataattcttgaaattgcaccctttagacacatcttcaagcttttctttcatcagtcgactaaaattatccatgttgaagcagagatcaactatctccctcacgacaacaatggacctctctaataacaccccatctggcaattttccacagctttccgtgttgccaggctgcacataccaatgaagtttatcagcaatctgaaccaaacactctgacaaaccatctatctcaatcctgggctgcctcagtacatcctttgtagccatatcttgggatgtccctgcagatatttccttttctgctgtacttgttaccctcttttctgtttcaccatccaccgcacaagatgcactctttgatatttcccccataacaaatgaagacggagttccaggttgcccttccttcccttccacggtttttgcaccacttaatctagcagaaacatcaaccagaggtacttcaaactgcagatccttttttaagcgctttactgcacacccatgttctagtgcaatatgctcagatgagctattccttgctactcttctggtttgcttgctttctcctctaggtgacacatttgccaacttagtggattttgttgaaaatttattaccgctctttttccttttgccagtcactttagcatccttcttagaaagatttttcgttttcttgatttttggaatagaagggaactttatatgctccccactaggtgttccagtagtagcatctattccatggtgtaaacagtagaagtaactcctttttttaattttccaagcaagttttggggcacctttgtcctttgtttcaaaggaaatttcgctgtgaaaaataccatttgatgccatgagaacatgatagcttggtaaacattctgtgtgatatgatcttggacagcgtctgcagactgcaaactggaattcacttcgtgtcctgtcctccatctttgcacatttaaagcaccaatggacagggcatgtaaatgacataccatctgcgatcatttcctccaatttacaagcaccatcagtgtcttcaggctcaagtagcactgcgatgcacttggggtggtagaagtgcccacaagattctttattacattgaaacaccatcaagccatggcgtattgttgagaggacaccaacatatcgcgcatggtgaatgatatccggcgatcccttagcatttggaccataagatggctcaagctctccgcatttgaaacattgatgttcattatgttcacaattctcacacaagaaagttccactttcctttagctttagctccacagaagtgaaacggagagttctgcatttggatttcctgccatgcttcaccctggcatggaaggacctcttgcatggaccttcacagctaagcaactttccaccatcatcacatatggcacatatcatatctgtatcatcatcagttgcattaccatcagtatcagtatcttcatcagtactatcatcattattatcatcactgctgtcgctattgctgtagctgcagtcatcactgctttcaagtgactcatcactgacaataaatcgatcttctgtacacgctctccttggtatgggctcaatggccttcctggaagcatcctcaataaagcatcgtataatcttcgacttcactaaaattggatccctctccatgaaaagcttgattagatgatggtgcttctttatgtcatccccattaggtacaggaccaaatttattgaaaacttcaccgaggtgatcaaaaaggcttctctgttgtttcttgggacacttcctgacaaagtggagcatttgcactgtgatcaatattgatcgaacttttttttcataatagcacatccgtggtttcaacagttctatccatttcccgtcactcgaaagcactgagatctttggcctctgacaatcaagatctaccctccaagctatcaccttcttgaacacatgacggttattatctgtaaatccacgcaagttcagttccttgtaatcagaacatgagacttcttcgttctcatcaaactttatgggcaagacactgaagcagactggcttgtcctcgctttcctcaaaatagtagatgtccacatcgttaaccggtggctccacgtcatcgtcgtcgtcaaacat

SEQ ID NO: 22100 - DNA, 1611 bp, Oryza sativa
  Clone ID: TF_OsC134975_1
tagtggatccccgggctccacccccgattgtgctctctctcctccgctccgcggcgccgctctccttccgccgccgccgccgacgacgacgacgacctcctcctccgggtcgacgaaaccctagccgcggcgcggaggcctgctgcttccggctcccgctcctccctgccgagttcccgcgaacccttcgctgccggtgaaggaaggcgaggatggacggcggctacggctcggtcacaatcgtccacgacgcgcgctcccccgaggacgtcttccaggacttctgcggccgccgctccggcatcgtcaaggccctcaccatcgaggtggagaagttctacaagcagtgcgaccctgagaaggagaacttgtgcctctatggactgcctaatggaacctgggcagtgactctaccagctgatgaagttcctcctgaactaccagagccagccctcgggataaacttcgctcgtgatggaatgcaggaaaaagattggctgtccctgatagctgtccatagtgattcatggttactgtctgtggcattttactttggggctcgttttggatttgataaaaaggccagggaacggctcttcatgatgaccagtagtctccccactgtctttgaagttgtgtcaggaggtgtgaatacacaatcaaaaaccgccaacggcagtagcaaaaacaagtcaggctctaagccaccaaagcggcccaattctgacagcaagccacagaagcaggtccaggcaaagtatgaggaagagaacggcggcagaggaaatggaggtgatgaagatcaagctgaaaccatttgtggcgcctgtggtgaggcctacgcaaacggcgagttctggatttgctgtgacatttgtgagacctggttccatggcaaatgtgtccgaatcacccctgccaaggcggagcacatcaagcattacaagtgtcctggctgcagcaacaagaggaccagagaatgagcgtccattttttctttctaatgtgatcctgatagtagtggcaaaaaatagatagtagtttacccgtgaacttggggaacctcaattcctactgggtgaccgtcgttgcggcagccctggttgccccgctgtattagtagtagctacgttacttcttgtatcatactggacatagttggtagtgccccagtaatagtagtatcaataggccatcttctgcctccttggttggatggattggttaagtgtctaaactctctgattaatgatgtgattttttagtcaaaaaaaaaaaaaaaaaaaaaaaaaaaaaattgcttctaattcatttttttccctgttgatttgcatgaccttttctcaaactggtcattttaattctatctgatctatcactttactaaagaattcccacgtggctctatactatgtgcaaggatgcgagtacttatatgctgattccagagtcatggtagacttgtgagtctaggttgttctactgacacctgccatgatttaaatctgataattgatcatttattaatgatccgctctgctagctatgttaagtgtcacataacccatatttttcacaatagactcactgtgtcatgcatttatatgaaca

SEQ ID NO: 22101 - DNA, 3946 bp, Oryza sativa
  Clone ID: TF_OsC463_6
atggctaagcctctccgctctaccgtcctcgtctgcgcctctgcggcgatggccccaacctccgcaccaagattgcccacttcggcgccgccgatctcgccggcgagctcccggaaaccgaaaccgaacagggcacgtgcgggtacattgtgccggagctcatcgcgggcggagcgccatcgcggcggtcggacgagtacgcgctgggcggcggtggcggcagaaggaggaggggaggcgatgcggcggtgggtggaccggaggctgagggattcgttcccggtggacacggtggaggagatgacgacgctggcgctccagtgcgtagccaaggacgcggcggcgcagccggagatgtcgtggcctcgtgggtcgccgccaaggtgtccaagctcttcctgcccagagccacagagacaagagtttggtggtggcaacccgctccggcggctgcctctcgtctctccaccaccccgtcccgccgattttccgcctcgacctggtggtgcagtgctcgattcggcagttcggggcttaccgagggcgcagggtgtcgatgtgcagcccgaggaatcgcatatccgaaggggagtcgaaattagggtttccctctactcgccgccgatgaaggggggccgcttgcaccgtctggagcggccgcccgccgcccacatcaccaccgccgcagccgccaccacgcccgctccggcgcccgccgatgattggggggatggctcgtggacggtggactgctcgtgcggcatcacgtacgacgacggggaggagatggtgagctgcgacgagtgcaacgtctgggtgcacacgcggccaagcgcgccccctcctccgccgacgaggctgaggtcgccgagctcctggccgagctggcccacccaccgcccacggccgttgtaccgccgatgggctgaagtccctctcccctcccgtgtccatgtccacgggcttccaggcggtacagacaccgccctattccgcagcgccgcaccctcccctgtattctcgtccgccctatggcgctgtgctgggtacgtacccaagagattcggcttccgctactgcgaattcccctactgggctgatgacaaggacggtgccaacgctctatttgcgctggctagagagaagcgcaaggaaaaggcagagactaggttccctctccgccttggagccatacacaaggacaagaattatgtcaggacgctgagcatttgcggcgataaggtggatggcgttgagcactctgtggacgatgacgcaaagaggacatctccaccaagtgatgcaaagaagagaggaacatccattagcattgtagagcctgatacttgggacaatggttgtgagaagaaaagggattttgatgtgccagctagtgaggatcagcatgccaaaacaaacatggtaaattctgatttgcacgtgcttgttgaagctaagaagaagagggcttcatcctcagaacgaagtggggataagaagtgctctgcctcgaaggaaattactgggatgctaaagaaatatgaacctaaggagtccaagcgattggtgatatcctcaggagttgcaacaacggcagctgtagcagagcaagaagtgcactcacgatttgtgaagctctacccacctcacttgagtgcgccaggtggaggagagatgcatggcagtgagctgcacctgccaatgggtggaggagcagagtggcaaagtcaccagcagacccttgcatggcgaaggtgcaaaccaggcgtgcaccagggtagcgtgtatgaaggactagacgggaatcaaaatgtaggtttacagactggagtaagatcgaatggagttgtgaaaagggatgatgccaaacgatcaaatggagatgtccagagcgatgctgctcctgagaaaatgaatgagggtctggatcttcagaagcaatcaaatcaaacttcaaatcttctggttgttggtggtgtaccggatttacagactaaccagtcagaatcattgactatcaagaaggaagcatctacagatgatcatgagagaaccgaggctatccagtttgtaagtgatgagcataaaagtggaaaacaagatactgcaatgttatcaacccttcagaggcattcgtccaagttagcatctgacttagtttatcaacatccaaagtctgaaacacaaaatccgatgcacacaataccagagcatccaaactcaagtttaggtaatgtgaaagtttgtacagcatcttctggtcctaactctaccacttttgatttatcttgctctttgctatccacagaaccatcatcagaagaaactactgttcgtttggtaaagaaggatcagacaaggttggtctcatccgctgacagcgaaaatgattttgcaaaaaaatctgagagttcccaggatcgcacaagatcctctgataaagttcaattgaaaggctttgttccgtctgcgccaaaatcatctcaaggaagtagaacatatgtatcttctgccaaaaatagatttatagtgccaaaggagcagttgcaaaagacatcaactgaaggaaacgctccaccagggtcattacaaggtgaagtggcacccttacattctcgtaataaggcaatgcctttgagcttttaccaaagaaaggacaagatccaccaccgctctattcatatcacacaggacacttccaatagttcagcatcggctgagctgcaatctactgaaacaacagcttcattgagcgatgaacagcttgcattgttattacatcaacaattgaacagctcccccagagtaccaagggtgccacgttgtcatcaagcatctaccatgcagatgctacatccaactggagctagtgtgttctcaaaacggtcttcagcacatggaggaagggatcaagcactggtcttaaagaagaggaacaaagatgatgcatggagagataatgatgagaccaagaagacaggaaaggtgtctagtgttgaacggaggcatagagatagtagcacagaacgtgtccttgctgcaaaagactcatgcaaatttactgaaaatatagaatcagaacagagaaatcgtggcatttgttcaactggagccacctctggcgtaggaaatgatgctccaatagatagaggtgtttcacatgatttacctgggttgattgaggaaatcattagcaaaaatacaaacataacatatggtgaactgtgcaacgctattcgccagcattggggggatttaagtaaacccaacgtggaaaacaatgcataccccaactatttacatgctgttaacgattgtcttaggaacaggaatgactgggctcaccttgttgaccaggctgcaatgatgaatccaaacaagcgccggaaggtagaggaaagtgactctttgtcagcagatgtactggcaaccgagaagacaaataaagaggctaaaaggggtccagaagacacaaatgctgaatcacaccatgaaattctgccaaggggcaaacgcaaggctcggaaatgcaggcgtcttgaactgaaagggaggagagtcaacgatacgaggaagagatctagctttgattcggcctctgatgatgatgataccaccttgtcggattccagtagtgacagaaatgacacccctatggataagagcctagaagatagttttgttatagctaagaatgcagattcaagttcatagaggtggttcaatgcagtgctgctggcaatacattcgaatggagttggtgaagaaagtcagatttagcgaccgcagatcggttcacttgtaagttgtaacagtagtgtaacatagttaatccttttctcgcctaactgtaatgcaggtagatttgttgaagtagcgtatcatgtaagcaatttgcaatttgtagcgtctgatgattgcgcccaaaataacaagcattatgtgt

SEQ ID NO: 22102 - DNA, 6409 bp, Oryza sativa
  Clone ID: TF_OsC158862_1
atgccaaggaagaaggccagctcgccctcgccgacctccaccgccagggagactagaagctcctccgctcgtggtcatgcatcaccaaccccaaccccaaccctcaggaggtccacccgagaaaccacatccagattttcttcttcttcttcgtcttccgcaaacaagcacgaaggctcccccgccaagcaaagtgccaacaacaacaccgcaaaacggaagatgaataatgctgccgcagatacctccaccaggccaatcaagaagaacaaaaagctaaacgcaaagtcctatttagcactcttctccacaccccaacaaaccgccaaatcccctcctgcccctggaggaaattcccggctgtattctaactttggcaatgtagcccctcctctcctagtccaagtggatgacgacaatgcttccacggtgcctatgcaagacagtggcactcttctggagcatgaagaagctgacacacaagagcaaggttaccagtctggcttgcacaaagttcctgaggtggtactggaggagactgatgtctccaagaacaaagctgatgaacatgcttccacttctgaggccaagaagacaattgaagcaggtgatcccagagagatcaaaggggcttctacttcaaatcaggctttagtaacccattctgatggaacagattacaacgagtacctgtgtgctgtttgcagaagtagggaaaccccaggaattctcaagtttaaaatgaggcagctcaggagatgccaccatgaaaggctgtgggagaggtcttgtgatggaaaagattgcaaaaatcggtaccatgattcttgtctggatcctcccctgcaatatgtgtcgctaggtatctggttgtgcaccttatgtactaaaaagaggctccagtttggtttatttgcagtcagtgagggcattgaatctttgtgggatgttaaggaagtgaaatggaaagatctgggctatgagtatgcaacatgggagcttgagacttcatcatttttatgtacccctgaggctaaggatctgaaaaggaactatgagagccgccatgaagatgcaagaagaggttttgatcctgcaaaaataaataagggtaagcaatgtctgtttcagaaacttcagaagctaccggatgggttcccccctggtttagacaaagatcatttgagttcacttaaccggctccgcgagttctggcacaattctgatggtgctatttgtctcgatgatcaggagagagtaatcaaaaccattcttttttctatgtccatattgcctgatgtctgccaaccacttctcattgtctctacttctgcttctctctcattgtgggaagctaagttcaatcgcttggcaccatcgatcaatgttgttgtgtataatggggagaaagacgtacgcaaacagattcaagatttggagttttatgagaacggtttggtgacgtttcaagttctcttgtcccatcctgatgccatcctagaggacattcagaccatggaatcaattgtttgggaggcagttatggttgacgattgtcaaagcttgagagtttcaaaatgccttgaacaacttaagcatctttctaccaattttaggatggttcttttgagtttcccactcaaggagagtattcctgagtacatcaacctgctgtctttcctcaaccctgaaggaagtgtcatttcgagtagttcaaatggtgattttactgatacaggtgatatcttagcaacgctgaaagaaaaatttgctcgtcatgttgcatttgagcggaaagcagattcttcaaaatttttggagtactgggttcctgctcgtctttcacgagtgcagctagaaatgtactgttataccttactttcaaactccccagcactccgatcacactcaagaactgatagtgttggtgctcttcgtgacattcttgtatccctccggaagtgctgtgaccacccttacctggttgatcaatcactgcaaagctcacttactaagggccattctctgactgatattctagatattggatctggtggcggggctggcaaccctatgggtgacattttggatgattttgtccgtcagagatttggttttgagtcatatgagcgtgtagaacgcggattgctagtgccgaagaaacaaacagcactgaatatgttcaatgacaaaactaaggggcgttttattttcttgattgatagtcgtgcttgtgttccaagcattaaattatcatctgtcgatgccatcatcatatattgtagtgattggaatccaaccaatgacttgagagttctccagaggatcagtatagagtctcaatctgaatgtgtgcctatttttcgcttgtattcgtcttgtacggtggaggaaaagactcttatactagcgaagcatgatcatattcttgacagcaacgtccagaatgtaatgcctatcgtgagccattccctgcttagttggggtgcatcgtttctcttcaatagacttgaggagttccaaaagcatgactactccagtaaagattctgaggatgatggtctcttcatgaataatgtatttttggagtttgcagcgaaactatccaccaacgttgaagccagcactaaaatggaaaatgcagtcatatctcgagctcagcagagtggatcgttttattctagagatattgctgttataagcgagagggagggaatatctgcagttgatggtgatttgccaaagttctggaccttctggtcaaatttactaggtgggaggtctcctcattggcaatatatatctgagccagtgcaaaggaaccgtaggaagatacaaaatatggaagaccaaatgagaatacctgcagaagaaactgatgaagcaataatgaaacgtagaaaaatcggagaaatcatggattcatctccgaagatcctacctgtcaaagacaatgatgctgtgctgcctgaaaatagtacagcatccagttctcatgaaacatcagttgatgacacttggcaagagctaggggcagaaagccttcagggcacacagaaaggtcttcacacccaactcaagccagagctgtcaaagttgtatgaattgttggaattgccggagactgtcaaatgtttatgtgaggaattacttgattacattttgaagaatcatcaagtcagtcaggagccaaagggcatattgcatgcattcaacattgccctgtgttggcgtgctgcttctctcttaaagcataagatcaatcgaagagagtcacttgccctttctgtgagaaacttgaactatgagtgcgatgaagtgctcgctgaatatgtttatgagaagctaaggatcctcaagaaaaagttttcgcgtagagcaagtgaaacaagcaagcagagccaatctactccagtaaataacacatcatcttacaaacaacagacctcaccgaaattgagaagtgacggatcaatttgtcatcaggtaacgacaattgatggtgatttggaaaatgtttcacatgaagaggctccacatgatatcttgaccgaggagatgatattagaacagaaggaattgatatctgttctagaaactcatagagaagaacatgttttaagggatgaacttcttgaaagaatcacagagaaaagaattaatttaattaacatggttttctccttaagagaaaagaatattcaggataaacaaggaaacgagaccacactgttagacatgcacaagcaaaaggaagtggcaaagctgcaagaaacatgcaatttggtcgtggaacatcttcgtaaaggtcacattgattcagaggacagggatgccacggtgaagctaataattgaatggtttactttgcttctgtatgcatttttgaatcacatgagatgccagcataacaagttgaagatgcagcaatcaacttcatggaacaaggagttacaattgaaggaaattttccttcagcaagcaaaatctggccacttagatcgtagctttgatcaacaaattcctttaccagattcatgctttactttggaagaattcagccacttcaaggaaatagttggtaatttccctgtcggtgcagctacttcagcaaattgccagcattctttggcatcaaccatggaaattgcattggtccggagtgtcagtccatctgaagttgggaattcagaagcagcgataaatggggctgttgaagttcctgtccacaccgaaaaaagaccaacatcagaagttgggttgtcgcagaacaggatggacaatgattctgatggcattgactcacaaggagggccacctctggctgttcaacattcattaagttctaatcctgcaattgacaattccaataatttggaatcttcagttgccagccatagaagcgaacatcttggggatattgcagtggaagttaatgccgacaattgtggcactactcttgcagattcacctcacttagaggcaccaactgtggctgccctgcccagccagagtgccttgccaatggctatggaagttgacattcagacagatcatgtagttcagtctgcccagcagaacatagtgacaggacgagttccacaagaagaagagcgagaaggttcgaccactgtaacatcagctcagcctttgcaacctgaaatgcgaccatcaagtccagtatccggtattttgcgtgaaagaacaaatcctgatcagaggagggaaagtcgtcagccagaggctgcacctagttcggtggatccaacacaactctttcccgtggcatcactgatgtttaatcacccaccacttggcaatgaaccattgaaaaatgagctgcacagattacaagtacacatggattctcttaataaaatctacgaactgaagaaatcacaacttcaaacggagtgcagccaagaaatcgagaagataaaacagaagtatgatttgttaattaaagaacaagactccgctcatcatcagcacaggaagacactggatgacttgtatgggaaagttctcctaaaccaatcactagctgatgattttcgggtcaaatttgtatcaacatctgcagctcaagccagagccgtttctcctccactttgccagacaactcgccagacagctggggtatctcagcaggtaccaactaggccttcggtggctggatcgattgcattgccagtcggttcatcatcagctagtcgaccatcgctgcagaggcattgtgctcaaccatcgcatgtggatcggtcatcatcatcgggggggagtcattcatcatcgccatcttcacaagttgtacgacctcccccagcaatactaggcagcgttgtcagggcaacatcaactccttttagtcacacacctgcagcccgtggaaactatggagttgggagtgaagtagcacgggcaccagctccccatctccagttcaggctgccacgagcacatcccacggcccctgtaaatcagcagcagcggcagctcccagttaggctagagagcacatgttcaaggacacagttgactcctgtgagcaccccagtaaacgcaaggcagttgagttcacaatcagtttccccggtgagcaattcatcatcatcgtcaagctcacatccaggtccagcactctcaaatccagccttggcagcaaattcaagttcaaatccagttttgagtgcaggcacagtggcattgccgccaagtccacacccacccgagtcgatagcagcaccaaggggacagcaaaagggggcaccgtcaggcttgaatacagtgcctgttgtaggctcgggtttgccgccaagtaggtccatgtcagattcggtgtcgctggatgcatggcttacatccaatcttggtctgaaggacggtgaaaccagcacacctcgcactcgcatggatagtcatcgtacagtagatgtggtgtgcttgtccgatgacgaaccagaagagcactagagctagagctagactgacctgacttttgtagtacagcagtattttcttggaatgccattttttgcctgcctggcacaaggagctgaatttggccggactggtggcttgcatgtatatgttgttactactagtttgttattagtagtaccattccattctagcttagcttgtaagctgggtgggttggggttcccttccctccaggccttgtgcagcatgcctagtaaggtctgctagggtaacttaggttgttgtaaatagtactaagtaattagtactgtacaagtaataacttgctaaccagccacccaggaagtgaattaagcatggtggtaaaaacctccttggttgcttgattggttgtagtcgacgaccttttggtttactaatatacttgtgtcaaaaaaaaaaaaaaaaaaaaaaaaaaaaaaaaaaa

SEQ ID NO: 22103 - DNA, 4845 bp, Oryza sativa
  Clone ID: TF_OsC11584_1
aaactatcccttctgcaacgcttaacctatcccacgcaaaggcaagaatgtccaaagaaaatacagagaatttatatgtacaggcgagaaaggcatctttgtatatcctcaaacaggtaaatccacccatgttgccgttcacccgagcgacctgaggcggagcaagatttctggtaaagatcccacaccatacattcatctgtttcgttctctcgttcacattaactcagtttgcaccgttctacaacttcagcccaattggatcatcgtttgcttggaaccctttgtagcagcaaaagactggccagccccacttgacgcttgtactttctggctgtgaagaccaaggaaacaaacgtcttctggcctttcttgagacaagattaaccatcttgatctcagctgctcctatccaccaggctcttgtggttcatgggcctgtgtatttcgattccgcaacttgtctttagaaagagagtcacgaggaacatatgcataccccttcggaagacgttggttctgtgtagaagcttgatcagatgtcataaaaagctccttttgaaatgtttccctattcttcttatccttcgtcttcttttctccagcttccaatttctgtgaggtaactggtcttcgcgggagctgcttaccagcaagtgatcctctttcactaaacttccgtttgaacgatatcagtgtccttgagctatcagctgtgtttatctcagcatccctgttattcagagaaaacctgatcgcctttttcccagaaatagtactgtccactgtgacatcatcagacctttgcatggttccactgtatgatttgttgttaacagaagtagtggcagattctgaacttgctccatgtgtaaggtaggagaaaacaagagtatccttcgttttggcaagtatgtcatgatcacatagaaccctctcacgcttcaccttttctctcttaattatcctctcgcacaagagtcgcaatttttccaactcaaccctcattcttttcatgttgttgaactcctcaagtccatactgttgcatatcagcctccttttgctctatgctgtgtttgctacaatatgccttgtgttgcaaaataccaccagatccttttgtgttcatgtagaaaccagcatgtctagcacaataaggatgaaaagtggtttggcagtccccattattgcactttagacatgcgccaacagtatgaaggcagacacagcaagtatctttgtcctttacaagactttccattcctttgactggactatcttgtcccctcacatactcagtctccaacaaccactcagcacagaaagcatgaatccactgtccatctgcagtctttctaaatgcacctgatgtgccatggcacagatcacactgcactaaggacaggtttgtgccattgcaatctgattgatcaccaacacaagtgtcttctggtgaaatatcttcgcaaagttcacacttccaggggccagaaatattctcaatatttctatagcaacctatgtggactgcagccttgcatctggagcagacaaatatccggttcaacacagtctcacttcgcatgcatacatcacagtatagtgcattttctttggaataatttggcatatgaaaagtgctgcggttattatcttgtgaaattttgttgttgggtggctttgacaaatccttgagtcgtagtagtgaagaagtccgctggccaacgtttggaggtccagtgccaaattttggagaattctcttgcttagcaggtactacatcatcattggcatcttttctcacagttgagttacgtgaggaggccacaactgcagctgcagctgcagccagaatggcctgggcttctttatgtctcttctcttttctcccacgtttcttagcttctctaacatcacggagaaactgattgacaaaaataaaatcccattttctcctactgaaagcatccaactcacgagagagattctggacaacctttgctattaaatcttcatatctgtgcttcagaaaggcagcagtgtcaagtagcctggcttgcaagtacagcatttccccttctacttcatcatcaggtgagtgctcaaggatacccaaggattttgctcttgaaacttgatccatcacatctgttgtttctgtaagttttatcgaggaacccacacgccttctctcatcgggataacataacggatcttcagggtgacatggtgccagcttatcttgcttgaacgtgttgtcccaaagctgagtcatcttttccttgatgagtggatggatataatagtgtgaatcattgaagttggaaaagggctgtccaggaacatgatctgcgttgcaatcatggttattcccaacaccattttcaaccaagtttaactcatgttttacattatcacctggaggaaaatattgattcaatgaagagacaccctccagctccgagccaggttcagcctcagttaagttatatcttttctttccaggagatgtacctttattttcatttggtatcgccatggaagttccaaattgtgtattgccagagatgttgttcgatatcaatcctccatgctcttcctttggagtacctttagcacaatcttcagcaggggaagaacactcacgctcagcgcctgcttcagccatcttttttattccattctgcaaaagggttgttactccagttgcacagacagctgtgttatccctcataatcttgttattatctttagatcttgttgatgaggatttcatcacagcagaatctgacaagtaagctgttgttcctttctcatcattcggaaccaatgaattcttcatgtttacactatttgtatcctcagacctgcctggtttgctattatgcaccaccattgggccccctttaagaatctttgcctgagcagctggtatatgtgcagaattttggagccacttgataattttcagtttcagaccatgggaaaaagtggtggtttcacccacaagagcagcttccaaagattctgaagaaatacccacttcagatgctacatcaccaacactaacctttccttgatcaattagctttctaagaacaagagcaacatcagcagagtttctcataaggttcccaccaaccgagagattgtcagtatccacttccatcccttggattgctagggaatctgaacttctaacagtgtggggtaaagaggcttgctctatggtctctactttgataaggttactagagttaaagctagtggcttcatagttcatgaatttatccttgttcttgcgcgtgaatcttagttttggtacctttccagtgataaggtttgcatcttttagccttgcttctgtaggactctggtgagatgcacagttacttctctctagagaattggcatatccaatagtagaatgctttgagcaaaatgctctcagctcgacattaggatacccaaattttccccatatctccatttgatgcttggactctcgtgcacatataggatgaaaaggtgttcggcatgttccatgactacatcggacacatacaccatgcttaaccttgcaaatgctgcacaccaatttccactgattctcctggacacttccaacattagtaacaggttccattgattccatgtcttccacaagagctcccggtgtccaaaggctacaaaacaagtgcacaaatttaaggttccccccatgcgctgtttgaccaggctcccctttgacaggttttagagcgcctttctcttttgggcatagaacacaaggcatcgacaaggtgttgtccgcatctttcttcaacgactgcagtgactccaaatccttacaccaagtgcacaaccactggccatcaggcacaacatgcaaaccataacacttctggtgcacagttaccttacagcggttgcaattgagcatgctattggacaccgtactactctcccccaaacaacaaacatcacatacagaactagcctcagctcccgagcgcggtagcagaacaagctgctctaaccctgcatccacacctaaaagcttcctcttcttgttgggccgttctgaagtgagcacaaaccgttcctttgatcctagcaaccaattcagtgatgattctccctcttcttcacattttgatgatacaatgccagcactgctagtagcttgctccacttccaatggccaattctcctgttgcacaaccacctcatgtatgccctgctctacactctgctcaccgcgttccttgttaccaacgaactgtcgcacaatcacctcatgtatgccttgctcaacactttgctcacttcgctcactccgttcgctatgctccttgttactgactctttcttcaccacccagacccaagtacgagcttgtttcagccacagccacatcaaatgtctcagctgtgtccatcaattccttgccactgcccacaaatggtatgaggatgcacgaatcgagcccgccatagccgaacggaaactttggcattaacatatcaatatcatccaaattcaccggccggaaatacgcctcgaactgctcccacacgccagtcttcgcagagggctccgtggctggctgcggcgggagctccacatcagccacgtcctggggctgaatcttcttgtgcttcttccgcgcgtcgctctgccccgaccagttcacgagccgcgcgggcagcgtgggaaccctaggcgccgtcccctcgccctcgaacggcgtccgcaccgacagggccttcctggcctgcgcgtacaggtccaccccgacgcccggggcggccccctccggcaagccctcggcgcgggccat

SEQ ID NO: 22104 - DNA, 3157 bp, Oryza sativa
  Clone ID: TF_OsC85093_1
ggggcaaaatggtttgcattagaaaagaacgactgtaatcgataaattagtgccatttacagggatggaagctcgcgcttctgagctatagctaaacttattttctaaatgctatgttaaagaatggggaagcaacaaagaacaaggtaaagcatataccaccagccaacccagaaaaaagaaagaaagaaagaaagaacagtaaactaatggccaatttgacatctacagtaaactaattcatgaatttacgacaattagccgtttggcagaggcaaggaactttgcgatcatcagcctcgtcagggtcaaataagtagtcatacgttagctcttcgccggctgagacatttttcttggttattaggacaatacggctcaggtcatgccccacactcataagccttgcatggaagtttggagtgcaggactgaccaatcaagagtgccaagtatcgtttatctgtggcatcaacgactacttcctcgctgattttgaaaagataccaatctttgccttgtacacgatattgttcttcccttaaatcagcaacacttcgtctgacctgctcacctctatactcgagcaccatttctccttcttgaatgcccctacgagcaaaaagtccccatctatgaattcctgacctaccaaagcatactctggtatgctctgttttctgcagatagtgtagacgctccttaaaagtagaaaaggactctggatccctctcttccctaggtggattcaaactgtcgatttcatcccatcgatgttgacaggatccccttacacggtgtgcaattgctccctcccgagatctctttagttctttcttaacataaaaccgacatcttgctgcagataagttctctgaaatttcaacttctgacactgaatccttgggaagatctttcctaatcagccttgaagcagctacagtgccattgctctgaacaagtttttttgaagagatagttccagcaggagtttgaattatcaaaacattgtcaggattaggggcccgatgatgagcacaatatgaaatcttgtttgttgtctgtttgccgtttttttccaagcagcgtatctccatcctatagcctgcccttgatgcacagatggcatggtaataagttgagcacctgtagcactgtgtacacgaaccatgtatttgcctacaaatgacacacatcttcatgaatagcaaaggcgtaatattcaatatcccaatagcaggttccatcagctcatcactagcaaaagcaacttgtggctgaaaccatgcacatgtcacatgtacccacaagttatcaacatttgttggcttcagtgcaccaccttttacagggcaaagacaacactcccttttttgatcaggtgtttcacaagccctacaaacccatgaggtgaagtcttgctttcccctcacgccatagcattcctgatgaactgctatctggcatctgttacagattacaattttgttgtaatcccagtcttcaacccatctacagactgcacatctttctgttgtccattttacatttacagtatcatatggttcacttagcaaatcaagaagcttttgtttcttcattttctgagaggagcgctttgcaggatttgtggaatatgaacttgattgatgttgctctatccattttccaaacggcataagcgtgtccttgattttaatacttgacttccagtttttacttctgcagccagcatgccgttcccattcattgaacaaaaatttttgtcccttgcatggaccacaatggcaagaaattagttcaagatctcgtaggtaagttccttccatgccaaaacagataactgcaactttgtcaggcttgctacttttccatcttcctccacatttatgttgccagcttttcaaacatacaccacaatactctttggaccgcagtatcttagcacactgtctgcaagcaagttgttccattacatacaccatcatgcttgggtctttatttggaaagcaatttccacaactctcacattgaagtgctcttttgtaacgtgcaggctgtcctgttgtgttgccatccattggaacttcgaagaatccctgatcagccaaaaatgcctcttctaatgccctctggaaatcaccaggtttgcaactgcttagttctgtctgcccttgaaatcggtccatgtagtccacaaatggaaatatccctccttgcctcacccagatgaacttcttctcatcaccgaattctgcagcccagccgaacagcatcacacaaagcacagcaccgctgcgtggctgtggtggcaatgcctgggcagcagctggctgtgctggatcgaccaccacccccggccacaccggctgccgcttcccgagccttgcccacacaatgtcgccatacacaaaatcattcctccagtaagatagctcttcctcctcctcctcctcctcttcttcttcctcctccgcctcctcgtcctcgtcatcgtcatcgtcatcgtcatcgtcatcgtcatcgtcatcgtcatcgtattgccttttcatcagtccctttctatggtaatagctgtatggttcaccgtgtacagaagtgaccgtgctgagggacatggagtacttcctggaggcaacaaagttgtggccttcctcataatcatcatcgccattttcatctaactctgacattgttagactcctatcagcaattgcacctttgcgatataacacctcgcttttgggcactagctgcacagccttggccggaacaggtggcttcgccggcttatccttcttccaggggtcgatgagcaccgagtcgttgaaccgcgagggcagcacctgggccctcccgcgcgacgtgcgcaccaccggcggtcgagacgccgccgcggcggcggctgctgcccgcgaggcagcggccggggacgcgacctcggcctcctcgcaccagcggaacccgaaggcggcgtaggggatgccggcgaccggcacgtcgccgagcagctccacggggaagaactcgtcgcccctccgcctcttgggccgccgctcgccgccgtccccatcgtcctccccgaccccggcgccgcccccggcattgcaccgcctcagcgagaggatctccgaccgctggttccgcttaaagatcat

SEQ ID NO: 22105 - DNA, 5091 bp, Oryza sativa
  Clone ID: TF_OsC12404_1
atggaggggttggtggggagggcggtgaggaaggagttcccggggttcggggtgttcgacggggtggtggagtcgtacgacgccgaggcggggtacttccgggtgatgtacgaggacggggactccgaggaggtggagcttggggaggtggtggggttgctggttggtgggtcgccggttggggtggagatggcgcatccgctgccgttgacgcccgggcggcgcccgaagaagcggcggcgcggggatgaggaggggggcgttggcgtgggcgcggtggtggcgatggaggtggattccgtggttctggctgtccccgccggtggcgcggagcccgcgtcgccggtggtggtggtggaggggagtagtagggatgaggtggatggggacgtggtgtcggagatggcggagaagaggcggagggtggtgagtccagggcctgagtcgtccgggaagccgcttcggcggagcgcgcggcaggcgaaggcggccgcgcgggtggccgaaatggaggccgccgccgctgtggcggccgccgctgaggctgaagcagctgctgccgcgatggccgaggccgaggcagaggctgctgttacgccaccgcagtctgggagtaagcgtaagcgtgcaagcggggctggcaggtatcggtctgtcgcgaaggatttggagaaggctgcggtggagaggctgcctccgaagccggagcttccaccctcgtcgcagagtttggatttggaaggtctccctgctctcgacgtctttcaagtgtactcctgcttgaggtcttttagtaggcagctgttcctgagcccgttcctgctggagacatttgtggctgcactgcggtgtatatatgtgaaccctttgattgactgggttcatttttctctcctgcgagcgatgaagagtcacttggaagatctcgccaatgaaggagaccctccggcaatgcattgcattaggaatcttaactgggagcttttggacctagcaacttggccaatctatcttgctgagtacctattgactcgtggttcagaactgaggtatggtatgaagcttacagacctaaagctgttgaatacagagtactatactcagccggcaatggtgaagttagagttactgcgcgcactctgtgacgatgttctggaaattgaggctatacgttctgaagttgtttcaaggatgtctgagttggatgggaatgatgagctttgtaaaagcactcgtacaagaagaaaaaggagggcttctgctgtcaagaacctactgaattcttctcgggctcctgaagattccagtgacactgaagatggtaacagcgatgagtgttatctttgtggcatggatggtaatttgttatgttgtgatggctgtcctgctgcatttcactctaaatgtgtgggggtagtggaagatttattgcctgaaggtaattggttttgcccggagtgtttgatacagaagaatgatggattcaaaaatatggtaaagcctggaagaggagctgaggttctgggaatggatccacatgaccgactatactttggcacctgtggctatattttggtggttgagtcaactgctgaggattctctggactcgacatgtcattactatggcatttttgatcaccattcgcttttcaatgtgctaagaacatgccatccctcgtacagttcaatcactaacatgatatctttgttttggggcactgcaattgattcttttgattccaatggtcgatgtgaaaataacaaggaattcagtatctttgatgccaagatagactgtagtcatttattgccatcgaagcaacacacagaacatgagcagcttaagtcagataagaatggctcctgtgaacaattggcctgtgggaaagctcatgcctcggatccagatcggctggatcatgacacctctcaccacaagttctccttgagatctgcggttatttctgaaaatggaaatgcaactagtgccaagactcagcaagatgtttgttcttatgctaatggattgcctgctgagaataagatagaccaatcacctcacaaaaagataagtgattgttatatccattcgaaccctgctatgtacgtaaactactacagttttggtcaaatagcagcatcagctgctgaagagttgaaggacaagctatcggaaaacaaagaaggaaagaaagttggtcaggatgcagcttcattccagctaaaaacaatatgtaagaaatatgccaatatttttgctctgacagatcaaaagttgtctgtagagctgcgaaaggaaaaatgtggttggtgtaattcctgccaaatcagtggcggtgttgattgcattttcagagtcaccgatggcaaatgcatggagggtcttcagtcagaaaagaatatgaacagccatattattcttgccatacatatcatcttgtcaattgaagaacggctaaatggtctactgattggtccatggaaaaatccccaatttagcagttattggcgtaaggcagttctgaaggcttcagatgtgtcatcattgaagcaacctctccttatgttggagtgcccggtgcgacgtgttgccttctcagtggaatggcaaaaaccagcagactctgttgaagttgttgggtctgcagctcatgtcttggttcgtacatctaataaatcctcgagacatggaagcactagaaagccagggagaaagccatttattgttgaactcaaagttgactctcgtgatgttggtgtttactggcgaaggggtgggagattgtctcgtcaagtgtttcactggaagaggttgccaaagtccttgacatataaagctgttcggcaagcggggcgaattaaaatcccaaccatattatatagtgatggttcacagtttgccaggaggtccaaatacatagcttggcaagctgctgtggaaatggcagaaaatgtggcccagtttattttgcagatcaaagagcttgaattcaatatcaggtggactgagatattgagcactctccctgctagccttgcaacaaaggaaacccagaaaatagcacgtcttttcaagaaagttatagttcgcagaaagcgtgtagatggaacaaatgtggaatatttacttgattttgggaagagggagaatattcctccagttattgctaaacatggaaaaaaacttgacgaaccctctaatgagaggaacagatactggttaagtgaaggacatctccctctgagtcttttgaaggcatatgaagctaaagcattaactcgcttactgaaaaagaaagatattgatcaccttccaaagaagatgattgacttgaaacccccaaagccaaaaaaatcaggatttgatgatctcctagaaaaagcaaaaaagcaagtccttgggctttgtggccattgtgacaaagaagtaaagatcagtgatgctgtgaactgccaatattgtgaagcacttttccataaaaagcacttcaaggttcctagaggtgctactgatgcttattatgtttgcaacaagtgcctatctgagaaggtcttgaatgtgaagtctccacagaaaaaggttgtatcaaagaagaactctctgaaaaagaagacaaagaagcaatcacttaagattgtaacaagaagtaaacagattgttgccaaatccaagaagaagatgggcaagaataagggcaagcgtggccgacctaggaagtacccgctgaatgagtcaaagaataaattgccagagttgcgtgtgaaagaaccagccaatgtgcccaagaatgagccagctaaacgtatatcaaaaagattatattcaaagtacatgaaaggcaattcaaatatatctgagcgttcagcaaagaggaggaggactgcttctcattattcatactggttagatggccttcggtggacacaaaacccaaatgatgatcgggcaatatcttttaggacagaaagagttgtctttccctgcgaagatgctgatctgtctgaagtttttccagtgtgccgtctatgccagaaatgctacagtggagaatctatttatattgcctgtgaagattgtggagattggttccatggagacatctattctattactcttgagaatgttaataatctcataggtttcaagtgccatagatgccgtttgaaagatgtacctgtttgtccgtatgtacaaacagataatatccttatggctcaatctgataaggatgacgtcacaagcagatctatagaggacaaggaagacaggagcccaacagatctggttgcccatgacagtctggaagggtctcatggtcatatcattgagaaagaggttaatgatcatagttttgaaaaggaagttggtgatcatatttgtttgcaagcgcaggaagatcataatgaaaaggagctcgacagtcatagcactgagaaagagctcggtgatcataacaagacggaagagtttgatggcaatatgaaagtgctatttaatcttaacagtacaaaggagcttgatagtactagcactgagaaagagcttggtgatcataacaagatagaagagtttgatgtcaatatggaaatgttcttcaatcttaacaatacgaaggagcttgatagtactggagaaagcatatgtgctggtggagaagcacactgtctgcatgagctcaacaaccatgaaattcttaaggagtgtcatagtcttgacaataacctgggtgaactcgataatcaagactgccaaaaagagtgtcataatcaaaatagtctaaaagagcttgaaaatcatcgaagttcacaagagcttgatagtcataaaagtccagaagagcttgataatattataagtccaaaagagcttgactgtactgaaaataatgaacactctgctgcagtgacgcagtcggatggttttcttgatgaccccttcaacattaggatatctgacaaaggactgatcatagcatcagaaaatggtaagataaaggaatctattcctttgcaaaccaagaataaacctgaggagaatcctgttcctgctgatcatgacattgatcttcaggtggtggtgactttatag

SEQ ID NO: 22106 - DNA, 2474 bp, Oryza sativa
  unsure (1)..(2474): unsure at all n locations
  Clone ID: TF_OsC54697_1
atggtggtgaacagccggccgctgaagagggcgaggacgcgggtggaggccagggacttcgctgggttcccgcaggcggtggacggcggggctgccaggacgttccggtaggcggtgagggggttcctcgcgaggtacgcgcggctgctgcctctcccctctatcttctcgccggcggccgccgcggcaccgccgcatctgttgacgtggagggtgtcgctgcgggtcggcgaggagggggacgaggagggcggcggcggcgccgtggagctcaacgtcgttgaggaggatgtgctccgatcgcgatctgtgtattgtgaccagtgcagagtcgtgggatggagtggtcacccggtctgtgggaagcggtaccatttcatcatcgagaacgacaacaaccaggtgtgcggcaagcgccacagctgctgcctccgctgcgggactcccacagtcgctggagaatcaagatgcctcctatgcaactttgatatggatggcgaggagctggaggagtgcgggtacatgcatctggacgacaacacccacctgctgcacgctgtggtgcatgcaaatggttatggccaccttctgagggtaaatggccgtgaaggtggctcaagatgtctcacgggccgtgacataatgagtttctgggatcgcttgtgcaaggtgctacatgtgaggaaagtaactgtcatggacatatccaagaagcatggaatggaatacaggcttctgcatgccatcacaagtggccatccttggtatggtgaatggggatacaagtttggcgctggtagctttgcactaacctcagatacttaccaagaggcagtggatacgctttccggtatacaactcgcgttgtacttctcacatcgccagcccattcggacccctctgcagaacacgattgctctgtactgggcactctctgatcgccagcttgtgactgttcgggacctcttccggttcataatgcacctgcttcatcaagcacgcaagaagaacgagacatcaaaacccacaactgatgaacacaaagaagttgcatctaatgtgctctgcaagtggacaaaggaagatattgatcgggcagaaactgcaatgctcaaggtcctacgggttgttcagcctggacagtgggtatcatggcgtgcacttcggggagctgcatcgaaggctgttgattcacaggagctacttgactattctcttcgaggactgggtggaaaactgatggacgatggccatttcatagctgtccgctgcaatgctgagacgagtgcaattgaatacaggctggaagataactccaaccagtcagttgatgcggctgcgtttgggccttctgttgatcatcttctgcacgatctgaagttcctctataacgctttgctgaacccagaaaccatgttggcttcacagccagaggttataggtgcatcatcacacagtgcagcagcaaagattctcgactgcaagcagttcatcaaacattacgatcagcacaccccacgggctcctttgaacccattcctactttctgtgaggtgttccattgaacttcttgatcacccaaaagactacactgcaccaccggtggaactagtgcttttaccagcaagtgctacccttgctgaactgaaaatacaggctacaagggcctttcaagaaacatacctcatgttccaaagctaccaggttgaacagctccctgacttcccaaattttagtgacacaaccctcgtgaagcatgtgcttggctcaagccagctcgtgagggtaagaggaaggtgcactggggataaccgaagaattgtgcaattcaggatggaaagggggttggagaactggacggtcgactgcacctgtggagccaaggacgatgatggcgagaggatgcttgcatgtgatgtttgtggagtttggcaacacaccaggtgttcagggattagtgattttgatgatgtccctgagaagttcatctgcaggaagtgtgctagtccacgcagaggaaagggtcgtggtggtggaggtggcaatggtggtagcagaatggatgtgagcgctgcagggaggtgcaaggatgagataggatcatctgttggcggtgcaggcaaatttgggcgcatggcaactgttggatgactgtacataatgtgtgaaatgtaaatactgaggggagagtggggagtagcacctgaggcctgtgtgaaccttcatggaatcttgtctttctgaccagtgatatgatgttaatctatcctccttggaagcaaaaaacaaacagaattgttcagcacgctcaattccattcaagtgcagcataaagagggtgggatgaaagatgacaatcttgaaatgaataataagatatctaacgaacactcattaaattcttccaggcttccatgtcgtggctttacactatgaaaggcagccanatagtagaaagtggctcgtgccgaatt

SEQ ID NO: 22107 - DNA, 567 bp, Oryza sativa
  Clone ID: TF_uC-osflM202003g05b1
attattcttagaaaggattgcttccaaggaggatagattaacatcatatcactggtcagaaagacaagattccatgaaggttcacacaggcctcagcgctcacatccattctgctaccaccattgccacctccaccaccacgaccctttcctctgcgtggactagcacacttcctgcagatgaacttctcagggacatcatcaaaatcactaatccctgaacacctggtgtgttgccaaactccacaaacatcacatgcaagcatcctctcgccatcatcgtccttggctccacaggtgcagtcgaccgtccagttctccaaccccctttccatcctgaattgcacaattcttcggttatccccagtgcaccttcctcttaccctcacgagctggcttgagccaagcacatgcttcacgagggttgtgtcactaaaatttgggaagtcagggagctgctcaacctggaagctttggaacatgaggtgcattatgaaccggaagaggtcccgaacagtcacaagctggcgatcagagagtgcccagtacagagcaatcgtgttctgca

SEQ ID NO: 22108 - DNA, 5441 bp, Oryza sativa
  Clone ID: TF_OsC15358_1
atgctcgcgtcccgcatcccgctcaagcgctgcaccgccgccgccgtcgtccccctccccggggagttggagatggaggaggggcccaccccccccgccgggggtggtgaggggagcggcgcggcggtggtgcccgccaagcgccgccgcgagcgggtggtcccctcgcggtttagggactcggtggtgtcgctgccgctgccgcccgcgaagaaggggaggcccgcgaagaaggcggccgcgcgggagggcggggacggggaggtgtacgatgtggaggtgcgcgcggtggagcaacaaggcgcgacggcggcggccttcggcgccgtggagaccgcggtgtggcccggcgacgagcggccggcgcagacggaggaggagctgtaccgggcgtgcaggaatatccgcaggagcagcagctccagcgggttcagcggcagcgtggtgacgtcgctgagcaatgccggcgggagcgtggcgccggaggggaagcccgtggtggtggtggagtgcaagccgaagagggagggcggcgataaaaaggaggatttttactggccggaggatttcgtgctgggtgatgtcgtgtgggcgaggtccgggaagaagtgcccagcatggcctgcggtggtgattgacccactgctccacgcgccagcggtcgtgttgaactcctgcatcccgggtgcactctgcgtcatgttctttggattctcttctggcgggcatggcagggactatggatgggttaagcaagggttgatctttccatttgtggactacttagaccggtttaagggtcaggctttatataaactcaaggcaaacagattccgtcaagcaattgaggaggctttccttgctgagcgtgggttttgtgagctcgaaacggatgaggggtgctcactagagaagtctgtcaatgaccagtctatccctgacgggttactggaagggagtggttctaacaatgagcaggaatgtcaatcggaggctcaggttgttggcaaatcaactggatgttgtgatagttgtggtaatcgtgttccacccaagatcgcgaagaaaaagaagcaagcgggagagcagttactctgtagacactgtgataagctattgcagtcaaagcagtactgtggcatatgcaagaaaatctggcaccacacagatggtggaaattgggtttgttgtgatgagtgtcaaatttgggttcacgtagaatgtgacctaacatgcatcaacatggaggacttagaaaatgccgattacttctgtccagattgcaaatcaaaacgcaagacagtacctcctgttgaacaaatgaacactccgaacagttcagaatgtgctagcacttctaaggaaaaactgccggaaatgatacctgtgttctgctttgggatggacggaatgtatttacctaagaagcacatgatactatgccaatgtaattcttgcaaagaaaggctgatgagtctgagtgagtgggagagacatactggttcaaggaagaagaactggaagatgagcgttaaacttaagagcaatggggatccattggtaaccttgttggatgatattccctgcgcaaatgtgaagtcttctacaccaagtattaataaagaagagttgctgaaattgctaggtacattggctcttgagtttatgttggtttatgcagttgcaaattcttttagacctgtcaatgctagatggacaactgaacgttgtgctgtttgtcgatgggttgaggattgggactacaataaaattattatttgcaacagatgccaaatagctgtccaccaagagtgctatggagcacgtgatgtacaagattttacaaattgggtctgtcgagcatgtgaattgccgaaacaaaaaagagaatgttgtctttgtcctgtcaaaggcggtgctctcaagccaacagatattgaccaactatgggttcatgttacatgtgcctggtttcaacctaaagtctcttttcctgttgatgagacaatggagccagccatgggcatattgagcatcccttcagagtactttaagaaggcatgtgttatatgcaagcagatgcatggtgcctgcactcagtgctacaagtgctctacttattatcatgcaatgtgtgcatcaagagcaggatatcgcatggagttgcaatactctgaaaaaaatggaaggaacataacaagaatggtttcctactgtgcatttcacagtactcctgacccagataatgtcttgatagttaagacgcctgaaggagttttctcaaccaaatttttgccccaaaataatgagaaacagagtggtacaagacttgtcaggaaagagaatctacaggagaaagtccttcctgctaaaatttctgactgtccagctgcaaggtgcctaccttatgaaatgctgaaaaataagaaagaaccaggagaggcaattgcccacagaataatgggaccccgacatcattcccaagagtcaattgagggtttgaacgcttgcatgaaaatagaaaacaaaagggtctcttgtggtcgatctggaatacatggatggggactctttgctgctaagaaaatccaggaggggcaaatggttatcgaatatcgcggtgaccaagttagacgtagtgttgcagatttgagggaagcacgatatcacagggagaagaaagattgttatctgttcaagatcagcgaagacgttgtcgttgatgcaacagagaaagggaacatagcccgcctaattaatcactcgtgtatgcctaattgctacgcaaggatcatgagtgttggcgatgaaaagagccagataattcttatcgccaaaagagacgtctccgctggcgaagaactaacctatgactacttgtttgaccctgacgagtccgaggactgcaggtttttctctgcagttcagtttcagtttcagataggccgtgagtggcgctgctgcagccacccgagagttgaaacggacctcaaaacacttgctagaagattttggaaagttgctgccccttactggtggtcagaagataaagtgcaagcgaggctgaggcttgctgcagtatttgctcttacattagcaactactggaattagtgttggatttaactttctgggtcgtgacttctacaatgcccttgctgacaaggaccaggaacaatttaccaagcaactgctgtattacttgggaggttttgctgtaggaataccgattgtttatacaagaattatatcacatatcactagattttccttctttgtcttgagagactatgcaagggagaccctttctttaagatggcgatcttggatgacaagttattacatgaagcgctactttaaaaatagaactttctataagattcaatctcaatcactaattgataacccggatcaacggatcaatgatgatctcagtgcattcactggaaccgcgcttgcattttctctgacatttttaaatgctgccgtggacttgatatcattcagtaacatcctttatgggatctatccaccattattcattgttcttattgtctactcccttgggggcactggaattagtatcttccttggtaaaaatttggtcaacttgaacttcatgcaagaaaagaaagaagcagattttcgttatggacttgtccgagttagagaaaatgctgaatcaattgctttttatggcggtgaagaaaatgaattgcaacttttgttggatcgattcaggagggcttttgaaaaccttagcgaattgctaatagcatctcgtaatctggagtttttcaccaatggctaccgttatttaatccagatcctgccagctgcagttgttgctccgatgtacttctcaggaaaaattgaatttggagtaataaatcaatcagtgtctgctttcaatcatatccttagtgatttttctctcattgtgttccagtttcagtcaattagtgcattctcggcggttattgatcgtctaggtgaatttgatgatctgttggatggaaatggttcatctttatccaagcctgataacattgatgggatcaacataattttcaagagcactggtcctactgtactgagttccaatggatcaccgacacaatctaatccatccatggttcttgagatttgtaatttgacattattaacacccaggagtggaaacattcttattactgacctcactatggaactcaaagaaaaggaccacctactggtaatggggcccagtggaagtgggaaaacctctttgttacgtgctttggctggcctttggaccagtggtactggggacatcatataccatgtgagaggttccatggagcttcaaacatcaaattcaggtcctgatgagccatccaacatacagtcaaacggtgaagaactgctacaaagttcaaagcagagaagggataatggtatattctttgttccacagagaccatatatggttttgggaacccttcgtcagcaattgctctatcctacatggactgaagatgtttgtcattcatcaaataatgatcctcaaagtacagaccctcttacctttgaagtctccacatcagatggagttggttccaagtctgagatgcccacaactgatgaactgatcagagtacttgaggctgttaagttaggctatatattgcctcgtttcaatggtttggattctatgcatgattgggccagcgttctctctctgggggagcaacagcgtcttgcatttgctcggttgttacttgcaaaaccaactttagtcctccttgatgagtccacaagtgcactagatgatatgaatgagcgtcatctatacagtcagattgaagctgcagggattacttacataagcattggtcaccggaaaacactgcacaagttccacaacaaggtcttgtacatttcaaattccgattcaacggatagcaacccacgtaattggtacctaaagcccacagaacagatgtcgattgaagagtcatcctcatttgcttcataagaatttcatgatttgagcaacatttgcccctgagcagttttgtcgcaagatttcacccatacgtgaagtgtatggtgcccagccaagtacccaaaatatgtcatgctgattgttctaaagatgtgatgcttgagtagttgagttgtatgaccaaaattgctagtatgctacaaaccaactcgaggcgtggcacagattttagcacctaaaggttgaaagggaagctcatctgttcttggatcgttataccacgaagttcagaatgaacatcatatgtagatatgcagtcctctgatctttttgagtttcttttagaaatgacgacggaatatctgaaactgtctctttgttattacgtgtgtggtgtgtccttgtaactatactgggaattacagctcttatatacatgcagtgtgtgcagactc

SEQ ID NO: 22109 - DNA, 3084 bp, Oryza sativa
  Clone ID: TF_OsC247488_1
atgaggaagggaatatgcaccgggcatattacttatacggggcggacacgaggcccaataacggagggcaaggaagcatcatcggcaatctgccgaggaagcgccaagcgtgaaaacggaacgacatggacgatggaaatggatgggggagatgaggcgaccagctcaggcacaagggaaaaccttggtatccctgaacgcgctgcaagatatggcgcatcattcccgtgtgtggaggagcatggagagaccaaagtcgggcaggccggggtccaggctcctagtagagaagaatgttcaccgggattcaagtggcagtggatcacccactacaggcactcatggggaagccggagggtgtgcgactgcgagctagggtttggggcggcggggagggggagggggggaggattggcggaggcggcggcggcgttggaggggttccttgcggatccatggctgctgaggccggcggcggcgggggagggggtgggggtggaggaggagggaggggtggcgacggtgcaggtggaggtgccgccggtggaggcggcggaggagggggaggaggaggccggcagggcggccgtgctgcggcaggcggccgccgcggaggactacgcgcggaggctggagggcgccgccgccgcgggtacgggtctcaggtttatgccaaatggattttcagtgcttcttacgctttgcttttttatttggggtgtagatacacacgactatgatgttgtcaagttggaggaaggagatgaagaggactggggccaagaagatgtgggcaatgctgctgtcaaggttatgtgtcgtatatgcttttcgggagaaaatgagggtagtacaaaagctgccaaaatgcttccatgcaaactctgcaacaaaaagtatcatagaagttgtttgaaaaactggggggaacatagagatcttttccattggagctcatgggtctgcccctcttgccgcagttgtgaggtatgtcgacgacctggtgatcccaacaagttaatgttctgtaaaaggtgtgatggtgcttatcactgctactgtcagcaaccgtcgcacaagaatgttacccatggaccatacttatgtccaaaacatacaaggtgtcacagttgtggatctggtgtacctgggagtggccatagcacaaggtggtttctgggttacacatgctgtgatgcttgtggacgattatttgtgaaaggaaactactgtccagtttgcttgaaggtttatagagattctgaagtgataccaatggtttgttgtgatgtttgtgaaaagtgggtacatattgagtgtgatggcatcagcgaggaaaaataccagcaatttcaatcggaccaaaaccttcagtacacatgtggagcatgccgtggcgaatgctcccagattagggacacagaagatgctgttagggagctttggaagaggcgggatgtagttgatcatgaccttatggctagtttaagggctgctgctgcactgccttctttggaagatgtctcaccatctcatcctaactcagatgatgaaaaacttggtgcatatgtaatgaaaaatgatggtagaaacacactcaaattctctttcaaaagcaacagtactaagcctgcattagattcatctgaacaagagaagaatgctatcaagagctcagggtcaaataagaagcattccaagaagaaagggaatcaaaataataaaacagttagcgagcaggatgagatatttttggagaaaaggaatgaaactaaatcattgggtagtttgggagatcaaattgcagatgttactcgtgataagagttcatttaaaaatgatgccgatgcgtttgtgctgtcttcagctcaaagtgcagagaaggctttgaaattacaatctgccaaagctgcagcacataatgctgatatgatacccaaagtcaagattaaaggaactaaggttccgagtttgcatttcaaggatgtaggcgaggaaaatgctgccaagagtgacacagggaaaggtaccaagttggttattcatatcggttcacgacacaaaagtaggagtggctctcccaagtctgaaatgtccaattctcagaaagagcaagagctggtttcaatgcatggagggaaagttgatgtgacaagccagttcaaaagctctagaagtgaaataaaagaaaaaagtgtaatgaagctagttagagagactggagtacaacaaaatagccttctaggagatctaggtgcttcaaaaaagcatgcaaccggaaaaaggagcaatgctatagtttctgcaatggaaaatgcaagtgaaagtggtaccagaagcagatcgtttggacaaaaacaatctgttaatcatctgactgagaaccaggggaatgcttcattttctgtgaacaactctcctgacagcttgaagccatcattgctcaagcttaaatttaaacgtccaatttttgagcagccaagcactcagtcttctcaaccagaggagccgggcacctgggcttcaccgcaagaggagttaaatgttgctaaaggccagagatcaaagaggaagagaccttcattagacaagatggatggttcggaaagtaaggctccagctgccaagagacatgagcagagcacaggagaagaagcaatggatgcgaactggatcctgcgcaagttgggcaaggatgcgattgggaagaggattgaggtccagctagcttctgatggcaaatggcatcagggggtagtctcgaatgtaatcaatggcactttgtgccttcagttagataatggtaggtctgagaacatagagctgggaaagcgggcaatccgcttgatagcacaaaggtcacataccggaaagcgattaacccattttgcgcctcaggctccagcatttggatcgtcgcagtctctgattcatgggagattgggaggtctgaagcgcattggcttcattttgacttctggtagtgtaggaacaaacaactgggaaggctttttaggggccaccctggatgtagaagaaatgcctgatgatggccatgtacatgtagctgtagctgctgaatga

SEQ ID NO: 22110 - DNA, 593 bp, Oryza sativa
  Clone ID: TF_rsicef_7783.y1.abd
gcacgaggcacctatgtggatagtagttctgaagaaagtgaagatcaacaggtgaaaatatgtgacatatgtggagatgttggtgaggagaagaagcttgctatttgcagtaggtgcaatgatggtgctgaacatatttactgcatgagggtaatgatgccagaggttccagagggtgattggttttgtgaagagtgccgaactgagatgcagattgaaaaagaaaagagcatacttgagaaatctcaagtgaaggttagtacaatttctgtagggagtaaggtgaaggctgcaaatgtgagtagtaaagacctaaatgtgagtaatacatccagtaagagtacaaaagaagatgcagaggaagggattgtccctagtggctgtacttctacaggaaaggaggaagacggtagatcatgcattggtggcagtgaggctgctaataaaaacgaagagcagacatccagtgggagaaatgatgattttaatttgaagatactacatggagagaggcatatgcaaagccacaataatgatgttccatttacatccgtggctcatgacatatctaatatggctgtaaagaataaaag

SEQ ID NO: 22111 - DNA, 2662 bp, Oryza sativa
  Clone ID: TF_OsC348_1
accaccaccaccactctcgctcgctccccccactcccactcgcctgaaaccctagcaaggagctcccggcggatggacgagggaggcggcgctggtgctgcggctgccgccgccgggaacgcggcgggggcggcggtgcaccacaacgcgcggtccgcggaggacgtcttccgcgacttccgcgcgcgccgcgcgggcatcgtcaaggcgctcaccaccgatgtggagaagttctaccggcagtgcgaccccgagaaagagaacctgtgcctttatggattgcccaatgagacctgggacgtgacccttccagctgaggaagtacctcctgaacttccagaaccagcactgggcataaactttgctcgtgatggaatgatcgaaaaagattggttgtcgctggttgcagttcatagcgatgcatggctactgtctgtagcattttactttggggctcgctttggatttgataaggaagccaggagacggctcttcaccatgattaatggtcttcccactgtatatgaagttgtgacgggaattgccaagaagcaaacaaaagtctccaacggcagcagcaaaagcaacaagtccaaccctaaaccatcgaagcaatccaattctaacagcaagcctgcaaagccacctcagccaaaagatgaggaagacagcggcccggaaggcacagaggatgaggaccaggcttacatgtgtggcgcttgcggagagacttacgcgaacggtgagttctggatctgctgcgacgtctgcgagaagtggttccatggcaagtgcgttcggatcacccctgcgaaggcagagcacatcaagcagtacaagtgccctggctgcagcagcaagaggagccgagaatgaccacgggaggctcccggttgacatgttttagaatcgttaggaattggtgaagaggcggagaaccgcttcacccgcaacctgctgccgtgcagcagcagacccggcgtgcaggccggttgttgtattagtttcagtcattgtgttgtacccgacatggtaagtagctattgtatttagcaggcaggcaggctaactgctgtggtcgtagtgtgatgtgaacctctctcgctccccccactcccactcgcctgaaaccctagcaaggagctcccggcggatggacgagggaggcggcgctggtgctgcggctgccgccgccgggaacgcggcgggggcggcggtgcaccacaacgcgcggtccgcggaggacgtcttccgcgacttccgcgcgcgccgcgcgggcatcgtcaaggcgctcaccaccgatgtggagaagttttaaaccatctttttttccctcttattattactgtacatctgccgaaagaaatcctttcttgcagacgacgaatcaacaaattttacagcggaggagaggagatcgtatcatctcgctgccaccagcggcagcgagggtgttttgttgctgggcatgtccatgtcgagctccaggccgaagagcacgccttggtaggcctcgacgccatgcttgaggaagtagagctcccgcatccgccggaagacgtcccaggtgagcaagctgtcggaggcggcctggtggcaccgccccgccgcgcgcttcacctgcagcgccgccgccacgcgctccagcccgccgtacagctcgccgccgcagtgccgcatcatgtgcttcacgtcgtacacctcgtcgccgaagaagacgcgcaccaggttcaggaactcggccatggacctcggcagcttccgccccatgaggagcttgaccaggtaggcgaagtcgtaggcggagtggaaggtgacccacttgacggcgccgtgggagcagacgaggcccgacgacatgagcagcggcgccagcgcgctcgccctgacgccgtgcctgcggtgcgcggcgaggtccacgccgtgctccgccagcagctggacggactcggcggcgtggcggtggacgcgctggtcgaagtcggagaggttgatctcgaaggcgagcgcgggcgccgcggtgggggacgcggcgagggtgatgcccacctggatgaggtggagcgcgtccacgttgcggcggaggaggtcgtaccggtcgccggcggtgagcagggcggggtgcttggtcgggcggtggatcacgccggggaactccgtgtccatggacacgtacgggaagtgatcgatcgcgttgcggatgatccggaattcctcctccacgttgtgcgcccacacccggcgtatctccaccggcggcgcaggctgcctcttcctgccaacgccggcggcggcgaactccgacggcacgaacgccatgccaggcggcggcggctgctgcttcttccgacaggcggcgaacaacaactccggcggcggcttcttcctggcggcgacaaactctgacggcatgtcttaactcaaagattggatggatctcggcaacgaattcgaagcgcgatgagcaattggaatttggaaaaattcggaccgaattggagatgcgagttcgccccgtatgagaaagttggatactctcggtgttcagtagtgattaagttatgggttagtgtgtatgattctatgataactgcctcccctttcatgaggtttctaccccaaactccccttaatataatatataaaaaaaaaaaaacaaaaa

SEQ ID NO: 22112 - DNA, 1180 bp, Oryza sativa
  Clone ID: TF_OsC348_2
cgctccccccactcccactcgcctgaaaccctagcaaggagctcccggcggatggacgagggaggcggcgctggtgctgcggctgccgccgccgggaacgcggcgggggcggcggtgcaccacaacgcgcggtccgcggaggacgtcttccgcgacttccgcgcgcgccgcgcgggcatcgtcaaggcgctcaccaccgatgtggagaagttctaccggcagtgcgaccccgagaaagagaacctgtgcctttatggattgcccaatgagacctgggacgtgacccttccagctgaggaagtacctcctgaacttccagaaccagcactgggcataaactttgctcgtgatggaatgatcgaaaaagattggttgtcgctggttgcagttcatagcgatgcatggctactgtctgtagcattttactttggggctcgctttggatttgataaggaagccaggagacggctcttcaccatgattaatggtcttcccactgtatatgaagttgtgacgggaattgccaagaagcaaacaaaagtctccaacggcagcagcaaaagcaacaagtccaaccctaaaccatcgaagcaatccaattctaacagcaagcctgcaaagccacctcagccaaaagatgaggaagacagcggcccggaaggcgcagaggatgaggaccaggcttacatgtgtggcgcttgcggagagacttacgcgaacggtgagttctggatctgctgcgacgtctgcgagaagtggttccatggcaagtgcgttcggatcacccctgcgaaggcagagcacatcaagcagtacaagtgccctggctgcagcagcaagaggagccgagaatgaccacgggaggctcccggttgacatgttttagaatcgttaggaattggtgaagaggcggagaaccgcttcacccgcaacctgctgccgtgcagcagcagacccggcgtgcaggccggttgttgtattagtttcagtcattgtgttgtacccgacatggtaagtagctattgtatttagcaggcaggcaggctaactgctgtggtcgtagtgtgatgtgaacctctatgagagagttggatactctcggtgttcagtagtgattaagttatgggttagtgtgtatgattctatgataactgcctcccctttcatgaggtttctaccc

SEQ ID NO: 22113 - DNA, 4738 bp, Oryza sativa
  Clone ID: TF_OsC11017_1
atgccaccggttgcgtccggctccggccggaagaggcagctggtgctggagtccagcgattcggaggcggatgagttctttgtctcgacgcggcgcaaggaggatgatgatgatgatgccggaaatgccggcggcggaagcggaggaggtggtgatcagggtggggaaaaggtggtgactgttagtcctgagaaggtttctggtgccaagtctactgatgaaggaggtggttcagacaagagcaagggaagtgaggtgggtaagagtgttttgcaacctgatgtgaagaggatcagaactgaggctgcccatggtggcggcagcggaagcggtgggagtgtatcgaaggatggaaccggcgggaaaatgctgcgcccggggttccccaagtggcgatttgagaagccggaggtaagggcagggcgggttcttgatgagaaaggtggggtcgagacgaaggtaagcagttcccaaaaggttaaggaccatgcatcgagttcggtttatgagagaagacggccagagccactgaaacctgagaaatcgacgccatcgaagactaaccaagaggttataagggtacaagggaaaagcggtgtcttaaagatccgtccgaagaacaataaggtggctagtgaaactggtgatggcaagaacctgccgaagaatgctaaggtggatggggatactggtgatggcaaagttctgccaaagaagactacagtggaggaaaatggtgatggaaagattttgaccaagagtggtgttttaaagctcctcccaaagaacaataaggtggccaaggaaaccagtgatggcaatcctcgaagcaagaacactaaggtggttggggaaaccagtgacgccaagattctgatgaagaacaaggcgaatagggaaagtggtgatgataaggcaccgaagaactgtacggtgaatctagaaactagcgctggcaagattttgtccagaaacactaaggaagatttgaaaaccagcgatgtctgtagacaagataaggagaaaagcgatgcaattgatgtgtcccaaaaacagggtgcagatggtgagaagagaatcacagaaaaactagtctcccccatcctattgaggaaaagtgacccaagtgtagtgggaatttctttgggccagaaaatgaagcagcaaaattcaaaggcgcaactgaagatatcctcactaggccaacgtcagccttcacttaatttgaaagatgagaagaataagaaaaaaagattgcttgatcataaaatgtcaccagaaaatttgtccaagaaagcaaaaccaaatgccattgatcaggatacatctcgtccttctcttgagaagcatggaataaagaaggaaaggaaagggcctcgttacacaatgaagcagaagctcaggggtcagataaaggacattcttttaaacaatggatggaaaattgatctaaggcgcaggaaaaacaaagattatgaagattctgtctatgtttctccacaaggaaatggctattggtcaatcactaaggcttatgctgtgttccaagagcagtctaaaagtgggaagcatacaggtaaatcatctaagcataaagcaggtgttgcagatgctgcctgtaatgccatatcagaaaatgatttagcaatgctacagaggaatgtggtgaaaaggaggaccaagaaagaacttggtgcttctaaaaagaagtatgaggacagcagcagcaggaactccaaagacaacaatgctggtagaagttctggaaacaagcatcaaagcagtggagttaggggatgtgcgcttcttgtccgtggtagtactcatagcatggaaggcaatgtggacggctattttccttatcgatggaagcggacagttttatcatggatgatagatatgggggttgtttctgaagatgcaaaggtcaaatatatgaataagaagggcacacgggcaaggttggagggtagaattactagggatggcattcactgcggatgttgctctaagattctcacagttgctaagtttgaacttcatgctggttcaaaagagcagcagccctatgaaaacatctttctggaagatggtggggctacgttgtcacaatgcttagttgatgcgtggaagaagcaatcacaatctgaaaagaaagggttttacaaggtagatcctggtgatgatccggatgatgatacttgtggcatttgtggtgatggtggcgatttgctctgctgcgataactgcccttcaacttttcacttggcttgcttaggaatcaagatgccttctggtgattggcattgcagtagctgtatatgtaggttctgtggttctacccaagaaataacaacatcgtctgctgagttactttcttgtttacagtgttcaaggaaatatcatcaagtttgtgcacctggaaccatgaaagactctgttaaagctgaatccaattcctcaactgattgtttttgcagcccaggatgtagaaagatttataaacatctgagaaaactacttggggtaaagaacgctattgaggctggattttcctggagcctggttcgctgttttcctgataaactagctgcacctcccaaagggaaagctcatttgatacattgcaattccaagacagctgttgctttctcagttatggatgagtgctttctgccacgtattgatgagagaagtgggattaatataatccacaatgtcatatataactgtgggtcagatttcaatcgtttaaattttagtaagttctatacatttattctggagcggggtgatgaagttatatctgcagcagctgtcaggattcatggaactgacttagcagaaatgccattcataggaacaaggggcatatataggcgccaagggatgtgccatcggctactcaatgcaattgaatcggccctttcctccctgaatgttcgaagactagtaatacctgccatacctgaattgcaaaatacctggactactgtttttggttttaaacctgttgaaccttccaagagacaaaaaatcaagtctctgaatatcttgattatccatggcactggtcttctagagaagcggttgcttgcaacaggcactattaaccaagagaacactactgttaatgatatgatggatgctcaaacacatgttgaagcaaccggatcccggacacctgttcatttttcctgtgaattaccagtgggtggtgatcctgatattaagcatcatgatgactctcatcctttagttgggaactccaaaggcttgacacttaatctgccttgtgttcctgaagaaaaaactgcagaattgacatctccagtattagatgttgttcagtgcatgcctgaatctgaaaatactcaagaaatgaaaaatggagaaacagatgcgacactgacttctgaggacataattgcagaacagaagtatgaagataaatctaattccagtcttacagattcatctgctattcccatgacagtggatccaggctcatgttcatccaatgagactgtgaaaggagaacatcacacatctagtgaaccttctgttgaagctattctagtaagagacaaacctgaaccttccatctcttgcaacgttaccaaccaagaagacaaaaactcttccatggttcctgttgatacgacagttcatttagccactatagttgggaatcatgatattcagaattcagtggaagtcaaaggtatggaacataatacagctaaggatcaaacttttgttagtgctgtagctaataatgttgctactactgaagatcccagtgattctgtagctgactgtgaagtgccaatagtgaggtctattcagcagaaggatgaggttatcgcagacaaaaatgcttgcgcaactatagatcaaactgctgttgacgatgtagctaataattttgttgctaccactgaaaatgacactgattctacagctgaacttggagtgtcaatggagagatgtatccagcaaaaggttgaggttatcaaagacaaaagtgattcaccattgagaacttctataagcaaagttatgttggagaaatcggatcaaatgaagtctactgaaagtgatagtgttaaaatgaaggacatggcgattgaggtgaaagtcacagttgagaacttcagtgaagcaggtaaaccagcttcagcgcttgtcatgtcaaatgacattaatggtgaagttatggctaagcctaatctaacttgtggggatgatcaacttcatggaggggatgggacatacaaaaatagcatggaagatgacctagcttccagagaacctgttaatgcatgactttgcatttcctgctacaaaatgtttaagtgagcagagcaatgggagggacgatctagttttctgcaagtagctgcctcagctcgttctccatggctacaacgaagtgtttagagttgcattttgcagcaatgaaatgctgatgtttcagaattttggtagtctgtcgatcatgggggctttttgttggtttagtaggcataagtagttcacaccgtaggacctcttatacaaaccccaaaaagtgggccaaatttttggtgtaaatacatgtgggaaattgctgttggcattttggtgcacctgaaatgttgtctgaagattgtcgatgaaaacagacttgcaggtagtgcctgtacagatataaaaatccatcctcatctgtttgactgttaaaaaaaaaaaaaaa

SEQ ID NO: 22114 - DNA, 3714 bp, Oryza sativa
  Clone ID: TF_OsC86365_1
atggatggtgttgacaaggataaagggaatgggaaggtgcatttcagggattcctctccccaggaagctttccgaacctacaagaggcgccggcagccacggccggagccgcaacagcaaccgcagccgcagccgcagtcagagccggaaccacagcaacagccacagccacagccacagccacagccacagccagaggcagaggcagaggcagaggcagaggccaaggctgcagatgttctggcacggcaggtgactgaaacattttggaaaagtagggacattggatggaagcatggcataatgatcgacgagaacagacaacactggaagtgcatgtattgtcacctgactagatatggtggtggtgtctctagacttaagcggcatcttgctggtgatctggatgtcaaaatgtgcccaaaagttccagctgacgtctctgaaaaaataagggagcatttgcggaagaaaagagaaaggcgaaagaagcgagctgcacaaaatcgtgataactgtgtgacggctaagagcacctctgatgatatcaagtctggcaaagatcctttacccgttgattcagaggtgctgactggagtagacactgttcttgaagaagttactaaccaaacgaaccatgataatcaggatcttacttatcccaaggctaccatgttgttacgagggataagagatattgggtgggagcatgcagtggatcttgatggaaataaaagacgatggaagtgcaagtggtgttctttatgtcgaagtggtggtgtaactacattgaaggctcatcttactgatagtagttgcccaaatattcctaaggaaatatcaaaaaaagtgttgaactttattgaagagaaaagggcagcacgccatctttttaatagcgctgcaaaatctcctttcaatgtcaaatttgacgaggatgcagttaatctctcagaaatacaggtggaaggtactccaccattgacagatgatcgacaacctttaggaaattccttgcatatacaaacatcagagtgcaccattaatgagtttgaaaaggtggcagctggaagcaaccaacagggtgcagaacatagcaaccaactacttaaccatggtgaacagctgatgaaaagcagcgatcaacctgaggagcactgcaccttggaacatggaaggtgccaagtacttgacaataataagcagcagactatggacaataaaactgataatccggaacacaaagaggtcttgaaacaccctaaaaaaactaggtttaacataaggaagcatatagttatcgttgatgaatctgcaaggcattggaggtgtagatattgtggtttggatgggtatggcaaaacgtctaggctccattttcatcttgctgctgtgtttcgacatcctaagtgcccaagtgttccaaaagaagtttttgcaaaggcacggcatcatattcacttaaagagaaggctcaatgtgaaaaaggctgggcaacaagctcgttcaaggccacatattcttgggcaatcgagtcagcaacagcagaacaacaatccggtactttccaattacccaacaagattgagggacaatgcatgggaacattcgcttattcatgacaaagagaagggccattggaagtgcaagtggtgcagtttagagggttatcatggcataactagattgaagtggcatcttgttgggtggcagaatcgtcctcaatgcctaaatgttccagaagatgttgctaaaactattcgggataaaatgatatcaagagagaagcagaaagaaggaagattgaatcttgatgttattgacagttgcaacatgccatgctcttctgagagtttacagtttgatcaagagaattttgctgaggtaatgcagggaaaaggttcttctgaagattttaatcaagctgaaagacaatcaaacacattgaacacagtatgcaataccactcatcctccacagaacagcaacaattatcagggacttcaagaaaatggattatatagtagcaaaaacaaatctgagaagcaaactgaaagatatgactgttggagtcactggcgatatgttttagatggactgatgcatttgccaggtgcactagagggtcctggcattcagagttgcatccgtgatgtacttctttacggttctgctgaatttggaactgttggggacaaagtggaaatggattccaacagaaaagtgtcaagtgatgggaatattgctaagtgtcagagtgttcttgtggatgttttaaagtcagagaattttgccttattgtgcaatgtgcttggcagaactgtccatcaagatgagcaaaggactaagtattttgattttaccatgattgactcaaggatgaaaaatggagattatggccgtgcaccattattattcaaacatgatttgaaaatggttgaaagagagaggggatcagatgatagtgaagagaatctgaagggagctgcggcgaccaatttggaacccatgaacatggtcaagtcaaatgcattggtactttcaacctcacaaggcttcaaccagttggatcaaccagatccaatggatgtttgcgatgaacaaaacggtactaactgcaatgaatgtggcaaggtagcgaaaattgatagcatcctcacatgcaagagatgcatgctagcattccacgtctcatgcattgaacctcctgtgccatccacttcaactggaagctggtgttgtaaaacctgcagcaccatctgtaacgaatcagctgaagttggcatggccttggtccattatgaaccaaatcgtttgcacggacattgcgtcgcatgcaaggaccttgagttttgcaggcctccaaggtgtgaggaaactgccagtgaaagggcacctgctgataactccagagcaattgtgattcccagtgcagagcctgttgaggatgtggaattgtcagatattgatgtcaggggcttatgcaagatgtgtggaaatcccgaggagaaggacaagagattcttggtatgtggtcacacccattgtctatataagtactaccacatttcttgcctgaaggctacacagatcgctagtgacaagcagctggacaagccctgctggtactgcccatcgtgcctttgccgagtttgccattctgacagagatgatgacctgaccattctgtgtgacggctgtgatgaagcttatcatctctactgcataacaccccgtcgaacttcaatacccaaggggaaatggtactgctcatcatgtgcgatagagagagcaaaggaggggatggcgcggcatgagaaaaggatgctgaaactccataggaaggatgatcctgggctgcaaggcatgagatatgaaatggtggacatgatactcgctgctgcggagatgcttagcgatgatgagcagcaggggacctgaatcaccttttcttttttcctgatcaaacagaatcatttaggaagttgaacctgtcatcttttttttttttgcttcacctcatttaggttatacctaattaaagttaaacaacttgtcgtcgtcggaagtttaagggatcgagttaagtactcaggtggttgaatattggttttgtctggggaacagtggtagcgaaatgtcgctatattgtgtacctgtgggtgcaattttgtgaacaggctccaattgaagtgaaaaatgctgaagaatttc

SEQ ID NO: 22115 - DNA, 5967 bp, Oryza sativa; identical to SEQ ID NO: 12702
  Clone ID: TF_OsC296057_1

SEQ ID NO: 22116 - DNA, 503 bp, Oryza sativa
  Clone ID: TF_jC-osleLIB3474049f11b1
aaacgaagtcttctgagcctcgggcgaagcagccaaagccgcagccccagcccccagtgaagaacgaaggccgcgaggaggaaggcggcccggacgacgaggaaggcggcgttggcggcggaggaggcggtagggaggaggagcacggggagacgctgtgcggcgcgtgcggggagagctacggcgccgacgagttctggatctgctgcgacatctgcgagaagtggttccacggcaagtgcgtcaagatcaccccggccaaggcggagcacatcaagcagtacaagtgcccctcctgcagcgccgccgcgggccccgcgctcgggctcaccaagcccaacgccgtcgagccgccgcaggtttcatttgctgctaaagacgtcgaattctccgaatggaagggagacatcctcgcaatcgcagtgacagagaatgatctggtcaaaggatcagactccaaattcgagaatgcggtgttgaagaagctcgacggccagctcggc

SEQ ID NO: 22117 - DNA, 459 bp, Oryza sativa
  Clone ID: TF_jC-osroLIB3475012g10b1
cccacgcgtccgcccacgcgtccgcccttttttttttttttttaacacaggaaagatgaagctttaaacacaggtaggttaatcaacagttacagtttaaaattaaattagagacaagcttacaaactagaaaagctagggcaagataatatctaagagatcatgacatccggagattgacaactccactctaacacagttcgacacagcttcttgttactcatgcccgggccctcttgttggtgcagtccgggcacttgtactgcttgatatgctcggcacgagcgggtgtgatcttgacgcacttcccatgataccacttctcgcagttatcgcaacagatccagaactcgttcttgccatcgttggttccacaggtcccacacaaagtgttgccatggacatcctccttttcctgtccctgatcatcaccactttccctcttgatccttgggggct

SEQ ID NO: 22118 - DNA, 2016 bp, Oryza sativa
  Clone ID: TF_OsC5969_2
aattgcaaaggctcacattcatatttgaatccatctttacattggatattgaaaatgaaacgacacatggtaccaatcactcatctgcaacgacagaactaaaaattggtgccgctgcaggctgctctcttttaaaccccctccccctccaaaagataccaaaaaaaaaacaaataatgtcagaataaaacgcggcgcagcacacaccccagctcctcctccggcgacgagaaaaaaaaatggacgcgcagtacaacccgcgaacggtggaggaggtcttccgcgacttcaagggccgccgcgccggcctcgtccgcgcgctcaccgcagatgtggaggatttcttccggcaatgcgacccggaaaaggaaaacttgtgcctttatgggtttcccaatgagcattgggaagtaaatttgcccgcagaagaggtgccacctgagctcccagagccagcattgggcattaactttgcacgagatgggatgcaggaaaaagattggctgtccatggttgcagtgcacagtgatgcatggttactttctgttgcattttactttggtgctcggttcggatttgataaaaatgacaggaagcgcctgtttggtatgattaatgatcttcccacgatttttgaagttgttagtgggaagagtaaagccaagccaccgagtgctaataaccacagcaatagtaaatcaaaatccagcaataaaacgaagtcttctgagcctcgggcgaagcagccaaagccgcagccccagcccccagtgaagaacgaaggccgcgaggaggaaggcggcccggacgacgaggaaggcggcggtggcggcggaggaggcggtagggaggaggagcacggggagacgctgtgcggcgcgtgcggggagagctacggcgccgacgagttctggatctgctgcgacatctgcgagaagtggttccacggcaagtgcgtcaagatcaccccggccaaggcggagcacatcaagcagtacaagtgcccctcctgcagcggcggcaacggcggtggcggcggcgtcagcggcaacggcaagcgtgcgcgcccgtcctaaggtgtggcacggcgagcccacccagagttaggatttgggctcgccgtctggtaggagcagtctgcatagtgcggtccagcggctattcttatttgcaatggctgtaactcgtgaggatgatttttaactttgttaagttattgtatggcagtggctgtaacttgtaagggtgtttttaacttgttaggcatgcagttgggcggccccttagggggctaagactgcttatccattgtactcctaatctaaccttaatttggtttttttttaattaataagaagatgaaagtaatcggctaatccacctaaagtactaaacgagaagccattataagccagtacctcgtgagagatgagagaagcaaaaacacaagcacgcatgcccggagtccactgataagtgacaacccctatgaagtgattagtgatattcgcatcatgttagctgaacagtacactactaatgcacgggaagacgactttgatgcaaaacctaatgacaaggacaaccagggcgaaggaaacgtggcctggggtggtataaacaaagaattgtacagcttacaagttacaatccagaattaacagctagcaaagcacatattgaatcatgctgatattgggatgaggtgtagcaaagcgagcccatcaacagttaagatttgggctcgccgtgtggtaggagcagtctgcatagtgcagtgcagcggctattcttatttgcaatggctgtaactcgtgaggatgatttttaactttgttaagttattgtatggcagtggctgtaacttgtaagggtgtttttaacttgttaggcatgcagttgtgctgccccttagggggctaagactgcttatccattgtactcctaatctaatcttaatttggtttttttttcactacagtagatggctgtatttagctggtctaccagcttact

SEQ ID NO: 22119 - DNA, 1301 bp, Oryza sativa
  unsure (1)..(1301): unsure at all n locations
  Clone ID: TF_OsC170376_1
gccccggcatcggccccgcgcgccgtcgactctcaccggtcctgctcggccggcccccgccgccggaggagggagagggtgctcgtcgctgcggtgcggccgcaatggcccccgcggcgcaggtggcgtcgaacccgcggacggtggaggacatcttcaaggattactcggcgcggcgcggcgcgctcgtccgcgcgctcacctcagatgtggacgagttcttcgggctctgcgacccagataaggagaatttgtgcctgtacggcctcgccaacgggagctgggaggtggcgctgccggcggaggaggtgccgccggagctgcccgagccggcgctcggcatcaacttcgcccgcgacgggatgaaccgccgggactggctctccctcgtcgccgtccactccgactcgtggctcgtctccgtcgccttcttcttcgccgcgcggctcaacggaaacgaacgttggcgcatgtgtctgcatgtgcacatgtatcccgtgctcttctttttgtttcctttctttgctttgagtgaattggagtcatgcgttctggatgtgctggctgtagtgtactggccgttctattttaagaagtctgcgtatgctatgtcctggaagcggctcttcaacatgatcaatgatctacctactgtatatgaagcattggttgacaggaagcacgtcagggataggtctggtgtcgatagcagcggaaaatccaaacattcaacaaagagaacaggcgaagggcaggtaaagcgctccagggttgtcgcagaggagtacgaggacgacgacgaagaacacaacgagacattctgcggaacttgcggtggcctctacaacgcgaacgagttctggatcgggtgcgacatctgtgagcggtggttccacggcaaatgcgtcaggataaccccggctaaggcggagcacatcaagcactacaagtgccctgactgcagcagcagctcctccaagaaaaccaggctatagagggtgtaaagttggtggtgtggtgccagtcgtccgtcgtgacccagtcgngagtcaaacgacacagtcgtggtccgtgccaccgtaggaaaaaaaaagagtgggtgaagctggtgtcgttcgggtccaantggtcggtagcgttagcgtagagtggtgaaaggtcagtcgtagacaacgttggtgcgtggtgtgggtagatgaggccaaaaagagtgaactgtaaaagacgggaaaaacgtattcgatctttagctttgttttataaatgttttcttcatngtccaaaaaaaaaaaaaaaaaaaa

SEQ ID NO: 22120 - DNA, 3313 bp, Oryza sativa
  Clone ID: TF_OsC1283_1
ccggccggggagctcccacgggtggagaggcagccaaggatacgatagcaaggaagagagagcgttgaagatgctgctgaccaccccgttcgtgtcgtcccctgtgagggtccagggcaatgggggcagcggcgcctcgccgtgggcgggcgcggcgacggcgctgaggatccaggcggcgaagcagctgacggggcgtgtggtgacgacgaaggcggacaagacggtgggggtggaggtggtgcggctggctcctcacccaaagtacaagcggcgggagcgcatcaagaagaagtaccaggcgcacgacccggacaaccagttcaaggtcggcgacgtcgtcgagctccgccgatcccgccccatcttcaagaccaagcacttcctcgccgtgcccatccccccgtgcgtcattcgccgcaagtcccagctcctcccgcatctccagtcccagtccctggcccaagacccgatccagtaacctccgcctccagcgcctacagcatcccaatggtcgtgaacaatttgataaaatcctcgtaggttgtttaaggaggggctgggatactaacaaaagagtgcaggaggcggcgtgttcggcatttgcaacgcttgaagaggaggctgctgaagagttagtaccacacttgggaattattttgcagcaccttatgtgtgcctatggaaaataccagagacgaaaccttcgaatactctatgatgctctcggcactcttgctgatgctgttggagctgagcttaaccaggcaaaatatctagatatatttatgccaccactaatcacaaaatggcagcaacttgccaactctgataaagatttattcccactgctcgaatgctttacatcggaccaggattttcatgctgagccagtatttcagagatgcattgttttgtgtctattctttactatacgttgggagaagcaaagagaagaaagctcatcgtgcagcgccagggtgatttttatgatgtgatggattcgttagttttgtatgctccactgctagtgatatattggttcgacaggctgctgtctgagagcatcatgtgcgttgtcctcagcacaagtgagtggtaagaaagaattaccacgacagacagaatgaaggctagtaccttcccttttggtttattgagtcgattgggtcgaagagctgtgcttgattgtaggttctattgtactggtcagttcagtggactcggttatgtttttttgtcactccactggcactggcactggcaccccagcagcaacatagagttgttggaaaggttttgtagcgtgtattttatgggtccaagagtttaggtgtagggtcttctctcttttattttattttttttccttttgtgctcgacagggttgtattgattcattccccaataaaaaaaaagtattgaacaaaaaaaaaaaaaaaagacattgtggccccccacatggaccatttcatgcaagcctggtgcaatgccttgtgcatgatacgagatgattgtgacaaacgtcgtcgagctccgccgctcccgccccatctccaagaccaagcacttcctcgccgtccccctccccccgcgcgacacccgccgcaagtcccagctcctcccgccttccattgatttttatttgctctggatttcgaacttccccagcattggcagctgtaattccatccaatcttttagttagcaaggatgttccaggaaataacatcaagttcacattacgaagttgtttcttctcattatcttcaatgggtttgaaaccaaatcctgacacccatgtattaaccaactctgggatggcagaaaggaccaatgtctcaacatggaatgatctaagcatcatttcaatggtgtccataagtcttcggcacattccttggcggcgataatccacagaagtagcaataaatggaagctcagctgctttggtcccatgtactctgatagatgctacacataaaatctcatcacctttctccaggattactgtatagaacccctggtaatctaagcgagcgaagtttgatctggtattgtacaagacatgcggtatcatgtctacaccagttctaggatccaccatgcgaacaaaacattcctccaatatagtaagagccacagctaattttgtattgcattctgtcatatgcgcaatcttcttggaagaatgtagcttctgcccatcagtgttgcacttcaatatgctccatgaaagctcgttgtcaagaaaattctctattccaacgtgattgtgtaatccaataaatatctctttacagtatctcccacaaaaccatatgttggattgtttatccccacaggggagcatctcctggtcaatgcaagtatcatggtatgaatctccacactgcaaacatttcaagatagccgagaatgttgaaacctccttttcactaagtggattcccacaactccggcatgtgcagttatggcagtaccaactgccttctggaagttcctggtcagacaaacaagtttgatgatatgttgatgggcaattgtcgcagcaaagtaattcaccaccatctccacagaaaccacacgtatcatcattttcatccatcgcctcaacttttctaccagatgcatcacatttcctacttagaaattcagcagaccaagcttctacctggcatagagtgtacgatttgccagactgtagaaagaggcccaatgaggactttggtaaactgcaaccgccatgaaccttgaagtctgatatagaaaaggtcttggtgcaacaattgcacagaatgccttcccaggtaacctgcccatccttaacaacttcgttgctcttcagattctggtactgtataacatcttttacggtcagaaagccagtggcaatcaaccagcagagaactgttttccgtgccaaacttactctcttcccacccaacagatttgatcctccttttccggacattcgagcaagtagcctgccacatttctttgagctcttaaactttgtaaacttctttgcatagccaagatccctatttttcaccatagctgtgatcaaaagatcatcgtcattgatacgtaacacacggggccttttcttggcatacttctcccaagcttgaggttttcttttagcagcaactgccttttgcgcctggcgtaccaaaattctgacagaggttgtcaagttggacaaagtgagcagaagcagtagagtcgcgggacaggtgaggcagaagcgtagtatcatagactgtgttgctgtagagtgagaagtggtctggtcctgtgacagacagat

SEQ ID NO: 22121 - DNA, 3288 bp, Oryza sativa
  Clone ID: TF_OsC45337_1
gcactttttagaccaacggatcaagtcagccgtaagcaaaaggagttgaggaaatgagagctgagataactgcctggtgacgtctctggtggcgacggcgacggggtcctccgcgtccggggtgctcggcgggggcacgttgatgtcgagcggcacggggccgagcttccacctgttggtgcgggcgccacgcatctcgcactcggggcatatccagtcctcgttggcggtggcgcggggccgacgcgcgccggggggggccggcggcggcggcggcggcggcatgagcggcggccagacgcggacgcaggcgaggtggaacccgcgctcgcaggagtcgcagacgatggtccccccggggttctcggggaggccgcacgccgcgcacgggggcggcgggttcccacgccctgcctcccccgggtgccgcgccgccggcggcccgaacggcggcgccctcgccgtcaccgactcgatcgcgctcgccgccgccaccctcagcgcctgcgcctgcgccaccgcgtcccgatggatccccatcgccacctcacgcgcctcgtaaggaagcatccccacctggctcaccacggcgccgcccacggcggccggggccgtcgggcgaggagagcaacaagcaaagcaaagcacgagcaaagcgaggagagggttaagcgaggagaggggaattcgcggagagtcgagtcggggggccaggtgtggggcggatgatgaggccgtggtggagtgggacccagatgtcggtgactcagatgcgggccgcaaaaggtcagaggtttctcgctgatgaggccttcctcctttgcggttgtgccgctgacgtgtgggctgcggtaggtgtgggacccacgtgtcagggagtcggatgggggccgcaaaaaagtcagaggtctcgctgtcgatgactgcgcggggggtggggtgggggagcgtggacgcacgggttgcgcgtgccccggtggtggtggctgtgtccgtccgcgcggctgtttctggtggtgatgcgctggtgtgttttggctggtgtacccggcgcgagaacccattagcaccccgggaaggggtatatgtgttctcatggtaagtaaaacgggttgatgtgtatctatcgatgaggatagggactttgcaggttgccttgttgtgcccataacccttacacctgctgcagcgcaccgcccttttgattgcgattcgaggatcagctggcttttcctttggtcttccaacctgcctccgggttagaatcggtgattgatgtaatgcctcgccttgtgatgggtcagttgatggagcagccacaacaatgtcaggtattggattgattgacatggcataggtcaagcggtagcactctgttgtgaaatacttggcacagaagtcaagtgggttatgatcagtgcgctcaaacaccgcaattgcatgtgagcatgggatcccagagacatgccactttctgcaggtgcagtcccatgtatcaatgttgacaacattgacagcgccatcgcatacctcaaacacattattgtttccgtcattgcctgttgagcaaacaacactgtgtgtaagagctttgcccatctcttcctgaattttctgattggttgatggagttagcggttccgtccatgaattcgaatattccctgcgcgtatacatcatctccatcaagttgcatctgattgtatcaaccaactgcactactgagagctcatatctactggggacccactgaagaattgtctcgggaacattgcaggtgtactggccaagtcgcgaccccttgaagaaggcatctgaccacttctcaggtttagtctccaaaagccattcagcaagcttatcagattcaactttgatgagttcaatacactggttgaattcatcaactttgcatgaatacatggctttcttaacatgctcaaccattgtatcttttagttcttcactccaactgtcatccaattgtgccttaaattcttcaataaaatagttgacatggtagccatgatagctatctggaaatataagagagacctcatccaacagaccacatttgccatttgatatgaatgttagttctccagacacaggcaatgaagcttttagctgttcaagaaaccaatgccaattttcttgactctcgtcgtccactacagagagtgcaactgggaacatatcgccttcaccatcaactgaggtagcagccaacagcttccaatgcttgttcggtttcacagatatcacatcaagaaagaggagaggtctgcagccatgcacaaaaccttgaatggaggcatgaaatgcaacaaagaagcggaattttgaatcttccaaggcctctactgttgccgcacttccagggtttgtctcgacaatcctttggcaaaaccaaggaagctggttgcatgcctcttcatgtgaactgtatagttctttctgggctattgatttgcctcgccaagcttgggagtaattcaggcttagcccatattcccgctgaagatcattagcaatatctcttggcctatagtttggactatcacgcaatttttccttaataacactggccacccacttttgagacgctagacgatgacttttgactgactctgattcacatgtatgacttccaaaaactttcttaatcatgaaatccttctttgcaggagacttggatgcatgtatacgccatggacatccttcagcggtacattccacagtgacacgagaagagtcattcttgacaaatctgtaatggaacctatgtgcaatggcatacttgtgtagtgcatcacggaattcctttggaccttcaaacacttgaccagctccagtaatcgcattctcccaacttgcacaaatcttttgcctcttagatccatctggagtagttgctgctacagcatgatctgcagaagcagcaggcaccacggcagatgtttttaccctgttgtcagccttcttcatgacataaatatatgttgtctctgactctgcatggaattcaaccatgcgttttaggtctttgtcattggaaattgaaatcaaagtcttgttattcctcggaaggaagtacttgaacacataggagtcaagtttgaggttattgagcgttgaagatatctcatgtttgaatgttttaaaagtccaatcacttttcacatgcatcgcgtgcgcctctccaccagaataggacatctgtccatcatcatcagttttgaattctccacctacttgaagaacagctactatctgtttgctccccat

SEQ ID NO: 22122 - DNA, 626 bp, Oryza sativa
  Clone ID: TF_OsC5969_3
ggcggcccggacgacaaggaagccgccggtgcggccgaaggagccggtagggaggaggagcacggggaaacgctgtgcggcgcgtgcggggagagctacggcgccgacgagttctggatctgctgcgacatcttgcgagaagtggttccacggcaagtgcgtcaagatcaccccggccaaggcggagcacatcaagcagtacaagtgcccctcctgcagcggcggcaacggcggtggcggcggcgtcagcggcaacggcaagcgtgcgcgcccgtcctaaggtgtggcacggcgagcccatccagagttaagatttgggctcgccgtgtggtaggagcagtctgcatagtgcagtgcagcggctattcttatttgcaatggctgtaactcgtgaggatgatttttaactttgttaagttattgtatggcagtggctgtaacttgtaagggtgtttttaacttgttaggcatgcagttgtgctgccccttagggggctaagactgcttatccattgtactcctaatctaatcttaatttggtttttttttaattaagtagatggctgtatttagctggtctaccagcttactactgcgtcctgtgttaagagtttgctttcttgctc

SEQ ID NO: 22123 - DNA, 4767 bp, Oryza sativa
  Clone ID: TF_OsC13101_1
atgaaggattacgataagtctacttcctttgaggtggacgactctaccattgatggtgatgtggagcttggtggagggctcactgtggtggggaatgagaggaatgatggaaggggtttcgttggtgagaatggagcctcgaacaagaggagtttgaggtataactcgatgctaatgcaggtgtgtgccgaaacagcggcttgtgtgtctctggatttttgcaatgatgagactttcgagaagtaacgttgtgataagttagcagagggtgatagggcagggttgcggacatctcttgcatacaatgctgagctcggtgcggcagaaaattgtgcgttagagtgcgatgctgggtttgatgcaacttgaaattccgcaaatcatgtgtaaggtttggatcttgctgaggttggaagtgttccattgaatgggatggacgcatatattaaggaatctgaaggttagatcggtaagttagatgactgactggttaccctttcagaggagccgaatgaatctgggggaggaacaagtgttgggggcatcaatgactcccaggaaaacaaggcggtgaatgggctttgccagggattggtcatagccccatttgatacagcaaacggtaatgcatggaccatcagaaaaaaaatctcagatagtggacgagaatctattgagcaagaggataccgtaatgtgctctaatgaagaacagaaagttgagaaccattgccagtttgacgataagcataaagaagctgaaatttctcagattgagctcgcagttgataaccacattatgctaactgattgcactaaccaaaagaaggggatcgacagtcctgtgaatgaaaccaagggggattcaactcctgacattgtttttataaggagaaaatcaataactagaaaaacatgtgaagcgaagcaggtgaaatctgaagatgaggttcgatttgagaagcgagttacaaggtctgctactgttagacagagagaggtttctgctagcatgtgcgtaggtgctacaaacgatgctaacttggaaagcaaagaaaggaaggaagatgttcatcattatacaaggaaagtgggcagcaccgtgcgctcaaaagttcatcacacaggggtggcagaatgcgacactgatacaaagaagaaactaaaaggaactgttaccactcgaagaaactcagatgccattgctaatgatgatcctccaagtatcacgcagaacaaggaatcaaaaactcagatgaagatcgatatcaagtctcaaccactcacaagaaggggcagcatagtaaataaaacagaagacgcagtttctgggttagaccagaatatctgtagttcagccatcactgataaaaatgatatagagctcacagattctgaaggagttaaatctgagaacaaggccgctgtgaggaagtcaatattatcagttggcgctaagattgttgccagtaagaagaggatattggaatcaggacttgataaagctagtggagagtcaccagttgcaataccatccctaaagaaggcaagagatacatcctcagacactgagctagagcaaccaaaaatgtcttctggaaagaaacttaccagaaataactgtggctcaagtaagaaaggtatgtcgacaagacggcaacatcagagtcaaacagctaagttgagtacatctgtgaattgctccaataaaaacgaatctaagctatcacagaatgaatccgatgatgatggaactggcagtgatacttccttgaagaacacttgtgtaagacgtactcgaagtggtggtgttgtccccaaaaaacaagaggattctagtgaatctgaggaaccgatcatactgagaaaaaatcatcaaagaggaaaatattctgggaaaagggctggatctacaccaaggaaagttaaagctcccaaaggcaatagaaaggaagtcaaggcttccagtttgaaatcttcgggtccaagtgagcagataaatacaggaagtcttcgtgaagaaaaacaaaaaataagtgatcatatcaagggcatgcttctagatgctggttggacgattgatctgagacccaggaatggcagaaattacttggattctgtgtatatacctcctagtggtaaaggatcttactggtctgtcacaaaagcttatgctgtgttccttgaaggtatggaatctgagaagaagggcagagctaaagatcagcgaccctcaaagaaatctgtaggtagccctgggaaaagtcatgtttcagaggaaatccttagcaaattaaaaagaatagtcgttaataaacgaagaaccaaagtagaacttcagaagttgaaaaagaggaaacatggtttactgaaaaagcagaaaacttccaagcgcaactcaaggggttccaaaaataaaatttcaaattctagaaagttgcatttaggcagcgaaagaaaaaagcgaggtggttgtgctctacttgctcgtggatcaaataaggatggtggaagcagcactaacggttttgttccatatgaatggaaacgtacagttttatcctggttgattgatcttgatattattgatatcaatgcaaaactgaaatgtgtggatgaaacccactcaaaagttttactggaaggtgtaaccactagggatggaattaactgcagatgctgcagcaaggtctttacagtacttgaatttgtggctcacgctggcgggccagtcagcaaaccttatagaaatgttcttgtagatgggctggacactgaccttttgcattgtctcattaatgcatgggataagcagtctgattctgaaaggcaggcctttttccctattagcactgagactgatgaccccaatgatgacacatgtggtatttgtggtgatggaggcaatttgatctgctgtgatggatgtccctcaacattccacatgagttgtctagaacttgaggaacattcaaggcaggatgctcaagacattgctgaggttgactcttcactctgtacttgttcccagtgcgaagaaaaatatcacccaggttgctctcctgagactactaacacatccaatgtctccagtcaggcatgcgatttattctgccaacaaagttgcagactgttttcaattagatttctgggcggcaatgatatctatggaactgtcaacagtgctctcatgcagtcattaagatatatctatagtttattttcctgtgatattcattataggggaaagctgtttgagggattgcgtaatcttcttgctgtgaagaaggatcttgaaccagaattttcatgcagaattattcagcgtattcatgaaaatgtaccagaaacagttgttgctttggatgagagggttgagtgtaactccaagattgcagttgctctttcgttaatggatgagtgctttcttccgattgttgaccaaagaactggcatcaacttgatacgtaatgttgtgtacaactgtgggtcaaattttgttcggatggacttccatgggttttatatctttgttttggaacgtggagatgaaataatagccgcagcatcggtcagaatacatggaaccaagttagcagagatgccattcattggtactcggaatatgtatcggcgtcaagggatgtgccgcagactgctagatggaattgaaatgatcctcagctccctcaatgttgagaagttgataattccagctatcgctgaacttgtggacacctggacatctaaatttggatttagttcacttgatgtttctgaaaagcaagaagtcaagtctaccagcatgttagtttttcctggaacaggtcttcttcaaaagccattgctaaagaaaacttcacctggggaaaattcaagctctcaagaagttgatggtgttttctctgagctcgagtctgggaaaacttccaatgtggccaatgaagactctctttgttctgcaaatgctgagactcaaggttcggctgccccatgttatggggacaacagcaaagatgctagtgcttgcaatgattgacatgcttcctttgcattattttgtccctgtcaaaaggtgcaccctggtagtttcaagcattgacagatactattgaggacatgaagcacaccgatccttcattgttactattattctcttttgactcggcatgcggttcgtcggttggcagaagtagcctggatagagagggcgagtttttgaagatcccttgcagagcagcagcacctcggttctgctcaatattgatgattcaattgactctttggtttcggtttgacttgaaaccagcctgtgcagggttggactccgatcacctaactttaagtggtttacctttacctgtaaagtcagcatgtagaactgagatgatagttttattccgtgttttttttttctggatggttaacttagtaccaaaggccaacgtgtgccgcaaaatcttcgtacatgtttctttacctgctatgtgacagtagctttgtttttgctagcccatttttttgcagccagatctcatctgtaagacactaatgcatgggcaagcagaaaaaaaatctcagatatgccacctgttctcatgttggaagtaaatctgataatgttatggcatctatcctcgtgttcatgcagatgcaaggtgcttttgttcgctgaatcgaactactgatcaggtgagatgtggtcaaagatcgcaaggttataatcactctggaaagcatttacttggaatcatattgtctatctgct

SEQ ID NO: 22124 - DNA, 2944 bp, Oryza sativa
  Clone ID: TF_OsC97719_1
atggggaagggaggggaaggggcggttcccgtgggggagagcggcgggcggcggcggaggaggccgggcgaggacggaggcgacgacgacgacgaggagtatgtggtggaggaggatgaggaggaagagtgcgacgaggatctgtctgcctcgagcgccggcgagggaggagagggcacagacgaggaatacgaagagggtgatgaggacgaagaggaggatgagaccccgcggccgaggcagcctgtcaagagccgcgagaatgggcggaaggggaaggcagacccacccgttgcgcgatctcgtcgacgtaagtacgaggatgacgatgactactcggaagaagaagacgatcgggtcgacgagtacggcgaggatcttgaggaggaggaagaggatcttgaggaggaggaagaggaggacgatgaggcgccacgatccaagcgcatgaagaaacgtggtggccgcaacgtggaggggaagcttcctctggagcgatcaaatcgccggaggtatgaggaggacatggactttgaccctgacatggatgaggaggaagaggaggaggatgttgatttcgatcctgaagtggaggacgaggaggaagaagattttgaggatgaggaagatgatgaattggaagcgactaaggtgagggttaagaatatggggcggcgaaagtctactttgaatcagcgacgagggaagatgaagagcagctctaaggtggccagtcggaaggtgggttcagtcaaggcaaggaacgctgcgtctataagacggaggcagaaaaaacgttcaatgcttgatcgttatgaggatgacgacttcattgtggaggacgaggttatggctgattggcaaccaaggaaaaaggctagaattaggaagcagatggaggttgatcctccgacaccagtttttgaggctgagatatggcctactattgattcagacacgacagacttcgaatttgtaacatccgatgaggaagcagccattgctgagcctactagggttattaagaaggggaggaagaaaagggtatttgtgtcagattcatcctcagattctgaattcgttgtatcagataaggaattggggaatttgaaggagtctgagcctccagagtctctgaaagtgctgccttcatcacccaggaagatttctgttacaggtaatggggagcacaaggggaaggagaaaaaggaaccacaggaggctggaagggcaacgtgcgggatttgcctttctgaagaacagagagtgactgtgcagggtgtgctggattgctgttcacactatttttgctttgcatgcatcatgcaatggtctaaggttgagtcaaggtgtccgttgtgtaaacggcggttcacaacaatcacaaagtcgtcaaaggaggatactggtttggaactgacaaattctgtaattagggttgaagaacgtgatcaggtttatcagcctacggaagaggaaataagacgttggctagatccatacgagaatgttgtgtgcatagagtgcaatcaaggtggtgatgacagtctcatgttactatgcgatatttgtgactcctcagcacatacttactgtgttggtttgggaagagaagtacctgaaggaaattggtactgtggaggttgtagactcgatggcgaagcacattcataccataatcatgtgaatggcaattctgggatgtttggtgcaatttcaccaattggcacttttgaaaggcaggggattgatctaaatgtatctccaagagagattcctaggggaaatcattctgttgagtctcaagcttctactgcaggagcatcaactccatctggaaggcagacaaacgcaacgaattttagaagacgtcaaatgcatgactggatacgcagtttgctttctagaccaaggacaacacttgggccagttatgcatcataatggtgtgcatcagagtggttttgtaccaagcactgaaccagaccacatgaacttttgcgcaccattagaatctgacactttacacaacactgggtctgtaccacaaagtgaaccaagccagaacttccatgttatgtcagaagccaacacttcagagacttcctttggaaggcatgcagctctttctgaaagacgtcaaatttatgaacgttttttcatgttgctatctagaccaagcccgactattagaccggacttgtgccataatgcctcagagcatggtagttctgtaccaagagttgaaccaaaccacatgaactttcatgctccgccagtagccaacagtccacaaactctgcttgatggcattccaaaccgcagcaatggtttttcttttactcaggctcacagtaattttgtagatggaaacaacttccaaggaactgaaggtgtctagagcaacagcaacttgtcaagcaaatatgtatgcagagtacaagtacttgctagaagaaacccacaaacatattcaggggagtaaaatgtgcccatcgatgagaggcttatggaaatcgagacaaggggacgctggttgtcatcccttcatgtcctcctagcaattgctgtcattctccgggcaattattcttgttgaaaatagctgttcatcatgctgcttatctgtcagcaatgtgatcgatgacataaacggcatgcttttgtaaagtttttctgttttagactaggcatttatatctgctgttactgccatttgttcagtcgtaaaggcgacctaaaagatcacacaacggccaagataatttggatagcttagaatgtatagattgtgccattggggaaatcaggttttaggaaggccattcattctgttgacacgctctttcgcccatgaatatttttttttctaattgaattgccctatttgtctcaaaaaaaaaaaaaaaaaaaaaaaaaaaaaaaaaaaaaaaaaaaaaaaaaaaa

SEQ ID NO: 22125 - DNA, 1279 bp, Oryza sativa
  Clone ID: TF_OsC9817_2
ccggccgggaatccccaaatcgaaggatcgggagccgccggattggtcctcaaatcgaccccaaatcgaaggattgagccagggacgccgccggatccgtcctctaatcgaccgccatggcgatcgcccgcaccggcgtgtacgtcgacgactacctcgagtattcgagcacgctggccggcgacctgcagaggattctctccaccatgcgcgagctcgacgagagggctcatggcattatgggacagaccaaagaacagataaagtatctactcggagtgccatcccatgggttcgacaggtcaaacatggatgatgatgaatctgcctcagagagaatgaaaaaggacatcgaagctagtcaggacaatgcgttgagtctctgcaccgagaaagtgttgcttgcacgccaagcttatgacctgatagagagtcatatcaaacgtctggatgaagacttaggccagtttgcagaagacttgaagcaagaaggaaagatacctccagatgaaccatcaatccttcctgcaatttcagcatttagcagggatgacaaacggaggcctggtttcagtacacctcaagcaacaaagaagttcagagagagggaatgggacagggaaaggggtatggacttcgacttaatgccccctccaggtagcaacaagaaaacaactgcacctatggatgtggatcaaacaattgatccaaatgaaccaacatactgtatatgccaccagatttcatatggtgatatgattgcttgtgacaatgataactgcgaaggaggtgaatggttccattacacttgtgttggtctgacaccagaaacgagattcaaggggaaatggttttgcccaacatgcaggaatctttaatgagaggttctccaaagttgtgcgaagcaggacagtggctccactgctcatgtgttagttcggcgctcggagcggtttcagaagatgcatgagggaatcctcagtaatgagttggtccaaagttggtaggatgcaaaatggtgacaactttggaattgtagggtgcgcattacttgacagttaacagtgggttaaggttgttggttcaccaggtttactttagtttgtccatgtatatgcaaggggcaacagtaagactatatatataaacttgttcaaaaatctctccctgtgagacagttgttcttatagtggtgaaatgctttactgctcagtgcagctgctgtagtctcccaaatgttggctaccaagtatccatttccatagttggtgaagcttcc

SEQ ID NO: 22126 - DNA, 3312 bp, Oryza sativa; identical to SEQ ID NO: 12720
  Clone ID: TF_OsC60785_2

SEQ ID NO: 22127 - DNA, 5261 bp, Oryza sativa
  Clone ID: TF_OsC77457_1
ttagttcaattatctcctgcagcttcttgatctacataagcaggggattctttaccctacatcttctcggttgaagtgataatcgtaggtaatttccttagctgcatttacgtggcgttacgggacgaacactacgttcttcgggttccttattgagtttttttttgtgacatattttttttgttgatttttaaattaattctaaatccattctaaatttaagtttggatgtctaaattatcagtgccagattaagtccctacagtttattcatatatacagtgcgcacattacaatgtttaaacagcactacaaacatacgaccgaagtacactatcttagttcagatatctcctgcagcctctcgatctacagaagcaggggattctttgcccttcatcttctcggttgaagtgataatcgtaggtaatttcctcccccggatttatgtggcgttccgcgaagaacactaccttcttctcgttccttactgagattatttttgcgacacagtttggttggcaagagtggttgatgaatcttgcgatcccacccttgcgggtggcatcgatgatatgttcctttccaatcttgaagaagtaacaagcactcttatattgctgccgtttcccggactggtattcaatctctcttttgtcagcaacgcattgcccaacaatttcaccaacatactcattttcattatgctcgccttctggctcactttgcaacaaacccctctgatgagcacaccaaggatgaaagagaactgagcaattaacatcacgacaccccataaatgagcccccagttctgttacacattgagcattcggtatttcttttggcaggtgaagcccctgatatatcaaaagcactcattgtgattgtatttgggcattttgtaccaggtgtccacaacccacagaccacatgaacccactgccttgttcgtggaccaagtagactggaattgcgattagaggtccacgacttgctgataatgtccccacgtgcactacctattgaagcttcttttataccaaaagaagatatagcattgaagcttcttgatctgtgtccattaaatgaatcatgcctgacatattccccatgtaacttgcttgtacactcactgttcacatttcctgatgaataaacatatttatctgatctttttgcagttgcaatacccctcagcaagcttttgagaatattctgggctttcaatgcccttgtcatagctccacctccataaccacacagaacacagactgtgtcctgggtattgatcttgcagggcttacagaaccattgtcctcttggaacttttagaacaccatagcaagcttggtgcaccttgataaagcacttgctgcactctatcaactgattggaaggctccaggtttgagataccacaaacacaacatgaagcatctaaactaggcctttgtatatatctctccatcctattaagagatatgcatgctctttgattcttacttcctctacttcttgatgctgacagctgacttgtccccatatctgcaaggctaagaggctcatcttcttcaagtacacagcagggactttggcagtcagtcttgacgtgtggcctcgagacattagatgaatacctattctttttgggagaccacagttcatcttgtggactgaaacttctgtcaccagaggaagatttatctgcagaaccatctgaactcttttcctcagaaaaatggatattttctgtcttactgaggggtttgatagcatgacatctcttagcctttttaagaatcagattgagtggaacaattttgggagatttccgattatcattagttattcctgtagcaatcaaactagaatcaatactggcactcccactacaggcatcttcactgttagtttcatttacaatgcaattcagagacacatattttggcagtttgcggacaagcaatcgactcccttgctgttggcattttgttctatccaaagtggtcatattatcttcttgcttttttctatcagaggaatttgattctccaacataaatgccctcatcatctgaccgttcattgtcaacattgagaactttgcagttgctgtgaagccgtttcacatgtttattcagatgcgtgggaggatgtttcctcttggtttttgatactctgcgtgaaaatggaccagccttatgctgcggttgagaatccccttcccgggatgacagatcaattttcctagtacaatcatcggattctgatttgtttgcacagcacctcaatgttcgtgttttctttgacatttcagaacattgtccctcattctcatgttctttccgtgtacttccctcagaaatttgattatttttgtgcttcactaaagatggctccaggtgaaatctagaaaaactattttgggcttcttcacatcctgtactaataggcaaatagctggatgaggaacatttctcaattcgtgacccttcatcaaacacaagatttttgtgttcaagaccatacttgttcaattcaggtgatgcagaaaacttggtcacaacatcgctggagaatccagaagagaaaccggattttagttctttaaatattccagaatctctacaagcactcgctttctcttttacagtttcatagggccaatggccacctacagccgatgcttctgttacattcttcagctgctgtaatgtaggaacacaaggtcggttcaatacttcagtagagacctcattctggaaagaagctttagagtcgctttttctagcaattatctcgcttgagcactggcatattaatttttcactctcccctagcgtgcaacatctggcagcagcttgcatgccatcatccttgctcttttgtactgtatgatcagtttgatcgattctagcaacacagtgctttgtaaatccataacctgccaaacattttggggctaaagagcagcagcattttccatcccggtaaggactacattctgtattattaggtgcatcaagcagagtgttcttagtcaagctgttggctgtgtgtcccatagaacttctgtagtacccatcaatgggacatgcatggcaacaggactgcaacataagctctctagaacataatgaggatcttggtatgaaagtagagcgggtgcgcacttcatctagccctatgggctggaactggagtgccatcattacagaaatgagatcggcagaaattgccagctctaaaaccaagtttggaagaatcttcttgagctttgcaacagcatctatgcattgattttccgttctatcataaaaacagggagccccagtctcagaatgtgcaagatgggatttgtcagcaacatgattacaacacctgcaattcactggagaagaaacttctgcgcaaattttggagattccggcgttaggttgactaggcagcaaatgtggcaggcagtccccatttattaaaggctcttgactatttgcatgaagtacatcttgatgaacatatcccttggaagccactggaactggaagagacctgctatctgatatccttttcgtgtgaataatggcaggtgccaacttcaactgattatcatttgcccttgtctcaacttgtgtacttgcagtttttaaacgatcggaactatatgcaacatctggagccttaagaaggtaatgctcattactgttgagaacatcatcaatggactcagatgtactatttctctcaagatgtgaaagaaataatgaaataaatgaattctttgctgcatcatctgtaatctcattgagttcagaatggctggttccattagaaacatcaagtgatcgtttcctattacctgtaccaaatgatggctcaatgttttctatagttttgttggctttggtagtttgcttcggataagcatctgcaccaagtgattctgaaccatcttgaattattttgtgaggtacatcaggcatgcatgccctactgtcattgctcaaaactcttgtagaactaggaccaggactacgagacaagttatttaagtttttctccagaaagtttgcataatcatgtgccaaatgatttctactgtaagttattcccatgtttgctgttgaatatgttcgttcacttggcctgctaatagagttcatgttcatgtcatggatcatatgatttgctaagtttattttcgaactctgctgtatagctggattctttgagaaagcttcatgtaaaccgacactctttctataaaatgtttcatctggcttattcactagcttctcaacagaagtgaatcgtccaacctcattgtggatatcactggaataaactggattgtttatatgtccagtgctttttccatgtccactgaatagccctgttttttccatgttattgttcgttgtaaggagacttttagtccagtattcttctgaagaatatctcatatatgcccattctggccagtcccacttagtgtcagaaatggatgctccaacccccatgcagtacttgagccattgtacaatagtcatgccattatccataatgacaatttcaccagctttttctgcgggtcctcctgaatgctcacagaacttagccacagacattctcagccggtgacaaaagcaacgaactccaaaaatcccagcttcaccgacaaagaattcaccaccaacattcagacaggagacgcatatctgatcccctagaagcgcaggatgatggcgaggggttgattgggatggcaatttctgcactgcgcatgtgctcgagtcctgaaactggatggcgccttgggatatcccattgttaactgaacattcccctggaaaactaccctgcacatttgcacttgtgttctgaaacaacggccccaagcaggagggctgctcaacgctgctgctggcttccaagccgtgcctcggatgcttgggcagaggctccgcgcctccgagcggggaagcgcgagtaagatcaatgacattagcagcattgcctgcattgagcatgccaaacaacgccttccggtccgaaacatgggtggcatggggatggttcccagccacctgagcaagcaacgaggtgctcggcgccgctctcgcgggctggccgtactgcgagctcggatggcttgcggccagctgctccggcggcgccgctccctgtgcggcgaaggggcggaggatgtggcgcagactggcgctgtcaatctgcacacggacacagtagaacgacgccat

SEQ ID NO: 22128 - DNA, 3190 bp, Oryza sativa
  Clone ID: TF_OsC4368_1
acaggaaaagatctgaatattttgattatgccaccacaaagtaagttccaattatggtaccaaaaacaaagggaatgccaaacctatgtcaaaataaatgtacaattacgagggcatttttgggtaaatgtgagcaaagaataattagcatttctcacatgaaaaactgaggcaaatttttgcaattttgccactagccccgaaggagcacagttcgcaatccagtaccctggggcaattctaaatacaatcctcttattttggctgattgcccctcaacatcaacatcgtttacaactccacggcattatgggaatccacaattatggtgccgactaacaaaagtcgaatcaaaagaataatgtcagatatacatttacaattaatttttgtccttcttttgtaaaatgttgatatacacaataatgaggactctttcacatcaagaataacgattaggctcacaagattgtctaattgcaccgcaaaagcaccgtgcgcgcgtcacaaccctaacacactcataacctatcctgaacattcaggtccctgcacaaaggattcacgtgaagatgcccctaatctgagttatagggttgaactccatgaataaaccaattaacttcaccagagttttccacatatcaccttcaggcactaaagagttgtatatgcgccgctctctaatgtctgatattggtggcctgacgagctctccgatgtactcaatcatcatgtcgcctgccttgtgcgaaacctttgcaaagacaccaaatccatgaattcttgactttccaaaagctagtctcctcctgaatgtagccttcatgcttttatacttttcaatcatagaagacacgttgccaacagcttcttgatgtgcaacatccaaaaagccaactgattgaattggttcactgatagcatcatggcctactctattttggcagaaaccactaacaatataaggcatattctctacatataaacgttttacagaagcggtagccataacttgaggttgcttttggccccttctcccatggatattataaggttcagtccttgcacaaccggatggtggaactgcatctgtctgaactaccacagcaggcttagcaaggttactttcaagagatggacgttcagtcgatggttgtctgtgcttcttgcagtatgaaagtagacgaatacatgggtcctcatcctcatcaagtaacatgaggtggattttgtcatcatcttcaagctcaacacaaagatcagcagcacgtgcacaaagagggtgatatgcaacacgacaggtaggatgagaacactgtatgcaagctccataagcaactccgcaaatgctgcatagaagtttccagcggtccttgttgattctgctcaatccatcaatcggttccattctcttcacatcttttaagcaagtttctgtaccaaagttaggattaatataattaaaagcatgtcctgttactggacaaagacagcatcgtggagaaacacgaggcgcctcaggtcgacacaggttgcaaagccaaaggactccattcaatggttcgagttcaccatagcatctagcatgtaccatcatacggcacttatcacattgcaagaacaaattgtcttcgtattcctcatccatatcacaaacactacaatagtctagatctttccaatttacatgaacagctctatacccacgaaaggtgtctccagcattttcaaaatactttaagcatgaccttgcattgggtaactcctgaataagttgccgtatttgtggatttgaaaagccaaacatataggaaccagatccctgacaaacatctctgtccaatccagaggccacattgcgctgtttttcctttaatctacaatatatctccttccaacatgtatttggggtagagccatcaatctgtgttccatcttctgatgtgaccctaaacaatggccgagcttttatatctgaattcctcagtacctccattttgtaaagtattactacatgtggatctttcactgatctgaacttcctgaaagcagtatacccttcaggccatatatgctttttgttatggaaatagtctgagtcagttactatcctacctaatttgctcacacgaagatttcctagttctattggagtcatctcatcataatcccctccgctttcagctgttttatcttcagataaattgtcacaagaatgtacatctttattggaattagcatcagaactgcccttttccatggatttctgtagttgcaacatattttctgggagaagctgtgtgcagagaaacctggcaaaatcatgagtaccaaagaattgaacaagtatcgactgatctagtcggcctggcttcaaagccctgttagcaggaacatttgattcatccaccacaacagctggccacatggcatgacctgtaagtttagcccacacaagatcacctggatcaagaccttggtaatcatgaaggctaacagcaagggcaagcaactcatcatagcccctcttgttcagattggaaattccaaatttcaagttcctgcacttcatttcttcagatgaaatagaaaattttatcctttcatcagctaggttaaggtcctctgattcgccatcatcatactttacttttgccttgcatcctaatcccacaaaggccagtggatccgcagcctcaatttccaactccaaccatctcctcccagccgaggaggcagcttccttgtgcacgccctgccgctgccgcctcttgggttcagagaagtaacccctcctctcagcccctccgctacgcctcaggcagcgccgccgcgcgggctcctccccatccccgcctaatgcgggcggggcttgccccaggctcagcagctcgtacttgagagaacccttccgccgtgtaacctcctcatcctcgtcgtcctcccgggggtgcagcatcggtggtgctgtggcaggcgagggaggtggcccctcgacccgcggcttcttacggcggcggcggtagtagacgatcacggggggcttgccgtcctcggcggagcggggcttcttggggagagggcacggagcagaggaggagtagacgcggccaagtgggaggtagcgaattgggtggtccacctcctcctcctcgtgcacgaagcccccctccaccgcgatcaccat

SEQ ID NO: 22129 - DNA, 796 bp, Oryza sativa
  unsure (1)..(796): unsure at all n locations
  Clone ID: TF_OsC88193_1
gctcgtggtggtgccctcttcctgtccccttcctgttcctgcgggtgctctggcctcccattcaacggcccctttcctggttcttgcggagccgcgctccagctcccctggtgcctccctcgggtgcgtgtggtacctcctcaggatcgggtttgccgcccccgctcccgcacgcgtccgcccacgcgtccgctgaatgttcctcgtcaaatattggttctacagaaccaatgacaggcttcacatcggcgagggatctttgcattgccatactgagggaagatggactcataactgaatctcgaactaaaatcaaggcagaggaattgactggttatgatgccgacttactgttccaatgcaaaacttgtgggaaatcagaccatccattaaagatgcttatatgtgattcttgcgaagcagcgttccatctgtcttgttgcatccctcgtgttcatgaggtaccaactgatgaatggtattgtctgccatgcttcaggaagaaaccaaagagtcagtatggcaagctgtcagagggaaaggtcaaatcttcagggaatatcaaccaaaggcctcatggcatgagtcatatagagtacatgttacaagatacgtgctgatatgttactggggttcgaantggtatagactntcaagcagaagtgccagaatggtcttgtcctacttccagcatgnttgncttgttattccttttcttggagnggggatgtttaattgcgaggagccctctgaatttgattctgctgacctcactaaactgaactggtcaaaaact

SEQ ID NO: 22130 - DNA, 4046 bp, Oryza sativa
  Clone ID: TF_OsC11114_1
atggcatgcgctccctcttcacacctggtacatatggatgttctggctgtgatatttctagaagaaagaagtgaaaaatcctcactttgttttgagtttggagggagagagagtagaggaaggaaacctccctccggatccaggaaatcctcatccatcctcatgacttccgacgagctcgccggtgagggtgaggtcgacggcgcggagctgatcctgtcgctgccggaggacgtgctcgggctcatctccgcccacctccgcccgcgcgacctcctcgccctctccgccgcctcccgcagcctccgcaacgccgtctccaccgccgacaaggcgtggctcgcccagtgccgccgcctcctccccaccgcctcccacctcctcgcctggcgcaccgccctcgcccactcctccctcgccgtctgccgcttcctccactccgccgccccgctcctcggcctctgggcccaccagaaccccgagctcggcaacctcgtcctcgccctccctggcttcctctccctcgtcgccgtccgctccatcccccaggagctctccccgcgcctcctctgggcccccgtcttcgagctcctcgccgaccaccgcggccaccccgccttcctcttcctccacggcgccgcccacgactccctcttccccggcctcctctcctcctccctccaccccctcgccaacaccctcttcctcgaggcccacacctccacctccacctcccacttctcccgcctcgccttcgccgaccgccgccgcctcctcaacgccctcgtcgccgcctcccgcctcaccctcccccccgatgtcgccactgccccgctcttcgcgcgctccgacgccgacctcccgctgctcgccgcgcgccgggaggccatgctgcgcctgcacagccagtctggcgggggcatggtgcgcagggccgagatcgaggcgctgctgatcggggccaggaagacggcggcgctgccggccgacaccgccggcgacaagatgcggctgcggaggaccttctcggtggtcgccggttttgtcaggaacagcctgcggcagatggtgacacggtcggcgtccgccaattccagggctgagtacgcccaccccaagcatctgccattggacgagttcctgcgagccggagagagcgtcggcctgagcctccgtggcgcgcggatgaggctgtctatctaccggaattggccaagcatgcatgacaaccggtttgtgctctacaagctgacgacgcaggcgcccatgcctggccgggagtatgccggtttgtggggaggcacattcgggtggccgccagggcggccggaggatgagcgcaaacctggcaaggctctcttcttcctactcctctcctatgaggaggacagcgaagggaagcttcagctgattgcaaccaaggtgttggagggtacacactatgtcgtgcatccgaatgggtcctctatgtttatcgtgcgggtcggtgagccatccactgagacttttccgtggcaaaccgatgaggagtcgcgtgctgtggagatcaatagaagctttgctggtgagggcattgccaccgggtatgggttcaggtatcctggctcaaagcccggatcgctctttgtcctcctggatggccggcttgcatttgtttggagagagaacaaagctgttctcaccttgcaaaggctggacctggaggatatgataaggagaggggagcgtgtgccttcattgccgccgatacccaacttcgcctacctcacaaagtcttactccaatgtctttgctgtggcacctggcagcacgagcttcccagcttctccaaggtttatctattttggtaattcagttgtgagcaaaatcagacgctttatgctaaactttagatataaactaaaatgtcaaaatttagcaaatgagctacagtcgcagatccagcctcctgatgataacatcatgagtattgattacctgcgtgctattgctacgtctacagctgttatggtagaatataaatggaggagtaaaagaaacgctactagttgtatttgggcctttgggggcgtatggagcgttgattttggtccagcccggcctttgccactcatggccaacggcgccaattctaagaaagacgccaaggcccaacattggattagctggagggacactctccacggcttcctccaatcccctgctattagccagggtggaggaattcagacctgcatccgtcatgctctccaacacaatccttgcttgctcaccaatggtgttgttgttcacactgaattcaaaggtaacccagctcattcccaaggagaggaagcaaaagtgcagcaccctaatggtgctgctggaggcaaggtggtttctgcagatgctgctatacaagatgcggctgccgcagcttcttccgaagctaacaaggcaatgtgtaataatgccctcttcgacattttggtctcccagaaatttgccttgttgtgccatttgctacttgggaccttccatgtcaataaacctggtgatgtcatcgacttggaaaaaatcgacgccaagatgagaaatggagactatgcccacaaccctgcactatttgacgatgatatccagcagatgtgggagaagtttgagcaagttggccaagagatgacaggtctagcgagcaacctttcaaccatttcacgagtttcataccaaaagcaggcttctggattttctgaagctgaggtggctgagcacagaatagaggaaataagtttgccgggtgctgtccacgttgtcacaaaggagtcgactaccaccgtgcagttggccccatgtgattctagtcattctacaataccgaaacgaactgtgccacctggacgtgatctgtgcccttgcgatggttgtggcaccaaggtagatgttgaagaaggcctaatctgtgatgaatgtgacaccatgtaccactttgcatgtgtcaagctactcaatcctgatattaagcaagtcccagcaatctggcattgttcaacctgcagcttcaagaaaaaagaattggctgcagataccacgaataatgttgcccatgactgcttgcatggtggtaactgtgttttgtgtgaccagctcgagctggtgaagacagaagaagaagatcccaagcttcccataaaaattgaattagctgaagaaagagaggggagctccgtctcaagcatgggggaagacaatgaaccagacctgtcaacaactgccctgtcaaacttgtgcaaacactgtggcacatgcgaagacgatgacaagagattcatggtatgcggacatccttactgcgtttacaagttctatcatatccgatgcctgaaaacaagccagcttgcaattgagcaacaaaagaagcttggttgctggtactgcccctcttgcctctgcagagggtgcttccaagacaaggatgatgaccagatagtcatgtgtgatggctgtgatgaaggttatcacatatattgcatgagaccagcacgcaacactatccccaaaggtaagtggtactgtacattttgcaagatccgcagggcagcggaaggaatgcataagtatgaggattctgtgctgaaaatacatgggaatagtaagcatgcttgtaatgtgaatcagtcgaaggattctgaaggtgatggtactgaaaagtgatcatcacaatagctttgtggattagcttctgagctcgcttggacaagctcaggaaaagagattctttggccccttaggagggctatacaccgactttgatactgaatcagttgtgtagtttatttaattaactgccgttgacatctacaggaagaactcttacctggtgaagatggtgtatgtagtcttttagctgggcggaatgatgtgtctgtgttacttgttcaccttccttctttacccccttgtcagtgaccattgtgaatgttgtcctgtacttgccctgtgatggtattcttaaacacttttttttgggggaaatatgattttgtttttttaaaaaaaaaaaaaaaaaa

SEQ ID NO: 22131 - DNA, 1246 bp, Oryza sativa
  Clone ID: TF_OsC1327_1
gcacgaggcccgctgcgtcccgttcacaccaccaccgtctcgtcgcctcgtcggcggcgtctcctccgcgcgagggtccccccccaaaccctagccgccgccattgccacgcgcgcgccccccaccccacgaatggaaggaggcggaggcggaggcggaggcggtggcggaggtggaggtggaggaggcggaggcggggcaccgtacgccacgcgcacggcggaggaggtcttccgcgacctccggggccgccgcgccggcatgatcaaggccctcaccaccgatgtggagaagttttacaagctctgcgaccctgaaaaggagaacttgtgcctttatggatatcctaatgaaacatgggaggtgaccttgccagctgaggaagtgcccccagagatccctgaaccagcattgggaatcaacttcgctagggatggcatgaatgagaaagactggttggcgttagtcgcagttcacagtgattcctggttactgtctgttgcattctactttggagcccgatttggttttgacagagaagcaaggaggcgactctttaatatgataaacaatttgccaacaatatttgaggtagtgacaggagccgctaagaagcaggcgaaagaaaagactcccaacagtagtagcaagagcaacaagcctagttcgaaagtgcagtcaaaagctgagtctcgttcgaaatctaagctgtcagcccccaaggatgaagagggaagtggtgatgatgagggagaggaagaggaggatgaccatgacaacactttgtgtgggacctgtggaaccaacgatggcaaggacgagttctggatctgttgcgataactgcgagaagtggtatcatgggaagtgcgtcaagatcacacccgctcgtgccgagcatatcaagcagtacaagtgcccggactgcaccaacaagagggcccgggcatgagtaacaagaagctgtgtcgaactgtgttagagtggagttgtcaatctccggatgtcatgatctcttagatattatcttgccctagcttttctagtttgtaagcttgtctctaatttaattttaaactgtaactgttgattaacctacctgtgtttaaagcttcatctttcctgtgttaattctagcattcatagtgtgtaaacttgcacatcttgtgtcaactgaagcctgaaggtactgcggctcccctgacccaaaaaaaaaaaaaaaaaaaaaaaaaaaaaaaaaaaaaaaa

SEQ ID NO: 22132 - DNA, 419 bp, Oryza sativa
  unsure (1)..(419): unsure at all n locations
  Clone ID: TF_LIB3434-034-P1-N1-C10
acataattgcagccatgaaaaactggcatggcggatatgaatccttgttatcgttatgtacatgttagctgatttgaggccacagtaatccttcagccgcattgctaaaggaacctgtgccagtcttacatcttttgttaggtgcactactatacatgagcctaggaccactgctcttcggcttgtgggttagtttacatgatttacatacatatctctttggaaccctatcaaaatcactgattccagcacacctagtgtgcatccacatatggcaagtgtcacaggatagcattctctcaccgtcatcgtccgttgctccacaggagcatttaactgtccatttgtccacacccatctccatgcggtcaattgcaaaccgtgtnnnnccaccaatgcacctgcctttgatgtggaca

SEQ ID NO: 22133 - DNA, 3242 bp, Oryza sativa
  Clone ID: TF_OsC133489_1
atgtccacctcccccggccgcacccgctccggccgccccctctcctcctcctcctcctcctcctcctcctcctccgcccccgcccctgcccccaagaggcggaggagaccggacaagccccccgaccacgaccccgcccccgcccccgcccccgacaaggatcttctcgtctcccctcacacgcctcctatggacgccgaggcgcccaagcccatacacctcctcaacgacaaggacaaggacaaggagggggacgatggatctcaccaggatacacccacgctacagtcaccccctcgtggatctgatgctcatccaataccaacggagctcaatgtttctgctgctgtcgccaggcctccacaaccaccccatgcacaaccaacggagctcaatgctgttgccgccgccgcgtctgctctaccaatggagcttgatgctgctgctgctgctgctgtgcctgccgaatcaacggagctcaatgctgctgcaaccgctgtgcccgcacaaccgacagaggtcaatgctgctgctgagattgtcaaaccaattgggctcaatgctgtcgctgctgagactgcaaagccagacatggccatggaattgcaggaaccgcctactgtaactgcagccaatgggagggatgtttcccatgaatcatttgaacaaaacctgcaacaccaggtcctggacaatgccttaaccgatccttctttgcttgccgagagcactgcaacaccagcctctactgctggcctcaagcctgcgaggcgcttcacacgatcgctgctcaagaacaaaccagaggaagagcccacagctagcaaaagtcaagaccctgctgtctccatgatatcggaggacaacaacgaggcctctgttgatttggctcttgccccagggaagccacagaggaggttcacaaggtctcttctcaaggtaaaggttgaggcgcgctctaccaacaatttgcttcaatccaaggaggcaattgacagcacatcagactcttctcggtcagtgaagaagatggagatgaagatgtctaagaaggtcgcctgcctcacaaagcacccaagcaacattagagagttgctcaacactggcctgctcgagggaatgccagtcaggtacatcatccccagtagcaagttgcagaaggctgtgctgaaaggagtgattacaggctgcaatatccgttgcttttgtttatcctgtaatggttccaagaacatctttcttcatcacaaactgaaatctttggaagctttttgtgtcaacgttgccttgagccaaaacaacatcaagatcccccttccccatcttatgcttgtaagagcaattccagggacaccgggctacacaaattggtctttaaagttctgcttgatgaggaaagttgatgggtatatcaaggatcaaagaatctactgtaatcactgcaaccgagtggttagcccgtcagcatttgaggctcatgcgggtgagggaacaagacgcaagccgtatgacaatatttttacatcaaatggagtatcattacatgagctgtcaatgaaaatatcaaaggacatggaattatctgaacgcgaaacagatgatttgtgcagagaatgtggtcaagggggagatattttcccttgcaaaatgtgcccaaggtcatttcacccagcctgtgtagggctgtctggagtcccctcagagtggtattgtgataattgcagcaaccttgttcaaaaggaaaaggctttagcagaaaataaaaatgctaaagctgctggaaggcaagctggagttgattctattgaacagataatgaagagagctatacggattgtcccaatctctgatgaccttggtgggtgtgccctatgcaagcagaaagattttaacaattcagtatttgatgagcgcactgtgatactctgtgaccaatgtgagaaagagtatcatgttgggtgtttgcggagccagtggcaagttgacctgaaggaattaccagaaggggagtggttctgttgtaatagttgctcagagattcgttcttccttggacaagataatctctgatggagctttgattttggctgagtcagatattgatatcataaggaagaaacatgagatgaaagggttaagcatggacactaatacagatctgagatggcgattacttgctggtagaaaggcttctgaagatggtgacttattgctctctgctgcagtcccaattattcatcaatcttttgatccaatcattgaagttcagagcgggagggatctaattcctgagatggtcaatgggaggagacccaaggatggaatgcctggccaagattatagtggaatgtactgtgcagtgttaactttaggcacttctgttgtgtcagctgcattgttgcgagtcatgggaggtgaagtggccgaactgccactagttgctacaagtaaagaccttcaaggactgggctacttccaagctttgttctcgtgcatagagaggatgcttatttctctgaagatcaaacacttcatgcttccagccgcccaggaagctgaaggcatctggatgaacaaatttggcttcactaaaattcctcaggaacagtcggatgcttatcttaatggggcacacctgactatattccatggaacgtcaaatctgtacaaggctattccttcgtcataatattggtttgaagccttgtgctgtgcatgtatgcagtcagacagatttgtgttttgaagctctgctgacaactgtacataagatgatgaagcatgggctaaaggatgatgatagcacacagaagaaagggggagaaaagatgaaagataaaagtaactcgaggcggcatgatattggtcgaccaaaattcttatccttcagtttggagatatgctggatgatggaggcaatgcattttgcttaattttgtttatctttttttaaaaaaaaaaattggctttcagcattttcagtgtggctgctatgccgctgagaaatgcagctatttttgatgtacagacctcaaacatcagaaactgcaggtttaatgcagtgctgaccctgttctgtttggagttagacttttggtctgtttcttgggttggcattattgcaagatttggaagggcctgtttgatgtggctgtcaagttttgatgggaaagagcatattgtatttgtggatatacatgctagcttaagtaaaagttttgaaggaatgcagtaagtagtggt

SEQ ID NO: 22134 - DNA, 2094 bp, Oryza sativa; identical to SEQ ID NO: 12684
  Clone ID: TF_OsC294928_1

SEQ ID NO: 22135 - DNA, 1014 bp, Oryza sativa
  Clone ID: TF_OsC78000_1
agaaacaaggcatgaacaaatttcctctaaaggctacaatgtaacagtatccatatctcaaatgaacaaccacaacagtaaccgaccagtttatgaaacaaactatcctgtaaagtttcttcttttttgttttccagcatctaccacaacagtgcgcaatgttctagagcaaattcttcacatctgccgccaacttgggactggaagagggatggcaagtatcatttgattgatcagcttagtcagcagtagagagccacagcagcagctccatggtttttattgcctactcttcttggagctgctgcaatcagggcacttgtagtgctttatgtgttccgctttcgctggtgttatcctaacgcatttgccgtggaaccaccgctcgcaaatgtcgcacccaatccaaaactcgttggcgttgtagcggccaccgcaggttccacatagggtttcactgtgttcttcttcatcgtacccatcgtcaacaactgctggcctcgaggtttttgtctgcacgtcatttgctcgctttcctgagtgcctggatttgctgccattgtcggcaccagatttattatcccttccatgcttcctatcagacagtgcttcaagcacggttggatggtcattgatcaagctgaataagcgcttcctctcgttgccgttgaggcgcgcgccgaagaagaaggcgacggagagcagccacgagtcggagtggacggcgacgagcgagagccagtcgcggcggtgcatcccgtccctggcgaagttgatcccgagcgccggctccggcagctccggcggcacctcctccgccggcagcgccacctcccaccgcccgttcgggtgcccgtacaggcacaaattctccttctctgggtcgcagaatccgtagaactcatccacatcgacggtgagggcgcggacgaggccggcgcggcggccggagaagtccttgaagatgtcctcgacggtgcgcggcgcgggggagacgggggcggccatctccat

SEQ ID NO: 22136 - DNA, 2256 bp, Oryza sativa
  Clone ID: TF_OsC53130_1
atgggcaccgcccgcggcagggtcgccctggagggcggcggccggcgccggaggaagctggacgaagaggatgatgaggagtatgtggcggacgacgacgaggagaaagacgaagacgaagacgaggaggagtaccaacaggccgccgccccctccgacgacggcgaggaggggggcgacgacgaaggggagcaggaggacgaatcaggtgcggatttcgtcggggacgaggaggaggaggaggaggacctcgaagacgcatatgatttggaggaggtcaaggcgccgcgccccaagcgcccgcccaaggggaagccgccgccgagatctcgccgtcggaggcaaaaggacgacgacgatgactacgaagaggaggaggaggaggacgccgacttcgatccggacgtggacgaagacgacgaggaagagaaagacagcaccaagaaccacgtggccaagcggcaacgaccacccgctcgtaagaagaacaagaggaaccctgctagggtttttaagacaaagcataagaagcacagctcagggcgtcgacggagggagcgctgggatacagatgacgacgaggaacaagaggaggatgcggatcacatcttgaaggacgatcaggaagtagagccggacgcccgccacccaaagaagaaggcctaggctgctaggaagaccagggatgtcacgccggagccggatgtcgaggcaagcgcatggccggccgtcgaatcagacacttcagaattcgaattcgtgacatctgatgaagaagctgctgacaaggaagcaccagccgctgaaccagcaaaaaccaaggggaagaagggcaggaagaggtggggatctgggtcagagtcatcatctgattctgattatgtcatatcagagcaggaactgaaggatctggaagtctccatgcctccagatgcagctctgcaatcacctgcaaccctgccgcgccggacctttctttcaaggagggtgggggagaaggggaaagagcctgaagaggcttggaaacagacatgtgggatatgcctctcggaagaacagagagccacgatacagggtgtgcttaattgctgcgcacattacttctgcttcgcttgcatcatggagtggtcaaaggtggagtccaggtgcccattgtgcaaacgccgattcacaacaattaccaagtcatcaatggcagatctagggcttggatcaaggaaagctgtcattagggtagaaaaacgtgatcaggtgtatcagcccacagaagaggaaatgagacgttggttggatccgtatgaaaatgttgtatgcatagagtgcaatcgtggtggtgatgacaacctcatgctactatgtgatatttgtgattcctcagcacatacctattgtgttggtctaggaagacaagtaccagaaggaaactggtactgcggaggatgtagatccggtggggagggcccctctgcacaggatacggtggttcactgcagagaaagtaataccaaccctgccaacagtagttctggatcatttggctcagccacaccaagtggagtgttccagagaccaccaccaatcaacacccaaccttctctacaaggattcgatctaaatctctcaccaagagaaacccctgatgaagataagcgagaagagtcacatgtttcagctgatgctgtttcgactcctactggaaggcatgccactctcgataggaggcgggcctttaaccgacgaattcgcatccttctatttagaccaagggtcacacctaatgggtggcagaatccgattcagtctgacaggacaataccagagaatgaacaaaatccacagagcacgtccactccaactgaagtgaacccatcatgttccagggatagttctatgcagaaccagcagagtagctcatcttttgttcagccagcaaggggtcttattgaacgcacctatgggggtggaagcaatttccaacaaacagaaggtgctaaggaacagctgattcctattgtcaagaggaacctcaaactaatgtgtgctcagtccccattgggtcaatctgatttcaagaatgttgcacggagagcaacacacactatcttagcactgtctgggattgcacacaacgaggattttgttgtcactatattggatgagcgagagatggaaatgaacattgtgcaatcaaatgttatgttgagaaatggttgcagtacagagtacagaccatgtctaagttgccttagaagttag

SEQ ID NO: 22137 - DNA, 1314 bp, Oryza sativa
  Clone ID: TF_OsC4349_1
ctggaggcgcctcctcggcgggcgagtgcgctcccctcgcctctttgtgtttttttttttatcaataatgaggctgagaataaatgaccacaagcaatttttaacaaactacaagagtacatgtttgacacaaatacacaattcaaatctaaaacactaaagagtccagtacaggtgcacttagaagggcttgaagaagcataagctattacagttagtttctactactaacagaaaatctagaattgatgccattgacatacaccaaacaacacattaaagaccctaaagctggtcctaaactgaaaaccaacagctgaatgcatatccattgggcattctatctcatgagggtctttacagcgagtcaaattcttggttcttcagacataagccatagagggatccaccatcaagctctggctctcttgctactactgctgcagttcgggcacttgtagtgcttgatgtgctcagccttggcaggggttatcttgacacacttaccgtggaaccatgtctcacaagcatcgcagcagatccagaactcatcctgtccatagttgtcaccacatgcaccacataatgtgttttcgtgatcttcttcttcctcctcttcctcacctccgctatcatcctcatccttcggaggtggcatctttggacccctagagttgggttccggctggcgcgatggcttcgtgccggatttattgctcttgccactggtcttgggggttttttctttgctctgcttctttgcagtcccagtgacaacctcatatatggttggaaggttgttaatcatgctaaaaagccgtttcctggattctttgtcaaacccgaatcttgctccaaagtaaaaggctactgctagcagccaggtatcactatgaaccgcaacaagtgacagccagtctttctcatccatcccatcccgagcaaaattaattcccagagctggttctggaagctctggaggaacctcctcagcaggcaagttcacttcccatgtctcattgggaagaccatataaacacaaattctctttctctgggtcgcactgctggtagaacttctccacatctgtggtcagcgccttgatcatcccggcccgccgcgcgcggaagtcccggaacacgtcctccggcgtgcggtgcgccccgcctccgtccattccacccaccaccaccaccaccccaccgccgccgcgccctcctcctccgccgctcccgcccgccgctagggttagggttttggaagagagagagatagagagagcgcaaagcgaagcacaaaaaaaaaaagcttacc

SEQ ID NO: 22138 - DNA, 828 bp, Oryza sativa
  Clone ID: TF_OsC31997_4
gtggctttagccagtcagacttatgacctggttgatgctcatatccaacagctagatcagtttatgagaaaacttgaagaacttcgacaagaaaaggaggcagctacaactgctgctgctgctgctgctgcggcggctgctagtgttgctacaggtacgcctgttgctgctactgtaacagctagcgctggtacttcaactgctgacaatactccaaaaggtggaaggtctagcgaaagaggccgagggggtcgaaagaagactgctaaggtgcccactgagcaaccagcaccagccatagatttagaactgcctgtggatcctaacgaaccaacatattgcctctgcaaccaagtcagctacggagagatggtcgcatgcgacaataatgattgcaagatcgaatggtatcactttgggtgcgtcggcgtgaaagagcatccgaaggggaagtggtattgcccaagttgcattggattccaaaagaagcgaaaaggaaagtgaaatgtgatcaacccttgataggaggtagcttcttgatgataagtggtgatggacgtgggtaacaaaaacatagtagctggtactgtgaaatactgttgtagcttcagtgatgatgtacatgttacccctgtgttaccgaggaaatgctgtaggcgtcttagagttagggaccagtcaatcatgaagagcagttgtgcctgtattggtgtatcttcattgcctttttttggtggatgtgtaggttgtaattgtaatctatccctcccatgtgggcttgatgcaatctacacataaatctgtttatacctaaaaaaaaaaaacaaa

SEQ ID NO: 22139 - DNA, 2212 bp, Oryza sativa
  Clone ID: TF_OsC152828_1
atggcgcctaagatggtgatcagcctggggagctcgcggcggcggaagcgcggcgagatgctgttccggttcgaggccttctgccagcccggctacccggcgaacttcgccggcgccggcggcttcagggacaacgtgaggacgctgctcggcttcgcgcacctggaggccggcgtccacggcgagaccaagtgctggtcgttccagctcgagctgcaccgccacccccccaccgtcgtgaggctcttcgtcgtcgaggaggaggtcgccgcctcgccgcaccgccagtgccacctctgccgccatattgggtgggggaggcatctgatatgcagcaagaggtatcacttcttgctgccgaggagggaatcggcggcggaagccgacggcctgtgcttcgcgatcaaccacggcggcggcggtggcgcggagaaagcgtcgtcgaaagggacgacgacgacggcctccagcagaggccacctgctacacggcgtcgtgcacctcaacggctacggccacctcgtcgccctccacggcctcgagggcggctccgacttcgtctccggccaccagatcatggacctctgggaccgcatttgctcagccttgcacgtaaggacggtgagcctggtggacacggcgaggaagggccacatggagctgaggctgctgcacggcgtcgcgtacggcgagacgtggttcgggcggtgggggtacaggtacggccggccgagctacggcgtcgcgctgccgtcgtaccggcagtcgctgcacgtgctcggctccatgccgctctgcgtgctggtgccgcacctgtcgtgcttcagccaggagctccccatggtggtcaccaagtaccaggccatcagcggccacaagctgctcagcctcggcgacctcctccgcttcatgctcgagctgcgcgcccgcctgccggccacctccgtcacggccatggactaccggggcatcatgtcggaggcctcgtgccggtggtcggcgaagcgcgtcgacatggcggcgcgcgccgtcgtggacgcgctccgccgcgccgagccggcggcgcggtgggtcacgcggcaggaggtgcgcgacgcggcgcgcgcctacatcggcgacacgggcctcctcgacttcgtgctcaagtccctcggcaaccacatcgtcggcaactacgtcgtgcgccgcaccatgaacccggtgaccaaggtgctcgagtactgcctcgaggacgtctccagcgtgctcccggcggtcgccgccggcggcggcgtgccggcgcagggcaagatgagggtgaggttccagctcacgcgtgcgcagctcatgagggacctggtgcacctgtaccggcacgtgctcaaggagcccagccaggcgctcaccggcggcgcgttcggcgcgatcccggtggcggtgcggatggtcctggacatcaagcacttcgtcaaagattaccacgaaggacaagccgcggcgagcagcaatggcggtggcggattcgggcatccccacatcaacctgtgctgcacgctgctcgtgagcaacgggagcccggagctagctccaccgtacgagacggtgaccctgccggcgcacgcgacggtgggcgagctgaagtgggaggcgcagagggtgttcagcgagatgtacctcggcctgaggagcttcgcggcggactccgtcgtcggggtcggcgccgaccaggagggcctcccggtgctcgggctggtcgacgtcggaagcgccgtcgtggtgcaagggagcgtgggcgagcagataaacggggaggaccacgagaggaaggaggaggcggcggcggcggccgtgtgcgaggggagcggcggcggcgagcgcgtcgtggactgcgcgtgcggcgcggtggacgacgacggcgagcgcatggcgtgctgcgacatctgcgaggcgtggcagcacacgcggtgcgccgggatcgcggacaccgaggacgcgccgcacgtcttcctctgcagccggtgcgacaacgacgtcgtgtcgttcccgtccttcaactgttagatgtgatgctgctgctgctaactgctactactacttgcctctgctgctatatatgatgctaacctagtacaaagtgatccagaattcaatttgttttctcggcaaaaccaaaatgaaaacgaaggtaaaaccaagtgaacttcagatcaaacaaaaaaaaaaaaaaaaaaaa

SEQ ID NO: 22140 - DNA, 1268 bp, Oryza sativa
  Clone ID: TF_OsC32575_1
gcacggggctccccgcgccgcgctctcctctcctccgcatcgcgatcacctcctcctctcctctcctcgcctcgcctcgccggagatcgcctcgcccacgcgccgcctccctcccatggacgcatcctaccgccgcgacggccgcggaggcggcggcggcgggggcggcggcggttccgcccctcgctccgtcgaggacatcttcaaggacttccgcgcccgccgcaccgccatcctccgcgccctcacccacgacgtcgaggatttctacgcgcagtgcgatccagagaaggagaatctgtgcctgtacgggtacgcgaacgaggcgtggcaggtggcgctgccggcggaggaggtgcccaccgagctgccggagccggcgctcgggatcaacttcgcccgcgacgggatgaaccgccgcgactggctcgcgctcgtcgccgtccactccgactcgtggctcgtctccgtcgccttctactacgccgcgcgcctcaaccgcaacgaccggaagcgtttgtttggcatgatgaatgatttgccaactgtttacgaagtcgtatctggttcaagacaatctaaggagagggacagatccggcatggacaacagcagcagaaataaaatttcatcgaagcataccagcgacgtggcgcgtgtcgaaaataatatcaaggaggaagatgaaggctacgacgaggacgatggcgaccacagtgagaccctatgcgggacttgcggtgggatatacagcgccgacgagttctggatcggctgcgacgtgtgcgagaggtggtaccacggcaagtgcgtcaagatcactccggcgaaggcggagagcataaagcagtacaagtgcccgagctgcagctccaagagacctagacagtagtagcatatgccaccctcctccggcgagaggaggtgtcgccggcgacgccgccattgacagaggcgtcaggctgtgggttactgtacctttcgtttttcgacttacatatgatgaagatgatgccaaatgtgaggtaagaagatcacaagacattcatgtgaggtggagatatgaggctatgtatgttgccagaggaataggggtaacgtaatatatgtaactttgcgaaacaagatggaagtttatctgacaataatccgagaggtttgtgttgatatgttgtgtcaatgactcgaatccgctgtaatgtgggtcttgtacctgaatacatgggtttattcccattagataaagccataattttatgacatttccc

SEQ ID NO: 22141 - DNA, 567 bp, Oryza sativa; identical to SEQ ID NO: 12728
  Clone ID: TF_OsC308411_1

SEQ ID NO: 22142 - DNA, 1345 bp, Oryza sativa
  Clone ID: TF_OsC359_8248
cttgttttaactgaagttgaacttcccttgatgtctgggttcctgctgctctccacgatcatggaacatgacgcatgcaagaatatccccgtcataatgatgtcttcaaatgattccgttagcatggttttcaaatgcatgctaaagggtgctgcagatttccttgttaagccaatacggaagaatgaattaaggaacttatggcagcatgtttggagaaaacaactgtccagcggtgttcttgatgtgcagcatactcaacaagaagataatcttacagaaaggcatgagcagaagaccggagtgacgaaagctgaacatgtgactgaaaatgttgtccacaagaacatggaatgcagtgaacaagaaagtgatgctcaaagttcatgtacaaggtcagaactggaggctgacagtaggcaaaccaacaatttactggaatataagcagccaatgggaaggcatttctccaagcctgaccacaagaacaccgagaaaaatggagggactaaaattcatgcatctaatgatggcaacttgattccacggagggaagaggatgcatcactgaggaggatgacatgttcaaatgatattaattgtgagaaagcttccagggatatggagctggttcatattattgacaatcagcagaagaataacacacatatggagatggatgttgcgagagcaaattcccgtgggaaatgatgacaagtgcttttccattccagcacaccagttagaactttctctcagaagatctgactacagtagattagagagccaggagaaaaatgaacgaagaacactgaaccactcaacttcatctccattttccttgtacaactgcaggacagcatcatctaccattaatgctggtgatgctcaggcatgcagcacctcggcaacacatatagatcttgaaaacaaaaatggagattccaaaactccctctcaagacaagagggaaacaaaccaacctcccattagagttgtaccatttcctgttcctgttggaggactaacatttgatgggcagccattctggaacggtgcacctgtggcatcccttttctatccacaatcagctcctcccatttggaatagcaaaacatctacctggcaagacgcaaccacacaagcaatttctctgcagcagaatggtccaaaagatacggatactaagcaggttgaaaatgtagaggaacaaactgctcggagtcatctaagtgctaatcggaaatggtacaactctaatgggaggttggtttgtttccctcttgtcttgagagggagttttggaatctctattatgcggacgcgtggtcgacggggattcgac

SEQ ID NO: 22143 - DNA, 754 bp, Oryza sativa
  Clone ID: TF_LIB4370-019-R1-K1-H1
agaagagggagaaaaaaatatctgaagaaaaaaaaaagaggagaagcggtttgtatttgctggctggtttggtttccacgccctccgatttgattcgctgctgacgtggcacccaccgcgtaaaaaaaaatttgcagatattttcccacctcccccttctcctctctctcttcctcctcctcctctctctcctcttccaaaatgtctcccgacgccgacgcggcggcggcggcggcggccggcggcgagggcgcggcggcggcgggggtggggacggcgggtgaagggcggggggtgatccggtgggaccagatcctgccgcggcggtccctccgcgtgctgctcgtcgagcacgacgactccacccgccaggtcgtcaccgcgctcctccgcaagtgcggctaccgcggtgagtacccctcgctctctccctacctaaaccctaatcgctctcctctcctcgcgattgattgctattgagagttttctgaggagggaattgggggggattggttccctgtttgccctgtgtgctcgttttgatcggaggtgagcagtggcggcggtggcggacgggatgaaggcgtggggggtgatgcgggagcgggcgtacgccttcgacctcgtgctcacggaggtcactatgcccacgctctcccgcatcgagctgctctccaggatcgtcgcctccgaccagtgcaagaacatccccgtcataatgatgtcgtcccaagattctattggcacagtgctc

SEQ ID NO: 22144 - DNA, 616 bp, Oryza sativa
  Clone ID: TF_LIB4370-026-R1-K1-B1
agcagtgtaagagttcatgggctcgcaagatgatcagggtgctcctcgtcgaggacgaggagataatagggtcgtggcgagagcggcgctgaaggcggcaggcggcggcgacgtcgtggacgaggcggagaacggggaggtggcggtgcagcgggtgcgggacgcggcggcgccgtacgacctcgtgctcatggacaagcagatgccggtcatggacggccacgagcgtgtgttgttgttgtgcaggcgacgaggcggatccggggcatgggggtgaccacgccgatcgtcgccgtgtcgagcgacggcctccccgccgacgtcgacgcgttcatcaccgccggcgccgacgacttcacgtccaagcctctgtccaaggagaagctgggagtcatccttgccaaatttagacttgcttaacgacgtatatatatgtgtactgcttaattagtatatatgccttgctagatcaagatctccaataaacgggatttatggagtatatatgatgctgcgtttaggaacaaaattttaggcgtgtaatctccgaaaaaaaaaaaggtgtgtaatgtgtatatatgtctgaactaccttacaaagtactatgatcatgatg

SEQ ID NO: 22145 - DNA, 2620 bp, Oryza sativa
  Clone ID: TF_OsC359_8450
ctctaaactagtggatccccgggctgcaggctcgaggagagagagagaggaggaggagaggtggttgcgccttgcgcggtgaaagggtagttaccgccgcgggcgactccggcgaggaggggcgagtgggctggagctagcggcgggggaatggggggtggagtggaggagaggaaggtggtggacttggaggacggggacggggaggaaggggaggatgcggcggcggtggcggcggggtcgagcagggagacgcggatgctgccgaggatgccggtgcgggtgctgctcgctgagggcgacgactccacgcgccacatcatctgcgcgctgctccgcaagtgcgggtatcgagttgccgcagcctctgatggtgtgaaagcgtgggacatactaaaggaaaaatctttcaatatagaccttgttttaactgaagttgaacttcccttgatgtctgggttcctgctgctctccacgatcatggaacatgacgcatgcaagaatatccccgtcataatgatgtcttcaaatgattccgttagcatggttttcaaatgcatgctaaagggtgctgcagatttccttgttaagccaatacggaagaatgaattaaggaacttatggcagcatgtttggagaaaacaactgtccagcggtgttcttgatgtgcagcatactcaacaagaagataatcttacagaaaggcatgagcagaagaccggagtgacgaaagctgaacatgtgactgaaaatgttgtccacaagaacatggaatgcagtgaacaagaaagtgatgctcaaatgtatttagcccttcagatctgcatcaatgttggtgaactaatttatcaatttttcaagtcagcgaaatgtcacagttcggtcctcttgggtattgcaaaatggagtacatatgacaacagtaagagttcatgtacaaggtcagaactggaggctgacagtaggcaaaccaacaatttactggaatataagcagccaatgggaaggcatttctccaagcctgaccacaagaacaccgagaaaaatggagggactaaaattcatgcatctaatgatggcaacttgattccacggagggaagaggatgcatcactgaggaggatgacatgttcaaatgatattaattgtgagaaagcttccagggatatggagctggttcatattattgacaatcagcagaagaataacacacatatggagatggatgttgcgagagcaaattcccgtggaaatgatgacaagtgcttttccattccagcacaccagttagaactttctctcagaagatctgactacagtagattagagagccaggagaaaaatgaacgaagaacactgaaccactcaacttcatctccattttccttgtacaactgcaggacagcatcatctaccattaatgctggtgatgctcaggcatgcagcacctcggcaacacatatagatcttgaaaacaaaaatggagattccaaaactccctctcaagacaagagggaaacaaaccaacctcccattagagttgtaccatttcctgttcctgttggaggactaacatttgatgggcagccattctggaacggtgcacctgtggcatcccttttctatccacaatcagctcctcccatttggaatagcaaaacatctacctggcaagacgcaaccacacaagcaatttctctgcagcagaatggtccaaaagatacggatactaagcaggttgaaaatgtagaggaacaaactgctcggagtcatctaagtgctaatcggaaacatctccgcattgaaattcctacagatgagccgcggcatgtttctccaaccaccggtgaaagtgggagcagcactgtgctggacagcgccagaaaaacgctcagtggcagtgtctgtgacagctcttccaaccacatgattgcccctactgaatcatcaaatgttgttcctgaaaatcctgatggtttacgccacctgagccaacgagaggctgcactgaacaagttccggcttaagaggaaagacaggtgctttgagaagaaggtgcgataccagagcaggaagctactagccgagcagcgaccgcgggttaagggtcagtttgttcggcaagatcatggtgtccaagggagctagggctgtccaaacttcaggagattgctgtgccacggttatcctggtggtcagtgtcagattttgtttgaagagtgaaagtatgattgccctgacctacagtcagcagtgtatggtggtgttgcatatatatacaggctaacttcgtgtgctaggttaggccatggacctcgtacattgtagagtttgtcagtagggatcatattttgcttcagatctagataagctgcgtttatcatgtagcacacgtatttatgttttctaaattgtatctagccaacagttaacgtgtaagctggacgtgtgtggatgtaaggtgtcaaggatatccaaagacaaagttcttttgtacagtttcttacactgaacatcgttggtgtagtttcatactttcagtaaagcttgtgatgcttccgaaaaaaaaaaaaaaaaaactcgagactagttctctctctctcctcgtgccgaattcctg

SEQ ID NO: 22146 - DNA, 633 bp, Oryza sativa
  Clone ID: TF_OsC261347_1
tgtctgcgcgcggggcggcgaggcgagggctgtcgcgattcctcctctttcaaatactcccacggcgaggaccgcggcgagggcgcgcgggccattgctgctgcttcttctgctgctgcgtgtgtgtgggtgagacctgagaggatgggggcggaggcggtgagggtgctggtggtggacgactcgccggtggacaggcgggtcgtggagctgctgctccgggcgcactgcggtggcggcggcggcgccgccgccggcgaggcggctccgttccacgtcaccgccgtggacagcggcaagaaggcgatggagctgctcggccggcggcggggggaccgggaccacctcaccccatcctctccggcggcggcggcggcggccaacgttcgtccccccgcccccgtcccggccgtccactgcagcccggtgatgtctcatcacctgatataggagtgttcatcaattctgaacgaactcggtctctctcaccccctcctctgacacaaagtctaactcgctctgttctttctctgttcctcggagagaaatttaatcccttcactaatcatcactagcagagcaacagtgcggtagtttgaatgtctgatgagttctttgatgaaactcatgttg

SEQ ID NO: 22147 - DNA, 2553 bp, Oryza sativa
  Clone ID: TF_OsC1281_24
gaatgcatcagggtacgctttcttggcctcctcgagctctttgagcacctgggtggcgtcagtgcacccgaacatgggcagcttccacatggtccagtacctgccatcgtagtatccgggggatctgtggttctcacggtagacgaatccgaccttgctgaactcgaggcagggcacccacttggatcgaagcaggtactcgatctgcttcaaaagatcctccacggtgagtggtggcaggtacgatagggtctcgaacttcttgatgccctcaattggccacacctgcatgcacttgatccttccgccattgctgacgttgccgaagcccgagttggtggagcggcggctgacggggagcccggcggtggacttgagccctaggaatggagccacgataccattaacagtctccatgtttggcctcccaacattgggagcagtactaggtcctctttgcccattgtttccattatggccacctgaaaagctcccgttcacactatagtttgccgcatgaccttcaatgggaggatcaaatacattggatgaaccacactgagcatctgatgatcctcgctcaatggatggctgctgctgctgctgtgtcataacatggacgtagtaatgaacatgatgatggtgctgcataaagctattttgtacatctacagggtggcccacattaactccattagcaattccttcatcaactttgtctttccctacaacattagcaggtgacgtttgacgctgcacaggatggaatgctgatgtatgttgggtagctttgacagctgatggtgatatcacttttcccctgtttgaagaaggttttgtgatggcattcttagtactggagcccatgtcattgttgttgctactaccattggagccttgctttatttcagcagcatctgaatttgacttcaccttgcagttggagtctgttttcagagcctctgaactgttatcttgaggtgaacagcttcccccaaatccagctccaccttgattagaagccacagttgtatggtacctggtgaaagctgagagatctgatcttttcagaatatttcgttcatcatggatttcagttgcagatccagttgttttcaatctcttcaaacccaactcttcagatgtcatatcaatgagagaatcacgatttttatcatttccatctggaaccttggaggagcaatcaggagcattattgattctaactacttgtttgtcatctgtgcttctggctattgaactaattaaatcaacagtttgagtagttggttcattctgtgtgttcctactatctgtttctcttgttgttttactttggggcatgagagtttcatgctgtttttctgttggattaacggacatctctcttggagaagattggtactccatactagaatttctaggagctcctatttctaagtacttccccatggagtcatcgttattttctttatgtttctttccgctccttttatttgcagtcggtaaccacctgttgctgcatatctctgatgtggggtgaattacttgcgcacaagtactatctggtagatcggatggttgatcaggagacatttgttgtgggctgtcaatctccactgcacgctttgtccatgaactctgtgttttaaaacaggctgatggcatgagaatacattggcacaattgtcctacatttagagaaaattgagtgccactgccattatcactgccatccctagcgttgtgtccaacacttaagtcgtcatcatcttcatcattgtcatcatcatcctcgttgtcattattgctaccgctgttattctcatattcatcatcaacctttggtttggtacacttttgtgttcggatgccactttcgcttccactgccactggaactgtggcatcgtctccaaacatgctgccaaaggttcttaagttcattcttacgtataggcttcactagaaagtcaactgctccttttgacaaacacttaaagactgtacccattgagtcattcgaagacatcataatcacgggaatatccttgcaaattttgtggcttgtgatcttactaagcagaccaatgccagacagacgtggcattacgacctcggtcaatacaaggtcaatgtggttttgcagatcttcaagacattgccatgcatgtagcccattttcagcagggataactgcacttggaaatctggaagcgcagaaccctcttgaatcttcataacaacacttacgaagcagtgcgctgaccacctgacgggtagagtcatcattctccaccagcaagaccctcagtgtcttcacagggaggaacctctcccaccggacaatctgcacttggtgctccttctgttcatctgtttgctggggctctggtggtgtactgtgcccattgggtaagtcctctcccatgccattcctccattcctcctcctctggcttgtgactatgaccattctccaggatgccattccctgtccccttaacatcgtctcgggaaggctcgtccgtaccagcttcgcaggcgctacccat

SEQ ID NO: 22148 - DNA, 3090 bp, Oryza sativa
  Clone ID: TF_OsC53858_1
atggggaagccggaggcgaggagtgggtggaggaacgcggcggcggcggcgtgggtgctggtggccgtggcgtgcgcggcgtacatgcactggcacctgcggcgggagaccatggaccgcgccgaggagcggctcgtcagcatgtgcgaggagcgggcgaggatgctgcaggagcagttcggcgtcaccgtcaaccacgtccacgccctcgccatcctcatctccaccttccatttcgagaagttcccgtccgccatcgaccaggatacatttgcaaagtacacggcaaggacatcgtttgagcgcccactgctgaatggagtggcatatgcgcagcgtatcttccatcacgagagggaaatgtttgagaaccagcagggatggattatgaagacgatgaagcgacaggctgcgcctccacaggatgagtatgccccagtgattttttcacaggatacggtttcctaccttgcacgtatcgacatgatgtctggggaggaggaccgggaaaacatcttacgtgcaagggctaccggcaaagctgtgttgacaaacccattcaggttgcttgggtcaaaccacttgggggtagttctcacttttgctgtgtatcgccctggtctagctgctgatgcatcagttgaggagcgtgtggaagcaactgctggttgtttggttgttgtggtctcatcaaatcaaatccctactaacagatatcttggtggagcttttgatgtggagtcactcgtggaaaatttgctgagtaaacttgctggcaatcaggatattgtagtgaatgtgtatgatgtcacaaatgcttctgaacctatggccatgtatggtcctcaaagtccagatggtaaagtgtccctcttccatgtgagcacgcttgactttggtgatcctttcagggcgcatgaaatgaggtgcaggttggtagcttctttctcatggcataaatttgttggttgcttcttacttggctcttgcactaattctggcaacctgagcaggtataggcaaaagcctcctctgccatggtctgctatcactaatcctttgggaacttttgttatatggatgcttgtggggtatataatttgtgccgcatggtctcgctatgataaagtttcagaggattgtagaaagatggaagagctcaaaactcaagcggaagctgctgatgttgctaagtcccagtttctggcaactgtatcccatgagatcagaacacctatgaatggcgtccttgtcgtccagcgatctaaaattctaccttttgatgtaggaatgctcgacatgctcttggggacagatctgagtatgactcagaaggattatgctcagacagcccagatgtgtggcagagcattgataacactgataaatgatgtacttgatcgggctaagattgaagcagggaaattggagcttgaggcagtgccatttgacctgcggtctctcatggatgatgtgatctccttattttcttcaaaatcaagagagaagtgcattgagcttgcagtgtttgtatgtgatgatgttccaaaagttgttattggagatccatggagatatcgacaaatactgacaaatttggtgggaaatgcagtcaaattcacagaacggggccatgtatttgtgcgagtctgcctggctgagaactcaaaagtggaagctaatcaagtccttaatggaaccatgaatgggaaagacggcaaagttgagactacagctaatggcgccttcaatactttgagtggttttcaagccgcagatgagcgcaataactgggattattttaagctgctgctatctgataaagagccccatatggatgagcttgagtgcgacagatcttatcaaaatgattgtgactgtgtgaccttgatgataagtattgaggatacaggtgttgggatcccattacatgcacaagatcgtgtttttacgcctttcatgcaggctgatagttcaacttcaaggaactatggtggaactggcattggtttaagcatcagcaaatgtttagctgaacttatgggcggtcaaataagtttcactagccgtccatttgttgggagtacatttacattctcagctgtcctcaagcgctcatgcaaagatacttcaagtgattcaaagaggagcttatctgaggcactaccaactgcctttaagggaatgaaggctattttagtagatgggagacctgtacgtggagctgtcacacgatatcaccttaacaggttgggaatagttgttaaagttgtgaataatttgagtatggggcttcagactttagctggacaaaatggtgtgaaagagtccagggagaaactgtctatgctttttatagagagtgacatctggaggcctgagacagatatcctattattgaatcgtctgcatgagctaaagaataatggtcaggtgcatgagttgccgaagctagttcttttggtaacatcagaagctgacaaggacagatatggatccgcatttgatattgtgatgtataaacctataagggcaagcacaattgcttcttgccttcaacagttgctaaaagtagtgatgcctgaaaggaaagacaatcaaaataggccctcatttctccgcagcttgctgattgggaagaatatattgattgtagatgataataaagtcaatctcagggttgctgcagctgcgctcaagaaatatggtgccaaagttcattgtgttgaaagcggcaaagatgcagtctccttacttcaacaaccacactgctttgatgcatgctttatggatgttcagatgccagagatggatgggtttgaggcaactagacaaataaggcaaatggaggtaaaagcaaacgaggaaaggaaggcgttggatttaatggagggttcaacattcgtcgagtcccatttgcctgttctggcaatgaccgcggatgtcattcaggcgacatatgaagaatgtataaaatcgggaatggatggttatgtgtccaaacctttcgacgaggagcagttataccaagctgtctccagattagtggtgggaacgaaggaatcagcggtatgatgatgggctggctag

SEQ ID NO: 22149 - DNA, 3119 bp, Oryza sativa
  Clone ID: TF_OsC1281_22
ttatccctgctgaaaatgggctacatgcatggcaatgtcttgaagatctgcaaaaccacattgaccttgtattgaccgaggtcgtaatgccacgtctgtctggcattggtctgcttagtaagatcacaagccacaaaatttgcaaggatattcccgtgattatgatgtcttcgaatgactcaatgggtacagtctttaagtgtttgtcaaaaggagcagttgactttctagtgaagcctatacgtaagaatgaacttaagaacctttggcagcatgtttggagacgatgccacagttccagtggcagtggaagcgaaagtggcatccgaacacaaaagtgtaccaaaccaaaggttgatgatgaatatgagaataacagcggtagcaataatgacaacgaggatgatgatgacaatgatgaagatgatgacgacttaagtgttggacacaacgctagggatggcagtgataatggcagtggcactcaaagttcatggacaaagcgtgcagtggagattgacagcccacaacaaatgtctcctgatcaaccatccgatctaccagatagtacttgtgcgcaagtaattcaccccacatcagagatatgcagcaacaggtggttaccgactgcaaataaaaggagcggaaagaaacataaagaaaataacgatgactccatggggaagtacttagaaataggagctcctagaaattctagtatggagtaccaatcttctccaagagagatgtccgttaatccaacagaaaaacagcatgaaactctcatgccccaaagtaaaacaacaagagaaacagatagtaggaacacacagaatgaaccaactactcaaactgttgatttaattagttcaatagccagaagcacagatgacaaacaagtagttagaatcaataatgctcctgattgctcctccaaggttccagatggaaatgataaaaatcgtgattctctcattgatatgacatctgaagagttgggtttgaagagattgaaaacaactggatctgcaactgaaatccatgatgaacgaaatattctgaaaagatcagatctctcagctttcaccaggtaccatacaactgtggcttctaatcaaggtggagctggatttgggggaagctgttcacctcaagataacagttcagaggctctgaaaacagactccaactgcaaggtgaagtcaaattcagatgctgctgaaataaagcaaggctccaatggtagtagcaacaacaatgacatgggctccagtactaagaatgccatcacaaaaccttcttcaaacaggggaaaagtgatatcaccatcagctgtcaaagctacccaacatacatcagcattccatcctgtgcagcgtcaaacgtcacctgctaatgttgtagggaaagacaaagttgatgaaggaattgctaatggagttaatgtgggccaccctgtagatgtacaaaatagctttatgcagcaccatcatcatgttcattactacgtccatgttatgacacagcagcagcagcagccatccattgagcgaggatcatcagatgctcagtgtggttcatccaatgtatttgatcctcccattgaaggtcatgcggcaaactatagtgtgaacgggagcttttcaggtggccataatggaaacaatgggcaaagaggacctagtactgctcccaatgttgggaggccaaacatggagactgttaatggtatcgtggatgaaaatggggctggaggtggcaatggaagtgggagtggtagtggtaatgacttgtatcagaatggggtctgttaccgagaagctgcattgaacaaattcagacagaaacggaaagtgaggaactttggaaaaaaggtgcgctatcagagcagaaagaggttggctgagcagcgccctcggatccgcgggcaattcgtgcgacaatctggacaggaagatcaggcaggccaagacgaagacagataactaagaaccacctacatatccaacatggcatctgctttgacagctggagagctacgcaattcattccatagctgaaagcagctcatcgatccccacattggagtgctcaataaataaaacccatatgattattttctgtgcctgactccagatgaaatttgtgctatggagtggaccacgcatttaattttaatatggcaatcggtaacaacttagatgcgatggttatttgtgacctccagttcccttgcagagatccacttggacactttgtcgagtctaaggaggagcaaaccatctgacgtttctatcggatcatgaatgctaaatctttactctactactacatcgagctgacatcagtgagggttcaactattcattgcgagacattattttcaagtcaaatagtacatacttttctgctggctgcatttctttttcatgttaatttccgctggctccaattttgtggttgactactgttatggagtaatggcaaccccagtgcagtaatgacggtttctttttaagttttgctttagctttgtcttgtaatgaacctctgtgatgtttgggatttcttacaaagccggatgctgacgatctttcctctaaaaaaaaaaaaaaaaaactcgagactagttctctctctttgatcatagtggcccacagaaagcaaagaagattcagacatcccagccctatgggcctgctggaggagtggtgttcaaggaaggtgttgatgcatctggaagggtagccaagggaaagggtctttaccagttttcccacaagtatggacgcacaatgttgatgggtacagccccaatatatacccccagaagaatggtcttcaactggtgatgtctatgttggaggaaaggcacggtttacttctctgggcaatcactcttgctggaattctagttggcggcgctattcttgtctacaacactagtgcactggcttagctaagtgcagcagaccacagctgtgcctgcttccatgtatataatcttcactaggaatgtaaccagttatgtacctggactggacttgactgccagcgttggtaatgaataaggccgagtaatgttaattctaagttaaacaaaaaaaaaaaaaaaaaaaa

SEQ ID NO: 22150 - DNA, 2712 bp, Oryza sativa
  Clone ID: TF_OsC15088_1
cggcacgaggcctcttccaaaatgtctcccgacgccgacgcggcggcggcggcggcggccggcggcgagggcgcggcggcggcgggggtggggacggcgggtgaagggcggggggtgatccggtgggaccagatcctgccgcggcggtccctccgcgtgctgctcgtcgagcacgacgactccacccgccaggtcgtcaccgcgctcctccgcaagtgcggctaccgcgtggcggcggtggcggacgggatgaaggcgtggggggtgatgcgggagcgggcgtacgccttcgacctcgtgctcacggaggtcactatgcccacgctctccggcatcgagctgctctccaggatcgtcgcctccgacgagtgcaagaacatccccgtcataatgatgtcgtcccaagattctattggcacagtgctcaggtgcatgcagaagggtgcggtggatttccttgtgaaaccagtgagaaagaatgaattgcgtaacttatggcaacatgtatggaggcgacatgcaatgaatagccaaacaaatgcatcggaaaacaatgcggctagcaatcatttaagtgccaatggtggtaatgggtcaaagacaggagaacacagcgatgaggaaagtgatgctcagagttctggtagcaaaagggaggttgaaattcaaagtgctgaaaagttaccagaggttgttgcagatggtggggcaggctcatccagagaacataaaatacagaatggtttcattgatggaatgaacacaaaatcacatgcattaaagggtaatgatgatgctccaagtggaaacgcgtgtggtgatagtgaactacaagtgctttcaactgagaagaatgtgcgttccaaattccttaatggtattacttctgcgaaggttgctggacagataatggataatgccttgaggtttgctgattcaagttcacttcgttcaagtgatcctggaaaagatcttttggttgttgcccagaccacagctgacagaaaatgcaaatcttcagcactggaaaataatgctgtcatggaaaataaccttagtgaaaattcaaaggggactgcaacaggccatgctgaatcttgtccgtctcactttgtggagataaatttagaaaagcaacatcatctcaatggttatacaaaccacaagttgaatgagaaagatatctttaatcactcaaattcctctgccttttcgaggtatggtaataagaggatagaatcatcagctcaacggccatttcccccttccttccgcgtggttcaccaacaacctgtttacgacaagaatccccaatccagccgggtcttgctttcctgtgaacataatacacgcgagagtacagtgcaagctcaggtccctttggacagaagcacagagggtgctgcaatcctgtgttccagtagtgtaagagaagatgctggtacaagcagttcctctcctagaaaggacagtttaactcatccttcttatgggtttatacctgttccaattcctgttggtgctgctataccctaccactacggtgcaattatgcagccaatgtattatccacagggtgcttttatgcattgtgattcagctgccatcaacaagacagcaattcagcatgtctcttgtcaatctaactaccatgaaaatcttggtaaaccgccacagattgatgagcacaagcagccagaagaaaaccatcagttgcatcattcaagacaaattctccgagaatcaggagaaccagttgacttggcgaaggctcatatggagcgtattaaccagagtgctagctgtagccaggatattcgcaaaggaagtggatgcactgggagcggtgaaactgatgcaaatacaaatacggtaattgcactagaaagtggcaatgagagcggtgtccagaactgcagtaataatgtattggatggtgaccggtctcgccgtgaagctgccttgttgaaattccggatgaaaagaaaagatagatgtttcgagaaaaaggtcaggtatcatagcaggaagaagcttgcagaacaaagacccagggttaagggccagtttgtgagccaaaaactgaagtcagctataacaacagaggcagaaactgactagtgacaccgttaactcatactgtacttttgatacttcccttctcagcgaagggcattcgaagtaacccgtgtaagttaaaggctggcaacagttttccttccgtagttagccttttgtacaagtgctctcttcttttgtcggttgtttattggcttccatgccataccttgtaaagacctcaaattgataaaagtgttcagggggtaaagaaattttcaagctggtgctaaaaaaaaaaaaaaaaacggacgagagcgacatgttcccgcctccggaggcgccgacgacgacgaacccgccgccatcaccgccgcctccaccgtcgtcaccaccgccgccgacgacgaagagcagcagcgggtcgacggcgtcgccgccgtcgtcctcgtcccacttctcatcgccgccgtctccgccgtcgtcgtccaacccgtactactacttctacctctccggcagcggcaggcgctgcggcggcggcggcgcggcgagcgtttacacggcgctgatcctagcggcgttgctgcccatcgccacattcctgacgtgacaacgcgcacgaattttagcgcacgatatgatcggaattaa

SEQ ID NO: 22151 - DNA, 2212 bp, Oryza sativa
  Clone ID: TF_OsC53137_1
atggtgggcgccggcgagggggatcgcgttggcggcggggcggcggtagggggagggcagcagttcgtggaccggagcaaggtgaggattctgctctgcgacagcgacccaagtagctcacgggaggtgctccgcctcctctgcaactgctcataccaagtgacttgcgccaagtctccgaggcaggtgatcaacgtactcaactgcgaggcgggggagatcgacatcatcttggccgaggtcgatctgcccgtctccaagtgcttcaagatgctcaaatacatcgccaggaacaaggaattgcgccacatccccatcataatgatgtccaacagagacgaggtctctgttgttgtcaagtgcttgcgtctcggggcagccgagtacctggtcaagccactgcgcatgaacgagctgctgaacctctggacccatgtgtggcggcgaaggcggatgcttggtttgtcggagaaaaacttcttcaatgacaatttcgagttggcgttatcggaacctagtgacgccaataccaacagcaccactcttctctcggatgacacagatgataagccaaaagaaaacattaatcaagaaacaagcacctcgaatcaacatgaatatgagtctaatccttctgatgctgagcctaaacaaaaaggcacaccagagggtttactagtctctactgaaggcggcgaccaagcttcatctcccggagtaatgttttcacgtccaataaagactaacttgagggttgctgagtcttctgcttttctagcttatgttaagtcaagcaccccaactaccagctcatttgacagcgaactacaaaaaggtggaaatcggttagactcttcggatcacaggggtaatttctctagtacaactgacagaagtgacactggcactgatgtaaatattcgggataaagaagcctttgagatgccagtgcaataccctgtggtatgcttttcttcctctaacttgcatctggagcgaagcaatgaaggccaaaatgatgcttcaggaactcctcctgtatatcattttcccttttattacccagggatgatggaccacggtatgacacatcctccggtgcaaaatttccaagggaacataaacaacgctcaagtgcatacaccacaaacgttgctccctcagtataatgtttatccccaatgtcatggtgtatctatgatgccaccatttcagtataatcctgctggtatgagcattcaatcaaatcaactgccaacacaaaatatgtggccacaggcatcaagcacaccaatgcccgaggaaacatgtagtcggtctgaacggagagctgcagcacttgccaaattcaggctgaaaaggaaggaacgttgttttgacaagaaggtgaggtacgtgaataggaagaaacttgctgaaacaaggccgagggtgcgagggcaatttgttagacaggcaaactatacagatataaccagcactggagatgatatctcagaagatgaagatgatgatccatcctccagggaggtagagatggtttcttctccagagtagtttgaaaggttttcctatatgtaaaatagagtgcagatgattactgctcactttgcaactcattagatgtaggcaatacatttcttctgcttttaactaggcaatacatccactcgctcacacacaatacatcctttttgtcccccaaggaacttgtggcatatccatcactgttactatggacgttttggagaaaatcatctttgaaggtgagatgtaattatgctagttagtgatgcataggccagtctagatcgtaaccatcttgtttcagaatcttataggactttactcagtgctccttcttagacacgtttttacttccattttctcgatgttggaggctgtccatgtttgaacatcgtgttctaccacagaagtcgattttggaggttgtacatgtttgaactttgtgttctatcacagaagtttgcgagcaccattgaaaacaaggacactagcgacctgacctaccgtactgttctgagtagtgccaatatttctaggaaattgtccctttctaaggacaatttcgtttttccccccactttcatcttcaatattgattttgcccctatcaaaaactttactgctaatccatgtatattcgtgacaaatgtcgactatatattttgtagctgtactttgtcatgtt

SEQ ID NO: 22152 - DNA, 2749 bp, Oryza sativa
  Clone ID: TF_OsC50511_1
tcgttcctcttcttcctccgccttcgccgccgccgccgccgccgccgattactcgcttccgcctccgcctcaaccccgttcgtccccaaccaaccaaccgcagtccaatccaagcgaatactaagctcacttgaattcggttggtgcctcgtcgtcattctgccaccacttgagagttccttcatacacacaccactcgcagtctcagcagcagcagcagcagcgcagtcatccctgctgaaaatggccagcaagcatggacatatctagaagatatgcaaaacagcattgatcttgttttgacagaggttgttatgcctggtgtatctggaatttctctattgagtaggatcatgaaccacaatatttgcaagaatattccagtgattatgatgtcttcaaatgatgctatgggtacagtttttaagtgtttgtcaaagggcgctgttgacttcttagtcaagcccatacgtaagaatgaacttaagaacctatggcagcatgtgtggagacggtgccacagctccagtggcagtggaagtgaaagtggcattcagacacaaaagtgtgccaaatcaaaaagtggggatgaatccaataataacaatggcagcaatgacgatgatgacgacgatggtgtaatcatgggacttaatgcaagagatggcagtgataacggcagtggcactcaagcgcagagctcatggacaaagcgcgctgttgagattgacagtccacaggctatgtctccagatcaattagctgatccacctgatagcacttgtgcacaagtgatccacctgaagtcagatatatgcagcaatagatggttaccatgtacaagcaacaaaaattccaagaaacaaaaagaaactaatgatgacttcaaggggaaggacttggaaataggttctcctagaaatttaaacacagcttatcaatcctctccgaatgagagatccatcaaaccaacagatagacggaatgaatatccactgcaaaacaattcaaaggaggcagcgatggaaaatctggaggagtcaagtgttcgagctgctgacttaattggttcgatggccaaaaacatggatgcacaacaggcagcaagagccgcaaatgcccctaattgctcctccaaagtgccagaagggaaagataagaaccgtgataatattatgccatcacttgaattaagtttgaaaaggtaccatacacctgtggcttccaatcaaggtgggacaggattcatgggaagctgttcgctgcatgataatagctcagaggctatgaaaacggattctgcttacaacatgaagtcaaactcagatgctgcaccaataaaacaaggttctaatggtagtagcaataacaatgacatgggttccactacaaagaacgttgtgacaaagcctagtacaaataaggagagagtaatgtcaccctcagctgttaaggctaatggacacacatcagcatttcatcctgcacagcactggacgtctccagctaatacaacaggaaaagaaaagactgatgaagtggctaacaatgcagcaaagagggctcagcctggtgaagtacagagcaacctcgtacaacaccctcgcccaatacttcattatgttcatttcgatgtgtcacgtgagaatggtggatccggggcccctcaatgtggttcatccaatgtatttgatcctcctgtcgaaggtcatgctgccaactatggtgtcaatggaagcaactcaggcagtaacaatggaagcaatgggcagaatgggagtacgactgctgtaaatgctgaacggccaaatatggagatcgctaatggcaccatcaacaaaagtggacctggaggtggcaatggaagtggaagcggcagtggcaatgacatgtatctgaaacgcttcactcaacgagagcatagagtggctgcagtgatcaagtttagacagaaaaggaaagagcgcaacttcggaaaaaaggtgcggtaccagagcagaaagaggctggccgagcagcggccaagggtccgcggacagttcgtgcggcaagctgtgcaagaccaacaacagcagggtggtgggcgcgaagcggcagcggacagatgacccccctccccacctacccgatgcctgcggcctcctatccgcttttttccacccggttcccaccaggggtcctttctcctccctcggccgatcgatcaacaacatcccatgcatccggcatcccaccaccattgattccatcatatttagagtctggaataaataaggaactcctatcctatttatcccctatctatatatgaagatatgataatggtgatctgcgttactactagtagaagaatatggtgtggctgactccacttcaggtggacctataatactactccagtagtatgtgcctgtggagtcaagctcgaacgtactactccatatttaagcatgtcatgtactgctactatgagacgagagtgctctgccctgtagggacagcactattgtcaatgtcatgtgtttgttgggtcactggtcttcttagatttgcgtccatgtctggcagcagcactccactgtagttggctcacgcatgttgttgaaatgagccacatgccttgccttgagatagaacttgctgtcactgtttctccttaatctaaatatactggagtggagtattttattatctaaaaaaaataatccggtgattgaccaggctcgtccaaaaaaaaaaaaaaaaaaaa

SEQ ID NO: 22153 - DNA, 1637 bp, Oryza sativa
  unsure (1)..(1637): unsure at all n locations
  Clone ID: TF_OsC22028_1
ccacgcgtccgagcagctcaagcccaccggaggagagagagaaaagaggaaatcatggaggcgatttgctgtggagattcgggtgtgtgatctggtcggatcttgctttcctgggaggaggaagaagaagaggtggaggtggccgcggtgtgatgcggtgggtagtttgcttatatcctcgagatgccgcattagccaagccagccacacccatcatcatcagcttcctctccctagctccattgccgcggcagcaagaaagaaatcaccaggagaagacttcttggtggtttgatatgctttgattgagcccctggagaagagaggaacagaggcttttttctctgcgggttcttcaattattcagggtttcttctggttcttgtctcgccatgacggtggttgatgcggagtcgcggttccatgtcctcgcggtggatgatagcctgatcgacaggaagctcatcgagatgctgctcaagaactcgtcctaccaagtgaccactgtggattctgggagcaaggccttggagctgcttggattgagggatgagggtgatgactcctcctcttcaccttcttcctcctcacctgaccatcaggagattgatgtcaacctgataatcactgactactgcatgcctggcatgacagggtatgatctgctcaagagggtgaagggatcatcttcattgaaggacataccagttgtgatcatgtcttctgagaatgtgcctgcaaggatcaacaggtgcttggaagatggtgcagaggagttcttcctgaaacctgtcaagctcgctgacatgaagaagctcaagtctcacctgctcaaaaggaaacagcagctgcccatggctgctgctgcaccagataagccgccacacaaaccagatgaagctgcagcctcagcagctgcaattgctgaagctgcaacagctcaaaccgatggaatcatcagtgattgcagctgcagcggcagcagcaagaggaaggcggctgcaatggagcaggaggtcatctcctcacctgatcagaggacgaagccaagattgtcctccactagcagcggccttgcagtggagacctgatgaaactgaattaattagaatccccccaactaagaaatgattttggcctctttttctgttttgattttttttatggagctgctcatggaagtatggaaccattagctcctgggggttttaattaatttacttaattagtagtttgaggtgaaaggaaagtccacgtacttttacactagctcttgcttcgatccacaaattttgttgtgccaaaggaacaccatggcaccaagtggtgttcgttagaaaaggagttgtgggaatgaaatggaaggggaagttgtagataaaggcagcaccttggatgcttttaggctaattttaaggcttattattcaagcaaaaaagtgttttgtttgaacttggagaggaaaaagctaagtgctactgctactatgaattgtctagcagattgatggaccaaccaactggtcttttgcaaaaaaaaaaaaaaaancgggggggccctttttagaggaccaaagtttacttccccgtgcttgcaagttaaaattttttttatggggcacctaaaataaaatcaat

SEQ ID NO: 22154 - DNA, 2511 bp, Oryza sativa
  Clone ID: TF_21735411
atgttgctctccacttggacgccaggatgcttccagggcaataaaatcttgttaagatctctaatcacatggtattatctcgaatttatgccaaagctgcggcctttttattttcttttttacttaaccttgccaagttgcgctacggattcgccgcctatttctgacaaaagctcctccattttcctcccattggcgcagcagcagcagctagtccactggatgatgcctccaagattcagatgccaagattacctcctgccgctgctgctcgccctttcgccggccgccgcccccgcccgccaggtggagtaccaccattgccactgcgacggcggcggcggcggcggcggcggggggttgtggagcatggacagcatcttcaggtggcagaaggtgagcgacctgctgatcgcggcggcctacttctccatcccgctggagatcctctacttcgtcgccgggctccggcatctcctcccgttccggtgggtgctcgtccagttcggcgccttcatcgtgctgtgcggcctcacccacctcctcaccgccttcacctacgagccgcacccgttcatggtggtgctcctcctcaccacggccaagttcttgacggcgctcgtctccttcctcaccgccatcacgctgctcaccctcatcccgcagctgctccgggtcaaggtgagggagagcttgctgtggctcaaggccagggagctcgaccgcgaggtcgtcctcatgaagcggcaggaggaggcgagctggcatgtccggatgctcacccacgagatccgcaagtcgctcgaccgccacaccgtgctctacaccaccctcatcgagctctccagggtgctcggcctcaccaactgcgccgtctggatgcccgccgccggcgagatgtgcttgacgcacgagctccggcgagacggcggcggcgaggatggcgtcgtcggcgtcgacgacgcggacgtcgtcgaggtgcgggggagcgacggcgtcaagctgctcgggccggactcggtgctcgccgcggcgagcggcggcaaggaggagggcaccggcgcggtggcggcgatccggatgccgatgctgaaggtgtccgacttcaagggcggcacgccggaggtgatccagacgagctacgccgtgctggtgctggtgccccccgccggcaagagctgggggcggcacgagatggagatcgtcgaggtggtcgccggccaggtcgccgtcgcgctgtcgcacgcgacgctgctggaggagtcccgggcgatgcgggaccggctggcggagcagaaccgcgagctgctgcaggcgcggcgcgacgcgctcatggcgaacgaggcgaggcaggcgttccagggcgtgatgagccaggggatgcgccgcccgatccactccatcctcggcctcgtgtccatggtgcaggaggaggccctggcgccggagcagaggctcgtcgtcgacaccatggcgcgcaccgccaccgtcgtctccacgctcgtcaacgacgtcatggagatgtcggccgacagccgcgagcgcttcccgctcgagacgcggccgttccacctgcacgccatgatcagggacgccgcctgcgtcgcccggtgcctctgcgacttcagggggttcggcttcgccgtgcacgtcgagaacgcgctgccggacctcgtcgtcggcgacgagcggaggattttccatgtcctgctccacatggtcggcaacctgattggccgcaccgagcccgggcatgtcacgctccgggtgcgcgccgccgacgacgacgtgctggacgacaggctcggccagaggtgggatccatggtggccgtcctactccactggctactcctcggtgaagtttgtcattggtgtcaagcggcagcagaacggcgatgccggctcgccgctgtcgcggaggccgagtgggaagggcattgatctcagacttagcttcagcatgtgcagaaagcttgtgcagatgatgcaagggaacatctgggcgattcttgatccccaagggctaccggagagcatgactctggtgctcaggtttcagctgcaatcgccactgacatcatcaagccttggaggatcattcgagcagaagcactcgtcgccgtcgtgccagattgcaggcctgaaggttctgcttatcgacgacgatgacgacatcaaccttgtggttgctcggaagctattggagaagctcggctgcgtggtctcctcgccgccttcaggatcaggatttctcagctctgttggctcctcagcagcagccttccagcttgtcatggtgaacctcgaaatgaagagagtaaaagcccttgatgtcgcgacgaggatcagccagtacaggagcggccgatggccaatcgtcatggccatggcttccgaccagaaggcctgggagaagtgcgctcaatccgggatcaatggcatcctcaagaagccggtgattctgcaggagttgaaagacgagctggcgcgaattcttcagagcacatga

SEQ ID NO: 22155 - DNA, 2859 bp, Oryza sativa
  Clone ID: TF_OsC945_1
atggcatcaattggatggcatctttccctggaacccaatatcgatagcttcactgttgcagacaacaaactggttctgctcaactttgagcagcagcagctagtccactggatgatgcctccaagattcagatgccaagattacctcctgccgctgctgctcgccctttcgccggccgccgccgccgcccgcgaggtggagtaccaccattgccactgcgacggcggcggcggcggcggcggcggggggttgtggagcatggacagcatcttcaggtggcagaaggtgagcgacctgctgatcgcggcggcctacttctccatcccgctggagatcctctacttcgtcgccgggctccggcatctcctcccgttccggtgggtgctcgtccagttcggcgccttcatcgtgctgtgcggcctcacccacctcctcaccgccttcacctacgagccgcacccgttcatggtggtgctcctcctcaccacggccaagttcttgacggcgctcgtctccttcctcaccgccatcacgctgctcaccctcatcccgcagctgctccgggtcaaggtgagggagagcttgctgtggctcaaggccagggagctcgaccgcgaggtcgtcctcatgaagcggcaggaggaggcgagctggcatgtccggatgctcacccacgagatccgcaagtcgctcgaccgccacaccgtgctctacaccaccctcatcgagctctccagggtgctcggcctcaccaactgcgccgtctggatgcccgccgccggcgagatgtgcttgacgcacgagctccggcgagacggcggcggcgaggatggcgtcgtcggcgtcgacgacgcggacgtcgtcgaggtgcgggggagcgacggcgtcaagctgctcgggccggactcggtgctcgccgcggcgagcggcggcaaggaggagggcaccggcgcggtggcggcgatccggatgccgatgctgaaggtgtccgacttcaagggcggcacgccggaggtgatccagacgagctacgccgtgctggtgctggtgccccccgccggcaagagctgggggcggcacgagatggagatcgtcgaggtggtcgccggccaggtcgccgtcgcgctgtcgcacgcgacgctgctggaggagtcccgggcgatgcgggaccggctggcggagcagaaccgcgagctgctgcaggcgcggcgcgacgcgctcatggcgaacgaggcgaggcaggcgttccagggcgtgatgagccaggggatgcgccgcccgatccactccatcctcggcctcgtgtccatggtgcaggaggaggccctggcgccggagcagaggctcgtcgtcgacaccatggcgcgcaccgccaccgtcgtctccacgctcgtcaacgacgtcatggagatgtcggccgacagccgcgagcgcttcccgctcgagacgcggccgttccacctgcacgccatgatcagggacgccgcctgcgtcgcccggtgcctctgcgacttcagggggttcggcttcgccgtgcacgtcgagaacgcgctgccggacctcgtcgtcggcgacgagcggaggattttccatgtcctgctccacatggtcggcaacctgattggccgcaccgagcccgggcatgtcacgctccgggtgcgcgccgccgacgacgacgtgctggacgacaggctcggccagaggtgggatccatggtggccgtcctactccactggctactcctcggtgaagtttgtcattggtgtcaagcggcagcagaacggcgatgccggctcgccgctgtcgcggaggccgagtgggaagggcattgatctcagacttagcttcagcatgtgcagaaagcttgtgcagatgatgcaagggaacatctgggcgattcttgatccccaagggctaccggagagcatgactctggtgctcaggtttcagctgcaatcgccactgacatcatcaagccttggaggatcattcgagcagaagcactcgtcgccgtcgtgccagattgcaggcctgaaggttctgcttatcgacgacgatgacgacatcaaccttgtggttgctcggaagctattggagaagctcggctgcgtggtctcctcgccgccttcaggatcaggatttctcagctctgttggctcctcagcagcagccttccagcttgtcatggtgaacctcgaaatgaagagagtaaaagcccttgatgtcgcgacgaggatcagccagtacaggagcggccgatggccaatcgtcatggccatggcttccgaccagaaggcctgggagaagtgcgctcaatccgggatcaatggcatcctcaagaagccggtgattctgcaggagttgaaagacgagctggcgcgaattcttcagagcacatgatgctgatgtttgctggaggtctgtttgtctaagagctctgaagtctgaatcggtaaaagctgtgaatcctgtgatcagtgtacaacctcgtcatccagcattgaagaatgaagaactcagaagaattctgtgatcagtgtacaatctcgtcatccagcattgcagaatgaagaactcaaaagatcttcgcggcgaaaacggggaacatctctaacgaaagaaagggtgccctgatggatggcaagaacacatggaatcttggcagcaatggcgtccccgagaaatcttcttcgcacaaattttgtaatatgagtttgagtgggaatacaagtcgtgtaattttctaatgatcgagatgtacactcgggtgaagtcaagggaattcgtacttgactctctctgtcaaagcaaatcatgagattggaatcaatgagatgatatctcaaaacaaaaaaaaaa

SEQ ID NO: 22156 - DNA, 609 bp, Oryza sativa
  Clone ID: TF_OsC50061_1
accgcaaagcctcttctcctcttcttctcctactcgcttactcaatcgctcgaggattcttggattggattattgggttggattttgagttgatcaatggcggcagcggcgcaggctccggcggcggcgaaggtggtggtggcgacgtcgccgagggcaggcggaggcggaggcggcggcggggacaggaaggtggtgccggttgtggtggcggcggcggccggcgacgaggcgcagagcgagatgcacgtgctggcggtggacgacagctccgtggaccgcgccgtcatcgccaagatcctccggagctccaagtacagggtgaccacggtggagtcggcgacgagggcgctcgagctcctctgcctcggcctcgtccccaacgtcaacatgatcatcaccgactactggatgcccggcatgaccggctacgagctcctcaagcgcgtcaaggaatcgtctcagctcaaggagatcccggtggtgatcatgtcgtcggagaacgtgccgaaccggatcagccggtgcctggaggagggcgccgaggacttcctgctcaagcccgtacgcccctccgacgtgtcgcggctctgcagccgtatcagatga

SEQ ID NO: 22157 - DNA, 1127 bp, Oryza sativa
  Clone ID: TF_OsC51348_1
cggttccccgcgccccccctctccccccgagcacacacaccatctgcatcttctcttctaccattctggctttctccttgtagtctcttctgtgctttcagagaagagaaaaacatatctgtgctagctgtgccttcttccacacgcgtccgctgcatcttctcttctaccattcttgctttctccttgtagcctcttccttttccagagaagagaaacatatctgtgcaagctttgccttcttccatggcagtggctatagaggctccgttccatgtcctggctgtggatgatagccttcctgacaggaagctcatcgagaggctactcaagacctcttctttccaagtaaccactgttgattcggggagcaaggctctggagttcttggggctccatgatcatgaggacagcccaatttctactcaatcagatcagcaggaggttggagtgaacctgatcatcacagactactgcatgcctggcatgacaggatatgatcttctcaagaagatcaaggaatcgtcttatttaagggacatcccagttgtgatcatgtcatcggataacattccttcaaggatcaatagatgcctggaggaaggagctgatgaatttttcctcaaaccagttcggctctccgacatgagcaagctgaagccccacatactgaaaagcagatgcaaggagcactaccagcaggaacaaaacctgcaaagcaacagcgaaagcaacaacagcagtaaccccacaagcgagaacagcagcagcagcactagcaccaacagccacaagagaaaggcagtcgatgaagaaattttgccccacacaataagaccaaggcatagttgatttagcatctgactggtcatttgacactgatttttttttcttgcttctgtctgatcggtttttgacatactgatttgtaaaagggatactaacatctagtttacaaaatagaatggaatccgttaacggatactgcttgaattcgaatgggtgattctcagttcatcacattgtgattttaagccagttaagccttcaaattcctgctgagattaagggccactgaaaacatcttgtgccatatttgttaaggaatatcttaaaacccctaaaaa

SEQ ID NO: 22158 - DNA, 2596 bp, Oryza sativa
  Clone ID: TF_OsC569_1
atgccaccgatcccatctctgtggatccgcgtcttcttctcctggctgctgctgtcgctgcccgccgcggctgccgccgatttcagccactgcggcggctgcgacgacggcgacggcggcggcggcatatggagcacggacaacatcctgcaatgccagagggtgagcgacttcctcatcgccatggcctacttctccatcccgctcgagctgctctacttcgccacctgctccgacctcttcccgctcaagtggatcgtcctgcagttcggcgccttcatcgtgctctgcggcctcacccacctcatcaccatgttcacctacgagccgcactcgttccacgtcgtgctcgcgctcaccgtcgccaagttcctgaccgccctggtgtcgttcgccaccgcgatcacgctgctcacgctcataccgcagctgctcagggtcaaggtcagggagaacttcctcaggatcaaggcgcgggagctggaccgggaggtggggatgatgaagaggcaagaggaagcgagttggcacgtgcggatgctcacgcacgagatccgcaagtcgctcgatcgccacacgatcctgtacaccaccatggttgagctctccaagacgctcgagctgcagaactgcgccgtctggatgcctagcgagagcgggagcgagatgatcctgacacatcagctgaggcagatggagacggaggactcgaatagcctgtccattgcgatggacaacccggatgtacttgaaataaaggcaacaaaggatgcaaaagttctcgcggcagactcagcgcttgggattgcaagcagaggcaagcttgaagcaggtcctgttgctgcaatacggatgccgatgttgaaggcgtcgaatttcaaaggagggactccagaagtgatggaaacaagctatgctattttggtcttggtactacccgaggatggttcactaggatggggtgaagaggagttggagattgttgaagtggttgctgatcaagtcgcagtcgccctatcacatgctgcagttctggaggaatctcaattgatgcgagagaagctcgccgcgcaacacagggacttgctgagagcaaagcatgaaaccacgatggccactgaagctaggaactcctttcagactgccatgtatgatggaatgcgacggccaatgcactcgatccttggtctagtctcaatgatgcagcaagaaaatatgaaccctgagcaaaggcttgtaatggatgccattgtcaagacaagtagcgttgcgtcaacattgatgaatgatgtcatgcaaacatcaaccgtaaatcgtgagtatttgtctttggtgaggagggcattcaaccttcattcgttggttaaggaggcaatcagtgttgtaagatgcctaactggctgcaaggggattgattttgagtttgaagtggataattctttgcccgaaagggtcgtcggtgatgagaagagggttttccacatcgtcctgcacatggtaggtactctaatacagaggtgtaatgcaggctgtctatccttgtatgtgaatacttacaatgagaaggaagagaggcacaatcaggattggatgctgcgaagagcaaacttctctggcagctatgtgtgtgttaagtttgagattaggattagagagtccagaggtaatcttttgagttcgtcatccagtcggagacttcaagggcccaactctaccagttctgagatggggcttagcttcaacatgtgcaagaaaattgtgcagatgatgaatggtaatatttggtcagtctctgattcaaaaggccttggagaaactatcatgcttgcccttcagttccagctgcagcatgtgactccggtctctggagcatcctcggacttgttccgatcagcgccaattcccaattttaatggactccaagtcattcttgtggacagtgatgacaccaatcgggccgtaactcacaagctcctggagaagcttggttgcctagtcctctcggttacttccggcatccaatgcatcaactcctttgccagtgctgagtcatctttccagctggtggttcttgacctcaccatgcgtacaatggatggatttgatgtagctcttgcaatcaggaagttcagggggaattgttggccaccgttgatagttgctcttgcggcaagcaccgatgacaccgttcgggatcggtgccagcaggcaggaataaacggtctgatccaaaaaccagtcactttagcagcactgggagatgaactgtatagagtccttcaaaacaattgaaagagcctcatggttctcatttctttcaatctcaatagattgctgtagcttgattaatagttactacgctactagtttctgccaggttaggtccatacaatcacaaaacatttgcacaaacaaaatgtatagggagatattaaaacatcctgcctttaccttggttccttggtgaaggaaagaaggtagaaattttgaagaggtcatacagttagaacttacttattcatttgtaaaccctatttagattattaatcatttgtcaggtaaattaaaaaaaaaaaaaaaaaaaaaaaaaaaaaaa

SEQ ID NO: 22159 - DNA, 976 bp, Oryza sativa
  Clone ID: TF_OsC115733_1
ggcacgaggcgatcttctcaaagccatcaacggcgttggggtcgccgaatccgatcccggtggtggtcatgtcgtcggagaatgagccccagaggatcagcagatgcttgacagccggtgccgaggatttcatccttaagcctctcaagatgaacgatgtccagcgcctccggaaatgctccggcgccaccaggccgaagtccgccgtcgccggagacgatgaccggtgctgcaacacggccaagaaggcggcggcggcggcggcagccacaccggagcagcagcagcagcagcagagatcgccgcatgttttttggtttttgcaggtgatgaatgcatccagcttcgaggtgtcgcactacttccagctcatcttcaagctcatcctgctcgcctacgccgtgctgtgcctcagccagctcctgcacagatggtccaatggcagcagcctcctctccctgtggtgcgcatgaattcaagaaattaaatcaaatcgacgatccagaaggctggattgattaatttcccattatcgatgaaaaaaattgaaaaaaaaagagagatggatgaagactcagtggcatagcgtggatttatccgaaactgaaacctcttcatcaagcaagagtgcagctaaggtggactaattggatgcatgatgatctccatcccagctaagcatgggggttcttaattaattcagctataatataattttcaacagccatgcatgcagcagcagctaagatgtgatctttctaggggtagatttgttacttatttgttcttaaattctcaagaggattctaaccaggttattaattattttcagaggtttttaagtggtactatactactactgctacttagattattttgctgagagagaaaagagtagcagtacagtagcaccacaatttgctcatttgtataaagcggccccgcatgatttgagtgggcatctggtgtcgttttt

SEQ ID NO: 22160 - DNA, 562 bp, Oryza sativa
  Clone ID: TF_OsC36724_1
ccggccgggatccaaaactattccaagcaaactcttccagttttctgtttttctcatcttctgcttcccctgtgtagagcacagtagaggttccatcagcttgctctcatggtgttccaaacccaaggatccaacctgagggcattgctcgttgaggacatcaaagtgaaccgcatgatcctgtcgcagatgctgcgcaaattccaagttgaaaccactgtggttcagaatggaaaagaagctgttgaactattccttggaggagaaacatttgatattgttttgactgacaatcttatgcccatcatgactggtcctgaggcaatatccaagatccgtgccatgggtgctactgatgtgatggattgtggagtctcagttgacgccaacagcatggaagagttcaaagatgctggtgctgatctatgtgtgcccaagctgaagcttgagattctagagcacatccttcaggagaccaggagcaagaagaacaagagcagcgcttaggtttcagaagaaatcaagggactatctgtcatcattagtgtcatagttgttgact

SEQ ID NO: 22161 - DNA, 325 bp, Oryza sativa
  Clone ID: TF_LIB3433-027-P1-K1-D5
gcaaagcctttcatgccaagcacacacaccatctgcatcttctcttctaccattcttgctttctccttggagcctctttcttttggtctttcagagaagagaaacatatttgtgcaagctttggcttttttcatgggaggggctatagaggctccggtccatgttctggctgtggatgataaccctcctgacagggagctcatcgagagggttctcaagacctcttcttttcaagtaaccactgttgattccgggagcaaggctctggagttcttggggctccatgatcatgaggacagcccaatttctactcaatcagatcagc

SEQ ID NO: 22162 - DNA, 1874 bp, Oryza sativa
  Clone ID: TF_OsC6964_1
tgcagctggtgctttgaagaaatatggaatcatagttacctgtgtggacacgggaaaggaggcaatttctaggcttcagccacaatattaatttgatgcttgtgtaatggatgttcagaggcctgatatggatgggtttgaagttaatagattagttcgttcgaaaaatggaagctctggatgacacttctcctgaaaacatagaagttacagcgaattccaaaaatacgatgccatataatactctaagtgggcttgaagtagcaaataatcggaaaaccttggagagtttcaggatgttcaaagattcgtcagatgcaatagattcagtgaacttactagtaactgtcgaagacactggcataggaataactaaggatgctcaaactcgcatttttacacctttcatgcaagcggatggttccacctcaaggacatatggtggaactggaattggtttgagtattacgaaacgcctggttgaattgatgggtggagaaatagggttttgtgagtaaaccaggagttagtagtacattttcttttactgctattttcaaggaaaataggaaagatccaggggatatcaaaaggtattgtcctgaacctactccaccagattttcaaggaatgagagcgcttgttgttgacggaagatgtgctcgtgctgaggttaccatgtaccatctgcggagacttggaatacaatgtgatcttgcagccacatctgaatcagcactttctgctctattggaatcctgcaattcaagtgtaaaaagcagtctaaatatggtgcttgttgacaaagaagcttggggcgaggactcaggcttggcatttttccggtgtcttatagatcttcggctgaagggcacactcaagtcttggcaaaccatgccaaagttctttcttttggcaggttcaataactcctgctgactctgattgtttgaggttggcggggtattctaatagcataagaaaaccccttcgtcttagtactgttgctgcttgtcttagtaaagcactaggggttggacttacaggccgacgaagtagagataattctttggttcttcgaagtgtactaacaggaaaaaacattttagttgtggacgacaatgctgttaatcgcatagttgcagctggtgctttgaagaaatatggagctatagttacctgtgtggacagtggaaaggaggcaatttctaggctccagccacctcataaatttgatgcttgttttatggatgttcagatgcctgagatggatgggtttgaagctactagattagttcgttctgtagaaagtaaaatcaatgatacgatccaggcagcatctgctaaaaacccatttggagataacaatattgcaaagcagaagagctatgcagtaaatcgagaacagaagtttgattggactgctatttatgtttcatttgacaattggatgaaatctatttcaacatcacgccttcagccatgtgcttaaggggaaactttgaccatttttacccagtggaaatcaatgagggacatacattgaactgacatagcctccttcatgctgttccagtgtagtggctgacaagatgacatcaatggcgttcttgttgtacagctaatatagattatgagaaggctaatgctcctgtttattctgtattcttgagtgtacatatgaaatggcaagaaaatagtgagagttggaggatttgtctggtggcttgaagaatgtaaataggaatgttcatatccatcttttctgaggtctggttatgtggggtgtaagttgtacatatgttctcttgtagaaatgtaattgattattagattacggcaatgttccaaaaaaagtaaatatattaagcttcc

SEQ ID NO: 22163 - DNA, 3478 bp, Oryza sativa
  Clone ID: TF_OsC18122_1
gccagaaatggatgggtttgaagccactagaaggattagagtgatggaaagagatctaaatgcgcgaactcctatattgggcgatgacggcagatgttatacaggccccacactgaggacgtgcctgaaaacgcgaaatggatggctatgtctccaagccatttgaaggggagcagctgtacagcgaagtagcgcggtttttcccaaaatcatgaccaagttgaataggaaggtttatatggaatgtaaattggtggaggatgttgccacgcaccgatcacatgccatggcacagaattttgtccaagatgctgtgttcccaagagaatgaagcacaaaaggtgtcgagatggaaccgcccatgttctgatctgtagtacaccatctgacctagaggcaaaattaactgcgcaattacatgagaacaagatacatgtgcagcaaaggtactcaaacaatttcttgaagtcaaggcgtgtgaaaatggcagctgcatattcactaactgcagaagaagcagaagtcgttctcgtagatgccctctgcctttgtaatataaacgtagggagagaaaatttttcctgtcttcttttttttttcctcgggaattttacggtgtacatattaggtgttggtgatatgtgcaggcaattccttggtatatttggatgtgtttttttttttttctgcaaggtttgtggaagctgtaaatgacacaattcaaaggtgaagcctttggtttcttccattgacatttttgacaagaatattgatgccgtaggatctcggctgttcttttgcaaaaaaaaaaaaaaaaaaaaaaggagcagttcgagcggcagcaagggtgggcgatcaagaagatgtactcctcctccaacaagaagcagtcgtcgccggggcccgggcccggcgacgccgccgtcgcggagatccgggagcccgccgaggagtacgccccggtcatcttcgcccaggacgcctacaagcacgtcatctccttcgacatgctctccgggaatgaggatcgggataacatattacgggctaggaaatctggcaagggtgtcctgactgctcctttcaagctactgaataatcgcctcggagtgatcttgacgtacactgtttataagtatgagctccctgcatatgccaggccacatgaacgcatccaagccgcgattggctatttgggcggcatatttgacatacaagcactcgtcgagaagttgctcaaacaactcgcgagccaggaatccatcatggtgaatgtgtatgatacgaccaacgagagcccgatcagtatgtacggtgatgatactgggagtggcatgtgccatgtcagcgtgctcaactttggtgatccgtcgagaaagcatgagatgcattgcaggtttgaaaaaaagccaccatggccatggctggcaataacgtcatcgtttggaactcttgtgattgctttactgactggtcacatatttcaagctactgtccatcggattgctaaagttgaagatgatttccacaagatgagcgaactcaagaagcgtgcagaagatgcagacgtcgcaaagtcacagttcttggctactgtttcacatgagatcagaactccaatgaatggtgttctagggatgctccaaatgctcatggatactgatttggacacgacgcagcaggactatgttagaactgcccaagctagtggaaaagctttggtctctctcatcaatgaggttcttgatcaggcaaagattgagtctggtaaacttgagctcgagacggtgccctttgatcttagaacagtttgtgacgacattttatctctgttttgtgggaaagctcaggagaaaggactggagttagcagtgtatgtctcggatcaagttccacagatacttattggcgatcctggcaggataagacaaatcattacgaatcttgtcgggaactccataaagttcacagagagagggcatatatacctgacagttcatgtagttgaagaggtcatgagttgtttggaggtagagacaggaattcagaacacaaacactttaagtggctatccagtagccaacagaagatgtagctgggagagcattcggcttttcaacagagaattacactcatctgagaagtcttttgcgcccatcgcatctgattcaataagcttggttatatctgttgaagatactggcgtcggcatcccatttgaagcccaatcccgtgtgttcacccctttcatgcaggtaggtccatccattgcccgcatccatgggggcactggcattggattaagcatcagcaagtgcttggttggtctcatgaagggagaaatcggttttgcaagtaagccccatgttggttctactttcaccttcaccgcggtgcttatgagggcacactgcaaaggaaatgacatcaaatcatcagaatttaaagggatcaatgcattggttgttgatcataggccagtccgtgcaaaggttaccaagtatcacttgcaaagacttggagttaagaccgaactgacagctgagctaaatcagttcatttctaaattaaactctggatcactgactgcaaagctagtgctaatagacaaggaaacctggcttaaggaatcccattgcacgcctcttctggttaacaaattgaggaataatgacaagccagactctcctaagttatttcttttggggagctctgcaagttctcccaagggcggttcagatacatccagggaacataacttgaatgtaataatgaagccgcttcgtgcaagcatgcttcaggtctcactacgacgagcactaggtggggtcgataaggtgcactgcaggaatggagtagttggcaattcaacattgggcagccttcttcacaagaagcaaatcattgttgtcgacgacaatatcgttaacctgaaggtggctgctggtgctcttaagaagtatggtgccgaagttacttgtgcagacagcgggaaaaaagcaatcacattgctaaaacccccgcacaattttgatgcttgtttcatggacatacagatgccagaaatggatgggtttgaagccactagaaggattagagtgatggaaagagatctaaatgagcgaatagaacgcggagaggcgccaccagaatgtgctagtattcagaggtggcgaactcctatattggcgatgacggcagatgttatacaggcaacacacgaggagtgcctgaaaagcgaaatggatggctatgtctccaagccatttgaaggggagcagctgtacagcgaagtagcgcggtttttccaaaatcatgaccaagttgaataggaaggtttatatggaatgtaaattggtggaggatgttgccacgcaccgatcacatgccatggcacagaattttgtccaagatgctgtgttccccagagaatgaagcacaaaaggtgtcgagatggaaccgccccatgttctgatct

SEQ ID NO: 22164 - DNA, 765 bp, Oryza sativa
  unsure (1)..(765): unsure at all n locations
  Clone ID: TF_LIB4309-004-Q1-K1-F10
catccatcatcccctacctctcgctctctctctcctctcctctcctcttattatcatcgcatccatcccgcacttctctctctttggtggtggtgctcgctctcgctcaccctgctttgacctttggatttttatttttaaggatccaagaaagtgctgtttcttgggttgcttggaggtggaggagtttgggagattgtttgtgtttgattgattggttgattgattggaggaagatgacggtggaggagaggcaggggagggtgggaggccatggtgtgagcggcggcggcggcgggagagaccagttcccggtcggcatgcgggtgctcgccgtcgacgacgaccccacctgcctcaagatcctcgagaacctcctgcttcgatgccagtatcacgtgacaacaactggtcaggcggccacggccctgaagctgctcagggagaacaaggaccagtttgacctggtgatcagcgacgtccacatgccggacatggatggcttcaaactccttgagcttgtcggcctcgagatggacctcccagtcattatgttgtctgcgaacggngaaacacaaactgtcatgaagggtataacccatggtgcatgtgactatcttctgaagccagtgcgtcttgagcagctaaggacgatatggcaacatgtgattaggcgtaagaattgtgatgctaagaaccgtggtaacgatgatgacgctggtcagaaggcacagggaatgaacaatgaggtgagagtattggtgc

SEQ ID NO: 22165 - DNA, 996 bp, Oryza sativa
  unsure (1)..(996): unsure at all n locations
  Clone ID: TF_OsC51348_4
cccacgcgtccggatctaccatattatttcgaccatctattacaatacaagcatcttatgatatttggatgaacatgccaaagtcagatgtgcagataatttagtaaaaacatagagcacataataggagaacatctttgtatgcatatagagaaaaaaggtagtggaaaccttatcaattgtgaaaaataatcaaatatagaaccaagctggtttaggctaaactngatatggagatctctccgaatccctatgtcaaaaccatcgctgccctggaaagcgacgcggcgatcgaacgcgatatcatatcgaatcatctccacttctcgatcttattcagttggccgtgccaggcgtcaccggatccacgccttcagatttgggaaagttgctggctgcatcgccaagatttggctggggaaagttggtagcgaccgagaaatcgtccgatcaggaggatttcttggttggtgtggcaaccccatccgatccgaggatttgaagcctgattatattctaatcttcaacaaatctgatgcagcaaactggcagcctcttccttctgttcttccagagaagagaaacatatctgtgcaagctttgccttcttccatggcagtggctatagaggctccgttccatgtcctggctgtggatgatagccttcctgacaggaagctcatcgagaggctactcaagacctcttctttccaagtaaccactgttgattcggggagcaaggctctggagttcttggggctccatgatcatgaggacagcccaatttctactcaatcagatcagcaggaggttggagtgaacctgatcatcacagactactgcatgcctggcatgacaggatatgatcttctcaagaagatcaaggaatcgtcttatttaagggacatcccagttgtgatcatgtcatcggataacattccttcaaggatcaatagtataattaaggaacaagccccacagctcacgtcgtcttaa

SEQ ID NO: 22166 - DNA, 912 bp, Oryza sativa
  Clone ID: TF_OsC41886_1
atggctcaaagggtaggacactctgctgatggggtttttgtcatgatcgttgatgaagataagtcacatgccaacttcgcaagaggcatgctctccagcctcaattttcatgtgatagtgtactcaagtcctgtgaatgcactcgtttttctggagaataacgcacaagacgtcgctgtagtcttggcagcagtggacatgaaacaattgagtggttttcagttcctcgaagctgcaagagtgaaacgccaggaccttcaagttatcatgatgtcagctgagacaacaatgtccacaatgatgaggtgtgttaaactcggtgcacgttttctagtgaagaagcctcttaacgaagaaactgtaggtaatctgtggcagcatgttgacctgaaagttttgaagatggagaagatcagggaattactgcaagatgaaaataatgaagaggaggaagtgaattcctttgaagctaagaaggctgattcagttaaagttcaatcagatgagaagggacatgacaatgctaaaatctctaacactgctgctgctgaagggtctgatgaaaaagtctctagtggtgatggtcatgtagtgcctaaagcgtataataatgtgaatgttgaagagagcataggtagtaacaatacttcaggtgaacaagtctccgacaagatcaagagtgatgcaagagttggggtgatccttgtggactacccagattttgaggatgatgagaccaagaaacccacaagcacttagatataatccggtctcgactcgactctgtgtagagatcgagtgagctgagaatgtggggggaacaagtgactgaaagaatgcactaccatatatgtttatggtagtgtttgtatcttactttctgcaaaataagaaatgcaccatgtgctgaat

SEQ ID NO: 22167 - DNA, 962 bp, Oryza sativa
  unsure (1)..(962): unsure at all n locations
  Clone ID: TF_OsC41886_2
aacaccaaaaaatagaaccatagcaagtagaatccatagctttgagaaactcatggctcaaagggtaggacactctgctgatggggtttttgtcatgatcgttgatgaagataagtcacatgccaacttcgcaagaggcatgctctccagcctcaattttcatgtgatagtgtactcaagtcctgtgaatgcactcgtttttctggagaataacgcacaagacgtcgctgtagtcttggcagcagtggacatgaaacaattgagtggttttcagttcctcgaagctgcaagagtgaaacgccaggaccttcaagttatcatgatgtcagctgagacaacaatgtccacaatgatgaggtgtgttaaactcggtgcacgttttctagtgaagaagcctcttaacgaagaaactgtaggtaatctgtggcagcatgttgacctgaaagttttgaagatggagaagatcagggaattactgcaagatcctggacaagagacggtgataactattagttatgaagagcaattctctggagaaactgaagcagatgaaaataatgaagaggaggaagtgaattcctttgaagctaagaaggctgattcagttaaagttcaatcagatgagaagggacatgacaatgctaaaatctctaacactgctgctgctgaagggtctgatgaaaaagtctctagtggtgatggtcatgtagtgcctaaagcgtataataatgtgaatgttgaagagagcataggtagtaacaatacttcaggtgaacaagtctccgacaagatcaagagtgatgcaagagttgnggtgatccttgtggactacccagattttgaggatgatgagaccaagaaacccacaagcacttagatataatccggtctcgactcgactctgtgtagagatcgagtgagctgagaatgtggggggaacaagtgactgaaagaatgcacta

SEQ ID NO: 22168 - DNA, 612 bp, Oryza sativa
  unsure (1)..(612): unsure at all n locations
  Clone ID: TF_LIB4371-041-R1-K1-A4
cgctttttaaagngcgctacactacaaggcctctcccccccgctgccgactgccgtcttgctctccctccctcccaaccccccactctccccgctcctcctgcgagggctcggcgaggggtggctgggcctgagcgcgggcatggacgccaccgccttcccctacgggctgcgcgtcctcgtcgtggacgacgaccccacctggctcaagatcctcgagaagatgctcaggaagtgttcctacgaagaaatatcgcctctacctgagtaggttgcaaaagcagaatgaggaaaggatattaggcgctgctaggcaagatttcagtcacaagggaacatcagaaaaccttaacctccgaagttccttccaagagcaaccaagcaacatagcaaatggatatccgcatgcttctcagaatatacaaactcaggccaacatgctagattctcagctagaggacaccaagagcacagtgcccttgcctgtgccagataaaaaaagaactctagcaagtgatgctgctgactcacagaatgtcaccagtgcttcaagtttaggtgggggttctgtctttcaaaagcatggccggtgaatcaggacaggaagccatca

SEQ ID NO: 22169 - DNA, 699 bp, Oryza sativa
  Clone ID: TF_OsC1528_1640
ttttttttttttttttttgcaacaacaagccagtaaagttgatctctcccagtcacacgttaattgataagtgcaacacacatatatgcctcagtaagacttagattgcagttacaccattacttttgatacttgagctaatgcaatcatgtaggagaaaccctgccttttatggttcatgcttgtgtaaattacctgccatatcccaaatgcttcccaaactgatgcactgttggcagaagagcatctcacaatcggcgacaacgacgggcagcttggagagcgcctcacacaccttgtgccaccggtgctagtcgtggcacctgctcagctcctccttgcacttgtccaccgcgcaggaagggcactgctgcccggcgccaccaacaccctcaacgcgcgcggtcacttcaccggcaccgaggccacagctgacaagtgacggccaagtgaccaactaaccagtagagcagctcactgtagcagttgctccaagagcccttccttgtctaggttcaaatctcaaatccgttgattcacaaatcataatcactttaagcggcgcggatgatgcggatcggttgagctccgtgtggcgccgccgagctcctcgtcacatcgggcggcaagaccacacaggcggcctacgggctttcttcgacggcggtggtgacggacggcgccggatccgcctcgtgc
